United States Patent Application Publication US 2015/0141320 A1 - sequence listing, part 46

SEQ ID NO: 1804289 - DNA, 15 bp, Homo sapiens
tgtgtattgatctct

SEQ ID NO: 1804290 - DNA, 15 bp, Homo sapiens
gtgtattgatctctc

SEQ ID NO: 1804291 - DNA, 15 bp, Homo sapiens
tgtattgatctctca

SEQ ID NO: 1804292 - DNA, 15 bp, Homo sapiens
gtattgatctctcac

SEQ ID NO: 1804293 - DNA, 15 bp, Homo sapiens
tattgatctctcact

SEQ ID NO: 1804294 - DNA, 15 bp, Homo sapiens
attgatctctcactc

SEQ ID NO: 1804295 - DNA, 15 bp, Homo sapiens
ttgatctctcactct

SEQ ID NO: 1804296 - DNA, 15 bp, Homo sapiens
tgatctctcactctc

SEQ ID NO: 1804297 - DNA, 15 bp, Homo sapiens
gatctctcactctcg

SEQ ID NO: 1804298 - DNA, 15 bp, Homo sapiens
atctctcactctcgg

SEQ ID NO: 1804299 - DNA, 15 bp, Homo sapiens
tctctcactctcggg

SEQ ID NO: 1804300 - DNA, 15 bp, Homo sapiens
ctctcactctcggga

SEQ ID NO: 1804301 - DNA, 15 bp, Homo sapiens
tctcactctcgggat

SEQ ID NO: 1804302 - DNA, 15 bp, Homo sapiens
ctcactctcgggata

SEQ ID NO: 1804303 - DNA, 15 bp, Homo sapiens
tcactctcgggatag

SEQ ID NO: 1804304 - DNA, 15 bp, Homo sapiens
cactctcgggataga

SEQ ID NO: 1804305 - DNA, 15 bp, Homo sapiens
actctcgggatagaa

SEQ ID NO: 1804306 - DNA, 15 bp, Homo sapiens
ctctcgggatagaat

SEQ ID NO: 1804307 - DNA, 15 bp, Homo sapiens
tctcgggatagaatt

SEQ ID NO: 1804308 - DNA, 15 bp, Homo sapiens
ctcgggatagaatta

SEQ ID NO: 1804309 - DNA, 15 bp, Homo sapiens
tcgggatagaattat

SEQ ID NO: 1804310 - DNA, 15 bp, Homo sapiens
cgggatagaattata

SEQ ID NO: 1804311 - DNA, 15 bp, Homo sapiens
gggatagaattataa

SEQ ID NO: 1804312 - DNA, 15 bp, Homo sapiens
ggatagaattataac

SEQ ID NO: 1804313 - DNA, 15 bp, Homo sapiens
gatagaattataact

SEQ ID NO: 1804314 - DNA, 15 bp, Homo sapiens
atagaattataactc

SEQ ID NO: 1804315 - DNA, 15 bp, Homo sapiens
tagaattataactct

SEQ ID NO: 1804316 - DNA, 15 bp, Homo sapiens
agaattataactctc

SEQ ID NO: 1804317 - DNA, 15 bp, Homo sapiens
gaattataactctct

SEQ ID NO: 1804318 - DNA, 15 bp, Homo sapiens
aattataactctctg

SEQ ID NO: 1804319 - DNA, 15 bp, Homo sapiens
attataactctctgg

SEQ ID NO: 1804320 - DNA, 15 bp, Homo sapiens
ttataactctctgga

SEQ ID NO: 1804321 - DNA, 15 bp, Homo sapiens
tataactctctggat

SEQ ID NO: 1804322 - DNA, 15 bp, Homo sapiens
ataactctctggata

SEQ ID NO: 1804323 - DNA, 15 bp, Homo sapiens
taactctctggatag

SEQ ID NO: 1804324 - DNA, 15 bp, Homo sapiens
aactctctggataga

SEQ ID NO: 1804325 - DNA, 15 bp, Homo sapiens
ctatctatctggata

SEQ ID NO: 1804326 - DNA, 15 bp, Homo sapiens
tatctatctggatag

SEQ ID NO: 1804327 - DNA, 15 bp, Homo sapiens
atctatctggataga

SEQ ID NO: 1804328 - DNA, 15 bp, Homo sapiens
ctggatagaattctt

SEQ ID NO: 1804329 - DNA, 15 bp, Homo sapiens
tggatagaattctta

SEQ ID NO: 1804330 - DNA, 15 bp, Homo sapiens
ggatagaattcttac

SEQ ID NO: 1804331 - DNA, 15 bp, Homo sapiens
gatagaattcttacc

SEQ ID NO: 1804332 - DNA, 15 bp, Homo sapiens
atagaattcttacca

SEQ ID NO: 1804333 - DNA, 15 bp, Homo sapiens
tagaattcttaccat

SEQ ID NO: 1804334 - DNA, 15 bp, Homo sapiens
agaattcttaccatc

SEQ ID NO: 1804335 - DNA, 15 bp, Homo sapiens
gaattcttaccatct

SEQ ID NO: 1804336 - DNA, 15 bp, Homo sapiens
aattcttaccatctg

SEQ ID NO: 1804337 - DNA, 15 bp, Homo sapiens
attcttaccatctgg

SEQ ID NO: 1804338 - DNA, 15 bp, Homo sapiens
ttcttaccatctgga

SEQ ID NO: 1804339 - DNA, 15 bp, Homo sapiens
tcttaccatctggat

SEQ ID NO: 1804340 - DNA, 15 bp, Homo sapiens
cttaccatctggata

SEQ ID NO: 1804341 - DNA, 15 bp, Homo sapiens
ttaccatctggatag

SEQ ID NO: 1804342 - DNA, 15 bp, Homo sapiens
taccatctggataga

SEQ ID NO: 1804343 - DNA, 15 bp, Homo sapiens
actctcactatctga

SEQ ID NO: 1804344 - DNA, 15 bp, Homo sapiens
ctctcactatctgaa

SEQ ID NO: 1804345 - DNA, 15 bp, Homo sapiens
tctcactatctgaat

SEQ ID NO: 1804346 - DNA, 15 bp, Homo sapiens
ctcactatctgaata

SEQ ID NO: 1804347 - DNA, 15 bp, Homo sapiens
tcactatctgaatag

SEQ ID NO: 1804348 - DNA, 15 bp, Homo sapiens
cactatctgaataga

SEQ ID NO: 1804349 - DNA, 15 bp, Homo sapiens
actatctgaatagaa

SEQ ID NO: 1804350 - DNA, 15 bp, Homo sapiens
ctatctgaatagaat

SEQ ID NO: 1804351 - DNA, 15 bp, Homo sapiens
tatctgaatagaatt

SEQ ID NO: 1804352 - DNA, 15 bp, Homo sapiens
atctgaatagaattc

SEQ ID NO: 1804353 - DNA, 15 bp, Homo sapiens
tctgaatagaattct

SEQ ID NO: 1804354 - DNA, 15 bp, Homo sapiens
ctgaatagaattctc

SEQ ID NO: 1804355 - DNA, 15 bp, Homo sapiens
tgaatagaattctca

SEQ ID NO: 1804356 - DNA, 15 bp, Homo sapiens
gaatagaattctcac

SEQ ID NO: 1804357 - DNA, 15 bp, Homo sapiens
aatagaattctcact

SEQ ID NO: 1804358 - DNA, 15 bp, Homo sapiens
atagaactctcactt

SEQ ID NO: 1804359 - DNA, 15 bp, Homo sapiens
gaattctctccatcc

SEQ ID NO: 1804360 - DNA, 15 bp, Homo sapiens
aattctctccatcct

SEQ ID NO: 1804361 - DNA, 15 bp, Homo sapiens
attctctccatcctg

SEQ ID NO: 1804362 - DNA, 15 bp, Homo sapiens
ttctctccatcctga

SEQ ID NO: 1804363 - DNA, 15 bp, Homo sapiens
tctctccatcctgac

SEQ ID NO: 1804364 - DNA, 15 bp, Homo sapiens
ctctccatcctgaca

SEQ ID NO: 1804365 - DNA, 15 bp, Homo sapiens
tctccatcctgacag

SEQ ID NO: 1804366 - DNA, 15 bp, Homo sapiens
ctccatcctgacaga

SEQ ID NO: 1804367 - DNA, 15 bp, Homo sapiens
tccatcctgacagaa

SEQ ID NO: 1804368 - DNA, 15 bp, Homo sapiens
ccatcctgacagaac

SEQ ID NO: 1804369 - DNA, 15 bp, Homo sapiens
catcctgacagaact

SEQ ID NO: 1804370 - DNA, 15 bp, Homo sapiens
atcctgacagaactc

SEQ ID NO: 1804371 - DNA, 15 bp, Homo sapiens
tcctgacagaactct

SEQ ID NO: 1804372 - DNA, 15 bp, Homo sapiens
cctgacagaactctc

SEQ ID NO: 1804373 - DNA, 15 bp, Homo sapiens
ctgacagaactctca

SEQ ID NO: 1804374 - DNA, 15 bp, Homo sapiens
tgacagaactctcaa

SEQ ID NO: 1804375 - DNA, 15 bp, Homo sapiens
gacagaactctcaat

SEQ ID NO: 1804376 - DNA, 15 bp, Homo sapiens
acagaactctcaata

SEQ ID NO: 1804377 - DNA, 15 bp, Homo sapiens
cagaactctcaatat

SEQ ID NO: 1804378 - DNA, 15 bp, Homo sapiens
aactctcaatatctg

SEQ ID NO: 1804379 - DNA, 15 bp, Homo sapiens
actctcaatatctgg

SEQ ID NO: 1804380 - DNA, 15 bp, Homo sapiens
ctctcaatatctgga

SEQ ID NO: 1804381 - DNA, 15 bp, Homo sapiens
tctcaatatctggat

SEQ ID NO: 1804382 - DNA, 15 bp, Homo sapiens
ctcaatatctggatg

SEQ ID NO: 1804383 - DNA, 15 bp, Homo sapiens
tcaatatctggatgg

SEQ ID NO: 1804384 - DNA, 15 bp, Homo sapiens
caatatctggatgga

SEQ ID NO: 1804385 - DNA, 15 bp, Homo sapiens
aatatctggatggaa

SEQ ID NO: 1804386 - DNA, 15 bp, Homo sapiens
atatctggatggaat

SEQ ID NO: 1804387 - DNA, 15 bp, Homo sapiens
tggatggaattctca

SEQ ID NO: 1804388 - DNA, 15 bp, Homo sapiens
ggatggaattctcac

SEQ ID NO: 1804389 - DNA, 15 bp, Homo sapiens
gatggaattctcact

SEQ ID NO: 1804390 - DNA, 15 bp, Homo sapiens
atggaattctcactc

SEQ ID NO: 1804391 - DNA, 15 bp, Homo sapiens
tggaattctcactct

SEQ ID NO: 1804392 - DNA, 15 bp, Homo sapiens
ggaattctcactctc

SEQ ID NO: 1804393 - DNA, 15 bp, Homo sapiens
atagaactctcactc

SEQ ID NO: 1804394 - DNA, 15 bp, Homo sapiens
tagaactctcactct

SEQ ID NO: 1804395 - DNA, 15 bp, Homo sapiens
agaactctcactctc

SEQ ID NO: 1804396 - DNA, 15 bp, Homo sapiens
gaactctcactctct

SEQ ID NO: 1804397 - DNA, 15 bp, Homo sapiens
aactctcactctctt

SEQ ID NO: 1804398 - DNA, 15 bp, Homo sapiens
actctcactctcttt

SEQ ID NO: 1804399 - DNA, 15 bp, Homo sapiens
ctctcactctctttg

SEQ ID NO: 1804400 - DNA, 15 bp, Homo sapiens
tctcactctctttgt

SEQ ID NO: 1804401 - DNA, 15 bp, Homo sapiens
ctcactctctttgtg

SEQ ID NO: 1804402 - DNA, 15 bp, Homo sapiens
tcactctctttgtgg

SEQ ID NO: 1804403 - DNA, 15 bp, Homo sapiens
cactctctttgtgga

SEQ ID NO: 1804404 - DNA, 15 bp, Homo sapiens
actctctttgtggat

SEQ ID NO: 1804405 - DNA, 15 bp, Homo sapiens
ctctctttgtggata

SEQ ID NO: 1804406 - DNA, 15 bp, Homo sapiens
tctctttgtggatag

SEQ ID NO: 1804407 - DNA, 15 bp, Homo sapiens
ctctttgtggataga

SEQ ID NO: 1804408 - DNA, 15 bp, Homo sapiens
tctttgtggatagaa

SEQ ID NO: 1804409 - DNA, 15 bp, Homo sapiens
ctttgtggatagaac

SEQ ID NO: 1804410 - DNA, 15 bp, Homo sapiens
tttgtggatagaact

SEQ ID NO: 1804411 - DNA, 15 bp, Homo sapiens
ttgtggatagaactc

SEQ ID NO: 1804412 - DNA, 15 bp, Homo sapiens
tgtggatagaactct

SEQ ID NO: 1804413 - DNA, 15 bp, Homo sapiens
gtggatagaactctc

SEQ ID NO: 1804414 - DNA, 15 bp, Homo sapiens
tagaactctcactcc

SEQ ID NO: 1804415 - DNA, 15 bp, Homo sapiens
agaactctcactccc

SEQ ID NO: 1804416 - DNA, 15 bp, Homo sapiens
gaactctcactccct

SEQ ID NO: 1804417 - DNA, 15 bp, Homo sapiens
aactctcactccctg

SEQ ID NO: 1804418 - DNA, 15 bp, Homo sapiens
actctcactccctgt

SEQ ID NO: 1804419 - DNA, 15 bp, Homo sapiens
ctctcactccctgtc

SEQ ID NO: 1804420 - DNA, 15 bp, Homo sapiens
tctcactccctgtct

SEQ ID NO: 1804421 - DNA, 15 bp, Homo sapiens
ctcactccctgtctg

SEQ ID NO: 1804422 - DNA, 15 bp, Homo sapiens
tcactccctgtctgg

SEQ ID NO: 1804423 - DNA, 15 bp, Homo sapiens
cactccctgtctgga

SEQ ID NO: 1804424 - DNA, 15 bp, Homo sapiens
actccctgtctggat

SEQ ID NO: 1804425 - DNA, 15 bp, Homo sapiens
ctccctgtctggata

SEQ ID NO: 1804426 - DNA, 15 bp, Homo sapiens
tccctgtctggatag

SEQ ID NO: 1804427 - DNA, 15 bp, Homo sapiens
ccctgtctggataga

SEQ ID NO: 1804428 - DNA, 15 bp, Homo sapiens
cctgtctggatagaa

SEQ ID NO: 1804429 - DNA, 15 bp, Homo sapiens
ctgtctggatagaac

SEQ ID NO: 1804430 - DNA, 15 bp, Homo sapiens
tgtctggatagaact

SEQ ID NO: 1804431 - DNA, 15 bp, Homo sapiens
gtctggatagaactc

SEQ ID NO: 1804432 - DNA, 15 bp, Homo sapiens
atagaactctcacac

SEQ ID NO: 1804433 - DNA, 15 bp, Homo sapiens
tagaactctcacacc

SEQ ID NO: 1804434 - DNA, 15 bp, Homo sapiens
agaactctcacaccc

SEQ ID NO: 1804435 - DNA, 15 bp, Homo sapiens
gaactctcacaccct

SEQ ID NO: 1804436 - DNA, 15 bp, Homo sapiens
aactctcacaccctg

SEQ ID NO: 1804437 - DNA, 15 bp, Homo sapiens
actctcacaccctgt

SEQ ID NO: 1804438 - DNA, 15 bp, Homo sapiens
ctctcacaccctgtc

SEQ ID NO: 1804439 - DNA, 15 bp, Homo sapiens
tctcacaccctgtct

SEQ ID NO: 1804440 - DNA, 15 bp, Homo sapiens
ctcacaccctgtctg

SEQ ID NO: 1804441 - DNA, 15 bp, Homo sapiens
tcacaccctgtctgg

SEQ ID NO: 1804442 - DNA, 15 bp, Homo sapiens
cacaccctgtctgga

SEQ ID NO: 1804443 - DNA, 15 bp, Homo sapiens
acaccctgtctggat

SEQ ID NO: 1804444 - DNA, 15 bp, Homo sapiens
caccctgtctggata

SEQ ID NO: 1804445 - DNA, 15 bp, Homo sapiens
accctgtctggatag

SEQ ID NO: 1804446 - DNA, 15 bp, Homo sapiens
aactctcactctcta

SEQ ID NO: 1804447 - DNA, 15 bp, Homo sapiens
actctcactctctag

SEQ ID NO: 1804448 - DNA, 15 bp, Homo sapiens
ctctcactctctaga

SEQ ID NO: 1804449 - DNA, 15 bp, Homo sapiens
tctcactctctagat

SEQ ID NO: 1804450 - DNA, 15 bp, Homo sapiens
ctcactctctagata

SEQ ID NO: 1804451 - DNA, 15 bp, Homo sapiens
tcactctctagatag

SEQ ID NO: 1804452 - DNA, 15 bp, Homo sapiens
cactctctagataga

SEQ ID NO: 1804453 - DNA, 15 bp, Homo sapiens
actctctagatagaa

SEQ ID NO: 1804454 - DNA, 15 bp, Homo sapiens
ctctctagatagaac

SEQ ID NO: 1804455 - DNA, 15 bp, Homo sapiens
tctctagatagaact

SEQ ID NO: 1804456 - DNA, 15 bp, Homo sapiens
ctctagatagaactg

SEQ ID NO: 1804457 - DNA, 15 bp, Homo sapiens
tctagatagaactgt

SEQ ID NO: 1804458 - DNA, 15 bp, Homo sapiens
ctagatagaactgtt

SEQ ID NO: 1804459 - DNA, 15 bp, Homo sapiens
tagatagaactgtta

SEQ ID NO: 1804460 - DNA, 15 bp, Homo sapiens
agatagaactgttaa

SEQ ID NO: 1804461 - DNA, 15 bp, Homo sapiens
gatagaactgttaat

SEQ ID NO: 1804462 - DNA, 15 bp, Homo sapiens
atagaactgttaata

SEQ ID NO: 1804463 - DNA, 15 bp, Homo sapiens
tagaactgttaataa

SEQ ID NO: 1804464 - DNA, 15 bp, Homo sapiens
agaactgttaataac

SEQ ID NO: 1804465 - DNA, 15 bp, Homo sapiens
gaactgttaataact

SEQ ID NO: 1804466 - DNA, 15 bp, Homo sapiens
aactgttaataactg

SEQ ID NO: 1804467 - DNA, 15 bp, Homo sapiens
actgttaataactgg

SEQ ID NO: 1804468 - DNA, 15 bp, Homo sapiens
ctgttaataactgga

SEQ ID NO: 1804469 - DNA, 15 bp, Homo sapiens
tgttaataactggat

SEQ ID NO: 1804470 - DNA, 15 bp, Homo sapiens
gttaataactggata

SEQ ID NO: 1804471 - DNA, 15 bp, Homo sapiens
ttaataactggatag

SEQ ID NO: 1804472 - DNA, 15 bp, Homo sapiens
taataactggataga

SEQ ID NO: 1804473 - DNA, 15 bp, Homo sapiens
aataactggatagaa

SEQ ID NO: 1804474 - DNA, 15 bp, Homo sapiens
ataactggatagaat

SEQ ID NO: 1804475 - DNA, 15 bp, Homo sapiens
taactggatagaatt

SEQ ID NO: 1804476 - DNA, 15 bp, Homo sapiens
aactggatagaattt

SEQ ID NO: 1804477 - DNA, 15 bp, Homo sapiens
actggatagaatttt

SEQ ID NO: 1804478 - DNA, 15 bp, Homo sapiens
ctggatagaattttc

SEQ ID NO: 1804479 - DNA, 15 bp, Homo sapiens
tggatagaattttca

SEQ ID NO: 1804480 - DNA, 15 bp, Homo sapiens
ggatagaattttcac

SEQ ID NO: 1804481 - DNA, 15 bp, Homo sapiens
gatagaattttcacc

SEQ ID NO: 1804482 - DNA, 15 bp, Homo sapiens
atagaattttcacca

SEQ ID NO: 1804483 - DNA, 15 bp, Homo sapiens
tagaattttcaccat

SEQ ID NO: 1804484 - DNA, 15 bp, Homo sapiens
agaattttcaccatc

SEQ ID NO: 1804485 - DNA, 15 bp, Homo sapiens
gaattttcaccatct

SEQ ID NO: 1804486 - DNA, 15 bp, Homo sapiens
aattttcaccatctg

SEQ ID NO: 1804487 - DNA, 15 bp, Homo sapiens
attttcaccatctgg

SEQ ID NO: 1804488 - DNA, 15 bp, Homo sapiens
ttttcaccatctgga

SEQ ID NO: 1804489 - DNA, 15 bp, Homo sapiens
tttcaccatctggat

SEQ ID NO: 1804490 - DNA, 15 bp, Homo sapiens
ttcaccatctggata

SEQ ID NO: 1804491 - DNA, 15 bp, Homo sapiens
ctatctggatagaac

SEQ ID NO: 1804492 - DNA, 15 bp, Homo sapiens
tatctggatagaact

SEQ ID NO: 1804493 - DNA, 15 bp, Homo sapiens
agaactctcaccatg

SEQ ID NO: 1804494 - DNA, 15 bp, Homo sapiens
gaactctcaccatgt

SEQ ID NO: 1804495 - DNA, 15 bp, Homo sapiens
aactctcaccatgtg

SEQ ID NO: 1804496 - DNA, 15 bp, Homo sapiens
actctcaccatgtgt

SEQ ID NO: 1804497 - DNA, 15 bp, Homo sapiens
ctctcaccatgtgta

SEQ ID NO: 1804498 - DNA, 15 bp, Homo sapiens
ctcaccatgtgtata

SEQ ID NO: 1804499 - DNA, 15 bp, Homo sapiens
tcaccatgtgtataa

SEQ ID NO: 1804500 - DNA, 15 bp, Homo sapiens
caccatgtgtataaa

SEQ ID NO: 1804501 - DNA, 15 bp, Homo sapiens
accatgtgtataaaa

SEQ ID NO: 1804502 - DNA, 15 bp, Homo sapiens
ccatgtgtataaaac

SEQ ID NO: 1804503 - DNA, 15 bp, Homo sapiens
catgtgtataaaact

SEQ ID NO: 1804504 - DNA, 15 bp, Homo sapiens
atgtgtataaaactc

SEQ ID NO: 1804505 - DNA, 15 bp, Homo sapiens
tgtgtataaaactct

SEQ ID NO: 1804506 - DNA, 15 bp, Homo sapiens
gtgtataaaactctc

SEQ ID NO: 1804507 - DNA, 15 bp, Homo sapiens
tgtataaaactctca

SEQ ID NO: 1804508 - DNA, 15 bp, Homo sapiens
gtataaaactctcac

SEQ ID NO: 1804509 - DNA, 15 bp, Homo sapiens
tataaaactctcact

SEQ ID NO: 1804510 - DNA, 15 bp, Homo sapiens
ataaaactctcactg

SEQ ID NO: 1804511 - DNA, 15 bp, Homo sapiens
taaaactctcactgt

SEQ ID NO: 1804512 - DNA, 15 bp, Homo sapiens
aaaactctcactgtg

SEQ ID NO: 1804513 - DNA, 15 bp, Homo sapiens
aaactctcactgtgt

SEQ ID NO: 1804514 - DNA, 15 bp, Homo sapiens
aactctcactgtgtg

SEQ ID NO: 1804515 - DNA, 15 bp, Homo sapiens
actctcactgtgtgg

SEQ ID NO: 1804516 - DNA, 15 bp, Homo sapiens
ctctcactgtgtggg

SEQ ID NO: 1804517 - DNA, 15 bp, Homo sapiens
tctcactgtgtggga

SEQ ID NO: 1804518 - DNA, 15 bp, Homo sapiens
ctcactgtgtgggaa

SEQ ID NO: 1804519 - DNA, 15 bp, Homo sapiens
tcactgtgtgggaag

SEQ ID NO: 1804520 - DNA, 15 bp, Homo sapiens
cactgtgtgggaaga

SEQ ID NO: 1804521 - DNA, 15 bp, Homo sapiens
actgtgtgggaagag

SEQ ID NO: 1804522 - DNA, 15 bp, Homo sapiens
ctgtgtgggaagaga

SEQ ID NO: 1804523 - DNA, 15 bp, Homo sapiens
tgtgtgggaagagaa

SEQ ID NO: 1804524 - DNA, 15 bp, Homo sapiens
gtgtgggaagagaac

SEQ ID NO: 1804525 - DNA, 15 bp, Homo sapiens
tgtgggaagagaact

SEQ ID NO: 1804526 - DNA, 15 bp, Homo sapiens
gtgggaagagaactc

SEQ ID NO: 1804527 - DNA, 15 bp, Homo sapiens
tgggaagagaactct

SEQ ID NO: 1804528 - DNA, 15 bp, Homo sapiens
gggaagagaactctc

SEQ ID NO: 1804529 - DNA, 15 bp, Homo sapiens
ggaagagaactctca

SEQ ID NO: 1804530 - DNA, 15 bp, Homo sapiens
gaagagaactctcac

SEQ ID NO: 1804531 - DNA, 15 bp, Homo sapiens
aagagaactctcact

SEQ ID NO: 1804532 - DNA, 15 bp, Homo sapiens
agagaactctcactt

SEQ ID NO: 1804533 - DNA, 15 bp, Homo sapiens
gagaactctcacttt

SEQ ID NO: 1804534 - DNA, 15 bp, Homo sapiens
aactctcactttctg

SEQ ID NO: 1804535 - DNA, 15 bp, Homo sapiens
actctcactttctgg

SEQ ID NO: 1804536 - DNA, 15 bp, Homo sapiens
ctctcactttctgga

SEQ ID NO: 1804537 - DNA, 15 bp, Homo sapiens
ctttctggatagaaa

SEQ ID NO: 1804538 - DNA, 15 bp, Homo sapiens
tttctggatagaaat

SEQ ID NO: 1804539 - DNA, 15 bp, Homo sapiens
ttctggatagaaatc

SEQ ID NO: 1804540 - DNA, 15 bp, Homo sapiens
atagaaatctcactt

SEQ ID NO: 1804541 - DNA, 15 bp, Homo sapiens
tagaaatctcacttt

SEQ ID NO: 1804542 - DNA, 15 bp, Homo sapiens
agaaatctcactttc

SEQ ID NO: 1804543 - DNA, 15 bp, Homo sapiens
gaaatctcactttct

SEQ ID NO: 1804544 - DNA, 15 bp, Homo sapiens
aaatctcactttcta

SEQ ID NO: 1804545 - DNA, 15 bp, Homo sapiens
aatctcactttctat

SEQ ID NO: 1804546 - DNA, 15 bp, Homo sapiens
atctcactttctatc

SEQ ID NO: 1804547 - DNA, 15 bp, Homo sapiens
tctcactttctatct

SEQ ID NO: 1804548 - DNA, 15 bp, Homo sapiens
ctcactttctatctg

SEQ ID NO: 1804549 - DNA, 15 bp, Homo sapiens
tcactttctatctgg

SEQ ID NO: 1804550 - DNA, 15 bp, Homo sapiens
cactttctatctgga

SEQ ID NO: 1804551 - DNA, 15 bp, Homo sapiens
actttctatctggat

SEQ ID NO: 1804552 - DNA, 15 bp, Homo sapiens
ctttctatctggata

SEQ ID NO: 1804553 - DNA, 15 bp, Homo sapiens
tttctatctggatag

SEQ ID NO: 1804554 - DNA, 15 bp, Homo sapiens
ttctatctggataga

SEQ ID NO: 1804555 - DNA, 15 bp, Homo sapiens
tggatagaactctcc

SEQ ID NO: 1804556 - DNA, 15 bp, Homo sapiens
ggatagaactctccc

SEQ ID NO: 1804557 - DNA, 15 bp, Homo sapiens
gatagaactctcccc

SEQ ID NO: 1804558 - DNA, 15 bp, Homo sapiens
atagaactctcccca

SEQ ID NO: 1804559 - DNA, 15 bp, Homo sapiens
tagaactctccccat

SEQ ID NO: 1804560 - DNA, 15 bp, Homo sapiens
agaactctccccatg

SEQ ID NO: 1804561 - DNA, 15 bp, Homo sapiens
gaactctccccatgt

SEQ ID NO: 1804562 - DNA, 15 bp, Homo sapiens
aactctccccatgta

SEQ ID NO: 1804563 - DNA, 15 bp, Homo sapiens
actctccccatgtag

SEQ ID NO: 1804564 - DNA, 15 bp, Homo sapiens
ctctccccatgtaga

SEQ ID NO: 1804565 - DNA, 15 bp, Homo sapiens
tctccccatgtagat

SEQ ID NO: 1804566 - DNA, 15 bp, Homo sapiens
ctccccatgtagata

SEQ ID NO: 1804567 - DNA, 15 bp, Homo sapiens
tccccatgtagatag

SEQ ID NO: 1804568 - DNA, 15 bp, Homo sapiens
ccccatgtagataga

SEQ ID NO: 1804569 - DNA, 15 bp, Homo sapiens
cccatgtagatagaa

SEQ ID NO: 1804570 - DNA, 15 bp, Homo sapiens
ccatgtagatagaac

SEQ ID NO: 1804571 - DNA, 15 bp, Homo sapiens
catgtagatagaact

SEQ ID NO: 1804572 - DNA, 15 bp, Homo sapiens
atgtagatagaactc

SEQ ID NO: 1804573 - DNA, 15 bp, Homo sapiens
tgtagatagaactct

SEQ ID NO: 1804574 - DNA, 15 bp, Homo sapiens
gtagatagaactctc

SEQ ID NO: 1804575 - DNA, 15 bp, Homo sapiens
tagatagaactctcc

SEQ ID NO: 1804576 - DNA, 15 bp, Homo sapiens
agatagaactctccc

SEQ ID NO: 1804577 - DNA, 15 bp, Homo sapiens
gatagaactctccct

SEQ ID NO: 1804578 - DNA, 15 bp, Homo sapiens
atagaactctcccta

SEQ ID NO: 1804579 - DNA, 15 bp, Homo sapiens
tagaactctccctat

SEQ ID NO: 1804580 - DNA, 15 bp, Homo sapiens
agaactctccctatc

SEQ ID NO: 1804581 - DNA, 15 bp, Homo sapiens
gaactctccctatct

SEQ ID NO: 1804582 - DNA, 15 bp, Homo sapiens
aactctccctatctg

SEQ ID NO: 1804583 - DNA, 15 bp, Homo sapiens
actctccctatctgg

SEQ ID NO: 1804584 - DNA, 15 bp, Homo sapiens
ctctccctatctgga

SEQ ID NO: 1804585 - DNA, 15 bp, Homo sapiens
ctccctatctggata

SEQ ID NO: 1804586 - DNA, 15 bp, Homo sapiens
tccctatctggatac

SEQ ID NO: 1804587 - DNA, 15 bp, Homo sapiens
ccctatctggataca

SEQ ID NO: 1804588 - DNA, 15 bp, Homo sapiens
cctatctggatacaa

SEQ ID NO: 1804589 - DNA, 15 bp, Homo sapiens
ctatctggatacaat

SEQ ID NO: 1804590 - DNA, 15 bp, Homo sapiens
tatctggatacaatt

SEQ ID NO: 1804591 - DNA, 15 bp, Homo sapiens
atctggatacaattt

SEQ ID NO: 1804592 - DNA, 15 bp, Homo sapiens
tctggatacaatttt

SEQ ID NO: 1804593 - DNA, 15 bp, Homo sapiens
ctggatacaattttc

SEQ ID NO: 1804594 - DNA, 15 bp, Homo sapiens
tggatacaattttcc

SEQ ID NO: 1804595 - DNA, 15 bp, Homo sapiens
ggatacaattttccc

SEQ ID NO: 1804596 - DNA, 15 bp, Homo sapiens
gatacaattttccca

SEQ ID NO: 1804597 - DNA, 15 bp, Homo sapiens
atacaattttcccat

SEQ ID NO: 1804598 - DNA, 15 bp, Homo sapiens
tacaattttcccatc

SEQ ID NO: 1804599 - DNA, 15 bp, Homo sapiens
acaattttcccatct

SEQ ID NO: 1804600 - DNA, 15 bp, Homo sapiens
caattttcccatctg

SEQ ID NO: 1804601 - DNA, 15 bp, Homo sapiens
aattttcccatctga

SEQ ID NO: 1804602 - DNA, 15 bp, Homo sapiens
attttcccatctgaa

SEQ ID NO: 1804603 - DNA, 15 bp, Homo sapiens
ttttcccatctgaat

SEQ ID NO: 1804604 - DNA, 15 bp, Homo sapiens
tttcccatctgaata

SEQ ID NO: 1804605 - DNA, 15 bp, Homo sapiens
ttcccatctgaatag

SEQ ID NO: 1804606 - DNA, 15 bp, Homo sapiens
tcccatctgaataga

SEQ ID NO: 1804607 - DNA, 15 bp, Homo sapiens
cccatctgaatagaa

SEQ ID NO: 1804608 - DNA, 15 bp, Homo sapiens
ccatctgaatagaac

SEQ ID NO: 1804609 - DNA, 15 bp, Homo sapiens
catctgaatagaact

SEQ ID NO: 1804610 - DNA, 15 bp, Homo sapiens
atctgaatagaactc

SEQ ID NO: 1804611 - DNA, 15 bp, Homo sapiens
tgaatagaactctct

SEQ ID NO: 1804612 - DNA, 15 bp, Homo sapiens
gaatagaactctcta

SEQ ID NO: 1804613 - DNA, 15 bp, Homo sapiens
aatagaactctctat

SEQ ID NO: 1804614 - DNA, 15 bp, Homo sapiens
atagaactctctatc

SEQ ID NO: 1804615 - DNA, 15 bp, Homo sapiens
tagaactctctatcc

SEQ ID NO: 1804616 - DNA, 15 bp, Homo sapiens
agaactctctatccg

SEQ ID NO: 1804617 - DNA, 15 bp, Homo sapiens
gaactctctatccgg

SEQ ID NO: 1804618 - DNA, 15 bp, Homo sapiens
aactctctatccgga

SEQ ID NO: 1804619 - DNA, 15 bp, Homo sapiens
actctctatccggat

SEQ ID NO: 1804620 - DNA, 15 bp, Homo sapiens
ctctctatccggata

SEQ ID NO: 1804621 - DNA, 15 bp, Homo sapiens
tctctatccggatag

SEQ ID NO: 1804622 - DNA, 15 bp, Homo sapiens
ctctatccggataga

SEQ ID NO: 1804623 - DNA, 15 bp, Homo sapiens
tctatccggatagaa

SEQ ID NO: 1804624 - DNA, 15 bp, Homo sapiens
ctatccggatagaat

SEQ ID NO: 1804625 - DNA, 15 bp, Homo sapiens
tatccggatagaatt

SEQ ID NO: 1804626 - DNA, 15 bp, Homo sapiens
atccggatagaattc

SEQ ID NO: 1804627 - DNA, 15 bp, Homo sapiens
tccggatagaattct

SEQ ID NO: 1804628 - DNA, 15 bp, Homo sapiens
ccggatagaattctc

SEQ ID NO: 1804629 - DNA, 15 bp, Homo sapiens
cggatagaattctca

SEQ ID NO: 1804630 - DNA, 15 bp, Homo sapiens
ttctcactctctggg

SEQ ID NO: 1804631 - DNA, 15 bp, Homo sapiens
tctcactctctgggt

SEQ ID NO: 1804632 - DNA, 15 bp, Homo sapiens
ctcactctctgggta

SEQ ID NO: 1804633 - DNA, 15 bp, Homo sapiens
tcactctctgggtag

SEQ ID NO: 1804634 - DNA, 15 bp, Homo sapiens
cactctctgggtaga

SEQ ID NO: 1804635 - DNA, 15 bp, Homo sapiens
actctctgggtagaa

SEQ ID NO: 1804636 - DNA, 15 bp, Homo sapiens
ctctctgggtagaac

SEQ ID NO: 1804637 - DNA, 15 bp, Homo sapiens
tctctgggtagaact

SEQ ID NO: 1804638 - DNA, 15 bp, Homo sapiens
tctgggtagaactct

SEQ ID NO: 1804639 - DNA, 15 bp, Homo sapiens
ctgggtagaactctc

SEQ ID NO: 1804640 - DNA, 15 bp, Homo sapiens
tgggtagaactctct

SEQ ID NO: 1804641 - DNA, 15 bp, Homo sapiens
gggtagaactctcta

SEQ ID NO: 1804642 - DNA, 15 bp, Homo sapiens
ggtagaactctctat

SEQ ID NO: 1804643 - DNA, 15 bp, Homo sapiens
gtagaactctctatc

SEQ ID NO: 1804644 - DNA, 15 bp, Homo sapiens
tagaactctctatct

SEQ ID NO: 1804645 - DNA, 15 bp, Homo sapiens
agaactctctatcta

SEQ ID NO: 1804646 - DNA, 15 bp, Homo sapiens
gaactctctatctat

SEQ ID NO: 1804647 - DNA, 15 bp, Homo sapiens
aactctctatctatc

SEQ ID NO: 1804648 - DNA, 15 bp, Homo sapiens
actctctatctatct

SEQ ID NO: 1804649 - DNA, 15 bp, Homo sapiens
ctctctatctatctg

SEQ ID NO: 1804650 - DNA, 15 bp, Homo sapiens
tctctatctatctgg

SEQ ID NO: 1804651 - DNA, 15 bp, Homo sapiens
ctctatctatctgga

SEQ ID NO: 1804652 - DNA, 15 bp, Homo sapiens
tctatctatctggat

SEQ ID NO: 1804653 - DNA, 15 bp, Homo sapiens
atctggatataattc

SEQ ID NO: 1804654 - DNA, 15 bp, Homo sapiens
tctggatataattct

SEQ ID NO: 1804655 - DNA, 15 bp, Homo sapiens
ctggatataattctc

SEQ ID NO: 1804656 - DNA, 15 bp, Homo sapiens
tggatataattctca

SEQ ID NO: 1804657 - DNA, 15 bp, Homo sapiens
ggatataattctcac

SEQ ID NO: 1804658 - DNA, 15 bp, Homo sapiens
gatataattctcact

SEQ ID NO: 1804659 - DNA, 15 bp, Homo sapiens
atataattctcactt

SEQ ID NO: 1804660 - DNA, 15 bp, Homo sapiens
tataattctcacttt

SEQ ID NO: 1804661 - DNA, 15 bp, Homo sapiens
ataattctcactttc

SEQ ID NO: 1804662 - DNA, 15 bp, Homo sapiens
taattctcactttct

SEQ ID NO: 1804663 - DNA, 15 bp, Homo sapiens
aattctcactttctg

SEQ ID NO: 1804664 - DNA, 15 bp, Homo sapiens
attctcactttctgg

SEQ ID NO: 1804665 - DNA, 15 bp, Homo sapiens
gatggaattctcacc

SEQ ID NO: 1804666 - DNA, 15 bp, Homo sapiens
atggaattctcacca

SEQ ID NO: 1804667 - DNA, 15 bp, Homo sapiens
tggaattctcaccat

SEQ ID NO: 1804668 - DNA, 15 bp, Homo sapiens
ggaattctcaccatc

SEQ ID NO: 1804669 - DNA, 15 bp, Homo sapiens
tctcaccatctggaa

SEQ ID NO: 1804670 - DNA, 15 bp, Homo sapiens
ctcaccatctggaag

SEQ ID NO: 1804671 - DNA, 15 bp, Homo sapiens
tcaccatctggaaga

SEQ ID NO: 1804672 - DNA, 15 bp, Homo sapiens
caccatctggaagaa

SEQ ID NO: 1804673 - DNA, 15 bp, Homo sapiens
accatctggaagaag

SEQ ID NO: 1804674 - DNA, 15 bp, Homo sapiens
ccatctggaagaagt

SEQ ID NO: 1804675 - DNA, 15 bp, Homo sapiens
catctggaagaagtt

SEQ ID NO: 1804676 - DNA, 15 bp, Homo sapiens
atctggaagaagttt

SEQ ID NO: 1804677 - DNA, 15 bp, Homo sapiens
tctggaagaagtttc

SEQ ID NO: 1804678 - DNA, 15 bp, Homo sapiens
ctggaagaagtttca

SEQ ID NO: 1804679 - DNA, 15 bp, Homo sapiens
tggaagaagtttcac

SEQ ID NO: 1804680 - DNA, 15 bp, Homo sapiens
ggaagaagtttcact

SEQ ID NO: 1804681 - DNA, 15 bp, Homo sapiens
gaagaagtttcacta

SEQ ID NO: 1804682 - DNA, 15 bp, Homo sapiens
aagaagtttcactat

SEQ ID NO: 1804683 - DNA, 15 bp, Homo sapiens
agaagtttcactatc

SEQ ID NO: 1804684 - DNA, 15 bp, Homo sapiens
gaagtttcactatct

SEQ ID NO: 1804685 - DNA, 15 bp, Homo sapiens
aagtttcactatctg

SEQ ID NO: 1804686 - DNA, 15 bp, Homo sapiens
agtttcactatctgg

SEQ ID NO: 1804687 - DNA, 15 bp, Homo sapiens
gtttcactatctgga

SEQ ID NO: 1804688 - DNA, 15 bp, Homo sapiens
tttcactatctggat

SEQ ID NO: 1804689 - DNA, 15 bp, Homo sapiens
ttcactatctggata

SEQ ID NO: 1804690 - DNA, 15 bp, Homo sapiens
agaattctcactcta

SEQ ID NO: 1804691 - DNA, 15 bp, Homo sapiens
gaattctcactctag

SEQ ID NO: 1804692 - DNA, 15 bp, Homo sapiens
aattctcactctaga

SEQ ID NO: 1804693 - DNA, 15 bp, Homo sapiens
attctcactctagat

SEQ ID NO: 1804694 - DNA, 15 bp, Homo sapiens
ttctcactctagata

SEQ ID NO: 1804695 - DNA, 15 bp, Homo sapiens
tctcactctagataa

SEQ ID NO: 1804696 - DNA, 15 bp, Homo sapiens
ctcactctagataaa

SEQ ID NO: 1804697 - DNA, 15 bp, Homo sapiens
tcactctagataaaa

SEQ ID NO: 1804698 - DNA, 15 bp, Homo sapiens
cactctagataaaac

SEQ ID NO: 1804699 - DNA, 15 bp, Homo sapiens
actctagataaaact

SEQ ID NO: 1804700 - DNA, 15 bp, Homo sapiens
ctctagataaaactc

SEQ ID NO: 1804701 - DNA, 15 bp, Homo sapiens
tctagataaaactct

SEQ ID NO: 1804702 - DNA, 15 bp, Homo sapiens
ctagataaaactctc

SEQ ID NO: 1804703 - DNA, 15 bp, Homo sapiens
tagataaaactctca

SEQ ID NO: 1804704 - DNA, 15 bp, Homo sapiens
agataaaactctcac

SEQ ID NO: 1804705 - DNA, 15 bp, Homo sapiens
gataaaactctcact

SEQ ID NO: 1804706 - DNA, 15 bp, Homo sapiens
ataaaactctcacta

SEQ ID NO: 1804707 - DNA, 15 bp, Homo sapiens
taaaactctcactat

SEQ ID NO: 1804708 - DNA, 15 bp, Homo sapiens
aaaactctcactatc

SEQ ID NO: 1804709 - DNA, 15 bp, Homo sapiens
aaactctcactatct

SEQ ID NO: 1804710 - DNA, 15 bp, Homo sapiens
tcaccctctggatag

SEQ ID NO: 1804711 - DNA, 15 bp, Homo sapiens
caccctctggataga

SEQ ID NO: 1804712 - DNA, 15 bp, Homo sapiens
accctctggatagaa

SEQ ID NO: 1804713 - DNA, 15 bp, Homo sapiens
ccctctggatagaac

SEQ ID NO: 1804714 - DNA, 15 bp, Homo sapiens
cctctggatagaacg

SEQ ID NO: 1804715 - DNA, 15 bp, Homo sapiens
ctctggatagaacgc

SEQ ID NO: 1804716 - DNA, 15 bp, Homo sapiens
tctggatagaacgct

SEQ ID NO: 1804717 - DNA, 15 bp, Homo sapiens
ctggatagaacgctc

SEQ ID NO: 1804718 - DNA, 15 bp, Homo sapiens
tggatagaacgctca

SEQ ID NO: 1804719 - DNA, 15 bp, Homo sapiens
ggatagaacgctcac

SEQ ID NO: 1804720 - DNA, 15 bp, Homo sapiens
gatagaacgctcact

SEQ ID NO: 1804721 - DNA, 15 bp, Homo sapiens
atagaacgctcacta

SEQ ID NO: 1804722 - DNA, 15 bp, Homo sapiens
tagaacgctcactat

SEQ ID NO: 1804723 - DNA, 15 bp, Homo sapiens
agaacgctcactatc

SEQ ID NO: 1804724 - DNA, 15 bp, Homo sapiens
gaacgctcactatct

SEQ ID NO: 1804725 - DNA, 15 bp, Homo sapiens
aacgctcactatcta

SEQ ID NO: 1804726 - DNA, 15 bp, Homo sapiens
acgctcactatctat

SEQ ID NO: 1804727 - DNA, 15 bp, Homo sapiens
cgctcactatctatc

SEQ ID NO: 1804728 - DNA, 15 bp, Homo sapiens
gctcactatctatct

SEQ ID NO: 1804729 - DNA, 15 bp, Homo sapiens
tcactctctggataa

SEQ ID NO: 1804730 - DNA, 15 bp, Homo sapiens
cactctctggataaa

SEQ ID NO: 1804731 - DNA, 15 bp, Homo sapiens
actctctggataaaa

SEQ ID NO: 1804732 - DNA, 15 bp, Homo sapiens
ctctctggataaaac

SEQ ID NO: 1804733 - DNA, 15 bp, Homo sapiens
tctctggataaaact

SEQ ID NO: 1804734 - DNA, 15 bp, Homo sapiens
ctctggataaaactc

SEQ ID NO: 1804735 - DNA, 15 bp, Homo sapiens
tctggataaaactct

SEQ ID NO: 1804736 - DNA, 15 bp, Homo sapiens
ctggataaaactctc

SEQ ID NO: 1804737 - DNA, 15 bp, Homo sapiens
tggataaaactctca

SEQ ID NO: 1804738 - DNA, 15 bp, Homo sapiens
ggataaaactctcac

SEQ ID NO: 1804739 - DNA, 15 bp, Homo sapiens
cactatctgtctggt

SEQ ID NO: 1804740 - DNA, 15 bp, Homo sapiens
actatctgtctggta

SEQ ID NO: 1804741 - DNA, 15 bp, Homo sapiens
ctatctgtctggtag

SEQ ID NO: 1804742 - DNA, 15 bp, Homo sapiens
tatctgtctggtaga

SEQ ID NO: 1804743 - DNA, 15 bp, Homo sapiens
atctgtctggtagaa

SEQ ID NO: 1804744 - DNA, 15 bp, Homo sapiens
tctgtctggtagaat

SEQ ID NO: 1804745 - DNA, 15 bp, Homo sapiens
ctgtctggtagaatt

SEQ ID NO: 1804746 - DNA, 15 bp, Homo sapiens
tgtctggtagaattc

SEQ ID NO: 1804747 - DNA, 15 bp, Homo sapiens
gtctggtagaattct

SEQ ID NO: 1804748 - DNA, 15 bp, Homo sapiens
tctggtagaattctc

SEQ ID NO: 1804749 - DNA, 15 bp, Homo sapiens
ctggtagaattctca

SEQ ID NO: 1804750 - DNA, 15 bp, Homo sapiens
tggtagaattctcac

SEQ ID NO: 1804751 - DNA, 15 bp, Homo sapiens
ggtagaattctcacc

SEQ ID NO: 1804752 - DNA, 15 bp, Homo sapiens
gtagaattctcacca

SEQ ID NO: 1804753 - DNA, 15 bp, Homo sapiens
ccatctggatagaat

SEQ ID NO: 1804754 - DNA, 15 bp, Homo sapiens
catctggatagaatt

SEQ ID NO: 1804755 - DNA, 15 bp, Homo sapiens
atagaattctcacta

SEQ ID NO: 1804756 - DNA, 15 bp, Homo sapiens
tagaattctcactat

SEQ ID NO: 1804757 - DNA, 15 bp, Homo sapiens
agaattctcactatc

SEQ ID NO: 1804758 - DNA, 15 bp, Homo sapiens
gaattctcactatct

SEQ ID NO: 1804759 - DNA, 15 bp, Homo sapiens
aattctcactatctg

SEQ ID NO: 1804760 - DNA, 15 bp, Homo sapiens
attctcactatctgg

SEQ ID NO: 1804761 - DNA, 15 bp, Homo sapiens
ttctcactatctgga

SEQ ID NO: 1804762 - DNA, 15 bp, Homo sapiens
gatagaattcttact

SEQ ID NO: 1804763 - DNA, 15 bp, Homo sapiens
atagaattcttactt

SEQ ID NO: 1804764 - DNA, 15 bp, Homo sapiens
tagaattcttacttt

SEQ ID NO: 1804765 - DNA, 15 bp, Homo sapiens
agaattcttactttc

SEQ ID NO: 1804766 - DNA, 15 bp, Homo sapiens
gaattcttactttct

SEQ ID NO: 1804767 - DNA, 15 bp, Homo sapiens
aattcttactttctg

SEQ ID NO: 1804768 - DNA, 15 bp, Homo sapiens
attcttactttctgg

SEQ ID NO: 1804769 - DNA, 15 bp, Homo sapiens
ttcttactttctgga

SEQ ID NO: 1804770 - DNA, 15 bp, Homo sapiens
tcttactttctggat

SEQ ID NO: 1804771 - DNA, 15 bp, Homo sapiens
cttactttctggata

SEQ ID NO: 1804772 - DNA, 15 bp, Homo sapiens
ttactttctggatag

SEQ ID NO: 1804773 - DNA, 15 bp, Homo sapiens
tactttctggataga

SEQ ID NO: 1804774 - DNA, 15 bp, Homo sapiens
agaactctcagtgtc

SEQ ID NO: 1804775 - DNA, 15 bp, Homo sapiens
gaactctcagtgtct

SEQ ID NO: 1804776 - DNA, 15 bp, Homo sapiens
aactctcagtgtctt

SEQ ID NO: 1804777 - DNA, 15 bp, Homo sapiens
actctcagtgtcttt

SEQ ID NO: 1804778 - DNA, 15 bp, Homo sapiens
ctctcagtgtctttc

SEQ ID NO: 1804779 - DNA, 15 bp, Homo sapiens
tctcagtgtctttct

SEQ ID NO: 1804780 - DNA, 15 bp, Homo sapiens
ctcagtgtctttctg

SEQ ID NO: 1804781 - DNA, 15 bp, Homo sapiens
tcagtgtctttctgg

SEQ ID NO: 1804782 - DNA, 15 bp, Homo sapiens
cagtgtctttctgga

SEQ ID NO: 1804783 - DNA, 15 bp, Homo sapiens
agtgtctttctggat

SEQ ID NO: 1804784 - DNA, 15 bp, Homo sapiens
gtgtctttctggata

SEQ ID NO: 1804785 - DNA, 15 bp, Homo sapiens
tgtctttctggatag

SEQ ID NO: 1804786 - DNA, 15 bp, Homo sapiens
gtctttctggataga

SEQ ID NO: 1804787 - DNA, 15 bp, Homo sapiens
tctttctggatagaa

SEQ ID NO: 1804788 - DNA, 15 bp, Homo sapiens
ctttctggatagaat

SEQ ID NO: 1804789 - DNA, 15 bp, Homo sapiens
tttctggatagaatt

SEQ ID NO: 1804790 - DNA, 15 bp, Homo sapiens
ttctggatagaattc

SEQ ID NO: 1804791 - DNA, 15 bp, Homo sapiens
cctctggatagaact

SEQ ID NO: 1804792 - DNA, 15 bp, Homo sapiens
tctggatagaactcg

SEQ ID NO: 1804793 - DNA, 15 bp, Homo sapiens
ctggatagaactcgc

SEQ ID NO: 1804794 - DNA, 15 bp, Homo sapiens
tggatagaactcgca

SEQ ID NO: 1804795 - DNA, 15 bp, Homo sapiens
ggatagaactcgcac

SEQ ID NO: 1804796 - DNA, 15 bp, Homo sapiens
gatagaactcgcact

SEQ ID NO: 1804797 - DNA, 15 bp, Homo sapiens
atagaactcgcacta

SEQ ID NO: 1804798 - DNA, 15 bp, Homo sapiens
tagaactcgcactat

SEQ ID NO: 1804799 - DNA, 15 bp, Homo sapiens
agaactcgcactatc

SEQ ID NO: 1804800 - DNA, 15 bp, Homo sapiens
gaactcgcactatct

SEQ ID NO: 1804801 - DNA, 15 bp, Homo sapiens
aactcgcactatcta

SEQ ID NO: 1804802 - DNA, 15 bp, Homo sapiens
actcgcactatctac

SEQ ID NO: 1804803 - DNA, 15 bp, Homo sapiens
ctcgcactatctacc

SEQ ID NO: 1804804 - DNA, 15 bp, Homo sapiens
tcgcactatctacct

SEQ ID NO: 1804805 - DNA, 15 bp, Homo sapiens
cgcactatctacctg

SEQ ID NO: 1804806 - DNA, 15 bp, Homo sapiens
gcactatctacctgg

SEQ ID NO: 1804807 - DNA, 15 bp, Homo sapiens
cactatctacctgga

SEQ ID NO: 1804808 - DNA, 15 bp, Homo sapiens
actatctacctggat

SEQ ID NO: 1804809 - DNA, 15 bp, Homo sapiens
ctatctacctggata

SEQ ID NO: 1804810 - DNA, 15 bp, Homo sapiens
tatctacctggatag

SEQ ID NO: 1804811 - DNA, 15 bp, Homo sapiens
atctacctggataga

SEQ ID NO: 1804812 - DNA, 15 bp, Homo sapiens
tctacctggatagaa

SEQ ID NO: 1804813 - DNA, 15 bp, Homo sapiens
ctacctggatagaag

SEQ ID NO: 1804814 - DNA, 15 bp, Homo sapiens
tacctggatagaagt

SEQ ID NO: 1804815 - DNA, 15 bp, Homo sapiens
acctggatagaagtc

SEQ ID NO: 1804816 - DNA, 15 bp, Homo sapiens
cctggatagaagtct

SEQ ID NO: 1804817 - DNA, 15 bp, Homo sapiens
ctggatagaagtctc

SEQ ID NO: 1804818 - DNA, 15 bp, Homo sapiens
tggatagaagtctca

SEQ ID NO: 1804819 - DNA, 15 bp, Homo sapiens
ggatagaagtctcac

SEQ ID NO: 1804820 - DNA, 15 bp, Homo sapiens
gatagaagtctcact

SEQ ID NO: 1804821 - DNA, 15 bp, Homo sapiens
atagaagtctcactc

SEQ ID NO: 1804822 - DNA, 15 bp, Homo sapiens
tagaagtctcactct

SEQ ID NO: 1804823 - DNA, 15 bp, Homo sapiens
agaagtctcactctc

SEQ ID NO: 1804824 - DNA, 15 bp, Homo sapiens
gaagtctcactctct

SEQ ID NO: 1804825 - DNA, 15 bp, Homo sapiens
aagtctcactctctg

SEQ ID NO: 1804826 - DNA, 15 bp, Homo sapiens
agtctcactctctgg

SEQ ID NO: 1804827 - DNA, 15 bp, Homo sapiens
gtctcactctctgga

SEQ ID NO: 1804828 - DNA, 15 bp, Homo sapiens
tcactctctggatat

SEQ ID NO: 1804829 - DNA, 15 bp, Homo sapiens
cactctctggatata

SEQ ID NO: 1804830 - DNA, 15 bp, Homo sapiens
actctctggatataa

SEQ ID NO: 1804831 - DNA, 15 bp, Homo sapiens
ctctctggatataac

SEQ ID NO: 1804832 - DNA, 15 bp, Homo sapiens
tctctggatataact

SEQ ID NO: 1804833 - DNA, 15 bp, Homo sapiens
ctctggatataactc

SEQ ID NO: 1804834 - DNA, 15 bp, Homo sapiens
tctggatataactct

SEQ ID NO: 1804835 - DNA, 15 bp, Homo sapiens
ctggatataactctc

SEQ ID NO: 1804836 - DNA, 15 bp, Homo sapiens
tggatataactctca

SEQ ID NO: 1804837 - DNA, 15 bp, Homo sapiens
ggatataactctcac

SEQ ID NO: 1804838 - DNA, 15 bp, Homo sapiens
gatataactctcact

SEQ ID NO: 1804839 - DNA, 15 bp, Homo sapiens
tataactctcactaa

SEQ ID NO: 1804840 - DNA, 15 bp, Homo sapiens
ataactctcactaac

SEQ ID NO: 1804841 - DNA, 15 bp, Homo sapiens
taactctcactaact

SEQ ID NO: 1804842 - DNA, 15 bp, Homo sapiens
aactctcactaactg

SEQ ID NO: 1804843 - DNA, 15 bp, Homo sapiens
actctcactaactgt

SEQ ID NO: 1804844 - DNA, 15 bp, Homo sapiens
ctctcactaactgtc

SEQ ID NO: 1804845 - DNA, 15 bp, Homo sapiens
tctcactaactgtct

SEQ ID NO: 1804846 - DNA, 15 bp, Homo sapiens
ctcactaactgtctg

SEQ ID NO: 1804847 - DNA, 15 bp, Homo sapiens
tcactaactgtctgg

SEQ ID NO: 1804848 - DNA, 15 bp, Homo sapiens
cactaactgtctgga

SEQ ID NO: 1804849 - DNA, 15 bp, Homo sapiens
actaactgtctggat

SEQ ID NO: 1804850 - DNA, 15 bp, Homo sapiens
ctaactgtctggata

SEQ ID NO: 1804851 - DNA, 15 bp, Homo sapiens
taactgtctggatag

SEQ ID NO: 1804852 - DNA, 15 bp, Homo sapiens
aactgtctggataga

SEQ ID NO: 1804853 - DNA, 15 bp, Homo sapiens
actgtctggatagaa

SEQ ID NO: 1804854 - DNA, 15 bp, Homo sapiens
attctcactatctgc

SEQ ID NO: 1804855 - DNA, 15 bp, Homo sapiens
ttctcactatctgca

SEQ ID NO: 1804856 - DNA, 15 bp, Homo sapiens
ctgcatagaattcta

SEQ ID NO: 1804857 - DNA, 15 bp, Homo sapiens
tgcatagaattctat

SEQ ID NO: 1804858 - DNA, 15 bp, Homo sapiens
gcatagaattctatc

SEQ ID NO: 1804859 - DNA, 15 bp, Homo sapiens
catagaattctatct

SEQ ID NO: 1804860 - DNA, 15 bp, Homo sapiens
atagaattctatctg

SEQ ID NO: 1804861 - DNA, 15 bp, Homo sapiens
tagaattctatctgt

SEQ ID NO: 1804862 - DNA, 15 bp, Homo sapiens
agaattctatctgtc

SEQ ID NO: 1804863 - DNA, 15 bp, Homo sapiens
gaattctatctgtct

SEQ ID NO: 1804864 - DNA, 15 bp, Homo sapiens
aattctatctgtctg

SEQ ID NO: 1804865 - DNA, 15 bp, Homo sapiens
attctatctgtctgg

SEQ ID NO: 1804866 - DNA, 15 bp, Homo sapiens
ttctatctgtctggt

SEQ ID NO: 1804867 - DNA, 15 bp, Homo sapiens
tctatctgtctggtt

SEQ ID NO: 1804868 - DNA, 15 bp, Homo sapiens
ctatctgtctggtta

SEQ ID NO: 1804869 - DNA, 15 bp, Homo sapiens
tatctgtctggttag

SEQ ID NO: 1804870 - DNA, 15 bp, Homo sapiens
atctgtctggttaga

SEQ ID NO: 1804871 - DNA, 15 bp, Homo sapiens
tctgtctggttagaa

SEQ ID NO: 1804872 - DNA, 15 bp, Homo sapiens
ctgtctggttagaat

SEQ ID NO: 1804873 - DNA, 15 bp, Homo sapiens
tgtctggttagaatt

SEQ ID NO: 1804874 - DNA, 15 bp, Homo sapiens
gtctggttagaattt

SEQ ID NO: 1804875 - DNA, 15 bp, Homo sapiens
tctggttagaatttt

SEQ ID NO: 1804876 - DNA, 15 bp, Homo sapiens
ctggttagaattttc

SEQ ID NO: 1804877 - DNA, 15 bp, Homo sapiens
tggttagaattttca

SEQ ID NO: 1804878 - DNA, 15 bp, Homo sapiens
ggttagaattttcac

SEQ ID NO: 1804879 - DNA, 15 bp, Homo sapiens
gttagaattttcact

SEQ ID NO: 1804880 - DNA, 15 bp, Homo sapiens
ttagaattttcactc

SEQ ID NO: 1804881 - DNA, 15 bp, Homo sapiens
tagaattttcactct

SEQ ID NO: 1804882 - DNA, 15 bp, Homo sapiens
agaattttcactctc

SEQ ID NO: 1804883 - DNA, 15 bp, Homo sapiens
gaattttcactctct

SEQ ID NO: 1804884 - DNA, 15 bp, Homo sapiens
aattttcactctcta

SEQ ID NO: 1804885 - DNA, 15 bp, Homo sapiens
attttcactctctag

SEQ ID NO: 1804886 - DNA, 15 bp, Homo sapiens
ttttcactctctaga

SEQ ID NO: 1804887 - DNA, 15 bp, Homo sapiens
tttcactctctagat

SEQ ID NO: 1804888 - DNA, 15 bp, Homo sapiens
ttcactctctagata

SEQ ID NO: 1804889 - DNA, 15 bp, Homo sapiens
ctctagatagaactc

SEQ ID NO: 1804890 - DNA, 15 bp, Homo sapiens
actatctatctggac

SEQ ID NO: 1804891 - DNA, 15 bp, Homo sapiens
ctatctatctggaca

SEQ ID NO: 1804892 - DNA, 15 bp, Homo sapiens
tatctatctggacag

SEQ ID NO: 1804893 - DNA, 15 bp, Homo sapiens
atctatctggacaga

SEQ ID NO: 1804894 - DNA, 15 bp, Homo sapiens
tctatctggacagaa

SEQ ID NO: 1804895 - DNA, 15 bp, Homo sapiens
ctatctggacagaat

SEQ ID NO: 1804896 - DNA, 15 bp, Homo sapiens
tatctggacagaatt

SEQ ID NO: 1804897 - DNA, 15 bp, Homo sapiens
atctggacagaattc

SEQ ID NO: 1804898 - DNA, 15 bp, Homo sapiens
tctggacagaattct

SEQ ID NO: 1804899 - DNA, 15 bp, Homo sapiens
ctggacagaattctc

SEQ ID NO: 1804900 - DNA, 15 bp, Homo sapiens
tggacagaattctca

SEQ ID NO: 1804901 - DNA, 15 bp, Homo sapiens
ggacagaattctcac

SEQ ID NO: 1804902 - DNA, 15 bp, Homo sapiens
gacagaattctcact

SEQ ID NO: 1804903 - DNA, 15 bp, Homo sapiens
acagaattctcactc

SEQ ID NO: 1804904 - DNA, 15 bp, Homo sapiens
cagaattctcactct

SEQ ID NO: 1804905 - DNA, 15 bp, Homo sapiens
ctggataaaactctt

SEQ ID NO: 1804906 - DNA, 15 bp, Homo sapiens
tggataaaactctta

SEQ ID NO: 1804907 - DNA, 15 bp, Homo sapiens
ggataaaactcttaa

SEQ ID NO: 1804908 - DNA, 15 bp, Homo sapiens
gataaaactcttaac

SEQ ID NO: 1804909 - DNA, 15 bp, Homo sapiens
ataaaactcttaact

SEQ ID NO: 1804910 - DNA, 15 bp, Homo sapiens
taaaactcttaacta

SEQ ID NO: 1804911 - DNA, 15 bp, Homo sapiens
aaaactcttaactat

SEQ ID NO: 1804912 - DNA, 15 bp, Homo sapiens
aaactcttaactatc

SEQ ID NO: 1804913 - DNA, 15 bp, Homo sapiens
aactcttaactatct

SEQ ID NO: 1804914 - DNA, 15 bp, Homo sapiens
actcttaactatctg

SEQ ID NO: 1804915 - DNA, 15 bp, Homo sapiens
ctcttaactatctgt

SEQ ID NO: 1804916 - DNA, 15 bp, Homo sapiens
tcttaactatctgtc

SEQ ID NO: 1804917 - DNA, 15 bp, Homo sapiens
cttaactatctgtct

SEQ ID NO: 1804918 - DNA, 15 bp, Homo sapiens
ttaactatctgtctg

SEQ ID NO: 1804919 - DNA, 15 bp, Homo sapiens
taactatctgtctgg

SEQ ID NO: 1804920 - DNA, 15 bp, Homo sapiens
aactatctgtctgga

SEQ ID NO: 1804921 - DNA, 15 bp, Homo sapiens
tctcaccatctggac

SEQ ID NO: 1804922 - DNA, 15 bp, Homo sapiens
ctcaccatctggaca

SEQ ID NO: 1804923 - DNA, 15 bp, Homo sapiens
tcaccatctggacag

SEQ ID NO: 1804924 - DNA, 15 bp, Homo sapiens
caccatctggacaga

SEQ ID NO: 1804925 - DNA, 15 bp, Homo sapiens
accatctggacagaa

SEQ ID NO: 1804926 - DNA, 15 bp, Homo sapiens
ccatctggacagaac

SEQ ID NO: 1804927 - DNA, 15 bp, Homo sapiens
catctggacagaact

SEQ ID NO: 1804928 - DNA, 15 bp, Homo sapiens
atctggacagaactc

SEQ ID NO: 1804929 - DNA, 15 bp, Homo sapiens
tctggacagaactct

SEQ ID NO: 1804930 - DNA, 15 bp, Homo sapiens
ctggacagaactctc

SEQ ID NO: 1804931 - DNA, 15 bp, Homo sapiens
tggacagaactctca

SEQ ID NO: 1804932 - DNA, 15 bp, Homo sapiens
gaactctcactatcg

SEQ ID NO: 1804933 - DNA, 15 bp, Homo sapiens
aactctcactatcgg

SEQ ID NO: 1804934 - DNA, 15 bp, Homo sapiens
actctcactatcggt

SEQ ID NO: 1804935 - DNA, 15 bp, Homo sapiens
ctctcactatcggtc

SEQ ID NO: 1804936 - DNA, 15 bp, Homo sapiens
tctcactatcggtct

SEQ ID NO: 1804937 - DNA, 15 bp, Homo sapiens
ctcactatcggtctg

SEQ ID NO: 1804938 - DNA, 15 bp, Homo sapiens
tcactatcggtctgg

SEQ ID NO: 1804939 - DNA, 15 bp, Homo sapiens
cactatcggtctgga

SEQ ID NO: 1804940 - DNA, 15 bp, Homo sapiens
actatcggtctggat

SEQ ID NO: 1804941 - DNA, 15 bp, Homo sapiens
ctatcggtctggata

SEQ ID NO: 1804942 - DNA, 15 bp, Homo sapiens
tatcggtctggataa

SEQ ID NO: 1804943 - DNA, 15 bp, Homo sapiens
atcggtctggataaa

SEQ ID NO: 1804944 - DNA, 15 bp, Homo sapiens
tcggtctggataaaa

SEQ ID NO: 1804945 - DNA, 15 bp, Homo sapiens
cggtctggataaaat

SEQ ID NO: 1804946 - DNA, 15 bp, Homo sapiens
ggtctggataaaatt

SEQ ID NO: 1804947 - DNA, 15 bp, Homo sapiens
aaattctcaccatct

SEQ ID NO: 1804948 - DNA, 15 bp, Homo sapiens
attctcaccatctgt

SEQ ID NO: 1804949 - DNA, 15 bp, Homo sapiens
ttctcaccatctgtg

SEQ ID NO: 1804950 - DNA, 15 bp, Homo sapiens
tctcaccatctgtgt

SEQ ID NO: 1804951 - DNA, 15 bp, Homo sapiens
ctcaccatctgtgta

SEQ ID NO: 1804952 - DNA, 15 bp, Homo sapiens
tcaccatctgtgtag

SEQ ID NO: 1804953 - DNA, 15 bp, Homo sapiens
caccatctgtgtaga

SEQ ID NO: 1804954 - DNA, 15 bp, Homo sapiens
accatctgtgtagaa

SEQ ID NO: 1804955 - DNA, 15 bp, Homo sapiens
ccatctgtgtagaat

SEQ ID NO: 1804956 - DNA, 15 bp, Homo sapiens
catctgtgtagaatt

SEQ ID NO: 1804957 - DNA, 15 bp, Homo sapiens
atctgtgtagaattc

SEQ ID NO: 1804958 - DNA, 15 bp, Homo sapiens
tctgtgtagaattct

SEQ ID NO: 1804959 - DNA, 15 bp, Homo sapiens
ctgtgtagaattctc

SEQ ID NO: 1804960 - DNA, 15 bp, Homo sapiens
tgtgtagaattctca

SEQ ID NO: 1804961 - DNA, 15 bp, Homo sapiens
gtgtagaattctcac

SEQ ID NO: 1804962 - DNA, 15 bp, Homo sapiens
tgtagaattctcact

SEQ ID NO: 1804963 - DNA, 15 bp, Homo sapiens
gtagaattctcacta

SEQ ID NO: 1804964 - DNA, 15 bp, Homo sapiens
ctgcatagaattctt

SEQ ID NO: 1804965 - DNA, 15 bp, Homo sapiens
tgcatagaattctta

SEQ ID NO: 1804966 - DNA, 15 bp, Homo sapiens
gcatagaattcttac

SEQ ID NO: 1804967 - DNA, 15 bp, Homo sapiens
catagaattcttact

SEQ ID NO: 1804968 - DNA, 15 bp, Homo sapiens
atagaattcttactc

SEQ ID NO: 1804969 - DNA, 15 bp, Homo sapiens
tagaattcttactct

SEQ ID NO: 1804970 - DNA, 15 bp, Homo sapiens
agaattcttactctc

SEQ ID NO: 1804971 - DNA, 15 bp, Homo sapiens
gaattcttactctct

SEQ ID NO: 1804972 - DNA, 15 bp, Homo sapiens
aattcttactctctg

SEQ ID NO: 1804973 - DNA, 15 bp, Homo sapiens
ttcttactctctgga

SEQ ID NO: 1804974 - DNA, 15 bp, Homo sapiens
tcttactctctggat

SEQ ID NO: 1804975 - DNA, 15 bp, Homo sapiens
cttactctctggata

SEQ ID NO: 1804976 - DNA, 15 bp, Homo sapiens
ttactctctggatag

SEQ ID NO: 1804977 - DNA, 15 bp, Homo sapiens
tactctctggataga

SEQ ID NO: 1804978 - DNA, 15 bp, Homo sapiens
tggatagaactctct

SEQ ID NO: 1804979 - DNA, 15 bp, Homo sapiens
ggatagaactctctc

SEQ ID NO: 1804980 - DNA, 15 bp, Homo sapiens
gatagaactctctcg

SEQ ID NO: 1804981 - DNA, 15 bp, Homo sapiens
atagaactctctcgt

SEQ ID NO: 1804982 - DNA, 15 bp, Homo sapiens
tagaactctctcgta

SEQ ID NO: 1804983 - DNA, 15 bp, Homo sapiens
agaactctctcgtat

SEQ ID NO: 1804984 - DNA, 15 bp, Homo sapiens
gaactctctcgtatt

SEQ ID NO: 1804985 - DNA, 15 bp, Homo sapiens
aactctctcgtattc

SEQ ID NO: 1804986 - DNA, 15 bp, Homo sapiens
actctctcgtattcc

SEQ ID NO: 1804987 - DNA, 15 bp, Homo sapiens
ctctctcgtattcct

SEQ ID NO: 1804988 - DNA, 15 bp, Homo sapiens
tctctcgtattcctc

SEQ ID NO: 1804989 - DNA, 15 bp, Homo sapiens
ctctcgtattcctcg

SEQ ID NO: 1804990 - DNA, 15 bp, Homo sapiens
tctcgtattcctcga

SEQ ID NO: 1804991 - DNA, 15 bp, Homo sapiens
ctcgtattcctcgat

SEQ ID NO: 1804992 - DNA, 15 bp, Homo sapiens
tcgtattcctcgata

SEQ ID NO: 1804993 - DNA, 15 bp, Homo sapiens
cgtattcctcgatag

SEQ ID NO: 1804994 - DNA, 15 bp, Homo sapiens
gtattcctcgataga

SEQ ID NO: 1804995 - DNA, 15 bp, Homo sapiens
tattcctcgatagaa

SEQ ID NO: 1804996 - DNA, 15 bp, Homo sapiens
attcctcgatagaac

SEQ ID NO: 1804997 - DNA, 15 bp, Homo sapiens
ttcctcgatagaact

SEQ ID NO: 1804998 - DNA, 15 bp, Homo sapiens
tcctcgatagaactc

SEQ ID NO: 1804999 - DNA, 15 bp, Homo sapiens
cctcgatagaactct

SEQ ID NO: 1805000 - DNA, 15 bp, Homo sapiens
ctcgatagaactctg

SEQ ID NO: 1805001 - DNA, 15 bp, Homo sapiens
tcgatagaactctga

SEQ ID NO: 1805002 - DNA, 15 bp, Homo sapiens
cgatagaactctgac

SEQ ID NO: 1805003 - DNA, 15 bp, Homo sapiens
gatagaactctgacc

SEQ ID NO: 1805004 - DNA, 15 bp, Homo sapiens
atagaactctgacca

SEQ ID NO: 1805005 - DNA, 15 bp, Homo sapiens
tagaactctgaccat

SEQ ID NO: 1805006 - DNA, 15 bp, Homo sapiens
agaactctgaccatc

SEQ ID NO: 1805007 - DNA, 15 bp, Homo sapiens
gaactctgaccatct

SEQ ID NO: 1805008 - DNA, 15 bp, Homo sapiens
aactctgaccatctg

SEQ ID NO: 1805009 - DNA, 15 bp, Homo sapiens
actctgaccatctgg

SEQ ID NO: 1805010 - DNA, 15 bp, Homo sapiens
ctctgaccatctgga

SEQ ID NO: 1805011 - DNA, 15 bp, Homo sapiens
tctgaccatctggat

SEQ ID NO: 1805012 - DNA, 15 bp, Homo sapiens
ctgaccatctggata

SEQ ID NO: 1805013 - DNA, 15 bp, Homo sapiens
tgaccatctggatag

SEQ ID NO: 1805014 - DNA, 15 bp, Homo sapiens
gaccatctggataga

SEQ ID NO: 1805015 - DNA, 15 bp, Homo sapiens
tatctggatagaatc

SEQ ID NO: 1805016 - DNA, 15 bp, Homo sapiens
atctggatagaatcc

SEQ ID NO: 1805017 - DNA, 15 bp, Homo sapiens
tctggatagaatcct

SEQ ID NO: 1805018 - DNA, 15 bp, Homo sapiens
ctggatagaatcctc

SEQ ID NO: 1805019 - DNA, 15 bp, Homo sapiens
tggatagaatcctca

SEQ ID NO: 1805020 - DNA, 15 bp, Homo sapiens
ggatagaatcctcac

SEQ ID NO: 1805021 - DNA, 15 bp, Homo sapiens
gatagaatcctcact

SEQ ID NO: 1805022 - DNA, 15 bp, Homo sapiens
atagaatcctcactc

SEQ ID NO: 1805023 - DNA, 15 bp, Homo sapiens
tagaatcctcactct

SEQ ID NO: 1805024 - DNA, 15 bp, Homo sapiens
agaatcctcactcta

SEQ ID NO: 1805025 - DNA, 15 bp, Homo sapiens
gaatcctcactctat

SEQ ID NO: 1805026 - DNA, 15 bp, Homo sapiens
aatcctcactctata

SEQ ID NO: 1805027 - DNA, 15 bp, Homo sapiens
atcctcactctatat

SEQ ID NO: 1805028 - DNA, 15 bp, Homo sapiens
tcctcactctatata

SEQ ID NO: 1805029 - DNA, 15 bp, Homo sapiens
cctcactctatatag

SEQ ID NO: 1805030 - DNA, 15 bp, Homo sapiens
ctcactctatataga

SEQ ID NO: 1805031 - DNA, 15 bp, Homo sapiens
tcactctatatagaa

SEQ ID NO: 1805032 - DNA, 15 bp, Homo sapiens
cactctatatagaac

SEQ ID NO: 1805033 - DNA, 15 bp, Homo sapiens
actctatatagaact

SEQ ID NO: 1805034 - DNA, 15 bp, Homo sapiens
ctctatatagaactc

SEQ ID NO: 1805035 - DNA, 15 bp, Homo sapiens
tctatatagaactct

SEQ ID NO: 1805036 - DNA, 15 bp, Homo sapiens
ctatatagaactctc

SEQ ID NO: 1805037 - DNA, 15 bp, Homo sapiens
tatatagaactctca

SEQ ID NO: 1805038 - DNA, 15 bp, Homo sapiens
atatagaactctcac

SEQ ID NO: 1805039 - DNA, 15 bp, Homo sapiens
actctcactatctct

SEQ ID NO: 1805040 - DNA, 15 bp, Homo sapiens
ctctcactatctctc

SEQ ID NO: 1805041 - DNA, 15 bp, Homo sapiens
tctcactatctctct

SEQ ID NO: 1805042 - DNA, 15 bp, Homo sapiens
ctcactatctctctg

SEQ ID NO: 1805043 - DNA, 15 bp, Homo sapiens
tcactatctctctgg

SEQ ID NO: 1805044 - DNA, 15 bp, Homo sapiens
cactatctctctgga

SEQ ID NO: 1805045 - DNA, 15 bp, Homo sapiens
actatctctctggat

SEQ ID NO: 1805046 - DNA, 15 bp, Homo sapiens
ctatctctctggata

SEQ ID NO: 1805047 - DNA, 15 bp, Homo sapiens
tatctctctggatag

SEQ ID NO: 1805048 - DNA, 15 bp, Homo sapiens
atctctctggataga

SEQ ID NO: 1805049 - DNA, 15 bp, Homo sapiens
tctctctggatagaa

SEQ ID NO: 1805050 - DNA, 15 bp, Homo sapiens
aattctcactctgga

SEQ ID NO: 1805051 - DNA, 15 bp, Homo sapiens
attctcactctggaa

SEQ ID NO: 1805052 - DNA, 15 bp, Homo sapiens
ttctcactctggaaa

SEQ ID NO: 1805053 - DNA, 15 bp, Homo sapiens
tctcactctggaaag

SEQ ID NO: 1805054 - DNA, 15 bp, Homo sapiens
ctcactctggaaaga

SEQ ID NO: 1805055 - DNA, 15 bp, Homo sapiens
tcactctggaaagaa

SEQ ID NO: 1805056 - DNA, 15 bp, Homo sapiens
cactctggaaagaac

SEQ ID NO: 1805057 - DNA, 15 bp, Homo sapiens
actctggaaagaacc

SEQ ID NO: 1805058 - DNA, 15 bp, Homo sapiens
ctctggaaagaaccc

SEQ ID NO: 1805059 - DNA, 15 bp, Homo sapiens
tctggaaagaaccct

SEQ ID NO: 1805060 - DNA, 15 bp, Homo sapiens
ctggaaagaaccctc

SEQ ID NO: 1805061 - DNA, 15 bp, Homo sapiens
tggaaagaaccctca

SEQ ID NO: 1805062 - DNA, 15 bp, Homo sapiens
ggaaagaaccctcac

SEQ ID NO: 1805063 - DNA, 15 bp, Homo sapiens
gaaagaaccctcact

SEQ ID NO: 1805064 - DNA, 15 bp, Homo sapiens
aaagaaccctcacta

SEQ ID NO: 1805065 - DNA, 15 bp, Homo sapiens
aagaaccctcactat

SEQ ID NO: 1805066 - DNA, 15 bp, Homo sapiens
agaaccctcactatc

SEQ ID NO: 1805067 - DNA, 15 bp, Homo sapiens
gaaccctcactatct

SEQ ID NO: 1805068 - DNA, 15 bp, Homo sapiens
aaccctcactatcta

SEQ ID NO: 1805069 - DNA, 15 bp, Homo sapiens
accctcactatctat

SEQ ID NO: 1805070 - DNA, 15 bp, Homo sapiens
ccctcactatctata

SEQ ID NO: 1805071 - DNA, 15 bp, Homo sapiens
cctcactatctatat

SEQ ID NO: 1805072 - DNA, 15 bp, Homo sapiens
ctcactatctatatg

SEQ ID NO: 1805073 - DNA, 15 bp, Homo sapiens
tcactatctatatgg

SEQ ID NO: 1805074 - DNA, 15 bp, Homo sapiens
cactatctatatgga

SEQ ID NO: 1805075 - DNA, 15 bp, Homo sapiens
actatctatatggaa

SEQ ID NO: 1805076 - DNA, 15 bp, Homo sapiens
ctatctatatggaaa

SEQ ID NO: 1805077 - DNA, 15 bp, Homo sapiens
tatctatatggaaag

SEQ ID NO: 1805078 - DNA, 15 bp, Homo sapiens
atctatatggaaaga

SEQ ID NO: 1805079 - DNA, 15 bp, Homo sapiens
tctatatggaaagaa

SEQ ID NO: 1805080 - DNA, 15 bp, Homo sapiens
ctatatggaaagaat

SEQ ID NO: 1805081 - DNA, 15 bp, Homo sapiens
tatatggaaagaatt

SEQ ID NO: 1805082 - DNA, 15 bp, Homo sapiens
atatggaaagaattc

SEQ ID NO: 1805083 - DNA, 15 bp, Homo sapiens
tatggaaagaattct

SEQ ID NO: 1805084 - DNA, 15 bp, Homo sapiens
atggaaagaattctc

SEQ ID NO: 1805085 - DNA, 15 bp, Homo sapiens
ggaaagaattctcaa

SEQ ID NO: 1805086 - DNA, 15 bp, Homo sapiens
gaaagaattctcaac

SEQ ID NO: 1805087 - DNA, 15 bp, Homo sapiens
aaagaattctcaaca

SEQ ID NO: 1805088 - DNA, 15 bp, Homo sapiens
aagaattctcaacat

SEQ ID NO: 1805089 - DNA, 15 bp, Homo sapiens
agaattctcaacatc

SEQ ID NO: 1805090 - DNA, 15 bp, Homo sapiens
gaattctcaacatct

SEQ ID NO: 1805091 - DNA, 15 bp, Homo sapiens
aattctcaacatctg

SEQ ID NO: 1805092 - DNA, 15 bp, Homo sapiens
attctcaacatctgg

SEQ ID NO: 1805093 - DNA, 15 bp, Homo sapiens
ttctcaacatctgga

SEQ ID NO: 1805094 - DNA, 15 bp, Homo sapiens
tctcaacatctggat

SEQ ID NO: 1805095 - DNA, 15 bp, Homo sapiens
ctcaacatctggata

SEQ ID NO: 1805096 - DNA, 15 bp, Homo sapiens
tcaacatctggatag

SEQ ID NO: 1805097 - DNA, 15 bp, Homo sapiens
caacatctggataga

SEQ ID NO: 1805098 - DNA, 15 bp, Homo sapiens
aacatctggatagaa

SEQ ID NO: 1805099 - DNA, 15 bp, Homo sapiens
acatctggatagaat

SEQ ID NO: 1805100 - DNA, 15 bp, Homo sapiens
catctggatagaatc

SEQ ID NO: 1805101 - DNA, 15 bp, Homo sapiens
atagaatcctcacta

SEQ ID NO: 1805102 - DNA, 15 bp, Homo sapiens
tagaatcctcactat

SEQ ID NO: 1805103 - DNA, 15 bp, Homo sapiens
agaatcctcactatc

SEQ ID NO: 1805104 - DNA, 15 bp, Homo sapiens
gaatcctcactatct

SEQ ID NO: 1805105 - DNA, 15 bp, Homo sapiens
aatcctcactatctg

SEQ ID NO: 1805106 - DNA, 15 bp, Homo sapiens
atcctcactatctgg

SEQ ID NO: 1805107 - DNA, 15 bp, Homo sapiens
tcctcactatctgga

SEQ ID NO: 1805108 - DNA, 15 bp, Homo sapiens
cctcactatctggat

SEQ ID NO: 1805109 - DNA, 15 bp, Homo sapiens
aattctcactctctc

SEQ ID NO: 1805110 - DNA, 15 bp, Homo sapiens
attctcactctctcg

SEQ ID NO: 1805111 - DNA, 15 bp, Homo sapiens
ttctcactctctcga

SEQ ID NO: 1805112 - DNA, 15 bp, Homo sapiens
tctcactctctcgat

SEQ ID NO: 1805113 - DNA, 15 bp, Homo sapiens
ctcactctctcgata

SEQ ID NO: 1805114 - DNA, 15 bp, Homo sapiens
tcactctctcgatag

SEQ ID NO: 1805115 - DNA, 15 bp, Homo sapiens
cactctctcgataga

SEQ ID NO: 1805116 - DNA, 15 bp, Homo sapiens
actctctcgatagaa

SEQ ID NO: 1805117 - DNA, 15 bp, Homo sapiens
ctctctcgatagaac

SEQ ID NO: 1805118 - DNA, 15 bp, Homo sapiens
tctctcgatagaact

SEQ ID NO: 1805119 - DNA, 15 bp, Homo sapiens
ctctcgatagaactc

SEQ ID NO: 1805120 - DNA, 15 bp, Homo sapiens
tctcgatagaactct

SEQ ID NO: 1805121 - DNA, 15 bp, Homo sapiens
ctcgatagaactctt

SEQ ID NO: 1805122 - DNA, 15 bp, Homo sapiens
tcgatagaactcttg

SEQ ID NO: 1805123 - DNA, 15 bp, Homo sapiens
cgatagaactcttgc

SEQ ID NO: 1805124 - DNA, 15 bp, Homo sapiens
gatagaactcttgct

SEQ ID NO: 1805125 - DNA, 15 bp, Homo sapiens
atagaactcttgcta

SEQ ID NO: 1805126 - DNA, 15 bp, Homo sapiens
tagaactcttgctat

SEQ ID NO: 1805127 - DNA, 15 bp, Homo sapiens
agaactcttgctatc

SEQ ID NO: 1805128 - DNA, 15 bp, Homo sapiens
gaactcttgctatct

SEQ ID NO: 1805129 - DNA, 15 bp, Homo sapiens
aactcttgctatctg

SEQ ID NO: 1805130 - DNA, 15 bp, Homo sapiens
actcttgctatctgt

SEQ ID NO: 1805131 - DNA, 15 bp, Homo sapiens
ctcttgctatctgtc

SEQ ID NO: 1805132 - DNA, 15 bp, Homo sapiens
tcttgctatctgtct

SEQ ID NO: 1805133 - DNA, 15 bp, Homo sapiens
cttgctatctgtctg

SEQ ID NO: 1805134 - DNA, 15 bp, Homo sapiens
ttgctatctgtctgg

SEQ ID NO: 1805135 - DNA, 15 bp, Homo sapiens
tgctatctgtctgga

SEQ ID NO: 1805136 - DNA, 15 bp, Homo sapiens
gctatctgtctggat

SEQ ID NO: 1805137 - DNA, 15 bp, Homo sapiens
tagaattctcaccac

SEQ ID NO: 1805138 - DNA, 15 bp, Homo sapiens
agaattctcaccacc

SEQ ID NO: 1805139 - DNA, 15 bp, Homo sapiens
gaattctcaccacct

SEQ ID NO: 1805140 - DNA, 15 bp, Homo sapiens
aattctcaccaccta

SEQ ID NO: 1805141 - DNA, 15 bp, Homo sapiens
attctcaccacctag

SEQ ID NO: 1805142 - DNA, 15 bp, Homo sapiens
ttctcaccacctaga

SEQ ID NO: 1805143 - DNA, 15 bp, Homo sapiens
tctcaccacctagat

SEQ ID NO: 1805144 - DNA, 15 bp, Homo sapiens
ctcaccacctagata

SEQ ID NO: 1805145 - DNA, 15 bp, Homo sapiens
tcaccacctagatag

SEQ ID NO: 1805146 - DNA, 15 bp, Homo sapiens
caccacctagataga

SEQ ID NO: 1805147 - DNA, 15 bp, Homo sapiens
accacctagatagaa

SEQ ID NO: 1805148 - DNA, 15 bp, Homo sapiens
ccacctagatagaac

SEQ ID NO: 1805149 - DNA, 15 bp, Homo sapiens
cacctagatagaact

SEQ ID NO: 1805150 - DNA, 15 bp, Homo sapiens
acctagatagaactc

SEQ ID NO: 1805151 - DNA, 15 bp, Homo sapiens
cctagatagaactct

SEQ ID NO: 1805152 - DNA, 15 bp, Homo sapiens
agatagaactctcaa

SEQ ID NO: 1805153 - DNA, 15 bp, Homo sapiens
tagaactctcaataa

SEQ ID NO: 1805154 - DNA, 15 bp, Homo sapiens
agaactctcaataaa

SEQ ID NO: 1805155 - DNA, 15 bp, Homo sapiens
gaactctcaataaat

SEQ ID NO: 1805156 - DNA, 15 bp, Homo sapiens
aactctcaataaatg

SEQ ID NO: 1805157 - DNA, 15 bp, Homo sapiens
actctcaataaatgg

SEQ ID NO: 1805158 - DNA, 15 bp, Homo sapiens
ctctcaataaatggt

SEQ ID NO: 1805159 - DNA, 15 bp, Homo sapiens
tctcaataaatggta

SEQ ID NO: 1805160 - DNA, 15 bp, Homo sapiens
ctcaataaatggtag

SEQ ID NO: 1805161 - DNA, 15 bp, Homo sapiens
tcaataaatggtaga

SEQ ID NO: 1805162 - DNA, 15 bp, Homo sapiens
caataaatggtagaa

SEQ ID NO: 1805163 - DNA, 15 bp, Homo sapiens
aataaatggtagaat

SEQ ID NO: 1805164 - DNA, 15 bp, Homo sapiens
ataaatggtagaatt

SEQ ID NO: 1805165 - DNA, 15 bp, Homo sapiens
taaatggtagaattc

SEQ ID NO: 1805166 - DNA, 15 bp, Homo sapiens
aaatggtagaattct

SEQ ID NO: 1805167 - DNA, 15 bp, Homo sapiens
aatggtagaattctt

SEQ ID NO: 1805168 - DNA, 15 bp, Homo sapiens
atggtagaattctta

SEQ ID NO: 1805169 - DNA, 15 bp, Homo sapiens
tggtagaattcttac

SEQ ID NO: 1805170 - DNA, 15 bp, Homo sapiens
ggtagaattcttact

SEQ ID NO: 1805171 - DNA, 15 bp, Homo sapiens
gtagaattcttactc

SEQ ID NO: 1805172 - DNA, 15 bp, Homo sapiens
tcttactctctggac

SEQ ID NO: 1805173 - DNA, 15 bp, Homo sapiens
cttactctctggaca

SEQ ID NO: 1805174 - DNA, 15 bp, Homo sapiens
ttactctctggacaa

SEQ ID NO: 1805175 - DNA, 15 bp, Homo sapiens
tactctctggacaaa

SEQ ID NO: 1805176 - DNA, 15 bp, Homo sapiens
actctctggacaaaa

SEQ ID NO: 1805177 - DNA, 15 bp, Homo sapiens
ctctctggacaaaac

SEQ ID NO: 1805178 - DNA, 15 bp, Homo sapiens
tctctggacaaaact

SEQ ID NO: 1805179 - DNA, 15 bp, Homo sapiens
ctctggacaaaactc

SEQ ID NO: 1805180 - DNA, 15 bp, Homo sapiens
tctggacaaaactct

SEQ ID NO: 1805181 - DNA, 15 bp, Homo sapiens
ctggacaaaactctc

SEQ ID NO: 1805182 - DNA, 15 bp, Homo sapiens
tggacaaaactctca

SEQ ID NO: 1805183 - DNA, 15 bp, Homo sapiens
ggacaaaactctcac

SEQ ID NO: 1805184 - DNA, 15 bp, Homo sapiens
gacaaaactctcact

SEQ ID NO: 1805185 - DNA, 15 bp, Homo sapiens
acaaaactctcacta

SEQ ID NO: 1805186 - DNA, 15 bp, Homo sapiens
caaaactctcactat

SEQ ID NO: 1805187 - DNA, 15 bp, Homo sapiens
aactctcactatctt

SEQ ID NO: 1805188 - DNA, 15 bp, Homo sapiens
actctcactatcttt

SEQ ID NO: 1805189 - DNA, 15 bp, Homo sapiens
ctctcactatctttc

SEQ ID NO: 1805190 - DNA, 15 bp, Homo sapiens
tctcactatctttca

SEQ ID NO: 1805191 - DNA, 15 bp, Homo sapiens
ctcactatctttcag

SEQ ID NO: 1805192 - DNA, 15 bp, Homo sapiens
tcactatctttcagg

SEQ ID NO: 1805193 - DNA, 15 bp, Homo sapiens
cactatctttcagga

SEQ ID NO: 1805194 - DNA, 15 bp, Homo sapiens
actatctttcaggat

SEQ ID NO: 1805195 - DNA, 15 bp, Homo sapiens
ctatctttcaggata

SEQ ID NO: 1805196 - DNA, 15 bp, Homo sapiens
tatctttcaggatag

SEQ ID NO: 1805197 - DNA, 15 bp, Homo sapiens
atctttcaggataga

SEQ ID NO: 1805198 - DNA, 15 bp, Homo sapiens
tctttcaggatagaa

SEQ ID NO: 1805199 - DNA, 15 bp, Homo sapiens
ctttcaggatagaac

SEQ ID NO: 1805200 - DNA, 15 bp, Homo sapiens
tttcaggatagaact

SEQ ID NO: 1805201 - DNA, 15 bp, Homo sapiens
ttcaggatagaactc

SEQ ID NO: 1805202 - DNA, 15 bp, Homo sapiens
caggatagaactctt

SEQ ID NO: 1805203 - DNA, 15 bp, Homo sapiens
aggatagaactctta

SEQ ID NO: 1805204 - DNA, 15 bp, Homo sapiens
ggatagaactcttac

SEQ ID NO: 1805205 - DNA, 15 bp, Homo sapiens
gatagaactcttact

SEQ ID NO: 1805206 - DNA, 15 bp, Homo sapiens
atagaactcttacta

SEQ ID NO: 1805207 - DNA, 15 bp, Homo sapiens
tagaactcttactac

SEQ ID NO: 1805208 - DNA, 15 bp, Homo sapiens
agaactcttactacc

SEQ ID NO: 1805209 - DNA, 15 bp, Homo sapiens
gaactcttactacct

SEQ ID NO: 1805210 - DNA, 15 bp, Homo sapiens
aactcttactacctg

SEQ ID NO: 1805211 - DNA, 15 bp, Homo sapiens
actcttactacctgg

SEQ ID NO: 1805212 - DNA, 15 bp, Homo sapiens
ctcttactacctgga

SEQ ID NO: 1805213 - DNA, 15 bp, Homo sapiens
tcttactacctggag

SEQ ID NO: 1805214 - DNA, 15 bp, Homo sapiens
cttactacctggaga

SEQ ID NO: 1805215 - DNA, 15 bp, Homo sapiens
ttactacctggagag

SEQ ID NO: 1805216 - DNA, 15 bp, Homo sapiens
tactacctggagaga

SEQ ID NO: 1805217 - DNA, 15 bp, Homo sapiens
actacctggagagaa

SEQ ID NO: 1805218 - DNA, 15 bp, Homo sapiens
ctacctggagagaac

SEQ ID NO: 1805219 - DNA, 15 bp, Homo sapiens
tacctggagagaact

SEQ ID NO: 1805220 - DNA, 15 bp, Homo sapiens
acctggagagaactc

SEQ ID NO: 1805221 - DNA, 15 bp, Homo sapiens
cctggagagaactct

SEQ ID NO: 1805222 - DNA, 15 bp, Homo sapiens
ctggagagaactctc

SEQ ID NO: 1805223 - DNA, 15 bp, Homo sapiens
tggagagaactctca

SEQ ID NO: 1805224 - DNA, 15 bp, Homo sapiens
ggagagaactctcac

SEQ ID NO: 1805225 - DNA, 15 bp, Homo sapiens
ggatagaattctcaa

SEQ ID NO: 1805226 - DNA, 15 bp, Homo sapiens
gatagaattctcaac

SEQ ID NO: 1805227 - DNA, 15 bp, Homo sapiens
atagaattctcaaca

SEQ ID NO: 1805228 - DNA, 15 bp, Homo sapiens
tagaattctcaacat

SEQ ID NO: 1805229 - DNA, 15 bp, Homo sapiens
attctcaacatctga

SEQ ID NO: 1805230 - DNA, 15 bp, Homo sapiens
ttctcaacatctgag

SEQ ID NO: 1805231 - DNA, 15 bp, Homo sapiens
tctcaacatctgagg

SEQ ID NO: 1805232 - DNA, 15 bp, Homo sapiens
ctcaacatctgagga

SEQ ID NO: 1805233 - DNA, 15 bp, Homo sapiens
tcaacatctgaggat

SEQ ID NO: 1805234 - DNA, 15 bp, Homo sapiens
caacatctgaggata

SEQ ID NO: 1805235 - DNA, 15 bp, Homo sapiens
aacatctgaggatag

SEQ ID NO: 1805236 - DNA, 15 bp, Homo sapiens
acatctgaggataga

SEQ ID NO: 1805237 - DNA, 15 bp, Homo sapiens
catctgaggatagat

SEQ ID NO: 1805238 - DNA, 15 bp, Homo sapiens
atctgaggatagatt

SEQ ID NO: 1805239 - DNA, 15 bp, Homo sapiens
tctgaggatagattt

SEQ ID NO: 1805240 - DNA, 15 bp, Homo sapiens
ctgaggatagatttc

SEQ ID NO: 1805241 - DNA, 15 bp, Homo sapiens
tgaggatagatttcc

SEQ ID NO: 1805242 - DNA, 15 bp, Homo sapiens
gaggatagatttcca

SEQ ID NO: 1805243 - DNA, 15 bp, Homo sapiens
aggatagatttccaa

SEQ ID NO: 1805244 - DNA, 15 bp, Homo sapiens
ggatagatttccaac

SEQ ID NO: 1805245 - DNA, 15 bp, Homo sapiens
gatagatttccaact

SEQ ID NO: 1805246 - DNA, 15 bp, Homo sapiens
atagatttccaacta

SEQ ID NO: 1805247 - DNA, 15 bp, Homo sapiens
tagatttccaactat

SEQ ID NO: 1805248 - DNA, 15 bp, Homo sapiens
agatttccaactatc

SEQ ID NO: 1805249 - DNA, 15 bp, Homo sapiens
gatttccaactatct

SEQ ID NO: 1805250 - DNA, 15 bp, Homo sapiens
atttccaactatcta

SEQ ID NO: 1805251 - DNA, 15 bp, Homo sapiens
tttccaactatctat

SEQ ID NO: 1805252 - DNA, 15 bp, Homo sapiens
ttccaactatctatc

SEQ ID NO: 1805253 - DNA, 15 bp, Homo sapiens
tccaactatctatct

SEQ ID NO: 1805254 - DNA, 15 bp, Homo sapiens
ccaactatctatctg

SEQ ID NO: 1805255 - DNA, 15 bp, Homo sapiens
caactatctatctgg

SEQ ID NO: 1805256 - DNA, 15 bp, Homo sapiens
aactatctatctgga

SEQ ID NO: 1805257 - DNA, 15 bp, Homo sapiens
tctggatataattcc

SEQ ID NO: 1805258 - DNA, 15 bp, Homo sapiens
ctggatataattccc

SEQ ID NO: 1805259 - DNA, 15 bp, Homo sapiens
tggatataattccca

SEQ ID NO: 1805260 - DNA, 15 bp, Homo sapiens
ggatataattcccac

SEQ ID NO: 1805261 - DNA, 15 bp, Homo sapiens
gatataattcccact

SEQ ID NO: 1805262 - DNA, 15 bp, Homo sapiens
atataattcccactc

SEQ ID NO: 1805263 - DNA, 15 bp, Homo sapiens
tataattcccactct

SEQ ID NO: 1805264 - DNA, 15 bp, Homo sapiens
ataattcccactctg

SEQ ID NO: 1805265 - DNA, 15 bp, Homo sapiens
taattcccactctgt

SEQ ID NO: 1805266 - DNA, 15 bp, Homo sapiens
aattcccactctgtc

SEQ ID NO: 1805267 - DNA, 15 bp, Homo sapiens
attcccactctgtcg

SEQ ID NO: 1805268 - DNA, 15 bp, Homo sapiens
ttcccactctgtcgt

SEQ ID NO: 1805269 - DNA, 15 bp, Homo sapiens
tcccactctgtcgtt

SEQ ID NO: 1805270 - DNA, 15 bp, Homo sapiens
cccactctgtcgtta

SEQ ID NO: 1805271 - DNA, 15 bp, Homo sapiens
ccactctgtcgttag

SEQ ID NO: 1805272 - DNA, 15 bp, Homo sapiens
cactctgtcgttaga

SEQ ID NO: 1805273 - DNA, 15 bp, Homo sapiens
actctgtcgttagaa

SEQ ID NO: 1805274 - DNA, 15 bp, Homo sapiens
ctctgtcgttagaac

SEQ ID NO: 1805275 - DNA, 15 bp, Homo sapiens
tctgtcgttagaact

SEQ ID NO: 1805276 - DNA, 15 bp, Homo sapiens
ctgtcgttagaactc

SEQ ID NO: 1805277 - DNA, 15 bp, Homo sapiens
tgtcgttagaactct

SEQ ID NO: 1805278 - DNA, 15 bp, Homo sapiens
gtcgttagaactctc

SEQ ID NO: 1805279 - DNA, 15 bp, Homo sapiens
tcgttagaactctca

SEQ ID NO: 1805280 - DNA, 15 bp, Homo sapiens
cgttagaactctcac

SEQ ID NO: 1805281 - DNA, 15 bp, Homo sapiens
gttagaactctcact

SEQ ID NO: 1805282 - DNA, 15 bp, Homo sapiens
ttagaactctcacta

SEQ ID NO: 1805283 - DNA, 15 bp, Homo sapiens
tagaactctcactac

SEQ ID NO: 1805284 - DNA, 15 bp, Homo sapiens
agaactctcactacc

SEQ ID NO: 1805285 - DNA, 15 bp, Homo sapiens
gaactctcactacct

SEQ ID NO: 1805286 - DNA, 15 bp, Homo sapiens
aactctcactacctg

SEQ ID NO: 1805287 - DNA, 15 bp, Homo sapiens
actctcactacctgt

SEQ ID NO: 1805288 - DNA, 15 bp, Homo sapiens
ctctcactacctgtc

SEQ ID NO: 1805289 - DNA, 15 bp, Homo sapiens
tctcactacctgtct

SEQ ID NO: 1805290 - DNA, 15 bp, Homo sapiens
ctcactacctgtcta

SEQ ID NO: 1805291 - DNA, 15 bp, Homo sapiens
tcactacctgtctag

SEQ ID NO: 1805292 - DNA, 15 bp, Homo sapiens
cactacctgtctaga

SEQ ID NO: 1805293 - DNA, 15 bp, Homo sapiens
actacctgtctagat

SEQ ID NO: 1805294 - DNA, 15 bp, Homo sapiens
ctacctgtctagata

SEQ ID NO: 1805295 - DNA, 15 bp, Homo sapiens
tacctgtctagatac

SEQ ID NO: 1805296 - DNA, 15 bp, Homo sapiens
acctgtctagataca

SEQ ID NO: 1805297 - DNA, 15 bp, Homo sapiens
cctgtctagatacaa

SEQ ID NO: 1805298 - DNA, 15 bp, Homo sapiens
ctgtctagatacaat

SEQ ID NO: 1805299 - DNA, 15 bp, Homo sapiens
tgtctagatacaatt

SEQ ID NO: 1805300 - DNA, 15 bp, Homo sapiens
gtctagatacaattt

SEQ ID NO: 1805301 - DNA, 15 bp, Homo sapiens
tctagatacaatttt

SEQ ID NO: 1805302 - DNA, 15 bp, Homo sapiens
ctagatacaattttc

SEQ ID NO: 1805303 - DNA, 15 bp, Homo sapiens
tagatacaattttca

SEQ ID NO: 1805304 - DNA, 15 bp, Homo sapiens
agatacaattttcac

SEQ ID NO: 1805305 - DNA, 15 bp, Homo sapiens
gatacaattttcacc

SEQ ID NO: 1805306 - DNA, 15 bp, Homo sapiens
atacaattttcacca

SEQ ID NO: 1805307 - DNA, 15 bp, Homo sapiens
tacaattttcaccat

SEQ ID NO: 1805308 - DNA, 15 bp, Homo sapiens
acaattttcaccatc

SEQ ID NO: 1805309 - DNA, 15 bp, Homo sapiens
caattttcaccatcc

SEQ ID NO: 1805310 - DNA, 15 bp, Homo sapiens
aattttcaccatcca

SEQ ID NO: 1805311 - DNA, 15 bp, Homo sapiens
attttcaccatccat

SEQ ID NO: 1805312 - DNA, 15 bp, Homo sapiens
ttttcaccatccatg

SEQ ID NO: 1805313 - DNA, 15 bp, Homo sapiens
tttcaccatccatga

SEQ ID NO: 1805314 - DNA, 15 bp, Homo sapiens
ttcaccatccatgaa

SEQ ID NO: 1805315 - DNA, 15 bp, Homo sapiens
tcaccatccatgaac

SEQ ID NO: 1805316 - DNA, 15 bp, Homo sapiens
caccatccatgaaca

SEQ ID NO: 1805317 - DNA, 15 bp, Homo sapiens
accatccatgaacaa

SEQ ID NO: 1805318 - DNA, 15 bp, Homo sapiens
ccatccatgaacaac

SEQ ID NO: 1805319 - DNA, 15 bp, Homo sapiens
catccatgaacaact

SEQ ID NO: 1805320 - DNA, 15 bp, Homo sapiens
atccatgaacaactc

SEQ ID NO: 1805321 - DNA, 15 bp, Homo sapiens
tccatgaacaactct

SEQ ID NO: 1805322 - DNA, 15 bp, Homo sapiens
ccatgaacaactctc

SEQ ID NO: 1805323 - DNA, 15 bp, Homo sapiens
catgaacaactctca

SEQ ID NO: 1805324 - DNA, 15 bp, Homo sapiens
atgaacaactctcac

SEQ ID NO: 1805325 - DNA, 15 bp, Homo sapiens
tgaacaactctcaca

SEQ ID NO: 1805326 - DNA, 15 bp, Homo sapiens
gaacaactctcacaa

SEQ ID NO: 1805327 - DNA, 15 bp, Homo sapiens
aacaactctcacaat

SEQ ID NO: 1805328 - DNA, 15 bp, Homo sapiens
acaactctcacaatc

SEQ ID NO: 1805329 - DNA, 15 bp, Homo sapiens
caactctcacaatct

SEQ ID NO: 1805330 - DNA, 15 bp, Homo sapiens
actctcacaatctgt

SEQ ID NO: 1805331 - DNA, 15 bp, Homo sapiens
ctctcacaatctgta

SEQ ID NO: 1805332 - DNA, 15 bp, Homo sapiens
tctcacaatctgtat

SEQ ID NO: 1805333 - DNA, 15 bp, Homo sapiens
ctcacaatctgtatg

SEQ ID NO: 1805334 - DNA, 15 bp, Homo sapiens
tcacaatctgtatgg

SEQ ID NO: 1805335 - DNA, 15 bp, Homo sapiens
cacaatctgtatgga

SEQ ID NO: 1805336 - DNA, 15 bp, Homo sapiens
acaatctgtatggaa

SEQ ID NO: 1805337 - DNA, 15 bp, Homo sapiens
caatctgtatggaat

SEQ ID NO: 1805338 - DNA, 15 bp, Homo sapiens
aatctgtatggaatt

SEQ ID NO: 1805339 - DNA, 15 bp, Homo sapiens
atctgtatggaattc

SEQ ID NO: 1805340 - DNA, 15 bp, Homo sapiens
tctgtatggaattcg

SEQ ID NO: 1805341 - DNA, 15 bp, Homo sapiens
ctgtatggaattcgc

SEQ ID NO: 1805342 - DNA, 15 bp, Homo sapiens
tgtatggaattcgct

SEQ ID NO: 1805343 - DNA, 15 bp, Homo sapiens
gtatggaattcgcta

SEQ ID NO: 1805344 - DNA, 15 bp, Homo sapiens
tatggaattcgctat

SEQ ID NO: 1805345 - DNA, 15 bp, Homo sapiens
atggaattcgctatc

SEQ ID NO: 1805346 - DNA, 15 bp, Homo sapiens
tggaattcgctatct

SEQ ID NO: 1805347 - DNA, 15 bp, Homo sapiens
ggaattcgctatctc

SEQ ID NO: 1805348 - DNA, 15 bp, Homo sapiens
gaattcgctatctct

SEQ ID NO: 1805349 - DNA, 15 bp, Homo sapiens
aattcgctatctctg

SEQ ID NO: 1805350 - DNA, 15 bp, Homo sapiens
attcgctatctctgg

SEQ ID NO: 1805351 - DNA, 15 bp, Homo sapiens
ttcgctatctctgga

SEQ ID NO: 1805352 - DNA, 15 bp, Homo sapiens
tcgctatctctggat

SEQ ID NO: 1805353 - DNA, 15 bp, Homo sapiens
cgctatctctggata

SEQ ID NO: 1805354 - DNA, 15 bp, Homo sapiens
gctatctctggatag

SEQ ID NO: 1805355 - DNA, 15 bp, Homo sapiens
ctatctctggataga

SEQ ID NO: 1805356 - DNA, 15 bp, Homo sapiens
tatctctggatagaa

SEQ ID NO: 1805357 - DNA, 15 bp, Homo sapiens
atctctggatagaag

SEQ ID NO: 1805358 - DNA, 15 bp, Homo sapiens
tctctggatagaagt

SEQ ID NO: 1805359 - DNA, 15 bp, Homo sapiens
ctctggatagaagtc

SEQ ID NO: 1805360 - DNA, 15 bp, Homo sapiens
tctggatagaagtct

SEQ ID NO: 1805361 - DNA, 15 bp, Homo sapiens
ctggatagaagtctt

SEQ ID NO: 1805362 - DNA, 15 bp, Homo sapiens
tggatagaagtctta

SEQ ID NO: 1805363 - DNA, 15 bp, Homo sapiens
ggatagaagtcttac

SEQ ID NO: 1805364 - DNA, 15 bp, Homo sapiens
gatagaagtcttact

SEQ ID NO: 1805365 - DNA, 15 bp, Homo sapiens
atagaagtcttacta

SEQ ID NO: 1805366 - DNA, 15 bp, Homo sapiens
tagaagtcttactat

SEQ ID NO: 1805367 - DNA, 15 bp, Homo sapiens
agaagtcttactatc

SEQ ID NO: 1805368 - DNA, 15 bp, Homo sapiens
gaagtcttactatca

SEQ ID NO: 1805369 - DNA, 15 bp, Homo sapiens
aagtcttactatcaa

SEQ ID NO: 1805370 - DNA, 15 bp, Homo sapiens
agtcttactatcaat

SEQ ID NO: 1805371 - DNA, 15 bp, Homo sapiens
gtcttactatcaatc

SEQ ID NO: 1805372 - DNA, 15 bp, Homo sapiens
tcttactatcaatct

SEQ ID NO: 1805373 - DNA, 15 bp, Homo sapiens
cttactatcaatctg

SEQ ID NO: 1805374 - DNA, 15 bp, Homo sapiens
ttactatcaatctgg

SEQ ID NO: 1805375 - DNA, 15 bp, Homo sapiens
tactatcaatctgga

SEQ ID NO: 1805376 - DNA, 15 bp, Homo sapiens
actatcaatctggat

SEQ ID NO: 1805377 - DNA, 15 bp, Homo sapiens
ctatcaatctggata

SEQ ID NO: 1805378 - DNA, 15 bp, Homo sapiens
tatcaatctggatat

SEQ ID NO: 1805379 - DNA, 15 bp, Homo sapiens
atcaatctggatata

SEQ ID NO: 1805380 - DNA, 15 bp, Homo sapiens
tcaatctggatataa

SEQ ID NO: 1805381 - DNA, 15 bp, Homo sapiens
caatctggatataat

SEQ ID NO: 1805382 - DNA, 15 bp, Homo sapiens
aatctggatataatt

SEQ ID NO: 1805383 - DNA, 15 bp, Homo sapiens
taattctcactctct

SEQ ID NO: 1805384 - DNA, 15 bp, Homo sapiens
ctctcactatctggg

SEQ ID NO: 1805385 - DNA, 15 bp, Homo sapiens
tctcactatctgggt

SEQ ID NO: 1805386 - DNA, 15 bp, Homo sapiens
ctcactatctgggta

SEQ ID NO: 1805387 - DNA, 15 bp, Homo sapiens
tcactatctgggtag

SEQ ID NO: 1805388 - DNA, 15 bp, Homo sapiens
cactatctgggtaga

SEQ ID NO: 1805389 - DNA, 15 bp, Homo sapiens
actatctgggtagat

SEQ ID NO: 1805390 - DNA, 15 bp, Homo sapiens
ctatctgggtagatt

SEQ ID NO: 1805391 - DNA, 15 bp, Homo sapiens
tatctgggtagattg

SEQ ID NO: 1805392 - DNA, 15 bp, Homo sapiens
atctgggtagattgc

SEQ ID NO: 1805393 - DNA, 15 bp, Homo sapiens
tctgggtagattgct

SEQ ID NO: 1805394 - DNA, 15 bp, Homo sapiens
ctgggtagattgctc

SEQ ID NO: 1805395 - DNA, 15 bp, Homo sapiens
tgggtagattgctca

SEQ ID NO: 1805396 - DNA, 15 bp, Homo sapiens
gggtagattgctcac

SEQ ID NO: 1805397 - DNA, 15 bp, Homo sapiens
ggtagattgctcacc

SEQ ID NO: 1805398 - DNA, 15 bp, Homo sapiens
gtagattgctcacca

SEQ ID NO: 1805399 - DNA, 15 bp, Homo sapiens
tagattgctcaccat

SEQ ID NO: 1805400 - DNA, 15 bp, Homo sapiens
agattgctcaccatc

SEQ ID NO: 1805401 - DNA, 15 bp, Homo sapiens
gattgctcaccatct

SEQ ID NO: 1805402 - DNA, 15 bp, Homo sapiens
attgctcaccatctg

SEQ ID NO: 1805403 - DNA, 15 bp, Homo sapiens
ttgctcaccatctgg

SEQ ID NO: 1805404 - DNA, 15 bp, Homo sapiens
tgctcaccatctgga

SEQ ID NO: 1805405 - DNA, 15 bp, Homo sapiens
gctcaccatctggat

SEQ ID NO: 1805406 - DNA, 15 bp, Homo sapiens
aattctcactatcta

SEQ ID NO: 1805407 - DNA, 15 bp, Homo sapiens
attctcactatctat

SEQ ID NO: 1805408 - DNA, 15 bp, Homo sapiens
ttctcactatctatc

SEQ ID NO: 1805409 - DNA, 15 bp, Homo sapiens
tcactatctatctat

SEQ ID NO: 1805410 - DNA, 15 bp, Homo sapiens
cactatctatctata

SEQ ID NO: 1805411 - DNA, 15 bp, Homo sapiens
actatctatctatag

SEQ ID NO: 1805412 - DNA, 15 bp, Homo sapiens
ctatctatctataga

SEQ ID NO: 1805413 - DNA, 15 bp, Homo sapiens
tatctatctatagaa

SEQ ID NO: 1805414 - DNA, 15 bp, Homo sapiens
atctatctatagaat

SEQ ID NO: 1805415 - DNA, 15 bp, Homo sapiens
tctatctatagaatt

SEQ ID NO: 1805416 - DNA, 15 bp, Homo sapiens
ctatctatagaattc

SEQ ID NO: 1805417 - DNA, 15 bp, Homo sapiens
tatctatagaattct

SEQ ID NO: 1805418 - DNA, 15 bp, Homo sapiens
atctatagaattctc

SEQ ID NO: 1805419 - DNA, 15 bp, Homo sapiens
tctatagaattctca

SEQ ID NO: 1805420 - DNA, 15 bp, Homo sapiens
ctatagaattctcac

SEQ ID NO: 1805421 - DNA, 15 bp, Homo sapiens
tatagaattctcact

SEQ ID NO: 1805422 - DNA, 15 bp, Homo sapiens
aattctcactctcta

SEQ ID NO: 1805423 - DNA, 15 bp, Homo sapiens
attctcactctctag

SEQ ID NO: 1805424 - DNA, 15 bp, Homo sapiens
ttctcactctctaga

SEQ ID NO: 1805425 - DNA, 15 bp, Homo sapiens
agaactctcaatata

SEQ ID NO: 1805426 - DNA, 15 bp, Homo sapiens
gaactctcaatatat

SEQ ID NO: 1805427 - DNA, 15 bp, Homo sapiens
aactctcaatatata

SEQ ID NO: 1805428 - DNA, 15 bp, Homo sapiens
actctcaatatatat

SEQ ID NO: 1805429 - DNA, 15 bp, Homo sapiens
ctctcaatatatatc

SEQ ID NO: 1805430 - DNA, 15 bp, Homo sapiens
tctcaatatatatct

SEQ ID NO: 1805431 - DNA, 15 bp, Homo sapiens
ctcaatatatatctg

SEQ ID NO: 1805432 - DNA, 15 bp, Homo sapiens
tcaatatatatctgg

SEQ ID NO: 1805433 - DNA, 15 bp, Homo sapiens
caatatatatctgga

SEQ ID NO: 1805434 - DNA, 15 bp, Homo sapiens
aatatatatctggat

SEQ ID NO: 1805435 - DNA, 15 bp, Homo sapiens
atatatatctggata

SEQ ID NO: 1805436 - DNA, 15 bp, Homo sapiens
tatatatctggatag

SEQ ID NO: 1805437 - DNA, 15 bp, Homo sapiens
atatatctggataga

SEQ ID NO: 1805438 - DNA, 15 bp, Homo sapiens
tctcactatctggag

SEQ ID NO: 1805439 - DNA, 15 bp, Homo sapiens
ctcactatctggaga

SEQ ID NO: 1805440 - DNA, 15 bp, Homo sapiens
tcactatctggagag

SEQ ID NO: 1805441 - DNA, 15 bp, Homo sapiens
cactatctggagaga

SEQ ID NO: 1805442 - DNA, 15 bp, Homo sapiens
actatctggagagaa

SEQ ID NO: 1805443 - DNA, 15 bp, Homo sapiens
ctatctggagagaat

SEQ ID NO: 1805444 - DNA, 15 bp, Homo sapiens
tatctggagagaatt

SEQ ID NO: 1805445 - DNA, 15 bp, Homo sapiens
atctggagagaattc

SEQ ID NO: 1805446 - DNA, 15 bp, Homo sapiens
tctggagagaattct

SEQ ID NO: 1805447 - DNA, 15 bp, Homo sapiens
ctggagagaattctc

SEQ ID NO: 1805448 - DNA, 15 bp, Homo sapiens
tggagagaattctca

SEQ ID NO: 1805449 - DNA, 15 bp, Homo sapiens
ggagagaattctcac

SEQ ID NO: 1805450 - DNA, 15 bp, Homo sapiens
gagagaattctcact

SEQ ID NO: 1805451 - DNA, 15 bp, Homo sapiens
agagaattctcactc

SEQ ID NO: 1805452 - DNA, 15 bp, Homo sapiens
gagaattctcactct

SEQ ID NO: 1805453 - DNA, 15 bp, Homo sapiens
ttctcactctctgtg

SEQ ID NO: 1805454 - DNA, 15 bp, Homo sapiens
tctcactctctgtgt

SEQ ID NO: 1805455 - DNA, 15 bp, Homo sapiens
ctcactctctgtgtg

SEQ ID NO: 1805456 - DNA, 15 bp, Homo sapiens
tcactctctgtgtgg

SEQ ID NO: 1805457 - DNA, 15 bp, Homo sapiens
cactctctgtgtgga

SEQ ID NO: 1805458 - DNA, 15 bp, Homo sapiens
actctctgtgtggaa

SEQ ID NO: 1805459 - DNA, 15 bp, Homo sapiens
ctctctgtgtggaac

SEQ ID NO: 1805460 - DNA, 15 bp, Homo sapiens
tctctgtgtggaact

SEQ ID NO: 1805461 - DNA, 15 bp, Homo sapiens
ctctgtgtggaactc

SEQ ID NO: 1805462 - DNA, 15 bp, Homo sapiens
tctgtgtggaactct

SEQ ID NO: 1805463 - DNA, 15 bp, Homo sapiens
ctgtgtggaactctc

SEQ ID NO: 1805464 - DNA, 15 bp, Homo sapiens
tgtgtggaactctca

SEQ ID NO: 1805465 - DNA, 15 bp, Homo sapiens
gtgtggaactctcac

SEQ ID NO: 1805466 - DNA, 15 bp, Homo sapiens
tgtggaactctcact

SEQ ID NO: 1805467 - DNA, 15 bp, Homo sapiens
gtggaactctcacta

SEQ ID NO: 1805468 - DNA, 15 bp, Homo sapiens
tggaactctcactat

SEQ ID NO: 1805469 - DNA, 15 bp, Homo sapiens
ggaactctcactatt

SEQ ID NO: 1805470 - DNA, 15 bp, Homo sapiens
gaactctcactattt

SEQ ID NO: 1805471 - DNA, 15 bp, Homo sapiens
aactctcactattta

SEQ ID NO: 1805472 - DNA, 15 bp, Homo sapiens
actctcactatttat

SEQ ID NO: 1805473 - DNA, 15 bp, Homo sapiens
ctctcactatttatc

SEQ ID NO: 1805474 - DNA, 15 bp, Homo sapiens
tctcactatttatct

SEQ ID NO: 1805475 - DNA, 15 bp, Homo sapiens
ctcactatttatctg

SEQ ID NO: 1805476 - DNA, 15 bp, Homo sapiens
tcactatttatctgg

SEQ ID NO: 1805477 - DNA, 15 bp, Homo sapiens
cactatttatctgga

SEQ ID NO: 1805478 - DNA, 15 bp, Homo sapiens
actatttatctggat

SEQ ID NO: 1805479 - DNA, 15 bp, Homo sapiens
ctatttatctggata

SEQ ID NO: 1805480 - DNA, 15 bp, Homo sapiens
tatttatctggatag

SEQ ID NO: 1805481 - DNA, 15 bp, Homo sapiens
atttatctggataga

SEQ ID NO: 1805482 - DNA, 15 bp, Homo sapiens
tttatctggatagaa

SEQ ID NO: 1805483 - DNA, 15 bp, Homo sapiens
ttatctggatagaat

SEQ ID NO: 1805484 - DNA, 15 bp, Homo sapiens
aattctcaacatcta

SEQ ID NO: 1805485 - DNA, 15 bp, Homo sapiens
attctcaacatctag

SEQ ID NO: 1805486 - DNA, 15 bp, Homo sapiens
ttctcaacatctaga

SEQ ID NO: 1805487 - DNA, 15 bp, Homo sapiens
tctcaacatctagat

SEQ ID NO: 1805488 - DNA, 15 bp, Homo sapiens
ctcaacatctagata

SEQ ID NO: 1805489 - DNA, 15 bp, Homo sapiens
tcaacatctagatag

SEQ ID NO: 1805490 - DNA, 15 bp, Homo sapiens
caacatctagataga

SEQ ID NO: 1805491 - DNA, 15 bp, Homo sapiens
aacatctagatagaa

SEQ ID NO: 1805492 - DNA, 15 bp, Homo sapiens
acatctagatagaac

SEQ ID NO: 1805493 - DNA, 15 bp, Homo sapiens
agaactctcactatt

SEQ ID NO: 1805494 - DNA, 15 bp, Homo sapiens
aactctcactatttg

SEQ ID NO: 1805495 - DNA, 15 bp, Homo sapiens
actctcactatttgt

SEQ ID NO: 1805496 - DNA, 15 bp, Homo sapiens
ctctcactatttgtc

SEQ ID NO: 1805497 - DNA, 15 bp, Homo sapiens
tctcactatttgtct

SEQ ID NO: 1805498 - DNA, 15 bp, Homo sapiens
ctcactatttgtctg

SEQ ID NO: 1805499 - DNA, 15 bp, Homo sapiens
tcactatttgtctgg

SEQ ID NO: 1805500 - DNA, 15 bp, Homo sapiens
cactatttgtctgga

SEQ ID NO: 1805501 - DNA, 15 bp, Homo sapiens
actatttgtctggat

SEQ ID NO: 1805502 - DNA, 15 bp, Homo sapiens
ctatttgtctggata

SEQ ID NO: 1805503 - DNA, 15 bp, Homo sapiens
tatttgtctggatag

SEQ ID NO: 1805504 - DNA, 15 bp, Homo sapiens
atttgtctggataga

SEQ ID NO: 1805505 - DNA, 15 bp, Homo sapiens
tttgtctggatagag

SEQ ID NO: 1805506 - DNA, 15 bp, Homo sapiens
ttgtctggatagagt

SEQ ID NO: 1805507 - DNA, 15 bp, Homo sapiens
tgtctggatagagtt

SEQ ID NO: 1805508 - DNA, 15 bp, Homo sapiens
gtctggatagagttc

SEQ ID NO: 1805509 - DNA, 15 bp, Homo sapiens
gatagagttctcacc

SEQ ID NO: 1805510 - DNA, 15 bp, Homo sapiens
atagagttctcacca

SEQ ID NO: 1805511 - DNA, 15 bp, Homo sapiens
tagagttctcaccat

SEQ ID NO: 1805512 - DNA, 15 bp, Homo sapiens
agagttctcaccata

SEQ ID NO: 1805513 - DNA, 15 bp, Homo sapiens
gagttctcaccatat

SEQ ID NO: 1805514 - DNA, 15 bp, Homo sapiens
agttctcaccatatg

SEQ ID NO: 1805515 - DNA, 15 bp, Homo sapiens
gttctcaccatatgg

SEQ ID NO: 1805516 - DNA, 15 bp, Homo sapiens
ttctcaccatatgga

SEQ ID NO: 1805517 - DNA, 15 bp, Homo sapiens
tctcaccatatggac

SEQ ID NO: 1805518 - DNA, 15 bp, Homo sapiens
ctcaccatatggaca

SEQ ID NO: 1805519 - DNA, 15 bp, Homo sapiens
tcaccatatggacag

SEQ ID NO: 1805520 - DNA, 15 bp, Homo sapiens
caccatatggacaga

SEQ ID NO: 1805521 - DNA, 15 bp, Homo sapiens
accatatggacagaa

SEQ ID NO: 1805522 - DNA, 15 bp, Homo sapiens
ccatatggacagaac

SEQ ID NO: 1805523 - DNA, 15 bp, Homo sapiens
catatggacagaact

SEQ ID NO: 1805524 - DNA, 15 bp, Homo sapiens
atatggacagaactc

SEQ ID NO: 1805525 - DNA, 15 bp, Homo sapiens
tatggacagaactct

SEQ ID NO: 1805526 - DNA, 15 bp, Homo sapiens
atggacagaactctc

SEQ ID NO: 1805527 - DNA, 15 bp, Homo sapiens
ctctcactatctggt

SEQ ID NO: 1805528 - DNA, 15 bp, Homo sapiens
tctcactatctggtt

SEQ ID NO: 1805529 - DNA, 15 bp, Homo sapiens
ctcactatctggtta

SEQ ID NO: 1805530 - DNA, 15 bp, Homo sapiens
tcactatctggttag

SEQ ID NO: 1805531 - DNA, 15 bp, Homo sapiens
cactatctggttaga

SEQ ID NO: 1805532 - DNA, 15 bp, Homo sapiens
actatctggttagaa

SEQ ID NO: 1805533 - DNA, 15 bp, Homo sapiens
ctatctggttagaat

SEQ ID NO: 1805534 - DNA, 15 bp, Homo sapiens
tatctggttagaatt

SEQ ID NO: 1805535 - DNA, 15 bp, Homo sapiens
atctggttagaattc

SEQ ID NO: 1805536 - DNA, 15 bp, Homo sapiens
tctggttagaattct

SEQ ID NO: 1805537 - DNA, 15 bp, Homo sapiens
ctggttagaattctc

SEQ ID NO: 1805538 - DNA, 15 bp, Homo sapiens
tggttagaattctca

SEQ ID NO: 1805539 - DNA, 15 bp, Homo sapiens
ggttagaattctcac

SEQ ID NO: 1805540 - DNA, 15 bp, Homo sapiens
gttagaattctcact

SEQ ID NO: 1805541 - DNA, 15 bp, Homo sapiens
ttagaattctcactc

SEQ ID NO: 1805542 - DNA, 15 bp, Homo sapiens
ctgtctggatagaaa

SEQ ID NO: 1805543 - DNA, 15 bp, Homo sapiens
tgtctggatagaaat

SEQ ID NO: 1805544 - DNA, 15 bp, Homo sapiens
gtctggatagaaatc

SEQ ID NO: 1805545 - DNA, 15 bp, Homo sapiens
gatagaaatctcacc

SEQ ID NO: 1805546 - DNA, 15 bp, Homo sapiens
atagaaatctcacca

SEQ ID NO: 1805547 - DNA, 15 bp, Homo sapiens
tagaaatctcaccat

SEQ ID NO: 1805548 - DNA, 15 bp, Homo sapiens
agaaatctcaccatc

SEQ ID NO: 1805549 - DNA, 15 bp, Homo sapiens
gaaatctcaccatct

SEQ ID NO: 1805550 - DNA, 15 bp, Homo sapiens
aaatctcaccatctg

SEQ ID NO: 1805551 - DNA, 15 bp, Homo sapiens
aatctcaccatctga

SEQ ID NO: 1805552 - DNA, 15 bp, Homo sapiens
atctcaccatctgaa

SEQ ID NO: 1805553 - DNA, 15 bp, Homo sapiens
tctcaccatctgaat

SEQ ID NO: 1805554 - DNA, 15 bp, Homo sapiens
ctcaccatctgaatt

SEQ ID NO: 1805555 - DNA, 15 bp, Homo sapiens
tcaccatctgaattg

SEQ ID NO: 1805556 - DNA, 15 bp, Homo sapiens
caccatctgaattga

SEQ ID NO: 1805557 - DNA, 15 bp, Homo sapiens
accatctgaattgaa

SEQ ID NO: 1805558 - DNA, 15 bp, Homo sapiens
ccatctgaattgaac

SEQ ID NO: 1805559 - DNA, 15 bp, Homo sapiens
catctgaattgaact

SEQ ID NO: 1805560 - DNA, 15 bp, Homo sapiens
atctgaattgaactc

SEQ ID NO: 1805561 - DNA, 15 bp, Homo sapiens
tctgaattgaactct

SEQ ID NO: 1805562 - DNA, 15 bp, Homo sapiens
ctgaattgaactctc

SEQ ID NO: 1805563 - DNA, 15 bp, Homo sapiens
tgaattgaactctca

SEQ ID NO: 1805564 - DNA, 15 bp, Homo sapiens
gaattgaactctcac

SEQ ID NO: 1805565 - DNA, 15 bp, Homo sapiens
aattgaactctcact

SEQ ID NO: 1805566 - DNA, 15 bp, Homo sapiens
attgaactctcacta

SEQ ID NO: 1805567 - DNA, 15 bp, Homo sapiens
ttgaactctcactaa

SEQ ID NO: 1805568 - DNA, 15 bp, Homo sapiens
tgaactctcactaac

SEQ ID NO: 1805569 - DNA, 15 bp, Homo sapiens
gaactctcactaact

SEQ ID NO: 1805570 - DNA, 15 bp, Homo sapiens
actctcactaactgg

SEQ ID NO: 1805571 - DNA, 15 bp, Homo sapiens
ctctcactaactgga

SEQ ID NO: 1805572 - DNA, 15 bp, Homo sapiens
tctcactaactggat

SEQ ID NO: 1805573 - DNA, 15 bp, Homo sapiens
ctcactaactggata

SEQ ID NO: 1805574 - DNA, 15 bp, Homo sapiens
tcactaactggatag

SEQ ID NO: 1805575 - DNA, 15 bp, Homo sapiens
cactaactggataga

SEQ ID NO: 1805576 - DNA, 15 bp, Homo sapiens
actaactggatagaa

SEQ ID NO: 1805577 - DNA, 15 bp, Homo sapiens
ctaactggatagaat

SEQ ID NO: 1805578 - DNA, 15 bp, Homo sapiens
aactggatagaattc

SEQ ID NO: 1805579 - DNA, 15 bp, Homo sapiens
actggatagaattct

SEQ ID NO: 1805580 - DNA, 15 bp, Homo sapiens
ggatagaattcttat

SEQ ID NO: 1805581 - DNA, 15 bp, Homo sapiens
gatagaattcttatt

SEQ ID NO: 1805582 - DNA, 15 bp, Homo sapiens
atagaattcttattc

SEQ ID NO: 1805583 - DNA, 15 bp, Homo sapiens
tagaattcttattct

SEQ ID NO: 1805584 - DNA, 15 bp, Homo sapiens
agaattcttattctc

SEQ ID NO: 1805585 - DNA, 15 bp, Homo sapiens
gaattcttattctct

SEQ ID NO: 1805586 - DNA, 15 bp, Homo sapiens
aattcttattctctg

SEQ ID NO: 1805587 - DNA, 15 bp, Homo sapiens
attcttattctctgg

SEQ ID NO: 1805588 - DNA, 15 bp, Homo sapiens
ttcttattctctgga

SEQ ID NO: 1805589 - DNA, 15 bp, Homo sapiens
tcttattctctggat

SEQ ID NO: 1805590 - DNA, 15 bp, Homo sapiens
cttattctctggata

SEQ ID NO: 1805591 - DNA, 15 bp, Homo sapiens
ttattctctggataa

SEQ ID NO: 1805592 - DNA, 15 bp, Homo sapiens
tattctctggataaa

SEQ ID NO: 1805593 - DNA, 15 bp, Homo sapiens
attctctggataaaa

SEQ ID NO: 1805594 - DNA, 15 bp, Homo sapiens
ttctctggataaaac

SEQ ID NO: 1805595 - DNA, 15 bp, Homo sapiens
tctcactatctttct

SEQ ID NO: 1805596 - DNA, 15 bp, Homo sapiens
ctcactatctttctt

SEQ ID NO: 1805597 - DNA, 15 bp, Homo sapiens
tcactatctttcttg

SEQ ID NO: 1805598 - DNA, 15 bp, Homo sapiens
cactatctttcttga

SEQ ID NO: 1805599 - DNA, 15 bp, Homo sapiens
actatctttcttgat

SEQ ID NO: 1805600 - DNA, 15 bp, Homo sapiens
ctatctttcttgata

SEQ ID NO: 1805601 - DNA, 15 bp, Homo sapiens
tatctttcttgatag

SEQ ID NO: 1805602 - DNA, 15 bp, Homo sapiens
atctttcttgataga

SEQ ID NO: 1805603 - DNA, 15 bp, Homo sapiens
tctttcttgatagaa

SEQ ID NO: 1805604 - DNA, 15 bp, Homo sapiens
ctttcttgatagaac

SEQ ID NO: 1805605 - DNA, 15 bp, Homo sapiens
tttcttgatagaact

SEQ ID NO: 1805606 - DNA, 15 bp, Homo sapiens
ttcttgatagaactc

SEQ ID NO: 1805607 - DNA, 15 bp, Homo sapiens
tcttgatagaactct

SEQ ID NO: 1805608 - DNA, 15 bp, Homo sapiens
cttgatagaactctt

SEQ ID NO: 1805609 - DNA, 15 bp, Homo sapiens
ttgatagaactctta

SEQ ID NO: 1805610 - DNA, 15 bp, Homo sapiens
tgatagaactcttac

SEQ ID NO: 1805611 - DNA, 15 bp, Homo sapiens
tagaactcttactaa

SEQ ID NO: 1805612 - DNA, 15 bp, Homo sapiens
agaactcttactaac

SEQ ID NO: 1805613 - DNA, 15 bp, Homo sapiens
gaactcttactaact

SEQ ID NO: 1805614 - DNA, 15 bp, Homo sapiens
aactcttactaactg

SEQ ID NO: 1805615 - DNA, 15 bp, Homo sapiens
actcttactaactgg

SEQ ID NO: 1805616 - DNA, 15 bp, Homo sapiens
ctcttactaactggg

SEQ ID NO: 1805617 - DNA, 15 bp, Homo sapiens
tcttactaactggga

SEQ ID NO: 1805618 - DNA, 15 bp, Homo sapiens
cttactaactgggag

SEQ ID NO: 1805619 - DNA, 15 bp, Homo sapiens
ttactaactgggagg

SEQ ID NO: 1805620 - DNA, 15 bp, Homo sapiens
tactaactgggagga

SEQ ID NO: 1805621 - DNA, 15 bp, Homo sapiens
actaactgggaggaa

SEQ ID NO: 1805622 - DNA, 15 bp, Homo sapiens
ctaactgggaggaac

SEQ ID NO: 1805623 - DNA, 15 bp, Homo sapiens
taactgggaggaact

SEQ ID NO: 1805624 - DNA, 15 bp, Homo sapiens
aactgggaggaactc

SEQ ID NO: 1805625 - DNA, 15 bp, Homo sapiens
actgggaggaactct

SEQ ID NO: 1805626 - DNA, 15 bp, Homo sapiens
ctgggaggaactctc

SEQ ID NO: 1805627 - DNA, 15 bp, Homo sapiens
tgggaggaactctca

SEQ ID NO: 1805628 - DNA, 15 bp, Homo sapiens
gggaggaactctcac

SEQ ID NO: 1805629 - DNA, 15 bp, Homo sapiens
ggaggaactctcact

SEQ ID NO: 1805630 - DNA, 15 bp, Homo sapiens
gaggaactctcacta

SEQ ID NO: 1805631 - DNA, 15 bp, Homo sapiens
aggaactctcactat

SEQ ID NO: 1805632 - DNA, 15 bp, Homo sapiens
ggaactctcactatc

SEQ ID NO: 1805633 - DNA, 15 bp, Homo sapiens
ggatagaattctctg

SEQ ID NO: 1805634 - DNA, 15 bp, Homo sapiens
gatagaattctctgt

SEQ ID NO: 1805635 - DNA, 15 bp, Homo sapiens
atagaattctctgtc

SEQ ID NO: 1805636 - DNA, 15 bp, Homo sapiens
tagaattctctgtct

SEQ ID NO: 1805637 - DNA, 15 bp, Homo sapiens
agaattctctgtctc

SEQ ID NO: 1805638 - DNA, 15 bp, Homo sapiens
gaattctctgtctct

SEQ ID NO: 1805639 - DNA, 15 bp, Homo sapiens
aattctctgtctctg

SEQ ID NO: 1805640 - DNA, 15 bp, Homo sapiens
attctctgtctctgg

SEQ ID NO: 1805641 - DNA, 15 bp, Homo sapiens
ttctctgtctctgga

SEQ ID NO: 1805642 - DNA, 15 bp, Homo sapiens
tctctgtctctggat

SEQ ID NO: 1805643 - DNA, 15 bp, Homo sapiens
ctctgtctctggata

SEQ ID NO: 1805644 - DNA, 15 bp, Homo sapiens
tctgtctctggatag

SEQ ID NO: 1805645 - DNA, 15 bp, Homo sapiens
ctgtctctggataga

SEQ ID NO: 1805646 - DNA, 15 bp, Homo sapiens
tgtctctggatagaa

SEQ ID NO: 1805647 - DNA, 15 bp, Homo sapiens
gtctctggatagaac

SEQ ID NO: 1805648 - DNA, 15 bp, Homo sapiens
agaactctcactata

SEQ ID NO: 1805649 - DNA, 15 bp, Homo sapiens
gaactctcactatat

SEQ ID NO: 1805650 - DNA, 15 bp, Homo sapiens
aactctcactatata

SEQ ID NO: 1805651 - DNA, 15 bp, Homo sapiens
actctcactatatat

SEQ ID NO: 1805652 - DNA, 15 bp, Homo sapiens
ctctcactatatatc

SEQ ID NO: 1805653 - DNA, 15 bp, Homo sapiens
tctcactatatatct

SEQ ID NO: 1805654 - DNA, 15 bp, Homo sapiens
ctcactatatatctg

SEQ ID NO: 1805655 - DNA, 15 bp, Homo sapiens
tcactatatatctgg

SEQ ID NO: 1805656 - DNA, 15 bp, Homo sapiens
cactatatatctgga

SEQ ID NO: 1805657 - DNA, 15 bp, Homo sapiens
actatatatctggac

SEQ ID NO: 1805658 - DNA, 15 bp, Homo sapiens
ctatatatctggaca

SEQ ID NO: 1805659 - DNA, 15 bp, Homo sapiens
tatatatctggacag

SEQ ID NO: 1805660 - DNA, 15 bp, Homo sapiens
atatatctggacaga

SEQ ID NO: 1805661 - DNA, 15 bp, Homo sapiens
tatatctggacagaa

SEQ ID NO: 1805662 - DNA, 15 bp, Homo sapiens
atatctggacagaac

SEQ ID NO: 1805663 - DNA, 15 bp, Homo sapiens
tatctggacagaact

SEQ ID NO: 1805664 - DNA, 15 bp, Homo sapiens
gacagaactctcaca

SEQ ID NO: 1805665 - DNA, 15 bp, Homo sapiens
acagaactctcacaa

SEQ ID NO: 1805666 - DNA, 15 bp, Homo sapiens
cagaactctcacaat

SEQ ID NO: 1805667 - DNA, 15 bp, Homo sapiens
atctggatagaattg

SEQ ID NO: 1805668 - DNA, 15 bp, Homo sapiens
tctggatagaattgt

SEQ ID NO: 1805669 - DNA, 15 bp, Homo sapiens
ctggatagaattgtc

SEQ ID NO: 1805670 - DNA, 15 bp, Homo sapiens
tggatagaattgtca

SEQ ID NO: 1805671 - DNA, 15 bp, Homo sapiens
ggatagaattgtcat

SEQ ID NO: 1805672 - DNA, 15 bp, Homo sapiens
gatagaattgtcatt

SEQ ID NO: 1805673 - DNA, 15 bp, Homo sapiens
atagaattgtcattc

SEQ ID NO: 1805674 - DNA, 15 bp, Homo sapiens
tagaattgtcattct

SEQ ID NO: 1805675 - DNA, 15 bp, Homo sapiens
agaattgtcattctc

SEQ ID NO: 1805676 - DNA, 15 bp, Homo sapiens
gaattgtcattctct

SEQ ID NO: 1805677 - DNA, 15 bp, Homo sapiens
aattgtcattctctg

SEQ ID NO: 1805678 - DNA, 15 bp, Homo sapiens
attgtcattctctga

SEQ ID NO: 1805679 - DNA, 15 bp, Homo sapiens
ttgtcattctctgaa

SEQ ID NO: 1805680 - DNA, 15 bp, Homo sapiens
tgtcattctctgaat

SEQ ID NO: 1805681 - DNA, 15 bp, Homo sapiens
gtcattctctgaata

SEQ ID NO: 1805682 - DNA, 15 bp, Homo sapiens
tcattctctgaatag

SEQ ID NO: 1805683 - DNA, 15 bp, Homo sapiens
cattctctgaatagt

SEQ ID NO: 1805684 - DNA, 15 bp, Homo sapiens
attctctgaatagta

SEQ ID NO: 1805685 - DNA, 15 bp, Homo sapiens
ttctctgaatagtac

SEQ ID NO: 1805686 - DNA, 15 bp, Homo sapiens
tctctgaatagtact

SEQ ID NO: 1805687 - DNA, 15 bp, Homo sapiens
ctctgaatagtactc

SEQ ID NO: 1805688 - DNA, 15 bp, Homo sapiens
tctgaatagtactct

SEQ ID NO: 1805689 - DNA, 15 bp, Homo sapiens
ctgaatagtactctc

SEQ ID NO: 1805690 - DNA, 15 bp, Homo sapiens
tgaatagtactctca

SEQ ID NO: 1805691 - DNA, 15 bp, Homo sapiens
gaatagtactctcac

SEQ ID NO: 1805692 - DNA, 15 bp, Homo sapiens
aatagtactctcact

SEQ ID NO: 1805693 - DNA, 15 bp, Homo sapiens
atagtactctcacta

SEQ ID NO: 1805694 - DNA, 15 bp, Homo sapiens
tagtactctcactat

SEQ ID NO: 1805695 - DNA, 15 bp, Homo sapiens
agtactctcactatc

SEQ ID NO: 1805696 - DNA, 15 bp, Homo sapiens
gtactctcactatct

SEQ ID NO: 1805697 - DNA, 15 bp, Homo sapiens
tactctcactatcta

SEQ ID NO: 1805698 - DNA, 15 bp, Homo sapiens
ctcactatctatctc

SEQ ID NO: 1805699 - DNA, 15 bp, Homo sapiens
tcactatctatctcg

SEQ ID NO: 1805700 - DNA, 15 bp, Homo sapiens
cactatctatctcga

SEQ ID NO: 1805701 - DNA, 15 bp, Homo sapiens
actatctatctcgat

SEQ ID NO: 1805702 - DNA, 15 bp, Homo sapiens
ctatctatctcgata

SEQ ID NO: 1805703 - DNA, 15 bp, Homo sapiens
tatctatctcgatag

SEQ ID NO: 1805704 - DNA, 15 bp, Homo sapiens
atctatctcgataga

SEQ ID NO: 1805705 - DNA, 15 bp, Homo sapiens
tctatctcgatagaa

SEQ ID NO: 1805706 - DNA, 15 bp, Homo sapiens
ctatctcgatagaat

SEQ ID NO: 1805707 - DNA, 15 bp, Homo sapiens
tatctcgatagaatt

SEQ ID NO: 1805708 - DNA, 15 bp, Homo sapiens
atctcgatagaattc

SEQ ID NO: 1805709 - DNA, 15 bp, Homo sapiens
tctcgatagaattct

SEQ ID NO: 1805710 - DNA, 15 bp, Homo sapiens
ctcgatagaattctc

SEQ ID NO: 1805711 - DNA, 15 bp, Homo sapiens
tcgatagaattctca

SEQ ID NO: 1805712 - DNA, 15 bp, Homo sapiens
cgatagaattctcac

SEQ ID NO: 1805713 - DNA, 15 bp, Homo sapiens
ctggatagaactcta

SEQ ID NO: 1805714 - DNA, 15 bp, Homo sapiens
tggatagaactctat

SEQ ID NO: 1805715 - DNA, 15 bp, Homo sapiens
ggatagaactctatc

SEQ ID NO: 1805716 - DNA, 15 bp, Homo sapiens
gatagaactctatct

SEQ ID NO: 1805717 - DNA, 15 bp, Homo sapiens
atagaactctatctg

SEQ ID NO: 1805718 - DNA, 15 bp, Homo sapiens
tagaactctatctgt

SEQ ID NO: 1805719 - DNA, 15 bp, Homo sapiens
agaactctatctgtc

SEQ ID NO: 1805720 - DNA, 15 bp, Homo sapiens
gaactctatctgtct

SEQ ID NO: 1805721 - DNA, 15 bp, Homo sapiens
aactctatctgtctg

SEQ ID NO: 1805722 - DNA, 15 bp, Homo sapiens
actctatctgtctgg

SEQ ID NO: 1805723 - DNA, 15 bp, Homo sapiens
ctctatctgtctgga

SEQ ID NO: 1805724 - DNA, 15 bp, Homo sapiens
tctatctgtctggat

SEQ ID NO: 1805725 - DNA, 15 bp, Homo sapiens
tctgtctggatagac

SEQ ID NO: 1805726 - DNA, 15 bp, Homo sapiens
ctgtctggatagact

SEQ ID NO: 1805727 - DNA, 15 bp, Homo sapiens
tgtctggatagacta

SEQ ID NO: 1805728 - DNA, 15 bp, Homo sapiens
gtctggatagactac

SEQ ID NO: 1805729 - DNA, 15 bp, Homo sapiens
tctggatagactact

SEQ ID NO: 1805730 - DNA, 15 bp, Homo sapiens
ctggatagactactc

SEQ ID NO: 1805731 - DNA, 15 bp, Homo sapiens
tggatagactactca

SEQ ID NO: 1805732 - DNA, 15 bp, Homo sapiens
ggatagactactcac

SEQ ID NO: 1805733 - DNA, 15 bp, Homo sapiens
gatagactactcacc

SEQ ID NO: 1805734 - DNA, 15 bp, Homo sapiens
atagactactcacca

SEQ ID NO: 1805735 - DNA, 15 bp, Homo sapiens
tagactactcaccat

SEQ ID NO: 1805736 - DNA, 15 bp, Homo sapiens
agactactcaccatt

SEQ ID NO: 1805737 - DNA, 15 bp, Homo sapiens
gactactcaccattt

SEQ ID NO: 1805738 - DNA, 15 bp, Homo sapiens
actactcaccatttg

SEQ ID NO: 1805739 - DNA, 15 bp, Homo sapiens
ctactcaccatttgg

SEQ ID NO: 1805740 - DNA, 15 bp, Homo sapiens
tactcaccatttgga

SEQ ID NO: 1805741 - DNA, 15 bp, Homo sapiens
actcaccatttggat

SEQ ID NO: 1805742 - DNA, 15 bp, Homo sapiens
ctcaccatttggata

SEQ ID NO: 1805743 - DNA, 15 bp, Homo sapiens
tcaccatttggatag

SEQ ID NO: 1805744 - DNA, 15 bp, Homo sapiens
caccatttggataga

SEQ ID NO: 1805745 - DNA, 15 bp, Homo sapiens
accatttggatagaa

SEQ ID NO: 1805746 - DNA, 15 bp, Homo sapiens
ccatttggatagaac

SEQ ID NO: 1805747 - DNA, 15 bp, Homo sapiens
catttggatagaact

SEQ ID NO: 1805748 - DNA, 15 bp, Homo sapiens
atttggatagaactc

SEQ ID NO: 1805749 - DNA, 15 bp, Homo sapiens
tttggatagaactct

SEQ ID NO: 1805750 - DNA, 15 bp, Homo sapiens
ttggatagaactcta

SEQ ID NO: 1805751 - DNA, 15 bp, Homo sapiens
ggatagaactctatt

SEQ ID NO: 1805752 - DNA, 15 bp, Homo sapiens
gatagaactctattt

SEQ ID NO: 1805753 - DNA, 15 bp, Homo sapiens
atagaactctatttt

SEQ ID NO: 1805754 - DNA, 15 bp, Homo sapiens
tagaactctattttt

SEQ ID NO: 1805755 - DNA, 15 bp, Homo sapiens
agaactctatttttc

SEQ ID NO: 1805756 - DNA, 15 bp, Homo sapiens
gaactctatttttct

SEQ ID NO: 1805757 - DNA, 15 bp, Homo sapiens
aactctatttttctg

SEQ ID NO: 1805758 - DNA, 15 bp, Homo sapiens
actctatttttctgt

SEQ ID NO: 1805759 - DNA, 15 bp, Homo sapiens
ctctatttttctgta

SEQ ID NO: 1805760 - DNA, 15 bp, Homo sapiens
tctatttttctgtat

SEQ ID NO: 1805761 - DNA, 15 bp, Homo sapiens
ctatttttctgtata

SEQ ID NO: 1805762 - DNA, 15 bp, Homo sapiens
tatttttctgtatag

SEQ ID NO: 1805763 - DNA, 15 bp, Homo sapiens
atttttctgtataga

SEQ ID NO: 1805764 - DNA, 15 bp, Homo sapiens
tttttctgtatagaa

SEQ ID NO: 1805765 - DNA, 15 bp, Homo sapiens
ttttctgtatagaac

SEQ ID NO: 1805766 - DNA, 15 bp, Homo sapiens
tttctgtatagaact

SEQ ID NO: 1805767 - DNA, 15 bp, Homo sapiens
ttctgtatagaactc

SEQ ID NO: 1805768 - DNA, 15 bp, Homo sapiens
tctgtatagaactct

SEQ ID NO: 1805769 - DNA, 15 bp, Homo sapiens
tctggatggaattcc

SEQ ID NO: 1805770 - DNA, 15 bp, Homo sapiens
ctggatggaattccc

SEQ ID NO: 1805771 - DNA, 15 bp, Homo sapiens
tggatggaattccca

SEQ ID NO: 1805772 - DNA, 15 bp, Homo sapiens
ggatggaattcccac

SEQ ID NO: 1805773 - DNA, 15 bp, Homo sapiens
gatggaattcccact

SEQ ID NO: 1805774 - DNA, 15 bp, Homo sapiens
atggaattcccactc

SEQ ID NO: 1805775 - DNA, 15 bp, Homo sapiens
tggaattcccactct

SEQ ID NO: 1805776 - DNA, 15 bp, Homo sapiens
ggaattcccactctc

SEQ ID NO: 1805777 - DNA, 15 bp, Homo sapiens
gaattcccactctct

SEQ ID NO: 1805778 - DNA, 15 bp, Homo sapiens
aattcccactctctg

SEQ ID NO: 1805779 - DNA, 15 bp, Homo sapiens
attcccactctctgg

SEQ ID NO: 1805780 - DNA, 15 bp, Homo sapiens
ttcccactctctgga

SEQ ID NO: 1805781 - DNA, 15 bp, Homo sapiens
tcccactctctggat

SEQ ID NO: 1805782 - DNA, 15 bp, Homo sapiens
cccactctctggata

SEQ ID NO: 1805783 - DNA, 15 bp, Homo sapiens
ccactctctggatag

SEQ ID NO: 1805784 - DNA, 15 bp, Homo sapiens
ctctggatagaactt

SEQ ID NO: 1805785 - DNA, 15 bp, Homo sapiens
tctggatagaacttt

SEQ ID NO: 1805786 - DNA, 15 bp, Homo sapiens
ctggatagaactttc

SEQ ID NO: 1805787 - DNA, 15 bp, Homo sapiens
tggatagaactttca

SEQ ID NO: 1805788 - DNA, 15 bp, Homo sapiens
ggatagaactttcac

SEQ ID NO: 1805789 - DNA, 15 bp, Homo sapiens
gatagaactttcact

SEQ ID NO: 1805790 - DNA, 15 bp, Homo sapiens
atagaactttcacta

SEQ ID NO: 1805791 - DNA, 15 bp, Homo sapiens
tagaactttcactac

SEQ ID NO: 1805792 - DNA, 15 bp, Homo sapiens
agaactttcactacc

SEQ ID NO: 1805793 - DNA, 15 bp, Homo sapiens
gaactttcactacct

SEQ ID NO: 1805794 - DNA, 15 bp, Homo sapiens
aactttcactacctg

SEQ ID NO: 1805795 - DNA, 15 bp, Homo sapiens
actttcactacctgt

SEQ ID NO: 1805796 - DNA, 15 bp, Homo sapiens
ctttcactacctgtc

SEQ ID NO: 1805797 - DNA, 15 bp, Homo sapiens
tttcactacctgtct

SEQ ID NO: 1805798 - DNA, 15 bp, Homo sapiens
ttcactacctgtctg

SEQ ID NO: 1805799 - DNA, 15 bp, Homo sapiens
tcactacctgtctgg

SEQ ID NO: 1805800 - DNA, 15 bp, Homo sapiens
cactacctgtctgga

SEQ ID NO: 1805801 - DNA, 15 bp, Homo sapiens
actacctgtctggat

SEQ ID NO: 1805802 - DNA, 15 bp, Homo sapiens
ctacctgtctggata

SEQ ID NO: 1805803 - DNA, 15 bp, Homo sapiens
tacctgtctggatag

SEQ ID NO: 1805804 - DNA, 15 bp, Homo sapiens
acctgtctggataga

SEQ ID NO: 1805805 - DNA, 15 bp, Homo sapiens
cctgtctggatagat

SEQ ID NO: 1805806 - DNA, 15 bp, Homo sapiens
ctgtctggatagatt

SEQ ID NO: 1805807 - DNA, 15 bp, Homo sapiens
tgtctggatagattt

SEQ ID NO: 1805808 - DNA, 15 bp, Homo sapiens
gtctggatagatttc

SEQ ID NO: 1805809 - DNA, 15 bp, Homo sapiens
tctggatagatttct

SEQ ID NO: 1805810 - DNA, 15 bp, Homo sapiens
ctggatagatttctc

SEQ ID NO: 1805811 - DNA, 15 bp, Homo sapiens
tggatagatttctca

SEQ ID NO: 1805812 - DNA, 15 bp, Homo sapiens
ggatagatttctcac

SEQ ID NO: 1805813 - DNA, 15 bp, Homo sapiens
gatagatttctcaca

SEQ ID NO: 1805814 - DNA, 15 bp, Homo sapiens
atagatttctcacac

SEQ ID NO: 1805815 - DNA, 15 bp, Homo sapiens
tagatttctcacact

SEQ ID NO: 1805816 - DNA, 15 bp, Homo sapiens
agatttctcacactc

SEQ ID NO: 1805817 - DNA, 15 bp, Homo sapiens
gatttctcacactct

SEQ ID NO: 1805818 - DNA, 15 bp, Homo sapiens
atttctcacactctg

SEQ ID NO: 1805819 - DNA, 15 bp, Homo sapiens
tttctcacactctgg

SEQ ID NO: 1805820 - DNA, 15 bp, Homo sapiens
ttctcacactctggt

SEQ ID NO: 1805821 - DNA, 15 bp, Homo sapiens
tctcacactctggtt

SEQ ID NO: 1805822 - DNA, 15 bp, Homo sapiens
ctcacactctggtta

SEQ ID NO: 1805823 - DNA, 15 bp, Homo sapiens
tcacactctggttag

SEQ ID NO: 1805824 - DNA, 15 bp, Homo sapiens
cacactctggttaga

SEQ ID NO: 1805825 - DNA, 15 bp, Homo sapiens
acactctggttagaa

SEQ ID NO: 1805826 - DNA, 15 bp, Homo sapiens
cactctggttagaac

SEQ ID NO: 1805827 - DNA, 15 bp, Homo sapiens
actctggttagaact

SEQ ID NO: 1805828 - DNA, 15 bp, Homo sapiens
ctctggttagaactc

SEQ ID NO: 1805829 - DNA, 15 bp, Homo sapiens
tctggttagaactct

SEQ ID NO: 1805830 - DNA, 15 bp, Homo sapiens
ctggttagaactctc

SEQ ID NO: 1805831 - DNA, 15 bp, Homo sapiens
tggttagaactctca

SEQ ID NO: 1805832 - DNA, 15 bp, Homo sapiens
ggttagaactctcac

SEQ ID NO: 1805833 - DNA, 15 bp, Homo sapiens
atagaattctcaccg

SEQ ID NO: 1805834 - DNA, 15 bp, Homo sapiens
tagaattctcaccgt

SEQ ID NO: 1805835 - DNA, 15 bp, Homo sapiens
agaattctcaccgtc

SEQ ID NO: 1805836 - DNA, 15 bp, Homo sapiens
gaattctcaccgtct

SEQ ID NO: 1805837 - DNA, 15 bp, Homo sapiens
aattctcaccgtctg

SEQ ID NO: 1805838 - DNA, 15 bp, Homo sapiens
attctcaccgtctgg

SEQ ID NO: 1805839 - DNA, 15 bp, Homo sapiens
ttctcaccgtctggg

SEQ ID NO: 1805840 - DNA, 15 bp, Homo sapiens
tctcaccgtctgggt

SEQ ID NO: 1805841 - DNA, 15 bp, Homo sapiens
ctcaccgtctgggta

SEQ ID NO: 1805842 - DNA, 15 bp, Homo sapiens
tcaccgtctgggtag

SEQ ID NO: 1805843 - DNA, 15 bp, Homo sapiens
caccgtctgggtaga

SEQ ID NO: 1805844 - DNA, 15 bp, Homo sapiens
accgtctgggtagaa

SEQ ID NO: 1805845 - DNA, 15 bp, Homo sapiens
ccgtctgggtagaac

SEQ ID NO: 1805846 - DNA, 15 bp, Homo sapiens
cgtctgggtagaact

SEQ ID NO: 1805847 - DNA, 15 bp, Homo sapiens
gtctgggtagaactc

SEQ ID NO: 1805848 - DNA, 15 bp, Homo sapiens
tgggtagaactctca

SEQ ID NO: 1805849 - DNA, 15 bp, Homo sapiens
gggtagaactctcac

SEQ ID NO: 1805850 - DNA, 15 bp, Homo sapiens
ggtagaactctcact

SEQ ID NO: 1805851 - DNA, 15 bp, Homo sapiens
gtagaactctcacta

SEQ ID NO: 1805852 - DNA, 15 bp, Homo sapiens
attctcactctggat

SEQ ID NO: 1805853 - DNA, 15 bp, Homo sapiens
ttctcactctggata

SEQ ID NO: 1805854 - DNA, 15 bp, Homo sapiens
tctcactctggatag

SEQ ID NO: 1805855 - DNA, 15 bp, Homo sapiens
ctcactctggataga

SEQ ID NO: 1805856 - DNA, 15 bp, Homo sapiens
tcactctggatagaa

SEQ ID NO: 1805857 - DNA, 15 bp, Homo sapiens
cactctggatagaac

SEQ ID NO: 1805858 - DNA, 15 bp, Homo sapiens
actctggatagaact

SEQ ID NO: 1805859 - DNA, 15 bp, Homo sapiens
ctggatagaactctg

SEQ ID NO: 1805860 - DNA, 15 bp, Homo sapiens
tggatagaactctga

SEQ ID NO: 1805861 - DNA, 15 bp, Homo sapiens
ggatagaactctgac

SEQ ID NO: 1805862 - DNA, 15 bp, Homo sapiens
gatagaactctgact

SEQ ID NO: 1805863 - DNA, 15 bp, Homo sapiens
atagaactctgacta

SEQ ID NO: 1805864 - DNA, 15 bp, Homo sapiens
aactctgactatcta

SEQ ID NO: 1805865 - DNA, 15 bp, Homo sapiens
actctgactatctat

SEQ ID NO: 1805866 - DNA, 15 bp, Homo sapiens
ctctgactatctatt

SEQ ID NO: 1805867 - DNA, 15 bp, Homo sapiens
tctgactatctattt

SEQ ID NO: 1805868 - DNA, 15 bp, Homo sapiens
ctgactatctatttc

SEQ ID NO: 1805869 - DNA, 15 bp, Homo sapiens
tgactatctatttca

SEQ ID NO: 1805870 - DNA, 15 bp, Homo sapiens
gactatctatttcaa

SEQ ID NO: 1805871 - DNA, 15 bp, Homo sapiens
actatctatttcaat

SEQ ID NO: 1805872 - DNA, 15 bp, Homo sapiens
ctatctatttcaata

SEQ ID NO: 1805873 - DNA, 15 bp, Homo sapiens
tatctatttcaatag

SEQ ID NO: 1805874 - DNA, 15 bp, Homo sapiens
atctatttcaataga

SEQ ID NO: 1805875 - DNA, 15 bp, Homo sapiens
tctatttcaatagaa

SEQ ID NO: 1805876 - DNA, 15 bp, Homo sapiens
ctatttcaatagaat

SEQ ID NO: 1805877 - DNA, 15 bp, Homo sapiens
tatttcaatagaatt

SEQ ID NO: 1805878 - DNA, 15 bp, Homo sapiens
atttcaatagaattc

SEQ ID NO: 1805879 - DNA, 15 bp, Homo sapiens
tttcaatagaattct

SEQ ID NO: 1805880 - DNA, 15 bp, Homo sapiens
ttcaatagaattctc

SEQ ID NO: 1805881 - DNA, 15 bp, Homo sapiens
tcaatagaattctca

SEQ ID NO: 1805882 - DNA, 15 bp, Homo sapiens
caatagaattctcac

SEQ ID NO: 1805883 - DNA, 15 bp, Homo sapiens
gatagaattctcaca

SEQ ID NO: 1805884 - DNA, 15 bp, Homo sapiens
gaattctcacactcc

SEQ ID NO: 1805885 - DNA, 15 bp, Homo sapiens
aattctcacactccg

SEQ ID NO: 1805886 - DNA, 15 bp, Homo sapiens
attctcacactccgg

SEQ ID NO: 1805887 - DNA, 15 bp, Homo sapiens
ttctcacactccgga

SEQ ID NO: 1805888 - DNA, 15 bp, Homo sapiens
tctcacactccggat

SEQ ID NO: 1805889 - DNA, 15 bp, Homo sapiens
ctcacactccggata

SEQ ID NO: 1805890 - DNA, 15 bp, Homo sapiens
tcacactccggatag

SEQ ID NO: 1805891 - DNA, 15 bp, Homo sapiens
cacactccggataga

SEQ ID NO: 1805892 - DNA, 15 bp, Homo sapiens
acactccggatagaa

SEQ ID NO: 1805893 - DNA, 15 bp, Homo sapiens
cactccggatagaac

SEQ ID NO: 1805894 - DNA, 15 bp, Homo sapiens
actccggatagaact

SEQ ID NO: 1805895 - DNA, 15 bp, Homo sapiens
ctccggatagaactc

SEQ ID NO: 1805896 - DNA, 15 bp, Homo sapiens
tccggatagaactct

SEQ ID NO: 1805897 - DNA, 15 bp, Homo sapiens
ccggatagaactctc

SEQ ID NO: 1805898 - DNA, 15 bp, Homo sapiens
cggatagaactctca

SEQ ID NO: 1805899 - DNA, 15 bp, Homo sapiens
ctcaatatctatcta

SEQ ID NO: 1805900 - DNA, 15 bp, Homo sapiens
tcaatatctatctag

SEQ ID NO: 1805901 - DNA, 15 bp, Homo sapiens
caatatctatctaga

SEQ ID NO: 1805902 - DNA, 15 bp, Homo sapiens
aatatctatctagat

SEQ ID NO: 1805903 - DNA, 15 bp, Homo sapiens
atatctatctagata

SEQ ID NO: 1805904 - DNA, 15 bp, Homo sapiens
ctatctagatagaac

SEQ ID NO: 1805905 - DNA, 15 bp, Homo sapiens
tatctagatagaact

SEQ ID NO: 1805906 - DNA, 15 bp, Homo sapiens
accctctggatacaa

SEQ ID NO: 1805907 - DNA, 15 bp, Homo sapiens
ccctctggatacaac

SEQ ID NO: 1805908 - DNA, 15 bp, Homo sapiens
cctctggatacaact

SEQ ID NO: 1805909 - DNA, 15 bp, Homo sapiens
ctctggatacaactc

SEQ ID NO: 1805910 - DNA, 15 bp, Homo sapiens
tctggatacaactct

SEQ ID NO: 1805911 - DNA, 15 bp, Homo sapiens
ctggatacaactctc

SEQ ID NO: 1805912 - DNA, 15 bp, Homo sapiens
tggatacaactctca

SEQ ID NO: 1805913 - DNA, 15 bp, Homo sapiens
ggatacaactctcac

SEQ ID NO: 1805914 - DNA, 15 bp, Homo sapiens
gatacaactctcact

SEQ ID NO: 1805915 - DNA, 15 bp, Homo sapiens
atacaactctcactg

SEQ ID NO: 1805916 - DNA, 15 bp, Homo sapiens
tacaactctcactgt

SEQ ID NO: 1805917 - DNA, 15 bp, Homo sapiens
acaactctcactgtc

SEQ ID NO: 1805918 - DNA, 15 bp, Homo sapiens
caactctcactgtct

SEQ ID NO: 1805919 - DNA, 15 bp, Homo sapiens
aactctcactgtcta

SEQ ID NO: 1805920 - DNA, 15 bp, Homo sapiens
actctcactgtctat

SEQ ID NO: 1805921 - DNA, 15 bp, Homo sapiens
ctctcactgtctatc

SEQ ID NO: 1805922 - DNA, 15 bp, Homo sapiens
tctcactgtctatct

SEQ ID NO: 1805923 - DNA, 15 bp, Homo sapiens
ctcactgtctatctg

SEQ ID NO: 1805924 - DNA, 15 bp, Homo sapiens
tcactgtctatctgg

SEQ ID NO: 1805925 - DNA, 15 bp, Homo sapiens
cactgtctatctgga

SEQ ID NO: 1805926 - DNA, 15 bp, Homo sapiens
ggatagaattcttag

SEQ ID NO: 1805927 - DNA, 15 bp, Homo sapiens
gatagaattcttagt

SEQ ID NO: 1805928 - DNA, 15 bp, Homo sapiens
atagaattcttagtc

SEQ ID NO: 1805929 - DNA, 15 bp, Homo sapiens
tagaattcttagtct

SEQ ID NO: 1805930 - DNA, 15 bp, Homo sapiens
agaattcttagtctc

SEQ ID NO: 1805931 - DNA, 15 bp, Homo sapiens
gaattcttagtctct

SEQ ID NO: 1805932 - DNA, 15 bp, Homo sapiens
aattcttagtctctg

SEQ ID NO: 1805933 - DNA, 15 bp, Homo sapiens
attcttagtctctgg

SEQ ID NO: 1805934 - DNA, 15 bp, Homo sapiens
ttcttagtctctgga

SEQ ID NO: 1805935 - DNA, 15 bp, Homo sapiens
tcttagtctctggat

SEQ ID NO: 1805936 - DNA, 15 bp, Homo sapiens
cttagtctctggata

SEQ ID NO: 1805937 - DNA, 15 bp, Homo sapiens
ttagtctctggatag

SEQ ID NO: 1805938 - DNA, 15 bp, Homo sapiens
tagtctctggataga

SEQ ID NO: 1805939 - DNA, 15 bp, Homo sapiens
agtctctggatagaa

SEQ ID NO: 1805940 - DNA, 15 bp, Homo sapiens
gtctctggatagaag

SEQ ID NO: 1805941 - DNA, 15 bp, Homo sapiens
agtctcactctctgt

SEQ ID NO: 1805942 - DNA, 15 bp, Homo sapiens
gtctcactctctgtc

SEQ ID NO: 1805943 - DNA, 15 bp, Homo sapiens
tctcactctctgtct

SEQ ID NO: 1805944 - DNA, 15 bp, Homo sapiens
ctcactctctgtctg

SEQ ID NO: 1805945 - DNA, 15 bp, Homo sapiens
tcactctctgtctgg

SEQ ID NO: 1805946 - DNA, 15 bp, Homo sapiens
cactctctgtctggc

SEQ ID NO: 1805947 - DNA, 15 bp, Homo sapiens
actctctgtctggct

SEQ ID NO: 1805948 - DNA, 15 bp, Homo sapiens
ctctctgtctggcta

SEQ ID NO: 1805949 - DNA, 15 bp, Homo sapiens
tctctgtctggctat

SEQ ID NO: 1805950 - DNA, 15 bp, Homo sapiens
ctctgtctggctata

SEQ ID NO: 1805951 - DNA, 15 bp, Homo sapiens
tctgtctggctataa

SEQ ID NO: 1805952 - DNA, 15 bp, Homo sapiens
ctgtctggctataat

SEQ ID NO: 1805953 - DNA, 15 bp, Homo sapiens
tgtctggctataatt

SEQ ID NO: 1805954 - DNA, 15 bp, Homo sapiens
gtctggctataattc

SEQ ID NO: 1805955 - DNA, 15 bp, Homo sapiens
tctggctataattct

SEQ ID NO: 1805956 - DNA, 15 bp, Homo sapiens
ctggctataattctc

SEQ ID NO: 1805957 - DNA, 15 bp, Homo sapiens
tggctataattctca

SEQ ID NO: 1805958 - DNA, 15 bp, Homo sapiens
ggctataattctcaa

SEQ ID NO: 1805959 - DNA, 15 bp, Homo sapiens
gctataattctcaaa

SEQ ID NO: 1805960 - DNA, 15 bp, Homo sapiens
ctataattctcaaaa

SEQ ID NO: 1805961 - DNA, 15 bp, Homo sapiens
tataattctcaaaat

SEQ ID NO: 1805962 - DNA, 15 bp, Homo sapiens
ataattctcaaaatc

SEQ ID NO: 1805963 - DNA, 15 bp, Homo sapiens
taattctcaaaatct

SEQ ID NO: 1805964 - DNA, 15 bp, Homo sapiens
aattctcaaaatctg

SEQ ID NO: 1805965 - DNA, 15 bp, Homo sapiens
attctcaaaatctgg

SEQ ID NO: 1805966 - DNA, 15 bp, Homo sapiens
ttctcaaaatctggg

SEQ ID NO: 1805967 - DNA, 15 bp, Homo sapiens
tctcaaaatctgggt

SEQ ID NO: 1805968 - DNA, 15 bp, Homo sapiens
ctcaaaatctgggtg

SEQ ID NO: 1805969 - DNA, 15 bp, Homo sapiens
tcaaaatctgggtgg

SEQ ID NO: 1805970 - DNA, 15 bp, Homo sapiens
caaaatctgggtgga

SEQ ID NO: 1805971 - DNA, 15 bp, Homo sapiens
aaaatctgggtggaa

SEQ ID NO: 1805972 - DNA, 15 bp, Homo sapiens
aaatctgggtggaac

SEQ ID NO: 1805973 - DNA, 15 bp, Homo sapiens
aatctgggtggaact

SEQ ID NO: 1805974 - DNA, 15 bp, Homo sapiens
atctgggtggaactc

SEQ ID NO: 1805975 - DNA, 15 bp, Homo sapiens
tctgggtggaactct

SEQ ID NO: 1805976 - DNA, 15 bp, Homo sapiens
ctgggtggaactctc

SEQ ID NO: 1805977 - DNA, 15 bp, Homo sapiens
tgggtggaactctca

SEQ ID NO: 1805978 - DNA, 15 bp, Homo sapiens
gggtggaactctcac

SEQ ID NO: 1805979 - DNA, 15 bp, Homo sapiens
ggtggaactctcact

SEQ ID NO: 1805980 - DNA, 15 bp, Homo sapiens
gtctggatagaactg

SEQ ID NO: 1805981 - DNA, 15 bp, Homo sapiens
tctggatagaactgt

SEQ ID NO: 1805982 - DNA, 15 bp, Homo sapiens
ctggatagaactgtc

SEQ ID NO: 1805983 - DNA, 15 bp, Homo sapiens
tggatagaactgtca

SEQ ID NO: 1805984 - DNA, 15 bp, Homo sapiens
ggatagaactgtcac

SEQ ID NO: 1805985 - DNA, 15 bp, Homo sapiens
gatagaactgtcact

SEQ ID NO: 1805986 - DNA, 15 bp, Homo sapiens
atagaactgtcactc

SEQ ID NO: 1805987 - DNA, 15 bp, Homo sapiens
tagaactgtcactct

SEQ ID NO: 1805988 - DNA, 15 bp, Homo sapiens
agaactgtcactctc

SEQ ID NO: 1805989 - DNA, 15 bp, Homo sapiens
gaactgtcactctca

SEQ ID NO: 1805990 - DNA, 15 bp, Homo sapiens
aactgtcactctcag

SEQ ID NO: 1805991 - DNA, 15 bp, Homo sapiens
actgtcactctcaga

SEQ ID NO: 1805992 - DNA, 15 bp, Homo sapiens
ctgtcactctcagaa

SEQ ID NO: 1805993 - DNA, 15 bp, Homo sapiens
tgtcactctcagaac

SEQ ID NO: 1805994 - DNA, 15 bp, Homo sapiens
gtcactctcagaact

SEQ ID NO: 1805995 - DNA, 15 bp, Homo sapiens
tcactctcagaactt

SEQ ID NO: 1805996 - DNA, 15 bp, Homo sapiens
cactctcagaacttt

SEQ ID NO: 1805997 - DNA, 15 bp, Homo sapiens
actctcagaactttc

SEQ ID NO: 1805998 - DNA, 15 bp, Homo sapiens
ctctcagaactttct

SEQ ID NO: 1805999 - DNA, 15 bp, Homo sapiens
tctcagaactttctg

SEQ ID NO: 1806000 - DNA, 15 bp, Homo sapiens
ctcagaactttctgg

SEQ ID NO: 1806001 - DNA, 15 bp, Homo sapiens
tcagaactttctgga

SEQ ID NO: 1806002 - DNA, 15 bp, Homo sapiens
cagaactttctggat

SEQ ID NO: 1806003 - DNA, 15 bp, Homo sapiens
agaactttctggata

SEQ ID NO: 1806004 - DNA, 15 bp, Homo sapiens
gaactttctggatag

SEQ ID NO: 1806005 - DNA, 15 bp, Homo sapiens
aactttctggataga

SEQ ID NO: 1806006 - DNA, 15 bp, Homo sapiens
atagaattctcactg

SEQ ID NO: 1806007 - DNA, 15 bp, Homo sapiens
tagaattctcactgt

SEQ ID NO: 1806008 - DNA, 15 bp, Homo sapiens
agaattctcactgtc

SEQ ID NO: 1806009 - DNA, 15 bp, Homo sapiens
gaattctcactgtct

SEQ ID NO: 1806010 - DNA, 15 bp, Homo sapiens
aattctcactgtctg

SEQ ID NO: 1806011 - DNA, 15 bp, Homo sapiens
attctcactgtctgg

SEQ ID NO: 1806012 - DNA, 15 bp, Homo sapiens
ttctcactgtctgga

SEQ ID NO: 1806013 - DNA, 15 bp, Homo sapiens
tcactgtctggatag

SEQ ID NO: 1806014 - DNA, 15 bp, Homo sapiens
cactgtctggataga

SEQ ID NO: 1806015 - DNA, 15 bp, Homo sapiens
tagaattctcaccaa

SEQ ID NO: 1806016 - DNA, 15 bp, Homo sapiens
agaattctcaccaaa

SEQ ID NO: 1806017 - DNA, 15 bp, Homo sapiens
gaattctcaccaaat

SEQ ID NO: 1806018 - DNA, 15 bp, Homo sapiens
aattctcaccaaatg

SEQ ID NO: 1806019 - DNA, 15 bp, Homo sapiens
attctcaccaaatgt

SEQ ID NO: 1806020 - DNA, 15 bp, Homo sapiens
ttctcaccaaatgtc

SEQ ID NO: 1806021 - DNA, 15 bp, Homo sapiens
tctcaccaaatgtct

SEQ ID NO: 1806022 - DNA, 15 bp, Homo sapiens
ctcaccaaatgtctg

SEQ ID NO: 1806023 - DNA, 15 bp, Homo sapiens
tcaccaaatgtctgg

SEQ ID NO: 1806024 - DNA, 15 bp, Homo sapiens
caccaaatgtctgga

SEQ ID NO: 1806025 - DNA, 15 bp, Homo sapiens
accaaatgtctggat

SEQ ID NO: 1806026 - DNA, 15 bp, Homo sapiens
ccaaatgtctggata

SEQ ID NO: 1806027 - DNA, 15 bp, Homo sapiens
caaatgtctggatag

SEQ ID NO: 1806028 - DNA, 15 bp, Homo sapiens
aaatgtctggataga

SEQ ID NO: 1806029 - DNA, 15 bp, Homo sapiens
aatgtctggatagaa

SEQ ID NO: 1806030 - DNA, 15 bp, Homo sapiens
atgtctggatagaat

SEQ ID NO: 1806031 - DNA, 15 bp, Homo sapiens
gaattctcactctgt

SEQ ID NO: 1806032 - DNA, 15 bp, Homo sapiens
aattctcactctgtg

SEQ ID NO: 1806033 - DNA, 15 bp, Homo sapiens
attctcactctgtgg

SEQ ID NO: 1806034 - DNA, 15 bp, Homo sapiens
ttctcactctgtgga

SEQ ID NO: 1806035 - DNA, 15 bp, Homo sapiens
tctcactctgtggat

SEQ ID NO: 1806036 - DNA, 15 bp, Homo sapiens
ctcactctgtggata

SEQ ID NO: 1806037 - DNA, 15 bp, Homo sapiens
tcactctgtggatag

SEQ ID NO: 1806038 - DNA, 15 bp, Homo sapiens
cactctgtggataga

SEQ ID NO: 1806039 - DNA, 15 bp, Homo sapiens
actctgtggatagaa

SEQ ID NO: 1806040 - DNA, 15 bp, Homo sapiens
ctctgtggatagaac

SEQ ID NO: 1806041 - DNA, 15 bp, Homo sapiens
tctgtggatagaact

SEQ ID NO: 1806042 - DNA, 15 bp, Homo sapiens
ctgtggatagaactc

SEQ ID NO: 1806043 - DNA, 15 bp, Homo sapiens
gtggatagaactctg

SEQ ID NO: 1806044 - DNA, 15 bp, Homo sapiens
atagaactctgactg

SEQ ID NO: 1806045 - DNA, 15 bp, Homo sapiens
tagaactctgactgt

SEQ ID NO: 1806046 - DNA, 15 bp, Homo sapiens
agaactctgactgtc

SEQ ID NO: 1806047 - DNA, 15 bp, Homo sapiens
gaactctgactgtct

SEQ ID NO: 1806048 - DNA, 15 bp, Homo sapiens
aactctgactgtcta

SEQ ID NO: 1806049 - DNA, 15 bp, Homo sapiens
actctgactgtctat

SEQ ID NO: 1806050 - DNA, 15 bp, Homo sapiens
ctctgactgtctatc

SEQ ID NO: 1806051 - DNA, 15 bp, Homo sapiens
tctgactgtctatct

SEQ ID NO: 1806052 - DNA, 15 bp, Homo sapiens
ctgactgtctatctg

SEQ ID NO: 1806053 - DNA, 15 bp, Homo sapiens
tgactgtctatctgg

SEQ ID NO: 1806054 - DNA, 15 bp, Homo sapiens
gactgtctatctgga

SEQ ID NO: 1806055 - DNA, 15 bp, Homo sapiens
atagaattctctccc

SEQ ID NO: 1806056 - DNA, 15 bp, Homo sapiens
tagaattctctccct

SEQ ID NO: 1806057 - DNA, 15 bp, Homo sapiens
agaattctctccctc

SEQ ID NO: 1806058 - DNA, 15 bp, Homo sapiens
attctctccctctgg

SEQ ID NO: 1806059 - DNA, 15 bp, Homo sapiens
ttctctccctctgga

SEQ ID NO: 1806060 - DNA, 15 bp, Homo sapiens
tctctccctctggat

SEQ ID NO: 1806061 - DNA, 15 bp, Homo sapiens
ctctccctctggata

SEQ ID NO: 1806062 - DNA, 15 bp, Homo sapiens
tctccctctggatac

SEQ ID NO: 1806063 - DNA, 15 bp, Homo sapiens
ctccctctggataca

SEQ ID NO: 1806064 - DNA, 15 bp, Homo sapiens
tccctctggatacaa

SEQ ID NO: 1806065 - DNA, 15 bp, Homo sapiens
atacaactctcacta

SEQ ID NO: 1806066 - DNA, 15 bp, Homo sapiens
tacaactctcactat

SEQ ID NO: 1806067 - DNA, 15 bp, Homo sapiens
acaactctcactatc

SEQ ID NO: 1806068 - DNA, 15 bp, Homo sapiens
caactctcactatct

SEQ ID NO: 1806069 - DNA, 15 bp, Homo sapiens
ttctcacactctgga

SEQ ID NO: 1806070 - DNA, 15 bp, Homo sapiens
tctcacactctggat

SEQ ID NO: 1806071 - DNA, 15 bp, Homo sapiens
ctcacactctggata

SEQ ID NO: 1806072 - DNA, 15 bp, Homo sapiens
tcacactctggatac

SEQ ID NO: 1806073 - DNA, 15 bp, Homo sapiens
cacactctggataca

SEQ ID NO: 1806074 - DNA, 15 bp, Homo sapiens
acactctggatacaa

SEQ ID NO: 1806075 - DNA, 15 bp, Homo sapiens
cactctggatacaac

SEQ ID NO: 1806076 - DNA, 15 bp, Homo sapiens
actctggatacaact

SEQ ID NO: 1806077 - DNA, 15 bp, Homo sapiens
atacaactctcactc

SEQ ID NO: 1806078 - DNA, 15 bp, Homo sapiens
tacaactctcactct

SEQ ID NO: 1806079 - DNA, 15 bp, Homo sapiens
acaactctcactctc

SEQ ID NO: 1806080 - DNA, 15 bp, Homo sapiens
caactctcactctct

SEQ ID NO: 1806081 - DNA, 15 bp, Homo sapiens
aactctcactctctg

SEQ ID NO: 1806082 - DNA, 15 bp, Homo sapiens
actctcactctctgt

SEQ ID NO: 1806083 - DNA, 15 bp, Homo sapiens
ctctcactctctgtc

SEQ ID NO: 1806084 - DNA, 15 bp, Homo sapiens
cactctctgtctgga

SEQ ID NO: 1806085 - DNA, 15 bp, Homo sapiens
actctctgtctggat

SEQ ID NO: 1806086 - DNA, 15 bp, Homo sapiens
ctctctgtctggata

SEQ ID NO: 1806087 - DNA, 15 bp, Homo sapiens
tctctgtctggatat

SEQ ID NO: 1806088 - DNA, 15 bp, Homo sapiens
ctctgtctggatata

SEQ ID NO: 1806089 - DNA, 15 bp, Homo sapiens
tctgtctggatataa

SEQ ID NO: 1806090 - DNA, 15 bp, Homo sapiens
ctgtctggatataat

SEQ ID NO: 1806091 - DNA, 15 bp, Homo sapiens
tgtctggatataatt

SEQ ID NO: 1806092 - DNA, 15 bp, Homo sapiens
gtctggatataattc

SEQ ID NO: 1806093 - DNA, 15 bp, Homo sapiens
gatataattctcacc

SEQ ID NO: 1806094 - DNA, 15 bp, Homo sapiens
atataattctcaccc

SEQ ID NO: 1806095 - DNA, 15 bp, Homo sapiens
tataattctcaccct

SEQ ID NO: 1806096 - DNA, 15 bp, Homo sapiens
ataattctcaccctc

SEQ ID NO: 1806097 - DNA, 15 bp, Homo sapiens
taattctcaccctct

SEQ ID NO: 1806098 - DNA, 15 bp, Homo sapiens
ccctctggatagaat

SEQ ID NO: 1806099 - DNA, 15 bp, Homo sapiens
cctctggatagaatt

SEQ ID NO: 1806100 - DNA, 15 bp, Homo sapiens
tggatagaattctcg

SEQ ID NO: 1806101 - DNA, 15 bp, Homo sapiens
ggatagaattctcgc

SEQ ID NO: 1806102 - DNA, 15 bp, Homo sapiens
gatagaattctcgcc

SEQ ID NO: 1806103 - DNA, 15 bp, Homo sapiens
atagaattctcgcca

SEQ ID NO: 1806104 - DNA, 15 bp, Homo sapiens
tagaattctcgccat

SEQ ID NO: 1806105 - DNA, 15 bp, Homo sapiens
agaattctcgccatc

SEQ ID NO: 1806106 - DNA, 15 bp, Homo sapiens
gaattctcgccatct

SEQ ID NO: 1806107 - DNA, 15 bp, Homo sapiens
aattctcgccatctg

SEQ ID NO: 1806108 - DNA, 15 bp, Homo sapiens
attctcgccatctgc

SEQ ID NO: 1806109 - DNA, 15 bp, Homo sapiens
ttctcgccatctgca

SEQ ID NO: 1806110 - DNA, 15 bp, Homo sapiens
tctcgccatctgcat

SEQ ID NO: 1806111 - DNA, 15 bp, Homo sapiens
ctcgccatctgcatg

SEQ ID NO: 1806112 - DNA, 15 bp, Homo sapiens
tcgccatctgcatgc

SEQ ID NO: 1806113 - DNA, 15 bp, Homo sapiens
cgccatctgcatgca

SEQ ID NO: 1806114 - DNA, 15 bp, Homo sapiens
gccatctgcatgcac

SEQ ID NO: 1806115 - DNA, 15 bp, Homo sapiens
ccatctgcatgcacg

SEQ ID NO: 1806116 - DNA, 15 bp, Homo sapiens
catctgcatgcacgg

SEQ ID NO: 1806117 - DNA, 15 bp, Homo sapiens
atctgcatgcacggg

SEQ ID NO: 1806118 - DNA, 15 bp, Homo sapiens
tctgcatgcacggga

SEQ ID NO: 1806119 - DNA, 15 bp, Homo sapiens
ctgcatgcacgggat

SEQ ID NO: 1806120 - DNA, 15 bp, Homo sapiens
tgcatgcacgggatt

SEQ ID NO: 1806121 - DNA, 15 bp, Homo sapiens
gcatgcacgggattc

SEQ ID NO: 1806122 - DNA, 15 bp, Homo sapiens
catgcacgggattct

SEQ ID NO: 1806123 - DNA, 15 bp, Homo sapiens
atgcacgggattcta

SEQ ID NO: 1806124 - DNA, 15 bp, Homo sapiens
tgcacgggattctaa

SEQ ID NO: 1806125 - DNA, 15 bp, Homo sapiens
gcacgggattctaac

SEQ ID NO: 1806126 - DNA, 15 bp, Homo sapiens
cacgggattctaact

SEQ ID NO: 1806127 - DNA, 15 bp, Homo sapiens
acgggattctaacta

SEQ ID NO: 1806128 - DNA, 15 bp, Homo sapiens
cgggattctaactat

SEQ ID NO: 1806129 - DNA, 15 bp, Homo sapiens
gggattctaactatc

SEQ ID NO: 1806130 - DNA, 15 bp, Homo sapiens
ggattctaactatct

SEQ ID NO: 1806131 - DNA, 15 bp, Homo sapiens
gattctaactatctg

SEQ ID NO: 1806132 - DNA, 15 bp, Homo sapiens
attctaactatctgt

SEQ ID NO: 1806133 - DNA, 15 bp, Homo sapiens
ttctaactatctgtc

SEQ ID NO: 1806134 - DNA, 15 bp, Homo sapiens
tctaactatctgtct

SEQ ID NO: 1806135 - DNA, 15 bp, Homo sapiens
ctaactatctgtcta

SEQ ID NO: 1806136 - DNA, 15 bp, Homo sapiens
taactatctgtctag

SEQ ID NO: 1806137 - DNA, 15 bp, Homo sapiens
aactatctgtctaga

SEQ ID NO: 1806138 - DNA, 15 bp, Homo sapiens
actatctgtctagat

SEQ ID NO: 1806139 - DNA, 15 bp, Homo sapiens
ctatctgtctagata

SEQ ID NO: 1806140 - DNA, 15 bp, Homo sapiens
tatctgtctagatag

SEQ ID NO: 1806141 - DNA, 15 bp, Homo sapiens
atctgtctagataga

SEQ ID NO: 1806142 - DNA, 15 bp, Homo sapiens
tctgtctagatagaa

SEQ ID NO: 1806143 - DNA, 15 bp, Homo sapiens
ctgtctagatagaat

SEQ ID NO: 1806144 - DNA, 15 bp, Homo sapiens
tgtctagatagaatt

SEQ ID NO: 1806145 - DNA, 15 bp, Homo sapiens
gtctagatagaattt

SEQ ID NO: 1806146 - DNA, 15 bp, Homo sapiens
tctagatagaatttt

SEQ ID NO: 1806147 - DNA, 15 bp, Homo sapiens
ctagatagaattttc

SEQ ID NO: 1806148 - DNA, 15 bp, Homo sapiens
tagatagaattttca

SEQ ID NO: 1806149 - DNA, 15 bp, Homo sapiens
agatagaattttcac

SEQ ID NO: 1806150 - DNA, 15 bp, Homo sapiens
caccatctggatagc

SEQ ID NO: 1806151 - DNA, 15 bp, Homo sapiens
accatctggatagcg

SEQ ID NO: 1806152 - DNA, 15 bp, Homo sapiens
ccatctggatagcgc

SEQ ID NO: 1806153 - DNA, 15 bp, Homo sapiens
catctggatagcgct

SEQ ID NO: 1806154 - DNA, 15 bp, Homo sapiens
atctggatagcgctc

SEQ ID NO: 1806155 - DNA, 15 bp, Homo sapiens
tctggatagcgctct

SEQ ID NO: 1806156 - DNA, 15 bp, Homo sapiens
ctggatagcgctctt

SEQ ID NO: 1806157 - DNA, 15 bp, Homo sapiens
tggatagcgctctta

SEQ ID NO: 1806158 - DNA, 15 bp, Homo sapiens
ggatagcgctcttac

SEQ ID NO: 1806159 - DNA, 15 bp, Homo sapiens
gatagcgctcttact

SEQ ID NO: 1806160 - DNA, 15 bp, Homo sapiens
atagcgctcttacta

SEQ ID NO: 1806161 - DNA, 15 bp, Homo sapiens
tagcgctcttactat

SEQ ID NO: 1806162 - DNA, 15 bp, Homo sapiens
agcgctcttactatc

SEQ ID NO: 1806163 - DNA, 15 bp, Homo sapiens
gcgctcttactatct

SEQ ID NO: 1806164 - DNA, 15 bp, Homo sapiens
cgctcttactatctg

SEQ ID NO: 1806165 - DNA, 15 bp, Homo sapiens
gctcttactatctgg

SEQ ID NO: 1806166 - DNA, 15 bp, Homo sapiens
ctcttactatctgga

SEQ ID NO: 1806167 - DNA, 15 bp, Homo sapiens
tcttactatctggat

SEQ ID NO: 1806168 - DNA, 15 bp, Homo sapiens
cttactatctggata

SEQ ID NO: 1806169 - DNA, 15 bp, Homo sapiens
ttactatctggatag

SEQ ID NO: 1806170 - DNA, 15 bp, Homo sapiens
tactatctggataga

SEQ ID NO: 1806171 - DNA, 15 bp, Homo sapiens
gaattctcactctgc

SEQ ID NO: 1806172 - DNA, 15 bp, Homo sapiens
aattctcactctgca

SEQ ID NO: 1806173 - DNA, 15 bp, Homo sapiens
attctcactctgcat

SEQ ID NO: 1806174 - DNA, 15 bp, Homo sapiens
ttctcactctgcata

SEQ ID NO: 1806175 - DNA, 15 bp, Homo sapiens
tctcactctgcatag

SEQ ID NO: 1806176 - DNA, 15 bp, Homo sapiens
ctcactctgcataga

SEQ ID NO: 1806177 - DNA, 15 bp, Homo sapiens
tcactctgcatagaa

SEQ ID NO: 1806178 - DNA, 15 bp, Homo sapiens
cactctgcatagaac

SEQ ID NO: 1806179 - DNA, 15 bp, Homo sapiens
actctgcatagaact

SEQ ID NO: 1806180 - DNA, 15 bp, Homo sapiens
ctctgcatagaactc

SEQ ID NO: 1806181 - DNA, 15 bp, Homo sapiens
tctgcatagaactct

SEQ ID NO: 1806182 - DNA, 15 bp, Homo sapiens
ctgcatagaactctc

SEQ ID NO: 1806183 - DNA, 15 bp, Homo sapiens
tgcatagaactctca

SEQ ID NO: 1806184 - DNA, 15 bp, Homo sapiens
gcatagaactctcac

SEQ ID NO: 1806185 - DNA, 15 bp, Homo sapiens
catagaactctcact

SEQ ID NO: 1806186 - DNA, 15 bp, Homo sapiens
tctatctggatagag

SEQ ID NO: 1806187 - DNA, 15 bp, Homo sapiens
ctatctggatagagc

SEQ ID NO: 1806188 - DNA, 15 bp, Homo sapiens
tatctggatagagct

SEQ ID NO: 1806189 - DNA, 15 bp, Homo sapiens
atctggatagagctc

SEQ ID NO: 1806190 - DNA, 15 bp, Homo sapiens
tctggatagagctct

SEQ ID NO: 1806191 - DNA, 15 bp, Homo sapiens
ctggatagagctctt

SEQ ID NO: 1806192 - DNA, 15 bp, Homo sapiens
tggatagagctctta

SEQ ID NO: 1806193 - DNA, 15 bp, Homo sapiens
ggatagagctcttac

SEQ ID NO: 1806194 - DNA, 15 bp, Homo sapiens
gatagagctcttact

SEQ ID NO: 1806195 - DNA, 15 bp, Homo sapiens
atagagctcttacta

SEQ ID NO: 1806196 - DNA, 15 bp, Homo sapiens
tagagctcttactat

SEQ ID NO: 1806197 - DNA, 15 bp, Homo sapiens
agagctcttactatc

SEQ ID NO: 1806198 - DNA, 15 bp, Homo sapiens
gagctcttactatct

SEQ ID NO: 1806199 - DNA, 15 bp, Homo sapiens
agctcttactatctg

SEQ ID NO: 1806200 - DNA, 15 bp, Homo sapiens
ctggatagatctctc

SEQ ID NO: 1806201 - DNA, 15 bp, Homo sapiens
tggatagatctctca

SEQ ID NO: 1806202 - DNA, 15 bp, Homo sapiens
ggatagatctctcac

SEQ ID NO: 1806203 - DNA, 15 bp, Homo sapiens
gatagatctctcact

SEQ ID NO: 1806204 - DNA, 15 bp, Homo sapiens
atagatctctcacta

SEQ ID NO: 1806205 - DNA, 15 bp, Homo sapiens
tagatctctcactat

SEQ ID NO: 1806206 - DNA, 15 bp, Homo sapiens
agatctctcactatt

SEQ ID NO: 1806207 - DNA, 15 bp, Homo sapiens
gatctctcactattt

SEQ ID NO: 1806208 - DNA, 15 bp, Homo sapiens
atctctcactatttg

SEQ ID NO: 1806209 - DNA, 15 bp, Homo sapiens
tctctcactatttgt

SEQ ID NO: 1806210 - DNA, 15 bp, Homo sapiens
actatttgtctggaa

SEQ ID NO: 1806211 - DNA, 15 bp, Homo sapiens
ctatttgtctggaaa

SEQ ID NO: 1806212 - DNA, 15 bp, Homo sapiens
tatttgtctggaaag

SEQ ID NO: 1806213 - DNA, 15 bp, Homo sapiens
atttgtctggaaaga

SEQ ID NO: 1806214 - DNA, 15 bp, Homo sapiens
tttgtctggaaagaa

SEQ ID NO: 1806215 - DNA, 15 bp, Homo sapiens
ttgtctggaaagaat

SEQ ID NO: 1806216 - DNA, 15 bp, Homo sapiens
tgtctggaaagaatt

SEQ ID NO: 1806217 - DNA, 15 bp, Homo sapiens
gtctggaaagaattc

SEQ ID NO: 1806218 - DNA, 15 bp, Homo sapiens
ggaaagaattctcac

SEQ ID NO: 1806219 - DNA, 15 bp, Homo sapiens
gaaagaattctcact

SEQ ID NO: 1806220 - DNA, 15 bp, Homo sapiens
aaagaattctcactc

SEQ ID NO: 1806221 - DNA, 15 bp, Homo sapiens
aagaattctcactct

SEQ ID NO: 1806222 - DNA, 15 bp, Homo sapiens
ctgtggatagaactg

SEQ ID NO: 1806223 - DNA, 15 bp, Homo sapiens
tgtggatagaactgt

SEQ ID NO: 1806224 - DNA, 15 bp, Homo sapiens
gtggatagaactgtc

SEQ ID NO: 1806225 - DNA, 15 bp, Homo sapiens
tggatagaactgtcg

SEQ ID NO: 1806226 - DNA, 15 bp, Homo sapiens
ggatagaactgtcgc

SEQ ID NO: 1806227 - DNA, 15 bp, Homo sapiens
gatagaactgtcgct

SEQ ID NO: 1806228 - DNA, 15 bp, Homo sapiens
atagaactgtcgcta

SEQ ID NO: 1806229 - DNA, 15 bp, Homo sapiens
tagaactgtcgctat

SEQ ID NO: 1806230 - DNA, 15 bp, Homo sapiens
agaactgtcgctatc

SEQ ID NO: 1806231 - DNA, 15 bp, Homo sapiens
gaactgtcgctatca

SEQ ID NO: 1806232 - DNA, 15 bp, Homo sapiens
aactgtcgctatcaa

SEQ ID NO: 1806233 - DNA, 15 bp, Homo sapiens
actgtcgctatcaat

SEQ ID NO: 1806234 - DNA, 15 bp, Homo sapiens
ctgtcgctatcaatc

SEQ ID NO: 1806235 - DNA, 15 bp, Homo sapiens
tgtcgctatcaatct

SEQ ID NO: 1806236 - DNA, 15 bp, Homo sapiens
gtcgctatcaatctg

SEQ ID NO: 1806237 - DNA, 15 bp, Homo sapiens
tcgctatcaatctgg

SEQ ID NO: 1806238 - DNA, 15 bp, Homo sapiens
cgctatcaatctgga

SEQ ID NO: 1806239 - DNA, 15 bp, Homo sapiens
gctatcaatctggat

SEQ ID NO: 1806240 - DNA, 15 bp, Homo sapiens
tatcaatctggatag

SEQ ID NO: 1806241 - DNA, 15 bp, Homo sapiens
atcaatctggataga

SEQ ID NO: 1806242 - DNA, 15 bp, Homo sapiens
tcaatctggatagaa

SEQ ID NO: 1806243 - DNA, 15 bp, Homo sapiens
tctcactatctagaa

SEQ ID NO: 1806244 - DNA, 15 bp, Homo sapiens
ctcactatctagaag

SEQ ID NO: 1806245 - DNA, 15 bp, Homo sapiens
tcactatctagaagg

SEQ ID NO: 1806246 - DNA, 15 bp, Homo sapiens
cactatctagaagga

SEQ ID NO: 1806247 - DNA, 15 bp, Homo sapiens
actatctagaaggat

SEQ ID NO: 1806248 - DNA, 15 bp, Homo sapiens
ctatctagaaggatt

SEQ ID NO: 1806249 - DNA, 15 bp, Homo sapiens
tatctagaaggattt

SEQ ID NO: 1806250 - DNA, 15 bp, Homo sapiens
atctagaaggatttc

SEQ ID NO: 1806251 - DNA, 15 bp, Homo sapiens
tctagaaggatttct

SEQ ID NO: 1806252 - DNA, 15 bp, Homo sapiens
ctagaaggatttctc

SEQ ID NO: 1806253 - DNA, 15 bp, Homo sapiens
tagaaggatttctca

SEQ ID NO: 1806254 - DNA, 15 bp, Homo sapiens
agaaggatttctcac

SEQ ID NO: 1806255 - DNA, 15 bp, Homo sapiens
gaaggatttctcacc

SEQ ID NO: 1806256 - DNA, 15 bp, Homo sapiens
aaggatttctcacca

SEQ ID NO: 1806257 - DNA, 15 bp, Homo sapiens
aggatttctcaccat

SEQ ID NO: 1806258 - DNA, 15 bp, Homo sapiens
ggatttctcaccatc

SEQ ID NO: 1806259 - DNA, 15 bp, Homo sapiens
gatttctcaccatcc

SEQ ID NO: 1806260 - DNA, 15 bp, Homo sapiens
atttctcaccatcca

SEQ ID NO: 1806261 - DNA, 15 bp, Homo sapiens
tttctcaccatccag

SEQ ID NO: 1806262 - DNA, 15 bp, Homo sapiens
ttctcaccatccaga

SEQ ID NO: 1806263 - DNA, 15 bp, Homo sapiens
tctcaccatccagat

SEQ ID NO: 1806264 - DNA, 15 bp, Homo sapiens
ctcaccatccagata

SEQ ID NO: 1806265 - DNA, 15 bp, Homo sapiens
tcaccatccagatag

SEQ ID NO: 1806266 - DNA, 15 bp, Homo sapiens
caccatccagataga

SEQ ID NO: 1806267 - DNA, 15 bp, Homo sapiens
accatccagatagaa

SEQ ID NO: 1806268 - DNA, 15 bp, Homo sapiens
ccatccagatagaac

SEQ ID NO: 1806269 - DNA, 15 bp, Homo sapiens
catccagatagaact

SEQ ID NO: 1806270 - DNA, 15 bp, Homo sapiens
atccagatagaactc

SEQ ID NO: 1806271 - DNA, 15 bp, Homo sapiens
tccagatagaactct

SEQ ID NO: 1806272 - DNA, 15 bp, Homo sapiens
ccagatagaactctc

SEQ ID NO: 1806273 - DNA, 15 bp, Homo sapiens
cagatagaactctca

SEQ ID NO: 1806274 - DNA, 15 bp, Homo sapiens
ctcactatctatctt

SEQ ID NO: 1806275 - DNA, 15 bp, Homo sapiens
tcactatctatcttg

SEQ ID NO: 1806276 - DNA, 15 bp, Homo sapiens
cactatctatcttga

SEQ ID NO: 1806277 - DNA, 15 bp, Homo sapiens
actatctatcttgat

SEQ ID NO: 1806278 - DNA, 15 bp, Homo sapiens
ctatctatcttgata

SEQ ID NO: 1806279 - DNA, 15 bp, Homo sapiens
tatctatcttgatag

SEQ ID NO: 1806280 - DNA, 15 bp, Homo sapiens
atctatcttgataga

SEQ ID NO: 1806281 - DNA, 15 bp, Homo sapiens
tctatcttgatagaa

SEQ ID NO: 1806282 - DNA, 15 bp, Homo sapiens
ctatcttgatagaat

SEQ ID NO: 1806283 - DNA, 15 bp, Homo sapiens
tatcttgatagaatt

SEQ ID NO: 1806284 - DNA, 15 bp, Homo sapiens
atcttgatagaattc

SEQ ID NO: 1806285 - DNA, 15 bp, Homo sapiens
tcttgatagaattct

SEQ ID NO: 1806286 - DNA, 15 bp, Homo sapiens
cttgatagaattctc

SEQ ID NO: 1806287 - DNA, 15 bp, Homo sapiens
ttgatagaattctca

SEQ ID NO: 1806288 - DNA, 15 bp, Homo sapiens
tgatagaattctcac

SEQ ID NO: 1806289 - DNA, 15 bp, Homo sapiens
caccctctggatagc

SEQ ID NO: 1806290 - DNA, 15 bp, Homo sapiens
accctctggatagca

SEQ ID NO: 1806291 - DNA, 15 bp, Homo sapiens
ccctctggatagcac

SEQ ID NO: 1806292 - DNA, 15 bp, Homo sapiens
cctctggatagcact

SEQ ID NO: 1806293 - DNA, 15 bp, Homo sapiens
ctctggatagcactc

SEQ ID NO: 1806294 - DNA, 15 bp, Homo sapiens
tctggatagcactct

SEQ ID NO: 1806295 - DNA, 15 bp, Homo sapiens
ctggatagcactctc

SEQ ID NO: 1806296 - DNA, 15 bp, Homo sapiens
tggatagcactctca

SEQ ID NO: 1806297 - DNA, 15 bp, Homo sapiens
ggatagcactctcac

SEQ ID NO: 1806298 - DNA, 15 bp, Homo sapiens
gatagcactctcact

SEQ ID NO: 1806299 - DNA, 15 bp, Homo sapiens
atagcactctcacta

SEQ ID NO: 1806300 - DNA, 15 bp, Homo sapiens
tagcactctcactat

SEQ ID NO: 1806301 - DNA, 15 bp, Homo sapiens
agcactctcactata

SEQ ID NO: 1806302 - DNA, 15 bp, Homo sapiens
gcactctcactatat

SEQ ID NO: 1806303 - DNA, 15 bp, Homo sapiens
cactctcactatata

SEQ ID NO: 1806304 - DNA, 15 bp, Homo sapiens
actatatatctggat

SEQ ID NO: 1806305 - DNA, 15 bp, Homo sapiens
ctatatatctggata

SEQ ID NO: 1806306 - DNA, 15 bp, Homo sapiens
gatagaattctcgct

SEQ ID NO: 1806307 - DNA, 15 bp, Homo sapiens
atagaattctcgctt

SEQ ID NO: 1806308 - DNA, 15 bp, Homo sapiens
tagaattctcgcttg

SEQ ID NO: 1806309 - DNA, 15 bp, Homo sapiens
agaattctcgcttgc

SEQ ID NO: 1806310 - DNA, 15 bp, Homo sapiens
gaattctcgcttgct

SEQ ID NO: 1806311 - DNA, 15 bp, Homo sapiens
aattctcgcttgctg

SEQ ID NO: 1806312 - DNA, 15 bp, Homo sapiens
attctcgcttgctgg

SEQ ID NO: 1806313 - DNA, 15 bp, Homo sapiens
ttctcgcttgctgga

SEQ ID NO: 1806314 - DNA, 15 bp, Homo sapiens
tctcgcttgctggat

SEQ ID NO: 1806315 - DNA, 15 bp, Homo sapiens
ctcgcttgctggata

SEQ ID NO: 1806316 - DNA, 15 bp, Homo sapiens
tcgcttgctggataa

SEQ ID NO: 1806317 - DNA, 15 bp, Homo sapiens
cgcttgctggataaa

SEQ ID NO: 1806318 - DNA, 15 bp, Homo sapiens
gcttgctggataaaa

SEQ ID NO: 1806319 - DNA, 15 bp, Homo sapiens
cttgctggataaaac

SEQ ID NO: 1806320 - DNA, 15 bp, Homo sapiens
ttgctggataaaact

SEQ ID NO: 1806321 - DNA, 15 bp, Homo sapiens
tgctggataaaactc

SEQ ID NO: 1806322 - DNA, 15 bp, Homo sapiens
gctggataaaactct

SEQ ID NO: 1806323 - DNA, 15 bp, Homo sapiens
aaactctcactatcc

SEQ ID NO: 1806324 - DNA, 15 bp, Homo sapiens
aactctcactatccg

SEQ ID NO: 1806325 - DNA, 15 bp, Homo sapiens
actctcactatccgt

SEQ ID NO: 1806326 - DNA, 15 bp, Homo sapiens
ctctcactatccgtc

SEQ ID NO: 1806327 - DNA, 15 bp, Homo sapiens
tctcactatccgtct

SEQ ID NO: 1806328 - DNA, 15 bp, Homo sapiens
ctcactatccgtctg

SEQ ID NO: 1806329 - DNA, 15 bp, Homo sapiens
tcactatccgtctgg

SEQ ID NO: 1806330 - DNA, 15 bp, Homo sapiens
cactatccgtctgga

SEQ ID NO: 1806331 - DNA, 15 bp, Homo sapiens
actatccgtctggat

SEQ ID NO: 1806332 - DNA, 15 bp, Homo sapiens
ctatccgtctggata

SEQ ID NO: 1806333 - DNA, 15 bp, Homo sapiens
tatccgtctggatag

SEQ ID NO: 1806334 - DNA, 15 bp, Homo sapiens
atccgtctggataga

SEQ ID NO: 1806335 - DNA, 15 bp, Homo sapiens
tccgtctggatagaa

SEQ ID NO: 1806336 - DNA, 15 bp, Homo sapiens
ccgtctggatagaat

SEQ ID NO: 1806337 - DNA, 15 bp, Homo sapiens
cgtctggatagaatt

SEQ ID NO: 1806338 - DNA, 15 bp, Homo sapiens
ttctcaccatctagt

SEQ ID NO: 1806339 - DNA, 15 bp, Homo sapiens
tctcaccatctagtt

SEQ ID NO: 1806340 - DNA, 15 bp, Homo sapiens
ctcaccatctagtta

SEQ ID NO: 1806341 - DNA, 15 bp, Homo sapiens
tcaccatctagttag

SEQ ID NO: 1806342 - DNA, 15 bp, Homo sapiens
caccatctagttaga

SEQ ID NO: 1806343 - DNA, 15 bp, Homo sapiens
accatctagttagaa

SEQ ID NO: 1806344 - DNA, 15 bp, Homo sapiens
ccatctagttagaac

SEQ ID NO: 1806345 - DNA, 15 bp, Homo sapiens
catctagttagaact

SEQ ID NO: 1806346 - DNA, 15 bp, Homo sapiens
atctagttagaactt

SEQ ID NO: 1806347 - DNA, 15 bp, Homo sapiens
tctagttagaacttt

SEQ ID NO: 1806348 - DNA, 15 bp, Homo sapiens
ctagttagaactttc

SEQ ID NO: 1806349 - DNA, 15 bp, Homo sapiens
tagttagaactttca

SEQ ID NO: 1806350 - DNA, 15 bp, Homo sapiens
agttagaactttcac

SEQ ID NO: 1806351 - DNA, 15 bp, Homo sapiens
gttagaactttcact

SEQ ID NO: 1806352 - DNA, 15 bp, Homo sapiens
ttagaactttcacta

SEQ ID NO: 1806353 - DNA, 15 bp, Homo sapiens
tagaactttcactat

SEQ ID NO: 1806354 - DNA, 15 bp, Homo sapiens
agaactttcactatc

SEQ ID NO: 1806355 - DNA, 15 bp, Homo sapiens
gaactttcactatct

SEQ ID NO: 1806356 - DNA, 15 bp, Homo sapiens
aactttcactatctg

SEQ ID NO: 1806357 - DNA, 15 bp, Homo sapiens
actttcactatctgg

SEQ ID NO: 1806358 - DNA, 15 bp, Homo sapiens
ctttcactatctgga

SEQ ID NO: 1806359 - DNA, 15 bp, Homo sapiens
attctctggatagat

SEQ ID NO: 1806360 - DNA, 15 bp, Homo sapiens
ttctctggatagatc

SEQ ID NO: 1806361 - DNA, 15 bp, Homo sapiens
ggatagatctctcat

SEQ ID NO: 1806362 - DNA, 15 bp, Homo sapiens
gatagatctctcatt

SEQ ID NO: 1806363 - DNA, 15 bp, Homo sapiens
atagatctctcatta

SEQ ID NO: 1806364 - DNA, 15 bp, Homo sapiens
tagatctctcattat

SEQ ID NO: 1806365 - DNA, 15 bp, Homo sapiens
agatctctcattatc

SEQ ID NO: 1806366 - DNA, 15 bp, Homo sapiens
gatctctcattatct

SEQ ID NO: 1806367 - DNA, 15 bp, Homo sapiens
atctctcattatctg

SEQ ID NO: 1806368 - DNA, 15 bp, Homo sapiens
tctctcattatctgt

SEQ ID NO: 1806369 - DNA, 15 bp, Homo sapiens
ctctcattatctgtc

SEQ ID NO: 1806370 - DNA, 15 bp, Homo sapiens
tctcattatctgtct

SEQ ID NO: 1806371 - DNA, 15 bp, Homo sapiens
ctcattatctgtctg

SEQ ID NO: 1806372 - DNA, 15 bp, Homo sapiens
tcattatctgtctgg

SEQ ID NO: 1806373 - DNA, 15 bp, Homo sapiens
cattatctgtctgga

SEQ ID NO: 1806374 - DNA, 15 bp, Homo sapiens
attatctgtctggag

SEQ ID NO: 1806375 - DNA, 15 bp, Homo sapiens
ttatctgtctggaga

SEQ ID NO: 1806376 - DNA, 15 bp, Homo sapiens
tatctgtctggagag

SEQ ID NO: 1806377 - DNA, 15 bp, Homo sapiens
atctgtctggagaga

SEQ ID NO: 1806378 - DNA, 15 bp, Homo sapiens
tctgtctggagagaa

SEQ ID NO: 1806379 - DNA, 15 bp, Homo sapiens
ctgtctggagagaat

SEQ ID NO: 1806380 - DNA, 15 bp, Homo sapiens
tgtctggagagaata

SEQ ID NO: 1806381 - DNA, 15 bp, Homo sapiens
gtctggagagaatac

SEQ ID NO: 1806382 - DNA, 15 bp, Homo sapiens
tctggagagaatact

SEQ ID NO: 1806383 - DNA, 15 bp, Homo sapiens
ctggagagaatactc

SEQ ID NO: 1806384 - DNA, 15 bp, Homo sapiens
tggagagaatactca

SEQ ID NO: 1806385 - DNA, 15 bp, Homo sapiens
ggagagaatactcat

SEQ ID NO: 1806386 - DNA, 15 bp, Homo sapiens
gagagaatactcatt

SEQ ID NO: 1806387 - DNA, 15 bp, Homo sapiens
agagaatactcattc

SEQ ID NO: 1806388 - DNA, 15 bp, Homo sapiens
gagaatactcattct

SEQ ID NO: 1806389 - DNA, 15 bp, Homo sapiens
agaatactcattctc

SEQ ID NO: 1806390 - DNA, 15 bp, Homo sapiens
gaatactcattctct

SEQ ID NO: 1806391 - DNA, 15 bp, Homo sapiens
aatactcattctctg

SEQ ID NO: 1806392 - DNA, 15 bp, Homo sapiens
atactcattctctgg

SEQ ID NO: 1806393 - DNA, 15 bp, Homo sapiens
tactcattctctgga

SEQ ID NO: 1806394 - DNA, 15 bp, Homo sapiens
actcattctctggat

SEQ ID NO: 1806395 - DNA, 15 bp, Homo sapiens
gaactctcactatca

SEQ ID NO: 1806396 - DNA, 15 bp, Homo sapiens
aactctcactatcaa

SEQ ID NO: 1806397 - DNA, 15 bp, Homo sapiens
actctcactatcaat

SEQ ID NO: 1806398 - DNA, 15 bp, Homo sapiens
ctctcactatcaatg

SEQ ID NO: 1806399 - DNA, 15 bp, Homo sapiens
tctcactatcaatgt

SEQ ID NO: 1806400 - DNA, 15 bp, Homo sapiens
ctcactatcaatgtg

SEQ ID NO: 1806401 - DNA, 15 bp, Homo sapiens
tcactatcaatgtgg

SEQ ID NO: 1806402 - DNA, 15 bp, Homo sapiens
cactatcaatgtgga

SEQ ID NO: 1806403 - DNA, 15 bp, Homo sapiens
actatcaatgtggat

SEQ ID NO: 1806404 - DNA, 15 bp, Homo sapiens
ctatcaatgtggata

SEQ ID NO: 1806405 - DNA, 15 bp, Homo sapiens
tatcaatgtggatag

SEQ ID NO: 1806406 - DNA, 15 bp, Homo sapiens
atcaatgtggataga

SEQ ID NO: 1806407 - DNA, 15 bp, Homo sapiens
tcaatgtggatagaa

SEQ ID NO: 1806408 - DNA, 15 bp, Homo sapiens
caatgtggatagaat

SEQ ID NO: 1806409 - DNA, 15 bp, Homo sapiens
aatgtggatagaatt

SEQ ID NO: 1806410 - DNA, 15 bp, Homo sapiens
atgtggatagaattc

SEQ ID NO: 1806411 - DNA, 15 bp, Homo sapiens
tgtggatagaattct

SEQ ID NO: 1806412 - DNA, 15 bp, Homo sapiens
gtggatagaattctc

SEQ ID NO: 1806413 - DNA, 15 bp, Homo sapiens
tctcaccctctggac

SEQ ID NO: 1806414 - DNA, 15 bp, Homo sapiens
ctcaccctctggaca

SEQ ID NO: 1806415 - DNA, 15 bp, Homo sapiens
tcaccctctggacag

SEQ ID NO: 1806416 - DNA, 15 bp, Homo sapiens
caccctctggacaga

SEQ ID NO: 1806417 - DNA, 15 bp, Homo sapiens
accctctggacagaa

SEQ ID NO: 1806418 - DNA, 15 bp, Homo sapiens
ccctctggacagaac

SEQ ID NO: 1806419 - DNA, 15 bp, Homo sapiens
cctctggacagaact

SEQ ID NO: 1806420 - DNA, 15 bp, Homo sapiens
ctctggacagaactc

SEQ ID NO: 1806421 - DNA, 15 bp, Homo sapiens
ctggacagaactctg

SEQ ID NO: 1806422 - DNA, 15 bp, Homo sapiens
tggacagaactctga

SEQ ID NO: 1806423 - DNA, 15 bp, Homo sapiens
ggacagaactctgag

SEQ ID NO: 1806424 - DNA, 15 bp, Homo sapiens
gacagaactctgagt

SEQ ID NO: 1806425 - DNA, 15 bp, Homo sapiens
acagaactctgagta

SEQ ID NO: 1806426 - DNA, 15 bp, Homo sapiens
cagaactctgagtat

SEQ ID NO: 1806427 - DNA, 15 bp, Homo sapiens
agaactctgagtatc

SEQ ID NO: 1806428 - DNA, 15 bp, Homo sapiens
gaactctgagtatct

SEQ ID NO: 1806429 - DNA, 15 bp, Homo sapiens
aactctgagtatctg

SEQ ID NO: 1806430 - DNA, 15 bp, Homo sapiens
actctgagtatctgg

SEQ ID NO: 1806431 - DNA, 15 bp, Homo sapiens
ctctgagtatctgga

SEQ ID NO: 1806432 - DNA, 15 bp, Homo sapiens
tctgagtatctggat

SEQ ID NO: 1806433 - DNA, 15 bp, Homo sapiens
ctgagtatctggata

SEQ ID NO: 1806434 - DNA, 15 bp, Homo sapiens
tgagtatctggatag

SEQ ID NO: 1806435 - DNA, 15 bp, Homo sapiens
gagtatctggataga

SEQ ID NO: 1806436 - DNA, 15 bp, Homo sapiens
agtatctggatagaa

SEQ ID NO: 1806437 - DNA, 15 bp, Homo sapiens
gtatctggatagaat

SEQ ID NO: 1806438 - DNA, 15 bp, Homo sapiens
atctggatagaatta

SEQ ID NO: 1806439 - DNA, 15 bp, Homo sapiens
tctggatagaattat

SEQ ID NO: 1806440 - DNA, 15 bp, Homo sapiens
ctggatagaattatc

SEQ ID NO: 1806441 - DNA, 15 bp, Homo sapiens
tggatagaattatca

SEQ ID NO: 1806442 - DNA, 15 bp, Homo sapiens
ggatagaattatcat

SEQ ID NO: 1806443 - DNA, 15 bp, Homo sapiens
gatagaattatcatc

SEQ ID NO: 1806444 - DNA, 15 bp, Homo sapiens
atagaattatcatcc

SEQ ID NO: 1806445 - DNA, 15 bp, Homo sapiens
tagaattatcatcct

SEQ ID NO: 1806446 - DNA, 15 bp, Homo sapiens
agaattatcatcctc

SEQ ID NO: 1806447 - DNA, 15 bp, Homo sapiens
gaattatcatcctct

SEQ ID NO: 1806448 - DNA, 15 bp, Homo sapiens
aattatcatcctctg

SEQ ID NO: 1806449 - DNA, 15 bp, Homo sapiens
attatcatcctctgg

SEQ ID NO: 1806450 - DNA, 15 bp, Homo sapiens
ttatcatcctctgga

SEQ ID NO: 1806451 - DNA, 15 bp, Homo sapiens
tatcatcctctggat

SEQ ID NO: 1806452 - DNA, 15 bp, Homo sapiens
atcatcctctggata

SEQ ID NO: 1806453 - DNA, 15 bp, Homo sapiens
tcatcctctggatag

SEQ ID NO: 1806454 - DNA, 15 bp, Homo sapiens
catcctctggataga

SEQ ID NO: 1806455 - DNA, 15 bp, Homo sapiens
atcctctggatagaa

SEQ ID NO: 1806456 - DNA, 15 bp, Homo sapiens
tcctctggatagaac

SEQ ID NO: 1806457 - DNA, 15 bp, Homo sapiens
tatctgtctggataa

SEQ ID NO: 1806458 - DNA, 15 bp, Homo sapiens
atctgtctggataaa

SEQ ID NO: 1806459 - DNA, 15 bp, Homo sapiens
tctgtctggataaaa

SEQ ID NO: 1806460 - DNA, 15 bp, Homo sapiens
gataaaattctcact

SEQ ID NO: 1806461 - DNA, 15 bp, Homo sapiens
ataaaattctcactc

SEQ ID NO: 1806462 - DNA, 15 bp, Homo sapiens
taaaattctcactct

SEQ ID NO: 1806463 - DNA, 15 bp, Homo sapiens
aaaattctcactctc

SEQ ID NO: 1806464 - DNA, 15 bp, Homo sapiens
aaattctcactctct

SEQ ID NO: 1806465 - DNA, 15 bp, Homo sapiens
tcaccatctggataa

SEQ ID NO: 1806466 - DNA, 15 bp, Homo sapiens
caccatctggataaa

SEQ ID NO: 1806467 - DNA, 15 bp, Homo sapiens
accatctggataaaa

SEQ ID NO: 1806468 - DNA, 15 bp, Homo sapiens
ccatctggataaaac

SEQ ID NO: 1806469 - DNA, 15 bp, Homo sapiens
catctggataaaact

SEQ ID NO: 1806470 - DNA, 15 bp, Homo sapiens
atctggataaaactc

SEQ ID NO: 1806471 - DNA, 15 bp, Homo sapiens
ataaaactctcactc

SEQ ID NO: 1806472 - DNA, 15 bp, Homo sapiens
taaaactctcactct

SEQ ID NO: 1806473 - DNA, 15 bp, Homo sapiens
aaaactctcactctc

SEQ ID NO: 1806474 - DNA, 15 bp, Homo sapiens
aaactctcactctct

SEQ ID NO: 1806475 - DNA, 15 bp, Homo sapiens
actctcactctctgg

SEQ ID NO: 1806476 - DNA, 15 bp, Homo sapiens
ctctcactctctggt

SEQ ID NO: 1806477 - DNA, 15 bp, Homo sapiens
tctcactctctggta

SEQ ID NO: 1806478 - DNA, 15 bp, Homo sapiens
ctcactctctggtag

SEQ ID NO: 1806479 - DNA, 15 bp, Homo sapiens
tcactctctggtaga

SEQ ID NO: 1806480 - DNA, 15 bp, Homo sapiens
cactctctggtagaa

SEQ ID NO: 1806481 - DNA, 15 bp, Homo sapiens
actctctggtagaat

SEQ ID NO: 1806482 - DNA, 15 bp, Homo sapiens
ctctctggtagaatt

SEQ ID NO: 1806483 - DNA, 15 bp, Homo sapiens
tctctggtagaattc

SEQ ID NO: 1806484 - DNA, 15 bp, Homo sapiens
ctctggtagaattct

SEQ ID NO: 1806485 - DNA, 15 bp, Homo sapiens
tggtagaattctcat

SEQ ID NO: 1806486 - DNA, 15 bp, Homo sapiens
ggtagaattctcatg

SEQ ID NO: 1806487 - DNA, 15 bp, Homo sapiens
gtagaattctcatga

SEQ ID NO: 1806488 - DNA, 15 bp, Homo sapiens
tagaattctcatgat

SEQ ID NO: 1806489 - DNA, 15 bp, Homo sapiens
agaattctcatgatc

SEQ ID NO: 1806490 - DNA, 15 bp, Homo sapiens
gaattctcatgatct

SEQ ID NO: 1806491 - DNA, 15 bp, Homo sapiens
aattctcatgatctg

SEQ ID NO: 1806492 - DNA, 15 bp, Homo sapiens
attctcatgatctgg

SEQ ID NO: 1806493 - DNA, 15 bp, Homo sapiens
ttctcatgatctgga

SEQ ID NO: 1806494 - DNA, 15 bp, Homo sapiens
tctcatgatctggat

SEQ ID NO: 1806495 - DNA, 15 bp, Homo sapiens
ctcatgatctggata

SEQ ID NO: 1806496 - DNA, 15 bp, Homo sapiens
tcatgatctggatag

SEQ ID NO: 1806497 - DNA, 15 bp, Homo sapiens
catgatctggataga

SEQ ID NO: 1806498 - DNA, 15 bp, Homo sapiens
atgatctggatagaa

SEQ ID NO: 1806499 - DNA, 15 bp, Homo sapiens
tgatctggatagaac

SEQ ID NO: 1806500 - DNA, 15 bp, Homo sapiens
gatctggatagaact

SEQ ID NO: 1806501 - DNA, 15 bp, Homo sapiens
gatagaattcttaca

SEQ ID NO: 1806502 - DNA, 15 bp, Homo sapiens
atagaattcttacac

SEQ ID NO: 1806503 - DNA, 15 bp, Homo sapiens
tagaattcttacact

SEQ ID NO: 1806504 - DNA, 15 bp, Homo sapiens
agaattcttacactc

SEQ ID NO: 1806505 - DNA, 15 bp, Homo sapiens
gaattcttacactct

SEQ ID NO: 1806506 - DNA, 15 bp, Homo sapiens
aattcttacactctg

SEQ ID NO: 1806507 - DNA, 15 bp, Homo sapiens
attcttacactctgg

SEQ ID NO: 1806508 - DNA, 15 bp, Homo sapiens
ttcttacactctgga

SEQ ID NO: 1806509 - DNA, 15 bp, Homo sapiens
tcttacactctggat

SEQ ID NO: 1806510 - DNA, 15 bp, Homo sapiens
cttacactctggata

SEQ ID NO: 1806511 - DNA, 15 bp, Homo sapiens
ttacactctggatag

SEQ ID NO: 1806512 - DNA, 15 bp, Homo sapiens
tacactctggataga

SEQ ID NO: 1806513 - DNA, 15 bp, Homo sapiens
acactctggatagaa

SEQ ID NO: 1806514 - DNA, 15 bp, Homo sapiens
actctcactatcttc

SEQ ID NO: 1806515 - DNA, 15 bp, Homo sapiens
ctctcactatcttcc

SEQ ID NO: 1806516 - DNA, 15 bp, Homo sapiens
tctcactatcttcct

SEQ ID NO: 1806517 - DNA, 15 bp, Homo sapiens
ctcactatcttcctg

SEQ ID NO: 1806518 - DNA, 15 bp, Homo sapiens
tcactatcttcctgg

SEQ ID NO: 1806519 - DNA, 15 bp, Homo sapiens
actatcttcctggac

SEQ ID NO: 1806520 - DNA, 15 bp, Homo sapiens
ctatcttcctggacg

SEQ ID NO: 1806521 - DNA, 15 bp, Homo sapiens
tatcttcctggacgg

SEQ ID NO: 1806522 - DNA, 15 bp, Homo sapiens
atcttcctggacgga

SEQ ID NO: 1806523 - DNA, 15 bp, Homo sapiens
tcttcctggacggaa

SEQ ID NO: 1806524 - DNA, 15 bp, Homo sapiens
cttcctggacggaac

SEQ ID NO: 1806525 - DNA, 15 bp, Homo sapiens
ttcctggacggaact

SEQ ID NO: 1806526 - DNA, 15 bp, Homo sapiens
tcctggacggaactc

SEQ ID NO: 1806527 - DNA, 15 bp, Homo sapiens
cctggacggaactct

SEQ ID NO: 1806528 - DNA, 15 bp, Homo sapiens
ctggacggaactctc

SEQ ID NO: 1806529 - DNA, 15 bp, Homo sapiens
tggacggaactctca

SEQ ID NO: 1806530 - DNA, 15 bp, Homo sapiens
ggacggaactctcac

SEQ ID NO: 1806531 - DNA, 15 bp, Homo sapiens
gacggaactctcacc

SEQ ID NO: 1806532 - DNA, 15 bp, Homo sapiens
acggaactctcaccc

SEQ ID NO: 1806533 - DNA, 15 bp, Homo sapiens
cggaactctcaccct

SEQ ID NO: 1806534 - DNA, 15 bp, Homo sapiens
ggaactctcaccctc

SEQ ID NO: 1806535 - DNA, 15 bp, Homo sapiens
gaactctcaccctct

SEQ ID NO: 1806536 - DNA, 15 bp, Homo sapiens
aactctcaccctctg

SEQ ID NO: 1806537 - DNA, 15 bp, Homo sapiens
actctcaccctctgg

SEQ ID NO: 1806538 - DNA, 15 bp, Homo sapiens
ctctcaccctctgga

SEQ ID NO: 1806539 - DNA, 15 bp, Homo sapiens
actctcactatttgg

SEQ ID NO: 1806540 - DNA, 15 bp, Homo sapiens
ctctcactatttgga

SEQ ID NO: 1806541 - DNA, 15 bp, Homo sapiens
tctcactatttggat

SEQ ID NO: 1806542 - DNA, 15 bp, Homo sapiens
ctcactatttggata

SEQ ID NO: 1806543 - DNA, 15 bp, Homo sapiens
tcactatttggatag

SEQ ID NO: 1806544 - DNA, 15 bp, Homo sapiens
cactatttggataga

SEQ ID NO: 1806545 - DNA, 15 bp, Homo sapiens
actatttggatagaa

SEQ ID NO: 1806546 - DNA, 15 bp, Homo sapiens
ctatttggatagaat

SEQ ID NO: 1806547 - DNA, 15 bp, Homo sapiens
tatttggatagaatt

SEQ ID NO: 1806548 - DNA, 15 bp, Homo sapiens
atttggatagaattc

SEQ ID NO: 1806549 - DNA, 15 bp, Homo sapiens
tttggatagaattct

SEQ ID NO: 1806550 - DNA, 15 bp, Homo sapiens
ttggatagaattctc

SEQ ID NO: 1806551 - DNA, 15 bp, Homo sapiens
tcactatctggataa

SEQ ID NO: 1806552 - DNA, 15 bp, Homo sapiens
cactatctggataaa

SEQ ID NO: 1806553 - DNA, 15 bp, Homo sapiens
actatctggataaaa

SEQ ID NO: 1806554 - DNA, 15 bp, Homo sapiens
ctatctggataaaag

SEQ ID NO: 1806555 - DNA, 15 bp, Homo sapiens
tatctggataaaagt

SEQ ID NO: 1806556 - DNA, 15 bp, Homo sapiens
atctggataaaagtc

SEQ ID NO: 1806557 - DNA, 15 bp, Homo sapiens
tctggataaaagtct

SEQ ID NO: 1806558 - DNA, 15 bp, Homo sapiens
ctggataaaagtctc

SEQ ID NO: 1806559 - DNA, 15 bp, Homo sapiens
tggataaaagtctca

SEQ ID NO: 1806560 - DNA, 15 bp, Homo sapiens
ggataaaagtctcac

SEQ ID NO: 1806561 - DNA, 15 bp, Homo sapiens
gataaaagtctcact

SEQ ID NO: 1806562 - DNA, 15 bp, Homo sapiens
ataaaagtctcactc

SEQ ID NO: 1806563 - DNA, 15 bp, Homo sapiens
taaaagtctcactct

SEQ ID NO: 1806564 - DNA, 15 bp, Homo sapiens
aaaagtctcactctc

SEQ ID NO: 1806565 - DNA, 15 bp, Homo sapiens
aaagtctcactctct

SEQ ID NO: 1806566 - DNA, 15 bp, Homo sapiens
gtctcactctctgtt

SEQ ID NO: 1806567 - DNA, 15 bp, Homo sapiens
tctcactctctgttt

SEQ ID NO: 1806568 - DNA, 15 bp, Homo sapiens
ctcactctctgtttg

SEQ ID NO: 1806569 - DNA, 15 bp, Homo sapiens
tcactctctgtttgg

SEQ ID NO: 1806570 - DNA, 15 bp, Homo sapiens
cactctctgtttggt

SEQ ID NO: 1806571 - DNA, 15 bp, Homo sapiens
actctctgtttggta

SEQ ID NO: 1806572 - DNA, 15 bp, Homo sapiens
ctctctgtttggtac

SEQ ID NO: 1806573 - DNA, 15 bp, Homo sapiens
tctctgtttggtaca

SEQ ID NO: 1806574 - DNA, 15 bp, Homo sapiens
ctctgtttggtacag

SEQ ID NO: 1806575 - DNA, 15 bp, Homo sapiens
tctgtttggtacagt

SEQ ID NO: 1806576 - DNA, 15 bp, Homo sapiens
ctgtttggtacagtt

SEQ ID NO: 1806577 - DNA, 15 bp, Homo sapiens
tgtttggtacagttc

SEQ ID NO: 1806578 - DNA, 15 bp, Homo sapiens
gtttggtacagttct

SEQ ID NO: 1806579 - DNA, 15 bp, Homo sapiens
tttggtacagttctc

SEQ ID NO: 1806580 - DNA, 15 bp, Homo sapiens
ttggtacagttctca

SEQ ID NO: 1806581 - DNA, 15 bp, Homo sapiens
tggtacagttctcac

SEQ ID NO: 1806582 - DNA, 15 bp, Homo sapiens
ggtacagttctcacg

SEQ ID NO: 1806583 - DNA, 15 bp, Homo sapiens
gtacagttctcacga

SEQ ID NO: 1806584 - DNA, 15 bp, Homo sapiens
tacagttctcacgat

SEQ ID NO: 1806585 - DNA, 15 bp, Homo sapiens
acagttctcacgatc

SEQ ID NO: 1806586 - DNA, 15 bp, Homo sapiens
cagttctcacgatct

SEQ ID NO: 1806587 - DNA, 15 bp, Homo sapiens
agttctcacgatctg

SEQ ID NO: 1806588 - DNA, 15 bp, Homo sapiens
gttctcacgatctgg

SEQ ID NO: 1806589 - DNA, 15 bp, Homo sapiens
ttctcacgatctgga

SEQ ID NO: 1806590 - DNA, 15 bp, Homo sapiens
tctcacgatctggat

SEQ ID NO: 1806591 - DNA, 15 bp, Homo sapiens
ctcacgatctggata

SEQ ID NO: 1806592 - DNA, 15 bp, Homo sapiens
tcacgatctggatag

SEQ ID NO: 1806593 - DNA, 15 bp, Homo sapiens
cacgatctggataga

SEQ ID NO: 1806594 - DNA, 15 bp, Homo sapiens
acgatctggatagaa

SEQ ID NO: 1806595 - DNA, 15 bp, Homo sapiens
cgatctggatagaac

SEQ ID NO: 1806596 - DNA, 15 bp, Homo sapiens
ctcactatctttctg

SEQ ID NO: 1806597 - DNA, 15 bp, Homo sapiens
tcactatctttctgg

SEQ ID NO: 1806598 - DNA, 15 bp, Homo sapiens
cactatctttctgga

SEQ ID NO: 1806599 - DNA, 15 bp, Homo sapiens
actatctttctggat

SEQ ID NO: 1806600 - DNA, 15 bp, Homo sapiens
ctatctttctggatg

SEQ ID NO: 1806601 - DNA, 15 bp, Homo sapiens
tatctttctggatgg

SEQ ID NO: 1806602 - DNA, 15 bp, Homo sapiens
atctttctggatgga

SEQ ID NO: 1806603 - DNA, 15 bp, Homo sapiens
tctttctggatggaa

SEQ ID NO: 1806604 - DNA, 15 bp, Homo sapiens
ctttctggatggaac

SEQ ID NO: 1806605 - DNA, 15 bp, Homo sapiens
tttctggatggaact

SEQ ID NO: 1806606 - DNA, 15 bp, Homo sapiens
ttctggatggaactc

SEQ ID NO: 1806607 - DNA, 15 bp, Homo sapiens
tctggatggaactct

SEQ ID NO: 1806608 - DNA, 15 bp, Homo sapiens
ctggatggaactctc

SEQ ID NO: 1806609 - DNA, 15 bp, Homo sapiens
tggatggaactctca

SEQ ID NO: 1806610 - DNA, 15 bp, Homo sapiens
ggatggaactctcac

SEQ ID NO: 1806611 - DNA, 15 bp, Homo sapiens
gatggaactctcacc

SEQ ID NO: 1806612 - DNA, 15 bp, Homo sapiens
atggaactctcaccc

SEQ ID NO: 1806613 - DNA, 15 bp, Homo sapiens
tggaactctcaccct

SEQ ID NO: 1806614 - DNA, 15 bp, Homo sapiens
aactctcaccctcta

SEQ ID NO: 1806615 - DNA, 15 bp, Homo sapiens
actctcaccctctag

SEQ ID NO: 1806616 - DNA, 15 bp, Homo sapiens
ctctcaccctctaga

SEQ ID NO: 1806617 - DNA, 15 bp, Homo sapiens
tctcaccctctagat

SEQ ID NO: 1806618 - DNA, 15 bp, Homo sapiens
ctcaccctctagata

SEQ ID NO: 1806619 - DNA, 15 bp, Homo sapiens
tcaccctctagatag

SEQ ID NO: 1806620 - DNA, 15 bp, Homo sapiens
caccctctagataga

SEQ ID NO: 1806621 - DNA, 15 bp, Homo sapiens
accctctagatagaa

SEQ ID NO: 1806622 - DNA, 15 bp, Homo sapiens
ccctctagatagaac

SEQ ID NO: 1806623 - DNA, 15 bp, Homo sapiens
cctctagatagaact

SEQ ID NO: 1806624 - DNA, 15 bp, Homo sapiens
cactatctatctggt

SEQ ID NO: 1806625 - DNA, 15 bp, Homo sapiens
actatctatctggtt

SEQ ID NO: 1806626 - DNA, 15 bp, Homo sapiens
ctatctatctggtta

SEQ ID NO: 1806627 - DNA, 15 bp, Homo sapiens
tatctatctggttag

SEQ ID NO: 1806628 - DNA, 15 bp, Homo sapiens
atctatctggttaga

SEQ ID NO: 1806629 - DNA, 15 bp, Homo sapiens
tctatctggttagaa

SEQ ID NO: 1806630 - DNA, 15 bp, Homo sapiens
ctcactctctcgatt

SEQ ID NO: 1806631 - DNA, 15 bp, Homo sapiens
tcactctctcgattg

SEQ ID NO: 1806632 - DNA, 15 bp, Homo sapiens
cactctctcgattga

SEQ ID NO: 1806633 - DNA, 15 bp, Homo sapiens
actctctcgattgaa

SEQ ID NO: 1806634 - DNA, 15 bp, Homo sapiens
ctctctcgattgaag

SEQ ID NO: 1806635 - DNA, 15 bp, Homo sapiens
tctctcgattgaagt

SEQ ID NO: 1806636 - DNA, 15 bp, Homo sapiens
ctctcgattgaagtc

SEQ ID NO: 1806637 - DNA, 15 bp, Homo sapiens
tctcgattgaagtct

SEQ ID NO: 1806638 - DNA, 15 bp, Homo sapiens
ctcgattgaagtctc

SEQ ID NO: 1806639 - DNA, 15 bp, Homo sapiens
tcgattgaagtctca

SEQ ID NO: 1806640 - DNA, 15 bp, Homo sapiens
cgattgaagtctcac

SEQ ID NO: 1806641 - DNA, 15 bp, Homo sapiens
gattgaagtctcact

SEQ ID NO: 1806642 - DNA, 15 bp, Homo sapiens
attgaagtctcacta

SEQ ID NO: 1806643 - DNA, 15 bp, Homo sapiens
ttgaagtctcactat

SEQ ID NO: 1806644 - DNA, 15 bp, Homo sapiens
tgaagtctcactatc

SEQ ID NO: 1806645 - DNA, 15 bp, Homo sapiens
gaagtctcactatct

SEQ ID NO: 1806646 - DNA, 15 bp, Homo sapiens
aagtctcactatctg

SEQ ID NO: 1806647 - DNA, 15 bp, Homo sapiens
agtctcactatctgg

SEQ ID NO: 1806648 - DNA, 15 bp, Homo sapiens
gtctcactatctgga

SEQ ID NO: 1806649 - DNA, 15 bp, Homo sapiens
attctcaccatctgc

SEQ ID NO: 1806650 - DNA, 15 bp, Homo sapiens
ttctcaccatctgca

SEQ ID NO: 1806651 - DNA, 15 bp, Homo sapiens
tctcaccatctgcag

SEQ ID NO: 1806652 - DNA, 15 bp, Homo sapiens
ctcaccatctgcaga

SEQ ID NO: 1806653 - DNA, 15 bp, Homo sapiens
tcaccatctgcagag

SEQ ID NO: 1806654 - DNA, 15 bp, Homo sapiens
caccatctgcagaga

SEQ ID NO: 1806655 - DNA, 15 bp, Homo sapiens
accatctgcagagaa

SEQ ID NO: 1806656 - DNA, 15 bp, Homo sapiens
ccatctgcagagaac

SEQ ID NO: 1806657 - DNA, 15 bp, Homo sapiens
catctgcagagaact

SEQ ID NO: 1806658 - DNA, 15 bp, Homo sapiens
atctgcagagaactc

SEQ ID NO: 1806659 - DNA, 15 bp, Homo sapiens
tctgcagagaactct

SEQ ID NO: 1806660 - DNA, 15 bp, Homo sapiens
ctgcagagaactctc

SEQ ID NO: 1806661 - DNA, 15 bp, Homo sapiens
tgcagagaactctca

SEQ ID NO: 1806662 - DNA, 15 bp, Homo sapiens
gcagagaactctcac

SEQ ID NO: 1806663 - DNA, 15 bp, Homo sapiens
cagagaactctcact

SEQ ID NO: 1806664 - DNA, 15 bp, Homo sapiens
agagaactctcactg

SEQ ID NO: 1806665 - DNA, 15 bp, Homo sapiens
gagaactctcactgt

SEQ ID NO: 1806666 - DNA, 15 bp, Homo sapiens
ctcactgtctatctc

SEQ ID NO: 1806667 - DNA, 15 bp, Homo sapiens
tcactgtctatctcg

SEQ ID NO: 1806668 - DNA, 15 bp, Homo sapiens
cactgtctatctcga

SEQ ID NO: 1806669 - DNA, 15 bp, Homo sapiens
actgtctatctcgat

SEQ ID NO: 1806670 - DNA, 15 bp, Homo sapiens
ctgtctatctcgata

SEQ ID NO: 1806671 - DNA, 15 bp, Homo sapiens
tgtctatctcgataa

SEQ ID NO: 1806672 - DNA, 15 bp, Homo sapiens
gtctatctcgataaa

SEQ ID NO: 1806673 - DNA, 15 bp, Homo sapiens
tctatctcgataaaa

SEQ ID NO: 1806674 - DNA, 15 bp, Homo sapiens
ctatctcgataaaac

SEQ ID NO: 1806675 - DNA, 15 bp, Homo sapiens
tatctcgataaaact

SEQ ID NO: 1806676 - DNA, 15 bp, Homo sapiens
atctcgataaaactc

SEQ ID NO: 1806677 - DNA, 15 bp, Homo sapiens
tctcgataaaactct

SEQ ID NO: 1806678 - DNA, 15 bp, Homo sapiens
ctcgataaaactctc

SEQ ID NO: 1806679 - DNA, 15 bp, Homo sapiens
tcgataaaactctca

SEQ ID NO: 1806680 - DNA, 15 bp, Homo sapiens
cgataaaactctcac

SEQ ID NO: 1806681 - DNA, 15 bp, Homo sapiens
taaaactctcactac

SEQ ID NO: 1806682 - DNA, 15 bp, Homo sapiens
aaaactctcactacc

SEQ ID NO: 1806683 - DNA, 15 bp, Homo sapiens
aaactctcactacct

SEQ ID NO: 1806684 - DNA, 15 bp, Homo sapiens
aactctcactaccta

SEQ ID NO: 1806685 - DNA, 15 bp, Homo sapiens
actctcactacctat

SEQ ID NO: 1806686 - DNA, 15 bp, Homo sapiens
ctctcactacctatc

SEQ ID NO: 1806687 - DNA, 15 bp, Homo sapiens
tctcactacctatct

SEQ ID NO: 1806688 - DNA, 15 bp, Homo sapiens
ctcactacctatctg

SEQ ID NO: 1806689 - DNA, 15 bp, Homo sapiens
tcactacctatctgg

SEQ ID NO: 1806690 - DNA, 15 bp, Homo sapiens
cactacctatctgga

SEQ ID NO: 1806691 - DNA, 15 bp, Homo sapiens
actacctatctggat

SEQ ID NO: 1806692 - DNA, 15 bp, Homo sapiens
ctacctatctggata

SEQ ID NO: 1806693 - DNA, 15 bp, Homo sapiens
tacctatctggatag

SEQ ID NO: 1806694 - DNA, 15 bp, Homo sapiens
acctatctggataga

SEQ ID NO: 1806695 - DNA, 15 bp, Homo sapiens
cctatctggatagaa

SEQ ID NO: 1806696 - DNA, 15 bp, Homo sapiens
tggatagaactctcg

SEQ ID NO: 1806697 - DNA, 15 bp, Homo sapiens
ggatagaactctcgc

SEQ ID NO: 1806698 - DNA, 15 bp, Homo sapiens
gatagaactctcgct

SEQ ID NO: 1806699 - DNA, 15 bp, Homo sapiens
atagaactctcgcta

SEQ ID NO: 1806700 - DNA, 15 bp, Homo sapiens
aactctcgctatctg

SEQ ID NO: 1806701 - DNA, 15 bp, Homo sapiens
actctcgctatctgg

SEQ ID NO: 1806702 - DNA, 15 bp, Homo sapiens
ctctcgctatctgga

SEQ ID NO: 1806703 - DNA, 15 bp, Homo sapiens
tctcgctatctggat

SEQ ID NO: 1806704 - DNA, 15 bp, Homo sapiens
ctcgctatctggata

SEQ ID NO: 1806705 - DNA, 15 bp, Homo sapiens
tcgctatctggatag

SEQ ID NO: 1806706 - DNA, 15 bp, Homo sapiens
cgctatctggataga

SEQ ID NO: 1806707 - DNA, 15 bp, Homo sapiens
gctatctggatagaa

SEQ ID NO: 1806708 - DNA, 15 bp, Homo sapiens
ggatagaattgtcac

SEQ ID NO: 1806709 - DNA, 15 bp, Homo sapiens
gatagaattgtcacc

SEQ ID NO: 1806710 - DNA, 15 bp, Homo sapiens
atagaattgtcacca

SEQ ID NO: 1806711 - DNA, 15 bp, Homo sapiens
tagaattgtcaccat

SEQ ID NO: 1806712 - DNA, 15 bp, Homo sapiens
agaattgtcaccatc

SEQ ID NO: 1806713 - DNA, 15 bp, Homo sapiens
gaattgtcaccatct

SEQ ID NO: 1806714 - DNA, 15 bp, Homo sapiens
aattgtcaccatctg

SEQ ID NO: 1806715 - DNA, 15 bp, Homo sapiens
attgtcaccatctgg

SEQ ID NO: 1806716 - DNA, 15 bp, Homo sapiens
ttgtcaccatctggg

SEQ ID NO: 1806717 - DNA, 15 bp, Homo sapiens
tgtcaccatctgggt

SEQ ID NO: 1806718 - DNA, 15 bp, Homo sapiens
gtcaccatctgggta

SEQ ID NO: 1806719 - DNA, 15 bp, Homo sapiens
tcaccatctgggtag

SEQ ID NO: 1806720 - DNA, 15 bp, Homo sapiens
caccatctgggtaga

SEQ ID NO: 1806721 - DNA, 15 bp, Homo sapiens
accatctgggtagaa

SEQ ID NO: 1806722 - DNA, 15 bp, Homo sapiens
ccatctgggtagaac

SEQ ID NO: 1806723 - DNA, 15 bp, Homo sapiens
catctgggtagaact

SEQ ID NO: 1806724 - DNA, 15 bp, Homo sapiens
atctgggtagaactc

SEQ ID NO: 1806725 - DNA, 15 bp, Homo sapiens
ctgggtagaactctg

SEQ ID NO: 1806726 - DNA, 15 bp, Homo sapiens
ggtagaactctgaca

SEQ ID NO: 1806727 - DNA, 15 bp, Homo sapiens
gtagaactctgacaa

SEQ ID NO: 1806728 - DNA, 15 bp, Homo sapiens
tagaactctgacaat

SEQ ID NO: 1806729 - DNA, 15 bp, Homo sapiens
agaactctgacaatc

SEQ ID NO: 1806730 - DNA, 15 bp, Homo sapiens
gaactctgacaatct

SEQ ID NO: 1806731 - DNA, 15 bp, Homo sapiens
aactctgacaatctc

SEQ ID NO: 1806732 - DNA, 15 bp, Homo sapiens
actctgacaatctct

SEQ ID NO: 1806733 - DNA, 15 bp, Homo sapiens
ctctgacaatctctc

SEQ ID NO: 1806734 - DNA, 15 bp, Homo sapiens
tctgacaatctctct

SEQ ID NO: 1806735 - DNA, 15 bp, Homo sapiens
ctgacaatctctctg

SEQ ID NO: 1806736 - DNA, 15 bp, Homo sapiens
tgacaatctctctgg

SEQ ID NO: 1806737 - DNA, 15 bp, Homo sapiens
gacaatctctctgga

SEQ ID NO: 1806738 - DNA, 15 bp, Homo sapiens
acaatctctctggat

SEQ ID NO: 1806739 - DNA, 15 bp, Homo sapiens
caatctctctggata

SEQ ID NO: 1806740 - DNA, 15 bp, Homo sapiens
aatctctctggatag

SEQ ID NO: 1806741 - DNA, 15 bp, Homo sapiens
ctcaccctctggatg

SEQ ID NO: 1806742 - DNA, 15 bp, Homo sapiens
tcaccctctggatgg

SEQ ID NO: 1806743 - DNA, 15 bp, Homo sapiens
caccctctggatgga

SEQ ID NO: 1806744 - DNA, 15 bp, Homo sapiens
accctctggatggaa

SEQ ID NO: 1806745 - DNA, 15 bp, Homo sapiens
ccctctggatggaac

SEQ ID NO: 1806746 - DNA, 15 bp, Homo sapiens
cctctggatggaact

SEQ ID NO: 1806747 - DNA, 15 bp, Homo sapiens
ctctggatggaactc

SEQ ID NO: 1806748 - DNA, 15 bp, Homo sapiens
gatggaactctcact

SEQ ID NO: 1806749 - DNA, 15 bp, Homo sapiens
atggaactctcacta

SEQ ID NO: 1806750 - DNA, 15 bp, Homo sapiens
ctctcactatctgct

SEQ ID NO: 1806751 - DNA, 15 bp, Homo sapiens
tctcactatctgctg

SEQ ID NO: 1806752 - DNA, 15 bp, Homo sapiens
ctcactatctgctgt

SEQ ID NO: 1806753 - DNA, 15 bp, Homo sapiens
tcactatctgctgta

SEQ ID NO: 1806754 - DNA, 15 bp, Homo sapiens
cactatctgctgtat

SEQ ID NO: 1806755 - DNA, 15 bp, Homo sapiens
actatctgctgtata

SEQ ID NO: 1806756 - DNA, 15 bp, Homo sapiens
ctatctgctgtatag

SEQ ID NO: 1806757 - DNA, 15 bp, Homo sapiens
tatctgctgtataga

SEQ ID NO: 1806758 - DNA, 15 bp, Homo sapiens
atctgctgtatagaa

SEQ ID NO: 1806759 - DNA, 15 bp, Homo sapiens
tctgctgtatagaat

SEQ ID NO: 1806760 - DNA, 15 bp, Homo sapiens
ctgctgtatagaatt

SEQ ID NO: 1806761 - DNA, 15 bp, Homo sapiens
tgctgtatagaattc

SEQ ID NO: 1806762 - DNA, 15 bp, Homo sapiens
gctgtatagaattct

SEQ ID NO: 1806763 - DNA, 15 bp, Homo sapiens
tatagaattctcacc

SEQ ID NO: 1806764 - DNA, 15 bp, Homo sapiens
ctctggatagaactg

SEQ ID NO: 1806765 - DNA, 15 bp, Homo sapiens
atagaactgtcacta

SEQ ID NO: 1806766 - DNA, 15 bp, Homo sapiens
tagaactgtcactat

SEQ ID NO: 1806767 - DNA, 15 bp, Homo sapiens
agaactgtcactatc

SEQ ID NO: 1806768 - DNA, 15 bp, Homo sapiens
gaactgtcactatct

SEQ ID NO: 1806769 - DNA, 15 bp, Homo sapiens
aactgtcactatctg

SEQ ID NO: 1806770 - DNA, 15 bp, Homo sapiens
actgtcactatctgt

SEQ ID NO: 1806771 - DNA, 15 bp, Homo sapiens
ctgtcactatctgtc

SEQ ID NO: 1806772 - DNA, 15 bp, Homo sapiens
tgtcactatctgtct

SEQ ID NO: 1806773 - DNA, 15 bp, Homo sapiens
gtcactatctgtctg

SEQ ID NO: 1806774 - DNA, 15 bp, Homo sapiens
tcactatctgtctgt

SEQ ID NO: 1806775 - DNA, 15 bp, Homo sapiens
cactatctgtctgta

SEQ ID NO: 1806776 - DNA, 15 bp, Homo sapiens
actatctgtctgtat

SEQ ID NO: 1806777 - DNA, 15 bp, Homo sapiens
ctatctgtctgtata

SEQ ID NO: 1806778 - DNA, 15 bp, Homo sapiens
tatctgtctgtatag

SEQ ID NO: 1806779 - DNA, 15 bp, Homo sapiens
atctgtctgtataga

SEQ ID NO: 1806780 - DNA, 15 bp, Homo sapiens
tctgtctgtatagaa

SEQ ID NO: 1806781 - DNA, 15 bp, Homo sapiens
ctgtctgtatagaat

SEQ ID NO: 1806782 - DNA, 15 bp, Homo sapiens
tgtctgtatagaatt

SEQ ID NO: 1806783 - DNA, 15 bp, Homo sapiens
gtctgtatagaattc

SEQ ID NO: 1806784 - DNA, 15 bp, Homo sapiens
tggatagaactctaa

SEQ ID NO: 1806785 - DNA, 15 bp, Homo sapiens
ggatagaactctaac

SEQ ID NO: 1806786 - DNA, 15 bp, Homo sapiens
gatagaactctaaca

SEQ ID NO: 1806787 - DNA, 15 bp, Homo sapiens
atagaactctaacaa

SEQ ID NO: 1806788 - DNA, 15 bp, Homo sapiens
tagaactctaacaat

SEQ ID NO: 1806789 - DNA, 15 bp, Homo sapiens
agaactctaacaatc

SEQ ID NO: 1806790 - DNA, 15 bp, Homo sapiens
gaactctaacaatct

SEQ ID NO: 1806791 - DNA, 15 bp, Homo sapiens
aactctaacaatctg

SEQ ID NO: 1806792 - DNA, 15 bp, Homo sapiens
actctaacaatctgg

SEQ ID NO: 1806793 - DNA, 15 bp, Homo sapiens
ctctaacaatctgga

SEQ ID NO: 1806794 - DNA, 15 bp, Homo sapiens
tctaacaatctggat

SEQ ID NO: 1806795 - DNA, 15 bp, Homo sapiens
ctaacaatctggata

SEQ ID NO: 1806796 - DNA, 15 bp, Homo sapiens
taacaatctggatag

SEQ ID NO: 1806797 - DNA, 15 bp, Homo sapiens
aacaatctggataga

SEQ ID NO: 1806798 - DNA, 15 bp, Homo sapiens
attctcactctctgc

SEQ ID NO: 1806799 - DNA, 15 bp, Homo sapiens
ttctcactctctgca

SEQ ID NO: 1806800 - DNA, 15 bp, Homo sapiens
tctcactctctgcat

SEQ ID NO: 1806801 - DNA, 15 bp, Homo sapiens
ctcactctctgcata

SEQ ID NO: 1806802 - DNA, 15 bp, Homo sapiens
tcactctctgcatag

SEQ ID NO: 1806803 - DNA, 15 bp, Homo sapiens
cactctctgcataga

SEQ ID NO: 1806804 - DNA, 15 bp, Homo sapiens
actctctgcatagaa

SEQ ID NO: 1806805 - DNA, 15 bp, Homo sapiens
ctctctgcatagaac

SEQ ID NO: 1806806 - DNA, 15 bp, Homo sapiens
tctctgcatagaact

SEQ ID NO: 1806807 - DNA, 15 bp, Homo sapiens
tatatatctggatat

SEQ ID NO: 1806808 - DNA, 15 bp, Homo sapiens
atatatctggatata

SEQ ID NO: 1806809 - DNA, 15 bp, Homo sapiens
tatatctggatataa

SEQ ID NO: 1806810 - DNA, 15 bp, Homo sapiens
atatctggatataat

SEQ ID NO: 1806811 - DNA, 15 bp, Homo sapiens
gaactctcactatcc

SEQ ID NO: 1806812 - DNA, 15 bp, Homo sapiens
actctcactatccgg

SEQ ID NO: 1806813 - DNA, 15 bp, Homo sapiens
ctctcactatccgga

SEQ ID NO: 1806814 - DNA, 15 bp, Homo sapiens
tctcactatccggat

SEQ ID NO: 1806815 - DNA, 15 bp, Homo sapiens
ctcactatccggata

SEQ ID NO: 1806816 - DNA, 15 bp, Homo sapiens
tcactatccggatag

SEQ ID NO: 1806817 - DNA, 15 bp, Homo sapiens
cactatccggataga

SEQ ID NO: 1806818 - DNA, 15 bp, Homo sapiens
actatccggatagaa

SEQ ID NO: 1806819 - DNA, 15 bp, Homo sapiens
ttctcaccatctggt

SEQ ID NO: 1806820 - DNA, 15 bp, Homo sapiens
tctcaccatctggtt

SEQ ID NO: 1806821 - DNA, 15 bp, Homo sapiens
ctcaccatctggtta

SEQ ID NO: 1806822 - DNA, 15 bp, Homo sapiens
tcaccatctggttag

SEQ ID NO: 1806823 - DNA, 15 bp, Homo sapiens
caccatctggttaga

SEQ ID NO: 1806824 - DNA, 15 bp, Homo sapiens
accatctggttagaa

SEQ ID NO: 1806825 - DNA, 15 bp, Homo sapiens
ccatctggttagaat

SEQ ID NO: 1806826 - DNA, 15 bp, Homo sapiens
catctggttagaatt

SEQ ID NO: 1806827 - DNA, 15 bp, Homo sapiens
atctggttagaatta

SEQ ID NO: 1806828 - DNA, 15 bp, Homo sapiens
tctggttagaattat

SEQ ID NO: 1806829 - DNA, 15 bp, Homo sapiens
ctggttagaattatc

SEQ ID NO: 1806830 - DNA, 15 bp, Homo sapiens
tggttagaattatca

SEQ ID NO: 1806831 - DNA, 15 bp, Homo sapiens
ggttagaattatcac

SEQ ID NO: 1806832 - DNA, 15 bp, Homo sapiens
gttagaattatcact

SEQ ID NO: 1806833 - DNA, 15 bp, Homo sapiens
ttagaattatcacta

SEQ ID NO: 1806834 - DNA, 15 bp, Homo sapiens
tagaattatcactat

SEQ ID NO: 1806835 - DNA, 15 bp, Homo sapiens
agaattatcactatc

SEQ ID NO: 1806836 - DNA, 15 bp, Homo sapiens
gaattatcactatct

SEQ ID NO: 1806837 - DNA, 15 bp, Homo sapiens
aattatcactatcta

SEQ ID NO: 1806838 - DNA, 15 bp, Homo sapiens
attatcactatctat

SEQ ID NO: 1806839 - DNA, 15 bp, Homo sapiens
ttatcactatctatc

SEQ ID NO: 1806840 - DNA, 15 bp, Homo sapiens
tatcactatctatcg

SEQ ID NO: 1806841 - DNA, 15 bp, Homo sapiens
atcactatctatcgg

SEQ ID NO: 1806842 - DNA, 15 bp, Homo sapiens
tcactatctatcggg

SEQ ID NO: 1806843 - DNA, 15 bp, Homo sapiens
cactatctatcggga

SEQ ID NO: 1806844 - DNA, 15 bp, Homo sapiens
actatctatcgggat

SEQ ID NO: 1806845 - DNA, 15 bp, Homo sapiens
ctatctatcgggata

SEQ ID NO: 1806846 - DNA, 15 bp, Homo sapiens
tatctatcgggatag

SEQ ID NO: 1806847 - DNA, 15 bp, Homo sapiens
atctatcgggataga

SEQ ID NO: 1806848 - DNA, 15 bp, Homo sapiens
tctatcgggatagaa

SEQ ID NO: 1806849 - DNA, 15 bp, Homo sapiens
ctatcgggatagaat

SEQ ID NO: 1806850 - DNA, 15 bp, Homo sapiens
tatcgggatagaatt

SEQ ID NO: 1806851 - DNA, 15 bp, Homo sapiens
atcgggatagaattc

SEQ ID NO: 1806852 - DNA, 15 bp, Homo sapiens
tcgggatagaattct

SEQ ID NO: 1806853 - DNA, 15 bp, Homo sapiens
cgggatagaattctc

SEQ ID NO: 1806854 - DNA, 15 bp, Homo sapiens
gggatagaattctca

SEQ ID NO: 1806855 - DNA, 15 bp, Homo sapiens
tctctggatagaacc

SEQ ID NO: 1806856 - DNA, 15 bp, Homo sapiens
ctctggatagaaccc

SEQ ID NO: 1806857 - DNA, 15 bp, Homo sapiens
tctggatagaaccct

SEQ ID NO: 1806858 - DNA, 15 bp, Homo sapiens
ctggatagaaccctc

SEQ ID NO: 1806859 - DNA, 15 bp, Homo sapiens
tggatagaaccctca

SEQ ID NO: 1806860 - DNA, 15 bp, Homo sapiens
ggatagaaccctcac

SEQ ID NO: 1806861 - DNA, 15 bp, Homo sapiens
gatagaaccctcact

SEQ ID NO: 1806862 - DNA, 15 bp, Homo sapiens
atagaaccctcacta

SEQ ID NO: 1806863 - DNA, 15 bp, Homo sapiens
tagaaccctcactat

SEQ ID NO: 1806864 - DNA, 15 bp, Homo sapiens
tatctatatggaaat

SEQ ID NO: 1806865 - DNA, 15 bp, Homo sapiens
atctatatggaaata

SEQ ID NO: 1806866 - DNA, 15 bp, Homo sapiens
tctatatggaaataa

SEQ ID NO: 1806867 - DNA, 15 bp, Homo sapiens
ctatatggaaataac

SEQ ID NO: 1806868 - DNA, 15 bp, Homo sapiens
tatatggaaataact

SEQ ID NO: 1806869 - DNA, 15 bp, Homo sapiens
atatggaaataactc

SEQ ID NO: 1806870 - DNA, 15 bp, Homo sapiens
tatggaaataactct

SEQ ID NO: 1806871 - DNA, 15 bp, Homo sapiens
atggaaataactctc

SEQ ID NO: 1806872 - DNA, 15 bp, Homo sapiens
tggaaataactctca

SEQ ID NO: 1806873 - DNA, 15 bp, Homo sapiens
ggaaataactctcac

SEQ ID NO: 1806874 - DNA, 15 bp, Homo sapiens
gaaataactctcacc

SEQ ID NO: 1806875 - DNA, 15 bp, Homo sapiens
aaataactctcacca

SEQ ID NO: 1806876 - DNA, 15 bp, Homo sapiens
aataactctcaccat

SEQ ID NO: 1806877 - DNA, 15 bp, Homo sapiens
ataactctcaccatc

SEQ ID NO: 1806878 - DNA, 15 bp, Homo sapiens
taactctcaccatct

SEQ ID NO: 1806879 - DNA, 15 bp, Homo sapiens
aactctcaccatctg

SEQ ID NO: 1806880 - DNA, 15 bp, Homo sapiens
actctcaccatctgg

SEQ ID NO: 1806881 - DNA, 15 bp, Homo sapiens
ctctcaccatctggg

SEQ ID NO: 1806882 - DNA, 15 bp, Homo sapiens
tctcaccatctgggt

SEQ ID NO: 1806883 - DNA, 15 bp, Homo sapiens
ctcaccatctgggta

SEQ ID NO: 1806884 - DNA, 15 bp, Homo sapiens
ccatctgggtagaat

SEQ ID NO: 1806885 - DNA, 15 bp, Homo sapiens
catctgggtagaatt

SEQ ID NO: 1806886 - DNA, 15 bp, Homo sapiens
atctgggtagaattc

SEQ ID NO: 1806887 - DNA, 15 bp, Homo sapiens
tctgggtagaattct

SEQ ID NO: 1806888 - DNA, 15 bp, Homo sapiens
ctgggtagaattctc

SEQ ID NO: 1806889 - DNA, 15 bp, Homo sapiens
tgggtagaattctcc

SEQ ID NO: 1806890 - DNA, 15 bp, Homo sapiens
gggtagaattctccc

SEQ ID NO: 1806891 - DNA, 15 bp, Homo sapiens
ggtagaattctccct

SEQ ID NO: 1806892 - DNA, 15 bp, Homo sapiens
gtagaattctcccta

SEQ ID NO: 1806893 - DNA, 15 bp, Homo sapiens
tagaattctccctat

SEQ ID NO: 1806894 - DNA, 15 bp, Homo sapiens
agaattctccctatc

SEQ ID NO: 1806895 - DNA, 15 bp, Homo sapiens
gaattctccctatct

SEQ ID NO: 1806896 - DNA, 15 bp, Homo sapiens
aattctccctatcta

SEQ ID NO: 1806897 - DNA, 15 bp, Homo sapiens
attctccctatctag

SEQ ID NO: 1806898 - DNA, 15 bp, Homo sapiens
ttctccctatctaga

SEQ ID NO: 1806899 - DNA, 15 bp, Homo sapiens
tctccctatctagat

SEQ ID NO: 1806900 - DNA, 15 bp, Homo sapiens
ctccctatctagata

SEQ ID NO: 1806901 - DNA, 15 bp, Homo sapiens
tccctatctagatag

SEQ ID NO: 1806902 - DNA, 15 bp, Homo sapiens
ccctatctagataga

SEQ ID NO: 1806903 - DNA, 15 bp, Homo sapiens
cctatctagatagaa

SEQ ID NO: 1806904 - DNA, 15 bp, Homo sapiens
aattctcactgtcta

SEQ ID NO: 1806905 - DNA, 15 bp, Homo sapiens
attctcactgtctac

SEQ ID NO: 1806906 - DNA, 15 bp, Homo sapiens
ttctcactgtctaca

SEQ ID NO: 1806907 - DNA, 15 bp, Homo sapiens
tctcactgtctacat

SEQ ID NO: 1806908 - DNA, 15 bp, Homo sapiens
ctcactgtctacata

SEQ ID NO: 1806909 - DNA, 15 bp, Homo sapiens
tcactgtctacatag

SEQ ID NO: 1806910 - DNA, 15 bp, Homo sapiens
cactgtctacataga

SEQ ID NO: 1806911 - DNA, 15 bp, Homo sapiens
actgtctacatagag

SEQ ID NO: 1806912 - DNA, 15 bp, Homo sapiens
ctgtctacatagagc

SEQ ID NO: 1806913 - DNA, 15 bp, Homo sapiens
tgtctacatagagct

SEQ ID NO: 1806914 - DNA, 15 bp, Homo sapiens
gtctacatagagctc

SEQ ID NO: 1806915 - DNA, 15 bp, Homo sapiens
tctacatagagctct

SEQ ID NO: 1806916 - DNA, 15 bp, Homo sapiens
ctacatagagctctc

SEQ ID NO: 1806917 - DNA, 15 bp, Homo sapiens
tacatagagctctcg

SEQ ID NO: 1806918 - DNA, 15 bp, Homo sapiens
acatagagctctcgc

SEQ ID NO: 1806919 - DNA, 15 bp, Homo sapiens
catagagctctcgct

SEQ ID NO: 1806920 - DNA, 15 bp, Homo sapiens
atagagctctcgcta

SEQ ID NO: 1806921 - DNA, 15 bp, Homo sapiens
tagagctctcgctat

SEQ ID NO: 1806922 - DNA, 15 bp, Homo sapiens
agagctctcgctatc

SEQ ID NO: 1806923 - DNA, 15 bp, Homo sapiens
gagctctcgctatct

SEQ ID NO: 1806924 - DNA, 15 bp, Homo sapiens
agctctcgctatctg

SEQ ID NO: 1806925 - DNA, 15 bp, Homo sapiens
gctctcgctatctgt

SEQ ID NO: 1806926 - DNA, 15 bp, Homo sapiens
ctctcgctatctgtc

SEQ ID NO: 1806927 - DNA, 15 bp, Homo sapiens
tctcgctatctgtct

SEQ ID NO: 1806928 - DNA, 15 bp, Homo sapiens
ctcgctatctgtctg

SEQ ID NO: 1806929 - DNA, 15 bp, Homo sapiens
tcgctatctgtctgg

SEQ ID NO: 1806930 - DNA, 15 bp, Homo sapiens
cgctatctgtctgga

SEQ ID NO: 1806931 - DNA, 15 bp, Homo sapiens
tagaactctcactga

SEQ ID NO: 1806932 - DNA, 15 bp, Homo sapiens
agaactctcactgac

SEQ ID NO: 1806933 - DNA, 15 bp, Homo sapiens
gaactctcactgact

SEQ ID NO: 1806934 - DNA, 15 bp, Homo sapiens
aactctcactgactg

SEQ ID NO: 1806935 - DNA, 15 bp, Homo sapiens
actctcactgactgg

SEQ ID NO: 1806936 - DNA, 15 bp, Homo sapiens
ctctcactgactgga

SEQ ID NO: 1806937 - DNA, 15 bp, Homo sapiens
tctcactgactggat

SEQ ID NO: 1806938 - DNA, 15 bp, Homo sapiens
ctcactgactggata

SEQ ID NO: 1806939 - DNA, 15 bp, Homo sapiens
tcactgactggatag

SEQ ID NO: 1806940 - DNA, 15 bp, Homo sapiens
cactgactggataga

SEQ ID NO: 1806941 - DNA, 15 bp, Homo sapiens
actgactggatagaa

SEQ ID NO: 1806942 - DNA, 15 bp, Homo sapiens
ctgactggatagaat

SEQ ID NO: 1806943 - DNA, 15 bp, Homo sapiens
tgactggatagaatt

SEQ ID NO: 1806944 - DNA, 15 bp, Homo sapiens
gactggatagaattc

SEQ ID NO: 1806945 - DNA, 15 bp, Homo sapiens
ttactctctggataa

SEQ ID NO: 1806946 - DNA, 15 bp, Homo sapiens
tactctctggataaa

SEQ ID NO: 1806947 - DNA, 15 bp, Homo sapiens
actctctggataaac

SEQ ID NO: 1806948 - DNA, 15 bp, Homo sapiens
ctctctggataaaca

SEQ ID NO: 1806949 - DNA, 15 bp, Homo sapiens
tctctggataaacat

SEQ ID NO: 1806950 - DNA, 15 bp, Homo sapiens
ctctggataaacatc

SEQ ID NO: 1806951 - DNA, 15 bp, Homo sapiens
tctggataaacatct

SEQ ID NO: 1806952 - DNA, 15 bp, Homo sapiens
ctggataaacatctc

SEQ ID NO: 1806953 - DNA, 15 bp, Homo sapiens
tggataaacatctca

SEQ ID NO: 1806954 - DNA, 15 bp, Homo sapiens
ggataaacatctcac

SEQ ID NO: 1806955 - DNA, 15 bp, Homo sapiens
gataaacatctcact

SEQ ID NO: 1806956 - DNA, 15 bp, Homo sapiens
ataaacatctcacta

SEQ ID NO: 1806957 - DNA, 15 bp, Homo sapiens
taaacatctcactat

SEQ ID NO: 1806958 - DNA, 15 bp, Homo sapiens
aaacatctcactatc

SEQ ID NO: 1806959 - DNA, 15 bp, Homo sapiens
aacatctcactatct

SEQ ID NO: 1806960 - DNA, 15 bp, Homo sapiens
acatctcactatctt

SEQ ID NO: 1806961 - DNA, 15 bp, Homo sapiens
catctcactatcttt

SEQ ID NO: 1806962 - DNA, 15 bp, Homo sapiens
atctcactatctttc

SEQ ID NO: 1806963 - DNA, 15 bp, Homo sapiens
agaactcttactact

SEQ ID NO: 1806964 - DNA, 15 bp, Homo sapiens
gaactcttactactt

SEQ ID NO: 1806965 - DNA, 15 bp, Homo sapiens
aactcttactacttg

SEQ ID NO: 1806966 - DNA, 15 bp, Homo sapiens
actcttactacttgg

SEQ ID NO: 1806967 - DNA, 15 bp, Homo sapiens
ctcttactacttgga

SEQ ID NO: 1806968 - DNA, 15 bp, Homo sapiens
tcttactacttggaa

SEQ ID NO: 1806969 - DNA, 15 bp, Homo sapiens
cttactacttggaaa

SEQ ID NO: 1806970 - DNA, 15 bp, Homo sapiens
ttactacttggaaag

SEQ ID NO: 1806971 - DNA, 15 bp, Homo sapiens
tactacttggaaaga

SEQ ID NO: 1806972 - DNA, 15 bp, Homo sapiens
actacttggaaagaa

SEQ ID NO: 1806973 - DNA, 15 bp, Homo sapiens
ctacttggaaagaat

SEQ ID NO: 1806974 - DNA, 15 bp, Homo sapiens
tacttggaaagaatg

SEQ ID NO: 1806975 - DNA, 15 bp, Homo sapiens
acttggaaagaatgc

SEQ ID NO: 1806976 - DNA, 15 bp, Homo sapiens
cttggaaagaatgct

SEQ ID NO: 1806977 - DNA, 15 bp, Homo sapiens
ttggaaagaatgctc

SEQ ID NO: 1806978 - DNA, 15 bp, Homo sapiens
tggaaagaatgctca

SEQ ID NO: 1806979 - DNA, 15 bp, Homo sapiens
ggaaagaatgctcac

SEQ ID NO: 1806980 - DNA, 15 bp, Homo sapiens
gaaagaatgctcact

SEQ ID NO: 1806981 - DNA, 15 bp, Homo sapiens
aaagaatgctcacta

SEQ ID NO: 1806982 - DNA, 15 bp, Homo sapiens
aagaatgctcactat

SEQ ID NO: 1806983 - DNA, 15 bp, Homo sapiens
agaatgctcactatc

SEQ ID NO: 1806984 - DNA, 15 bp, Homo sapiens
gaatgctcactatct

SEQ ID NO: 1806985 - DNA, 15 bp, Homo sapiens
aatgctcactatctg

SEQ ID NO: 1806986 - DNA, 15 bp, Homo sapiens
atgctcactatctgt

SEQ ID NO: 1806987 - DNA, 15 bp, Homo sapiens
tgctcactatctgta

SEQ ID NO: 1806988 - DNA, 15 bp, Homo sapiens
gctcactatctgtat

SEQ ID NO: 1806989 - DNA, 15 bp, Homo sapiens
ctcactatctgtata

SEQ ID NO: 1806990 - DNA, 15 bp, Homo sapiens
tcactatctgtatag

SEQ ID NO: 1806991 - DNA, 15 bp, Homo sapiens
cactatctgtataga

SEQ ID NO: 1806992 - DNA, 15 bp, Homo sapiens
ctgtatagaattcta

SEQ ID NO: 1806993 - DNA, 15 bp, Homo sapiens
tgtatagaattctaa

SEQ ID NO: 1806994 - DNA, 15 bp, Homo sapiens
gtatagaattctaac

SEQ ID NO: 1806995 - DNA, 15 bp, Homo sapiens
tatagaattctaacc

SEQ ID NO: 1806996 - DNA, 15 bp, Homo sapiens
atagaattctaacca

SEQ ID NO: 1806997 - DNA, 15 bp, Homo sapiens
tagaattctaaccat

SEQ ID NO: 1806998 - DNA, 15 bp, Homo sapiens
agaattctaaccatc

SEQ ID NO: 1806999 - DNA, 15 bp, Homo sapiens
gaattctaaccatct

SEQ ID NO: 1807000 - DNA, 15 bp, Homo sapiens
aattctaaccatctg

SEQ ID NO: 1807001 - DNA, 15 bp, Homo sapiens
attctaaccatctgg

SEQ ID NO: 1807002 - DNA, 15 bp, Homo sapiens
ttctaaccatctggg

SEQ ID NO: 1807003 - DNA, 15 bp, Homo sapiens
tctaaccatctgggt

SEQ ID NO: 1807004 - DNA, 15 bp, Homo sapiens
ctaaccatctgggta

SEQ ID NO: 1807005 - DNA, 15 bp, Homo sapiens
taaccatctgggtag

SEQ ID NO: 1807006 - DNA, 15 bp, Homo sapiens
aaccatctgggtaga

SEQ ID NO: 1807007 - DNA, 15 bp, Homo sapiens
tgggtagaattctca

SEQ ID NO: 1807008 - DNA, 15 bp, Homo sapiens
gggtagaattctcac

SEQ ID NO: 1807009 - DNA, 15 bp, Homo sapiens
ggtagaattctcact

SEQ ID NO: 1807010 - DNA, 15 bp, Homo sapiens
ctatctggatagaag

SEQ ID NO: 1807011 - DNA, 15 bp, Homo sapiens
tatctggatagaagt

SEQ ID NO: 1807012 - DNA, 15 bp, Homo sapiens
atctggatagaagtc

SEQ ID NO: 1807013 - DNA, 15 bp, Homo sapiens
atagaagtctcacta

SEQ ID NO: 1807014 - DNA, 15 bp, Homo sapiens
tagaagtctcactat

SEQ ID NO: 1807015 - DNA, 15 bp, Homo sapiens
agaagtctcactatc

SEQ ID NO: 1807016 - DNA, 15 bp, Homo sapiens
aagtctcactatcta

SEQ ID NO: 1807017 - DNA, 15 bp, Homo sapiens
agtctcactatctat

SEQ ID NO: 1807018 - DNA, 15 bp, Homo sapiens
gtctcactatctatt

SEQ ID NO: 1807019 - DNA, 15 bp, Homo sapiens
tctcactatctattt

SEQ ID NO: 1807020 - DNA, 15 bp, Homo sapiens
ctcactatctatttg

SEQ ID NO: 1807021 - DNA, 15 bp, Homo sapiens
tcactatctatttgg

SEQ ID NO: 1807022 - DNA, 15 bp, Homo sapiens
cactatctatttgga

SEQ ID NO: 1807023 - DNA, 15 bp, Homo sapiens
actatctatttggat

SEQ ID NO: 1807024 - DNA, 15 bp, Homo sapiens
ctatctatttggata

SEQ ID NO: 1807025 - DNA, 15 bp, Homo sapiens
tatctatttggatag

SEQ ID NO: 1807026 - DNA, 15 bp, Homo sapiens
atctatttggataga

SEQ ID NO: 1807027 - DNA, 15 bp, Homo sapiens
tctatttggatagaa

SEQ ID NO: 1807028 - DNA, 15 bp, Homo sapiens
agatctctcactatc

SEQ ID NO: 1807029 - DNA, 15 bp, Homo sapiens
gatctctcactatct

SEQ ID NO: 1807030 - DNA, 15 bp, Homo sapiens
atctctcactatctg

SEQ ID NO: 1807031 - DNA, 15 bp, Homo sapiens
tctctcactatctgt

SEQ ID NO: 1807032 - DNA, 15 bp, Homo sapiens
ctatctgtctggatc

SEQ ID NO: 1807033 - DNA, 15 bp, Homo sapiens
tatctgtctggatcg

SEQ ID NO: 1807034 - DNA, 15 bp, Homo sapiens
atctgtctggatcgt

SEQ ID NO: 1807035 - DNA, 15 bp, Homo sapiens
tctgtctggatcgta

SEQ ID NO: 1807036 - DNA, 15 bp, Homo sapiens
ctgtctggatcgtat

SEQ ID NO: 1807037 - DNA, 15 bp, Homo sapiens
tgtctggatcgtatt

SEQ ID NO: 1807038 - DNA, 15 bp, Homo sapiens
gtctggatcgtattc

SEQ ID NO: 1807039 - DNA, 15 bp, Homo sapiens
tctggatcgtattcc

SEQ ID NO: 1807040 - DNA, 15 bp, Homo sapiens
ctggatcgtattccc

SEQ ID NO: 1807041 - DNA, 15 bp, Homo sapiens
tggatcgtattccca

SEQ ID NO: 1807042 - DNA, 15 bp, Homo sapiens
ggatcgtattcccat

SEQ ID NO: 1807043 - DNA, 15 bp, Homo sapiens
gatcgtattcccatt

SEQ ID NO: 1807044 - DNA, 15 bp, Homo sapiens
atcgtattcccattc

SEQ ID NO: 1807045 - DNA, 15 bp, Homo sapiens
tcgtattcccattct

SEQ ID NO: 1807046 - DNA, 15 bp, Homo sapiens
cgtattcccattctg

SEQ ID NO: 1807047 - DNA, 15 bp, Homo sapiens
gtattcccattctgt

SEQ ID NO: 1807048 - DNA, 15 bp, Homo sapiens
tattcccattctgtg

SEQ ID NO: 1807049 - DNA, 15 bp, Homo sapiens
attcccattctgtgg

SEQ ID NO: 1807050 - DNA, 15 bp, Homo sapiens
ttcccattctgtgga

SEQ ID NO: 1807051 - DNA, 15 bp, Homo sapiens
tcccattctgtggat

SEQ ID NO: 1807052 - DNA, 15 bp, Homo sapiens
cccattctgtggata

SEQ ID NO: 1807053 - DNA, 15 bp, Homo sapiens
ccattctgtggatag

SEQ ID NO: 1807054 - DNA, 15 bp, Homo sapiens
cattctgtggataga

SEQ ID NO: 1807055 - DNA, 15 bp, Homo sapiens
attctgtggatagaa

SEQ ID NO: 1807056 - DNA, 15 bp, Homo sapiens
ttctgtggatagaac

SEQ ID NO: 1807057 - DNA, 15 bp, Homo sapiens
tctcactatcaatgc

SEQ ID NO: 1807058 - DNA, 15 bp, Homo sapiens
ctcactatcaatgcg

SEQ ID NO: 1807059 - DNA, 15 bp, Homo sapiens
tcactatcaatgcgg

SEQ ID NO: 1807060 - DNA, 15 bp, Homo sapiens
cactatcaatgcgga

SEQ ID NO: 1807061 - DNA, 15 bp, Homo sapiens
actatcaatgcggat

SEQ ID NO: 1807062 - DNA, 15 bp, Homo sapiens
ctatcaatgcggata

SEQ ID NO: 1807063 - DNA, 15 bp, Homo sapiens
tatcaatgcggatag

SEQ ID NO: 1807064 - DNA, 15 bp, Homo sapiens
atcaatgcggataga

SEQ ID NO: 1807065 - DNA, 15 bp, Homo sapiens
tcaatgcggatagaa

SEQ ID NO: 1807066 - DNA, 15 bp, Homo sapiens
caatgcggatagaat

SEQ ID NO: 1807067 - DNA, 15 bp, Homo sapiens
aatgcggatagaatt

SEQ ID NO: 1807068 - DNA, 15 bp, Homo sapiens
atgcggatagaattc

SEQ ID NO: 1807069 - DNA, 15 bp, Homo sapiens
tgcggatagaattct

SEQ ID NO: 1807070 - DNA, 15 bp, Homo sapiens
gcggatagaattctc

SEQ ID NO: 1807071 - DNA, 15 bp, Homo sapiens
ctggataaaactcta

SEQ ID NO: 1807072 - DNA, 15 bp, Homo sapiens
tggataaaactctat

SEQ ID NO: 1807073 - DNA, 15 bp, Homo sapiens
ggataaaactctatc

SEQ ID NO: 1807074 - DNA, 15 bp, Homo sapiens
gataaaactctatct

SEQ ID NO: 1807075 - DNA, 15 bp, Homo sapiens
ataaaactctatctg

SEQ ID NO: 1807076 - DNA, 15 bp, Homo sapiens
taaaactctatctgt

SEQ ID NO: 1807077 - DNA, 15 bp, Homo sapiens
aaaactctatctgtc

SEQ ID NO: 1807078 - DNA, 15 bp, Homo sapiens
aaactctatctgtct

SEQ ID NO: 1807079 - DNA, 15 bp, Homo sapiens
ggatagaattctcag

SEQ ID NO: 1807080 - DNA, 15 bp, Homo sapiens
gatagaattctcagc

SEQ ID NO: 1807081 - DNA, 15 bp, Homo sapiens
atagaattctcagca

SEQ ID NO: 1807082 - DNA, 15 bp, Homo sapiens
tagaattctcagcat

SEQ ID NO: 1807083 - DNA, 15 bp, Homo sapiens
agaattctcagcatc

SEQ ID NO: 1807084 - DNA, 15 bp, Homo sapiens
gaattctcagcatct

SEQ ID NO: 1807085 - DNA, 15 bp, Homo sapiens
aattctcagcatctg

SEQ ID NO: 1807086 - DNA, 15 bp, Homo sapiens
attctcagcatctgg

SEQ ID NO: 1807087 - DNA, 15 bp, Homo sapiens
ttctcagcatctgga

SEQ ID NO: 1807088 - DNA, 15 bp, Homo sapiens
tctcagcatctggat

SEQ ID NO: 1807089 - DNA, 15 bp, Homo sapiens
ctcagcatctggata

SEQ ID NO: 1807090 - DNA, 15 bp, Homo sapiens
tcagcatctggataa

SEQ ID NO: 1807091 - DNA, 15 bp, Homo sapiens
cagcatctggataaa

SEQ ID NO: 1807092 - DNA, 15 bp, Homo sapiens
agcatctggataaaa

SEQ ID NO: 1807093 - DNA, 15 bp, Homo sapiens
gcatctggataaaac

SEQ ID NO: 1807094 - DNA, 15 bp, Homo sapiens
tggataaaactctcc

SEQ ID NO: 1807095 - DNA, 15 bp, Homo sapiens
ggataaaactctccc

SEQ ID NO: 1807096 - DNA, 15 bp, Homo sapiens
gataaaactctccct

SEQ ID NO: 1807097 - DNA, 15 bp, Homo sapiens
ataaaactctccctg

SEQ ID NO: 1807098 - DNA, 15 bp, Homo sapiens
taaaactctccctgt

SEQ ID NO: 1807099 - DNA, 15 bp, Homo sapiens
aaaactctccctgtc

SEQ ID NO: 1807100 - DNA, 15 bp, Homo sapiens
aaactctccctgtct

SEQ ID NO: 1807101 - DNA, 15 bp, Homo sapiens
aactctccctgtctg

SEQ ID NO: 1807102 - DNA, 15 bp, Homo sapiens
actctccctgtctgt

SEQ ID NO: 1807103 - DNA, 15 bp, Homo sapiens
ctctccctgtctgtc

SEQ ID NO: 1807104 - DNA, 15 bp, Homo sapiens
tctccctgtctgtct

SEQ ID NO: 1807105 - DNA, 15 bp, Homo sapiens
ctccctgtctgtctg

SEQ ID NO: 1807106 - DNA, 15 bp, Homo sapiens
tccctgtctgtctgg

SEQ ID NO: 1807107 - DNA, 15 bp, Homo sapiens
ccctgtctgtctggt

SEQ ID NO: 1807108 - DNA, 15 bp, Homo sapiens
cctgtctgtctggta

SEQ ID NO: 1807109 - DNA, 15 bp, Homo sapiens
ctgtctgtctggtag

SEQ ID NO: 1807110 - DNA, 15 bp, Homo sapiens
tgtctgtctggtaga

SEQ ID NO: 1807111 - DNA, 15 bp, Homo sapiens
gtctgtctggtagaa

SEQ ID NO: 1807112 - DNA, 15 bp, Homo sapiens
ggatagaactctcat

SEQ ID NO: 1807113 - DNA, 15 bp, Homo sapiens
gatagaactctcatt

SEQ ID NO: 1807114 - DNA, 15 bp, Homo sapiens
atagaactctcatta

SEQ ID NO: 1807115 - DNA, 15 bp, Homo sapiens
tagaactctcattat

SEQ ID NO: 1807116 - DNA, 15 bp, Homo sapiens
agaactctcattatc

SEQ ID NO: 1807117 - DNA, 15 bp, Homo sapiens
gaactctcattatct

SEQ ID NO: 1807118 - DNA, 15 bp, Homo sapiens
aactctcattatctg

SEQ ID NO: 1807119 - DNA, 15 bp, Homo sapiens
actctcattatctgg

SEQ ID NO: 1807120 - DNA, 15 bp, Homo sapiens
ctctcattatctgga

SEQ ID NO: 1807121 - DNA, 15 bp, Homo sapiens
tctcattatctggat

SEQ ID NO: 1807122 - DNA, 15 bp, Homo sapiens
ctcattatctggata

SEQ ID NO: 1807123 - DNA, 15 bp, Homo sapiens
tcattatctggatag

SEQ ID NO: 1807124 - DNA, 15 bp, Homo sapiens
cattatctggataga

SEQ ID NO: 1807125 - DNA, 15 bp, Homo sapiens
attatctggatagaa

SEQ ID NO: 1807126 - DNA, 15 bp, Homo sapiens
ctatctttctggata

SEQ ID NO: 1807127 - DNA, 15 bp, Homo sapiens
tatctttctggatag

SEQ ID NO: 1807128 - DNA, 15 bp, Homo sapiens
atctttctggataga

SEQ ID NO: 1807129 - DNA, 15 bp, Homo sapiens
ttctggatagaacta

SEQ ID NO: 1807130 - DNA, 15 bp, Homo sapiens
tctggatagaactat

SEQ ID NO: 1807131 - DNA, 15 bp, Homo sapiens
ctggatagaactatc

SEQ ID NO: 1807132 - DNA, 15 bp, Homo sapiens
tggatagaactatca

SEQ ID NO: 1807133 - DNA, 15 bp, Homo sapiens
ggatagaactatcac

SEQ ID NO: 1807134 - DNA, 15 bp, Homo sapiens
gatagaactatcacc

SEQ ID NO: 1807135 - DNA, 15 bp, Homo sapiens
atagaactatcaccc

SEQ ID NO: 1807136 - DNA, 15 bp, Homo sapiens
tagaactatcaccct

SEQ ID NO: 1807137 - DNA, 15 bp, Homo sapiens
agaactatcaccctc

SEQ ID NO: 1807138 - DNA, 15 bp, Homo sapiens
gaactatcaccctct

SEQ ID NO: 1807139 - DNA, 15 bp, Homo sapiens
aactatcaccctctg

SEQ ID NO: 1807140 - DNA, 15 bp, Homo sapiens
actatcaccctctgg

SEQ ID NO: 1807141 - DNA, 15 bp, Homo sapiens
ctatcaccctctgga

SEQ ID NO: 1807142 - DNA, 15 bp, Homo sapiens
tatcaccctctggat

SEQ ID NO: 1807143 - DNA, 15 bp, Homo sapiens
atcaccctctggata

SEQ ID NO: 1807144 - DNA, 15 bp, Homo sapiens
tagaattctcactcc

SEQ ID NO: 1807145 - DNA, 15 bp, Homo sapiens
agaattctcactccc

SEQ ID NO: 1807146 - DNA, 15 bp, Homo sapiens
gaattctcactcccc

SEQ ID NO: 1807147 - DNA, 15 bp, Homo sapiens
aattctcactcccca

SEQ ID NO: 1807148 - DNA, 15 bp, Homo sapiens
attctcactccccag

SEQ ID NO: 1807149 - DNA, 15 bp, Homo sapiens
ttctcactccccaga

SEQ ID NO: 1807150 - DNA, 15 bp, Homo sapiens
tctcactccccagat

SEQ ID NO: 1807151 - DNA, 15 bp, Homo sapiens
ctcactccccagata

SEQ ID NO: 1807152 - DNA, 15 bp, Homo sapiens
tcactccccagatag

SEQ ID NO: 1807153 - DNA, 15 bp, Homo sapiens
cactccccagatagt

SEQ ID NO: 1807154 - DNA, 15 bp, Homo sapiens
actccccagatagtg

SEQ ID NO: 1807155 - DNA, 15 bp, Homo sapiens
ctccccagatagtgg

SEQ ID NO: 1807156 - DNA, 15 bp, Homo sapiens
tccccagatagtgga

SEQ ID NO: 1807157 - DNA, 15 bp, Homo sapiens
ccccagatagtggac

SEQ ID NO: 1807158 - DNA, 15 bp, Homo sapiens
cccagatagtggaca

SEQ ID NO: 1807159 - DNA, 15 bp, Homo sapiens
ccagatagtggacac

SEQ ID NO: 1807160 - DNA, 15 bp, Homo sapiens
cagatagtggacact

SEQ ID NO: 1807161 - DNA, 15 bp, Homo sapiens
agatagtggacacta

SEQ ID NO: 1807162 - DNA, 15 bp, Homo sapiens
gatagtggacactat

SEQ ID NO: 1807163 - DNA, 15 bp, Homo sapiens
atagtggacactatg

SEQ ID NO: 1807164 - DNA, 15 bp, Homo sapiens
tagtggacactatgt

SEQ ID NO: 1807165 - DNA, 15 bp, Homo sapiens
agtggacactatgtc

SEQ ID NO: 1807166 - DNA, 15 bp, Homo sapiens
gtggacactatgtct

SEQ ID NO: 1807167 - DNA, 15 bp, Homo sapiens
tggacactatgtctc

SEQ ID NO: 1807168 - DNA, 15 bp, Homo sapiens
ggacactatgtctca

SEQ ID NO: 1807169 - DNA, 15 bp, Homo sapiens
gacactatgtctcac

SEQ ID NO: 1807170 - DNA, 15 bp, Homo sapiens
acactatgtctcact

SEQ ID NO: 1807171 - DNA, 15 bp, Homo sapiens
cactatgtctcacta

SEQ ID NO: 1807172 - DNA, 15 bp, Homo sapiens
actatgtctcactat

SEQ ID NO: 1807173 - DNA, 15 bp, Homo sapiens
ctatgtctcactatc

SEQ ID NO: 1807174 - DNA, 15 bp, Homo sapiens
tatgtctcactatcc

SEQ ID NO: 1807175 - DNA, 15 bp, Homo sapiens
atgtctcactatccg

SEQ ID NO: 1807176 - DNA, 15 bp, Homo sapiens
tgtctcactatccgg

SEQ ID NO: 1807177 - DNA, 15 bp, Homo sapiens
gtctcactatccgga

SEQ ID NO: 1807178 - DNA, 15 bp, Homo sapiens
cactatccggatagt

SEQ ID NO: 1807179 - DNA, 15 bp, Homo sapiens
actatccggatagtg

SEQ ID NO: 1807180 - DNA, 15 bp, Homo sapiens
ctatccggatagtgg

SEQ ID NO: 1807181 - DNA, 15 bp, Homo sapiens
tatccggatagtgga

SEQ ID NO: 1807182 - DNA, 15 bp, Homo sapiens
atccggatagtggac

SEQ ID NO: 1807183 - DNA, 15 bp, Homo sapiens
tccggatagtggaca

SEQ ID NO: 1807184 - DNA, 15 bp, Homo sapiens
ccggatagtggacat

SEQ ID NO: 1807185 - DNA, 15 bp, Homo sapiens
cggatagtggacata

SEQ ID NO: 1807186 - DNA, 15 bp, Homo sapiens
ggatagtggacataa

SEQ ID NO: 1807187 - DNA, 15 bp, Homo sapiens
gatagtggacataat

SEQ ID NO: 1807188 - DNA, 15 bp, Homo sapiens
atagtggacataatt

SEQ ID NO: 1807189 - DNA, 15 bp, Homo sapiens
tagtggacataattc

SEQ ID NO: 1807190 - DNA, 15 bp, Homo sapiens
agtggacataattct

SEQ ID NO: 1807191 - DNA, 15 bp, Homo sapiens
gtggacataattctc

SEQ ID NO: 1807192 - DNA, 15 bp, Homo sapiens
tggacataattctca

SEQ ID NO: 1807193 - DNA, 15 bp, Homo sapiens
ggacataattctcac

SEQ ID NO: 1807194 - DNA, 15 bp, Homo sapiens
gacataattctcact

SEQ ID NO: 1807195 - DNA, 15 bp, Homo sapiens
acataattctcacta

SEQ ID NO: 1807196 - DNA, 15 bp, Homo sapiens
cataattctcactat

SEQ ID NO: 1807197 - DNA, 15 bp, Homo sapiens
ataattctcactatc

SEQ ID NO: 1807198 - DNA, 15 bp, Homo sapiens
taattctcactatcc

SEQ ID NO: 1807199 - DNA, 15 bp, Homo sapiens
aattctcactatccg

SEQ ID NO: 1807200 - DNA, 15 bp, Homo sapiens
attctcactatccgg

SEQ ID NO: 1807201 - DNA, 15 bp, Homo sapiens
ttctcactatccgga

SEQ ID NO: 1807202 - DNA, 15 bp, Homo sapiens
ctatccggatagaaa

SEQ ID NO: 1807203 - DNA, 15 bp, Homo sapiens
tatccggatagaaat

SEQ ID NO: 1807204 - DNA, 15 bp, Homo sapiens
atccggatagaaatt

SEQ ID NO: 1807205 - DNA, 15 bp, Homo sapiens
tccggatagaaattt

SEQ ID NO: 1807206 - DNA, 15 bp, Homo sapiens
ccggatagaaatttc

SEQ ID NO: 1807207 - DNA, 15 bp, Homo sapiens
cggatagaaatttca

SEQ ID NO: 1807208 - DNA, 15 bp, Homo sapiens
ggatagaaatttcac

SEQ ID NO: 1807209 - DNA, 15 bp, Homo sapiens
gatagaaatttcacc

SEQ ID NO: 1807210 - DNA, 15 bp, Homo sapiens
atagaaatttcacca

SEQ ID NO: 1807211 - DNA, 15 bp, Homo sapiens
tagaaatttcaccat

SEQ ID NO: 1807212 - DNA, 15 bp, Homo sapiens
agaaatttcaccatc

SEQ ID NO: 1807213 - DNA, 15 bp, Homo sapiens
gaaatttcaccatct

SEQ ID NO: 1807214 - DNA, 15 bp, Homo sapiens
aaatttcaccatctg

SEQ ID NO: 1807215 - DNA, 15 bp, Homo sapiens
aatttcaccatctgc

SEQ ID NO: 1807216 - DNA, 15 bp, Homo sapiens
atttcaccatctgca

SEQ ID NO: 1807217 - DNA, 15 bp, Homo sapiens
tttcaccatctgcat

SEQ ID NO: 1807218 - DNA, 15 bp, Homo sapiens
ttcaccatctgcata

SEQ ID NO: 1807219 - DNA, 15 bp, Homo sapiens
tcaccatctgcatag

SEQ ID NO: 1807220 - DNA, 15 bp, Homo sapiens
caccatctgcataga

SEQ ID NO: 1807221 - DNA, 15 bp, Homo sapiens
accatctgcatagaa

SEQ ID NO: 1807222 - DNA, 15 bp, Homo sapiens
ccatctgcatagaac

SEQ ID NO: 1807223 - DNA, 15 bp, Homo sapiens
catctgcatagaact

SEQ ID NO: 1807224 - DNA, 15 bp, Homo sapiens
atctgcatagaactc

SEQ ID NO: 1807225 - DNA, 15 bp, Homo sapiens
gaactctcactaccg

SEQ ID NO: 1807226 - DNA, 15 bp, Homo sapiens
aactctcactaccgg

SEQ ID NO: 1807227 - DNA, 15 bp, Homo sapiens
actctcactaccggg

SEQ ID NO: 1807228 - DNA, 15 bp, Homo sapiens
ctctcactaccggga

SEQ ID NO: 1807229 - DNA, 15 bp, Homo sapiens
tctcactaccgggat

SEQ ID NO: 1807230 - DNA, 15 bp, Homo sapiens
ctcactaccgggata

SEQ ID NO: 1807231 - DNA, 15 bp, Homo sapiens
tcactaccgggatag

SEQ ID NO: 1807232 - DNA, 15 bp, Homo sapiens
cactaccgggataga

SEQ ID NO: 1807233 - DNA, 15 bp, Homo sapiens
actaccgggatagaa

SEQ ID NO: 1807234 - DNA, 15 bp, Homo sapiens
ctaccgggatagaat

SEQ ID NO: 1807235 - DNA, 15 bp, Homo sapiens
taccgggatagaatt

SEQ ID NO: 1807236 - DNA, 15 bp, Homo sapiens
accgggatagaattc

SEQ ID NO: 1807237 - DNA, 15 bp, Homo sapiens
ccgggatagaattct

SEQ ID NO: 1807238 - DNA, 15 bp, Homo sapiens
tctcaccatctgcat

SEQ ID NO: 1807239 - DNA, 15 bp, Homo sapiens
ctcaccatctgcatt

SEQ ID NO: 1807240 - DNA, 15 bp, Homo sapiens
tcaccatctgcattg

SEQ ID NO: 1807241 - DNA, 15 bp, Homo sapiens
caccatctgcattga

SEQ ID NO: 1807242 - DNA, 15 bp, Homo sapiens
accatctgcattgaa

SEQ ID NO: 1807243 - DNA, 15 bp, Homo sapiens
ccatctgcattgaaa

SEQ ID NO: 1807244 - DNA, 15 bp, Homo sapiens
catctgcattgaaat

SEQ ID NO: 1807245 - DNA, 15 bp, Homo sapiens
atctgcattgaaatc

SEQ ID NO: 1807246 - DNA, 15 bp, Homo sapiens
tctgcattgaaatct

SEQ ID NO: 1807247 - DNA, 15 bp, Homo sapiens
ctgcattgaaatctc

SEQ ID NO: 1807248 - DNA, 15 bp, Homo sapiens
tgcattgaaatctca

SEQ ID NO: 1807249 - DNA, 15 bp, Homo sapiens
gcattgaaatctcac

SEQ ID NO: 1807250 - DNA, 15 bp, Homo sapiens
cattgaaatctcact

SEQ ID NO: 1807251 - DNA, 15 bp, Homo sapiens
attgaaatctcacta

SEQ ID NO: 1807252 - DNA, 15 bp, Homo sapiens
ttgaaatctcactat

SEQ ID NO: 1807253 - DNA, 15 bp, Homo sapiens
tgaaatctcactatc

SEQ ID NO: 1807254 - DNA, 15 bp, Homo sapiens
aaatctcactatcta

SEQ ID NO: 1807255 - DNA, 15 bp, Homo sapiens
aatctcactatctat

SEQ ID NO: 1807256 - DNA, 15 bp, Homo sapiens
atctcactatctatc

SEQ ID NO: 1807257 - DNA, 15 bp, Homo sapiens
ggatagaattatcac

SEQ ID NO: 1807258 - DNA, 15 bp, Homo sapiens
actctcactatctac

SEQ ID NO: 1807259 - DNA, 15 bp, Homo sapiens
ctctcactatctacc

SEQ ID NO: 1807260 - DNA, 15 bp, Homo sapiens
tctcactatctacct

SEQ ID NO: 1807261 - DNA, 15 bp, Homo sapiens
ctcactatctacctc

SEQ ID NO: 1807262 - DNA, 15 bp, Homo sapiens
tcactatctacctcg

SEQ ID NO: 1807263 - DNA, 15 bp, Homo sapiens
cactatctacctcga

SEQ ID NO: 1807264 - DNA, 15 bp, Homo sapiens
actatctacctcgat

SEQ ID NO: 1807265 - DNA, 15 bp, Homo sapiens
ctatctacctcgata

SEQ ID NO: 1807266 - DNA, 15 bp, Homo sapiens
tatctacctcgatat

SEQ ID NO: 1807267 - DNA, 15 bp, Homo sapiens
atctacctcgatata

SEQ ID NO: 1807268 - DNA, 15 bp, Homo sapiens
tctacctcgatataa

SEQ ID NO: 1807269 - DNA, 15 bp, Homo sapiens
ctacctcgatataat

SEQ ID NO: 1807270 - DNA, 15 bp, Homo sapiens
tacctcgatataatt

SEQ ID NO: 1807271 - DNA, 15 bp, Homo sapiens
acctcgatataattc

SEQ ID NO: 1807272 - DNA, 15 bp, Homo sapiens
cctcgatataattct

SEQ ID NO: 1807273 - DNA, 15 bp, Homo sapiens
ctcgatataattctc

SEQ ID NO: 1807274 - DNA, 15 bp, Homo sapiens
tcgatataattctca

SEQ ID NO: 1807275 - DNA, 15 bp, Homo sapiens
cgatataattctcac

SEQ ID NO: 1807276 - DNA, 15 bp, Homo sapiens
ctctggatagaacta

SEQ ID NO: 1807277 - DNA, 15 bp, Homo sapiens
tctggatagaactag

SEQ ID NO: 1807278 - DNA, 15 bp, Homo sapiens
ctggatagaactagc

SEQ ID NO: 1807279 - DNA, 15 bp, Homo sapiens
tggatagaactagca

SEQ ID NO: 1807280 - DNA, 15 bp, Homo sapiens
ggatagaactagcac

SEQ ID NO: 1807281 - DNA, 15 bp, Homo sapiens
gatagaactagcact

SEQ ID NO: 1807282 - DNA, 15 bp, Homo sapiens
atagaactagcacta

SEQ ID NO: 1807283 - DNA, 15 bp, Homo sapiens
tagaactagcactat

SEQ ID NO: 1807284 - DNA, 15 bp, Homo sapiens
agaactagcactatg

SEQ ID NO: 1807285 - DNA, 15 bp, Homo sapiens
gaactagcactatgt

SEQ ID NO: 1807286 - DNA, 15 bp, Homo sapiens
aactagcactatgtg

SEQ ID NO: 1807287 - DNA, 15 bp, Homo sapiens
actagcactatgtga

SEQ ID NO: 1807288 - DNA, 15 bp, Homo sapiens
ctagcactatgtgaa

SEQ ID NO: 1807289 - DNA, 15 bp, Homo sapiens
gcactatgtgaatag

SEQ ID NO: 1807290 - DNA, 15 bp, Homo sapiens
cactatgtgaataga

SEQ ID NO: 1807291 - DNA, 15 bp, Homo sapiens
actatgtgaatagaa

SEQ ID NO: 1807292 - DNA, 15 bp, Homo sapiens
ctatgtgaatagaat

SEQ ID NO: 1807293 - DNA, 15 bp, Homo sapiens
tatgtgaatagaatt

SEQ ID NO: 1807294 - DNA, 15 bp, Homo sapiens
atgtgaatagaattc

SEQ ID NO: 1807295 - DNA, 15 bp, Homo sapiens
tgtgaatagaattct

SEQ ID NO: 1807296 - DNA, 15 bp, Homo sapiens
gtgaatagaattctt

SEQ ID NO: 1807297 - DNA, 15 bp, Homo sapiens
tgaatagaattctta

SEQ ID NO: 1807298 - DNA, 15 bp, Homo sapiens
gaatagaattcttac

SEQ ID NO: 1807299 - DNA, 15 bp, Homo sapiens
aatagaattcttact

SEQ ID NO: 1807300 - DNA, 15 bp, Homo sapiens
actctcgctatctgt

SEQ ID NO: 1807301 - DNA, 15 bp, Homo sapiens
tagaactctcactaa

SEQ ID NO: 1807302 - DNA, 15 bp, Homo sapiens
agaactctcactaac

SEQ ID NO: 1807303 - DNA, 15 bp, Homo sapiens
aattcttactctctt

SEQ ID NO: 1807304 - DNA, 15 bp, Homo sapiens
attcttactctcttg

SEQ ID NO: 1807305 - DNA, 15 bp, Homo sapiens
ttcttactctcttgg

SEQ ID NO: 1807306 - DNA, 15 bp, Homo sapiens
tcttactctcttggt

SEQ ID NO: 1807307 - DNA, 15 bp, Homo sapiens
cttactctcttggta

SEQ ID NO: 1807308 - DNA, 15 bp, Homo sapiens
ttactctcttggtaa

SEQ ID NO: 1807309 - DNA, 15 bp, Homo sapiens
tactctcttggtaaa

SEQ ID NO: 1807310 - DNA, 15 bp, Homo sapiens
actctcttggtaaaa

SEQ ID NO: 1807311 - DNA, 15 bp, Homo sapiens
ctctcttggtaaaaa

SEQ ID NO: 1807312 - DNA, 15 bp, Homo sapiens
tctcttggtaaaaat

SEQ ID NO: 1807313 - DNA, 15 bp, Homo sapiens
ctcttggtaaaaatc

SEQ ID NO: 1807314 - DNA, 15 bp, Homo sapiens
tcttggtaaaaatct

SEQ ID NO: 1807315 - DNA, 15 bp, Homo sapiens
cttggtaaaaatctc

SEQ ID NO: 1807316 - DNA, 15 bp, Homo sapiens
ttggtaaaaatctca

SEQ ID NO: 1807317 - DNA, 15 bp, Homo sapiens
tggtaaaaatctcac

SEQ ID NO: 1807318 - DNA, 15 bp, Homo sapiens
ggtaaaaatctcact

SEQ ID NO: 1807319 - DNA, 15 bp, Homo sapiens
gtaaaaatctcacta

SEQ ID NO: 1807320 - DNA, 15 bp, Homo sapiens
taaaaatctcactat

SEQ ID NO: 1807321 - DNA, 15 bp, Homo sapiens
aaaaatctcactatc

SEQ ID NO: 1807322 - DNA, 15 bp, Homo sapiens
aaaatctcactatct

SEQ ID NO: 1807323 - DNA, 15 bp, Homo sapiens
aaatctcactatctt

SEQ ID NO: 1807324 - DNA, 15 bp, Homo sapiens
aatctcactatcttt

SEQ ID NO: 1807325 - DNA, 15 bp, Homo sapiens
ctggatagaactctt

SEQ ID NO: 1807326 - DNA, 15 bp, Homo sapiens
tggatagaactctta

SEQ ID NO: 1807327 - DNA, 15 bp, Homo sapiens
tcttactacctggaa

SEQ ID NO: 1807328 - DNA, 15 bp, Homo sapiens
cttactacctggaaa

SEQ ID NO: 1807329 - DNA, 15 bp, Homo sapiens
ttactacctggaaag

SEQ ID NO: 1807330 - DNA, 15 bp, Homo sapiens
tactacctggaaaga

SEQ ID NO: 1807331 - DNA, 15 bp, Homo sapiens
actacctggaaagaa

SEQ ID NO: 1807332 - DNA, 15 bp, Homo sapiens
ctacctggaaagaac

SEQ ID NO: 1807333 - DNA, 15 bp, Homo sapiens
tacctggaaagaact

SEQ ID NO: 1807334 - DNA, 15 bp, Homo sapiens
acctggaaagaactc

SEQ ID NO: 1807335 - DNA, 15 bp, Homo sapiens
cctggaaagaactct

SEQ ID NO: 1807336 - DNA, 15 bp, Homo sapiens
ctggaaagaactctc

SEQ ID NO: 1807337 - DNA, 15 bp, Homo sapiens
tggaaagaactctca

SEQ ID NO: 1807338 - DNA, 15 bp, Homo sapiens
ggaaagaactctcag

SEQ ID NO: 1807339 - DNA, 15 bp, Homo sapiens
gaaagaactctcagt

SEQ ID NO: 1807340 - DNA, 15 bp, Homo sapiens
aaagaactctcagta

SEQ ID NO: 1807341 - DNA, 15 bp, Homo sapiens
aagaactctcagtat

SEQ ID NO: 1807342 - DNA, 15 bp, Homo sapiens
agaactctcagtatc

SEQ ID NO: 1807343 - DNA, 15 bp, Homo sapiens
gaactctcagtatct

SEQ ID NO: 1807344 - DNA, 15 bp, Homo sapiens
aactctcagtatctg

SEQ ID NO: 1807345 - DNA, 15 bp, Homo sapiens
actctcagtatctgg

SEQ ID NO: 1807346 - DNA, 15 bp, Homo sapiens
ctctcagtatctggc

SEQ ID NO: 1807347 - DNA, 15 bp, Homo sapiens
tctcagtatctggct

SEQ ID NO: 1807348 - DNA, 15 bp, Homo sapiens
ctcagtatctggcta

SEQ ID NO: 1807349 - DNA, 15 bp, Homo sapiens
tcagtatctggctag

SEQ ID NO: 1807350 - DNA, 15 bp, Homo sapiens
cagtatctggctaga

SEQ ID NO: 1807351 - DNA, 15 bp, Homo sapiens
agtatctggctagat

SEQ ID NO: 1807352 - DNA, 15 bp, Homo sapiens
gtatctggctagatt

SEQ ID NO: 1807353 - DNA, 15 bp, Homo sapiens
tatctggctagattt

SEQ ID NO: 1807354 - DNA, 15 bp, Homo sapiens
atctggctagatttc

SEQ ID NO: 1807355 - DNA, 15 bp, Homo sapiens
tctggctagatttct

SEQ ID NO: 1807356 - DNA, 15 bp, Homo sapiens
ctggctagatttctc

SEQ ID NO: 1807357 - DNA, 15 bp, Homo sapiens
tggctagatttctca

SEQ ID NO: 1807358 - DNA, 15 bp, Homo sapiens
ggctagatttctcac

SEQ ID NO: 1807359 - DNA, 15 bp, Homo sapiens
gctagatttctcacc

SEQ ID NO: 1807360 - DNA, 15 bp, Homo sapiens
ctagatttctcacca

SEQ ID NO: 1807361 - DNA, 15 bp, Homo sapiens
tagatttctcaccat

SEQ ID NO: 1807362 - DNA, 15 bp, Homo sapiens
agatttctcaccatc

SEQ ID NO: 1807363 - DNA, 15 bp, Homo sapiens
gatttctcaccatct

SEQ ID NO: 1807364 - DNA, 15 bp, Homo sapiens
atttctcaccatctg

SEQ ID NO: 1807365 - DNA, 15 bp, Homo sapiens
tttctcaccatctgg

SEQ ID NO: 1807366 - DNA, 15 bp, Homo sapiens
ttctcaccatctggg

SEQ ID NO: 1807367 - DNA, 15 bp, Homo sapiens
agaattctcactctt

SEQ ID NO: 1807368 - DNA, 15 bp, Homo sapiens
gaattctcactcttt

SEQ ID NO: 1807369 - DNA, 15 bp, Homo sapiens
aattctcactctttg

SEQ ID NO: 1807370 - DNA, 15 bp, Homo sapiens
attctcactctttgg

SEQ ID NO: 1807371 - DNA, 15 bp, Homo sapiens
ttctcactctttgga

SEQ ID NO: 1807372 - DNA, 15 bp, Homo sapiens
tctcactctttggat

SEQ ID NO: 1807373 - DNA, 15 bp, Homo sapiens
ctcactctttggata

SEQ ID NO: 1807374 - DNA, 15 bp, Homo sapiens
tcactctttggatag

SEQ ID NO: 1807375 - DNA, 15 bp, Homo sapiens
cactctttggataga

SEQ ID NO: 1807376 - DNA, 15 bp, Homo sapiens
actctttggatagaa

SEQ ID NO: 1807377 - DNA, 15 bp, Homo sapiens
ctctttggatagaac

SEQ ID NO: 1807378 - DNA, 15 bp, Homo sapiens
tctttggatagaact

SEQ ID NO: 1807379 - DNA, 15 bp, Homo sapiens
ctttggatagaactc

SEQ ID NO: 1807380 - DNA, 15 bp, Homo sapiens
ttggatagaactctc

SEQ ID NO: 1807381 - DNA, 15 bp, Homo sapiens
tcagcatctggatag

SEQ ID NO: 1807382 - DNA, 15 bp, Homo sapiens
cagcatctggataga

SEQ ID NO: 1807383 - DNA, 15 bp, Homo sapiens
agcatctggatagaa

SEQ ID NO: 1807384 - DNA, 15 bp, Homo sapiens
gcatctggatagaac

SEQ ID NO: 1807385 - DNA, 15 bp, Homo sapiens
cactatctgggtagt

SEQ ID NO: 1807386 - DNA, 15 bp, Homo sapiens
actatctgggtagta

SEQ ID NO: 1807387 - DNA, 15 bp, Homo sapiens
ctatctgggtagtat

SEQ ID NO: 1807388 - DNA, 15 bp, Homo sapiens
tatctgggtagtatt

SEQ ID NO: 1807389 - DNA, 15 bp, Homo sapiens
atctgggtagtattc

SEQ ID NO: 1807390 - DNA, 15 bp, Homo sapiens
tctgggtagtattct

SEQ ID NO: 1807391 - DNA, 15 bp, Homo sapiens
ctgggtagtattctc

SEQ ID NO: 1807392 - DNA, 15 bp, Homo sapiens
tgggtagtattctca

SEQ ID NO: 1807393 - DNA, 15 bp, Homo sapiens
gggtagtattctcac

SEQ ID NO: 1807394 - DNA, 15 bp, Homo sapiens
ggtagtattctcact

SEQ ID NO: 1807395 - DNA, 15 bp, Homo sapiens
gtagtattctcactc

SEQ ID NO: 1807396 - DNA, 15 bp, Homo sapiens
tagtattctcactct

SEQ ID NO: 1807397 - DNA, 15 bp, Homo sapiens
agtattctcactctc

SEQ ID NO: 1807398 - DNA, 15 bp, Homo sapiens
gtattctcactctct

SEQ ID NO: 1807399 - DNA, 15 bp, Homo sapiens
tattctcactctctt

SEQ ID NO: 1807400 - DNA, 15 bp, Homo sapiens
attctcactctcttg

SEQ ID NO: 1807401 - DNA, 15 bp, Homo sapiens
ttctcactctcttgg

SEQ ID NO: 1807402 - DNA, 15 bp, Homo sapiens
tctcactctcttggt

SEQ ID NO: 1807403 - DNA, 15 bp, Homo sapiens
ctcactctcttggta

SEQ ID NO: 1807404 - DNA, 15 bp, Homo sapiens
tcactctcttggtag

SEQ ID NO: 1807405 - DNA, 15 bp, Homo sapiens
cactctcttggtaga

SEQ ID NO: 1807406 - DNA, 15 bp, Homo sapiens
actctcttggtagaa

SEQ ID NO: 1807407 - DNA, 15 bp, Homo sapiens
ctctcttggtagaac

SEQ ID NO: 1807408 - DNA, 15 bp, Homo sapiens
tctcttggtagaact

SEQ ID NO: 1807409 - DNA, 15 bp, Homo sapiens
ctcttggtagaactc

SEQ ID NO: 1807410 - DNA, 15 bp, Homo sapiens
tcttggtagaactct

SEQ ID NO: 1807411 - DNA, 15 bp, Homo sapiens
cttggtagaactctc

SEQ ID NO: 1807412 - DNA, 15 bp, Homo sapiens
ttggtagaactctca

SEQ ID NO: 1807413 - DNA, 15 bp, Homo sapiens
tggtagaactctcac

SEQ ID NO: 1807414 - DNA, 15 bp, Homo sapiens
atagaattctcacaa

SEQ ID NO: 1807415 - DNA, 15 bp, Homo sapiens
tagaattctcacaat

SEQ ID NO: 1807416 - DNA, 15 bp, Homo sapiens
agaattctcacaatc

SEQ ID NO: 1807417 - DNA, 15 bp, Homo sapiens
gaattctcacaatct

SEQ ID NO: 1807418 - DNA, 15 bp, Homo sapiens
attctcacaatctgg

SEQ ID NO: 1807419 - DNA, 15 bp, Homo sapiens
ttctcacaatctgga

SEQ ID NO: 1807420 - DNA, 15 bp, Homo sapiens
caatctggatagaag

SEQ ID NO: 1807421 - DNA, 15 bp, Homo sapiens
aatctggatagaagt

SEQ ID NO: 1807422 - DNA, 15 bp, Homo sapiens
atagaagtcttactg

SEQ ID NO: 1807423 - DNA, 15 bp, Homo sapiens
tagaagtcttactgt

SEQ ID NO: 1807424 - DNA, 15 bp, Homo sapiens
agaagtcttactgtg

SEQ ID NO: 1807425 - DNA, 15 bp, Homo sapiens
gaagtcttactgtgt

SEQ ID NO: 1807426 - DNA, 15 bp, Homo sapiens
aagtcttactgtgta

SEQ ID NO: 1807427 - DNA, 15 bp, Homo sapiens
agtcttactgtgtat

SEQ ID NO: 1807428 - DNA, 15 bp, Homo sapiens
gtcttactgtgtatc

SEQ ID NO: 1807429 - DNA, 15 bp, Homo sapiens
tcttactgtgtatct

SEQ ID NO: 1807430 - DNA, 15 bp, Homo sapiens
cttactgtgtatctg

SEQ ID NO: 1807431 - DNA, 15 bp, Homo sapiens
ttactgtgtatctgg

SEQ ID NO: 1807432 - DNA, 15 bp, Homo sapiens
tactgtgtatctgga

SEQ ID NO: 1807433 - DNA, 15 bp, Homo sapiens
actgtgtatctggat

SEQ ID NO: 1807434 - DNA, 15 bp, Homo sapiens
ctgtgtatctggata

SEQ ID NO: 1807435 - DNA, 15 bp, Homo sapiens
tgtgtatctggatag

SEQ ID NO: 1807436 - DNA, 15 bp, Homo sapiens
gtgtatctggataga

SEQ ID NO: 1807437 - DNA, 15 bp, Homo sapiens
tgtatctggatagaa

SEQ ID NO: 1807438 - DNA, 15 bp, Homo sapiens
atctggatagaattt

SEQ ID NO: 1807439 - DNA, 15 bp, Homo sapiens
tctggatagaatttt

SEQ ID NO: 1807440 - DNA, 15 bp, Homo sapiens
gatagaattttcact

SEQ ID NO: 1807441 - DNA, 15 bp, Homo sapiens
atagaattttcactc

SEQ ID NO: 1807442 - DNA, 15 bp, Homo sapiens
aattttcactctctg

SEQ ID NO: 1807443 - DNA, 15 bp, Homo sapiens
attttcactctctgg

SEQ ID NO: 1807444 - DNA, 15 bp, Homo sapiens
ttttcactctctgga

SEQ ID NO: 1807445 - DNA, 15 bp, Homo sapiens
tttcactctctggat

SEQ ID NO: 1807446 - DNA, 15 bp, Homo sapiens
ttcactctctggata

SEQ ID NO: 1807447 - DNA, 15 bp, Homo sapiens
ctctcactatctata

SEQ ID NO: 1807448 - DNA, 15 bp, Homo sapiens
tctcactatctatat

SEQ ID NO: 1807449 - DNA, 15 bp, Homo sapiens
actatctatatggag

SEQ ID NO: 1807450 - DNA, 15 bp, Homo sapiens
ctatctatatggaga

SEQ ID NO: 1807451 - DNA, 15 bp, Homo sapiens
tatctatatggagag

SEQ ID NO: 1807452 - DNA, 15 bp, Homo sapiens
atctatatggagaga

SEQ ID NO: 1807453 - DNA, 15 bp, Homo sapiens
tctatatggagagaa

SEQ ID NO: 1807454 - DNA, 15 bp, Homo sapiens
ctatatggagagaat

SEQ ID NO: 1807455 - DNA, 15 bp, Homo sapiens
tatatggagagaatt

SEQ ID NO: 1807456 - DNA, 15 bp, Homo sapiens
atatggagagaatta

SEQ ID NO: 1807457 - DNA, 15 bp, Homo sapiens
tatggagagaattat

SEQ ID NO: 1807458 - DNA, 15 bp, Homo sapiens
atggagagaattatc

SEQ ID NO: 1807459 - DNA, 15 bp, Homo sapiens
tggagagaattatca

SEQ ID NO: 1807460 - DNA, 15 bp, Homo sapiens
ggagagaattatcac

SEQ ID NO: 1807461 - DNA, 15 bp, Homo sapiens
gagagaattatcacc

SEQ ID NO: 1807462 - DNA, 15 bp, Homo sapiens
agagaattatcacca

SEQ ID NO: 1807463 - DNA, 15 bp, Homo sapiens
gagaattatcaccaa

SEQ ID NO: 1807464 - DNA, 15 bp, Homo sapiens
agaattatcaccaac

SEQ ID NO: 1807465 - DNA, 15 bp, Homo sapiens
gaattatcaccaact

SEQ ID NO: 1807466 - DNA, 15 bp, Homo sapiens
aattatcaccaactg

SEQ ID NO: 1807467 - DNA, 15 bp, Homo sapiens
attatcaccaactgt

SEQ ID NO: 1807468 - DNA, 15 bp, Homo sapiens
ttatcaccaactgta

SEQ ID NO: 1807469 - DNA, 15 bp, Homo sapiens
tatcaccaactgtat

SEQ ID NO: 1807470 - DNA, 15 bp, Homo sapiens
atcaccaactgtata

SEQ ID NO: 1807471 - DNA, 15 bp, Homo sapiens
tcaccaactgtatag

SEQ ID NO: 1807472 - DNA, 15 bp, Homo sapiens
caccaactgtataga

SEQ ID NO: 1807473 - DNA, 15 bp, Homo sapiens
accaactgtatagaa

SEQ ID NO: 1807474 - DNA, 15 bp, Homo sapiens
ccaactgtatagaac

SEQ ID NO: 1807475 - DNA, 15 bp, Homo sapiens
caactgtatagaact

SEQ ID NO: 1807476 - DNA, 15 bp, Homo sapiens
aactgtatagaactc

SEQ ID NO: 1807477 - DNA, 15 bp, Homo sapiens
atagaattctcgcta

SEQ ID NO: 1807478 - DNA, 15 bp, Homo sapiens
tagaattctcgctat

SEQ ID NO: 1807479 - DNA, 15 bp, Homo sapiens
agaattctcgctatc

SEQ ID NO: 1807480 - DNA, 15 bp, Homo sapiens
gaattctcgctatct

SEQ ID NO: 1807481 - DNA, 15 bp, Homo sapiens
aattctcgctatctg

SEQ ID NO: 1807482 - DNA, 15 bp, Homo sapiens
attctcgctatctgt

SEQ ID NO: 1807483 - DNA, 15 bp, Homo sapiens
ttctcgctatctgtc

SEQ ID NO: 1807484 - DNA, 15 bp, Homo sapiens
agaattcttactctg

SEQ ID NO: 1807485 - DNA, 15 bp, Homo sapiens
gaattcttactctga

SEQ ID NO: 1807486 - DNA, 15 bp, Homo sapiens
aattcttactctgaa

SEQ ID NO: 1807487 - DNA, 15 bp, Homo sapiens
attcttactctgaat

SEQ ID NO: 1807488 - DNA, 15 bp, Homo sapiens
ttcttactctgaata

SEQ ID NO: 1807489 - DNA, 15 bp, Homo sapiens
tcttactctgaataa

SEQ ID NO: 1807490 - DNA, 15 bp, Homo sapiens
cttactctgaataaa

SEQ ID NO: 1807491 - DNA, 15 bp, Homo sapiens
ttactctgaataaaa

SEQ ID NO: 1807492 - DNA, 15 bp, Homo sapiens
tactctgaataaaac

SEQ ID NO: 1807493 - DNA, 15 bp, Homo sapiens
actctgaataaaact

SEQ ID NO: 1807494 - DNA, 15 bp, Homo sapiens
ctctgaataaaactc

SEQ ID NO: 1807495 - DNA, 15 bp, Homo sapiens
tctgaataaaactct

SEQ ID NO: 1807496 - DNA, 15 bp, Homo sapiens
ctgaataaaactctc

SEQ ID NO: 1807497 - DNA, 15 bp, Homo sapiens
tgaataaaactctca

SEQ ID NO: 1807498 - DNA, 15 bp, Homo sapiens
gaataaaactctcac

SEQ ID NO: 1807499 - DNA, 15 bp, Homo sapiens
aataaaactctcact

SEQ ID NO: 1807500 - DNA, 15 bp, Homo sapiens
aaaactctcactatg

SEQ ID NO: 1807501 - DNA, 15 bp, Homo sapiens
aaactctcactatgt

SEQ ID NO: 1807502 - DNA, 15 bp, Homo sapiens
aactctcactatgtt

SEQ ID NO: 1807503 - DNA, 15 bp, Homo sapiens
actctcactatgttt

SEQ ID NO: 1807504 - DNA, 15 bp, Homo sapiens
ctctcactatgtttc

SEQ ID NO: 1807505 - DNA, 15 bp, Homo sapiens
tctcactatgtttct

SEQ ID NO: 1807506 - DNA, 15 bp, Homo sapiens
ctcactatgtttctg

SEQ ID NO: 1807507 - DNA, 15 bp, Homo sapiens
tcactatgtttctgg

SEQ ID NO: 1807508 - DNA, 15 bp, Homo sapiens
cactatgtttctgga

SEQ ID NO: 1807509 - DNA, 15 bp, Homo sapiens
actatgtttctggat

SEQ ID NO: 1807510 - DNA, 15 bp, Homo sapiens
ctatgtttctggata

SEQ ID NO: 1807511 - DNA, 15 bp, Homo sapiens
tatgtttctggatag

SEQ ID NO: 1807512 - DNA, 15 bp, Homo sapiens
atgtttctggataga

SEQ ID NO: 1807513 - DNA, 15 bp, Homo sapiens
tgtttctggatagaa

SEQ ID NO: 1807514 - DNA, 15 bp, Homo sapiens
gtttctggatagaac

SEQ ID NO: 1807515 - DNA, 15 bp, Homo sapiens
ttactacctggaaac

SEQ ID NO: 1807516 - DNA, 15 bp, Homo sapiens
tactacctggaaaca

SEQ ID NO: 1807517 - DNA, 15 bp, Homo sapiens
actacctggaaacaa

SEQ ID NO: 1807518 - DNA, 15 bp, Homo sapiens
ctacctggaaacaac

SEQ ID NO: 1807519 - DNA, 15 bp, Homo sapiens
tacctggaaacaact

SEQ ID NO: 1807520 - DNA, 15 bp, Homo sapiens
acctggaaacaactc

SEQ ID NO: 1807521 - DNA, 15 bp, Homo sapiens
cctggaaacaactct

SEQ ID NO: 1807522 - DNA, 15 bp, Homo sapiens
ctggaaacaactctc

SEQ ID NO: 1807523 - DNA, 15 bp, Homo sapiens
tggaaacaactctca

SEQ ID NO: 1807524 - DNA, 15 bp, Homo sapiens
ggaaacaactctcac

SEQ ID NO: 1807525 - DNA, 15 bp, Homo sapiens
gaaacaactctcact

SEQ ID NO: 1807526 - DNA, 15 bp, Homo sapiens
aaacaactctcacta

SEQ ID NO: 1807527 - DNA, 15 bp, Homo sapiens
aacaactctcactat

SEQ ID NO: 1807528 - DNA, 15 bp, Homo sapiens
acaactctcactata

SEQ ID NO: 1807529 - DNA, 15 bp, Homo sapiens
caactctcactatat

SEQ ID NO: 1807530 - DNA, 15 bp, Homo sapiens
aactctcactatatg

SEQ ID NO: 1807531 - DNA, 15 bp, Homo sapiens
actctcactatatgg

SEQ ID NO: 1807532 - DNA, 15 bp, Homo sapiens
ctctcactatatgga

SEQ ID NO: 1807533 - DNA, 15 bp, Homo sapiens
tctcactatatggat

SEQ ID NO: 1807534 - DNA, 15 bp, Homo sapiens
ctcactatatggata

SEQ ID NO: 1807535 - DNA, 15 bp, Homo sapiens
tcactatatggatag

SEQ ID NO: 1807536 - DNA, 15 bp, Homo sapiens
cactatatggatagt

SEQ ID NO: 1807537 - DNA, 15 bp, Homo sapiens
actatatggatagta

SEQ ID NO: 1807538 - DNA, 15 bp, Homo sapiens
ctatatggatagtat

SEQ ID NO: 1807539 - DNA, 15 bp, Homo sapiens
tatatggatagtatt

SEQ ID NO: 1807540 - DNA, 15 bp, Homo sapiens
atatggatagtattc

SEQ ID NO: 1807541 - DNA, 15 bp, Homo sapiens
tatggatagtattct

SEQ ID NO: 1807542 - DNA, 15 bp, Homo sapiens
atggatagtattctc

SEQ ID NO: 1807543 - DNA, 15 bp, Homo sapiens
tggatagtattctca

SEQ ID NO: 1807544 - DNA, 15 bp, Homo sapiens
ggatagtattctcac

SEQ ID NO: 1807545 - DNA, 15 bp, Homo sapiens
gatagtattctcact

SEQ ID NO: 1807546 - DNA, 15 bp, Homo sapiens
atagtattctcacta

SEQ ID NO: 1807547 - DNA, 15 bp, Homo sapiens
tagtattctcactat

SEQ ID NO: 1807548 - DNA, 15 bp, Homo sapiens
agtattctcactatc

SEQ ID NO: 1807549 - DNA, 15 bp, Homo sapiens
gtattctcactatct

SEQ ID NO: 1807550 - DNA, 15 bp, Homo sapiens
tattctcactatctg

SEQ ID NO: 1807551 - DNA, 15 bp, Homo sapiens
attctcactatctaa

SEQ ID NO: 1807552 - DNA, 15 bp, Homo sapiens
ttctcactatctaac

SEQ ID NO: 1807553 - DNA, 15 bp, Homo sapiens
tctcactatctaact

SEQ ID NO: 1807554 - DNA, 15 bp, Homo sapiens
ctcactatctaactg

SEQ ID NO: 1807555 - DNA, 15 bp, Homo sapiens
tcactatctaactgg

SEQ ID NO: 1807556 - DNA, 15 bp, Homo sapiens
cactatctaactgga

SEQ ID NO: 1807557 - DNA, 15 bp, Homo sapiens
actatctaactggat

SEQ ID NO: 1807558 - DNA, 15 bp, Homo sapiens
ctatctaactggata

SEQ ID NO: 1807559 - DNA, 15 bp, Homo sapiens
tatctaactggatag

SEQ ID NO: 1807560 - DNA, 15 bp, Homo sapiens
atctaactggataga

SEQ ID NO: 1807561 - DNA, 15 bp, Homo sapiens
tctaactggatagaa

SEQ ID NO: 1807562 - DNA, 15 bp, Homo sapiens
taactggatagaata

SEQ ID NO: 1807563 - DNA, 15 bp, Homo sapiens
aactggatagaatag

SEQ ID NO: 1807564 - DNA, 15 bp, Homo sapiens
actggatagaataga

SEQ ID NO: 1807565 - DNA, 15 bp, Homo sapiens
ctggatagaatagaa

SEQ ID NO: 1807566 - DNA, 15 bp, Homo sapiens
tggatagaatagaat

SEQ ID NO: 1807567 - DNA, 15 bp, Homo sapiens
ggatagaatagaatt

SEQ ID NO: 1807568 - DNA, 15 bp, Homo sapiens
gatagaatagaattc

SEQ ID NO: 1807569 - DNA, 15 bp, Homo sapiens
atagaatagaattct

SEQ ID NO: 1807570 - DNA, 15 bp, Homo sapiens
tagaatagaattctc

SEQ ID NO: 1807571 - DNA, 15 bp, Homo sapiens
agaatagaattctca

SEQ ID NO: 1807572 - DNA, 15 bp, Homo sapiens
gatagaactctcacg

SEQ ID NO: 1807573 - DNA, 15 bp, Homo sapiens
atagaactctcacga

SEQ ID NO: 1807574 - DNA, 15 bp, Homo sapiens
tagaactctcacgat

SEQ ID NO: 1807575 - DNA, 15 bp, Homo sapiens
agaactctcacgatc

SEQ ID NO: 1807576 - DNA, 15 bp, Homo sapiens
gaactctcacgatct

SEQ ID NO: 1807577 - DNA, 15 bp, Homo sapiens
aactctcacgatctg

SEQ ID NO: 1807578 - DNA, 15 bp, Homo sapiens
actctcacgatctgg

SEQ ID NO: 1807579 - DNA, 15 bp, Homo sapiens
ctctcacgatctggg

SEQ ID NO: 1807580 - DNA, 15 bp, Homo sapiens
tctcacgatctgggt

SEQ ID NO: 1807581 - DNA, 15 bp, Homo sapiens
ctcacgatctgggta

SEQ ID NO: 1807582 - DNA, 15 bp, Homo sapiens
tcacgatctgggtag

SEQ ID NO: 1807583 - DNA, 15 bp, Homo sapiens
cacgatctgggtaga

SEQ ID NO: 1807584 - DNA, 15 bp, Homo sapiens
acgatctgggtagaa

SEQ ID NO: 1807585 - DNA, 15 bp, Homo sapiens
cgatctgggtagaat

SEQ ID NO: 1807586 - DNA, 15 bp, Homo sapiens
gatctgggtagaatt

SEQ ID NO: 1807587 - DNA, 15 bp, Homo sapiens
ctgggtagaattcta

SEQ ID NO: 1807588 - DNA, 15 bp, Homo sapiens
tgggtagaattctaa

SEQ ID NO: 1807589 - DNA, 15 bp, Homo sapiens
gggtagaattctaag

SEQ ID NO: 1807590 - DNA, 15 bp, Homo sapiens
ggtagaattctaagt

SEQ ID NO: 1807591 - DNA, 15 bp, Homo sapiens
gtagaattctaagtc

SEQ ID NO: 1807592 - DNA, 15 bp, Homo sapiens
tagaattctaagtct

SEQ ID NO: 1807593 - DNA, 15 bp, Homo sapiens
agaattctaagtctc

SEQ ID NO: 1807594 - DNA, 15 bp, Homo sapiens
gaattctaagtctct

SEQ ID NO: 1807595 - DNA, 15 bp, Homo sapiens
aattctaagtctctt

SEQ ID NO: 1807596 - DNA, 15 bp, Homo sapiens
attctaagtctcttg

SEQ ID NO: 1807597 - DNA, 15 bp, Homo sapiens
ttctaagtctcttgg

SEQ ID NO: 1807598 - DNA, 15 bp, Homo sapiens
tctaagtctcttggt

SEQ ID NO: 1807599 - DNA, 15 bp, Homo sapiens
ctaagtctcttggta

SEQ ID NO: 1807600 - DNA, 15 bp, Homo sapiens
taagtctcttggtag

SEQ ID NO: 1807601 - DNA, 15 bp, Homo sapiens
aagtctcttggtaga

SEQ ID NO: 1807602 - DNA, 15 bp, Homo sapiens
agtctcttggtagaa

SEQ ID NO: 1807603 - DNA, 15 bp, Homo sapiens
gtctcttggtagaac

SEQ ID NO: 1807604 - DNA, 15 bp, Homo sapiens
tcactatctctctgt

SEQ ID NO: 1807605 - DNA, 15 bp, Homo sapiens
cactatctctctgtg

SEQ ID NO: 1807606 - DNA, 15 bp, Homo sapiens
actatctctctgtgt

SEQ ID NO: 1807607 - DNA, 15 bp, Homo sapiens
ctatctctctgtgta

SEQ ID NO: 1807608 - DNA, 15 bp, Homo sapiens
tatctctctgtgtag

SEQ ID NO: 1807609 - DNA, 15 bp, Homo sapiens
atctctctgtgtaga

SEQ ID NO: 1807610 - DNA, 15 bp, Homo sapiens
tctctctgtgtagaa

SEQ ID NO: 1807611 - DNA, 15 bp, Homo sapiens
ctctctgtgtagaat

SEQ ID NO: 1807612 - DNA, 15 bp, Homo sapiens
tctctgtgtagaatt

SEQ ID NO: 1807613 - DNA, 15 bp, Homo sapiens
ctctgtgtagaattc

SEQ ID NO: 1807614 - DNA, 15 bp, Homo sapiens
ctgtgtagaattctg

SEQ ID NO: 1807615 - DNA, 15 bp, Homo sapiens
tgtgtagaattctga

SEQ ID NO: 1807616 - DNA, 15 bp, Homo sapiens
gtgtagaattctgat

SEQ ID NO: 1807617 - DNA, 15 bp, Homo sapiens
tgtagaattctgata

SEQ ID NO: 1807618 - DNA, 15 bp, Homo sapiens
gtagaattctgataa

SEQ ID NO: 1807619 - DNA, 15 bp, Homo sapiens
tagaattctgataat

SEQ ID NO: 1807620 - DNA, 15 bp, Homo sapiens
agaattctgataatc

SEQ ID NO: 1807621 - DNA, 15 bp, Homo sapiens
gaattctgataatct

SEQ ID NO: 1807622 - DNA, 15 bp, Homo sapiens
aattctgataatctg

SEQ ID NO: 1807623 - DNA, 15 bp, Homo sapiens
attctgataatctgg

SEQ ID NO: 1807624 - DNA, 15 bp, Homo sapiens
ttctgataatctggt

SEQ ID NO: 1807625 - DNA, 15 bp, Homo sapiens
tctgataatctggtt

SEQ ID NO: 1807626 - DNA, 15 bp, Homo sapiens
ctgataatctggtta

SEQ ID NO: 1807627 - DNA, 15 bp, Homo sapiens
tgataatctggttag

SEQ ID NO: 1807628 - DNA, 15 bp, Homo sapiens
gataatctggttagc

SEQ ID NO: 1807629 - DNA, 15 bp, Homo sapiens
ataatctggttagca

SEQ ID NO: 1807630 - DNA, 15 bp, Homo sapiens
taatctggttagcac

SEQ ID NO: 1807631 - DNA, 15 bp, Homo sapiens
aatctggttagcact

SEQ ID NO: 1807632 - DNA, 15 bp, Homo sapiens
atctggttagcactc

SEQ ID NO: 1807633 - DNA, 15 bp, Homo sapiens
tctggttagcactct

SEQ ID NO: 1807634 - DNA, 15 bp, Homo sapiens
ctggttagcactctt

SEQ ID NO: 1807635 - DNA, 15 bp, Homo sapiens
tggttagcactctta

SEQ ID NO: 1807636 - DNA, 15 bp, Homo sapiens
ggttagcactcttac

SEQ ID NO: 1807637 - DNA, 15 bp, Homo sapiens
gttagcactcttact

SEQ ID NO: 1807638 - DNA, 15 bp, Homo sapiens
ttagcactcttacta

SEQ ID NO: 1807639 - DNA, 15 bp, Homo sapiens
tagcactcttactaa

SEQ ID NO: 1807640 - DNA, 15 bp, Homo sapiens
agcactcttactaac

SEQ ID NO: 1807641 - DNA, 15 bp, Homo sapiens
gcactcttactaact

SEQ ID NO: 1807642 - DNA, 15 bp, Homo sapiens
cactcttactaactg

SEQ ID NO: 1807643 - DNA, 15 bp, Homo sapiens
actcttactaactgt

SEQ ID NO: 1807644 - DNA, 15 bp, Homo sapiens
ctcttactaactgtc

SEQ ID NO: 1807645 - DNA, 15 bp, Homo sapiens
tcttactaactgtct

SEQ ID NO: 1807646 - DNA, 15 bp, Homo sapiens
cttactaactgtctg

SEQ ID NO: 1807647 - DNA, 15 bp, Homo sapiens
ttactaactgtctgg

SEQ ID NO: 1807648 - DNA, 15 bp, Homo sapiens
tactaactgtctgga

SEQ ID NO: 1807649 - DNA, 15 bp, Homo sapiens
ctcactctctgtcta

SEQ ID NO: 1807650 - DNA, 15 bp, Homo sapiens
tcactctctgtctag

SEQ ID NO: 1807651 - DNA, 15 bp, Homo sapiens
cactctctgtctagg

SEQ ID NO: 1807652 - DNA, 15 bp, Homo sapiens
actctctgtctaggt

SEQ ID NO: 1807653 - DNA, 15 bp, Homo sapiens
ctctctgtctaggta

SEQ ID NO: 1807654 - DNA, 15 bp, Homo sapiens
tctctgtctaggtag

SEQ ID NO: 1807655 - DNA, 15 bp, Homo sapiens
ctctgtctaggtaga

SEQ ID NO: 1807656 - DNA, 15 bp, Homo sapiens
tctgtctaggtagaa

SEQ ID NO: 1807657 - DNA, 15 bp, Homo sapiens
ctgtctaggtagaat

SEQ ID NO: 1807658 - DNA, 15 bp, Homo sapiens
tgtctaggtagaatt

SEQ ID NO: 1807659 - DNA, 15 bp, Homo sapiens
gtctaggtagaattt

SEQ ID NO: 1807660 - DNA, 15 bp, Homo sapiens
tctaggtagaatttt

SEQ ID NO: 1807661 - DNA, 15 bp, Homo sapiens
ctaggtagaattttc

SEQ ID NO: 1807662 - DNA, 15 bp, Homo sapiens
taggtagaattttca

SEQ ID NO: 1807663 - DNA, 15 bp, Homo sapiens
aggtagaattttcac

SEQ ID NO: 1807664 - DNA, 15 bp, Homo sapiens
ggtagaattttcacc

SEQ ID NO: 1807665 - DNA, 15 bp, Homo sapiens
gtagaattttcacca

SEQ ID NO: 1807666 - DNA, 15 bp, Homo sapiens
tttcaccatctggaa

SEQ ID NO: 1807667 - DNA, 15 bp, Homo sapiens
ttcaccatctggaaa

SEQ ID NO: 1807668 - DNA, 15 bp, Homo sapiens
tcaccatctggaaac

SEQ ID NO: 1807669 - DNA, 15 bp, Homo sapiens
caccatctggaaaca

SEQ ID NO: 1807670 - DNA, 15 bp, Homo sapiens
accatctggaaacaa

SEQ ID NO: 1807671 - DNA, 15 bp, Homo sapiens
ccatctggaaacaac

SEQ ID NO: 1807672 - DNA, 15 bp, Homo sapiens
catctggaaacaact

SEQ ID NO: 1807673 - DNA, 15 bp, Homo sapiens
atctggaaacaactc

SEQ ID NO: 1807674 - DNA, 15 bp, Homo sapiens
tctggaaacaactct

SEQ ID NO: 1807675 - DNA, 15 bp, Homo sapiens
ctggaaacaactctt

SEQ ID NO: 1807676 - DNA, 15 bp, Homo sapiens
tggaaacaactctta

SEQ ID NO: 1807677 - DNA, 15 bp, Homo sapiens
ggaaacaactcttac

SEQ ID NO: 1807678 - DNA, 15 bp, Homo sapiens
gaaacaactcttaca

SEQ ID NO: 1807679 - DNA, 15 bp, Homo sapiens
aaacaactcttacaa

SEQ ID NO: 1807680 - DNA, 15 bp, Homo sapiens
aacaactcttacaat

SEQ ID NO: 1807681 - DNA, 15 bp, Homo sapiens
acaactcttacaatc

SEQ ID NO: 1807682 - DNA, 15 bp, Homo sapiens
caactcttacaatct

SEQ ID NO: 1807683 - DNA, 15 bp, Homo sapiens
aactcttacaatctg

SEQ ID NO: 1807684 - DNA, 15 bp, Homo sapiens
actcttacaatctgg

SEQ ID NO: 1807685 - DNA, 15 bp, Homo sapiens
ctcttacaatctgga

SEQ ID NO: 1807686 - DNA, 15 bp, Homo sapiens
tcttacaatctggat

SEQ ID NO: 1807687 - DNA, 15 bp, Homo sapiens
cttacaatctggata

SEQ ID NO: 1807688 - DNA, 15 bp, Homo sapiens
ttacaatctggatag

SEQ ID NO: 1807689 - DNA, 15 bp, Homo sapiens
tacaatctggatagg

SEQ ID NO: 1807690 - DNA, 15 bp, Homo sapiens
acaatctggatagga

SEQ ID NO: 1807691 - DNA, 15 bp, Homo sapiens
caatctggataggat

SEQ ID NO: 1807692 - DNA, 15 bp, Homo sapiens
aatctggataggatt

SEQ ID NO: 1807693 - DNA, 15 bp, Homo sapiens
atctggataggattc

SEQ ID NO: 1807694 - DNA, 15 bp, Homo sapiens
tctggataggattct

SEQ ID NO: 1807695 - DNA, 15 bp, Homo sapiens
ctggataggattctc

SEQ ID NO: 1807696 - DNA, 15 bp, Homo sapiens
tggataggattctca

SEQ ID NO: 1807697 - DNA, 15 bp, Homo sapiens
ggataggattctcac

SEQ ID NO: 1807698 - DNA, 15 bp, Homo sapiens
gataggattctcact

SEQ ID NO: 1807699 - DNA, 15 bp, Homo sapiens
ataggattctcactc

SEQ ID NO: 1807700 - DNA, 15 bp, Homo sapiens
taggattctcactct

SEQ ID NO: 1807701 - DNA, 15 bp, Homo sapiens
aggattctcactctc

SEQ ID NO: 1807702 - DNA, 15 bp, Homo sapiens
ggattctcactctct

SEQ ID NO: 1807703 - DNA, 15 bp, Homo sapiens
gattctcactctctg

SEQ ID NO: 1807704 - DNA, 15 bp, Homo sapiens
tagaactcttactat

SEQ ID NO: 1807705 - DNA, 15 bp, Homo sapiens
agaactcttactatc

SEQ ID NO: 1807706 - DNA, 15 bp, Homo sapiens
gaactcttactatca

SEQ ID NO: 1807707 - DNA, 15 bp, Homo sapiens
aactcttactatcaa

SEQ ID NO: 1807708 - DNA, 15 bp, Homo sapiens
actcttactatcaat

SEQ ID NO: 1807709 - DNA, 15 bp, Homo sapiens
ctcttactatcaatc

SEQ ID NO: 1807710 - DNA, 15 bp, Homo sapiens
attctcactgtctgt

SEQ ID NO: 1807711 - DNA, 15 bp, Homo sapiens
ttctcactgtctgta

SEQ ID NO: 1807712 - DNA, 15 bp, Homo sapiens
tctcactgtctgtat

SEQ ID NO: 1807713 - DNA, 15 bp, Homo sapiens
ctcactgtctgtata

SEQ ID NO: 1807714 - DNA, 15 bp, Homo sapiens
tcactgtctgtatag

SEQ ID NO: 1807715 - DNA, 15 bp, Homo sapiens
cactgtctgtataga

SEQ ID NO: 1807716 - DNA, 15 bp, Homo sapiens
actgtctgtatagaa

SEQ ID NO: 1807717 - DNA, 15 bp, Homo sapiens
ctgtctgtatagaac

SEQ ID NO: 1807718 - DNA, 15 bp, Homo sapiens
tgtctgtatagaact

SEQ ID NO: 1807719 - DNA, 15 bp, Homo sapiens
gtctgtatagaactc

SEQ ID NO: 1807720 - DNA, 15 bp, Homo sapiens
actatctggatagat

SEQ ID NO: 1807721 - DNA, 15 bp, Homo sapiens
ctatctggatagatt

SEQ ID NO: 1807722 - DNA, 15 bp, Homo sapiens
tatctggatagattt

SEQ ID NO: 1807723 - DNA, 15 bp, Homo sapiens
atctggatagatttc

SEQ ID NO: 1807724 - DNA, 15 bp, Homo sapiens
gatagatttctcacc

SEQ ID NO: 1807725 - DNA, 15 bp, Homo sapiens
atagatttctcacca

SEQ ID NO: 1807726 - DNA, 15 bp, Homo sapiens
ttctcactctgtggg

SEQ ID NO: 1807727 - DNA, 15 bp, Homo sapiens
tctcactctgtgggt

SEQ ID NO: 1807728 - DNA, 15 bp, Homo sapiens
ctcactctgtgggta

SEQ ID NO: 1807729 - DNA, 15 bp, Homo sapiens
tcactctgtgggtag

SEQ ID NO: 1807730 - DNA, 15 bp, Homo sapiens
cactctgtgggtaga

SEQ ID NO: 1807731 - DNA, 15 bp, Homo sapiens
actctgtgggtagaa

SEQ ID NO: 1807732 - DNA, 15 bp, Homo sapiens
ctctgtgggtagaac

SEQ ID NO: 1807733 - DNA, 15 bp, Homo sapiens
tctgtgggtagaact

SEQ ID NO: 1807734 - DNA, 15 bp, Homo sapiens
ctgtgggtagaactc

SEQ ID NO: 1807735 - DNA, 15 bp, Homo sapiens
tgtgggtagaactct

SEQ ID NO: 1807736 - DNA, 15 bp, Homo sapiens
gtgggtagaactctt

SEQ ID NO: 1807737 - DNA, 15 bp, Homo sapiens
tgggtagaactctta

SEQ ID NO: 1807738 - DNA, 15 bp, Homo sapiens
gggtagaactcttac

SEQ ID NO: 1807739 - DNA, 15 bp, Homo sapiens
ggtagaactcttact

SEQ ID NO: 1807740 - DNA, 15 bp, Homo sapiens
gtagaactcttacta

SEQ ID NO: 1807741 - DNA, 15 bp, Homo sapiens
gaactcttactatct

SEQ ID NO: 1807742 - DNA, 15 bp, Homo sapiens
aactcttactatcta

SEQ ID NO: 1807743 - DNA, 15 bp, Homo sapiens
actcttactatctat

SEQ ID NO: 1807744 - DNA, 15 bp, Homo sapiens
ctcttactatctatc

SEQ ID NO: 1807745 - DNA, 15 bp, Homo sapiens
tcttactatctatct

SEQ ID NO: 1807746 - DNA, 15 bp, Homo sapiens
cttactatctatctt

SEQ ID NO: 1807747 - DNA, 15 bp, Homo sapiens
ttactatctatcttg

SEQ ID NO: 1807748 - DNA, 15 bp, Homo sapiens
tactatctatcttga

SEQ ID NO: 1807749 - DNA, 15 bp, Homo sapiens
atctatcttgatagg

SEQ ID NO: 1807750 - DNA, 15 bp, Homo sapiens
tctatcttgataggg

SEQ ID NO: 1807751 - DNA, 15 bp, Homo sapiens
ctatcttgatagggt

SEQ ID NO: 1807752 - DNA, 15 bp, Homo sapiens
tatcttgatagggtt

SEQ ID NO: 1807753 - DNA, 15 bp, Homo sapiens
atcttgatagggttc

SEQ ID NO: 1807754 - DNA, 15 bp, Homo sapiens
tcttgatagggttct

SEQ ID NO: 1807755 - DNA, 15 bp, Homo sapiens
cttgatagggttctc

SEQ ID NO: 1807756 - DNA, 15 bp, Homo sapiens
ttgatagggttctca

SEQ ID NO: 1807757 - DNA, 15 bp, Homo sapiens
tgatagggttctcac

SEQ ID NO: 1807758 - DNA, 15 bp, Homo sapiens
gatagggttctcacc

SEQ ID NO: 1807759 - DNA, 15 bp, Homo sapiens
atagggttctcacca

SEQ ID NO: 1807760 - DNA, 15 bp, Homo sapiens
tagggttctcaccat

SEQ ID NO: 1807761 - DNA, 15 bp, Homo sapiens
agggttctcaccata

SEQ ID NO: 1807762 - DNA, 15 bp, Homo sapiens
gggttctcaccatat

SEQ ID NO: 1807763 - DNA, 15 bp, Homo sapiens
ggttctcaccatatg

SEQ ID NO: 1807764 - DNA, 15 bp, Homo sapiens
tctcaccatatggat

SEQ ID NO: 1807765 - DNA, 15 bp, Homo sapiens
ctcaccatatggata

SEQ ID NO: 1807766 - DNA, 15 bp, Homo sapiens
tcaccatatggatag

SEQ ID NO: 1807767 - DNA, 15 bp, Homo sapiens
caccatatggataga

SEQ ID NO: 1807768 - DNA, 15 bp, Homo sapiens
accatatggatagaa

SEQ ID NO: 1807769 - DNA, 15 bp, Homo sapiens
ccatatggatagaac

SEQ ID NO: 1807770 - DNA, 15 bp, Homo sapiens
catatggatagaact

SEQ ID NO: 1807771 - DNA, 15 bp, Homo sapiens
atatggatagaactc

SEQ ID NO: 1807772 - DNA, 15 bp, Homo sapiens
tataactctcactac

SEQ ID NO: 1807773 - DNA, 15 bp, Homo sapiens
ataactctcactacc

SEQ ID NO: 1807774 - DNA, 15 bp, Homo sapiens
taactctcactacct

SEQ ID NO: 1807775 - DNA, 15 bp, Homo sapiens
tacctatctggatat

SEQ ID NO: 1807776 - DNA, 15 bp, Homo sapiens
acctatctggatata

SEQ ID NO: 1807777 - DNA, 15 bp, Homo sapiens
cctatctggatataa

SEQ ID NO: 1807778 - DNA, 15 bp, Homo sapiens
cactctctggatagc

SEQ ID NO: 1807779 - DNA, 15 bp, Homo sapiens
actctctggatagca

SEQ ID NO: 1807780 - DNA, 15 bp, Homo sapiens
ctctctggatagcac

SEQ ID NO: 1807781 - DNA, 15 bp, Homo sapiens
tctctggatagcact

SEQ ID NO: 1807782 - DNA, 15 bp, Homo sapiens
tctggatagcactca

SEQ ID NO: 1807783 - DNA, 15 bp, Homo sapiens
ctggatagcactcac

SEQ ID NO: 1807784 - DNA, 15 bp, Homo sapiens
tggatagcactcact

SEQ ID NO: 1807785 - DNA, 15 bp, Homo sapiens
ggatagcactcacta

SEQ ID NO: 1807786 - DNA, 15 bp, Homo sapiens
gatagcactcactat

SEQ ID NO: 1807787 - DNA, 15 bp, Homo sapiens
atagcactcactatc

SEQ ID NO: 1807788 - DNA, 15 bp, Homo sapiens
tagcactcactatct

SEQ ID NO: 1807789 - DNA, 15 bp, Homo sapiens
agcactcactatctg

SEQ ID NO: 1807790 - DNA, 15 bp, Homo sapiens
gcactcactatctgg

SEQ ID NO: 1807791 - DNA, 15 bp, Homo sapiens
cactcactatctgga

SEQ ID NO: 1807792 - DNA, 15 bp, Homo sapiens
actcactatctggat

SEQ ID NO: 1807793 - DNA, 15 bp, Homo sapiens
gaattctcaccatcg

SEQ ID NO: 1807794 - DNA, 15 bp, Homo sapiens
ccatcgggatagaat

SEQ ID NO: 1807795 - DNA, 15 bp, Homo sapiens
catcgggatagaatt

SEQ ID NO: 1807796 - DNA, 15 bp, Homo sapiens
agaattctcactata

SEQ ID NO: 1807797 - DNA, 15 bp, Homo sapiens
gaattctcactatat

SEQ ID NO: 1807798 - DNA, 15 bp, Homo sapiens
aattctcactatata

SEQ ID NO: 1807799 - DNA, 15 bp, Homo sapiens
attctcactatatac

SEQ ID NO: 1807800 - DNA, 15 bp, Homo sapiens
ttctcactatatacc

SEQ ID NO: 1807801 - DNA, 15 bp, Homo sapiens
tctcactatatacct

SEQ ID NO: 1807802 - DNA, 15 bp, Homo sapiens
ctcactatataccta

SEQ ID NO: 1807803 - DNA, 15 bp, Homo sapiens
tcactatatacctag

SEQ ID NO: 1807804 - DNA, 15 bp, Homo sapiens
cactatatacctaga

SEQ ID NO: 1807805 - DNA, 15 bp, Homo sapiens
actatatacctagat

SEQ ID NO: 1807806 - DNA, 15 bp, Homo sapiens
ctatatacctagata

SEQ ID NO: 1807807 - DNA, 15 bp, Homo sapiens
tatatacctagatag

SEQ ID NO: 1807808 - DNA, 15 bp, Homo sapiens
atatacctagataga

SEQ ID NO: 1807809 - DNA, 15 bp, Homo sapiens
tatacctagatagaa

SEQ ID NO: 1807810 - DNA, 15 bp, Homo sapiens
atacctagatagaat

SEQ ID NO: 1807811 - DNA, 15 bp, Homo sapiens
tacctagatagaatt

SEQ ID NO: 1807812 - DNA, 15 bp, Homo sapiens
acctagatagaattc

SEQ ID NO: 1807813 - DNA, 15 bp, Homo sapiens
cctagatagaattct

SEQ ID NO: 1807814 - DNA, 15 bp, Homo sapiens
caatctggatagaac

SEQ ID NO: 1807815 - DNA, 15 bp, Homo sapiens
aatctggatagaact

SEQ ID NO: 1807816 - DNA, 15 bp, Homo sapiens
tagatagaactctcg

SEQ ID NO: 1807817 - DNA, 15 bp, Homo sapiens
agatagaactctcgc

SEQ ID NO: 1807818 - DNA, 15 bp, Homo sapiens
agaactctcgctatt

SEQ ID NO: 1807819 - DNA, 15 bp, Homo sapiens
gaactctcgctattc

SEQ ID NO: 1807820 - DNA, 15 bp, Homo sapiens
aactctcgctattca

SEQ ID NO: 1807821 - DNA, 15 bp, Homo sapiens
actctcgctattcat

SEQ ID NO: 1807822 - DNA, 15 bp, Homo sapiens
ctctcgctattcatc

SEQ ID NO: 1807823 - DNA, 15 bp, Homo sapiens
tctcgctattcatct

SEQ ID NO: 1807824 - DNA, 15 bp, Homo sapiens
ctcgctattcatcta

SEQ ID NO: 1807825 - DNA, 15 bp, Homo sapiens
tcgctattcatctag

SEQ ID NO: 1807826 - DNA, 15 bp, Homo sapiens
cgctattcatctaga

SEQ ID NO: 1807827 - DNA, 15 bp, Homo sapiens
gctattcatctagag

SEQ ID NO: 1807828 - DNA, 15 bp, Homo sapiens
ctattcatctagaga

SEQ ID NO: 1807829 - DNA, 15 bp, Homo sapiens
tattcatctagagag

SEQ ID NO: 1807830 - DNA, 15 bp, Homo sapiens
attcatctagagaga

SEQ ID NO: 1807831 - DNA, 15 bp, Homo sapiens
ttcatctagagagaa

SEQ ID NO: 1807832 - DNA, 15 bp, Homo sapiens
tcatctagagagaat

SEQ ID NO: 1807833 - DNA, 15 bp, Homo sapiens
catctagagagaatt

SEQ ID NO: 1807834 - DNA, 15 bp, Homo sapiens
atctagagagaattc

SEQ ID NO: 1807835 - DNA, 15 bp, Homo sapiens
tctagagagaattcc

SEQ ID NO: 1807836 - DNA, 15 bp, Homo sapiens
ctagagagaattccc

SEQ ID NO: 1807837 - DNA, 15 bp, Homo sapiens
tagagagaattccca

SEQ ID NO: 1807838 - DNA, 15 bp, Homo sapiens
agagagaattcccat

SEQ ID NO: 1807839 - DNA, 15 bp, Homo sapiens
gagagaattcccatc

SEQ ID NO: 1807840 - DNA, 15 bp, Homo sapiens
agagaattcccatct

SEQ ID NO: 1807841 - DNA, 15 bp, Homo sapiens
gagaattcccatctg

SEQ ID NO: 1807842 - DNA, 15 bp, Homo sapiens
agaattcccatctga

SEQ ID NO: 1807843 - DNA, 15 bp, Homo sapiens
gaattcccatctgaa

SEQ ID NO: 1807844 - DNA, 15 bp, Homo sapiens
aattcccatctgaat

SEQ ID NO: 1807845 - DNA, 15 bp, Homo sapiens
attcccatctgaata

SEQ ID NO: 1807846 - DNA, 15 bp, Homo sapiens
tcccatctgaatagt

SEQ ID NO: 1807847 - DNA, 15 bp, Homo sapiens
cccatctgaatagta

SEQ ID NO: 1807848 - DNA, 15 bp, Homo sapiens
ccatctgaatagtac

SEQ ID NO: 1807849 - DNA, 15 bp, Homo sapiens
catctgaatagtact

SEQ ID NO: 1807850 - DNA, 15 bp, Homo sapiens
atctgaatagtactc

SEQ ID NO: 1807851 - DNA, 15 bp, Homo sapiens
tagtactctcactaa

SEQ ID NO: 1807852 - DNA, 15 bp, Homo sapiens
agtactctcactaac

SEQ ID NO: 1807853 - DNA, 15 bp, Homo sapiens
gtactctcactaact

SEQ ID NO: 1807854 - DNA, 15 bp, Homo sapiens
tactctcactaactg

SEQ ID NO: 1807855 - DNA, 15 bp, Homo sapiens
actggatagaattcc

SEQ ID NO: 1807856 - DNA, 15 bp, Homo sapiens
ctggatagaattcct

SEQ ID NO: 1807857 - DNA, 15 bp, Homo sapiens
tggatagaattccta

SEQ ID NO: 1807858 - DNA, 15 bp, Homo sapiens
ggatagaattcctac

SEQ ID NO: 1807859 - DNA, 15 bp, Homo sapiens
gatagaattcctact

SEQ ID NO: 1807860 - DNA, 15 bp, Homo sapiens
atagaattcctactc

SEQ ID NO: 1807861 - DNA, 15 bp, Homo sapiens
tagaattcctactct

SEQ ID NO: 1807862 - DNA, 15 bp, Homo sapiens
agaattcctactctc

SEQ ID NO: 1807863 - DNA, 15 bp, Homo sapiens
gaattcctactctct

SEQ ID NO: 1807864 - DNA, 15 bp, Homo sapiens
aattcctactctctg

SEQ ID NO: 1807865 - DNA, 15 bp, Homo sapiens
attcctactctctgg

SEQ ID NO: 1807866 - DNA, 15 bp, Homo sapiens
ttcctactctctgga

SEQ ID NO: 1807867 - DNA, 15 bp, Homo sapiens
tcctactctctggat

SEQ ID NO: 1807868 - DNA, 15 bp, Homo sapiens
cctactctctggata

SEQ ID NO: 1807869 - DNA, 15 bp, Homo sapiens
ctactctctggataa

SEQ ID NO: 1807870 - DNA, 15 bp, Homo sapiens
tctcactatctttcc

SEQ ID NO: 1807871 - DNA, 15 bp, Homo sapiens
ctcactatctttccg

SEQ ID NO: 1807872 - DNA, 15 bp, Homo sapiens
tcactatctttccgg

SEQ ID NO: 1807873 - DNA, 15 bp, Homo sapiens
cactatctttccgga

SEQ ID NO: 1807874 - DNA, 15 bp, Homo sapiens
actatctttccggat

SEQ ID NO: 1807875 - DNA, 15 bp, Homo sapiens
ctatctttccggata

SEQ ID NO: 1807876 - DNA, 15 bp, Homo sapiens
tatctttccggatag

SEQ ID NO: 1807877 - DNA, 15 bp, Homo sapiens
atctttccggataga

SEQ ID NO: 1807878 - DNA, 15 bp, Homo sapiens
tctttccggatagaa

SEQ ID NO: 1807879 - DNA, 15 bp, Homo sapiens
ctttccggatagaac

SEQ ID NO: 1807880 - DNA, 15 bp, Homo sapiens
tttccggatagaact

SEQ ID NO: 1807881 - DNA, 15 bp, Homo sapiens
ttccggatagaactc

SEQ ID NO: 1807882 - DNA, 15 bp, Homo sapiens
ccggatagaactctt

SEQ ID NO: 1807883 - DNA, 15 bp, Homo sapiens
cggatagaactctta

SEQ ID NO: 1807884 - DNA, 15 bp, Homo sapiens
ggatagaactcttag

SEQ ID NO: 1807885 - DNA, 15 bp, Homo sapiens
gatagaactcttagt

SEQ ID NO: 1807886 - DNA, 15 bp, Homo sapiens
atagaactcttagta

SEQ ID NO: 1807887 - DNA, 15 bp, Homo sapiens
tagaactcttagtat

SEQ ID NO: 1807888 - DNA, 15 bp, Homo sapiens
agaactcttagtatc

SEQ ID NO: 1807889 - DNA, 15 bp, Homo sapiens
gaactcttagtatct

SEQ ID NO: 1807890 - DNA, 15 bp, Homo sapiens
aactcttagtatctg

SEQ ID NO: 1807891 - DNA, 15 bp, Homo sapiens
actcttagtatctgg

SEQ ID NO: 1807892 - DNA, 15 bp, Homo sapiens
ctcttagtatctgga

SEQ ID NO: 1807893 - DNA, 15 bp, Homo sapiens
tcttagtatctggaa

SEQ ID NO: 1807894 - DNA, 15 bp, Homo sapiens
cttagtatctggaaa

SEQ ID NO: 1807895 - DNA, 15 bp, Homo sapiens
ttagtatctggaaag

SEQ ID NO: 1807896 - DNA, 15 bp, Homo sapiens
tagtatctggaaaga

SEQ ID NO: 1807897 - DNA, 15 bp, Homo sapiens
agtatctggaaagaa

SEQ ID NO: 1807898 - DNA, 15 bp, Homo sapiens
gtatctggaaagaac

SEQ ID NO: 1807899 - DNA, 15 bp, Homo sapiens
tatctggaaagaact

SEQ ID NO: 1807900 - DNA, 15 bp, Homo sapiens
atctggaaagaactg

SEQ ID NO: 1807901 - DNA, 15 bp, Homo sapiens
tctggaaagaactgt

SEQ ID NO: 1807902 - DNA, 15 bp, Homo sapiens
ctggaaagaactgtc

SEQ ID NO: 1807903 - DNA, 15 bp, Homo sapiens
tggaaagaactgtca

SEQ ID NO: 1807904 - DNA, 15 bp, Homo sapiens
ggaaagaactgtcac

SEQ ID NO: 1807905 - DNA, 15 bp, Homo sapiens
gaaagaactgtcact

SEQ ID NO: 1807906 - DNA, 15 bp, Homo sapiens
aaagaactgtcacta

SEQ ID NO: 1807907 - DNA, 15 bp, Homo sapiens
aagaactgtcactat

SEQ ID NO: 1807908 - DNA, 15 bp, Homo sapiens
actgtcactatctgg

SEQ ID NO: 1807909 - DNA, 15 bp, Homo sapiens
ctgtcactatctgga

SEQ ID NO: 1807910 - DNA, 15 bp, Homo sapiens
tgtcactatctggat

SEQ ID NO: 1807911 - DNA, 15 bp, Homo sapiens
gtcactatctggata

SEQ ID NO: 1807912 - DNA, 15 bp, Homo sapiens
ctggatagaattcta

SEQ ID NO: 1807913 - DNA, 15 bp, Homo sapiens
tggatagaattctat

SEQ ID NO: 1807914 - DNA, 15 bp, Homo sapiens
ggatagaattctatg

SEQ ID NO: 1807915 - DNA, 15 bp, Homo sapiens
gatagaattctatgt

SEQ ID NO: 1807916 - DNA, 15 bp, Homo sapiens
atagaattctatgtc

SEQ ID NO: 1807917 - DNA, 15 bp, Homo sapiens
tagaattctatgtct

SEQ ID NO: 1807918 - DNA, 15 bp, Homo sapiens
agaattctatgtctc

SEQ ID NO: 1807919 - DNA, 15 bp, Homo sapiens
gaattctatgtctct

SEQ ID NO: 1807920 - DNA, 15 bp, Homo sapiens
aattctatgtctctg

SEQ ID NO: 1807921 - DNA, 15 bp, Homo sapiens
attctatgtctctgg

SEQ ID NO: 1807922 - DNA, 15 bp, Homo sapiens
ttctatgtctctgga

SEQ ID NO: 1807923 - DNA, 15 bp, Homo sapiens
tctatgtctctggat

SEQ ID NO: 1807924 - DNA, 15 bp, Homo sapiens
ctatgtctctggata

SEQ ID NO: 1807925 - DNA, 15 bp, Homo sapiens
tatgtctctggatag

SEQ ID NO: 1807926 - DNA, 15 bp, Homo sapiens
atgtctctggataga

SEQ ID NO: 1807927 - DNA, 15 bp, Homo sapiens
gtctctggatagaat

SEQ ID NO: 1807928 - DNA, 15 bp, Homo sapiens
attctcactatctgt

SEQ ID NO: 1807929 - DNA, 15 bp, Homo sapiens
ttctcactatctgtc

SEQ ID NO: 1807930 - DNA, 15 bp, Homo sapiens
tctcactatctgtca

SEQ ID NO: 1807931 - DNA, 15 bp, Homo sapiens
ctcactatctgtcag

SEQ ID NO: 1807932 - DNA, 15 bp, Homo sapiens
tcactatctgtcagg

SEQ ID NO: 1807933 - DNA, 15 bp, Homo sapiens
cactatctgtcagga

SEQ ID NO: 1807934 - DNA, 15 bp, Homo sapiens
actatctgtcaggat

SEQ ID NO: 1807935 - DNA, 15 bp, Homo sapiens
ctatctgtcaggata

SEQ ID NO: 1807936 - DNA, 15 bp, Homo sapiens
tatctgtcaggataa

SEQ ID NO: 1807937 - DNA, 15 bp, Homo sapiens
atctgtcaggataaa

SEQ ID NO: 1807938 - DNA, 15 bp, Homo sapiens
tctgtcaggataaaa

SEQ ID NO: 1807939 - DNA, 15 bp, Homo sapiens
ctgtcaggataaaat

SEQ ID NO: 1807940 - DNA, 15 bp, Homo sapiens
tgtcaggataaaatt

SEQ ID NO: 1807941 - DNA, 15 bp, Homo sapiens
gtcaggataaaattc

SEQ ID NO: 1807942 - DNA, 15 bp, Homo sapiens
tcaggataaaattct

SEQ ID NO: 1807943 - DNA, 15 bp, Homo sapiens
caggataaaattctc

SEQ ID NO: 1807944 - DNA, 15 bp, Homo sapiens
aggataaaattctca

SEQ ID NO: 1807945 - DNA, 15 bp, Homo sapiens
ctcactgtctatctt

SEQ ID NO: 1807946 - DNA, 15 bp, Homo sapiens
tcactgtctatcttg

SEQ ID NO: 1807947 - DNA, 15 bp, Homo sapiens
cactgtctatcttga

SEQ ID NO: 1807948 - DNA, 15 bp, Homo sapiens
actgtctatcttgat

SEQ ID NO: 1807949 - DNA, 15 bp, Homo sapiens
ctgtctatcttgata

SEQ ID NO: 1807950 - DNA, 15 bp, Homo sapiens
tgtctatcttgatag

SEQ ID NO: 1807951 - DNA, 15 bp, Homo sapiens
gtctatcttgataga

SEQ ID NO: 1807952 - DNA, 15 bp, Homo sapiens
tgtctggatagaata

SEQ ID NO: 1807953 - DNA, 15 bp, Homo sapiens
gtctggatagaatac

SEQ ID NO: 1807954 - DNA, 15 bp, Homo sapiens
tctggatagaatact

SEQ ID NO: 1807955 - DNA, 15 bp, Homo sapiens
ctggatagaatactc

SEQ ID NO: 1807956 - DNA, 15 bp, Homo sapiens
tggatagaatactca

SEQ ID NO: 1807957 - DNA, 15 bp, Homo sapiens
ggatagaatactcac

SEQ ID NO: 1807958 - DNA, 15 bp, Homo sapiens
gatagaatactcacc

SEQ ID NO: 1807959 - DNA, 15 bp, Homo sapiens
atagaatactcacca

SEQ ID NO: 1807960 - DNA, 15 bp, Homo sapiens
tagaatactcaccat

SEQ ID NO: 1807961 - DNA, 15 bp, Homo sapiens
agaatactcaccatt

SEQ ID NO: 1807962 - DNA, 15 bp, Homo sapiens
gaatactcaccattt

SEQ ID NO: 1807963 - DNA, 15 bp, Homo sapiens
aatactcaccatttg

SEQ ID NO: 1807964 - DNA, 15 bp, Homo sapiens
atactcaccatttgg

SEQ ID NO: 1807965 - DNA, 15 bp, Homo sapiens
cttactatctatctg

SEQ ID NO: 1807966 - DNA, 15 bp, Homo sapiens
ttactatctatctgg

SEQ ID NO: 1807967 - DNA, 15 bp, Homo sapiens
tactatctatctgga

SEQ ID NO: 1807968 - DNA, 15 bp, Homo sapiens
ggaattctcactctg

SEQ ID NO: 1807969 - DNA, 15 bp, Homo sapiens
cactctgtggatagg

SEQ ID NO: 1807970 - DNA, 15 bp, Homo sapiens
actctgtggatagga

SEQ ID NO: 1807971 - DNA, 15 bp, Homo sapiens
ctctgtggataggac

SEQ ID NO: 1807972 - DNA, 15 bp, Homo sapiens
tctgtggataggact

SEQ ID NO: 1807973 - DNA, 15 bp, Homo sapiens
ctgtggataggactc

SEQ ID NO: 1807974 - DNA, 15 bp, Homo sapiens
tgtggataggactct

SEQ ID NO: 1807975 - DNA, 15 bp, Homo sapiens
gtggataggactctc

SEQ ID NO: 1807976 - DNA, 15 bp, Homo sapiens
tggataggactctca

SEQ ID NO: 1807977 - DNA, 15 bp, Homo sapiens
ggataggactctcac

SEQ ID NO: 1807978 - DNA, 15 bp, Homo sapiens
gataggactctcact

SEQ ID NO: 1807979 - DNA, 15 bp, Homo sapiens
ataggactctcacta

SEQ ID NO: 1807980 - DNA, 15 bp, Homo sapiens
taggactctcactac

SEQ ID NO: 1807981 - DNA, 15 bp, Homo sapiens
aggactctcactacc

SEQ ID NO: 1807982 - DNA, 15 bp, Homo sapiens
ggactctcactacct

SEQ ID NO: 1807983 - DNA, 15 bp, Homo sapiens
gactctcactacctg

SEQ ID NO: 1807984 - DNA, 15 bp, Homo sapiens
ctcactacctgtctg

SEQ ID NO: 1807985 - DNA, 15 bp, Homo sapiens
tctggatagacttct

SEQ ID NO: 1807986 - DNA, 15 bp, Homo sapiens
ctggatagacttctc

SEQ ID NO: 1807987 - DNA, 15 bp, Homo sapiens
tggatagacttctcg

SEQ ID NO: 1807988 - DNA, 15 bp, Homo sapiens
ggatagacttctcgg

SEQ ID NO: 1807989 - DNA, 15 bp, Homo sapiens
gatagacttctcggt

SEQ ID NO: 1807990 - DNA, 15 bp, Homo sapiens
atagacttctcggtc

SEQ ID NO: 1807991 - DNA, 15 bp, Homo sapiens
tagacttctcggtct

SEQ ID NO: 1807992 - DNA, 15 bp, Homo sapiens
agacttctcggtctc

SEQ ID NO: 1807993 - DNA, 15 bp, Homo sapiens
gacttctcggtctct

SEQ ID NO: 1807994 - DNA, 15 bp, Homo sapiens
acttctcggtctctg

SEQ ID NO: 1807995 - DNA, 15 bp, Homo sapiens
cttctcggtctctgg

SEQ ID NO: 1807996 - DNA, 15 bp, Homo sapiens
ttctcggtctctgga

SEQ ID NO: 1807997 - DNA, 15 bp, Homo sapiens
tctcggtctctggat

SEQ ID NO: 1807998 - DNA, 15 bp, Homo sapiens
ctcggtctctggata

SEQ ID NO: 1807999 - DNA, 15 bp, Homo sapiens
tcggtctctggatag

SEQ ID NO: 1808000 - DNA, 15 bp, Homo sapiens
cggtctctggataga

SEQ ID NO: 1808001 - DNA, 15 bp, Homo sapiens
ggtctctggatagaa

SEQ ID NO: 1808002 - DNA, 15 bp, Homo sapiens
ggatagaagtctcaa

SEQ ID NO: 1808003 - DNA, 15 bp, Homo sapiens
gatagaagtctcaat

SEQ ID NO: 1808004 - DNA, 15 bp, Homo sapiens
atagaagtctcaatg

SEQ ID NO: 1808005 - DNA, 15 bp, Homo sapiens
tagaagtctcaatgc

SEQ ID NO: 1808006 - DNA, 15 bp, Homo sapiens
agaagtctcaatgcc

SEQ ID NO: 1808007 - DNA, 15 bp, Homo sapiens
gaagtctcaatgcct

SEQ ID NO: 1808008 - DNA, 15 bp, Homo sapiens
aagtctcaatgcctg

SEQ ID NO: 1808009 - DNA, 15 bp, Homo sapiens
agtctcaatgcctgt

SEQ ID NO: 1808010 - DNA, 15 bp, Homo sapiens
gtctcaatgcctgtc

SEQ ID NO: 1808011 - DNA, 15 bp, Homo sapiens
tctcaatgcctgtct

SEQ ID NO: 1808012 - DNA, 15 bp, Homo sapiens
ctcaatgcctgtcta

SEQ ID NO: 1808013 - DNA, 15 bp, Homo sapiens
tcaatgcctgtctag

SEQ ID NO: 1808014 - DNA, 15 bp, Homo sapiens
caatgcctgtctaga

SEQ ID NO: 1808015 - DNA, 15 bp, Homo sapiens
aatgcctgtctagat

SEQ ID NO: 1808016 - DNA, 15 bp, Homo sapiens
atgcctgtctagata

SEQ ID NO: 1808017 - DNA, 15 bp, Homo sapiens
tgcctgtctagatag

SEQ ID NO: 1808018 - DNA, 15 bp, Homo sapiens
gcctgtctagataga

SEQ ID NO: 1808019 - DNA, 15 bp, Homo sapiens
cctgtctagatagaa

SEQ ID NO: 1808020 - DNA, 15 bp, Homo sapiens
gaattttcaccatcc

SEQ ID NO: 1808021 - DNA, 15 bp, Homo sapiens
aattttcaccatccg

SEQ ID NO: 1808022 - DNA, 15 bp, Homo sapiens
attttcaccatccgg

SEQ ID NO: 1808023 - DNA, 15 bp, Homo sapiens
ttttcaccatccgga

SEQ ID NO: 1808024 - DNA, 15 bp, Homo sapiens
tttcaccatccggat

SEQ ID NO: 1808025 - DNA, 15 bp, Homo sapiens
ttcaccatccggata

SEQ ID NO: 1808026 - DNA, 15 bp, Homo sapiens
tcaccatccggatac

SEQ ID NO: 1808027 - DNA, 15 bp, Homo sapiens
caccatccggataca

SEQ ID NO: 1808028 - DNA, 15 bp, Homo sapiens
accatccggatacaa

SEQ ID NO: 1808029 - DNA, 15 bp, Homo sapiens
ccatccggatacaac

SEQ ID NO: 1808030 - DNA, 15 bp, Homo sapiens
catccggatacaact

SEQ ID NO: 1808031 - DNA, 15 bp, Homo sapiens
atccggatacaactc

SEQ ID NO: 1808032 - DNA, 15 bp, Homo sapiens
tccggatacaactct

SEQ ID NO: 1808033 - DNA, 15 bp, Homo sapiens
ccggatacaactctc

SEQ ID NO: 1808034 - DNA, 15 bp, Homo sapiens
cggatacaactctca

SEQ ID NO: 1808035 - DNA, 15 bp, Homo sapiens
ctcattctctggatt

SEQ ID NO: 1808036 - DNA, 15 bp, Homo sapiens
tcattctctggattg

SEQ ID NO: 1808037 - DNA, 15 bp, Homo sapiens
cattctctggattga

SEQ ID NO: 1808038 - DNA, 15 bp, Homo sapiens
attctctggattgat

SEQ ID NO: 1808039 - DNA, 15 bp, Homo sapiens
ttctctggattgatc

SEQ ID NO: 1808040 - DNA, 15 bp, Homo sapiens
tctctggattgatct

SEQ ID NO: 1808041 - DNA, 15 bp, Homo sapiens
ctctggattgatctc

SEQ ID NO: 1808042 - DNA, 15 bp, Homo sapiens
tctggattgatctct

SEQ ID NO: 1808043 - DNA, 15 bp, Homo sapiens
ctggattgatctctc

SEQ ID NO: 1808044 - DNA, 15 bp, Homo sapiens
tggattgatctctca

SEQ ID NO: 1808045 - DNA, 15 bp, Homo sapiens
ggattgatctctcac

SEQ ID NO: 1808046 - DNA, 15 bp, Homo sapiens
gattgatctctcact

SEQ ID NO: 1808047 - DNA, 15 bp, Homo sapiens
attgatctctcacta

SEQ ID NO: 1808048 - DNA, 15 bp, Homo sapiens
ttgatctctcactat

SEQ ID NO: 1808049 - DNA, 15 bp, Homo sapiens
tgatctctcactatc

SEQ ID NO: 1808050 - DNA, 15 bp, Homo sapiens
agaattctcactgtg

SEQ ID NO: 1808051 - DNA, 15 bp, Homo sapiens
gaattctcactgtgg

SEQ ID NO: 1808052 - DNA, 15 bp, Homo sapiens
tctcactgtgggtag

SEQ ID NO: 1808053 - DNA, 15 bp, Homo sapiens
ctcactgtgggtaga

SEQ ID NO: 1808054 - DNA, 15 bp, Homo sapiens
tcactgtgggtagaa

SEQ ID NO: 1808055 - DNA, 15 bp, Homo sapiens
cactgtgggtagaat

SEQ ID NO: 1808056 - DNA, 15 bp, Homo sapiens
actgtgggtagaatt

SEQ ID NO: 1808057 - DNA, 15 bp, Homo sapiens
ctgtgggtagaattc

SEQ ID NO: 1808058 - DNA, 15 bp, Homo sapiens
tgtgggtagaattct

SEQ ID NO: 1808059 - DNA, 15 bp, Homo sapiens
gtgggtagaattctc

SEQ ID NO: 1808060 - DNA, 15 bp, Homo sapiens
gaattctcactatca

SEQ ID NO: 1808061 - DNA, 15 bp, Homo sapiens
aattctcactatcat

SEQ ID NO: 1808062 - DNA, 15 bp, Homo sapiens
attctcactatcatt

SEQ ID NO: 1808063 - DNA, 15 bp, Homo sapiens
ttctcactatcattc

SEQ ID NO: 1808064 - DNA, 15 bp, Homo sapiens
tctcactatcattct

SEQ ID NO: 1808065 - DNA, 15 bp, Homo sapiens
ctcactatcattctg

SEQ ID NO: 1808066 - DNA, 15 bp, Homo sapiens
tcactatcattctgg

SEQ ID NO: 1808067 - DNA, 15 bp, Homo sapiens
cactatcattctgga

SEQ ID NO: 1808068 - DNA, 15 bp, Homo sapiens
actatcattctggac

SEQ ID NO: 1808069 - DNA, 15 bp, Homo sapiens
ctatcattctggaca

SEQ ID NO: 1808070 - DNA, 15 bp, Homo sapiens
tatcattctggacat

SEQ ID NO: 1808071 - DNA, 15 bp, Homo sapiens
atcattctggacata

SEQ ID NO: 1808072 - DNA, 15 bp, Homo sapiens
tcattctggacataa

SEQ ID NO: 1808073 - DNA, 15 bp, Homo sapiens
cattctggacataat

SEQ ID NO: 1808074 - DNA, 15 bp, Homo sapiens
attctggacataatt

SEQ ID NO: 1808075 - DNA, 15 bp, Homo sapiens
ttctggacataattc

SEQ ID NO: 1808076 - DNA, 15 bp, Homo sapiens
tctggacataattct

SEQ ID NO: 1808077 - DNA, 15 bp, Homo sapiens
ctggacataattctt

SEQ ID NO: 1808078 - DNA, 15 bp, Homo sapiens
tggacataattctta

SEQ ID NO: 1808079 - DNA, 15 bp, Homo sapiens
ggacataattcttac

SEQ ID NO: 1808080 - DNA, 15 bp, Homo sapiens
gacataattcttacc

SEQ ID NO: 1808081 - DNA, 15 bp, Homo sapiens
acataattcttaccc

SEQ ID NO: 1808082 - DNA, 15 bp, Homo sapiens
cataattcttaccct

SEQ ID NO: 1808083 - DNA, 15 bp, Homo sapiens
ataattcttaccctc

SEQ ID NO: 1808084 - DNA, 15 bp, Homo sapiens
taattcttaccctct

SEQ ID NO: 1808085 - DNA, 15 bp, Homo sapiens
aattcttaccctctg

SEQ ID NO: 1808086 - DNA, 15 bp, Homo sapiens
attcttaccctctgg

SEQ ID NO: 1808087 - DNA, 15 bp, Homo sapiens
ttcttaccctctggg

SEQ ID NO: 1808088 - DNA, 15 bp, Homo sapiens
tcttaccctctgggt

SEQ ID NO: 1808089 - DNA, 15 bp, Homo sapiens
cttaccctctgggtt

SEQ ID NO: 1808090 - DNA, 15 bp, Homo sapiens
ttaccctctgggttg

SEQ ID NO: 1808091 - DNA, 15 bp, Homo sapiens
taccctctgggttga

SEQ ID NO: 1808092 - DNA, 15 bp, Homo sapiens
accctctgggttgaa

SEQ ID NO: 1808093 - DNA, 15 bp, Homo sapiens
ccctctgggttgaac

SEQ ID NO: 1808094 - DNA, 15 bp, Homo sapiens
cctctgggttgaact

SEQ ID NO: 1808095 - DNA, 15 bp, Homo sapiens
ctctgggttgaactc

SEQ ID NO: 1808096 - DNA, 15 bp, Homo sapiens
tctgggttgaactct

SEQ ID NO: 1808097 - DNA, 15 bp, Homo sapiens
ctgggttgaactctc

SEQ ID NO: 1808098 - DNA, 15 bp, Homo sapiens
tgggttgaactctca

SEQ ID NO: 1808099 - DNA, 15 bp, Homo sapiens
gggttgaactctcac

SEQ ID NO: 1808100 - DNA, 15 bp, Homo sapiens
ggttgaactctcact

SEQ ID NO: 1808101 - DNA, 15 bp, Homo sapiens
gttgaactctcacta

SEQ ID NO: 1808102 - DNA, 15 bp, Homo sapiens
ttgaactctcactat

SEQ ID NO: 1808103 - DNA, 15 bp, Homo sapiens
tgaactctcactatc

SEQ ID NO: 1808104 - DNA, 15 bp, Homo sapiens
attctcaccatgtgg

SEQ ID NO: 1808105 - DNA, 15 bp, Homo sapiens
ttctcaccatgtggg

SEQ ID NO: 1808106 - DNA, 15 bp, Homo sapiens
tctcaccatgtgggt

SEQ ID NO: 1808107 - DNA, 15 bp, Homo sapiens
ctcaccatgtgggtg

SEQ ID NO: 1808108 - DNA, 15 bp, Homo sapiens
tcaccatgtgggtgg

SEQ ID NO: 1808109 - DNA, 15 bp, Homo sapiens
caccatgtgggtgga

SEQ ID NO: 1808110 - DNA, 15 bp, Homo sapiens
accatgtgggtggaa

SEQ ID NO: 1808111 - DNA, 15 bp, Homo sapiens
ccatgtgggtggaac

SEQ ID NO: 1808112 - DNA, 15 bp, Homo sapiens
catgtgggtggaact

SEQ ID NO: 1808113 - DNA, 15 bp, Homo sapiens
atgtgggtggaactc

SEQ ID NO: 1808114 - DNA, 15 bp, Homo sapiens
tgtgggtggaactct

SEQ ID NO: 1808115 - DNA, 15 bp, Homo sapiens
gtgggtggaactctc

SEQ ID NO: 1808116 - DNA, 15 bp, Homo sapiens
atctatctggatagt

SEQ ID NO: 1808117 - DNA, 15 bp, Homo sapiens
tctatctggatagta

SEQ ID NO: 1808118 - DNA, 15 bp, Homo sapiens
ctatctggatagtat

SEQ ID NO: 1808119 - DNA, 15 bp, Homo sapiens
tatctggatagtatt

SEQ ID NO: 1808120 - DNA, 15 bp, Homo sapiens
atctggatagtattc

SEQ ID NO: 1808121 - DNA, 15 bp, Homo sapiens
tctggatagtattct

SEQ ID NO: 1808122 - DNA, 15 bp, Homo sapiens
ctggatagtattctc

SEQ ID NO: 1808123 - DNA, 15 bp, Homo sapiens
tggatagtattctcg

SEQ ID NO: 1808124 - DNA, 15 bp, Homo sapiens
ggatagtattctcgc

SEQ ID NO: 1808125 - DNA, 15 bp, Homo sapiens
gatagtattctcgct

SEQ ID NO: 1808126 - DNA, 15 bp, Homo sapiens
atagtattctcgctc

SEQ ID NO: 1808127 - DNA, 15 bp, Homo sapiens
tagtattctcgctct

SEQ ID NO: 1808128 - DNA, 15 bp, Homo sapiens
agtattctcgctctc

SEQ ID NO: 1808129 - DNA, 15 bp, Homo sapiens
gtattctcgctctct

SEQ ID NO: 1808130 - DNA, 15 bp, Homo sapiens
tattctcgctctctg

SEQ ID NO: 1808131 - DNA, 15 bp, Homo sapiens
attctcgctctctgg

SEQ ID NO: 1808132 - DNA, 15 bp, Homo sapiens
ttctcgctctctgga

SEQ ID NO: 1808133 - DNA, 15 bp, Homo sapiens
tctcgctctctggaa

SEQ ID NO: 1808134 - DNA, 15 bp, Homo sapiens
ctcgctctctggaaa

SEQ ID NO: 1808135 - DNA, 15 bp, Homo sapiens
tcgctctctggaaag

SEQ ID NO: 1808136 - DNA, 15 bp, Homo sapiens
cgctctctggaaaga

SEQ ID NO: 1808137 - DNA, 15 bp, Homo sapiens
gctctctggaaagaa

SEQ ID NO: 1808138 - DNA, 15 bp, Homo sapiens
ctctctggaaagaac

SEQ ID NO: 1808139 - DNA, 15 bp, Homo sapiens
tctctggaaagaact

SEQ ID NO: 1808140 - DNA, 15 bp, Homo sapiens
ctctggaaagaactc

SEQ ID NO: 1808141 - DNA, 15 bp, Homo sapiens
tctggaaagaactct

SEQ ID NO: 1808142 - DNA, 15 bp, Homo sapiens
ggaaagaactctcac

SEQ ID NO: 1808143 - DNA, 15 bp, Homo sapiens
gaaagaactctcact

SEQ ID NO: 1808144 - DNA, 15 bp, Homo sapiens
aaagaactctcacta

SEQ ID NO: 1808145 - DNA, 15 bp, Homo sapiens
aagaactctcactat

SEQ ID NO: 1808146 - DNA, 15 bp, Homo sapiens
atagaattcttaccc

SEQ ID NO: 1808147 - DNA, 15 bp, Homo sapiens
tagaattcttaccct

SEQ ID NO: 1808148 - DNA, 15 bp, Homo sapiens
agaattcttaccctc

SEQ ID NO: 1808149 - DNA, 15 bp, Homo sapiens
gaattcttaccctct

SEQ ID NO: 1808150 - DNA, 15 bp, Homo sapiens
ttcttaccctctgga

SEQ ID NO: 1808151 - DNA, 15 bp, Homo sapiens
tcttaccctctggat

SEQ ID NO: 1808152 - DNA, 15 bp, Homo sapiens
cttaccctctggata

SEQ ID NO: 1808153 - DNA, 15 bp, Homo sapiens
ttaccctctggatag

SEQ ID NO: 1808154 - DNA, 15 bp, Homo sapiens
taccctctggataga

SEQ ID NO: 1808155 - DNA, 15 bp, Homo sapiens
acatctggatagaac

SEQ ID NO: 1808156 - DNA, 15 bp, Homo sapiens
atagaactcttactg

SEQ ID NO: 1808157 - DNA, 15 bp, Homo sapiens
gaactcttactgtct

SEQ ID NO: 1808158 - DNA, 15 bp, Homo sapiens
aactcttactgtcta

SEQ ID NO: 1808159 - DNA, 15 bp, Homo sapiens
actcttactgtctat

SEQ ID NO: 1808160 - DNA, 15 bp, Homo sapiens
ttactgtctatctga

SEQ ID NO: 1808161 - DNA, 15 bp, Homo sapiens
tactgtctatctgaa

SEQ ID NO: 1808162 - DNA, 15 bp, Homo sapiens
actgtctatctgaat

SEQ ID NO: 1808163 - DNA, 15 bp, Homo sapiens
ctgtctatctgaata

SEQ ID NO: 1808164 - DNA, 15 bp, Homo sapiens
tgtctatctgaatag

SEQ ID NO: 1808165 - DNA, 15 bp, Homo sapiens
gtctatctgaataga

SEQ ID NO: 1808166 - DNA, 15 bp, Homo sapiens
tctatctgaatagat

SEQ ID NO: 1808167 - DNA, 15 bp, Homo sapiens
ctatctgaatagatt

SEQ ID NO: 1808168 - DNA, 15 bp, Homo sapiens
tatctgaatagattt

SEQ ID NO: 1808169 - DNA, 15 bp, Homo sapiens
atctgaatagatttc

SEQ ID NO: 1808170 - DNA, 15 bp, Homo sapiens
tctgaatagatttct

SEQ ID NO: 1808171 - DNA, 15 bp, Homo sapiens
ctgaatagatttctc

SEQ ID NO: 1808172 - DNA, 15 bp, Homo sapiens
tgaatagatttctca

SEQ ID NO: 1808173 - DNA, 15 bp, Homo sapiens
gaatagatttctcac

SEQ ID NO: 1808174 - DNA, 15 bp, Homo sapiens
aatagatttctcact

SEQ ID NO: 1808175 - DNA, 15 bp, Homo sapiens
atagatttctcactc

SEQ ID NO: 1808176 - DNA, 15 bp, Homo sapiens
tagatttctcactct

SEQ ID NO: 1808177 - DNA, 15 bp, Homo sapiens
agatttctcactctc

SEQ ID NO: 1808178 - DNA, 15 bp, Homo sapiens
gatttctcactctct

SEQ ID NO: 1808179 - DNA, 15 bp, Homo sapiens
atttctcactctctg

SEQ ID NO: 1808180 - DNA, 15 bp, Homo sapiens
tttctcactctctgg

SEQ ID NO: 1808181 - DNA, 15 bp, Homo sapiens
ctcactctttggatg

SEQ ID NO: 1808182 - DNA, 15 bp, Homo sapiens
tcactctttggatga

SEQ ID NO: 1808183 - DNA, 15 bp, Homo sapiens
cactctttggatgaa

SEQ ID NO: 1808184 - DNA, 15 bp, Homo sapiens
actctttggatgaaa

SEQ ID NO: 1808185 - DNA, 15 bp, Homo sapiens
ctctttggatgaaac

SEQ ID NO: 1808186 - DNA, 15 bp, Homo sapiens
tctttggatgaaact

SEQ ID NO: 1808187 - DNA, 15 bp, Homo sapiens
ctttggatgaaactc

SEQ ID NO: 1808188 - DNA, 15 bp, Homo sapiens
tttggatgaaactct

SEQ ID NO: 1808189 - DNA, 15 bp, Homo sapiens
ttggatgaaactctc

SEQ ID NO: 1808190 - DNA, 15 bp, Homo sapiens
tggatgaaactctca

SEQ ID NO: 1808191 - DNA, 15 bp, Homo sapiens
ggatgaaactctcag

SEQ ID NO: 1808192 - DNA, 15 bp, Homo sapiens
gatgaaactctcagt

SEQ ID NO: 1808193 - DNA, 15 bp, Homo sapiens
atgaaactctcagta

SEQ ID NO: 1808194 - DNA, 15 bp, Homo sapiens
tgaaactctcagtat

SEQ ID NO: 1808195 - DNA, 15 bp, Homo sapiens
gaaactctcagtatc

SEQ ID NO: 1808196 - DNA, 15 bp, Homo sapiens
aaactctcagtatct

SEQ ID NO: 1808197 - DNA, 15 bp, Homo sapiens
ctctcagtatctgtc

SEQ ID NO: 1808198 - DNA, 15 bp, Homo sapiens
tctcagtatctgtct

SEQ ID NO: 1808199 - DNA, 15 bp, Homo sapiens
ctcagtatctgtctg

SEQ ID NO: 1808200 - DNA, 15 bp, Homo sapiens
tcagtatctgtctgg

SEQ ID NO: 1808201 - DNA, 15 bp, Homo sapiens
cagtatctgtctgga

SEQ ID NO: 1808202 - DNA, 15 bp, Homo sapiens
agtatctgtctggat

SEQ ID NO: 1808203 - DNA, 15 bp, Homo sapiens
gtatctgtctggata

SEQ ID NO: 1808204 - DNA, 15 bp, Homo sapiens
ctctcactatctttt

SEQ ID NO: 1808205 - DNA, 15 bp, Homo sapiens
tctcactatcttttt

SEQ ID NO: 1808206 - DNA, 15 bp, Homo sapiens
ctcactatctttttg

SEQ ID NO: 1808207 - DNA, 15 bp, Homo sapiens
tcactatctttttgg

SEQ ID NO: 1808208 - DNA, 15 bp, Homo sapiens
cactatctttttggt

SEQ ID NO: 1808209 - DNA, 15 bp, Homo sapiens
actatctttttggtt

SEQ ID NO: 1808210 - DNA, 15 bp, Homo sapiens
ctatctttttggtta

SEQ ID NO: 1808211 - DNA, 15 bp, Homo sapiens
tatctttttggttag

SEQ ID NO: 1808212 - DNA, 15 bp, Homo sapiens
atctttttggttaga

SEQ ID NO: 1808213 - DNA, 15 bp, Homo sapiens
tctttttggttagaa

SEQ ID NO: 1808214 - DNA, 15 bp, Homo sapiens
ctttttggttagaac

SEQ ID NO: 1808215 - DNA, 15 bp, Homo sapiens
tttttggttagaact

SEQ ID NO: 1808216 - DNA, 15 bp, Homo sapiens
ttttggttagaactg

SEQ ID NO: 1808217 - DNA, 15 bp, Homo sapiens
tttggttagaactgt

SEQ ID NO: 1808218 - DNA, 15 bp, Homo sapiens
ttggttagaactgtc

SEQ ID NO: 1808219 - DNA, 15 bp, Homo sapiens
tggttagaactgtca

SEQ ID NO: 1808220 - DNA, 15 bp, Homo sapiens
ggttagaactgtcac

SEQ ID NO: 1808221 - DNA, 15 bp, Homo sapiens
gttagaactgtcacc

SEQ ID NO: 1808222 - DNA, 15 bp, Homo sapiens
ttagaactgtcaccc

SEQ ID NO: 1808223 - DNA, 15 bp, Homo sapiens
agaactgtcaccctg

SEQ ID NO: 1808224 - DNA, 15 bp, Homo sapiens
gaactgtcaccctgt

SEQ ID NO: 1808225 - DNA, 15 bp, Homo sapiens
aactgtcaccctgtg

SEQ ID NO: 1808226 - DNA, 15 bp, Homo sapiens
actgtcaccctgtgg

SEQ ID NO: 1808227 - DNA, 15 bp, Homo sapiens
ctgtcaccctgtgga

SEQ ID NO: 1808228 - DNA, 15 bp, Homo sapiens
tgtcaccctgtggat

SEQ ID NO: 1808229 - DNA, 15 bp, Homo sapiens
gtcaccctgtggata

SEQ ID NO: 1808230 - DNA, 15 bp, Homo sapiens
tcaccctgtggatag

SEQ ID NO: 1808231 - DNA, 15 bp, Homo sapiens
caccctgtggataga

SEQ ID NO: 1808232 - DNA, 15 bp, Homo sapiens
accctgtggatagaa

SEQ ID NO: 1808233 - DNA, 15 bp, Homo sapiens
ccctgtggatagaaa

SEQ ID NO: 1808234 - DNA, 15 bp, Homo sapiens
cctgtggatagaaat

SEQ ID NO: 1808235 - DNA, 15 bp, Homo sapiens
ctgtggatagaaatt

SEQ ID NO: 1808236 - DNA, 15 bp, Homo sapiens
tgtggatagaaattt

SEQ ID NO: 1808237 - DNA, 15 bp, Homo sapiens
gtggatagaaatttc

SEQ ID NO: 1808238 - DNA, 15 bp, Homo sapiens
tggatagaaatttct

SEQ ID NO: 1808239 - DNA, 15 bp, Homo sapiens
ggatagaaatttctc

SEQ ID NO: 1808240 - DNA, 15 bp, Homo sapiens
gatagaaatttctct

SEQ ID NO: 1808241 - DNA, 15 bp, Homo sapiens
atagaaatttctcta

SEQ ID NO: 1808242 - DNA, 15 bp, Homo sapiens
tagaaatttctctat

SEQ ID NO: 1808243 - DNA, 15 bp, Homo sapiens
agaaatttctctatc

SEQ ID NO: 1808244 - DNA, 15 bp, Homo sapiens
gaaatttctctatct

SEQ ID NO: 1808245 - DNA, 15 bp, Homo sapiens
aaatttctctatcta

SEQ ID NO: 1808246 - DNA, 15 bp, Homo sapiens
aatttctctatctat

SEQ ID NO: 1808247 - DNA, 15 bp, Homo sapiens
atttctctatctatc

SEQ ID NO: 1808248 - DNA, 15 bp, Homo sapiens
tttctctatctatct

SEQ ID NO: 1808249 - DNA, 15 bp, Homo sapiens
ttctctatctatctg

SEQ ID NO: 1808250 - DNA, 15 bp, Homo sapiens
atagaattctccctc

SEQ ID NO: 1808251 - DNA, 15 bp, Homo sapiens
tagaattctccctct

SEQ ID NO: 1808252 - DNA, 15 bp, Homo sapiens
agaattctccctctc

SEQ ID NO: 1808253 - DNA, 15 bp, Homo sapiens
gaattctccctctct

SEQ ID NO: 1808254 - DNA, 15 bp, Homo sapiens
aattctccctctctg

SEQ ID NO: 1808255 - DNA, 15 bp, Homo sapiens
attctccctctctgg

SEQ ID NO: 1808256 - DNA, 15 bp, Homo sapiens
ttctccctctctgga

SEQ ID NO: 1808257 - DNA, 15 bp, Homo sapiens
tctccctctctggat

SEQ ID NO: 1808258 - DNA, 15 bp, Homo sapiens
ctccctctctggata

SEQ ID NO: 1808259 - DNA, 15 bp, Homo sapiens
tccctctctggatag

SEQ ID NO: 1808260 - DNA, 15 bp, Homo sapiens
ccctctctggataga

SEQ ID NO: 1808261 - DNA, 15 bp, Homo sapiens
cctctctggatagaa

SEQ ID NO: 1808262 - DNA, 15 bp, Homo sapiens
ctctctggatagaag

SEQ ID NO: 1808263 - DNA, 15 bp, Homo sapiens
ccatctggatagaag

SEQ ID NO: 1808264 - DNA, 15 bp, Homo sapiens
catctggatagaagt

SEQ ID NO: 1808265 - DNA, 15 bp, Homo sapiens
atctggatagaagtg

SEQ ID NO: 1808266 - DNA, 15 bp, Homo sapiens
tctggatagaagtgt

SEQ ID NO: 1808267 - DNA, 15 bp, Homo sapiens
ctggatagaagtgtc

SEQ ID NO: 1808268 - DNA, 15 bp, Homo sapiens
tggatagaagtgtca

SEQ ID NO: 1808269 - DNA, 15 bp, Homo sapiens
ggatagaagtgtcac

SEQ ID NO: 1808270 - DNA, 15 bp, Homo sapiens
gatagaagtgtcact

SEQ ID NO: 1808271 - DNA, 15 bp, Homo sapiens
atagaagtgtcacta

SEQ ID NO: 1808272 - DNA, 15 bp, Homo sapiens
tagaagtgtcactat

SEQ ID NO: 1808273 - DNA, 15 bp, Homo sapiens
agaagtgtcactatc

SEQ ID NO: 1808274 - DNA, 15 bp, Homo sapiens
gaagtgtcactatct

SEQ ID NO: 1808275 - DNA, 15 bp, Homo sapiens
aagtgtcactatctg

SEQ ID NO: 1808276 - DNA, 15 bp, Homo sapiens
agtgtcactatctgt

SEQ ID NO: 1808277 - DNA, 15 bp, Homo sapiens
gtgtcactatctgtc

SEQ ID NO: 1808278 - DNA, 15 bp, Homo sapiens
tcttaccatctggag

SEQ ID NO: 1808279 - DNA, 15 bp, Homo sapiens
cttaccatctggaga

SEQ ID NO: 1808280 - DNA, 15 bp, Homo sapiens
ttaccatctggagag

SEQ ID NO: 1808281 - DNA, 15 bp, Homo sapiens
taccatctggagaga

SEQ ID NO: 1808282 - DNA, 15 bp, Homo sapiens
accatctggagagaa

SEQ ID NO: 1808283 - DNA, 15 bp, Homo sapiens
ccatctggagagaac

SEQ ID NO: 1808284 - DNA, 15 bp, Homo sapiens
catctggagagaact

SEQ ID NO: 1808285 - DNA, 15 bp, Homo sapiens
atctggagagaactc

SEQ ID NO: 1808286 - DNA, 15 bp, Homo sapiens
ttctcaccatctggc

SEQ ID NO: 1808287 - DNA, 15 bp, Homo sapiens
tctcaccatctggct

SEQ ID NO: 1808288 - DNA, 15 bp, Homo sapiens
ctcaccatctggcta

SEQ ID NO: 1808289 - DNA, 15 bp, Homo sapiens
tcaccatctggctag

SEQ ID NO: 1808290 - DNA, 15 bp, Homo sapiens
caccatctggctaga

SEQ ID NO: 1808291 - DNA, 15 bp, Homo sapiens
accatctggctagaa

SEQ ID NO: 1808292 - DNA, 15 bp, Homo sapiens
ccatctggctagaac

SEQ ID NO: 1808293 - DNA, 15 bp, Homo sapiens
catctggctagaacc

SEQ ID NO: 1808294 - DNA, 15 bp, Homo sapiens
atctggctagaaccc

SEQ ID NO: 1808295 - DNA, 15 bp, Homo sapiens
tctggctagaaccct

SEQ ID NO: 1808296 - DNA, 15 bp, Homo sapiens
ctggctagaaccctc

SEQ ID NO: 1808297 - DNA, 15 bp, Homo sapiens
tggctagaaccctca

SEQ ID NO: 1808298 - DNA, 15 bp, Homo sapiens
ggctagaaccctcac

SEQ ID NO: 1808299 - DNA, 15 bp, Homo sapiens
gctagaaccctcact

SEQ ID NO: 1808300 - DNA, 15 bp, Homo sapiens
ctagaaccctcacta

SEQ ID NO: 1808301 - DNA, 15 bp, Homo sapiens
aaccctcactatctg

SEQ ID NO: 1808302 - DNA, 15 bp, Homo sapiens
accctcactatctgt

SEQ ID NO: 1808303 - DNA, 15 bp, Homo sapiens
ccctcactatctgtc

SEQ ID NO: 1808304 - DNA, 15 bp, Homo sapiens
cctcactatctgtct

SEQ ID NO: 1808305 - DNA, 15 bp, Homo sapiens
ctatctgtctggatg

SEQ ID NO: 1808306 - DNA, 15 bp, Homo sapiens
tatctgtctggatgg

SEQ ID NO: 1808307 - DNA, 15 bp, Homo sapiens
atctgtctggatgga

SEQ ID NO: 1808308 - DNA, 15 bp, Homo sapiens
tctgtctggatggaa

SEQ ID NO: 1808309 - DNA, 15 bp, Homo sapiens
ctgtctggatggaac

SEQ ID NO: 1808310 - DNA, 15 bp, Homo sapiens
tgtctggatggaact

SEQ ID NO: 1808311 - DNA, 15 bp, Homo sapiens
gtctggatggaactc

SEQ ID NO: 1808312 - DNA, 15 bp, Homo sapiens
ctctcactatctatg

SEQ ID NO: 1808313 - DNA, 15 bp, Homo sapiens
tctcactatctatgt

SEQ ID NO: 1808314 - DNA, 15 bp, Homo sapiens
ctcactatctatgta

SEQ ID NO: 1808315 - DNA, 15 bp, Homo sapiens
tcactatctatgtag

SEQ ID NO: 1808316 - DNA, 15 bp, Homo sapiens
cactatctatgtaga

SEQ ID NO: 1808317 - DNA, 15 bp, Homo sapiens
actatctatgtagac

SEQ ID NO: 1808318 - DNA, 15 bp, Homo sapiens
ctatctatgtagaca

SEQ ID NO: 1808319 - DNA, 15 bp, Homo sapiens
tatctatgtagacag

SEQ ID NO: 1808320 - DNA, 15 bp, Homo sapiens
atctatgtagacaga

SEQ ID NO: 1808321 - DNA, 15 bp, Homo sapiens
tctatgtagacagaa

SEQ ID NO: 1808322 - DNA, 15 bp, Homo sapiens
ctatgtagacagaat

SEQ ID NO: 1808323 - DNA, 15 bp, Homo sapiens
tatgtagacagaatt

SEQ ID NO: 1808324 - DNA, 15 bp, Homo sapiens
atgtagacagaattc

SEQ ID NO: 1808325 - DNA, 15 bp, Homo sapiens
tgtagacagaattct

SEQ ID NO: 1808326 - DNA, 15 bp, Homo sapiens
gtagacagaattctc

SEQ ID NO: 1808327 - DNA, 15 bp, Homo sapiens
tagacagaattctca

SEQ ID NO: 1808328 - DNA, 15 bp, Homo sapiens
agacagaattctcac

SEQ ID NO: 1808329 - DNA, 15 bp, Homo sapiens
ctcgctatctggatt

SEQ ID NO: 1808330 - DNA, 15 bp, Homo sapiens
tcgctatctggattg

SEQ ID NO: 1808331 - DNA, 15 bp, Homo sapiens
cgctatctggattga

SEQ ID NO: 1808332 - DNA, 15 bp, Homo sapiens
gctatctggattgaa

SEQ ID NO: 1808333 - DNA, 15 bp, Homo sapiens
ctatctggattgaat

SEQ ID NO: 1808334 - DNA, 15 bp, Homo sapiens
tatctggattgaatt

SEQ ID NO: 1808335 - DNA, 15 bp, Homo sapiens
atctggattgaattt

SEQ ID NO: 1808336 - DNA, 15 bp, Homo sapiens
tctggattgaatttt

SEQ ID NO: 1808337 - DNA, 15 bp, Homo sapiens
ctggattgaattttc

SEQ ID NO: 1808338 - DNA, 15 bp, Homo sapiens
tggattgaattttca

SEQ ID NO: 1808339 - DNA, 15 bp, Homo sapiens
ggattgaattttcac

SEQ ID NO: 1808340 - DNA, 15 bp, Homo sapiens
gattgaattttcacc

SEQ ID NO: 1808341 - DNA, 15 bp, Homo sapiens
attgaattttcacca

SEQ ID NO: 1808342 - DNA, 15 bp, Homo sapiens
ttgaattttcaccat

SEQ ID NO: 1808343 - DNA, 15 bp, Homo sapiens
tgaattttcaccatc

SEQ ID NO: 1808344 - DNA, 15 bp, Homo sapiens
ttcaccatctggatg

SEQ ID NO: 1808345 - DNA, 15 bp, Homo sapiens
tcaccatctggatgg

SEQ ID NO: 1808346 - DNA, 15 bp, Homo sapiens
caccatctggatgga

SEQ ID NO: 1808347 - DNA, 15 bp, Homo sapiens
accatctggatggaa

SEQ ID NO: 1808348 - DNA, 15 bp, Homo sapiens
ccatctggatggaat

SEQ ID NO: 1808349 - DNA, 15 bp, Homo sapiens
catctggatggaatt

SEQ ID NO: 1808350 - DNA, 15 bp, Homo sapiens
atggaattctcactg

SEQ ID NO: 1808351 - DNA, 15 bp, Homo sapiens
tggaattctcactgt

SEQ ID NO: 1808352 - DNA, 15 bp, Homo sapiens
ggaattctcactgtc

SEQ ID NO: 1808353 - DNA, 15 bp, Homo sapiens
gaattctcactgtcg

SEQ ID NO: 1808354 - DNA, 15 bp, Homo sapiens
aattctcactgtcga

SEQ ID NO: 1808355 - DNA, 15 bp, Homo sapiens
attctcactgtcgat

SEQ ID NO: 1808356 - DNA, 15 bp, Homo sapiens
ttctcactgtcgatc

SEQ ID NO: 1808357 - DNA, 15 bp, Homo sapiens
tctcactgtcgatca

SEQ ID NO: 1808358 - DNA, 15 bp, Homo sapiens
ctcactgtcgatcac

SEQ ID NO: 1808359 - DNA, 15 bp, Homo sapiens
tcactgtcgatcacg

SEQ ID NO: 1808360 - DNA, 15 bp, Homo sapiens
cactgtcgatcacgt

SEQ ID NO: 1808361 - DNA, 15 bp, Homo sapiens
actgtcgatcacgtt

SEQ ID NO: 1808362 - DNA, 15 bp, Homo sapiens
ctgtcgatcacgttg

SEQ ID NO: 1808363 - DNA, 15 bp, Homo sapiens
tgtcgatcacgttgg

SEQ ID NO: 1808364 - DNA, 15 bp, Homo sapiens
gtcgatcacgttgga

SEQ ID NO: 1808365 - DNA, 15 bp, Homo sapiens
tcgatcacgttggaa

SEQ ID NO: 1808366 - DNA, 15 bp, Homo sapiens
cgatcacgttggaat

SEQ ID NO: 1808367 - DNA, 15 bp, Homo sapiens
gatcacgttggaatt

SEQ ID NO: 1808368 - DNA, 15 bp, Homo sapiens
atcacgttggaattc

SEQ ID NO: 1808369 - DNA, 15 bp, Homo sapiens
tcacgttggaattct

SEQ ID NO: 1808370 - DNA, 15 bp, Homo sapiens
cacgttggaattctc

SEQ ID NO: 1808371 - DNA, 15 bp, Homo sapiens
acgttggaattctca

SEQ ID NO: 1808372 - DNA, 15 bp, Homo sapiens
cgttggaattctcac

SEQ ID NO: 1808373 - DNA, 15 bp, Homo sapiens
gttggaattctcact

SEQ ID NO: 1808374 - DNA, 15 bp, Homo sapiens
ttggaattctcactc

SEQ ID NO: 1808375 - DNA, 15 bp, Homo sapiens
gtggatagaactgtg

SEQ ID NO: 1808376 - DNA, 15 bp, Homo sapiens
tggatagaactgtga

SEQ ID NO: 1808377 - DNA, 15 bp, Homo sapiens
ggatagaactgtgac

SEQ ID NO: 1808378 - DNA, 15 bp, Homo sapiens
gatagaactgtgaca

SEQ ID NO: 1808379 - DNA, 15 bp, Homo sapiens
atagaactgtgacaa

SEQ ID NO: 1808380 - DNA, 15 bp, Homo sapiens
tagaactgtgacaat

SEQ ID NO: 1808381 - DNA, 15 bp, Homo sapiens
agaactgtgacaatc

SEQ ID NO: 1808382 - DNA, 15 bp, Homo sapiens
gaactgtgacaatct

SEQ ID NO: 1808383 - DNA, 15 bp, Homo sapiens
aactgtgacaatcta

SEQ ID NO: 1808384 - DNA, 15 bp, Homo sapiens
actgtgacaatctat

SEQ ID NO: 1808385 - DNA, 15 bp, Homo sapiens
ctgtgacaatctatc

SEQ ID NO: 1808386 - DNA, 15 bp, Homo sapiens
tgtgacaatctatct

SEQ ID NO: 1808387 - DNA, 15 bp, Homo sapiens
gtgacaatctatctg

SEQ ID NO: 1808388 - DNA, 15 bp, Homo sapiens
tgacaatctatctgg

SEQ ID NO: 1808389 - DNA, 15 bp, Homo sapiens
gacaatctatctgga

SEQ ID NO: 1808390 - DNA, 15 bp, Homo sapiens
acaatctatctggat

SEQ ID NO: 1808391 - DNA, 15 bp, Homo sapiens
caatctatctggata

SEQ ID NO: 1808392 - DNA, 15 bp, Homo sapiens
aatctatctggatag

SEQ ID NO: 1808393 - DNA, 15 bp, Homo sapiens
agaattcttactctt

SEQ ID NO: 1808394 - DNA, 15 bp, Homo sapiens
gaattcttactcttg

SEQ ID NO: 1808395 - DNA, 15 bp, Homo sapiens
aattcttactcttga

SEQ ID NO: 1808396 - DNA, 15 bp, Homo sapiens
attcttactcttgat

SEQ ID NO: 1808397 - DNA, 15 bp, Homo sapiens
ttcttactcttgata

SEQ ID NO: 1808398 - DNA, 15 bp, Homo sapiens
tcttactcttgatag

SEQ ID NO: 1808399 - DNA, 15 bp, Homo sapiens
cttactcttgataga

SEQ ID NO: 1808400 - DNA, 15 bp, Homo sapiens
ttactcttgatagaa

SEQ ID NO: 1808401 - DNA, 15 bp, Homo sapiens
tactcttgatagaac

SEQ ID NO: 1808402 - DNA, 15 bp, Homo sapiens
actcttgatagaact

SEQ ID NO: 1808403 - DNA, 15 bp, Homo sapiens
ctcttgatagaactc

SEQ ID NO: 1808404 - DNA, 15 bp, Homo sapiens
cttgatagaactcta

SEQ ID NO: 1808405 - DNA, 15 bp, Homo sapiens
ttgatagaactctat

SEQ ID NO: 1808406 - DNA, 15 bp, Homo sapiens
tgatagaactctatt

SEQ ID NO: 1808407 - DNA, 15 bp, Homo sapiens
aactctatttgtctg

SEQ ID NO: 1808408 - DNA, 15 bp, Homo sapiens
actctatttgtctgc

SEQ ID NO: 1808409 - DNA, 15 bp, Homo sapiens
ctctatttgtctgca

SEQ ID NO: 1808410 - DNA, 15 bp, Homo sapiens
tctatttgtctgcat

SEQ ID NO: 1808411 - DNA, 15 bp, Homo sapiens
ctatttgtctgcata

SEQ ID NO: 1808412 - DNA, 15 bp, Homo sapiens
tatttgtctgcatag

SEQ ID NO: 1808413 - DNA, 15 bp, Homo sapiens
atttgtctgcataga

SEQ ID NO: 1808414 - DNA, 15 bp, Homo sapiens
tttgtctgcatagac

SEQ ID NO: 1808415 - DNA, 15 bp, Homo sapiens
ttgtctgcatagact

SEQ ID NO: 1808416 - DNA, 15 bp, Homo sapiens
tgtctgcatagactt

SEQ ID NO: 1808417 - DNA, 15 bp, Homo sapiens
gtctgcatagacttc

SEQ ID NO: 1808418 - DNA, 15 bp, Homo sapiens
tctgcatagacttct

SEQ ID NO: 1808419 - DNA, 15 bp, Homo sapiens
ctgcatagacttctc

SEQ ID NO: 1808420 - DNA, 15 bp, Homo sapiens
tgcatagacttctca

SEQ ID NO: 1808421 - DNA, 15 bp, Homo sapiens
gcatagacttctcac

SEQ ID NO: 1808422 - DNA, 15 bp, Homo sapiens
catagacttctcacc

SEQ ID NO: 1808423 - DNA, 15 bp, Homo sapiens
atagacttctcacca

SEQ ID NO: 1808424 - DNA, 15 bp, Homo sapiens
tagacttctcaccat

SEQ ID NO: 1808425 - DNA, 15 bp, Homo sapiens
agacttctcaccatc

SEQ ID NO: 1808426 - DNA, 15 bp, Homo sapiens
gacttctcaccatct

SEQ ID NO: 1808427 - DNA, 15 bp, Homo sapiens
acttctcaccatctg

SEQ ID NO: 1808428 - DNA, 15 bp, Homo sapiens
cttctcaccatctgg

SEQ ID NO: 1808429 - DNA, 15 bp, Homo sapiens
atagaactctcagtc

SEQ ID NO: 1808430 - DNA, 15 bp, Homo sapiens
tagaactctcagtct

SEQ ID NO: 1808431 - DNA, 15 bp, Homo sapiens
agaactctcagtctc

SEQ ID NO: 1808432 - DNA, 15 bp, Homo sapiens
gaactctcagtctct

SEQ ID NO: 1808433 - DNA, 15 bp, Homo sapiens
aactctcagtctctg

SEQ ID NO: 1808434 - DNA, 15 bp, Homo sapiens
actctcagtctctgg

SEQ ID NO: 1808435 - DNA, 15 bp, Homo sapiens
ctctcagtctctgga

SEQ ID NO: 1808436 - DNA, 15 bp, Homo sapiens
tctcagtctctggat

SEQ ID NO: 1808437 - DNA, 15 bp, Homo sapiens
ctcagtctctggata

SEQ ID NO: 1808438 - DNA, 15 bp, Homo sapiens
tcagtctctggatag

SEQ ID NO: 1808439 - DNA, 15 bp, Homo sapiens
cagtctctggataga

SEQ ID NO: 1808440 - DNA, 15 bp, Homo sapiens
ctcactgtctggatg

SEQ ID NO: 1808441 - DNA, 15 bp, Homo sapiens
cactgtctggatgga

SEQ ID NO: 1808442 - DNA, 15 bp, Homo sapiens
actgtctggatggaa

SEQ ID NO: 1808443 - DNA, 15 bp, Homo sapiens
tggaactctcactac

SEQ ID NO: 1808444 - DNA, 15 bp, Homo sapiens
ggaactctcactacc

SEQ ID NO: 1808445 - DNA, 15 bp, Homo sapiens
ctcactacctgtctc

SEQ ID NO: 1808446 - DNA, 15 bp, Homo sapiens
tcactacctgtctcg

SEQ ID NO: 1808447 - DNA, 15 bp, Homo sapiens
cactacctgtctcga

SEQ ID NO: 1808448 - DNA, 15 bp, Homo sapiens
actacctgtctcgat

SEQ ID NO: 1808449 - DNA, 15 bp, Homo sapiens
ctacctgtctcgata

SEQ ID NO: 1808450 - DNA, 15 bp, Homo sapiens
tacctgtctcgatag

SEQ ID NO: 1808451 - DNA, 15 bp, Homo sapiens
acctgtctcgataga

SEQ ID NO: 1808452 - DNA, 15 bp, Homo sapiens
cctgtctcgatagaa

SEQ ID NO: 1808453 - DNA, 15 bp, Homo sapiens
tgtctcgatagaatt

SEQ ID NO: 1808454 - DNA, 15 bp, Homo sapiens
gtctcgatagaattc

SEQ ID NO: 1808455 - DNA, 15 bp, Homo sapiens
tcactgtctggatat

SEQ ID NO: 1808456 - DNA, 15 bp, Homo sapiens
cactgtctggatata

SEQ ID NO: 1808457 - DNA, 15 bp, Homo sapiens
actgtctggatataa

SEQ ID NO: 1808458 - DNA, 15 bp, Homo sapiens
tgtctggatataatc

SEQ ID NO: 1808459 - DNA, 15 bp, Homo sapiens
gtctggatataatcc

SEQ ID NO: 1808460 - DNA, 15 bp, Homo sapiens
tctggatataatcct

SEQ ID NO: 1808461 - DNA, 15 bp, Homo sapiens
ctggatataatcctc

SEQ ID NO: 1808462 - DNA, 15 bp, Homo sapiens
tggatataatcctca

SEQ ID NO: 1808463 - DNA, 15 bp, Homo sapiens
ggatataatcctcac

SEQ ID NO: 1808464 - DNA, 15 bp, Homo sapiens
gatataatcctcact

SEQ ID NO: 1808465 - DNA, 15 bp, Homo sapiens
atataatcctcactc

SEQ ID NO: 1808466 - DNA, 15 bp, Homo sapiens
tataatcctcactct

SEQ ID NO: 1808467 - DNA, 15 bp, Homo sapiens
ataatcctcactctc

SEQ ID NO: 1808468 - DNA, 15 bp, Homo sapiens
taatcctcactctct

SEQ ID NO: 1808469 - DNA, 15 bp, Homo sapiens
aatcctcactctctg

SEQ ID NO: 1808470 - DNA, 15 bp, Homo sapiens
atcctcactctctgg

SEQ ID NO: 1808471 - DNA, 15 bp, Homo sapiens
tcctcactctctgga

SEQ ID NO: 1808472 - DNA, 15 bp, Homo sapiens
cctcactctctggat

SEQ ID NO: 1808473 - DNA, 15 bp, Homo sapiens
agaactagcactatc

SEQ ID NO: 1808474 - DNA, 15 bp, Homo sapiens
gaactagcactatct

SEQ ID NO: 1808475 - DNA, 15 bp, Homo sapiens
aactagcactatctg

SEQ ID NO: 1808476 - DNA, 15 bp, Homo sapiens
actagcactatctgg

SEQ ID NO: 1808477 - DNA, 15 bp, Homo sapiens
ctagcactatctggg

SEQ ID NO: 1808478 - DNA, 15 bp, Homo sapiens
tagcactatctgggt

SEQ ID NO: 1808479 - DNA, 15 bp, Homo sapiens
agcactatctgggta

SEQ ID NO: 1808480 - DNA, 15 bp, Homo sapiens
gcactatctgggtag

SEQ ID NO: 1808481 - DNA, 15 bp, Homo sapiens
ggtagaattctcaca

SEQ ID NO: 1808482 - DNA, 15 bp, Homo sapiens
gtagaattctcacaa

SEQ ID NO: 1808483 - DNA, 15 bp, Homo sapiens
tggatagaattctaa

SEQ ID NO: 1808484 - DNA, 15 bp, Homo sapiens
ggatagaattctaac

SEQ ID NO: 1808485 - DNA, 15 bp, Homo sapiens
gatagaattctaact

SEQ ID NO: 1808486 - DNA, 15 bp, Homo sapiens
atagaattctaactc

SEQ ID NO: 1808487 - DNA, 15 bp, Homo sapiens
tagaattctaactct

SEQ ID NO: 1808488 - DNA, 15 bp, Homo sapiens
agaattctaactctg

SEQ ID NO: 1808489 - DNA, 15 bp, Homo sapiens
gaattctaactctgg

SEQ ID NO: 1808490 - DNA, 15 bp, Homo sapiens
aattctaactctgga

SEQ ID NO: 1808491 - DNA, 15 bp, Homo sapiens
attctaactctggat

SEQ ID NO: 1808492 - DNA, 15 bp, Homo sapiens
ttctaactctggata

SEQ ID NO: 1808493 - DNA, 15 bp, Homo sapiens
tctaactctggatag

SEQ ID NO: 1808494 - DNA, 15 bp, Homo sapiens
ctaactctggataga

SEQ ID NO: 1808495 - DNA, 15 bp, Homo sapiens
taactctggatagaa

SEQ ID NO: 1808496 - DNA, 15 bp, Homo sapiens
aactctggatagaac

SEQ ID NO: 1808497 - DNA, 15 bp, Homo sapiens
tatggaaagaattca

SEQ ID NO: 1808498 - DNA, 15 bp, Homo sapiens
atggaaagaattcac

SEQ ID NO: 1808499 - DNA, 15 bp, Homo sapiens
tggaaagaattcact

SEQ ID NO: 1808500 - DNA, 15 bp, Homo sapiens
ggaaagaattcactc

SEQ ID NO: 1808501 - DNA, 15 bp, Homo sapiens
gaaagaattcactct

SEQ ID NO: 1808502 - DNA, 15 bp, Homo sapiens
aaagaattcactctc

SEQ ID NO: 1808503 - DNA, 15 bp, Homo sapiens
aagaattcactctct

SEQ ID NO: 1808504 - DNA, 15 bp, Homo sapiens
agaattcactctctg

SEQ ID NO: 1808505 - DNA, 15 bp, Homo sapiens
gaattcactctctgg

SEQ ID NO: 1808506 - DNA, 15 bp, Homo sapiens
aattcactctctgga

SEQ ID NO: 1808507 - DNA, 15 bp, Homo sapiens
attcactctctggat

SEQ ID NO: 1808508 - DNA, 15 bp, Homo sapiens
gaattctcactgtgt

SEQ ID NO: 1808509 - DNA, 15 bp, Homo sapiens
aattctcactgtgta

SEQ ID NO: 1808510 - DNA, 15 bp, Homo sapiens
attctcactgtgtat

SEQ ID NO: 1808511 - DNA, 15 bp, Homo sapiens
ttctcactgtgtatg

SEQ ID NO: 1808512 - DNA, 15 bp, Homo sapiens
tctcactgtgtatgt

SEQ ID NO: 1808513 - DNA, 15 bp, Homo sapiens
ctcactgtgtatgtt

SEQ ID NO: 1808514 - DNA, 15 bp, Homo sapiens
tcactgtgtatgttg

SEQ ID NO: 1808515 - DNA, 15 bp, Homo sapiens
cactgtgtatgttga

SEQ ID NO: 1808516 - DNA, 15 bp, Homo sapiens
actgtgtatgttgat

SEQ ID NO: 1808517 - DNA, 15 bp, Homo sapiens
ctgtgtatgttgatg

SEQ ID NO: 1808518 - DNA, 15 bp, Homo sapiens
tgtgtatgttgatgg

SEQ ID NO: 1808519 - DNA, 15 bp, Homo sapiens
gtgtatgttgatgga

SEQ ID NO: 1808520 - DNA, 15 bp, Homo sapiens
tgtatgttgatggaa

SEQ ID NO: 1808521 - DNA, 15 bp, Homo sapiens
gtatgttgatggaat

SEQ ID NO: 1808522 - DNA, 15 bp, Homo sapiens
tatgttgatggaatt

SEQ ID NO: 1808523 - DNA, 15 bp, Homo sapiens
atgttgatggaattc

SEQ ID NO: 1808524 - DNA, 15 bp, Homo sapiens
tgttgatggaattct

SEQ ID NO: 1808525 - DNA, 15 bp, Homo sapiens
gttgatggaattctc

SEQ ID NO: 1808526 - DNA, 15 bp, Homo sapiens
ttgatggaattctca

SEQ ID NO: 1808527 - DNA, 15 bp, Homo sapiens
tgatggaattctcag

SEQ ID NO: 1808528 - DNA, 15 bp, Homo sapiens
gatggaattctcagg

SEQ ID NO: 1808529 - DNA, 15 bp, Homo sapiens
atggaattctcaggc

SEQ ID NO: 1808530 - DNA, 15 bp, Homo sapiens
tggaattctcaggct

SEQ ID NO: 1808531 - DNA, 15 bp, Homo sapiens
ggaattctcaggctg

SEQ ID NO: 1808532 - DNA, 15 bp, Homo sapiens
gaattctcaggctgt

SEQ ID NO: 1808533 - DNA, 15 bp, Homo sapiens
aattctcaggctgtg

SEQ ID NO: 1808534 - DNA, 15 bp, Homo sapiens
attctcaggctgtgg

SEQ ID NO: 1808535 - DNA, 15 bp, Homo sapiens
ttctcaggctgtgga

SEQ ID NO: 1808536 - DNA, 15 bp, Homo sapiens
tctcaggctgtggat

SEQ ID NO: 1808537 - DNA, 15 bp, Homo sapiens
ctcaggctgtggata

SEQ ID NO: 1808538 - DNA, 15 bp, Homo sapiens
tcaggctgtggatat

SEQ ID NO: 1808539 - DNA, 15 bp, Homo sapiens
caggctgtggatata

SEQ ID NO: 1808540 - DNA, 15 bp, Homo sapiens
aggctgtggatataa

SEQ ID NO: 1808541 - DNA, 15 bp, Homo sapiens
ggctgtggatataac

SEQ ID NO: 1808542 - DNA, 15 bp, Homo sapiens
gctgtggatataact

SEQ ID NO: 1808543 - DNA, 15 bp, Homo sapiens
ctgtggatataactc

SEQ ID NO: 1808544 - DNA, 15 bp, Homo sapiens
tgtggatataactct

SEQ ID NO: 1808545 - DNA, 15 bp, Homo sapiens
gtggatataactctc

SEQ ID NO: 1808546 - DNA, 15 bp, Homo sapiens
ctggatagaattttt

SEQ ID NO: 1808547 - DNA, 15 bp, Homo sapiens
tggatagaattttta

SEQ ID NO: 1808548 - DNA, 15 bp, Homo sapiens
ggatagaatttttac

SEQ ID NO: 1808549 - DNA, 15 bp, Homo sapiens
gatagaatttttact

SEQ ID NO: 1808550 - DNA, 15 bp, Homo sapiens
atagaatttttacta

SEQ ID NO: 1808551 - DNA, 15 bp, Homo sapiens
tagaatttttactat

SEQ ID NO: 1808552 - DNA, 15 bp, Homo sapiens
agaatttttactatc

SEQ ID NO: 1808553 - DNA, 15 bp, Homo sapiens
gaatttttactatct

SEQ ID NO: 1808554 - DNA, 15 bp, Homo sapiens
aatttttactatctg

SEQ ID NO: 1808555 - DNA, 15 bp, Homo sapiens
atttttactatctgg

SEQ ID NO: 1808556 - DNA, 15 bp, Homo sapiens
tttttactatctgga

SEQ ID NO: 1808557 - DNA, 15 bp, Homo sapiens
ttttactatctggat

SEQ ID NO: 1808558 - DNA, 15 bp, Homo sapiens
tttactatctggata

SEQ ID NO: 1808559 - DNA, 15 bp, Homo sapiens
ttctcactatctggg

SEQ ID NO: 1808560 - DNA, 15 bp, Homo sapiens
tattctcactctctg

SEQ ID NO: 1808561 - DNA, 15 bp, Homo sapiens
agaattctcaccctt

SEQ ID NO: 1808562 - DNA, 15 bp, Homo sapiens
gaattctcacccttt

SEQ ID NO: 1808563 - DNA, 15 bp, Homo sapiens
aattctcaccctttg

SEQ ID NO: 1808564 - DNA, 15 bp, Homo sapiens
attctcaccctttgg

SEQ ID NO: 1808565 - DNA, 15 bp, Homo sapiens
ttctcaccctttgga

SEQ ID NO: 1808566 - DNA, 15 bp, Homo sapiens
tctcaccctttggat

SEQ ID NO: 1808567 - DNA, 15 bp, Homo sapiens
ctcaccctttggata

SEQ ID NO: 1808568 - DNA, 15 bp, Homo sapiens
tcaccctttggatag

SEQ ID NO: 1808569 - DNA, 15 bp, Homo sapiens
caccctttggataga

SEQ ID NO: 1808570 - DNA, 15 bp, Homo sapiens
accctttggatagaa

SEQ ID NO: 1808571 - DNA, 15 bp, Homo sapiens
ccctttggatagaac

SEQ ID NO: 1808572 - DNA, 15 bp, Homo sapiens
cctttggatagaact

SEQ ID NO: 1808573 - DNA, 15 bp, Homo sapiens
cactatctgtctggg

SEQ ID NO: 1808574 - DNA, 15 bp, Homo sapiens
actatctgtctgggt

SEQ ID NO: 1808575 - DNA, 15 bp, Homo sapiens
ctatctgtctgggta

SEQ ID NO: 1808576 - DNA, 15 bp, Homo sapiens
tatctgtctgggtag

SEQ ID NO: 1808577 - DNA, 15 bp, Homo sapiens
tctgggtagaattcg

SEQ ID NO: 1808578 - DNA, 15 bp, Homo sapiens
ctgggtagaattcgc

SEQ ID NO: 1808579 - DNA, 15 bp, Homo sapiens
tgggtagaattcgct

SEQ ID NO: 1808580 - DNA, 15 bp, Homo sapiens
gggtagaattcgctc

SEQ ID NO: 1808581 - DNA, 15 bp, Homo sapiens
ggtagaattcgctcc

SEQ ID NO: 1808582 - DNA, 15 bp, Homo sapiens
gtagaattcgctccg

SEQ ID NO: 1808583 - DNA, 15 bp, Homo sapiens
tagaattcgctccgt

SEQ ID NO: 1808584 - DNA, 15 bp, Homo sapiens
agaattcgctccgtc

SEQ ID NO: 1808585 - DNA, 15 bp, Homo sapiens
gaattcgctccgtcg

SEQ ID NO: 1808586 - DNA, 15 bp, Homo sapiens
aattcgctccgtcgt

SEQ ID NO: 1808587 - DNA, 15 bp, Homo sapiens
attcgctccgtcgta

SEQ ID NO: 1808588 - DNA, 15 bp, Homo sapiens
ttcgctccgtcgtaa

SEQ ID NO: 1808589 - DNA, 15 bp, Homo sapiens
tcgctccgtcgtaat

SEQ ID NO: 1808590 - DNA, 15 bp, Homo sapiens
cgctccgtcgtaata

SEQ ID NO: 1808591 - DNA, 15 bp, Homo sapiens
gctccgtcgtaatag

SEQ ID NO: 1808592 - DNA, 15 bp, Homo sapiens
ctccgtcgtaataga

SEQ ID NO: 1808593 - DNA, 15 bp, Homo sapiens
tccgtcgtaatagaa

SEQ ID NO: 1808594 - DNA, 15 bp, Homo sapiens
ccgtcgtaatagaac

SEQ ID NO: 1808595 - DNA, 15 bp, Homo sapiens
cgtcgtaatagaact

SEQ ID NO: 1808596 - DNA, 15 bp, Homo sapiens
gtcgtaatagaactc

SEQ ID NO: 1808597 - DNA, 15 bp, Homo sapiens
tcgtaatagaactct

SEQ ID NO: 1808598 - DNA, 15 bp, Homo sapiens
cgtaatagaactctc

SEQ ID NO: 1808599 - DNA, 15 bp, Homo sapiens
gtaatagaactctca

SEQ ID NO: 1808600 - DNA, 15 bp, Homo sapiens
taatagaactctcac

SEQ ID NO: 1808601 - DNA, 15 bp, Homo sapiens
ctctcactatctgtg

SEQ ID NO: 1808602 - DNA, 15 bp, Homo sapiens
tctcactatctgtgt

SEQ ID NO: 1808603 - DNA, 15 bp, Homo sapiens
ctcactatctgtgtg

SEQ ID NO: 1808604 - DNA, 15 bp, Homo sapiens
tcactatctgtgtgg

SEQ ID NO: 1808605 - DNA, 15 bp, Homo sapiens
cactatctgtgtgga

SEQ ID NO: 1808606 - DNA, 15 bp, Homo sapiens
actatctgtgtggat

SEQ ID NO: 1808607 - DNA, 15 bp, Homo sapiens
ctatctgtgtggata

SEQ ID NO: 1808608 - DNA, 15 bp, Homo sapiens
tatctgtgtggatag

SEQ ID NO: 1808609 - DNA, 15 bp, Homo sapiens
atctgtgtggataga

SEQ ID NO: 1808610 - DNA, 15 bp, Homo sapiens
tctgtgtggatagaa

SEQ ID NO: 1808611 - DNA, 15 bp, Homo sapiens
ctgtgtggatagaat

SEQ ID NO: 1808612 - DNA, 15 bp, Homo sapiens
tgtgtggatagaatt

SEQ ID NO: 1808613 - DNA, 15 bp, Homo sapiens
gtgtggatagaattc

SEQ ID NO: 1808614 - DNA, 15 bp, Homo sapiens
ctctcactatatggg

SEQ ID NO: 1808615 - DNA, 15 bp, Homo sapiens
tctcactatatgggt

SEQ ID NO: 1808616 - DNA, 15 bp, Homo sapiens
ctcactatatgggta

SEQ ID NO: 1808617 - DNA, 15 bp, Homo sapiens
tcactatatgggtag

SEQ ID NO: 1808618 - DNA, 15 bp, Homo sapiens
cactatatgggtaga

SEQ ID NO: 1808619 - DNA, 15 bp, Homo sapiens
actatatgggtagaa

SEQ ID NO: 1808620 - DNA, 15 bp, Homo sapiens
ctatatgggtagaat

SEQ ID NO: 1808621 - DNA, 15 bp, Homo sapiens
tatatgggtagaatt

SEQ ID NO: 1808622 - DNA, 15 bp, Homo sapiens
atatgggtagaattc

SEQ ID NO: 1808623 - DNA, 15 bp, Homo sapiens
tatgggtagaattct

SEQ ID NO: 1808624 - DNA, 15 bp, Homo sapiens
atgggtagaattctg

SEQ ID NO: 1808625 - DNA, 15 bp, Homo sapiens
tgggtagaattctga

SEQ ID NO: 1808626 - DNA, 15 bp, Homo sapiens
gggtagaattctgac

SEQ ID NO: 1808627 - DNA, 15 bp, Homo sapiens
ggtagaattctgact

SEQ ID NO: 1808628 - DNA, 15 bp, Homo sapiens
gtagaattctgactc

SEQ ID NO: 1808629 - DNA, 15 bp, Homo sapiens
tagaattctgactct

SEQ ID NO: 1808630 - DNA, 15 bp, Homo sapiens
agaattctgactctc

SEQ ID NO: 1808631 - DNA, 15 bp, Homo sapiens
gaattctgactctct

SEQ ID NO: 1808632 - DNA, 15 bp, Homo sapiens
aattctgactctctg

SEQ ID NO: 1808633 - DNA, 15 bp, Homo sapiens
attctgactctctgg

SEQ ID NO: 1808634 - DNA, 15 bp, Homo sapiens
ttctgactctctgga

SEQ ID NO: 1808635 - DNA, 15 bp, Homo sapiens
tctgactctctggat

SEQ ID NO: 1808636 - DNA, 15 bp, Homo sapiens
ctgactctctggatc

SEQ ID NO: 1808637 - DNA, 15 bp, Homo sapiens
tgactctctggatcg

SEQ ID NO: 1808638 - DNA, 15 bp, Homo sapiens
gactctctggatcga

SEQ ID NO: 1808639 - DNA, 15 bp, Homo sapiens
actctctggatcgaa

SEQ ID NO: 1808640 - DNA, 15 bp, Homo sapiens
ctctctggatcgaac

SEQ ID NO: 1808641 - DNA, 15 bp, Homo sapiens
tctctggatcgaact

SEQ ID NO: 1808642 - DNA, 15 bp, Homo sapiens
ctctggatcgaactc

SEQ ID NO: 1808643 - DNA, 15 bp, Homo sapiens
tctggatcgaactct

SEQ ID NO: 1808644 - DNA, 15 bp, Homo sapiens
ctggatcgaactctc

SEQ ID NO: 1808645 - DNA, 15 bp, Homo sapiens
tggatcgaactctca

SEQ ID NO: 1808646 - DNA, 15 bp, Homo sapiens
ggatcgaactctcac

SEQ ID NO: 1808647 - DNA, 15 bp, Homo sapiens
gatcgaactctcact

SEQ ID NO: 1808648 - DNA, 15 bp, Homo sapiens
atcgaactctcacta

SEQ ID NO: 1808649 - DNA, 15 bp, Homo sapiens
tcgaactctcactat

SEQ ID NO: 1808650 - DNA, 15 bp, Homo sapiens
cgaactctcactatc

SEQ ID NO: 1808651 - DNA, 15 bp, Homo sapiens
actatctgtctggaa

SEQ ID NO: 1808652 - DNA, 15 bp, Homo sapiens
ctatctgtctggaaa

SEQ ID NO: 1808653 - DNA, 15 bp, Homo sapiens
tatctgtctggaaag

SEQ ID NO: 1808654 - DNA, 15 bp, Homo sapiens
atctgtctggaaaga

SEQ ID NO: 1808655 - DNA, 15 bp, Homo sapiens
tctgtctggaaagaa

SEQ ID NO: 1808656 - DNA, 15 bp, Homo sapiens
ctgtctggaaagaat

SEQ ID NO: 1808657 - DNA, 15 bp, Homo sapiens
tgtctggaaagaatc

SEQ ID NO: 1808658 - DNA, 15 bp, Homo sapiens
gtctggaaagaatcc

SEQ ID NO: 1808659 - DNA, 15 bp, Homo sapiens
tctggaaagaatcct

SEQ ID NO: 1808660 - DNA, 15 bp, Homo sapiens
ctggaaagaatcctc

SEQ ID NO: 1808661 - DNA, 15 bp, Homo sapiens
tggaaagaatcctca

SEQ ID NO: 1808662 - DNA, 15 bp, Homo sapiens
ggaaagaatcctcac

SEQ ID NO: 1808663 - DNA, 15 bp, Homo sapiens
gaaagaatcctcact

SEQ ID NO: 1808664 - DNA, 15 bp, Homo sapiens
aaagaatcctcactc

SEQ ID NO: 1808665 - DNA, 15 bp, Homo sapiens
aagaatcctcactct

SEQ ID NO: 1808666 - DNA, 15 bp, Homo sapiens
agaatcctcactctt

SEQ ID NO: 1808667 - DNA, 15 bp, Homo sapiens
gaatcctcactcttt

SEQ ID NO: 1808668 - DNA, 15 bp, Homo sapiens
aatcctcactctttg

SEQ ID NO: 1808669 - DNA, 15 bp, Homo sapiens
atcctcactctttgg

SEQ ID NO: 1808670 - DNA, 15 bp, Homo sapiens
tcctcactctttgga

SEQ ID NO: 1808671 - DNA, 15 bp, Homo sapiens
cctcactctttggat

SEQ ID NO: 1808672 - DNA, 15 bp, Homo sapiens
atagaactctcattt

SEQ ID NO: 1808673 - DNA, 15 bp, Homo sapiens
tagaactctcatttt

SEQ ID NO: 1808674 - DNA, 15 bp, Homo sapiens
agaactctcattttc

SEQ ID NO: 1808675 - DNA, 15 bp, Homo sapiens
gaactctcattttct

SEQ ID NO: 1808676 - DNA, 15 bp, Homo sapiens
aactctcattttctg

SEQ ID NO: 1808677 - DNA, 15 bp, Homo sapiens
actctcattttctgt

SEQ ID NO: 1808678 - DNA, 15 bp, Homo sapiens
ctctcattttctgtc

SEQ ID NO: 1808679 - DNA, 15 bp, Homo sapiens
tctcattttctgtct

SEQ ID NO: 1808680 - DNA, 15 bp, Homo sapiens
ctcattttctgtctg

SEQ ID NO: 1808681 - DNA, 15 bp, Homo sapiens
tcattttctgtctgg

SEQ ID NO: 1808682 - DNA, 15 bp, Homo sapiens
cattttctgtctgga

SEQ ID NO: 1808683 - DNA, 15 bp, Homo sapiens
attttctgtctggat

SEQ ID NO: 1808684 - DNA, 15 bp, Homo sapiens
ttttctgtctggata

SEQ ID NO: 1808685 - DNA, 15 bp, Homo sapiens
tttctgtctggatag

SEQ ID NO: 1808686 - DNA, 15 bp, Homo sapiens
ttctgtctggataga

SEQ ID NO: 1808687 - DNA, 15 bp, Homo sapiens
atctggatagaatct

SEQ ID NO: 1808688 - DNA, 15 bp, Homo sapiens
tctggatagaatctc

SEQ ID NO: 1808689 - DNA, 15 bp, Homo sapiens
ctggatagaatctca

SEQ ID NO: 1808690 - DNA, 15 bp, Homo sapiens
tggatagaatctcac

SEQ ID NO: 1808691 - DNA, 15 bp, Homo sapiens
ggatagaatctcact

SEQ ID NO: 1808692 - DNA, 15 bp, Homo sapiens
gatagaatctcacta

SEQ ID NO: 1808693 - DNA, 15 bp, Homo sapiens
atagaatctcactat

SEQ ID NO: 1808694 - DNA, 15 bp, Homo sapiens
tagaatctcactatc

SEQ ID NO: 1808695 - DNA, 15 bp, Homo sapiens
agaatctcactatct

SEQ ID NO: 1808696 - DNA, 15 bp, Homo sapiens
gaatctcactatcta

SEQ ID NO: 1808697 - DNA, 15 bp, Homo sapiens
aatctcactatctag

SEQ ID NO: 1808698 - DNA, 15 bp, Homo sapiens
atctcactatctaga

SEQ ID NO: 1808699 - DNA, 15 bp, Homo sapiens
agatagaattctcat

SEQ ID NO: 1808700 - DNA, 15 bp, Homo sapiens
ctcactctctgtctc

SEQ ID NO: 1808701 - DNA, 15 bp, Homo sapiens
tcactctctgtctca

SEQ ID NO: 1808702 - DNA, 15 bp, Homo sapiens
cactctctgtctcat

SEQ ID NO: 1808703 - DNA, 15 bp, Homo sapiens
actctctgtctcatt

SEQ ID NO: 1808704 - DNA, 15 bp, Homo sapiens
ctctctgtctcatta

SEQ ID NO: 1808705 - DNA, 15 bp, Homo sapiens
tctctgtctcattag

SEQ ID NO: 1808706 - DNA, 15 bp, Homo sapiens
ctctgtctcattaga

SEQ ID NO: 1808707 - DNA, 15 bp, Homo sapiens
tctgtctcattagat

SEQ ID NO: 1808708 - DNA, 15 bp, Homo sapiens
ctgtctcattagatc

SEQ ID NO: 1808709 - DNA, 15 bp, Homo sapiens
tgtctcattagatct

SEQ ID NO: 1808710 - DNA, 15 bp, Homo sapiens
gtctcattagatctc

SEQ ID NO: 1808711 - DNA, 15 bp, Homo sapiens
tctcattagatctct

SEQ ID NO: 1808712 - DNA, 15 bp, Homo sapiens
ctcattagatctctc

SEQ ID NO: 1808713 - DNA, 15 bp, Homo sapiens
tcattagatctctca

SEQ ID NO: 1808714 - DNA, 15 bp, Homo sapiens
cattagatctctcac

SEQ ID NO: 1808715 - DNA, 15 bp, Homo sapiens
attagatctctcact

SEQ ID NO: 1808716 - DNA, 15 bp, Homo sapiens
ttagatctctcactg

SEQ ID NO: 1808717 - DNA, 15 bp, Homo sapiens
tctctcactgtctgt

SEQ ID NO: 1808718 - DNA, 15 bp, Homo sapiens
gatagaactctaact

SEQ ID NO: 1808719 - DNA, 15 bp, Homo sapiens
atagaactctaactc

SEQ ID NO: 1808720 - DNA, 15 bp, Homo sapiens
tagaactctaactct

SEQ ID NO: 1808721 - DNA, 15 bp, Homo sapiens
agaactctaactctc

SEQ ID NO: 1808722 - DNA, 15 bp, Homo sapiens
gaactctaactctct

SEQ ID NO: 1808723 - DNA, 15 bp, Homo sapiens
aactctaactctctg

SEQ ID NO: 1808724 - DNA, 15 bp, Homo sapiens
actctaactctctgg

SEQ ID NO: 1808725 - DNA, 15 bp, Homo sapiens
ctctaactctctgga

SEQ ID NO: 1808726 - DNA, 15 bp, Homo sapiens
tctaactctctggat

SEQ ID NO: 1808727 - DNA, 15 bp, Homo sapiens
ctaactctctggata

SEQ ID NO: 1808728 - DNA, 15 bp, Homo sapiens
ggatagaactcttaa

SEQ ID NO: 1808729 - DNA, 15 bp, Homo sapiens
gatagaactcttaat

SEQ ID NO: 1808730 - DNA, 15 bp, Homo sapiens
atagaactcttaata

SEQ ID NO: 1808731 - DNA, 15 bp, Homo sapiens
tagaactcttaataa

SEQ ID NO: 1808732 - DNA, 15 bp, Homo sapiens
agaactcttaataac

SEQ ID NO: 1808733 - DNA, 15 bp, Homo sapiens
gaactcttaataact

SEQ ID NO: 1808734 - DNA, 15 bp, Homo sapiens
aactcttaataactc

SEQ ID NO: 1808735 - DNA, 15 bp, Homo sapiens
actcttaataactcg

SEQ ID NO: 1808736 - DNA, 15 bp, Homo sapiens
ctcttaataactcga

SEQ ID NO: 1808737 - DNA, 15 bp, Homo sapiens
tcttaataactcgat

SEQ ID NO: 1808738 - DNA, 15 bp, Homo sapiens
cttaataactcgata

SEQ ID NO: 1808739 - DNA, 15 bp, Homo sapiens
ttaataactcgatag

SEQ ID NO: 1808740 - DNA, 15 bp, Homo sapiens
taataactcgataga

SEQ ID NO: 1808741 - DNA, 15 bp, Homo sapiens
aataactcgatagaa

SEQ ID NO: 1808742 - DNA, 15 bp, Homo sapiens
ataactcgatagaac

SEQ ID NO: 1808743 - DNA, 15 bp, Homo sapiens
taactcgatagaact

SEQ ID NO: 1808744 - DNA, 15 bp, Homo sapiens
aactcgatagaactt

SEQ ID NO: 1808745 - DNA, 15 bp, Homo sapiens
actcgatagaacttt

SEQ ID NO: 1808746 - DNA, 15 bp, Homo sapiens
ctcgatagaactttc

SEQ ID NO: 1808747 - DNA, 15 bp, Homo sapiens
tcgatagaactttca

SEQ ID NO: 1808748 - DNA, 15 bp, Homo sapiens
cgatagaactttcac

SEQ ID NO: 1808749 - DNA, 15 bp, Homo sapiens
gatagaactttcacc

SEQ ID NO: 1808750 - DNA, 15 bp, Homo sapiens
atagaactttcacca

SEQ ID NO: 1808751 - DNA, 15 bp, Homo sapiens
tagaactttcaccat

SEQ ID NO: 1808752 - DNA, 15 bp, Homo sapiens
agaactttcaccatc

SEQ ID NO: 1808753 - DNA, 15 bp, Homo sapiens
gaactttcaccatct

SEQ ID NO: 1808754 - DNA, 15 bp, Homo sapiens
aactttcaccatctg

SEQ ID NO: 1808755 - DNA, 15 bp, Homo sapiens
actttcaccatctgg

SEQ ID NO: 1808756 - DNA, 15 bp, Homo sapiens
ctttcaccatctgga

SEQ ID NO: 1808757 - DNA, 15 bp, Homo sapiens
actctcaccatctga

SEQ ID NO: 1808758 - DNA, 15 bp, Homo sapiens
ctctcaccatctgaa

SEQ ID NO: 1808759 - DNA, 15 bp, Homo sapiens
tcaccatctgaataa

SEQ ID NO: 1808760 - DNA, 15 bp, Homo sapiens
caccatctgaataaa

SEQ ID NO: 1808761 - DNA, 15 bp, Homo sapiens
accatctgaataaaa

SEQ ID NO: 1808762 - DNA, 15 bp, Homo sapiens
ccatctgaataaaac

SEQ ID NO: 1808763 - DNA, 15 bp, Homo sapiens
catctgaataaaact

SEQ ID NO: 1808764 - DNA, 15 bp, Homo sapiens
atctgaataaaactc

SEQ ID NO: 1808765 - DNA, 15 bp, Homo sapiens
tcactgtgtgggaat

SEQ ID NO: 1808766 - DNA, 15 bp, Homo sapiens
cactgtgtgggaata

SEQ ID NO: 1808767 - DNA, 15 bp, Homo sapiens
actgtgtgggaatag

SEQ ID NO: 1808768 - DNA, 15 bp, Homo sapiens
ctgtgtgggaataga

SEQ ID NO: 1808769 - DNA, 15 bp, Homo sapiens
tgtgtgggaatagaa

SEQ ID NO: 1808770 - DNA, 15 bp, Homo sapiens
gtgtgggaatagaac

SEQ ID NO: 1808771 - DNA, 15 bp, Homo sapiens
tgtgggaatagaact

SEQ ID NO: 1808772 - DNA, 15 bp, Homo sapiens
gtgggaatagaactc

SEQ ID NO: 1808773 - DNA, 15 bp, Homo sapiens
tgggaatagaactct

SEQ ID NO: 1808774 - DNA, 15 bp, Homo sapiens
gggaatagaactctc

SEQ ID NO: 1808775 - DNA, 15 bp, Homo sapiens
ggaatagaactctca

SEQ ID NO: 1808776 - DNA, 15 bp, Homo sapiens
ctctcactctctgga

SEQ ID NO: 1808777 - DNA, 15 bp, Homo sapiens
agaattcttactcta

SEQ ID NO: 1808778 - DNA, 15 bp, Homo sapiens
gaattcttactctag

SEQ ID NO: 1808779 - DNA, 15 bp, Homo sapiens
aattcttactctaga

SEQ ID NO: 1808780 - DNA, 15 bp, Homo sapiens
attcttactctagat

SEQ ID NO: 1808781 - DNA, 15 bp, Homo sapiens
ttcttactctagata

SEQ ID NO: 1808782 - DNA, 15 bp, Homo sapiens
tcttactctagatag

SEQ ID NO: 1808783 - DNA, 15 bp, Homo sapiens
cttactctagataga

SEQ ID NO: 1808784 - DNA, 15 bp, Homo sapiens
ttactctagatagaa

SEQ ID NO: 1808785 - DNA, 15 bp, Homo sapiens
tactctagatagaac

SEQ ID NO: 1808786 - DNA, 15 bp, Homo sapiens
ctcaccatctggatc

SEQ ID NO: 1808787 - DNA, 15 bp, Homo sapiens
tcaccatctggatca

SEQ ID NO: 1808788 - DNA, 15 bp, Homo sapiens
caccatctggatcaa

SEQ ID NO: 1808789 - DNA, 15 bp, Homo sapiens
accatctggatcaaa

SEQ ID NO: 1808790 - DNA, 15 bp, Homo sapiens
ccatctggatcaaac

SEQ ID NO: 1808791 - DNA, 15 bp, Homo sapiens
catctggatcaaact

SEQ ID NO: 1808792 - DNA, 15 bp, Homo sapiens
atctggatcaaactc

SEQ ID NO: 1808793 - DNA, 15 bp, Homo sapiens
tctggatcaaactct

SEQ ID NO: 1808794 - DNA, 15 bp, Homo sapiens
ctggatcaaactctc

SEQ ID NO: 1808795 - DNA, 15 bp, Homo sapiens
tggatcaaactctca

SEQ ID NO: 1808796 - DNA, 15 bp, Homo sapiens
ggatcaaactctcac

SEQ ID NO: 1808797 - DNA, 15 bp, Homo sapiens
gatcaaactctcact

SEQ ID NO: 1808798 - DNA, 15 bp, Homo sapiens
atcaaactctcacta

SEQ ID NO: 1808799 - DNA, 15 bp, Homo sapiens
tcaaactctcactat

SEQ ID NO: 1808800 - DNA, 15 bp, Homo sapiens
caaactctcactatc

SEQ ID NO: 1808801 - DNA, 15 bp, Homo sapiens
agaactctccccatc

SEQ ID NO: 1808802 - DNA, 15 bp, Homo sapiens
gaactctccccatct

SEQ ID NO: 1808803 - DNA, 15 bp, Homo sapiens
aactctccccatctg

SEQ ID NO: 1808804 - DNA, 15 bp, Homo sapiens
actctccccatctgg

SEQ ID NO: 1808805 - DNA, 15 bp, Homo sapiens
ctctccccatctgga

SEQ ID NO: 1808806 - DNA, 15 bp, Homo sapiens
tctccccatctggat

SEQ ID NO: 1808807 - DNA, 15 bp, Homo sapiens
ctccccatctggatt

SEQ ID NO: 1808808 - DNA, 15 bp, Homo sapiens
tccccatctggattg

SEQ ID NO: 1808809 - DNA, 15 bp, Homo sapiens
ccccatctggattga

SEQ ID NO: 1808810 - DNA, 15 bp, Homo sapiens
cccatctggattgaa

SEQ ID NO: 1808811 - DNA, 15 bp, Homo sapiens
ccatctggattgaac

SEQ ID NO: 1808812 - DNA, 15 bp, Homo sapiens
catctggattgaact

SEQ ID NO: 1808813 - DNA, 15 bp, Homo sapiens
atctggattgaactc

SEQ ID NO: 1808814 - DNA, 15 bp, Homo sapiens
tctggattgaactct

SEQ ID NO: 1808815 - DNA, 15 bp, Homo sapiens
ctggattgaactctc

SEQ ID NO: 1808816 - DNA, 15 bp, Homo sapiens
tggattgaactctca

SEQ ID NO: 1808817 - DNA, 15 bp, Homo sapiens
ggattgaactctcac

SEQ ID NO: 1808818 - DNA, 15 bp, Homo sapiens
gattgaactctcact

SEQ ID NO: 1808819 - DNA, 15 bp, Homo sapiens
atagaactgtcactg

SEQ ID NO: 1808820 - DNA, 15 bp, Homo sapiens
tagaactgtcactgt

SEQ ID NO: 1808821 - DNA, 15 bp, Homo sapiens
agaactgtcactgtc

SEQ ID NO: 1808822 - DNA, 15 bp, Homo sapiens
gaactgtcactgtct

SEQ ID NO: 1808823 - DNA, 15 bp, Homo sapiens
aactgtcactgtcta

SEQ ID NO: 1808824 - DNA, 15 bp, Homo sapiens
actgtcactgtctat

SEQ ID NO: 1808825 - DNA, 15 bp, Homo sapiens
ctgtcactgtctatc

SEQ ID NO: 1808826 - DNA, 15 bp, Homo sapiens
tgtcactgtctatct

SEQ ID NO: 1808827 - DNA, 15 bp, Homo sapiens
gtcactgtctatctg

SEQ ID NO: 1808828 - DNA, 15 bp, Homo sapiens
tggattgaactctcg

SEQ ID NO: 1808829 - DNA, 15 bp, Homo sapiens
ggattgaactctcgc

SEQ ID NO: 1808830 - DNA, 15 bp, Homo sapiens
gattgaactctcgct

SEQ ID NO: 1808831 - DNA, 15 bp, Homo sapiens
attgaactctcgcta

SEQ ID NO: 1808832 - DNA, 15 bp, Homo sapiens
ttgaactctcgctat

SEQ ID NO: 1808833 - DNA, 15 bp, Homo sapiens
tgaactctcgctatc

SEQ ID NO: 1808834 - DNA, 15 bp, Homo sapiens
ctcactctctggatg

SEQ ID NO: 1808835 - DNA, 15 bp, Homo sapiens
tctctggatggaacg

SEQ ID NO: 1808836 - DNA, 15 bp, Homo sapiens
ctctggatggaacgc

SEQ ID NO: 1808837 - DNA, 15 bp, Homo sapiens
tctggatggaacgct

SEQ ID NO: 1808838 - DNA, 15 bp, Homo sapiens
ctggatggaacgctc

SEQ ID NO: 1808839 - DNA, 15 bp, Homo sapiens
tggatggaacgctca

SEQ ID NO: 1808840 - DNA, 15 bp, Homo sapiens
ggatggaacgctcac

SEQ ID NO: 1808841 - DNA, 15 bp, Homo sapiens
gatggaacgctcact

SEQ ID NO: 1808842 - DNA, 15 bp, Homo sapiens
atggaacgctcacta

SEQ ID NO: 1808843 - DNA, 15 bp, Homo sapiens
tggaacgctcactat

SEQ ID NO: 1808844 - DNA, 15 bp, Homo sapiens
ggaacgctcactatc

SEQ ID NO: 1808845 - DNA, 15 bp, Homo sapiens
aacgctcactatctg

SEQ ID NO: 1808846 - DNA, 15 bp, Homo sapiens
acgctcactatctgg

SEQ ID NO: 1808847 - DNA, 15 bp, Homo sapiens
cgctcactatctggg

SEQ ID NO: 1808848 - DNA, 15 bp, Homo sapiens
gctcactatctggga

SEQ ID NO: 1808849 - DNA, 15 bp, Homo sapiens
ctcactatctgggag

SEQ ID NO: 1808850 - DNA, 15 bp, Homo sapiens
tcactatctgggagc

SEQ ID NO: 1808851 - DNA, 15 bp, Homo sapiens
cactatctgggagcc

SEQ ID NO: 1808852 - DNA, 15 bp, Homo sapiens
actatctgggagcct

SEQ ID NO: 1808853 - DNA, 15 bp, Homo sapiens
ctatctgggagccta

SEQ ID NO: 1808854 - DNA, 15 bp, Homo sapiens
tatctgggagcctaa

SEQ ID NO: 1808855 - DNA, 15 bp, Homo sapiens
atctgggagcctaac

SEQ ID NO: 1808856 - DNA, 15 bp, Homo sapiens
tctgggagcctaact

SEQ ID NO: 1808857 - DNA, 15 bp, Homo sapiens
ctgggagcctaacta

SEQ ID NO: 1808858 - DNA, 15 bp, Homo sapiens
tgggagcctaactac

SEQ ID NO: 1808859 - DNA, 15 bp, Homo sapiens
gggagcctaactact

SEQ ID NO: 1808860 - DNA, 15 bp, Homo sapiens
ggagcctaactactc

SEQ ID NO: 1808861 - DNA, 15 bp, Homo sapiens
gagcctaactactca

SEQ ID NO: 1808862 - DNA, 15 bp, Homo sapiens
agcctaactactcag

SEQ ID NO: 1808863 - DNA, 15 bp, Homo sapiens
gcctaactactcagc

SEQ ID NO: 1808864 - DNA, 15 bp, Homo sapiens
cctaactactcagcc

SEQ ID NO: 1808865 - DNA, 15 bp, Homo sapiens
ctaactactcagcct

SEQ ID NO: 1808866 - DNA, 15 bp, Homo sapiens
taactactcagcctc

SEQ ID NO: 1808867 - DNA, 15 bp, Homo sapiens
aactactcagcctcc

SEQ ID NO: 1808868 - DNA, 15 bp, Homo sapiens
actactcagcctccc

SEQ ID NO: 1808869 - DNA, 15 bp, Homo sapiens
ctactcagcctcccc

SEQ ID NO: 1808870 - DNA, 15 bp, Homo sapiens
tactcagcctccccc

SEQ ID NO: 1808871 - DNA, 15 bp, Homo sapiens
actcagcctcccccg

SEQ ID NO: 1808872 - DNA, 15 bp, Homo sapiens
ctcagcctcccccga

SEQ ID NO: 1808873 - DNA, 15 bp, Homo sapiens
tcagcctcccccgac

SEQ ID NO: 1808874 - DNA, 15 bp, Homo sapiens
cagcctcccccgacc

SEQ ID NO: 1808875 - DNA, 15 bp, Homo sapiens
agcctcccccgacca

SEQ ID NO: 1808876 - DNA, 15 bp, Homo sapiens
gcctcccccgaccag

SEQ ID NO: 1808877 - DNA, 15 bp, Homo sapiens
cctcccccgaccagc

SEQ ID NO: 1808878 - DNA, 15 bp, Homo sapiens
ctcccccgaccagcc

SEQ ID NO: 1808879 - DNA, 15 bp, Homo sapiens
tcccccgaccagccc

SEQ ID NO: 1808880 - DNA, 15 bp, Homo sapiens
cccccgaccagccca

SEQ ID NO: 1808881 - DNA, 15 bp, Homo sapiens
ccccgaccagcccaa

SEQ ID NO: 1808882 - DNA, 15 bp, Homo sapiens
cccgaccagcccaac

SEQ ID NO: 1808883 - DNA, 15 bp, Homo sapiens
ccgaccagcccaact

SEQ ID NO: 1808884 - DNA, 15 bp, Homo sapiens
cgaccagcccaactt

SEQ ID NO: 1808885 - DNA, 15 bp, Homo sapiens
gaccagcccaacttc

SEQ ID NO: 1808886 - DNA, 15 bp, Homo sapiens
accagcccaacttct

SEQ ID NO: 1808887 - DNA, 15 bp, Homo sapiens
ccagcccaacttctc

SEQ ID NO: 1808888 - DNA, 15 bp, Homo sapiens
cagcccaacttctcc

SEQ ID NO: 1808889 - DNA, 15 bp, Homo sapiens
agcccaacttctccc

SEQ ID NO: 1808890 - DNA, 15 bp, Homo sapiens
gcccaacttctcccc

SEQ ID NO: 1808891 - DNA, 15 bp, Homo sapiens
cccaacttctcccca

SEQ ID NO: 1808892 - DNA, 15 bp, Homo sapiens
ccaacttctccccat

SEQ ID NO: 1808893 - DNA, 15 bp, Homo sapiens
caacttctccccatg

SEQ ID NO: 1808894 - DNA, 15 bp, Homo sapiens
aacttctccccatgg

SEQ ID NO: 1808895 - DNA, 15 bp, Homo sapiens
acttctccccatgga

SEQ ID NO: 1808896 - DNA, 15 bp, Homo sapiens
cttctccccatggag

SEQ ID NO: 1808897 - DNA, 15 bp, Homo sapiens
ttctccccatggagg

SEQ ID NO: 1808898 - DNA, 15 bp, Homo sapiens
tctccccatggaggg

SEQ ID NO: 1808899 - DNA, 15 bp, Homo sapiens
ctccccatggagggg

SEQ ID NO: 1808900 - DNA, 15 bp, Homo sapiens
tccccatggaggggc

SEQ ID NO: 1808901 - DNA, 15 bp, Homo sapiens
ccccatggaggggca

SEQ ID NO: 1808902 - DNA, 15 bp, Homo sapiens
cccatggaggggcac

SEQ ID NO: 1808903 - DNA, 15 bp, Homo sapiens
ccatggaggggcact

SEQ ID NO: 1808904 - DNA, 15 bp, Homo sapiens
catggaggggcactg

SEQ ID NO: 1808905 - DNA, 15 bp, Homo sapiens
atggaggggcactga

SEQ ID NO: 1808906 - DNA, 15 bp, Homo sapiens
tggaggggcactgag

SEQ ID NO: 1808907 - DNA, 15 bp, Homo sapiens
ggaggggcactgagt

SEQ ID NO: 1808908 - DNA, 15 bp, Homo sapiens
gaggggcactgagtc

SEQ ID NO: 1808909 - DNA, 15 bp, Homo sapiens
aggggcactgagtcc

SEQ ID NO: 1808910 - DNA, 15 bp, Homo sapiens
ggggcactgagtcct

SEQ ID NO: 1808911 - DNA, 15 bp, Homo sapiens
gggcactgagtcctc

SEQ ID NO: 1808912 - DNA, 15 bp, Homo sapiens
ggcactgagtcctca

SEQ ID NO: 1808913 - DNA, 15 bp, Homo sapiens
gcactgagtcctcat

SEQ ID NO: 1808914 - DNA, 15 bp, Homo sapiens
cactgagtcctcatt

SEQ ID NO: 1808915 - DNA, 15 bp, Homo sapiens
actgagtcctcatta

SEQ ID NO: 1808916 - DNA, 15 bp, Homo sapiens
ctgagtcctcattaa

SEQ ID NO: 1808917 - DNA, 15 bp, Homo sapiens
tgagtcctcattaaa

SEQ ID NO: 1808918 - DNA, 15 bp, Homo sapiens
gagtcctcattaaag

SEQ ID NO: 1808919 - DNA, 15 bp, Homo sapiens
agtcctcattaaagc

SEQ ID NO: 1808920 - DNA, 15 bp, Homo sapiens
gtcctcattaaagct

SEQ ID NO: 1808921 - DNA, 15 bp, Homo sapiens
tcctcattaaagctt

SEQ ID NO: 1808922 - DNA, 15 bp, Homo sapiens
cctcattaaagcttc

SEQ ID NO: 1808923 - DNA, 15 bp, Homo sapiens
ctcattaaagcttcc

SEQ ID NO: 1808924 - DNA, 15 bp, Homo sapiens
tcattaaagcttcct

SEQ ID NO: 1808925 - DNA, 15 bp, Homo sapiens
cattaaagcttcctg

SEQ ID NO: 1808926 - DNA, 15 bp, Homo sapiens
attaaagcttcctgg

SEQ ID NO: 1808927 - DNA, 15 bp, Homo sapiens
ttaaagcttcctgga

SEQ ID NO: 1808928 - DNA, 15 bp, Homo sapiens
taaagcttcctggac

SEQ ID NO: 1808929 - DNA, 15 bp, Homo sapiens
aaagcttcctggaca

SEQ ID NO: 1808930 - DNA, 15 bp, Homo sapiens
aagcttcctggacag

SEQ ID NO: 1808931 - DNA, 15 bp, Homo sapiens
agcttcctggacagc

SEQ ID NO: 1808932 - DNA, 15 bp, Homo sapiens
gcttcctggacagct

SEQ ID NO: 1808933 - DNA, 15 bp, Homo sapiens
cttcctggacagctg

SEQ ID NO: 1808934 - DNA, 15 bp, Homo sapiens
ttcctggacagctgg

SEQ ID NO: 1808935 - DNA, 15 bp, Homo sapiens
tcctggacagctgga

SEQ ID NO: 1808936 - DNA, 15 bp, Homo sapiens
cctggacagctggag

SEQ ID NO: 1808937 - DNA, 15 bp, Homo sapiens
ctggacagctggagt

SEQ ID NO: 1808938 - DNA, 15 bp, Homo sapiens
tggacagctggagtt

SEQ ID NO: 1808939 - DNA, 15 bp, Homo sapiens
ggacagctggagttg

SEQ ID NO: 1808940 - DNA, 15 bp, Homo sapiens
gacagctggagttgg

SEQ ID NO: 1808941 - DNA, 15 bp, Homo sapiens
acagctggagttgga

SEQ ID NO: 1808942 - DNA, 15 bp, Homo sapiens
cagctggagttggag

SEQ ID NO: 1808943 - DNA, 15 bp, Homo sapiens
agctggagttggagc

SEQ ID NO: 1808944 - DNA, 15 bp, Homo sapiens
gctggagttggagcc

SEQ ID NO: 1808945 - DNA, 15 bp, Homo sapiens
ctggagttggagcca

SEQ ID NO: 1808946 - DNA, 15 bp, Homo sapiens
tggagttggagccag

SEQ ID NO: 1808947 - DNA, 15 bp, Homo sapiens
ggagttggagccaga

SEQ ID NO: 1808948 - DNA, 15 bp, Homo sapiens
gagttggagccagag

SEQ ID NO: 1808949 - DNA, 15 bp, Homo sapiens
agttggagccagagc

SEQ ID NO: 1808950 - DNA, 15 bp, Homo sapiens
gttggagccagagca

SEQ ID NO: 1808951 - DNA, 15 bp, Homo sapiens
ttggagccagagcat

SEQ ID NO: 1808952 - DNA, 15 bp, Homo sapiens
tggagccagagcatg

SEQ ID NO: 1808953 - DNA, 15 bp, Homo sapiens
ggagccagagcatga

SEQ ID NO: 1808954 - DNA, 15 bp, Homo sapiens
gagccagagcatgac

SEQ ID NO: 1808955 - DNA, 15 bp, Homo sapiens
agccagagcatgact

SEQ ID NO: 1808956 - DNA, 15 bp, Homo sapiens
gccagagcatgactg

SEQ ID NO: 1808957 - DNA, 15 bp, Homo sapiens
ccagagcatgactgt

SEQ ID NO: 1808958 - DNA, 15 bp, Homo sapiens
cagagcatgactgtc

SEQ ID NO: 1808959 - DNA, 15 bp, Homo sapiens
agagcatgactgtca

SEQ ID NO: 1808960 - DNA, 15 bp, Homo sapiens
gagcatgactgtcat

SEQ ID NO: 1808961 - DNA, 15 bp, Homo sapiens
agcatgactgtcatg

SEQ ID NO: 1808962 - DNA, 15 bp, Homo sapiens
gcatgactgtcatgt

SEQ ID NO: 1808963 - DNA, 15 bp, Homo sapiens
catgactgtcatgtg

SEQ ID NO: 1808964 - DNA, 15 bp, Homo sapiens
atgactgtcatgtgg

SEQ ID NO: 1808965 - DNA, 15 bp, Homo sapiens
tgactgtcatgtggc

SEQ ID NO: 1808966 - DNA, 15 bp, Homo sapiens
gactgtcatgtggcc

SEQ ID NO: 1808967 - DNA, 15 bp, Homo sapiens
actgtcatgtggccc

SEQ ID NO: 1808968 - DNA, 15 bp, Homo sapiens
ctgtcatgtggccct

SEQ ID NO: 1808969 - DNA, 15 bp, Homo sapiens
tgtcatgtggccctt

SEQ ID NO: 1808970 - DNA, 15 bp, Homo sapiens
gtcatgtggcccttg

SEQ ID NO: 1808971 - DNA, 15 bp, Homo sapiens
tcatgtggcccttgg

SEQ ID NO: 1808972 - DNA, 15 bp, Homo sapiens
catgtggcccttggc

SEQ ID NO: 1808973 - DNA, 15 bp, Homo sapiens
atgtggcccttggct

SEQ ID NO: 1808974 - DNA, 15 bp, Homo sapiens
tgtggcccttggctc

SEQ ID NO: 1808975 - DNA, 15 bp, Homo sapiens
gtggcccttggctct

SEQ ID NO: 1808976 - DNA, 15 bp, Homo sapiens
tggcccttggctctg

SEQ ID NO: 1808977 - DNA, 15 bp, Homo sapiens
ggcccttggctctga

SEQ ID NO: 1808978 - DNA, 15 bp, Homo sapiens
gcccttggctctgaa

SEQ ID NO: 1808979 - DNA, 15 bp, Homo sapiens
cccttggctctgaag

SEQ ID NO: 1808980 - DNA, 15 bp, Homo sapiens
ccttggctctgaagg

SEQ ID NO: 1808981 - DNA, 15 bp, Homo sapiens
cttggctctgaaggc

SEQ ID NO: 1808982 - DNA, 15 bp, Homo sapiens
ttggctctgaaggct

SEQ ID NO: 1808983 - DNA, 15 bp, Homo sapiens
tggctctgaaggctc

SEQ ID NO: 1808984 - DNA, 15 bp, Homo sapiens
ggctctgaaggctct

SEQ ID NO: 1808985 - DNA, 15 bp, Homo sapiens
gctctgaaggctctt

SEQ ID NO: 1808986 - DNA, 15 bp, Homo sapiens
ctctgaaggctcttg

SEQ ID NO: 1808987 - DNA, 15 bp, Homo sapiens
tctgaaggctcttgc

SEQ ID NO: 1808988 - DNA, 15 bp, Homo sapiens
ctgaaggctcttgct

SEQ ID NO: 1808989 - DNA, 15 bp, Homo sapiens
tgaaggctcttgctc

SEQ ID NO: 1808990 - DNA, 15 bp, Homo sapiens
gaaggctcttgctct

SEQ ID NO: 1808991 - DNA, 15 bp, Homo sapiens
aaggctcttgctctg

SEQ ID NO: 1808992 - DNA, 15 bp, Homo sapiens
aggctcttgctctgt

SEQ ID NO: 1808993 - DNA, 15 bp, Homo sapiens
ggctcttgctctgtc

SEQ ID NO: 1808994 - DNA, 15 bp, Homo sapiens
gctcttgctctgtcc

SEQ ID NO: 1808995 - DNA, 15 bp, Homo sapiens
ctcttgctctgtcct

SEQ ID NO: 1808996 - DNA, 15 bp, Homo sapiens
tcttgctctgtccta

SEQ ID NO: 1808997 - DNA, 15 bp, Homo sapiens
cttgctctgtcctaa

SEQ ID NO: 1808998 - DNA, 15 bp, Homo sapiens
ttgctctgtcctaag

SEQ ID NO: 1808999 - DNA, 15 bp, Homo sapiens
tgctctgtcctaaga

SEQ ID NO: 1809000 - DNA, 15 bp, Homo sapiens
gctctgtcctaagat

SEQ ID NO: 1809001 - DNA, 15 bp, Homo sapiens
ctctgtcctaagatg

SEQ ID NO: 1809002 - DNA, 15 bp, Homo sapiens
tctgtcctaagatgt

SEQ ID NO: 1809003 - DNA, 15 bp, Homo sapiens
ctgtcctaagatgtc

SEQ ID NO: 1809004 - DNA, 15 bp, Homo sapiens
tgtcctaagatgtcc

SEQ ID NO: 1809005 - DNA, 15 bp, Homo sapiens
gtcctaagatgtcct

SEQ ID NO: 1809006 - DNA, 15 bp, Homo sapiens
tcctaagatgtcctc

SEQ ID NO: 1809007 - DNA, 15 bp, Homo sapiens
cctaagatgtcctca

SEQ ID NO: 1809008 - DNA, 15 bp, Homo sapiens
ctaagatgtcctcaa

SEQ ID NO: 1809009 - DNA, 15 bp, Homo sapiens
taagatgtcctcaaa

SEQ ID NO: 1809010 - DNA, 15 bp, Homo sapiens
aagatgtcctcaaaa

SEQ ID NO: 1809011 - DNA, 15 bp, Homo sapiens
agatgtcctcaaaat

SEQ ID NO: 1809012 - DNA, 15 bp, Homo sapiens
gatgtcctcaaaatg

SEQ ID NO: 1809013 - DNA, 15 bp, Homo sapiens
atgtcctcaaaatga

SEQ ID NO: 1809014 - DNA, 15 bp, Homo sapiens
tgtcctcaaaatgag

SEQ ID NO: 1809015 - DNA, 15 bp, Homo sapiens
gtcctcaaaatgagc

SEQ ID NO: 1809016 - DNA, 15 bp, Homo sapiens
tcctcaaaatgagcc

SEQ ID NO: 1809017 - DNA, 15 bp, Homo sapiens
cctcaaaatgagcct

SEQ ID NO: 1809018 - DNA, 15 bp, Homo sapiens
ctcaaaatgagcctg

SEQ ID NO: 1809019 - DNA, 15 bp, Homo sapiens
tcaaaatgagcctgg

SEQ ID NO: 1809020 - DNA, 15 bp, Homo sapiens
caaaatgagcctggg

SEQ ID NO: 1809021 - DNA, 15 bp, Homo sapiens
aaaatgagcctgggt

SEQ ID NO: 1809022 - DNA, 15 bp, Homo sapiens
aaatgagcctgggta

SEQ ID NO: 1809023 - DNA, 15 bp, Homo sapiens
aatgagcctgggtag

SEQ ID NO: 1809024 - DNA, 15 bp, Homo sapiens
atgagcctgggtagt

SEQ ID NO: 1809025 - DNA, 15 bp, Homo sapiens
tgagcctgggtagtg

SEQ ID NO: 1809026 - DNA, 15 bp, Homo sapiens
gagcctgggtagtgg

SEQ ID NO: 1809027 - DNA, 15 bp, Homo sapiens
agcctgggtagtggg

SEQ ID NO: 1809028 - DNA, 15 bp, Homo sapiens
gcctgggtagtggga

SEQ ID NO: 1809029 - DNA, 15 bp, Homo sapiens
cctgggtagtgggac

SEQ ID NO: 1809030 - DNA, 15 bp, Homo sapiens
ctgggtagtgggact

SEQ ID NO: 1809031 - DNA, 15 bp, Homo sapiens
tgggtagtgggactt

SEQ ID NO: 1809032 - DNA, 15 bp, Homo sapiens
gggtagtgggacttg

SEQ ID NO: 1809033 - DNA, 15 bp, Homo sapiens
ggtagtgggacttgg

SEQ ID NO: 1809034 - DNA, 15 bp, Homo sapiens
gtagtgggacttggg

SEQ ID NO: 1809035 - DNA, 15 bp, Homo sapiens
tagtgggacttgggc

SEQ ID NO: 1809036 - DNA, 15 bp, Homo sapiens
agtgggacttgggcg

SEQ ID NO: 1809037 - DNA, 15 bp, Homo sapiens
gtgggacttgggcgg

SEQ ID NO: 1809038 - DNA, 15 bp, Homo sapiens
tgggacttgggcggg

SEQ ID NO: 1809039 - DNA, 15 bp, Homo sapiens
gggacttgggcgggg

SEQ ID NO: 1809040 - DNA, 15 bp, Homo sapiens
ggacttgggcggggc

SEQ ID NO: 1809041 - DNA, 15 bp, Homo sapiens
gacttgggcggggcc

SEQ ID NO: 1809042 - DNA, 15 bp, Homo sapiens
acttgggcggggcct

SEQ ID NO: 1809043 - DNA, 15 bp, Homo sapiens
cttgggcggggcctc

SEQ ID NO: 1809044 - DNA, 15 bp, Homo sapiens
ttgggcggggcctct

SEQ ID NO: 1809045 - DNA, 15 bp, Homo sapiens
tgggcggggcctcta

SEQ ID NO: 1809046 - DNA, 15 bp, Homo sapiens
gggcggggcctctac

SEQ ID NO: 1809047 - DNA, 15 bp, Homo sapiens
ggcggggcctctact

SEQ ID NO: 1809048 - DNA, 15 bp, Homo sapiens
gcggggcctctactc

SEQ ID NO: 1809049 - DNA, 15 bp, Homo sapiens
cggggcctctactct

SEQ ID NO: 1809050 - DNA, 15 bp, Homo sapiens
ggggcctctactctt

SEQ ID NO: 1809051 - DNA, 15 bp, Homo sapiens
gggcctctactcttt

SEQ ID NO: 1809052 - DNA, 15 bp, Homo sapiens
ggcctctactctttc

SEQ ID NO: 1809053 - DNA, 15 bp, Homo sapiens
gcctctactctttcc

SEQ ID NO: 1809054 - DNA, 15 bp, Homo sapiens
cctctactctttccc

SEQ ID NO: 1809055 - DNA, 15 bp, Homo sapiens
ctctactctttccca

SEQ ID NO: 1809056 - DNA, 15 bp, Homo sapiens
tctactctttcccat

SEQ ID NO: 1809057 - DNA, 15 bp, Homo sapiens
ctactctttcccatt

SEQ ID NO: 1809058 - DNA, 15 bp, Homo sapiens
tactctttcccattt

SEQ ID NO: 1809059 - DNA, 15 bp, Homo sapiens
actctttcccatttt

SEQ ID NO: 1809060 - DNA, 15 bp, Homo sapiens
ctctttcccattttt

SEQ ID NO: 1809061 - DNA, 15 bp, Homo sapiens
ctttcccattttttg

SEQ ID NO: 1809062 - DNA, 15 bp, Homo sapiens
tttcccattttttga

SEQ ID NO: 1809063 - DNA, 15 bp, Homo sapiens
ttcccattttttgat

SEQ ID NO: 1809064 - DNA, 15 bp, Homo sapiens
tcccattttttgatc

SEQ ID NO: 1809065 - DNA, 15 bp, Homo sapiens
cccattttttgatcc

SEQ ID NO: 1809066 - DNA, 15 bp, Homo sapiens
ccattttttgatcca

SEQ ID NO: 1809067 - DNA, 15 bp, Homo sapiens
cattttttgatccac

SEQ ID NO: 1809068 - DNA, 15 bp, Homo sapiens
attttttgatccact

SEQ ID NO: 1809069 - DNA, 15 bp, Homo sapiens
ttttttgatccactg

SEQ ID NO: 1809070 - DNA, 15 bp, Homo sapiens
tttttgatccactgc

SEQ ID NO: 1809071 - DNA, 15 bp, Homo sapiens
ttttgatccactgct

SEQ ID NO: 1809072 - DNA, 15 bp, Homo sapiens
tttgatccactgctc

SEQ ID NO: 1809073 - DNA, 15 bp, Homo sapiens
ttgatccactgctct

SEQ ID NO: 1809074 - DNA, 15 bp, Homo sapiens
tgatccactgctctt

SEQ ID NO: 1809075 - DNA, 15 bp, Homo sapiens
gatccactgctctta

SEQ ID NO: 1809076 - DNA, 15 bp, Homo sapiens
atccactgctcttac

SEQ ID NO: 1809077 - DNA, 15 bp, Homo sapiens
tccactgctcttacc

SEQ ID NO: 1809078 - DNA, 15 bp, Homo sapiens
ccactgctcttaccc

SEQ ID NO: 1809079 - DNA, 15 bp, Homo sapiens
cactgctcttaccct

SEQ ID NO: 1809080 - DNA, 15 bp, Homo sapiens
actgctcttaccctg

SEQ ID NO: 1809081 - DNA, 15 bp, Homo sapiens
ctgctcttaccctga

SEQ ID NO: 1809082 - DNA, 15 bp, Homo sapiens
tgctcttaccctgag

SEQ ID NO: 1809083 - DNA, 15 bp, Homo sapiens
gctcttaccctgagg

SEQ ID NO: 1809084 - DNA, 15 bp, Homo sapiens
ctcttaccctgaggc

SEQ ID NO: 1809085 - DNA, 15 bp, Homo sapiens
tcttaccctgaggct

SEQ ID NO: 1809086 - DNA, 15 bp, Homo sapiens
cttaccctgaggctt

SEQ ID NO: 1809087 - DNA, 15 bp, Homo sapiens
ttaccctgaggcttc

SEQ ID NO: 1809088 - DNA, 15 bp, Homo sapiens
taccctgaggcttct

SEQ ID NO: 1809089 - DNA, 15 bp, Homo sapiens
accctgaggcttctg

SEQ ID NO: 1809090 - DNA, 15 bp, Homo sapiens
ccctgaggcttctgc

SEQ ID NO: 1809091 - DNA, 15 bp, Homo sapiens
cctgaggcttctgca

SEQ ID NO: 1809092 - DNA, 15 bp, Homo sapiens
ctgaggcttctgcag

SEQ ID NO: 1809093 - DNA, 15 bp, Homo sapiens
tgaggcttctgcaga

SEQ ID NO: 1809094 - DNA, 15 bp, Homo sapiens
gaggcttctgcagat

SEQ ID NO: 1809095 - DNA, 15 bp, Homo sapiens
aggcttctgcagatg

SEQ ID NO: 1809096 - DNA, 15 bp, Homo sapiens
ggcttctgcagatgt

SEQ ID NO: 1809097 - DNA, 15 bp, Homo sapiens
gcttctgcagatgtg

SEQ ID NO: 1809098 - DNA, 15 bp, Homo sapiens
cttctgcagatgtgg

SEQ ID NO: 1809099 - DNA, 15 bp, Homo sapiens
ttctgcagatgtggt

SEQ ID NO: 1809100 - DNA, 15 bp, Homo sapiens
tctgcagatgtggtc

SEQ ID NO: 1809101 - DNA, 15 bp, Homo sapiens
ctgcagatgtggtca

SEQ ID NO: 1809102 - DNA, 15 bp, Homo sapiens
tgcagatgtggtcag

SEQ ID NO: 1809103 - DNA, 15 bp, Homo sapiens
gcagatgtggtcagg

SEQ ID NO: 1809104 - DNA, 15 bp, Homo sapiens
cagatgtggtcaggc

SEQ ID NO: 1809105 - DNA, 15 bp, Homo sapiens
agatgtggtcaggcc

SEQ ID NO: 1809106 - DNA, 15 bp, Homo sapiens
gatgtggtcaggcct

SEQ ID NO: 1809107 - DNA, 15 bp, Homo sapiens
atgtggtcaggcctg

SEQ ID NO: 1809108 - DNA, 15 bp, Homo sapiens
tgtggtcaggcctgg

SEQ ID NO: 1809109 - DNA, 15 bp, Homo sapiens
gtggtcaggcctggc

SEQ ID NO: 1809110 - DNA, 15 bp, Homo sapiens
tggtcaggcctggca

SEQ ID NO: 1809111 - DNA, 15 bp, Homo sapiens
ggtcaggcctggcag

SEQ ID NO: 1809112 - DNA, 15 bp, Homo sapiens
gtcaggcctggcagg

SEQ ID NO: 1809113 - DNA, 15 bp, Homo sapiens
tcaggcctggcaggg

SEQ ID NO: 1809114 - DNA, 15 bp, Homo sapiens
caggcctggcagggt

SEQ ID NO: 1809115 - DNA, 15 bp, Homo sapiens
aggcctggcagggtg

SEQ ID NO: 1809116 - DNA, 15 bp, Homo sapiens
ggcctggcagggtga

SEQ ID NO: 1809117 - DNA, 15 bp, Homo sapiens
gcctggcagggtgaa

SEQ ID NO: 1809118 - DNA, 15 bp, Homo sapiens
cctggcagggtgaag

SEQ ID NO: 1809119 - DNA, 15 bp, Homo sapiens
ctggcagggtgaagg

SEQ ID NO: 1809120 - DNA, 15 bp, Homo sapiens
tggcagggtgaagga

SEQ ID NO: 1809121 - DNA, 15 bp, Homo sapiens
ggcagggtgaaggac

SEQ ID NO: 1809122 - DNA, 15 bp, Homo sapiens
gcagggtgaaggacc

SEQ ID NO: 1809123 - DNA, 15 bp, Homo sapiens
cagggtgaaggacca

SEQ ID NO: 1809124 - DNA, 15 bp, Homo sapiens
agggtgaaggaccag

SEQ ID NO: 1809125 - DNA, 15 bp, Homo sapiens
gggtgaaggaccagc

SEQ ID NO: 1809126 - DNA, 15 bp, Homo sapiens
ggtgaaggaccagcc

SEQ ID NO: 1809127 - DNA, 15 bp, Homo sapiens
gtgaaggaccagccc

SEQ ID NO: 1809128 - DNA, 15 bp, Homo sapiens
tgaaggaccagccct

SEQ ID NO: 1809129 - DNA, 15 bp, Homo sapiens
gaaggaccagccctt

SEQ ID NO: 1809130 - DNA, 15 bp, Homo sapiens
aaggaccagcccttg

SEQ ID NO: 1809131 - DNA, 15 bp, Homo sapiens
aggaccagcccttgg

SEQ ID NO: 1809132 - DNA, 15 bp, Homo sapiens
ggaccagcccttggg

SEQ ID NO: 1809133 - DNA, 15 bp, Homo sapiens
gaccagcccttgggg

SEQ ID NO: 1809134 - DNA, 15 bp, Homo sapiens
accagcccttggggt

SEQ ID NO: 1809135 - DNA, 15 bp, Homo sapiens
ccagcccttggggtc

SEQ ID NO: 1809136 - DNA, 15 bp, Homo sapiens
cagcccttggggtcc

SEQ ID NO: 1809137 - DNA, 15 bp, Homo sapiens
agcccttggggtccc

SEQ ID NO: 1809138 - DNA, 15 bp, Homo sapiens
gcccttggggtccct

SEQ ID NO: 1809139 - DNA, 15 bp, Homo sapiens
cccttggggtccctc

SEQ ID NO: 1809140 - DNA, 15 bp, Homo sapiens
ccttggggtccctct

SEQ ID NO: 1809141 - DNA, 15 bp, Homo sapiens
cttggggtccctctg

SEQ ID NO: 1809142 - DNA, 15 bp, Homo sapiens
ttggggtccctctgc

SEQ ID NO: 1809143 - DNA, 15 bp, Homo sapiens
tggggtccctctgcc

SEQ ID NO: 1809144 - DNA, 15 bp, Homo sapiens
ggggtccctctgcct

SEQ ID NO: 1809145 - DNA, 15 bp, Homo sapiens
gggtccctctgcctc

SEQ ID NO: 1809146 - DNA, 15 bp, Homo sapiens
ggtccctctgcctct

SEQ ID NO: 1809147 - DNA, 15 bp, Homo sapiens
gtccctctgcctctc

SEQ ID NO: 1809148 - DNA, 15 bp, Homo sapiens
tccctctgcctctct

SEQ ID NO: 1809149 - DNA, 15 bp, Homo sapiens
ccctctgcctctctc

SEQ ID NO: 1809150 - DNA, 15 bp, Homo sapiens
cctctgcctctctct

SEQ ID NO: 1809151 - DNA, 15 bp, Homo sapiens
ctctgcctctctctg

SEQ ID NO: 1809152 - DNA, 15 bp, Homo sapiens
tctgcctctctctgc

SEQ ID NO: 1809153 - DNA, 15 bp, Homo sapiens
ctgcctctctctgct

SEQ ID NO: 1809154 - DNA, 15 bp, Homo sapiens
tgcctctctctgctc

SEQ ID NO: 1809155 - DNA, 15 bp, Homo sapiens
gcctctctctgctct

SEQ ID NO: 1809156 - DNA, 15 bp, Homo sapiens
cctctctctgctctg

SEQ ID NO: 1809157 - DNA, 15 bp, Homo sapiens
ctctctctgctctgc

SEQ ID NO: 1809158 - DNA, 15 bp, Homo sapiens
tctctctgctctgcc

SEQ ID NO: 1809159 - DNA, 15 bp, Homo sapiens
ctctctgctctgccc

SEQ ID NO: 1809160 - DNA, 15 bp, Homo sapiens
tctctgctctgcccc

SEQ ID NO: 1809161 - DNA, 15 bp, Homo sapiens
ctctgctctgcccct

SEQ ID NO: 1809162 - DNA, 15 bp, Homo sapiens
tctgctctgcccctt

SEQ ID NO: 1809163 - DNA, 15 bp, Homo sapiens
ctgctctgccccttg

SEQ ID NO: 1809164 - DNA, 15 bp, Homo sapiens
tgctctgccccttgc

SEQ ID NO: 1809165 - DNA, 15 bp, Homo sapiens
gctctgccccttgct

SEQ ID NO: 1809166 - DNA, 15 bp, Homo sapiens
ctctgccccttgctt

SEQ ID NO: 1809167 - DNA, 15 bp, Homo sapiens
tctgccccttgcttc

SEQ ID NO: 1809168 - DNA, 15 bp, Homo sapiens
ctgccccttgcttca

SEQ ID NO: 1809169 - DNA, 15 bp, Homo sapiens
tgccccttgcttcat

SEQ ID NO: 1809170 - DNA, 15 bp, Homo sapiens
gccccttgcttcatg

SEQ ID NO: 1809171 - DNA, 15 bp, Homo sapiens
ccccttgcttcatgg

SEQ ID NO: 1809172 - DNA, 15 bp, Homo sapiens
cccttgcttcatggc

SEQ ID NO: 1809173 - DNA, 15 bp, Homo sapiens
ccttgcttcatggct

SEQ ID NO: 1809174 - DNA, 15 bp, Homo sapiens
cttgcttcatggctg

SEQ ID NO: 1809175 - DNA, 15 bp, Homo sapiens
ttgcttcatggctga

SEQ ID NO: 1809176 - DNA, 15 bp, Homo sapiens
tgcttcatggctgag

SEQ ID NO: 1809177 - DNA, 15 bp, Homo sapiens
gcttcatggctgagg

SEQ ID NO: 1809178 - DNA, 15 bp, Homo sapiens
cttcatggctgaggg

SEQ ID NO: 1809179 - DNA, 15 bp, Homo sapiens
ttcatggctgagggt

SEQ ID NO: 1809180 - DNA, 15 bp, Homo sapiens
tcatggctgagggtg

SEQ ID NO: 1809181 - DNA, 15 bp, Homo sapiens
catggctgagggtgg

SEQ ID NO: 1809182 - DNA, 15 bp, Homo sapiens
atggctgagggtggg

SEQ ID NO: 1809183 - DNA, 15 bp, Homo sapiens
tggctgagggtgggg

SEQ ID NO: 1809184 - DNA, 15 bp, Homo sapiens
ggctgagggtgggga

SEQ ID NO: 1809185 - DNA, 15 bp, Homo sapiens
gctgagggtggggag

SEQ ID NO: 1809186 - DNA, 15 bp, Homo sapiens
ctgagggtggggaga

SEQ ID NO: 1809187 - DNA, 15 bp, Homo sapiens
tgagggtggggagaa

SEQ ID NO: 1809188 - DNA, 15 bp, Homo sapiens
gagggtggggagaat

SEQ ID NO: 1809189 - DNA, 15 bp, Homo sapiens
agggtggggagaatg

SEQ ID NO: 1809190 - DNA, 15 bp, Homo sapiens
gggtggggagaatgt

SEQ ID NO: 1809191 - DNA, 15 bp, Homo sapiens
ggtggggagaatgtc

SEQ ID NO: 1809192 - DNA, 15 bp, Homo sapiens
gtggggagaatgtcc

SEQ ID NO: 1809193 - DNA, 15 bp, Homo sapiens
tggggagaatgtccc

SEQ ID NO: 1809194 - DNA, 15 bp, Homo sapiens
ggggagaatgtccca

SEQ ID NO: 1809195 - DNA, 15 bp, Homo sapiens
gggagaatgtcccag

SEQ ID NO: 1809196 - DNA, 15 bp, Homo sapiens
ggagaatgtcccaga

SEQ ID NO: 1809197 - DNA, 15 bp, Homo sapiens
gagaatgtcccagag

SEQ ID NO: 1809198 - DNA, 15 bp, Homo sapiens
agaatgtcccagagc

SEQ ID NO: 1809199 - DNA, 15 bp, Homo sapiens
gaatgtcccagagcc

SEQ ID NO: 1809200 - DNA, 15 bp, Homo sapiens
aatgtcccagagccc

SEQ ID NO: 1809201 - DNA, 15 bp, Homo sapiens
atgtcccagagcccc

SEQ ID NO: 1809202 - DNA, 15 bp, Homo sapiens
tgtcccagagcccca

SEQ ID NO: 1809203 - DNA, 15 bp, Homo sapiens
gtcccagagccccac

SEQ ID NO: 1809204 - DNA, 15 bp, Homo sapiens
tcccagagccccacg

SEQ ID NO: 1809205 - DNA, 15 bp, Homo sapiens
cccagagccccacga

SEQ ID NO: 1809206 - DNA, 15 bp, Homo sapiens
ccagagccccacgag

SEQ ID NO: 1809207 - DNA, 15 bp, Homo sapiens
cagagccccacgagg

SEQ ID NO: 1809208 - DNA, 15 bp, Homo sapiens
agagccccacgaggg

SEQ ID NO: 1809209 - DNA, 15 bp, Homo sapiens
gagccccacgagggg

SEQ ID NO: 1809210 - DNA, 15 bp, Homo sapiens
agccccacgaggggt

SEQ ID NO: 1809211 - DNA, 15 bp, Homo sapiens
gccccacgaggggtg

SEQ ID NO: 1809212 - DNA, 15 bp, Homo sapiens
ccccacgaggggtga

SEQ ID NO: 1809213 - DNA, 15 bp, Homo sapiens
cccacgaggggtgat

SEQ ID NO: 1809214 - DNA, 15 bp, Homo sapiens
ccacgaggggtgatc

SEQ ID NO: 1809215 - DNA, 15 bp, Homo sapiens
cacgaggggtgatca

SEQ ID NO: 1809216 - DNA, 15 bp, Homo sapiens
acgaggggtgatcag

SEQ ID NO: 1809217 - DNA, 15 bp, Homo sapiens
cgaggggtgatcagc

SEQ ID NO: 1809218 - DNA, 15 bp, Homo sapiens
gaggggtgatcagca

SEQ ID NO: 1809219 - DNA, 15 bp, Homo sapiens
aggggtgatcagcat

SEQ ID NO: 1809220 - DNA, 15 bp, Homo sapiens
ggggtgatcagcatt

SEQ ID NO: 1809221 - DNA, 15 bp, Homo sapiens
gggtgatcagcattg

SEQ ID NO: 1809222 - DNA, 15 bp, Homo sapiens
ggtgatcagcattgt

SEQ ID NO: 1809223 - DNA, 15 bp, Homo sapiens
gtgatcagcattgtg

SEQ ID NO: 1809224 - DNA, 15 bp, Homo sapiens
tgatcagcattgtga

SEQ ID NO: 1809225 - DNA, 15 bp, Homo sapiens
gatcagcattgtgag

SEQ ID NO: 1809226 - DNA, 15 bp, Homo sapiens
atcagcattgtgagc

SEQ ID NO: 1809227 - DNA, 15 bp, Homo sapiens
tcagcattgtgagct

SEQ ID NO: 1809228 - DNA, 15 bp, Homo sapiens
cagcattgtgagctg

SEQ ID NO: 1809229 - DNA, 15 bp, Homo sapiens
agcattgtgagctgg

SEQ ID NO: 1809230 - DNA, 15 bp, Homo sapiens
gcattgtgagctggg

SEQ ID NO: 1809231 - DNA, 15 bp, Homo sapiens
cattgtgagctgggc

SEQ ID NO: 1809232 - DNA, 15 bp, Homo sapiens
attgtgagctgggcg

SEQ ID NO: 1809233 - DNA, 15 bp, Homo sapiens
ttgtgagctgggcgt

SEQ ID NO: 1809234 - DNA, 15 bp, Homo sapiens
tgtgagctgggcgtg

SEQ ID NO: 1809235 - DNA, 15 bp, Homo sapiens
gtgagctgggcgtgc

SEQ ID NO: 1809236 - DNA, 15 bp, Homo sapiens
tgagctgggcgtgca

SEQ ID NO: 1809237 - DNA, 15 bp, Homo sapiens
gagctgggcgtgcac

SEQ ID NO: 1809238 - DNA, 15 bp, Homo sapiens
agctgggcgtgcacc

SEQ ID NO: 1809239 - DNA, 15 bp, Homo sapiens
gctgggcgtgcacca

SEQ ID NO: 1809240 - DNA, 15 bp, Homo sapiens
ctgggcgtgcaccaa

SEQ ID NO: 1809241 - DNA, 15 bp, Homo sapiens
tgggcgtgcaccaag

SEQ ID NO: 1809242 - DNA, 15 bp, Homo sapiens
gggcgtgcaccaagc

SEQ ID NO: 1809243 - DNA, 15 bp, Homo sapiens
ggcgtgcaccaagct

SEQ ID NO: 1809244 - DNA, 15 bp, Homo sapiens
gcgtgcaccaagctc

SEQ ID NO: 1809245 - DNA, 15 bp, Homo sapiens
cgtgcaccaagctct

SEQ ID NO: 1809246 - DNA, 15 bp, Homo sapiens
gtgcaccaagctctt

SEQ ID NO: 1809247 - DNA, 15 bp, Homo sapiens
tgcaccaagctcttc

SEQ ID NO: 1809248 - DNA, 15 bp, Homo sapiens
gcaccaagctcttca

SEQ ID NO: 1809249 - DNA, 15 bp, Homo sapiens
caccaagctcttcac

SEQ ID NO: 1809250 - DNA, 15 bp, Homo sapiens
accaagctcttcacc

SEQ ID NO: 1809251 - DNA, 15 bp, Homo sapiens
ccaagctcttcacct

SEQ ID NO: 1809252 - DNA, 15 bp, Homo sapiens
caagctcttcacctg

SEQ ID NO: 1809253 - DNA, 15 bp, Homo sapiens
aagctcttcacctgt

SEQ ID NO: 1809254 - DNA, 15 bp, Homo sapiens
agctcttcacctgtg

SEQ ID NO: 1809255 - DNA, 15 bp, Homo sapiens
gctcttcacctgtga

SEQ ID NO: 1809256 - DNA, 15 bp, Homo sapiens
ctcttcacctgtgag

SEQ ID NO: 1809257 - DNA, 15 bp, Homo sapiens
tcttcacctgtgagc

SEQ ID NO: 1809258 - DNA, 15 bp, Homo sapiens
cttcacctgtgagca

SEQ ID NO: 1809259 - DNA, 15 bp, Homo sapiens
ttcacctgtgagcag

SEQ ID NO: 1809260 - DNA, 15 bp, Homo sapiens
tcacctgtgagcagg

SEQ ID NO: 1809261 - DNA, 15 bp, Homo sapiens
cacctgtgagcaggt

SEQ ID NO: 1809262 - DNA, 15 bp, Homo sapiens
acctgtgagcaggtg

SEQ ID NO: 1809263 - DNA, 15 bp, Homo sapiens
cctgtgagcaggtgc

SEQ ID NO: 1809264 - DNA, 15 bp, Homo sapiens
ctgtgagcaggtgcc

SEQ ID NO: 1809265 - DNA, 15 bp, Homo sapiens
tgtgagcaggtgcca

SEQ ID NO: 1809266 - DNA, 15 bp, Homo sapiens
gtgagcaggtgccag

SEQ ID NO: 1809267 - DNA, 15 bp, Homo sapiens
tgagcaggtgccagg

SEQ ID NO: 1809268 - DNA, 15 bp, Homo sapiens
gagcaggtgccaggg

SEQ ID NO: 1809269 - DNA, 15 bp, Homo sapiens
agcaggtgccaggga

SEQ ID NO: 1809270 - DNA, 15 bp, Homo sapiens
gcaggtgccagggaa

SEQ ID NO: 1809271 - DNA, 15 bp, Homo sapiens
caggtgccagggaac

SEQ ID NO: 1809272 - DNA, 15 bp, Homo sapiens
aggtgccagggaaca

SEQ ID NO: 1809273 - DNA, 15 bp, Homo sapiens
ggtgccagggaacag

SEQ ID NO: 1809274 - DNA, 15 bp, Homo sapiens
gtgccagggaacagg

SEQ ID NO: 1809275 - DNA, 15 bp, Homo sapiens
tgccagggaacaggc

SEQ ID NO: 1809276 - DNA, 15 bp, Homo sapiens
gccagggaacaggcc

SEQ ID NO: 1809277 - DNA, 15 bp, Homo sapiens
ccagggaacaggcca

SEQ ID NO: 1809278 - DNA, 15 bp, Homo sapiens
cagggaacaggccac

SEQ ID NO: 1809279 - DNA, 15 bp, Homo sapiens
agggaacaggccacc

SEQ ID NO: 1809280 - DNA, 15 bp, Homo sapiens
gggaacaggccacct

SEQ ID NO: 1809281 - DNA, 15 bp, Homo sapiens
ggaacaggccacctg

SEQ ID NO: 1809282 - DNA, 15 bp, Homo sapiens
gaacaggccacctgt

SEQ ID NO: 1809283 - DNA, 15 bp, Homo sapiens
aacaggccacctgtg

SEQ ID NO: 1809284 - DNA, 15 bp, Homo sapiens
acaggccacctgtga

SEQ ID NO: 1809285 - DNA, 15 bp, Homo sapiens
caggccacctgtgac

SEQ ID NO: 1809286 - DNA, 15 bp, Homo sapiens
aggccacctgtgact

SEQ ID NO: 1809287 - DNA, 15 bp, Homo sapiens
ggccacctgtgactc

SEQ ID NO: 1809288 - DNA, 15 bp, Homo sapiens
gccacctgtgactcc

SEQ ID NO: 1809289 - DNA, 15 bp, Homo sapiens
ccacctgtgactcca

SEQ ID NO: 1809290 - DNA, 15 bp, Homo sapiens
cacctgtgactccac

SEQ ID NO: 1809291 - DNA, 15 bp, Homo sapiens
acctgtgactccaca

SEQ ID NO: 1809292 - DNA, 15 bp, Homo sapiens
cctgtgactccacat

SEQ ID NO: 1809293 - DNA, 15 bp, Homo sapiens
ctgtgactccacatc

SEQ ID NO: 1809294 - DNA, 15 bp, Homo sapiens
tgtgactccacatcc

SEQ ID NO: 1809295 - DNA, 15 bp, Homo sapiens
gtgactccacatccc

SEQ ID NO: 1809296 - DNA, 15 bp, Homo sapiens
tgactccacatcccc

SEQ ID NO: 1809297 - DNA, 15 bp, Homo sapiens
gactccacatcccct

SEQ ID NO: 1809298 - DNA, 15 bp, Homo sapiens
actccacatcccctg

SEQ ID NO: 1809299 - DNA, 15 bp, Homo sapiens
ctccacatcccctgc

SEQ ID NO: 1809300 - DNA, 15 bp, Homo sapiens
tccacatcccctgct

SEQ ID NO: 1809301 - DNA, 15 bp, Homo sapiens
ccacatcccctgctt

SEQ ID NO: 1809302 - DNA, 15 bp, Homo sapiens
cacatcccctgcttg

SEQ ID NO: 1809303 - DNA, 15 bp, Homo sapiens
acatcccctgcttgc

SEQ ID NO: 1809304 - DNA, 15 bp, Homo sapiens
catcccctgcttgca

SEQ ID NO: 1809305 - DNA, 15 bp, Homo sapiens
atcccctgcttgcag

SEQ ID NO: 1809306 - DNA, 15 bp, Homo sapiens
tcccctgcttgcagt

SEQ ID NO: 1809307 - DNA, 15 bp, Homo sapiens
cccctgcttgcagtg

SEQ ID NO: 1809308 - DNA, 15 bp, Homo sapiens
ccctgcttgcagtgg

SEQ ID NO: 1809309 - DNA, 15 bp, Homo sapiens
cctgcttgcagtgga

SEQ ID NO: 1809310 - DNA, 15 bp, Homo sapiens
ctgcttgcagtggac

SEQ ID NO: 1809311 - DNA, 15 bp, Homo sapiens
tgcttgcagtggacc

SEQ ID NO: 1809312 - DNA, 15 bp, Homo sapiens
gcttgcagtggacct

SEQ ID NO: 1809313 - DNA, 15 bp, Homo sapiens
cttgcagtggacctg

SEQ ID NO: 1809314 - DNA, 15 bp, Homo sapiens
ttgcagtggacctga

SEQ ID NO: 1809315 - DNA, 15 bp, Homo sapiens
tgcagtggacctgac

SEQ ID NO: 1809316 - DNA, 15 bp, Homo sapiens
gcagtggacctgacc

SEQ ID NO: 1809317 - DNA, 15 bp, Homo sapiens
cagtggacctgacca

SEQ ID NO: 1809318 - DNA, 15 bp, Homo sapiens
agtggacctgaccag

SEQ ID NO: 1809319 - DNA, 15 bp, Homo sapiens
gtggacctgaccagc

SEQ ID NO: 1809320 - DNA, 15 bp, Homo sapiens
tggacctgaccagca

SEQ ID NO: 1809321 - DNA, 15 bp, Homo sapiens
ggacctgaccagcat

SEQ ID NO: 1809322 - DNA, 15 bp, Homo sapiens
gacctgaccagcatt

SEQ ID NO: 1809323 - DNA, 15 bp, Homo sapiens
acctgaccagcattg

SEQ ID NO: 1809324 - DNA, 15 bp, Homo sapiens
cctgaccagcattga

SEQ ID NO: 1809325 - DNA, 15 bp, Homo sapiens
ctgaccagcattgac

SEQ ID NO: 1809326 - DNA, 15 bp, Homo sapiens
tgaccagcattgaca

SEQ ID NO: 1809327 - DNA, 15 bp, Homo sapiens
gaccagcattgacag

SEQ ID NO: 1809328 - DNA, 15 bp, Homo sapiens
accagcattgacagg

SEQ ID NO: 1809329 - DNA, 15 bp, Homo sapiens
ccagcattgacaggc

SEQ ID NO: 1809330 - DNA, 15 bp, Homo sapiens
cagcattgacaggcg

SEQ ID NO: 1809331 - DNA, 15 bp, Homo sapiens
agcattgacaggcgc

SEQ ID NO: 1809332 - DNA, 15 bp, Homo sapiens
gcattgacaggcgca

SEQ ID NO: 1809333 - DNA, 15 bp, Homo sapiens
cattgacaggcgcag

SEQ ID NO: 1809334 - DNA, 15 bp, Homo sapiens
attgacaggcgcagc

SEQ ID NO: 1809335 - DNA, 15 bp, Homo sapiens
ttgacaggcgcagca

SEQ ID NO: 1809336 - DNA, 15 bp, Homo sapiens
tgacaggcgcagcag

SEQ ID NO: 1809337 - DNA, 15 bp, Homo sapiens
gacaggcgcagcaga

SEQ ID NO: 1809338 - DNA, 15 bp, Homo sapiens
acaggcgcagcagag

SEQ ID NO: 1809339 - DNA, 15 bp, Homo sapiens
caggcgcagcagaga

SEQ ID NO: 1809340 - DNA, 15 bp, Homo sapiens
aggcgcagcagagag

SEQ ID NO: 1809341 - DNA, 15 bp, Homo sapiens
ggcgcagcagagagc

SEQ ID NO: 1809342 - DNA, 15 bp, Homo sapiens
gcgcagcagagagca

SEQ ID NO: 1809343 - DNA, 15 bp, Homo sapiens
cgcagcagagagcag

SEQ ID NO: 1809344 - DNA, 15 bp, Homo sapiens
gcagcagagagcagg

SEQ ID NO: 1809345 - DNA, 15 bp, Homo sapiens
cagcagagagcagga

SEQ ID NO: 1809346 - DNA, 15 bp, Homo sapiens
agcagagagcaggaa

SEQ ID NO: 1809347 - DNA, 15 bp, Homo sapiens
gcagagagcaggaat

SEQ ID NO: 1809348 - DNA, 15 bp, Homo sapiens
cagagagcaggaatt

SEQ ID NO: 1809349 - DNA, 15 bp, Homo sapiens
agagagcaggaattg

SEQ ID NO: 1809350 - DNA, 15 bp, Homo sapiens
gagagcaggaattgg

SEQ ID NO: 1809351 - DNA, 15 bp, Homo sapiens
agagcaggaattggc

SEQ ID NO: 1809352 - DNA, 15 bp, Homo sapiens
gagcaggaattggcc

SEQ ID NO: 1809353 - DNA, 15 bp, Homo sapiens
agcaggaattggcca

SEQ ID NO: 1809354 - DNA, 15 bp, Homo sapiens
gcaggaattggccac

SEQ ID NO: 1809355 - DNA, 15 bp, Homo sapiens
caggaattggccacc

SEQ ID NO: 1809356 - DNA, 15 bp, Homo sapiens
aggaattggccacca

SEQ ID NO: 1809357 - DNA, 15 bp, Homo sapiens
ggaattggccaccag

SEQ ID NO: 1809358 - DNA, 15 bp, Homo sapiens
gaattggccaccagg

SEQ ID NO: 1809359 - DNA, 15 bp, Homo sapiens
aattggccaccaggg

SEQ ID NO: 1809360 - DNA, 15 bp, Homo sapiens
attggccaccaggga

SEQ ID NO: 1809361 - DNA, 15 bp, Homo sapiens
ttggccaccagggag

SEQ ID NO: 1809362 - DNA, 15 bp, Homo sapiens
tggccaccagggaga

SEQ ID NO: 1809363 - DNA, 15 bp, Homo sapiens
ggccaccagggagaa

SEQ ID NO: 1809364 - DNA, 15 bp, Homo sapiens
gccaccagggagaag

SEQ ID NO: 1809365 - DNA, 15 bp, Homo sapiens
ccaccagggagaagg

SEQ ID NO: 1809366 - DNA, 15 bp, Homo sapiens
caccagggagaaggc

SEQ ID NO: 1809367 - DNA, 15 bp, Homo sapiens
accagggagaaggct

SEQ ID NO: 1809368 - DNA, 15 bp, Homo sapiens
ccagggagaaggctc

SEQ ID NO: 1809369 - DNA, 15 bp, Homo sapiens
cagggagaaggctca

SEQ ID NO: 1809370 - DNA, 15 bp, Homo sapiens
agggagaaggctcag

SEQ ID NO: 1809371 - DNA, 15 bp, Homo sapiens
gggagaaggctcagt

SEQ ID NO: 1809372 - DNA, 15 bp, Homo sapiens
ggagaaggctcagtc

SEQ ID NO: 1809373 - DNA, 15 bp, Homo sapiens
gagaaggctcagtca

SEQ ID NO: 1809374 - DNA, 15 bp, Homo sapiens
agaaggctcagtcac

SEQ ID NO: 1809375 - DNA, 15 bp, Homo sapiens
gaaggctcagtcact

SEQ ID NO: 1809376 - DNA, 15 bp, Homo sapiens
aaggctcagtcactc

SEQ ID NO: 1809377 - DNA, 15 bp, Homo sapiens
aggctcagtcactcg

SEQ ID NO: 1809378 - DNA, 15 bp, Homo sapiens
ggctcagtcactcgc

SEQ ID NO: 1809379 - DNA, 15 bp, Homo sapiens
gctcagtcactcgca

SEQ ID NO: 1809380 - DNA, 15 bp, Homo sapiens
ctcagtcactcgcag

SEQ ID NO: 1809381 - DNA, 15 bp, Homo sapiens
tcagtcactcgcagc

SEQ ID NO: 1809382 - DNA, 15 bp, Homo sapiens
cagtcactcgcagcc

SEQ ID NO: 1809383 - DNA, 15 bp, Homo sapiens
agtcactcgcagccc

SEQ ID NO: 1809384 - DNA, 15 bp, Homo sapiens
gtcactcgcagccct

SEQ ID NO: 1809385 - DNA, 15 bp, Homo sapiens
tcactcgcagccctg

SEQ ID NO: 1809386 - DNA, 15 bp, Homo sapiens
cactcgcagccctgt

SEQ ID NO: 1809387 - DNA, 15 bp, Homo sapiens
actcgcagccctgtt

SEQ ID NO: 1809388 - DNA, 15 bp, Homo sapiens
ctcgcagccctgttt

SEQ ID NO: 1809389 - DNA, 15 bp, Homo sapiens
tcgcagccctgtttc

SEQ ID NO: 1809390 - DNA, 15 bp, Homo sapiens
cgcagccctgtttct

SEQ ID NO: 1809391 - DNA, 15 bp, Homo sapiens
gcagccctgtttcta

SEQ ID NO: 1809392 - DNA, 15 bp, Homo sapiens
cagccctgtttctag

SEQ ID NO: 1809393 - DNA, 15 bp, Homo sapiens
agccctgtttctaga

SEQ ID NO: 1809394 - DNA, 15 bp, Homo sapiens
gccctgtttctagaa

SEQ ID NO: 1809395 - DNA, 15 bp, Homo sapiens
ccctgtttctagaaa

SEQ ID NO: 1809396 - DNA, 15 bp, Homo sapiens
cctgtttctagaaaa

SEQ ID NO: 1809397 - DNA, 15 bp, Homo sapiens
ctgtttctagaaaaa

SEQ ID NO: 1809398 - DNA, 15 bp, Homo sapiens
tgtttctagaaaaag

SEQ ID NO: 1809399 - DNA, 15 bp, Homo sapiens
gtttctagaaaaagt

SEQ ID NO: 1809400 - DNA, 15 bp, Homo sapiens
tttctagaaaaagtg

SEQ ID NO: 1809401 - DNA, 15 bp, Homo sapiens
ttctagaaaaagtgc

SEQ ID NO: 1809402 - DNA, 15 bp, Homo sapiens
tctagaaaaagtgcg

SEQ ID NO: 1809403 - DNA, 15 bp, Homo sapiens
ctagaaaaagtgcgt

SEQ ID NO: 1809404 - DNA, 15 bp, Homo sapiens
tagaaaaagtgcgtg

SEQ ID NO: 1809405 - DNA, 15 bp, Homo sapiens
agaaaaagtgcgtga

SEQ ID NO: 1809406 - DNA, 15 bp, Homo sapiens
gaaaaagtgcgtgac

SEQ ID NO: 1809407 - DNA, 15 bp, Homo sapiens
aaaaagtgcgtgact

SEQ ID NO: 1809408 - DNA, 15 bp, Homo sapiens
aaaagtgcgtgactt

SEQ ID NO: 1809409 - DNA, 15 bp, Homo sapiens
aaagtgcgtgactta

SEQ ID NO: 1809410 - DNA, 15 bp, Homo sapiens
aagtgcgtgacttag

SEQ ID NO: 1809411 - DNA, 15 bp, Homo sapiens
agtgcgtgacttaga

SEQ ID NO: 1809412 - DNA, 15 bp, Homo sapiens
gtgcgtgacttagat

SEQ ID NO: 1809413 - DNA, 15 bp, Homo sapiens
tgcgtgacttagatg

SEQ ID NO: 1809414 - DNA, 15 bp, Homo sapiens
gcgtgacttagatga

SEQ ID NO: 1809415 - DNA, 15 bp, Homo sapiens
cgtgacttagatgac

SEQ ID NO: 1809416 - DNA, 15 bp, Homo sapiens
gtgacttagatgact

SEQ ID NO: 1809417 - DNA, 15 bp, Homo sapiens
tgacttagatgactt

SEQ ID NO: 1809418 - DNA, 15 bp, Homo sapiens
gacttagatgacttt

SEQ ID NO: 1809419 - DNA, 15 bp, Homo sapiens
acttagatgactttc

SEQ ID NO: 1809420 - DNA, 15 bp, Homo sapiens
cttagatgactttct

SEQ ID NO: 1809421 - DNA, 15 bp, Homo sapiens
ttagatgactttcta

SEQ ID NO: 1809422 - DNA, 15 bp, Homo sapiens
tagatgactttctat

SEQ ID NO: 1809423 - DNA, 15 bp, Homo sapiens
agatgactttctatg

SEQ ID NO: 1809424 - DNA, 15 bp, Homo sapiens
gatgactttctatgg

SEQ ID NO: 1809425 - DNA, 15 bp, Homo sapiens
atgactttctatgga

SEQ ID NO: 1809426 - DNA, 15 bp, Homo sapiens
tgactttctatggaa

SEQ ID NO: 1809427 - DNA, 15 bp, Homo sapiens
gactttctatggaaa

SEQ ID NO: 1809428 - DNA, 15 bp, Homo sapiens
actttctatggaaag

SEQ ID NO: 1809429 - DNA, 15 bp, Homo sapiens
ctttctatggaaagc

SEQ ID NO: 1809430 - DNA, 15 bp, Homo sapiens
tttctatggaaagca

SEQ ID NO: 1809431 - DNA, 15 bp, Homo sapiens
ttctatggaaagcag

SEQ ID NO: 1809432 - DNA, 15 bp, Homo sapiens
tctatggaaagcaga

SEQ ID NO: 1809433 - DNA, 15 bp, Homo sapiens
ctatggaaagcagag

SEQ ID NO: 1809434 - DNA, 15 bp, Homo sapiens
tatggaaagcagaga

SEQ ID NO: 1809435 - DNA, 15 bp, Homo sapiens
atggaaagcagagac

SEQ ID NO: 1809436 - DNA, 15 bp, Homo sapiens
tggaaagcagagacg

SEQ ID NO: 1809437 - DNA, 15 bp, Homo sapiens
ggaaagcagagacga

SEQ ID NO: 1809438 - DNA, 15 bp, Homo sapiens
gaaagcagagacgaa

SEQ ID NO: 1809439 - DNA, 15 bp, Homo sapiens
aaagcagagacgaag

SEQ ID NO: 1809440 - DNA, 15 bp, Homo sapiens
aagcagagacgaagg

SEQ ID NO: 1809441 - DNA, 15 bp, Homo sapiens
agcagagacgaagga

SEQ ID NO: 1809442 - DNA, 15 bp, Homo sapiens
gcagagacgaaggat

SEQ ID NO: 1809443 - DNA, 15 bp, Homo sapiens
cagagacgaaggatc

SEQ ID NO: 1809444 - DNA, 15 bp, Homo sapiens
agagacgaaggatct

SEQ ID NO: 1809445 - DNA, 15 bp, Homo sapiens
gagacgaaggatctt

SEQ ID NO: 1809446 - DNA, 15 bp, Homo sapiens
agacgaaggatcttg

SEQ ID NO: 1809447 - DNA, 15 bp, Homo sapiens
gacgaaggatcttga

SEQ ID NO: 1809448 - DNA, 15 bp, Homo sapiens
acgaaggatcttgac

SEQ ID NO: 1809449 - DNA, 15 bp, Homo sapiens
cgaaggatcttgacg

SEQ ID NO: 1809450 - DNA, 15 bp, Homo sapiens
gaaggatcttgacga

SEQ ID NO: 1809451 - DNA, 15 bp, Homo sapiens
aaggatcttgacgag

SEQ ID NO: 1809452 - DNA, 15 bp, Homo sapiens
aggatcttgacgagg

SEQ ID NO: 1809453 - DNA, 15 bp, Homo sapiens
ggatcttgacgagga

SEQ ID NO: 1809454 - DNA, 15 bp, Homo sapiens
gatcttgacgaggac

SEQ ID NO: 1809455 - DNA, 15 bp, Homo sapiens
atcttgacgaggaca

SEQ ID NO: 1809456 - DNA, 15 bp, Homo sapiens
tcttgacgaggacac

SEQ ID NO: 1809457 - DNA, 15 bp, Homo sapiens
cttgacgaggacacc

SEQ ID NO: 1809458 - DNA, 15 bp, Homo sapiens
ttgacgaggacacct

SEQ ID NO: 1809459 - DNA, 15 bp, Homo sapiens
tgacgaggacacctg

SEQ ID NO: 1809460 - DNA, 15 bp, Homo sapiens
gacgaggacacctgt

SEQ ID NO: 1809461 - DNA, 15 bp, Homo sapiens
acgaggacacctgtg

SEQ ID NO: 1809462 - DNA, 15 bp, Homo sapiens
cgaggacacctgtgt

SEQ ID NO: 1809463 - DNA, 15 bp, Homo sapiens
gaggacacctgtgtg

SEQ ID NO: 1809464 - DNA, 15 bp, Homo sapiens
aggacacctgtgtgg

SEQ ID NO: 1809465 - DNA, 15 bp, Homo sapiens
ggacacctgtgtgga

SEQ ID NO: 1809466 - DNA, 15 bp, Homo sapiens
gacacctgtgtggaa

SEQ ID NO: 1809467 - DNA, 15 bp, Homo sapiens
acacctgtgtggaaa

SEQ ID NO: 1809468 - DNA, 15 bp, Homo sapiens
cacctgtgtggaaag

SEQ ID NO: 1809469 - DNA, 15 bp, Homo sapiens
acctgtgtggaaagg

SEQ ID NO: 1809470 - DNA, 15 bp, Homo sapiens
cctgtgtggaaaggt

SEQ ID NO: 1809471 - DNA, 15 bp, Homo sapiens
ctgtgtggaaaggta

SEQ ID NO: 1809472 - DNA, 15 bp, Homo sapiens
tgtgtggaaaggtaa

SEQ ID NO: 1809473 - DNA, 15 bp, Homo sapiens
gtgtggaaaggtaag

SEQ ID NO: 1809474 - DNA, 15 bp, Homo sapiens
tgtggaaaggtaagg

SEQ ID NO: 1809475 - DNA, 15 bp, Homo sapiens
gtggaaaggtaaggt

SEQ ID NO: 1809476 - DNA, 15 bp, Homo sapiens
tggaaaggtaaggtg

SEQ ID NO: 1809477 - DNA, 15 bp, Homo sapiens
ggaaaggtaaggtgg

SEQ ID NO: 1809478 - DNA, 15 bp, Homo sapiens
gaaaggtaaggtggc

SEQ ID NO: 1809479 - DNA, 15 bp, Homo sapiens
aaaggtaaggtggca

SEQ ID NO: 1809480 - DNA, 15 bp, Homo sapiens
aaggtaaggtggcag

SEQ ID NO: 1809481 - DNA, 15 bp, Homo sapiens
aggtaaggtggcagg

SEQ ID NO: 1809482 - DNA, 15 bp, Homo sapiens
ggtaaggtggcaggc

SEQ ID NO: 1809483 - DNA, 15 bp, Homo sapiens
gtaaggtggcaggcg

SEQ ID NO: 1809484 - DNA, 15 bp, Homo sapiens
taaggtggcaggcga

SEQ ID NO: 1809485 - DNA, 15 bp, Homo sapiens
aaggtggcaggcgac

SEQ ID NO: 1809486 - DNA, 15 bp, Homo sapiens
aggtggcaggcgact

SEQ ID NO: 1809487 - DNA, 15 bp, Homo sapiens
ggtggcaggcgactc

SEQ ID NO: 1809488 - DNA, 15 bp, Homo sapiens
gtggcaggcgactct

SEQ ID NO: 1809489 - DNA, 15 bp, Homo sapiens
tggcaggcgactctg

SEQ ID NO: 1809490 - DNA, 15 bp, Homo sapiens
ggcaggcgactctga

SEQ ID NO: 1809491 - DNA, 15 bp, Homo sapiens
gcaggcgactctgag

SEQ ID NO: 1809492 - DNA, 15 bp, Homo sapiens
caggcgactctgaga

SEQ ID NO: 1809493 - DNA, 15 bp, Homo sapiens
aggcgactctgagag

SEQ ID NO: 1809494 - DNA, 15 bp, Homo sapiens
ggcgactctgagagg

SEQ ID NO: 1809495 - DNA, 15 bp, Homo sapiens
gcgactctgagagga

SEQ ID NO: 1809496 - DNA, 15 bp, Homo sapiens
cgactctgagaggag

SEQ ID NO: 1809497 - DNA, 15 bp, Homo sapiens
gactctgagaggaga

SEQ ID NO: 1809498 - DNA, 15 bp, Homo sapiens
actctgagaggagag

SEQ ID NO: 1809499 - DNA, 15 bp, Homo sapiens
ctctgagaggagagc

SEQ ID NO: 1809500 - DNA, 15 bp, Homo sapiens
tctgagaggagagct

SEQ ID NO: 1809501 - DNA, 15 bp, Homo sapiens
ctgagaggagagctc

SEQ ID NO: 1809502 - DNA, 15 bp, Homo sapiens
tgagaggagagctcc

SEQ ID NO: 1809503 - DNA, 15 bp, Homo sapiens
gagaggagagctccc

SEQ ID NO: 1809504 - DNA, 15 bp, Homo sapiens
agaggagagctccct

SEQ ID NO: 1809505 - DNA, 15 bp, Homo sapiens
gaggagagctccctg

SEQ ID NO: 1809506 - DNA, 15 bp, Homo sapiens
aggagagctccctgc

SEQ ID NO: 1809507 - DNA, 15 bp, Homo sapiens
ggagagctccctgca

SEQ ID NO: 1809508 - DNA, 15 bp, Homo sapiens
gagagctccctgcag

SEQ ID NO: 1809509 - DNA, 15 bp, Homo sapiens
agagctccctgcaga

SEQ ID NO: 1809510 - DNA, 15 bp, Homo sapiens
gagctccctgcagaa

SEQ ID NO: 1809511 - DNA, 15 bp, Homo sapiens
agctccctgcagaag

SEQ ID NO: 1809512 - DNA, 15 bp, Homo sapiens
gctccctgcagaagg

SEQ ID NO: 1809513 - DNA, 15 bp, Homo sapiens
ctccctgcagaaggt

SEQ ID NO: 1809514 - DNA, 15 bp, Homo sapiens
tccctgcagaaggtg

SEQ ID NO: 1809515 - DNA, 15 bp, Homo sapiens
ccctgcagaaggtgg

SEQ ID NO: 1809516 - DNA, 15 bp, Homo sapiens
cctgcagaaggtggc

SEQ ID NO: 1809517 - DNA, 15 bp, Homo sapiens
ctgcagaaggtggct

SEQ ID NO: 1809518 - DNA, 15 bp, Homo sapiens
tgcagaaggtggctg

SEQ ID NO: 1809519 - DNA, 15 bp, Homo sapiens
gcagaaggtggctgc

SEQ ID NO: 1809520 - DNA, 15 bp, Homo sapiens
cagaaggtggctgcc

SEQ ID NO: 1809521 - DNA, 15 bp, Homo sapiens
agaaggtggctgccc

SEQ ID NO: 1809522 - DNA, 15 bp, Homo sapiens
gaaggtggctgcccc

SEQ ID NO: 1809523 - DNA, 15 bp, Homo sapiens
aaggtggctgccccc

SEQ ID NO: 1809524 - DNA, 15 bp, Homo sapiens
aggtggctgccccca

SEQ ID NO: 1809525 - DNA, 15 bp, Homo sapiens
ggtggctgcccccat

SEQ ID NO: 1809526 - DNA, 15 bp, Homo sapiens
gtggctgcccccatg

SEQ ID NO: 1809527 - DNA, 15 bp, Homo sapiens
tggctgcccccatga

SEQ ID NO: 1809528 - DNA, 15 bp, Homo sapiens
ggctgcccccatgac

SEQ ID NO: 1809529 - DNA, 15 bp, Homo sapiens
gctgcccccatgacc

SEQ ID NO: 1809530 - DNA, 15 bp, Homo sapiens
ctgcccccatgacct

SEQ ID NO: 1809531 - DNA, 15 bp, Homo sapiens
tgcccccatgacctg

SEQ ID NO: 1809532 - DNA, 15 bp, Homo sapiens
gcccccatgacctgg

SEQ ID NO: 1809533 - DNA, 15 bp, Homo sapiens
cccccatgacctggc

SEQ ID NO: 1809534 - DNA, 15 bp, Homo sapiens
ccccatgacctggcc

SEQ ID NO: 1809535 - DNA, 15 bp, Homo sapiens
cccatgacctggcca

SEQ ID NO: 1809536 - DNA, 15 bp, Homo sapiens
ccatgacctggccac

SEQ ID NO: 1809537 - DNA, 15 bp, Homo sapiens
catgacctggccaca

SEQ ID NO: 1809538 - DNA, 15 bp, Homo sapiens
atgacctggccacat

SEQ ID NO: 1809539 - DNA, 15 bp, Homo sapiens
tgacctggccacatc

SEQ ID NO: 1809540 - DNA, 15 bp, Homo sapiens
gacctggccacatct

SEQ ID NO: 1809541 - DNA, 15 bp, Homo sapiens
acctggccacatctt

SEQ ID NO: 1809542 - DNA, 15 bp, Homo sapiens
cctggccacatcttc

SEQ ID NO: 1809543 - DNA, 15 bp, Homo sapiens
ctggccacatcttct

SEQ ID NO: 1809544 - DNA, 15 bp, Homo sapiens
tggccacatcttctg

SEQ ID NO: 1809545 - DNA, 15 bp, Homo sapiens
ggccacatcttctgc

SEQ ID NO: 1809546 - DNA, 15 bp, Homo sapiens
gccacatcttctgcc

SEQ ID NO: 1809547 - DNA, 15 bp, Homo sapiens
ccacatcttctgcct

SEQ ID NO: 1809548 - DNA, 15 bp, Homo sapiens
cacatcttctgcctc

SEQ ID NO: 1809549 - DNA, 15 bp, Homo sapiens
acatcttctgcctcc

SEQ ID NO: 1809550 - DNA, 15 bp, Homo sapiens
catcttctgcctccc

SEQ ID NO: 1809551 - DNA, 15 bp, Homo sapiens
atcttctgcctccca

SEQ ID NO: 1809552 - DNA, 15 bp, Homo sapiens
tcttctgcctcccag

SEQ ID NO: 1809553 - DNA, 15 bp, Homo sapiens
cttctgcctcccagc

SEQ ID NO: 1809554 - DNA, 15 bp, Homo sapiens
ttctgcctcccagca

SEQ ID NO: 1809555 - DNA, 15 bp, Homo sapiens
tctgcctcccagcag

SEQ ID NO: 1809556 - DNA, 15 bp, Homo sapiens
ctgcctcccagcagc

SEQ ID NO: 1809557 - DNA, 15 bp, Homo sapiens
tgcctcccagcagcg

SEQ ID NO: 1809558 - DNA, 15 bp, Homo sapiens
gcctcccagcagcgt

SEQ ID NO: 1809559 - DNA, 15 bp, Homo sapiens
cctcccagcagcgtg

SEQ ID NO: 1809560 - DNA, 15 bp, Homo sapiens
ctcccagcagcgtga

SEQ ID NO: 1809561 - DNA, 15 bp, Homo sapiens
tcccagcagcgtgac

SEQ ID NO: 1809562 - DNA, 15 bp, Homo sapiens
cccagcagcgtgacc

SEQ ID NO: 1809563 - DNA, 15 bp, Homo sapiens
ccagcagcgtgaccc

SEQ ID NO: 1809564 - DNA, 15 bp, Homo sapiens
cagcagcgtgacccc

SEQ ID NO: 1809565 - DNA, 15 bp, Homo sapiens
agcagcgtgacccca

SEQ ID NO: 1809566 - DNA, 15 bp, Homo sapiens
gcagcgtgaccccac

SEQ ID NO: 1809567 - DNA, 15 bp, Homo sapiens
cagcgtgaccccact

SEQ ID NO: 1809568 - DNA, 15 bp, Homo sapiens
agcgtgaccccacta

SEQ ID NO: 1809569 - DNA, 15 bp, Homo sapiens
gcgtgaccccactag

SEQ ID NO: 1809570 - DNA, 15 bp, Homo sapiens
cgtgaccccactaga

SEQ ID NO: 1809571 - DNA, 15 bp, Homo sapiens
gtgaccccactagac

SEQ ID NO: 1809572 - DNA, 15 bp, Homo sapiens
tgaccccactagaca

SEQ ID NO: 1809573 - DNA, 15 bp, Homo sapiens
gaccccactagacac

SEQ ID NO: 1809574 - DNA, 15 bp, Homo sapiens
accccactagacacc

SEQ ID NO: 1809575 - DNA, 15 bp, Homo sapiens
ccccactagacacca

SEQ ID NO: 1809576 - DNA, 15 bp, Homo sapiens
cccactagacaccaa

SEQ ID NO: 1809577 - DNA, 15 bp, Homo sapiens
ccactagacaccaac

SEQ ID NO: 1809578 - DNA, 15 bp, Homo sapiens
cactagacaccaact

SEQ ID NO: 1809579 - DNA, 15 bp, Homo sapiens
actagacaccaactg

SEQ ID NO: 1809580 - DNA, 15 bp, Homo sapiens
ctagacaccaactgc

SEQ ID NO: 1809581 - DNA, 15 bp, Homo sapiens
tagacaccaactgcc

SEQ ID NO: 1809582 - DNA, 15 bp, Homo sapiens
agacaccaactgcct

SEQ ID NO: 1809583 - DNA, 15 bp, Homo sapiens
gacaccaactgcctc

SEQ ID NO: 1809584 - DNA, 15 bp, Homo sapiens
acaccaactgcctcc

SEQ ID NO: 1809585 - DNA, 15 bp, Homo sapiens
caccaactgcctccc

SEQ ID NO: 1809586 - DNA, 15 bp, Homo sapiens
accaactgcctcccg

SEQ ID NO: 1809587 - DNA, 15 bp, Homo sapiens
ccaactgcctcccga

SEQ ID NO: 1809588 - DNA, 15 bp, Homo sapiens
caactgcctcccgag

SEQ ID NO: 1809589 - DNA, 15 bp, Homo sapiens
aactgcctcccgagt

SEQ ID NO: 1809590 - DNA, 15 bp, Homo sapiens
actgcctcccgagtc

SEQ ID NO: 1809591 - DNA, 15 bp, Homo sapiens
ctgcctcccgagtcc

SEQ ID NO: 1809592 - DNA, 15 bp, Homo sapiens
tgcctcccgagtcct

SEQ ID NO: 1809593 - DNA, 15 bp, Homo sapiens
gcctcccgagtccta

SEQ ID NO: 1809594 - DNA, 15 bp, Homo sapiens
cctcccgagtcctac

SEQ ID NO: 1809595 - DNA, 15 bp, Homo sapiens
ctcccgagtcctacg

SEQ ID NO: 1809596 - DNA, 15 bp, Homo sapiens
tcccgagtcctacga

SEQ ID NO: 1809597 - DNA, 15 bp, Homo sapiens
cccgagtcctacgaa

SEQ ID NO: 1809598 - DNA, 15 bp, Homo sapiens
ccgagtcctacgaag

SEQ ID NO: 1809599 - DNA, 15 bp, Homo sapiens
cgagtcctacgaaga

SEQ ID NO: 1809600 - DNA, 15 bp, Homo sapiens
gagtcctacgaagat

SEQ ID NO: 1809601 - DNA, 15 bp, Homo sapiens
agtcctacgaagatg

SEQ ID NO: 1809602 - DNA, 15 bp, Homo sapiens
gtcctacgaagatgc

SEQ ID NO: 1809603 - DNA, 15 bp, Homo sapiens
tcctacgaagatgcc

SEQ ID NO: 1809604 - DNA, 15 bp, Homo sapiens
cctacgaagatgcct

SEQ ID NO: 1809605 - DNA, 15 bp, Homo sapiens
ctacgaagatgcctg

SEQ ID NO: 1809606 - DNA, 15 bp, Homo sapiens
tacgaagatgcctgg

SEQ ID NO: 1809607 - DNA, 15 bp, Homo sapiens
acgaagatgcctggg

SEQ ID NO: 1809608 - DNA, 15 bp, Homo sapiens
cgaagatgcctgggg

SEQ ID NO: 1809609 - DNA, 15 bp, Homo sapiens
gaagatgcctggggc

SEQ ID NO: 1809610 - DNA, 15 bp, Homo sapiens
aagatgcctggggcg

SEQ ID NO: 1809611 - DNA, 15 bp, Homo sapiens
agatgcctggggcgg

SEQ ID NO: 1809612 - DNA, 15 bp, Homo sapiens
gatgcctggggcggt

SEQ ID NO: 1809613 - DNA, 15 bp, Homo sapiens
atgcctggggcggtg

SEQ ID NO: 1809614 - DNA, 15 bp, Homo sapiens
tgcctggggcggtgc

SEQ ID NO: 1809615 - DNA, 15 bp, Homo sapiens
gcctggggcggtgca

SEQ ID NO: 1809616 - DNA, 15 bp, Homo sapiens
cctggggcggtgcag

SEQ ID NO: 1809617 - DNA, 15 bp, Homo sapiens
ctggggcggtgcagc

SEQ ID NO: 1809618 - DNA, 15 bp, Homo sapiens
tggggcggtgcagca

SEQ ID NO: 1809619 - DNA, 15 bp, Homo sapiens
ggggcggtgcagcag

SEQ ID NO: 1809620 - DNA, 15 bp, Homo sapiens
gggcggtgcagcagt

SEQ ID NO: 1809621 - DNA, 15 bp, Homo sapiens
ggcggtgcagcagtt

SEQ ID NO: 1809622 - DNA, 15 bp, Homo sapiens
gcggtgcagcagttt

SEQ ID NO: 1809623 - DNA, 15 bp, Homo sapiens
cggtgcagcagttta

SEQ ID NO: 1809624 - DNA, 15 bp, Homo sapiens
ggtgcagcagtttac

SEQ ID NO: 1809625 - DNA, 15 bp, Homo sapiens
gtgcagcagtttacg

SEQ ID NO: 1809626 - DNA, 15 bp, Homo sapiens
tgcagcagtttacga

SEQ ID NO: 1809627 - DNA, 15 bp, Homo sapiens
gcagcagtttacgac

SEQ ID NO: 1809628 - DNA, 15 bp, Homo sapiens
cagcagtttacgacg

SEQ ID NO: 1809629 - DNA, 15 bp, Homo sapiens
agcagtttacgacgc

SEQ ID NO: 1809630 - DNA, 15 bp, Homo sapiens
gcagtttacgacgct

SEQ ID NO: 1809631 - DNA, 15 bp, Homo sapiens
cagtttacgacgctg

SEQ ID NO: 1809632 - DNA, 15 bp, Homo sapiens
agtttacgacgctga

SEQ ID NO: 1809633 - DNA, 15 bp, Homo sapiens
gtttacgacgctgat

SEQ ID NO: 1809634 - DNA, 15 bp, Homo sapiens
tttacgacgctgatc

SEQ ID NO: 1809635 - DNA, 15 bp, Homo sapiens
ttacgacgctgatcc

SEQ ID NO: 1809636 - DNA, 15 bp, Homo sapiens
tacgacgctgatccg

SEQ ID NO: 1809637 - DNA, 15 bp, Homo sapiens
acgacgctgatccgg

SEQ ID NO: 1809638 - DNA, 15 bp, Homo sapiens
cgacgctgatccggt

SEQ ID NO: 1809639 - DNA, 15 bp, Homo sapiens
gacgctgatccggta

SEQ ID NO: 1809640 - DNA, 15 bp, Homo sapiens
acgctgatccggtaa

SEQ ID NO: 1809641 - DNA, 15 bp, Homo sapiens
cgctgatccggtaat

SEQ ID NO: 1809642 - DNA, 15 bp, Homo sapiens
gctgatccggtaatt

SEQ ID NO: 1809643 - DNA, 15 bp, Homo sapiens
ctgatccggtaatta

SEQ ID NO: 1809644 - DNA, 15 bp, Homo sapiens
tgatccggtaattat

SEQ ID NO: 1809645 - DNA, 15 bp, Homo sapiens
gatccggtaattatc

SEQ ID NO: 1809646 - DNA, 15 bp, Homo sapiens
atccggtaattatct

SEQ ID NO: 1809647 - DNA, 15 bp, Homo sapiens
tccggtaattatctg

SEQ ID NO: 1809648 - DNA, 15 bp, Homo sapiens
ccggtaattatctgt

SEQ ID NO: 1809649 - DNA, 15 bp, Homo sapiens
cggtaattatctgtc

SEQ ID NO: 1809650 - DNA, 15 bp, Homo sapiens
ggtaattatctgtca

SEQ ID NO: 1809651 - DNA, 15 bp, Homo sapiens
gtaattatctgtcat

SEQ ID NO: 1809652 - DNA, 15 bp, Homo sapiens
taattatctgtcatt

SEQ ID NO: 1809653 - DNA, 15 bp, Homo sapiens
aattatctgtcattt

SEQ ID NO: 1809654 - DNA, 15 bp, Homo sapiens
attatctgtcatttt

SEQ ID NO: 1809655 - DNA, 15 bp, Homo sapiens
ttatctgtcatttta

SEQ ID NO: 1809656 - DNA, 15 bp, Homo sapiens
tatctgtcattttat

SEQ ID NO: 1809657 - DNA, 15 bp, Homo sapiens
atctgtcattttatt

SEQ ID NO: 1809658 - DNA, 15 bp, Homo sapiens
tctgtcattttatta

SEQ ID NO: 1809659 - DNA, 15 bp, Homo sapiens
ctgtcattttattac

SEQ ID NO: 1809660 - DNA, 15 bp, Homo sapiens
tgtcattttattact

SEQ ID NO: 1809661 - DNA, 15 bp, Homo sapiens
gtcattttattactg

SEQ ID NO: 1809662 - DNA, 15 bp, Homo sapiens
tcattttattactga

SEQ ID NO: 1809663 - DNA, 15 bp, Homo sapiens
cattttattactgaa

SEQ ID NO: 1809664 - DNA, 15 bp, Homo sapiens
attttattactgaac

SEQ ID NO: 1809665 - DNA, 15 bp, Homo sapiens
ttttattactgaacc

SEQ ID NO: 1809666 - DNA, 15 bp, Homo sapiens
tttattactgaaccc

SEQ ID NO: 1809667 - DNA, 15 bp, Homo sapiens
ttattactgaacccg

SEQ ID NO: 1809668 - DNA, 15 bp, Homo sapiens
tattactgaacccgc

SEQ ID NO: 1809669 - DNA, 15 bp, Homo sapiens
attactgaacccgcc

SEQ ID NO: 1809670 - DNA, 15 bp, Homo sapiens
ttactgaacccgccc

SEQ ID NO: 1809671 - DNA, 15 bp, Homo sapiens
tactgaacccgcccc

SEQ ID NO: 1809672 - DNA, 15 bp, Homo sapiens
actgaacccgccccc

SEQ ID NO: 1809673 - DNA, 15 bp, Homo sapiens
ctgaacccgcccccc

SEQ ID NO: 1809674 - DNA, 15 bp, Homo sapiens
tgaacccgcccccct

SEQ ID NO: 1809675 - DNA, 15 bp, Homo sapiens
gaacccgcccccctg

SEQ ID NO: 1809676 - DNA, 15 bp, Homo sapiens
aacccgcccccctgc

SEQ ID NO: 1809677 - DNA, 15 bp, Homo sapiens
acccgcccccctgcc

SEQ ID NO: 1809678 - DNA, 15 bp, Homo sapiens
cccgcccccctgccc

SEQ ID NO: 1809679 - DNA, 15 bp, Homo sapiens
ccgcccccctgccca

SEQ ID NO: 1809680 - DNA, 15 bp, Homo sapiens
cgcccccctgcccaa

SEQ ID NO: 1809681 - DNA, 15 bp, Homo sapiens
gcccccctgcccaag

SEQ ID NO: 1809682 - DNA, 15 bp, Homo sapiens
cccccctgcccaagt

SEQ ID NO: 1809683 - DNA, 15 bp, Homo sapiens
ccccctgcccaagtc

SEQ ID NO: 1809684 - DNA, 15 bp, Homo sapiens
cccctgcccaagtct

SEQ ID NO: 1809685 - DNA, 15 bp, Homo sapiens
ccctgcccaagtctt

SEQ ID NO: 1809686 - DNA, 15 bp, Homo sapiens
cctgcccaagtcttt

SEQ ID NO: 1809687 - DNA, 15 bp, Homo sapiens
ctgcccaagtctttg

SEQ ID NO: 1809688 - DNA, 15 bp, Homo sapiens
tgcccaagtctttgt

SEQ ID NO: 1809689 - DNA, 15 bp, Homo sapiens
gcccaagtctttgta

SEQ ID NO: 1809690 - DNA, 15 bp, Homo sapiens
cccaagtctttgtat

SEQ ID NO: 1809691 - DNA, 15 bp, Homo sapiens
ccaagtctttgtata

SEQ ID NO: 1809692 - DNA, 15 bp, Homo sapiens
caagtctttgtatat

SEQ ID NO: 1809693 - DNA, 15 bp, Homo sapiens
aagtctttgtatatc

SEQ ID NO: 1809694 - DNA, 15 bp, Homo sapiens
agtctttgtatatca

SEQ ID NO: 1809695 - DNA, 15 bp, Homo sapiens
gtctttgtatatcac

SEQ ID NO: 1809696 - DNA, 15 bp, Homo sapiens
tctttgtatatcaca

SEQ ID NO: 1809697 - DNA, 15 bp, Homo sapiens
ctttgtatatcacat

SEQ ID NO: 1809698 - DNA, 15 bp, Homo sapiens
tttgtatatcacatt

SEQ ID NO: 1809699 - DNA, 15 bp, Homo sapiens
ttgtatatcacatta

SEQ ID NO: 1809700 - DNA, 15 bp, Homo sapiens
tgtatatcacattaa

SEQ ID NO: 1809701 - DNA, 15 bp, Homo sapiens
gtatatcacattaag

SEQ ID NO: 1809702 - DNA, 15 bp, Homo sapiens
tatatcacattaagc

SEQ ID NO: 1809703 - DNA, 15 bp, Homo sapiens
atatcacattaagcc

SEQ ID NO: 1809704 - DNA, 15 bp, Homo sapiens
tatcacattaagccc

SEQ ID NO: 1809705 - DNA, 15 bp, Homo sapiens
atcacattaagccct

SEQ ID NO: 1809706 - DNA, 15 bp, Homo sapiens
tcacattaagccctt

SEQ ID NO: 1809707 - DNA, 15 bp, Homo sapiens
cacattaagcccttt

SEQ ID NO: 1809708 - DNA, 15 bp, Homo sapiens
acattaagccctttc

SEQ ID NO: 1809709 - DNA, 15 bp, Homo sapiens
cattaagccctttct

SEQ ID NO: 1809710 - DNA, 15 bp, Homo sapiens
attaagccctttcta

SEQ ID NO: 1809711 - DNA, 15 bp, Homo sapiens
ttaagccctttctat

SEQ ID NO: 1809712 - DNA, 15 bp, Homo sapiens
taagccctttctatt

SEQ ID NO: 1809713 - DNA, 15 bp, Homo sapiens
aagccctttctatta

SEQ ID NO: 1809714 - DNA, 15 bp, Homo sapiens
agccctttctattaa

SEQ ID NO: 1809715 - DNA, 15 bp, Homo sapiens
gccctttctattaaa

SEQ ID NO: 1809716 - DNA, 15 bp, Homo sapiens
ccctttctattaaag

SEQ ID NO: 1809717 - DNA, 15 bp, Homo sapiens
cctttctattaaagt

SEQ ID NO: 1809718 - DNA, 15 bp, Homo sapiens
ctttctattaaagtg

SEQ ID NO: 1809719 - DNA, 15 bp, Homo sapiens
tttctattaaagtga

SEQ ID NO: 1809720 - DNA, 15 bp, Homo sapiens
ttctattaaagtgaa

SEQ ID NO: 1809721 - DNA, 15 bp, Homo sapiens
tctattaaagtgaat

SEQ ID NO: 1809722 - DNA, 15 bp, Homo sapiens
ctattaaagtgaatt

SEQ ID NO: 1809723 - DNA, 15 bp, Homo sapiens
tattaaagtgaattt

SEQ ID NO: 1809724 - DNA, 15 bp, Homo sapiens
attaaagtgaattta

SEQ ID NO: 1809725 - DNA, 15 bp, Homo sapiens
ttaaagtgaatttaa

SEQ ID NO: 1809726 - DNA, 15 bp, Homo sapiens
taaagtgaatttaaa

SEQ ID NO: 1809727 - DNA, 15 bp, Homo sapiens
aaagtgaatttaaag

SEQ ID NO: 1809728 - DNA, 15 bp, Homo sapiens
aagtgaatttaaagg

SEQ ID NO: 1809729 - DNA, 15 bp, Homo sapiens
agtgaatttaaagga

SEQ ID NO: 1809730 - DNA, 15 bp, Homo sapiens
gtgaatttaaaggag

SEQ ID NO: 1809731 - DNA, 15 bp, Homo sapiens
tgaatttaaaggaga

SEQ ID NO: 1809732 - DNA, 15 bp, Homo sapiens
gaatttaaaggagaa

SEQ ID NO: 1809733 - DNA, 15 bp, Homo sapiens
aatttaaaggagaaa

SEQ ID NO: 1809734 - DNA, 15 bp, Homo sapiens
atttaaaggagaaag

SEQ ID NO: 1809735 - DNA, 15 bp, Homo sapiens
tttaaaggagaaagt

SEQ ID NO: 1809736 - DNA, 15 bp, Homo sapiens
ttaaaggagaaagtg

SEQ ID NO: 1809737 - DNA, 15 bp, Homo sapiens
taaaggagaaagtga

SEQ ID NO: 1809738 - DNA, 15 bp, Homo sapiens
aaaggagaaagtgag

SEQ ID NO: 1809739 - DNA, 15 bp, Homo sapiens
aaggagaaagtgaga

SEQ ID NO: 1809740 - DNA, 15 bp, Homo sapiens
aggagaaagtgagag

SEQ ID NO: 1809741 - DNA, 15 bp, Homo sapiens
ggagaaagtgagagg

SEQ ID NO: 1809742 - DNA, 15 bp, Homo sapiens
gagaaagtgagaggt

SEQ ID NO: 1809743 - DNA, 15 bp, Homo sapiens
agaaagtgagaggta

SEQ ID NO: 1809744 - DNA, 15 bp, Homo sapiens
gaaagtgagaggtag

SEQ ID NO: 1809745 - DNA, 15 bp, Homo sapiens
aaagtgagaggtaga

SEQ ID NO: 1809746 - DNA, 15 bp, Homo sapiens
aagtgagaggtagag

SEQ ID NO: 1809747 - DNA, 15 bp, Homo sapiens
agtgagaggtagagt

SEQ ID NO: 1809748 - DNA, 15 bp, Homo sapiens
gtgagaggtagagtc

SEQ ID NO: 1809749 - DNA, 15 bp, Homo sapiens
tgagaggtagagtca

SEQ ID NO: 1809750 - DNA, 15 bp, Homo sapiens
gagaggtagagtcat

SEQ ID NO: 1809751 - DNA, 15 bp, Homo sapiens
agaggtagagtcatt

SEQ ID NO: 1809752 - DNA, 15 bp, Homo sapiens
gaggtagagtcattt

SEQ ID NO: 1809753 - DNA, 15 bp, Homo sapiens
aggtagagtcatttg

SEQ ID NO: 1809754 - DNA, 15 bp, Homo sapiens
ggtagagtcatttga

SEQ ID NO: 1809755 - DNA, 15 bp, Homo sapiens
gtagagtcatttgaa

SEQ ID NO: 1809756 - DNA, 15 bp, Homo sapiens
tagagtcatttgaaa

SEQ ID NO: 1809757 - DNA, 15 bp, Homo sapiens
agagtcatttgaaaa

SEQ ID NO: 1809758 - DNA, 15 bp, Homo sapiens
gagtcatttgaaaaa

SEQ ID NO: 1809759 - DNA, 15 bp, Homo sapiens
agtcatttgaaaaaa

SEQ ID NO: 1809760 - DNA, 15 bp, Homo sapiens
gtcatttgaaaaaaa

SEQ ID NO: 1809761 - DNA, 15 bp, Homo sapiens
tcatttgaaaaaaac

SEQ ID NO: 1809762 - DNA, 15 bp, Homo sapiens
catttgaaaaaaaca

SEQ ID NO: 1809763 - DNA, 15 bp, Homo sapiens
atttgaaaaaaacag

SEQ ID NO: 1809764 - DNA, 15 bp, Homo sapiens
tttgaaaaaaacagc

SEQ ID NO: 1809765 - DNA, 15 bp, Homo sapiens
ttgaaaaaaacagca

SEQ ID NO: 1809766 - DNA, 15 bp, Homo sapiens
tgaaaaaaacagcat

SEQ ID NO: 1809767 - DNA, 15 bp, Homo sapiens
gaaaaaaacagcatc

SEQ ID NO: 1809768 - DNA, 15 bp, Homo sapiens
aaaaaaacagcatcc

SEQ ID NO: 1809769 - DNA, 15 bp, Homo sapiens
aaaaaacagcatcca

SEQ ID NO: 1809770 - DNA, 15 bp, Homo sapiens
aaaaacagcatccag

SEQ ID NO: 1809771 - DNA, 15 bp, Homo sapiens
aaaacagcatccagc

SEQ ID NO: 1809772 - DNA, 15 bp, Homo sapiens
aaacagcatccagca

SEQ ID NO: 1809773 - DNA, 15 bp, Homo sapiens
aacagcatccagcag

SEQ ID NO: 1809774 - DNA, 15 bp, Homo sapiens
acagcatccagcagg

SEQ ID NO: 1809775 - DNA, 15 bp, Homo sapiens
cagcatccagcaggg

SEQ ID NO: 1809776 - DNA, 15 bp, Homo sapiens
agcatccagcagggc

SEQ ID NO: 1809777 - DNA, 15 bp, Homo sapiens
gcatccagcagggcg

SEQ ID NO: 1809778 - DNA, 15 bp, Homo sapiens
catccagcagggcgt

SEQ ID NO: 1809779 - DNA, 15 bp, Homo sapiens
atccagcagggcgtt

SEQ ID NO: 1809780 - DNA, 15 bp, Homo sapiens
tccagcagggcgttg

SEQ ID NO: 1809781 - DNA, 15 bp, Homo sapiens
ccagcagggcgttgg

SEQ ID NO: 1809782 - DNA, 15 bp, Homo sapiens
cagcagggcgttggt

SEQ ID NO: 1809783 - DNA, 15 bp, Homo sapiens
agcagggcgttggtg

SEQ ID NO: 1809784 - DNA, 15 bp, Homo sapiens
gcagggcgttggtgg

SEQ ID NO: 1809785 - DNA, 15 bp, Homo sapiens
cagggcgttggtggc

SEQ ID NO: 1809786 - DNA, 15 bp, Homo sapiens
agggcgttggtggct

SEQ ID NO: 1809787 - DNA, 15 bp, Homo sapiens
gggcgttggtggctt

SEQ ID NO: 1809788 - DNA, 15 bp, Homo sapiens
ggcgttggtggctta

SEQ ID NO: 1809789 - DNA, 15 bp, Homo sapiens
gcgttggtggcttat

SEQ ID NO: 1809790 - DNA, 15 bp, Homo sapiens
cgttggtggcttatg

SEQ ID NO: 1809791 - DNA, 15 bp, Homo sapiens
gttggtggcttatgc

SEQ ID NO: 1809792 - DNA, 15 bp, Homo sapiens
ttggtggcttatgcc

SEQ ID NO: 1809793 - DNA, 15 bp, Homo sapiens
tcccagcactctggg

SEQ ID NO: 1809794 - DNA, 15 bp, Homo sapiens
cccagcactctggga

SEQ ID NO: 1809795 - DNA, 15 bp, Homo sapiens
ccagcactctgggag

SEQ ID NO: 1809796 - DNA, 15 bp, Homo sapiens
cagcactctgggagg

SEQ ID NO: 1809797 - DNA, 15 bp, Homo sapiens
agcactctgggaggc

SEQ ID NO: 1809798 - DNA, 15 bp, Homo sapiens
gcactctgggaggct

SEQ ID NO: 1809799 - DNA, 15 bp, Homo sapiens
cactctgggaggctg

SEQ ID NO: 1809800 - DNA, 15 bp, Homo sapiens
actctgggaggctgt

SEQ ID NO: 1809801 - DNA, 15 bp, Homo sapiens
tctgggaggctgtgg

SEQ ID NO: 1809802 - DNA, 15 bp, Homo sapiens
ctgggaggctgtggt

SEQ ID NO: 1809803 - DNA, 15 bp, Homo sapiens
tgggaggctgtggtg

SEQ ID NO: 1809804 - DNA, 15 bp, Homo sapiens
gggaggctgtggtgc

SEQ ID NO: 1809805 - DNA, 15 bp, Homo sapiens
ggaggctgtggtgcg

SEQ ID NO: 1809806 - DNA, 15 bp, Homo sapiens
gaggctgtggtgcgt

SEQ ID NO: 1809807 - DNA, 15 bp, Homo sapiens
aggctgtggtgcgtg

SEQ ID NO: 1809808 - DNA, 15 bp, Homo sapiens
ggctgtggtgcgtgg

SEQ ID NO: 1809809 - DNA, 15 bp, Homo sapiens
gctgtggtgcgtgga

SEQ ID NO: 1809810 - DNA, 15 bp, Homo sapiens
ctgtggtgcgtggat

SEQ ID NO: 1809811 - DNA, 15 bp, Homo sapiens
tgtggtgcgtggatc

SEQ ID NO: 1809812 - DNA, 15 bp, Homo sapiens
gtggtgcgtggatca

SEQ ID NO: 1809813 - DNA, 15 bp, Homo sapiens
tggtgcgtggatcac

SEQ ID NO: 1809814 - DNA, 15 bp, Homo sapiens
ggtgcgtggatcact

SEQ ID NO: 1809815 - DNA, 15 bp, Homo sapiens
gtgcgtggatcactt

SEQ ID NO: 1809816 - DNA, 15 bp, Homo sapiens
tgcgtggatcactta

SEQ ID NO: 1809817 - DNA, 15 bp, Homo sapiens
gcgtggatcacttaa

SEQ ID NO: 1809818 - DNA, 15 bp, Homo sapiens
cgtggatcacttaag

SEQ ID NO: 1809819 - DNA, 15 bp, Homo sapiens
gtggatcacttaagt

SEQ ID NO: 1809820 - DNA, 15 bp, Homo sapiens
tggatcacttaagtt

SEQ ID NO: 1809821 - DNA, 15 bp, Homo sapiens
ggatcacttaagttc

SEQ ID NO: 1809822 - DNA, 15 bp, Homo sapiens
gatcacttaagttca

SEQ ID NO: 1809823 - DNA, 15 bp, Homo sapiens
atcacttaagttcag

SEQ ID NO: 1809824 - DNA, 15 bp, Homo sapiens
tcacttaagttcagg

SEQ ID NO: 1809825 - DNA, 15 bp, Homo sapiens
cacttaagttcagga

SEQ ID NO: 1809826 - DNA, 15 bp, Homo sapiens
acttaagttcaggag

SEQ ID NO: 1809827 - DNA, 15 bp, Homo sapiens
cttaagttcaggagt

SEQ ID NO: 1809828 - DNA, 15 bp, Homo sapiens
ttaagttcaggagtt

SEQ ID NO: 1809829 - DNA, 15 bp, Homo sapiens
taagttcaggagttc

SEQ ID NO: 1809830 - DNA, 15 bp, Homo sapiens
aagttcaggagttcg

SEQ ID NO: 1809831 - DNA, 15 bp, Homo sapiens
agttcaggagttcga

SEQ ID NO: 1809832 - DNA, 15 bp, Homo sapiens
gttcaggagttcgag

SEQ ID NO: 1809833 - DNA, 15 bp, Homo sapiens
ttcaggagttcgaga

SEQ ID NO: 1809834 - DNA, 15 bp, Homo sapiens
cctgggcaacaaggt

SEQ ID NO: 1809835 - DNA, 15 bp, Homo sapiens
ctgggcaacaaggtg

SEQ ID NO: 1809836 - DNA, 15 bp, Homo sapiens
tgggcaacaaggtga

SEQ ID NO: 1809837 - DNA, 15 bp, Homo sapiens
gggcaacaaggtgaa

SEQ ID NO: 1809838 - DNA, 15 bp, Homo sapiens
ggcaacaaggtgaaa

SEQ ID NO: 1809839 - DNA, 15 bp, Homo sapiens
gcaacaaggtgaaag

SEQ ID NO: 1809840 - DNA, 15 bp, Homo sapiens
caacaaggtgaaagc

SEQ ID NO: 1809841 - DNA, 15 bp, Homo sapiens
aacaaggtgaaagcc

SEQ ID NO: 1809842 - DNA, 15 bp, Homo sapiens
acaaggtgaaagccc

SEQ ID NO: 1809843 - DNA, 15 bp, Homo sapiens
caaggtgaaagccca

SEQ ID NO: 1809844 - DNA, 15 bp, Homo sapiens
aaggtgaaagcccat

SEQ ID NO: 1809845 - DNA, 15 bp, Homo sapiens
aggtgaaagcccatc

SEQ ID NO: 1809846 - DNA, 15 bp, Homo sapiens
ggtgaaagcccatct

SEQ ID NO: 1809847 - DNA, 15 bp, Homo sapiens
aagcccatctctaca

SEQ ID NO: 1809848 - DNA, 15 bp, Homo sapiens
agcccatctctacaa

SEQ ID NO: 1809849 - DNA, 15 bp, Homo sapiens
gcccatctctacaaa

SEQ ID NO: 1809850 - DNA, 15 bp, Homo sapiens
catctctacaaaaaa

SEQ ID NO: 1809851 - DNA, 15 bp, Homo sapiens
ctctacaaaaaatta

SEQ ID NO: 1809852 - DNA, 15 bp, Homo sapiens
tctacaaaaaattat

SEQ ID NO: 1809853 - DNA, 15 bp, Homo sapiens
ctacaaaaaattata

SEQ ID NO: 1809854 - DNA, 15 bp, Homo sapiens
tacaaaaaattataa

SEQ ID NO: 1809855 - DNA, 15 bp, Homo sapiens
acaaaaaattataaa

SEQ ID NO: 1809856 - DNA, 15 bp, Homo sapiens
caaaaaattataaaa

SEQ ID NO: 1809857 - DNA, 15 bp, Homo sapiens
aaaaattataaaaag

SEQ ID NO: 1809858 - DNA, 15 bp, Homo sapiens
aaaattataaaaagt

SEQ ID NO: 1809859 - DNA, 15 bp, Homo sapiens
aaattataaaaagta

SEQ ID NO: 1809860 - DNA, 15 bp, Homo sapiens
aattataaaaagtag

SEQ ID NO: 1809861 - DNA, 15 bp, Homo sapiens
attataaaaagtagc

SEQ ID NO: 1809862 - DNA, 15 bp, Homo sapiens
ttataaaaagtagcc

SEQ ID NO: 1809863 - DNA, 15 bp, Homo sapiens
tataaaaagtagcca

SEQ ID NO: 1809864 - DNA, 15 bp, Homo sapiens
ataaaaagtagccag

SEQ ID NO: 1809865 - DNA, 15 bp, Homo sapiens
taaaaagtagccagt

SEQ ID NO: 1809866 - DNA, 15 bp, Homo sapiens
aaaaagtagccagtt

SEQ ID NO: 1809867 - DNA, 15 bp, Homo sapiens
aaaagtagccagtta

SEQ ID NO: 1809868 - DNA, 15 bp, Homo sapiens
aaagtagccagttat

SEQ ID NO: 1809869 - DNA, 15 bp, Homo sapiens
aagtagccagttatg

SEQ ID NO: 1809870 - DNA, 15 bp, Homo sapiens
agtagccagttatgg

SEQ ID NO: 1809871 - DNA, 15 bp, Homo sapiens
gtagccagttatggt

SEQ ID NO: 1809872 - DNA, 15 bp, Homo sapiens
tagccagttatggtg

SEQ ID NO: 1809873 - DNA, 15 bp, Homo sapiens
agccagttatggtgg

SEQ ID NO: 1809874 - DNA, 15 bp, Homo sapiens
gccagttatggtggc

SEQ ID NO: 1809875 - DNA, 15 bp, Homo sapiens
ccagttatggtggcg

SEQ ID NO: 1809876 - DNA, 15 bp, Homo sapiens
cagttatggtggcgt

SEQ ID NO: 1809877 - DNA, 15 bp, Homo sapiens
agttatggtggcgtg

SEQ ID NO: 1809878 - DNA, 15 bp, Homo sapiens
gttatggtggcgtgg

SEQ ID NO: 1809879 - DNA, 15 bp, Homo sapiens
ttatggtggcgtggg

SEQ ID NO: 1809880 - DNA, 15 bp, Homo sapiens
tatggtggcgtgggc

SEQ ID NO: 1809881 - DNA, 15 bp, Homo sapiens
atggtggcgtgggcc

SEQ ID NO: 1809882 - DNA, 15 bp, Homo sapiens
tggtggcgtgggcct

SEQ ID NO: 1809883 - DNA, 15 bp, Homo sapiens
ggtggcgtgggccta

SEQ ID NO: 1809884 - DNA, 15 bp, Homo sapiens
gtggcgtgggcctac

SEQ ID NO: 1809885 - DNA, 15 bp, Homo sapiens
tggcgtgggcctacc

SEQ ID NO: 1809886 - DNA, 15 bp, Homo sapiens
ggcgtgggcctacct

SEQ ID NO: 1809887 - DNA, 15 bp, Homo sapiens
gcgtgggcctacctg

SEQ ID NO: 1809888 - DNA, 15 bp, Homo sapiens
cgtgggcctacctgg

SEQ ID NO: 1809889 - DNA, 15 bp, Homo sapiens
gtgggcctacctggt

SEQ ID NO: 1809890 - DNA, 15 bp, Homo sapiens
tgggcctacctggta

SEQ ID NO: 1809891 - DNA, 15 bp, Homo sapiens
gggcctacctggtag

SEQ ID NO: 1809892 - DNA, 15 bp, Homo sapiens
ggcctacctggtagg

SEQ ID NO: 1809893 - DNA, 15 bp, Homo sapiens
gcctacctggtaggc

SEQ ID NO: 1809894 - DNA, 15 bp, Homo sapiens
cctacctggtaggct

SEQ ID NO: 1809895 - DNA, 15 bp, Homo sapiens
ctacctggtaggctg

SEQ ID NO: 1809896 - DNA, 15 bp, Homo sapiens
tacctggtaggctga

SEQ ID NO: 1809897 - DNA, 15 bp, Homo sapiens
acctggtaggctgag

SEQ ID NO: 1809898 - DNA, 15 bp, Homo sapiens
cctggtaggctgagg

SEQ ID NO: 1809899 - DNA, 15 bp, Homo sapiens
ctggtaggctgaggt

SEQ ID NO: 1809900 - DNA, 15 bp, Homo sapiens
tggtaggctgaggtg

SEQ ID NO: 1809901 - DNA, 15 bp, Homo sapiens
ggtaggctgaggtgg

SEQ ID NO: 1809902 - DNA, 15 bp, Homo sapiens
gtaggctgaggtggg

SEQ ID NO: 1809903 - DNA, 15 bp, Homo sapiens
taggctgaggtggga

SEQ ID NO: 1809904 - DNA, 15 bp, Homo sapiens
gaggattgcttgatt

SEQ ID NO: 1809905 - DNA, 15 bp, Homo sapiens
aggattgcttgattc

SEQ ID NO: 1809906 - DNA, 15 bp, Homo sapiens
ggattgcttgattcc

SEQ ID NO: 1809907 - DNA, 15 bp, Homo sapiens
gattgcttgattcct

SEQ ID NO: 1809908 - DNA, 15 bp, Homo sapiens
attgcttgattcctg

SEQ ID NO: 1809909 - DNA, 15 bp, Homo sapiens
ttgcttgattcctgg

SEQ ID NO: 1809910 - DNA, 15 bp, Homo sapiens
tgcttgattcctgga

SEQ ID NO: 1809911 - DNA, 15 bp, Homo sapiens
gcttgattcctggag

SEQ ID NO: 1809912 - DNA, 15 bp, Homo sapiens
cttgattcctggagg

SEQ ID NO: 1809913 - DNA, 15 bp, Homo sapiens
ttgattcctggaggt

SEQ ID NO: 1809914 - DNA, 15 bp, Homo sapiens
tgattcctggaggtg

SEQ ID NO: 1809915 - DNA, 15 bp, Homo sapiens
gattcctggaggtgg

SEQ ID NO: 1809916 - DNA, 15 bp, Homo sapiens
attcctggaggtgga

SEQ ID NO: 1809917 - DNA, 15 bp, Homo sapiens
ttcctggaggtggag

SEQ ID NO: 1809918 - DNA, 15 bp, Homo sapiens
tcctggaggtggagg

SEQ ID NO: 1809919 - DNA, 15 bp, Homo sapiens
cctggaggtggaggc

SEQ ID NO: 1809920 - DNA, 15 bp, Homo sapiens
ctggaggtggaggct

SEQ ID NO: 1809921 - DNA, 15 bp, Homo sapiens
tggaggtggaggctg

SEQ ID NO: 1809922 - DNA, 15 bp, Homo sapiens
gtgagccgtgattgc

SEQ ID NO: 1809923 - DNA, 15 bp, Homo sapiens
tgagccgtgattgca

SEQ ID NO: 1809924 - DNA, 15 bp, Homo sapiens
gagccgtgattgcac

SEQ ID NO: 1809925 - DNA, 15 bp, Homo sapiens
agccgtgattgcacc

SEQ ID NO: 1809926 - DNA, 15 bp, Homo sapiens
gccgtgattgcacct

SEQ ID NO: 1809927 - DNA, 15 bp, Homo sapiens
ccgtgattgcacctt

SEQ ID NO: 1809928 - DNA, 15 bp, Homo sapiens
cgtgattgcaccttc

SEQ ID NO: 1809929 - DNA, 15 bp, Homo sapiens
gtgattgcaccttca

SEQ ID NO: 1809930 - DNA, 15 bp, Homo sapiens
tgattgcaccttcac

SEQ ID NO: 1809931 - DNA, 15 bp, Homo sapiens
gattgcaccttcact

SEQ ID NO: 1809932 - DNA, 15 bp, Homo sapiens
attgcaccttcactc

SEQ ID NO: 1809933 - DNA, 15 bp, Homo sapiens
ttgcaccttcactcc

SEQ ID NO: 1809934 - DNA, 15 bp, Homo sapiens
tgcaccttcactcca

SEQ ID NO: 1809935 - DNA, 15 bp, Homo sapiens
gcaccttcactccag

SEQ ID NO: 1809936 - DNA, 15 bp, Homo sapiens
caccttcactccagc

SEQ ID NO: 1809937 - DNA, 15 bp, Homo sapiens
accttcactccagcc

SEQ ID NO: 1809938 - DNA, 15 bp, Homo sapiens
ccttcactccagcct

SEQ ID NO: 1809939 - DNA, 15 bp, Homo sapiens
cttcactccagccta

SEQ ID NO: 1809940 - DNA, 15 bp, Homo sapiens
ttcactccagcctag

SEQ ID NO: 1809941 - DNA, 15 bp, Homo sapiens
tcactccagcctagg

SEQ ID NO: 1809942 - DNA, 15 bp, Homo sapiens
cactccagcctaggc

SEQ ID NO: 1809943 - DNA, 15 bp, Homo sapiens
actccagcctaggca

SEQ ID NO: 1809944 - DNA, 15 bp, Homo sapiens
ctccagcctaggcag

SEQ ID NO: 1809945 - DNA, 15 bp, Homo sapiens
tccagcctaggcagc

SEQ ID NO: 1809946 - DNA, 15 bp, Homo sapiens
ccagcctaggcagca

SEQ ID NO: 1809947 - DNA, 15 bp, Homo sapiens
cagcctaggcagcag

SEQ ID NO: 1809948 - DNA, 15 bp, Homo sapiens
agcctaggcagcaga

SEQ ID NO: 1809949 - DNA, 15 bp, Homo sapiens
gcctaggcagcagag

SEQ ID NO: 1809950 - DNA, 15 bp, Homo sapiens
cctaggcagcagagc

SEQ ID NO: 1809951 - DNA, 15 bp, Homo sapiens
ctaggcagcagagca

SEQ ID NO: 1809952 - DNA, 15 bp, Homo sapiens
taggcagcagagcaa

SEQ ID NO: 1809953 - DNA, 15 bp, Homo sapiens
aggcagcagagcaag

SEQ ID NO: 1809954 - DNA, 15 bp, Homo sapiens
ggcagcagagcaaga

SEQ ID NO: 1809955 - DNA, 15 bp, Homo sapiens
gcagcagagcaagac

SEQ ID NO: 1809956 - DNA, 15 bp, Homo sapiens
cagcagagcaagacc

SEQ ID NO: 1809957 - DNA, 15 bp, Homo sapiens
agcagagcaagaccc

SEQ ID NO: 1809958 - DNA, 15 bp, Homo sapiens
gcagagcaagacccc

SEQ ID NO: 1809959 - DNA, 15 bp, Homo sapiens
cagagcaagacccca

SEQ ID NO: 1809960 - DNA, 15 bp, Homo sapiens
agagcaagaccccat

SEQ ID NO: 1809961 - DNA, 15 bp, Homo sapiens
gagcaagaccccatc

SEQ ID NO: 1809962 - DNA, 15 bp, Homo sapiens
caagaccccatctca

SEQ ID NO: 1809963 - DNA, 15 bp, Homo sapiens
aagaccccatctcaa

SEQ ID NO: 1809964 - DNA, 15 bp, Homo sapiens
agaccccatctcaaa

SEQ ID NO: 1809965 - DNA, 15 bp, Homo sapiens
gaccccatctcaaaa

SEQ ID NO: 1809966 - DNA, 15 bp, Homo sapiens
accccatctcaaaaa

SEQ ID NO: 1809967 - DNA, 15 bp, Homo sapiens
ccccatctcaaaaaa

SEQ ID NO: 1809968 - DNA, 15 bp, Homo sapiens
ccatctcaaaaaaag

SEQ ID NO: 1809969 - DNA, 15 bp, Homo sapiens
catctcaaaaaaagg

SEQ ID NO: 1809970 - DNA, 15 bp, Homo sapiens
atctcaaaaaaagga

SEQ ID NO: 1809971 - DNA, 15 bp, Homo sapiens
tctcaaaaaaaggaa

SEQ ID NO: 1809972 - DNA, 15 bp, Homo sapiens
ctcaaaaaaaggaaa

SEQ ID NO: 1809973 - DNA, 15 bp, Homo sapiens
tcaaaaaaaggaaac

SEQ ID NO: 1809974 - DNA, 15 bp, Homo sapiens
caaaaaaaggaaaca

SEQ ID NO: 1809975 - DNA, 15 bp, Homo sapiens
aaaaaaaggaaacag

SEQ ID NO: 1809976 - DNA, 15 bp, Homo sapiens
aaaaaaggaaacagc

SEQ ID NO: 1809977 - DNA, 15 bp, Homo sapiens
aaaaaggaaacagca

SEQ ID NO: 1809978 - DNA, 15 bp, Homo sapiens
aaaaggaaacagcat

SEQ ID NO: 1809979 - DNA, 15 bp, Homo sapiens
aaaggaaacagcatt

SEQ ID NO: 1809980 - DNA, 15 bp, Homo sapiens
aaggaaacagcattg

SEQ ID NO: 1809981 - DNA, 15 bp, Homo sapiens
aggaaacagcattgt

SEQ ID NO: 1809982 - DNA, 15 bp, Homo sapiens
ggaaacagcattgtt

SEQ ID NO: 1809983 - DNA, 15 bp, Homo sapiens
gaaacagcattgttg

SEQ ID NO: 1809984 - DNA, 15 bp, Homo sapiens
aaacagcattgttgg

SEQ ID NO: 1809985 - DNA, 15 bp, Homo sapiens
aacagcattgttggg

SEQ ID NO: 1809986 - DNA, 15 bp, Homo sapiens
acagcattgttggga

SEQ ID NO: 1809987 - DNA, 15 bp, Homo sapiens
cagcattgttgggac

SEQ ID NO: 1809988 - DNA, 15 bp, Homo sapiens
agcattgttgggacc

SEQ ID NO: 1809989 - DNA, 15 bp, Homo sapiens
gcattgttgggacca

SEQ ID NO: 1809990 - DNA, 15 bp, Homo sapiens
cattgttgggaccag

SEQ ID NO: 1809991 - DNA, 15 bp, Homo sapiens
attgttgggaccagc

SEQ ID NO: 1809992 - DNA, 15 bp, Homo sapiens
ttgttgggaccagca

SEQ ID NO: 1809993 - DNA, 15 bp, Homo sapiens
tgttgggaccagcac

SEQ ID NO: 1809994 - DNA, 15 bp, Homo sapiens
gttgggaccagcact

SEQ ID NO: 1809995 - DNA, 15 bp, Homo sapiens
ttgggaccagcacta

SEQ ID NO: 1809996 - DNA, 15 bp, Homo sapiens
tgggaccagcactaa

SEQ ID NO: 1809997 - DNA, 15 bp, Homo sapiens
gggaccagcactaac

SEQ ID NO: 1809998 - DNA, 15 bp, Homo sapiens
ggaccagcactaacc

SEQ ID NO: 1809999 - DNA, 15 bp, Homo sapiens
gaccagcactaacct

SEQ ID NO: 1810000 - DNA, 15 bp, Homo sapiens
accagcactaacctt

SEQ ID NO: 1810001 - DNA, 15 bp, Homo sapiens
ccagcactaaccttc

SEQ ID NO: 1810002 - DNA, 15 bp, Homo sapiens
cagcactaaccttca

SEQ ID NO: 1810003 - DNA, 15 bp, Homo sapiens
agcactaaccttcag

SEQ ID NO: 1810004 - DNA, 15 bp, Homo sapiens
gcactaaccttcagt

SEQ ID NO: 1810005 - DNA, 15 bp, Homo sapiens
cactaaccttcagtg

SEQ ID NO: 1810006 - DNA, 15 bp, Homo sapiens
actaaccttcagtgc

SEQ ID NO: 1810007 - DNA, 15 bp, Homo sapiens
ctaaccttcagtgcg

SEQ ID NO: 1810008 - DNA, 15 bp, Homo sapiens
taaccttcagtgcga

SEQ ID NO: 1810009 - DNA, 15 bp, Homo sapiens
aaccttcagtgcgac

SEQ ID NO: 1810010 - DNA, 15 bp, Homo sapiens
accttcagtgcgaca

SEQ ID NO: 1810011 - DNA, 15 bp, Homo sapiens
ccttcagtgcgacac

SEQ ID NO: 1810012 - DNA, 15 bp, Homo sapiens
cttcagtgcgacaca

SEQ ID NO: 1810013 - DNA, 15 bp, Homo sapiens
ttcagtgcgacacag

SEQ ID NO: 1810014 - DNA, 15 bp, Homo sapiens
tcagtgcgacacaga

SEQ ID NO: 1810015 - DNA, 15 bp, Homo sapiens
cagtgcgacacagaa

SEQ ID NO: 1810016 - DNA, 15 bp, Homo sapiens
agtgcgacacagaac

SEQ ID NO: 1810017 - DNA, 15 bp, Homo sapiens
gtgcgacacagaaca

SEQ ID NO: 1810018 - DNA, 15 bp, Homo sapiens
tgcgacacagaacac

SEQ ID NO: 1810019 - DNA, 15 bp, Homo sapiens
gcgacacagaacacc

SEQ ID NO: 1810020 - DNA, 15 bp, Homo sapiens
cgacacagaacaccc

SEQ ID NO: 1810021 - DNA, 15 bp, Homo sapiens
gacacagaacacccc

SEQ ID NO: 1810022 - DNA, 15 bp, Homo sapiens
acacagaacacccct

SEQ ID NO: 1810023 - DNA, 15 bp, Homo sapiens
cacagaacaccccta

SEQ ID NO: 1810024 - DNA, 15 bp, Homo sapiens
acagaacacccctat

SEQ ID NO: 1810025 - DNA, 15 bp, Homo sapiens
cagaacacccctatt

SEQ ID NO: 1810026 - DNA, 15 bp, Homo sapiens
agaacacccctattg

SEQ ID NO: 1810027 - DNA, 15 bp, Homo sapiens
gaacacccctattgc

SEQ ID NO: 1810028 - DNA, 15 bp, Homo sapiens
aacacccctattgct

SEQ ID NO: 1810029 - DNA, 15 bp, Homo sapiens
acacccctattgctt

SEQ ID NO: 1810030 - DNA, 15 bp, Homo sapiens
cacccctattgcttt

SEQ ID NO: 1810031 - DNA, 15 bp, Homo sapiens
acccctattgctttt

SEQ ID NO: 1810032 - DNA, 15 bp, Homo sapiens
cccctattgctttta

SEQ ID NO: 1810033 - DNA, 15 bp, Homo sapiens
ccctattgcttttat

SEQ ID NO: 1810034 - DNA, 15 bp, Homo sapiens
cctattgcttttatt

SEQ ID NO: 1810035 - DNA, 15 bp, Homo sapiens
ctattgcttttattc

SEQ ID NO: 1810036 - DNA, 15 bp, Homo sapiens
tattgcttttattct

SEQ ID NO: 1810037 - DNA, 15 bp, Homo sapiens
attgcttttattctt

SEQ ID NO: 1810038 - DNA, 15 bp, Homo sapiens
ttgcttttattcttt

SEQ ID NO: 1810039 - DNA, 15 bp, Homo sapiens
tgcttttattcttta

SEQ ID NO: 1810040 - DNA, 15 bp, Homo sapiens
gcttttattctttaa

SEQ ID NO: 1810041 - DNA, 15 bp, Homo sapiens
cttttattctttaag

SEQ ID NO: 1810042 - DNA, 15 bp, Homo sapiens
ttttattctttaagc

SEQ ID NO: 1810043 - DNA, 15 bp, Homo sapiens
tttattctttaagca

SEQ ID NO: 1810044 - DNA, 15 bp, Homo sapiens
ttattctttaagcaa

SEQ ID NO: 1810045 - DNA, 15 bp, Homo sapiens
tattctttaagcaaa

SEQ ID NO: 1810046 - DNA, 15 bp, Homo sapiens
attctttaagcaaaa

SEQ ID NO: 1810047 - DNA, 15 bp, Homo sapiens
ttctttaagcaaaat

SEQ ID NO: 1810048 - DNA, 15 bp, Homo sapiens
tctttaagcaaaatt

SEQ ID NO: 1810049 - DNA, 15 bp, Homo sapiens
ctttaagcaaaatta

SEQ ID NO: 1810050 - DNA, 15 bp, Homo sapiens
tttaagcaaaattaa

SEQ ID NO: 1810051 - DNA, 15 bp, Homo sapiens
ttaagcaaaattaag

SEQ ID NO: 1810052 - DNA, 15 bp, Homo sapiens
taagcaaaattaaga

SEQ ID NO: 1810053 - DNA, 15 bp, Homo sapiens
aagcaaaattaagat

SEQ ID NO: 1810054 - DNA, 15 bp, Homo sapiens
agcaaaattaagata

SEQ ID NO: 1810055 - DNA, 15 bp, Homo sapiens
gcaaaattaagatat

SEQ ID NO: 1810056 - DNA, 15 bp, Homo sapiens
caaaattaagatatc

SEQ ID NO: 1810057 - DNA, 15 bp, Homo sapiens
aaaattaagatatcc

SEQ ID NO: 1810058 - DNA, 15 bp, Homo sapiens
aaattaagatatcct

SEQ ID NO: 1810059 - DNA, 15 bp, Homo sapiens
aattaagatatcctc

SEQ ID NO: 1810060 - DNA, 15 bp, Homo sapiens
attaagatatcctca

SEQ ID NO: 1810061 - DNA, 15 bp, Homo sapiens
ttaagatatcctcac

SEQ ID NO: 1810062 - DNA, 15 bp, Homo sapiens
taagatatcctcacc

SEQ ID NO: 1810063 - DNA, 15 bp, Homo sapiens
aagatatcctcaccg

SEQ ID NO: 1810064 - DNA, 15 bp, Homo sapiens
agatatcctcaccgg

SEQ ID NO: 1810065 - DNA, 15 bp, Homo sapiens
gatatcctcaccggc

SEQ ID NO: 1810066 - DNA, 15 bp, Homo sapiens
atatcctcaccggct

SEQ ID NO: 1810067 - DNA, 15 bp, Homo sapiens
tatcctcaccggctg

SEQ ID NO: 1810068 - DNA, 15 bp, Homo sapiens
atcctcaccggctgg

SEQ ID NO: 1810069 - DNA, 15 bp, Homo sapiens
tcctcaccggctgga

SEQ ID NO: 1810070 - DNA, 15 bp, Homo sapiens
cctcaccggctggaa

SEQ ID NO: 1810071 - DNA, 15 bp, Homo sapiens
ctcaccggctggaag

SEQ ID NO: 1810072 - DNA, 15 bp, Homo sapiens
tcaccggctggaaga

SEQ ID NO: 1810073 - DNA, 15 bp, Homo sapiens
caccggctggaagat

SEQ ID NO: 1810074 - DNA, 15 bp, Homo sapiens
accggctggaagatc

SEQ ID NO: 1810075 - DNA, 15 bp, Homo sapiens
ccggctggaagatcg

SEQ ID NO: 1810076 - DNA, 15 bp, Homo sapiens
cggctggaagatcgt

SEQ ID NO: 1810077 - DNA, 15 bp, Homo sapiens
ggctggaagatcgta

SEQ ID NO: 1810078 - DNA, 15 bp, Homo sapiens
gctggaagatcgtag

SEQ ID NO: 1810079 - DNA, 15 bp, Homo sapiens
ctggaagatcgtaga

SEQ ID NO: 1810080 - DNA, 15 bp, Homo sapiens
tggaagatcgtagaa

SEQ ID NO: 1810081 - DNA, 15 bp, Homo sapiens
ggaagatcgtagaaa

SEQ ID NO: 1810082 - DNA, 15 bp, Homo sapiens
gaagatcgtagaaat

SEQ ID NO: 1810083 - DNA, 15 bp, Homo sapiens
aagatcgtagaaata

SEQ ID NO: 1810084 - DNA, 15 bp, Homo sapiens
agatcgtagaaatag

SEQ ID NO: 1810085 - DNA, 15 bp, Homo sapiens
gatcgtagaaatagc

SEQ ID NO: 1810086 - DNA, 15 bp, Homo sapiens
atcgtagaaatagca

SEQ ID NO: 1810087 - DNA, 15 bp, Homo sapiens
tcgtagaaatagcat

SEQ ID NO: 1810088 - DNA, 15 bp, Homo sapiens
cgtagaaatagcata

SEQ ID NO: 1810089 - DNA, 15 bp, Homo sapiens
gtagaaatagcatag

SEQ ID NO: 1810090 - DNA, 15 bp, Homo sapiens
tagaaatagcatagg

SEQ ID NO: 1810091 - DNA, 15 bp, Homo sapiens
agaaatagcataggg

SEQ ID NO: 1810092 - DNA, 15 bp, Homo sapiens
gaaatagcatagggt

SEQ ID NO: 1810093 - DNA, 15 bp, Homo sapiens
aaatagcatagggtc

SEQ ID NO: 1810094 - DNA, 15 bp, Homo sapiens
aatagcatagggtca

SEQ ID NO: 1810095 - DNA, 15 bp, Homo sapiens
atagcatagggtcat

SEQ ID NO: 1810096 - DNA, 15 bp, Homo sapiens
tagcatagggtcatt

SEQ ID NO: 1810097 - DNA, 15 bp, Homo sapiens
agcatagggtcattg

SEQ ID NO: 1810098 - DNA, 15 bp, Homo sapiens
gcatagggtcattga

SEQ ID NO: 1810099 - DNA, 15 bp, Homo sapiens
catagggtcattgag

SEQ ID NO: 1810100 - DNA, 15 bp, Homo sapiens
atagggtcattgaga

SEQ ID NO: 1810101 - DNA, 15 bp, Homo sapiens
tagggtcattgagaa

SEQ ID NO: 1810102 - DNA, 15 bp, Homo sapiens
agggtcattgagaaa

SEQ ID NO: 1810103 - DNA, 15 bp, Homo sapiens
gggtcattgagaaaa

SEQ ID NO: 1810104 - DNA, 15 bp, Homo sapiens
ggtcattgagaaaaa

SEQ ID NO: 1810105 - DNA, 15 bp, Homo sapiens
gtcattgagaaaaat

SEQ ID NO: 1810106 - DNA, 15 bp, Homo sapiens
tcattgagaaaaatg

SEQ ID NO: 1810107 - DNA, 15 bp, Homo sapiens
cattgagaaaaatgg

SEQ ID NO: 1810108 - DNA, 15 bp, Homo sapiens
attgagaaaaatgga

SEQ ID NO: 1810109 - DNA, 15 bp, Homo sapiens
ttgagaaaaatggag

SEQ ID NO: 1810110 - DNA, 15 bp, Homo sapiens
tgagaaaaatggaga

SEQ ID NO: 1810111 - DNA, 15 bp, Homo sapiens
gagaaaaatggagac

SEQ ID NO: 1810112 - DNA, 15 bp, Homo sapiens
agaaaaatggagaca

SEQ ID NO: 1810113 - DNA, 15 bp, Homo sapiens
gaaaaatggagacaa

SEQ ID NO: 1810114 - DNA, 15 bp, Homo sapiens
aaaaatggagacaat

SEQ ID NO: 1810115 - DNA, 15 bp, Homo sapiens
aaaatggagacaata

SEQ ID NO: 1810116 - DNA, 15 bp, Homo sapiens
aaatggagacaatag

SEQ ID NO: 1810117 - DNA, 15 bp, Homo sapiens
aatggagacaatagg

SEQ ID NO: 1810118 - DNA, 15 bp, Homo sapiens
atggagacaatagga

SEQ ID NO: 1810119 - DNA, 15 bp, Homo sapiens
tggagacaataggag

SEQ ID NO: 1810120 - DNA, 15 bp, Homo sapiens
ggagacaataggaga

SEQ ID NO: 1810121 - DNA, 15 bp, Homo sapiens
gagacaataggagag

SEQ ID NO: 1810122 - DNA, 15 bp, Homo sapiens
agacaataggagaga

SEQ ID NO: 1810123 - DNA, 15 bp, Homo sapiens
gacaataggagagaa

SEQ ID NO: 1810124 - DNA, 15 bp, Homo sapiens
acaataggagagaat

SEQ ID NO: 1810125 - DNA, 15 bp, Homo sapiens
caataggagagaatc

SEQ ID NO: 1810126 - DNA, 15 bp, Homo sapiens
aataggagagaatct

SEQ ID NO: 1810127 - DNA, 15 bp, Homo sapiens
ataggagagaatctc

SEQ ID NO: 1810128 - DNA, 15 bp, Homo sapiens
taggagagaatctct

SEQ ID NO: 1810129 - DNA, 15 bp, Homo sapiens
aggagagaatctctg

SEQ ID NO: 1810130 - DNA, 15 bp, Homo sapiens
ggagagaatctctgg

SEQ ID NO: 1810131 - DNA, 15 bp, Homo sapiens
gagagaatctctggt

SEQ ID NO: 1810132 - DNA, 15 bp, Homo sapiens
agagaatctctggtt

SEQ ID NO: 1810133 - DNA, 15 bp, Homo sapiens
gagaatctctggtta

SEQ ID NO: 1810134 - DNA, 15 bp, Homo sapiens
agaatctctggttaa

SEQ ID NO: 1810135 - DNA, 15 bp, Homo sapiens
gaatctctggttaaa

SEQ ID NO: 1810136 - DNA, 15 bp, Homo sapiens
aatctctggttaaaa

SEQ ID NO: 1810137 - DNA, 15 bp, Homo sapiens
atctctggttaaaag

SEQ ID NO: 1810138 - DNA, 15 bp, Homo sapiens
tctctggttaaaagg

SEQ ID NO: 1810139 - DNA, 15 bp, Homo sapiens
ctctggttaaaaggg

SEQ ID NO: 1810140 - DNA, 15 bp, Homo sapiens
tctggttaaaaggga

SEQ ID NO: 1810141 - DNA, 15 bp, Homo sapiens
ctggttaaaagggaa

SEQ ID NO: 1810142 - DNA, 15 bp, Homo sapiens
tggttaaaagggaag

SEQ ID NO: 1810143 - DNA, 15 bp, Homo sapiens
ggttaaaagggaagt

SEQ ID NO: 1810144 - DNA, 15 bp, Homo sapiens
gttaaaagggaagtc

SEQ ID NO: 1810145 - DNA, 15 bp, Homo sapiens
ttaaaagggaagtcg

SEQ ID NO: 1810146 - DNA, 15 bp, Homo sapiens
taaaagggaagtcgt

SEQ ID NO: 1810147 - DNA, 15 bp, Homo sapiens
aaaagggaagtcgtg

SEQ ID NO: 1810148 - DNA, 15 bp, Homo sapiens
aaagggaagtcgtgg

SEQ ID NO: 1810149 - DNA, 15 bp, Homo sapiens
aagggaagtcgtggt

SEQ ID NO: 1810150 - DNA, 15 bp, Homo sapiens
agggaagtcgtggtc

SEQ ID NO: 1810151 - DNA, 15 bp, Homo sapiens
gggaagtcgtggtca

SEQ ID NO: 1810152 - DNA, 15 bp, Homo sapiens
ggaagtcgtggtcat

SEQ ID NO: 1810153 - DNA, 15 bp, Homo sapiens
gaagtcgtggtcata

SEQ ID NO: 1810154 - DNA, 15 bp, Homo sapiens
aagtcgtggtcatac

SEQ ID NO: 1810155 - DNA, 15 bp, Homo sapiens
agtcgtggtcatacc

SEQ ID NO: 1810156 - DNA, 15 bp, Homo sapiens
gtcgtggtcatacca

SEQ ID NO: 1810157 - DNA, 15 bp, Homo sapiens
tcgtggtcataccag

SEQ ID NO: 1810158 - DNA, 15 bp, Homo sapiens
cgtggtcataccagc

SEQ ID NO: 1810159 - DNA, 15 bp, Homo sapiens
gtggtcataccagcc

SEQ ID NO: 1810160 - DNA, 15 bp, Homo sapiens
tggtcataccagccc

SEQ ID NO: 1810161 - DNA, 15 bp, Homo sapiens
ggtcataccagccct

SEQ ID NO: 1810162 - DNA, 15 bp, Homo sapiens
gtcataccagccctc

SEQ ID NO: 1810163 - DNA, 15 bp, Homo sapiens
tcataccagccctca

SEQ ID NO: 1810164 - DNA, 15 bp, Homo sapiens
cataccagccctcaa

SEQ ID NO: 1810165 - DNA, 15 bp, Homo sapiens
ataccagccctcaaa

SEQ ID NO: 1810166 - DNA, 15 bp, Homo sapiens
taccagccctcaaag

SEQ ID NO: 1810167 - DNA, 15 bp, Homo sapiens
accagccctcaaaga

SEQ ID NO: 1810168 - DNA, 15 bp, Homo sapiens
ccagccctcaaagaa

SEQ ID NO: 1810169 - DNA, 15 bp, Homo sapiens
cagccctcaaagaaa

SEQ ID NO: 1810170 - DNA, 15 bp, Homo sapiens
agccctcaaagaaag

SEQ ID NO: 1810171 - DNA, 15 bp, Homo sapiens
gccctcaaagaaagc

SEQ ID NO: 1810172 - DNA, 15 bp, Homo sapiens
ccctcaaagaaagcc

SEQ ID NO: 1810173 - DNA, 15 bp, Homo sapiens
cctcaaagaaagcca

SEQ ID NO: 1810174 - DNA, 15 bp, Homo sapiens
ctcaaagaaagccag

SEQ ID NO: 1810175 - DNA, 15 bp, Homo sapiens
tcaaagaaagccaga

SEQ ID NO: 1810176 - DNA, 15 bp, Homo sapiens
caaagaaagccagac

SEQ ID NO: 1810177 - DNA, 15 bp, Homo sapiens
aaagaaagccagacg

SEQ ID NO: 1810178 - DNA, 15 bp, Homo sapiens
aagaaagccagacgg

SEQ ID NO: 1810179 - DNA, 15 bp, Homo sapiens
agaaagccagacggc

SEQ ID NO: 1810180 - DNA, 15 bp, Homo sapiens
gaaagccagacggca

SEQ ID NO: 1810181 - DNA, 15 bp, Homo sapiens
aaagccagacggcac

SEQ ID NO: 1810182 - DNA, 15 bp, Homo sapiens
aagccagacggcact

SEQ ID NO: 1810183 - DNA, 15 bp, Homo sapiens
agccagacggcactg

SEQ ID NO: 1810184 - DNA, 15 bp, Homo sapiens
gccagacggcactgt

SEQ ID NO: 1810185 - DNA, 15 bp, Homo sapiens
ccagacggcactgtg

SEQ ID NO: 1810186 - DNA, 15 bp, Homo sapiens
cagacggcactgtgt

SEQ ID NO: 1810187 - DNA, 15 bp, Homo sapiens
agacggcactgtgtg

SEQ ID NO: 1810188 - DNA, 15 bp, Homo sapiens
gacggcactgtgtgg

SEQ ID NO: 1810189 - DNA, 15 bp, Homo sapiens
acggcactgtgtggc

SEQ ID NO: 1810190 - DNA, 15 bp, Homo sapiens
cggcactgtgtggcg

SEQ ID NO: 1810191 - DNA, 15 bp, Homo sapiens
ggcactgtgtggcgt

SEQ ID NO: 1810192 - DNA, 15 bp, Homo sapiens
gcactgtgtggcgtg

SEQ ID NO: 1810193 - DNA, 15 bp, Homo sapiens
cactgtgtggcgtgt

SEQ ID NO: 1810194 - DNA, 15 bp, Homo sapiens
actgtgtggcgtgtg

SEQ ID NO: 1810195 - DNA, 15 bp, Homo sapiens
ctgtgtggcgtgtgt

SEQ ID NO: 1810196 - DNA, 15 bp, Homo sapiens
tgtgtggcgtgtgtc

SEQ ID NO: 1810197 - DNA, 15 bp, Homo sapiens
gtgtggcgtgtgtct

SEQ ID NO: 1810198 - DNA, 15 bp, Homo sapiens
tgtggcgtgtgtctt

SEQ ID NO: 1810199 - DNA, 15 bp, Homo sapiens
gtggcgtgtgtcttt

SEQ ID NO: 1810200 - DNA, 15 bp, Homo sapiens
tggcgtgtgtctttc

SEQ ID NO: 1810201 - DNA, 15 bp, Homo sapiens
ggcgtgtgtctttcc

SEQ ID NO: 1810202 - DNA, 15 bp, Homo sapiens
gcgtgtgtctttcct

SEQ ID NO: 1810203 - DNA, 15 bp, Homo sapiens
cgtgtgtctttcctg

SEQ ID NO: 1810204 - DNA, 15 bp, Homo sapiens
gtgtgtctttcctga

SEQ ID NO: 1810205 - DNA, 15 bp, Homo sapiens
tgtgtctttcctgat

SEQ ID NO: 1810206 - DNA, 15 bp, Homo sapiens
gtgtctttcctgatg

SEQ ID NO: 1810207 - DNA, 15 bp, Homo sapiens
tgtctttcctgatgt

SEQ ID NO: 1810208 - DNA, 15 bp, Homo sapiens
gtctttcctgatgtt

SEQ ID NO: 1810209 - DNA, 15 bp, Homo sapiens
tctttcctgatgttt

SEQ ID NO: 1810210 - DNA, 15 bp, Homo sapiens
ctttcctgatgtttc

SEQ ID NO: 1810211 - DNA, 15 bp, Homo sapiens
tttcctgatgtttcc

SEQ ID NO: 1810212 - DNA, 15 bp, Homo sapiens
ttcctgatgtttcca

SEQ ID NO: 1810213 - DNA, 15 bp, Homo sapiens
tcctgatgtttccat

SEQ ID NO: 1810214 - DNA, 15 bp, Homo sapiens
cctgatgtttccatg

SEQ ID NO: 1810215 - DNA, 15 bp, Homo sapiens
ctgatgtttccatgc

SEQ ID NO: 1810216 - DNA, 15 bp, Homo sapiens
tgatgtttccatgca

SEQ ID NO: 1810217 - DNA, 15 bp, Homo sapiens
gatgtttccatgcat

SEQ ID NO: 1810218 - DNA, 15 bp, Homo sapiens
atgtttccatgcata

SEQ ID NO: 1810219 - DNA, 15 bp, Homo sapiens
tgtttccatgcatac

SEQ ID NO: 1810220 - DNA, 15 bp, Homo sapiens
gtttccatgcataca

SEQ ID NO: 1810221 - DNA, 15 bp, Homo sapiens
tttccatgcatacac

SEQ ID NO: 1810222 - DNA, 15 bp, Homo sapiens
ttccatgcatacaca

SEQ ID NO: 1810223 - DNA, 15 bp, Homo sapiens
tccatgcatacacac

SEQ ID NO: 1810224 - DNA, 15 bp, Homo sapiens
ccatgcatacacaca

SEQ ID NO: 1810225 - DNA, 15 bp, Homo sapiens
atgcatacacacatt

SEQ ID NO: 1810226 - DNA, 15 bp, Homo sapiens
tgcatacacacattt

SEQ ID NO: 1810227 - DNA, 15 bp, Homo sapiens
gcatacacacatttg

SEQ ID NO: 1810228 - DNA, 15 bp, Homo sapiens
catacacacatttgt

SEQ ID NO: 1810229 - DNA, 15 bp, Homo sapiens
atacacacatttgta

SEQ ID NO: 1810230 - DNA, 15 bp, Homo sapiens
tacacacatttgtaa

SEQ ID NO: 1810231 - DNA, 15 bp, Homo sapiens
acacacatttgtaaa

SEQ ID NO: 1810232 - DNA, 15 bp, Homo sapiens
cacacatttgtaaac

SEQ ID NO: 1810233 - DNA, 15 bp, Homo sapiens
acacatttgtaaacg

SEQ ID NO: 1810234 - DNA, 15 bp, Homo sapiens
cacatttgtaaacgt

SEQ ID NO: 1810235 - DNA, 15 bp, Homo sapiens
acatttgtaaacgta

SEQ ID NO: 1810236 - DNA, 15 bp, Homo sapiens
catttgtaaacgtag

SEQ ID NO: 1810237 - DNA, 15 bp, Homo sapiens
atttgtaaacgtagc

SEQ ID NO: 1810238 - DNA, 15 bp, Homo sapiens
tttgtaaacgtagcg

SEQ ID NO: 1810239 - DNA, 15 bp, Homo sapiens
ttgtaaacgtagcgg

SEQ ID NO: 1810240 - DNA, 15 bp, Homo sapiens
tgtaaacgtagcggg

SEQ ID NO: 1810241 - DNA, 15 bp, Homo sapiens
gtaaacgtagcggga

SEQ ID NO: 1810242 - DNA, 15 bp, Homo sapiens
taaacgtagcgggat

SEQ ID NO: 1810243 - DNA, 15 bp, Homo sapiens
aaacgtagcgggatc

SEQ ID NO: 1810244 - DNA, 15 bp, Homo sapiens
aacgtagcgggatca

SEQ ID NO: 1810245 - DNA, 15 bp, Homo sapiens
acgtagcgggatcat

SEQ ID NO: 1810246 - DNA, 15 bp, Homo sapiens
cgtagcgggatcata

SEQ ID NO: 1810247 - DNA, 15 bp, Homo sapiens
gtagcgggatcatac

SEQ ID NO: 1810248 - DNA, 15 bp, Homo sapiens
tagcgggatcatact

SEQ ID NO: 1810249 - DNA, 15 bp, Homo sapiens
agcgggatcatactc

SEQ ID NO: 1810250 - DNA, 15 bp, Homo sapiens
gcgggatcatactct

SEQ ID NO: 1810251 - DNA, 15 bp, Homo sapiens
cgggatcatactctg

SEQ ID NO: 1810252 - DNA, 15 bp, Homo sapiens
gggatcatactctgc

SEQ ID NO: 1810253 - DNA, 15 bp, Homo sapiens
ggatcatactctgca

SEQ ID NO: 1810254 - DNA, 15 bp, Homo sapiens
gatcatactctgcat

SEQ ID NO: 1810255 - DNA, 15 bp, Homo sapiens
atcatactctgcatg

SEQ ID NO: 1810256 - DNA, 15 bp, Homo sapiens
tcatactctgcatgc

SEQ ID NO: 1810257 - DNA, 15 bp, Homo sapiens
catactctgcatgct

SEQ ID NO: 1810258 - DNA, 15 bp, Homo sapiens
atactctgcatgctg

SEQ ID NO: 1810259 - DNA, 15 bp, Homo sapiens
tactctgcatgctgg

SEQ ID NO: 1810260 - DNA, 15 bp, Homo sapiens
actctgcatgctggt

SEQ ID NO: 1810261 - DNA, 15 bp, Homo sapiens
ctctgcatgctggtc

SEQ ID NO: 1810262 - DNA, 15 bp, Homo sapiens
tctgcatgctggtct

SEQ ID NO: 1810263 - DNA, 15 bp, Homo sapiens
ctgcatgctggtctg

SEQ ID NO: 1810264 - DNA, 15 bp, Homo sapiens
tgcatgctggtctgt

SEQ ID NO: 1810265 - DNA, 15 bp, Homo sapiens
gcatgctggtctgta

SEQ ID NO: 1810266 - DNA, 15 bp, Homo sapiens
catgctggtctgtag

SEQ ID NO: 1810267 - DNA, 15 bp, Homo sapiens
atgctggtctgtagc

SEQ ID NO: 1810268 - DNA, 15 bp, Homo sapiens
tgctggtctgtagct

SEQ ID NO: 1810269 - DNA, 15 bp, Homo sapiens
gctggtctgtagctg

SEQ ID NO: 1810270 - DNA, 15 bp, Homo sapiens
ctggtctgtagctgg

SEQ ID NO: 1810271 - DNA, 15 bp, Homo sapiens
tggtctgtagctggt

SEQ ID NO: 1810272 - DNA, 15 bp, Homo sapiens
ggtctgtagctggtt

SEQ ID NO: 1810273 - DNA, 15 bp, Homo sapiens
gtctgtagctggttt

SEQ ID NO: 1810274 - DNA, 15 bp, Homo sapiens
tctgtagctggtttc

SEQ ID NO: 1810275 - DNA, 15 bp, Homo sapiens
ctgtagctggtttct

SEQ ID NO: 1810276 - DNA, 15 bp, Homo sapiens
tgtagctggtttctt

SEQ ID NO: 1810277 - DNA, 15 bp, Homo sapiens
gtagctggtttcttt

SEQ ID NO: 1810278 - DNA, 15 bp, Homo sapiens
tagctggtttctttt

SEQ ID NO: 1810279 - DNA, 15 bp, Homo sapiens
agctggtttcttttc

SEQ ID NO: 1810280 - DNA, 15 bp, Homo sapiens
gctggtttcttttca

SEQ ID NO: 1810281 - DNA, 15 bp, Homo sapiens
ctggtttcttttcac

SEQ ID NO: 1810282 - DNA, 15 bp, Homo sapiens
tggtttcttttcact

SEQ ID NO: 1810283 - DNA, 15 bp, Homo sapiens
ggtttcttttcactt

SEQ ID NO: 1810284 - DNA, 15 bp, Homo sapiens
gtttcttttcactta

SEQ ID NO: 1810285 - DNA, 15 bp, Homo sapiens
tttcttttcacttag

SEQ ID NO: 1810286 - DNA, 15 bp, Homo sapiens
ttcttttcacttagg

SEQ ID NO: 1810287 - DNA, 15 bp, Homo sapiens
tcttttcacttaggg

SEQ ID NO: 1810288 - DNA, 15 bp, Homo sapiens
cttttcacttagggc

SEQ ID NO: 1810289 - DNA, 15 bp, Homo sapiens
ttttcacttagggca

SEQ ID NO: 1810290 - DNA, 15 bp, Homo sapiens
tttcacttagggcag

SEQ ID NO: 1810291 - DNA, 15 bp, Homo sapiens
ttcacttagggcagc

SEQ ID NO: 1810292 - DNA, 15 bp, Homo sapiens
tcacttagggcagca

SEQ ID NO: 1810293 - DNA, 15 bp, Homo sapiens
cacttagggcagcac

SEQ ID NO: 1810294 - DNA, 15 bp, Homo sapiens
acttagggcagcacc

SEQ ID NO: 1810295 - DNA, 15 bp, Homo sapiens
cttagggcagcacct

SEQ ID NO: 1810296 - DNA, 15 bp, Homo sapiens
ttagggcagcacctc

SEQ ID NO: 1810297 - DNA, 15 bp, Homo sapiens
tagggcagcacctct

SEQ ID NO: 1810298 - DNA, 15 bp, Homo sapiens
agggcagcacctcta

SEQ ID NO: 1810299 - DNA, 15 bp, Homo sapiens
gggcagcacctctac

SEQ ID NO: 1810300 - DNA, 15 bp, Homo sapiens
ggcagcacctctacc

SEQ ID NO: 1810301 - DNA, 15 bp, Homo sapiens
gcagcacctctacct

SEQ ID NO: 1810302 - DNA, 15 bp, Homo sapiens
cagcacctctacctc

SEQ ID NO: 1810303 - DNA, 15 bp, Homo sapiens
agcacctctacctcc

SEQ ID NO: 1810304 - DNA, 15 bp, Homo sapiens
gcacctctacctccc

SEQ ID NO: 1810305 - DNA, 15 bp, Homo sapiens
cacctctacctcccg

SEQ ID NO: 1810306 - DNA, 15 bp, Homo sapiens
acctctacctcccgt

SEQ ID NO: 1810307 - DNA, 15 bp, Homo sapiens
cctctacctcccgtc

SEQ ID NO: 1810308 - DNA, 15 bp, Homo sapiens
ctctacctcccgtct

SEQ ID NO: 1810309 - DNA, 15 bp, Homo sapiens
tctacctcccgtctg

SEQ ID NO: 1810310 - DNA, 15 bp, Homo sapiens
ctacctcccgtctga

SEQ ID NO: 1810311 - DNA, 15 bp, Homo sapiens
tacctcccgtctgat

SEQ ID NO: 1810312 - DNA, 15 bp, Homo sapiens
acctcccgtctgatt

SEQ ID NO: 1810313 - DNA, 15 bp, Homo sapiens
cctcccgtctgattg

SEQ ID NO: 1810314 - DNA, 15 bp, Homo sapiens
ctcccgtctgattgg

SEQ ID NO: 1810315 - DNA, 15 bp, Homo sapiens
tcccgtctgattggg

SEQ ID NO: 1810316 - DNA, 15 bp, Homo sapiens
cccgtctgattgggt

SEQ ID NO: 1810317 - DNA, 15 bp, Homo sapiens
ccgtctgattgggtc

SEQ ID NO: 1810318 - DNA, 15 bp, Homo sapiens
cgtctgattgggtct

SEQ ID NO: 1810319 - DNA, 15 bp, Homo sapiens
gtctgattgggtctt

SEQ ID NO: 1810320 - DNA, 15 bp, Homo sapiens
tctgattgggtcttc

SEQ ID NO: 1810321 - DNA, 15 bp, Homo sapiens
ctgattgggtcttcc

SEQ ID NO: 1810322 - DNA, 15 bp, Homo sapiens
tgattgggtcttcct

SEQ ID NO: 1810323 - DNA, 15 bp, Homo sapiens
gattgggtcttcctc

SEQ ID NO: 1810324 - DNA, 15 bp, Homo sapiens
attgggtcttcctcg

SEQ ID NO: 1810325 - DNA, 15 bp, Homo sapiens
ttgggtcttcctcgg

SEQ ID NO: 1810326 - DNA, 15 bp, Homo sapiens
tgggtcttcctcggc

SEQ ID NO: 1810327 - DNA, 15 bp, Homo sapiens
gggtcttcctcggca

SEQ ID NO: 1810328 - DNA, 15 bp, Homo sapiens
ggtcttcctcggcat

SEQ ID NO: 1810329 - DNA, 15 bp, Homo sapiens
gtcttcctcggcatt

SEQ ID NO: 1810330 - DNA, 15 bp, Homo sapiens
tcttcctcggcattc

SEQ ID NO: 1810331 - DNA, 15 bp, Homo sapiens
cttcctcggcattcc

SEQ ID NO: 1810332 - DNA, 15 bp, Homo sapiens
caaaacaacaagaaa

SEQ ID NO: 1810333 - DNA, 15 bp, Homo sapiens
aaaacaacaagaaaa

SEQ ID NO: 1810334 - DNA, 15 bp, Homo sapiens
aaacaacaagaaaaa

SEQ ID NO: 1810335 - DNA, 15 bp, Homo sapiens
aacaacaagaaaaac

SEQ ID NO: 1810336 - DNA, 15 bp, Homo sapiens
acaacaagaaaaaca

SEQ ID NO: 1810337 - DNA, 15 bp, Homo sapiens
caacaagaaaaacag

SEQ ID NO: 1810338 - DNA, 15 bp, Homo sapiens
aacaagaaaaacaga

SEQ ID NO: 1810339 - DNA, 15 bp, Homo sapiens
acaagaaaaacagaa

SEQ ID NO: 1810340 - DNA, 15 bp, Homo sapiens
caagaaaaacagaac

SEQ ID NO: 1810341 - DNA, 15 bp, Homo sapiens
aagaaaaacagaacg

SEQ ID NO: 1810342 - DNA, 15 bp, Homo sapiens
agaaaaacagaacgt

SEQ ID NO: 1810343 - DNA, 15 bp, Homo sapiens
gaaaaacagaacgtg

SEQ ID NO: 1810344 - DNA, 15 bp, Homo sapiens
aaaaacagaacgtgg

SEQ ID NO: 1810345 - DNA, 15 bp, Homo sapiens
aaaacagaacgtggt

SEQ ID NO: 1810346 - DNA, 15 bp, Homo sapiens
aaacagaacgtggtg

SEQ ID NO: 1810347 - DNA, 15 bp, Homo sapiens
aacagaacgtggtgg

SEQ ID NO: 1810348 - DNA, 15 bp, Homo sapiens
acagaacgtggtggc

SEQ ID NO: 1810349 - DNA, 15 bp, Homo sapiens
cagaacgtggtggct

SEQ ID NO: 1810350 - DNA, 15 bp, Homo sapiens
agaacgtggtggctc

SEQ ID NO: 1810351 - DNA, 15 bp, Homo sapiens
ggccaaggtgggtga

SEQ ID NO: 1810352 - DNA, 15 bp, Homo sapiens
gccaaggtgggtgaa

SEQ ID NO: 1810353 - DNA, 15 bp, Homo sapiens
ccaaggtgggtgaat

SEQ ID NO: 1810354 - DNA, 15 bp, Homo sapiens
caaggtgggtgaatc

SEQ ID NO: 1810355 - DNA, 15 bp, Homo sapiens
aaggtgggtgaatca

SEQ ID NO: 1810356 - DNA, 15 bp, Homo sapiens
aggtgggtgaatcac

SEQ ID NO: 1810357 - DNA, 15 bp, Homo sapiens
ggtgggtgaatcacc

SEQ ID NO: 1810358 - DNA, 15 bp, Homo sapiens
gtgggtgaatcacct

SEQ ID NO: 1810359 - DNA, 15 bp, Homo sapiens
tgggtgaatcacctt

SEQ ID NO: 1810360 - DNA, 15 bp, Homo sapiens
gggtgaatcacctta

SEQ ID NO: 1810361 - DNA, 15 bp, Homo sapiens
ggtgaatcaccttag

SEQ ID NO: 1810362 - DNA, 15 bp, Homo sapiens
gtgaatcaccttagg

SEQ ID NO: 1810363 - DNA, 15 bp, Homo sapiens
tgaatcaccttaggt

SEQ ID NO: 1810364 - DNA, 15 bp, Homo sapiens
gaatcaccttaggtc

SEQ ID NO: 1810365 - DNA, 15 bp, Homo sapiens
aatcaccttaggtca

SEQ ID NO: 1810366 - DNA, 15 bp, Homo sapiens
atcaccttaggtcag

SEQ ID NO: 1810367 - DNA, 15 bp, Homo sapiens
tcaccttaggtcagg

SEQ ID NO: 1810368 - DNA, 15 bp, Homo sapiens
caccttaggtcagga

SEQ ID NO: 1810369 - DNA, 15 bp, Homo sapiens
accttaggtcaggag

SEQ ID NO: 1810370 - DNA, 15 bp, Homo sapiens
ccttaggtcaggagt

SEQ ID NO: 1810371 - DNA, 15 bp, Homo sapiens
taggtcaggagttca

SEQ ID NO: 1810372 - DNA, 15 bp, Homo sapiens
tggccaacatggtgg

SEQ ID NO: 1810373 - DNA, 15 bp, Homo sapiens
ggccaacatggtgga

SEQ ID NO: 1810374 - DNA, 15 bp, Homo sapiens
gccaacatggtggaa

SEQ ID NO: 1810375 - DNA, 15 bp, Homo sapiens
ccaacatggtggaac

SEQ ID NO: 1810376 - DNA, 15 bp, Homo sapiens
caacatggtggaacc

SEQ ID NO: 1810377 - DNA, 15 bp, Homo sapiens
aacatggtggaaccc

SEQ ID NO: 1810378 - DNA, 15 bp, Homo sapiens
acatggtggaacccc

SEQ ID NO: 1810379 - DNA, 15 bp, Homo sapiens
catggtggaaccccc

SEQ ID NO: 1810380 - DNA, 15 bp, Homo sapiens
atggtggaaccccca

SEQ ID NO: 1810381 - DNA, 15 bp, Homo sapiens
tggtggaacccccat

SEQ ID NO: 1810382 - DNA, 15 bp, Homo sapiens
ggtggaacccccata

SEQ ID NO: 1810383 - DNA, 15 bp, Homo sapiens
gtggaacccccatat

SEQ ID NO: 1810384 - DNA, 15 bp, Homo sapiens
tggaacccccatatc

SEQ ID NO: 1810385 - DNA, 15 bp, Homo sapiens
ggaacccccatatct

SEQ ID NO: 1810386 - DNA, 15 bp, Homo sapiens
gaacccccatatcta

SEQ ID NO: 1810387 - DNA, 15 bp, Homo sapiens
aacccccatatctac

SEQ ID NO: 1810388 - DNA, 15 bp, Homo sapiens
acccccatatctact

SEQ ID NO: 1810389 - DNA, 15 bp, Homo sapiens
cccccatatctacta

SEQ ID NO: 1810390 - DNA, 15 bp, Homo sapiens
ccccatatctactaa

SEQ ID NO: 1810391 - DNA, 15 bp, Homo sapiens
cccatatctactaaa

SEQ ID NO: 1810392 - DNA, 15 bp, Homo sapiens
ccatatctactaaaa

SEQ ID NO: 1810393 - DNA, 15 bp, Homo sapiens
catatctactaaaaa

SEQ ID NO: 1810394 - DNA, 15 bp, Homo sapiens
atatctactaaaaat

SEQ ID NO: 1810395 - DNA, 15 bp, Homo sapiens
atctactaaaaataa

SEQ ID NO: 1810396 - DNA, 15 bp, Homo sapiens
ctaaaaataacaaaa

SEQ ID NO: 1810397 - DNA, 15 bp, Homo sapiens
taaaaataacaaaat

SEQ ID NO: 1810398 - DNA, 15 bp, Homo sapiens
aaaaataacaaaatt

SEQ ID NO: 1810399 - DNA, 15 bp, Homo sapiens
aaaataacaaaatta

SEQ ID NO: 1810400 - DNA, 15 bp, Homo sapiens
aaataacaaaattag

SEQ ID NO: 1810401 - DNA, 15 bp, Homo sapiens
aataacaaaattagc

SEQ ID NO: 1810402 - DNA, 15 bp, Homo sapiens
ataacaaaattagcc

SEQ ID NO: 1810403 - DNA, 15 bp, Homo sapiens
taacaaaattagccg

SEQ ID NO: 1810404 - DNA, 15 bp, Homo sapiens
aacaaaattagccga

SEQ ID NO: 1810405 - DNA, 15 bp, Homo sapiens
acaaaattagccgag

SEQ ID NO: 1810406 - DNA, 15 bp, Homo sapiens
caaaattagccgagt

SEQ ID NO: 1810407 - DNA, 15 bp, Homo sapiens
aaaattagccgagtg

SEQ ID NO: 1810408 - DNA, 15 bp, Homo sapiens
aaattagccgagtgt

SEQ ID NO: 1810409 - DNA, 15 bp, Homo sapiens
aattagccgagtgtg

SEQ ID NO: 1810410 - DNA, 15 bp, Homo sapiens
attagccgagtgtgg

SEQ ID NO: 1810411 - DNA, 15 bp, Homo sapiens
ttagccgagtgtggt

SEQ ID NO: 1810412 - DNA, 15 bp, Homo sapiens
tagccgagtgtggtg

SEQ ID NO: 1810413 - DNA, 15 bp, Homo sapiens
agccgagtgtggtgg

SEQ ID NO: 1810414 - DNA, 15 bp, Homo sapiens
gccgagtgtggtggc

SEQ ID NO: 1810415 - DNA, 15 bp, Homo sapiens
ccgagtgtggtggca

SEQ ID NO: 1810416 - DNA, 15 bp, Homo sapiens
cgagtgtggtggcac

SEQ ID NO: 1810417 - DNA, 15 bp, Homo sapiens
gagtgtggtggcaca

SEQ ID NO: 1810418 - DNA, 15 bp, Homo sapiens
agtgtggtggcacat

SEQ ID NO: 1810419 - DNA, 15 bp, Homo sapiens
gtgtggtggcacatg

SEQ ID NO: 1810420 - DNA, 15 bp, Homo sapiens
tgtggtggcacatgt

SEQ ID NO: 1810421 - DNA, 15 bp, Homo sapiens
gtggtggcacatgtc

SEQ ID NO: 1810422 - DNA, 15 bp, Homo sapiens
tggtggcacatgtct

SEQ ID NO: 1810423 - DNA, 15 bp, Homo sapiens
ggtggcacatgtcta

SEQ ID NO: 1810424 - DNA, 15 bp, Homo sapiens
gtggcacatgtctat

SEQ ID NO: 1810425 - DNA, 15 bp, Homo sapiens
tggcacatgtctata

SEQ ID NO: 1810426 - DNA, 15 bp, Homo sapiens
ggcacatgtctataa

SEQ ID NO: 1810427 - DNA, 15 bp, Homo sapiens
gcacatgtctataat

SEQ ID NO: 1810428 - DNA, 15 bp, Homo sapiens
cacatgtctataatc

SEQ ID NO: 1810429 - DNA, 15 bp, Homo sapiens
acatgtctataatcc

SEQ ID NO: 1810430 - DNA, 15 bp, Homo sapiens
catgtctataatccc

SEQ ID NO: 1810431 - DNA, 15 bp, Homo sapiens
atgtctataatccca

SEQ ID NO: 1810432 - DNA, 15 bp, Homo sapiens
tgtctataatcccag

SEQ ID NO: 1810433 - DNA, 15 bp, Homo sapiens
gtctataatcccagc

SEQ ID NO: 1810434 - DNA, 15 bp, Homo sapiens
tctataatcccagct

SEQ ID NO: 1810435 - DNA, 15 bp, Homo sapiens
cttgaacccaggaga

SEQ ID NO: 1810436 - DNA, 15 bp, Homo sapiens
ttgaacccaggagat

SEQ ID NO: 1810437 - DNA, 15 bp, Homo sapiens
tgaacccaggagatg

SEQ ID NO: 1810438 - DNA, 15 bp, Homo sapiens
gaacccaggagatgg

SEQ ID NO: 1810439 - DNA, 15 bp, Homo sapiens
aacccaggagatgga

SEQ ID NO: 1810440 - DNA, 15 bp, Homo sapiens
acccaggagatggag

SEQ ID NO: 1810441 - DNA, 15 bp, Homo sapiens
cccaggagatggagg

SEQ ID NO: 1810442 - DNA, 15 bp, Homo sapiens
ccaggagatggaggt

SEQ ID NO: 1810443 - DNA, 15 bp, Homo sapiens
caggagatggaggtt

SEQ ID NO: 1810444 - DNA, 15 bp, Homo sapiens
aggagatggaggttg

SEQ ID NO: 1810445 - DNA, 15 bp, Homo sapiens
gccaagatcacaccg

SEQ ID NO: 1810446 - DNA, 15 bp, Homo sapiens
ccaagatcacaccgc

SEQ ID NO: 1810447 - DNA, 15 bp, Homo sapiens
caagatcacaccgct

SEQ ID NO: 1810448 - DNA, 15 bp, Homo sapiens
aagatcacaccgctg

SEQ ID NO: 1810449 - DNA, 15 bp, Homo sapiens
agatcacaccgctgc

SEQ ID NO: 1810450 - DNA, 15 bp, Homo sapiens
gatcacaccgctgca

SEQ ID NO: 1810451 - DNA, 15 bp, Homo sapiens
atcacaccgctgcac

SEQ ID NO: 1810452 - DNA, 15 bp, Homo sapiens
tcacaccgctgcact

SEQ ID NO: 1810453 - DNA, 15 bp, Homo sapiens
cacaccgctgcactc

SEQ ID NO: 1810454 - DNA, 15 bp, Homo sapiens
acaccgctgcactcc

SEQ ID NO: 1810455 - DNA, 15 bp, Homo sapiens
caccgctgcactcca

SEQ ID NO: 1810456 - DNA, 15 bp, Homo sapiens
accgctgcactccag

SEQ ID NO: 1810457 - DNA, 15 bp, Homo sapiens
ccgctgcactccagg

SEQ ID NO: 1810458 - DNA, 15 bp, Homo sapiens
cgctgcactccaggc

SEQ ID NO: 1810459 - DNA, 15 bp, Homo sapiens
gctgcactccaggct

SEQ ID NO: 1810460 - DNA, 15 bp, Homo sapiens
caggctgggcaacaa

SEQ ID NO: 1810461 - DNA, 15 bp, Homo sapiens
aggctgggcaacaag

SEQ ID NO: 1810462 - DNA, 15 bp, Homo sapiens
ggctgggcaacaaga

SEQ ID NO: 1810463 - DNA, 15 bp, Homo sapiens
gctgggcaacaagag

SEQ ID NO: 1810464 - DNA, 15 bp, Homo sapiens
tctcaaaaaaaagag

SEQ ID NO: 1810465 - DNA, 15 bp, Homo sapiens
ctcaaaaaaaagaga

SEQ ID NO: 1810466 - DNA, 15 bp, Homo sapiens
tcaaaaaaaagagag

SEQ ID NO: 1810467 - DNA, 15 bp, Homo sapiens
caaaaaaaagagaga

SEQ ID NO: 1810468 - DNA, 15 bp, Homo sapiens
aaaaaaaagagagaa

SEQ ID NO: 1810469 - DNA, 15 bp, Homo sapiens
aaaaaaagagagaaa

SEQ ID NO: 1810470 - DNA, 15 bp, Homo sapiens
aaaaaagagagaaaa

SEQ ID NO: 1810471 - DNA, 15 bp, Homo sapiens
aaaaagagagaaaag

SEQ ID NO: 1810472 - DNA, 15 bp, Homo sapiens
aaaagagagaaaaga

SEQ ID NO: 1810473 - DNA, 15 bp, Homo sapiens
aaagagagaaaagaa

SEQ ID NO: 1810474 - DNA, 15 bp, Homo sapiens
aagagagaaaagaaa

SEQ ID NO: 1810475 - DNA, 15 bp, Homo sapiens
agagagaaaagaaaa

SEQ ID NO: 1810476 - DNA, 15 bp, Homo sapiens
gagagaaaagaaaag

SEQ ID NO: 1810477 - DNA, 15 bp, Homo sapiens
agagaaaagaaaagc

SEQ ID NO: 1810478 - DNA, 15 bp, Homo sapiens
gagaaaagaaaagct

SEQ ID NO: 1810479 - DNA, 15 bp, Homo sapiens
agaaaagaaaagctt

SEQ ID NO: 1810480 - DNA, 15 bp, Homo sapiens
gaaaagaaaagcttt

SEQ ID NO: 1810481 - DNA, 15 bp, Homo sapiens
aaaagaaaagcttta

SEQ ID NO: 1810482 - DNA, 15 bp, Homo sapiens
aaagaaaagctttat

SEQ ID NO: 1810483 - DNA, 15 bp, Homo sapiens
aagaaaagctttatt

SEQ ID NO: 1810484 - DNA, 15 bp, Homo sapiens
agaaaagctttattt

SEQ ID NO: 1810485 - DNA, 15 bp, Homo sapiens
gaaaagctttatttg

SEQ ID NO: 1810486 - DNA, 15 bp, Homo sapiens
aaaagctttatttgt

SEQ ID NO: 1810487 - DNA, 15 bp, Homo sapiens
aaagctttatttgtg

SEQ ID NO: 1810488 - DNA, 15 bp, Homo sapiens
aagctttatttgtgt

SEQ ID NO: 1810489 - DNA, 15 bp, Homo sapiens
agctttatttgtgtt

SEQ ID NO: 1810490 - DNA, 15 bp, Homo sapiens
gctttatttgtgttg

SEQ ID NO: 1810491 - DNA, 15 bp, Homo sapiens
ctttatttgtgttga

SEQ ID NO: 1810492 - DNA, 15 bp, Homo sapiens
tttatttgtgttgat

SEQ ID NO: 1810493 - DNA, 15 bp, Homo sapiens
ttatttgtgttgatt

SEQ ID NO: 1810494 - DNA, 15 bp, Homo sapiens
tatttgtgttgattc

SEQ ID NO: 1810495 - DNA, 15 bp, Homo sapiens
atttgtgttgattcc

SEQ ID NO: 1810496 - DNA, 15 bp, Homo sapiens
tttgtgttgattcca

SEQ ID NO: 1810497 - DNA, 15 bp, Homo sapiens
ttgtgttgattccat

SEQ ID NO: 1810498 - DNA, 15 bp, Homo sapiens
tgtgttgattccatt

SEQ ID NO: 1810499 - DNA, 15 bp, Homo sapiens
gtgttgattccatta

SEQ ID NO: 1810500 - DNA, 15 bp, Homo sapiens
tgttgattccattat

SEQ ID NO: 1810501 - DNA, 15 bp, Homo sapiens
gttgattccattatt

SEQ ID NO: 1810502 - DNA, 15 bp, Homo sapiens
ttgattccattattc

SEQ ID NO: 1810503 - DNA, 15 bp, Homo sapiens
tgattccattattcc

SEQ ID NO: 1810504 - DNA, 15 bp, Homo sapiens
gattccattattcca

SEQ ID NO: 1810505 - DNA, 15 bp, Homo sapiens
attccattattccac

SEQ ID NO: 1810506 - DNA, 15 bp, Homo sapiens
ttccattattccact

SEQ ID NO: 1810507 - DNA, 15 bp, Homo sapiens
tccattattccacta

SEQ ID NO: 1810508 - DNA, 15 bp, Homo sapiens
ccattattccactat

SEQ ID NO: 1810509 - DNA, 15 bp, Homo sapiens
cattattccactatt

SEQ ID NO: 1810510 - DNA, 15 bp, Homo sapiens
attattccactattg

SEQ ID NO: 1810511 - DNA, 15 bp, Homo sapiens
ttattccactattgc

SEQ ID NO: 1810512 - DNA, 15 bp, Homo sapiens
tattccactattgca

SEQ ID NO: 1810513 - DNA, 15 bp, Homo sapiens
attccactattgcac

SEQ ID NO: 1810514 - DNA, 15 bp, Homo sapiens
ttccactattgcaca

SEQ ID NO: 1810515 - DNA, 15 bp, Homo sapiens
tccactattgcacag

SEQ ID NO: 1810516 - DNA, 15 bp, Homo sapiens
ccactattgcacaga

SEQ ID NO: 1810517 - DNA, 15 bp, Homo sapiens
cactattgcacagaa

SEQ ID NO: 1810518 - DNA, 15 bp, Homo sapiens
actattgcacagaag

SEQ ID NO: 1810519 - DNA, 15 bp, Homo sapiens
ctattgcacagaagc

SEQ ID NO: 1810520 - DNA, 15 bp, Homo sapiens
tattgcacagaagcc

SEQ ID NO: 1810521 - DNA, 15 bp, Homo sapiens
attgcacagaagccc

SEQ ID NO: 1810522 - DNA, 15 bp, Homo sapiens
ttgcacagaagccct

SEQ ID NO: 1810523 - DNA, 15 bp, Homo sapiens
tgcacagaagccctg

SEQ ID NO: 1810524 - DNA, 15 bp, Homo sapiens
gcacagaagccctgc

SEQ ID NO: 1810525 - DNA, 15 bp, Homo sapiens
cacagaagccctgca

SEQ ID NO: 1810526 - DNA, 15 bp, Homo sapiens
acagaagccctgcac

SEQ ID NO: 1810527 - DNA, 15 bp, Homo sapiens
cagaagccctgcact

SEQ ID NO: 1810528 - DNA, 15 bp, Homo sapiens
agaagccctgcactg

SEQ ID NO: 1810529 - DNA, 15 bp, Homo sapiens
gaagccctgcactgt

SEQ ID NO: 1810530 - DNA, 15 bp, Homo sapiens
aagccctgcactgtg

SEQ ID NO: 1810531 - DNA, 15 bp, Homo sapiens
agccctgcactgtgc

SEQ ID NO: 1810532 - DNA, 15 bp, Homo sapiens
gccctgcactgtgct

SEQ ID NO: 1810533 - DNA, 15 bp, Homo sapiens
ccctgcactgtgctt

SEQ ID NO: 1810534 - DNA, 15 bp, Homo sapiens
cctgcactgtgcttg

SEQ ID NO: 1810535 - DNA, 15 bp, Homo sapiens
ctgcactgtgcttgg

SEQ ID NO: 1810536 - DNA, 15 bp, Homo sapiens
tgcactgtgcttgga

SEQ ID NO: 1810537 - DNA, 15 bp, Homo sapiens
gcactgtgcttggaa

SEQ ID NO: 1810538 - DNA, 15 bp, Homo sapiens
cactgtgcttggaat

SEQ ID NO: 1810539 - DNA, 15 bp, Homo sapiens
actgtgcttggaatc

SEQ ID NO: 1810540 - DNA, 15 bp, Homo sapiens
ctgtgcttggaatca

SEQ ID NO: 1810541 - DNA, 15 bp, Homo sapiens
tgtgcttggaatcag

SEQ ID NO: 1810542 - DNA, 15 bp, Homo sapiens
gtgcttggaatcagc

SEQ ID NO: 1810543 - DNA, 15 bp, Homo sapiens
tgcttggaatcagct

SEQ ID NO: 1810544 - DNA, 15 bp, Homo sapiens
gcttggaatcagctt

SEQ ID NO: 1810545 - DNA, 15 bp, Homo sapiens
cttggaatcagcttg

SEQ ID NO: 1810546 - DNA, 15 bp, Homo sapiens
ttggaatcagcttga

SEQ ID NO: 1810547 - DNA, 15 bp, Homo sapiens
tggaatcagcttgat

SEQ ID NO: 1810548 - DNA, 15 bp, Homo sapiens
ggaatcagcttgatc

SEQ ID NO: 1810549 - DNA, 15 bp, Homo sapiens
gaatcagcttgatct

SEQ ID NO: 1810550 - DNA, 15 bp, Homo sapiens
aatcagcttgatctt

SEQ ID NO: 1810551 - DNA, 15 bp, Homo sapiens
atcagcttgatcttg

SEQ ID NO: 1810552 - DNA, 15 bp, Homo sapiens
tcagcttgatcttga

SEQ ID NO: 1810553 - DNA, 15 bp, Homo sapiens
cagcttgatcttgag

SEQ ID NO: 1810554 - DNA, 15 bp, Homo sapiens
agcttgatcttgagt

SEQ ID NO: 1810555 - DNA, 15 bp, Homo sapiens
gcttgatcttgagtt

SEQ ID NO: 1810556 - DNA, 15 bp, Homo sapiens
cttgatcttgagttt

SEQ ID NO: 1810557 - DNA, 15 bp, Homo sapiens
ttgatcttgagtttg

SEQ ID NO: 1810558 - DNA, 15 bp, Homo sapiens
tgatcttgagtttgt

SEQ ID NO: 1810559 - DNA, 15 bp, Homo sapiens
gatcttgagtttgtc

SEQ ID NO: 1810560 - DNA, 15 bp, Homo sapiens
atcttgagtttgtct

SEQ ID NO: 1810561 - DNA, 15 bp, Homo sapiens
tcttgagtttgtctg

SEQ ID NO: 1810562 - DNA, 15 bp, Homo sapiens
cttgagtttgtctgg

SEQ ID NO: 1810563 - DNA, 15 bp, Homo sapiens
ttgagtttgtctggt

SEQ ID NO: 1810564 - DNA, 15 bp, Homo sapiens
tgagtttgtctggtt

SEQ ID NO: 1810565 - DNA, 15 bp, Homo sapiens
gagtttgtctggttt

SEQ ID NO: 1810566 - DNA, 15 bp, Homo sapiens
agtttgtctggtttt

SEQ ID NO: 1810567 - DNA, 15 bp, Homo sapiens
gtttgtctggttttc

SEQ ID NO: 1810568 - DNA, 15 bp, Homo sapiens
tttgtctggttttca

SEQ ID NO: 1810569 - DNA, 15 bp, Homo sapiens
ttgtctggttttcac

SEQ ID NO: 1810570 - DNA, 15 bp, Homo sapiens
tgtctggttttcaca

SEQ ID NO: 1810571 - DNA, 15 bp, Homo sapiens
gtctggttttcacag

SEQ ID NO: 1810572 - DNA, 15 bp, Homo sapiens
tctggttttcacagg

SEQ ID NO: 1810573 - DNA, 15 bp, Homo sapiens
ctggttttcacaggc

SEQ ID NO: 1810574 - DNA, 15 bp, Homo sapiens
tggttttcacaggcc

SEQ ID NO: 1810575 - DNA, 15 bp, Homo sapiens
ggttttcacaggcct

SEQ ID NO: 1810576 - DNA, 15 bp, Homo sapiens
gttttcacaggcctc

SEQ ID NO: 1810577 - DNA, 15 bp, Homo sapiens
ttttcacaggcctcc

SEQ ID NO: 1810578 - DNA, 15 bp, Homo sapiens
tttcacaggcctcct

SEQ ID NO: 1810579 - DNA, 15 bp, Homo sapiens
ttcacaggcctcctc

SEQ ID NO: 1810580 - DNA, 15 bp, Homo sapiens
tcacaggcctcctct

SEQ ID NO: 1810581 - DNA, 15 bp, Homo sapiens
cacaggcctcctctt

SEQ ID NO: 1810582 - DNA, 15 bp, Homo sapiens
acaggcctcctcttc

SEQ ID NO: 1810583 - DNA, 15 bp, Homo sapiens
caggcctcctcttcc

SEQ ID NO: 1810584 - DNA, 15 bp, Homo sapiens
aggcctcctcttcct

SEQ ID NO: 1810585 - DNA, 15 bp, Homo sapiens
ggcctcctcttcctg

SEQ ID NO: 1810586 - DNA, 15 bp, Homo sapiens
gcctcctcttcctga

SEQ ID NO: 1810587 - DNA, 15 bp, Homo sapiens
cctcctcttcctgac

SEQ ID NO: 1810588 - DNA, 15 bp, Homo sapiens
ctcctcttcctgaca

SEQ ID NO: 1810589 - DNA, 15 bp, Homo sapiens
tcctcttcctgacag

SEQ ID NO: 1810590 - DNA, 15 bp, Homo sapiens
cctcttcctgacagt

SEQ ID NO: 1810591 - DNA, 15 bp, Homo sapiens
ctcttcctgacagta

SEQ ID NO: 1810592 - DNA, 15 bp, Homo sapiens
tcttcctgacagtaa

SEQ ID NO: 1810593 - DNA, 15 bp, Homo sapiens
cttcctgacagtaaa

SEQ ID NO: 1810594 - DNA, 15 bp, Homo sapiens
ttcctgacagtaaac

SEQ ID NO: 1810595 - DNA, 15 bp, Homo sapiens
tcctgacagtaaact

SEQ ID NO: 1810596 - DNA, 15 bp, Homo sapiens
cctgacagtaaactt

SEQ ID NO: 1810597 - DNA, 15 bp, Homo sapiens
ctgacagtaaacttg

SEQ ID NO: 1810598 - DNA, 15 bp, Homo sapiens
tgacagtaaacttga

SEQ ID NO: 1810599 - DNA, 15 bp, Homo sapiens
gacagtaaacttgaa

SEQ ID NO: 1810600 - DNA, 15 bp, Homo sapiens
acagtaaacttgaaa

SEQ ID NO: 1810601 - DNA, 15 bp, Homo sapiens
cagtaaacttgaaaa

SEQ ID NO: 1810602 - DNA, 15 bp, Homo sapiens
agtaaacttgaaaat

SEQ ID NO: 1810603 - DNA, 15 bp, Homo sapiens
gtaaacttgaaaata

SEQ ID NO: 1810604 - DNA, 15 bp, Homo sapiens
taaacttgaaaatat

SEQ ID NO: 1810605 - DNA, 15 bp, Homo sapiens
aaacttgaaaatatt

SEQ ID NO: 1810606 - DNA, 15 bp, Homo sapiens
aacttgaaaatattt

SEQ ID NO: 1810607 - DNA, 15 bp, Homo sapiens
acttgaaaatatttt

SEQ ID NO: 1810608 - DNA, 15 bp, Homo sapiens
cttgaaaatattttt

SEQ ID NO: 1810609 - DNA, 15 bp, Homo sapiens
ttgaaaatattttta

SEQ ID NO: 1810610 - DNA, 15 bp, Homo sapiens
tgaaaatatttttat

SEQ ID NO: 1810611 - DNA, 15 bp, Homo sapiens
gaaaatatttttatg

SEQ ID NO: 1810612 - DNA, 15 bp, Homo sapiens
aaaatatttttatgt

SEQ ID NO: 1810613 - DNA, 15 bp, Homo sapiens
aaatatttttatgtg

SEQ ID NO: 1810614 - DNA, 15 bp, Homo sapiens
aatatttttatgtgg

SEQ ID NO: 1810615 - DNA, 15 bp, Homo sapiens
atatttttatgtggg

SEQ ID NO: 1810616 - DNA, 15 bp, Homo sapiens
tatttttatgtgggc

SEQ ID NO: 1810617 - DNA, 15 bp, Homo sapiens
atttttatgtgggca

SEQ ID NO: 1810618 - DNA, 15 bp, Homo sapiens
tttttatgtgggcac

SEQ ID NO: 1810619 - DNA, 15 bp, Homo sapiens
ttttatgtgggcact

SEQ ID NO: 1810620 - DNA, 15 bp, Homo sapiens
tttatgtgggcactt

SEQ ID NO: 1810621 - DNA, 15 bp, Homo sapiens
ttatgtgggcacttg

SEQ ID NO: 1810622 - DNA, 15 bp, Homo sapiens
tatgtgggcacttgg

SEQ ID NO: 1810623 - DNA, 15 bp, Homo sapiens
atgtgggcacttggg

SEQ ID NO: 1810624 - DNA, 15 bp, Homo sapiens
tgtgggcacttgggt

SEQ ID NO: 1810625 - DNA, 15 bp, Homo sapiens
gtgggcacttgggtt

SEQ ID NO: 1810626 - DNA, 15 bp, Homo sapiens
tgggcacttgggttt

SEQ ID NO: 1810627 - DNA, 15 bp, Homo sapiens
gggcacttgggtttt

SEQ ID NO: 1810628 - DNA, 15 bp, Homo sapiens
ggcacttgggttttg

SEQ ID NO: 1810629 - DNA, 15 bp, Homo sapiens
gcacttgggttttga

SEQ ID NO: 1810630 - DNA, 15 bp, Homo sapiens
cacttgggttttgaa

SEQ ID NO: 1810631 - DNA, 15 bp, Homo sapiens
acttgggttttgaag

SEQ ID NO: 1810632 - DNA, 15 bp, Homo sapiens
cttgggttttgaagg

SEQ ID NO: 1810633 - DNA, 15 bp, Homo sapiens
ttgggttttgaagga

SEQ ID NO: 1810634 - DNA, 15 bp, Homo sapiens
tgggttttgaaggac

SEQ ID NO: 1810635 - DNA, 15 bp, Homo sapiens
gggttttgaaggact

SEQ ID NO: 1810636 - DNA, 15 bp, Homo sapiens
ggttttgaaggactc

SEQ ID NO: 1810637 - DNA, 15 bp, Homo sapiens
gttttgaaggactcc

SEQ ID NO: 1810638 - DNA, 15 bp, Homo sapiens
ttttgaaggactcct

SEQ ID NO: 1810639 - DNA, 15 bp, Homo sapiens
tttgaaggactcctt

SEQ ID NO: 1810640 - DNA, 15 bp, Homo sapiens
ttgaaggactccttg

SEQ ID NO: 1810641 - DNA, 15 bp, Homo sapiens
tgaaggactccttgg

SEQ ID NO: 1810642 - DNA, 15 bp, Homo sapiens
gaaggactccttggg

SEQ ID NO: 1810643 - DNA, 15 bp, Homo sapiens
aaggactccttgggc

SEQ ID NO: 1810644 - DNA, 15 bp, Homo sapiens
aggactccttgggcc

SEQ ID NO: 1810645 - DNA, 15 bp, Homo sapiens
ggactccttgggcct

SEQ ID NO: 1810646 - DNA, 15 bp, Homo sapiens
gactccttgggcctc

SEQ ID NO: 1810647 - DNA, 15 bp, Homo sapiens
actccttgggcctca

SEQ ID NO: 1810648 - DNA, 15 bp, Homo sapiens
ctccttgggcctcaa

SEQ ID NO: 1810649 - DNA, 15 bp, Homo sapiens
tccttgggcctcaat

SEQ ID NO: 1810650 - DNA, 15 bp, Homo sapiens
ccttgggcctcaatc

SEQ ID NO: 1810651 - DNA, 15 bp, Homo sapiens
cttgggcctcaatcc

SEQ ID NO: 1810652 - DNA, 15 bp, Homo sapiens
ttgggcctcaatccc

SEQ ID NO: 1810653 - DNA, 15 bp, Homo sapiens
tgggcctcaatcccc

SEQ ID NO: 1810654 - DNA, 15 bp, Homo sapiens
gggcctcaatccccg

SEQ ID NO: 1810655 - DNA, 15 bp, Homo sapiens
ggcctcaatccccgg

SEQ ID NO: 1810656 - DNA, 15 bp, Homo sapiens
gcctcaatccccggt

SEQ ID NO: 1810657 - DNA, 15 bp, Homo sapiens
cctcaatccccggtg

SEQ ID NO: 1810658 - DNA, 15 bp, Homo sapiens
ctcaatccccggtgt

SEQ ID NO: 1810659 - DNA, 15 bp, Homo sapiens
tcaatccccggtgtc

SEQ ID NO: 1810660 - DNA, 15 bp, Homo sapiens
caatccccggtgtcc

SEQ ID NO: 1810661 - DNA, 15 bp, Homo sapiens
aatccccggtgtcct

SEQ ID NO: 1810662 - DNA, 15 bp, Homo sapiens
atccccggtgtccta

SEQ ID NO: 1810663 - DNA, 15 bp, Homo sapiens
tccccggtgtcctaa

SEQ ID NO: 1810664 - DNA, 15 bp, Homo sapiens
ccccggtgtcctaac

SEQ ID NO: 1810665 - DNA, 15 bp, Homo sapiens
cccggtgtcctaact

SEQ ID NO: 1810666 - DNA, 15 bp, Homo sapiens
ccggtgtcctaactc

SEQ ID NO: 1810667 - DNA, 15 bp, Homo sapiens
cggtgtcctaactct

SEQ ID NO: 1810668 - DNA, 15 bp, Homo sapiens
ggtgtcctaactctg

SEQ ID NO: 1810669 - DNA, 15 bp, Homo sapiens
gtgtcctaactctga

SEQ ID NO: 1810670 - DNA, 15 bp, Homo sapiens
tgtcctaactctgag

SEQ ID NO: 1810671 - DNA, 15 bp, Homo sapiens
gtcctaactctgagc

SEQ ID NO: 1810672 - DNA, 15 bp, Homo sapiens
tcctaactctgagct

SEQ ID NO: 1810673 - DNA, 15 bp, Homo sapiens
cctaactctgagcta

SEQ ID NO: 1810674 - DNA, 15 bp, Homo sapiens
ctaactctgagctac

SEQ ID NO: 1810675 - DNA, 15 bp, Homo sapiens
taactctgagctaca

SEQ ID NO: 1810676 - DNA, 15 bp, Homo sapiens
aactctgagctacag

SEQ ID NO: 1810677 - DNA, 15 bp, Homo sapiens
actctgagctacaga

SEQ ID NO: 1810678 - DNA, 15 bp, Homo sapiens
ctctgagctacagag

SEQ ID NO: 1810679 - DNA, 15 bp, Homo sapiens
tctgagctacagagc

SEQ ID NO: 1810680 - DNA, 15 bp, Homo sapiens
ctgagctacagagct

SEQ ID NO: 1810681 - DNA, 15 bp, Homo sapiens
tgagctacagagctg

SEQ ID NO: 1810682 - DNA, 15 bp, Homo sapiens
gagctacagagctga

SEQ ID NO: 1810683 - DNA, 15 bp, Homo sapiens
agctacagagctgac

SEQ ID NO: 1810684 - DNA, 15 bp, Homo sapiens
gctacagagctgact

SEQ ID NO: 1810685 - DNA, 15 bp, Homo sapiens
ctacagagctgacta

SEQ ID NO: 1810686 - DNA, 15 bp, Homo sapiens
tacagagctgactag

SEQ ID NO: 1810687 - DNA, 15 bp, Homo sapiens
acagagctgactaga

SEQ ID NO: 1810688 - DNA, 15 bp, Homo sapiens
cagagctgactagaa

SEQ ID NO: 1810689 - DNA, 15 bp, Homo sapiens
agagctgactagaaa

SEQ ID NO: 1810690 - DNA, 15 bp, Homo sapiens
gagctgactagaaat

SEQ ID NO: 1810691 - DNA, 15 bp, Homo sapiens
agctgactagaaatc

SEQ ID NO: 1810692 - DNA, 15 bp, Homo sapiens
gctgactagaaatcc

SEQ ID NO: 1810693 - DNA, 15 bp, Homo sapiens
ctgactagaaatcct

SEQ ID NO: 1810694 - DNA, 15 bp, Homo sapiens
tgactagaaatcctg

SEQ ID NO: 1810695 - DNA, 15 bp, Homo sapiens
gactagaaatcctgt

SEQ ID NO: 1810696 - DNA, 15 bp, Homo sapiens
actagaaatcctgta

SEQ ID NO: 1810697 - DNA, 15 bp, Homo sapiens
ctagaaatcctgtaa

SEQ ID NO: 1810698 - DNA, 15 bp, Homo sapiens
tagaaatcctgtaag

SEQ ID NO: 1810699 - DNA, 15 bp, Homo sapiens
agaaatcctgtaaga

SEQ ID NO: 1810700 - DNA, 15 bp, Homo sapiens
gaaatcctgtaagaa

SEQ ID NO: 1810701 - DNA, 15 bp, Homo sapiens
aaatcctgtaagaag

SEQ ID NO: 1810702 - DNA, 15 bp, Homo sapiens
aatcctgtaagaaga

SEQ ID NO: 1810703 - DNA, 15 bp, Homo sapiens
atcctgtaagaagac

SEQ ID NO: 1810704 - DNA, 15 bp, Homo sapiens
tcctgtaagaagacc

SEQ ID NO: 1810705 - DNA, 15 bp, Homo sapiens
cctgtaagaagacca

SEQ ID NO: 1810706 - DNA, 15 bp, Homo sapiens
ctgtaagaagaccac

SEQ ID NO: 1810707 - DNA, 15 bp, Homo sapiens
tgtaagaagaccacc

SEQ ID NO: 1810708 - DNA, 15 bp, Homo sapiens
gtaagaagaccacca

SEQ ID NO: 1810709 - DNA, 15 bp, Homo sapiens
taagaagaccaccat

SEQ ID NO: 1810710 - DNA, 15 bp, Homo sapiens
aagaagaccaccatg

SEQ ID NO: 1810711 - DNA, 15 bp, Homo sapiens
agaagaccaccatgt

SEQ ID NO: 1810712 - DNA, 15 bp, Homo sapiens
gaagaccaccatgtg

SEQ ID NO: 1810713 - DNA, 15 bp, Homo sapiens
aagaccaccatgtgg

SEQ ID NO: 1810714 - DNA, 15 bp, Homo sapiens
agaccaccatgtgga

SEQ ID NO: 1810715 - DNA, 15 bp, Homo sapiens
gaccaccatgtggag

SEQ ID NO: 1810716 - DNA, 15 bp, Homo sapiens
accaccatgtggagg

SEQ ID NO: 1810717 - DNA, 15 bp, Homo sapiens
ccaccatgtggagga

SEQ ID NO: 1810718 - DNA, 15 bp, Homo sapiens
caccatgtggaggaa

SEQ ID NO: 1810719 - DNA, 15 bp, Homo sapiens
accatgtggaggaaa

SEQ ID NO: 1810720 - DNA, 15 bp, Homo sapiens
ccatgtggaggaaac

SEQ ID NO: 1810721 - DNA, 15 bp, Homo sapiens
catgtggaggaaacc

SEQ ID NO: 1810722 - DNA, 15 bp, Homo sapiens
atgtggaggaaaccc

SEQ ID NO: 1810723 - DNA, 15 bp, Homo sapiens
tgtggaggaaaccct

SEQ ID NO: 1810724 - DNA, 15 bp, Homo sapiens
gtggaggaaaccctc

SEQ ID NO: 1810725 - DNA, 15 bp, Homo sapiens
tggaggaaaccctcc

SEQ ID NO: 1810726 - DNA, 15 bp, Homo sapiens
ggaggaaaccctcca

SEQ ID NO: 1810727 - DNA, 15 bp, Homo sapiens
gaggaaaccctccaa

SEQ ID NO: 1810728 - DNA, 15 bp, Homo sapiens
aggaaaccctccaaa

SEQ ID NO: 1810729 - DNA, 15 bp, Homo sapiens
ggaaaccctccaaag

SEQ ID NO: 1810730 - DNA, 15 bp, Homo sapiens
gaaaccctccaaagc

SEQ ID NO: 1810731 - DNA, 15 bp, Homo sapiens
aaaccctccaaagca

SEQ ID NO: 1810732 - DNA, 15 bp, Homo sapiens
aaccctccaaagcac

SEQ ID NO: 1810733 - DNA, 15 bp, Homo sapiens
accctccaaagcaca

SEQ ID NO: 1810734 - DNA, 15 bp, Homo sapiens
ccctccaaagcacac

SEQ ID NO: 1810735 - DNA, 15 bp, Homo sapiens
cctccaaagcacaca

SEQ ID NO: 1810736 - DNA, 15 bp, Homo sapiens
ctccaaagcacacaa

SEQ ID NO: 1810737 - DNA, 15 bp, Homo sapiens
tccaaagcacacaaa

SEQ ID NO: 1810738 - DNA, 15 bp, Homo sapiens
ccaaagcacacaaat

SEQ ID NO: 1810739 - DNA, 15 bp, Homo sapiens
caaagcacacaaatc

SEQ ID NO: 1810740 - DNA, 15 bp, Homo sapiens
aaagcacacaaatca

SEQ ID NO: 1810741 - DNA, 15 bp, Homo sapiens
aagcacacaaatcat

SEQ ID NO: 1810742 - DNA, 15 bp, Homo sapiens
agcacacaaatcatc

SEQ ID NO: 1810743 - DNA, 15 bp, Homo sapiens
gcacacaaatcatcc

SEQ ID NO: 1810744 - DNA, 15 bp, Homo sapiens
cacacaaatcatcca

SEQ ID NO: 1810745 - DNA, 15 bp, Homo sapiens
acacaaatcatccat

SEQ ID NO: 1810746 - DNA, 15 bp, Homo sapiens
cacaaatcatccatc

SEQ ID NO: 1810747 - DNA, 15 bp, Homo sapiens
acaaatcatccatct

SEQ ID NO: 1810748 - DNA, 15 bp, Homo sapiens
caaatcatccatctc

SEQ ID NO: 1810749 - DNA, 15 bp, Homo sapiens
aaatcatccatctca

SEQ ID NO: 1810750 - DNA, 15 bp, Homo sapiens
aatcatccatctcag

SEQ ID NO: 1810751 - DNA, 15 bp, Homo sapiens
atcatccatctcaga

SEQ ID NO: 1810752 - DNA, 15 bp, Homo sapiens
tcatccatctcagaa

SEQ ID NO: 1810753 - DNA, 15 bp, Homo sapiens
catccatctcagaag

SEQ ID NO: 1810754 - DNA, 15 bp, Homo sapiens
atccatctcagaagg

SEQ ID NO: 1810755 - DNA, 15 bp, Homo sapiens
tccatctcagaagga

SEQ ID NO: 1810756 - DNA, 15 bp, Homo sapiens
ccatctcagaaggaa

SEQ ID NO: 1810757 - DNA, 15 bp, Homo sapiens
catctcagaaggaac

SEQ ID NO: 1810758 - DNA, 15 bp, Homo sapiens
atctcagaaggaaca

SEQ ID NO: 1810759 - DNA, 15 bp, Homo sapiens
tctcagaaggaacac

SEQ ID NO: 1810760 - DNA, 15 bp, Homo sapiens
ctcagaaggaacacg

SEQ ID NO: 1810761 - DNA, 15 bp, Homo sapiens
tcagaaggaacacga

SEQ ID NO: 1810762 - DNA, 15 bp, Homo sapiens
cagaaggaacacgac

SEQ ID NO: 1810763 - DNA, 15 bp, Homo sapiens
agaaggaacacgact

SEQ ID NO: 1810764 - DNA, 15 bp, Homo sapiens
gaaggaacacgactt

SEQ ID NO: 1810765 - DNA, 15 bp, Homo sapiens
aaggaacacgacttg

SEQ ID NO: 1810766 - DNA, 15 bp, Homo sapiens
aggaacacgacttgg

SEQ ID NO: 1810767 - DNA, 15 bp, Homo sapiens
ggaacacgacttgga

SEQ ID NO: 1810768 - DNA, 15 bp, Homo sapiens
gaacacgacttggaa

SEQ ID NO: 1810769 - DNA, 15 bp, Homo sapiens
aacacgacttggaaa

SEQ ID NO: 1810770 - DNA, 15 bp, Homo sapiens
acacgacttggaaag

SEQ ID NO: 1810771 - DNA, 15 bp, Homo sapiens
cacgacttggaaagg

SEQ ID NO: 1810772 - DNA, 15 bp, Homo sapiens
acgacttggaaaggg

SEQ ID NO: 1810773 - DNA, 15 bp, Homo sapiens
cgacttggaaagggg

SEQ ID NO: 1810774 - DNA, 15 bp, Homo sapiens
gacttggaaagggga

SEQ ID NO: 1810775 - DNA, 15 bp, Homo sapiens
acttggaaaggggaa

SEQ ID NO: 1810776 - DNA, 15 bp, Homo sapiens
cttggaaaggggaag

SEQ ID NO: 1810777 - DNA, 15 bp, Homo sapiens
ttggaaaggggaagg

SEQ ID NO: 1810778 - DNA, 15 bp, Homo sapiens
tggaaaggggaagga

SEQ ID NO: 1810779 - DNA, 15 bp, Homo sapiens
ggaaaggggaaggac

SEQ ID NO: 1810780 - DNA, 15 bp, Homo sapiens
gaaaggggaaggaca

SEQ ID NO: 1810781 - DNA, 15 bp, Homo sapiens
aaaggggaaggacat

SEQ ID NO: 1810782 - DNA, 15 bp, Homo sapiens
aaggggaaggacatg

SEQ ID NO: 1810783 - DNA, 15 bp, Homo sapiens
aggggaaggacatgg

SEQ ID NO: 1810784 - DNA, 15 bp, Homo sapiens
ggggaaggacatggt

SEQ ID NO: 1810785 - DNA, 15 bp, Homo sapiens
gggaaggacatggtg

SEQ ID NO: 1810786 - DNA, 15 bp, Homo sapiens
ggaaggacatggtgg

SEQ ID NO: 1810787 - DNA, 15 bp, Homo sapiens
gaaggacatggtggt

SEQ ID NO: 1810788 - DNA, 15 bp, Homo sapiens
aaggacatggtggtg

SEQ ID NO: 1810789 - DNA, 15 bp, Homo sapiens
aggacatggtggtgt

SEQ ID NO: 1810790 - DNA, 15 bp, Homo sapiens
acatggtggtgtgcc

SEQ ID NO: 1810791 - DNA, 15 bp, Homo sapiens
catggtggtgtgccc

SEQ ID NO: 1810792 - DNA, 15 bp, Homo sapiens
atggtggtgtgccca

SEQ ID NO: 1810793 - DNA, 15 bp, Homo sapiens
tggtggtgtgcccat

SEQ ID NO: 1810794 - DNA, 15 bp, Homo sapiens
ggtggtgtgcccatt

SEQ ID NO: 1810795 - DNA, 15 bp, Homo sapiens
gtggtgtgcccattg

SEQ ID NO: 1810796 - DNA, 15 bp, Homo sapiens
tggtgtgcccattga

SEQ ID NO: 1810797 - DNA, 15 bp, Homo sapiens
ggtgtgcccattgat

SEQ ID NO: 1810798 - DNA, 15 bp, Homo sapiens
gtgtgcccattgatt

SEQ ID NO: 1810799 - DNA, 15 bp, Homo sapiens
tgtgcccattgattg

SEQ ID NO: 1810800 - DNA, 15 bp, Homo sapiens
gtgcccattgattga

SEQ ID NO: 1810801 - DNA, 15 bp, Homo sapiens
tgcccattgattgac

SEQ ID NO: 1810802 - DNA, 15 bp, Homo sapiens
gcccattgattgact

SEQ ID NO: 1810803 - DNA, 15 bp, Homo sapiens
cccattgattgactc

SEQ ID NO: 1810804 - DNA, 15 bp, Homo sapiens
ccattgattgactca

SEQ ID NO: 1810805 - DNA, 15 bp, Homo sapiens
cattgattgactcat

SEQ ID NO: 1810806 - DNA, 15 bp, Homo sapiens
attgattgactcatt

SEQ ID NO: 1810807 - DNA, 15 bp, Homo sapiens
ttgattgactcattc

SEQ ID NO: 1810808 - DNA, 15 bp, Homo sapiens
tgattgactcattca

SEQ ID NO: 1810809 - DNA, 15 bp, Homo sapiens
gattgactcattcag

SEQ ID NO: 1810810 - DNA, 15 bp, Homo sapiens
attgactcattcagt

SEQ ID NO: 1810811 - DNA, 15 bp, Homo sapiens
ttgactcattcagtg

SEQ ID NO: 1810812 - DNA, 15 bp, Homo sapiens
tgactcattcagtga

SEQ ID NO: 1810813 - DNA, 15 bp, Homo sapiens
gactcattcagtgat

SEQ ID NO: 1810814 - DNA, 15 bp, Homo sapiens
actcattcagtgatg

SEQ ID NO: 1810815 - DNA, 15 bp, Homo sapiens
ctcattcagtgatgc

SEQ ID NO: 1810816 - DNA, 15 bp, Homo sapiens
tcattcagtgatgcc

SEQ ID NO: 1810817 - DNA, 15 bp, Homo sapiens
cattcagtgatgcct

SEQ ID NO: 1810818 - DNA, 15 bp, Homo sapiens
attcagtgatgccta

SEQ ID NO: 1810819 - DNA, 15 bp, Homo sapiens
ttcagtgatgcctac

SEQ ID NO: 1810820 - DNA, 15 bp, Homo sapiens
tcagtgatgcctacc

SEQ ID NO: 1810821 - DNA, 15 bp, Homo sapiens
cagtgatgcctaccg

SEQ ID NO: 1810822 - DNA, 15 bp, Homo sapiens
agtgatgcctaccgg

SEQ ID NO: 1810823 - DNA, 15 bp, Homo sapiens
gtgatgcctaccggg

SEQ ID NO: 1810824 - DNA, 15 bp, Homo sapiens
tgatgcctaccgggt

SEQ ID NO: 1810825 - DNA, 15 bp, Homo sapiens
gatgcctaccgggtg

SEQ ID NO: 1810826 - DNA, 15 bp, Homo sapiens
atgcctaccgggtgc

SEQ ID NO: 1810827 - DNA, 15 bp, Homo sapiens
tgcctaccgggtgcc

SEQ ID NO: 1810828 - DNA, 15 bp, Homo sapiens
gcctaccgggtgcct

SEQ ID NO: 1810829 - DNA, 15 bp, Homo sapiens
cctaccgggtgccta

SEQ ID NO: 1810830 - DNA, 15 bp, Homo sapiens
ctaccgggtgcctat

SEQ ID NO: 1810831 - DNA, 15 bp, Homo sapiens
taccgggtgcctatc

SEQ ID NO: 1810832 - DNA, 15 bp, Homo sapiens
accgggtgcctatca

SEQ ID NO: 1810833 - DNA, 15 bp, Homo sapiens
ccgggtgcctatcat

SEQ ID NO: 1810834 - DNA, 15 bp, Homo sapiens
cgggtgcctatcatg

SEQ ID NO: 1810835 - DNA, 15 bp, Homo sapiens
gggtgcctatcatgc

SEQ ID NO: 1810836 - DNA, 15 bp, Homo sapiens
ggtgcctatcatgcc

SEQ ID NO: 1810837 - DNA, 15 bp, Homo sapiens
gtgcctatcatgcca

SEQ ID NO: 1810838 - DNA, 15 bp, Homo sapiens
tgcctatcatgccaa

SEQ ID NO: 1810839 - DNA, 15 bp, Homo sapiens
gcctatcatgccaag

SEQ ID NO: 1810840 - DNA, 15 bp, Homo sapiens
cctatcatgccaagc

SEQ ID NO: 1810841 - DNA, 15 bp, Homo sapiens
ctatcatgccaagct

SEQ ID NO: 1810842 - DNA, 15 bp, Homo sapiens
tatcatgccaagctc

SEQ ID NO: 1810843 - DNA, 15 bp, Homo sapiens
atcatgccaagctct

SEQ ID NO: 1810844 - DNA, 15 bp, Homo sapiens
tcatgccaagctctg

SEQ ID NO: 1810845 - DNA, 15 bp, Homo sapiens
catgccaagctctgc

SEQ ID NO: 1810846 - DNA, 15 bp, Homo sapiens
atgccaagctctgct

SEQ ID NO: 1810847 - DNA, 15 bp, Homo sapiens
tgccaagctctgcta

SEQ ID NO: 1810848 - DNA, 15 bp, Homo sapiens
gccaagctctgctaa

SEQ ID NO: 1810849 - DNA, 15 bp, Homo sapiens
ccaagctctgctaat

SEQ ID NO: 1810850 - DNA, 15 bp, Homo sapiens
caagctctgctaatt

SEQ ID NO: 1810851 - DNA, 15 bp, Homo sapiens
aagctctgctaattg

SEQ ID NO: 1810852 - DNA, 15 bp, Homo sapiens
agctctgctaattgg

SEQ ID NO: 1810853 - DNA, 15 bp, Homo sapiens
gctctgctaattggc

SEQ ID NO: 1810854 - DNA, 15 bp, Homo sapiens
ctctgctaattggca

SEQ ID NO: 1810855 - DNA, 15 bp, Homo sapiens
tctgctaattggcag

SEQ ID NO: 1810856 - DNA, 15 bp, Homo sapiens
ctgctaattggcagg

SEQ ID NO: 1810857 - DNA, 15 bp, Homo sapiens
tgctaattggcaggt

SEQ ID NO: 1810858 - DNA, 15 bp, Homo sapiens
gctaattggcaggtc

SEQ ID NO: 1810859 - DNA, 15 bp, Homo sapiens
ctaattggcaggtct

SEQ ID NO: 1810860 - DNA, 15 bp, Homo sapiens
taattggcaggtctg

SEQ ID NO: 1810861 - DNA, 15 bp, Homo sapiens
aattggcaggtctgc

SEQ ID NO: 1810862 - DNA, 15 bp, Homo sapiens
attggcaggtctgca

SEQ ID NO: 1810863 - DNA, 15 bp, Homo sapiens
ttggcaggtctgcag

SEQ ID NO: 1810864 - DNA, 15 bp, Homo sapiens
tggcaggtctgcaga

SEQ ID NO: 1810865 - DNA, 15 bp, Homo sapiens
ggcaggtctgcagag

SEQ ID NO: 1810866 - DNA, 15 bp, Homo sapiens
gcaggtctgcagagt

SEQ ID NO: 1810867 - DNA, 15 bp, Homo sapiens
caggtctgcagagtg

SEQ ID NO: 1810868 - DNA, 15 bp, Homo sapiens
aggtctgcagagtgc

SEQ ID NO: 1810869 - DNA, 15 bp, Homo sapiens
ggtctgcagagtgct

SEQ ID NO: 1810870 - DNA, 15 bp, Homo sapiens
gtctgcagagtgctg

SEQ ID NO: 1810871 - DNA, 15 bp, Homo sapiens
tctgcagagtgctgg

SEQ ID NO: 1810872 - DNA, 15 bp, Homo sapiens
ctgcagagtgctgga

SEQ ID NO: 1810873 - DNA, 15 bp, Homo sapiens
tgcagagtgctggaa

SEQ ID NO: 1810874 - DNA, 15 bp, Homo sapiens
gcagagtgctggaag

SEQ ID NO: 1810875 - DNA, 15 bp, Homo sapiens
cagagtgctggaaga

SEQ ID NO: 1810876 - DNA, 15 bp, Homo sapiens
agagtgctggaagaa

SEQ ID NO: 1810877 - DNA, 15 bp, Homo sapiens
gagtgctggaagaac

SEQ ID NO: 1810878 - DNA, 15 bp, Homo sapiens
agtgctggaagaact

SEQ ID NO: 1810879 - DNA, 15 bp, Homo sapiens
gtgctggaagaactc

SEQ ID NO: 1810880 - DNA, 15 bp, Homo sapiens
tgctggaagaactca

SEQ ID NO: 1810881 - DNA, 15 bp, Homo sapiens
gctggaagaactcac

SEQ ID NO: 1810882 - DNA, 15 bp, Homo sapiens
ctggaagaactcacc

SEQ ID NO: 1810883 - DNA, 15 bp, Homo sapiens
tggaagaactcacct

SEQ ID NO: 1810884 - DNA, 15 bp, Homo sapiens
ggaagaactcacctc

SEQ ID NO: 1810885 - DNA, 15 bp, Homo sapiens
gaagaactcacctcc

SEQ ID NO: 1810886 - DNA, 15 bp, Homo sapiens
aagaactcacctcct

SEQ ID NO: 1810887 - DNA, 15 bp, Homo sapiens
agaactcacctcctc

SEQ ID NO: 1810888 - DNA, 15 bp, Homo sapiens
gaactcacctcctca

SEQ ID NO: 1810889 - DNA, 15 bp, Homo sapiens
aactcacctcctcag

SEQ ID NO: 1810890 - DNA, 15 bp, Homo sapiens
actcacctcctcagg

SEQ ID NO: 1810891 - DNA, 15 bp, Homo sapiens
ctcacctcctcaggg

SEQ ID NO: 1810892 - DNA, 15 bp, Homo sapiens
tcacctcctcaggga

SEQ ID NO: 1810893 - DNA, 15 bp, Homo sapiens
cacctcctcagggag

SEQ ID NO: 1810894 - DNA, 15 bp, Homo sapiens
acctcctcagggaga

SEQ ID NO: 1810895 - DNA, 15 bp, Homo sapiens
cctcctcagggagaa

SEQ ID NO: 1810896 - DNA, 15 bp, Homo sapiens
ctcctcagggagaaa

SEQ ID NO: 1810897 - DNA, 15 bp, Homo sapiens
tcctcagggagaaaa

SEQ ID NO: 1810898 - DNA, 15 bp, Homo sapiens
cctcagggagaaaac

SEQ ID NO: 1810899 - DNA, 15 bp, Homo sapiens
ctcagggagaaaaca

SEQ ID NO: 1810900 - DNA, 15 bp, Homo sapiens
tcagggagaaaacag

SEQ ID NO: 1810901 - DNA, 15 bp, Homo sapiens
cagggagaaaacaga

SEQ ID NO: 1810902 - DNA, 15 bp, Homo sapiens
agggagaaaacagac

SEQ ID NO: 1810903 - DNA, 15 bp, Homo sapiens
gggagaaaacagaca

SEQ ID NO: 1810904 - DNA, 15 bp, Homo sapiens
ggagaaaacagacaa

SEQ ID NO: 1810905 - DNA, 15 bp, Homo sapiens
gagaaaacagacaaa

SEQ ID NO: 1810906 - DNA, 15 bp, Homo sapiens
agaaaacagacaaaa

SEQ ID NO: 1810907 - DNA, 15 bp, Homo sapiens
gaaaacagacaaaaa

SEQ ID NO: 1810908 - DNA, 15 bp, Homo sapiens
aaaacagacaaaaac

SEQ ID NO: 1810909 - DNA, 15 bp, Homo sapiens
aaacagacaaaaaca

SEQ ID NO: 1810910 - DNA, 15 bp, Homo sapiens
aacagacaaaaacaa

SEQ ID NO: 1810911 - DNA, 15 bp, Homo sapiens
acagacaaaaacaag

SEQ ID NO: 1810912 - DNA, 15 bp, Homo sapiens
cagacaaaaacaagt

SEQ ID NO: 1810913 - DNA, 15 bp, Homo sapiens
agacaaaaacaagta

SEQ ID NO: 1810914 - DNA, 15 bp, Homo sapiens
gacaaaaacaagtaa

SEQ ID NO: 1810915 - DNA, 15 bp, Homo sapiens
acaaaaacaagtaaa

SEQ ID NO: 1810916 - DNA, 15 bp, Homo sapiens
caaaaacaagtaaat

SEQ ID NO: 1810917 - DNA, 15 bp, Homo sapiens
aaaaacaagtaaata

SEQ ID NO: 1810918 - DNA, 15 bp, Homo sapiens
aaaacaagtaaataa

SEQ ID NO: 1810919 - DNA, 15 bp, Homo sapiens
aaacaagtaaataat

SEQ ID NO: 1810920 - DNA, 15 bp, Homo sapiens
aacaagtaaataatg

SEQ ID NO: 1810921 - DNA, 15 bp, Homo sapiens
acaagtaaataatgg

SEQ ID NO: 1810922 - DNA, 15 bp, Homo sapiens
caagtaaataatggg

SEQ ID NO: 1810923 - DNA, 15 bp, Homo sapiens
aagtaaataatggga

SEQ ID NO: 1810924 - DNA, 15 bp, Homo sapiens
agtaaataatgggaa

SEQ ID NO: 1810925 - DNA, 15 bp, Homo sapiens
gtaaataatgggaat

SEQ ID NO: 1810926 - DNA, 15 bp, Homo sapiens
taaataatgggaatg

SEQ ID NO: 1810927 - DNA, 15 bp, Homo sapiens
aaataatgggaatgt

SEQ ID NO: 1810928 - DNA, 15 bp, Homo sapiens
aataatgggaatgtc

SEQ ID NO: 1810929 - DNA, 15 bp, Homo sapiens
ataatgggaatgtca

SEQ ID NO: 1810930 - DNA, 15 bp, Homo sapiens
taatgggaatgtcac

SEQ ID NO: 1810931 - DNA, 15 bp, Homo sapiens
aatgggaatgtcaca

SEQ ID NO: 1810932 - DNA, 15 bp, Homo sapiens
atgggaatgtcacag

SEQ ID NO: 1810933 - DNA, 15 bp, Homo sapiens
tgggaatgtcacagc

SEQ ID NO: 1810934 - DNA, 15 bp, Homo sapiens
gggaatgtcacagca

SEQ ID NO: 1810935 - DNA, 15 bp, Homo sapiens
ggaatgtcacagcaa

SEQ ID NO: 1810936 - DNA, 15 bp, Homo sapiens
gaatgtcacagcaag

SEQ ID NO: 1810937 - DNA, 15 bp, Homo sapiens
aatgtcacagcaagg

SEQ ID NO: 1810938 - DNA, 15 bp, Homo sapiens
atgtcacagcaaggg

SEQ ID NO: 1810939 - DNA, 15 bp, Homo sapiens
tgtcacagcaagggc

SEQ ID NO: 1810940 - DNA, 15 bp, Homo sapiens
gtcacagcaagggca

SEQ ID NO: 1810941 - DNA, 15 bp, Homo sapiens
tcacagcaagggcac

SEQ ID NO: 1810942 - DNA, 15 bp, Homo sapiens
cacagcaagggcaca

SEQ ID NO: 1810943 - DNA, 15 bp, Homo sapiens
acagcaagggcacat

SEQ ID NO: 1810944 - DNA, 15 bp, Homo sapiens
cagcaagggcacatc

SEQ ID NO: 1810945 - DNA, 15 bp, Homo sapiens
agcaagggcacatcc

SEQ ID NO: 1810946 - DNA, 15 bp, Homo sapiens
gcaagggcacatcca

SEQ ID NO: 1810947 - DNA, 15 bp, Homo sapiens
caagggcacatccag

SEQ ID NO: 1810948 - DNA, 15 bp, Homo sapiens
aagggcacatccagg

SEQ ID NO: 1810949 - DNA, 15 bp, Homo sapiens
agggcacatccaggc

SEQ ID NO: 1810950 - DNA, 15 bp, Homo sapiens
gggcacatccaggcc

SEQ ID NO: 1810951 - DNA, 15 bp, Homo sapiens
ggcacatccaggcct

SEQ ID NO: 1810952 - DNA, 15 bp, Homo sapiens
gcacatccaggcctg

SEQ ID NO: 1810953 - DNA, 15 bp, Homo sapiens
cacatccaggcctgg

SEQ ID NO: 1810954 - DNA, 15 bp, Homo sapiens
acatccaggcctggg

SEQ ID NO: 1810955 - DNA, 15 bp, Homo sapiens
catccaggcctgggt

SEQ ID NO: 1810956 - DNA, 15 bp, Homo sapiens
atccaggcctgggtt

SEQ ID NO: 1810957 - DNA, 15 bp, Homo sapiens
tccaggcctgggttg

SEQ ID NO: 1810958 - DNA, 15 bp, Homo sapiens
ccaggcctgggttga

SEQ ID NO: 1810959 - DNA, 15 bp, Homo sapiens
caggcctgggttgaa

SEQ ID NO: 1810960 - DNA, 15 bp, Homo sapiens
aggcctgggttgaag

SEQ ID NO: 1810961 - DNA, 15 bp, Homo sapiens
ggcctgggttgaaga

SEQ ID NO: 1810962 - DNA, 15 bp, Homo sapiens
gcctgggttgaagac

SEQ ID NO: 1810963 - DNA, 15 bp, Homo sapiens
cctgggttgaagacg

SEQ ID NO: 1810964 - DNA, 15 bp, Homo sapiens
ctgggttgaagacgc

SEQ ID NO: 1810965 - DNA, 15 bp, Homo sapiens
tgggttgaagacgct

SEQ ID NO: 1810966 - DNA, 15 bp, Homo sapiens
gggttgaagacgcta

SEQ ID NO: 1810967 - DNA, 15 bp, Homo sapiens
ggttgaagacgctac

SEQ ID NO: 1810968 - DNA, 15 bp, Homo sapiens
gttgaagacgctact

SEQ ID NO: 1810969 - DNA, 15 bp, Homo sapiens
ttgaagacgctactt

SEQ ID NO: 1810970 - DNA, 15 bp, Homo sapiens
tgaagacgctacttt

SEQ ID NO: 1810971 - DNA, 15 bp, Homo sapiens
gaagacgctacttta

SEQ ID NO: 1810972 - DNA, 15 bp, Homo sapiens
aagacgctactttat

SEQ ID NO: 1810973 - DNA, 15 bp, Homo sapiens
agacgctactttatg

SEQ ID NO: 1810974 - DNA, 15 bp, Homo sapiens
gacgctactttatgg

SEQ ID NO: 1810975 - DNA, 15 bp, Homo sapiens
acgctactttatggt

SEQ ID NO: 1810976 - DNA, 15 bp, Homo sapiens
cgctactttatggtg

SEQ ID NO: 1810977 - DNA, 15 bp, Homo sapiens
gctactttatggtgg

SEQ ID NO: 1810978 - DNA, 15 bp, Homo sapiens
ctactttatggtggc

SEQ ID NO: 1810979 - DNA, 15 bp, Homo sapiens
tactttatggtggct

SEQ ID NO: 1810980 - DNA, 15 bp, Homo sapiens
actttatggtggctc

SEQ ID NO: 1810981 - DNA, 15 bp, Homo sapiens
ctttatggtggctca

SEQ ID NO: 1810982 - DNA, 15 bp, Homo sapiens
tttatggtggctcac

SEQ ID NO: 1810983 - DNA, 15 bp, Homo sapiens
ttatggtggctcaca

SEQ ID NO: 1810984 - DNA, 15 bp, Homo sapiens
tatggtggctcacac

SEQ ID NO: 1810985 - DNA, 15 bp, Homo sapiens
ggcgggcggatcacc

SEQ ID NO: 1810986 - DNA, 15 bp, Homo sapiens
gcgggcggatcacct

SEQ ID NO: 1810987 - DNA, 15 bp, Homo sapiens
cgggcggatcacctg

SEQ ID NO: 1810988 - DNA, 15 bp, Homo sapiens
ggagttcaagaccaa

SEQ ID NO: 1810989 - DNA, 15 bp, Homo sapiens
gagttcaagaccaac

SEQ ID NO: 1810990 - DNA, 15 bp, Homo sapiens
agttcaagaccaacc

SEQ ID NO: 1810991 - DNA, 15 bp, Homo sapiens
gttcaagaccaacct

SEQ ID NO: 1810992 - DNA, 15 bp, Homo sapiens
ttcaagaccaacctg

SEQ ID NO: 1810993 - DNA, 15 bp, Homo sapiens
tcaagaccaacctga

SEQ ID NO: 1810994 - DNA, 15 bp, Homo sapiens
caagaccaacctgac

SEQ ID NO: 1810995 - DNA, 15 bp, Homo sapiens
aagaccaacctgacc

SEQ ID NO: 1810996 - DNA, 15 bp, Homo sapiens
agaccaacctgacca

SEQ ID NO: 1810997 - DNA, 15 bp, Homo sapiens
gaccaacctgaccaa

SEQ ID NO: 1810998 - DNA, 15 bp, Homo sapiens
accaacctgaccaac

SEQ ID NO: 1810999 - DNA, 15 bp, Homo sapiens
ccaacctgaccaaca

SEQ ID NO: 1811000 - DNA, 15 bp, Homo sapiens
caacctgaccaacat

SEQ ID NO: 1811001 - DNA, 15 bp, Homo sapiens
aacctgaccaacatg

SEQ ID NO: 1811002 - DNA, 15 bp, Homo sapiens
acctgaccaacatga

SEQ ID NO: 1811003 - DNA, 15 bp, Homo sapiens
cctgaccaacatgac

SEQ ID NO: 1811004 - DNA, 15 bp, Homo sapiens
ctgaccaacatgaca

SEQ ID NO: 1811005 - DNA, 15 bp, Homo sapiens
tgaccaacatgacaa

SEQ ID NO: 1811006 - DNA, 15 bp, Homo sapiens
gaccaacatgacaaa

SEQ ID NO: 1811007 - DNA, 15 bp, Homo sapiens
accaacatgacaaaa

SEQ ID NO: 1811008 - DNA, 15 bp, Homo sapiens
ccaacatgacaaaaa

SEQ ID NO: 1811009 - DNA, 15 bp, Homo sapiens
caacatgacaaaaac

SEQ ID NO: 1811010 - DNA, 15 bp, Homo sapiens
aacatgacaaaaaca

SEQ ID NO: 1811011 - DNA, 15 bp, Homo sapiens
acatgacaaaaacac

SEQ ID NO: 1811012 - DNA, 15 bp, Homo sapiens
catgacaaaaacacg

SEQ ID NO: 1811013 - DNA, 15 bp, Homo sapiens
atgacaaaaacacgc

SEQ ID NO: 1811014 - DNA, 15 bp, Homo sapiens
tgacaaaaacacgcc

SEQ ID NO: 1811015 - DNA, 15 bp, Homo sapiens
gacaaaaacacgcct

SEQ ID NO: 1811016 - DNA, 15 bp, Homo sapiens
acaaaaacacgcctc

SEQ ID NO: 1811017 - DNA, 15 bp, Homo sapiens
caaaaacacgcctct

SEQ ID NO: 1811018 - DNA, 15 bp, Homo sapiens
aaaaacacgcctcta

SEQ ID NO: 1811019 - DNA, 15 bp, Homo sapiens
aaaacacgcctctac

SEQ ID NO: 1811020 - DNA, 15 bp, Homo sapiens
aaacacgcctctact

SEQ ID NO: 1811021 - DNA, 15 bp, Homo sapiens
aacacgcctctacta

SEQ ID NO: 1811022 - DNA, 15 bp, Homo sapiens
acacgcctctactaa

SEQ ID NO: 1811023 - DNA, 15 bp, Homo sapiens
cacgcctctactaaa

SEQ ID NO: 1811024 - DNA, 15 bp, Homo sapiens
acgcctctactaaaa

SEQ ID NO: 1811025 - DNA, 15 bp, Homo sapiens
aaattagccgggtgc

SEQ ID NO: 1811026 - DNA, 15 bp, Homo sapiens
aattagccgggtgca

SEQ ID NO: 1811027 - DNA, 15 bp, Homo sapiens
attagccgggtgcag

SEQ ID NO: 1811028 - DNA, 15 bp, Homo sapiens
ttagccgggtgcagt

SEQ ID NO: 1811029 - DNA, 15 bp, Homo sapiens
tagccgggtgcagtg

SEQ ID NO: 1811030 - DNA, 15 bp, Homo sapiens
agccgggtgcagtgg

SEQ ID NO: 1811031 - DNA, 15 bp, Homo sapiens
gccgggtgcagtggt

SEQ ID NO: 1811032 - DNA, 15 bp, Homo sapiens
ccgggtgcagtggtg

SEQ ID NO: 1811033 - DNA, 15 bp, Homo sapiens
cgggtgcagtggtgg

SEQ ID NO: 1811034 - DNA, 15 bp, Homo sapiens
gggtgcagtggtggg

SEQ ID NO: 1811035 - DNA, 15 bp, Homo sapiens
ggtgcagtggtgggc

SEQ ID NO: 1811036 - DNA, 15 bp, Homo sapiens
gtgcagtggtgggcg

SEQ ID NO: 1811037 - DNA, 15 bp, Homo sapiens
tgcagtggtgggcgc

SEQ ID NO: 1811038 - DNA, 15 bp, Homo sapiens
gcagtggtgggcgcc

SEQ ID NO: 1811039 - DNA, 15 bp, Homo sapiens
cagtggtgggcgcct

SEQ ID NO: 1811040 - DNA, 15 bp, Homo sapiens
agtggtgggcgccta

SEQ ID NO: 1811041 - DNA, 15 bp, Homo sapiens
gtggtgggcgcctat

SEQ ID NO: 1811042 - DNA, 15 bp, Homo sapiens
tggtgggcgcctata

SEQ ID NO: 1811043 - DNA, 15 bp, Homo sapiens
ggtgggcgcctataa

SEQ ID NO: 1811044 - DNA, 15 bp, Homo sapiens
gtgggcgcctataat

SEQ ID NO: 1811045 - DNA, 15 bp, Homo sapiens
tgggcgcctataatc

SEQ ID NO: 1811046 - DNA, 15 bp, Homo sapiens
gggcgcctataatcc

SEQ ID NO: 1811047 - DNA, 15 bp, Homo sapiens
ggcgcctataatccc

SEQ ID NO: 1811048 - DNA, 15 bp, Homo sapiens
gcgcctataatccca

SEQ ID NO: 1811049 - DNA, 15 bp, Homo sapiens
tataatcccagctag

SEQ ID NO: 1811050 - DNA, 15 bp, Homo sapiens
ataatcccagctagt

SEQ ID NO: 1811051 - DNA, 15 bp, Homo sapiens
aatcccagctagtct

SEQ ID NO: 1811052 - DNA, 15 bp, Homo sapiens
atcccagctagtctc

SEQ ID NO: 1811053 - DNA, 15 bp, Homo sapiens
tcccagctagtctcg

SEQ ID NO: 1811054 - DNA, 15 bp, Homo sapiens
cccagctagtctcga

SEQ ID NO: 1811055 - DNA, 15 bp, Homo sapiens
ccagctagtctcgag

SEQ ID NO: 1811056 - DNA, 15 bp, Homo sapiens
cagctagtctcgagg

SEQ ID NO: 1811057 - DNA, 15 bp, Homo sapiens
agctagtctcgaggc

SEQ ID NO: 1811058 - DNA, 15 bp, Homo sapiens
gctagtctcgaggct

SEQ ID NO: 1811059 - DNA, 15 bp, Homo sapiens
ctagtctcgaggctg

SEQ ID NO: 1811060 - DNA, 15 bp, Homo sapiens
tagtctcgaggctga

SEQ ID NO: 1811061 - DNA, 15 bp, Homo sapiens
agtctcgaggctgag

SEQ ID NO: 1811062 - DNA, 15 bp, Homo sapiens
gtctcgaggctgaga

SEQ ID NO: 1811063 - DNA, 15 bp, Homo sapiens
tctcgaggctgagac

SEQ ID NO: 1811064 - DNA, 15 bp, Homo sapiens
ctcgaggctgagaca

SEQ ID NO: 1811065 - DNA, 15 bp, Homo sapiens
tcgaggctgagacat

SEQ ID NO: 1811066 - DNA, 15 bp, Homo sapiens
cgaggctgagacatg

SEQ ID NO: 1811067 - DNA, 15 bp, Homo sapiens
gctgagacatgagaa

SEQ ID NO: 1811068 - DNA, 15 bp, Homo sapiens
ctgagacatgagaat

SEQ ID NO: 1811069 - DNA, 15 bp, Homo sapiens
tgagacatgagaata

SEQ ID NO: 1811070 - DNA, 15 bp, Homo sapiens
gagacatgagaatag

SEQ ID NO: 1811071 - DNA, 15 bp, Homo sapiens
agacatgagaatagc

SEQ ID NO: 1811072 - DNA, 15 bp, Homo sapiens
gacatgagaatagct

SEQ ID NO: 1811073 - DNA, 15 bp, Homo sapiens
acatgagaatagctt

SEQ ID NO: 1811074 - DNA, 15 bp, Homo sapiens
catgagaatagcttg

SEQ ID NO: 1811075 - DNA, 15 bp, Homo sapiens
atgagaatagcttga

SEQ ID NO: 1811076 - DNA, 15 bp, Homo sapiens
tgagaatagcttgaa

SEQ ID NO: 1811077 - DNA, 15 bp, Homo sapiens
gagaatagcttgaac

SEQ ID NO: 1811078 - DNA, 15 bp, Homo sapiens
agaatagcttgaacc

SEQ ID NO: 1811079 - DNA, 15 bp, Homo sapiens
gaatagcttgaaccc

SEQ ID NO: 1811080 - DNA, 15 bp, Homo sapiens
aatagcttgaacccg

SEQ ID NO: 1811081 - DNA, 15 bp, Homo sapiens
atagcttgaacccgg

SEQ ID NO: 1811082 - DNA, 15 bp, Homo sapiens
tagcttgaacccggg

SEQ ID NO: 1811083 - DNA, 15 bp, Homo sapiens
agcttgaacccggga

SEQ ID NO: 1811084 - DNA, 15 bp, Homo sapiens
ggcggaggttgcaga

SEQ ID NO: 1811085 - DNA, 15 bp, Homo sapiens
gcggaggttgcagag

SEQ ID NO: 1811086 - DNA, 15 bp, Homo sapiens
cggaggttgcagagc

SEQ ID NO: 1811087 - DNA, 15 bp, Homo sapiens
ggaggttgcagagcc

SEQ ID NO: 1811088 - DNA, 15 bp, Homo sapiens
gaggttgcagagcct

SEQ ID NO: 1811089 - DNA, 15 bp, Homo sapiens
aggttgcagagccta

SEQ ID NO: 1811090 - DNA, 15 bp, Homo sapiens
ggttgcagagcctag

SEQ ID NO: 1811091 - DNA, 15 bp, Homo sapiens
gttgcagagcctaga

SEQ ID NO: 1811092 - DNA, 15 bp, Homo sapiens
ttgcagagcctagat

SEQ ID NO: 1811093 - DNA, 15 bp, Homo sapiens
tgcagagcctagata

SEQ ID NO: 1811094 - DNA, 15 bp, Homo sapiens
gcagagcctagatag

SEQ ID NO: 1811095 - DNA, 15 bp, Homo sapiens
cagagcctagatagc

SEQ ID NO: 1811096 - DNA, 15 bp, Homo sapiens
agagcctagatagcg

SEQ ID NO: 1811097 - DNA, 15 bp, Homo sapiens
gagcctagatagcgc

SEQ ID NO: 1811098 - DNA, 15 bp, Homo sapiens
agcctagatagcgcc

SEQ ID NO: 1811099 - DNA, 15 bp, Homo sapiens
gcctagatagcgcca

SEQ ID NO: 1811100 - DNA, 15 bp, Homo sapiens
cctagatagcgccat

SEQ ID NO: 1811101 - DNA, 15 bp, Homo sapiens
ctagatagcgccatt

SEQ ID NO: 1811102 - DNA, 15 bp, Homo sapiens
tagatagcgccattg

SEQ ID NO: 1811103 - DNA, 15 bp, Homo sapiens
agatagcgccattga

SEQ ID NO: 1811104 - DNA, 15 bp, Homo sapiens
gatagcgccattgaa

SEQ ID NO: 1811105 - DNA, 15 bp, Homo sapiens
atagcgccattgaac

SEQ ID NO: 1811106 - DNA, 15 bp, Homo sapiens
tagcgccattgaact

SEQ ID NO: 1811107 - DNA, 15 bp, Homo sapiens
agcgccattgaactg

SEQ ID NO: 1811108 - DNA, 15 bp, Homo sapiens
gcgccattgaactgt

SEQ ID NO: 1811109 - DNA, 15 bp, Homo sapiens
cgccattgaactgta

SEQ ID NO: 1811110 - DNA, 15 bp, Homo sapiens
gccattgaactgtag

SEQ ID NO: 1811111 - DNA, 15 bp, Homo sapiens
ccattgaactgtagc

SEQ ID NO: 1811112 - DNA, 15 bp, Homo sapiens
cattgaactgtagcc

SEQ ID NO: 1811113 - DNA, 15 bp, Homo sapiens
attgaactgtagcct

SEQ ID NO: 1811114 - DNA, 15 bp, Homo sapiens
ttgaactgtagcctg

SEQ ID NO: 1811115 - DNA, 15 bp, Homo sapiens
tgaactgtagcctgg

SEQ ID NO: 1811116 - DNA, 15 bp, Homo sapiens
gaactgtagcctggg

SEQ ID NO: 1811117 - DNA, 15 bp, Homo sapiens
aactgtagcctgggc

SEQ ID NO: 1811118 - DNA, 15 bp, Homo sapiens
gcaacagagcacgac

SEQ ID NO: 1811119 - DNA, 15 bp, Homo sapiens
caacagagcacgact

SEQ ID NO: 1811120 - DNA, 15 bp, Homo sapiens
aacagagcacgactc

SEQ ID NO: 1811121 - DNA, 15 bp, Homo sapiens
acagagcacgactcc

SEQ ID NO: 1811122 - DNA, 15 bp, Homo sapiens
cagagcacgactccg

SEQ ID NO: 1811123 - DNA, 15 bp, Homo sapiens
agagcacgactccgt

SEQ ID NO: 1811124 - DNA, 15 bp, Homo sapiens
gagcacgactccgtc

SEQ ID NO: 1811125 - DNA, 15 bp, Homo sapiens
agcacgactccgtct

SEQ ID NO: 1811126 - DNA, 15 bp, Homo sapiens
gcacgactccgtctc

SEQ ID NO: 1811127 - DNA, 15 bp, Homo sapiens
cacgactccgtctca

SEQ ID NO: 1811128 - DNA, 15 bp, Homo sapiens
acgactccgtctcaa

SEQ ID NO: 1811129 - DNA, 15 bp, Homo sapiens
cgactccgtctcaaa

SEQ ID NO: 1811130 - DNA, 15 bp, Homo sapiens
tccgtctcaaaaaat

SEQ ID NO: 1811131 - DNA, 15 bp, Homo sapiens
ccgtctcaaaaaata

SEQ ID NO: 1811132 - DNA, 15 bp, Homo sapiens
cgtctcaaaaaataa

SEQ ID NO: 1811133 - DNA, 15 bp, Homo sapiens
gtctcaaaaaataaa

SEQ ID NO: 1811134 - DNA, 15 bp, Homo sapiens
aaataaataaaaaac

SEQ ID NO: 1811135 - DNA, 15 bp, Homo sapiens
aataaataaaaaaca

SEQ ID NO: 1811136 - DNA, 15 bp, Homo sapiens
ataaataaaaaacaa

SEQ ID NO: 1811137 - DNA, 15 bp, Homo sapiens
taaataaaaaacaac

SEQ ID NO: 1811138 - DNA, 15 bp, Homo sapiens
aaataaaaaacaaca

SEQ ID NO: 1811139 - DNA, 15 bp, Homo sapiens
aataaaaaacaacac

SEQ ID NO: 1811140 - DNA, 15 bp, Homo sapiens
ataaaaaacaacacg

SEQ ID NO: 1811141 - DNA, 15 bp, Homo sapiens
taaaaaacaacacgc

SEQ ID NO: 1811142 - DNA, 15 bp, Homo sapiens
aaaaaacaacacgct

SEQ ID NO: 1811143 - DNA, 15 bp, Homo sapiens
aaaaacaacacgcta

SEQ ID NO: 1811144 - DNA, 15 bp, Homo sapiens
aaaacaacacgctac

SEQ ID NO: 1811145 - DNA, 15 bp, Homo sapiens
aaacaacacgctact

SEQ ID NO: 1811146 - DNA, 15 bp, Homo sapiens
aacaacacgctactt

SEQ ID NO: 1811147 - DNA, 15 bp, Homo sapiens
acaacacgctacttt

SEQ ID NO: 1811148 - DNA, 15 bp, Homo sapiens
caacacgctacttta

SEQ ID NO: 1811149 - DNA, 15 bp, Homo sapiens
aacacgctactttag

SEQ ID NO: 1811150 - DNA, 15 bp, Homo sapiens
acacgctactttaga

SEQ ID NO: 1811151 - DNA, 15 bp, Homo sapiens
cacgctactttagag

SEQ ID NO: 1811152 - DNA, 15 bp, Homo sapiens
acgctactttagaga

SEQ ID NO: 1811153 - DNA, 15 bp, Homo sapiens
cgctactttagagaa

SEQ ID NO: 1811154 - DNA, 15 bp, Homo sapiens
gctactttagagaac

SEQ ID NO: 1811155 - DNA, 15 bp, Homo sapiens
ctactttagagaact

SEQ ID NO: 1811156 - DNA, 15 bp, Homo sapiens
tactttagagaactc

SEQ ID NO: 1811157 - DNA, 15 bp, Homo sapiens
actttagagaactct

SEQ ID NO: 1811158 - DNA, 15 bp, Homo sapiens
ctttagagaactctc

SEQ ID NO: 1811159 - DNA, 15 bp, Homo sapiens
tttagagaactctct

SEQ ID NO: 1811160 - DNA, 15 bp, Homo sapiens
ttagagaactctctg

SEQ ID NO: 1811161 - DNA, 15 bp, Homo sapiens
tagagaactctctga

SEQ ID NO: 1811162 - DNA, 15 bp, Homo sapiens
agagaactctctgag

SEQ ID NO: 1811163 - DNA, 15 bp, Homo sapiens
gagaactctctgagg

SEQ ID NO: 1811164 - DNA, 15 bp, Homo sapiens
agaactctctgagga

SEQ ID NO: 1811165 - DNA, 15 bp, Homo sapiens
gaactctctgaggat

SEQ ID NO: 1811166 - DNA, 15 bp, Homo sapiens
aactctctgaggata

SEQ ID NO: 1811167 - DNA, 15 bp, Homo sapiens
actctctgaggatag

SEQ ID NO: 1811168 - DNA, 15 bp, Homo sapiens
ctctctgaggataga

SEQ ID NO: 1811169 - DNA, 15 bp, Homo sapiens
tctctgaggatagat

SEQ ID NO: 1811170 - DNA, 15 bp, Homo sapiens
ctctgaggatagatc

SEQ ID NO: 1811171 - DNA, 15 bp, Homo sapiens
tctgaggatagatct

SEQ ID NO: 1811172 - DNA, 15 bp, Homo sapiens
ctgaggatagatctc

SEQ ID NO: 1811173 - DNA, 15 bp, Homo sapiens
tgaggatagatctca

SEQ ID NO: 1811174 - DNA, 15 bp, Homo sapiens
gaggatagatctcaa

SEQ ID NO: 1811175 - DNA, 15 bp, Homo sapiens
aggatagatctcaac

SEQ ID NO: 1811176 - DNA, 15 bp, Homo sapiens
ggatagatctcaaca

SEQ ID NO: 1811177 - DNA, 15 bp, Homo sapiens
gatagatctcaacag

SEQ ID NO: 1811178 - DNA, 15 bp, Homo sapiens
atagatctcaacagc

SEQ ID NO: 1811179 - DNA, 15 bp, Homo sapiens
tagatctcaacagcc

SEQ ID NO: 1811180 - DNA, 15 bp, Homo sapiens
agatctcaacagcca

SEQ ID NO: 1811181 - DNA, 15 bp, Homo sapiens
gatctcaacagccaa

SEQ ID NO: 1811182 - DNA, 15 bp, Homo sapiens
atctcaacagccaac

SEQ ID NO: 1811183 - DNA, 15 bp, Homo sapiens
tctcaacagccaacc

SEQ ID NO: 1811184 - DNA, 15 bp, Homo sapiens
ctcaacagccaacca

SEQ ID NO: 1811185 - DNA, 15 bp, Homo sapiens
tcaacagccaaccat

SEQ ID NO: 1811186 - DNA, 15 bp, Homo sapiens
caacagccaaccatt

SEQ ID NO: 1811187 - DNA, 15 bp, Homo sapiens
aacagccaaccattg

SEQ ID NO: 1811188 - DNA, 15 bp, Homo sapiens
acagccaaccattgt

SEQ ID NO: 1811189 - DNA, 15 bp, Homo sapiens
cagccaaccattgtc

SEQ ID NO: 1811190 - DNA, 15 bp, Homo sapiens
agccaaccattgtcc

SEQ ID NO: 1811191 - DNA, 15 bp, Homo sapiens
gccaaccattgtcca

SEQ ID NO: 1811192 - DNA, 15 bp, Homo sapiens
ccaaccattgtccaa

SEQ ID NO: 1811193 - DNA, 15 bp, Homo sapiens
caaccattgtccaaa

SEQ ID NO: 1811194 - DNA, 15 bp, Homo sapiens
aaccattgtccaaac

SEQ ID NO: 1811195 - DNA, 15 bp, Homo sapiens
accattgtccaaaca

SEQ ID NO: 1811196 - DNA, 15 bp, Homo sapiens
ccattgtccaaacaa

SEQ ID NO: 1811197 - DNA, 15 bp, Homo sapiens
cattgtccaaacaac

SEQ ID NO: 1811198 - DNA, 15 bp, Homo sapiens
attgtccaaacaact

SEQ ID NO: 1811199 - DNA, 15 bp, Homo sapiens
ttgtccaaacaactg

SEQ ID NO: 1811200 - DNA, 15 bp, Homo sapiens
tgtccaaacaactgt

SEQ ID NO: 1811201 - DNA, 15 bp, Homo sapiens
gtccaaacaactgtg

SEQ ID NO: 1811202 - DNA, 15 bp, Homo sapiens
tccaaacaactgtgc

SEQ ID NO: 1811203 - DNA, 15 bp, Homo sapiens
ccaaacaactgtgca

SEQ ID NO: 1811204 - DNA, 15 bp, Homo sapiens
caaacaactgtgcaa

SEQ ID NO: 1811205 - DNA, 15 bp, Homo sapiens
aaacaactgtgcaag

SEQ ID NO: 1811206 - DNA, 15 bp, Homo sapiens
aacaactgtgcaagg

SEQ ID NO: 1811207 - DNA, 15 bp, Homo sapiens
acaactgtgcaaggg

SEQ ID NO: 1811208 - DNA, 15 bp, Homo sapiens
caactgtgcaagggc

SEQ ID NO: 1811209 - DNA, 15 bp, Homo sapiens
aactgtgcaagggca

SEQ ID NO: 1811210 - DNA, 15 bp, Homo sapiens
actgtgcaagggcag

SEQ ID NO: 1811211 - DNA, 15 bp, Homo sapiens
ctgtgcaagggcagg

SEQ ID NO: 1811212 - DNA, 15 bp, Homo sapiens
tgtgcaagggcagga

SEQ ID NO: 1811213 - DNA, 15 bp, Homo sapiens
gtgcaagggcaggaa

SEQ ID NO: 1811214 - DNA, 15 bp, Homo sapiens
tgcaagggcaggaag

SEQ ID NO: 1811215 - DNA, 15 bp, Homo sapiens
gcaagggcaggaaga

SEQ ID NO: 1811216 - DNA, 15 bp, Homo sapiens
caagggcaggaagac

SEQ ID NO: 1811217 - DNA, 15 bp, Homo sapiens
aagggcaggaagact

SEQ ID NO: 1811218 - DNA, 15 bp, Homo sapiens
agggcaggaagactg

SEQ ID NO: 1811219 - DNA, 15 bp, Homo sapiens
gggcaggaagactga

SEQ ID NO: 1811220 - DNA, 15 bp, Homo sapiens
ggcaggaagactgaa

SEQ ID NO: 1811221 - DNA, 15 bp, Homo sapiens
gcaggaagactgaag

SEQ ID NO: 1811222 - DNA, 15 bp, Homo sapiens
caggaagactgaagc

SEQ ID NO: 1811223 - DNA, 15 bp, Homo sapiens
aggaagactgaagct

SEQ ID NO: 1811224 - DNA, 15 bp, Homo sapiens
ggaagactgaagctg

SEQ ID NO: 1811225 - DNA, 15 bp, Homo sapiens
gaagactgaagctgg

SEQ ID NO: 1811226 - DNA, 15 bp, Homo sapiens
aagactgaagctggt

SEQ ID NO: 1811227 - DNA, 15 bp, Homo sapiens
agactgaagctggtt

SEQ ID NO: 1811228 - DNA, 15 bp, Homo sapiens
gactgaagctggttg

SEQ ID NO: 1811229 - DNA, 15 bp, Homo sapiens
actgaagctggttga

SEQ ID NO: 1811230 - DNA, 15 bp, Homo sapiens
ctgaagctggttgaa

SEQ ID NO: 1811231 - DNA, 15 bp, Homo sapiens
tgaagctggttgaac

SEQ ID NO: 1811232 - DNA, 15 bp, Homo sapiens
gaagctggttgaaca

SEQ ID NO: 1811233 - DNA, 15 bp, Homo sapiens
aagctggttgaacac

SEQ ID NO: 1811234 - DNA, 15 bp, Homo sapiens
agctggttgaacact

SEQ ID NO: 1811235 - DNA, 15 bp, Homo sapiens
gctggttgaacactt

SEQ ID NO: 1811236 - DNA, 15 bp, Homo sapiens
ctggttgaacacttt

SEQ ID NO: 1811237 - DNA, 15 bp, Homo sapiens
tggttgaacactttt

SEQ ID NO: 1811238 - DNA, 15 bp, Homo sapiens
ggttgaacacttttg

SEQ ID NO: 1811239 - DNA, 15 bp, Homo sapiens
gttgaacacttttgc

SEQ ID NO: 1811240 - DNA, 15 bp, Homo sapiens
ttgaacacttttgct

SEQ ID NO: 1811241 - DNA, 15 bp, Homo sapiens
tgaacacttttgctt

SEQ ID NO: 1811242 - DNA, 15 bp, Homo sapiens
gaacacttttgcttt

SEQ ID NO: 1811243 - DNA, 15 bp, Homo sapiens
aacacttttgcttta

SEQ ID NO: 1811244 - DNA, 15 bp, Homo sapiens
acacttttgctttac

SEQ ID NO: 1811245 - DNA, 15 bp, Homo sapiens
cacttttgctttacc

SEQ ID NO: 1811246 - DNA, 15 bp, Homo sapiens
acttttgctttacct

SEQ ID NO: 1811247 - DNA, 15 bp, Homo sapiens
cttttgctttacctg

SEQ ID NO: 1811248 - DNA, 15 bp, Homo sapiens
ttttgctttacctgg

SEQ ID NO: 1811249 - DNA, 15 bp, Homo sapiens
tttgctttacctgga

SEQ ID NO: 1811250 - DNA, 15 bp, Homo sapiens
ttgctttacctggac

SEQ ID NO: 1811251 - DNA, 15 bp, Homo sapiens
tgctttacctggacc

SEQ ID NO: 1811252 - DNA, 15 bp, Homo sapiens
gctttacctggacct

SEQ ID NO: 1811253 - DNA, 15 bp, Homo sapiens
ctttacctggacctg

SEQ ID NO: 1811254 - DNA, 15 bp, Homo sapiens
tttacctggacctga

SEQ ID NO: 1811255 - DNA, 15 bp, Homo sapiens
ttacctggacctgat

SEQ ID NO: 1811256 - DNA, 15 bp, Homo sapiens
tacctggacctgatt

SEQ ID NO: 1811257 - DNA, 15 bp, Homo sapiens
acctggacctgattt

SEQ ID NO: 1811258 - DNA, 15 bp, Homo sapiens
cctggacctgatttt

SEQ ID NO: 1811259 - DNA, 15 bp, Homo sapiens
ctggacctgattttt

SEQ ID NO: 1811260 - DNA, 15 bp, Homo sapiens
tggacctgatttttt

SEQ ID NO: 1811261 - DNA, 15 bp, Homo sapiens
ggacctgattttttt

SEQ ID NO: 1811262 - DNA, 15 bp, Homo sapiens
gacctgatttttttt

SEQ ID NO: 1811263 - DNA, 15 bp, Homo sapiens
acctgattttttttt

SEQ ID NO: 1811264 - DNA, 15 bp, Homo sapiens
cctgatttttttttt

SEQ ID NO: 1811265 - DNA, 15 bp, Homo sapiens
ctgattttttttttc

SEQ ID NO: 1811266 - DNA, 15 bp, Homo sapiens
tgattttttttttcc

SEQ ID NO: 1811267 - DNA, 15 bp, Homo sapiens
gattttttttttcct

SEQ ID NO: 1811268 - DNA, 15 bp, Homo sapiens
attttttttttcctc

SEQ ID NO: 1811269 - DNA, 15 bp, Homo sapiens
ttttttttttcctcc

SEQ ID NO: 1811270 - DNA, 15 bp, Homo sapiens
tttttttttcctcca

SEQ ID NO: 1811271 - DNA, 15 bp, Homo sapiens
ttttttttcctccat

SEQ ID NO: 1811272 - DNA, 15 bp, Homo sapiens
tttttttcctccatg

SEQ ID NO: 1811273 - DNA, 15 bp, Homo sapiens
ttttttcctccatgc

SEQ ID NO: 1811274 - DNA, 15 bp, Homo sapiens
tttttcctccatgca

SEQ ID NO: 1811275 - DNA, 15 bp, Homo sapiens
ttttcctccatgcag

SEQ ID NO: 1811276 - DNA, 15 bp, Homo sapiens
tttcctccatgcaga

SEQ ID NO: 1811277 - DNA, 15 bp, Homo sapiens
ttcctccatgcagaa

SEQ ID NO: 1811278 - DNA, 15 bp, Homo sapiens
tcctccatgcagaaa

SEQ ID NO: 1811279 - DNA, 15 bp, Homo sapiens
cctccatgcagaaaa

SEQ ID NO: 1811280 - DNA, 15 bp, Homo sapiens
ctccatgcagaaaag

SEQ ID NO: 1811281 - DNA, 15 bp, Homo sapiens
tccatgcagaaaaga

SEQ ID NO: 1811282 - DNA, 15 bp, Homo sapiens
ccatgcagaaaagaa

SEQ ID NO: 1811283 - DNA, 15 bp, Homo sapiens
catgcagaaaagaaa

SEQ ID NO: 1811284 - DNA, 15 bp, Homo sapiens
atgcagaaaagaaaa

SEQ ID NO: 1811285 - DNA, 15 bp, Homo sapiens
tgcagaaaagaaaaa

SEQ ID NO: 1811286 - DNA, 15 bp, Homo sapiens
gcagaaaagaaaaag

SEQ ID NO: 1811287 - DNA, 15 bp, Homo sapiens
cagaaaagaaaaaga

SEQ ID NO: 1811288 - DNA, 15 bp, Homo sapiens
agaaaagaaaaagat

SEQ ID NO: 1811289 - DNA, 15 bp, Homo sapiens
gaaaagaaaaagata

SEQ ID NO: 1811290 - DNA, 15 bp, Homo sapiens
aaaagaaaaagataa

SEQ ID NO: 1811291 - DNA, 15 bp, Homo sapiens
aaagaaaaagataag

SEQ ID NO: 1811292 - DNA, 15 bp, Homo sapiens
aagaaaaagataagt

SEQ ID NO: 1811293 - DNA, 15 bp, Homo sapiens
agaaaaagataagtg

SEQ ID NO: 1811294 - DNA, 15 bp, Homo sapiens
gaaaaagataagtgc

SEQ ID NO: 1811295 - DNA, 15 bp, Homo sapiens
aaaaagataagtgcc

SEQ ID NO: 1811296 - DNA, 15 bp, Homo sapiens
aaaagataagtgcct

SEQ ID NO: 1811297 - DNA, 15 bp, Homo sapiens
aaagataagtgccta

SEQ ID NO: 1811298 - DNA, 15 bp, Homo sapiens
aagataagtgcctat

SEQ ID NO: 1811299 - DNA, 15 bp, Homo sapiens
agataagtgcctatt

SEQ ID NO: 1811300 - DNA, 15 bp, Homo sapiens
gataagtgcctattt

SEQ ID NO: 1811301 - DNA, 15 bp, Homo sapiens
ataagtgcctatttt

SEQ ID NO: 1811302 - DNA, 15 bp, Homo sapiens
taagtgcctattttt

SEQ ID NO: 1811303 - DNA, 15 bp, Homo sapiens
aagtgcctatttttg

SEQ ID NO: 1811304 - DNA, 15 bp, Homo sapiens
agtgcctatttttga

SEQ ID NO: 1811305 - DNA, 15 bp, Homo sapiens
gtgcctatttttgat

SEQ ID NO: 1811306 - DNA, 15 bp, Homo sapiens
tgcctatttttgatt

SEQ ID NO: 1811307 - DNA, 15 bp, Homo sapiens
gcctatttttgattt

SEQ ID NO: 1811308 - DNA, 15 bp, Homo sapiens
cctatttttgatttg

SEQ ID NO: 1811309 - DNA, 15 bp, Homo sapiens
ctatttttgatttgc

SEQ ID NO: 1811310 - DNA, 15 bp, Homo sapiens
tatttttgatttgct

SEQ ID NO: 1811311 - DNA, 15 bp, Homo sapiens
atttttgatttgcta

SEQ ID NO: 1811312 - DNA, 15 bp, Homo sapiens
tttttgatttgctaa

SEQ ID NO: 1811313 - DNA, 15 bp, Homo sapiens
ttttgatttgctaat

SEQ ID NO: 1811314 - DNA, 15 bp, Homo sapiens
tttgatttgctaatg

SEQ ID NO: 1811315 - DNA, 15 bp, Homo sapiens
ttgatttgctaatgc

SEQ ID NO: 1811316 - DNA, 15 bp, Homo sapiens
tgatttgctaatgca

SEQ ID NO: 1811317 - DNA, 15 bp, Homo sapiens
gatttgctaatgcag

SEQ ID NO: 1811318 - DNA, 15 bp, Homo sapiens
atttgctaatgcagc

SEQ ID NO: 1811319 - DNA, 15 bp, Homo sapiens
tttgctaatgcagct

SEQ ID NO: 1811320 - DNA, 15 bp, Homo sapiens
ttgctaatgcagctt

SEQ ID NO: 1811321 - DNA, 15 bp, Homo sapiens
tgctaatgcagcttt

SEQ ID NO: 1811322 - DNA, 15 bp, Homo sapiens
gctaatgcagctttt

SEQ ID NO: 1811323 - DNA, 15 bp, Homo sapiens
ctaatgcagcttttc

SEQ ID NO: 1811324 - DNA, 15 bp, Homo sapiens
taatgcagcttttct

SEQ ID NO: 1811325 - DNA, 15 bp, Homo sapiens
aatgcagcttttctt

SEQ ID NO: 1811326 - DNA, 15 bp, Homo sapiens
atgcagcttttcttt

SEQ ID NO: 1811327 - DNA, 15 bp, Homo sapiens
tgcagcttttcttta

SEQ ID NO: 1811328 - DNA, 15 bp, Homo sapiens
gcagcttttctttat

SEQ ID NO: 1811329 - DNA, 15 bp, Homo sapiens
cagcttttctttatt

SEQ ID NO: 1811330 - DNA, 15 bp, Homo sapiens
agcttttctttattt

SEQ ID NO: 1811331 - DNA, 15 bp, Homo sapiens
gcttttctttatttg

SEQ ID NO: 1811332 - DNA, 15 bp, Homo sapiens
cttttctttatttgt

SEQ ID NO: 1811333 - DNA, 15 bp, Homo sapiens
ttttctttatttgta

SEQ ID NO: 1811334 - DNA, 15 bp, Homo sapiens
tttctttatttgtac

SEQ ID NO: 1811335 - DNA, 15 bp, Homo sapiens
ttctttatttgtact

SEQ ID NO: 1811336 - DNA, 15 bp, Homo sapiens
tctttatttgtacta

SEQ ID NO: 1811337 - DNA, 15 bp, Homo sapiens
ctttatttgtactaa

SEQ ID NO: 1811338 - DNA, 15 bp, Homo sapiens
tttatttgtactaag

SEQ ID NO: 1811339 - DNA, 15 bp, Homo sapiens
ttatttgtactaagg

SEQ ID NO: 1811340 - DNA, 15 bp, Homo sapiens
tatttgtactaaggc

SEQ ID NO: 1811341 - DNA, 15 bp, Homo sapiens
atttgtactaaggct

SEQ ID NO: 1811342 - DNA, 15 bp, Homo sapiens
tttgtactaaggctg

SEQ ID NO: 1811343 - DNA, 15 bp, Homo sapiens
ttgtactaaggctgc

SEQ ID NO: 1811344 - DNA, 15 bp, Homo sapiens
tgtactaaggctgca

SEQ ID NO: 1811345 - DNA, 15 bp, Homo sapiens
gtactaaggctgcat

SEQ ID NO: 1811346 - DNA, 15 bp, Homo sapiens
tactaaggctgcata

SEQ ID NO: 1811347 - DNA, 15 bp, Homo sapiens
actaaggctgcataa

SEQ ID NO: 1811348 - DNA, 15 bp, Homo sapiens
ctaaggctgcataat

SEQ ID NO: 1811349 - DNA, 15 bp, Homo sapiens
taaggctgcataatg

SEQ ID NO: 1811350 - DNA, 15 bp, Homo sapiens
aaggctgcataatgt

SEQ ID NO: 1811351 - DNA, 15 bp, Homo sapiens
aggctgcataatgta

SEQ ID NO: 1811352 - DNA, 15 bp, Homo sapiens
ggctgcataatgtag

SEQ ID NO: 1811353 - DNA, 15 bp, Homo sapiens
gctgcataatgtagg

SEQ ID NO: 1811354 - DNA, 15 bp, Homo sapiens
ctgcataatgtaggc

SEQ ID NO: 1811355 - DNA, 15 bp, Homo sapiens
tgcataatgtaggct

SEQ ID NO: 1811356 - DNA, 15 bp, Homo sapiens
gcataatgtaggctt

SEQ ID NO: 1811357 - DNA, 15 bp, Homo sapiens
cataatgtaggcttt

SEQ ID NO: 1811358 - DNA, 15 bp, Homo sapiens
ataatgtaggctttg

SEQ ID NO: 1811359 - DNA, 15 bp, Homo sapiens
taatgtaggctttgt

SEQ ID NO: 1811360 - DNA, 15 bp, Homo sapiens
aatgtaggctttgta

SEQ ID NO: 1811361 - DNA, 15 bp, Homo sapiens
atgtaggctttgtaa

SEQ ID NO: 1811362 - DNA, 15 bp, Homo sapiens
tgtaggctttgtaaa

SEQ ID NO: 1811363 - DNA, 15 bp, Homo sapiens
gtaggctttgtaaag

SEQ ID NO: 1811364 - DNA, 15 bp, Homo sapiens
taggctttgtaaagt

SEQ ID NO: 1811365 - DNA, 15 bp, Homo sapiens
aggctttgtaaagtc

SEQ ID NO: 1811366 - DNA, 15 bp, Homo sapiens
ggctttgtaaagtcc

SEQ ID NO: 1811367 - DNA, 15 bp, Homo sapiens
gctttgtaaagtcca

SEQ ID NO: 1811368 - DNA, 15 bp, Homo sapiens
ctttgtaaagtccac

SEQ ID NO: 1811369 - DNA, 15 bp, Homo sapiens
tttgtaaagtccacg

SEQ ID NO: 1811370 - DNA, 15 bp, Homo sapiens
ttgtaaagtccacgg

SEQ ID NO: 1811371 - DNA, 15 bp, Homo sapiens
tgtaaagtccacggg

SEQ ID NO: 1811372 - DNA, 15 bp, Homo sapiens
gtaaagtccacgggc

SEQ ID NO: 1811373 - DNA, 15 bp, Homo sapiens
taaagtccacgggcc

SEQ ID NO: 1811374 - DNA, 15 bp, Homo sapiens
aaagtccacgggcct

SEQ ID NO: 1811375 - DNA, 15 bp, Homo sapiens
aagtccacgggcctg

SEQ ID NO: 1811376 - DNA, 15 bp, Homo sapiens
agtccacgggcctga

SEQ ID NO: 1811377 - DNA, 15 bp, Homo sapiens
gtccacgggcctgaa

SEQ ID NO: 1811378 - DNA, 15 bp, Homo sapiens
tccacgggcctgaaa

SEQ ID NO: 1811379 - DNA, 15 bp, Homo sapiens
ccacgggcctgaaag

SEQ ID NO: 1811380 - DNA, 15 bp, Homo sapiens
cacgggcctgaaagc

SEQ ID NO: 1811381 - DNA, 15 bp, Homo sapiens
acgggcctgaaagca

SEQ ID NO: 1811382 - DNA, 15 bp, Homo sapiens
cgggcctgaaagcac

SEQ ID NO: 1811383 - DNA, 15 bp, Homo sapiens
gggcctgaaagcacg

SEQ ID NO: 1811384 - DNA, 15 bp, Homo sapiens
ggcctgaaagcacga

SEQ ID NO: 1811385 - DNA, 15 bp, Homo sapiens
gcctgaaagcacgat

SEQ ID NO: 1811386 - DNA, 15 bp, Homo sapiens
cctgaaagcacgata

SEQ ID NO: 1811387 - DNA, 15 bp, Homo sapiens
ctgaaagcacgatac

SEQ ID NO: 1811388 - DNA, 15 bp, Homo sapiens
tgaaagcacgataca

SEQ ID NO: 1811389 - DNA, 15 bp, Homo sapiens
gaaagcacgatacat

SEQ ID NO: 1811390 - DNA, 15 bp, Homo sapiens
aaagcacgatacatt

SEQ ID NO: 1811391 - DNA, 15 bp, Homo sapiens
aagcacgatacattt

SEQ ID NO: 1811392 - DNA, 15 bp, Homo sapiens
agcacgatacatttc

SEQ ID NO: 1811393 - DNA, 15 bp, Homo sapiens
gcacgatacatttct

SEQ ID NO: 1811394 - DNA, 15 bp, Homo sapiens
cacgatacatttcta

SEQ ID NO: 1811395 - DNA, 15 bp, Homo sapiens
acgatacatttctaa

SEQ ID NO: 1811396 - DNA, 15 bp, Homo sapiens
cgatacatttctaat

SEQ ID NO: 1811397 - DNA, 15 bp, Homo sapiens
gatacatttctaatg

SEQ ID NO: 1811398 - DNA, 15 bp, Homo sapiens
atacatttctaatgg

SEQ ID NO: 1811399 - DNA, 15 bp, Homo sapiens
tacatttctaatgga

SEQ ID NO: 1811400 - DNA, 15 bp, Homo sapiens
acatttctaatggaa

SEQ ID NO: 1811401 - DNA, 15 bp, Homo sapiens
catttctaatggaaa

SEQ ID NO: 1811402 - DNA, 15 bp, Homo sapiens
atttctaatggaaac

SEQ ID NO: 1811403 - DNA, 15 bp, Homo sapiens
tttctaatggaaaca

SEQ ID NO: 1811404 - DNA, 15 bp, Homo sapiens
ttctaatggaaacac

SEQ ID NO: 1811405 - DNA, 15 bp, Homo sapiens
tctaatggaaacact

SEQ ID NO: 1811406 - DNA, 15 bp, Homo sapiens
ctaatggaaacactc

SEQ ID NO: 1811407 - DNA, 15 bp, Homo sapiens
taatggaaacactcc

SEQ ID NO: 1811408 - DNA, 15 bp, Homo sapiens
aatggaaacactccc

SEQ ID NO: 1811409 - DNA, 15 bp, Homo sapiens
atggaaacactccca

SEQ ID NO: 1811410 - DNA, 15 bp, Homo sapiens
tggaaacactcccat

SEQ ID NO: 1811411 - DNA, 15 bp, Homo sapiens
ggaaacactcccatg

SEQ ID NO: 1811412 - DNA, 15 bp, Homo sapiens
gaaacactcccatgc

SEQ ID NO: 1811413 - DNA, 15 bp, Homo sapiens
aaacactcccatgca

SEQ ID NO: 1811414 - DNA, 15 bp, Homo sapiens
aacactcccatgcat

SEQ ID NO: 1811415 - DNA, 15 bp, Homo sapiens
acactcccatgcatg

SEQ ID NO: 1811416 - DNA, 15 bp, Homo sapiens
cactcccatgcatga

SEQ ID NO: 1811417 - DNA, 15 bp, Homo sapiens
actcccatgcatgat

SEQ ID NO: 1811418 - DNA, 15 bp, Homo sapiens
ctcccatgcatgatt

SEQ ID NO: 1811419 - DNA, 15 bp, Homo sapiens
tcccatgcatgattg

SEQ ID NO: 1811420 - DNA, 15 bp, Homo sapiens
cccatgcatgattgt

SEQ ID NO: 1811421 - DNA, 15 bp, Homo sapiens
ccatgcatgattgta

SEQ ID NO: 1811422 - DNA, 15 bp, Homo sapiens
catgcatgattgtac

SEQ ID NO: 1811423 - DNA, 15 bp, Homo sapiens
atgcatgattgtaca

SEQ ID NO: 1811424 - DNA, 15 bp, Homo sapiens
tgcatgattgtacaa

SEQ ID NO: 1811425 - DNA, 15 bp, Homo sapiens
gcatgattgtacaac

SEQ ID NO: 1811426 - DNA, 15 bp, Homo sapiens
catgattgtacaaca

SEQ ID NO: 1811427 - DNA, 15 bp, Homo sapiens
atgattgtacaacag

SEQ ID NO: 1811428 - DNA, 15 bp, Homo sapiens
tgattgtacaacagg

SEQ ID NO: 1811429 - DNA, 15 bp, Homo sapiens
gattgtacaacagga

SEQ ID NO: 1811430 - DNA, 15 bp, Homo sapiens
attgtacaacaggaa

SEQ ID NO: 1811431 - DNA, 15 bp, Homo sapiens
ttgtacaacaggaaa

SEQ ID NO: 1811432 - DNA, 15 bp, Homo sapiens
tgtacaacaggaaag

SEQ ID NO: 1811433 - DNA, 15 bp, Homo sapiens
gtacaacaggaaagc

SEQ ID NO: 1811434 - DNA, 15 bp, Homo sapiens
tacaacaggaaagcg

SEQ ID NO: 1811435 - DNA, 15 bp, Homo sapiens
acaacaggaaagcga

SEQ ID NO: 1811436 - DNA, 15 bp, Homo sapiens
caacaggaaagcgat

SEQ ID NO: 1811437 - DNA, 15 bp, Homo sapiens
aacaggaaagcgata

SEQ ID NO: 1811438 - DNA, 15 bp, Homo sapiens
acaggaaagcgataa

SEQ ID NO: 1811439 - DNA, 15 bp, Homo sapiens
caggaaagcgataaa

SEQ ID NO: 1811440 - DNA, 15 bp, Homo sapiens
aggaaagcgataaat

SEQ ID NO: 1811441 - DNA, 15 bp, Homo sapiens
ggaaagcgataaatt

SEQ ID NO: 1811442 - DNA, 15 bp, Homo sapiens
gaaagcgataaatta

SEQ ID NO: 1811443 - DNA, 15 bp, Homo sapiens
aaagcgataaattac

SEQ ID NO: 1811444 - DNA, 15 bp, Homo sapiens
aagcgataaattacc

SEQ ID NO: 1811445 - DNA, 15 bp, Homo sapiens
agcgataaattaccg

SEQ ID NO: 1811446 - DNA, 15 bp, Homo sapiens
gcgataaattaccgt

SEQ ID NO: 1811447 - DNA, 15 bp, Homo sapiens
cgataaattaccgtg

SEQ ID NO: 1811448 - DNA, 15 bp, Homo sapiens
gataaattaccgtga

SEQ ID NO: 1811449 - DNA, 15 bp, Homo sapiens
ataaattaccgtgat

SEQ ID NO: 1811450 - DNA, 15 bp, Homo sapiens
taaattaccgtgatt

SEQ ID NO: 1811451 - DNA, 15 bp, Homo sapiens
aaattaccgtgattt

SEQ ID NO: 1811452 - DNA, 15 bp, Homo sapiens
aattaccgtgatttt

SEQ ID NO: 1811453 - DNA, 15 bp, Homo sapiens
attaccgtgattttg

SEQ ID NO: 1811454 - DNA, 15 bp, Homo sapiens
ttaccgtgattttgt

SEQ ID NO: 1811455 - DNA, 15 bp, Homo sapiens
taccgtgattttgta

SEQ ID NO: 1811456 - DNA, 15 bp, Homo sapiens
accgtgattttgtac

SEQ ID NO: 1811457 - DNA, 15 bp, Homo sapiens
ccgtgattttgtact

SEQ ID NO: 1811458 - DNA, 15 bp, Homo sapiens
cgtgattttgtactc

SEQ ID NO: 1811459 - DNA, 15 bp, Homo sapiens
gtgattttgtactcc

SEQ ID NO: 1811460 - DNA, 15 bp, Homo sapiens
tgattttgtactccc

SEQ ID NO: 1811461 - DNA, 15 bp, Homo sapiens
gattttgtactccct

SEQ ID NO: 1811462 - DNA, 15 bp, Homo sapiens
attttgtactccctg

SEQ ID NO: 1811463 - DNA, 15 bp, Homo sapiens
ttttgtactccctgc

SEQ ID NO: 1811464 - DNA, 15 bp, Homo sapiens
tttgtactccctgca

SEQ ID NO: 1811465 - DNA, 15 bp, Homo sapiens
ttgtactccctgcag

SEQ ID NO: 1811466 - DNA, 15 bp, Homo sapiens
tgtactccctgcagc

SEQ ID NO: 1811467 - DNA, 15 bp, Homo sapiens
gtactccctgcagct

SEQ ID NO: 1811468 - DNA, 15 bp, Homo sapiens
tactccctgcagcta

SEQ ID NO: 1811469 - DNA, 15 bp, Homo sapiens
actccctgcagctat

SEQ ID NO: 1811470 - DNA, 15 bp, Homo sapiens
ctccctgcagctatt

SEQ ID NO: 1811471 - DNA, 15 bp, Homo sapiens
tccctgcagctatta

SEQ ID NO: 1811472 - DNA, 15 bp, Homo sapiens
ccctgcagctattag

SEQ ID NO: 1811473 - DNA, 15 bp, Homo sapiens
cctgcagctattagt

SEQ ID NO: 1811474 - DNA, 15 bp, Homo sapiens
ctgcagctattagtt

SEQ ID NO: 1811475 - DNA, 15 bp, Homo sapiens
tgcagctattagttc

SEQ ID NO: 1811476 - DNA, 15 bp, Homo sapiens
gcagctattagttcg

SEQ ID NO: 1811477 - DNA, 15 bp, Homo sapiens
cagctattagttcgg

SEQ ID NO: 1811478 - DNA, 15 bp, Homo sapiens
agctattagttcggc

SEQ ID NO: 1811479 - DNA, 15 bp, Homo sapiens
gctattagttcggcc

SEQ ID NO: 1811480 - DNA, 15 bp, Homo sapiens
ctattagttcggccc

SEQ ID NO: 1811481 - DNA, 15 bp, Homo sapiens
tattagttcggccct

SEQ ID NO: 1811482 - DNA, 15 bp, Homo sapiens
attagttcggccctc

SEQ ID NO: 1811483 - DNA, 15 bp, Homo sapiens
ttagttcggccctcc

SEQ ID NO: 1811484 - DNA, 15 bp, Homo sapiens
tagttcggccctcct

SEQ ID NO: 1811485 - DNA, 15 bp, Homo sapiens
agttcggccctcctt

SEQ ID NO: 1811486 - DNA, 15 bp, Homo sapiens
gttcggccctccttc

SEQ ID NO: 1811487 - DNA, 15 bp, Homo sapiens
ttcggccctccttca

SEQ ID NO: 1811488 - DNA, 15 bp, Homo sapiens
tcggccctccttcag

SEQ ID NO: 1811489 - DNA, 15 bp, Homo sapiens
cggccctccttcagg

SEQ ID NO: 1811490 - DNA, 15 bp, Homo sapiens
ggccctccttcagga

SEQ ID NO: 1811491 - DNA, 15 bp, Homo sapiens
gccctccttcaggaa

SEQ ID NO: 1811492 - DNA, 15 bp, Homo sapiens
ccctccttcaggaat

SEQ ID NO: 1811493 - DNA, 15 bp, Homo sapiens
cctccttcaggaatg

SEQ ID NO: 1811494 - DNA, 15 bp, Homo sapiens
ctccttcaggaatgt

SEQ ID NO: 1811495 - DNA, 15 bp, Homo sapiens
tccttcaggaatgtt

SEQ ID NO: 1811496 - DNA, 15 bp, Homo sapiens
ccttcaggaatgttg

SEQ ID NO: 1811497 - DNA, 15 bp, Homo sapiens
cttcaggaatgttgc

SEQ ID NO: 1811498 - DNA, 15 bp, Homo sapiens
ttcaggaatgttgct

SEQ ID NO: 1811499 - DNA, 15 bp, Homo sapiens
tcaggaatgttgctt

SEQ ID NO: 1811500 - DNA, 15 bp, Homo sapiens
caggaatgttgcttt

SEQ ID NO: 1811501 - DNA, 15 bp, Homo sapiens
aggaatgttgctttc

SEQ ID NO: 1811502 - DNA, 15 bp, Homo sapiens
ggaatgttgctttcg

SEQ ID NO: 1811503 - DNA, 15 bp, Homo sapiens
gaatgttgctttcgg

SEQ ID NO: 1811504 - DNA, 15 bp, Homo sapiens
aatgttgctttcggt

SEQ ID NO: 1811505 - DNA, 15 bp, Homo sapiens
atgttgctttcggtt

SEQ ID NO: 1811506 - DNA, 15 bp, Homo sapiens
tgttgctttcggtta

SEQ ID NO: 1811507 - DNA, 15 bp, Homo sapiens
gttgctttcggttat

SEQ ID NO: 1811508 - DNA, 15 bp, Homo sapiens
ttgctttcggttata

SEQ ID NO: 1811509 - DNA, 15 bp, Homo sapiens
tgctttcggttatag

SEQ ID NO: 1811510 - DNA, 15 bp, Homo sapiens
gctttcggttataga

SEQ ID NO: 1811511 - DNA, 15 bp, Homo sapiens
ctttcggttatagaa

SEQ ID NO: 1811512 - DNA, 15 bp, Homo sapiens
tttcggttatagaaa

SEQ ID NO: 1811513 - DNA, 15 bp, Homo sapiens
ttcggttatagaaat

SEQ ID NO: 1811514 - DNA, 15 bp, Homo sapiens
tcggttatagaaatt

SEQ ID NO: 1811515 - DNA, 15 bp, Homo sapiens
cggttatagaaattc

SEQ ID NO: 1811516 - DNA, 15 bp, Homo sapiens
ggttatagaaattct

SEQ ID NO: 1811517 - DNA, 15 bp, Homo sapiens
gttatagaaattcta

SEQ ID NO: 1811518 - DNA, 15 bp, Homo sapiens
ttatagaaattctac

SEQ ID NO: 1811519 - DNA, 15 bp, Homo sapiens
tatagaaattctaca

SEQ ID NO: 1811520 - DNA, 15 bp, Homo sapiens
atagaaattctacaa

SEQ ID NO: 1811521 - DNA, 15 bp, Homo sapiens
tagaaattctacaaa

SEQ ID NO: 1811522 - DNA, 15 bp, Homo sapiens
agaaattctacaaat

SEQ ID NO: 1811523 - DNA, 15 bp, Homo sapiens
gaaattctacaaata

SEQ ID NO: 1811524 - DNA, 15 bp, Homo sapiens
aaattctacaaatat

SEQ ID NO: 1811525 - DNA, 15 bp, Homo sapiens
aattctacaaatatt

SEQ ID NO: 1811526 - DNA, 15 bp, Homo sapiens
attctacaaatattg

SEQ ID NO: 1811527 - DNA, 15 bp, Homo sapiens
ttctacaaatattgg

SEQ ID NO: 1811528 - DNA, 15 bp, Homo sapiens
tctacaaatattggt

SEQ ID NO: 1811529 - DNA, 15 bp, Homo sapiens
ctacaaatattggtt

SEQ ID NO: 1811530 - DNA, 15 bp, Homo sapiens
tacaaatattggttc

SEQ ID NO: 1811531 - DNA, 15 bp, Homo sapiens
acaaatattggttca

SEQ ID NO: 1811532 - DNA, 15 bp, Homo sapiens
caaatattggttcat

SEQ ID NO: 1811533 - DNA, 15 bp, Homo sapiens
aaatattggttcatc

SEQ ID NO: 1811534 - DNA, 15 bp, Homo sapiens
aatattggttcatca

SEQ ID NO: 1811535 - DNA, 15 bp, Homo sapiens
atattggttcatcag

SEQ ID NO: 1811536 - DNA, 15 bp, Homo sapiens
tattggttcatcaga

SEQ ID NO: 1811537 - DNA, 15 bp, Homo sapiens
attggttcatcagaa

SEQ ID NO: 1811538 - DNA, 15 bp, Homo sapiens
ttggttcatcagaaa

SEQ ID NO: 1811539 - DNA, 15 bp, Homo sapiens
tggttcatcagaaag

SEQ ID NO: 1811540 - DNA, 15 bp, Homo sapiens
ggttcatcagaaaga

SEQ ID NO: 1811541 - DNA, 15 bp, Homo sapiens
gttcatcagaaagac

SEQ ID NO: 1811542 - DNA, 15 bp, Homo sapiens
ttcatcagaaagaca

SEQ ID NO: 1811543 - DNA, 15 bp, Homo sapiens
tcatcagaaagacaa

SEQ ID NO: 1811544 - DNA, 15 bp, Homo sapiens
catcagaaagacaaa

SEQ ID NO: 1811545 - DNA, 15 bp, Homo sapiens
atcagaaagacaaat

SEQ ID NO: 1811546 - DNA, 15 bp, Homo sapiens
tcagaaagacaaata

SEQ ID NO: 1811547 - DNA, 15 bp, Homo sapiens
cagaaagacaaatat

SEQ ID NO: 1811548 - DNA, 15 bp, Homo sapiens
agaaagacaaatatt

SEQ ID NO: 1811549 - DNA, 15 bp, Homo sapiens
gaaagacaaatatta

SEQ ID NO: 1811550 - DNA, 15 bp, Homo sapiens
aaagacaaatattaa

SEQ ID NO: 1811551 - DNA, 15 bp, Homo sapiens
aagacaaatattaaa

SEQ ID NO: 1811552 - DNA, 15 bp, Homo sapiens
agacaaatattaaat

SEQ ID NO: 1811553 - DNA, 15 bp, Homo sapiens
gacaaatattaaatg

SEQ ID NO: 1811554 - DNA, 15 bp, Homo sapiens
acaaatattaaatga

SEQ ID NO: 1811555 - DNA, 15 bp, Homo sapiens
caaatattaaatgaa

SEQ ID NO: 1811556 - DNA, 15 bp, Homo sapiens
aaatattaaatgaaa

SEQ ID NO: 1811557 - DNA, 15 bp, Homo sapiens
aatattaaatgaaaa

SEQ ID NO: 1811558 - DNA, 15 bp, Homo sapiens
atattaaatgaaaat

SEQ ID NO: 1811559 - DNA, 15 bp, Homo sapiens
tattaaatgaaaatt

SEQ ID NO: 1811560 - DNA, 15 bp, Homo sapiens
attaaatgaaaatta

SEQ ID NO: 1811561 - DNA, 15 bp, Homo sapiens
ttaaatgaaaattat

SEQ ID NO: 1811562 - DNA, 15 bp, Homo sapiens
taaatgaaaattatg

SEQ ID NO: 1811563 - DNA, 15 bp, Homo sapiens
aaatgaaaattatgc

SEQ ID NO: 1811564 - DNA, 15 bp, Homo sapiens
aatgaaaattatgct

SEQ ID NO: 1811565 - DNA, 15 bp, Homo sapiens
atgaaaattatgctc

SEQ ID NO: 1811566 - DNA, 15 bp, Homo sapiens
tgaaaattatgctca

SEQ ID NO: 1811567 - DNA, 15 bp, Homo sapiens
gaaaattatgctcaa

SEQ ID NO: 1811568 - DNA, 15 bp, Homo sapiens
aaaattatgctcaag

SEQ ID NO: 1811569 - DNA, 15 bp, Homo sapiens
aaattatgctcaagg

SEQ ID NO: 1811570 - DNA, 15 bp, Homo sapiens
aattatgctcaagga

SEQ ID NO: 1811571 - DNA, 15 bp, Homo sapiens
attatgctcaaggac

SEQ ID NO: 1811572 - DNA, 15 bp, Homo sapiens
ttatgctcaaggaca

SEQ ID NO: 1811573 - DNA, 15 bp, Homo sapiens
tatgctcaaggacat

SEQ ID NO: 1811574 - DNA, 15 bp, Homo sapiens
atgctcaaggacatg

SEQ ID NO: 1811575 - DNA, 15 bp, Homo sapiens
tgctcaaggacatga

SEQ ID NO: 1811576 - DNA, 15 bp, Homo sapiens
gctcaaggacatgag

SEQ ID NO: 1811577 - DNA, 15 bp, Homo sapiens
ctcaaggacatgaga

SEQ ID NO: 1811578 - DNA, 15 bp, Homo sapiens
tcaaggacatgagaa

SEQ ID NO: 1811579 - DNA, 15 bp, Homo sapiens
caaggacatgagaaa

SEQ ID NO: 1811580 - DNA, 15 bp, Homo sapiens
aaggacatgagaaaa

SEQ ID NO: 1811581 - DNA, 15 bp, Homo sapiens
aggacatgagaaaaa

SEQ ID NO: 1811582 - DNA, 15 bp, Homo sapiens
ggacatgagaaaaag

SEQ ID NO: 1811583 - DNA, 15 bp, Homo sapiens
gacatgagaaaaagt

SEQ ID NO: 1811584 - DNA, 15 bp, Homo sapiens
acatgagaaaaagtg

SEQ ID NO: 1811585 - DNA, 15 bp, Homo sapiens
catgagaaaaagtgt

SEQ ID NO: 1811586 - DNA, 15 bp, Homo sapiens
atgagaaaaagtgtg

SEQ ID NO: 1811587 - DNA, 15 bp, Homo sapiens
tgagaaaaagtgtgc

SEQ ID NO: 1811588 - DNA, 15 bp, Homo sapiens
gagaaaaagtgtgca

SEQ ID NO: 1811589 - DNA, 15 bp, Homo sapiens
agaaaaagtgtgcag

SEQ ID NO: 1811590 - DNA, 15 bp, Homo sapiens
gaaaaagtgtgcaga

SEQ ID NO: 1811591 - DNA, 15 bp, Homo sapiens
aaaaagtgtgcagag

SEQ ID NO: 1811592 - DNA, 15 bp, Homo sapiens
aaaagtgtgcagagt

SEQ ID NO: 1811593 - DNA, 15 bp, Homo sapiens
aaagtgtgcagagta

SEQ ID NO: 1811594 - DNA, 15 bp, Homo sapiens
aagtgtgcagagtac

SEQ ID NO: 1811595 - DNA, 15 bp, Homo sapiens
agtgtgcagagtaca

SEQ ID NO: 1811596 - DNA, 15 bp, Homo sapiens
gtgtgcagagtacac

SEQ ID NO: 1811597 - DNA, 15 bp, Homo sapiens
tgtgcagagtacaca

SEQ ID NO: 1811598 - DNA, 15 bp, Homo sapiens
gtgcagagtacacac

SEQ ID NO: 1811599 - DNA, 15 bp, Homo sapiens
tgcagagtacacaca

SEQ ID NO: 1811600 - DNA, 15 bp, Homo sapiens
gcagagtacacacat

SEQ ID NO: 1811601 - DNA, 15 bp, Homo sapiens
cagagtacacacatt

SEQ ID NO: 1811602 - DNA, 15 bp, Homo sapiens
agagtacacacattg

SEQ ID NO: 1811603 - DNA, 15 bp, Homo sapiens
gagtacacacattgc

SEQ ID NO: 1811604 - DNA, 15 bp, Homo sapiens
agtacacacattgca

SEQ ID NO: 1811605 - DNA, 15 bp, Homo sapiens
gtacacacattgcag

SEQ ID NO: 1811606 - DNA, 15 bp, Homo sapiens
tacacacattgcaga

SEQ ID NO: 1811607 - DNA, 15 bp, Homo sapiens
acacacattgcagac

SEQ ID NO: 1811608 - DNA, 15 bp, Homo sapiens
cacacattgcagact

SEQ ID NO: 1811609 - DNA, 15 bp, Homo sapiens
acacattgcagactt

SEQ ID NO: 1811610 - DNA, 15 bp, Homo sapiens
cacattgcagacttg

SEQ ID NO: 1811611 - DNA, 15 bp, Homo sapiens
acattgcagacttga

SEQ ID NO: 1811612 - DNA, 15 bp, Homo sapiens
cattgcagacttgag

SEQ ID NO: 1811613 - DNA, 15 bp, Homo sapiens
attgcagacttgaga

SEQ ID NO: 1811614 - DNA, 15 bp, Homo sapiens
ttgcagacttgagaa

SEQ ID NO: 1811615 - DNA, 15 bp, Homo sapiens
tgcagacttgagaaa

SEQ ID NO: 1811616 - DNA, 15 bp, Homo sapiens
gcagacttgagaaag

SEQ ID NO: 1811617 - DNA, 15 bp, Homo sapiens
cagacttgagaaaga

SEQ ID NO: 1811618 - DNA, 15 bp, Homo sapiens
agacttgagaaagaa

SEQ ID NO: 1811619 - DNA, 15 bp, Homo sapiens
gacttgagaaagaaa

SEQ ID NO: 1811620 - DNA, 15 bp, Homo sapiens
acttgagaaagaaat

SEQ ID NO: 1811621 - DNA, 15 bp, Homo sapiens
cttgagaaagaaatt

SEQ ID NO: 1811622 - DNA, 15 bp, Homo sapiens
ttgagaaagaaattg

SEQ ID NO: 1811623 - DNA, 15 bp, Homo sapiens
tgagaaagaaattgt

SEQ ID NO: 1811624 - DNA, 15 bp, Homo sapiens
gagaaagaaattgtc

SEQ ID NO: 1811625 - DNA, 15 bp, Homo sapiens
agaaagaaattgtcc

SEQ ID NO: 1811626 - DNA, 15 bp, Homo sapiens
gaaagaaattgtcct

SEQ ID NO: 1811627 - DNA, 15 bp, Homo sapiens
aaagaaattgtcctc

SEQ ID NO: 1811628 - DNA, 15 bp, Homo sapiens
aagaaattgtcctca

SEQ ID NO: 1811629 - DNA, 15 bp, Homo sapiens
agaaattgtcctcag

SEQ ID NO: 1811630 - DNA, 15 bp, Homo sapiens
gaaattgtcctcaga

SEQ ID NO: 1811631 - DNA, 15 bp, Homo sapiens
aaattgtcctcagaa

SEQ ID NO: 1811632 - DNA, 15 bp, Homo sapiens
aattgtcctcagaac

SEQ ID NO: 1811633 - DNA, 15 bp, Homo sapiens
attgtcctcagaaca

SEQ ID NO: 1811634 - DNA, 15 bp, Homo sapiens
ttgtcctcagaacaa

SEQ ID NO: 1811635 - DNA, 15 bp, Homo sapiens
tgtcctcagaacaat

SEQ ID NO: 1811636 - DNA, 15 bp, Homo sapiens
gtcctcagaacaatt

SEQ ID NO: 1811637 - DNA, 15 bp, Homo sapiens
tcctcagaacaattt

SEQ ID NO: 1811638 - DNA, 15 bp, Homo sapiens
cctcagaacaatttg

SEQ ID NO: 1811639 - DNA, 15 bp, Homo sapiens
ctcagaacaatttgc

SEQ ID NO: 1811640 - DNA, 15 bp, Homo sapiens
tcagaacaatttgca

SEQ ID NO: 1811641 - DNA, 15 bp, Homo sapiens
cagaacaatttgcaa

SEQ ID NO: 1811642 - DNA, 15 bp, Homo sapiens
agaacaatttgcaat

SEQ ID NO: 1811643 - DNA, 15 bp, Homo sapiens
gaacaatttgcaata

SEQ ID NO: 1811644 - DNA, 15 bp, Homo sapiens
aacaatttgcaatac

SEQ ID NO: 1811645 - DNA, 15 bp, Homo sapiens
acaatttgcaataca

SEQ ID NO: 1811646 - DNA, 15 bp, Homo sapiens
caatttgcaatacaa

SEQ ID NO: 1811647 - DNA, 15 bp, Homo sapiens
aatttgcaatacaaa

SEQ ID NO: 1811648 - DNA, 15 bp, Homo sapiens
atttgcaatacaaag

SEQ ID NO: 1811649 - DNA, 15 bp, Homo sapiens
tttgcaatacaaagc

SEQ ID NO: 1811650 - DNA, 15 bp, Homo sapiens
ttgcaatacaaagct

SEQ ID NO: 1811651 - DNA, 15 bp, Homo sapiens
tgcaatacaaagctt

SEQ ID NO: 1811652 - DNA, 15 bp, Homo sapiens
gcaatacaaagcttg

SEQ ID NO: 1811653 - DNA, 15 bp, Homo sapiens
caatacaaagcttgc

SEQ ID NO: 1811654 - DNA, 15 bp, Homo sapiens
aatacaaagcttgct

SEQ ID NO: 1811655 - DNA, 15 bp, Homo sapiens
atacaaagcttgctt

SEQ ID NO: 1811656 - DNA, 15 bp, Homo sapiens
tacaaagcttgctta

SEQ ID NO: 1811657 - DNA, 15 bp, Homo sapiens
acaaagcttgcttaa

SEQ ID NO: 1811658 - DNA, 15 bp, Homo sapiens
caaagcttgcttaat

SEQ ID NO: 1811659 - DNA, 15 bp, Homo sapiens
aaagcttgcttaata

SEQ ID NO: 1811660 - DNA, 15 bp, Homo sapiens
aagcttgcttaataa

SEQ ID NO: 1811661 - DNA, 15 bp, Homo sapiens
agcttgcttaataat

SEQ ID NO: 1811662 - DNA, 15 bp, Homo sapiens
gcttgcttaataatt

SEQ ID NO: 1811663 - DNA, 15 bp, Homo sapiens
cttgcttaataattt

SEQ ID NO: 1811664 - DNA, 15 bp, Homo sapiens
ttgcttaataattta

SEQ ID NO: 1811665 - DNA, 15 bp, Homo sapiens
tgcttaataatttac

SEQ ID NO: 1811666 - DNA, 15 bp, Homo sapiens
gcttaataatttact

SEQ ID NO: 1811667 - DNA, 15 bp, Homo sapiens
cttaataatttactg

SEQ ID NO: 1811668 - DNA, 15 bp, Homo sapiens
ttaataatttactgg

SEQ ID NO: 1811669 - DNA, 15 bp, Homo sapiens
taataatttactgga

SEQ ID NO: 1811670 - DNA, 15 bp, Homo sapiens
aataatttactggaa

SEQ ID NO: 1811671 - DNA, 15 bp, Homo sapiens
ataatttactggaac

SEQ ID NO: 1811672 - DNA, 15 bp, Homo sapiens
taatttactggaact

SEQ ID NO: 1811673 - DNA, 15 bp, Homo sapiens
aatttactggaactg

SEQ ID NO: 1811674 - DNA, 15 bp, Homo sapiens
atttactggaactgg

SEQ ID NO: 1811675 - DNA, 15 bp, Homo sapiens
tttactggaactggt

SEQ ID NO: 1811676 - DNA, 15 bp, Homo sapiens
ttactggaactggta

SEQ ID NO: 1811677 - DNA, 15 bp, Homo sapiens
tactggaactggtaa

SEQ ID NO: 1811678 - DNA, 15 bp, Homo sapiens
actggaactggtaaa

SEQ ID NO: 1811679 - DNA, 15 bp, Homo sapiens
ctggaactggtaaac

SEQ ID NO: 1811680 - DNA, 15 bp, Homo sapiens
tggaactggtaaact

SEQ ID NO: 1811681 - DNA, 15 bp, Homo sapiens
ggaactggtaaactc

SEQ ID NO: 1811682 - DNA, 15 bp, Homo sapiens
gaactggtaaactca

SEQ ID NO: 1811683 - DNA, 15 bp, Homo sapiens
aactggtaaactcag

SEQ ID NO: 1811684 - DNA, 15 bp, Homo sapiens
actggtaaactcagc

SEQ ID NO: 1811685 - DNA, 15 bp, Homo sapiens
ctggtaaactcagcg

SEQ ID NO: 1811686 - DNA, 15 bp, Homo sapiens
tggtaaactcagcga

SEQ ID NO: 1811687 - DNA, 15 bp, Homo sapiens
ggtaaactcagcgat

SEQ ID NO: 1811688 - DNA, 15 bp, Homo sapiens
gtaaactcagcgatt

SEQ ID NO: 1811689 - DNA, 15 bp, Homo sapiens
taaactcagcgatta

SEQ ID NO: 1811690 - DNA, 15 bp, Homo sapiens
aaactcagcgattat

SEQ ID NO: 1811691 - DNA, 15 bp, Homo sapiens
aactcagcgattatg

SEQ ID NO: 1811692 - DNA, 15 bp, Homo sapiens
actcagcgattatgc

SEQ ID NO: 1811693 - DNA, 15 bp, Homo sapiens
ctcagcgattatgcc

SEQ ID NO: 1811694 - DNA, 15 bp, Homo sapiens
tcagcgattatgcca

SEQ ID NO: 1811695 - DNA, 15 bp, Homo sapiens
cagcgattatgccag

SEQ ID NO: 1811696 - DNA, 15 bp, Homo sapiens
agcgattatgccagg

SEQ ID NO: 1811697 - DNA, 15 bp, Homo sapiens
gcgattatgccaggc

SEQ ID NO: 1811698 - DNA, 15 bp, Homo sapiens
cgattatgccaggca

SEQ ID NO: 1811699 - DNA, 15 bp, Homo sapiens
gattatgccaggcac

SEQ ID NO: 1811700 - DNA, 15 bp, Homo sapiens
attatgccaggcact

SEQ ID NO: 1811701 - DNA, 15 bp, Homo sapiens
ttatgccaggcactg

SEQ ID NO: 1811702 - DNA, 15 bp, Homo sapiens
tatgccaggcactgg

SEQ ID NO: 1811703 - DNA, 15 bp, Homo sapiens
atgccaggcactgga

SEQ ID NO: 1811704 - DNA, 15 bp, Homo sapiens
tgccaggcactggat

SEQ ID NO: 1811705 - DNA, 15 bp, Homo sapiens
gccaggcactggatc

SEQ ID NO: 1811706 - DNA, 15 bp, Homo sapiens
ccaggcactggatct

SEQ ID NO: 1811707 - DNA, 15 bp, Homo sapiens
caggcactggatctt

SEQ ID NO: 1811708 - DNA, 15 bp, Homo sapiens
aggcactggatcttc

SEQ ID NO: 1811709 - DNA, 15 bp, Homo sapiens
ggcactggatcttca

SEQ ID NO: 1811710 - DNA, 15 bp, Homo sapiens
gcactggatcttcaa

SEQ ID NO: 1811711 - DNA, 15 bp, Homo sapiens
cactggatcttcaat

SEQ ID NO: 1811712 - DNA, 15 bp, Homo sapiens
actggatcttcaatt

SEQ ID NO: 1811713 - DNA, 15 bp, Homo sapiens
ctggatcttcaatta

SEQ ID NO: 1811714 - DNA, 15 bp, Homo sapiens
tggatcttcaattaa

SEQ ID NO: 1811715 - DNA, 15 bp, Homo sapiens
ggatcttcaattaag

SEQ ID NO: 1811716 - DNA, 15 bp, Homo sapiens
gatcttcaattaagt

SEQ ID NO: 1811717 - DNA, 15 bp, Homo sapiens
atcttcaattaagtg

SEQ ID NO: 1811718 - DNA, 15 bp, Homo sapiens
tcttcaattaagtgt

SEQ ID NO: 1811719 - DNA, 15 bp, Homo sapiens
cttcaattaagtgta

SEQ ID NO: 1811720 - DNA, 15 bp, Homo sapiens
ttcaattaagtgtaa

SEQ ID NO: 1811721 - DNA, 15 bp, Homo sapiens
tcaattaagtgtaag

SEQ ID NO: 1811722 - DNA, 15 bp, Homo sapiens
caattaagtgtaaga

SEQ ID NO: 1811723 - DNA, 15 bp, Homo sapiens
aattaagtgtaagaa

SEQ ID NO: 1811724 - DNA, 15 bp, Homo sapiens
attaagtgtaagaaa

SEQ ID NO: 1811725 - DNA, 15 bp, Homo sapiens
ttaagtgtaagaaaa

SEQ ID NO: 1811726 - DNA, 15 bp, Homo sapiens
taagtgtaagaaaat

SEQ ID NO: 1811727 - DNA, 15 bp, Homo sapiens
aagtgtaagaaaata

SEQ ID NO: 1811728 - DNA, 15 bp, Homo sapiens
agtgtaagaaaatag

SEQ ID NO: 1811729 - DNA, 15 bp, Homo sapiens
gtgtaagaaaatagg

SEQ ID NO: 1811730 - DNA, 15 bp, Homo sapiens
tgtaagaaaataggc

SEQ ID NO: 1811731 - DNA, 15 bp, Homo sapiens
gtaagaaaataggct

SEQ ID NO: 1811732 - DNA, 15 bp, Homo sapiens
taagaaaataggctt

SEQ ID NO: 1811733 - DNA, 15 bp, Homo sapiens
aagaaaataggctta

SEQ ID NO: 1811734 - DNA, 15 bp, Homo sapiens
agaaaataggcttac

SEQ ID NO: 1811735 - DNA, 15 bp, Homo sapiens
gaaaataggcttaca

SEQ ID NO: 1811736 - DNA, 15 bp, Homo sapiens
aaaataggcttacag

SEQ ID NO: 1811737 - DNA, 15 bp, Homo sapiens
aaataggcttacagt

SEQ ID NO: 1811738 - DNA, 15 bp, Homo sapiens
aataggcttacagtg

SEQ ID NO: 1811739 - DNA, 15 bp, Homo sapiens
ataggcttacagtgt

SEQ ID NO: 1811740 - DNA, 15 bp, Homo sapiens
taggcttacagtgta

SEQ ID NO: 1811741 - DNA, 15 bp, Homo sapiens
aggcttacagtgtaa

SEQ ID NO: 1811742 - DNA, 15 bp, Homo sapiens
ggcttacagtgtaag

SEQ ID NO: 1811743 - DNA, 15 bp, Homo sapiens
gcttacagtgtaaga

SEQ ID NO: 1811744 - DNA, 15 bp, Homo sapiens
cttacagtgtaagat

SEQ ID NO: 1811745 - DNA, 15 bp, Homo sapiens
ttacagtgtaagatg

SEQ ID NO: 1811746 - DNA, 15 bp, Homo sapiens
tacagtgtaagatgt

SEQ ID NO: 1811747 - DNA, 15 bp, Homo sapiens
acagtgtaagatgtc

SEQ ID NO: 1811748 - DNA, 15 bp, Homo sapiens
cagtgtaagatgtct

SEQ ID NO: 1811749 - DNA, 15 bp, Homo sapiens
agtgtaagatgtctg

SEQ ID NO: 1811750 - DNA, 15 bp, Homo sapiens
gtgtaagatgtctgg

SEQ ID NO: 1811751 - DNA, 15 bp, Homo sapiens
tgtaagatgtctgga

SEQ ID NO: 1811752 - DNA, 15 bp, Homo sapiens
gtaagatgtctggaa

SEQ ID NO: 1811753 - DNA, 15 bp, Homo sapiens
taagatgtctggaaa

SEQ ID NO: 1811754 - DNA, 15 bp, Homo sapiens
aagatgtctggaaac

SEQ ID NO: 1811755 - DNA, 15 bp, Homo sapiens
agatgtctggaaact

SEQ ID NO: 1811756 - DNA, 15 bp, Homo sapiens
gatgtctggaaactg

SEQ ID NO: 1811757 - DNA, 15 bp, Homo sapiens
atgtctggaaactgg

SEQ ID NO: 1811758 - DNA, 15 bp, Homo sapiens
tgtctggaaactggg

SEQ ID NO: 1811759 - DNA, 15 bp, Homo sapiens
gtctggaaactggga

SEQ ID NO: 1811760 - DNA, 15 bp, Homo sapiens
tctggaaactgggag

SEQ ID NO: 1811761 - DNA, 15 bp, Homo sapiens
ctggaaactgggagc

SEQ ID NO: 1811762 - DNA, 15 bp, Homo sapiens
tggaaactgggagca

SEQ ID NO: 1811763 - DNA, 15 bp, Homo sapiens
ggaaactgggagcac

SEQ ID NO: 1811764 - DNA, 15 bp, Homo sapiens
gaaactgggagcact

SEQ ID NO: 1811765 - DNA, 15 bp, Homo sapiens
aaactgggagcactt

SEQ ID NO: 1811766 - DNA, 15 bp, Homo sapiens
aactgggagcacttc

SEQ ID NO: 1811767 - DNA, 15 bp, Homo sapiens
actgggagcacttct

SEQ ID NO: 1811768 - DNA, 15 bp, Homo sapiens
ctgggagcacttcta

SEQ ID NO: 1811769 - DNA, 15 bp, Homo sapiens
tgggagcacttctat

SEQ ID NO: 1811770 - DNA, 15 bp, Homo sapiens
gggagcacttctatt

SEQ ID NO: 1811771 - DNA, 15 bp, Homo sapiens
ggagcacttctatta

SEQ ID NO: 1811772 - DNA, 15 bp, Homo sapiens
gagcacttctattaa

SEQ ID NO: 1811773 - DNA, 15 bp, Homo sapiens
agcacttctattaat

SEQ ID NO: 1811774 - DNA, 15 bp, Homo sapiens
gcacttctattaatg

SEQ ID NO: 1811775 - DNA, 15 bp, Homo sapiens
cacttctattaatgt

SEQ ID NO: 1811776 - DNA, 15 bp, Homo sapiens
acttctattaatgtg

SEQ ID NO: 1811777 - DNA, 15 bp, Homo sapiens
cttctattaatgtga

SEQ ID NO: 1811778 - DNA, 15 bp, Homo sapiens
ttctattaatgtgaa

SEQ ID NO: 1811779 - DNA, 15 bp, Homo sapiens
tctattaatgtgaat

SEQ ID NO: 1811780 - DNA, 15 bp, Homo sapiens
ctattaatgtgaatg

SEQ ID NO: 1811781 - DNA, 15 bp, Homo sapiens
tattaatgtgaatgt

SEQ ID NO: 1811782 - DNA, 15 bp, Homo sapiens
attaatgtgaatgtg

SEQ ID NO: 1811783 - DNA, 15 bp, Homo sapiens
ttaatgtgaatgtga

SEQ ID NO: 1811784 - DNA, 15 bp, Homo sapiens
taatgtgaatgtgag

SEQ ID NO: 1811785 - DNA, 15 bp, Homo sapiens
aatgtgaatgtgagg

SEQ ID NO: 1811786 - DNA, 15 bp, Homo sapiens
atgtgaatgtgaggg

SEQ ID NO: 1811787 - DNA, 15 bp, Homo sapiens
tgtgaatgtgagggt

SEQ ID NO: 1811788 - DNA, 15 bp, Homo sapiens
gtgaatgtgagggtt

SEQ ID NO: 1811789 - DNA, 15 bp, Homo sapiens
tgaatgtgagggttt

SEQ ID NO: 1811790 - DNA, 15 bp, Homo sapiens
gaatgtgagggtttt

SEQ ID NO: 1811791 - DNA, 15 bp, Homo sapiens
aatgtgagggttttt

SEQ ID NO: 1811792 - DNA, 15 bp, Homo sapiens
atgtgagggtttttt

SEQ ID NO: 1811793 - DNA, 15 bp, Homo sapiens
tgtgagggttttttt

SEQ ID NO: 1811794 - DNA, 15 bp, Homo sapiens
gtgagggtttttttt

SEQ ID NO: 1811795 - DNA, 15 bp, Homo sapiens
tgagggttttttttt

SEQ ID NO: 1811796 - DNA, 15 bp, Homo sapiens
gagggtttttttttt

SEQ ID NO: 1811797 - DNA, 15 bp, Homo sapiens
gggttttttttttta

SEQ ID NO: 1811798 - DNA, 15 bp, Homo sapiens
ggtttttttttttaa

SEQ ID NO: 1811799 - DNA, 15 bp, Homo sapiens
gtttttttttttaat

SEQ ID NO: 1811800 - DNA, 15 bp, Homo sapiens
tttttttttttaatt

SEQ ID NO: 1811801 - DNA, 15 bp, Homo sapiens
ttttttttttaatta

SEQ ID NO: 1811802 - DNA, 15 bp, Homo sapiens
tttttttttaattag

SEQ ID NO: 1811803 - DNA, 15 bp, Homo sapiens
ttttttttaattaga

SEQ ID NO: 1811804 - DNA, 15 bp, Homo sapiens
tttttttaattagaa

SEQ ID NO: 1811805 - DNA, 15 bp, Homo sapiens
ttttttaattagaat

SEQ ID NO: 1811806 - DNA, 15 bp, Homo sapiens
tttttaattagaata

SEQ ID NO: 1811807 - DNA, 15 bp, Homo sapiens
ttttaattagaatat

SEQ ID NO: 1811808 - DNA, 15 bp, Homo sapiens
tttaattagaatatt

SEQ ID NO: 1811809 - DNA, 15 bp, Homo sapiens
ttaattagaatattc

SEQ ID NO: 1811810 - DNA, 15 bp, Homo sapiens
taattagaatattct

SEQ ID NO: 1811811 - DNA, 15 bp, Homo sapiens
aattagaatattctt

SEQ ID NO: 1811812 - DNA, 15 bp, Homo sapiens
attagaatattctta

SEQ ID NO: 1811813 - DNA, 15 bp, Homo sapiens
ttagaatattcttac

SEQ ID NO: 1811814 - DNA, 15 bp, Homo sapiens
tagaatattcttaca

SEQ ID NO: 1811815 - DNA, 15 bp, Homo sapiens
agaatattcttacag

SEQ ID NO: 1811816 - DNA, 15 bp, Homo sapiens
gaatattcttacagt

SEQ ID NO: 1811817 - DNA, 15 bp, Homo sapiens
aatattcttacagtt

SEQ ID NO: 1811818 - DNA, 15 bp, Homo sapiens
atattcttacagttt

SEQ ID NO: 1811819 - DNA, 15 bp, Homo sapiens
tattcttacagtttc

SEQ ID NO: 1811820 - DNA, 15 bp, Homo sapiens
attcttacagtttca

SEQ ID NO: 1811821 - DNA, 15 bp, Homo sapiens
ttcttacagtttcaa

SEQ ID NO: 1811822 - DNA, 15 bp, Homo sapiens
tcttacagtttcaat

SEQ ID NO: 1811823 - DNA, 15 bp, Homo sapiens
cttacagtttcaatt

SEQ ID NO: 1811824 - DNA, 15 bp, Homo sapiens
ttacagtttcaattc

SEQ ID NO: 1811825 - DNA, 15 bp, Homo sapiens
tacagtttcaattcc

SEQ ID NO: 1811826 - DNA, 15 bp, Homo sapiens
acagtttcaattcca

SEQ ID NO: 1811827 - DNA, 15 bp, Homo sapiens
cagtttcaattccaa

SEQ ID NO: 1811828 - DNA, 15 bp, Homo sapiens
agtttcaattccaat

SEQ ID NO: 1811829 - DNA, 15 bp, Homo sapiens
gtttcaattccaatt

SEQ ID NO: 1811830 - DNA, 15 bp, Homo sapiens
tttcaattccaattt

SEQ ID NO: 1811831 - DNA, 15 bp, Homo sapiens
ttcaattccaatttg

SEQ ID NO: 1811832 - DNA, 15 bp, Homo sapiens
tcaattccaatttga

SEQ ID NO: 1811833 - DNA, 15 bp, Homo sapiens
caattccaatttgac

SEQ ID NO: 1811834 - DNA, 15 bp, Homo sapiens
aattccaatttgact

SEQ ID NO: 1811835 - DNA, 15 bp, Homo sapiens
attccaatttgactt

SEQ ID NO: 1811836 - DNA, 15 bp, Homo sapiens
ttccaatttgacttt

SEQ ID NO: 1811837 - DNA, 15 bp, Homo sapiens
tccaatttgactttt

SEQ ID NO: 1811838 - DNA, 15 bp, Homo sapiens
ccaatttgactttta

SEQ ID NO: 1811839 - DNA, 15 bp, Homo sapiens
caatttgacttttaa

SEQ ID NO: 1811840 - DNA, 15 bp, Homo sapiens
aatttgacttttaac

SEQ ID NO: 1811841 - DNA, 15 bp, Homo sapiens
atttgacttttaact

SEQ ID NO: 1811842 - DNA, 15 bp, Homo sapiens
tttgacttttaactg

SEQ ID NO: 1811843 - DNA, 15 bp, Homo sapiens
ttgacttttaactga

SEQ ID NO: 1811844 - DNA, 15 bp, Homo sapiens
tgacttttaactgac

SEQ ID NO: 1811845 - DNA, 15 bp, Homo sapiens
gacttttaactgact

SEQ ID NO: 1811846 - DNA, 15 bp, Homo sapiens
acttttaactgactt

SEQ ID NO: 1811847 - DNA, 15 bp, Homo sapiens
cttttaactgacttt

SEQ ID NO: 1811848 - DNA, 15 bp, Homo sapiens
ttttaactgacttta

SEQ ID NO: 1811849 - DNA, 15 bp, Homo sapiens
tttaactgactttaa

SEQ ID NO: 1811850 - DNA, 15 bp, Homo sapiens
ttaactgactttaaa

SEQ ID NO: 1811851 - DNA, 15 bp, Homo sapiens
taactgactttaaac

SEQ ID NO: 1811852 - DNA, 15 bp, Homo sapiens
aactgactttaaacc

SEQ ID NO: 1811853 - DNA, 15 bp, Homo sapiens
actgactttaaaccg

SEQ ID NO: 1811854 - DNA, 15 bp, Homo sapiens
ctgactttaaaccga

SEQ ID NO: 1811855 - DNA, 15 bp, Homo sapiens
tgactttaaaccgat

SEQ ID NO: 1811856 - DNA, 15 bp, Homo sapiens
gactttaaaccgatt

SEQ ID NO: 1811857 - DNA, 15 bp, Homo sapiens
actttaaaccgattg

SEQ ID NO: 1811858 - DNA, 15 bp, Homo sapiens
ctttaaaccgattgc

SEQ ID NO: 1811859 - DNA, 15 bp, Homo sapiens
tttaaaccgattgct

SEQ ID NO: 1811860 - DNA, 15 bp, Homo sapiens
ttaaaccgattgctt

SEQ ID NO: 1811861 - DNA, 15 bp, Homo sapiens
taaaccgattgcttc

SEQ ID NO: 1811862 - DNA, 15 bp, Homo sapiens
aaaccgattgcttcc

SEQ ID NO: 1811863 - DNA, 15 bp, Homo sapiens
aaccgattgcttcca

SEQ ID NO: 1811864 - DNA, 15 bp, Homo sapiens
accgattgcttccat

SEQ ID NO: 1811865 - DNA, 15 bp, Homo sapiens
ccgattgcttccatt

SEQ ID NO: 1811866 - DNA, 15 bp, Homo sapiens
cgattgcttccattt

SEQ ID NO: 1811867 - DNA, 15 bp, Homo sapiens
gattgcttccatttc

SEQ ID NO: 1811868 - DNA, 15 bp, Homo sapiens
attgcttccatttcc

SEQ ID NO: 1811869 - DNA, 15 bp, Homo sapiens
ttgcttccatttcct

SEQ ID NO: 1811870 - DNA, 15 bp, Homo sapiens
tgcttccatttccta

SEQ ID NO: 1811871 - DNA, 15 bp, Homo sapiens
gcttccatttcctat

SEQ ID NO: 1811872 - DNA, 15 bp, Homo sapiens
cttccatttcctatt

SEQ ID NO: 1811873 - DNA, 15 bp, Homo sapiens
ttccatttcctattc

SEQ ID NO: 1811874 - DNA, 15 bp, Homo sapiens
tccatttcctattca

SEQ ID NO: 1811875 - DNA, 15 bp, Homo sapiens
ccatttcctattcat

SEQ ID NO: 1811876 - DNA, 15 bp, Homo sapiens
catttcctattcata

SEQ ID NO: 1811877 - DNA, 15 bp, Homo sapiens
atttcctattcatag

SEQ ID NO: 1811878 - DNA, 15 bp, Homo sapiens
tttcctattcatagg

SEQ ID NO: 1811879 - DNA, 15 bp, Homo sapiens
ttcctattcatagga

SEQ ID NO: 1811880 - DNA, 15 bp, Homo sapiens
tcctattcataggaa

SEQ ID NO: 1811881 - DNA, 15 bp, Homo sapiens
cctattcataggaag

SEQ ID NO: 1811882 - DNA, 15 bp, Homo sapiens
ctattcataggaagt

SEQ ID NO: 1811883 - DNA, 15 bp, Homo sapiens
tattcataggaagta

SEQ ID NO: 1811884 - DNA, 15 bp, Homo sapiens
attcataggaagtaa

SEQ ID NO: 1811885 - DNA, 15 bp, Homo sapiens
ttcataggaagtaaa

SEQ ID NO: 1811886 - DNA, 15 bp, Homo sapiens
tcataggaagtaaat

SEQ ID NO: 1811887 - DNA, 15 bp, Homo sapiens
cataggaagtaaatg

SEQ ID NO: 1811888 - DNA, 15 bp, Homo sapiens
ataggaagtaaatga

SEQ ID NO: 1811889 - DNA, 15 bp, Homo sapiens
taggaagtaaatgat

SEQ ID NO: 1811890 - DNA, 15 bp, Homo sapiens
aggaagtaaatgatt

SEQ ID NO: 1811891 - DNA, 15 bp, Homo sapiens
ggaagtaaatgattt

SEQ ID NO: 1811892 - DNA, 15 bp, Homo sapiens
gaagtaaatgatttt

SEQ ID NO: 1811893 - DNA, 15 bp, Homo sapiens
aagtaaatgatttta

SEQ ID NO: 1811894 - DNA, 15 bp, Homo sapiens
agtaaatgattttag

SEQ ID NO: 1811895 - DNA, 15 bp, Homo sapiens
gtaaatgattttagt

SEQ ID NO: 1811896 - DNA, 15 bp, Homo sapiens
taaatgattttagtc

SEQ ID NO: 1811897 - DNA, 15 bp, Homo sapiens
aaatgattttagtca

SEQ ID NO: 1811898 - DNA, 15 bp, Homo sapiens
aatgattttagtcag

SEQ ID NO: 1811899 - DNA, 15 bp, Homo sapiens
atgattttagtcaga

SEQ ID NO: 1811900 - DNA, 15 bp, Homo sapiens
tgattttagtcagag

SEQ ID NO: 1811901 - DNA, 15 bp, Homo sapiens
gattttagtcagagt

SEQ ID NO: 1811902 - DNA, 15 bp, Homo sapiens
attttagtcagagtc

SEQ ID NO: 1811903 - DNA, 15 bp, Homo sapiens
ttttagtcagagtcc

SEQ ID NO: 1811904 - DNA, 15 bp, Homo sapiens
tttagtcagagtcct

SEQ ID NO: 1811905 - DNA, 15 bp, Homo sapiens
ttagtcagagtccta

SEQ ID NO: 1811906 - DNA, 15 bp, Homo sapiens
tagtcagagtcctag

SEQ ID NO: 1811907 - DNA, 15 bp, Homo sapiens
agtcagagtcctagc

SEQ ID NO: 1811908 - DNA, 15 bp, Homo sapiens
gtcagagtcctagcc

SEQ ID NO: 1811909 - DNA, 15 bp, Homo sapiens
tcagagtcctagcca

SEQ ID NO: 1811910 - DNA, 15 bp, Homo sapiens
cagagtcctagccat

SEQ ID NO: 1811911 - DNA, 15 bp, Homo sapiens
agagtcctagccatg

SEQ ID NO: 1811912 - DNA, 15 bp, Homo sapiens
gagtcctagccatgc

SEQ ID NO: 1811913 - DNA, 15 bp, Homo sapiens
agtcctagccatgca

SEQ ID NO: 1811914 - DNA, 15 bp, Homo sapiens
gtcctagccatgcaa

SEQ ID NO: 1811915 - DNA, 15 bp, Homo sapiens
tcctagccatgcaac

SEQ ID NO: 1811916 - DNA, 15 bp, Homo sapiens
cctagccatgcaact

SEQ ID NO: 1811917 - DNA, 15 bp, Homo sapiens
ctagccatgcaactt

SEQ ID NO: 1811918 - DNA, 15 bp, Homo sapiens
tagccatgcaactta

SEQ ID NO: 1811919 - DNA, 15 bp, Homo sapiens
agccatgcaacttat

SEQ ID NO: 1811920 - DNA, 15 bp, Homo sapiens
gccatgcaacttatc

SEQ ID NO: 1811921 - DNA, 15 bp, Homo sapiens
ccatgcaacttatca

SEQ ID NO: 1811922 - DNA, 15 bp, Homo sapiens
catgcaacttatcaa

SEQ ID NO: 1811923 - DNA, 15 bp, Homo sapiens
atgcaacttatcaag

SEQ ID NO: 1811924 - DNA, 15 bp, Homo sapiens
tgcaacttatcaagt

SEQ ID NO: 1811925 - DNA, 15 bp, Homo sapiens
gcaacttatcaagtt

SEQ ID NO: 1811926 - DNA, 15 bp, Homo sapiens
caacttatcaagttg

SEQ ID NO: 1811927 - DNA, 15 bp, Homo sapiens
aacttatcaagttga

SEQ ID NO: 1811928 - DNA, 15 bp, Homo sapiens
acttatcaagttgat

SEQ ID NO: 1811929 - DNA, 15 bp, Homo sapiens
cttatcaagttgatt

SEQ ID NO: 1811930 - DNA, 15 bp, Homo sapiens
ttatcaagttgattc

SEQ ID NO: 1811931 - DNA, 15 bp, Homo sapiens
tatcaagttgattct

SEQ ID NO: 1811932 - DNA, 15 bp, Homo sapiens
atcaagttgattctg

SEQ ID NO: 1811933 - DNA, 15 bp, Homo sapiens
tcaagttgattctgg

SEQ ID NO: 1811934 - DNA, 15 bp, Homo sapiens
caagttgattctggg

SEQ ID NO: 1811935 - DNA, 15 bp, Homo sapiens
aagttgattctgggc

SEQ ID NO: 1811936 - DNA, 15 bp, Homo sapiens
agttgattctgggca

SEQ ID NO: 1811937 - DNA, 15 bp, Homo sapiens
gttgattctgggcaa

SEQ ID NO: 1811938 - DNA, 15 bp, Homo sapiens
ttgattctgggcaaa

SEQ ID NO: 1811939 - DNA, 15 bp, Homo sapiens
tgattctgggcaaat

SEQ ID NO: 1811940 - DNA, 15 bp, Homo sapiens
gattctgggcaaatt

SEQ ID NO: 1811941 - DNA, 15 bp, Homo sapiens
attctgggcaaattc

SEQ ID NO: 1811942 - DNA, 15 bp, Homo sapiens
ttctgggcaaattca

SEQ ID NO: 1811943 - DNA, 15 bp, Homo sapiens
tctgggcaaattcac

SEQ ID NO: 1811944 - DNA, 15 bp, Homo sapiens
ctgggcaaattcact

SEQ ID NO: 1811945 - DNA, 15 bp, Homo sapiens
tgggcaaattcactg

SEQ ID NO: 1811946 - DNA, 15 bp, Homo sapiens
gggcaaattcactgc

SEQ ID NO: 1811947 - DNA, 15 bp, Homo sapiens
ggcaaattcactgct

SEQ ID NO: 1811948 - DNA, 15 bp, Homo sapiens
gcaaattcactgctg

SEQ ID NO: 1811949 - DNA, 15 bp, Homo sapiens
caaattcactgctgt

SEQ ID NO: 1811950 - DNA, 15 bp, Homo sapiens
aaattcactgctgtg

SEQ ID NO: 1811951 - DNA, 15 bp, Homo sapiens
aattcactgctgtga

SEQ ID NO: 1811952 - DNA, 15 bp, Homo sapiens
attcactgctgtgac

SEQ ID NO: 1811953 - DNA, 15 bp, Homo sapiens
ttcactgctgtgacc

SEQ ID NO: 1811954 - DNA, 15 bp, Homo sapiens
tcactgctgtgaccc

SEQ ID NO: 1811955 - DNA, 15 bp, Homo sapiens
cactgctgtgaccct

SEQ ID NO: 1811956 - DNA, 15 bp, Homo sapiens
actgctgtgacccta

SEQ ID NO: 1811957 - DNA, 15 bp, Homo sapiens
ctgctgtgaccctag

SEQ ID NO: 1811958 - DNA, 15 bp, Homo sapiens
tgctgtgaccctagg

SEQ ID NO: 1811959 - DNA, 15 bp, Homo sapiens
gctgtgaccctaggt

SEQ ID NO: 1811960 - DNA, 15 bp, Homo sapiens
ctgtgaccctaggtt

SEQ ID NO: 1811961 - DNA, 15 bp, Homo sapiens
tgtgaccctaggttt

SEQ ID NO: 1811962 - DNA, 15 bp, Homo sapiens
gtgaccctaggtttc

SEQ ID NO: 1811963 - DNA, 15 bp, Homo sapiens
tgaccctaggtttct

SEQ ID NO: 1811964 - DNA, 15 bp, Homo sapiens
gaccctaggtttctc

SEQ ID NO: 1811965 - DNA, 15 bp, Homo sapiens
accctaggtttctca

SEQ ID NO: 1811966 - DNA, 15 bp, Homo sapiens
ccctaggtttctcac

SEQ ID NO: 1811967 - DNA, 15 bp, Homo sapiens
cctaggtttctcacg

SEQ ID NO: 1811968 - DNA, 15 bp, Homo sapiens
ctaggtttctcacgg

SEQ ID NO: 1811969 - DNA, 15 bp, Homo sapiens
taggtttctcacggt

SEQ ID NO: 1811970 - DNA, 15 bp, Homo sapiens
aggtttctcacggtg

SEQ ID NO: 1811971 - DNA, 15 bp, Homo sapiens
ggtttctcacggtga

SEQ ID NO: 1811972 - DNA, 15 bp, Homo sapiens
gtttctcacggtgaa

SEQ ID NO: 1811973 - DNA, 15 bp, Homo sapiens
tttctcacggtgaat

SEQ ID NO: 1811974 - DNA, 15 bp, Homo sapiens
ttctcacggtgaatt

SEQ ID NO: 1811975 - DNA, 15 bp, Homo sapiens
tctcacggtgaattc

SEQ ID NO: 1811976 - DNA, 15 bp, Homo sapiens
ctcacggtgaattct

SEQ ID NO: 1811977 - DNA, 15 bp, Homo sapiens
tcacggtgaattctc

SEQ ID NO: 1811978 - DNA, 15 bp, Homo sapiens
cacggtgaattctca

SEQ ID NO: 1811979 - DNA, 15 bp, Homo sapiens
acggtgaattctcat

SEQ ID NO: 1811980 - DNA, 15 bp, Homo sapiens
cggtgaattctcatt

SEQ ID NO: 1811981 - DNA, 15 bp, Homo sapiens
ggtgaattctcattg

SEQ ID NO: 1811982 - DNA, 15 bp, Homo sapiens
gtgaattctcattgc

SEQ ID NO: 1811983 - DNA, 15 bp, Homo sapiens
tgaattctcattgca

SEQ ID NO: 1811984 - DNA, 15 bp, Homo sapiens
gaattctcattgcaa

SEQ ID NO: 1811985 - DNA, 15 bp, Homo sapiens
aattctcattgcaaa

SEQ ID NO: 1811986 - DNA, 15 bp, Homo sapiens
attctcattgcaaaa

SEQ ID NO: 1811987 - DNA, 15 bp, Homo sapiens
ttctcattgcaaaag

SEQ ID NO: 1811988 - DNA, 15 bp, Homo sapiens
tctcattgcaaaagg

SEQ ID NO: 1811989 - DNA, 15 bp, Homo sapiens
ctcattgcaaaaggg

SEQ ID NO: 1811990 - DNA, 15 bp, Homo sapiens
tcattgcaaaagggc

SEQ ID NO: 1811991 - DNA, 15 bp, Homo sapiens
cattgcaaaagggct

SEQ ID NO: 1811992 - DNA, 15 bp, Homo sapiens
attgcaaaagggctg

SEQ ID NO: 1811993 - DNA, 15 bp, Homo sapiens
ttgcaaaagggctgc

SEQ ID NO: 1811994 - DNA, 15 bp, Homo sapiens
tgcaaaagggctgcc

SEQ ID NO: 1811995 - DNA, 15 bp, Homo sapiens
gcaaaagggctgcct

SEQ ID NO: 1811996 - DNA, 15 bp, Homo sapiens
caaaagggctgcctg

SEQ ID NO: 1811997 - DNA, 15 bp, Homo sapiens
aaaagggctgcctga

SEQ ID NO: 1811998 - DNA, 15 bp, Homo sapiens
aaagggctgcctgac

SEQ ID NO: 1811999 - DNA, 15 bp, Homo sapiens
aagggctgcctgacc

SEQ ID NO: 1812000 - DNA, 15 bp, Homo sapiens
agggctgcctgaccc

SEQ ID NO: 1812001 - DNA, 15 bp, Homo sapiens
gggctgcctgaccca

SEQ ID NO: 1812002 - DNA, 15 bp, Homo sapiens
ggctgcctgacccat

SEQ ID NO: 1812003 - DNA, 15 bp, Homo sapiens
gctgcctgacccata

SEQ ID NO: 1812004 - DNA, 15 bp, Homo sapiens
ctgcctgacccatag

SEQ ID NO: 1812005 - DNA, 15 bp, Homo sapiens
tgcctgacccatagc

SEQ ID NO: 1812006 - DNA, 15 bp, Homo sapiens
gcctgacccatagca

SEQ ID NO: 1812007 - DNA, 15 bp, Homo sapiens
cctgacccatagcag

SEQ ID NO: 1812008 - DNA, 15 bp, Homo sapiens
ctgacccatagcagt

SEQ ID NO: 1812009 - DNA, 15 bp, Homo sapiens
tgacccatagcagta

SEQ ID NO: 1812010 - DNA, 15 bp, Homo sapiens
gacccatagcagtag

SEQ ID NO: 1812011 - DNA, 15 bp, Homo sapiens
acccatagcagtagg

SEQ ID NO: 1812012 - DNA, 15 bp, Homo sapiens
cccatagcagtaggt

SEQ ID NO: 1812013 - DNA, 15 bp, Homo sapiens
ccatagcagtaggtg

SEQ ID NO: 1812014 - DNA, 15 bp, Homo sapiens
catagcagtaggtgc

SEQ ID NO: 1812015 - DNA, 15 bp, Homo sapiens
atagcagtaggtgca

SEQ ID NO: 1812016 - DNA, 15 bp, Homo sapiens
tagcagtaggtgcag

SEQ ID NO: 1812017 - DNA, 15 bp, Homo sapiens
agcagtaggtgcagt

SEQ ID NO: 1812018 - DNA, 15 bp, Homo sapiens
gcagtaggtgcagtg

SEQ ID NO: 1812019 - DNA, 15 bp, Homo sapiens
cagtaggtgcagtgt

SEQ ID NO: 1812020 - DNA, 15 bp, Homo sapiens
agtaggtgcagtgtt

SEQ ID NO: 1812021 - DNA, 15 bp, Homo sapiens
gtaggtgcagtgttt

SEQ ID NO: 1812022 - DNA, 15 bp, Homo sapiens
taggtgcagtgttta

SEQ ID NO: 1812023 - DNA, 15 bp, Homo sapiens
aggtgcagtgtttag

SEQ ID NO: 1812024 - DNA, 15 bp, Homo sapiens
ggtgcagtgtttaga

SEQ ID NO: 1812025 - DNA, 15 bp, Homo sapiens
gtgcagtgtttagaa

SEQ ID NO: 1812026 - DNA, 15 bp, Homo sapiens
tgcagtgtttagaac

SEQ ID NO: 1812027 - DNA, 15 bp, Homo sapiens
gcagtgtttagaacg

SEQ ID NO: 1812028 - DNA, 15 bp, Homo sapiens
cagtgtttagaacgc

SEQ ID NO: 1812029 - DNA, 15 bp, Homo sapiens
agtgtttagaacgca

SEQ ID NO: 1812030 - DNA, 15 bp, Homo sapiens
gtgtttagaacgcac

SEQ ID NO: 1812031 - DNA, 15 bp, Homo sapiens
tgtttagaacgcaca

SEQ ID NO: 1812032 - DNA, 15 bp, Homo sapiens
gtttagaacgcacag

SEQ ID NO: 1812033 - DNA, 15 bp, Homo sapiens
tttagaacgcacaga

SEQ ID NO: 1812034 - DNA, 15 bp, Homo sapiens
ttagaacgcacagaa

SEQ ID NO: 1812035 - DNA, 15 bp, Homo sapiens
tagaacgcacagaac

SEQ ID NO: 1812036 - DNA, 15 bp, Homo sapiens
agaacgcacagaact

SEQ ID NO: 1812037 - DNA, 15 bp, Homo sapiens
gaacgcacagaactg

SEQ ID NO: 1812038 - DNA, 15 bp, Homo sapiens
aacgcacagaactga

SEQ ID NO: 1812039 - DNA, 15 bp, Homo sapiens
acgcacagaactgac

SEQ ID NO: 1812040 - DNA, 15 bp, Homo sapiens
cgcacagaactgact

SEQ ID NO: 1812041 - DNA, 15 bp, Homo sapiens
gcacagaactgacta

SEQ ID NO: 1812042 - DNA, 15 bp, Homo sapiens
cacagaactgactac

SEQ ID NO: 1812043 - DNA, 15 bp, Homo sapiens
acagaactgactaca

SEQ ID NO: 1812044 - DNA, 15 bp, Homo sapiens
cagaactgactacag

SEQ ID NO: 1812045 - DNA, 15 bp, Homo sapiens
agaactgactacaga

SEQ ID NO: 1812046 - DNA, 15 bp, Homo sapiens
gaactgactacagac

SEQ ID NO: 1812047 - DNA, 15 bp, Homo sapiens
aactgactacagacg

SEQ ID NO: 1812048 - DNA, 15 bp, Homo sapiens
actgactacagacgg

SEQ ID NO: 1812049 - DNA, 15 bp, Homo sapiens
ctgactacagacggc

SEQ ID NO: 1812050 - DNA, 15 bp, Homo sapiens
tgactacagacggct

SEQ ID NO: 1812051 - DNA, 15 bp, Homo sapiens
gactacagacggctt

SEQ ID NO: 1812052 - DNA, 15 bp, Homo sapiens
actacagacggcttg

SEQ ID NO: 1812053 - DNA, 15 bp, Homo sapiens
ctacagacggcttga

SEQ ID NO: 1812054 - DNA, 15 bp, Homo sapiens
tacagacggcttgat

SEQ ID NO: 1812055 - DNA, 15 bp, Homo sapiens
acagacggcttgatt

SEQ ID NO: 1812056 - DNA, 15 bp, Homo sapiens
cagacggcttgattt

SEQ ID NO: 1812057 - DNA, 15 bp, Homo sapiens
agacggcttgattta

SEQ ID NO: 1812058 - DNA, 15 bp, Homo sapiens
gacggcttgatttac

SEQ ID NO: 1812059 - DNA, 15 bp, Homo sapiens
acggcttgatttact

SEQ ID NO: 1812060 - DNA, 15 bp, Homo sapiens
cggcttgatttactg

SEQ ID NO: 1812061 - DNA, 15 bp, Homo sapiens
ggcttgatttactgt

SEQ ID NO: 1812062 - DNA, 15 bp, Homo sapiens
gcttgatttactgtg

SEQ ID NO: 1812063 - DNA, 15 bp, Homo sapiens
cttgatttactgtga

SEQ ID NO: 1812064 - DNA, 15 bp, Homo sapiens
ttgatttactgtgac

SEQ ID NO: 1812065 - DNA, 15 bp, Homo sapiens
tgatttactgtgaca

SEQ ID NO: 1812066 - DNA, 15 bp, Homo sapiens
gatttactgtgacag

SEQ ID NO: 1812067 - DNA, 15 bp, Homo sapiens
atttactgtgacagg

SEQ ID NO: 1812068 - DNA, 15 bp, Homo sapiens
tttactgtgacagga

SEQ ID NO: 1812069 - DNA, 15 bp, Homo sapiens
ttactgtgacaggat

SEQ ID NO: 1812070 - DNA, 15 bp, Homo sapiens
tactgtgacaggatt

SEQ ID NO: 1812071 - DNA, 15 bp, Homo sapiens
actgtgacaggatta

SEQ ID NO: 1812072 - DNA, 15 bp, Homo sapiens
ctgtgacaggattat

SEQ ID NO: 1812073 - DNA, 15 bp, Homo sapiens
tgtgacaggattatg

SEQ ID NO: 1812074 - DNA, 15 bp, Homo sapiens
gtgacaggattatgc

SEQ ID NO: 1812075 - DNA, 15 bp, Homo sapiens
tgacaggattatgct

SEQ ID NO: 1812076 - DNA, 15 bp, Homo sapiens
gacaggattatgcta

SEQ ID NO: 1812077 - DNA, 15 bp, Homo sapiens
acaggattatgctag

SEQ ID NO: 1812078 - DNA, 15 bp, Homo sapiens
caggattatgctagg

SEQ ID NO: 1812079 - DNA, 15 bp, Homo sapiens
aggattatgctaggt

SEQ ID NO: 1812080 - DNA, 15 bp, Homo sapiens
ggattatgctaggtc

SEQ ID NO: 1812081 - DNA, 15 bp, Homo sapiens
gattatgctaggtct

SEQ ID NO: 1812082 - DNA, 15 bp, Homo sapiens
attatgctaggtctg

SEQ ID NO: 1812083 - DNA, 15 bp, Homo sapiens
ttatgctaggtctgg

SEQ ID NO: 1812084 - DNA, 15 bp, Homo sapiens
tatgctaggtctggg

SEQ ID NO: 1812085 - DNA, 15 bp, Homo sapiens
atgctaggtctgggg

SEQ ID NO: 1812086 - DNA, 15 bp, Homo sapiens
tgctaggtctgggga

SEQ ID NO: 1812087 - DNA, 15 bp, Homo sapiens
gctaggtctggggac

SEQ ID NO: 1812088 - DNA, 15 bp, Homo sapiens
ctaggtctggggaca

SEQ ID NO: 1812089 - DNA, 15 bp, Homo sapiens
taggtctggggacac

SEQ ID NO: 1812090 - DNA, 15 bp, Homo sapiens
aggtctggggacaca

SEQ ID NO: 1812091 - DNA, 15 bp, Homo sapiens
ggtctggggacacat

SEQ ID NO: 1812092 - DNA, 15 bp, Homo sapiens
gtctggggacacata

SEQ ID NO: 1812093 - DNA, 15 bp, Homo sapiens
tctggggacacataa

SEQ ID NO: 1812094 - DNA, 15 bp, Homo sapiens
ctggggacacataat

SEQ ID NO: 1812095 - DNA, 15 bp, Homo sapiens
tggggacacataatg

SEQ ID NO: 1812096 - DNA, 15 bp, Homo sapiens
ggggacacataatga

SEQ ID NO: 1812097 - DNA, 15 bp, Homo sapiens
gggacacataatgag

SEQ ID NO: 1812098 - DNA, 15 bp, Homo sapiens
ggacacataatgaga

SEQ ID NO: 1812099 - DNA, 15 bp, Homo sapiens
gacacataatgagac

SEQ ID NO: 1812100 - DNA, 15 bp, Homo sapiens
acacataatgagacc

SEQ ID NO: 1812101 - DNA, 15 bp, Homo sapiens
cacataatgagacca

SEQ ID NO: 1812102 - DNA, 15 bp, Homo sapiens
acataatgagaccaa

SEQ ID NO: 1812103 - DNA, 15 bp, Homo sapiens
cataatgagaccaag

SEQ ID NO: 1812104 - DNA, 15 bp, Homo sapiens
ataatgagaccaaga

SEQ ID NO: 1812105 - DNA, 15 bp, Homo sapiens
taatgagaccaagaa

SEQ ID NO: 1812106 - DNA, 15 bp, Homo sapiens
aatgagaccaagaac

SEQ ID NO: 1812107 - DNA, 15 bp, Homo sapiens
atgagaccaagaact

SEQ ID NO: 1812108 - DNA, 15 bp, Homo sapiens
tgagaccaagaactg

SEQ ID NO: 1812109 - DNA, 15 bp, Homo sapiens
gagaccaagaactgg

SEQ ID NO: 1812110 - DNA, 15 bp, Homo sapiens
agaccaagaactggt

SEQ ID NO: 1812111 - DNA, 15 bp, Homo sapiens
gaccaagaactggtc

SEQ ID NO: 1812112 - DNA, 15 bp, Homo sapiens
accaagaactggtcc

SEQ ID NO: 1812113 - DNA, 15 bp, Homo sapiens
ccaagaactggtccc

SEQ ID NO: 1812114 - DNA, 15 bp, Homo sapiens
caagaactggtccct

SEQ ID NO: 1812115 - DNA, 15 bp, Homo sapiens
aagaactggtccctg

SEQ ID NO: 1812116 - DNA, 15 bp, Homo sapiens
agaactggtccctgt

SEQ ID NO: 1812117 - DNA, 15 bp, Homo sapiens
gaactggtccctgtg

SEQ ID NO: 1812118 - DNA, 15 bp, Homo sapiens
aactggtccctgtgg

SEQ ID NO: 1812119 - DNA, 15 bp, Homo sapiens
actggtccctgtgga

SEQ ID NO: 1812120 - DNA, 15 bp, Homo sapiens
ctggtccctgtggag

SEQ ID NO: 1812121 - DNA, 15 bp, Homo sapiens
tggtccctgtggagt

SEQ ID NO: 1812122 - DNA, 15 bp, Homo sapiens
ggtccctgtggagtt

SEQ ID NO: 1812123 - DNA, 15 bp, Homo sapiens
gtccctgtggagttc

SEQ ID NO: 1812124 - DNA, 15 bp, Homo sapiens
tccctgtggagttca

SEQ ID NO: 1812125 - DNA, 15 bp, Homo sapiens
ccctgtggagttcag

SEQ ID NO: 1812126 - DNA, 15 bp, Homo sapiens
cctgtggagttcaga

SEQ ID NO: 1812127 - DNA, 15 bp, Homo sapiens
ctgtggagttcagaa

SEQ ID NO: 1812128 - DNA, 15 bp, Homo sapiens
tgtggagttcagaat

SEQ ID NO: 1812129 - DNA, 15 bp, Homo sapiens
gtggagttcagaatc

SEQ ID NO: 1812130 - DNA, 15 bp, Homo sapiens
tggagttcagaatct

SEQ ID NO: 1812131 - DNA, 15 bp, Homo sapiens
ggagttcagaatctg

SEQ ID NO: 1812132 - DNA, 15 bp, Homo sapiens
gagttcagaatctgt

SEQ ID NO: 1812133 - DNA, 15 bp, Homo sapiens
agttcagaatctgtg

SEQ ID NO: 1812134 - DNA, 15 bp, Homo sapiens
gttcagaatctgtgt

SEQ ID NO: 1812135 - DNA, 15 bp, Homo sapiens
ttcagaatctgtgtg

SEQ ID NO: 1812136 - DNA, 15 bp, Homo sapiens
tcagaatctgtgtgg

SEQ ID NO: 1812137 - DNA, 15 bp, Homo sapiens
cagaatctgtgtgga

SEQ ID NO: 1812138 - DNA, 15 bp, Homo sapiens
agaatctgtgtggaa

SEQ ID NO: 1812139 - DNA, 15 bp, Homo sapiens
gaatctgtgtggaag

SEQ ID NO: 1812140 - DNA, 15 bp, Homo sapiens
aatctgtgtggaaga

SEQ ID NO: 1812141 - DNA, 15 bp, Homo sapiens
atctgtgtggaagat

SEQ ID NO: 1812142 - DNA, 15 bp, Homo sapiens
tctgtgtggaagata

SEQ ID NO: 1812143 - DNA, 15 bp, Homo sapiens
ctgtgtggaagatag

SEQ ID NO: 1812144 - DNA, 15 bp, Homo sapiens
tgtgtggaagatagt

SEQ ID NO: 1812145 - DNA, 15 bp, Homo sapiens
gtgtggaagatagtg

SEQ ID NO: 1812146 - DNA, 15 bp, Homo sapiens
tgtggaagatagtgt

SEQ ID NO: 1812147 - DNA, 15 bp, Homo sapiens
gtggaagatagtgtg

SEQ ID NO: 1812148 - DNA, 15 bp, Homo sapiens
tggaagatagtgtga

SEQ ID NO: 1812149 - DNA, 15 bp, Homo sapiens
ggaagatagtgtgat

SEQ ID NO: 1812150 - DNA, 15 bp, Homo sapiens
gaagatagtgtgata

SEQ ID NO: 1812151 - DNA, 15 bp, Homo sapiens
aagatagtgtgatac

SEQ ID NO: 1812152 - DNA, 15 bp, Homo sapiens
agatagtgtgatacc

SEQ ID NO: 1812153 - DNA, 15 bp, Homo sapiens
gatagtgtgatacct

SEQ ID NO: 1812154 - DNA, 15 bp, Homo sapiens
atagtgtgatacctg

SEQ ID NO: 1812155 - DNA, 15 bp, Homo sapiens
tagtgtgatacctgc

SEQ ID NO: 1812156 - DNA, 15 bp, Homo sapiens
agtgtgatacctgct

SEQ ID NO: 1812157 - DNA, 15 bp, Homo sapiens
gtgtgatacctgctc

SEQ ID NO: 1812158 - DNA, 15 bp, Homo sapiens
tgtgatacctgctct

SEQ ID NO: 1812159 - DNA, 15 bp, Homo sapiens
gtgatacctgctctg

SEQ ID NO: 1812160 - DNA, 15 bp, Homo sapiens
tgatacctgctctgc

SEQ ID NO: 1812161 - DNA, 15 bp, Homo sapiens
gatacctgctctgct

SEQ ID NO: 1812162 - DNA, 15 bp, Homo sapiens
atacctgctctgctc

SEQ ID NO: 1812163 - DNA, 15 bp, Homo sapiens
tacctgctctgctca

SEQ ID NO: 1812164 - DNA, 15 bp, Homo sapiens
acctgctctgctcaa

SEQ ID NO: 1812165 - DNA, 15 bp, Homo sapiens
cctgctctgctcaag

SEQ ID NO: 1812166 - DNA, 15 bp, Homo sapiens
ctgctctgctcaagc

SEQ ID NO: 1812167 - DNA, 15 bp, Homo sapiens
tgctctgctcaagca

SEQ ID NO: 1812168 - DNA, 15 bp, Homo sapiens
gctctgctcaagcag

SEQ ID NO: 1812169 - DNA, 15 bp, Homo sapiens
ctctgctcaagcagc

SEQ ID NO: 1812170 - DNA, 15 bp, Homo sapiens
tctgctcaagcagcc

SEQ ID NO: 1812171 - DNA, 15 bp, Homo sapiens
ctgctcaagcagccg

SEQ ID NO: 1812172 - DNA, 15 bp, Homo sapiens
tgctcaagcagccgt

SEQ ID NO: 1812173 - DNA, 15 bp, Homo sapiens
gctcaagcagccgtg

SEQ ID NO: 1812174 - DNA, 15 bp, Homo sapiens
ctcaagcagccgtgg

SEQ ID NO: 1812175 - DNA, 15 bp, Homo sapiens
tcaagcagccgtgga

SEQ ID NO: 1812176 - DNA, 15 bp, Homo sapiens
caagcagccgtggaa

SEQ ID NO: 1812177 - DNA, 15 bp, Homo sapiens
aagcagccgtggaag

SEQ ID NO: 1812178 - DNA, 15 bp, Homo sapiens
agcagccgtggaagc

SEQ ID NO: 1812179 - DNA, 15 bp, Homo sapiens
gcagccgtggaagcc

SEQ ID NO: 1812180 - DNA, 15 bp, Homo sapiens
cagccgtggaagccc

SEQ ID NO: 1812181 - DNA, 15 bp, Homo sapiens
agccgtggaagccct

SEQ ID NO: 1812182 - DNA, 15 bp, Homo sapiens
gccgtggaagccctg

SEQ ID NO: 1812183 - DNA, 15 bp, Homo sapiens
ccgtggaagccctgg

SEQ ID NO: 1812184 - DNA, 15 bp, Homo sapiens
cgtggaagccctgga

SEQ ID NO: 1812185 - DNA, 15 bp, Homo sapiens
gtggaagccctggaa

SEQ ID NO: 1812186 - DNA, 15 bp, Homo sapiens
tggaagccctggaaa

SEQ ID NO: 1812187 - DNA, 15 bp, Homo sapiens
ggaagccctggaaag

SEQ ID NO: 1812188 - DNA, 15 bp, Homo sapiens
gaagccctggaaagg

SEQ ID NO: 1812189 - DNA, 15 bp, Homo sapiens
aagccctggaaaggg

SEQ ID NO: 1812190 - DNA, 15 bp, Homo sapiens
agccctggaaaggga

SEQ ID NO: 1812191 - DNA, 15 bp, Homo sapiens
gccctggaaagggaa

SEQ ID NO: 1812192 - DNA, 15 bp, Homo sapiens
ccctggaaagggaac

SEQ ID NO: 1812193 - DNA, 15 bp, Homo sapiens
cctggaaagggaaca

SEQ ID NO: 1812194 - DNA, 15 bp, Homo sapiens
ctggaaagggaacaa

SEQ ID NO: 1812195 - DNA, 15 bp, Homo sapiens
tggaaagggaacaat

SEQ ID NO: 1812196 - DNA, 15 bp, Homo sapiens
ggaaagggaacaata

SEQ ID NO: 1812197 - DNA, 15 bp, Homo sapiens
gaaagggaacaatat

SEQ ID NO: 1812198 - DNA, 15 bp, Homo sapiens
aaagggaacaatatg

SEQ ID NO: 1812199 - DNA, 15 bp, Homo sapiens
aagggaacaatatgc

SEQ ID NO: 1812200 - DNA, 15 bp, Homo sapiens
agggaacaatatgct

SEQ ID NO: 1812201 - DNA, 15 bp, Homo sapiens
gggaacaatatgctg

SEQ ID NO: 1812202 - DNA, 15 bp, Homo sapiens
ggaacaatatgctgg

SEQ ID NO: 1812203 - DNA, 15 bp, Homo sapiens
gaacaatatgctggg

SEQ ID NO: 1812204 - DNA, 15 bp, Homo sapiens
aacaatatgctgggt

SEQ ID NO: 1812205 - DNA, 15 bp, Homo sapiens
acaatatgctgggtg

SEQ ID NO: 1812206 - DNA, 15 bp, Homo sapiens
caatatgctgggtga

SEQ ID NO: 1812207 - DNA, 15 bp, Homo sapiens
aatatgctgggtgag

SEQ ID NO: 1812208 - DNA, 15 bp, Homo sapiens
atatgctgggtgagg

SEQ ID NO: 1812209 - DNA, 15 bp, Homo sapiens
tatgctgggtgaggg

SEQ ID NO: 1812210 - DNA, 15 bp, Homo sapiens
atgctgggtgagggg

SEQ ID NO: 1812211 - DNA, 15 bp, Homo sapiens
tgctgggtgaggggc

SEQ ID NO: 1812212 - DNA, 15 bp, Homo sapiens
gctgggtgaggggcc

SEQ ID NO: 1812213 - DNA, 15 bp, Homo sapiens
ctgggtgaggggccc

SEQ ID NO: 1812214 - DNA, 15 bp, Homo sapiens
tgggtgaggggccca

SEQ ID NO: 1812215 - DNA, 15 bp, Homo sapiens
gggtgaggggcccaa

SEQ ID NO: 1812216 - DNA, 15 bp, Homo sapiens
ggtgaggggcccaag

SEQ ID NO: 1812217 - DNA, 15 bp, Homo sapiens
gtgaggggcccaaga

SEQ ID NO: 1812218 - DNA, 15 bp, Homo sapiens
tgaggggcccaagag

SEQ ID NO: 1812219 - DNA, 15 bp, Homo sapiens
gaggggcccaagagg

SEQ ID NO: 1812220 - DNA, 15 bp, Homo sapiens
aggggcccaagaggc

SEQ ID NO: 1812221 - DNA, 15 bp, Homo sapiens
ggggcccaagaggca

SEQ ID NO: 1812222 - DNA, 15 bp, Homo sapiens
gggcccaagaggcag

SEQ ID NO: 1812223 - DNA, 15 bp, Homo sapiens
ggcccaagaggcaga

SEQ ID NO: 1812224 - DNA, 15 bp, Homo sapiens
gcccaagaggcagag

SEQ ID NO: 1812225 - DNA, 15 bp, Homo sapiens
caagaggcagaggtg

SEQ ID NO: 1812226 - DNA, 15 bp, Homo sapiens
aagaggcagaggtga

SEQ ID NO: 1812227 - DNA, 15 bp, Homo sapiens
agaggcagaggtgac

SEQ ID NO: 1812228 - DNA, 15 bp, Homo sapiens
gaggcagaggtgaca

SEQ ID NO: 1812229 - DNA, 15 bp, Homo sapiens
aggcagaggtgacac

SEQ ID NO: 1812230 - DNA, 15 bp, Homo sapiens
ggcagaggtgacact

SEQ ID NO: 1812231 - DNA, 15 bp, Homo sapiens
gcagaggtgacactg

SEQ ID NO: 1812232 - DNA, 15 bp, Homo sapiens
cagaggtgacactga

SEQ ID NO: 1812233 - DNA, 15 bp, Homo sapiens
agaggtgacactgac

SEQ ID NO: 1812234 - DNA, 15 bp, Homo sapiens
gaggtgacactgacg

SEQ ID NO: 1812235 - DNA, 15 bp, Homo sapiens
aggtgacactgacgg

SEQ ID NO: 1812236 - DNA, 15 bp, Homo sapiens
ggtgacactgacggt

SEQ ID NO: 1812237 - DNA, 15 bp, Homo sapiens
gtgacactgacggta

SEQ ID NO: 1812238 - DNA, 15 bp, Homo sapiens
tgacactgacggtat

SEQ ID NO: 1812239 - DNA, 15 bp, Homo sapiens
gacactgacggtatc

SEQ ID NO: 1812240 - DNA, 15 bp, Homo sapiens
acactgacggtatct

SEQ ID NO: 1812241 - DNA, 15 bp, Homo sapiens
cactgacggtatctc

SEQ ID NO: 1812242 - DNA, 15 bp, Homo sapiens
actgacggtatctca

SEQ ID NO: 1812243 - DNA, 15 bp, Homo sapiens
ctgacggtatctcag

SEQ ID NO: 1812244 - DNA, 15 bp, Homo sapiens
tgacggtatctcagc

SEQ ID NO: 1812245 - DNA, 15 bp, Homo sapiens
gacggtatctcagca

SEQ ID NO: 1812246 - DNA, 15 bp, Homo sapiens
acggtatctcagcat

SEQ ID NO: 1812247 - DNA, 15 bp, Homo sapiens
cggtatctcagcatt

SEQ ID NO: 1812248 - DNA, 15 bp, Homo sapiens
ggtatctcagcattc

SEQ ID NO: 1812249 - DNA, 15 bp, Homo sapiens
gtatctcagcattct

SEQ ID NO: 1812250 - DNA, 15 bp, Homo sapiens
tatctcagcattctc

SEQ ID NO: 1812251 - DNA, 15 bp, Homo sapiens
atctcagcattctcg

SEQ ID NO: 1812252 - DNA, 15 bp, Homo sapiens
tctcagcattctcga

SEQ ID NO: 1812253 - DNA, 15 bp, Homo sapiens
ctcagcattctcgaa

SEQ ID NO: 1812254 - DNA, 15 bp, Homo sapiens
tcagcattctcgaaa

SEQ ID NO: 1812255 - DNA, 15 bp, Homo sapiens
cagcattctcgaaaa

SEQ ID NO: 1812256 - DNA, 15 bp, Homo sapiens
agcattctcgaaaaa

SEQ ID NO: 1812257 - DNA, 15 bp, Homo sapiens
gcattctcgaaaaag

SEQ ID NO: 1812258 - DNA, 15 bp, Homo sapiens
cattctcgaaaaagg

SEQ ID NO: 1812259 - DNA, 15 bp, Homo sapiens
attctcgaaaaaggg

SEQ ID NO: 1812260 - DNA, 15 bp, Homo sapiens
ttctcgaaaaagggt

SEQ ID NO: 1812261 - DNA, 15 bp, Homo sapiens
tctcgaaaaagggtg

SEQ ID NO: 1812262 - DNA, 15 bp, Homo sapiens
ctcgaaaaagggtgc

SEQ ID NO: 1812263 - DNA, 15 bp, Homo sapiens
tcgaaaaagggtgca

SEQ ID NO: 1812264 - DNA, 15 bp, Homo sapiens
cgaaaaagggtgcag

SEQ ID NO: 1812265 - DNA, 15 bp, Homo sapiens
gaaaaagggtgcagg

SEQ ID NO: 1812266 - DNA, 15 bp, Homo sapiens
aaaaagggtgcaggt

SEQ ID NO: 1812267 - DNA, 15 bp, Homo sapiens
aaaagggtgcaggtg

SEQ ID NO: 1812268 - DNA, 15 bp, Homo sapiens
aaagggtgcaggtgc

SEQ ID NO: 1812269 - DNA, 15 bp, Homo sapiens
aagggtgcaggtgct

SEQ ID NO: 1812270 - DNA, 15 bp, Homo sapiens
agggtgcaggtgctg

SEQ ID NO: 1812271 - DNA, 15 bp, Homo sapiens
gggtgcaggtgctga

SEQ ID NO: 1812272 - DNA, 15 bp, Homo sapiens
ggtgcaggtgctgaa

SEQ ID NO: 1812273 - DNA, 15 bp, Homo sapiens
gtgcaggtgctgaag

SEQ ID NO: 1812274 - DNA, 15 bp, Homo sapiens
tgcaggtgctgaagg

SEQ ID NO: 1812275 - DNA, 15 bp, Homo sapiens
gcaggtgctgaaggc

SEQ ID NO: 1812276 - DNA, 15 bp, Homo sapiens
caggtgctgaaggca

SEQ ID NO: 1812277 - DNA, 15 bp, Homo sapiens
aggtgctgaaggcag

SEQ ID NO: 1812278 - DNA, 15 bp, Homo sapiens
ggtgctgaaggcagc

SEQ ID NO: 1812279 - DNA, 15 bp, Homo sapiens
gtgctgaaggcagcc

SEQ ID NO: 1812280 - DNA, 15 bp, Homo sapiens
tgctgaaggcagcct

SEQ ID NO: 1812281 - DNA, 15 bp, Homo sapiens
gctgaaggcagcctg

SEQ ID NO: 1812282 - DNA, 15 bp, Homo sapiens
ctgaaggcagcctgt

SEQ ID NO: 1812283 - DNA, 15 bp, Homo sapiens
tgaaggcagcctgtc

SEQ ID NO: 1812284 - DNA, 15 bp, Homo sapiens
gaaggcagcctgtcc

SEQ ID NO: 1812285 - DNA, 15 bp, Homo sapiens
aaggcagcctgtccg

SEQ ID NO: 1812286 - DNA, 15 bp, Homo sapiens
aggcagcctgtccgt

SEQ ID NO: 1812287 - DNA, 15 bp, Homo sapiens
ggcagcctgtccgtg

SEQ ID NO: 1812288 - DNA, 15 bp, Homo sapiens
gcagcctgtccgtga

SEQ ID NO: 1812289 - DNA, 15 bp, Homo sapiens
cagcctgtccgtgag

SEQ ID NO: 1812290 - DNA, 15 bp, Homo sapiens
agcctgtccgtgagg

SEQ ID NO: 1812291 - DNA, 15 bp, Homo sapiens
gcctgtccgtgaggt

SEQ ID NO: 1812292 - DNA, 15 bp, Homo sapiens
cctgtccgtgaggtg

SEQ ID NO: 1812293 - DNA, 15 bp, Homo sapiens
ctgtccgtgaggtgg

SEQ ID NO: 1812294 - DNA, 15 bp, Homo sapiens
tgtccgtgaggtggg

SEQ ID NO: 1812295 - DNA, 15 bp, Homo sapiens
gtccgtgaggtgggt

SEQ ID NO: 1812296 - DNA, 15 bp, Homo sapiens
tccgtgaggtgggtg

SEQ ID NO: 1812297 - DNA, 15 bp, Homo sapiens
ccgtgaggtgggtgg

SEQ ID NO: 1812298 - DNA, 15 bp, Homo sapiens
cgtgaggtgggtggg

SEQ ID NO: 1812299 - DNA, 15 bp, Homo sapiens
gtgaggtgggtgggc

SEQ ID NO: 1812300 - DNA, 15 bp, Homo sapiens
tgaggtgggtgggcc

SEQ ID NO: 1812301 - DNA, 15 bp, Homo sapiens
gaggtgggtgggccc

SEQ ID NO: 1812302 - DNA, 15 bp, Homo sapiens
aggtgggtgggcccc

SEQ ID NO: 1812303 - DNA, 15 bp, Homo sapiens
ggtgggtgggcccca

SEQ ID NO: 1812304 - DNA, 15 bp, Homo sapiens
gtgggtgggccccag

SEQ ID NO: 1812305 - DNA, 15 bp, Homo sapiens
tgggtgggccccagc

SEQ ID NO: 1812306 - DNA, 15 bp, Homo sapiens
gggtgggccccagcc

SEQ ID NO: 1812307 - DNA, 15 bp, Homo sapiens
ggtgggccccagcca

SEQ ID NO: 1812308 - DNA, 15 bp, Homo sapiens
gtgggccccagccat

SEQ ID NO: 1812309 - DNA, 15 bp, Homo sapiens
tgggccccagccatc

SEQ ID NO: 1812310 - DNA, 15 bp, Homo sapiens
gggccccagccatct

SEQ ID NO: 1812311 - DNA, 15 bp, Homo sapiens
ggccccagccatcta

SEQ ID NO: 1812312 - DNA, 15 bp, Homo sapiens
gccccagccatctag

SEQ ID NO: 1812313 - DNA, 15 bp, Homo sapiens
ccccagccatctagg

SEQ ID NO: 1812314 - DNA, 15 bp, Homo sapiens
cccagccatctaggg

SEQ ID NO: 1812315 - DNA, 15 bp, Homo sapiens
ccagccatctagggg

SEQ ID NO: 1812316 - DNA, 15 bp, Homo sapiens
cagccatctaggggg

SEQ ID NO: 1812317 - DNA, 15 bp, Homo sapiens
agccatctaggggga

SEQ ID NO: 1812318 - DNA, 15 bp, Homo sapiens
gccatctagggggat

SEQ ID NO: 1812319 - DNA, 15 bp, Homo sapiens
ccatctagggggatg

SEQ ID NO: 1812320 - DNA, 15 bp, Homo sapiens
catctagggggatgt

SEQ ID NO: 1812321 - DNA, 15 bp, Homo sapiens
atctagggggatgta

SEQ ID NO: 1812322 - DNA, 15 bp, Homo sapiens
tctagggggatgtaa

SEQ ID NO: 1812323 - DNA, 15 bp, Homo sapiens
ctagggggatgtaaa

SEQ ID NO: 1812324 - DNA, 15 bp, Homo sapiens
tagggggatgtaaaa

SEQ ID NO: 1812325 - DNA, 15 bp, Homo sapiens
agggggatgtaaaat

SEQ ID NO: 1812326 - DNA, 15 bp, Homo sapiens
gggggatgtaaaatg

SEQ ID NO: 1812327 - DNA, 15 bp, Homo sapiens
ggggatgtaaaatgc

SEQ ID NO: 1812328 - DNA, 15 bp, Homo sapiens
gggatgtaaaatgct

SEQ ID NO: 1812329 - DNA, 15 bp, Homo sapiens
ggatgtaaaatgctc

SEQ ID NO: 1812330 - DNA, 15 bp, Homo sapiens
gatgtaaaatgctct

SEQ ID NO: 1812331 - DNA, 15 bp, Homo sapiens
atgtaaaatgctctg

SEQ ID NO: 1812332 - DNA, 15 bp, Homo sapiens
tgtaaaatgctctga

SEQ ID NO: 1812333 - DNA, 15 bp, Homo sapiens
gtaaaatgctctgat

SEQ ID NO: 1812334 - DNA, 15 bp, Homo sapiens
taaaatgctctgata

SEQ ID NO: 1812335 - DNA, 15 bp, Homo sapiens
aaaatgctctgatac

SEQ ID NO: 1812336 - DNA, 15 bp, Homo sapiens
aaatgctctgataca

SEQ ID NO: 1812337 - DNA, 15 bp, Homo sapiens
aatgctctgatacag

SEQ ID NO: 1812338 - DNA, 15 bp, Homo sapiens
atgctctgatacaga

SEQ ID NO: 1812339 - DNA, 15 bp, Homo sapiens
tgctctgatacagat

SEQ ID NO: 1812340 - DNA, 15 bp, Homo sapiens
gctctgatacagata

SEQ ID NO: 1812341 - DNA, 15 bp, Homo sapiens
ctctgatacagatag

SEQ ID NO: 1812342 - DNA, 15 bp, Homo sapiens
tctgatacagataga

SEQ ID NO: 1812343 - DNA, 15 bp, Homo sapiens
ctgatacagatagaa

SEQ ID NO: 1812344 - DNA, 15 bp, Homo sapiens
tgatacagatagaac

SEQ ID NO: 1812345 - DNA, 15 bp, Homo sapiens
gatacagatagaacc

SEQ ID NO: 1812346 - DNA, 15 bp, Homo sapiens
atacagatagaacct

SEQ ID NO: 1812347 - DNA, 15 bp, Homo sapiens
tacagatagaacctc

SEQ ID NO: 1812348 - DNA, 15 bp, Homo sapiens
acagatagaacctcc

SEQ ID NO: 1812349 - DNA, 15 bp, Homo sapiens
cagatagaacctcct

SEQ ID NO: 1812350 - DNA, 15 bp, Homo sapiens
agatagaacctcctt

SEQ ID NO: 1812351 - DNA, 15 bp, Homo sapiens
gatagaacctccttc

SEQ ID NO: 1812352 - DNA, 15 bp, Homo sapiens
atagaacctccttca

SEQ ID NO: 1812353 - DNA, 15 bp, Homo sapiens
tagaacctccttcat

SEQ ID NO: 1812354 - DNA, 15 bp, Homo sapiens
agaacctccttcatt

SEQ ID NO: 1812355 - DNA, 15 bp, Homo sapiens
gaacctccttcattt

SEQ ID NO: 1812356 - DNA, 15 bp, Homo sapiens
aacctccttcatttt

SEQ ID NO: 1812357 - DNA, 15 bp, Homo sapiens
acctccttcatttta

SEQ ID NO: 1812358 - DNA, 15 bp, Homo sapiens
cctccttcattttag

SEQ ID NO: 1812359 - DNA, 15 bp, Homo sapiens
ctccttcattttagg

SEQ ID NO: 1812360 - DNA, 15 bp, Homo sapiens
tccttcattttaggt

SEQ ID NO: 1812361 - DNA, 15 bp, Homo sapiens
ccttcattttaggtg

SEQ ID NO: 1812362 - DNA, 15 bp, Homo sapiens
cttcattttaggtgt

SEQ ID NO: 1812363 - DNA, 15 bp, Homo sapiens
ttcattttaggtgtc

SEQ ID NO: 1812364 - DNA, 15 bp, Homo sapiens
tcattttaggtgtca

SEQ ID NO: 1812365 - DNA, 15 bp, Homo sapiens
cattttaggtgtcaa

SEQ ID NO: 1812366 - DNA, 15 bp, Homo sapiens
attttaggtgtcaat

SEQ ID NO: 1812367 - DNA, 15 bp, Homo sapiens
ttttaggtgtcaatt

SEQ ID NO: 1812368 - DNA, 15 bp, Homo sapiens
tttaggtgtcaattt

SEQ ID NO: 1812369 - DNA, 15 bp, Homo sapiens
ttaggtgtcaattta

SEQ ID NO: 1812370 - DNA, 15 bp, Homo sapiens
taggtgtcaatttac

SEQ ID NO: 1812371 - DNA, 15 bp, Homo sapiens
aggtgtcaatttacc

SEQ ID NO: 1812372 - DNA, 15 bp, Homo sapiens
ggtgtcaatttacca

SEQ ID NO: 1812373 - DNA, 15 bp, Homo sapiens
gtgtcaatttaccac

SEQ ID NO: 1812374 - DNA, 15 bp, Homo sapiens
tgtcaatttaccaca

SEQ ID NO: 1812375 - DNA, 15 bp, Homo sapiens
gtcaatttaccacac

SEQ ID NO: 1812376 - DNA, 15 bp, Homo sapiens
tcaatttaccacaca

SEQ ID NO: 1812377 - DNA, 15 bp, Homo sapiens
caatttaccacacac

SEQ ID NO: 1812378 - DNA, 15 bp, Homo sapiens
aatttaccacacacc

SEQ ID NO: 1812379 - DNA, 15 bp, Homo sapiens
atttaccacacaccc

SEQ ID NO: 1812380 - DNA, 15 bp, Homo sapiens
tttaccacacaccca

SEQ ID NO: 1812381 - DNA, 15 bp, Homo sapiens
ttaccacacacccaa

SEQ ID NO: 1812382 - DNA, 15 bp, Homo sapiens
taccacacacccaag

SEQ ID NO: 1812383 - DNA, 15 bp, Homo sapiens
accacacacccaagc

SEQ ID NO: 1812384 - DNA, 15 bp, Homo sapiens
ccacacacccaagct

SEQ ID NO: 1812385 - DNA, 15 bp, Homo sapiens
cacacacccaagctc

SEQ ID NO: 1812386 - DNA, 15 bp, Homo sapiens
acacacccaagctct

SEQ ID NO: 1812387 - DNA, 15 bp, Homo sapiens
cacacccaagctcta

SEQ ID NO: 1812388 - DNA, 15 bp, Homo sapiens
acacccaagctctac

SEQ ID NO: 1812389 - DNA, 15 bp, Homo sapiens
cacccaagctctacc

SEQ ID NO: 1812390 - DNA, 15 bp, Homo sapiens
acccaagctctacct

SEQ ID NO: 1812391 - DNA, 15 bp, Homo sapiens
cccaagctctacctt

SEQ ID NO: 1812392 - DNA, 15 bp, Homo sapiens
ccaagctctaccttc

SEQ ID NO: 1812393 - DNA, 15 bp, Homo sapiens
caagctctaccttct

SEQ ID NO: 1812394 - DNA, 15 bp, Homo sapiens
aagctctaccttcta

SEQ ID NO: 1812395 - DNA, 15 bp, Homo sapiens
agctctaccttctaa

SEQ ID NO: 1812396 - DNA, 15 bp, Homo sapiens
gctctaccttctaat

SEQ ID NO: 1812397 - DNA, 15 bp, Homo sapiens
ctctaccttctaatt

SEQ ID NO: 1812398 - DNA, 15 bp, Homo sapiens
tctaccttctaattt

SEQ ID NO: 1812399 - DNA, 15 bp, Homo sapiens
ctaccttctaatttt

SEQ ID NO: 1812400 - DNA, 15 bp, Homo sapiens
taccttctaattttt

SEQ ID NO: 1812401 - DNA, 15 bp, Homo sapiens
accttctaatttttg

SEQ ID NO: 1812402 - DNA, 15 bp, Homo sapiens
ccttctaatttttgc

SEQ ID NO: 1812403 - DNA, 15 bp, Homo sapiens
cttctaatttttgcc

SEQ ID NO: 1812404 - DNA, 15 bp, Homo sapiens
ttctaatttttgcca

SEQ ID NO: 1812405 - DNA, 15 bp, Homo sapiens
tctaatttttgccaa

SEQ ID NO: 1812406 - DNA, 15 bp, Homo sapiens
ctaatttttgccaac

SEQ ID NO: 1812407 - DNA, 15 bp, Homo sapiens
taatttttgccaact

SEQ ID NO: 1812408 - DNA, 15 bp, Homo sapiens
aatttttgccaactt

SEQ ID NO: 1812409 - DNA, 15 bp, Homo sapiens
atttttgccaacttt

SEQ ID NO: 1812410 - DNA, 15 bp, Homo sapiens
tttttgccaacttta

SEQ ID NO: 1812411 - DNA, 15 bp, Homo sapiens
ttttgccaactttat

SEQ ID NO: 1812412 - DNA, 15 bp, Homo sapiens
tttgccaactttatt

SEQ ID NO: 1812413 - DNA, 15 bp, Homo sapiens
ttgccaactttattc

SEQ ID NO: 1812414 - DNA, 15 bp, Homo sapiens
tgccaactttattcc

SEQ ID NO: 1812415 - DNA, 15 bp, Homo sapiens
gccaactttattcca

SEQ ID NO: 1812416 - DNA, 15 bp, Homo sapiens
ccaactttattccac

SEQ ID NO: 1812417 - DNA, 15 bp, Homo sapiens
caactttattccaca

SEQ ID NO: 1812418 - DNA, 15 bp, Homo sapiens
aactttattccacag

SEQ ID NO: 1812419 - DNA, 15 bp, Homo sapiens
actttattccacaga

SEQ ID NO: 1812420 - DNA, 15 bp, Homo sapiens
ctttattccacagaa

SEQ ID NO: 1812421 - DNA, 15 bp, Homo sapiens
tttattccacagaag

SEQ ID NO: 1812422 - DNA, 15 bp, Homo sapiens
ttattccacagaagt

SEQ ID NO: 1812423 - DNA, 15 bp, Homo sapiens
tattccacagaagtc

SEQ ID NO: 1812424 - DNA, 15 bp, Homo sapiens
attccacagaagtct

SEQ ID NO: 1812425 - DNA, 15 bp, Homo sapiens
ttccacagaagtctc

SEQ ID NO: 1812426 - DNA, 15 bp, Homo sapiens
tccacagaagtctca

SEQ ID NO: 1812427 - DNA, 15 bp, Homo sapiens
ccacagaagtctcaa

SEQ ID NO: 1812428 - DNA, 15 bp, Homo sapiens
cacagaagtctcaaa

SEQ ID NO: 1812429 - DNA, 15 bp, Homo sapiens
acagaagtctcaaat

SEQ ID NO: 1812430 - DNA, 15 bp, Homo sapiens
cagaagtctcaaatt

SEQ ID NO: 1812431 - DNA, 15 bp, Homo sapiens
agaagtctcaaatta

SEQ ID NO: 1812432 - DNA, 15 bp, Homo sapiens
gaagtctcaaattat

SEQ ID NO: 1812433 - DNA, 15 bp, Homo sapiens
aagtctcaaattatc

SEQ ID NO: 1812434 - DNA, 15 bp, Homo sapiens
agtctcaaattatct

SEQ ID NO: 1812435 - DNA, 15 bp, Homo sapiens
gtctcaaattatctg

SEQ ID NO: 1812436 - DNA, 15 bp, Homo sapiens
tctcaaattatctgc

SEQ ID NO: 1812437 - DNA, 15 bp, Homo sapiens
ctcaaattatctgct

SEQ ID NO: 1812438 - DNA, 15 bp, Homo sapiens
tcaaattatctgctt

SEQ ID NO: 1812439 - DNA, 15 bp, Homo sapiens
caaattatctgcttg

SEQ ID NO: 1812440 - DNA, 15 bp, Homo sapiens
aaattatctgcttgt

SEQ ID NO: 1812441 - DNA, 15 bp, Homo sapiens
aattatctgcttgtc

SEQ ID NO: 1812442 - DNA, 15 bp, Homo sapiens
attatctgcttgtcc

SEQ ID NO: 1812443 - DNA, 15 bp, Homo sapiens
ttatctgcttgtcct

SEQ ID NO: 1812444 - DNA, 15 bp, Homo sapiens
tatctgcttgtcctt

SEQ ID NO: 1812445 - DNA, 15 bp, Homo sapiens
atctgcttgtcctta

SEQ ID NO: 1812446 - DNA, 15 bp, Homo sapiens
tctgcttgtccttaa

SEQ ID NO: 1812447 - DNA, 15 bp, Homo sapiens
ctgcttgtccttaaa

SEQ ID NO: 1812448 - DNA, 15 bp, Homo sapiens
tgcttgtccttaaaa

SEQ ID NO: 1812449 - DNA, 15 bp, Homo sapiens
gcttgtccttaaaac

SEQ ID NO: 1812450 - DNA, 15 bp, Homo sapiens
cttgtccttaaaaca

SEQ ID NO: 1812451 - DNA, 15 bp, Homo sapiens
ttgtccttaaaacag

SEQ ID NO: 1812452 - DNA, 15 bp, Homo sapiens
tgtccttaaaacaga

SEQ ID NO: 1812453 - DNA, 15 bp, Homo sapiens
gtccttaaaacagat

SEQ ID NO: 1812454 - DNA, 15 bp, Homo sapiens
tccttaaaacagata

SEQ ID NO: 1812455 - DNA, 15 bp, Homo sapiens
ccttaaaacagataa

SEQ ID NO: 1812456 - DNA, 15 bp, Homo sapiens
cttaaaacagataag

SEQ ID NO: 1812457 - DNA, 15 bp, Homo sapiens
ttaaaacagataagc

SEQ ID NO: 1812458 - DNA, 15 bp, Homo sapiens
taaaacagataagca

SEQ ID NO: 1812459 - DNA, 15 bp, Homo sapiens
aaaacagataagcac

SEQ ID NO: 1812460 - DNA, 15 bp, Homo sapiens
aaacagataagcact

SEQ ID NO: 1812461 - DNA, 15 bp, Homo sapiens
aacagataagcactg

SEQ ID NO: 1812462 - DNA, 15 bp, Homo sapiens
acagataagcactga

SEQ ID NO: 1812463 - DNA, 15 bp, Homo sapiens
cagataagcactgac

SEQ ID NO: 1812464 - DNA, 15 bp, Homo sapiens
agataagcactgact

SEQ ID NO: 1812465 - DNA, 15 bp, Homo sapiens
gataagcactgactt

SEQ ID NO: 1812466 - DNA, 15 bp, Homo sapiens
ataagcactgacttt

SEQ ID NO: 1812467 - DNA, 15 bp, Homo sapiens
taagcactgactttt

SEQ ID NO: 1812468 - DNA, 15 bp, Homo sapiens
aagcactgacttttg

SEQ ID NO: 1812469 - DNA, 15 bp, Homo sapiens
agcactgacttttgt

SEQ ID NO: 1812470 - DNA, 15 bp, Homo sapiens
gcactgacttttgtc

SEQ ID NO: 1812471 - DNA, 15 bp, Homo sapiens
cactgacttttgtca

SEQ ID NO: 1812472 - DNA, 15 bp, Homo sapiens
actgacttttgtcag

SEQ ID NO: 1812473 - DNA, 15 bp, Homo sapiens
ctgacttttgtcagt

SEQ ID NO: 1812474 - DNA, 15 bp, Homo sapiens
tgacttttgtcagtt

SEQ ID NO: 1812475 - DNA, 15 bp, Homo sapiens
gacttttgtcagttg

SEQ ID NO: 1812476 - DNA, 15 bp, Homo sapiens
acttttgtcagttgt

SEQ ID NO: 1812477 - DNA, 15 bp, Homo sapiens
cttttgtcagttgtc

SEQ ID NO: 1812478 - DNA, 15 bp, Homo sapiens
ttttgtcagttgtct

SEQ ID NO: 1812479 - DNA, 15 bp, Homo sapiens
tttgtcagttgtcta

SEQ ID NO: 1812480 - DNA, 15 bp, Homo sapiens
ttgtcagttgtctac

SEQ ID NO: 1812481 - DNA, 15 bp, Homo sapiens
tgtcagttgtctaca

SEQ ID NO: 1812482 - DNA, 15 bp, Homo sapiens
gtcagttgtctacat

SEQ ID NO: 1812483 - DNA, 15 bp, Homo sapiens
tcagttgtctacata

SEQ ID NO: 1812484 - DNA, 15 bp, Homo sapiens
cagttgtctacatac

SEQ ID NO: 1812485 - DNA, 15 bp, Homo sapiens
agttgtctacataca

SEQ ID NO: 1812486 - DNA, 15 bp, Homo sapiens
gttgtctacatacaa

SEQ ID NO: 1812487 - DNA, 15 bp, Homo sapiens
ttgtctacatacaac

SEQ ID NO: 1812488 - DNA, 15 bp, Homo sapiens
tgtctacatacaacc

SEQ ID NO: 1812489 - DNA, 15 bp, Homo sapiens
gtctacatacaacct

SEQ ID NO: 1812490 - DNA, 15 bp, Homo sapiens
tctacatacaaccta

SEQ ID NO: 1812491 - DNA, 15 bp, Homo sapiens
ctacatacaacctat

SEQ ID NO: 1812492 - DNA, 15 bp, Homo sapiens
tacatacaacctata

SEQ ID NO: 1812493 - DNA, 15 bp, Homo sapiens
acatacaacctatag

SEQ ID NO: 1812494 - DNA, 15 bp, Homo sapiens
catacaacctatagg

SEQ ID NO: 1812495 - DNA, 15 bp, Homo sapiens
atacaacctataggc

SEQ ID NO: 1812496 - DNA, 15 bp, Homo sapiens
tacaacctataggcc

SEQ ID NO: 1812497 - DNA, 15 bp, Homo sapiens
acaacctataggcca

SEQ ID NO: 1812498 - DNA, 15 bp, Homo sapiens
caacctataggccat

SEQ ID NO: 1812499 - DNA, 15 bp, Homo sapiens
aacctataggccatt

SEQ ID NO: 1812500 - DNA, 15 bp, Homo sapiens
acctataggccattt

SEQ ID NO: 1812501 - DNA, 15 bp, Homo sapiens
cctataggccattta

SEQ ID NO: 1812502 - DNA, 15 bp, Homo sapiens
ctataggccatttaa

SEQ ID NO: 1812503 - DNA, 15 bp, Homo sapiens
tataggccatttaac

SEQ ID NO: 1812504 - DNA, 15 bp, Homo sapiens
ataggccatttaaca

SEQ ID NO: 1812505 - DNA, 15 bp, Homo sapiens
taggccatttaacaa

SEQ ID NO: 1812506 - DNA, 15 bp, Homo sapiens
aggccatttaacaag

SEQ ID NO: 1812507 - DNA, 15 bp, Homo sapiens
ggccatttaacaagg

SEQ ID NO: 1812508 - DNA, 15 bp, Homo sapiens
gccatttaacaagga

SEQ ID NO: 1812509 - DNA, 15 bp, Homo sapiens
ccatttaacaaggaa

SEQ ID NO: 1812510 - DNA, 15 bp, Homo sapiens
catttaacaaggaaa

SEQ ID NO: 1812511 - DNA, 15 bp, Homo sapiens
atttaacaaggaaat

SEQ ID NO: 1812512 - DNA, 15 bp, Homo sapiens
tttaacaaggaaatt

SEQ ID NO: 1812513 - DNA, 15 bp, Homo sapiens
ttaacaaggaaattc

SEQ ID NO: 1812514 - DNA, 15 bp, Homo sapiens
taacaaggaaattct

SEQ ID NO: 1812515 - DNA, 15 bp, Homo sapiens
aacaaggaaattcta

SEQ ID NO: 1812516 - DNA, 15 bp, Homo sapiens
acaaggaaattctag

SEQ ID NO: 1812517 - DNA, 15 bp, Homo sapiens
caaggaaattctagc

SEQ ID NO: 1812518 - DNA, 15 bp, Homo sapiens
aaggaaattctagcc

SEQ ID NO: 1812519 - DNA, 15 bp, Homo sapiens
aggaaattctagcca

SEQ ID NO: 1812520 - DNA, 15 bp, Homo sapiens
ggaaattctagccat

SEQ ID NO: 1812521 - DNA, 15 bp, Homo sapiens
gaaattctagccata

SEQ ID NO: 1812522 - DNA, 15 bp, Homo sapiens
aaattctagccataa

SEQ ID NO: 1812523 - DNA, 15 bp, Homo sapiens
aattctagccataac

SEQ ID NO: 1812524 - DNA, 15 bp, Homo sapiens
attctagccataaca

SEQ ID NO: 1812525 - DNA, 15 bp, Homo sapiens
ttctagccataacag

SEQ ID NO: 1812526 - DNA, 15 bp, Homo sapiens
tctagccataacaga

SEQ ID NO: 1812527 - DNA, 15 bp, Homo sapiens
ctagccataacagag

SEQ ID NO: 1812528 - DNA, 15 bp, Homo sapiens
tagccataacagagg

SEQ ID NO: 1812529 - DNA, 15 bp, Homo sapiens
agccataacagaggt

SEQ ID NO: 1812530 - DNA, 15 bp, Homo sapiens
gccataacagaggtc

SEQ ID NO: 1812531 - DNA, 15 bp, Homo sapiens
ccataacagaggtcc

SEQ ID NO: 1812532 - DNA, 15 bp, Homo sapiens
cataacagaggtccc

SEQ ID NO: 1812533 - DNA, 15 bp, Homo sapiens
ataacagaggtccct

SEQ ID NO: 1812534 - DNA, 15 bp, Homo sapiens
taacagaggtccctg

SEQ ID NO: 1812535 - DNA, 15 bp, Homo sapiens
aacagaggtccctgc

SEQ ID NO: 1812536 - DNA, 15 bp, Homo sapiens
acagaggtccctgcc

SEQ ID NO: 1812537 - DNA, 15 bp, Homo sapiens
cagaggtccctgcct

SEQ ID NO: 1812538 - DNA, 15 bp, Homo sapiens
agaggtccctgccta

SEQ ID NO: 1812539 - DNA, 15 bp, Homo sapiens
gaggtccctgcctaa

SEQ ID NO: 1812540 - DNA, 15 bp, Homo sapiens
aggtccctgcctaag

SEQ ID NO: 1812541 - DNA, 15 bp, Homo sapiens
ggtccctgcctaagt

SEQ ID NO: 1812542 - DNA, 15 bp, Homo sapiens
gtccctgcctaagtt

SEQ ID NO: 1812543 - DNA, 15 bp, Homo sapiens
tccctgcctaagttt

SEQ ID NO: 1812544 - DNA, 15 bp, Homo sapiens
ccctgcctaagtttt

SEQ ID NO: 1812545 - DNA, 15 bp, Homo sapiens
cctgcctaagtttta

SEQ ID NO: 1812546 - DNA, 15 bp, Homo sapiens
ctgcctaagttttaa

SEQ ID NO: 1812547 - DNA, 15 bp, Homo sapiens
tgcctaagttttaat

SEQ ID NO: 1812548 - DNA, 15 bp, Homo sapiens
gcctaagttttaatt

SEQ ID NO: 1812549 - DNA, 15 bp, Homo sapiens
cctaagttttaattt

SEQ ID NO: 1812550 - DNA, 15 bp, Homo sapiens
ctaagttttaattta

SEQ ID NO: 1812551 - DNA, 15 bp, Homo sapiens
taagttttaatttat

SEQ ID NO: 1812552 - DNA, 15 bp, Homo sapiens
aagttttaatttata

SEQ ID NO: 1812553 - DNA, 15 bp, Homo sapiens
agttttaatttataa

SEQ ID NO: 1812554 - DNA, 15 bp, Homo sapiens
gttttaatttataat

SEQ ID NO: 1812555 - DNA, 15 bp, Homo sapiens
ttttaatttataatt

SEQ ID NO: 1812556 - DNA, 15 bp, Homo sapiens
tttaatttataattc

SEQ ID NO: 1812557 - DNA, 15 bp, Homo sapiens
ttaatttataattct

SEQ ID NO: 1812558 - DNA, 15 bp, Homo sapiens
taatttataattcta

SEQ ID NO: 1812559 - DNA, 15 bp, Homo sapiens
aatttataattctaa

SEQ ID NO: 1812560 - DNA, 15 bp, Homo sapiens
atttataattctaag

SEQ ID NO: 1812561 - DNA, 15 bp, Homo sapiens
tttataattctaaga

SEQ ID NO: 1812562 - DNA, 15 bp, Homo sapiens
ttataattctaagac

SEQ ID NO: 1812563 - DNA, 15 bp, Homo sapiens
tataattctaagact

SEQ ID NO: 1812564 - DNA, 15 bp, Homo sapiens
ataattctaagactg

SEQ ID NO: 1812565 - DNA, 15 bp, Homo sapiens
taattctaagactga

SEQ ID NO: 1812566 - DNA, 15 bp, Homo sapiens
aattctaagactgaa

SEQ ID NO: 1812567 - DNA, 15 bp, Homo sapiens
attctaagactgaag

SEQ ID NO: 1812568 - DNA, 15 bp, Homo sapiens
ttctaagactgaagt

SEQ ID NO: 1812569 - DNA, 15 bp, Homo sapiens
tctaagactgaagtc

SEQ ID NO: 1812570 - DNA, 15 bp, Homo sapiens
ctaagactgaagtct

SEQ ID NO: 1812571 - DNA, 15 bp, Homo sapiens
taagactgaagtctt

SEQ ID NO: 1812572 - DNA, 15 bp, Homo sapiens
aagactgaagtcttt

SEQ ID NO: 1812573 - DNA, 15 bp, Homo sapiens
agactgaagtctttt

SEQ ID NO: 1812574 - DNA, 15 bp, Homo sapiens
gactgaagtcttttg

SEQ ID NO: 1812575 - DNA, 15 bp, Homo sapiens
actgaagtcttttga

SEQ ID NO: 1812576 - DNA, 15 bp, Homo sapiens
ctgaagtcttttgaa

SEQ ID NO: 1812577 - DNA, 15 bp, Homo sapiens
tgaagtcttttgaaa

SEQ ID NO: 1812578 - DNA, 15 bp, Homo sapiens
gaagtcttttgaaat

SEQ ID NO: 1812579 - DNA, 15 bp, Homo sapiens
aagtcttttgaaatg

SEQ ID NO: 1812580 - DNA, 15 bp, Homo sapiens
agtcttttgaaatgg

SEQ ID NO: 1812581 - DNA, 15 bp, Homo sapiens
gtcttttgaaatggc

SEQ ID NO: 1812582 - DNA, 15 bp, Homo sapiens
tcttttgaaatggct

SEQ ID NO: 1812583 - DNA, 15 bp, Homo sapiens
cttttgaaatggctt

SEQ ID NO: 1812584 - DNA, 15 bp, Homo sapiens
ttttgaaatggctta

SEQ ID NO: 1812585 - DNA, 15 bp, Homo sapiens
tttgaaatggcttaa

SEQ ID NO: 1812586 - DNA, 15 bp, Homo sapiens
ttgaaatggcttaaa

SEQ ID NO: 1812587 - DNA, 15 bp, Homo sapiens
tgaaatggcttaaag

SEQ ID NO: 1812588 - DNA, 15 bp, Homo sapiens
gaaatggcttaaagc

SEQ ID NO: 1812589 - DNA, 15 bp, Homo sapiens
aaatggcttaaagca

SEQ ID NO: 1812590 - DNA, 15 bp, Homo sapiens
aatggcttaaagcac

SEQ ID NO: 1812591 - DNA, 15 bp, Homo sapiens
atggcttaaagcact

SEQ ID NO: 1812592 - DNA, 15 bp, Homo sapiens
tggcttaaagcactt

SEQ ID NO: 1812593 - DNA, 15 bp, Homo sapiens
ggcttaaagcacttg

SEQ ID NO: 1812594 - DNA, 15 bp, Homo sapiens
gcttaaagcacttgt

SEQ ID NO: 1812595 - DNA, 15 bp, Homo sapiens
cttaaagcacttgtg

SEQ ID NO: 1812596 - DNA, 15 bp, Homo sapiens
ttaaagcacttgtgc

SEQ ID NO: 1812597 - DNA, 15 bp, Homo sapiens
taaagcacttgtgca

SEQ ID NO: 1812598 - DNA, 15 bp, Homo sapiens
aaagcacttgtgcaa

SEQ ID NO: 1812599 - DNA, 15 bp, Homo sapiens
aagcacttgtgcaaa

SEQ ID NO: 1812600 - DNA, 15 bp, Homo sapiens
agcacttgtgcaaac

SEQ ID NO: 1812601 - DNA, 15 bp, Homo sapiens
gcacttgtgcaaaca

SEQ ID NO: 1812602 - DNA, 15 bp, Homo sapiens
cacttgtgcaaacat

SEQ ID NO: 1812603 - DNA, 15 bp, Homo sapiens
acttgtgcaaacatt

SEQ ID NO: 1812604 - DNA, 15 bp, Homo sapiens
cttgtgcaaacattt

SEQ ID NO: 1812605 - DNA, 15 bp, Homo sapiens
ttgtgcaaacatttg

SEQ ID NO: 1812606 - DNA, 15 bp, Homo sapiens
tgtgcaaacatttga

SEQ ID NO: 1812607 - DNA, 15 bp, Homo sapiens
gtgcaaacatttgac

SEQ ID NO: 1812608 - DNA, 15 bp, Homo sapiens
tgcaaacatttgaca

SEQ ID NO: 1812609 - DNA, 15 bp, Homo sapiens
gcaaacatttgacaa

SEQ ID NO: 1812610 - DNA, 15 bp, Homo sapiens
caaacatttgacaag

SEQ ID NO: 1812611 - DNA, 15 bp, Homo sapiens
aaacatttgacaaga

SEQ ID NO: 1812612 - DNA, 15 bp, Homo sapiens
aacatttgacaagat

SEQ ID NO: 1812613 - DNA, 15 bp, Homo sapiens
acatttgacaagata

SEQ ID NO: 1812614 - DNA, 15 bp, Homo sapiens
catttgacaagataa

SEQ ID NO: 1812615 - DNA, 15 bp, Homo sapiens
atttgacaagataaa

SEQ ID NO: 1812616 - DNA, 15 bp, Homo sapiens
tttgacaagataaaa

SEQ ID NO: 1812617 - DNA, 15 bp, Homo sapiens
ttgacaagataaaaa

SEQ ID NO: 1812618 - DNA, 15 bp, Homo sapiens
tgacaagataaaaat

SEQ ID NO: 1812619 - DNA, 15 bp, Homo sapiens
gacaagataaaaatg

SEQ ID NO: 1812620 - DNA, 15 bp, Homo sapiens
acaagataaaaatga

SEQ ID NO: 1812621 - DNA, 15 bp, Homo sapiens
caagataaaaatgaa

SEQ ID NO: 1812622 - DNA, 15 bp, Homo sapiens
aagataaaaatgaag

SEQ ID NO: 1812623 - DNA, 15 bp, Homo sapiens
agataaaaatgaagg

SEQ ID NO: 1812624 - DNA, 15 bp, Homo sapiens
gataaaaatgaaggt

SEQ ID NO: 1812625 - DNA, 15 bp, Homo sapiens
ataaaaatgaaggtg

SEQ ID NO: 1812626 - DNA, 15 bp, Homo sapiens
taaaaatgaaggtgc

SEQ ID NO: 1812627 - DNA, 15 bp, Homo sapiens
aaaaatgaaggtgcc

SEQ ID NO: 1812628 - DNA, 15 bp, Homo sapiens
aaaatgaaggtgcca

SEQ ID NO: 1812629 - DNA, 15 bp, Homo sapiens
aaatgaaggtgccag

SEQ ID NO: 1812630 - DNA, 15 bp, Homo sapiens
aatgaaggtgccagt

SEQ ID NO: 1812631 - DNA, 15 bp, Homo sapiens
atgaaggtgccagtt

SEQ ID NO: 1812632 - DNA, 15 bp, Homo sapiens
tgaaggtgccagttg

SEQ ID NO: 1812633 - DNA, 15 bp, Homo sapiens
gaaggtgccagttgg

SEQ ID NO: 1812634 - DNA, 15 bp, Homo sapiens
aaggtgccagttggg

SEQ ID NO: 1812635 - DNA, 15 bp, Homo sapiens
aggtgccagttgggt

SEQ ID NO: 1812636 - DNA, 15 bp, Homo sapiens
ggtgccagttgggtg

SEQ ID NO: 1812637 - DNA, 15 bp, Homo sapiens
gtgccagttgggtgc

SEQ ID NO: 1812638 - DNA, 15 bp, Homo sapiens
tgccagttgggtgca

SEQ ID NO: 1812639 - DNA, 15 bp, Homo sapiens
gccagttgggtgcag

SEQ ID NO: 1812640 - DNA, 15 bp, Homo sapiens
ccagttgggtgcagg

SEQ ID NO: 1812641 - DNA, 15 bp, Homo sapiens
cagttgggtgcaggg

SEQ ID NO: 1812642 - DNA, 15 bp, Homo sapiens
agttgggtgcagggc

SEQ ID NO: 1812643 - DNA, 15 bp, Homo sapiens
gttgggtgcagggcc

SEQ ID NO: 1812644 - DNA, 15 bp, Homo sapiens
ttgggtgcagggcct

SEQ ID NO: 1812645 - DNA, 15 bp, Homo sapiens
tgggtgcagggcctc

SEQ ID NO: 1812646 - DNA, 15 bp, Homo sapiens
gggtgcagggcctcg

SEQ ID NO: 1812647 - DNA, 15 bp, Homo sapiens
ggtgcagggcctcgt

SEQ ID NO: 1812648 - DNA, 15 bp, Homo sapiens
gtgcagggcctcgtg

SEQ ID NO: 1812649 - DNA, 15 bp, Homo sapiens
tgcagggcctcgtgc

SEQ ID NO: 1812650 - DNA, 15 bp, Homo sapiens
gcagggcctcgtgcc

SEQ ID NO: 1812651 - DNA, 15 bp, Homo sapiens
cagggcctcgtgcct

SEQ ID NO: 1812652 - DNA, 15 bp, Homo sapiens
agggcctcgtgcctg

SEQ ID NO: 1812653 - DNA, 15 bp, Homo sapiens
gggcctcgtgcctgt

SEQ ID NO: 1812654 - DNA, 15 bp, Homo sapiens
ggcctcgtgcctgta

SEQ ID NO: 1812655 - DNA, 15 bp, Homo sapiens
gcctcgtgcctgtaa

SEQ ID NO: 1812656 - DNA, 15 bp, Homo sapiens
cctcgtgcctgtaat

SEQ ID NO: 1812657 - DNA, 15 bp, Homo sapiens
ctcgtgcctgtaatc

SEQ ID NO: 1812658 - DNA, 15 bp, Homo sapiens
tcgtgcctgtaatcc

SEQ ID NO: 1812659 - DNA, 15 bp, Homo sapiens
ctgtaatcccaacat

SEQ ID NO: 1812660 - DNA, 15 bp, Homo sapiens
tgtaatcccaacatt

SEQ ID NO: 1812661 - DNA, 15 bp, Homo sapiens
gtaatcccaacattt

SEQ ID NO: 1812662 - DNA, 15 bp, Homo sapiens
taatcccaacatttt

SEQ ID NO: 1812663 - DNA, 15 bp, Homo sapiens
aatcccaacattttg

SEQ ID NO: 1812664 - DNA, 15 bp, Homo sapiens
atcccaacattttgg

SEQ ID NO: 1812665 - DNA, 15 bp, Homo sapiens
tcccaacattttggg

SEQ ID NO: 1812666 - DNA, 15 bp, Homo sapiens
cccaacattttggga

SEQ ID NO: 1812667 - DNA, 15 bp, Homo sapiens
ccaacattttgggag

SEQ ID NO: 1812668 - DNA, 15 bp, Homo sapiens
caacattttgggagg

SEQ ID NO: 1812669 - DNA, 15 bp, Homo sapiens
aacattttgggaggc

SEQ ID NO: 1812670 - DNA, 15 bp, Homo sapiens
acattttgggaggcc

SEQ ID NO: 1812671 - DNA, 15 bp, Homo sapiens
aggccaaggtgggca

SEQ ID NO: 1812672 - DNA, 15 bp, Homo sapiens
ggccaaggtgggcaa

SEQ ID NO: 1812673 - DNA, 15 bp, Homo sapiens
gccaaggtgggcaaa

SEQ ID NO: 1812674 - DNA, 15 bp, Homo sapiens
ccaaggtgggcaaac

SEQ ID NO: 1812675 - DNA, 15 bp, Homo sapiens
caaggtgggcaaact

SEQ ID NO: 1812676 - DNA, 15 bp, Homo sapiens
aaggtgggcaaactg

SEQ ID NO: 1812677 - DNA, 15 bp, Homo sapiens
aggtgggcaaactgc

SEQ ID NO: 1812678 - DNA, 15 bp, Homo sapiens
ggtgggcaaactgct

SEQ ID NO: 1812679 - DNA, 15 bp, Homo sapiens
gtgggcaaactgctt

SEQ ID NO: 1812680 - DNA, 15 bp, Homo sapiens
tgggcaaactgcttg

SEQ ID NO: 1812681 - DNA, 15 bp, Homo sapiens
gggcaaactgcttga

SEQ ID NO: 1812682 - DNA, 15 bp, Homo sapiens
ggcaaactgcttgag

SEQ ID NO: 1812683 - DNA, 15 bp, Homo sapiens
gcaaactgcttgagc

SEQ ID NO: 1812684 - DNA, 15 bp, Homo sapiens
caaactgcttgagcc

SEQ ID NO: 1812685 - DNA, 15 bp, Homo sapiens
aaactgcttgagccc

SEQ ID NO: 1812686 - DNA, 15 bp, Homo sapiens
aactgcttgagccca

SEQ ID NO: 1812687 - DNA, 15 bp, Homo sapiens
actgcttgagcccag

SEQ ID NO: 1812688 - DNA, 15 bp, Homo sapiens
ctgcttgagcccagg

SEQ ID NO: 1812689 - DNA, 15 bp, Homo sapiens
cccaggagttcaaga

SEQ ID NO: 1812690 - DNA, 15 bp, Homo sapiens
ccagcctgggcaacc

SEQ ID NO: 1812691 - DNA, 15 bp, Homo sapiens
cagcctgggcaaccg

SEQ ID NO: 1812692 - DNA, 15 bp, Homo sapiens
agcctgggcaaccgg

SEQ ID NO: 1812693 - DNA, 15 bp, Homo sapiens
gcctgggcaaccgga

SEQ ID NO: 1812694 - DNA, 15 bp, Homo sapiens
cctgggcaaccggac

SEQ ID NO: 1812695 - DNA, 15 bp, Homo sapiens
ctgggcaaccggaca

SEQ ID NO: 1812696 - DNA, 15 bp, Homo sapiens
tgggcaaccggacaa

SEQ ID NO: 1812697 - DNA, 15 bp, Homo sapiens
gggcaaccggacaaa

SEQ ID NO: 1812698 - DNA, 15 bp, Homo sapiens
ggcaaccggacaaaa

SEQ ID NO: 1812699 - DNA, 15 bp, Homo sapiens
gcaaccggacaaaac

SEQ ID NO: 1812700 - DNA, 15 bp, Homo sapiens
caaccggacaaaact

SEQ ID NO: 1812701 - DNA, 15 bp, Homo sapiens
aaccggacaaaactc

SEQ ID NO: 1812702 - DNA, 15 bp, Homo sapiens
accggacaaaactct

SEQ ID NO: 1812703 - DNA, 15 bp, Homo sapiens
ccggacaaaactctg

SEQ ID NO: 1812704 - DNA, 15 bp, Homo sapiens
cggacaaaactctgt

SEQ ID NO: 1812705 - DNA, 15 bp, Homo sapiens
ggacaaaactctgtt

SEQ ID NO: 1812706 - DNA, 15 bp, Homo sapiens
gacaaaactctgttt

SEQ ID NO: 1812707 - DNA, 15 bp, Homo sapiens
acaaaactctgtttc

SEQ ID NO: 1812708 - DNA, 15 bp, Homo sapiens
caaaactctgtttct

SEQ ID NO: 1812709 - DNA, 15 bp, Homo sapiens
aaaactctgtttctt

SEQ ID NO: 1812710 - DNA, 15 bp, Homo sapiens
aaactctgtttcttc

SEQ ID NO: 1812711 - DNA, 15 bp, Homo sapiens
aactctgtttcttca

SEQ ID NO: 1812712 - DNA, 15 bp, Homo sapiens
actctgtttcttcaa

SEQ ID NO: 1812713 - DNA, 15 bp, Homo sapiens
ctctgtttcttcaaa

SEQ ID NO: 1812714 - DNA, 15 bp, Homo sapiens
tctgtttcttcaaaa

SEQ ID NO: 1812715 - DNA, 15 bp, Homo sapiens
ctgtttcttcaaaat

SEQ ID NO: 1812716 - DNA, 15 bp, Homo sapiens
tgtttcttcaaaata

SEQ ID NO: 1812717 - DNA, 15 bp, Homo sapiens
gtttcttcaaaatac

SEQ ID NO: 1812718 - DNA, 15 bp, Homo sapiens
tttcttcaaaataca

SEQ ID NO: 1812719 - DNA, 15 bp, Homo sapiens
ttcttcaaaatacaa

SEQ ID NO: 1812720 - DNA, 15 bp, Homo sapiens
tcttcaaaatacaaa

SEQ ID NO: 1812721 - DNA, 15 bp, Homo sapiens
cttcaaaatacaaaa

SEQ ID NO: 1812722 - DNA, 15 bp, Homo sapiens
ttcaaaatacaaaaa

SEQ ID NO: 1812723 - DNA, 15 bp, Homo sapiens
tcaaaatacaaaaaa

SEQ ID NO: 1812724 - DNA, 15 bp, Homo sapiens
caaaatacaaaaaat

SEQ ID NO: 1812725 - DNA, 15 bp, Homo sapiens
aaaaattagctggcc

SEQ ID NO: 1812726 - DNA, 15 bp, Homo sapiens
aaaattagctggccg

SEQ ID NO: 1812727 - DNA, 15 bp, Homo sapiens
aaattagctggccgt

SEQ ID NO: 1812728 - DNA, 15 bp, Homo sapiens
aattagctggccgtg

SEQ ID NO: 1812729 - DNA, 15 bp, Homo sapiens
attagctggccgtgg

SEQ ID NO: 1812730 - DNA, 15 bp, Homo sapiens
ttagctggccgtggt

SEQ ID NO: 1812731 - DNA, 15 bp, Homo sapiens
tagctggccgtggtg

SEQ ID NO: 1812732 - DNA, 15 bp, Homo sapiens
agctggccgtggtgg

SEQ ID NO: 1812733 - DNA, 15 bp, Homo sapiens
gctggccgtggtggc

SEQ ID NO: 1812734 - DNA, 15 bp, Homo sapiens
ctggccgtggtggca

SEQ ID NO: 1812735 - DNA, 15 bp, Homo sapiens
tggccgtggtggcat

SEQ ID NO: 1812736 - DNA, 15 bp, Homo sapiens
ggccgtggtggcatg

SEQ ID NO: 1812737 - DNA, 15 bp, Homo sapiens
gccgtggtggcatgc

SEQ ID NO: 1812738 - DNA, 15 bp, Homo sapiens
ccgtggtggcatgca

SEQ ID NO: 1812739 - DNA, 15 bp, Homo sapiens
cgtggtggcatgcac

SEQ ID NO: 1812740 - DNA, 15 bp, Homo sapiens
gtggtggcatgcacc

SEQ ID NO: 1812741 - DNA, 15 bp, Homo sapiens
ggcatgcacctgtag

SEQ ID NO: 1812742 - DNA, 15 bp, Homo sapiens
gcatgcacctgtagt

SEQ ID NO: 1812743 - DNA, 15 bp, Homo sapiens
catgcacctgtagtc

SEQ ID NO: 1812744 - DNA, 15 bp, Homo sapiens
atgcacctgtagtct

SEQ ID NO: 1812745 - DNA, 15 bp, Homo sapiens
tgcacctgtagtctc

SEQ ID NO: 1812746 - DNA, 15 bp, Homo sapiens
gcacctgtagtctca

SEQ ID NO: 1812747 - DNA, 15 bp, Homo sapiens
cacctgtagtctcag

SEQ ID NO: 1812748 - DNA, 15 bp, Homo sapiens
acctgtagtctcagt

SEQ ID NO: 1812749 - DNA, 15 bp, Homo sapiens
cctgtagtctcagtt

SEQ ID NO: 1812750 - DNA, 15 bp, Homo sapiens
ctgtagtctcagtta

SEQ ID NO: 1812751 - DNA, 15 bp, Homo sapiens
tgtagtctcagttac

SEQ ID NO: 1812752 - DNA, 15 bp, Homo sapiens
gtagtctcagttact

SEQ ID NO: 1812753 - DNA, 15 bp, Homo sapiens
tagtctcagttactt

SEQ ID NO: 1812754 - DNA, 15 bp, Homo sapiens
agtctcagttacttg

SEQ ID NO: 1812755 - DNA, 15 bp, Homo sapiens
gtctcagttacttgg

SEQ ID NO: 1812756 - DNA, 15 bp, Homo sapiens
tctcagttacttggg

SEQ ID NO: 1812757 - DNA, 15 bp, Homo sapiens
ctcagttacttggga

SEQ ID NO: 1812758 - DNA, 15 bp, Homo sapiens
tcagttacttgggag

SEQ ID NO: 1812759 - DNA, 15 bp, Homo sapiens
cagttacttgggagt

SEQ ID NO: 1812760 - DNA, 15 bp, Homo sapiens
agttacttgggagtc

SEQ ID NO: 1812761 - DNA, 15 bp, Homo sapiens
gttacttgggagtct

SEQ ID NO: 1812762 - DNA, 15 bp, Homo sapiens
ttacttgggagtctg

SEQ ID NO: 1812763 - DNA, 15 bp, Homo sapiens
tacttgggagtctga

SEQ ID NO: 1812764 - DNA, 15 bp, Homo sapiens
acttgggagtctgag

SEQ ID NO: 1812765 - DNA, 15 bp, Homo sapiens
cttgggagtctgagg

SEQ ID NO: 1812766 - DNA, 15 bp, Homo sapiens
ttgggagtctgaggt

SEQ ID NO: 1812767 - DNA, 15 bp, Homo sapiens
tgggagtctgaggtg

SEQ ID NO: 1812768 - DNA, 15 bp, Homo sapiens
gggagtctgaggtgg

SEQ ID NO: 1812769 - DNA, 15 bp, Homo sapiens
ggagtctgaggtggg

SEQ ID NO: 1812770 - DNA, 15 bp, Homo sapiens
gagtctgaggtggga

SEQ ID NO: 1812771 - DNA, 15 bp, Homo sapiens
agtctgaggtgggag

SEQ ID NO: 1812772 - DNA, 15 bp, Homo sapiens
gtctgaggtgggagg

SEQ ID NO: 1812773 - DNA, 15 bp, Homo sapiens
tctgaggtgggagga

SEQ ID NO: 1812774 - DNA, 15 bp, Homo sapiens
gaggatcacctgaga

SEQ ID NO: 1812775 - DNA, 15 bp, Homo sapiens
aggatcacctgagac

SEQ ID NO: 1812776 - DNA, 15 bp, Homo sapiens
ggatcacctgagact

SEQ ID NO: 1812777 - DNA, 15 bp, Homo sapiens
gatcacctgagactg

SEQ ID NO: 1812778 - DNA, 15 bp, Homo sapiens
atcacctgagactgg

SEQ ID NO: 1812779 - DNA, 15 bp, Homo sapiens
tcacctgagactggg

SEQ ID NO: 1812780 - DNA, 15 bp, Homo sapiens
cacctgagactggga

SEQ ID NO: 1812781 - DNA, 15 bp, Homo sapiens
acctgagactgggag

SEQ ID NO: 1812782 - DNA, 15 bp, Homo sapiens
cctgagactgggagg

SEQ ID NO: 1812783 - DNA, 15 bp, Homo sapiens
ctgagactgggaggt

SEQ ID NO: 1812784 - DNA, 15 bp, Homo sapiens
tgagactgggaggtc

SEQ ID NO: 1812785 - DNA, 15 bp, Homo sapiens
gagactgggaggtca

SEQ ID NO: 1812786 - DNA, 15 bp, Homo sapiens
agactgggaggtcaa

SEQ ID NO: 1812787 - DNA, 15 bp, Homo sapiens
gactgggaggtcaag

SEQ ID NO: 1812788 - DNA, 15 bp, Homo sapiens
actgggaggtcaaga

SEQ ID NO: 1812789 - DNA, 15 bp, Homo sapiens
ctgggaggtcaagac

SEQ ID NO: 1812790 - DNA, 15 bp, Homo sapiens
tgggaggtcaagact

SEQ ID NO: 1812791 - DNA, 15 bp, Homo sapiens
gggaggtcaagactg

SEQ ID NO: 1812792 - DNA, 15 bp, Homo sapiens
ggaggtcaagactgc

SEQ ID NO: 1812793 - DNA, 15 bp, Homo sapiens
gaggtcaagactgca

SEQ ID NO: 1812794 - DNA, 15 bp, Homo sapiens
aggtcaagactgcaa

SEQ ID NO: 1812795 - DNA, 15 bp, Homo sapiens
ggtcaagactgcaat

SEQ ID NO: 1812796 - DNA, 15 bp, Homo sapiens
gtcaagactgcaatg

SEQ ID NO: 1812797 - DNA, 15 bp, Homo sapiens
tcaagactgcaatga

SEQ ID NO: 1812798 - DNA, 15 bp, Homo sapiens
caagactgcaatgag

SEQ ID NO: 1812799 - DNA, 15 bp, Homo sapiens
aagactgcaatgagc

SEQ ID NO: 1812800 - DNA, 15 bp, Homo sapiens
agactgcaatgagcc

SEQ ID NO: 1812801 - DNA, 15 bp, Homo sapiens
gactgcaatgagccg

SEQ ID NO: 1812802 - DNA, 15 bp, Homo sapiens
actgcaatgagccgt

SEQ ID NO: 1812803 - DNA, 15 bp, Homo sapiens
ctgcaatgagccgtg

SEQ ID NO: 1812804 - DNA, 15 bp, Homo sapiens
tgcaatgagccgtga

SEQ ID NO: 1812805 - DNA, 15 bp, Homo sapiens
gcaatgagccgtgat

SEQ ID NO: 1812806 - DNA, 15 bp, Homo sapiens
caatgagccgtgatc

SEQ ID NO: 1812807 - DNA, 15 bp, Homo sapiens
aatgagccgtgatca

SEQ ID NO: 1812808 - DNA, 15 bp, Homo sapiens
atgagccgtgatcac

SEQ ID NO: 1812809 - DNA, 15 bp, Homo sapiens
tgagccgtgatcacg

SEQ ID NO: 1812810 - DNA, 15 bp, Homo sapiens
gagccgtgatcacgc

SEQ ID NO: 1812811 - DNA, 15 bp, Homo sapiens
agccgtgatcacgcc

SEQ ID NO: 1812812 - DNA, 15 bp, Homo sapiens
gccgtgatcacgcca

SEQ ID NO: 1812813 - DNA, 15 bp, Homo sapiens
ccgtgatcacgccac

SEQ ID NO: 1812814 - DNA, 15 bp, Homo sapiens
cgtgatcacgccact

SEQ ID NO: 1812815 - DNA, 15 bp, Homo sapiens
gtgatcacgccactg

SEQ ID NO: 1812816 - DNA, 15 bp, Homo sapiens
tgatcacgccactgc

SEQ ID NO: 1812817 - DNA, 15 bp, Homo sapiens
gatcacgccactgct

SEQ ID NO: 1812818 - DNA, 15 bp, Homo sapiens
atcacgccactgctc

SEQ ID NO: 1812819 - DNA, 15 bp, Homo sapiens
tcacgccactgctct

SEQ ID NO: 1812820 - DNA, 15 bp, Homo sapiens
cacgccactgctcta

SEQ ID NO: 1812821 - DNA, 15 bp, Homo sapiens
acgccactgctctac

SEQ ID NO: 1812822 - DNA, 15 bp, Homo sapiens
cgccactgctctaca

SEQ ID NO: 1812823 - DNA, 15 bp, Homo sapiens
gccactgctctacag

SEQ ID NO: 1812824 - DNA, 15 bp, Homo sapiens
ccactgctctacagg

SEQ ID NO: 1812825 - DNA, 15 bp, Homo sapiens
cactgctctacaggc

SEQ ID NO: 1812826 - DNA, 15 bp, Homo sapiens
actgctctacaggcc

SEQ ID NO: 1812827 - DNA, 15 bp, Homo sapiens
ctgctctacaggccg

SEQ ID NO: 1812828 - DNA, 15 bp, Homo sapiens
tgctctacaggccgg

SEQ ID NO: 1812829 - DNA, 15 bp, Homo sapiens
gctctacaggccggg

SEQ ID NO: 1812830 - DNA, 15 bp, Homo sapiens
ctctacaggccgggc

SEQ ID NO: 1812831 - DNA, 15 bp, Homo sapiens
tctacaggccgggca

SEQ ID NO: 1812832 - DNA, 15 bp, Homo sapiens
ctacaggccgggcaa

SEQ ID NO: 1812833 - DNA, 15 bp, Homo sapiens
tacaggccgggcaac

SEQ ID NO: 1812834 - DNA, 15 bp, Homo sapiens
acaggccgggcaaca

SEQ ID NO: 1812835 - DNA, 15 bp, Homo sapiens
caggccgggcaacag

SEQ ID NO: 1812836 - DNA, 15 bp, Homo sapiens
aggccgggcaacaga

SEQ ID NO: 1812837 - DNA, 15 bp, Homo sapiens
ggccgggcaacagag

SEQ ID NO: 1812838 - DNA, 15 bp, Homo sapiens
gccgggcaacagagt

SEQ ID NO: 1812839 - DNA, 15 bp, Homo sapiens
ccgggcaacagagtg

SEQ ID NO: 1812840 - DNA, 15 bp, Homo sapiens
cgggcaacagagtga

SEQ ID NO: 1812841 - DNA, 15 bp, Homo sapiens
aacagagtgagactg

SEQ ID NO: 1812842 - DNA, 15 bp, Homo sapiens
acagagtgagactgt

SEQ ID NO: 1812843 - DNA, 15 bp, Homo sapiens
cagagtgagactgtt

SEQ ID NO: 1812844 - DNA, 15 bp, Homo sapiens
agagtgagactgttt

SEQ ID NO: 1812845 - DNA, 15 bp, Homo sapiens
gagtgagactgtttg

SEQ ID NO: 1812846 - DNA, 15 bp, Homo sapiens
agtgagactgtttgt

SEQ ID NO: 1812847 - DNA, 15 bp, Homo sapiens
gtgagactgtttgtt

SEQ ID NO: 1812848 - DNA, 15 bp, Homo sapiens
tgagactgtttgttt

SEQ ID NO: 1812849 - DNA, 15 bp, Homo sapiens
gagactgtttgttta

SEQ ID NO: 1812850 - DNA, 15 bp, Homo sapiens
agactgtttgtttaa

SEQ ID NO: 1812851 - DNA, 15 bp, Homo sapiens
gactgtttgtttaaa

SEQ ID NO: 1812852 - DNA, 15 bp, Homo sapiens
actgtttgtttaaaa

SEQ ID NO: 1812853 - DNA, 15 bp, Homo sapiens
ctgtttgtttaaaaa

SEQ ID NO: 1812854 - DNA, 15 bp, Homo sapiens
tgtttgtttaaaaaa

SEQ ID NO: 1812855 - DNA, 15 bp, Homo sapiens
gtttgtttaaaaaag

SEQ ID NO: 1812856 - DNA, 15 bp, Homo sapiens
tttgtttaaaaaaga

SEQ ID NO: 1812857 - DNA, 15 bp, Homo sapiens
ttgtttaaaaaagaa

SEQ ID NO: 1812858 - DNA, 15 bp, Homo sapiens
gtttaaaaaagaaaa

SEQ ID NO: 1812859 - DNA, 15 bp, Homo sapiens
tttaaaaaagaaaaa

SEQ ID NO: 1812860 - DNA, 15 bp, Homo sapiens
ttaaaaaagaaaaaa

SEQ ID NO: 1812861 - DNA, 15 bp, Homo sapiens
aagaaaaaaaaaaag

SEQ ID NO: 1812862 - DNA, 15 bp, Homo sapiens
agaaaaaaaaaaagc

SEQ ID NO: 1812863 - DNA, 15 bp, Homo sapiens
gaaaaaaaaaaagca

SEQ ID NO: 1812864 - DNA, 15 bp, Homo sapiens
aaaaaaaaaaagcag

SEQ ID NO: 1812865 - DNA, 15 bp, Homo sapiens
aaaaaaaaaagcagc

SEQ ID NO: 1812866 - DNA, 15 bp, Homo sapiens
aaaaaaaaagcagca

SEQ ID NO: 1812867 - DNA, 15 bp, Homo sapiens
aaaaaaaagcagcag

SEQ ID NO: 1812868 - DNA, 15 bp, Homo sapiens
aaaaaaagcagcagc

SEQ ID NO: 1812869 - DNA, 15 bp, Homo sapiens
aaaaaagcagcagca

SEQ ID NO: 1812870 - DNA, 15 bp, Homo sapiens
aaaaagcagcagcag

SEQ ID NO: 1812871 - DNA, 15 bp, Homo sapiens
aaaagcagcagcagc

SEQ ID NO: 1812872 - DNA, 15 bp, Homo sapiens
aaagcagcagcagcc

SEQ ID NO: 1812873 - DNA, 15 bp, Homo sapiens
aagcagcagcagccc

SEQ ID NO: 1812874 - DNA, 15 bp, Homo sapiens
agcagcagcagccca

SEQ ID NO: 1812875 - DNA, 15 bp, Homo sapiens
gcagcagcagcccac

SEQ ID NO: 1812876 - DNA, 15 bp, Homo sapiens
cagcagcagcccaca

SEQ ID NO: 1812877 - DNA, 15 bp, Homo sapiens
agcagcagcccacag

SEQ ID NO: 1812878 - DNA, 15 bp, Homo sapiens
gcagcagcccacaga

SEQ ID NO: 1812879 - DNA, 15 bp, Homo sapiens
cagcagcccacagat

SEQ ID NO: 1812880 - DNA, 15 bp, Homo sapiens
agcagcccacagata

SEQ ID NO: 1812881 - DNA, 15 bp, Homo sapiens
gcagcccacagatat

SEQ ID NO: 1812882 - DNA, 15 bp, Homo sapiens
cagcccacagatatt

SEQ ID NO: 1812883 - DNA, 15 bp, Homo sapiens
agcccacagatattt

SEQ ID NO: 1812884 - DNA, 15 bp, Homo sapiens
gcccacagatattta

SEQ ID NO: 1812885 - DNA, 15 bp, Homo sapiens
cccacagatatttac

SEQ ID NO: 1812886 - DNA, 15 bp, Homo sapiens
ccacagatatttaca

SEQ ID NO: 1812887 - DNA, 15 bp, Homo sapiens
cacagatatttacag

SEQ ID NO: 1812888 - DNA, 15 bp, Homo sapiens
acagatatttacagt

SEQ ID NO: 1812889 - DNA, 15 bp, Homo sapiens
cagatatttacagta

SEQ ID NO: 1812890 - DNA, 15 bp, Homo sapiens
agatatttacagtat

SEQ ID NO: 1812891 - DNA, 15 bp, Homo sapiens
gatatttacagtata

SEQ ID NO: 1812892 - DNA, 15 bp, Homo sapiens
atatttacagtatac

SEQ ID NO: 1812893 - DNA, 15 bp, Homo sapiens
tatttacagtatact

SEQ ID NO: 1812894 - DNA, 15 bp, Homo sapiens
atttacagtatactt

SEQ ID NO: 1812895 - DNA, 15 bp, Homo sapiens
tttacagtatacttt

SEQ ID NO: 1812896 - DNA, 15 bp, Homo sapiens
ttacagtatacttta

SEQ ID NO: 1812897 - DNA, 15 bp, Homo sapiens
tacagtatactttat

SEQ ID NO: 1812898 - DNA, 15 bp, Homo sapiens
acagtatactttatt

SEQ ID NO: 1812899 - DNA, 15 bp, Homo sapiens
cagtatactttattc

SEQ ID NO: 1812900 - DNA, 15 bp, Homo sapiens
agtatactttattca

SEQ ID NO: 1812901 - DNA, 15 bp, Homo sapiens
gtatactttattcaa

SEQ ID NO: 1812902 - DNA, 15 bp, Homo sapiens
tatactttattcaaa

SEQ ID NO: 1812903 - DNA, 15 bp, Homo sapiens
atactttattcaaag

SEQ ID NO: 1812904 - DNA, 15 bp, Homo sapiens
tactttattcaaagc

SEQ ID NO: 1812905 - DNA, 15 bp, Homo sapiens
actttattcaaagca

SEQ ID NO: 1812906 - DNA, 15 bp, Homo sapiens
ctttattcaaagcat

SEQ ID NO: 1812907 - DNA, 15 bp, Homo sapiens
tttattcaaagcatt

SEQ ID NO: 1812908 - DNA, 15 bp, Homo sapiens
ttattcaaagcattt

SEQ ID NO: 1812909 - DNA, 15 bp, Homo sapiens
tattcaaagcatttc

SEQ ID NO: 1812910 - DNA, 15 bp, Homo sapiens
attcaaagcatttca

SEQ ID NO: 1812911 - DNA, 15 bp, Homo sapiens
ttcaaagcatttcag

SEQ ID NO: 1812912 - DNA, 15 bp, Homo sapiens
tcaaagcatttcagt

SEQ ID NO: 1812913 - DNA, 15 bp, Homo sapiens
caaagcatttcagtt

SEQ ID NO: 1812914 - DNA, 15 bp, Homo sapiens
aaagcatttcagtta

SEQ ID NO: 1812915 - DNA, 15 bp, Homo sapiens
aagcatttcagttaa

SEQ ID NO: 1812916 - DNA, 15 bp, Homo sapiens
agcatttcagttaaa

SEQ ID NO: 1812917 - DNA, 15 bp, Homo sapiens
gcatttcagttaaaa

SEQ ID NO: 1812918 - DNA, 15 bp, Homo sapiens
catttcagttaaaat

SEQ ID NO: 1812919 - DNA, 15 bp, Homo sapiens
atttcagttaaaatt

SEQ ID NO: 1812920 - DNA, 15 bp, Homo sapiens
tttcagttaaaatta

SEQ ID NO: 1812921 - DNA, 15 bp, Homo sapiens
ttcagttaaaattat

SEQ ID NO: 1812922 - DNA, 15 bp, Homo sapiens
tcagttaaaattatt

SEQ ID NO: 1812923 - DNA, 15 bp, Homo sapiens
cagttaaaattattt

SEQ ID NO: 1812924 - DNA, 15 bp, Homo sapiens
agttaaaattatttt

SEQ ID NO: 1812925 - DNA, 15 bp, Homo sapiens
gttaaaattattttg

SEQ ID NO: 1812926 - DNA, 15 bp, Homo sapiens
ttaaaattattttgg

SEQ ID NO: 1812927 - DNA, 15 bp, Homo sapiens
taaaattattttggg

SEQ ID NO: 1812928 - DNA, 15 bp, Homo sapiens
aaaattattttgggt

SEQ ID NO: 1812929 - DNA, 15 bp, Homo sapiens
aaattattttgggtt

SEQ ID NO: 1812930 - DNA, 15 bp, Homo sapiens
aattattttgggttc

SEQ ID NO: 1812931 - DNA, 15 bp, Homo sapiens
attattttgggttca

SEQ ID NO: 1812932 - DNA, 15 bp, Homo sapiens
ttattttgggttcaa

SEQ ID NO: 1812933 - DNA, 15 bp, Homo sapiens
tattttgggttcaaa

SEQ ID NO: 1812934 - DNA, 15 bp, Homo sapiens
attttgggttcaaat

SEQ ID NO: 1812935 - DNA, 15 bp, Homo sapiens
ttttgggttcaaata

SEQ ID NO: 1812936 - DNA, 15 bp, Homo sapiens
tttgggttcaaatac

SEQ ID NO: 1812937 - DNA, 15 bp, Homo sapiens
ttgggttcaaataca

SEQ ID NO: 1812938 - DNA, 15 bp, Homo sapiens
tgggttcaaatacat

SEQ ID NO: 1812939 - DNA, 15 bp, Homo sapiens
gggttcaaatacatg

SEQ ID NO: 1812940 - DNA, 15 bp, Homo sapiens
ggttcaaatacatga

SEQ ID NO: 1812941 - DNA, 15 bp, Homo sapiens
gttcaaatacatgaa

SEQ ID NO: 1812942 - DNA, 15 bp, Homo sapiens
ttcaaatacatgaac

SEQ ID NO: 1812943 - DNA, 15 bp, Homo sapiens
tcaaatacatgaaca

SEQ ID NO: 1812944 - DNA, 15 bp, Homo sapiens
caaatacatgaacat

SEQ ID NO: 1812945 - DNA, 15 bp, Homo sapiens
aaatacatgaacata

SEQ ID NO: 1812946 - DNA, 15 bp, Homo sapiens
aatacatgaacatat

SEQ ID NO: 1812947 - DNA, 15 bp, Homo sapiens
atacatgaacatata

SEQ ID NO: 1812948 - DNA, 15 bp, Homo sapiens
tacatgaacatataa

SEQ ID NO: 1812949 - DNA, 15 bp, Homo sapiens
acatgaacatataat

SEQ ID NO: 1812950 - DNA, 15 bp, Homo sapiens
catgaacatataatt

SEQ ID NO: 1812951 - DNA, 15 bp, Homo sapiens
atgaacatataatta

SEQ ID NO: 1812952 - DNA, 15 bp, Homo sapiens
tgaacatataattat

SEQ ID NO: 1812953 - DNA, 15 bp, Homo sapiens
gaacatataattata

SEQ ID NO: 1812954 - DNA, 15 bp, Homo sapiens
aacatataattatat

SEQ ID NO: 1812955 - DNA, 15 bp, Homo sapiens
acatataattatata

SEQ ID NO: 1812956 - DNA, 15 bp, Homo sapiens
catataattatatat

SEQ ID NO: 1812957 - DNA, 15 bp, Homo sapiens
tataattatatataa

SEQ ID NO: 1812958 - DNA, 15 bp, Homo sapiens
ataattatatataaa

SEQ ID NO: 1812959 - DNA, 15 bp, Homo sapiens
taattatatataaaa

SEQ ID NO: 1812960 - DNA, 15 bp, Homo sapiens
aattatatataaaat

SEQ ID NO: 1812961 - DNA, 15 bp, Homo sapiens
attatatataaaata

SEQ ID NO: 1812962 - DNA, 15 bp, Homo sapiens
ttatatataaaatac

SEQ ID NO: 1812963 - DNA, 15 bp, Homo sapiens
tatatataaaatact

SEQ ID NO: 1812964 - DNA, 15 bp, Homo sapiens
atatataaaatacta

SEQ ID NO: 1812965 - DNA, 15 bp, Homo sapiens
tatataaaatactat

SEQ ID NO: 1812966 - DNA, 15 bp, Homo sapiens
atataaaatactata

SEQ ID NO: 1812967 - DNA, 15 bp, Homo sapiens
tataaaatactatag

SEQ ID NO: 1812968 - DNA, 15 bp, Homo sapiens
ataaaatactatagt

SEQ ID NO: 1812969 - DNA, 15 bp, Homo sapiens
taaaatactatagtt

SEQ ID NO: 1812970 - DNA, 15 bp, Homo sapiens
aaaatactatagttc

SEQ ID NO: 1812971 - DNA, 15 bp, Homo sapiens
aaatactatagttct

SEQ ID NO: 1812972 - DNA, 15 bp, Homo sapiens
aatactatagttctc

SEQ ID NO: 1812973 - DNA, 15 bp, Homo sapiens
atactatagttctca

SEQ ID NO: 1812974 - DNA, 15 bp, Homo sapiens
tactatagttctcaa

SEQ ID NO: 1812975 - DNA, 15 bp, Homo sapiens
actatagttctcaat

SEQ ID NO: 1812976 - DNA, 15 bp, Homo sapiens
ctatagttctcaata

SEQ ID NO: 1812977 - DNA, 15 bp, Homo sapiens
tatagttctcaatag

SEQ ID NO: 1812978 - DNA, 15 bp, Homo sapiens
atagttctcaatagt

SEQ ID NO: 1812979 - DNA, 15 bp, Homo sapiens
tagttctcaatagtt

SEQ ID NO: 1812980 - DNA, 15 bp, Homo sapiens
agttctcaatagttt

SEQ ID NO: 1812981 - DNA, 15 bp, Homo sapiens
gttctcaatagttta

SEQ ID NO: 1812982 - DNA, 15 bp, Homo sapiens
ttctcaatagtttac

SEQ ID NO: 1812983 - DNA, 15 bp, Homo sapiens
tctcaatagtttaca

SEQ ID NO: 1812984 - DNA, 15 bp, Homo sapiens
ctcaatagtttacag

SEQ ID NO: 1812985 - DNA, 15 bp, Homo sapiens
tcaatagtttacagt

SEQ ID NO: 1812986 - DNA, 15 bp, Homo sapiens
caatagtttacagtg

SEQ ID NO: 1812987 - DNA, 15 bp, Homo sapiens
aatagtttacagtga

SEQ ID NO: 1812988 - DNA, 15 bp, Homo sapiens
atagtttacagtgac

SEQ ID NO: 1812989 - DNA, 15 bp, Homo sapiens
tagtttacagtgaca

SEQ ID NO: 1812990 - DNA, 15 bp, Homo sapiens
agtttacagtgacat

SEQ ID NO: 1812991 - DNA, 15 bp, Homo sapiens
gtttacagtgacatc

SEQ ID NO: 1812992 - DNA, 15 bp, Homo sapiens
tttacagtgacatct

SEQ ID NO: 1812993 - DNA, 15 bp, Homo sapiens
ttacagtgacatctt

SEQ ID NO: 1812994 - DNA, 15 bp, Homo sapiens
tacagtgacatcttt

SEQ ID NO: 1812995 - DNA, 15 bp, Homo sapiens
acagtgacatctttt

SEQ ID NO: 1812996 - DNA, 15 bp, Homo sapiens
cagtgacatcttttt

SEQ ID NO: 1812997 - DNA, 15 bp, Homo sapiens
agtgacatctttttt

SEQ ID NO: 1812998 - DNA, 15 bp, Homo sapiens
gtgacatctttttta

SEQ ID NO: 1812999 - DNA, 15 bp, Homo sapiens
tgacatcttttttag

SEQ ID NO: 1813000 - DNA, 15 bp, Homo sapiens
gacatcttttttaga

SEQ ID NO: 1813001 - DNA, 15 bp, Homo sapiens
acatcttttttagaa

SEQ ID NO: 1813002 - DNA, 15 bp, Homo sapiens
catcttttttagaat

SEQ ID NO: 1813003 - DNA, 15 bp, Homo sapiens
atcttttttagaatt

SEQ ID NO: 1813004 - DNA, 15 bp, Homo sapiens
tcttttttagaatta

SEQ ID NO: 1813005 - DNA, 15 bp, Homo sapiens
cttttttagaattag

SEQ ID NO: 1813006 - DNA, 15 bp, Homo sapiens
ttttttagaattagc

SEQ ID NO: 1813007 - DNA, 15 bp, Homo sapiens
tttttagaattagct

SEQ ID NO: 1813008 - DNA, 15 bp, Homo sapiens
ttttagaattagctg

SEQ ID NO: 1813009 - DNA, 15 bp, Homo sapiens
tttagaattagctgc

SEQ ID NO: 1813010 - DNA, 15 bp, Homo sapiens
ttagaattagctgct

SEQ ID NO: 1813011 - DNA, 15 bp, Homo sapiens
tagaattagctgctt

SEQ ID NO: 1813012 - DNA, 15 bp, Homo sapiens
agaattagctgctta

SEQ ID NO: 1813013 - DNA, 15 bp, Homo sapiens
gaattagctgcttat

SEQ ID NO: 1813014 - DNA, 15 bp, Homo sapiens
aattagctgcttata

SEQ ID NO: 1813015 - DNA, 15 bp, Homo sapiens
attagctgcttataa

SEQ ID NO: 1813016 - DNA, 15 bp, Homo sapiens
ttagctgcttataat

SEQ ID NO: 1813017 - DNA, 15 bp, Homo sapiens
tagctgcttataatt

SEQ ID NO: 1813018 - DNA, 15 bp, Homo sapiens
agctgcttataattt

SEQ ID NO: 1813019 - DNA, 15 bp, Homo sapiens
gctgcttataatttg

SEQ ID NO: 1813020 - DNA, 15 bp, Homo sapiens
ctgcttataatttga

SEQ ID NO: 1813021 - DNA, 15 bp, Homo sapiens
tgcttataatttgag

SEQ ID NO: 1813022 - DNA, 15 bp, Homo sapiens
gcttataatttgagt

SEQ ID NO: 1813023 - DNA, 15 bp, Homo sapiens
cttataatttgagtg

SEQ ID NO: 1813024 - DNA, 15 bp, Homo sapiens
ttataatttgagtgt

SEQ ID NO: 1813025 - DNA, 15 bp, Homo sapiens
tataatttgagtgta

SEQ ID NO: 1813026 - DNA, 15 bp, Homo sapiens
ataatttgagtgtaa

SEQ ID NO: 1813027 - DNA, 15 bp, Homo sapiens
taatttgagtgtaaa

SEQ ID NO: 1813028 - DNA, 15 bp, Homo sapiens
aatttgagtgtaaat

SEQ ID NO: 1813029 - DNA, 15 bp, Homo sapiens
tttgagtgtaaatgt

SEQ ID NO: 1813030 - DNA, 15 bp, Homo sapiens
ttgagtgtaaatgta

SEQ ID NO: 1813031 - DNA, 15 bp, Homo sapiens
tgagtgtaaatgtat

SEQ ID NO: 1813032 - DNA, 15 bp, Homo sapiens
gagtgtaaatgtatt

SEQ ID NO: 1813033 - DNA, 15 bp, Homo sapiens
agtgtaaatgtatta

SEQ ID NO: 1813034 - DNA, 15 bp, Homo sapiens
gtgtaaatgtattac

SEQ ID NO: 1813035 - DNA, 15 bp, Homo sapiens
tgtaaatgtattaca

SEQ ID NO: 1813036 - DNA, 15 bp, Homo sapiens
gtaaatgtattacag

SEQ ID NO: 1813037 - DNA, 15 bp, Homo sapiens
taaatgtattacaga

SEQ ID NO: 1813038 - DNA, 15 bp, Homo sapiens
aaatgtattacagaa

SEQ ID NO: 1813039 - DNA, 15 bp, Homo sapiens
aatgtattacagaaa

SEQ ID NO: 1813040 - DNA, 15 bp, Homo sapiens
atgtattacagaaag

SEQ ID NO: 1813041 - DNA, 15 bp, Homo sapiens
tgtattacagaaagc

SEQ ID NO: 1813042 - DNA, 15 bp, Homo sapiens
gtattacagaaagct

SEQ ID NO: 1813043 - DNA, 15 bp, Homo sapiens
tattacagaaagctg

SEQ ID NO: 1813044 - DNA, 15 bp, Homo sapiens
attacagaaagctgc

SEQ ID NO: 1813045 - DNA, 15 bp, Homo sapiens
ttacagaaagctgct

SEQ ID NO: 1813046 - DNA, 15 bp, Homo sapiens
tacagaaagctgcta

SEQ ID NO: 1813047 - DNA, 15 bp, Homo sapiens
acagaaagctgctaa

SEQ ID NO: 1813048 - DNA, 15 bp, Homo sapiens
cagaaagctgctaaa

SEQ ID NO: 1813049 - DNA, 15 bp, Homo sapiens
agaaagctgctaaat

SEQ ID NO: 1813050 - DNA, 15 bp, Homo sapiens
gaaagctgctaaatt

SEQ ID NO: 1813051 - DNA, 15 bp, Homo sapiens
aaagctgctaaattg

SEQ ID NO: 1813052 - DNA, 15 bp, Homo sapiens
aagctgctaaattgt

SEQ ID NO: 1813053 - DNA, 15 bp, Homo sapiens
agctgctaaattgtt

SEQ ID NO: 1813054 - DNA, 15 bp, Homo sapiens
gctgctaaattgttt

SEQ ID NO: 1813055 - DNA, 15 bp, Homo sapiens
ctgctaaattgttta

SEQ ID NO: 1813056 - DNA, 15 bp, Homo sapiens
tgctaaattgtttat

SEQ ID NO: 1813057 - DNA, 15 bp, Homo sapiens
gctaaattgtttata

SEQ ID NO: 1813058 - DNA, 15 bp, Homo sapiens
ctaaattgtttatat

SEQ ID NO: 1813059 - DNA, 15 bp, Homo sapiens
taaattgtttatatt

SEQ ID NO: 1813060 - DNA, 15 bp, Homo sapiens
aaattgtttatattt

SEQ ID NO: 1813061 - DNA, 15 bp, Homo sapiens
aattgtttatatttc

SEQ ID NO: 1813062 - DNA, 15 bp, Homo sapiens
attgtttatatttct

SEQ ID NO: 1813063 - DNA, 15 bp, Homo sapiens
ttgtttatatttcta

SEQ ID NO: 1813064 - DNA, 15 bp, Homo sapiens
tgtttatatttctac

SEQ ID NO: 1813065 - DNA, 15 bp, Homo sapiens
gtttatatttctact

SEQ ID NO: 1813066 - DNA, 15 bp, Homo sapiens
tttatatttctactt

SEQ ID NO: 1813067 - DNA, 15 bp, Homo sapiens
ttatatttctactta

SEQ ID NO: 1813068 - DNA, 15 bp, Homo sapiens
tatatttctacttat

SEQ ID NO: 1813069 - DNA, 15 bp, Homo sapiens
atatttctacttatt

SEQ ID NO: 1813070 - DNA, 15 bp, Homo sapiens
tatttctacttattt

SEQ ID NO: 1813071 - DNA, 15 bp, Homo sapiens
atttctacttatttc

SEQ ID NO: 1813072 - DNA, 15 bp, Homo sapiens
tttctacttatttca

SEQ ID NO: 1813073 - DNA, 15 bp, Homo sapiens
ttctacttatttcaa

SEQ ID NO: 1813074 - DNA, 15 bp, Homo sapiens
tctacttatttcaat

SEQ ID NO: 1813075 - DNA, 15 bp, Homo sapiens
ctacttatttcaatt

SEQ ID NO: 1813076 - DNA, 15 bp, Homo sapiens
tacttatttcaattt

SEQ ID NO: 1813077 - DNA, 15 bp, Homo sapiens
acttatttcaattta

SEQ ID NO: 1813078 - DNA, 15 bp, Homo sapiens
cttatttcaatttag

SEQ ID NO: 1813079 - DNA, 15 bp, Homo sapiens
ttatttcaatttagc

SEQ ID NO: 1813080 - DNA, 15 bp, Homo sapiens
tatttcaatttagct

SEQ ID NO: 1813081 - DNA, 15 bp, Homo sapiens
atttcaatttagcta

SEQ ID NO: 1813082 - DNA, 15 bp, Homo sapiens
tttcaatttagctat

SEQ ID NO: 1813083 - DNA, 15 bp, Homo sapiens
ttcaatttagctatt

SEQ ID NO: 1813084 - DNA, 15 bp, Homo sapiens
tcaatttagctatta

SEQ ID NO: 1813085 - DNA, 15 bp, Homo sapiens
caatttagctattag

SEQ ID NO: 1813086 - DNA, 15 bp, Homo sapiens
aatttagctattaga

SEQ ID NO: 1813087 - DNA, 15 bp, Homo sapiens
atttagctattagat

SEQ ID NO: 1813088 - DNA, 15 bp, Homo sapiens
tttagctattagata

SEQ ID NO: 1813089 - DNA, 15 bp, Homo sapiens
ttagctattagatat

SEQ ID NO: 1813090 - DNA, 15 bp, Homo sapiens
tagctattagatatt

SEQ ID NO: 1813091 - DNA, 15 bp, Homo sapiens
agctattagatattt

SEQ ID NO: 1813092 - DNA, 15 bp, Homo sapiens
gctattagatattta

SEQ ID NO: 1813093 - DNA, 15 bp, Homo sapiens
ctattagatatttag

SEQ ID NO: 1813094 - DNA, 15 bp, Homo sapiens
tattagatatttaga

SEQ ID NO: 1813095 - DNA, 15 bp, Homo sapiens
attagatatttagaa

SEQ ID NO: 1813096 - DNA, 15 bp, Homo sapiens
ttagatatttagaac

SEQ ID NO: 1813097 - DNA, 15 bp, Homo sapiens
tagatatttagaaca

SEQ ID NO: 1813098 - DNA, 15 bp, Homo sapiens
agatatttagaacac

SEQ ID NO: 1813099 - DNA, 15 bp, Homo sapiens
gatatttagaacact

SEQ ID NO: 1813100 - DNA, 15 bp, Homo sapiens
atatttagaacactc

SEQ ID NO: 1813101 - DNA, 15 bp, Homo sapiens
tatttagaacactca

SEQ ID NO: 1813102 - DNA, 15 bp, Homo sapiens
atttagaacactcat

SEQ ID NO: 1813103 - DNA, 15 bp, Homo sapiens
tttagaacactcata

SEQ ID NO: 1813104 - DNA, 15 bp, Homo sapiens
ttagaacactcataa

SEQ ID NO: 1813105 - DNA, 15 bp, Homo sapiens
tagaacactcataag

SEQ ID NO: 1813106 - DNA, 15 bp, Homo sapiens
agaacactcataagc

SEQ ID NO: 1813107 - DNA, 15 bp, Homo sapiens
gaacactcataagcc

SEQ ID NO: 1813108 - DNA, 15 bp, Homo sapiens
aacactcataagccc

SEQ ID NO: 1813109 - DNA, 15 bp, Homo sapiens
acactcataagccca

SEQ ID NO: 1813110 - DNA, 15 bp, Homo sapiens
cactcataagcccac

SEQ ID NO: 1813111 - DNA, 15 bp, Homo sapiens
actcataagcccacc

SEQ ID NO: 1813112 - DNA, 15 bp, Homo sapiens
ctcataagcccacct

SEQ ID NO: 1813113 - DNA, 15 bp, Homo sapiens
tcataagcccaccta

SEQ ID NO: 1813114 - DNA, 15 bp, Homo sapiens
cataagcccacctac

SEQ ID NO: 1813115 - DNA, 15 bp, Homo sapiens
ataagcccacctaca

SEQ ID NO: 1813116 - DNA, 15 bp, Homo sapiens
taagcccacctacag

SEQ ID NO: 1813117 - DNA, 15 bp, Homo sapiens
aagcccacctacagt

SEQ ID NO: 1813118 - DNA, 15 bp, Homo sapiens
agcccacctacagta

SEQ ID NO: 1813119 - DNA, 15 bp, Homo sapiens
gcccacctacagtat

SEQ ID NO: 1813120 - DNA, 15 bp, Homo sapiens
cccacctacagtata

SEQ ID NO: 1813121 - DNA, 15 bp, Homo sapiens
ccacctacagtatag

SEQ ID NO: 1813122 - DNA, 15 bp, Homo sapiens
cacctacagtatagt

SEQ ID NO: 1813123 - DNA, 15 bp, Homo sapiens
acctacagtatagtt

SEQ ID NO: 1813124 - DNA, 15 bp, Homo sapiens
cctacagtatagtta

SEQ ID NO: 1813125 - DNA, 15 bp, Homo sapiens
ctacagtatagttat

SEQ ID NO: 1813126 - DNA, 15 bp, Homo sapiens
tacagtatagttatt

SEQ ID NO: 1813127 - DNA, 15 bp, Homo sapiens
acagtatagttatta

SEQ ID NO: 1813128 - DNA, 15 bp, Homo sapiens
cagtatagttattat

SEQ ID NO: 1813129 - DNA, 15 bp, Homo sapiens
agtatagttattata

SEQ ID NO: 1813130 - DNA, 15 bp, Homo sapiens
gtatagttattatac

SEQ ID NO: 1813131 - DNA, 15 bp, Homo sapiens
tatagttattatact

SEQ ID NO: 1813132 - DNA, 15 bp, Homo sapiens
atagttattatactt

SEQ ID NO: 1813133 - DNA, 15 bp, Homo sapiens
tagttattatacttt

SEQ ID NO: 1813134 - DNA, 15 bp, Homo sapiens
agttattatacttta

SEQ ID NO: 1813135 - DNA, 15 bp, Homo sapiens
gttattatactttaa

SEQ ID NO: 1813136 - DNA, 15 bp, Homo sapiens
ttattatactttaaa

SEQ ID NO: 1813137 - DNA, 15 bp, Homo sapiens
tattatactttaaat

SEQ ID NO: 1813138 - DNA, 15 bp, Homo sapiens
attatactttaaata

SEQ ID NO: 1813139 - DNA, 15 bp, Homo sapiens
ttatactttaaatat

SEQ ID NO: 1813140 - DNA, 15 bp, Homo sapiens
tatactttaaatatt

SEQ ID NO: 1813141 - DNA, 15 bp, Homo sapiens
atactttaaatattt

SEQ ID NO: 1813142 - DNA, 15 bp, Homo sapiens
tactttaaatattta

SEQ ID NO: 1813143 - DNA, 15 bp, Homo sapiens
actttaaatatttat

SEQ ID NO: 1813144 - DNA, 15 bp, Homo sapiens
ctttaaatatttata

SEQ ID NO: 1813145 - DNA, 15 bp, Homo sapiens
tttaaatatttatat

SEQ ID NO: 1813146 - DNA, 15 bp, Homo sapiens
ttaaatatttatatt

SEQ ID NO: 1813147 - DNA, 15 bp, Homo sapiens
taaatatttatattc

SEQ ID NO: 1813148 - DNA, 15 bp, Homo sapiens
aaatatttatattca

SEQ ID NO: 1813149 - DNA, 15 bp, Homo sapiens
aatatttatattcaa

SEQ ID NO: 1813150 - DNA, 15 bp, Homo sapiens
atatttatattcaat

SEQ ID NO: 1813151 - DNA, 15 bp, Homo sapiens
tatttatattcaata

SEQ ID NO: 1813152 - DNA, 15 bp, Homo sapiens
atttatattcaatag

SEQ ID NO: 1813153 - DNA, 15 bp, Homo sapiens
tttatattcaatagg

SEQ ID NO: 1813154 - DNA, 15 bp, Homo sapiens
ttatattcaataggg

SEQ ID NO: 1813155 - DNA, 15 bp, Homo sapiens
tatattcaatagggg

SEQ ID NO: 1813156 - DNA, 15 bp, Homo sapiens
atattcaatagggga

SEQ ID NO: 1813157 - DNA, 15 bp, Homo sapiens
tattcaataggggaa

SEQ ID NO: 1813158 - DNA, 15 bp, Homo sapiens
attcaataggggaat

SEQ ID NO: 1813159 - DNA, 15 bp, Homo sapiens
ttcaataggggaatc

SEQ ID NO: 1813160 - DNA, 15 bp, Homo sapiens
tcaataggggaatca

SEQ ID NO: 1813161 - DNA, 15 bp, Homo sapiens
caataggggaatcaa

SEQ ID NO: 1813162 - DNA, 15 bp, Homo sapiens
aataggggaatcaat

SEQ ID NO: 1813163 - DNA, 15 bp, Homo sapiens
ataggggaatcaata

SEQ ID NO: 1813164 - DNA, 15 bp, Homo sapiens
taggggaatcaatac

SEQ ID NO: 1813165 - DNA, 15 bp, Homo sapiens
aggggaatcaataca

SEQ ID NO: 1813166 - DNA, 15 bp, Homo sapiens
ggggaatcaatacaa

SEQ ID NO: 1813167 - DNA, 15 bp, Homo sapiens
gggaatcaatacaat

SEQ ID NO: 1813168 - DNA, 15 bp, Homo sapiens
ggaatcaatacaata

SEQ ID NO: 1813169 - DNA, 15 bp, Homo sapiens
gaatcaatacaatac

SEQ ID NO: 1813170 - DNA, 15 bp, Homo sapiens
aatcaatacaataca

SEQ ID NO: 1813171 - DNA, 15 bp, Homo sapiens
atcaatacaatacaa

SEQ ID NO: 1813172 - DNA, 15 bp, Homo sapiens
tcaatacaatacaaa

SEQ ID NO: 1813173 - DNA, 15 bp, Homo sapiens
caatacaatacaaaa

SEQ ID NO: 1813174 - DNA, 15 bp, Homo sapiens
aatacaatacaaaag

SEQ ID NO: 1813175 - DNA, 15 bp, Homo sapiens
atacaatacaaaaga

SEQ ID NO: 1813176 - DNA, 15 bp, Homo sapiens
tacaatacaaaagat

SEQ ID NO: 1813177 - DNA, 15 bp, Homo sapiens
acaatacaaaagata

SEQ ID NO: 1813178 - DNA, 15 bp, Homo sapiens
caatacaaaagatat

SEQ ID NO: 1813179 - DNA, 15 bp, Homo sapiens
aatacaaaagatatt

SEQ ID NO: 1813180 - DNA, 15 bp, Homo sapiens
atacaaaagatattt

SEQ ID NO: 1813181 - DNA, 15 bp, Homo sapiens
tacaaaagatatttg

SEQ ID NO: 1813182 - DNA, 15 bp, Homo sapiens
acaaaagatatttga

SEQ ID NO: 1813183 - DNA, 15 bp, Homo sapiens
caaaagatatttgaa

SEQ ID NO: 1813184 - DNA, 15 bp, Homo sapiens
aaaagatatttgaac

SEQ ID NO: 1813185 - DNA, 15 bp, Homo sapiens
aaagatatttgaaca

SEQ ID NO: 1813186 - DNA, 15 bp, Homo sapiens
aagatatttgaacag

SEQ ID NO: 1813187 - DNA, 15 bp, Homo sapiens
agatatttgaacagc

SEQ ID NO: 1813188 - DNA, 15 bp, Homo sapiens
gatatttgaacagct

SEQ ID NO: 1813189 - DNA, 15 bp, Homo sapiens
atatttgaacagcta

SEQ ID NO: 1813190 - DNA, 15 bp, Homo sapiens
tatttgaacagctag

SEQ ID NO: 1813191 - DNA, 15 bp, Homo sapiens
atttgaacagctagt

SEQ ID NO: 1813192 - DNA, 15 bp, Homo sapiens
tttgaacagctagtc

SEQ ID NO: 1813193 - DNA, 15 bp, Homo sapiens
ttgaacagctagtcc

SEQ ID NO: 1813194 - DNA, 15 bp, Homo sapiens
tgaacagctagtcct

SEQ ID NO: 1813195 - DNA, 15 bp, Homo sapiens
gaacagctagtcctt

SEQ ID NO: 1813196 - DNA, 15 bp, Homo sapiens
aacagctagtccttt

SEQ ID NO: 1813197 - DNA, 15 bp, Homo sapiens
acagctagtcctttg

SEQ ID NO: 1813198 - DNA, 15 bp, Homo sapiens
cagctagtcctttgt

SEQ ID NO: 1813199 - DNA, 15 bp, Homo sapiens
agctagtcctttgta

SEQ ID NO: 1813200 - DNA, 15 bp, Homo sapiens
gctagtcctttgtaa

SEQ ID NO: 1813201 - DNA, 15 bp, Homo sapiens
ctagtcctttgtaac

SEQ ID NO: 1813202 - DNA, 15 bp, Homo sapiens
tagtcctttgtaaca

SEQ ID NO: 1813203 - DNA, 15 bp, Homo sapiens
agtcctttgtaacac

SEQ ID NO: 1813204 - DNA, 15 bp, Homo sapiens
gtcctttgtaacacc

SEQ ID NO: 1813205 - DNA, 15 bp, Homo sapiens
tcctttgtaacaccc

SEQ ID NO: 1813206 - DNA, 15 bp, Homo sapiens
cctttgtaacacccc

SEQ ID NO: 1813207 - DNA, 15 bp, Homo sapiens
ctttgtaacaccccc

SEQ ID NO: 1813208 - DNA, 15 bp, Homo sapiens
tttgtaacacccccc

SEQ ID NO: 1813209 - DNA, 15 bp, Homo sapiens
ttgtaacaccccccc

SEQ ID NO: 1813210 - DNA, 15 bp, Homo sapiens
tgtaacacccccccg

SEQ ID NO: 1813211 - DNA, 15 bp, Homo sapiens
gtaacacccccccgc

SEQ ID NO: 1813212 - DNA, 15 bp, Homo sapiens
taacacccccccgct

SEQ ID NO: 1813213 - DNA, 15 bp, Homo sapiens
aacacccccccgctg

SEQ ID NO: 1813214 - DNA, 15 bp, Homo sapiens
acacccccccgctgc

SEQ ID NO: 1813215 - DNA, 15 bp, Homo sapiens
cacccccccgctgct

SEQ ID NO: 1813216 - DNA, 15 bp, Homo sapiens
acccccccgctgctg

SEQ ID NO: 1813217 - DNA, 15 bp, Homo sapiens
cccccccgctgctgc

SEQ ID NO: 1813218 - DNA, 15 bp, Homo sapiens
ccccccgctgctgcc

SEQ ID NO: 1813219 - DNA, 15 bp, Homo sapiens
cccccgctgctgccg

SEQ ID NO: 1813220 - DNA, 15 bp, Homo sapiens
ccccgctgctgccga

SEQ ID NO: 1813221 - DNA, 15 bp, Homo sapiens
cccgctgctgccgag

SEQ ID NO: 1813222 - DNA, 15 bp, Homo sapiens
ccgctgctgccgaga

SEQ ID NO: 1813223 - DNA, 15 bp, Homo sapiens
cgctgctgccgagag

SEQ ID NO: 1813224 - DNA, 15 bp, Homo sapiens
gctgctgccgagagg

SEQ ID NO: 1813225 - DNA, 15 bp, Homo sapiens
ctgctgccgagaggg

SEQ ID NO: 1813226 - DNA, 15 bp, Homo sapiens
tgctgccgagagggc

SEQ ID NO: 1813227 - DNA, 15 bp, Homo sapiens
gctgccgagagggct

SEQ ID NO: 1813228 - DNA, 15 bp, Homo sapiens
ctgccgagagggcta

SEQ ID NO: 1813229 - DNA, 15 bp, Homo sapiens
tgccgagagggctag

SEQ ID NO: 1813230 - DNA, 15 bp, Homo sapiens
gccgagagggctaga

SEQ ID NO: 1813231 - DNA, 15 bp, Homo sapiens
ccgagagggctagat

SEQ ID NO: 1813232 - DNA, 15 bp, Homo sapiens
cgagagggctagata

SEQ ID NO: 1813233 - DNA, 15 bp, Homo sapiens
gagagggctagataa

SEQ ID NO: 1813234 - DNA, 15 bp, Homo sapiens
agagggctagataag

SEQ ID NO: 1813235 - DNA, 15 bp, Homo sapiens
gagggctagataagg

SEQ ID NO: 1813236 - DNA, 15 bp, Homo sapiens
agggctagataaggg

SEQ ID NO: 1813237 - DNA, 15 bp, Homo sapiens
gggctagataagggg

SEQ ID NO: 1813238 - DNA, 15 bp, Homo sapiens
ggctagataaggggg

SEQ ID NO: 1813239 - DNA, 15 bp, Homo sapiens
gctagataagggggt

SEQ ID NO: 1813240 - DNA, 15 bp, Homo sapiens
ctagataagggggtc

SEQ ID NO: 1813241 - DNA, 15 bp, Homo sapiens
tagataagggggtct

SEQ ID NO: 1813242 - DNA, 15 bp, Homo sapiens
agataagggggtctt

SEQ ID NO: 1813243 - DNA, 15 bp, Homo sapiens
gataagggggtctta

SEQ ID NO: 1813244 - DNA, 15 bp, Homo sapiens
ataagggggtcttac

SEQ ID NO: 1813245 - DNA, 15 bp, Homo sapiens
taagggggtcttacc

SEQ ID NO: 1813246 - DNA, 15 bp, Homo sapiens
aagggggtcttacct

SEQ ID NO: 1813247 - DNA, 15 bp, Homo sapiens
agggggtcttaccta

SEQ ID NO: 1813248 - DNA, 15 bp, Homo sapiens
gggggtcttacctat

SEQ ID NO: 1813249 - DNA, 15 bp, Homo sapiens
ggggtcttacctatt

SEQ ID NO: 1813250 - DNA, 15 bp, Homo sapiens
gggtcttacctattt

SEQ ID NO: 1813251 - DNA, 15 bp, Homo sapiens
ggtcttacctatttc

SEQ ID NO: 1813252 - DNA, 15 bp, Homo sapiens
gtcttacctatttcc

SEQ ID NO: 1813253 - DNA, 15 bp, Homo sapiens
tcttacctatttcct

SEQ ID NO: 1813254 - DNA, 15 bp, Homo sapiens
cttacctatttcctc

SEQ ID NO: 1813255 - DNA, 15 bp, Homo sapiens
ttacctatttcctct

SEQ ID NO: 1813256 - DNA, 15 bp, Homo sapiens
tacctatttcctctg

SEQ ID NO: 1813257 - DNA, 15 bp, Homo sapiens
acctatttcctctgt

SEQ ID NO: 1813258 - DNA, 15 bp, Homo sapiens
cctatttcctctgta

SEQ ID NO: 1813259 - DNA, 15 bp, Homo sapiens
ctatttcctctgtac

SEQ ID NO: 1813260 - DNA, 15 bp, Homo sapiens
tatttcctctgtacc

SEQ ID NO: 1813261 - DNA, 15 bp, Homo sapiens
atttcctctgtacca

SEQ ID NO: 1813262 - DNA, 15 bp, Homo sapiens
tttcctctgtaccac

SEQ ID NO: 1813263 - DNA, 15 bp, Homo sapiens
ttcctctgtaccaca

SEQ ID NO: 1813264 - DNA, 15 bp, Homo sapiens
tcctctgtaccacac

SEQ ID NO: 1813265 - DNA, 15 bp, Homo sapiens
cctctgtaccacact

SEQ ID NO: 1813266 - DNA, 15 bp, Homo sapiens
ctctgtaccacactc

SEQ ID NO: 1813267 - DNA, 15 bp, Homo sapiens
tctgtaccacactca

SEQ ID NO: 1813268 - DNA, 15 bp, Homo sapiens
ctgtaccacactcac

SEQ ID NO: 1813269 - DNA, 15 bp, Homo sapiens
tgtaccacactcaca

SEQ ID NO: 1813270 - DNA, 15 bp, Homo sapiens
gtaccacactcacat

SEQ ID NO: 1813271 - DNA, 15 bp, Homo sapiens
taccacactcacatt

SEQ ID NO: 1813272 - DNA, 15 bp, Homo sapiens
accacactcacattt

SEQ ID NO: 1813273 - DNA, 15 bp, Homo sapiens
ccacactcacatttt

SEQ ID NO: 1813274 - DNA, 15 bp, Homo sapiens
cacactcacatttta

SEQ ID NO: 1813275 - DNA, 15 bp, Homo sapiens
acactcacattttac

SEQ ID NO: 1813276 - DNA, 15 bp, Homo sapiens
cactcacattttacc

SEQ ID NO: 1813277 - DNA, 15 bp, Homo sapiens
actcacattttacca

SEQ ID NO: 1813278 - DNA, 15 bp, Homo sapiens
ctcacattttaccag

SEQ ID NO: 1813279 - DNA, 15 bp, Homo sapiens
tcacattttaccaga

SEQ ID NO: 1813280 - DNA, 15 bp, Homo sapiens
cacattttaccagag

SEQ ID NO: 1813281 - DNA, 15 bp, Homo sapiens
acattttaccagagt

SEQ ID NO: 1813282 - DNA, 15 bp, Homo sapiens
cattttaccagagtc

SEQ ID NO: 1813283 - DNA, 15 bp, Homo sapiens
attttaccagagtcc

SEQ ID NO: 1813284 - DNA, 15 bp, Homo sapiens
ttttaccagagtcca

SEQ ID NO: 1813285 - DNA, 15 bp, Homo sapiens
tttaccagagtccat

SEQ ID NO: 1813286 - DNA, 15 bp, Homo sapiens
ttaccagagtccata

SEQ ID NO: 1813287 - DNA, 15 bp, Homo sapiens
taccagagtccatat

SEQ ID NO: 1813288 - DNA, 15 bp, Homo sapiens
accagagtccatata

SEQ ID NO: 1813289 - DNA, 15 bp, Homo sapiens
ccagagtccatatac

SEQ ID NO: 1813290 - DNA, 15 bp, Homo sapiens
cagagtccatataca

SEQ ID NO: 1813291 - DNA, 15 bp, Homo sapiens
agagtccatatacag

SEQ ID NO: 1813292 - DNA, 15 bp, Homo sapiens
gagtccatatacagg

SEQ ID NO: 1813293 - DNA, 15 bp, Homo sapiens
agtccatatacaggg

SEQ ID NO: 1813294 - DNA, 15 bp, Homo sapiens
gtccatatacagggc

SEQ ID NO: 1813295 - DNA, 15 bp, Homo sapiens
tccatatacagggcc

SEQ ID NO: 1813296 - DNA, 15 bp, Homo sapiens
ccatatacagggcca

SEQ ID NO: 1813297 - DNA, 15 bp, Homo sapiens
catatacagggccag

SEQ ID NO: 1813298 - DNA, 15 bp, Homo sapiens
atatacagggccagt

SEQ ID NO: 1813299 - DNA, 15 bp, Homo sapiens
tatacagggccagtg

SEQ ID NO: 1813300 - DNA, 15 bp, Homo sapiens
atacagggccagtgt

SEQ ID NO: 1813301 - DNA, 15 bp, Homo sapiens
tacagggccagtgtg

SEQ ID NO: 1813302 - DNA, 15 bp, Homo sapiens
acagggccagtgtgg

SEQ ID NO: 1813303 - DNA, 15 bp, Homo sapiens
cagggccagtgtgga

SEQ ID NO: 1813304 - DNA, 15 bp, Homo sapiens
agggccagtgtggag

SEQ ID NO: 1813305 - DNA, 15 bp, Homo sapiens
gggccagtgtggagt

SEQ ID NO: 1813306 - DNA, 15 bp, Homo sapiens
ggccagtgtggagtc

SEQ ID NO: 1813307 - DNA, 15 bp, Homo sapiens
gccagtgtggagtca

SEQ ID NO: 1813308 - DNA, 15 bp, Homo sapiens
ccagtgtggagtcac

SEQ ID NO: 1813309 - DNA, 15 bp, Homo sapiens
cagtgtggagtcact

SEQ ID NO: 1813310 - DNA, 15 bp, Homo sapiens
agtgtggagtcactt

SEQ ID NO: 1813311 - DNA, 15 bp, Homo sapiens
gtgtggagtcacttc

SEQ ID NO: 1813312 - DNA, 15 bp, Homo sapiens
tgtggagtcacttca

SEQ ID NO: 1813313 - DNA, 15 bp, Homo sapiens
gtggagtcacttcat

SEQ ID NO: 1813314 - DNA, 15 bp, Homo sapiens
tggagtcacttcatg

SEQ ID NO: 1813315 - DNA, 15 bp, Homo sapiens
ggagtcacttcatgc

SEQ ID NO: 1813316 - DNA, 15 bp, Homo sapiens
gagtcacttcatgca

SEQ ID NO: 1813317 - DNA, 15 bp, Homo sapiens
agtcacttcatgcaa

SEQ ID NO: 1813318 - DNA, 15 bp, Homo sapiens
gtcacttcatgcaaa

SEQ ID NO: 1813319 - DNA, 15 bp, Homo sapiens
tcacttcatgcaaat

SEQ ID NO: 1813320 - DNA, 15 bp, Homo sapiens
cacttcatgcaaatg

SEQ ID NO: 1813321 - DNA, 15 bp, Homo sapiens
acttcatgcaaatga

SEQ ID NO: 1813322 - DNA, 15 bp, Homo sapiens
cttcatgcaaatgag

SEQ ID NO: 1813323 - DNA, 15 bp, Homo sapiens
ttcatgcaaatgaga

SEQ ID NO: 1813324 - DNA, 15 bp, Homo sapiens
tcatgcaaatgagat

SEQ ID NO: 1813325 - DNA, 15 bp, Homo sapiens
catgcaaatgagatg

SEQ ID NO: 1813326 - DNA, 15 bp, Homo sapiens
atgcaaatgagatgg

SEQ ID NO: 1813327 - DNA, 15 bp, Homo sapiens
tgcaaatgagatggt

SEQ ID NO: 1813328 - DNA, 15 bp, Homo sapiens
gcaaatgagatggta

SEQ ID NO: 1813329 - DNA, 15 bp, Homo sapiens
caaatgagatggtac

SEQ ID NO: 1813330 - DNA, 15 bp, Homo sapiens
aaatgagatggtact

SEQ ID NO: 1813331 - DNA, 15 bp, Homo sapiens
aatgagatggtactt

SEQ ID NO: 1813332 - DNA, 15 bp, Homo sapiens
atgagatggtacttt

SEQ ID NO: 1813333 - DNA, 15 bp, Homo sapiens
tgagatggtactttc

SEQ ID NO: 1813334 - DNA, 15 bp, Homo sapiens
gagatggtactttca

SEQ ID NO: 1813335 - DNA, 15 bp, Homo sapiens
agatggtactttcag

SEQ ID NO: 1813336 - DNA, 15 bp, Homo sapiens
gatggtactttcagt

SEQ ID NO: 1813337 - DNA, 15 bp, Homo sapiens
atggtactttcagtt

SEQ ID NO: 1813338 - DNA, 15 bp, Homo sapiens
tggtactttcagttt

SEQ ID NO: 1813339 - DNA, 15 bp, Homo sapiens
ggtactttcagtttc

SEQ ID NO: 1813340 - DNA, 15 bp, Homo sapiens
gtactttcagtttcc

SEQ ID NO: 1813341 - DNA, 15 bp, Homo sapiens
tactttcagtttccc

SEQ ID NO: 1813342 - DNA, 15 bp, Homo sapiens
actttcagtttcccc

SEQ ID NO: 1813343 - DNA, 15 bp, Homo sapiens
ctttcagtttcccca

SEQ ID NO: 1813344 - DNA, 15 bp, Homo sapiens
tttcagtttccccaa

SEQ ID NO: 1813345 - DNA, 15 bp, Homo sapiens
ttcagtttccccaaa

SEQ ID NO: 1813346 - DNA, 15 bp, Homo sapiens
tcagtttccccaaaa

SEQ ID NO: 1813347 - DNA, 15 bp, Homo sapiens
cagtttccccaaaaa

SEQ ID NO: 1813348 - DNA, 15 bp, Homo sapiens
agtttccccaaaaag

SEQ ID NO: 1813349 - DNA, 15 bp, Homo sapiens
gtttccccaaaaaga

SEQ ID NO: 1813350 - DNA, 15 bp, Homo sapiens
tttccccaaaaagat

SEQ ID NO: 1813351 - DNA, 15 bp, Homo sapiens
ttccccaaaaagatg

SEQ ID NO: 1813352 - DNA, 15 bp, Homo sapiens
tccccaaaaagatga

SEQ ID NO: 1813353 - DNA, 15 bp, Homo sapiens
ccccaaaaagatgac

SEQ ID NO: 1813354 - DNA, 15 bp, Homo sapiens
cccaaaaagatgact

SEQ ID NO: 1813355 - DNA, 15 bp, Homo sapiens
ccaaaaagatgactg

SEQ ID NO: 1813356 - DNA, 15 bp, Homo sapiens
caaaaagatgactgc

SEQ ID NO: 1813357 - DNA, 15 bp, Homo sapiens
aaaaagatgactgcg

SEQ ID NO: 1813358 - DNA, 15 bp, Homo sapiens
aaaagatgactgcga

SEQ ID NO: 1813359 - DNA, 15 bp, Homo sapiens
aaagatgactgcgaa

SEQ ID NO: 1813360 - DNA, 15 bp, Homo sapiens
aagatgactgcgaaa

SEQ ID NO: 1813361 - DNA, 15 bp, Homo sapiens
agatgactgcgaaat

SEQ ID NO: 1813362 - DNA, 15 bp, Homo sapiens
gatgactgcgaaatc

SEQ ID NO: 1813363 - DNA, 15 bp, Homo sapiens
atgactgcgaaatcc

SEQ ID NO: 1813364 - DNA, 15 bp, Homo sapiens
tgactgcgaaatcca

SEQ ID NO: 1813365 - DNA, 15 bp, Homo sapiens
gactgcgaaatccag

SEQ ID NO: 1813366 - DNA, 15 bp, Homo sapiens
actgcgaaatccaga

SEQ ID NO: 1813367 - DNA, 15 bp, Homo sapiens
ctgcgaaatccagat

SEQ ID NO: 1813368 - DNA, 15 bp, Homo sapiens
tgcgaaatccagatt

SEQ ID NO: 1813369 - DNA, 15 bp, Homo sapiens
gcgaaatccagatta

SEQ ID NO: 1813370 - DNA, 15 bp, Homo sapiens
cgaaatccagattac

SEQ ID NO: 1813371 - DNA, 15 bp, Homo sapiens
gaaatccagattaca

SEQ ID NO: 1813372 - DNA, 15 bp, Homo sapiens
aaatccagattacac

SEQ ID NO: 1813373 - DNA, 15 bp, Homo sapiens
aatccagattacacc

SEQ ID NO: 1813374 - DNA, 15 bp, Homo sapiens
atccagattacaccc

SEQ ID NO: 1813375 - DNA, 15 bp, Homo sapiens
tccagattacacccc

SEQ ID NO: 1813376 - DNA, 15 bp, Homo sapiens
ccagattacacccca

SEQ ID NO: 1813377 - DNA, 15 bp, Homo sapiens
cagattacaccccaa

SEQ ID NO: 1813378 - DNA, 15 bp, Homo sapiens
agattacaccccaac

SEQ ID NO: 1813379 - DNA, 15 bp, Homo sapiens
gattacaccccaacg

SEQ ID NO: 1813380 - DNA, 15 bp, Homo sapiens
attacaccccaacgt

SEQ ID NO: 1813381 - DNA, 15 bp, Homo sapiens
ttacaccccaacgtt

SEQ ID NO: 1813382 - DNA, 15 bp, Homo sapiens
tacaccccaacgtta

SEQ ID NO: 1813383 - DNA, 15 bp, Homo sapiens
acaccccaacgttat

SEQ ID NO: 1813384 - DNA, 15 bp, Homo sapiens
caccccaacgttatg

SEQ ID NO: 1813385 - DNA, 15 bp, Homo sapiens
accccaacgttatgc

SEQ ID NO: 1813386 - DNA, 15 bp, Homo sapiens
ccccaacgttatgcc

SEQ ID NO: 1813387 - DNA, 15 bp, Homo sapiens
cccaacgttatgcct

SEQ ID NO: 1813388 - DNA, 15 bp, Homo sapiens
ccaacgttatgcctc

SEQ ID NO: 1813389 - DNA, 15 bp, Homo sapiens
caacgttatgcctca

SEQ ID NO: 1813390 - DNA, 15 bp, Homo sapiens
aacgttatgcctcac

SEQ ID NO: 1813391 - DNA, 15 bp, Homo sapiens
acgttatgcctcacc

SEQ ID NO: 1813392 - DNA, 15 bp, Homo sapiens
cgttatgcctcacct

SEQ ID NO: 1813393 - DNA, 15 bp, Homo sapiens
gttatgcctcacctt

SEQ ID NO: 1813394 - DNA, 15 bp, Homo sapiens
ttatgcctcaccttg

SEQ ID NO: 1813395 - DNA, 15 bp, Homo sapiens
tatgcctcaccttgg

SEQ ID NO: 1813396 - DNA, 15 bp, Homo sapiens
atgcctcaccttgga

SEQ ID NO: 1813397 - DNA, 15 bp, Homo sapiens
tgcctcaccttggag

SEQ ID NO: 1813398 - DNA, 15 bp, Homo sapiens
gcctcaccttggaga

SEQ ID NO: 1813399 - DNA, 15 bp, Homo sapiens
cctcaccttggagac

SEQ ID NO: 1813400 - DNA, 15 bp, Homo sapiens
ctcaccttggagacc

SEQ ID NO: 1813401 - DNA, 15 bp, Homo sapiens
tcaccttggagacct

SEQ ID NO: 1813402 - DNA, 15 bp, Homo sapiens
caccttggagaccta

SEQ ID NO: 1813403 - DNA, 15 bp, Homo sapiens
accttggagacctat

SEQ ID NO: 1813404 - DNA, 15 bp, Homo sapiens
ccttggagacctatt

SEQ ID NO: 1813405 - DNA, 15 bp, Homo sapiens
tggagacctattcta

SEQ ID NO: 1813406 - DNA, 15 bp, Homo sapiens
ggagacctattctaa

SEQ ID NO: 1813407 - DNA, 15 bp, Homo sapiens
gagacctattctaat

SEQ ID NO: 1813408 - DNA, 15 bp, Homo sapiens
agacctattctaatg

SEQ ID NO: 1813409 - DNA, 15 bp, Homo sapiens
gacctattctaatga

SEQ ID NO: 1813410 - DNA, 15 bp, Homo sapiens
acctattctaatgaa

SEQ ID NO: 1813411 - DNA, 15 bp, Homo sapiens
cctattctaatgaat

SEQ ID NO: 1813412 - DNA, 15 bp, Homo sapiens
ctattctaatgaatg

SEQ ID NO: 1813413 - DNA, 15 bp, Homo sapiens
tattctaatgaatgt

SEQ ID NO: 1813414 - DNA, 15 bp, Homo sapiens
attctaatgaatgtc

SEQ ID NO: 1813415 - DNA, 15 bp, Homo sapiens
ttctaatgaatgtca

SEQ ID NO: 1813416 - DNA, 15 bp, Homo sapiens
tctaatgaatgtcaa

SEQ ID NO: 1813417 - DNA, 15 bp, Homo sapiens
ctaatgaatgtcaat

SEQ ID NO: 1813418 - DNA, 15 bp, Homo sapiens
taatgaatgtcaatt

SEQ ID NO: 1813419 - DNA, 15 bp, Homo sapiens
aatgaatgtcaatta

SEQ ID NO: 1813420 - DNA, 15 bp, Homo sapiens
atgaatgtcaattag

SEQ ID NO: 1813421 - DNA, 15 bp, Homo sapiens
tgaatgtcaattagt

SEQ ID NO: 1813422 - DNA, 15 bp, Homo sapiens
gaatgtcaattagtg

SEQ ID NO: 1813423 - DNA, 15 bp, Homo sapiens
aatgtcaattagtga

SEQ ID NO: 1813424 - DNA, 15 bp, Homo sapiens
atgtcaattagtgaa

SEQ ID NO: 1813425 - DNA, 15 bp, Homo sapiens
tgtcaattagtgaat

SEQ ID NO: 1813426 - DNA, 15 bp, Homo sapiens
gtcaattagtgaatg

SEQ ID NO: 1813427 - DNA, 15 bp, Homo sapiens
tcaattagtgaatgt

SEQ ID NO: 1813428 - DNA, 15 bp, Homo sapiens
caattagtgaatgtt

SEQ ID NO: 1813429 - DNA, 15 bp, Homo sapiens
aattagtgaatgttg

SEQ ID NO: 1813430 - DNA, 15 bp, Homo sapiens
attagtgaatgttga

SEQ ID NO: 1813431 - DNA, 15 bp, Homo sapiens
ttagtgaatgttgac

SEQ ID NO: 1813432 - DNA, 15 bp, Homo sapiens
tagtgaatgttgact

SEQ ID NO: 1813433 - DNA, 15 bp, Homo sapiens
agtgaatgttgacta

SEQ ID NO: 1813434 - DNA, 15 bp, Homo sapiens
gtgaatgttgactaa

SEQ ID NO: 1813435 - DNA, 15 bp, Homo sapiens
tgaatgttgactaac

SEQ ID NO: 1813436 - DNA, 15 bp, Homo sapiens
gaatgttgactaact

SEQ ID NO: 1813437 - DNA, 15 bp, Homo sapiens
aatgttgactaactt

SEQ ID NO: 1813438 - DNA, 15 bp, Homo sapiens
atgttgactaacttg

SEQ ID NO: 1813439 - DNA, 15 bp, Homo sapiens
tgttgactaacttgt

SEQ ID NO: 1813440 - DNA, 15 bp, Homo sapiens
gttgactaacttgtg

SEQ ID NO: 1813441 - DNA, 15 bp, Homo sapiens
ttgactaacttgtgg

SEQ ID NO: 1813442 - DNA, 15 bp, Homo sapiens
tgactaacttgtggt

SEQ ID NO: 1813443 - DNA, 15 bp, Homo sapiens
gactaacttgtggtt

SEQ ID NO: 1813444 - DNA, 15 bp, Homo sapiens
actaacttgtggtta

SEQ ID NO: 1813445 - DNA, 15 bp, Homo sapiens
ctaacttgtggttag

SEQ ID NO: 1813446 - DNA, 15 bp, Homo sapiens
taacttgtggttagc

SEQ ID NO: 1813447 - DNA, 15 bp, Homo sapiens
aacttgtggttagca

SEQ ID NO: 1813448 - DNA, 15 bp, Homo sapiens
acttgtggttagcat

SEQ ID NO: 1813449 - DNA, 15 bp, Homo sapiens
cttgtggttagcatg

SEQ ID NO: 1813450 - DNA, 15 bp, Homo sapiens
ttgtggttagcatga

SEQ ID NO: 1813451 - DNA, 15 bp, Homo sapiens
tgtggttagcatgac

SEQ ID NO: 1813452 - DNA, 15 bp, Homo sapiens
gtggttagcatgact

SEQ ID NO: 1813453 - DNA, 15 bp, Homo sapiens
tggttagcatgactg

SEQ ID NO: 1813454 - DNA, 15 bp, Homo sapiens
ggttagcatgactgc

SEQ ID NO: 1813455 - DNA, 15 bp, Homo sapiens
gttagcatgactgca

SEQ ID NO: 1813456 - DNA, 15 bp, Homo sapiens
ttagcatgactgcaa

SEQ ID NO: 1813457 - DNA, 15 bp, Homo sapiens
tagcatgactgcaaa

SEQ ID NO: 1813458 - DNA, 15 bp, Homo sapiens
agcatgactgcaaaa

SEQ ID NO: 1813459 - DNA, 15 bp, Homo sapiens
gcatgactgcaaaaa

SEQ ID NO: 1813460 - DNA, 15 bp, Homo sapiens
catgactgcaaaaaa

SEQ ID NO: 1813461 - DNA, 15 bp, Homo sapiens
atgactgcaaaaaaa

SEQ ID NO: 1813462 - DNA, 15 bp, Homo sapiens
tgactgcaaaaaaat

SEQ ID NO: 1813463 - DNA, 15 bp, Homo sapiens
gactgcaaaaaaatg

SEQ ID NO: 1813464 - DNA, 15 bp, Homo sapiens
actgcaaaaaaatga

SEQ ID NO: 1813465 - DNA, 15 bp, Homo sapiens
ctgcaaaaaaatgag

SEQ ID NO: 1813466 - DNA, 15 bp, Homo sapiens
tgcaaaaaaatgagg

SEQ ID NO: 1813467 - DNA, 15 bp, Homo sapiens
gcaaaaaaatgaggc

SEQ ID NO: 1813468 - DNA, 15 bp, Homo sapiens
caaaaaaatgaggcc

SEQ ID NO: 1813469 - DNA, 15 bp, Homo sapiens
aaaaaaatgaggcct

SEQ ID NO: 1813470 - DNA, 15 bp, Homo sapiens
aaaaaatgaggcctg

SEQ ID NO: 1813471 - DNA, 15 bp, Homo sapiens
aaaaatgaggcctgc

SEQ ID NO: 1813472 - DNA, 15 bp, Homo sapiens
aaaatgaggcctgct

SEQ ID NO: 1813473 - DNA, 15 bp, Homo sapiens
aaatgaggcctgctt

SEQ ID NO: 1813474 - DNA, 15 bp, Homo sapiens
aatgaggcctgcttc

SEQ ID NO: 1813475 - DNA, 15 bp, Homo sapiens
atgaggcctgcttca

SEQ ID NO: 1813476 - DNA, 15 bp, Homo sapiens
tgaggcctgcttcag

SEQ ID NO: 1813477 - DNA, 15 bp, Homo sapiens
gaggcctgcttcagt

SEQ ID NO: 1813478 - DNA, 15 bp, Homo sapiens
aggcctgcttcagtg

SEQ ID NO: 1813479 - DNA, 15 bp, Homo sapiens
ggcctgcttcagtgc

SEQ ID NO: 1813480 - DNA, 15 bp, Homo sapiens
gcctgcttcagtgca

SEQ ID NO: 1813481 - DNA, 15 bp, Homo sapiens
cctgcttcagtgcaa

SEQ ID NO: 1813482 - DNA, 15 bp, Homo sapiens
ctgcttcagtgcaat

SEQ ID NO: 1813483 - DNA, 15 bp, Homo sapiens
tgcttcagtgcaatc

SEQ ID NO: 1813484 - DNA, 15 bp, Homo sapiens
gcttcagtgcaatca

SEQ ID NO: 1813485 - DNA, 15 bp, Homo sapiens
cttcagtgcaatcac

SEQ ID NO: 1813486 - DNA, 15 bp, Homo sapiens
ttcagtgcaatcact

SEQ ID NO: 1813487 - DNA, 15 bp, Homo sapiens
tcagtgcaatcacta

SEQ ID NO: 1813488 - DNA, 15 bp, Homo sapiens
cagtgcaatcactaa

SEQ ID NO: 1813489 - DNA, 15 bp, Homo sapiens
agtgcaatcactaaa

SEQ ID NO: 1813490 - DNA, 15 bp, Homo sapiens
gtgcaatcactaaag

SEQ ID NO: 1813491 - DNA, 15 bp, Homo sapiens
tgcaatcactaaaga

SEQ ID NO: 1813492 - DNA, 15 bp, Homo sapiens
gcaatcactaaagac

SEQ ID NO: 1813493 - DNA, 15 bp, Homo sapiens
caatcactaaagaca

SEQ ID NO: 1813494 - DNA, 15 bp, Homo sapiens
aatcactaaagacag

SEQ ID NO: 1813495 - DNA, 15 bp, Homo sapiens
atcactaaagacagg

SEQ ID NO: 1813496 - DNA, 15 bp, Homo sapiens
tcactaaagacagga

SEQ ID NO: 1813497 - DNA, 15 bp, Homo sapiens
cactaaagacaggag

SEQ ID NO: 1813498 - DNA, 15 bp, Homo sapiens
actaaagacaggagt

SEQ ID NO: 1813499 - DNA, 15 bp, Homo sapiens
ctaaagacaggagtg

SEQ ID NO: 1813500 - DNA, 15 bp, Homo sapiens
taaagacaggagtga

SEQ ID NO: 1813501 - DNA, 15 bp, Homo sapiens
aaagacaggagtgag

SEQ ID NO: 1813502 - DNA, 15 bp, Homo sapiens
aagacaggagtgagg

SEQ ID NO: 1813503 - DNA, 15 bp, Homo sapiens
agacaggagtgaggc

SEQ ID NO: 1813504 - DNA, 15 bp, Homo sapiens
gacaggagtgaggct

SEQ ID NO: 1813505 - DNA, 15 bp, Homo sapiens
acaggagtgaggctc

SEQ ID NO: 1813506 - DNA, 15 bp, Homo sapiens
caggagtgaggctct

SEQ ID NO: 1813507 - DNA, 15 bp, Homo sapiens
aggagtgaggctctt

SEQ ID NO: 1813508 - DNA, 15 bp, Homo sapiens
ggagtgaggctcttg

SEQ ID NO: 1813509 - DNA, 15 bp, Homo sapiens
gagtgaggctcttgg

SEQ ID NO: 1813510 - DNA, 15 bp, Homo sapiens
agtgaggctcttggc

SEQ ID NO: 1813511 - DNA, 15 bp, Homo sapiens
gtgaggctcttggcc

SEQ ID NO: 1813512 - DNA, 15 bp, Homo sapiens
tgaggctcttggcca

SEQ ID NO: 1813513 - DNA, 15 bp, Homo sapiens
gaggctcttggccag

SEQ ID NO: 1813514 - DNA, 15 bp, Homo sapiens
aggctcttggccagg

SEQ ID NO: 1813515 - DNA, 15 bp, Homo sapiens
ggctcttggccaggc

SEQ ID NO: 1813516 - DNA, 15 bp, Homo sapiens
gctcttggccaggcg

SEQ ID NO: 1813517 - DNA, 15 bp, Homo sapiens
ctcttggccaggcgt

SEQ ID NO: 1813518 - DNA, 15 bp, Homo sapiens
tcttggccaggcgtg

SEQ ID NO: 1813519 - DNA, 15 bp, Homo sapiens
cttggccaggcgtgg

SEQ ID NO: 1813520 - DNA, 15 bp, Homo sapiens
ttggccaggcgtggt

SEQ ID NO: 1813521 - DNA, 15 bp, Homo sapiens
tggccaggcgtggtg

SEQ ID NO: 1813522 - DNA, 15 bp, Homo sapiens
ggccaggcgtggtgg

SEQ ID NO: 1813523 - DNA, 15 bp, Homo sapiens
ccaggcgtggtggct

SEQ ID NO: 1813524 - DNA, 15 bp, Homo sapiens
caggcgtggtggctc

SEQ ID NO: 1813525 - DNA, 15 bp, Homo sapiens
aggcgtggtggctca

SEQ ID NO: 1813526 - DNA, 15 bp, Homo sapiens
gcgtggtggctcaca

SEQ ID NO: 1813527 - DNA, 15 bp, Homo sapiens
cgtggtggctcacac

SEQ ID NO: 1813528 - DNA, 15 bp, Homo sapiens
gtggtggctcacacc

SEQ ID NO: 1813529 - DNA, 15 bp, Homo sapiens
tgggaggctgaagcg

SEQ ID NO: 1813530 - DNA, 15 bp, Homo sapiens
gggaggctgaagcga

SEQ ID NO: 1813531 - DNA, 15 bp, Homo sapiens
ggaggctgaagcgag

SEQ ID NO: 1813532 - DNA, 15 bp, Homo sapiens
gaggctgaagcgagc

SEQ ID NO: 1813533 - DNA, 15 bp, Homo sapiens
aggctgaagcgagcg

SEQ ID NO: 1813534 - DNA, 15 bp, Homo sapiens
ggctgaagcgagcgc

SEQ ID NO: 1813535 - DNA, 15 bp, Homo sapiens
gctgaagcgagcgca

SEQ ID NO: 1813536 - DNA, 15 bp, Homo sapiens
ctgaagcgagcgcag

SEQ ID NO: 1813537 - DNA, 15 bp, Homo sapiens
tgaagcgagcgcagg

SEQ ID NO: 1813538 - DNA, 15 bp, Homo sapiens
gaagcgagcgcaggg

SEQ ID NO: 1813539 - DNA, 15 bp, Homo sapiens
aagcgagcgcagggg

SEQ ID NO: 1813540 - DNA, 15 bp, Homo sapiens
agcgagcgcaggggg

SEQ ID NO: 1813541 - DNA, 15 bp, Homo sapiens
gcgagcgcaggggga

SEQ ID NO: 1813542 - DNA, 15 bp, Homo sapiens
cgagcgcagggggag

SEQ ID NO: 1813543 - DNA, 15 bp, Homo sapiens
gagcgcagggggagg

SEQ ID NO: 1813544 - DNA, 15 bp, Homo sapiens
agcgcagggggagga

SEQ ID NO: 1813545 - DNA, 15 bp, Homo sapiens
gcgcagggggaggat

SEQ ID NO: 1813546 - DNA, 15 bp, Homo sapiens
cgcagggggaggatc

SEQ ID NO: 1813547 - DNA, 15 bp, Homo sapiens
gcagggggaggatca

SEQ ID NO: 1813548 - DNA, 15 bp, Homo sapiens
cagggggaggatcac

SEQ ID NO: 1813549 - DNA, 15 bp, Homo sapiens
agggggaggatcact

SEQ ID NO: 1813550 - DNA, 15 bp, Homo sapiens
gggggaggatcactt

SEQ ID NO: 1813551 - DNA, 15 bp, Homo sapiens
ggggaggatcacttg

SEQ ID NO: 1813552 - DNA, 15 bp, Homo sapiens
gggaggatcacttgg

SEQ ID NO: 1813553 - DNA, 15 bp, Homo sapiens
ggaggatcacttggg

SEQ ID NO: 1813554 - DNA, 15 bp, Homo sapiens
gaggatcacttgggg

SEQ ID NO: 1813555 - DNA, 15 bp, Homo sapiens
aggatcacttggggc

SEQ ID NO: 1813556 - DNA, 15 bp, Homo sapiens
ggatcacttggggcc

SEQ ID NO: 1813557 - DNA, 15 bp, Homo sapiens
gatcacttggggcca

SEQ ID NO: 1813558 - DNA, 15 bp, Homo sapiens
atcacttggggccag

SEQ ID NO: 1813559 - DNA, 15 bp, Homo sapiens
tcacttggggccagg

SEQ ID NO: 1813560 - DNA, 15 bp, Homo sapiens
cacttggggccagga

SEQ ID NO: 1813561 - DNA, 15 bp, Homo sapiens
acttggggccaggag

SEQ ID NO: 1813562 - DNA, 15 bp, Homo sapiens
tggggccaggagttc

SEQ ID NO: 1813563 - DNA, 15 bp, Homo sapiens
ggggccaggagttcg

SEQ ID NO: 1813564 - DNA, 15 bp, Homo sapiens
gggccaggagttcga

SEQ ID NO: 1813565 - DNA, 15 bp, Homo sapiens
ggccaggagttcgag

SEQ ID NO: 1813566 - DNA, 15 bp, Homo sapiens
gccaggagttcgaga

SEQ ID NO: 1813567 - DNA, 15 bp, Homo sapiens
cgagaccaacctggc

SEQ ID NO: 1813568 - DNA, 15 bp, Homo sapiens
gagaccaacctggcc

SEQ ID NO: 1813569 - DNA, 15 bp, Homo sapiens
agaccaacctggcca

SEQ ID NO: 1813570 - DNA, 15 bp, Homo sapiens
gaccaacctggccaa

SEQ ID NO: 1813571 - DNA, 15 bp, Homo sapiens
accaacctggccaac

SEQ ID NO: 1813572 - DNA, 15 bp, Homo sapiens
ccaacctggccaaca

SEQ ID NO: 1813573 - DNA, 15 bp, Homo sapiens
caacctggccaacat

SEQ ID NO: 1813574 - DNA, 15 bp, Homo sapiens
aacctggccaacatg

SEQ ID NO: 1813575 - DNA, 15 bp, Homo sapiens
acctggccaacatgg

SEQ ID NO: 1813576 - DNA, 15 bp, Homo sapiens
catggtgaaactccg

SEQ ID NO: 1813577 - DNA, 15 bp, Homo sapiens
atggtgaaactccgt

SEQ ID NO: 1813578 - DNA, 15 bp, Homo sapiens
tggtgaaactccgtc

SEQ ID NO: 1813579 - DNA, 15 bp, Homo sapiens
gtgaaactccgtctt

SEQ ID NO: 1813580 - DNA, 15 bp, Homo sapiens
tgaaactccgtcttt

SEQ ID NO: 1813581 - DNA, 15 bp, Homo sapiens
gaaactccgtcttta

SEQ ID NO: 1813582 - DNA, 15 bp, Homo sapiens
aaactccgtctttac

SEQ ID NO: 1813583 - DNA, 15 bp, Homo sapiens
aactccgtctttacc

SEQ ID NO: 1813584 - DNA, 15 bp, Homo sapiens
actccgtctttacca

SEQ ID NO: 1813585 - DNA, 15 bp, Homo sapiens
ctccgtctttaccat

SEQ ID NO: 1813586 - DNA, 15 bp, Homo sapiens
tccgtctttaccata

SEQ ID NO: 1813587 - DNA, 15 bp, Homo sapiens
ccgtctttaccatac

SEQ ID NO: 1813588 - DNA, 15 bp, Homo sapiens
cgtctttaccataca

SEQ ID NO: 1813589 - DNA, 15 bp, Homo sapiens
gtctttaccatacaa

SEQ ID NO: 1813590 - DNA, 15 bp, Homo sapiens
tctttaccatacaaa

SEQ ID NO: 1813591 - DNA, 15 bp, Homo sapiens
ctttaccatacaaaa

SEQ ID NO: 1813592 - DNA, 15 bp, Homo sapiens
tttaccatacaaaaa

SEQ ID NO: 1813593 - DNA, 15 bp, Homo sapiens
ttaccatacaaaaat

SEQ ID NO: 1813594 - DNA, 15 bp, Homo sapiens
taccatacaaaaatt

SEQ ID NO: 1813595 - DNA, 15 bp, Homo sapiens
accatacaaaaatta

SEQ ID NO: 1813596 - DNA, 15 bp, Homo sapiens
ccatacaaaaattag

SEQ ID NO: 1813597 - DNA, 15 bp, Homo sapiens
catacaaaaattagc

SEQ ID NO: 1813598 - DNA, 15 bp, Homo sapiens
caaaaattagctgaa

SEQ ID NO: 1813599 - DNA, 15 bp, Homo sapiens
aaaaattagctgaac

SEQ ID NO: 1813600 - DNA, 15 bp, Homo sapiens
aaaattagctgaaca

SEQ ID NO: 1813601 - DNA, 15 bp, Homo sapiens
aaattagctgaacat

SEQ ID NO: 1813602 - DNA, 15 bp, Homo sapiens
aattagctgaacatg

SEQ ID NO: 1813603 - DNA, 15 bp, Homo sapiens
attagctgaacatgg

SEQ ID NO: 1813604 - DNA, 15 bp, Homo sapiens
ttagctgaacatggt

SEQ ID NO: 1813605 - DNA, 15 bp, Homo sapiens
tagctgaacatggtg

SEQ ID NO: 1813606 - DNA, 15 bp, Homo sapiens
agctgaacatggtgg

SEQ ID NO: 1813607 - DNA, 15 bp, Homo sapiens
gctgaacatggtggt

SEQ ID NO: 1813608 - DNA, 15 bp, Homo sapiens
ctgaacatggtggtg

SEQ ID NO: 1813609 - DNA, 15 bp, Homo sapiens
tgaacatggtggtgc

SEQ ID NO: 1813610 - DNA, 15 bp, Homo sapiens
gaacatggtggtgca

SEQ ID NO: 1813611 - DNA, 15 bp, Homo sapiens
aacatggtggtgcaa

SEQ ID NO: 1813612 - DNA, 15 bp, Homo sapiens
acatggtggtgcaag

SEQ ID NO: 1813613 - DNA, 15 bp, Homo sapiens
catggtggtgcaagc

SEQ ID NO: 1813614 - DNA, 15 bp, Homo sapiens
atggtggtgcaagcc

SEQ ID NO: 1813615 - DNA, 15 bp, Homo sapiens
tggtggtgcaagcct

SEQ ID NO: 1813616 - DNA, 15 bp, Homo sapiens
ggtggtgcaagcctg

SEQ ID NO: 1813617 - DNA, 15 bp, Homo sapiens
gtggtgcaagcctgt

SEQ ID NO: 1813618 - DNA, 15 bp, Homo sapiens
tggtgcaagcctgta

SEQ ID NO: 1813619 - DNA, 15 bp, Homo sapiens
ggtgcaagcctgtaa

SEQ ID NO: 1813620 - DNA, 15 bp, Homo sapiens
gtgcaagcctgtaat

SEQ ID NO: 1813621 - DNA, 15 bp, Homo sapiens
tgcaagcctgtaatc

SEQ ID NO: 1813622 - DNA, 15 bp, Homo sapiens
gcaagcctgtaatct

SEQ ID NO: 1813623 - DNA, 15 bp, Homo sapiens
caagcctgtaatctc

SEQ ID NO: 1813624 - DNA, 15 bp, Homo sapiens
aagcctgtaatctca

SEQ ID NO: 1813625 - DNA, 15 bp, Homo sapiens
agcctgtaatctcag

SEQ ID NO: 1813626 - DNA, 15 bp, Homo sapiens
cctgtaatctcagct

SEQ ID NO: 1813627 - DNA, 15 bp, Homo sapiens
ctgtaatctcagcta

SEQ ID NO: 1813628 - DNA, 15 bp, Homo sapiens
tgtaatctcagctac

SEQ ID NO: 1813629 - DNA, 15 bp, Homo sapiens
gtaatctcagctacg

SEQ ID NO: 1813630 - DNA, 15 bp, Homo sapiens
taatctcagctacgt

SEQ ID NO: 1813631 - DNA, 15 bp, Homo sapiens
aatctcagctacgtg

SEQ ID NO: 1813632 - DNA, 15 bp, Homo sapiens
atctcagctacgtgg

SEQ ID NO: 1813633 - DNA, 15 bp, Homo sapiens
tctcagctacgtggg

SEQ ID NO: 1813634 - DNA, 15 bp, Homo sapiens
ctcagctacgtggga

SEQ ID NO: 1813635 - DNA, 15 bp, Homo sapiens
tcagctacgtgggag

SEQ ID NO: 1813636 - DNA, 15 bp, Homo sapiens
cagctacgtgggagg

SEQ ID NO: 1813637 - DNA, 15 bp, Homo sapiens
agctacgtgggaggc

SEQ ID NO: 1813638 - DNA, 15 bp, Homo sapiens
gctacgtgggaggct

SEQ ID NO: 1813639 - DNA, 15 bp, Homo sapiens
ctacgtgggaggctg

SEQ ID NO: 1813640 - DNA, 15 bp, Homo sapiens
tacgtgggaggctga

SEQ ID NO: 1813641 - DNA, 15 bp, Homo sapiens
acgtgggaggctgag

SEQ ID NO: 1813642 - DNA, 15 bp, Homo sapiens
cgtgggaggctgagg

SEQ ID NO: 1813643 - DNA, 15 bp, Homo sapiens
gtgggaggctgaggc

SEQ ID NO: 1813644 - DNA, 15 bp, Homo sapiens
tgagctgagattgcg

SEQ ID NO: 1813645 - DNA, 15 bp, Homo sapiens
gagctgagattgcgc

SEQ ID NO: 1813646 - DNA, 15 bp, Homo sapiens
agctgagattgcgcc

SEQ ID NO: 1813647 - DNA, 15 bp, Homo sapiens
gctgagattgcgcca

SEQ ID NO: 1813648 - DNA, 15 bp, Homo sapiens
ctgagattgcgccac

SEQ ID NO: 1813649 - DNA, 15 bp, Homo sapiens
tgagattgcgccact

SEQ ID NO: 1813650 - DNA, 15 bp, Homo sapiens
gcgccactgcactct

SEQ ID NO: 1813651 - DNA, 15 bp, Homo sapiens
cgccactgcactctg

SEQ ID NO: 1813652 - DNA, 15 bp, Homo sapiens
gccactgcactctgg

SEQ ID NO: 1813653 - DNA, 15 bp, Homo sapiens
cactgcactctggct

SEQ ID NO: 1813654 - DNA, 15 bp, Homo sapiens
actgcactctggctt

SEQ ID NO: 1813655 - DNA, 15 bp, Homo sapiens
ctgcactctggctta

SEQ ID NO: 1813656 - DNA, 15 bp, Homo sapiens
tgcactctggcttaa

SEQ ID NO: 1813657 - DNA, 15 bp, Homo sapiens
gcactctggcttaag

SEQ ID NO: 1813658 - DNA, 15 bp, Homo sapiens
cactctggcttaagc

SEQ ID NO: 1813659 - DNA, 15 bp, Homo sapiens
actctggcttaagca

SEQ ID NO: 1813660 - DNA, 15 bp, Homo sapiens
ctctggcttaagcaa

SEQ ID NO: 1813661 - DNA, 15 bp, Homo sapiens
tctggcttaagcaac

SEQ ID NO: 1813662 - DNA, 15 bp, Homo sapiens
ctggcttaagcaaca

SEQ ID NO: 1813663 - DNA, 15 bp, Homo sapiens
tggcttaagcaacag

SEQ ID NO: 1813664 - DNA, 15 bp, Homo sapiens
ggcttaagcaacaga

SEQ ID NO: 1813665 - DNA, 15 bp, Homo sapiens
gcttaagcaacagag

SEQ ID NO: 1813666 - DNA, 15 bp, Homo sapiens
cttaagcaacagagc

SEQ ID NO: 1813667 - DNA, 15 bp, Homo sapiens
ttaagcaacagagca

SEQ ID NO: 1813668 - DNA, 15 bp, Homo sapiens
taagcaacagagcaa

SEQ ID NO: 1813669 - DNA, 15 bp, Homo sapiens
aagcaacagagcaag

SEQ ID NO: 1813670 - DNA, 15 bp, Homo sapiens
agcaacagagcaaga

SEQ ID NO: 1813671 - DNA, 15 bp, Homo sapiens
aacagagcaagacta

SEQ ID NO: 1813672 - DNA, 15 bp, Homo sapiens
acagagcaagactat

SEQ ID NO: 1813673 - DNA, 15 bp, Homo sapiens
cagagcaagactatc

SEQ ID NO: 1813674 - DNA, 15 bp, Homo sapiens
agagcaagactatct

SEQ ID NO: 1813675 - DNA, 15 bp, Homo sapiens
gagcaagactatctc

SEQ ID NO: 1813676 - DNA, 15 bp, Homo sapiens
agcaagactatctca

SEQ ID NO: 1813677 - DNA, 15 bp, Homo sapiens
gcaagactatctcaa

SEQ ID NO: 1813678 - DNA, 15 bp, Homo sapiens
caagactatctcaaa

SEQ ID NO: 1813679 - DNA, 15 bp, Homo sapiens
aagactatctcaaaa

SEQ ID NO: 1813680 - DNA, 15 bp, Homo sapiens
agactatctcaaaaa

SEQ ID NO: 1813681 - DNA, 15 bp, Homo sapiens
gactatctcaaaaaa

SEQ ID NO: 1813682 - DNA, 15 bp, Homo sapiens
aaaaaaaaaaagatg

SEQ ID NO: 1813683 - DNA, 15 bp, Homo sapiens
aaaaaaaaaagatgc

SEQ ID NO: 1813684 - DNA, 15 bp, Homo sapiens
aaaaaaaaagatgct

SEQ ID NO: 1813685 - DNA, 15 bp, Homo sapiens
aaaaaaaagatgctt

SEQ ID NO: 1813686 - DNA, 15 bp, Homo sapiens
aaaaaaagatgcttt

SEQ ID NO: 1813687 - DNA, 15 bp, Homo sapiens
aaaaaagatgctttt

SEQ ID NO: 1813688 - DNA, 15 bp, Homo sapiens
aaaaagatgcttttg

SEQ ID NO: 1813689 - DNA, 15 bp, Homo sapiens
aaaagatgcttttgg

SEQ ID NO: 1813690 - DNA, 15 bp, Homo sapiens
aaagatgcttttggc

SEQ ID NO: 1813691 - DNA, 15 bp, Homo sapiens
aagatgcttttggca

SEQ ID NO: 1813692 - DNA, 15 bp, Homo sapiens
agatgcttttggcaa

SEQ ID NO: 1813693 - DNA, 15 bp, Homo sapiens
gatgcttttggcaaa

SEQ ID NO: 1813694 - DNA, 15 bp, Homo sapiens
atgcttttggcaaac

SEQ ID NO: 1813695 - DNA, 15 bp, Homo sapiens
tgcttttggcaaacc

SEQ ID NO: 1813696 - DNA, 15 bp, Homo sapiens
gcttttggcaaacct

SEQ ID NO: 1813697 - DNA, 15 bp, Homo sapiens
cttttggcaaacctg

SEQ ID NO: 1813698 - DNA, 15 bp, Homo sapiens
ttttggcaaacctgt

SEQ ID NO: 1813699 - DNA, 15 bp, Homo sapiens
tttggcaaacctgta

SEQ ID NO: 1813700 - DNA, 15 bp, Homo sapiens
ttggcaaacctgtaa

SEQ ID NO: 1813701 - DNA, 15 bp, Homo sapiens
tggcaaacctgtaac

SEQ ID NO: 1813702 - DNA, 15 bp, Homo sapiens
ggcaaacctgtaaca

SEQ ID NO: 1813703 - DNA, 15 bp, Homo sapiens
gcaaacctgtaacat

SEQ ID NO: 1813704 - DNA, 15 bp, Homo sapiens
caaacctgtaacatg

SEQ ID NO: 1813705 - DNA, 15 bp, Homo sapiens
aaacctgtaacatgt

SEQ ID NO: 1813706 - DNA, 15 bp, Homo sapiens
aacctgtaacatgtg

SEQ ID NO: 1813707 - DNA, 15 bp, Homo sapiens
acctgtaacatgtgc

SEQ ID NO: 1813708 - DNA, 15 bp, Homo sapiens
cctgtaacatgtgca

SEQ ID NO: 1813709 - DNA, 15 bp, Homo sapiens
ctgtaacatgtgcag

SEQ ID NO: 1813710 - DNA, 15 bp, Homo sapiens
tgtaacatgtgcagg

SEQ ID NO: 1813711 - DNA, 15 bp, Homo sapiens
gtaacatgtgcaggt

SEQ ID NO: 1813712 - DNA, 15 bp, Homo sapiens
taacatgtgcaggtc

SEQ ID NO: 1813713 - DNA, 15 bp, Homo sapiens
aacatgtgcaggtcc

SEQ ID NO: 1813714 - DNA, 15 bp, Homo sapiens
acatgtgcaggtcct

SEQ ID NO: 1813715 - DNA, 15 bp, Homo sapiens
catgtgcaggtcctg

SEQ ID NO: 1813716 - DNA, 15 bp, Homo sapiens
atgtgcaggtcctgc

SEQ ID NO: 1813717 - DNA, 15 bp, Homo sapiens
tgtgcaggtcctgca

SEQ ID NO: 1813718 - DNA, 15 bp, Homo sapiens
gtgcaggtcctgcat

SEQ ID NO: 1813719 - DNA, 15 bp, Homo sapiens
tgcaggtcctgcatc

SEQ ID NO: 1813720 - DNA, 15 bp, Homo sapiens
gcaggtcctgcatct

SEQ ID NO: 1813721 - DNA, 15 bp, Homo sapiens
caggtcctgcatctg

SEQ ID NO: 1813722 - DNA, 15 bp, Homo sapiens
aggtcctgcatctgg

SEQ ID NO: 1813723 - DNA, 15 bp, Homo sapiens
ggtcctgcatctggg

SEQ ID NO: 1813724 - DNA, 15 bp, Homo sapiens
gtcctgcatctgggc

SEQ ID NO: 1813725 - DNA, 15 bp, Homo sapiens
tcctgcatctgggca

SEQ ID NO: 1813726 - DNA, 15 bp, Homo sapiens
cctgcatctgggcag

SEQ ID NO: 1813727 - DNA, 15 bp, Homo sapiens
ctgcatctgggcagt

SEQ ID NO: 1813728 - DNA, 15 bp, Homo sapiens
tgcatctgggcagtg

SEQ ID NO: 1813729 - DNA, 15 bp, Homo sapiens
gcatctgggcagtgc

SEQ ID NO: 1813730 - DNA, 15 bp, Homo sapiens
catctgggcagtgct

SEQ ID NO: 1813731 - DNA, 15 bp, Homo sapiens
atctgggcagtgctc

SEQ ID NO: 1813732 - DNA, 15 bp, Homo sapiens
tctgggcagtgctca

SEQ ID NO: 1813733 - DNA, 15 bp, Homo sapiens
ctgggcagtgctcaa

SEQ ID NO: 1813734 - DNA, 15 bp, Homo sapiens
tgggcagtgctcaag

SEQ ID NO: 1813735 - DNA, 15 bp, Homo sapiens
gggcagtgctcaagg

SEQ ID NO: 1813736 - DNA, 15 bp, Homo sapiens
ggcagtgctcaaggg

SEQ ID NO: 1813737 - DNA, 15 bp, Homo sapiens
gcagtgctcaaggga

SEQ ID NO: 1813738 - DNA, 15 bp, Homo sapiens
cagtgctcaagggaa

SEQ ID NO: 1813739 - DNA, 15 bp, Homo sapiens
agtgctcaagggaaa

SEQ ID NO: 1813740 - DNA, 15 bp, Homo sapiens
gtgctcaagggaaag

SEQ ID NO: 1813741 - DNA, 15 bp, Homo sapiens
tgctcaagggaaagc

SEQ ID NO: 1813742 - DNA, 15 bp, Homo sapiens
gctcaagggaaagcc

SEQ ID NO: 1813743 - DNA, 15 bp, Homo sapiens
ctcaagggaaagccg

SEQ ID NO: 1813744 - DNA, 15 bp, Homo sapiens
tcaagggaaagccgc

SEQ ID NO: 1813745 - DNA, 15 bp, Homo sapiens
caagggaaagccgca

SEQ ID NO: 1813746 - DNA, 15 bp, Homo sapiens
aagggaaagccgcac

SEQ ID NO: 1813747 - DNA, 15 bp, Homo sapiens
agggaaagccgcact

SEQ ID NO: 1813748 - DNA, 15 bp, Homo sapiens
gggaaagccgcacta

SEQ ID NO: 1813749 - DNA, 15 bp, Homo sapiens
ggaaagccgcactat

SEQ ID NO: 1813750 - DNA, 15 bp, Homo sapiens
gaaagccgcactatg

SEQ ID NO: 1813751 - DNA, 15 bp, Homo sapiens
aaagccgcactatgt

SEQ ID NO: 1813752 - DNA, 15 bp, Homo sapiens
aagccgcactatgtc

SEQ ID NO: 1813753 - DNA, 15 bp, Homo sapiens
agccgcactatgtcc

SEQ ID NO: 1813754 - DNA, 15 bp, Homo sapiens
gccgcactatgtcca

SEQ ID NO: 1813755 - DNA, 15 bp, Homo sapiens
ccgcactatgtccac

SEQ ID NO: 1813756 - DNA, 15 bp, Homo sapiens
cgcactatgtccact

SEQ ID NO: 1813757 - DNA, 15 bp, Homo sapiens
gcactatgtccactg

SEQ ID NO: 1813758 - DNA, 15 bp, Homo sapiens
cactatgtccactgg

SEQ ID NO: 1813759 - DNA, 15 bp, Homo sapiens
actatgtccactggg

SEQ ID NO: 1813760 - DNA, 15 bp, Homo sapiens
ctatgtccactgggc

SEQ ID NO: 1813761 - DNA, 15 bp, Homo sapiens
tatgtccactgggcc

SEQ ID NO: 1813762 - DNA, 15 bp, Homo sapiens
atgtccactgggcca

SEQ ID NO: 1813763 - DNA, 15 bp, Homo sapiens
tgtccactgggccaa

SEQ ID NO: 1813764 - DNA, 15 bp, Homo sapiens
gtccactgggccaag

SEQ ID NO: 1813765 - DNA, 15 bp, Homo sapiens
tccactgggccaaga

SEQ ID NO: 1813766 - DNA, 15 bp, Homo sapiens
ccactgggccaagac

SEQ ID NO: 1813767 - DNA, 15 bp, Homo sapiens
cactgggccaagact

SEQ ID NO: 1813768 - DNA, 15 bp, Homo sapiens
actgggccaagactc

SEQ ID NO: 1813769 - DNA, 15 bp, Homo sapiens
ctgggccaagactca

SEQ ID NO: 1813770 - DNA, 15 bp, Homo sapiens
tgggccaagactcaa

SEQ ID NO: 1813771 - DNA, 15 bp, Homo sapiens
gggccaagactcaac

SEQ ID NO: 1813772 - DNA, 15 bp, Homo sapiens
ggccaagactcaacg

SEQ ID NO: 1813773 - DNA, 15 bp, Homo sapiens
gccaagactcaacgt

SEQ ID NO: 1813774 - DNA, 15 bp, Homo sapiens
ccaagactcaacgtt

SEQ ID NO: 1813775 - DNA, 15 bp, Homo sapiens
caagactcaacgttg

SEQ ID NO: 1813776 - DNA, 15 bp, Homo sapiens
aagactcaacgttgg

SEQ ID NO: 1813777 - DNA, 15 bp, Homo sapiens
agactcaacgttggc

SEQ ID NO: 1813778 - DNA, 15 bp, Homo sapiens
gactcaacgttggcc

SEQ ID NO: 1813779 - DNA, 15 bp, Homo sapiens
actcaacgttggcca

SEQ ID NO: 1813780 - DNA, 15 bp, Homo sapiens
ctcaacgttggccat

SEQ ID NO: 1813781 - DNA, 15 bp, Homo sapiens
tcaacgttggccatg

SEQ ID NO: 1813782 - DNA, 15 bp, Homo sapiens
caacgttggccatgc

SEQ ID NO: 1813783 - DNA, 15 bp, Homo sapiens
aacgttggccatgcc

SEQ ID NO: 1813784 - DNA, 15 bp, Homo sapiens
acgttggccatgccc

SEQ ID NO: 1813785 - DNA, 15 bp, Homo sapiens
cgttggccatgcccc

SEQ ID NO: 1813786 - DNA, 15 bp, Homo sapiens
gttggccatgccccc

SEQ ID NO: 1813787 - DNA, 15 bp, Homo sapiens
ttggccatgccccct

SEQ ID NO: 1813788 - DNA, 15 bp, Homo sapiens
tggccatgccccctg

SEQ ID NO: 1813789 - DNA, 15 bp, Homo sapiens
ggccatgccccctgc

SEQ ID NO: 1813790 - DNA, 15 bp, Homo sapiens
gccatgccccctgct

SEQ ID NO: 1813791 - DNA, 15 bp, Homo sapiens
ccatgccccctgctt

SEQ ID NO: 1813792 - DNA, 15 bp, Homo sapiens
catgccccctgcttc

SEQ ID NO: 1813793 - DNA, 15 bp, Homo sapiens
atgccccctgcttcc

SEQ ID NO: 1813794 - DNA, 15 bp, Homo sapiens
tgccccctgcttcct

SEQ ID NO: 1813795 - DNA, 15 bp, Homo sapiens
gccccctgcttcctt

SEQ ID NO: 1813796 - DNA, 15 bp, Homo sapiens
ccccctgcttcctta

SEQ ID NO: 1813797 - DNA, 15 bp, Homo sapiens
cccctgcttccttaa

SEQ ID NO: 1813798 - DNA, 15 bp, Homo sapiens
ccctgcttccttaaa

SEQ ID NO: 1813799 - DNA, 15 bp, Homo sapiens
cctgcttccttaaat

SEQ ID NO: 1813800 - DNA, 15 bp, Homo sapiens
ctgcttccttaaatc

SEQ ID NO: 1813801 - DNA, 15 bp, Homo sapiens
tgcttccttaaatct

SEQ ID NO: 1813802 - DNA, 15 bp, Homo sapiens
gcttccttaaatcta

SEQ ID NO: 1813803 - DNA, 15 bp, Homo sapiens
cttccttaaatctaa

SEQ ID NO: 1813804 - DNA, 15 bp, Homo sapiens
ttccttaaatctaac

SEQ ID NO: 1813805 - DNA, 15 bp, Homo sapiens
tccttaaatctaacg

SEQ ID NO: 1813806 - DNA, 15 bp, Homo sapiens
ccttaaatctaacgc

SEQ ID NO: 1813807 - DNA, 15 bp, Homo sapiens
cttaaatctaacgcc

SEQ ID NO: 1813808 - DNA, 15 bp, Homo sapiens
ttaaatctaacgcca

SEQ ID NO: 1813809 - DNA, 15 bp, Homo sapiens
taaatctaacgccac

SEQ ID NO: 1813810 - DNA, 15 bp, Homo sapiens
aaatctaacgccaca

SEQ ID NO: 1813811 - DNA, 15 bp, Homo sapiens
aatctaacgccacaa

SEQ ID NO: 1813812 - DNA, 15 bp, Homo sapiens
atctaacgccacaaa

SEQ ID NO: 1813813 - DNA, 15 bp, Homo sapiens
tctaacgccacaaaa

SEQ ID NO: 1813814 - DNA, 15 bp, Homo sapiens
ctaacgccacaaaaa

SEQ ID NO: 1813815 - DNA, 15 bp, Homo sapiens
taacgccacaaaaag

SEQ ID NO: 1813816 - DNA, 15 bp, Homo sapiens
aacgccacaaaaaga

SEQ ID NO: 1813817 - DNA, 15 bp, Homo sapiens
acgccacaaaaagag

SEQ ID NO: 1813818 - DNA, 15 bp, Homo sapiens
cgccacaaaaagagt

SEQ ID NO: 1813819 - DNA, 15 bp, Homo sapiens
gccacaaaaagagtt

SEQ ID NO: 1813820 - DNA, 15 bp, Homo sapiens
ccacaaaaagagttg

SEQ ID NO: 1813821 - DNA, 15 bp, Homo sapiens
cacaaaaagagttga

SEQ ID NO: 1813822 - DNA, 15 bp, Homo sapiens
acaaaaagagttgaa

SEQ ID NO: 1813823 - DNA, 15 bp, Homo sapiens
caaaaagagttgaag

SEQ ID NO: 1813824 - DNA, 15 bp, Homo sapiens
aaaaagagttgaagt

SEQ ID NO: 1813825 - DNA, 15 bp, Homo sapiens
aaaagagttgaagta

SEQ ID NO: 1813826 - DNA, 15 bp, Homo sapiens
aaagagttgaagtaa

SEQ ID NO: 1813827 - DNA, 15 bp, Homo sapiens
aagagttgaagtaaa

SEQ ID NO: 1813828 - DNA, 15 bp, Homo sapiens
agagttgaagtaaaa

SEQ ID NO: 1813829 - DNA, 15 bp, Homo sapiens
gagttgaagtaaaag

SEQ ID NO: 1813830 - DNA, 15 bp, Homo sapiens
agttgaagtaaaagc

SEQ ID NO: 1813831 - DNA, 15 bp, Homo sapiens
gttgaagtaaaagcc

SEQ ID NO: 1813832 - DNA, 15 bp, Homo sapiens
ttgaagtaaaagcct

SEQ ID NO: 1813833 - DNA, 15 bp, Homo sapiens
tgaagtaaaagcctg

SEQ ID NO: 1813834 - DNA, 15 bp, Homo sapiens
gaagtaaaagcctgg

SEQ ID NO: 1813835 - DNA, 15 bp, Homo sapiens
aagtaaaagcctggc

SEQ ID NO: 1813836 - DNA, 15 bp, Homo sapiens
agtaaaagcctggcc

SEQ ID NO: 1813837 - DNA, 15 bp, Homo sapiens
gtaaaagcctggcca

SEQ ID NO: 1813838 - DNA, 15 bp, Homo sapiens
taaaagcctggccaa

SEQ ID NO: 1813839 - DNA, 15 bp, Homo sapiens
aaaagcctggccaat

SEQ ID NO: 1813840 - DNA, 15 bp, Homo sapiens
aaagcctggccaata

SEQ ID NO: 1813841 - DNA, 15 bp, Homo sapiens
aagcctggccaatac

SEQ ID NO: 1813842 - DNA, 15 bp, Homo sapiens
agcctggccaatacc

SEQ ID NO: 1813843 - DNA, 15 bp, Homo sapiens
gcctggccaatacca

SEQ ID NO: 1813844 - DNA, 15 bp, Homo sapiens
cctggccaataccat

SEQ ID NO: 1813845 - DNA, 15 bp, Homo sapiens
ctggccaataccatg

SEQ ID NO: 1813846 - DNA, 15 bp, Homo sapiens
tggccaataccatga

SEQ ID NO: 1813847 - DNA, 15 bp, Homo sapiens
ggccaataccatgat

SEQ ID NO: 1813848 - DNA, 15 bp, Homo sapiens
gccaataccatgatg

SEQ ID NO: 1813849 - DNA, 15 bp, Homo sapiens
ccaataccatgatga

SEQ ID NO: 1813850 - DNA, 15 bp, Homo sapiens
caataccatgatgac

SEQ ID NO: 1813851 - DNA, 15 bp, Homo sapiens
aataccatgatgaca

SEQ ID NO: 1813852 - DNA, 15 bp, Homo sapiens
ataccatgatgacat

SEQ ID NO: 1813853 - DNA, 15 bp, Homo sapiens
taccatgatgacatc

SEQ ID NO: 1813854 - DNA, 15 bp, Homo sapiens
accatgatgacatct

SEQ ID NO: 1813855 - DNA, 15 bp, Homo sapiens
ccatgatgacatcta

SEQ ID NO: 1813856 - DNA, 15 bp, Homo sapiens
catgatgacatctac

SEQ ID NO: 1813857 - DNA, 15 bp, Homo sapiens
atgatgacatctact

SEQ ID NO: 1813858 - DNA, 15 bp, Homo sapiens
tgatgacatctactt

SEQ ID NO: 1813859 - DNA, 15 bp, Homo sapiens
gatgacatctacttc

SEQ ID NO: 1813860 - DNA, 15 bp, Homo sapiens
atgacatctacttcc

SEQ ID NO: 1813861 - DNA, 15 bp, Homo sapiens
tgacatctacttcct

SEQ ID NO: 1813862 - DNA, 15 bp, Homo sapiens
gacatctacttcctg

SEQ ID NO: 1813863 - DNA, 15 bp, Homo sapiens
acatctacttcctgg

SEQ ID NO: 1813864 - DNA, 15 bp, Homo sapiens
catctacttcctggc

SEQ ID NO: 1813865 - DNA, 15 bp, Homo sapiens
atctacttcctggct

SEQ ID NO: 1813866 - DNA, 15 bp, Homo sapiens
tctacttcctggctt

SEQ ID NO: 1813867 - DNA, 15 bp, Homo sapiens
ctacttcctggcttc

SEQ ID NO: 1813868 - DNA, 15 bp, Homo sapiens
tacttcctggcttcc

SEQ ID NO: 1813869 - DNA, 15 bp, Homo sapiens
acttcctggcttccc

SEQ ID NO: 1813870 - DNA, 15 bp, Homo sapiens
cttcctggcttcccg

SEQ ID NO: 1813871 - DNA, 15 bp, Homo sapiens
ttcctggcttcccgc

SEQ ID NO: 1813872 - DNA, 15 bp, Homo sapiens
tcctggcttcccgcc

SEQ ID NO: 1813873 - DNA, 15 bp, Homo sapiens
cctggcttcccgcca

SEQ ID NO: 1813874 - DNA, 15 bp, Homo sapiens
ctggcttcccgccat

SEQ ID NO: 1813875 - DNA, 15 bp, Homo sapiens
tggcttcccgccatc

SEQ ID NO: 1813876 - DNA, 15 bp, Homo sapiens
ggcttcccgccatca

SEQ ID NO: 1813877 - DNA, 15 bp, Homo sapiens
gcttcccgccatcaa

SEQ ID NO: 1813878 - DNA, 15 bp, Homo sapiens
cttcccgccatcaac

SEQ ID NO: 1813879 - DNA, 15 bp, Homo sapiens
ttcccgccatcaacc

SEQ ID NO: 1813880 - DNA, 15 bp, Homo sapiens
tcccgccatcaaccc

SEQ ID NO: 1813881 - DNA, 15 bp, Homo sapiens
cccgccatcaaccct

SEQ ID NO: 1813882 - DNA, 15 bp, Homo sapiens
ccgccatcaaccctc

SEQ ID NO: 1813883 - DNA, 15 bp, Homo sapiens
cgccatcaaccctcc

SEQ ID NO: 1813884 - DNA, 15 bp, Homo sapiens
gccatcaaccctccc

SEQ ID NO: 1813885 - DNA, 15 bp, Homo sapiens
ccatcaaccctccct

SEQ ID NO: 1813886 - DNA, 15 bp, Homo sapiens
catcaaccctccctc

SEQ ID NO: 1813887 - DNA, 15 bp, Homo sapiens
atcaaccctccctca

SEQ ID NO: 1813888 - DNA, 15 bp, Homo sapiens
tcaaccctccctcac

SEQ ID NO: 1813889 - DNA, 15 bp, Homo sapiens
caaccctccctcaca

SEQ ID NO: 1813890 - DNA, 15 bp, Homo sapiens
aaccctccctcacac

SEQ ID NO: 1813891 - DNA, 15 bp, Homo sapiens
accctccctcacacc

SEQ ID NO: 1813892 - DNA, 15 bp, Homo sapiens
ccctccctcacacca

SEQ ID NO: 1813893 - DNA, 15 bp, Homo sapiens
cctccctcacaccat

SEQ ID NO: 1813894 - DNA, 15 bp, Homo sapiens
ctccctcacaccatc

SEQ ID NO: 1813895 - DNA, 15 bp, Homo sapiens
tccctcacaccatct

SEQ ID NO: 1813896 - DNA, 15 bp, Homo sapiens
ccctcacaccatctg

SEQ ID NO: 1813897 - DNA, 15 bp, Homo sapiens
cctcacaccatctgc

SEQ ID NO: 1813898 - DNA, 15 bp, Homo sapiens
ctcacaccatctgcg

SEQ ID NO: 1813899 - DNA, 15 bp, Homo sapiens
tcacaccatctgcgg

SEQ ID NO: 1813900 - DNA, 15 bp, Homo sapiens
cacaccatctgcggg

SEQ ID NO: 1813901 - DNA, 15 bp, Homo sapiens
acaccatctgcgggc

SEQ ID NO: 1813902 - DNA, 15 bp, Homo sapiens
caccatctgcgggca

SEQ ID NO: 1813903 - DNA, 15 bp, Homo sapiens
accatctgcgggcag

SEQ ID NO: 1813904 - DNA, 15 bp, Homo sapiens
ccatctgcgggcagg

SEQ ID NO: 1813905 - DNA, 15 bp, Homo sapiens
catctgcgggcaggt

SEQ ID NO: 1813906 - DNA, 15 bp, Homo sapiens
atctgcgggcaggta

SEQ ID NO: 1813907 - DNA, 15 bp, Homo sapiens
tctgcgggcaggtag

SEQ ID NO: 1813908 - DNA, 15 bp, Homo sapiens
ctgcgggcaggtagc

SEQ ID NO: 1813909 - DNA, 15 bp, Homo sapiens
tgcgggcaggtagca

SEQ ID NO: 1813910 - DNA, 15 bp, Homo sapiens
gcgggcaggtagcag

SEQ ID NO: 1813911 - DNA, 15 bp, Homo sapiens
cgggcaggtagcaga

SEQ ID NO: 1813912 - DNA, 15 bp, Homo sapiens
gggcaggtagcagat

SEQ ID NO: 1813913 - DNA, 15 bp, Homo sapiens
ggcaggtagcagatg

SEQ ID NO: 1813914 - DNA, 15 bp, Homo sapiens
gcaggtagcagatgc

SEQ ID NO: 1813915 - DNA, 15 bp, Homo sapiens
caggtagcagatgca

SEQ ID NO: 1813916 - DNA, 15 bp, Homo sapiens
aggtagcagatgcag

SEQ ID NO: 1813917 - DNA, 15 bp, Homo sapiens
ggtagcagatgcagg

SEQ ID NO: 1813918 - DNA, 15 bp, Homo sapiens
gtagcagatgcagga

SEQ ID NO: 1813919 - DNA, 15 bp, Homo sapiens
tagcagatgcaggag

SEQ ID NO: 1813920 - DNA, 15 bp, Homo sapiens
agcagatgcaggaga

SEQ ID NO: 1813921 - DNA, 15 bp, Homo sapiens
gcagatgcaggagag

SEQ ID NO: 1813922 - DNA, 15 bp, Homo sapiens
cagatgcaggagaga

SEQ ID NO: 1813923 - DNA, 15 bp, Homo sapiens
agatgcaggagagag

SEQ ID NO: 1813924 - DNA, 15 bp, Homo sapiens
gatgcaggagagaga

SEQ ID NO: 1813925 - DNA, 15 bp, Homo sapiens
atgcaggagagagag

SEQ ID NO: 1813926 - DNA, 15 bp, Homo sapiens
tgcaggagagagagt

SEQ ID NO: 1813927 - DNA, 15 bp, Homo sapiens
gcaggagagagagtt

SEQ ID NO: 1813928 - DNA, 15 bp, Homo sapiens
caggagagagagttc

SEQ ID NO: 1813929 - DNA, 15 bp, Homo sapiens
aggagagagagttcc

SEQ ID NO: 1813930 - DNA, 15 bp, Homo sapiens
ggagagagagttcca

SEQ ID NO: 1813931 - DNA, 15 bp, Homo sapiens
gagagagagttccac

SEQ ID NO: 1813932 - DNA, 15 bp, Homo sapiens
agagagagttccaca

SEQ ID NO: 1813933 - DNA, 15 bp, Homo sapiens
gagagagttccacaa

SEQ ID NO: 1813934 - DNA, 15 bp, Homo sapiens
agagagttccacaag

SEQ ID NO: 1813935 - DNA, 15 bp, Homo sapiens
gagagttccacaaga

SEQ ID NO: 1813936 - DNA, 15 bp, Homo sapiens
agagttccacaagac

SEQ ID NO: 1813937 - DNA, 15 bp, Homo sapiens
gagttccacaagaca

SEQ ID NO: 1813938 - DNA, 15 bp, Homo sapiens
agttccacaagacag

SEQ ID NO: 1813939 - DNA, 15 bp, Homo sapiens
gttccacaagacaga

SEQ ID NO: 1813940 - DNA, 15 bp, Homo sapiens
ttccacaagacagaa

SEQ ID NO: 1813941 - DNA, 15 bp, Homo sapiens
tccacaagacagaag

SEQ ID NO: 1813942 - DNA, 15 bp, Homo sapiens
ccacaagacagaagg

SEQ ID NO: 1813943 - DNA, 15 bp, Homo sapiens
cacaagacagaaggt

SEQ ID NO: 1813944 - DNA, 15 bp, Homo sapiens
acaagacagaaggtc

SEQ ID NO: 1813945 - DNA, 15 bp, Homo sapiens
caagacagaaggtca

SEQ ID NO: 1813946 - DNA, 15 bp, Homo sapiens
aagacagaaggtcaa

SEQ ID NO: 1813947 - DNA, 15 bp, Homo sapiens
agacagaaggtcaac

SEQ ID NO: 1813948 - DNA, 15 bp, Homo sapiens
gacagaaggtcaaca

SEQ ID NO: 1813949 - DNA, 15 bp, Homo sapiens
cagaaggtcaacagc

SEQ ID NO: 1813950 - DNA, 15 bp, Homo sapiens
agaaggtcaacagca

SEQ ID NO: 1813951 - DNA, 15 bp, Homo sapiens
gaaggtcaacagcac

SEQ ID NO: 1813952 - DNA, 15 bp, Homo sapiens
aaggtcaacagcaca

SEQ ID NO: 1813953 - DNA, 15 bp, Homo sapiens
aggtcaacagcacaa

SEQ ID NO: 1813954 - DNA, 15 bp, Homo sapiens
ggtcaacagcacaag

SEQ ID NO: 1813955 - DNA, 15 bp, Homo sapiens
gtcaacagcacaagt

SEQ ID NO: 1813956 - DNA, 15 bp, Homo sapiens
tcaacagcacaagtt

SEQ ID NO: 1813957 - DNA, 15 bp, Homo sapiens
caacagcacaagttg

SEQ ID NO: 1813958 - DNA, 15 bp, Homo sapiens
aacagcacaagttgc

SEQ ID NO: 1813959 - DNA, 15 bp, Homo sapiens
acagcacaagttgca

SEQ ID NO: 1813960 - DNA, 15 bp, Homo sapiens
cagcacaagttgcaa

SEQ ID NO: 1813961 - DNA, 15 bp, Homo sapiens
agcacaagttgcaag

SEQ ID NO: 1813962 - DNA, 15 bp, Homo sapiens
gcacaagttgcaaga

SEQ ID NO: 1813963 - DNA, 15 bp, Homo sapiens
cacaagttgcaagag

SEQ ID NO: 1813964 - DNA, 15 bp, Homo sapiens
acaagttgcaagagg

SEQ ID NO: 1813965 - DNA, 15 bp, Homo sapiens
caagttgcaagaggc

SEQ ID NO: 1813966 - DNA, 15 bp, Homo sapiens
aagttgcaagaggcc

SEQ ID NO: 1813967 - DNA, 15 bp, Homo sapiens
agttgcaagaggccc

SEQ ID NO: 1813968 - DNA, 15 bp, Homo sapiens
gttgcaagaggcccg

SEQ ID NO: 1813969 - DNA, 15 bp, Homo sapiens
ttgcaagaggcccgc

SEQ ID NO: 1813970 - DNA, 15 bp, Homo sapiens
tgcaagaggcccgcc

SEQ ID NO: 1813971 - DNA, 15 bp, Homo sapiens
gcaagaggcccgcct

SEQ ID NO: 1813972 - DNA, 15 bp, Homo sapiens
caagaggcccgccta

SEQ ID NO: 1813973 - DNA, 15 bp, Homo sapiens
aagaggcccgcctac

SEQ ID NO: 1813974 - DNA, 15 bp, Homo sapiens
agaggcccgcctacg

SEQ ID NO: 1813975 - DNA, 15 bp, Homo sapiens
gaggcccgcctacgt

SEQ ID NO: 1813976 - DNA, 15 bp, Homo sapiens
aggcccgcctacgtc

SEQ ID NO: 1813977 - DNA, 15 bp, Homo sapiens
ggcccgcctacgtcc

SEQ ID NO: 1813978 - DNA, 15 bp, Homo sapiens
gcccgcctacgtccc

SEQ ID NO: 1813979 - DNA, 15 bp, Homo sapiens
cccgcctacgtcccc

SEQ ID NO: 1813980 - DNA, 15 bp, Homo sapiens
ccgcctacgtcccca

SEQ ID NO: 1813981 - DNA, 15 bp, Homo sapiens
cgcctacgtccccaa

SEQ ID NO: 1813982 - DNA, 15 bp, Homo sapiens
gcctacgtccccaag

SEQ ID NO: 1813983 - DNA, 15 bp, Homo sapiens
cctacgtccccaagg

SEQ ID NO: 1813984 - DNA, 15 bp, Homo sapiens
ctacgtccccaaggc

SEQ ID NO: 1813985 - DNA, 15 bp, Homo sapiens
tacgtccccaaggca

SEQ ID NO: 1813986 - DNA, 15 bp, Homo sapiens
acgtccccaaggcaa

SEQ ID NO: 1813987 - DNA, 15 bp, Homo sapiens
cgtccccaaggcaag

SEQ ID NO: 1813988 - DNA, 15 bp, Homo sapiens
gtccccaaggcaagg

SEQ ID NO: 1813989 - DNA, 15 bp, Homo sapiens
tccccaaggcaaggt

SEQ ID NO: 1813990 - DNA, 15 bp, Homo sapiens
ccccaaggcaaggtc

SEQ ID NO: 1813991 - DNA, 15 bp, Homo sapiens
cccaaggcaaggtct

SEQ ID NO: 1813992 - DNA, 15 bp, Homo sapiens
ccaaggcaaggtctc

SEQ ID NO: 1813993 - DNA, 15 bp, Homo sapiens
caaggcaaggtctcc

SEQ ID NO: 1813994 - DNA, 15 bp, Homo sapiens
aaggcaaggtctccc

SEQ ID NO: 1813995 - DNA, 15 bp, Homo sapiens
aggcaaggtctcccc

SEQ ID NO: 1813996 - DNA, 15 bp, Homo sapiens
ggcaaggtctcccct

SEQ ID NO: 1813997 - DNA, 15 bp, Homo sapiens
gcaaggtctcccctg

SEQ ID NO: 1813998 - DNA, 15 bp, Homo sapiens
caaggtctcccctga

SEQ ID NO: 1813999 - DNA, 15 bp, Homo sapiens
aaggtctcccctgat

SEQ ID NO: 1814000 - DNA, 15 bp, Homo sapiens
aggtctcccctgatg

SEQ ID NO: 1814001 - DNA, 15 bp, Homo sapiens
ggtctcccctgatgt

SEQ ID NO: 1814002 - DNA, 15 bp, Homo sapiens
gtctcccctgatgtg

SEQ ID NO: 1814003 - DNA, 15 bp, Homo sapiens
tctcccctgatgtga

SEQ ID NO: 1814004 - DNA, 15 bp, Homo sapiens
ctcccctgatgtgaa

SEQ ID NO: 1814005 - DNA, 15 bp, Homo sapiens
tcccctgatgtgaac

SEQ ID NO: 1814006 - DNA, 15 bp, Homo sapiens
cccctgatgtgaaca

SEQ ID NO: 1814007 - DNA, 15 bp, Homo sapiens
ccctgatgtgaacag

SEQ ID NO: 1814008 - DNA, 15 bp, Homo sapiens
cctgatgtgaacagt

SEQ ID NO: 1814009 - DNA, 15 bp, Homo sapiens
ctgatgtgaacagtg

SEQ ID NO: 1814010 - DNA, 15 bp, Homo sapiens
tgatgtgaacagtgt

SEQ ID NO: 1814011 - DNA, 15 bp, Homo sapiens
gatgtgaacagtgtg

SEQ ID NO: 1814012 - DNA, 15 bp, Homo sapiens
atgtgaacagtgtga

SEQ ID NO: 1814013 - DNA, 15 bp, Homo sapiens
tgtgaacagtgtgac

SEQ ID NO: 1814014 - DNA, 15 bp, Homo sapiens
gtgaacagtgtgacc

SEQ ID NO: 1814015 - DNA, 15 bp, Homo sapiens
tgaacagtgtgaccc

SEQ ID NO: 1814016 - DNA, 15 bp, Homo sapiens
gaacagtgtgaccca

SEQ ID NO: 1814017 - DNA, 15 bp, Homo sapiens
aacagtgtgacccaa

SEQ ID NO: 1814018 - DNA, 15 bp, Homo sapiens
acagtgtgacccaag

SEQ ID NO: 1814019 - DNA, 15 bp, Homo sapiens
cagtgtgacccaagt

SEQ ID NO: 1814020 - DNA, 15 bp, Homo sapiens
agtgtgacccaagtt

SEQ ID NO: 1814021 - DNA, 15 bp, Homo sapiens
gtgtgacccaagttg

SEQ ID NO: 1814022 - DNA, 15 bp, Homo sapiens
tgtgacccaagttgg

SEQ ID NO: 1814023 - DNA, 15 bp, Homo sapiens
gtgacccaagttggc

SEQ ID NO: 1814024 - DNA, 15 bp, Homo sapiens
tgacccaagttggca

SEQ ID NO: 1814025 - DNA, 15 bp, Homo sapiens
gacccaagttggcac

SEQ ID NO: 1814026 - DNA, 15 bp, Homo sapiens
acccaagttggcact

SEQ ID NO: 1814027 - DNA, 15 bp, Homo sapiens
cccaagttggcactg

SEQ ID NO: 1814028 - DNA, 15 bp, Homo sapiens
ccaagttggcactga

SEQ ID NO: 1814029 - DNA, 15 bp, Homo sapiens
caagttggcactgaa

SEQ ID NO: 1814030 - DNA, 15 bp, Homo sapiens
aagttggcactgaaa

SEQ ID NO: 1814031 - DNA, 15 bp, Homo sapiens
agttggcactgaaac

SEQ ID NO: 1814032 - DNA, 15 bp, Homo sapiens
gttggcactgaaact

SEQ ID NO: 1814033 - DNA, 15 bp, Homo sapiens
ttggcactgaaactg

SEQ ID NO: 1814034 - DNA, 15 bp, Homo sapiens
tggcactgaaactgg

SEQ ID NO: 1814035 - DNA, 15 bp, Homo sapiens
ggcactgaaactgga

SEQ ID NO: 1814036 - DNA, 15 bp, Homo sapiens
gcactgaaactggaa

SEQ ID NO: 1814037 - DNA, 15 bp, Homo sapiens
cactgaaactggaac

SEQ ID NO: 1814038 - DNA, 15 bp, Homo sapiens
actgaaactggaaca

SEQ ID NO: 1814039 - DNA, 15 bp, Homo sapiens
ctgaaactggaacag

SEQ ID NO: 1814040 - DNA, 15 bp, Homo sapiens
tgaaactggaacagt

SEQ ID NO: 1814041 - DNA, 15 bp, Homo sapiens
gaaactggaacagta

SEQ ID NO: 1814042 - DNA, 15 bp, Homo sapiens
aaactggaacagtag

SEQ ID NO: 1814043 - DNA, 15 bp, Homo sapiens
aactggaacagtagg

SEQ ID NO: 1814044 - DNA, 15 bp, Homo sapiens
actggaacagtaggg

SEQ ID NO: 1814045 - DNA, 15 bp, Homo sapiens
ctggaacagtaggga

SEQ ID NO: 1814046 - DNA, 15 bp, Homo sapiens
tggaacagtagggag

SEQ ID NO: 1814047 - DNA, 15 bp, Homo sapiens
ggaacagtagggagt

SEQ ID NO: 1814048 - DNA, 15 bp, Homo sapiens
gaacagtagggagtc

SEQ ID NO: 1814049 - DNA, 15 bp, Homo sapiens
aacagtagggagtca

SEQ ID NO: 1814050 - DNA, 15 bp, Homo sapiens
acagtagggagtcac

SEQ ID NO: 1814051 - DNA, 15 bp, Homo sapiens
cagtagggagtcacc

SEQ ID NO: 1814052 - DNA, 15 bp, Homo sapiens
agtagggagtcacca

SEQ ID NO: 1814053 - DNA, 15 bp, Homo sapiens
gtagggagtcaccaa

SEQ ID NO: 1814054 - DNA, 15 bp, Homo sapiens
tagggagtcaccaaa

SEQ ID NO: 1814055 - DNA, 15 bp, Homo sapiens
agggagtcaccaaat

SEQ ID NO: 1814056 - DNA, 15 bp, Homo sapiens
gggagtcaccaaatt

SEQ ID NO: 1814057 - DNA, 15 bp, Homo sapiens
ggagtcaccaaattc

SEQ ID NO: 1814058 - DNA, 15 bp, Homo sapiens
gagtcaccaaattca

SEQ ID NO: 1814059 - DNA, 15 bp, Homo sapiens
agtcaccaaattcaa

SEQ ID NO: 1814060 - DNA, 15 bp, Homo sapiens
gtcaccaaattcaaa

SEQ ID NO: 1814061 - DNA, 15 bp, Homo sapiens
tcaccaaattcaaat

SEQ ID NO: 1814062 - DNA, 15 bp, Homo sapiens
caccaaattcaaatg

SEQ ID NO: 1814063 - DNA, 15 bp, Homo sapiens
accaaattcaaatga

SEQ ID NO: 1814064 - DNA, 15 bp, Homo sapiens
ccaaattcaaatgaa

SEQ ID NO: 1814065 - DNA, 15 bp, Homo sapiens
caaattcaaatgaac

SEQ ID NO: 1814066 - DNA, 15 bp, Homo sapiens
aaattcaaatgaaca

SEQ ID NO: 1814067 - DNA, 15 bp, Homo sapiens
aattcaaatgaacaa

SEQ ID NO: 1814068 - DNA, 15 bp, Homo sapiens
attcaaatgaacaag

SEQ ID NO: 1814069 - DNA, 15 bp, Homo sapiens
ttcaaatgaacaagg

SEQ ID NO: 1814070 - DNA, 15 bp, Homo sapiens
tcaaatgaacaagga

SEQ ID NO: 1814071 - DNA, 15 bp, Homo sapiens
caaatgaacaaggaa

SEQ ID NO: 1814072 - DNA, 15 bp, Homo sapiens
aaatgaacaaggaat

SEQ ID NO: 1814073 - DNA, 15 bp, Homo sapiens
aatgaacaaggaata

SEQ ID NO: 1814074 - DNA, 15 bp, Homo sapiens
atgaacaaggaatac

SEQ ID NO: 1814075 - DNA, 15 bp, Homo sapiens
tgaacaaggaatacc

SEQ ID NO: 1814076 - DNA, 15 bp, Homo sapiens
gaacaaggaataccc

SEQ ID NO: 1814077 - DNA, 15 bp, Homo sapiens
aacaaggaatacccc

SEQ ID NO: 1814078 - DNA, 15 bp, Homo sapiens
acaaggaatacccca

SEQ ID NO: 1814079 - DNA, 15 bp, Homo sapiens
caaggaataccccaa

SEQ ID NO: 1814080 - DNA, 15 bp, Homo sapiens
aaggaataccccaaa

SEQ ID NO: 1814081 - DNA, 15 bp, Homo sapiens
aggaataccccaaaa

SEQ ID NO: 1814082 - DNA, 15 bp, Homo sapiens
ggaataccccaaaat

SEQ ID NO: 1814083 - DNA, 15 bp, Homo sapiens
gaataccccaaaatg

SEQ ID NO: 1814084 - DNA, 15 bp, Homo sapiens
aataccccaaaatgg

SEQ ID NO: 1814085 - DNA, 15 bp, Homo sapiens
ataccccaaaatggg

SEQ ID NO: 1814086 - DNA, 15 bp, Homo sapiens
taccccaaaatgggg

SEQ ID NO: 1814087 - DNA, 15 bp, Homo sapiens
accccaaaatgggga

SEQ ID NO: 1814088 - DNA, 15 bp, Homo sapiens
ccccaaaatggggag

SEQ ID NO: 1814089 - DNA, 15 bp, Homo sapiens
cccaaaatggggaga

SEQ ID NO: 1814090 - DNA, 15 bp, Homo sapiens
ccaaaatggggagag

SEQ ID NO: 1814091 - DNA, 15 bp, Homo sapiens
caaaatggggagagt

SEQ ID NO: 1814092 - DNA, 15 bp, Homo sapiens
aaaatggggagagtt

SEQ ID NO: 1814093 - DNA, 15 bp, Homo sapiens
aaatggggagagttc

SEQ ID NO: 1814094 - DNA, 15 bp, Homo sapiens
aatggggagagttct

SEQ ID NO: 1814095 - DNA, 15 bp, Homo sapiens
atggggagagttctc

SEQ ID NO: 1814096 - DNA, 15 bp, Homo sapiens
tggggagagttctca

SEQ ID NO: 1814097 - DNA, 15 bp, Homo sapiens
ggggagagttctcaa

SEQ ID NO: 1814098 - DNA, 15 bp, Homo sapiens
gggagagttctcaaa

SEQ ID NO: 1814099 - DNA, 15 bp, Homo sapiens
ggagagttctcaaaa

SEQ ID NO: 1814100 - DNA, 15 bp, Homo sapiens
gagagttctcaaaac

SEQ ID NO: 1814101 - DNA, 15 bp, Homo sapiens
agagttctcaaaaca

SEQ ID NO: 1814102 - DNA, 15 bp, Homo sapiens
gagttctcaaaacat

SEQ ID NO: 1814103 - DNA, 15 bp, Homo sapiens
agttctcaaaacatt

SEQ ID NO: 1814104 - DNA, 15 bp, Homo sapiens
gttctcaaaacattt

SEQ ID NO: 1814105 - DNA, 15 bp, Homo sapiens
ttctcaaaacatttt

SEQ ID NO: 1814106 - DNA, 15 bp, Homo sapiens
tctcaaaacattttc

SEQ ID NO: 1814107 - DNA, 15 bp, Homo sapiens
ctcaaaacattttca

SEQ ID NO: 1814108 - DNA, 15 bp, Homo sapiens
tcaaaacattttcaa

SEQ ID NO: 1814109 - DNA, 15 bp, Homo sapiens
caaaacattttcaac

SEQ ID NO: 1814110 - DNA, 15 bp, Homo sapiens
aaaacattttcaaca

SEQ ID NO: 1814111 - DNA, 15 bp, Homo sapiens
aaacattttcaacat

SEQ ID NO: 1814112 - DNA, 15 bp, Homo sapiens
aacattttcaacatt

SEQ ID NO: 1814113 - DNA, 15 bp, Homo sapiens
acattttcaacattt

SEQ ID NO: 1814114 - DNA, 15 bp, Homo sapiens
cattttcaacatttc

SEQ ID NO: 1814115 - DNA, 15 bp, Homo sapiens
attttcaacatttcg

SEQ ID NO: 1814116 - DNA, 15 bp, Homo sapiens
ttttcaacatttcgg

SEQ ID NO: 1814117 - DNA, 15 bp, Homo sapiens
tttcaacatttcggt

SEQ ID NO: 1814118 - DNA, 15 bp, Homo sapiens
ttcaacatttcggta

SEQ ID NO: 1814119 - DNA, 15 bp, Homo sapiens
tcaacatttcggtaa

SEQ ID NO: 1814120 - DNA, 15 bp, Homo sapiens
caacatttcggtaat

SEQ ID NO: 1814121 - DNA, 15 bp, Homo sapiens
aacatttcggtaatt

SEQ ID NO: 1814122 - DNA, 15 bp, Homo sapiens
acatttcggtaatta

SEQ ID NO: 1814123 - DNA, 15 bp, Homo sapiens
catttcggtaattaa

SEQ ID NO: 1814124 - DNA, 15 bp, Homo sapiens
atttcggtaattaat

SEQ ID NO: 1814125 - DNA, 15 bp, Homo sapiens
tttcggtaattaatt

SEQ ID NO: 1814126 - DNA, 15 bp, Homo sapiens
ttcggtaattaatta

SEQ ID NO: 1814127 - DNA, 15 bp, Homo sapiens
tcggtaattaattac

SEQ ID NO: 1814128 - DNA, 15 bp, Homo sapiens
cggtaattaattacc

SEQ ID NO: 1814129 - DNA, 15 bp, Homo sapiens
ggtaattaattacct

SEQ ID NO: 1814130 - DNA, 15 bp, Homo sapiens
gtaattaattacctc

SEQ ID NO: 1814131 - DNA, 15 bp, Homo sapiens
taattaattacctca

SEQ ID NO: 1814132 - DNA, 15 bp, Homo sapiens
aattaattacctcat

SEQ ID NO: 1814133 - DNA, 15 bp, Homo sapiens
attaattacctcatc

SEQ ID NO: 1814134 - DNA, 15 bp, Homo sapiens
ttaattacctcatct

SEQ ID NO: 1814135 - DNA, 15 bp, Homo sapiens
taattacctcatctc

SEQ ID NO: 1814136 - DNA, 15 bp, Homo sapiens
aattacctcatctcc

SEQ ID NO: 1814137 - DNA, 15 bp, Homo sapiens
attacctcatctcca

SEQ ID NO: 1814138 - DNA, 15 bp, Homo sapiens
ttacctcatctccag

SEQ ID NO: 1814139 - DNA, 15 bp, Homo sapiens
tacctcatctccagt

SEQ ID NO: 1814140 - DNA, 15 bp, Homo sapiens
acctcatctccagtt

SEQ ID NO: 1814141 - DNA, 15 bp, Homo sapiens
cctcatctccagtta

SEQ ID NO: 1814142 - DNA, 15 bp, Homo sapiens
ctcatctccagttag

SEQ ID NO: 1814143 - DNA, 15 bp, Homo sapiens
tcatctccagttagg

SEQ ID NO: 1814144 - DNA, 15 bp, Homo sapiens
catctccagttaggt

SEQ ID NO: 1814145 - DNA, 15 bp, Homo sapiens
atctccagttaggtc

SEQ ID NO: 1814146 - DNA, 15 bp, Homo sapiens
tctccagttaggtca

SEQ ID NO: 1814147 - DNA, 15 bp, Homo sapiens
ctccagttaggtcaa

SEQ ID NO: 1814148 - DNA, 15 bp, Homo sapiens
tccagttaggtcaat

SEQ ID NO: 1814149 - DNA, 15 bp, Homo sapiens
ccagttaggtcaata

SEQ ID NO: 1814150 - DNA, 15 bp, Homo sapiens
cagttaggtcaatat

SEQ ID NO: 1814151 - DNA, 15 bp, Homo sapiens
agttaggtcaatatt

SEQ ID NO: 1814152 - DNA, 15 bp, Homo sapiens
gttaggtcaatattc

SEQ ID NO: 1814153 - DNA, 15 bp, Homo sapiens
ttaggtcaatattcc

SEQ ID NO: 1814154 - DNA, 15 bp, Homo sapiens
taggtcaatattcca

SEQ ID NO: 1814155 - DNA, 15 bp, Homo sapiens
aggtcaatattccat

SEQ ID NO: 1814156 - DNA, 15 bp, Homo sapiens
ggtcaatattccata

SEQ ID NO: 1814157 - DNA, 15 bp, Homo sapiens
gtcaatattccatat

SEQ ID NO: 1814158 - DNA, 15 bp, Homo sapiens
tcaatattccatatt

SEQ ID NO: 1814159 - DNA, 15 bp, Homo sapiens
caatattccatatta

SEQ ID NO: 1814160 - DNA, 15 bp, Homo sapiens
aatattccatattat

SEQ ID NO: 1814161 - DNA, 15 bp, Homo sapiens
atattccatattatt

SEQ ID NO: 1814162 - DNA, 15 bp, Homo sapiens
tattccatattatta

SEQ ID NO: 1814163 - DNA, 15 bp, Homo sapiens
attccatattattaa

SEQ ID NO: 1814164 - DNA, 15 bp, Homo sapiens
ttccatattattaag

SEQ ID NO: 1814165 - DNA, 15 bp, Homo sapiens
tccatattattaaga

SEQ ID NO: 1814166 - DNA, 15 bp, Homo sapiens
ccatattattaagac

SEQ ID NO: 1814167 - DNA, 15 bp, Homo sapiens
catattattaagaca

SEQ ID NO: 1814168 - DNA, 15 bp, Homo sapiens
atattattaagacac

SEQ ID NO: 1814169 - DNA, 15 bp, Homo sapiens
tattattaagacacc

SEQ ID NO: 1814170 - DNA, 15 bp, Homo sapiens
attattaagacacct

SEQ ID NO: 1814171 - DNA, 15 bp, Homo sapiens
ttattaagacacctt

SEQ ID NO: 1814172 - DNA, 15 bp, Homo sapiens
tattaagacaccttt

SEQ ID NO: 1814173 - DNA, 15 bp, Homo sapiens
attaagacacctttt

SEQ ID NO: 1814174 - DNA, 15 bp, Homo sapiens
ttaagacacctttta

SEQ ID NO: 1814175 - DNA, 15 bp, Homo sapiens
taagacaccttttat

SEQ ID NO: 1814176 - DNA, 15 bp, Homo sapiens
aagacaccttttata

SEQ ID NO: 1814177 - DNA, 15 bp, Homo sapiens
agacaccttttataa

SEQ ID NO: 1814178 - DNA, 15 bp, Homo sapiens
gacaccttttataat

SEQ ID NO: 1814179 - DNA, 15 bp, Homo sapiens
acaccttttataatg

SEQ ID NO: 1814180 - DNA, 15 bp, Homo sapiens
caccttttataatgg

SEQ ID NO: 1814181 - DNA, 15 bp, Homo sapiens
accttttataatggc

SEQ ID NO: 1814182 - DNA, 15 bp, Homo sapiens
ccttttataatggca

SEQ ID NO: 1814183 - DNA, 15 bp, Homo sapiens
cttttataatggcaa

SEQ ID NO: 1814184 - DNA, 15 bp, Homo sapiens
ttttataatggcaaa

SEQ ID NO: 1814185 - DNA, 15 bp, Homo sapiens
tttataatggcaaac

SEQ ID NO: 1814186 - DNA, 15 bp, Homo sapiens
ttataatggcaaact

SEQ ID NO: 1814187 - DNA, 15 bp, Homo sapiens
tataatggcaaactc

SEQ ID NO: 1814188 - DNA, 15 bp, Homo sapiens
ataatggcaaactct

SEQ ID NO: 1814189 - DNA, 15 bp, Homo sapiens
taatggcaaactctc

SEQ ID NO: 1814190 - DNA, 15 bp, Homo sapiens
aatggcaaactctcc

SEQ ID NO: 1814191 - DNA, 15 bp, Homo sapiens
atggcaaactctcct

SEQ ID NO: 1814192 - DNA, 15 bp, Homo sapiens
tggcaaactctcctg

SEQ ID NO: 1814193 - DNA, 15 bp, Homo sapiens
ggcaaactctcctga

SEQ ID NO: 1814194 - DNA, 15 bp, Homo sapiens
gcaaactctcctgac

SEQ ID NO: 1814195 - DNA, 15 bp, Homo sapiens
caaactctcctgact

SEQ ID NO: 1814196 - DNA, 15 bp, Homo sapiens
aaactctcctgacta

SEQ ID NO: 1814197 - DNA, 15 bp, Homo sapiens
aactctcctgactac

SEQ ID NO: 1814198 - DNA, 15 bp, Homo sapiens
actctcctgactacc

SEQ ID NO: 1814199 - DNA, 15 bp, Homo sapiens
ctctcctgactacct

SEQ ID NO: 1814200 - DNA, 15 bp, Homo sapiens
tctcctgactaccta

SEQ ID NO: 1814201 - DNA, 15 bp, Homo sapiens
ctcctgactacctat

SEQ ID NO: 1814202 - DNA, 15 bp, Homo sapiens
tcctgactacctatc

SEQ ID NO: 1814203 - DNA, 15 bp, Homo sapiens
cctgactacctatct

SEQ ID NO: 1814204 - DNA, 15 bp, Homo sapiens
ctgactacctatctt

SEQ ID NO: 1814205 - DNA, 15 bp, Homo sapiens
tgactacctatctta

SEQ ID NO: 1814206 - DNA, 15 bp, Homo sapiens
gactacctatcttag

SEQ ID NO: 1814207 - DNA, 15 bp, Homo sapiens
actacctatcttaga

SEQ ID NO: 1814208 - DNA, 15 bp, Homo sapiens
ctacctatcttagaa

SEQ ID NO: 1814209 - DNA, 15 bp, Homo sapiens
tacctatcttagaat

SEQ ID NO: 1814210 - DNA, 15 bp, Homo sapiens
acctatcttagaatt

SEQ ID NO: 1814211 - DNA, 15 bp, Homo sapiens
cctatcttagaattt

SEQ ID NO: 1814212 - DNA, 15 bp, Homo sapiens
ctatcttagaatttt

SEQ ID NO: 1814213 - DNA, 15 bp, Homo sapiens
tatcttagaattttt

SEQ ID NO: 1814214 - DNA, 15 bp, Homo sapiens
atcttagaatttttt

SEQ ID NO: 1814215 - DNA, 15 bp, Homo sapiens
tcttagaattttttt

SEQ ID NO: 1814216 - DNA, 15 bp, Homo sapiens
cttagaatttttttg

SEQ ID NO: 1814217 - DNA, 15 bp, Homo sapiens
ttagaatttttttga

SEQ ID NO: 1814218 - DNA, 15 bp, Homo sapiens
tagaatttttttgaa

SEQ ID NO: 1814219 - DNA, 15 bp, Homo sapiens
agaatttttttgaag

SEQ ID NO: 1814220 - DNA, 15 bp, Homo sapiens
gaatttttttgaagt

SEQ ID NO: 1814221 - DNA, 15 bp, Homo sapiens
aatttttttgaagtc

SEQ ID NO: 1814222 - DNA, 15 bp, Homo sapiens
atttttttgaagtca

SEQ ID NO: 1814223 - DNA, 15 bp, Homo sapiens
tttttttgaagtcac

SEQ ID NO: 1814224 - DNA, 15 bp, Homo sapiens
ttttttgaagtcact

SEQ ID NO: 1814225 - DNA, 15 bp, Homo sapiens
tttttgaagtcacta

SEQ ID NO: 1814226 - DNA, 15 bp, Homo sapiens
ttttgaagtcactac

SEQ ID NO: 1814227 - DNA, 15 bp, Homo sapiens
tttgaagtcactact

SEQ ID NO: 1814228 - DNA, 15 bp, Homo sapiens
ttgaagtcactactt

SEQ ID NO: 1814229 - DNA, 15 bp, Homo sapiens
tgaagtcactactta

SEQ ID NO: 1814230 - DNA, 15 bp, Homo sapiens
gaagtcactacttac

SEQ ID NO: 1814231 - DNA, 15 bp, Homo sapiens
aagtcactacttaca

SEQ ID NO: 1814232 - DNA, 15 bp, Homo sapiens
agtcactacttacag

SEQ ID NO: 1814233 - DNA, 15 bp, Homo sapiens
gtcactacttacagt

SEQ ID NO: 1814234 - DNA, 15 bp, Homo sapiens
tcactacttacagtg

SEQ ID NO: 1814235 - DNA, 15 bp, Homo sapiens
cactacttacagtgt

SEQ ID NO: 1814236 - DNA, 15 bp, Homo sapiens
actacttacagtgta

SEQ ID NO: 1814237 - DNA, 15 bp, Homo sapiens
ctacttacagtgtag

SEQ ID NO: 1814238 - DNA, 15 bp, Homo sapiens
tacttacagtgtaga

SEQ ID NO: 1814239 - DNA, 15 bp, Homo sapiens
acttacagtgtagat

SEQ ID NO: 1814240 - DNA, 15 bp, Homo sapiens
cttacagtgtagata

SEQ ID NO: 1814241 - DNA, 15 bp, Homo sapiens
ttacagtgtagatat

SEQ ID NO: 1814242 - DNA, 15 bp, Homo sapiens
tacagtgtagatatt

SEQ ID NO: 1814243 - DNA, 15 bp, Homo sapiens
acagtgtagatatta

SEQ ID NO: 1814244 - DNA, 15 bp, Homo sapiens
cagtgtagatattaa

SEQ ID NO: 1814245 - DNA, 15 bp, Homo sapiens
agtgtagatattaac

SEQ ID NO: 1814246 - DNA, 15 bp, Homo sapiens
gtgtagatattaaca

SEQ ID NO: 1814247 - DNA, 15 bp, Homo sapiens
tgtagatattaacag

SEQ ID NO: 1814248 - DNA, 15 bp, Homo sapiens
gtagatattaacagg

SEQ ID NO: 1814249 - DNA, 15 bp, Homo sapiens
tagatattaacaggc

SEQ ID NO: 1814250 - DNA, 15 bp, Homo sapiens
agatattaacaggca

SEQ ID NO: 1814251 - DNA, 15 bp, Homo sapiens
gatattaacaggcat

SEQ ID NO: 1814252 - DNA, 15 bp, Homo sapiens
atattaacaggcatg

SEQ ID NO: 1814253 - DNA, 15 bp, Homo sapiens
tattaacaggcatga

SEQ ID NO: 1814254 - DNA, 15 bp, Homo sapiens
attaacaggcatgag

SEQ ID NO: 1814255 - DNA, 15 bp, Homo sapiens
ttaacaggcatgaga

SEQ ID NO: 1814256 - DNA, 15 bp, Homo sapiens
taacaggcatgagat

SEQ ID NO: 1814257 - DNA, 15 bp, Homo sapiens
aacaggcatgagatt

SEQ ID NO: 1814258 - DNA, 15 bp, Homo sapiens
acaggcatgagattc

SEQ ID NO: 1814259 - DNA, 15 bp, Homo sapiens
caggcatgagattca

SEQ ID NO: 1814260 - DNA, 15 bp, Homo sapiens
aggcatgagattcaa

SEQ ID NO: 1814261 - DNA, 15 bp, Homo sapiens
ggcatgagattcaat

SEQ ID NO: 1814262 - DNA, 15 bp, Homo sapiens
gcatgagattcaata

SEQ ID NO: 1814263 - DNA, 15 bp, Homo sapiens
catgagattcaatat

SEQ ID NO: 1814264 - DNA, 15 bp, Homo sapiens
atgagattcaatata

SEQ ID NO: 1814265 - DNA, 15 bp, Homo sapiens
tgagattcaatatag

SEQ ID NO: 1814266 - DNA, 15 bp, Homo sapiens
gagattcaatatagg

SEQ ID NO: 1814267 - DNA, 15 bp, Homo sapiens
agattcaatataggg

SEQ ID NO: 1814268 - DNA, 15 bp, Homo sapiens
gattcaatataggga

SEQ ID NO: 1814269 - DNA, 15 bp, Homo sapiens
attcaatatagggat

SEQ ID NO: 1814270 - DNA, 15 bp, Homo sapiens
ttcaatatagggatc

SEQ ID NO: 1814271 - DNA, 15 bp, Homo sapiens
tcaatatagggatca

SEQ ID NO: 1814272 - DNA, 15 bp, Homo sapiens
caatatagggatcac

SEQ ID NO: 1814273 - DNA, 15 bp, Homo sapiens
aatatagggatcact

SEQ ID NO: 1814274 - DNA, 15 bp, Homo sapiens
atatagggatcactt

SEQ ID NO: 1814275 - DNA, 15 bp, Homo sapiens
tatagggatcacttt

SEQ ID NO: 1814276 - DNA, 15 bp, Homo sapiens
atagggatcactttt

SEQ ID NO: 1814277 - DNA, 15 bp, Homo sapiens
tagggatcactttta

SEQ ID NO: 1814278 - DNA, 15 bp, Homo sapiens
agggatcacttttat

SEQ ID NO: 1814279 - DNA, 15 bp, Homo sapiens
gggatcacttttatt

SEQ ID NO: 1814280 - DNA, 15 bp, Homo sapiens
ggatcacttttattt

SEQ ID NO: 1814281 - DNA, 15 bp, Homo sapiens
gatcacttttatttc

SEQ ID NO: 1814282 - DNA, 15 bp, Homo sapiens
atcacttttatttca

SEQ ID NO: 1814283 - DNA, 15 bp, Homo sapiens
tcacttttatttcaa

SEQ ID NO: 1814284 - DNA, 15 bp, Homo sapiens
cacttttatttcaaa

SEQ ID NO: 1814285 - DNA, 15 bp, Homo sapiens
acttttatttcaaac

SEQ ID NO: 1814286 - DNA, 15 bp, Homo sapiens
cttttatttcaaaca

SEQ ID NO: 1814287 - DNA, 15 bp, Homo sapiens
ttttatttcaaacaa

SEQ ID NO: 1814288 - DNA, 15 bp, Homo sapiens
tttatttcaaacaat

SEQ ID NO: 1814289 - DNA, 15 bp, Homo sapiens
atttcaaacaattaa

SEQ ID NO: 1814290 - DNA, 15 bp, Homo sapiens
tttcaaacaattaaa

SEQ ID NO: 1814291 - DNA, 15 bp, Homo sapiens
ttcaaacaattaaat

SEQ ID NO: 1814292 - DNA, 15 bp, Homo sapiens
tcaaacaattaaata

SEQ ID NO: 1814293 - DNA, 15 bp, Homo sapiens
caaacaattaaatac

SEQ ID NO: 1814294 - DNA, 15 bp, Homo sapiens
aaacaattaaataca

SEQ ID NO: 1814295 - DNA, 15 bp, Homo sapiens
aacaattaaatacaa

SEQ ID NO: 1814296 - DNA, 15 bp, Homo sapiens
acaattaaatacaaa

SEQ ID NO: 1814297 - DNA, 15 bp, Homo sapiens
caattaaatacaaac

SEQ ID NO: 1814298 - DNA, 15 bp, Homo sapiens
aattaaatacaaacc

SEQ ID NO: 1814299 - DNA, 15 bp, Homo sapiens
attaaatacaaacca

SEQ ID NO: 1814300 - DNA, 15 bp, Homo sapiens
ttaaatacaaaccaa

SEQ ID NO: 1814301 - DNA, 15 bp, Homo sapiens
taaatacaaaccaat

SEQ ID NO: 1814302 - DNA, 15 bp, Homo sapiens
aaatacaaaccaata

SEQ ID NO: 1814303 - DNA, 15 bp, Homo sapiens
aatacaaaccaatat

SEQ ID NO: 1814304 - DNA, 15 bp, Homo sapiens
atacaaaccaatatt

SEQ ID NO: 1814305 - DNA, 15 bp, Homo sapiens
tacaaaccaatattt

SEQ ID NO: 1814306 - DNA, 15 bp, Homo sapiens
acaaaccaatatttt

SEQ ID NO: 1814307 - DNA, 15 bp, Homo sapiens
caaaccaatatttta

SEQ ID NO: 1814308 - DNA, 15 bp, Homo sapiens
aaaccaatattttac

SEQ ID NO: 1814309 - DNA, 15 bp, Homo sapiens
aaccaatattttacc

SEQ ID NO: 1814310 - DNA, 15 bp, Homo sapiens
accaatattttaccc

SEQ ID NO: 1814311 - DNA, 15 bp, Homo sapiens
ccaatattttacccc

SEQ ID NO: 1814312 - DNA, 15 bp, Homo sapiens
caatattttacccct

SEQ ID NO: 1814313 - DNA, 15 bp, Homo sapiens
aatattttacccctt

SEQ ID NO: 1814314 - DNA, 15 bp, Homo sapiens
atattttaccccttc

SEQ ID NO: 1814315 - DNA, 15 bp, Homo sapiens
tattttaccccttca

SEQ ID NO: 1814316 - DNA, 15 bp, Homo sapiens
attttaccccttcat

SEQ ID NO: 1814317 - DNA, 15 bp, Homo sapiens
ttttaccccttcata

SEQ ID NO: 1814318 - DNA, 15 bp, Homo sapiens
tttaccccttcatag

SEQ ID NO: 1814319 - DNA, 15 bp, Homo sapiens
ttaccccttcataga

SEQ ID NO: 1814320 - DNA, 15 bp, Homo sapiens
taccccttcatagat

SEQ ID NO: 1814321 - DNA, 15 bp, Homo sapiens
accccttcatagatg

SEQ ID NO: 1814322 - DNA, 15 bp, Homo sapiens
ccccttcatagatga

SEQ ID NO: 1814323 - DNA, 15 bp, Homo sapiens
cccttcatagatgaa

SEQ ID NO: 1814324 - DNA, 15 bp, Homo sapiens
ccttcatagatgaaa

SEQ ID NO: 1814325 - DNA, 15 bp, Homo sapiens
cttcatagatgaaat

SEQ ID NO: 1814326 - DNA, 15 bp, Homo sapiens
ttcatagatgaaatc

SEQ ID NO: 1814327 - DNA, 15 bp, Homo sapiens
tcatagatgaaatca

SEQ ID NO: 1814328 - DNA, 15 bp, Homo sapiens
catagatgaaatcac

SEQ ID NO: 1814329 - DNA, 15 bp, Homo sapiens
atagatgaaatcaca

SEQ ID NO: 1814330 - DNA, 15 bp, Homo sapiens
tagatgaaatcacat

SEQ ID NO: 1814331 - DNA, 15 bp, Homo sapiens
agatgaaatcacatc

SEQ ID NO: 1814332 - DNA, 15 bp, Homo sapiens
gatgaaatcacatct

SEQ ID NO: 1814333 - DNA, 15 bp, Homo sapiens
atgaaatcacatctt

SEQ ID NO: 1814334 - DNA, 15 bp, Homo sapiens
tgaaatcacatcttt

SEQ ID NO: 1814335 - DNA, 15 bp, Homo sapiens
gaaatcacatctttt

SEQ ID NO: 1814336 - DNA, 15 bp, Homo sapiens
aaatcacatcttttc

SEQ ID NO: 1814337 - DNA, 15 bp, Homo sapiens
aatcacatcttttca

SEQ ID NO: 1814338 - DNA, 15 bp, Homo sapiens
atcacatcttttcag

SEQ ID NO: 1814339 - DNA, 15 bp, Homo sapiens
tcacatcttttcagg

SEQ ID NO: 1814340 - DNA, 15 bp, Homo sapiens
cacatcttttcagga

SEQ ID NO: 1814341 - DNA, 15 bp, Homo sapiens
acatcttttcaggat

SEQ ID NO: 1814342 - DNA, 15 bp, Homo sapiens
catcttttcaggata

SEQ ID NO: 1814343 - DNA, 15 bp, Homo sapiens
atcttttcaggatat

SEQ ID NO: 1814344 - DNA, 15 bp, Homo sapiens
tcttttcaggatatg

SEQ ID NO: 1814345 - DNA, 15 bp, Homo sapiens
cttttcaggatatga

SEQ ID NO: 1814346 - DNA, 15 bp, Homo sapiens
ttttcaggatatgag

SEQ ID NO: 1814347 - DNA, 15 bp, Homo sapiens
tttcaggatatgagt

SEQ ID NO: 1814348 - DNA, 15 bp, Homo sapiens
ttcaggatatgagta

SEQ ID NO: 1814349 - DNA, 15 bp, Homo sapiens
tcaggatatgagtat

SEQ ID NO: 1814350 - DNA, 15 bp, Homo sapiens
caggatatgagtata

SEQ ID NO: 1814351 - DNA, 15 bp, Homo sapiens
aggatatgagtataa

SEQ ID NO: 1814352 - DNA, 15 bp, Homo sapiens
ggatatgagtataaa

SEQ ID NO: 1814353 - DNA, 15 bp, Homo sapiens
gatatgagtataaag

SEQ ID NO: 1814354 - DNA, 15 bp, Homo sapiens
atatgagtataaagt

SEQ ID NO: 1814355 - DNA, 15 bp, Homo sapiens
tatgagtataaagta

SEQ ID NO: 1814356 - DNA, 15 bp, Homo sapiens
atgagtataaagtaa

SEQ ID NO: 1814357 - DNA, 15 bp, Homo sapiens
tgagtataaagtaac

SEQ ID NO: 1814358 - DNA, 15 bp, Homo sapiens
gagtataaagtaaca

SEQ ID NO: 1814359 - DNA, 15 bp, Homo sapiens
agtataaagtaacaa

SEQ ID NO: 1814360 - DNA, 15 bp, Homo sapiens
gtataaagtaacaag

SEQ ID NO: 1814361 - DNA, 15 bp, Homo sapiens
tataaagtaacaagc

SEQ ID NO: 1814362 - DNA, 15 bp, Homo sapiens
ataaagtaacaagcc

SEQ ID NO: 1814363 - DNA, 15 bp, Homo sapiens
taaagtaacaagcct

SEQ ID NO: 1814364 - DNA, 15 bp, Homo sapiens
aaagtaacaagccta

SEQ ID NO: 1814365 - DNA, 15 bp, Homo sapiens
aagtaacaagcctag

SEQ ID NO: 1814366 - DNA, 15 bp, Homo sapiens
agtaacaagcctagg

SEQ ID NO: 1814367 - DNA, 15 bp, Homo sapiens
gtaacaagcctaggg

SEQ ID NO: 1814368 - DNA, 15 bp, Homo sapiens
taacaagcctagggc

SEQ ID NO: 1814369 - DNA, 15 bp, Homo sapiens
aacaagcctagggca

SEQ ID NO: 1814370 - DNA, 15 bp, Homo sapiens
acaagcctagggcag

SEQ ID NO: 1814371 - DNA, 15 bp, Homo sapiens
caagcctagggcaga

SEQ ID NO: 1814372 - DNA, 15 bp, Homo sapiens
aagcctagggcagag

SEQ ID NO: 1814373 - DNA, 15 bp, Homo sapiens
agcctagggcagagc

SEQ ID NO: 1814374 - DNA, 15 bp, Homo sapiens
gcctagggcagagct

SEQ ID NO: 1814375 - DNA, 15 bp, Homo sapiens
cctagggcagagctt

SEQ ID NO: 1814376 - DNA, 15 bp, Homo sapiens
ctagggcagagcttg

SEQ ID NO: 1814377 - DNA, 15 bp, Homo sapiens
tagggcagagcttgt

SEQ ID NO: 1814378 - DNA, 15 bp, Homo sapiens
agggcagagcttgta

SEQ ID NO: 1814379 - DNA, 15 bp, Homo sapiens
gggcagagcttgtac

SEQ ID NO: 1814380 - DNA, 15 bp, Homo sapiens
ggcagagcttgtact

SEQ ID NO: 1814381 - DNA, 15 bp, Homo sapiens
gcagagcttgtactg

SEQ ID NO: 1814382 - DNA, 15 bp, Homo sapiens
cagagcttgtactga

SEQ ID NO: 1814383 - DNA, 15 bp, Homo sapiens
agagcttgtactgac

SEQ ID NO: 1814384 - DNA, 15 bp, Homo sapiens
gagcttgtactgaca

SEQ ID NO: 1814385 - DNA, 15 bp, Homo sapiens
agcttgtactgacaa

SEQ ID NO: 1814386 - DNA, 15 bp, Homo sapiens
gcttgtactgacaaa

SEQ ID NO: 1814387 - DNA, 15 bp, Homo sapiens
cttgtactgacaaag

SEQ ID NO: 1814388 - DNA, 15 bp, Homo sapiens
ttgtactgacaaagt

SEQ ID NO: 1814389 - DNA, 15 bp, Homo sapiens
tgtactgacaaagtc

SEQ ID NO: 1814390 - DNA, 15 bp, Homo sapiens
gtactgacaaagtcc

SEQ ID NO: 1814391 - DNA, 15 bp, Homo sapiens
tactgacaaagtcct

SEQ ID NO: 1814392 - DNA, 15 bp, Homo sapiens
actgacaaagtcctg

SEQ ID NO: 1814393 - DNA, 15 bp, Homo sapiens
ctgacaaagtcctga

SEQ ID NO: 1814394 - DNA, 15 bp, Homo sapiens
tgacaaagtcctgaa

SEQ ID NO: 1814395 - DNA, 15 bp, Homo sapiens
gacaaagtcctgaaa

SEQ ID NO: 1814396 - DNA, 15 bp, Homo sapiens
acaaagtcctgaaac

SEQ ID NO: 1814397 - DNA, 15 bp, Homo sapiens
caaagtcctgaaact

SEQ ID NO: 1814398 - DNA, 15 bp, Homo sapiens
aaagtcctgaaacta

SEQ ID NO: 1814399 - DNA, 15 bp, Homo sapiens
aagtcctgaaactac

SEQ ID NO: 1814400 - DNA, 15 bp, Homo sapiens
agtcctgaaactaca

SEQ ID NO: 1814401 - DNA, 15 bp, Homo sapiens
gtcctgaaactacaa

SEQ ID NO: 1814402 - DNA, 15 bp, Homo sapiens
tcctgaaactacaat

SEQ ID NO: 1814403 - DNA, 15 bp, Homo sapiens
cctgaaactacaatg

SEQ ID NO: 1814404 - DNA, 15 bp, Homo sapiens
ctgaaactacaatga

SEQ ID NO: 1814405 - DNA, 15 bp, Homo sapiens
tgaaactacaatgag

SEQ ID NO: 1814406 - DNA, 15 bp, Homo sapiens
gaaactacaatgaga

SEQ ID NO: 1814407 - DNA, 15 bp, Homo sapiens
aaactacaatgagag

SEQ ID NO: 1814408 - DNA, 15 bp, Homo sapiens
aactacaatgagagg

SEQ ID NO: 1814409 - DNA, 15 bp, Homo sapiens
actacaatgagagga

SEQ ID NO: 1814410 - DNA, 15 bp, Homo sapiens
ctacaatgagaggaa

SEQ ID NO: 1814411 - DNA, 15 bp, Homo sapiens
tacaatgagaggaaa

SEQ ID NO: 1814412 - DNA, 15 bp, Homo sapiens
acaatgagaggaaac

SEQ ID NO: 1814413 - DNA, 15 bp, Homo sapiens
caatgagaggaaaca

SEQ ID NO: 1814414 - DNA, 15 bp, Homo sapiens
aatgagaggaaacac

SEQ ID NO: 1814415 - DNA, 15 bp, Homo sapiens
atgagaggaaacaca

SEQ ID NO: 1814416 - DNA, 15 bp, Homo sapiens
tgagaggaaacacat

SEQ ID NO: 1814417 - DNA, 15 bp, Homo sapiens
gagaggaaacacatt

SEQ ID NO: 1814418 - DNA, 15 bp, Homo sapiens
agaggaaacacattg

SEQ ID NO: 1814419 - DNA, 15 bp, Homo sapiens
gaggaaacacattgc

SEQ ID NO: 1814420 - DNA, 15 bp, Homo sapiens
aggaaacacattgct

SEQ ID NO: 1814421 - DNA, 15 bp, Homo sapiens
ggaaacacattgctc

SEQ ID NO: 1814422 - DNA, 15 bp, Homo sapiens
gaaacacattgctct

SEQ ID NO: 1814423 - DNA, 15 bp, Homo sapiens
aaacacattgctcta

SEQ ID NO: 1814424 - DNA, 15 bp, Homo sapiens
aacacattgctctac

SEQ ID NO: 1814425 - DNA, 15 bp, Homo sapiens
acacattgctctact

SEQ ID NO: 1814426 - DNA, 15 bp, Homo sapiens
cacattgctctactt

SEQ ID NO: 1814427 - DNA, 15 bp, Homo sapiens
acattgctctacttc

SEQ ID NO: 1814428 - DNA, 15 bp, Homo sapiens
cattgctctacttcg

SEQ ID NO: 1814429 - DNA, 15 bp, Homo sapiens
attgctctacttcgg

SEQ ID NO: 1814430 - DNA, 15 bp, Homo sapiens
ttgctctacttcggg

SEQ ID NO: 1814431 - DNA, 15 bp, Homo sapiens
tgctctacttcggga

SEQ ID NO: 1814432 - DNA, 15 bp, Homo sapiens
gctctacttcgggat

SEQ ID NO: 1814433 - DNA, 15 bp, Homo sapiens
ctctacttcgggata

SEQ ID NO: 1814434 - DNA, 15 bp, Homo sapiens
tctacttcgggataa

SEQ ID NO: 1814435 - DNA, 15 bp, Homo sapiens
ctacttcgggataag

SEQ ID NO: 1814436 - DNA, 15 bp, Homo sapiens
tacttcgggataagt

SEQ ID NO: 1814437 - DNA, 15 bp, Homo sapiens
acttcgggataagtc

SEQ ID NO: 1814438 - DNA, 15 bp, Homo sapiens
cttcgggataagtca

SEQ ID NO: 1814439 - DNA, 15 bp, Homo sapiens
ttcgggataagtcat

SEQ ID NO: 1814440 - DNA, 15 bp, Homo sapiens
tcgggataagtcatg

SEQ ID NO: 1814441 - DNA, 15 bp, Homo sapiens
cgggataagtcatga

SEQ ID NO: 1814442 - DNA, 15 bp, Homo sapiens
gggataagtcatgac

SEQ ID NO: 1814443 - DNA, 15 bp, Homo sapiens
ggataagtcatgacc

SEQ ID NO: 1814444 - DNA, 15 bp, Homo sapiens
gataagtcatgaccg

SEQ ID NO: 1814445 - DNA, 15 bp, Homo sapiens
ataagtcatgaccga

SEQ ID NO: 1814446 - DNA, 15 bp, Homo sapiens
taagtcatgaccgag

SEQ ID NO: 1814447 - DNA, 15 bp, Homo sapiens
aagtcatgaccgaga

SEQ ID NO: 1814448 - DNA, 15 bp, Homo sapiens
agtcatgaccgagac

SEQ ID NO: 1814449 - DNA, 15 bp, Homo sapiens
gtcatgaccgagact

SEQ ID NO: 1814450 - DNA, 15 bp, Homo sapiens
tcatgaccgagactc

SEQ ID NO: 1814451 - DNA, 15 bp, Homo sapiens
catgaccgagactca

SEQ ID NO: 1814452 - DNA, 15 bp, Homo sapiens
atgaccgagactcaa

SEQ ID NO: 1814453 - DNA, 15 bp, Homo sapiens
tgaccgagactcaat

SEQ ID NO: 1814454 - DNA, 15 bp, Homo sapiens
gaccgagactcaatt

SEQ ID NO: 1814455 - DNA, 15 bp, Homo sapiens
accgagactcaattt

SEQ ID NO: 1814456 - DNA, 15 bp, Homo sapiens
ccgagactcaatttc

SEQ ID NO: 1814457 - DNA, 15 bp, Homo sapiens
cgagactcaatttca

SEQ ID NO: 1814458 - DNA, 15 bp, Homo sapiens
gagactcaatttcag

SEQ ID NO: 1814459 - DNA, 15 bp, Homo sapiens
agactcaatttcaga

SEQ ID NO: 1814460 - DNA, 15 bp, Homo sapiens
gactcaatttcagag

SEQ ID NO: 1814461 - DNA, 15 bp, Homo sapiens
actcaatttcagaga

SEQ ID NO: 1814462 - DNA, 15 bp, Homo sapiens
ctcaatttcagagac

SEQ ID NO: 1814463 - DNA, 15 bp, Homo sapiens
tcaatttcagagacg

SEQ ID NO: 1814464 - DNA, 15 bp, Homo sapiens
caatttcagagacgc

SEQ ID NO: 1814465 - DNA, 15 bp, Homo sapiens
aatttcagagacgct

SEQ ID NO: 1814466 - DNA, 15 bp, Homo sapiens
atttcagagacgctc

SEQ ID NO: 1814467 - DNA, 15 bp, Homo sapiens
tttcagagacgctct

SEQ ID NO: 1814468 - DNA, 15 bp, Homo sapiens
ttcagagacgctcta

SEQ ID NO: 1814469 - DNA, 15 bp, Homo sapiens
tcagagacgctctat

SEQ ID NO: 1814470 - DNA, 15 bp, Homo sapiens
cagagacgctctatg

SEQ ID NO: 1814471 - DNA, 15 bp, Homo sapiens
agagacgctctatga

SEQ ID NO: 1814472 - DNA, 15 bp, Homo sapiens
gagacgctctatgaa

SEQ ID NO: 1814473 - DNA, 15 bp, Homo sapiens
agacgctctatgaac

SEQ ID NO: 1814474 - DNA, 15 bp, Homo sapiens
gacgctctatgaaca

SEQ ID NO: 1814475 - DNA, 15 bp, Homo sapiens
acgctctatgaacag

SEQ ID NO: 1814476 - DNA, 15 bp, Homo sapiens
cgctctatgaacaga

SEQ ID NO: 1814477 - DNA, 15 bp, Homo sapiens
gctctatgaacagag

SEQ ID NO: 1814478 - DNA, 15 bp, Homo sapiens
ctctatgaacagagg

SEQ ID NO: 1814479 - DNA, 15 bp, Homo sapiens
tctatgaacagaggt

SEQ ID NO: 1814480 - DNA, 15 bp, Homo sapiens
ctatgaacagaggtg

SEQ ID NO: 1814481 - DNA, 15 bp, Homo sapiens
tatgaacagaggtgc

SEQ ID NO: 1814482 - DNA, 15 bp, Homo sapiens
atgaacagaggtgct

SEQ ID NO: 1814483 - DNA, 15 bp, Homo sapiens
tgaacagaggtgctt

SEQ ID NO: 1814484 - DNA, 15 bp, Homo sapiens
gaacagaggtgcttg

SEQ ID NO: 1814485 - DNA, 15 bp, Homo sapiens
aacagaggtgcttga

SEQ ID NO: 1814486 - DNA, 15 bp, Homo sapiens
acagaggtgcttgaa

SEQ ID NO: 1814487 - DNA, 15 bp, Homo sapiens
cagaggtgcttgaag

SEQ ID NO: 1814488 - DNA, 15 bp, Homo sapiens
agaggtgcttgaagc

SEQ ID NO: 1814489 - DNA, 15 bp, Homo sapiens
gaggtgcttgaagcc

SEQ ID NO: 1814490 - DNA, 15 bp, Homo sapiens
aggtgcttgaagcca

SEQ ID NO: 1814491 - DNA, 15 bp, Homo sapiens
ggtgcttgaagccac

SEQ ID NO: 1814492 - DNA, 15 bp, Homo sapiens
gtgcttgaagccaca

SEQ ID NO: 1814493 - DNA, 15 bp, Homo sapiens
tgcttgaagccacag

SEQ ID NO: 1814494 - DNA, 15 bp, Homo sapiens
gcttgaagccacagt

SEQ ID NO: 1814495 - DNA, 15 bp, Homo sapiens
cttgaagccacagtg

SEQ ID NO: 1814496 - DNA, 15 bp, Homo sapiens
ttgaagccacagtgg

SEQ ID NO: 1814497 - DNA, 15 bp, Homo sapiens
tgaagccacagtggc

SEQ ID NO: 1814498 - DNA, 15 bp, Homo sapiens
gaagccacagtggca

SEQ ID NO: 1814499 - DNA, 15 bp, Homo sapiens
aagccacagtggcag

SEQ ID NO: 1814500 - DNA, 15 bp, Homo sapiens
agccacagtggcaga

SEQ ID NO: 1814501 - DNA, 15 bp, Homo sapiens
gccacagtggcagaa

SEQ ID NO: 1814502 - DNA, 15 bp, Homo sapiens
ccacagtggcagaag

SEQ ID NO: 1814503 - DNA, 15 bp, Homo sapiens
cacagtggcagaagg

SEQ ID NO: 1814504 - DNA, 15 bp, Homo sapiens
acagtggcagaaggg

SEQ ID NO: 1814505 - DNA, 15 bp, Homo sapiens
cagtggcagaaggga

SEQ ID NO: 1814506 - DNA, 15 bp, Homo sapiens
agtggcagaagggaa

SEQ ID NO: 1814507 - DNA, 15 bp, Homo sapiens
gtggcagaagggaaa

SEQ ID NO: 1814508 - DNA, 15 bp, Homo sapiens
tggcagaagggaaag

SEQ ID NO: 1814509 - DNA, 15 bp, Homo sapiens
ggcagaagggaaaga

SEQ ID NO: 1814510 - DNA, 15 bp, Homo sapiens
gcagaagggaaagat

SEQ ID NO: 1814511 - DNA, 15 bp, Homo sapiens
cagaagggaaagatg

SEQ ID NO: 1814512 - DNA, 15 bp, Homo sapiens
agaagggaaagatgg

SEQ ID NO: 1814513 - DNA, 15 bp, Homo sapiens
gaagggaaagatggg

SEQ ID NO: 1814514 - DNA, 15 bp, Homo sapiens
aagggaaagatgggg

SEQ ID NO: 1814515 - DNA, 15 bp, Homo sapiens
agggaaagatgggga

SEQ ID NO: 1814516 - DNA, 15 bp, Homo sapiens
gggaaagatggggaa

SEQ ID NO: 1814517 - DNA, 15 bp, Homo sapiens
ggaaagatggggaag

SEQ ID NO: 1814518 - DNA, 15 bp, Homo sapiens
gaaagatggggaagt

SEQ ID NO: 1814519 - DNA, 15 bp, Homo sapiens
aaagatggggaagtg

SEQ ID NO: 1814520 - DNA, 15 bp, Homo sapiens
aagatggggaagtgt

SEQ ID NO: 1814521 - DNA, 15 bp, Homo sapiens
agatggggaagtgtg

SEQ ID NO: 1814522 - DNA, 15 bp, Homo sapiens
gatggggaagtgtgc

SEQ ID NO: 1814523 - DNA, 15 bp, Homo sapiens
atggggaagtgtgcc

SEQ ID NO: 1814524 - DNA, 15 bp, Homo sapiens
tggggaagtgtgccg

SEQ ID NO: 1814525 - DNA, 15 bp, Homo sapiens
ggggaagtgtgccga

SEQ ID NO: 1814526 - DNA, 15 bp, Homo sapiens
gggaagtgtgccgaa

SEQ ID NO: 1814527 - DNA, 15 bp, Homo sapiens
ggaagtgtgccgaag

SEQ ID NO: 1814528 - DNA, 15 bp, Homo sapiens
gaagtgtgccgaaga

SEQ ID NO: 1814529 - DNA, 15 bp, Homo sapiens
aagtgtgccgaagag

SEQ ID NO: 1814530 - DNA, 15 bp, Homo sapiens
agtgtgccgaagagc

SEQ ID NO: 1814531 - DNA, 15 bp, Homo sapiens
gtgtgccgaagagcc

SEQ ID NO: 1814532 - DNA, 15 bp, Homo sapiens
tgtgccgaagagcct

SEQ ID NO: 1814533 - DNA, 15 bp, Homo sapiens
gtgccgaagagcctc

SEQ ID NO: 1814534 - DNA, 15 bp, Homo sapiens
tgccgaagagcctcc

SEQ ID NO: 1814535 - DNA, 15 bp, Homo sapiens
gccgaagagcctcca

SEQ ID NO: 1814536 - DNA, 15 bp, Homo sapiens
ccgaagagcctccag

SEQ ID NO: 1814537 - DNA, 15 bp, Homo sapiens
cgaagagcctccagg

SEQ ID NO: 1814538 - DNA, 15 bp, Homo sapiens
gaagagcctccaggc

SEQ ID NO: 1814539 - DNA, 15 bp, Homo sapiens
aagagcctccaggca

SEQ ID NO: 1814540 - DNA, 15 bp, Homo sapiens
agagcctccaggcat

SEQ ID NO: 1814541 - DNA, 15 bp, Homo sapiens
gagcctccaggcatg

SEQ ID NO: 1814542 - DNA, 15 bp, Homo sapiens
agcctccaggcatga

SEQ ID NO: 1814543 - DNA, 15 bp, Homo sapiens
gcctccaggcatgac

SEQ ID NO: 1814544 - DNA, 15 bp, Homo sapiens
cctccaggcatgaca

SEQ ID NO: 1814545 - DNA, 15 bp, Homo sapiens
ctccaggcatgacag

SEQ ID NO: 1814546 - DNA, 15 bp, Homo sapiens
tccaggcatgacaga

SEQ ID NO: 1814547 - DNA, 15 bp, Homo sapiens
ccaggcatgacagac

SEQ ID NO: 1814548 - DNA, 15 bp, Homo sapiens
caggcatgacagaca

SEQ ID NO: 1814549 - DNA, 15 bp, Homo sapiens
aggcatgacagacag

SEQ ID NO: 1814550 - DNA, 15 bp, Homo sapiens
ggcatgacagacagt

SEQ ID NO: 1814551 - DNA, 15 bp, Homo sapiens
gcatgacagacagtc

SEQ ID NO: 1814552 - DNA, 15 bp, Homo sapiens
catgacagacagtcc

SEQ ID NO: 1814553 - DNA, 15 bp, Homo sapiens
atgacagacagtccc

SEQ ID NO: 1814554 - DNA, 15 bp, Homo sapiens
tgacagacagtcccc

SEQ ID NO: 1814555 - DNA, 15 bp, Homo sapiens
gacagacagtcccct

SEQ ID NO: 1814556 - DNA, 15 bp, Homo sapiens
acagacagtcccctg

SEQ ID NO: 1814557 - DNA, 15 bp, Homo sapiens
cagacagtcccctga

SEQ ID NO: 1814558 - DNA, 15 bp, Homo sapiens
agacagtcccctgac

SEQ ID NO: 1814559 - DNA, 15 bp, Homo sapiens
gacagtcccctgacc

SEQ ID NO: 1814560 - DNA, 15 bp, Homo sapiens
acagtcccctgacca

SEQ ID NO: 1814561 - DNA, 15 bp, Homo sapiens
cagtcccctgaccaa

SEQ ID NO: 1814562 - DNA, 15 bp, Homo sapiens
agtcccctgaccaag

SEQ ID NO: 1814563 - DNA, 15 bp, Homo sapiens
gtcccctgaccaagc

SEQ ID NO: 1814564 - DNA, 15 bp, Homo sapiens
tcccctgaccaagca

SEQ ID NO: 1814565 - DNA, 15 bp, Homo sapiens
cccctgaccaagcac

SEQ ID NO: 1814566 - DNA, 15 bp, Homo sapiens
ccctgaccaagcaca

SEQ ID NO: 1814567 - DNA, 15 bp, Homo sapiens
cctgaccaagcacaa

SEQ ID NO: 1814568 - DNA, 15 bp, Homo sapiens
ctgaccaagcacaag

SEQ ID NO: 1814569 - DNA, 15 bp, Homo sapiens
tgaccaagcacaagt

SEQ ID NO: 1814570 - DNA, 15 bp, Homo sapiens
gaccaagcacaagta

SEQ ID NO: 1814571 - DNA, 15 bp, Homo sapiens
accaagcacaagtaa

SEQ ID NO: 1814572 - DNA, 15 bp, Homo sapiens
ccaagcacaagtaac

SEQ ID NO: 1814573 - DNA, 15 bp, Homo sapiens
caagcacaagtaaca

SEQ ID NO: 1814574 - DNA, 15 bp, Homo sapiens
aagcacaagtaacag

SEQ ID NO: 1814575 - DNA, 15 bp, Homo sapiens
agcacaagtaacagg

SEQ ID NO: 1814576 - DNA, 15 bp, Homo sapiens
gcacaagtaacaggc

SEQ ID NO: 1814577 - DNA, 15 bp, Homo sapiens
cacaagtaacaggcc

SEQ ID NO: 1814578 - DNA, 15 bp, Homo sapiens
acaagtaacaggccc

SEQ ID NO: 1814579 - DNA, 15 bp, Homo sapiens
caagtaacaggccct

SEQ ID NO: 1814580 - DNA, 15 bp, Homo sapiens
aagtaacaggccctt

SEQ ID NO: 1814581 - DNA, 15 bp, Homo sapiens
agtaacaggcccttt

SEQ ID NO: 1814582 - DNA, 15 bp, Homo sapiens
gtaacaggccctttg

SEQ ID NO: 1814583 - DNA, 15 bp, Homo sapiens
taacaggccctttgg

SEQ ID NO: 1814584 - DNA, 15 bp, Homo sapiens
aacaggccctttggg

SEQ ID NO: 1814585 - DNA, 15 bp, Homo sapiens
acaggccctttgggt

SEQ ID NO: 1814586 - DNA, 15 bp, Homo sapiens
caggccctttgggtc

SEQ ID NO: 1814587 - DNA, 15 bp, Homo sapiens
aggccctttgggtct

SEQ ID NO: 1814588 - DNA, 15 bp, Homo sapiens
ggccctttgggtctc

SEQ ID NO: 1814589 - DNA, 15 bp, Homo sapiens
gccctttgggtctct

SEQ ID NO: 1814590 - DNA, 15 bp, Homo sapiens
ccctttgggtctctg

SEQ ID NO: 1814591 - DNA, 15 bp, Homo sapiens
cctttgggtctctgc

SEQ ID NO: 1814592 - DNA, 15 bp, Homo sapiens
ttgggtctctgcttc

SEQ ID NO: 1814593 - DNA, 15 bp, Homo sapiens
tgggtctctgcttct

SEQ ID NO: 1814594 - DNA, 15 bp, Homo sapiens
gggtctctgcttctc

SEQ ID NO: 1814595 - DNA, 15 bp, Homo sapiens
ggtctctgcttctca

SEQ ID NO: 1814596 - DNA, 15 bp, Homo sapiens
gtctctgcttctcac

SEQ ID NO: 1814597 - DNA, 15 bp, Homo sapiens
tctctgcttctcact

SEQ ID NO: 1814598 - DNA, 15 bp, Homo sapiens
ctctgcttctcactg

SEQ ID NO: 1814599 - DNA, 15 bp, Homo sapiens
tctgcttctcactgg

SEQ ID NO: 1814600 - DNA, 15 bp, Homo sapiens
ctgcttctcactgga

SEQ ID NO: 1814601 - DNA, 15 bp, Homo sapiens
tgcttctcactggaa

SEQ ID NO: 1814602 - DNA, 15 bp, Homo sapiens
gcttctcactggaaa

SEQ ID NO: 1814603 - DNA, 15 bp, Homo sapiens
cttctcactggaaaa

SEQ ID NO: 1814604 - DNA, 15 bp, Homo sapiens
ttctcactggaaaat

SEQ ID NO: 1814605 - DNA, 15 bp, Homo sapiens
tctcactggaaaatg

SEQ ID NO: 1814606 - DNA, 15 bp, Homo sapiens
ctcactggaaaatga

SEQ ID NO: 1814607 - DNA, 15 bp, Homo sapiens
tcactggaaaatgat

SEQ ID NO: 1814608 - DNA, 15 bp, Homo sapiens
cactggaaaatgatg

SEQ ID NO: 1814609 - DNA, 15 bp, Homo sapiens
actggaaaatgatga

SEQ ID NO: 1814610 - DNA, 15 bp, Homo sapiens
ctggaaaatgatgaa

SEQ ID NO: 1814611 - DNA, 15 bp, Homo sapiens
tggaaaatgatgaag

SEQ ID NO: 1814612 - DNA, 15 bp, Homo sapiens
ggaaaatgatgaagc

SEQ ID NO: 1814613 - DNA, 15 bp, Homo sapiens
gaaaatgatgaagcc

SEQ ID NO: 1814614 - DNA, 15 bp, Homo sapiens
aaaatgatgaagcct

SEQ ID NO: 1814615 - DNA, 15 bp, Homo sapiens
aaatgatgaagccta

SEQ ID NO: 1814616 - DNA, 15 bp, Homo sapiens
aatgatgaagcctag

SEQ ID NO: 1814617 - DNA, 15 bp, Homo sapiens
atgatgaagcctaga

SEQ ID NO: 1814618 - DNA, 15 bp, Homo sapiens
tgatgaagcctagat

SEQ ID NO: 1814619 - DNA, 15 bp, Homo sapiens
gatgaagcctagatc

SEQ ID NO: 1814620 - DNA, 15 bp, Homo sapiens
atgaagcctagatct

SEQ ID NO: 1814621 - DNA, 15 bp, Homo sapiens
tgaagcctagatctg

SEQ ID NO: 1814622 - DNA, 15 bp, Homo sapiens
gaagcctagatctga

SEQ ID NO: 1814623 - DNA, 15 bp, Homo sapiens
aagcctagatctgat

SEQ ID NO: 1814624 - DNA, 15 bp, Homo sapiens
agcctagatctgatg

SEQ ID NO: 1814625 - DNA, 15 bp, Homo sapiens
gcctagatctgatga

SEQ ID NO: 1814626 - DNA, 15 bp, Homo sapiens
cctagatctgatgac

SEQ ID NO: 1814627 - DNA, 15 bp, Homo sapiens
ctagatctgatgact

SEQ ID NO: 1814628 - DNA, 15 bp, Homo sapiens
tagatctgatgactc

SEQ ID NO: 1814629 - DNA, 15 bp, Homo sapiens
agatctgatgactcc

SEQ ID NO: 1814630 - DNA, 15 bp, Homo sapiens
gatctgatgactcct

SEQ ID NO: 1814631 - DNA, 15 bp, Homo sapiens
atctgatgactccta

SEQ ID NO: 1814632 - DNA, 15 bp, Homo sapiens
tctgatgactcctag

SEQ ID NO: 1814633 - DNA, 15 bp, Homo sapiens
ctgatgactcctagt

SEQ ID NO: 1814634 - DNA, 15 bp, Homo sapiens
tgatgactcctagtg

SEQ ID NO: 1814635 - DNA, 15 bp, Homo sapiens
gatgactcctagtgc

SEQ ID NO: 1814636 - DNA, 15 bp, Homo sapiens
atgactcctagtgcc

SEQ ID NO: 1814637 - DNA, 15 bp, Homo sapiens
tgactcctagtgcca

SEQ ID NO: 1814638 - DNA, 15 bp, Homo sapiens
gactcctagtgccaa

SEQ ID NO: 1814639 - DNA, 15 bp, Homo sapiens
actcctagtgccaac

SEQ ID NO: 1814640 - DNA, 15 bp, Homo sapiens
ctcctagtgccaaca

SEQ ID NO: 1814641 - DNA, 15 bp, Homo sapiens
tcctagtgccaacat

SEQ ID NO: 1814642 - DNA, 15 bp, Homo sapiens
cctagtgccaacatt

SEQ ID NO: 1814643 - DNA, 15 bp, Homo sapiens
ctagtgccaacattt

SEQ ID NO: 1814644 - DNA, 15 bp, Homo sapiens
tagtgccaacattta

SEQ ID NO: 1814645 - DNA, 15 bp, Homo sapiens
agtgccaacatttaa

SEQ ID NO: 1814646 - DNA, 15 bp, Homo sapiens
gtgccaacatttaac

SEQ ID NO: 1814647 - DNA, 15 bp, Homo sapiens
tgccaacatttaaca

SEQ ID NO: 1814648 - DNA, 15 bp, Homo sapiens
gccaacatttaacaa

SEQ ID NO: 1814649 - DNA, 15 bp, Homo sapiens
ccaacatttaacaaa

SEQ ID NO: 1814650 - DNA, 15 bp, Homo sapiens
caacatttaacaaag

SEQ ID NO: 1814651 - DNA, 15 bp, Homo sapiens
aacatttaacaaagt

SEQ ID NO: 1814652 - DNA, 15 bp, Homo sapiens
acatttaacaaagtt

SEQ ID NO: 1814653 - DNA, 15 bp, Homo sapiens
catttaacaaagttc

SEQ ID NO: 1814654 - DNA, 15 bp, Homo sapiens
atttaacaaagttcg

SEQ ID NO: 1814655 - DNA, 15 bp, Homo sapiens
tttaacaaagttcga

SEQ ID NO: 1814656 - DNA, 15 bp, Homo sapiens
ttaacaaagttcgaa

SEQ ID NO: 1814657 - DNA, 15 bp, Homo sapiens
taacaaagttcgaaa

SEQ ID NO: 1814658 - DNA, 15 bp, Homo sapiens
aacaaagttcgaaag

SEQ ID NO: 1814659 - DNA, 15 bp, Homo sapiens
acaaagttcgaaagt

SEQ ID NO: 1814660 - DNA, 15 bp, Homo sapiens
caaagttcgaaagtt

SEQ ID NO: 1814661 - DNA, 15 bp, Homo sapiens
aaagttcgaaagtta

SEQ ID NO: 1814662 - DNA, 15 bp, Homo sapiens
aagttcgaaagttat

SEQ ID NO: 1814663 - DNA, 15 bp, Homo sapiens
agttcgaaagttatg

SEQ ID NO: 1814664 - DNA, 15 bp, Homo sapiens
gttcgaaagttatgc

SEQ ID NO: 1814665 - DNA, 15 bp, Homo sapiens
ttcgaaagttatgca

SEQ ID NO: 1814666 - DNA, 15 bp, Homo sapiens
tcgaaagttatgcag

SEQ ID NO: 1814667 - DNA, 15 bp, Homo sapiens
cgaaagttatgcagg

SEQ ID NO: 1814668 - DNA, 15 bp, Homo sapiens
gaaagttatgcagga

SEQ ID NO: 1814669 - DNA, 15 bp, Homo sapiens
aaagttatgcaggac

SEQ ID NO: 1814670 - DNA, 15 bp, Homo sapiens
aagttatgcaggact

SEQ ID NO: 1814671 - DNA, 15 bp, Homo sapiens
agttatgcaggactt

SEQ ID NO: 1814672 - DNA, 15 bp, Homo sapiens
gttatgcaggacttc

SEQ ID NO: 1814673 - DNA, 15 bp, Homo sapiens
ttatgcaggacttca

SEQ ID NO: 1814674 - DNA, 15 bp, Homo sapiens
tatgcaggacttcac

SEQ ID NO: 1814675 - DNA, 15 bp, Homo sapiens
atgcaggacttcaca

SEQ ID NO: 1814676 - DNA, 15 bp, Homo sapiens
tgcaggacttcacac

SEQ ID NO: 1814677 - DNA, 15 bp, Homo sapiens
gcaggacttcacaca

SEQ ID NO: 1814678 - DNA, 15 bp, Homo sapiens
caggacttcacacat

SEQ ID NO: 1814679 - DNA, 15 bp, Homo sapiens
aggacttcacacatg

SEQ ID NO: 1814680 - DNA, 15 bp, Homo sapiens
ggacttcacacatgt

SEQ ID NO: 1814681 - DNA, 15 bp, Homo sapiens
gacttcacacatgta

SEQ ID NO: 1814682 - DNA, 15 bp, Homo sapiens
acttcacacatgtac

SEQ ID NO: 1814683 - DNA, 15 bp, Homo sapiens
cttcacacatgtacg

SEQ ID NO: 1814684 - DNA, 15 bp, Homo sapiens
ttcacacatgtacgg

SEQ ID NO: 1814685 - DNA, 15 bp, Homo sapiens
tcacacatgtacgga

SEQ ID NO: 1814686 - DNA, 15 bp, Homo sapiens
cacacatgtacggaa

SEQ ID NO: 1814687 - DNA, 15 bp, Homo sapiens
acacatgtacggaat

SEQ ID NO: 1814688 - DNA, 15 bp, Homo sapiens
cacatgtacggaatg

SEQ ID NO: 1814689 - DNA, 15 bp, Homo sapiens
acatgtacggaatgg

SEQ ID NO: 1814690 - DNA, 15 bp, Homo sapiens
catgtacggaatggc

SEQ ID NO: 1814691 - DNA, 15 bp, Homo sapiens
atgtacggaatggct

SEQ ID NO: 1814692 - DNA, 15 bp, Homo sapiens
tgtacggaatggctg

SEQ ID NO: 1814693 - DNA, 15 bp, Homo sapiens
gtacggaatggctgt

SEQ ID NO: 1814694 - DNA, 15 bp, Homo sapiens
tacggaatggctgta

SEQ ID NO: 1814695 - DNA, 15 bp, Homo sapiens
acggaatggctgtat

SEQ ID NO: 1814696 - DNA, 15 bp, Homo sapiens
cggaatggctgtatc

SEQ ID NO: 1814697 - DNA, 15 bp, Homo sapiens
ggaatggctgtatca

SEQ ID NO: 1814698 - DNA, 15 bp, Homo sapiens
gaatggctgtatcac

SEQ ID NO: 1814699 - DNA, 15 bp, Homo sapiens
aatggctgtatcaca

SEQ ID NO: 1814700 - DNA, 15 bp, Homo sapiens
atggctgtatcacag

SEQ ID NO: 1814701 - DNA, 15 bp, Homo sapiens
tggctgtatcacaga

SEQ ID NO: 1814702 - DNA, 15 bp, Homo sapiens
ggctgtatcacagaa

SEQ ID NO: 1814703 - DNA, 15 bp, Homo sapiens
gctgtatcacagaat

SEQ ID NO: 1814704 - DNA, 15 bp, Homo sapiens
ctgtatcacagaata

SEQ ID NO: 1814705 - DNA, 15 bp, Homo sapiens
tgtatcacagaatat

SEQ ID NO: 1814706 - DNA, 15 bp, Homo sapiens
gtatcacagaatatt

SEQ ID NO: 1814707 - DNA, 15 bp, Homo sapiens
tatcacagaatatta

SEQ ID NO: 1814708 - DNA, 15 bp, Homo sapiens
atcacagaatattat

SEQ ID NO: 1814709 - DNA, 15 bp, Homo sapiens
tcacagaatattatg

SEQ ID NO: 1814710 - DNA, 15 bp, Homo sapiens
cacagaatattatgc

SEQ ID NO: 1814711 - DNA, 15 bp, Homo sapiens
acagaatattatgcg

SEQ ID NO: 1814712 - DNA, 15 bp, Homo sapiens
cagaatattatgcgt

SEQ ID NO: 1814713 - DNA, 15 bp, Homo sapiens
agaatattatgcgtt

SEQ ID NO: 1814714 - DNA, 15 bp, Homo sapiens
gaatattatgcgtta

SEQ ID NO: 1814715 - DNA, 15 bp, Homo sapiens
aatattatgcgttag

SEQ ID NO: 1814716 - DNA, 15 bp, Homo sapiens
atattatgcgttaga

SEQ ID NO: 1814717 - DNA, 15 bp, Homo sapiens
tattatgcgttagaa

SEQ ID NO: 1814718 - DNA, 15 bp, Homo sapiens
attatgcgttagaaa

SEQ ID NO: 1814719 - DNA, 15 bp, Homo sapiens
ttatgcgttagaaag

SEQ ID NO: 1814720 - DNA, 15 bp, Homo sapiens
tatgcgttagaaagt

SEQ ID NO: 1814721 - DNA, 15 bp, Homo sapiens
atgcgttagaaagtt

SEQ ID NO: 1814722 - DNA, 15 bp, Homo sapiens
tgcgttagaaagttc

SEQ ID NO: 1814723 - DNA, 15 bp, Homo sapiens
gcgttagaaagttca

SEQ ID NO: 1814724 - DNA, 15 bp, Homo sapiens
cgttagaaagttcac

SEQ ID NO: 1814725 - DNA, 15 bp, Homo sapiens
gttagaaagttcacg

SEQ ID NO: 1814726 - DNA, 15 bp, Homo sapiens
ttagaaagttcacgg

SEQ ID NO: 1814727 - DNA, 15 bp, Homo sapiens
tagaaagttcacggt

SEQ ID NO: 1814728 - DNA, 15 bp, Homo sapiens
agaaagttcacggtc

SEQ ID NO: 1814729 - DNA, 15 bp, Homo sapiens
gaaagttcacggtca

SEQ ID NO: 1814730 - DNA, 15 bp, Homo sapiens
aaagttcacggtcac

SEQ ID NO: 1814731 - DNA, 15 bp, Homo sapiens
aagttcacggtcact

SEQ ID NO: 1814732 - DNA, 15 bp, Homo sapiens
agttcacggtcacta

SEQ ID NO: 1814733 - DNA, 15 bp, Homo sapiens
gttcacggtcactat

SEQ ID NO: 1814734 - DNA, 15 bp, Homo sapiens
ttcacggtcactata

SEQ ID NO: 1814735 - DNA, 15 bp, Homo sapiens
tcacggtcactatac

SEQ ID NO: 1814736 - DNA, 15 bp, Homo sapiens
cacggtcactatacc

SEQ ID NO: 1814737 - DNA, 15 bp, Homo sapiens
acggtcactatacct

SEQ ID NO: 1814738 - DNA, 15 bp, Homo sapiens
cggtcactataccta

SEQ ID NO: 1814739 - DNA, 15 bp, Homo sapiens
ggtcactatacctag

SEQ ID NO: 1814740 - DNA, 15 bp, Homo sapiens
gtcactatacctagc

SEQ ID NO: 1814741 - DNA, 15 bp, Homo sapiens
tcactatacctagct

SEQ ID NO: 1814742 - DNA, 15 bp, Homo sapiens
cactatacctagctc

SEQ ID NO: 1814743 - DNA, 15 bp, Homo sapiens
actatacctagctct

SEQ ID NO: 1814744 - DNA, 15 bp, Homo sapiens
ctatacctagctcta

SEQ ID NO: 1814745 - DNA, 15 bp, Homo sapiens
tatacctagctctaa

SEQ ID NO: 1814746 - DNA, 15 bp, Homo sapiens
atacctagctctaaa

SEQ ID NO: 1814747 - DNA, 15 bp, Homo sapiens
tacctagctctaaaa

SEQ ID NO: 1814748 - DNA, 15 bp, Homo sapiens
acctagctctaaaat

SEQ ID NO: 1814749 - DNA, 15 bp, Homo sapiens
cctagctctaaaatt

SEQ ID NO: 1814750 - DNA, 15 bp, Homo sapiens
ctagctctaaaattt

SEQ ID NO: 1814751 - DNA, 15 bp, Homo sapiens
tagctctaaaatttt

SEQ ID NO: 1814752 - DNA, 15 bp, Homo sapiens
agctctaaaattttt

SEQ ID NO: 1814753 - DNA, 15 bp, Homo sapiens
gctctaaaatttttc

SEQ ID NO: 1814754 - DNA, 15 bp, Homo sapiens
ctctaaaatttttca

SEQ ID NO: 1814755 - DNA, 15 bp, Homo sapiens
tctaaaatttttcag

SEQ ID NO: 1814756 - DNA, 15 bp, Homo sapiens
ctaaaatttttcaga

SEQ ID NO: 1814757 - DNA, 15 bp, Homo sapiens
taaaatttttcagag

SEQ ID NO: 1814758 - DNA, 15 bp, Homo sapiens
aaaatttttcagaga

SEQ ID NO: 1814759 - DNA, 15 bp, Homo sapiens
aaatttttcagagaa

SEQ ID NO: 1814760 - DNA, 15 bp, Homo sapiens
aatttttcagagaaa

SEQ ID NO: 1814761 - DNA, 15 bp, Homo sapiens
atttttcagagaaac

SEQ ID NO: 1814762 - DNA, 15 bp, Homo sapiens
tttttcagagaaaca

SEQ ID NO: 1814763 - DNA, 15 bp, Homo sapiens
ttttcagagaaacag

SEQ ID NO: 1814764 - DNA, 15 bp, Homo sapiens
tttcagagaaacagc

SEQ ID NO: 1814765 - DNA, 15 bp, Homo sapiens
ttcagagaaacagca

SEQ ID NO: 1814766 - DNA, 15 bp, Homo sapiens
tcagagaaacagcag

SEQ ID NO: 1814767 - DNA, 15 bp, Homo sapiens
cagagaaacagcaga

SEQ ID NO: 1814768 - DNA, 15 bp, Homo sapiens
agagaaacagcagac

SEQ ID NO: 1814769 - DNA, 15 bp, Homo sapiens
gagaaacagcagact

SEQ ID NO: 1814770 - DNA, 15 bp, Homo sapiens
agaaacagcagacta

SEQ ID NO: 1814771 - DNA, 15 bp, Homo sapiens
gaaacagcagactaa

SEQ ID NO: 1814772 - DNA, 15 bp, Homo sapiens
aaacagcagactaat

SEQ ID NO: 1814773 - DNA, 15 bp, Homo sapiens
aacagcagactaata

SEQ ID NO: 1814774 - DNA, 15 bp, Homo sapiens
acagcagactaataa

SEQ ID NO: 1814775 - DNA, 15 bp, Homo sapiens
cagcagactaataag

SEQ ID NO: 1814776 - DNA, 15 bp, Homo sapiens
agcagactaataagt

SEQ ID NO: 1814777 - DNA, 15 bp, Homo sapiens
gcagactaataagtg

SEQ ID NO: 1814778 - DNA, 15 bp, Homo sapiens
cagactaataagtga

SEQ ID NO: 1814779 - DNA, 15 bp, Homo sapiens
agactaataagtgaa

SEQ ID NO: 1814780 - DNA, 15 bp, Homo sapiens
gactaataagtgaat

SEQ ID NO: 1814781 - DNA, 15 bp, Homo sapiens
actaataagtgaatc

SEQ ID NO: 1814782 - DNA, 15 bp, Homo sapiens
ctaataagtgaatct

SEQ ID NO: 1814783 - DNA, 15 bp, Homo sapiens
taataagtgaatctt

SEQ ID NO: 1814784 - DNA, 15 bp, Homo sapiens
aataagtgaatctta

SEQ ID NO: 1814785 - DNA, 15 bp, Homo sapiens
ataagtgaatcttaa

SEQ ID NO: 1814786 - DNA, 15 bp, Homo sapiens
taagtgaatcttaaa

SEQ ID NO: 1814787 - DNA, 15 bp, Homo sapiens
aagtgaatcttaaat

SEQ ID NO: 1814788 - DNA, 15 bp, Homo sapiens
agtgaatcttaaata

SEQ ID NO: 1814789 - DNA, 15 bp, Homo sapiens
gtgaatcttaaataa

SEQ ID NO: 1814790 - DNA, 15 bp, Homo sapiens
tgaatcttaaataaa

SEQ ID NO: 1814791 - DNA, 15 bp, Homo sapiens
gaatcttaaataaag

SEQ ID NO: 1814792 - DNA, 15 bp, Homo sapiens
aatcttaaataaagg

SEQ ID NO: 1814793 - DNA, 15 bp, Homo sapiens
atcttaaataaagga

SEQ ID NO: 1814794 - DNA, 15 bp, Homo sapiens
tcttaaataaaggaa

SEQ ID NO: 1814795 - DNA, 15 bp, Homo sapiens
cttaaataaaggaat

SEQ ID NO: 1814796 - DNA, 15 bp, Homo sapiens
ttaaataaaggaata

SEQ ID NO: 1814797 - DNA, 15 bp, Homo sapiens
taaataaaggaataa

SEQ ID NO: 1814798 - DNA, 15 bp, Homo sapiens
aaataaaggaataac

SEQ ID NO: 1814799 - DNA, 15 bp, Homo sapiens
aataaaggaataaca

SEQ ID NO: 1814800 - DNA, 15 bp, Homo sapiens
ataaaggaataacat

SEQ ID NO: 1814801 - DNA, 15 bp, Homo sapiens
taaaggaataacatt

SEQ ID NO: 1814802 - DNA, 15 bp, Homo sapiens
aaaggaataacattt

SEQ ID NO: 1814803 - DNA, 15 bp, Homo sapiens
aaggaataacatttt

SEQ ID NO: 1814804 - DNA, 15 bp, Homo sapiens
aggaataacatttta

SEQ ID NO: 1814805 - DNA, 15 bp, Homo sapiens
ggaataacattttaa

SEQ ID NO: 1814806 - DNA, 15 bp, Homo sapiens
gaataacattttaat

SEQ ID NO: 1814807 - DNA, 15 bp, Homo sapiens
aataacattttaatg

SEQ ID NO: 1814808 - DNA, 15 bp, Homo sapiens
ataacattttaatga

SEQ ID NO: 1814809 - DNA, 15 bp, Homo sapiens
taacattttaatgaa

SEQ ID NO: 1814810 - DNA, 15 bp, Homo sapiens
aacattttaatgaaa

SEQ ID NO: 1814811 - DNA, 15 bp, Homo sapiens
acattttaatgaaat

SEQ ID NO: 1814812 - DNA, 15 bp, Homo sapiens
cattttaatgaaata

SEQ ID NO: 1814813 - DNA, 15 bp, Homo sapiens
attttaatgaaataa

SEQ ID NO: 1814814 - DNA, 15 bp, Homo sapiens
ttttaatgaaataaa

SEQ ID NO: 1814815 - DNA, 15 bp, Homo sapiens
tttaatgaaataaat

SEQ ID NO: 1814816 - DNA, 15 bp, Homo sapiens
ttaatgaaataaatg

SEQ ID NO: 1814817 - DNA, 15 bp, Homo sapiens
taatgaaataaatga

SEQ ID NO: 1814818 - DNA, 15 bp, Homo sapiens
aatgaaataaatgaa

SEQ ID NO: 1814819 - DNA, 15 bp, Homo sapiens
atgaaataaatgaaa

SEQ ID NO: 1814820 - DNA, 15 bp, Homo sapiens
tgaaataaatgaaac

SEQ ID NO: 1814821 - DNA, 15 bp, Homo sapiens
gaaataaatgaaaca

SEQ ID NO: 1814822 - DNA, 15 bp, Homo sapiens
aaataaatgaaacag

SEQ ID NO: 1814823 - DNA, 15 bp, Homo sapiens
aataaatgaaacaga

SEQ ID NO: 1814824 - DNA, 15 bp, Homo sapiens
ataaatgaaacagag

SEQ ID NO: 1814825 - DNA, 15 bp, Homo sapiens
taaatgaaacagagc

SEQ ID NO: 1814826 - DNA, 15 bp, Homo sapiens
aaatgaaacagagca

SEQ ID NO: 1814827 - DNA, 15 bp, Homo sapiens
aatgaaacagagcag

SEQ ID NO: 1814828 - DNA, 15 bp, Homo sapiens
atgaaacagagcagg

SEQ ID NO: 1814829 - DNA, 15 bp, Homo sapiens
tgaaacagagcaggg

SEQ ID NO: 1814830 - DNA, 15 bp, Homo sapiens
gaaacagagcaggga

SEQ ID NO: 1814831 - DNA, 15 bp, Homo sapiens
aaacagagcagggaa

SEQ ID NO: 1814832 - DNA, 15 bp, Homo sapiens
aacagagcagggaaa

SEQ ID NO: 1814833 - DNA, 15 bp, Homo sapiens
acagagcagggaaac

SEQ ID NO: 1814834 - DNA, 15 bp, Homo sapiens
cagagcagggaaacc

SEQ ID NO: 1814835 - DNA, 15 bp, Homo sapiens
agagcagggaaacca

SEQ ID NO: 1814836 - DNA, 15 bp, Homo sapiens
gagcagggaaaccaa

SEQ ID NO: 1814837 - DNA, 15 bp, Homo sapiens
agcagggaaaccaaa

SEQ ID NO: 1814838 - DNA, 15 bp, Homo sapiens
gcagggaaaccaaag

SEQ ID NO: 1814839 - DNA, 15 bp, Homo sapiens
cagggaaaccaaaga

SEQ ID NO: 1814840 - DNA, 15 bp, Homo sapiens
agggaaaccaaagag

SEQ ID NO: 1814841 - DNA, 15 bp, Homo sapiens
gggaaaccaaagagc

SEQ ID NO: 1814842 - DNA, 15 bp, Homo sapiens
ggaaaccaaagagcc

SEQ ID NO: 1814843 - DNA, 15 bp, Homo sapiens
gaaaccaaagagcca

SEQ ID NO: 1814844 - DNA, 15 bp, Homo sapiens
aaaccaaagagccaa

SEQ ID NO: 1814845 - DNA, 15 bp, Homo sapiens
aaccaaagagccaat

SEQ ID NO: 1814846 - DNA, 15 bp, Homo sapiens
accaaagagccaatt

SEQ ID NO: 1814847 - DNA, 15 bp, Homo sapiens
ccaaagagccaatta

SEQ ID NO: 1814848 - DNA, 15 bp, Homo sapiens
caaagagccaattag

SEQ ID NO: 1814849 - DNA, 15 bp, Homo sapiens
aaagagccaattagg

SEQ ID NO: 1814850 - DNA, 15 bp, Homo sapiens
aagagccaattaggg

SEQ ID NO: 1814851 - DNA, 15 bp, Homo sapiens
agagccaattagggg

SEQ ID NO: 1814852 - DNA, 15 bp, Homo sapiens
gagccaattagggga

SEQ ID NO: 1814853 - DNA, 15 bp, Homo sapiens
agccaattaggggaa

SEQ ID NO: 1814854 - DNA, 15 bp, Homo sapiens
gccaattaggggaag

SEQ ID NO: 1814855 - DNA, 15 bp, Homo sapiens
ccaattaggggaaga

SEQ ID NO: 1814856 - DNA, 15 bp, Homo sapiens
caattaggggaagaa

SEQ ID NO: 1814857 - DNA, 15 bp, Homo sapiens
aattaggggaagaat

SEQ ID NO: 1814858 - DNA, 15 bp, Homo sapiens
attaggggaagaatc

SEQ ID NO: 1814859 - DNA, 15 bp, Homo sapiens
ttaggggaagaatcc

SEQ ID NO: 1814860 - DNA, 15 bp, Homo sapiens
taggggaagaatcct

SEQ ID NO: 1814861 - DNA, 15 bp, Homo sapiens
aggggaagaatcctg

SEQ ID NO: 1814862 - DNA, 15 bp, Homo sapiens
ggggaagaatcctga

SEQ ID NO: 1814863 - DNA, 15 bp, Homo sapiens
gggaagaatcctgaa

SEQ ID NO: 1814864 - DNA, 15 bp, Homo sapiens
ggaagaatcctgaaa

SEQ ID NO: 1814865 - DNA, 15 bp, Homo sapiens
gaagaatcctgaaaa

SEQ ID NO: 1814866 - DNA, 15 bp, Homo sapiens
aagaatcctgaaaaa

SEQ ID NO: 1814867 - DNA, 15 bp, Homo sapiens
agaatcctgaaaaag

SEQ ID NO: 1814868 - DNA, 15 bp, Homo sapiens
gaatcctgaaaaagt

SEQ ID NO: 1814869 - DNA, 15 bp, Homo sapiens
aatcctgaaaaagta

SEQ ID NO: 1814870 - DNA, 15 bp, Homo sapiens
atcctgaaaaagtat

SEQ ID NO: 1814871 - DNA, 15 bp, Homo sapiens
tcctgaaaaagtatg

SEQ ID NO: 1814872 - DNA, 15 bp, Homo sapiens
cctgaaaaagtatgg

SEQ ID NO: 1814873 - DNA, 15 bp, Homo sapiens
ctgaaaaagtatggc

SEQ ID NO: 1814874 - DNA, 15 bp, Homo sapiens
tgaaaaagtatggct

SEQ ID NO: 1814875 - DNA, 15 bp, Homo sapiens
gaaaaagtatggctt

SEQ ID NO: 1814876 - DNA, 15 bp, Homo sapiens
aaaaagtatggcttc

SEQ ID NO: 1814877 - DNA, 15 bp, Homo sapiens
aaaagtatggcttca

SEQ ID NO: 1814878 - DNA, 15 bp, Homo sapiens
aaagtatggcttcac

SEQ ID NO: 1814879 - DNA, 15 bp, Homo sapiens
aagtatggcttcaca

SEQ ID NO: 1814880 - DNA, 15 bp, Homo sapiens
agtatggcttcacac

SEQ ID NO: 1814881 - DNA, 15 bp, Homo sapiens
gtatggcttcacaca

SEQ ID NO: 1814882 - DNA, 15 bp, Homo sapiens
tatggcttcacacag

SEQ ID NO: 1814883 - DNA, 15 bp, Homo sapiens
atggcttcacacagc

SEQ ID NO: 1814884 - DNA, 15 bp, Homo sapiens
tggcttcacacagca

SEQ ID NO: 1814885 - DNA, 15 bp, Homo sapiens
ggcttcacacagcag

SEQ ID NO: 1814886 - DNA, 15 bp, Homo sapiens
gcttcacacagcagc

SEQ ID NO: 1814887 - DNA, 15 bp, Homo sapiens
cttcacacagcagca

SEQ ID NO: 1814888 - DNA, 15 bp, Homo sapiens
ttcacacagcagcag

SEQ ID NO: 1814889 - DNA, 15 bp, Homo sapiens
tcacacagcagcagc

SEQ ID NO: 1814890 - DNA, 15 bp, Homo sapiens
cacacagcagcagca

SEQ ID NO: 1814891 - DNA, 15 bp, Homo sapiens
acacagcagcagcat

SEQ ID NO: 1814892 - DNA, 15 bp, Homo sapiens
cacagcagcagcatt

SEQ ID NO: 1814893 - DNA, 15 bp, Homo sapiens
acagcagcagcattg

SEQ ID NO: 1814894 - DNA, 15 bp, Homo sapiens
cagcagcagcattga

SEQ ID NO: 1814895 - DNA, 15 bp, Homo sapiens
agcagcagcattgaa

SEQ ID NO: 1814896 - DNA, 15 bp, Homo sapiens
gcagcagcattgaag

SEQ ID NO: 1814897 - DNA, 15 bp, Homo sapiens
cagcagcattgaaga

SEQ ID NO: 1814898 - DNA, 15 bp, Homo sapiens
agcagcattgaagaa

SEQ ID NO: 1814899 - DNA, 15 bp, Homo sapiens
gcagcattgaagaaa

SEQ ID NO: 1814900 - DNA, 15 bp, Homo sapiens
cagcattgaagaaaa

SEQ ID NO: 1814901 - DNA, 15 bp, Homo sapiens
agcattgaagaaaac

SEQ ID NO: 1814902 - DNA, 15 bp, Homo sapiens
gcattgaagaaaaca

SEQ ID NO: 1814903 - DNA, 15 bp, Homo sapiens
cattgaagaaaacac

SEQ ID NO: 1814904 - DNA, 15 bp, Homo sapiens
attgaagaaaacact

SEQ ID NO: 1814905 - DNA, 15 bp, Homo sapiens
ttgaagaaaacacta

SEQ ID NO: 1814906 - DNA, 15 bp, Homo sapiens
tgaagaaaacactat

SEQ ID NO: 1814907 - DNA, 15 bp, Homo sapiens
gaagaaaacactatc

SEQ ID NO: 1814908 - DNA, 15 bp, Homo sapiens
aagaaaacactatcg

SEQ ID NO: 1814909 - DNA, 15 bp, Homo sapiens
agaaaacactatcga

SEQ ID NO: 1814910 - DNA, 15 bp, Homo sapiens
gaaaacactatcgat

SEQ ID NO: 1814911 - DNA, 15 bp, Homo sapiens
aaaacactatcgatt

SEQ ID NO: 1814912 - DNA, 15 bp, Homo sapiens
aaacactatcgattt

SEQ ID NO: 1814913 - DNA, 15 bp, Homo sapiens
aacactatcgatttt

SEQ ID NO: 1814914 - DNA, 15 bp, Homo sapiens
acactatcgattttt

SEQ ID NO: 1814915 - DNA, 15 bp, Homo sapiens
cactatcgatttttc

SEQ ID NO: 1814916 - DNA, 15 bp, Homo sapiens
actatcgatttttcc

SEQ ID NO: 1814917 - DNA, 15 bp, Homo sapiens
ctatcgatttttccc

SEQ ID NO: 1814918 - DNA, 15 bp, Homo sapiens
tatcgatttttccca

SEQ ID NO: 1814919 - DNA, 15 bp, Homo sapiens
atcgatttttcccag

SEQ ID NO: 1814920 - DNA, 15 bp, Homo sapiens
tcgatttttcccaga

SEQ ID NO: 1814921 - DNA, 15 bp, Homo sapiens
cgatttttcccagag

SEQ ID NO: 1814922 - DNA, 15 bp, Homo sapiens
gatttttcccagaga

SEQ ID NO: 1814923 - DNA, 15 bp, Homo sapiens
atttttcccagagaa

SEQ ID NO: 1814924 - DNA, 15 bp, Homo sapiens
tttttcccagagaaa

SEQ ID NO: 1814925 - DNA, 15 bp, Homo sapiens
ttttcccagagaaaa

SEQ ID NO: 1814926 - DNA, 15 bp, Homo sapiens
tttcccagagaaaaa

SEQ ID NO: 1814927 - DNA, 15 bp, Homo sapiens
ttcccagagaaaaaa

SEQ ID NO: 1814928 - DNA, 15 bp, Homo sapiens
tcccagagaaaaaaa

SEQ ID NO: 1814929 - DNA, 15 bp, Homo sapiens
cccagagaaaaaaac

SEQ ID NO: 1814930 - DNA, 15 bp, Homo sapiens
ccagagaaaaaaact

SEQ ID NO: 1814931 - DNA, 15 bp, Homo sapiens
cagagaaaaaaactc

SEQ ID NO: 1814932 - DNA, 15 bp, Homo sapiens
agagaaaaaaactcc

SEQ ID NO: 1814933 - DNA, 15 bp, Homo sapiens
gagaaaaaaactcca

SEQ ID NO: 1814934 - DNA, 15 bp, Homo sapiens
agaaaaaaactccaa

SEQ ID NO: 1814935 - DNA, 15 bp, Homo sapiens
gaaaaaaactccaaa

SEQ ID NO: 1814936 - DNA, 15 bp, Homo sapiens
aaaaaaactccaaaa

SEQ ID NO: 1814937 - DNA, 15 bp, Homo sapiens
aaaaaactccaaaaa

SEQ ID NO: 1814938 - DNA, 15 bp, Homo sapiens
aaaaactccaaaaat

SEQ ID NO: 1814939 - DNA, 15 bp, Homo sapiens
aaaactccaaaaatg

SEQ ID NO: 1814940 - DNA, 15 bp, Homo sapiens
aaactccaaaaatgt

SEQ ID NO: 1814941 - DNA, 15 bp, Homo sapiens
aactccaaaaatgtc

SEQ ID NO: 1814942 - DNA, 15 bp, Homo sapiens
actccaaaaatgtcc

SEQ ID NO: 1814943 - DNA, 15 bp, Homo sapiens
ctccaaaaatgtcca

SEQ ID NO: 1814944 - DNA, 15 bp, Homo sapiens
tccaaaaatgtccaa

SEQ ID NO: 1814945 - DNA, 15 bp, Homo sapiens
ccaaaaatgtccaat

SEQ ID NO: 1814946 - DNA, 15 bp, Homo sapiens
caaaaatgtccaata

SEQ ID NO: 1814947 - DNA, 15 bp, Homo sapiens
aaaaatgtccaataa

SEQ ID NO: 1814948 - DNA, 15 bp, Homo sapiens
aaaatgtccaataac

SEQ ID NO: 1814949 - DNA, 15 bp, Homo sapiens
aaatgtccaataacc

SEQ ID NO: 1814950 - DNA, 15 bp, Homo sapiens
aatgtccaataacca

SEQ ID NO: 1814951 - DNA, 15 bp, Homo sapiens
atgtccaataaccaa

SEQ ID NO: 1814952 - DNA, 15 bp, Homo sapiens
tgtccaataaccaag

SEQ ID NO: 1814953 - DNA, 15 bp, Homo sapiens
gtccaataaccaagt

SEQ ID NO: 1814954 - DNA, 15 bp, Homo sapiens
tccaataaccaagtg

SEQ ID NO: 1814955 - DNA, 15 bp, Homo sapiens
ccaataaccaagtgc

SEQ ID NO: 1814956 - DNA, 15 bp, Homo sapiens
caataaccaagtgca

SEQ ID NO: 1814957 - DNA, 15 bp, Homo sapiens
aataaccaagtgcac

SEQ ID NO: 1814958 - DNA, 15 bp, Homo sapiens
ataaccaagtgcaca

SEQ ID NO: 1814959 - DNA, 15 bp, Homo sapiens
taaccaagtgcacag

SEQ ID NO: 1814960 - DNA, 15 bp, Homo sapiens
aaccaagtgcacaga

SEQ ID NO: 1814961 - DNA, 15 bp, Homo sapiens
accaagtgcacagag

SEQ ID NO: 1814962 - DNA, 15 bp, Homo sapiens
ccaagtgcacagagt

SEQ ID NO: 1814963 - DNA, 15 bp, Homo sapiens
caagtgcacagagtt

SEQ ID NO: 1814964 - DNA, 15 bp, Homo sapiens
aagtgcacagagtta

SEQ ID NO: 1814965 - DNA, 15 bp, Homo sapiens
agtgcacagagttat

SEQ ID NO: 1814966 - DNA, 15 bp, Homo sapiens
gtgcacagagttatg

SEQ ID NO: 1814967 - DNA, 15 bp, Homo sapiens
tgcacagagttatgg

SEQ ID NO: 1814968 - DNA, 15 bp, Homo sapiens
gcacagagttatggt

SEQ ID NO: 1814969 - DNA, 15 bp, Homo sapiens
cacagagttatggtc

SEQ ID NO: 1814970 - DNA, 15 bp, Homo sapiens
acagagttatggtca

SEQ ID NO: 1814971 - DNA, 15 bp, Homo sapiens
cagagttatggtcaa

SEQ ID NO: 1814972 - DNA, 15 bp, Homo sapiens
agagttatggtcaat

SEQ ID NO: 1814973 - DNA, 15 bp, Homo sapiens
gagttatggtcaata

SEQ ID NO: 1814974 - DNA, 15 bp, Homo sapiens
agttatggtcaataa

SEQ ID NO: 1814975 - DNA, 15 bp, Homo sapiens
gttatggtcaataag

SEQ ID NO: 1814976 - DNA, 15 bp, Homo sapiens
ttatggtcaataaga

SEQ ID NO: 1814977 - DNA, 15 bp, Homo sapiens
tatggtcaataagac

SEQ ID NO: 1814978 - DNA, 15 bp, Homo sapiens
atggtcaataagact

SEQ ID NO: 1814979 - DNA, 15 bp, Homo sapiens
tggtcaataagactt

SEQ ID NO: 1814980 - DNA, 15 bp, Homo sapiens
ggtcaataagacttt

SEQ ID NO: 1814981 - DNA, 15 bp, Homo sapiens
gtcaataagactttg

SEQ ID NO: 1814982 - DNA, 15 bp, Homo sapiens
tcaataagactttga

SEQ ID NO: 1814983 - DNA, 15 bp, Homo sapiens
caataagactttgaa

SEQ ID NO: 1814984 - DNA, 15 bp, Homo sapiens
aataagactttgaac

SEQ ID NO: 1814985 - DNA, 15 bp, Homo sapiens
ataagactttgaaca

SEQ ID NO: 1814986 - DNA, 15 bp, Homo sapiens
taagactttgaacat

SEQ ID NO: 1814987 - DNA, 15 bp, Homo sapiens
aagactttgaacatg

SEQ ID NO: 1814988 - DNA, 15 bp, Homo sapiens
agactttgaacatgc

SEQ ID NO: 1814989 - DNA, 15 bp, Homo sapiens
gactttgaacatgca

SEQ ID NO: 1814990 - DNA, 15 bp, Homo sapiens
actttgaacatgcat

SEQ ID NO: 1814991 - DNA, 15 bp, Homo sapiens
ctttgaacatgcatc

SEQ ID NO: 1814992 - DNA, 15 bp, Homo sapiens
tttgaacatgcatca

SEQ ID NO: 1814993 - DNA, 15 bp, Homo sapiens
ttgaacatgcatcac

SEQ ID NO: 1814994 - DNA, 15 bp, Homo sapiens
tgaacatgcatcaca

SEQ ID NO: 1814995 - DNA, 15 bp, Homo sapiens
gaacatgcatcacac

SEQ ID NO: 1814996 - DNA, 15 bp, Homo sapiens
aacatgcatcacaca

SEQ ID NO: 1814997 - DNA, 15 bp, Homo sapiens
acatgcatcacacat

SEQ ID NO: 1814998 - DNA, 15 bp, Homo sapiens
catgcatcacacata

SEQ ID NO: 1814999 - DNA, 15 bp, Homo sapiens
atgcatcacacatac

SEQ ID NO: 1815000 - DNA, 15 bp, Homo sapiens
tgcatcacacataca

SEQ ID NO: 1815001 - DNA, 15 bp, Homo sapiens
gcatcacacatacat

SEQ ID NO: 1815002 - DNA, 15 bp, Homo sapiens
catcacacatacata

SEQ ID NO: 1815003 - DNA, 15 bp, Homo sapiens
atcacacatacataa

SEQ ID NO: 1815004 - DNA, 15 bp, Homo sapiens
tcacacatacataag

SEQ ID NO: 1815005 - DNA, 15 bp, Homo sapiens
cacacatacataagt

SEQ ID NO: 1815006 - DNA, 15 bp, Homo sapiens
acacatacataagta

SEQ ID NO: 1815007 - DNA, 15 bp, Homo sapiens
cacatacataagtac

SEQ ID NO: 1815008 - DNA, 15 bp, Homo sapiens
acatacataagtaca

SEQ ID NO: 1815009 - DNA, 15 bp, Homo sapiens
catacataagtacat

SEQ ID NO: 1815010 - DNA, 15 bp, Homo sapiens
atacataagtacata

SEQ ID NO: 1815011 - DNA, 15 bp, Homo sapiens
tacataagtacataa

SEQ ID NO: 1815012 - DNA, 15 bp, Homo sapiens
acataagtacataaa

SEQ ID NO: 1815013 - DNA, 15 bp, Homo sapiens
cataagtacataaag

SEQ ID NO: 1815014 - DNA, 15 bp, Homo sapiens
ataagtacataaaga

SEQ ID NO: 1815015 - DNA, 15 bp, Homo sapiens
taagtacataaagaa

SEQ ID NO: 1815016 - DNA, 15 bp, Homo sapiens
aagtacataaagaaa

SEQ ID NO: 1815017 - DNA, 15 bp, Homo sapiens
agtacataaagaaaa

SEQ ID NO: 1815018 - DNA, 15 bp, Homo sapiens
gtacataaagaaaat

SEQ ID NO: 1815019 - DNA, 15 bp, Homo sapiens
tacataaagaaaatt

SEQ ID NO: 1815020 - DNA, 15 bp, Homo sapiens
acataaagaaaattt

SEQ ID NO: 1815021 - DNA, 15 bp, Homo sapiens
cataaagaaaatttt

SEQ ID NO: 1815022 - DNA, 15 bp, Homo sapiens
ataaagaaaattttc

SEQ ID NO: 1815023 - DNA, 15 bp, Homo sapiens
taaagaaaattttca

SEQ ID NO: 1815024 - DNA, 15 bp, Homo sapiens
aaagaaaattttcat

SEQ ID NO: 1815025 - DNA, 15 bp, Homo sapiens
aagaaaattttcatt

SEQ ID NO: 1815026 - DNA, 15 bp, Homo sapiens
agaaaattttcattt

SEQ ID NO: 1815027 - DNA, 15 bp, Homo sapiens
gaaaattttcattta

SEQ ID NO: 1815028 - DNA, 15 bp, Homo sapiens
aaaattttcatttat

SEQ ID NO: 1815029 - DNA, 15 bp, Homo sapiens
aaattttcatttatt

SEQ ID NO: 1815030 - DNA, 15 bp, Homo sapiens
aattttcatttattt

SEQ ID NO: 1815031 - DNA, 15 bp, Homo sapiens
attttcatttatttt

SEQ ID NO: 1815032 - DNA, 15 bp, Homo sapiens
ttttcatttattttt

SEQ ID NO: 1815033 - DNA, 15 bp, Homo sapiens
tttcatttatttttc

SEQ ID NO: 1815034 - DNA, 15 bp, Homo sapiens
ttcatttatttttcc

SEQ ID NO: 1815035 - DNA, 15 bp, Homo sapiens
catttatttttccct

SEQ ID NO: 1815036 - DNA, 15 bp, Homo sapiens
atttatttttccctc

SEQ ID NO: 1815037 - DNA, 15 bp, Homo sapiens
tttatttttccctca

SEQ ID NO: 1815038 - DNA, 15 bp, Homo sapiens
ttatttttccctcag

SEQ ID NO: 1815039 - DNA, 15 bp, Homo sapiens
tatttttccctcaga

SEQ ID NO: 1815040 - DNA, 15 bp, Homo sapiens
atttttccctcagat

SEQ ID NO: 1815041 - DNA, 15 bp, Homo sapiens
tttttccctcagata

SEQ ID NO: 1815042 - DNA, 15 bp, Homo sapiens
ttttccctcagatat

SEQ ID NO: 1815043 - DNA, 15 bp, Homo sapiens
tttccctcagatata

SEQ ID NO: 1815044 - DNA, 15 bp, Homo sapiens
ttccctcagatatac

SEQ ID NO: 1815045 - DNA, 15 bp, Homo sapiens
tccctcagatatact

SEQ ID NO: 1815046 - DNA, 15 bp, Homo sapiens
ccctcagatatactt

SEQ ID NO: 1815047 - DNA, 15 bp, Homo sapiens
cctcagatatacttc

SEQ ID NO: 1815048 - DNA, 15 bp, Homo sapiens
ctcagatatacttca

SEQ ID NO: 1815049 - DNA, 15 bp, Homo sapiens
tcagatatacttcaa

SEQ ID NO: 1815050 - DNA, 15 bp, Homo sapiens
cagatatacttcaaa

SEQ ID NO: 1815051 - DNA, 15 bp, Homo sapiens
agatatacttcaaaa

SEQ ID NO: 1815052 - DNA, 15 bp, Homo sapiens
gatatacttcaaaat

SEQ ID NO: 1815053 - DNA, 15 bp, Homo sapiens
atatacttcaaaata

SEQ ID NO: 1815054 - DNA, 15 bp, Homo sapiens
tatacttcaaaataa

SEQ ID NO: 1815055 - DNA, 15 bp, Homo sapiens
atacttcaaaataac

SEQ ID NO: 1815056 - DNA, 15 bp, Homo sapiens
tacttcaaaataaca

SEQ ID NO: 1815057 - DNA, 15 bp, Homo sapiens
acttcaaaataacat

SEQ ID NO: 1815058 - DNA, 15 bp, Homo sapiens
cttcaaaataacatg

SEQ ID NO: 1815059 - DNA, 15 bp, Homo sapiens
ttcaaaataacatgt

SEQ ID NO: 1815060 - DNA, 15 bp, Homo sapiens
tcaaaataacatgta

SEQ ID NO: 1815061 - DNA, 15 bp, Homo sapiens
caaaataacatgtag

SEQ ID NO: 1815062 - DNA, 15 bp, Homo sapiens
aaaataacatgtaga

SEQ ID NO: 1815063 - DNA, 15 bp, Homo sapiens
aaataacatgtagac

SEQ ID NO: 1815064 - DNA, 15 bp, Homo sapiens
aataacatgtagaca

SEQ ID NO: 1815065 - DNA, 15 bp, Homo sapiens
ataacatgtagacac

SEQ ID NO: 1815066 - DNA, 15 bp, Homo sapiens
taacatgtagacaca

SEQ ID NO: 1815067 - DNA, 15 bp, Homo sapiens
aacatgtagacacag

SEQ ID NO: 1815068 - DNA, 15 bp, Homo sapiens
acatgtagacacaga

SEQ ID NO: 1815069 - DNA, 15 bp, Homo sapiens
catgtagacacagaa

SEQ ID NO: 1815070 - DNA, 15 bp, Homo sapiens
atgtagacacagaat

SEQ ID NO: 1815071 - DNA, 15 bp, Homo sapiens
tgtagacacagaatc

SEQ ID NO: 1815072 - DNA, 15 bp, Homo sapiens
gtagacacagaatca

SEQ ID NO: 1815073 - DNA, 15 bp, Homo sapiens
tagacacagaatcac

SEQ ID NO: 1815074 - DNA, 15 bp, Homo sapiens
agacacagaatcaca

SEQ ID NO: 1815075 - DNA, 15 bp, Homo sapiens
gacacagaatcacaa

SEQ ID NO: 1815076 - DNA, 15 bp, Homo sapiens
acacagaatcacaaa

SEQ ID NO: 1815077 - DNA, 15 bp, Homo sapiens
cacagaatcacaaat

SEQ ID NO: 1815078 - DNA, 15 bp, Homo sapiens
acagaatcacaaata

SEQ ID NO: 1815079 - DNA, 15 bp, Homo sapiens
cagaatcacaaatat

SEQ ID NO: 1815080 - DNA, 15 bp, Homo sapiens
agaatcacaaatata

SEQ ID NO: 1815081 - DNA, 15 bp, Homo sapiens
gaatcacaaatatat

SEQ ID NO: 1815082 - DNA, 15 bp, Homo sapiens
aatcacaaatatata

SEQ ID NO: 1815083 - DNA, 15 bp, Homo sapiens
atcacaaatatatac

SEQ ID NO: 1815084 - DNA, 15 bp, Homo sapiens
tcacaaatatataca

SEQ ID NO: 1815085 - DNA, 15 bp, Homo sapiens
cacaaatatatacaa

SEQ ID NO: 1815086 - DNA, 15 bp, Homo sapiens
acaaatatatacaaa

SEQ ID NO: 1815087 - DNA, 15 bp, Homo sapiens
caaatatatacaaaa

SEQ ID NO: 1815088 - DNA, 15 bp, Homo sapiens
aaatatatacaaaac

SEQ ID NO: 1815089 - DNA, 15 bp, Homo sapiens
aatatatacaaaaca

SEQ ID NO: 1815090 - DNA, 15 bp, Homo sapiens
atatatacaaaacaa

SEQ ID NO: 1815091 - DNA, 15 bp, Homo sapiens
tatatacaaaacaaa

SEQ ID NO: 1815092 - DNA, 15 bp, Homo sapiens
atatacaaaacaaag

SEQ ID NO: 1815093 - DNA, 15 bp, Homo sapiens
tatacaaaacaaagt

SEQ ID NO: 1815094 - DNA, 15 bp, Homo sapiens
atacaaaacaaagta

SEQ ID NO: 1815095 - DNA, 15 bp, Homo sapiens
tacaaaacaaagtat

SEQ ID NO: 1815096 - DNA, 15 bp, Homo sapiens
acaaaacaaagtatc

SEQ ID NO: 1815097 - DNA, 15 bp, Homo sapiens
caaaacaaagtatcg

SEQ ID NO: 1815098 - DNA, 15 bp, Homo sapiens
aaaacaaagtatcgc

SEQ ID NO: 1815099 - DNA, 15 bp, Homo sapiens
aaacaaagtatcgcc

SEQ ID NO: 1815100 - DNA, 15 bp, Homo sapiens
aacaaagtatcgcct

SEQ ID NO: 1815101 - DNA, 15 bp, Homo sapiens
acaaagtatcgcctg

SEQ ID NO: 1815102 - DNA, 15 bp, Homo sapiens
caaagtatcgcctgg

SEQ ID NO: 1815103 - DNA, 15 bp, Homo sapiens
aaagtatcgcctggt

SEQ ID NO: 1815104 - DNA, 15 bp, Homo sapiens
aagtatcgcctggtt

SEQ ID NO: 1815105 - DNA, 15 bp, Homo sapiens
agtatcgcctggtta

SEQ ID NO: 1815106 - DNA, 15 bp, Homo sapiens
gtatcgcctggttat

SEQ ID NO: 1815107 - DNA, 15 bp, Homo sapiens
tatcgcctggttatt

SEQ ID NO: 1815108 - DNA, 15 bp, Homo sapiens
atcgcctggttattt

SEQ ID NO: 1815109 - DNA, 15 bp, Homo sapiens
tcgcctggttatttc

SEQ ID NO: 1815110 - DNA, 15 bp, Homo sapiens
cgcctggttatttca

SEQ ID NO: 1815111 - DNA, 15 bp, Homo sapiens
gcctggttatttcaa

SEQ ID NO: 1815112 - DNA, 15 bp, Homo sapiens
cctggttatttcaag

SEQ ID NO: 1815113 - DNA, 15 bp, Homo sapiens
ctggttatttcaaga

SEQ ID NO: 1815114 - DNA, 15 bp, Homo sapiens
tggttatttcaagaa

SEQ ID NO: 1815115 - DNA, 15 bp, Homo sapiens
ggttatttcaagaag

SEQ ID NO: 1815116 - DNA, 15 bp, Homo sapiens
gttatttcaagaaga

SEQ ID NO: 1815117 - DNA, 15 bp, Homo sapiens
ttatttcaagaagag

SEQ ID NO: 1815118 - DNA, 15 bp, Homo sapiens
tatttcaagaagagt

SEQ ID NO: 1815119 - DNA, 15 bp, Homo sapiens
atttcaagaagagtt

SEQ ID NO: 1815120 - DNA, 15 bp, Homo sapiens
tttcaagaagagttt

SEQ ID NO: 1815121 - DNA, 15 bp, Homo sapiens
ttcaagaagagtttt

SEQ ID NO: 1815122 - DNA, 15 bp, Homo sapiens
tcaagaagagttttc

SEQ ID NO: 1815123 - DNA, 15 bp, Homo sapiens
caagaagagttttcc

SEQ ID NO: 1815124 - DNA, 15 bp, Homo sapiens
aagaagagttttccc

SEQ ID NO: 1815125 - DNA, 15 bp, Homo sapiens
agaagagttttccct

SEQ ID NO: 1815126 - DNA, 15 bp, Homo sapiens
gaagagttttccctc

SEQ ID NO: 1815127 - DNA, 15 bp, Homo sapiens
aagagttttccctca

SEQ ID NO: 1815128 - DNA, 15 bp, Homo sapiens
agagttttccctcaa

SEQ ID NO: 1815129 - DNA, 15 bp, Homo sapiens
gagttttccctcaat

SEQ ID NO: 1815130 - DNA, 15 bp, Homo sapiens
agttttccctcaatt

SEQ ID NO: 1815131 - DNA, 15 bp, Homo sapiens
gttttccctcaattt

SEQ ID NO: 1815132 - DNA, 15 bp, Homo sapiens
ttttccctcaatttt

SEQ ID NO: 1815133 - DNA, 15 bp, Homo sapiens
tttccctcaattttc

SEQ ID NO: 1815134 - DNA, 15 bp, Homo sapiens
ttccctcaattttct

SEQ ID NO: 1815135 - DNA, 15 bp, Homo sapiens
tccctcaattttctt

SEQ ID NO: 1815136 - DNA, 15 bp, Homo sapiens
ccctcaattttctta

SEQ ID NO: 1815137 - DNA, 15 bp, Homo sapiens
cctcaattttcttag

SEQ ID NO: 1815138 - DNA, 15 bp, Homo sapiens
ctcaattttcttagc

SEQ ID NO: 1815139 - DNA, 15 bp, Homo sapiens
tcaattttcttagct

SEQ ID NO: 1815140 - DNA, 15 bp, Homo sapiens
caattttcttagctg

SEQ ID NO: 1815141 - DNA, 15 bp, Homo sapiens
aattttcttagctgc

SEQ ID NO: 1815142 - DNA, 15 bp, Homo sapiens
attttcttagctgct

SEQ ID NO: 1815143 - DNA, 15 bp, Homo sapiens
ttttcttagctgctg

SEQ ID NO: 1815144 - DNA, 15 bp, Homo sapiens
tttcttagctgctgt

SEQ ID NO: 1815145 - DNA, 15 bp, Homo sapiens
ttcttagctgctgtg

SEQ ID NO: 1815146 - DNA, 15 bp, Homo sapiens
tcttagctgctgtgc

SEQ ID NO: 1815147 - DNA, 15 bp, Homo sapiens
cttagctgctgtgca

SEQ ID NO: 1815148 - DNA, 15 bp, Homo sapiens
ttagctgctgtgcat

SEQ ID NO: 1815149 - DNA, 15 bp, Homo sapiens
tagctgctgtgcata

SEQ ID NO: 1815150 - DNA, 15 bp, Homo sapiens
agctgctgtgcataa

SEQ ID NO: 1815151 - DNA, 15 bp, Homo sapiens
gctgctgtgcataaa

SEQ ID NO: 1815152 - DNA, 15 bp, Homo sapiens
ctgctgtgcataaaa

SEQ ID NO: 1815153 - DNA, 15 bp, Homo sapiens
tgctgtgcataaaat

SEQ ID NO: 1815154 - DNA, 15 bp, Homo sapiens
gctgtgcataaaatt

SEQ ID NO: 1815155 - DNA, 15 bp, Homo sapiens
ctgtgcataaaattc

SEQ ID NO: 1815156 - DNA, 15 bp, Homo sapiens
tgtgcataaaattca

SEQ ID NO: 1815157 - DNA, 15 bp, Homo sapiens
gtgcataaaattcaa

SEQ ID NO: 1815158 - DNA, 15 bp, Homo sapiens
tgcataaaattcaaa

SEQ ID NO: 1815159 - DNA, 15 bp, Homo sapiens
gcataaaattcaaag

SEQ ID NO: 1815160 - DNA, 15 bp, Homo sapiens
cataaaattcaaagc

SEQ ID NO: 1815161 - DNA, 15 bp, Homo sapiens
ataaaattcaaagct

SEQ ID NO: 1815162 - DNA, 15 bp, Homo sapiens
taaaattcaaagctt

SEQ ID NO: 1815163 - DNA, 15 bp, Homo sapiens
aaaattcaaagcttt

SEQ ID NO: 1815164 - DNA, 15 bp, Homo sapiens
aaattcaaagctttc

SEQ ID NO: 1815165 - DNA, 15 bp, Homo sapiens
aattcaaagctttcc

SEQ ID NO: 1815166 - DNA, 15 bp, Homo sapiens
attcaaagctttcct

SEQ ID NO: 1815167 - DNA, 15 bp, Homo sapiens
ttcaaagctttcctg

SEQ ID NO: 1815168 - DNA, 15 bp, Homo sapiens
tcaaagctttcctgt

SEQ ID NO: 1815169 - DNA, 15 bp, Homo sapiens
caaagctttcctgtt

SEQ ID NO: 1815170 - DNA, 15 bp, Homo sapiens
aaagctttcctgtta

SEQ ID NO: 1815171 - DNA, 15 bp, Homo sapiens
aagctttcctgttaa

SEQ ID NO: 1815172 - DNA, 15 bp, Homo sapiens
agctttcctgttaag

SEQ ID NO: 1815173 - DNA, 15 bp, Homo sapiens
gctttcctgttaagg

SEQ ID NO: 1815174 - DNA, 15 bp, Homo sapiens
ctttcctgttaagga

SEQ ID NO: 1815175 - DNA, 15 bp, Homo sapiens
tttcctgttaaggag

SEQ ID NO: 1815176 - DNA, 15 bp, Homo sapiens
ttcctgttaaggaga

SEQ ID NO: 1815177 - DNA, 15 bp, Homo sapiens
tcctgttaaggagaa

SEQ ID NO: 1815178 - DNA, 15 bp, Homo sapiens
cctgttaaggagaaa

SEQ ID NO: 1815179 - DNA, 15 bp, Homo sapiens
ctgttaaggagaaaa

SEQ ID NO: 1815180 - DNA, 15 bp, Homo sapiens
tgttaaggagaaaaa

SEQ ID NO: 1815181 - DNA, 15 bp, Homo sapiens
gttaaggagaaaaaa

SEQ ID NO: 1815182 - DNA, 15 bp, Homo sapiens
ttaaggagaaaaaaa

SEQ ID NO: 1815183 - DNA, 15 bp, Homo sapiens
taaggagaaaaaaag

SEQ ID NO: 1815184 - DNA, 15 bp, Homo sapiens
aaggagaaaaaaaga

SEQ ID NO: 1815185 - DNA, 15 bp, Homo sapiens
aggagaaaaaaagag

SEQ ID NO: 1815186 - DNA, 15 bp, Homo sapiens
ggagaaaaaaagagg

SEQ ID NO: 1815187 - DNA, 15 bp, Homo sapiens
gagaaaaaaagaggg

SEQ ID NO: 1815188 - DNA, 15 bp, Homo sapiens
gaaaaaaagagggaa

SEQ ID NO: 1815189 - DNA, 15 bp, Homo sapiens
aaaaaaagagggaag

SEQ ID NO: 1815190 - DNA, 15 bp, Homo sapiens
aaaaaagagggaagt

SEQ ID NO: 1815191 - DNA, 15 bp, Homo sapiens
aaaaagagggaagtt

SEQ ID NO: 1815192 - DNA, 15 bp, Homo sapiens
aaaagagggaagtta

SEQ ID NO: 1815193 - DNA, 15 bp, Homo sapiens
aaagagggaagttag

SEQ ID NO: 1815194 - DNA, 15 bp, Homo sapiens
aagagggaagttaga

SEQ ID NO: 1815195 - DNA, 15 bp, Homo sapiens
agagggaagttagag

SEQ ID NO: 1815196 - DNA, 15 bp, Homo sapiens
gagggaagttagaga

SEQ ID NO: 1815197 - DNA, 15 bp, Homo sapiens
agggaagttagagat

SEQ ID NO: 1815198 - DNA, 15 bp, Homo sapiens
gggaagttagagata

SEQ ID NO: 1815199 - DNA, 15 bp, Homo sapiens
ggaagttagagatac

SEQ ID NO: 1815200 - DNA, 15 bp, Homo sapiens
gaagttagagatacc

SEQ ID NO: 1815201 - DNA, 15 bp, Homo sapiens
aagttagagatacca

SEQ ID NO: 1815202 - DNA, 15 bp, Homo sapiens
agttagagataccag

SEQ ID NO: 1815203 - DNA, 15 bp, Homo sapiens
gttagagataccagc

SEQ ID NO: 1815204 - DNA, 15 bp, Homo sapiens
ttagagataccagca

SEQ ID NO: 1815205 - DNA, 15 bp, Homo sapiens
tagagataccagcaa

SEQ ID NO: 1815206 - DNA, 15 bp, Homo sapiens
agagataccagcaag

SEQ ID NO: 1815207 - DNA, 15 bp, Homo sapiens
gagataccagcaaga

SEQ ID NO: 1815208 - DNA, 15 bp, Homo sapiens
agataccagcaagag

SEQ ID NO: 1815209 - DNA, 15 bp, Homo sapiens
gataccagcaagagg

SEQ ID NO: 1815210 - DNA, 15 bp, Homo sapiens
ataccagcaagaggt

SEQ ID NO: 1815211 - DNA, 15 bp, Homo sapiens
taccagcaagaggtg

SEQ ID NO: 1815212 - DNA, 15 bp, Homo sapiens
accagcaagaggtga

SEQ ID NO: 1815213 - DNA, 15 bp, Homo sapiens
ccagcaagaggtgat

SEQ ID NO: 1815214 - DNA, 15 bp, Homo sapiens
cagcaagaggtgatg

SEQ ID NO: 1815215 - DNA, 15 bp, Homo sapiens
agcaagaggtgatgg

SEQ ID NO: 1815216 - DNA, 15 bp, Homo sapiens
gcaagaggtgatggt

SEQ ID NO: 1815217 - DNA, 15 bp, Homo sapiens
caagaggtgatggta

SEQ ID NO: 1815218 - DNA, 15 bp, Homo sapiens
aagaggtgatggtac

SEQ ID NO: 1815219 - DNA, 15 bp, Homo sapiens
agaggtgatggtaca

SEQ ID NO: 1815220 - DNA, 15 bp, Homo sapiens
gaggtgatggtacat

SEQ ID NO: 1815221 - DNA, 15 bp, Homo sapiens
aggtgatggtacata

SEQ ID NO: 1815222 - DNA, 15 bp, Homo sapiens
ggtgatggtacataa

SEQ ID NO: 1815223 - DNA, 15 bp, Homo sapiens
gtgatggtacataac

SEQ ID NO: 1815224 - DNA, 15 bp, Homo sapiens
tgatggtacataact

SEQ ID NO: 1815225 - DNA, 15 bp, Homo sapiens
gatggtacataactt

SEQ ID NO: 1815226 - DNA, 15 bp, Homo sapiens
atggtacataactta

SEQ ID NO: 1815227 - DNA, 15 bp, Homo sapiens
tggtacataacttaa

SEQ ID NO: 1815228 - DNA, 15 bp, Homo sapiens
ggtacataacttaaa

SEQ ID NO: 1815229 - DNA, 15 bp, Homo sapiens
gtacataacttaaaa

SEQ ID NO: 1815230 - DNA, 15 bp, Homo sapiens
tacataacttaaaaa

SEQ ID NO: 1815231 - DNA, 15 bp, Homo sapiens
acataacttaaaaaa

SEQ ID NO: 1815232 - DNA, 15 bp, Homo sapiens
cataacttaaaaaat

SEQ ID NO: 1815233 - DNA, 15 bp, Homo sapiens
ataacttaaaaaatc

SEQ ID NO: 1815234 - DNA, 15 bp, Homo sapiens
taacttaaaaaatca

SEQ ID NO: 1815235 - DNA, 15 bp, Homo sapiens
aacttaaaaaatcat

SEQ ID NO: 1815236 - DNA, 15 bp, Homo sapiens
acttaaaaaatcata

SEQ ID NO: 1815237 - DNA, 15 bp, Homo sapiens
cttaaaaaatcataa

SEQ ID NO: 1815238 - DNA, 15 bp, Homo sapiens
ttaaaaaatcataaa

SEQ ID NO: 1815239 - DNA, 15 bp, Homo sapiens
taaaaaatcataaaa

SEQ ID NO: 1815240 - DNA, 15 bp, Homo sapiens
aaaaaatcataaaac

SEQ ID NO: 1815241 - DNA, 15 bp, Homo sapiens
aaaaatcataaaaca

SEQ ID NO: 1815242 - DNA, 15 bp, Homo sapiens
aaaatcataaaacac

SEQ ID NO: 1815243 - DNA, 15 bp, Homo sapiens
aaatcataaaacact

SEQ ID NO: 1815244 - DNA, 15 bp, Homo sapiens
aatcataaaacacta

SEQ ID NO: 1815245 - DNA, 15 bp, Homo sapiens
atcataaaacactac

SEQ ID NO: 1815246 - DNA, 15 bp, Homo sapiens
tcataaaacactacc

SEQ ID NO: 1815247 - DNA, 15 bp, Homo sapiens
cataaaacactacca

SEQ ID NO: 1815248 - DNA, 15 bp, Homo sapiens
ataaaacactaccaa

SEQ ID NO: 1815249 - DNA, 15 bp, Homo sapiens
taaaacactaccaac

SEQ ID NO: 1815250 - DNA, 15 bp, Homo sapiens
aaaacactaccaact

SEQ ID NO: 1815251 - DNA, 15 bp, Homo sapiens
aaacactaccaactg

SEQ ID NO: 1815252 - DNA, 15 bp, Homo sapiens
aacactaccaactgg

SEQ ID NO: 1815253 - DNA, 15 bp, Homo sapiens
acactaccaactggt

SEQ ID NO: 1815254 - DNA, 15 bp, Homo sapiens
cactaccaactggta

SEQ ID NO: 1815255 - DNA, 15 bp, Homo sapiens
actaccaactggtag

SEQ ID NO: 1815256 - DNA, 15 bp, Homo sapiens
ctaccaactggtagc

SEQ ID NO: 1815257 - DNA, 15 bp, Homo sapiens
taccaactggtagct

SEQ ID NO: 1815258 - DNA, 15 bp, Homo sapiens
accaactggtagcta

SEQ ID NO: 1815259 - DNA, 15 bp, Homo sapiens
ccaactggtagctaa

SEQ ID NO: 1815260 - DNA, 15 bp, Homo sapiens
caactggtagctaag

SEQ ID NO: 1815261 - DNA, 15 bp, Homo sapiens
aactggtagctaaga

SEQ ID NO: 1815262 - DNA, 15 bp, Homo sapiens
actggtagctaagac

SEQ ID NO: 1815263 - DNA, 15 bp, Homo sapiens
ctggtagctaagact

SEQ ID NO: 1815264 - DNA, 15 bp, Homo sapiens
tggtagctaagactg

SEQ ID NO: 1815265 - DNA, 15 bp, Homo sapiens
ggtagctaagactgc

SEQ ID NO: 1815266 - DNA, 15 bp, Homo sapiens
gtagctaagactgcc

SEQ ID NO: 1815267 - DNA, 15 bp, Homo sapiens
tagctaagactgcca

SEQ ID NO: 1815268 - DNA, 15 bp, Homo sapiens
agctaagactgccag

SEQ ID NO: 1815269 - DNA, 15 bp, Homo sapiens
gctaagactgccagg

SEQ ID NO: 1815270 - DNA, 15 bp, Homo sapiens
ctaagactgccaggc

SEQ ID NO: 1815271 - DNA, 15 bp, Homo sapiens
taagactgccaggcc

SEQ ID NO: 1815272 - DNA, 15 bp, Homo sapiens
aagactgccaggccc

SEQ ID NO: 1815273 - DNA, 15 bp, Homo sapiens
agactgccaggccca

SEQ ID NO: 1815274 - DNA, 15 bp, Homo sapiens
gactgccaggcccat

SEQ ID NO: 1815275 - DNA, 15 bp, Homo sapiens
actgccaggcccatg

SEQ ID NO: 1815276 - DNA, 15 bp, Homo sapiens
ctgccaggcccatgg

SEQ ID NO: 1815277 - DNA, 15 bp, Homo sapiens
tgccaggcccatgga

SEQ ID NO: 1815278 - DNA, 15 bp, Homo sapiens
gccaggcccatggaa

SEQ ID NO: 1815279 - DNA, 15 bp, Homo sapiens
ccaggcccatggaag

SEQ ID NO: 1815280 - DNA, 15 bp, Homo sapiens
caggcccatggaaga

SEQ ID NO: 1815281 - DNA, 15 bp, Homo sapiens
aggcccatggaagat

SEQ ID NO: 1815282 - DNA, 15 bp, Homo sapiens
ggcccatggaagatg

SEQ ID NO: 1815283 - DNA, 15 bp, Homo sapiens
gcccatggaagatgc

SEQ ID NO: 1815284 - DNA, 15 bp, Homo sapiens
cccatggaagatgct

SEQ ID NO: 1815285 - DNA, 15 bp, Homo sapiens
ccatggaagatgctg

SEQ ID NO: 1815286 - DNA, 15 bp, Homo sapiens
catggaagatgctgc

SEQ ID NO: 1815287 - DNA, 15 bp, Homo sapiens
atggaagatgctgcc

SEQ ID NO: 1815288 - DNA, 15 bp, Homo sapiens
tggaagatgctgccc

SEQ ID NO: 1815289 - DNA, 15 bp, Homo sapiens
ggaagatgctgcccc

SEQ ID NO: 1815290 - DNA, 15 bp, Homo sapiens
gaagatgctgcccct

SEQ ID NO: 1815291 - DNA, 15 bp, Homo sapiens
aagatgctgcccctc

SEQ ID NO: 1815292 - DNA, 15 bp, Homo sapiens
agatgctgcccctca

SEQ ID NO: 1815293 - DNA, 15 bp, Homo sapiens
gatgctgcccctcaa

SEQ ID NO: 1815294 - DNA, 15 bp, Homo sapiens
atgctgcccctcaag

SEQ ID NO: 1815295 - DNA, 15 bp, Homo sapiens
tgctgcccctcaagc

SEQ ID NO: 1815296 - DNA, 15 bp, Homo sapiens
gctgcccctcaagct

SEQ ID NO: 1815297 - DNA, 15 bp, Homo sapiens
ctgcccctcaagctt

SEQ ID NO: 1815298 - DNA, 15 bp, Homo sapiens
tgcccctcaagcttc

SEQ ID NO: 1815299 - DNA, 15 bp, Homo sapiens
gcccctcaagcttca

SEQ ID NO: 1815300 - DNA, 15 bp, Homo sapiens
cccctcaagcttcag

SEQ ID NO: 1815301 - DNA, 15 bp, Homo sapiens
ccctcaagcttcagt

SEQ ID NO: 1815302 - DNA, 15 bp, Homo sapiens
cctcaagcttcagta

SEQ ID NO: 1815303 - DNA, 15 bp, Homo sapiens
ctcaagcttcagtac

SEQ ID NO: 1815304 - DNA, 15 bp, Homo sapiens
tcaagcttcagtact

SEQ ID NO: 1815305 - DNA, 15 bp, Homo sapiens
caagcttcagtactc

SEQ ID NO: 1815306 - DNA, 15 bp, Homo sapiens
aagcttcagtactcc

SEQ ID NO: 1815307 - DNA, 15 bp, Homo sapiens
agcttcagtactcct

SEQ ID NO: 1815308 - DNA, 15 bp, Homo sapiens
gcttcagtactcctt

SEQ ID NO: 1815309 - DNA, 15 bp, Homo sapiens
cttcagtactccttc

SEQ ID NO: 1815310 - DNA, 15 bp, Homo sapiens
ttcagtactccttcc

SEQ ID NO: 1815311 - DNA, 15 bp, Homo sapiens
tcagtactccttcct

SEQ ID NO: 1815312 - DNA, 15 bp, Homo sapiens
cagtactccttcctt

SEQ ID NO: 1815313 - DNA, 15 bp, Homo sapiens
agtactccttccttg

SEQ ID NO: 1815314 - DNA, 15 bp, Homo sapiens
gtactccttccttgt

SEQ ID NO: 1815315 - DNA, 15 bp, Homo sapiens
tactccttccttgtt

SEQ ID NO: 1815316 - DNA, 15 bp, Homo sapiens
actccttccttgttt

SEQ ID NO: 1815317 - DNA, 15 bp, Homo sapiens
ctccttccttgtttc

SEQ ID NO: 1815318 - DNA, 15 bp, Homo sapiens
tccttccttgtttca

SEQ ID NO: 1815319 - DNA, 15 bp, Homo sapiens
ccttccttgtttcat

SEQ ID NO: 1815320 - DNA, 15 bp, Homo sapiens
cttccttgtttcatg

SEQ ID NO: 1815321 - DNA, 15 bp, Homo sapiens
ttccttgtttcatga

SEQ ID NO: 1815322 - DNA, 15 bp, Homo sapiens
tccttgtttcatgaa

SEQ ID NO: 1815323 - DNA, 15 bp, Homo sapiens
ccttgtttcatgaaa

SEQ ID NO: 1815324 - DNA, 15 bp, Homo sapiens
cttgtttcatgaaat

SEQ ID NO: 1815325 - DNA, 15 bp, Homo sapiens
ttgtttcatgaaatc

SEQ ID NO: 1815326 - DNA, 15 bp, Homo sapiens
tgtttcatgaaatca

SEQ ID NO: 1815327 - DNA, 15 bp, Homo sapiens
gtttcatgaaatcac

SEQ ID NO: 1815328 - DNA, 15 bp, Homo sapiens
tttcatgaaatcaca

SEQ ID NO: 1815329 - DNA, 15 bp, Homo sapiens
ttcatgaaatcacaa

SEQ ID NO: 1815330 - DNA, 15 bp, Homo sapiens
tcatgaaatcacaag

SEQ ID NO: 1815331 - DNA, 15 bp, Homo sapiens
catgaaatcacaagt

SEQ ID NO: 1815332 - DNA, 15 bp, Homo sapiens
atgaaatcacaagtt

SEQ ID NO: 1815333 - DNA, 15 bp, Homo sapiens
tgaaatcacaagttc

SEQ ID NO: 1815334 - DNA, 15 bp, Homo sapiens
gaaatcacaagttca

SEQ ID NO: 1815335 - DNA, 15 bp, Homo sapiens
aaatcacaagttcaa

SEQ ID NO: 1815336 - DNA, 15 bp, Homo sapiens
aatcacaagttcaag

SEQ ID NO: 1815337 - DNA, 15 bp, Homo sapiens
atcacaagttcaagg

SEQ ID NO: 1815338 - DNA, 15 bp, Homo sapiens
tcacaagttcaaggg

SEQ ID NO: 1815339 - DNA, 15 bp, Homo sapiens
cacaagttcaagggc

SEQ ID NO: 1815340 - DNA, 15 bp, Homo sapiens
acaagttcaagggcc

SEQ ID NO: 1815341 - DNA, 15 bp, Homo sapiens
caagttcaagggcct

SEQ ID NO: 1815342 - DNA, 15 bp, Homo sapiens
aagttcaagggcctc

SEQ ID NO: 1815343 - DNA, 15 bp, Homo sapiens
agttcaagggcctcg

SEQ ID NO: 1815344 - DNA, 15 bp, Homo sapiens
gttcaagggcctcgg

SEQ ID NO: 1815345 - DNA, 15 bp, Homo sapiens
ttcaagggcctcggg

SEQ ID NO: 1815346 - DNA, 15 bp, Homo sapiens
tcaagggcctcgggt

SEQ ID NO: 1815347 - DNA, 15 bp, Homo sapiens
caagggcctcgggtt

SEQ ID NO: 1815348 - DNA, 15 bp, Homo sapiens
aagggcctcgggttc

SEQ ID NO: 1815349 - DNA, 15 bp, Homo sapiens
agggcctcgggttca

SEQ ID NO: 1815350 - DNA, 15 bp, Homo sapiens
gggcctcgggttcag

SEQ ID NO: 1815351 - DNA, 15 bp, Homo sapiens
ggcctcgggttcaga

SEQ ID NO: 1815352 - DNA, 15 bp, Homo sapiens
gcctcgggttcagag

SEQ ID NO: 1815353 - DNA, 15 bp, Homo sapiens
cctcgggttcagagt

SEQ ID NO: 1815354 - DNA, 15 bp, Homo sapiens
ctcgggttcagagtt

SEQ ID NO: 1815355 - DNA, 15 bp, Homo sapiens
tcgggttcagagtta

SEQ ID NO: 1815356 - DNA, 15 bp, Homo sapiens
cgggttcagagttaa

SEQ ID NO: 1815357 - DNA, 15 bp, Homo sapiens
gggttcagagttaaa

SEQ ID NO: 1815358 - DNA, 15 bp, Homo sapiens
ggttcagagttaaag

SEQ ID NO: 1815359 - DNA, 15 bp, Homo sapiens
gttcagagttaaagc

SEQ ID NO: 1815360 - DNA, 15 bp, Homo sapiens
ttcagagttaaagct

SEQ ID NO: 1815361 - DNA, 15 bp, Homo sapiens
tcagagttaaagcta

SEQ ID NO: 1815362 - DNA, 15 bp, Homo sapiens
cagagttaaagctag

SEQ ID NO: 1815363 - DNA, 15 bp, Homo sapiens
agagttaaagctagc

SEQ ID NO: 1815364 - DNA, 15 bp, Homo sapiens
gagttaaagctagca

SEQ ID NO: 1815365 - DNA, 15 bp, Homo sapiens
agttaaagctagcag

SEQ ID NO: 1815366 - DNA, 15 bp, Homo sapiens
gttaaagctagcagc

SEQ ID NO: 1815367 - DNA, 15 bp, Homo sapiens
ttaaagctagcagca

SEQ ID NO: 1815368 - DNA, 15 bp, Homo sapiens
taaagctagcagcag

SEQ ID NO: 1815369 - DNA, 15 bp, Homo sapiens
aaagctagcagcagg

SEQ ID NO: 1815370 - DNA, 15 bp, Homo sapiens
aagctagcagcagga

SEQ ID NO: 1815371 - DNA, 15 bp, Homo sapiens
agctagcagcaggag

SEQ ID NO: 1815372 - DNA, 15 bp, Homo sapiens
gctagcagcaggagg

SEQ ID NO: 1815373 - DNA, 15 bp, Homo sapiens
ctagcagcaggaggt

SEQ ID NO: 1815374 - DNA, 15 bp, Homo sapiens
tagcagcaggaggta

SEQ ID NO: 1815375 - DNA, 15 bp, Homo sapiens
agcagcaggaggtag

SEQ ID NO: 1815376 - DNA, 15 bp, Homo sapiens
gcagcaggaggtagg

SEQ ID NO: 1815377 - DNA, 15 bp, Homo sapiens
cagcaggaggtaggg

SEQ ID NO: 1815378 - DNA, 15 bp, Homo sapiens
agcaggaggtagggt

SEQ ID NO: 1815379 - DNA, 15 bp, Homo sapiens
gcaggaggtagggtg

SEQ ID NO: 1815380 - DNA, 15 bp, Homo sapiens
caggaggtagggtgc

SEQ ID NO: 1815381 - DNA, 15 bp, Homo sapiens
aggaggtagggtgcg

SEQ ID NO: 1815382 - DNA, 15 bp, Homo sapiens
ggaggtagggtgcgt

SEQ ID NO: 1815383 - DNA, 15 bp, Homo sapiens
gaggtagggtgcgtg

SEQ ID NO: 1815384 - DNA, 15 bp, Homo sapiens
aggtagggtgcgtgt

SEQ ID NO: 1815385 - DNA, 15 bp, Homo sapiens
ggtagggtgcgtgtg

SEQ ID NO: 1815386 - DNA, 15 bp, Homo sapiens
gtagggtgcgtgtgt

SEQ ID NO: 1815387 - DNA, 15 bp, Homo sapiens
tagggtgcgtgtgtg

SEQ ID NO: 1815388 - DNA, 15 bp, Homo sapiens
agggtgcgtgtgtgt

SEQ ID NO: 1815389 - DNA, 15 bp, Homo sapiens
gggtgcgtgtgtgta

SEQ ID NO: 1815390 - DNA, 15 bp, Homo sapiens
ggtgcgtgtgtgtat

SEQ ID NO: 1815391 - DNA, 15 bp, Homo sapiens
gtgcgtgtgtgtata

SEQ ID NO: 1815392 - DNA, 15 bp, Homo sapiens
tgcgtgtgtgtatac

SEQ ID NO: 1815393 - DNA, 15 bp, Homo sapiens
gcgtgtgtgtatacg

SEQ ID NO: 1815394 - DNA, 15 bp, Homo sapiens
cgtgtgtgtatacgt

SEQ ID NO: 1815395 - DNA, 15 bp, Homo sapiens
gtgtgtgtatacgtg

SEQ ID NO: 1815396 - DNA, 15 bp, Homo sapiens
tgtgtgtatacgtgt

SEQ ID NO: 1815397 - DNA, 15 bp, Homo sapiens
gtgtgtatacgtgtg

SEQ ID NO: 1815398 - DNA, 15 bp, Homo sapiens
tgtgtatacgtgtgt

SEQ ID NO: 1815399 - DNA, 15 bp, Homo sapiens
gtgtatacgtgtgta

SEQ ID NO: 1815400 - DNA, 15 bp, Homo sapiens
tgtatacgtgtgtat

SEQ ID NO: 1815401 - DNA, 15 bp, Homo sapiens
gtatacgtgtgtatg

SEQ ID NO: 1815402 - DNA, 15 bp, Homo sapiens
tatacgtgtgtatgt

SEQ ID NO: 1815403 - DNA, 15 bp, Homo sapiens
atacgtgtgtatgtg

SEQ ID NO: 1815404 - DNA, 15 bp, Homo sapiens
tacgtgtgtatgtgc

SEQ ID NO: 1815405 - DNA, 15 bp, Homo sapiens
acgtgtgtatgtgca

SEQ ID NO: 1815406 - DNA, 15 bp, Homo sapiens
cgtgtgtatgtgcaa

SEQ ID NO: 1815407 - DNA, 15 bp, Homo sapiens
gtgtgtatgtgcaag

SEQ ID NO: 1815408 - DNA, 15 bp, Homo sapiens
tgtgtatgtgcaagc

SEQ ID NO: 1815409 - DNA, 15 bp, Homo sapiens
gtgtatgtgcaagca

SEQ ID NO: 1815410 - DNA, 15 bp, Homo sapiens
tgtatgtgcaagcat

SEQ ID NO: 1815411 - DNA, 15 bp, Homo sapiens
gtatgtgcaagcatg

SEQ ID NO: 1815412 - DNA, 15 bp, Homo sapiens
tatgtgcaagcatgt

SEQ ID NO: 1815413 - DNA, 15 bp, Homo sapiens
atgtgcaagcatgtg

SEQ ID NO: 1815414 - DNA, 15 bp, Homo sapiens
gtgcaagcatgtgtg

SEQ ID NO: 1815415 - DNA, 15 bp, Homo sapiens
tgcaagcatgtgtgt

SEQ ID NO: 1815416 - DNA, 15 bp, Homo sapiens
agcatgtgtgtgtgc

SEQ ID NO: 1815417 - DNA, 15 bp, Homo sapiens
catgtgtgtgtgcac

SEQ ID NO: 1815418 - DNA, 15 bp, Homo sapiens
atgtgtgtgtgcaca

SEQ ID NO: 1815419 - DNA, 15 bp, Homo sapiens
tgtgtgtgtgcacat

SEQ ID NO: 1815420 - DNA, 15 bp, Homo sapiens
gtgtgtgtgcacata

SEQ ID NO: 1815421 - DNA, 15 bp, Homo sapiens
tgtgtgtgcacatat

SEQ ID NO: 1815422 - DNA, 15 bp, Homo sapiens
gtgtgtgcacatatg

SEQ ID NO: 1815423 - DNA, 15 bp, Homo sapiens
tgtgtgcacatatgg

SEQ ID NO: 1815424 - DNA, 15 bp, Homo sapiens
gtgtgcacatatgga

SEQ ID NO: 1815425 - DNA, 15 bp, Homo sapiens
tgtgcacatatggag

SEQ ID NO: 1815426 - DNA, 15 bp, Homo sapiens
gtgcacatatggagg

SEQ ID NO: 1815427 - DNA, 15 bp, Homo sapiens
tgcacatatggaggt

SEQ ID NO: 1815428 - DNA, 15 bp, Homo sapiens
gcacatatggaggta

SEQ ID NO: 1815429 - DNA, 15 bp, Homo sapiens
cacatatggaggtat

SEQ ID NO: 1815430 - DNA, 15 bp, Homo sapiens
acatatggaggtatg

SEQ ID NO: 1815431 - DNA, 15 bp, Homo sapiens
catatggaggtatgg

SEQ ID NO: 1815432 - DNA, 15 bp, Homo sapiens
atatggaggtatggg

SEQ ID NO: 1815433 - DNA, 15 bp, Homo sapiens
tatggaggtatgggt

SEQ ID NO: 1815434 - DNA, 15 bp, Homo sapiens
atggaggtatgggta

SEQ ID NO: 1815435 - DNA, 15 bp, Homo sapiens
tggaggtatgggtat

SEQ ID NO: 1815436 - DNA, 15 bp, Homo sapiens
ggaggtatgggtatg

SEQ ID NO: 1815437 - DNA, 15 bp, Homo sapiens
gaggtatgggtatgg

SEQ ID NO: 1815438 - DNA, 15 bp, Homo sapiens
aggtatgggtatgga

SEQ ID NO: 1815439 - DNA, 15 bp, Homo sapiens
ggtatgggtatggaa

SEQ ID NO: 1815440 - DNA, 15 bp, Homo sapiens
gtatgggtatggaag

SEQ ID NO: 1815441 - DNA, 15 bp, Homo sapiens
tatgggtatggaagg

SEQ ID NO: 1815442 - DNA, 15 bp, Homo sapiens
atgggtatggaaggc

SEQ ID NO: 1815443 - DNA, 15 bp, Homo sapiens
tgggtatggaaggct

SEQ ID NO: 1815444 - DNA, 15 bp, Homo sapiens
gggtatggaaggctg

SEQ ID NO: 1815445 - DNA, 15 bp, Homo sapiens
ggtatggaaggctga

SEQ ID NO: 1815446 - DNA, 15 bp, Homo sapiens
gtatggaaggctgag

SEQ ID NO: 1815447 - DNA, 15 bp, Homo sapiens
tatggaaggctgagg

SEQ ID NO: 1815448 - DNA, 15 bp, Homo sapiens
atggaaggctgaggt

SEQ ID NO: 1815449 - DNA, 15 bp, Homo sapiens
ggaaggctgaggtgt

SEQ ID NO: 1815450 - DNA, 15 bp, Homo sapiens
gaaggctgaggtgtt

SEQ ID NO: 1815451 - DNA, 15 bp, Homo sapiens
aaggctgaggtgttt

SEQ ID NO: 1815452 - DNA, 15 bp, Homo sapiens
aggctgaggtgtttg

SEQ ID NO: 1815453 - DNA, 15 bp, Homo sapiens
ggctgaggtgtttga

SEQ ID NO: 1815454 - DNA, 15 bp, Homo sapiens
gctgaggtgtttgaa

SEQ ID NO: 1815455 - DNA, 15 bp, Homo sapiens
ctgaggtgtttgaaa

SEQ ID NO: 1815456 - DNA, 15 bp, Homo sapiens
tgaggtgtttgaaat

SEQ ID NO: 1815457 - DNA, 15 bp, Homo sapiens
gaggtgtttgaaata

SEQ ID NO: 1815458 - DNA, 15 bp, Homo sapiens
aggtgtttgaaataa

SEQ ID NO: 1815459 - DNA, 15 bp, Homo sapiens
ggtgtttgaaataaa

SEQ ID NO: 1815460 - DNA, 15 bp, Homo sapiens
gtgtttgaaataaac

SEQ ID NO: 1815461 - DNA, 15 bp, Homo sapiens
tgtttgaaataaaca

SEQ ID NO: 1815462 - DNA, 15 bp, Homo sapiens
gtttgaaataaacac

SEQ ID NO: 1815463 - DNA, 15 bp, Homo sapiens
tttgaaataaacacg

SEQ ID NO: 1815464 - DNA, 15 bp, Homo sapiens
ttgaaataaacacgg

SEQ ID NO: 1815465 - DNA, 15 bp, Homo sapiens
tgaaataaacacggt

SEQ ID NO: 1815466 - DNA, 15 bp, Homo sapiens
gaaataaacacggtg

SEQ ID NO: 1815467 - DNA, 15 bp, Homo sapiens
aaataaacacggtgt

SEQ ID NO: 1815468 - DNA, 15 bp, Homo sapiens
aataaacacggtgta

SEQ ID NO: 1815469 - DNA, 15 bp, Homo sapiens
ataaacacggtgtat

SEQ ID NO: 1815470 - DNA, 15 bp, Homo sapiens
taaacacggtgtatt

SEQ ID NO: 1815471 - DNA, 15 bp, Homo sapiens
aaacacggtgtattg

SEQ ID NO: 1815472 - DNA, 15 bp, Homo sapiens
aacacggtgtattga

SEQ ID NO: 1815473 - DNA, 15 bp, Homo sapiens
acacggtgtattgac

SEQ ID NO: 1815474 - DNA, 15 bp, Homo sapiens
cacggtgtattgact

SEQ ID NO: 1815475 - DNA, 15 bp, Homo sapiens
acggtgtattgactc

SEQ ID NO: 1815476 - DNA, 15 bp, Homo sapiens
cggtgtattgactca

SEQ ID NO: 1815477 - DNA, 15 bp, Homo sapiens
ggtgtattgactcag

SEQ ID NO: 1815478 - DNA, 15 bp, Homo sapiens
gtgtattgactcagt

SEQ ID NO: 1815479 - DNA, 15 bp, Homo sapiens
tgtattgactcagtt

SEQ ID NO: 1815480 - DNA, 15 bp, Homo sapiens
gtattgactcagttc

SEQ ID NO: 1815481 - DNA, 15 bp, Homo sapiens
tattgactcagttca

SEQ ID NO: 1815482 - DNA, 15 bp, Homo sapiens
attgactcagttcaa

SEQ ID NO: 1815483 - DNA, 15 bp, Homo sapiens
ttgactcagttcaat

SEQ ID NO: 1815484 - DNA, 15 bp, Homo sapiens
tgactcagttcaatg

SEQ ID NO: 1815485 - DNA, 15 bp, Homo sapiens
gactcagttcaatga

SEQ ID NO: 1815486 - DNA, 15 bp, Homo sapiens
actcagttcaatgac

SEQ ID NO: 1815487 - DNA, 15 bp, Homo sapiens
ctcagttcaatgaca

SEQ ID NO: 1815488 - DNA, 15 bp, Homo sapiens
tcagttcaatgacat

SEQ ID NO: 1815489 - DNA, 15 bp, Homo sapiens
cagttcaatgacata

SEQ ID NO: 1815490 - DNA, 15 bp, Homo sapiens
agttcaatgacataa

SEQ ID NO: 1815491 - DNA, 15 bp, Homo sapiens
gttcaatgacataac

SEQ ID NO: 1815492 - DNA, 15 bp, Homo sapiens
ttcaatgacataaca

SEQ ID NO: 1815493 - DNA, 15 bp, Homo sapiens
tcaatgacataacaa

SEQ ID NO: 1815494 - DNA, 15 bp, Homo sapiens
caatgacataacaaa

SEQ ID NO: 1815495 - DNA, 15 bp, Homo sapiens
aatgacataacaaaa

SEQ ID NO: 1815496 - DNA, 15 bp, Homo sapiens
atgacataacaaaaa

SEQ ID NO: 1815497 - DNA, 15 bp, Homo sapiens
tgacataacaaaaag

SEQ ID NO: 1815498 - DNA, 15 bp, Homo sapiens
gacataacaaaaagg

SEQ ID NO: 1815499 - DNA, 15 bp, Homo sapiens
acataacaaaaagga

SEQ ID NO: 1815500 - DNA, 15 bp, Homo sapiens
cataacaaaaaggaa

SEQ ID NO: 1815501 - DNA, 15 bp, Homo sapiens
ataacaaaaaggaat

SEQ ID NO: 1815502 - DNA, 15 bp, Homo sapiens
taacaaaaaggaatt

SEQ ID NO: 1815503 - DNA, 15 bp, Homo sapiens
aacaaaaaggaattg

SEQ ID NO: 1815504 - DNA, 15 bp, Homo sapiens
acaaaaaggaattgt

SEQ ID NO: 1815505 - DNA, 15 bp, Homo sapiens
caaaaaggaattgtg

SEQ ID NO: 1815506 - DNA, 15 bp, Homo sapiens
aaaaaggaattgtgc

SEQ ID NO: 1815507 - DNA, 15 bp, Homo sapiens
aaaaggaattgtgca

SEQ ID NO: 1815508 - DNA, 15 bp, Homo sapiens
aaaggaattgtgcat

SEQ ID NO: 1815509 - DNA, 15 bp, Homo sapiens
aaggaattgtgcata

SEQ ID NO: 1815510 - DNA, 15 bp, Homo sapiens
aggaattgtgcatat

SEQ ID NO: 1815511 - DNA, 15 bp, Homo sapiens
ggaattgtgcatatg

SEQ ID NO: 1815512 - DNA, 15 bp, Homo sapiens
gaattgtgcatatgt

SEQ ID NO: 1815513 - DNA, 15 bp, Homo sapiens
aattgtgcatatgtg

SEQ ID NO: 1815514 - DNA, 15 bp, Homo sapiens
attgtgcatatgtga

SEQ ID NO: 1815515 - DNA, 15 bp, Homo sapiens
ttgtgcatatgtgat

SEQ ID NO: 1815516 - DNA, 15 bp, Homo sapiens
tgtgcatatgtgatt

SEQ ID NO: 1815517 - DNA, 15 bp, Homo sapiens
gtgcatatgtgattt

SEQ ID NO: 1815518 - DNA, 15 bp, Homo sapiens
tgcatatgtgatttc

SEQ ID NO: 1815519 - DNA, 15 bp, Homo sapiens
gcatatgtgatttct

SEQ ID NO: 1815520 - DNA, 15 bp, Homo sapiens
catatgtgatttctc

SEQ ID NO: 1815521 - DNA, 15 bp, Homo sapiens
atatgtgatttctct

SEQ ID NO: 1815522 - DNA, 15 bp, Homo sapiens
tatgtgatttctctt

SEQ ID NO: 1815523 - DNA, 15 bp, Homo sapiens
atgtgatttctctta

SEQ ID NO: 1815524 - DNA, 15 bp, Homo sapiens
tgtgatttctcttat

SEQ ID NO: 1815525 - DNA, 15 bp, Homo sapiens
gtgatttctcttatt

SEQ ID NO: 1815526 - DNA, 15 bp, Homo sapiens
tgatttctcttatta

SEQ ID NO: 1815527 - DNA, 15 bp, Homo sapiens
gatttctcttattaa

SEQ ID NO: 1815528 - DNA, 15 bp, Homo sapiens
atttctcttattaaa

SEQ ID NO: 1815529 - DNA, 15 bp, Homo sapiens
tttctcttattaaag

SEQ ID NO: 1815530 - DNA, 15 bp, Homo sapiens
ttctcttattaaaga

SEQ ID NO: 1815531 - DNA, 15 bp, Homo sapiens
tctcttattaaagaa

SEQ ID NO: 1815532 - DNA, 15 bp, Homo sapiens
ctcttattaaagaaa

SEQ ID NO: 1815533 - DNA, 15 bp, Homo sapiens
tcttattaaagaaaa

SEQ ID NO: 1815534 - DNA, 15 bp, Homo sapiens
cttattaaagaaaac

SEQ ID NO: 1815535 - DNA, 15 bp, Homo sapiens
ttattaaagaaaaca

SEQ ID NO: 1815536 - DNA, 15 bp, Homo sapiens
tattaaagaaaacat

SEQ ID NO: 1815537 - DNA, 15 bp, Homo sapiens
attaaagaaaacatg

SEQ ID NO: 1815538 - DNA, 15 bp, Homo sapiens
ttaaagaaaacatgc

SEQ ID NO: 1815539 - DNA, 15 bp, Homo sapiens
taaagaaaacatgcc

SEQ ID NO: 1815540 - DNA, 15 bp, Homo sapiens
aaagaaaacatgccg

SEQ ID NO: 1815541 - DNA, 15 bp, Homo sapiens
aagaaaacatgccgg

SEQ ID NO: 1815542 - DNA, 15 bp, Homo sapiens
agaaaacatgccggg

SEQ ID NO: 1815543 - DNA, 15 bp, Homo sapiens
gaaaacatgccgggc

SEQ ID NO: 1815544 - DNA, 15 bp, Homo sapiens
aaaacatgccgggca

SEQ ID NO: 1815545 - DNA, 15 bp, Homo sapiens
aaacatgccgggcac

SEQ ID NO: 1815546 - DNA, 15 bp, Homo sapiens
aacatgccgggcaca

SEQ ID NO: 1815547 - DNA, 15 bp, Homo sapiens
acatgccgggcacag

SEQ ID NO: 1815548 - DNA, 15 bp, Homo sapiens
catgccgggcacagt

SEQ ID NO: 1815549 - DNA, 15 bp, Homo sapiens
atgccgggcacagtg

SEQ ID NO: 1815550 - DNA, 15 bp, Homo sapiens
tgccgggcacagtgg

SEQ ID NO: 1815551 - DNA, 15 bp, Homo sapiens
acgcctgtaatcccg

SEQ ID NO: 1815552 - DNA, 15 bp, Homo sapiens
cgcctgtaatcccgg

SEQ ID NO: 1815553 - DNA, 15 bp, Homo sapiens
gcctgtaatcccggc

SEQ ID NO: 1815554 - DNA, 15 bp, Homo sapiens
cctgtaatcccggca

SEQ ID NO: 1815555 - DNA, 15 bp, Homo sapiens
ctgtaatcccggcac

SEQ ID NO: 1815556 - DNA, 15 bp, Homo sapiens
tgtaatcccggcact

SEQ ID NO: 1815557 - DNA, 15 bp, Homo sapiens
gtaatcccggcactt

SEQ ID NO: 1815558 - DNA, 15 bp, Homo sapiens
taatcccggcacttt

SEQ ID NO: 1815559 - DNA, 15 bp, Homo sapiens
aatcccggcactttg

SEQ ID NO: 1815560 - DNA, 15 bp, Homo sapiens
atcccggcactttgg

SEQ ID NO: 1815561 - DNA, 15 bp, Homo sapiens
tcccggcactttggg

SEQ ID NO: 1815562 - DNA, 15 bp, Homo sapiens
cccggcactttggga

SEQ ID NO: 1815563 - DNA, 15 bp, Homo sapiens
ccggcactttgggag

SEQ ID NO: 1815564 - DNA, 15 bp, Homo sapiens
cggcactttgggagg

SEQ ID NO: 1815565 - DNA, 15 bp, Homo sapiens
aggccgaggtgggcg

SEQ ID NO: 1815566 - DNA, 15 bp, Homo sapiens
ggccgaggtgggcgg

SEQ ID NO: 1815567 - DNA, 15 bp, Homo sapiens
gccgaggtgggcgga

SEQ ID NO: 1815568 - DNA, 15 bp, Homo sapiens
ccgaggtgggcggat

SEQ ID NO: 1815569 - DNA, 15 bp, Homo sapiens
cgaggtgggcggatc

SEQ ID NO: 1815570 - DNA, 15 bp, Homo sapiens
ggtgggcggatcacg

SEQ ID NO: 1815571 - DNA, 15 bp, Homo sapiens
gtgggcggatcacga

SEQ ID NO: 1815572 - DNA, 15 bp, Homo sapiens
tgggcggatcacgag

SEQ ID NO: 1815573 - DNA, 15 bp, Homo sapiens
agttcaagaccagcg

SEQ ID NO: 1815574 - DNA, 15 bp, Homo sapiens
gttcaagaccagcgt

SEQ ID NO: 1815575 - DNA, 15 bp, Homo sapiens
ttcaagaccagcgtg

SEQ ID NO: 1815576 - DNA, 15 bp, Homo sapiens
tcaagaccagcgtgg

SEQ ID NO: 1815577 - DNA, 15 bp, Homo sapiens
caagaccagcgtggc

SEQ ID NO: 1815578 - DNA, 15 bp, Homo sapiens
aagaccagcgtggcc

SEQ ID NO: 1815579 - DNA, 15 bp, Homo sapiens
cagcgtggccaacat

SEQ ID NO: 1815580 - DNA, 15 bp, Homo sapiens
agcgtggccaacatg

SEQ ID NO: 1815581 - DNA, 15 bp, Homo sapiens
gcgtggccaacatgg

SEQ ID NO: 1815582 - DNA, 15 bp, Homo sapiens
cgtggccaacatggt

SEQ ID NO: 1815583 - DNA, 15 bp, Homo sapiens
gtggccaacatggtg

SEQ ID NO: 1815584 - DNA, 15 bp, Homo sapiens
tgtactaaaaatacg

SEQ ID NO: 1815585 - DNA, 15 bp, Homo sapiens
gtactaaaaatacga

SEQ ID NO: 1815586 - DNA, 15 bp, Homo sapiens
tactaaaaatacgaa

SEQ ID NO: 1815587 - DNA, 15 bp, Homo sapiens
actaaaaatacgaaa

SEQ ID NO: 1815588 - DNA, 15 bp, Homo sapiens
ctaaaaatacgaaaa

SEQ ID NO: 1815589 - DNA, 15 bp, Homo sapiens
taaaaatacgaaaat

SEQ ID NO: 1815590 - DNA, 15 bp, Homo sapiens
aaaaatacgaaaatg

SEQ ID NO: 1815591 - DNA, 15 bp, Homo sapiens
aaaatacgaaaatgt

SEQ ID NO: 1815592 - DNA, 15 bp, Homo sapiens
aaatacgaaaatgtg

SEQ ID NO: 1815593 - DNA, 15 bp, Homo sapiens
aatacgaaaatgtgc

SEQ ID NO: 1815594 - DNA, 15 bp, Homo sapiens
atacgaaaatgtgcc

SEQ ID NO: 1815595 - DNA, 15 bp, Homo sapiens
tacgaaaatgtgcca

SEQ ID NO: 1815596 - DNA, 15 bp, Homo sapiens
acgaaaatgtgccag

SEQ ID NO: 1815597 - DNA, 15 bp, Homo sapiens
cgaaaatgtgccagg

SEQ ID NO: 1815598 - DNA, 15 bp, Homo sapiens
gaaaatgtgccaggc

SEQ ID NO: 1815599 - DNA, 15 bp, Homo sapiens
aaaatgtgccaggca

SEQ ID NO: 1815600 - DNA, 15 bp, Homo sapiens
aaatgtgccaggcat

SEQ ID NO: 1815601 - DNA, 15 bp, Homo sapiens
aatgtgccaggcatg

SEQ ID NO: 1815602 - DNA, 15 bp, Homo sapiens
atgtgccaggcatgg

SEQ ID NO: 1815603 - DNA, 15 bp, Homo sapiens
tgtgccaggcatggt

SEQ ID NO: 1815604 - DNA, 15 bp, Homo sapiens
gtgccaggcatggtg

SEQ ID NO: 1815605 - DNA, 15 bp, Homo sapiens
tgccaggcatggtgg

SEQ ID NO: 1815606 - DNA, 15 bp, Homo sapiens
ggcaggcccctgtaa

SEQ ID NO: 1815607 - DNA, 15 bp, Homo sapiens
gcaggcccctgtaat

SEQ ID NO: 1815608 - DNA, 15 bp, Homo sapiens
caggcccctgtaatc

SEQ ID NO: 1815609 - DNA, 15 bp, Homo sapiens
aggcccctgtaatcc

SEQ ID NO: 1815610 - DNA, 15 bp, Homo sapiens
ggcccctgtaatccc

SEQ ID NO: 1815611 - DNA, 15 bp, Homo sapiens
gcccctgtaatccca

SEQ ID NO: 1815612 - DNA, 15 bp, Homo sapiens
gaatcgcttggacct

SEQ ID NO: 1815613 - DNA, 15 bp, Homo sapiens
aatcgcttggacctg

SEQ ID NO: 1815614 - DNA, 15 bp, Homo sapiens
atcgcttggacctgg

SEQ ID NO: 1815615 - DNA, 15 bp, Homo sapiens
tcgcttggacctggg

SEQ ID NO: 1815616 - DNA, 15 bp, Homo sapiens
cgcttggacctggga

SEQ ID NO: 1815617 - DNA, 15 bp, Homo sapiens
gcttggacctgggag

SEQ ID NO: 1815618 - DNA, 15 bp, Homo sapiens
cttggacctgggagg

SEQ ID NO: 1815619 - DNA, 15 bp, Homo sapiens
ttggacctgggaggc

SEQ ID NO: 1815620 - DNA, 15 bp, Homo sapiens
gcagtgagccgagac

SEQ ID NO: 1815621 - DNA, 15 bp, Homo sapiens
cagtgagccgagacc

SEQ ID NO: 1815622 - DNA, 15 bp, Homo sapiens
agtgagccgagaccg

SEQ ID NO: 1815623 - DNA, 15 bp, Homo sapiens
gtgagccgagaccgt

SEQ ID NO: 1815624 - DNA, 15 bp, Homo sapiens
tgagccgagaccgtg

SEQ ID NO: 1815625 - DNA, 15 bp, Homo sapiens
gagccgagaccgtgc

SEQ ID NO: 1815626 - DNA, 15 bp, Homo sapiens
agccgagaccgtgcc

SEQ ID NO: 1815627 - DNA, 15 bp, Homo sapiens
gccgagaccgtgcca

SEQ ID NO: 1815628 - DNA, 15 bp, Homo sapiens
ccgagaccgtgccat

SEQ ID NO: 1815629 - DNA, 15 bp, Homo sapiens
cgagaccgtgccatt

SEQ ID NO: 1815630 - DNA, 15 bp, Homo sapiens
gagaccgtgccattg

SEQ ID NO: 1815631 - DNA, 15 bp, Homo sapiens
agaccgtgccattgc

SEQ ID NO: 1815632 - DNA, 15 bp, Homo sapiens
gaccgtgccattgca

SEQ ID NO: 1815633 - DNA, 15 bp, Homo sapiens
accgtgccattgcac

SEQ ID NO: 1815634 - DNA, 15 bp, Homo sapiens
ccgtgccattgcact

SEQ ID NO: 1815635 - DNA, 15 bp, Homo sapiens
gccattgcactccag

SEQ ID NO: 1815636 - DNA, 15 bp, Homo sapiens
ctgggcaacacagcg

SEQ ID NO: 1815637 - DNA, 15 bp, Homo sapiens
tgggcaacacagcga

SEQ ID NO: 1815638 - DNA, 15 bp, Homo sapiens
gggcaacacagcgag

SEQ ID NO: 1815639 - DNA, 15 bp, Homo sapiens
ggcaacacagcgaga

SEQ ID NO: 1815640 - DNA, 15 bp, Homo sapiens
gcaacacagcgagac

SEQ ID NO: 1815641 - DNA, 15 bp, Homo sapiens
caacacagcgagact

SEQ ID NO: 1815642 - DNA, 15 bp, Homo sapiens
aacacagcgagactc

SEQ ID NO: 1815643 - DNA, 15 bp, Homo sapiens
acacagcgagactcc

SEQ ID NO: 1815644 - DNA, 15 bp, Homo sapiens
cacagcgagactcca

SEQ ID NO: 1815645 - DNA, 15 bp, Homo sapiens
acagcgagactccat

SEQ ID NO: 1815646 - DNA, 15 bp, Homo sapiens
cagcgagactccatc

SEQ ID NO: 1815647 - DNA, 15 bp, Homo sapiens
aaaaaaaaaggcaaa

SEQ ID NO: 1815648 - DNA, 15 bp, Homo sapiens
aaaaaaaaggcaaaa

SEQ ID NO: 1815649 - DNA, 15 bp, Homo sapiens
aaaaaaaggcaaaat

SEQ ID NO: 1815650 - DNA, 15 bp, Homo sapiens
aaaaaaggcaaaatt

SEQ ID NO: 1815651 - DNA, 15 bp, Homo sapiens
aaaaaggcaaaattt

SEQ ID NO: 1815652 - DNA, 15 bp, Homo sapiens
aaaaggcaaaatttc

SEQ ID NO: 1815653 - DNA, 15 bp, Homo sapiens
aaaggcaaaatttcc

SEQ ID NO: 1815654 - DNA, 15 bp, Homo sapiens
aaggcaaaatttcct

SEQ ID NO: 1815655 - DNA, 15 bp, Homo sapiens
aggcaaaatttccta

SEQ ID NO: 1815656 - DNA, 15 bp, Homo sapiens
ggcaaaatttcctag

SEQ ID NO: 1815657 - DNA, 15 bp, Homo sapiens
gcaaaatttcctaga

SEQ ID NO: 1815658 - DNA, 15 bp, Homo sapiens
caaaatttcctagac

SEQ ID NO: 1815659 - DNA, 15 bp, Homo sapiens
aaaatttcctagacg

SEQ ID NO: 1815660 - DNA, 15 bp, Homo sapiens
aaatttcctagacga

SEQ ID NO: 1815661 - DNA, 15 bp, Homo sapiens
aatttcctagacgaa

SEQ ID NO: 1815662 - DNA, 15 bp, Homo sapiens
atttcctagacgaag

SEQ ID NO: 1815663 - DNA, 15 bp, Homo sapiens
tttcctagacgaaga

SEQ ID NO: 1815664 - DNA, 15 bp, Homo sapiens
ttcctagacgaagaa

SEQ ID NO: 1815665 - DNA, 15 bp, Homo sapiens
tcctagacgaagaaa

SEQ ID NO: 1815666 - DNA, 15 bp, Homo sapiens
cctagacgaagaaat

SEQ ID NO: 1815667 - DNA, 15 bp, Homo sapiens
ctagacgaagaaata

SEQ ID NO: 1815668 - DNA, 15 bp, Homo sapiens
tagacgaagaaataa

SEQ ID NO: 1815669 - DNA, 15 bp, Homo sapiens
agacgaagaaataaa

SEQ ID NO: 1815670 - DNA, 15 bp, Homo sapiens
gacgaagaaataaaa

SEQ ID NO: 1815671 - DNA, 15 bp, Homo sapiens
acgaagaaataaaaa

SEQ ID NO: 1815672 - DNA, 15 bp, Homo sapiens
cgaagaaataaaaac

SEQ ID NO: 1815673 - DNA, 15 bp, Homo sapiens
gaagaaataaaaacc

SEQ ID NO: 1815674 - DNA, 15 bp, Homo sapiens
aagaaataaaaacca

SEQ ID NO: 1815675 - DNA, 15 bp, Homo sapiens
agaaataaaaaccaa

SEQ ID NO: 1815676 - DNA, 15 bp, Homo sapiens
gaaataaaaaccaac

SEQ ID NO: 1815677 - DNA, 15 bp, Homo sapiens
aaataaaaaccaact

SEQ ID NO: 1815678 - DNA, 15 bp, Homo sapiens
aataaaaaccaactt

SEQ ID NO: 1815679 - DNA, 15 bp, Homo sapiens
ataaaaaccaactta

SEQ ID NO: 1815680 - DNA, 15 bp, Homo sapiens
taaaaaccaacttat

SEQ ID NO: 1815681 - DNA, 15 bp, Homo sapiens
aaaaaccaacttatg

SEQ ID NO: 1815682 - DNA, 15 bp, Homo sapiens
aaaaccaacttatgt

SEQ ID NO: 1815683 - DNA, 15 bp, Homo sapiens
aaaccaacttatgta

SEQ ID NO: 1815684 - DNA, 15 bp, Homo sapiens
aaccaacttatgtaa

SEQ ID NO: 1815685 - DNA, 15 bp, Homo sapiens
accaacttatgtaaa

SEQ ID NO: 1815686 - DNA, 15 bp, Homo sapiens
ccaacttatgtaaat

SEQ ID NO: 1815687 - DNA, 15 bp, Homo sapiens
caacttatgtaaatg

SEQ ID NO: 1815688 - DNA, 15 bp, Homo sapiens
aacttatgtaaatga

SEQ ID NO: 1815689 - DNA, 15 bp, Homo sapiens
acttatgtaaatgaa

SEQ ID NO: 1815690 - DNA, 15 bp, Homo sapiens
cttatgtaaatgaac

SEQ ID NO: 1815691 - DNA, 15 bp, Homo sapiens
ttatgtaaatgaaca

SEQ ID NO: 1815692 - DNA, 15 bp, Homo sapiens
tatgtaaatgaacaa

SEQ ID NO: 1815693 - DNA, 15 bp, Homo sapiens
atgtaaatgaacaag

SEQ ID NO: 1815694 - DNA, 15 bp, Homo sapiens
tgtaaatgaacaagt

SEQ ID NO: 1815695 - DNA, 15 bp, Homo sapiens
gtaaatgaacaagta

SEQ ID NO: 1815696 - DNA, 15 bp, Homo sapiens
taaatgaacaagtaa

SEQ ID NO: 1815697 - DNA, 15 bp, Homo sapiens
aaatgaacaagtaat

SEQ ID NO: 1815698 - DNA, 15 bp, Homo sapiens
aatgaacaagtaatt

SEQ ID NO: 1815699 - DNA, 15 bp, Homo sapiens
atgaacaagtaatta

SEQ ID NO: 1815700 - DNA, 15 bp, Homo sapiens
tgaacaagtaattac

SEQ ID NO: 1815701 - DNA, 15 bp, Homo sapiens
gaacaagtaattacc

SEQ ID NO: 1815702 - DNA, 15 bp, Homo sapiens
aacaagtaattacca

SEQ ID NO: 1815703 - DNA, 15 bp, Homo sapiens
acaagtaattaccac

SEQ ID NO: 1815704 - DNA, 15 bp, Homo sapiens
caagtaattaccact

SEQ ID NO: 1815705 - DNA, 15 bp, Homo sapiens
aagtaattaccactg

SEQ ID NO: 1815706 - DNA, 15 bp, Homo sapiens
agtaattaccactga

SEQ ID NO: 1815707 - DNA, 15 bp, Homo sapiens
gtaattaccactgac

SEQ ID NO: 1815708 - DNA, 15 bp, Homo sapiens
taattaccactgaca

SEQ ID NO: 1815709 - DNA, 15 bp, Homo sapiens
aattaccactgacat

SEQ ID NO: 1815710 - DNA, 15 bp, Homo sapiens
attaccactgacata

SEQ ID NO: 1815711 - DNA, 15 bp, Homo sapiens
ttaccactgacataa

SEQ ID NO: 1815712 - DNA, 15 bp, Homo sapiens
taccactgacataat

SEQ ID NO: 1815713 - DNA, 15 bp, Homo sapiens
accactgacataata

SEQ ID NO: 1815714 - DNA, 15 bp, Homo sapiens
ccactgacataatat

SEQ ID NO: 1815715 - DNA, 15 bp, Homo sapiens
cactgacataatatg

SEQ ID NO: 1815716 - DNA, 15 bp, Homo sapiens
actgacataatatgc

SEQ ID NO: 1815717 - DNA, 15 bp, Homo sapiens
ctgacataatatgct

SEQ ID NO: 1815718 - DNA, 15 bp, Homo sapiens
tgacataatatgctt

SEQ ID NO: 1815719 - DNA, 15 bp, Homo sapiens
gacataatatgcttg

SEQ ID NO: 1815720 - DNA, 15 bp, Homo sapiens
acataatatgcttgg

SEQ ID NO: 1815721 - DNA, 15 bp, Homo sapiens
cataatatgcttggc

SEQ ID NO: 1815722 - DNA, 15 bp, Homo sapiens
ataatatgcttggct

SEQ ID NO: 1815723 - DNA, 15 bp, Homo sapiens
taatatgcttggctg

SEQ ID NO: 1815724 - DNA, 15 bp, Homo sapiens
aatatgcttggctgt

SEQ ID NO: 1815725 - DNA, 15 bp, Homo sapiens
atatgcttggctgtt

SEQ ID NO: 1815726 - DNA, 15 bp, Homo sapiens
tatgcttggctgttg

SEQ ID NO: 1815727 - DNA, 15 bp, Homo sapiens
atgcttggctgttga

SEQ ID NO: 1815728 - DNA, 15 bp, Homo sapiens
tgcttggctgttgaa

SEQ ID NO: 1815729 - DNA, 15 bp, Homo sapiens
gcttggctgttgaac

SEQ ID NO: 1815730 - DNA, 15 bp, Homo sapiens
cttggctgttgaact

SEQ ID NO: 1815731 - DNA, 15 bp, Homo sapiens
ttggctgttgaacta

SEQ ID NO: 1815732 - DNA, 15 bp, Homo sapiens
tggctgttgaactac

SEQ ID NO: 1815733 - DNA, 15 bp, Homo sapiens
ggctgttgaactaca

SEQ ID NO: 1815734 - DNA, 15 bp, Homo sapiens
gctgttgaactacag

SEQ ID NO: 1815735 - DNA, 15 bp, Homo sapiens
ctgttgaactacagg

SEQ ID NO: 1815736 - DNA, 15 bp, Homo sapiens
tgttgaactacaggc

SEQ ID NO: 1815737 - DNA, 15 bp, Homo sapiens
gttgaactacaggcc

SEQ ID NO: 1815738 - DNA, 15 bp, Homo sapiens
ttgaactacaggcca

SEQ ID NO: 1815739 - DNA, 15 bp, Homo sapiens
tgaactacaggccat

SEQ ID NO: 1815740 - DNA, 15 bp, Homo sapiens
gaactacaggccatt

SEQ ID NO: 1815741 - DNA, 15 bp, Homo sapiens
aactacaggccatta

SEQ ID NO: 1815742 - DNA, 15 bp, Homo sapiens
actacaggccattaa

SEQ ID NO: 1815743 - DNA, 15 bp, Homo sapiens
ctacaggccattaaa

SEQ ID NO: 1815744 - DNA, 15 bp, Homo sapiens
tacaggccattaaat

SEQ ID NO: 1815745 - DNA, 15 bp, Homo sapiens
acaggccattaaatc

SEQ ID NO: 1815746 - DNA, 15 bp, Homo sapiens
caggccattaaatcc

SEQ ID NO: 1815747 - DNA, 15 bp, Homo sapiens
aggccattaaatcct

SEQ ID NO: 1815748 - DNA, 15 bp, Homo sapiens
ggccattaaatccta

SEQ ID NO: 1815749 - DNA, 15 bp, Homo sapiens
gccattaaatcctat

SEQ ID NO: 1815750 - DNA, 15 bp, Homo sapiens
ccattaaatcctatt

SEQ ID NO: 1815751 - DNA, 15 bp, Homo sapiens
cattaaatcctattt

SEQ ID NO: 1815752 - DNA, 15 bp, Homo sapiens
attaaatcctatttc

SEQ ID NO: 1815753 - DNA, 15 bp, Homo sapiens
ttaaatcctatttca

SEQ ID NO: 1815754 - DNA, 15 bp, Homo sapiens
taaatcctatttcaa

SEQ ID NO: 1815755 - DNA, 15 bp, Homo sapiens
aaatcctatttcaag

SEQ ID NO: 1815756 - DNA, 15 bp, Homo sapiens
aatcctatttcaagt

SEQ ID NO: 1815757 - DNA, 15 bp, Homo sapiens
atcctatttcaagtt

SEQ ID NO: 1815758 - DNA, 15 bp, Homo sapiens
tcctatttcaagttg

SEQ ID NO: 1815759 - DNA, 15 bp, Homo sapiens
cctatttcaagttga

SEQ ID NO: 1815760 - DNA, 15 bp, Homo sapiens
ctatttcaagttgaa

SEQ ID NO: 1815761 - DNA, 15 bp, Homo sapiens
tatttcaagttgaaa

SEQ ID NO: 1815762 - DNA, 15 bp, Homo sapiens
atttcaagttgaaat

SEQ ID NO: 1815763 - DNA, 15 bp, Homo sapiens
tttcaagttgaaatg

SEQ ID NO: 1815764 - DNA, 15 bp, Homo sapiens
ttcaagttgaaatga

SEQ ID NO: 1815765 - DNA, 15 bp, Homo sapiens
tcaagttgaaatgag

SEQ ID NO: 1815766 - DNA, 15 bp, Homo sapiens
caagttgaaatgaga

SEQ ID NO: 1815767 - DNA, 15 bp, Homo sapiens
aagttgaaatgagag

SEQ ID NO: 1815768 - DNA, 15 bp, Homo sapiens
agttgaaatgagaga

SEQ ID NO: 1815769 - DNA, 15 bp, Homo sapiens
gttgaaatgagagaa

SEQ ID NO: 1815770 - DNA, 15 bp, Homo sapiens
ttgaaatgagagaac

SEQ ID NO: 1815771 - DNA, 15 bp, Homo sapiens
tgaaatgagagaact

SEQ ID NO: 1815772 - DNA, 15 bp, Homo sapiens
gaaatgagagaactg

SEQ ID NO: 1815773 - DNA, 15 bp, Homo sapiens
aaatgagagaactgc

SEQ ID NO: 1815774 - DNA, 15 bp, Homo sapiens
aatgagagaactgcc

SEQ ID NO: 1815775 - DNA, 15 bp, Homo sapiens
atgagagaactgccc

SEQ ID NO: 1815776 - DNA, 15 bp, Homo sapiens
tgagagaactgcccc

SEQ ID NO: 1815777 - DNA, 15 bp, Homo sapiens
gagagaactgcccca

SEQ ID NO: 1815778 - DNA, 15 bp, Homo sapiens
agagaactgccccaa

SEQ ID NO: 1815779 - DNA, 15 bp, Homo sapiens
gagaactgccccaag

SEQ ID NO: 1815780 - DNA, 15 bp, Homo sapiens
agaactgccccaagg

SEQ ID NO: 1815781 - DNA, 15 bp, Homo sapiens
gaactgccccaagga

SEQ ID NO: 1815782 - DNA, 15 bp, Homo sapiens
aactgccccaaggac

SEQ ID NO: 1815783 - DNA, 15 bp, Homo sapiens
actgccccaaggaca

SEQ ID NO: 1815784 - DNA, 15 bp, Homo sapiens
ctgccccaaggacat

SEQ ID NO: 1815785 - DNA, 15 bp, Homo sapiens
tgccccaaggacatt

SEQ ID NO: 1815786 - DNA, 15 bp, Homo sapiens
gccccaaggacattt

SEQ ID NO: 1815787 - DNA, 15 bp, Homo sapiens
ccccaaggacatttg

SEQ ID NO: 1815788 - DNA, 15 bp, Homo sapiens
cccaaggacatttgg

SEQ ID NO: 1815789 - DNA, 15 bp, Homo sapiens
ccaaggacatttggt

SEQ ID NO: 1815790 - DNA, 15 bp, Homo sapiens
caaggacatttggta

SEQ ID NO: 1815791 - DNA, 15 bp, Homo sapiens
aaggacatttggtaa

SEQ ID NO: 1815792 - DNA, 15 bp, Homo sapiens
aggacatttggtaaa

SEQ ID NO: 1815793 - DNA, 15 bp, Homo sapiens
ggacatttggtaaat

SEQ ID NO: 1815794 - DNA, 15 bp, Homo sapiens
gacatttggtaaatc

SEQ ID NO: 1815795 - DNA, 15 bp, Homo sapiens
acatttggtaaatcc

SEQ ID NO: 1815796 - DNA, 15 bp, Homo sapiens
catttggtaaatcca

SEQ ID NO: 1815797 - DNA, 15 bp, Homo sapiens
atttggtaaatccat

SEQ ID NO: 1815798 - DNA, 15 bp, Homo sapiens
tttggtaaatccatg

SEQ ID NO: 1815799 - DNA, 15 bp, Homo sapiens
ttggtaaatccatgc

SEQ ID NO: 1815800 - DNA, 15 bp, Homo sapiens
tggtaaatccatgcc

SEQ ID NO: 1815801 - DNA, 15 bp, Homo sapiens
ggtaaatccatgcct

SEQ ID NO: 1815802 - DNA, 15 bp, Homo sapiens
gtaaatccatgccta

SEQ ID NO: 1815803 - DNA, 15 bp, Homo sapiens
taaatccatgcctat

SEQ ID NO: 1815804 - DNA, 15 bp, Homo sapiens
aaatccatgcctata

SEQ ID NO: 1815805 - DNA, 15 bp, Homo sapiens
aatccatgcctatag

SEQ ID NO: 1815806 - DNA, 15 bp, Homo sapiens
atccatgcctatagc

SEQ ID NO: 1815807 - DNA, 15 bp, Homo sapiens
tccatgcctatagct

SEQ ID NO: 1815808 - DNA, 15 bp, Homo sapiens
ccatgcctatagctg

SEQ ID NO: 1815809 - DNA, 15 bp, Homo sapiens
catgcctatagctga

SEQ ID NO: 1815810 - DNA, 15 bp, Homo sapiens
atgcctatagctgaa

SEQ ID NO: 1815811 - DNA, 15 bp, Homo sapiens
tgcctatagctgaag

SEQ ID NO: 1815812 - DNA, 15 bp, Homo sapiens
gcctatagctgaagg

SEQ ID NO: 1815813 - DNA, 15 bp, Homo sapiens
cctatagctgaaggt

SEQ ID NO: 1815814 - DNA, 15 bp, Homo sapiens
ctatagctgaaggtc

SEQ ID NO: 1815815 - DNA, 15 bp, Homo sapiens
tatagctgaaggtct

SEQ ID NO: 1815816 - DNA, 15 bp, Homo sapiens
atagctgaaggtctg

SEQ ID NO: 1815817 - DNA, 15 bp, Homo sapiens
tagctgaaggtctga

SEQ ID NO: 1815818 - DNA, 15 bp, Homo sapiens
agctgaaggtctgag

SEQ ID NO: 1815819 - DNA, 15 bp, Homo sapiens
gctgaaggtctgaga

SEQ ID NO: 1815820 - DNA, 15 bp, Homo sapiens
ctgaaggtctgagac

SEQ ID NO: 1815821 - DNA, 15 bp, Homo sapiens
tgaaggtctgagaca

SEQ ID NO: 1815822 - DNA, 15 bp, Homo sapiens
gaaggtctgagacag

SEQ ID NO: 1815823 - DNA, 15 bp, Homo sapiens
aaggtctgagacaga

SEQ ID NO: 1815824 - DNA, 15 bp, Homo sapiens
aggtctgagacagac

SEQ ID NO: 1815825 - DNA, 15 bp, Homo sapiens
ggtctgagacagacc

SEQ ID NO: 1815826 - DNA, 15 bp, Homo sapiens
gtctgagacagacct

SEQ ID NO: 1815827 - DNA, 15 bp, Homo sapiens
tctgagacagacctt

SEQ ID NO: 1815828 - DNA, 15 bp, Homo sapiens
ctgagacagaccttg

SEQ ID NO: 1815829 - DNA, 15 bp, Homo sapiens
tgagacagaccttgt

SEQ ID NO: 1815830 - DNA, 15 bp, Homo sapiens
gagacagaccttgta

SEQ ID NO: 1815831 - DNA, 15 bp, Homo sapiens
agacagaccttgtat

SEQ ID NO: 1815832 - DNA, 15 bp, Homo sapiens
gacagaccttgtatt

SEQ ID NO: 1815833 - DNA, 15 bp, Homo sapiens
acagaccttgtattt

SEQ ID NO: 1815834 - DNA, 15 bp, Homo sapiens
cagaccttgtatttt

SEQ ID NO: 1815835 - DNA, 15 bp, Homo sapiens
agaccttgtatttta

SEQ ID NO: 1815836 - DNA, 15 bp, Homo sapiens
gaccttgtattttaa

SEQ ID NO: 1815837 - DNA, 15 bp, Homo sapiens
accttgtattttaaa

SEQ ID NO: 1815838 - DNA, 15 bp, Homo sapiens
ccttgtattttaaac

SEQ ID NO: 1815839 - DNA, 15 bp, Homo sapiens
cttgtattttaaact

SEQ ID NO: 1815840 - DNA, 15 bp, Homo sapiens
ttgtattttaaactg

SEQ ID NO: 1815841 - DNA, 15 bp, Homo sapiens
tgtattttaaactgt

SEQ ID NO: 1815842 - DNA, 15 bp, Homo sapiens
gtattttaaactgtg

SEQ ID NO: 1815843 - DNA, 15 bp, Homo sapiens
tattttaaactgtgg

SEQ ID NO: 1815844 - DNA, 15 bp, Homo sapiens
attttaaactgtggc

SEQ ID NO: 1815845 - DNA, 15 bp, Homo sapiens
ttttaaactgtggcc

SEQ ID NO: 1815846 - DNA, 15 bp, Homo sapiens
tttaaactgtggccc

SEQ ID NO: 1815847 - DNA, 15 bp, Homo sapiens
ttaaactgtggcccc

SEQ ID NO: 1815848 - DNA, 15 bp, Homo sapiens
taaactgtggcccca

SEQ ID NO: 1815849 - DNA, 15 bp, Homo sapiens
aaactgtggccccag

SEQ ID NO: 1815850 - DNA, 15 bp, Homo sapiens
aactgtggccccaga

SEQ ID NO: 1815851 - DNA, 15 bp, Homo sapiens
actgtggccccagag

SEQ ID NO: 1815852 - DNA, 15 bp, Homo sapiens
ctgtggccccagaga

SEQ ID NO: 1815853 - DNA, 15 bp, Homo sapiens
tgtggccccagagag

SEQ ID NO: 1815854 - DNA, 15 bp, Homo sapiens
gtggccccagagagc

SEQ ID NO: 1815855 - DNA, 15 bp, Homo sapiens
tggccccagagagct

SEQ ID NO: 1815856 - DNA, 15 bp, Homo sapiens
ggccccagagagcta

SEQ ID NO: 1815857 - DNA, 15 bp, Homo sapiens
gccccagagagctat

SEQ ID NO: 1815858 - DNA, 15 bp, Homo sapiens
ccccagagagctatg

SEQ ID NO: 1815859 - DNA, 15 bp, Homo sapiens
cccagagagctatgt

SEQ ID NO: 1815860 - DNA, 15 bp, Homo sapiens
ccagagagctatgtt

SEQ ID NO: 1815861 - DNA, 15 bp, Homo sapiens
cagagagctatgttc

SEQ ID NO: 1815862 - DNA, 15 bp, Homo sapiens
agagagctatgttct

SEQ ID NO: 1815863 - DNA, 15 bp, Homo sapiens
gagagctatgttctc

SEQ ID NO: 1815864 - DNA, 15 bp, Homo sapiens
agagctatgttctcc

SEQ ID NO: 1815865 - DNA, 15 bp, Homo sapiens
gagctatgttctccg

SEQ ID NO: 1815866 - DNA, 15 bp, Homo sapiens
agctatgttctccga

SEQ ID NO: 1815867 - DNA, 15 bp, Homo sapiens
gctatgttctccgac

SEQ ID NO: 1815868 - DNA, 15 bp, Homo sapiens
ctatgttctccgact

SEQ ID NO: 1815869 - DNA, 15 bp, Homo sapiens
tatgttctccgactg

SEQ ID NO: 1815870 - DNA, 15 bp, Homo sapiens
atgttctccgactgc

SEQ ID NO: 1815871 - DNA, 15 bp, Homo sapiens
tgttctccgactgcc

SEQ ID NO: 1815872 - DNA, 15 bp, Homo sapiens
gttctccgactgccg

SEQ ID NO: 1815873 - DNA, 15 bp, Homo sapiens
ttctccgactgccgc

SEQ ID NO: 1815874 - DNA, 15 bp, Homo sapiens
tctccgactgccgca

SEQ ID NO: 1815875 - DNA, 15 bp, Homo sapiens
ctccgactgccgcag

SEQ ID NO: 1815876 - DNA, 15 bp, Homo sapiens
tccgactgccgcagc

SEQ ID NO: 1815877 - DNA, 15 bp, Homo sapiens
ccgactgccgcagcc

SEQ ID NO: 1815878 - DNA, 15 bp, Homo sapiens
cgactgccgcagcca

SEQ ID NO: 1815879 - DNA, 15 bp, Homo sapiens
gactgccgcagccaa

SEQ ID NO: 1815880 - DNA, 15 bp, Homo sapiens
actgccgcagccaag

SEQ ID NO: 1815881 - DNA, 15 bp, Homo sapiens
ctgccgcagccaagg

SEQ ID NO: 1815882 - DNA, 15 bp, Homo sapiens
tgccgcagccaaggc

SEQ ID NO: 1815883 - DNA, 15 bp, Homo sapiens
gccgcagccaaggca

SEQ ID NO: 1815884 - DNA, 15 bp, Homo sapiens
ccgcagccaaggcat

SEQ ID NO: 1815885 - DNA, 15 bp, Homo sapiens
cgcagccaaggcatg

SEQ ID NO: 1815886 - DNA, 15 bp, Homo sapiens
gcagccaaggcatgc

SEQ ID NO: 1815887 - DNA, 15 bp, Homo sapiens
cagccaaggcatgct

SEQ ID NO: 1815888 - DNA, 15 bp, Homo sapiens
agccaaggcatgctg

SEQ ID NO: 1815889 - DNA, 15 bp, Homo sapiens
gccaaggcatgctgc

SEQ ID NO: 1815890 - DNA, 15 bp, Homo sapiens
ccaaggcatgctgct

SEQ ID NO: 1815891 - DNA, 15 bp, Homo sapiens
caaggcatgctgctc

SEQ ID NO: 1815892 - DNA, 15 bp, Homo sapiens
aaggcatgctgctca

SEQ ID NO: 1815893 - DNA, 15 bp, Homo sapiens
aggcatgctgctcag

SEQ ID NO: 1815894 - DNA, 15 bp, Homo sapiens
ggcatgctgctcagt

SEQ ID NO: 1815895 - DNA, 15 bp, Homo sapiens
gcatgctgctcagtc

SEQ ID NO: 1815896 - DNA, 15 bp, Homo sapiens
catgctgctcagtcc

SEQ ID NO: 1815897 - DNA, 15 bp, Homo sapiens
atgctgctcagtccc

SEQ ID NO: 1815898 - DNA, 15 bp, Homo sapiens
tgctgctcagtccct

SEQ ID NO: 1815899 - DNA, 15 bp, Homo sapiens
gctgctcagtccctc

SEQ ID NO: 1815900 - DNA, 15 bp, Homo sapiens
ctgctcagtccctca

SEQ ID NO: 1815901 - DNA, 15 bp, Homo sapiens
tgctcagtccctcaa

SEQ ID NO: 1815902 - DNA, 15 bp, Homo sapiens
gctcagtccctcaag

SEQ ID NO: 1815903 - DNA, 15 bp, Homo sapiens
ctcagtccctcaagc

SEQ ID NO: 1815904 - DNA, 15 bp, Homo sapiens
tcagtccctcaagcc

SEQ ID NO: 1815905 - DNA, 15 bp, Homo sapiens
cagtccctcaagcca

SEQ ID NO: 1815906 - DNA, 15 bp, Homo sapiens
agtccctcaagccat

SEQ ID NO: 1815907 - DNA, 15 bp, Homo sapiens
gtccctcaagccatc

SEQ ID NO: 1815908 - DNA, 15 bp, Homo sapiens
tccctcaagccatcc

SEQ ID NO: 1815909 - DNA, 15 bp, Homo sapiens
ccctcaagccatccc

SEQ ID NO: 1815910 - DNA, 15 bp, Homo sapiens
cctcaagccatcccc

SEQ ID NO: 1815911 - DNA, 15 bp, Homo sapiens
ctcaagccatcccct

SEQ ID NO: 1815912 - DNA, 15 bp, Homo sapiens
tcaagccatcccctg

SEQ ID NO: 1815913 - DNA, 15 bp, Homo sapiens
caagccatcccctga

SEQ ID NO: 1815914 - DNA, 15 bp, Homo sapiens
aagccatcccctgag

SEQ ID NO: 1815915 - DNA, 15 bp, Homo sapiens
agccatcccctgagg

SEQ ID NO: 1815916 - DNA, 15 bp, Homo sapiens
gccatcccctgaggg

SEQ ID NO: 1815917 - DNA, 15 bp, Homo sapiens
ccatcccctgagggc

SEQ ID NO: 1815918 - DNA, 15 bp, Homo sapiens
catcccctgagggct

SEQ ID NO: 1815919 - DNA, 15 bp, Homo sapiens
atcccctgagggctc

SEQ ID NO: 1815920 - DNA, 15 bp, Homo sapiens
tcccctgagggctct

SEQ ID NO: 1815921 - DNA, 15 bp, Homo sapiens
cccctgagggctctt

SEQ ID NO: 1815922 - DNA, 15 bp, Homo sapiens
ccctgagggctcttc

SEQ ID NO: 1815923 - DNA, 15 bp, Homo sapiens
cctgagggctcttca

SEQ ID NO: 1815924 - DNA, 15 bp, Homo sapiens
ctgagggctcttcac

SEQ ID NO: 1815925 - DNA, 15 bp, Homo sapiens
tgagggctcttcaca

SEQ ID NO: 1815926 - DNA, 15 bp, Homo sapiens
gagggctcttcacag

SEQ ID NO: 1815927 - DNA, 15 bp, Homo sapiens
agggctcttcacaga

SEQ ID NO: 1815928 - DNA, 15 bp, Homo sapiens
gggctcttcacagag

SEQ ID NO: 1815929 - DNA, 15 bp, Homo sapiens
ggctcttcacagaga

SEQ ID NO: 1815930 - DNA, 15 bp, Homo sapiens
ctcttcacagagatc

SEQ ID NO: 1815931 - DNA, 15 bp, Homo sapiens
tcttcacagagatct

SEQ ID NO: 1815932 - DNA, 15 bp, Homo sapiens
cttcacagagatcta

SEQ ID NO: 1815933 - DNA, 15 bp, Homo sapiens
ttcacagagatctaa

SEQ ID NO: 1815934 - DNA, 15 bp, Homo sapiens
tcacagagatctaat

SEQ ID NO: 1815935 - DNA, 15 bp, Homo sapiens
cacagagatctaatc

SEQ ID NO: 1815936 - DNA, 15 bp, Homo sapiens
acagagatctaatcc

SEQ ID NO: 1815937 - DNA, 15 bp, Homo sapiens
cagagatctaatcct

SEQ ID NO: 1815938 - DNA, 15 bp, Homo sapiens
agagatctaatcctc

SEQ ID NO: 1815939 - DNA, 15 bp, Homo sapiens
gagatctaatcctca

SEQ ID NO: 1815940 - DNA, 15 bp, Homo sapiens
agatctaatcctcat

SEQ ID NO: 1815941 - DNA, 15 bp, Homo sapiens
gatctaatcctcatg

SEQ ID NO: 1815942 - DNA, 15 bp, Homo sapiens
atctaatcctcatgt

SEQ ID NO: 1815943 - DNA, 15 bp, Homo sapiens
tctaatcctcatgta

SEQ ID NO: 1815944 - DNA, 15 bp, Homo sapiens
ctaatcctcatgtaa

SEQ ID NO: 1815945 - DNA, 15 bp, Homo sapiens
taatcctcatgtaat

SEQ ID NO: 1815946 - DNA, 15 bp, Homo sapiens
aatcctcatgtaatt

SEQ ID NO: 1815947 - DNA, 15 bp, Homo sapiens
atcctcatgtaatta

SEQ ID NO: 1815948 - DNA, 15 bp, Homo sapiens
tcctcatgtaattaa

SEQ ID NO: 1815949 - DNA, 15 bp, Homo sapiens
cctcatgtaattaag

SEQ ID NO: 1815950 - DNA, 15 bp, Homo sapiens
ctcatgtaattaagt

SEQ ID NO: 1815951 - DNA, 15 bp, Homo sapiens
tcatgtaattaagtc

SEQ ID NO: 1815952 - DNA, 15 bp, Homo sapiens
catgtaattaagtct

SEQ ID NO: 1815953 - DNA, 15 bp, Homo sapiens
atgtaattaagtctt

SEQ ID NO: 1815954 - DNA, 15 bp, Homo sapiens
tgtaattaagtcttc

SEQ ID NO: 1815955 - DNA, 15 bp, Homo sapiens
gtaattaagtcttca

SEQ ID NO: 1815956 - DNA, 15 bp, Homo sapiens
taattaagtcttcaa

SEQ ID NO: 1815957 - DNA, 15 bp, Homo sapiens
aattaagtcttcaac

SEQ ID NO: 1815958 - DNA, 15 bp, Homo sapiens
attaagtcttcaact

SEQ ID NO: 1815959 - DNA, 15 bp, Homo sapiens
ttaagtcttcaactt

SEQ ID NO: 1815960 - DNA, 15 bp, Homo sapiens
taagtcttcaactta

SEQ ID NO: 1815961 - DNA, 15 bp, Homo sapiens
aagtcttcaacttat

SEQ ID NO: 1815962 - DNA, 15 bp, Homo sapiens
agtcttcaacttatt

SEQ ID NO: 1815963 - DNA, 15 bp, Homo sapiens
gtcttcaacttattt

SEQ ID NO: 1815964 - DNA, 15 bp, Homo sapiens
tcttcaacttatttt

SEQ ID NO: 1815965 - DNA, 15 bp, Homo sapiens
cttcaacttattttc

SEQ ID NO: 1815966 - DNA, 15 bp, Homo sapiens
ttcaacttattttct

SEQ ID NO: 1815967 - DNA, 15 bp, Homo sapiens
tcaacttattttctt

SEQ ID NO: 1815968 - DNA, 15 bp, Homo sapiens
caacttattttctta

SEQ ID NO: 1815969 - DNA, 15 bp, Homo sapiens
aacttattttcttac

SEQ ID NO: 1815970 - DNA, 15 bp, Homo sapiens
acttattttcttaca

SEQ ID NO: 1815971 - DNA, 15 bp, Homo sapiens
cttattttcttacac

SEQ ID NO: 1815972 - DNA, 15 bp, Homo sapiens
ttattttcttacaca

SEQ ID NO: 1815973 - DNA, 15 bp, Homo sapiens
tattttcttacacat

SEQ ID NO: 1815974 - DNA, 15 bp, Homo sapiens
attttcttacacatt

SEQ ID NO: 1815975 - DNA, 15 bp, Homo sapiens
ttttcttacacattg

SEQ ID NO: 1815976 - DNA, 15 bp, Homo sapiens
tttcttacacattgt

SEQ ID NO: 1815977 - DNA, 15 bp, Homo sapiens
ttcttacacattgtt

SEQ ID NO: 1815978 - DNA, 15 bp, Homo sapiens
tcttacacattgtta

SEQ ID NO: 1815979 - DNA, 15 bp, Homo sapiens
cttacacattgttat

SEQ ID NO: 1815980 - DNA, 15 bp, Homo sapiens
ttacacattgttatg

SEQ ID NO: 1815981 - DNA, 15 bp, Homo sapiens
tacacattgttatga

SEQ ID NO: 1815982 - DNA, 15 bp, Homo sapiens
acacattgttatgaa

SEQ ID NO: 1815983 - DNA, 15 bp, Homo sapiens
cacattgttatgaag

SEQ ID NO: 1815984 - DNA, 15 bp, Homo sapiens
acattgttatgaagt

SEQ ID NO: 1815985 - DNA, 15 bp, Homo sapiens
cattgttatgaagtg

SEQ ID NO: 1815986 - DNA, 15 bp, Homo sapiens
attgttatgaagtgc

SEQ ID NO: 1815987 - DNA, 15 bp, Homo sapiens
ttgttatgaagtgca

SEQ ID NO: 1815988 - DNA, 15 bp, Homo sapiens
tgttatgaagtgcac

SEQ ID NO: 1815989 - DNA, 15 bp, Homo sapiens
gttatgaagtgcaca

SEQ ID NO: 1815990 - DNA, 15 bp, Homo sapiens
ttatgaagtgcacat

SEQ ID NO: 1815991 - DNA, 15 bp, Homo sapiens
tatgaagtgcacata

SEQ ID NO: 1815992 - DNA, 15 bp, Homo sapiens
atgaagtgcacataa

SEQ ID NO: 1815993 - DNA, 15 bp, Homo sapiens
tgaagtgcacataaa

SEQ ID NO: 1815994 - DNA, 15 bp, Homo sapiens
gaagtgcacataaat

SEQ ID NO: 1815995 - DNA, 15 bp, Homo sapiens
aagtgcacataaatc

SEQ ID NO: 1815996 - DNA, 15 bp, Homo sapiens
agtgcacataaatct

SEQ ID NO: 1815997 - DNA, 15 bp, Homo sapiens
gtgcacataaatctg

SEQ ID NO: 1815998 - DNA, 15 bp, Homo sapiens
tgcacataaatctgc

SEQ ID NO: 1815999 - DNA, 15 bp, Homo sapiens
gcacataaatctgca

SEQ ID NO: 1816000 - DNA, 15 bp, Homo sapiens
cacataaatctgcag

SEQ ID NO: 1816001 - DNA, 15 bp, Homo sapiens
acataaatctgcaga

SEQ ID NO: 1816002 - DNA, 15 bp, Homo sapiens
cataaatctgcagag

SEQ ID NO: 1816003 - DNA, 15 bp, Homo sapiens
ataaatctgcagagg

SEQ ID NO: 1816004 - DNA, 15 bp, Homo sapiens
taaatctgcagaggt

SEQ ID NO: 1816005 - DNA, 15 bp, Homo sapiens
aaatctgcagaggta

SEQ ID NO: 1816006 - DNA, 15 bp, Homo sapiens
aatctgcagaggtat

SEQ ID NO: 1816007 - DNA, 15 bp, Homo sapiens
atctgcagaggtatt

SEQ ID NO: 1816008 - DNA, 15 bp, Homo sapiens
tctgcagaggtattt

SEQ ID NO: 1816009 - DNA, 15 bp, Homo sapiens
ctgcagaggtatttt

SEQ ID NO: 1816010 - DNA, 15 bp, Homo sapiens
tgcagaggtattttt

SEQ ID NO: 1816011 - DNA, 15 bp, Homo sapiens
gcagaggtatttttt

SEQ ID NO: 1816012 - DNA, 15 bp, Homo sapiens
cagaggtattttttc

SEQ ID NO: 1816013 - DNA, 15 bp, Homo sapiens
agaggtattttttcc

SEQ ID NO: 1816014 - DNA, 15 bp, Homo sapiens
gaggtattttttccc

SEQ ID NO: 1816015 - DNA, 15 bp, Homo sapiens
aggtattttttcccc

SEQ ID NO: 1816016 - DNA, 15 bp, Homo sapiens
ggtattttttcccct

SEQ ID NO: 1816017 - DNA, 15 bp, Homo sapiens
gtattttttcccctt

SEQ ID NO: 1816018 - DNA, 15 bp, Homo sapiens
tattttttcccctta

SEQ ID NO: 1816019 - DNA, 15 bp, Homo sapiens
attttttccccttaa

SEQ ID NO: 1816020 - DNA, 15 bp, Homo sapiens
ttttttccccttaat

SEQ ID NO: 1816021 - DNA, 15 bp, Homo sapiens
tttttccccttaatt

SEQ ID NO: 1816022 - DNA, 15 bp, Homo sapiens
ttttccccttaatta

SEQ ID NO: 1816023 - DNA, 15 bp, Homo sapiens
tttccccttaattaa

SEQ ID NO: 1816024 - DNA, 15 bp, Homo sapiens
ttccccttaattaag

SEQ ID NO: 1816025 - DNA, 15 bp, Homo sapiens
tccccttaattaaga

SEQ ID NO: 1816026 - DNA, 15 bp, Homo sapiens
ccccttaattaagaa

SEQ ID NO: 1816027 - DNA, 15 bp, Homo sapiens
cccttaattaagaaa

SEQ ID NO: 1816028 - DNA, 15 bp, Homo sapiens
ccttaattaagaaat

SEQ ID NO: 1816029 - DNA, 15 bp, Homo sapiens
cttaattaagaaata

SEQ ID NO: 1816030 - DNA, 15 bp, Homo sapiens
ttaattaagaaatac

SEQ ID NO: 1816031 - DNA, 15 bp, Homo sapiens
taattaagaaatact

SEQ ID NO: 1816032 - DNA, 15 bp, Homo sapiens
aattaagaaatactc

SEQ ID NO: 1816033 - DNA, 15 bp, Homo sapiens
attaagaaatactca

SEQ ID NO: 1816034 - DNA, 15 bp, Homo sapiens
ttaagaaatactcac

SEQ ID NO: 1816035 - DNA, 15 bp, Homo sapiens
taagaaatactcaca

SEQ ID NO: 1816036 - DNA, 15 bp, Homo sapiens
aagaaatactcacag

SEQ ID NO: 1816037 - DNA, 15 bp, Homo sapiens
agaaatactcacagg

SEQ ID NO: 1816038 - DNA, 15 bp, Homo sapiens
gaaatactcacaggg

SEQ ID NO: 1816039 - DNA, 15 bp, Homo sapiens
aaatactcacagggg

SEQ ID NO: 1816040 - DNA, 15 bp, Homo sapiens
aatactcacaggggg

SEQ ID NO: 1816041 - DNA, 15 bp, Homo sapiens
atactcacagggggt

SEQ ID NO: 1816042 - DNA, 15 bp, Homo sapiens
tactcacagggggtt

SEQ ID NO: 1816043 - DNA, 15 bp, Homo sapiens
actcacagggggttc

SEQ ID NO: 1816044 - DNA, 15 bp, Homo sapiens
ctcacagggggttca

SEQ ID NO: 1816045 - DNA, 15 bp, Homo sapiens
tcacagggggttcaa

SEQ ID NO: 1816046 - DNA, 15 bp, Homo sapiens
cacagggggttcaat

SEQ ID NO: 1816047 - DNA, 15 bp, Homo sapiens
acagggggttcaatg

SEQ ID NO: 1816048 - DNA, 15 bp, Homo sapiens
cagggggttcaatga

SEQ ID NO: 1816049 - DNA, 15 bp, Homo sapiens
agggggttcaatgaa

SEQ ID NO: 1816050 - DNA, 15 bp, Homo sapiens
gggggttcaatgaaa

SEQ ID NO: 1816051 - DNA, 15 bp, Homo sapiens
ggggttcaatgaaag

SEQ ID NO: 1816052 - DNA, 15 bp, Homo sapiens
gggttcaatgaaagg

SEQ ID NO: 1816053 - DNA, 15 bp, Homo sapiens
ggttcaatgaaaggg

SEQ ID NO: 1816054 - DNA, 15 bp, Homo sapiens
gttcaatgaaaggga

SEQ ID NO: 1816055 - DNA, 15 bp, Homo sapiens
ttcaatgaaagggac

SEQ ID NO: 1816056 - DNA, 15 bp, Homo sapiens
tcaatgaaagggaca

SEQ ID NO: 1816057 - DNA, 15 bp, Homo sapiens
caatgaaagggacag

SEQ ID NO: 1816058 - DNA, 15 bp, Homo sapiens
aatgaaagggacagg

SEQ ID NO: 1816059 - DNA, 15 bp, Homo sapiens
atgaaagggacaggc

SEQ ID NO: 1816060 - DNA, 15 bp, Homo sapiens
tgaaagggacaggct

SEQ ID NO: 1816061 - DNA, 15 bp, Homo sapiens
gaaagggacaggctc

SEQ ID NO: 1816062 - DNA, 15 bp, Homo sapiens
aaagggacaggctct

SEQ ID NO: 1816063 - DNA, 15 bp, Homo sapiens
aagggacaggctctc

SEQ ID NO: 1816064 - DNA, 15 bp, Homo sapiens
agggacaggctctcc

SEQ ID NO: 1816065 - DNA, 15 bp, Homo sapiens
gggacaggctctcca

SEQ ID NO: 1816066 - DNA, 15 bp, Homo sapiens
ggacaggctctccag

SEQ ID NO: 1816067 - DNA, 15 bp, Homo sapiens
gacaggctctccagc

SEQ ID NO: 1816068 - DNA, 15 bp, Homo sapiens
acaggctctccagca

SEQ ID NO: 1816069 - DNA, 15 bp, Homo sapiens
caggctctccagcat

SEQ ID NO: 1816070 - DNA, 15 bp, Homo sapiens
aggctctccagcata

SEQ ID NO: 1816071 - DNA, 15 bp, Homo sapiens
ggctctccagcatac

SEQ ID NO: 1816072 - DNA, 15 bp, Homo sapiens
gctctccagcatact

SEQ ID NO: 1816073 - DNA, 15 bp, Homo sapiens
ctctccagcatactt

SEQ ID NO: 1816074 - DNA, 15 bp, Homo sapiens
tctccagcatacttc

SEQ ID NO: 1816075 - DNA, 15 bp, Homo sapiens
ctccagcatacttca

SEQ ID NO: 1816076 - DNA, 15 bp, Homo sapiens
tccagcatacttcag

SEQ ID NO: 1816077 - DNA, 15 bp, Homo sapiens
ccagcatacttcagc

SEQ ID NO: 1816078 - DNA, 15 bp, Homo sapiens
cagcatacttcagca

SEQ ID NO: 1816079 - DNA, 15 bp, Homo sapiens
agcatacttcagcaa

SEQ ID NO: 1816080 - DNA, 15 bp, Homo sapiens
gcatacttcagcaaa

SEQ ID NO: 1816081 - DNA, 15 bp, Homo sapiens
catacttcagcaaag

SEQ ID NO: 1816082 - DNA, 15 bp, Homo sapiens
atacttcagcaaaga

SEQ ID NO: 1816083 - DNA, 15 bp, Homo sapiens
tacttcagcaaagat

SEQ ID NO: 1816084 - DNA, 15 bp, Homo sapiens
acttcagcaaagatg

SEQ ID NO: 1816085 - DNA, 15 bp, Homo sapiens
cttcagcaaagatgc

SEQ ID NO: 1816086 - DNA, 15 bp, Homo sapiens
ttcagcaaagatgcg

SEQ ID NO: 1816087 - DNA, 15 bp, Homo sapiens
tcagcaaagatgcgt

SEQ ID NO: 1816088 - DNA, 15 bp, Homo sapiens
cagcaaagatgcgta

SEQ ID NO: 1816089 - DNA, 15 bp, Homo sapiens
agcaaagatgcgtaa

SEQ ID NO: 1816090 - DNA, 15 bp, Homo sapiens
gcaaagatgcgtaac

SEQ ID NO: 1816091 - DNA, 15 bp, Homo sapiens
caaagatgcgtaacg

SEQ ID NO: 1816092 - DNA, 15 bp, Homo sapiens
aaagatgcgtaacgc

SEQ ID NO: 1816093 - DNA, 15 bp, Homo sapiens
aagatgcgtaacgct

SEQ ID NO: 1816094 - DNA, 15 bp, Homo sapiens
agatgcgtaacgctt

SEQ ID NO: 1816095 - DNA, 15 bp, Homo sapiens
gatgcgtaacgcttt

SEQ ID NO: 1816096 - DNA, 15 bp, Homo sapiens
atgcgtaacgcttta

SEQ ID NO: 1816097 - DNA, 15 bp, Homo sapiens
tgcgtaacgctttag

SEQ ID NO: 1816098 - DNA, 15 bp, Homo sapiens
gcgtaacgctttaga

SEQ ID NO: 1816099 - DNA, 15 bp, Homo sapiens
cgtaacgctttagaa

SEQ ID NO: 1816100 - DNA, 15 bp, Homo sapiens
gtaacgctttagaaa

SEQ ID NO: 1816101 - DNA, 15 bp, Homo sapiens
taacgctttagaaac

SEQ ID NO: 1816102 - DNA, 15 bp, Homo sapiens
aacgctttagaaaca

SEQ ID NO: 1816103 - DNA, 15 bp, Homo sapiens
acgctttagaaacag

SEQ ID NO: 1816104 - DNA, 15 bp, Homo sapiens
cgctttagaaacaga

SEQ ID NO: 1816105 - DNA, 15 bp, Homo sapiens
gctttagaaacagat

SEQ ID NO: 1816106 - DNA, 15 bp, Homo sapiens
ctttagaaacagatc

SEQ ID NO: 1816107 - DNA, 15 bp, Homo sapiens
tttagaaacagatca

SEQ ID NO: 1816108 - DNA, 15 bp, Homo sapiens
ttagaaacagatcat

SEQ ID NO: 1816109 - DNA, 15 bp, Homo sapiens
tagaaacagatcatc

SEQ ID NO: 1816110 - DNA, 15 bp, Homo sapiens
agaaacagatcatcc

SEQ ID NO: 1816111 - DNA, 15 bp, Homo sapiens
gaaacagatcatcca

SEQ ID NO: 1816112 - DNA, 15 bp, Homo sapiens
aaacagatcatccaa

SEQ ID NO: 1816113 - DNA, 15 bp, Homo sapiens
aacagatcatccaat

SEQ ID NO: 1816114 - DNA, 15 bp, Homo sapiens
acagatcatccaatt

SEQ ID NO: 1816115 - DNA, 15 bp, Homo sapiens
cagatcatccaattt

SEQ ID NO: 1816116 - DNA, 15 bp, Homo sapiens
agatcatccaatttt

SEQ ID NO: 1816117 - DNA, 15 bp, Homo sapiens
gatcatccaattttg

SEQ ID NO: 1816118 - DNA, 15 bp, Homo sapiens
atcatccaattttgt

SEQ ID NO: 1816119 - DNA, 15 bp, Homo sapiens
tcatccaattttgta

SEQ ID NO: 1816120 - DNA, 15 bp, Homo sapiens
catccaattttgtat

SEQ ID NO: 1816121 - DNA, 15 bp, Homo sapiens
atccaattttgtatt

SEQ ID NO: 1816122 - DNA, 15 bp, Homo sapiens
tccaattttgtattc

SEQ ID NO: 1816123 - DNA, 15 bp, Homo sapiens
ccaattttgtattct

SEQ ID NO: 1816124 - DNA, 15 bp, Homo sapiens
caattttgtattctt

SEQ ID NO: 1816125 - DNA, 15 bp, Homo sapiens
aattttgtattcttt

SEQ ID NO: 1816126 - DNA, 15 bp, Homo sapiens
attttgtattctttg

SEQ ID NO: 1816127 - DNA, 15 bp, Homo sapiens
ttttgtattctttgc

SEQ ID NO: 1816128 - DNA, 15 bp, Homo sapiens
tttgtattctttgca

SEQ ID NO: 1816129 - DNA, 15 bp, Homo sapiens
ttgtattctttgcag

SEQ ID NO: 1816130 - DNA, 15 bp, Homo sapiens
tgtattctttgcagt

SEQ ID NO: 1816131 - DNA, 15 bp, Homo sapiens
gtattctttgcagtc

SEQ ID NO: 1816132 - DNA, 15 bp, Homo sapiens
tattctttgcagtca

SEQ ID NO: 1816133 - DNA, 15 bp, Homo sapiens
attctttgcagtcaa

SEQ ID NO: 1816134 - DNA, 15 bp, Homo sapiens
ttctttgcagtcaaa

SEQ ID NO: 1816135 - DNA, 15 bp, Homo sapiens
tctttgcagtcaaat

SEQ ID NO: 1816136 - DNA, 15 bp, Homo sapiens
ctttgcagtcaaatg

SEQ ID NO: 1816137 - DNA, 15 bp, Homo sapiens
tttgcagtcaaatgt

SEQ ID NO: 1816138 - DNA, 15 bp, Homo sapiens
ttgcagtcaaatgtt

SEQ ID NO: 1816139 - DNA, 15 bp, Homo sapiens
tgcagtcaaatgttc

SEQ ID NO: 1816140 - DNA, 15 bp, Homo sapiens
gcagtcaaatgttca

SEQ ID NO: 1816141 - DNA, 15 bp, Homo sapiens
cagtcaaatgttcat

SEQ ID NO: 1816142 - DNA, 15 bp, Homo sapiens
agtcaaatgttcata

SEQ ID NO: 1816143 - DNA, 15 bp, Homo sapiens
gtcaaatgttcatac

SEQ ID NO: 1816144 - DNA, 15 bp, Homo sapiens
tcaaatgttcataca

SEQ ID NO: 1816145 - DNA, 15 bp, Homo sapiens
caaatgttcatacag

SEQ ID NO: 1816146 - DNA, 15 bp, Homo sapiens
aaatgttcatacagt

SEQ ID NO: 1816147 - DNA, 15 bp, Homo sapiens
aatgttcatacagtg

SEQ ID NO: 1816148 - DNA, 15 bp, Homo sapiens
atgttcatacagtgc

SEQ ID NO: 1816149 - DNA, 15 bp, Homo sapiens
tgttcatacagtgct

SEQ ID NO: 1816150 - DNA, 15 bp, Homo sapiens
gttcatacagtgctt

SEQ ID NO: 1816151 - DNA, 15 bp, Homo sapiens
ttcatacagtgcttt

SEQ ID NO: 1816152 - DNA, 15 bp, Homo sapiens
tcatacagtgcttta

SEQ ID NO: 1816153 - DNA, 15 bp, Homo sapiens
catacagtgctttag

SEQ ID NO: 1816154 - DNA, 15 bp, Homo sapiens
atacagtgctttagc

SEQ ID NO: 1816155 - DNA, 15 bp, Homo sapiens
tacagtgctttagca

SEQ ID NO: 1816156 - DNA, 15 bp, Homo sapiens
acagtgctttagcag

SEQ ID NO: 1816157 - DNA, 15 bp, Homo sapiens
cagtgctttagcaga

SEQ ID NO: 1816158 - DNA, 15 bp, Homo sapiens
agtgctttagcagat

SEQ ID NO: 1816159 - DNA, 15 bp, Homo sapiens
gtgctttagcagatg

SEQ ID NO: 1816160 - DNA, 15 bp, Homo sapiens
tgctttagcagatgt

SEQ ID NO: 1816161 - DNA, 15 bp, Homo sapiens
gctttagcagatgtg

SEQ ID NO: 1816162 - DNA, 15 bp, Homo sapiens
ctttagcagatgtga

SEQ ID NO: 1816163 - DNA, 15 bp, Homo sapiens
tttagcagatgtgac

SEQ ID NO: 1816164 - DNA, 15 bp, Homo sapiens
ttagcagatgtgaca

SEQ ID NO: 1816165 - DNA, 15 bp, Homo sapiens
tagcagatgtgacat

SEQ ID NO: 1816166 - DNA, 15 bp, Homo sapiens
agcagatgtgacatc

SEQ ID NO: 1816167 - DNA, 15 bp, Homo sapiens
gcagatgtgacatct

SEQ ID NO: 1816168 - DNA, 15 bp, Homo sapiens
cagatgtgacatctt

SEQ ID NO: 1816169 - DNA, 15 bp, Homo sapiens
agatgtgacatcttt

SEQ ID NO: 1816170 - DNA, 15 bp, Homo sapiens
gatgtgacatctttc

SEQ ID NO: 1816171 - DNA, 15 bp, Homo sapiens
atgtgacatctttct

SEQ ID NO: 1816172 - DNA, 15 bp, Homo sapiens
tgtgacatctttctc

SEQ ID NO: 1816173 - DNA, 15 bp, Homo sapiens
gtgacatctttctct

SEQ ID NO: 1816174 - DNA, 15 bp, Homo sapiens
tgacatctttctctg

SEQ ID NO: 1816175 - DNA, 15 bp, Homo sapiens
gacatctttctctga

SEQ ID NO: 1816176 - DNA, 15 bp, Homo sapiens
acatctttctctgag

SEQ ID NO: 1816177 - DNA, 15 bp, Homo sapiens
catctttctctgaga

SEQ ID NO: 1816178 - DNA, 15 bp, Homo sapiens
atctttctctgagac

SEQ ID NO: 1816179 - DNA, 15 bp, Homo sapiens
tctttctctgagact

SEQ ID NO: 1816180 - DNA, 15 bp, Homo sapiens
ctttctctgagactg

SEQ ID NO: 1816181 - DNA, 15 bp, Homo sapiens
tttctctgagactga

SEQ ID NO: 1816182 - DNA, 15 bp, Homo sapiens
ttctctgagactgac

SEQ ID NO: 1816183 - DNA, 15 bp, Homo sapiens
tctctgagactgaca

SEQ ID NO: 1816184 - DNA, 15 bp, Homo sapiens
ctctgagactgacat

SEQ ID NO: 1816185 - DNA, 15 bp, Homo sapiens
tctgagactgacata

SEQ ID NO: 1816186 - DNA, 15 bp, Homo sapiens
ctgagactgacataa

SEQ ID NO: 1816187 - DNA, 15 bp, Homo sapiens
tgagactgacataaa

SEQ ID NO: 1816188 - DNA, 15 bp, Homo sapiens
gagactgacataaag

SEQ ID NO: 1816189 - DNA, 15 bp, Homo sapiens
agactgacataaaga

SEQ ID NO: 1816190 - DNA, 15 bp, Homo sapiens
gactgacataaagaa

SEQ ID NO: 1816191 - DNA, 15 bp, Homo sapiens
actgacataaagaaa

SEQ ID NO: 1816192 - DNA, 15 bp, Homo sapiens
ctgacataaagaaaa

SEQ ID NO: 1816193 - DNA, 15 bp, Homo sapiens
tgacataaagaaaaa

SEQ ID NO: 1816194 - DNA, 15 bp, Homo sapiens
gacataaagaaaaaa

SEQ ID NO: 1816195 - DNA, 15 bp, Homo sapiens
acataaagaaaaaaa

SEQ ID NO: 1816196 - DNA, 15 bp, Homo sapiens
cataaagaaaaaaat

SEQ ID NO: 1816197 - DNA, 15 bp, Homo sapiens
ataaagaaaaaaata

SEQ ID NO: 1816198 - DNA, 15 bp, Homo sapiens
taaagaaaaaaatat

SEQ ID NO: 1816199 - DNA, 15 bp, Homo sapiens
aaagaaaaaaatata

SEQ ID NO: 1816200 - DNA, 15 bp, Homo sapiens
aagaaaaaaatatat

SEQ ID NO: 1816201 - DNA, 15 bp, Homo sapiens
agaaaaaaatatatt

SEQ ID NO: 1816202 - DNA, 15 bp, Homo sapiens
gaaaaaaatatatta

SEQ ID NO: 1816203 - DNA, 15 bp, Homo sapiens
aaaaaaatatattaa

SEQ ID NO: 1816204 - DNA, 15 bp, Homo sapiens
aaaaaatatattaat

SEQ ID NO: 1816205 - DNA, 15 bp, Homo sapiens
aaaaatatattaatc

SEQ ID NO: 1816206 - DNA, 15 bp, Homo sapiens
aaaatatattaatca

SEQ ID NO: 1816207 - DNA, 15 bp, Homo sapiens
aaatatattaatcag

SEQ ID NO: 1816208 - DNA, 15 bp, Homo sapiens
aatatattaatcaga

SEQ ID NO: 1816209 - DNA, 15 bp, Homo sapiens
atatattaatcagag

SEQ ID NO: 1816210 - DNA, 15 bp, Homo sapiens
tatattaatcagaga

SEQ ID NO: 1816211 - DNA, 15 bp, Homo sapiens
atattaatcagagat

SEQ ID NO: 1816212 - DNA, 15 bp, Homo sapiens
tattaatcagagata

SEQ ID NO: 1816213 - DNA, 15 bp, Homo sapiens
attaatcagagataa

SEQ ID NO: 1816214 - DNA, 15 bp, Homo sapiens
ttaatcagagataaa

SEQ ID NO: 1816215 - DNA, 15 bp, Homo sapiens
taatcagagataaag

SEQ ID NO: 1816216 - DNA, 15 bp, Homo sapiens
aatcagagataaaga

SEQ ID NO: 1816217 - DNA, 15 bp, Homo sapiens
atcagagataaagac

SEQ ID NO: 1816218 - DNA, 15 bp, Homo sapiens
tcagagataaagaca

SEQ ID NO: 1816219 - DNA, 15 bp, Homo sapiens
cagagataaagacaa

SEQ ID NO: 1816220 - DNA, 15 bp, Homo sapiens
agagataaagacaac

SEQ ID NO: 1816221 - DNA, 15 bp, Homo sapiens
gagataaagacaacc

SEQ ID NO: 1816222 - DNA, 15 bp, Homo sapiens
agataaagacaacct

SEQ ID NO: 1816223 - DNA, 15 bp, Homo sapiens
gataaagacaaccta

SEQ ID NO: 1816224 - DNA, 15 bp, Homo sapiens
ataaagacaacctat

SEQ ID NO: 1816225 - DNA, 15 bp, Homo sapiens
taaagacaacctatc

SEQ ID NO: 1816226 - DNA, 15 bp, Homo sapiens
aaagacaacctatct

SEQ ID NO: 1816227 - DNA, 15 bp, Homo sapiens
aagacaacctatctt

SEQ ID NO: 1816228 - DNA, 15 bp, Homo sapiens
agacaacctatctta

SEQ ID NO: 1816229 - DNA, 15 bp, Homo sapiens
gacaacctatcttac

SEQ ID NO: 1816230 - DNA, 15 bp, Homo sapiens
acaacctatcttact

SEQ ID NO: 1816231 - DNA, 15 bp, Homo sapiens
caacctatcttactc

SEQ ID NO: 1816232 - DNA, 15 bp, Homo sapiens
aacctatcttactct

SEQ ID NO: 1816233 - DNA, 15 bp, Homo sapiens
acctatcttactctt

SEQ ID NO: 1816234 - DNA, 15 bp, Homo sapiens
cctatcttactcttt

SEQ ID NO: 1816235 - DNA, 15 bp, Homo sapiens
ctatcttactctttt

SEQ ID NO: 1816236 - DNA, 15 bp, Homo sapiens
tatcttactcttttc

SEQ ID NO: 1816237 - DNA, 15 bp, Homo sapiens
atcttactcttttca

SEQ ID NO: 1816238 - DNA, 15 bp, Homo sapiens
ttactcttttcacca

SEQ ID NO: 1816239 - DNA, 15 bp, Homo sapiens
tactcttttcaccaa

SEQ ID NO: 1816240 - DNA, 15 bp, Homo sapiens
actcttttcaccaaa

SEQ ID NO: 1816241 - DNA, 15 bp, Homo sapiens
ctcttttcaccaaaa

SEQ ID NO: 1816242 - DNA, 15 bp, Homo sapiens
cttttcaccaaaaca

SEQ ID NO: 1816243 - DNA, 15 bp, Homo sapiens
ttttcaccaaaacag

SEQ ID NO: 1816244 - DNA, 15 bp, Homo sapiens
tttcaccaaaacagc

SEQ ID NO: 1816245 - DNA, 15 bp, Homo sapiens
ttcaccaaaacagcc

SEQ ID NO: 1816246 - DNA, 15 bp, Homo sapiens
tcaccaaaacagcca

SEQ ID NO: 1816247 - DNA, 15 bp, Homo sapiens
caccaaaacagccac

SEQ ID NO: 1816248 - DNA, 15 bp, Homo sapiens
accaaaacagccact

SEQ ID NO: 1816249 - DNA, 15 bp, Homo sapiens
ccaaaacagccactc

SEQ ID NO: 1816250 - DNA, 15 bp, Homo sapiens
caaaacagccactca

SEQ ID NO: 1816251 - DNA, 15 bp, Homo sapiens
aaaacagccactcag

SEQ ID NO: 1816252 - DNA, 15 bp, Homo sapiens
aaacagccactcagg

SEQ ID NO: 1816253 - DNA, 15 bp, Homo sapiens
aacagccactcaggg

SEQ ID NO: 1816254 - DNA, 15 bp, Homo sapiens
acagccactcaggga

SEQ ID NO: 1816255 - DNA, 15 bp, Homo sapiens
cagccactcagggac

SEQ ID NO: 1816256 - DNA, 15 bp, Homo sapiens
agccactcagggacg

SEQ ID NO: 1816257 - DNA, 15 bp, Homo sapiens
gccactcagggacgg

SEQ ID NO: 1816258 - DNA, 15 bp, Homo sapiens
ccactcagggacggc

SEQ ID NO: 1816259 - DNA, 15 bp, Homo sapiens
cactcagggacggct

SEQ ID NO: 1816260 - DNA, 15 bp, Homo sapiens
actcagggacggctg

SEQ ID NO: 1816261 - DNA, 15 bp, Homo sapiens
ctcagggacggctgg

SEQ ID NO: 1816262 - DNA, 15 bp, Homo sapiens
tcagggacggctgga

SEQ ID NO: 1816263 - DNA, 15 bp, Homo sapiens
cagggacggctggat

SEQ ID NO: 1816264 - DNA, 15 bp, Homo sapiens
agggacggctggatc

SEQ ID NO: 1816265 - DNA, 15 bp, Homo sapiens
gggacggctggatcc

SEQ ID NO: 1816266 - DNA, 15 bp, Homo sapiens
ggacggctggatccc

SEQ ID NO: 1816267 - DNA, 15 bp, Homo sapiens
gacggctggatccct

SEQ ID NO: 1816268 - DNA, 15 bp, Homo sapiens
acggctggatccctt

SEQ ID NO: 1816269 - DNA, 15 bp, Homo sapiens
cggctggatcccttt

SEQ ID NO: 1816270 - DNA, 15 bp, Homo sapiens
ggctggatcccttta

SEQ ID NO: 1816271 - DNA, 15 bp, Homo sapiens
gctggatccctttat

SEQ ID NO: 1816272 - DNA, 15 bp, Homo sapiens
ctggatccctttatc

SEQ ID NO: 1816273 - DNA, 15 bp, Homo sapiens
tggatccctttatcc

SEQ ID NO: 1816274 - DNA, 15 bp, Homo sapiens
ggatccctttatccc

SEQ ID NO: 1816275 - DNA, 15 bp, Homo sapiens
gatccctttatccca

SEQ ID NO: 1816276 - DNA, 15 bp, Homo sapiens
atccctttatcccac

SEQ ID NO: 1816277 - DNA, 15 bp, Homo sapiens
tccctttatcccacg

SEQ ID NO: 1816278 - DNA, 15 bp, Homo sapiens
ccctttatcccacgg

SEQ ID NO: 1816279 - DNA, 15 bp, Homo sapiens
cctttatcccacggc

SEQ ID NO: 1816280 - DNA, 15 bp, Homo sapiens
ctttatcccacggca

SEQ ID NO: 1816281 - DNA, 15 bp, Homo sapiens
tttatcccacggcaa

SEQ ID NO: 1816282 - DNA, 15 bp, Homo sapiens
ttatcccacggcaaa

SEQ ID NO: 1816283 - DNA, 15 bp, Homo sapiens
tatcccacggcaaat

SEQ ID NO: 1816284 - DNA, 15 bp, Homo sapiens
atcccacggcaaatg

SEQ ID NO: 1816285 - DNA, 15 bp, Homo sapiens
tcccacggcaaatga

SEQ ID NO: 1816286 - DNA, 15 bp, Homo sapiens
cccacggcaaatgaa

SEQ ID NO: 1816287 - DNA, 15 bp, Homo sapiens
ccacggcaaatgaac

SEQ ID NO: 1816288 - DNA, 15 bp, Homo sapiens
cacggcaaatgaaca

SEQ ID NO: 1816289 - DNA, 15 bp, Homo sapiens
acggcaaatgaacac

SEQ ID NO: 1816290 - DNA, 15 bp, Homo sapiens
cggcaaatgaacact

SEQ ID NO: 1816291 - DNA, 15 bp, Homo sapiens
ggcaaatgaacactt

SEQ ID NO: 1816292 - DNA, 15 bp, Homo sapiens
gcaaatgaacactta

SEQ ID NO: 1816293 - DNA, 15 bp, Homo sapiens
caaatgaacacttaa

SEQ ID NO: 1816294 - DNA, 15 bp, Homo sapiens
aaatgaacacttaac

SEQ ID NO: 1816295 - DNA, 15 bp, Homo sapiens
aatgaacacttaact

SEQ ID NO: 1816296 - DNA, 15 bp, Homo sapiens
atgaacacttaacta

SEQ ID NO: 1816297 - DNA, 15 bp, Homo sapiens
tgaacacttaactac

SEQ ID NO: 1816298 - DNA, 15 bp, Homo sapiens
gaacacttaactact

SEQ ID NO: 1816299 - DNA, 15 bp, Homo sapiens
aacacttaactactt

SEQ ID NO: 1816300 - DNA, 15 bp, Homo sapiens
acacttaactacttt

SEQ ID NO: 1816301 - DNA, 15 bp, Homo sapiens
cacttaactactttc

SEQ ID NO: 1816302 - DNA, 15 bp, Homo sapiens
acttaactactttca

SEQ ID NO: 1816303 - DNA, 15 bp, Homo sapiens
cttaactactttcag

SEQ ID NO: 1816304 - DNA, 15 bp, Homo sapiens
ttaactactttcagt

SEQ ID NO: 1816305 - DNA, 15 bp, Homo sapiens
taactactttcagta

SEQ ID NO: 1816306 - DNA, 15 bp, Homo sapiens
aactactttcagtaa

SEQ ID NO: 1816307 - DNA, 15 bp, Homo sapiens
actactttcagtaag

SEQ ID NO: 1816308 - DNA, 15 bp, Homo sapiens
ctactttcagtaaga

SEQ ID NO: 1816309 - DNA, 15 bp, Homo sapiens
tactttcagtaagaa

SEQ ID NO: 1816310 - DNA, 15 bp, Homo sapiens
actttcagtaagaag

SEQ ID NO: 1816311 - DNA, 15 bp, Homo sapiens
ctttcagtaagaagc

SEQ ID NO: 1816312 - DNA, 15 bp, Homo sapiens
tttcagtaagaagcc

SEQ ID NO: 1816313 - DNA, 15 bp, Homo sapiens
ttcagtaagaagcca

SEQ ID NO: 1816314 - DNA, 15 bp, Homo sapiens
tcagtaagaagccac

SEQ ID NO: 1816315 - DNA, 15 bp, Homo sapiens
cagtaagaagccaca

SEQ ID NO: 1816316 - DNA, 15 bp, Homo sapiens
agtaagaagccacat

SEQ ID NO: 1816317 - DNA, 15 bp, Homo sapiens
gtaagaagccacatt

SEQ ID NO: 1816318 - DNA, 15 bp, Homo sapiens
taagaagccacattc

SEQ ID NO: 1816319 - DNA, 15 bp, Homo sapiens
aagaagccacattca

SEQ ID NO: 1816320 - DNA, 15 bp, Homo sapiens
agaagccacattcag

SEQ ID NO: 1816321 - DNA, 15 bp, Homo sapiens
gaagccacattcaga

SEQ ID NO: 1816322 - DNA, 15 bp, Homo sapiens
aagccacattcagaa

SEQ ID NO: 1816323 - DNA, 15 bp, Homo sapiens
agccacattcagaat

SEQ ID NO: 1816324 - DNA, 15 bp, Homo sapiens
gccacattcagaatc

SEQ ID NO: 1816325 - DNA, 15 bp, Homo sapiens
ccacattcagaatct

SEQ ID NO: 1816326 - DNA, 15 bp, Homo sapiens
cacattcagaatcta

SEQ ID NO: 1816327 - DNA, 15 bp, Homo sapiens
acattcagaatctac

SEQ ID NO: 1816328 - DNA, 15 bp, Homo sapiens
cattcagaatctacc

SEQ ID NO: 1816329 - DNA, 15 bp, Homo sapiens
attcagaatctacca

SEQ ID NO: 1816330 - DNA, 15 bp, Homo sapiens
ttcagaatctaccat

SEQ ID NO: 1816331 - DNA, 15 bp, Homo sapiens
tcagaatctaccatc

SEQ ID NO: 1816332 - DNA, 15 bp, Homo sapiens
cagaatctaccatct

SEQ ID NO: 1816333 - DNA, 15 bp, Homo sapiens
agaatctaccatctc

SEQ ID NO: 1816334 - DNA, 15 bp, Homo sapiens
gaatctaccatctcc

SEQ ID NO: 1816335 - DNA, 15 bp, Homo sapiens
aatctaccatctccc

SEQ ID NO: 1816336 - DNA, 15 bp, Homo sapiens
atctaccatctccct

SEQ ID NO: 1816337 - DNA, 15 bp, Homo sapiens
tctaccatctccctc

SEQ ID NO: 1816338 - DNA, 15 bp, Homo sapiens
ctaccatctccctca

SEQ ID NO: 1816339 - DNA, 15 bp, Homo sapiens
taccatctccctcac

SEQ ID NO: 1816340 - DNA, 15 bp, Homo sapiens
accatctccctcact

SEQ ID NO: 1816341 - DNA, 15 bp, Homo sapiens
ccatctccctcactt

SEQ ID NO: 1816342 - DNA, 15 bp, Homo sapiens
catctccctcacttc

SEQ ID NO: 1816343 - DNA, 15 bp, Homo sapiens
atctccctcacttct

SEQ ID NO: 1816344 - DNA, 15 bp, Homo sapiens
tctccctcacttctc

SEQ ID NO: 1816345 - DNA, 15 bp, Homo sapiens
ctccctcacttctct

SEQ ID NO: 1816346 - DNA, 15 bp, Homo sapiens
tccctcacttctcta

SEQ ID NO: 1816347 - DNA, 15 bp, Homo sapiens
ccctcacttctctac

SEQ ID NO: 1816348 - DNA, 15 bp, Homo sapiens
cctcacttctctaca

SEQ ID NO: 1816349 - DNA, 15 bp, Homo sapiens
ctcacttctctacat

SEQ ID NO: 1816350 - DNA, 15 bp, Homo sapiens
tcacttctctacatc

SEQ ID NO: 1816351 - DNA, 15 bp, Homo sapiens
cacttctctacatcc

SEQ ID NO: 1816352 - DNA, 15 bp, Homo sapiens
acttctctacatccc

SEQ ID NO: 1816353 - DNA, 15 bp, Homo sapiens
cttctctacatccct

SEQ ID NO: 1816354 - DNA, 15 bp, Homo sapiens
ttctctacatccctc

SEQ ID NO: 1816355 - DNA, 15 bp, Homo sapiens
tctctacatccctca

SEQ ID NO: 1816356 - DNA, 15 bp, Homo sapiens
ctctacatccctcat

SEQ ID NO: 1816357 - DNA, 15 bp, Homo sapiens
tctacatccctcatt

SEQ ID NO: 1816358 - DNA, 15 bp, Homo sapiens
ctacatccctcattc

SEQ ID NO: 1816359 - DNA, 15 bp, Homo sapiens
tacatccctcattcg

SEQ ID NO: 1816360 - DNA, 15 bp, Homo sapiens
acatccctcattcgg

SEQ ID NO: 1816361 - DNA, 15 bp, Homo sapiens
catccctcattcggc

SEQ ID NO: 1816362 - DNA, 15 bp, Homo sapiens
atccctcattcggca

SEQ ID NO: 1816363 - DNA, 15 bp, Homo sapiens
tccctcattcggcat

SEQ ID NO: 1816364 - DNA, 15 bp, Homo sapiens
ccctcattcggcatc

SEQ ID NO: 1816365 - DNA, 15 bp, Homo sapiens
cctcattcggcatca

SEQ ID NO: 1816366 - DNA, 15 bp, Homo sapiens
ctcattcggcatcac

SEQ ID NO: 1816367 - DNA, 15 bp, Homo sapiens
tcattcggcatcact

SEQ ID NO: 1816368 - DNA, 15 bp, Homo sapiens
cattcggcatcactc

SEQ ID NO: 1816369 - DNA, 15 bp, Homo sapiens
attcggcatcactca

SEQ ID NO: 1816370 - DNA, 15 bp, Homo sapiens
ttcggcatcactcac

SEQ ID NO: 1816371 - DNA, 15 bp, Homo sapiens
tcggcatcactcact

SEQ ID NO: 1816372 - DNA, 15 bp, Homo sapiens
cggcatcactcactt

SEQ ID NO: 1816373 - DNA, 15 bp, Homo sapiens
ggcatcactcacttt

SEQ ID NO: 1816374 - DNA, 15 bp, Homo sapiens
gcatcactcactttg

SEQ ID NO: 1816375 - DNA, 15 bp, Homo sapiens
catcactcactttga

SEQ ID NO: 1816376 - DNA, 15 bp, Homo sapiens
atcactcactttgaa

SEQ ID NO: 1816377 - DNA, 15 bp, Homo sapiens
tcactcactttgaag

SEQ ID NO: 1816378 - DNA, 15 bp, Homo sapiens
cactcactttgaagg

SEQ ID NO: 1816379 - DNA, 15 bp, Homo sapiens
actcactttgaagga

SEQ ID NO: 1816380 - DNA, 15 bp, Homo sapiens
ctcactttgaaggag

SEQ ID NO: 1816381 - DNA, 15 bp, Homo sapiens
tcactttgaaggaga

SEQ ID NO: 1816382 - DNA, 15 bp, Homo sapiens
cactttgaaggagaa

SEQ ID NO: 1816383 - DNA, 15 bp, Homo sapiens
actttgaaggagaag

SEQ ID NO: 1816384 - DNA, 15 bp, Homo sapiens
ctttgaaggagaaga

SEQ ID NO: 1816385 - DNA, 15 bp, Homo sapiens
tttgaaggagaagaa

SEQ ID NO: 1816386 - DNA, 15 bp, Homo sapiens
ttgaaggagaagaaa

SEQ ID NO: 1816387 - DNA, 15 bp, Homo sapiens
tgaaggagaagaaaa

SEQ ID NO: 1816388 - DNA, 15 bp, Homo sapiens
gaaggagaagaaaat

SEQ ID NO: 1816389 - DNA, 15 bp, Homo sapiens
aaggagaagaaaatg

SEQ ID NO: 1816390 - DNA, 15 bp, Homo sapiens
aggagaagaaaatga

SEQ ID NO: 1816391 - DNA, 15 bp, Homo sapiens
ggagaagaaaatgac

SEQ ID NO: 1816392 - DNA, 15 bp, Homo sapiens
gagaagaaaatgaca

SEQ ID NO: 1816393 - DNA, 15 bp, Homo sapiens
agaagaaaatgacaa

SEQ ID NO: 1816394 - DNA, 15 bp, Homo sapiens
gaagaaaatgacaaa

SEQ ID NO: 1816395 - DNA, 15 bp, Homo sapiens
aagaaaatgacaaat

SEQ ID NO: 1816396 - DNA, 15 bp, Homo sapiens
agaaaatgacaaata

SEQ ID NO: 1816397 - DNA, 15 bp, Homo sapiens
gaaaatgacaaatat

SEQ ID NO: 1816398 - DNA, 15 bp, Homo sapiens
aaaatgacaaatatg

SEQ ID NO: 1816399 - DNA, 15 bp, Homo sapiens
aaatgacaaatatgg

SEQ ID NO: 1816400 - DNA, 15 bp, Homo sapiens
aatgacaaatatggc

SEQ ID NO: 1816401 - DNA, 15 bp, Homo sapiens
atgacaaatatggct

SEQ ID NO: 1816402 - DNA, 15 bp, Homo sapiens
tgacaaatatggcta

SEQ ID NO: 1816403 - DNA, 15 bp, Homo sapiens
gacaaatatggctac

SEQ ID NO: 1816404 - DNA, 15 bp, Homo sapiens
acaaatatggctaca

SEQ ID NO: 1816405 - DNA, 15 bp, Homo sapiens
caaatatggctacat

SEQ ID NO: 1816406 - DNA, 15 bp, Homo sapiens
aaatatggctacatt

SEQ ID NO: 1816407 - DNA, 15 bp, Homo sapiens
aatatggctacattt

SEQ ID NO: 1816408 - DNA, 15 bp, Homo sapiens
atatggctacattta

SEQ ID NO: 1816409 - DNA, 15 bp, Homo sapiens
tatggctacatttaa

SEQ ID NO: 1816410 - DNA, 15 bp, Homo sapiens
atggctacatttaaa

SEQ ID NO: 1816411 - DNA, 15 bp, Homo sapiens
tggctacatttaaag

SEQ ID NO: 1816412 - DNA, 15 bp, Homo sapiens
ggctacatttaaagg

SEQ ID NO: 1816413 - DNA, 15 bp, Homo sapiens
gctacatttaaagga

SEQ ID NO: 1816414 - DNA, 15 bp, Homo sapiens
ctacatttaaaggac

SEQ ID NO: 1816415 - DNA, 15 bp, Homo sapiens
tacatttaaaggact

SEQ ID NO: 1816416 - DNA, 15 bp, Homo sapiens
acatttaaaggactt

SEQ ID NO: 1816417 - DNA, 15 bp, Homo sapiens
catttaaaggacttt

SEQ ID NO: 1816418 - DNA, 15 bp, Homo sapiens
atttaaaggacttta

SEQ ID NO: 1816419 - DNA, 15 bp, Homo sapiens
tttaaaggactttag

SEQ ID NO: 1816420 - DNA, 15 bp, Homo sapiens
ttaaaggactttaga

SEQ ID NO: 1816421 - DNA, 15 bp, Homo sapiens
taaaggactttagaa

SEQ ID NO: 1816422 - DNA, 15 bp, Homo sapiens
aaaggactttagaat

SEQ ID NO: 1816423 - DNA, 15 bp, Homo sapiens
aaggactttagaata

SEQ ID NO: 1816424 - DNA, 15 bp, Homo sapiens
aggactttagaataa

SEQ ID NO: 1816425 - DNA, 15 bp, Homo sapiens
ggactttagaataat

SEQ ID NO: 1816426 - DNA, 15 bp, Homo sapiens
gactttagaataata

SEQ ID NO: 1816427 - DNA, 15 bp, Homo sapiens
actttagaataatat

SEQ ID NO: 1816428 - DNA, 15 bp, Homo sapiens
ctttagaataatatt

SEQ ID NO: 1816429 - DNA, 15 bp, Homo sapiens
tttagaataatattg

SEQ ID NO: 1816430 - DNA, 15 bp, Homo sapiens
ttagaataatattga

SEQ ID NO: 1816431 - DNA, 15 bp, Homo sapiens
tagaataatattgat

SEQ ID NO: 1816432 - DNA, 15 bp, Homo sapiens
agaataatattgata

SEQ ID NO: 1816433 - DNA, 15 bp, Homo sapiens
gaataatattgatac

SEQ ID NO: 1816434 - DNA, 15 bp, Homo sapiens
aataatattgatacc

SEQ ID NO: 1816435 - DNA, 15 bp, Homo sapiens
ataatattgatacca

SEQ ID NO: 1816436 - DNA, 15 bp, Homo sapiens
taatattgataccat

SEQ ID NO: 1816437 - DNA, 15 bp, Homo sapiens
aatattgataccatt

SEQ ID NO: 1816438 - DNA, 15 bp, Homo sapiens
atattgataccattc

SEQ ID NO: 1816439 - DNA, 15 bp, Homo sapiens
tattgataccattca

SEQ ID NO: 1816440 - DNA, 15 bp, Homo sapiens
attgataccattcac

SEQ ID NO: 1816441 - DNA, 15 bp, Homo sapiens
ttgataccattcact

SEQ ID NO: 1816442 - DNA, 15 bp, Homo sapiens
tgataccattcactt

SEQ ID NO: 1816443 - DNA, 15 bp, Homo sapiens
gataccattcactta

SEQ ID NO: 1816444 - DNA, 15 bp, Homo sapiens
ataccattcacttag

SEQ ID NO: 1816445 - DNA, 15 bp, Homo sapiens
taccattcacttagg

SEQ ID NO: 1816446 - DNA, 15 bp, Homo sapiens
accattcacttaggt

SEQ ID NO: 1816447 - DNA, 15 bp, Homo sapiens
ccattcacttaggtt

SEQ ID NO: 1816448 - DNA, 15 bp, Homo sapiens
cattcacttaggtta

SEQ ID NO: 1816449 - DNA, 15 bp, Homo sapiens
attcacttaggttat

SEQ ID NO: 1816450 - DNA, 15 bp, Homo sapiens
ttcacttaggttatt

SEQ ID NO: 1816451 - DNA, 15 bp, Homo sapiens
tcacttaggttatta

SEQ ID NO: 1816452 - DNA, 15 bp, Homo sapiens
cacttaggttattac

SEQ ID NO: 1816453 - DNA, 15 bp, Homo sapiens
acttaggttattaca

SEQ ID NO: 1816454 - DNA, 15 bp, Homo sapiens
cttaggttattacat

SEQ ID NO: 1816455 - DNA, 15 bp, Homo sapiens
ttaggttattacatt

SEQ ID NO: 1816456 - DNA, 15 bp, Homo sapiens
taggttattacatta

SEQ ID NO: 1816457 - DNA, 15 bp, Homo sapiens
aggttattacattat

SEQ ID NO: 1816458 - DNA, 15 bp, Homo sapiens
ggttattacattatt

SEQ ID NO: 1816459 - DNA, 15 bp, Homo sapiens
gttattacattattt

SEQ ID NO: 1816460 - DNA, 15 bp, Homo sapiens
ttattacattattta

SEQ ID NO: 1816461 - DNA, 15 bp, Homo sapiens
tattacattatttaa

SEQ ID NO: 1816462 - DNA, 15 bp, Homo sapiens
attacattatttaag

SEQ ID NO: 1816463 - DNA, 15 bp, Homo sapiens
ttacattatttaaga

SEQ ID NO: 1816464 - DNA, 15 bp, Homo sapiens
tacattatttaagac

SEQ ID NO: 1816465 - DNA, 15 bp, Homo sapiens
acattatttaagacc

SEQ ID NO: 1816466 - DNA, 15 bp, Homo sapiens
cattatttaagacct

SEQ ID NO: 1816467 - DNA, 15 bp, Homo sapiens
attatttaagaccta

SEQ ID NO: 1816468 - DNA, 15 bp, Homo sapiens
ttatttaagacctat

SEQ ID NO: 1816469 - DNA, 15 bp, Homo sapiens
tatttaagacctatg

SEQ ID NO: 1816470 - DNA, 15 bp, Homo sapiens
atttaagacctatga

SEQ ID NO: 1816471 - DNA, 15 bp, Homo sapiens
tttaagacctatgat

SEQ ID NO: 1816472 - DNA, 15 bp, Homo sapiens
ttaagacctatgata

SEQ ID NO: 1816473 - DNA, 15 bp, Homo sapiens
taagacctatgatag

SEQ ID NO: 1816474 - DNA, 15 bp, Homo sapiens
aagacctatgatagt

SEQ ID NO: 1816475 - DNA, 15 bp, Homo sapiens
agacctatgatagtt

SEQ ID NO: 1816476 - DNA, 15 bp, Homo sapiens
gacctatgatagttc

SEQ ID NO: 1816477 - DNA, 15 bp, Homo sapiens
acctatgatagttca

SEQ ID NO: 1816478 - DNA, 15 bp, Homo sapiens
cctatgatagttcaa

SEQ ID NO: 1816479 - DNA, 15 bp, Homo sapiens
ctatgatagttcaag

SEQ ID NO: 1816480 - DNA, 15 bp, Homo sapiens
tatgatagttcaagt

SEQ ID NO: 1816481 - DNA, 15 bp, Homo sapiens
atgatagttcaagtg

SEQ ID NO: 1816482 - DNA, 15 bp, Homo sapiens
tgatagttcaagtga

SEQ ID NO: 1816483 - DNA, 15 bp, Homo sapiens
gatagttcaagtgac

SEQ ID NO: 1816484 - DNA, 15 bp, Homo sapiens
atagttcaagtgacc

SEQ ID NO: 1816485 - DNA, 15 bp, Homo sapiens
tagttcaagtgacca

SEQ ID NO: 1816486 - DNA, 15 bp, Homo sapiens
agttcaagtgaccac

SEQ ID NO: 1816487 - DNA, 15 bp, Homo sapiens
gttcaagtgaccaca

SEQ ID NO: 1816488 - DNA, 15 bp, Homo sapiens
ttcaagtgaccacaa

SEQ ID NO: 1816489 - DNA, 15 bp, Homo sapiens
tcaagtgaccacaaa

SEQ ID NO: 1816490 - DNA, 15 bp, Homo sapiens
caagtgaccacaaac

SEQ ID NO: 1816491 - DNA, 15 bp, Homo sapiens
aagtgaccacaaact

SEQ ID NO: 1816492 - DNA, 15 bp, Homo sapiens
agtgaccacaaactg

SEQ ID NO: 1816493 - DNA, 15 bp, Homo sapiens
gtgaccacaaactga

SEQ ID NO: 1816494 - DNA, 15 bp, Homo sapiens
tgaccacaaactgaa

SEQ ID NO: 1816495 - DNA, 15 bp, Homo sapiens
gaccacaaactgaag

SEQ ID NO: 1816496 - DNA, 15 bp, Homo sapiens
accacaaactgaagt

SEQ ID NO: 1816497 - DNA, 15 bp, Homo sapiens
ccacaaactgaagtc

SEQ ID NO: 1816498 - DNA, 15 bp, Homo sapiens
cacaaactgaagtcc

SEQ ID NO: 1816499 - DNA, 15 bp, Homo sapiens
acaaactgaagtcct

SEQ ID NO: 1816500 - DNA, 15 bp, Homo sapiens
caaactgaagtcctc

SEQ ID NO: 1816501 - DNA, 15 bp, Homo sapiens
aaactgaagtcctca

SEQ ID NO: 1816502 - DNA, 15 bp, Homo sapiens
aactgaagtcctcag

SEQ ID NO: 1816503 - DNA, 15 bp, Homo sapiens
actgaagtcctcagt

SEQ ID NO: 1816504 - DNA, 15 bp, Homo sapiens
ctgaagtcctcagtt

SEQ ID NO: 1816505 - DNA, 15 bp, Homo sapiens
tgaagtcctcagtta

SEQ ID NO: 1816506 - DNA, 15 bp, Homo sapiens
gaagtcctcagttat

SEQ ID NO: 1816507 - DNA, 15 bp, Homo sapiens
aagtcctcagttata

SEQ ID NO: 1816508 - DNA, 15 bp, Homo sapiens
agtcctcagttataa

SEQ ID NO: 1816509 - DNA, 15 bp, Homo sapiens
gtcctcagttataaa

SEQ ID NO: 1816510 - DNA, 15 bp, Homo sapiens
tcctcagttataaaa

SEQ ID NO: 1816511 - DNA, 15 bp, Homo sapiens
cctcagttataaaat

SEQ ID NO: 1816512 - DNA, 15 bp, Homo sapiens
ctcagttataaaata

SEQ ID NO: 1816513 - DNA, 15 bp, Homo sapiens
tcagttataaaataa

SEQ ID NO: 1816514 - DNA, 15 bp, Homo sapiens
cagttataaaataat

SEQ ID NO: 1816515 - DNA, 15 bp, Homo sapiens
agttataaaataata

SEQ ID NO: 1816516 - DNA, 15 bp, Homo sapiens
gttataaaataatac

SEQ ID NO: 1816517 - DNA, 15 bp, Homo sapiens
ttataaaataataca

SEQ ID NO: 1816518 - DNA, 15 bp, Homo sapiens
tataaaataatacac

SEQ ID NO: 1816519 - DNA, 15 bp, Homo sapiens
ataaaataatacaca

SEQ ID NO: 1816520 - DNA, 15 bp, Homo sapiens
taaaataatacacac

SEQ ID NO: 1816521 - DNA, 15 bp, Homo sapiens
aaaataatacacacc

SEQ ID NO: 1816522 - DNA, 15 bp, Homo sapiens
aaataatacacacca

SEQ ID NO: 1816523 - DNA, 15 bp, Homo sapiens
aataatacacaccat

SEQ ID NO: 1816524 - DNA, 15 bp, Homo sapiens
ataatacacaccatt

SEQ ID NO: 1816525 - DNA, 15 bp, Homo sapiens
taatacacaccattc

SEQ ID NO: 1816526 - DNA, 15 bp, Homo sapiens
aatacacaccattca

SEQ ID NO: 1816527 - DNA, 15 bp, Homo sapiens
atacacaccattcaa

SEQ ID NO: 1816528 - DNA, 15 bp, Homo sapiens
tacacaccattcaat

SEQ ID NO: 1816529 - DNA, 15 bp, Homo sapiens
acacaccattcaatc

SEQ ID NO: 1816530 - DNA, 15 bp, Homo sapiens
cacaccattcaatcc

SEQ ID NO: 1816531 - DNA, 15 bp, Homo sapiens
acaccattcaatccc

SEQ ID NO: 1816532 - DNA, 15 bp, Homo sapiens
caccattcaatcccc

SEQ ID NO: 1816533 - DNA, 15 bp, Homo sapiens
accattcaatcccct

SEQ ID NO: 1816534 - DNA, 15 bp, Homo sapiens
ccattcaatcccctt

SEQ ID NO: 1816535 - DNA, 15 bp, Homo sapiens
cattcaatccccttt

SEQ ID NO: 1816536 - DNA, 15 bp, Homo sapiens
attcaatcccctttg

SEQ ID NO: 1816537 - DNA, 15 bp, Homo sapiens
ttcaatcccctttgg

SEQ ID NO: 1816538 - DNA, 15 bp, Homo sapiens
tcaatcccctttggc

SEQ ID NO: 1816539 - DNA, 15 bp, Homo sapiens
caatcccctttggct

SEQ ID NO: 1816540 - DNA, 15 bp, Homo sapiens
aatcccctttggctt

SEQ ID NO: 1816541 - DNA, 15 bp, Homo sapiens
atcccctttggctta

SEQ ID NO: 1816542 - DNA, 15 bp, Homo sapiens
tcccctttggcttaa

SEQ ID NO: 1816543 - DNA, 15 bp, Homo sapiens
cccctttggcttaaa

SEQ ID NO: 1816544 - DNA, 15 bp, Homo sapiens
ccctttggcttaaaa

SEQ ID NO: 1816545 - DNA, 15 bp, Homo sapiens
cctttggcttaaaac

SEQ ID NO: 1816546 - DNA, 15 bp, Homo sapiens
ctttggcttaaaacc

SEQ ID NO: 1816547 - DNA, 15 bp, Homo sapiens
tttggcttaaaacca

SEQ ID NO: 1816548 - DNA, 15 bp, Homo sapiens
ttggcttaaaaccac

SEQ ID NO: 1816549 - DNA, 15 bp, Homo sapiens
tggcttaaaaccact

SEQ ID NO: 1816550 - DNA, 15 bp, Homo sapiens
ggcttaaaaccactg

SEQ ID NO: 1816551 - DNA, 15 bp, Homo sapiens
gcttaaaaccactgt

SEQ ID NO: 1816552 - DNA, 15 bp, Homo sapiens
cttaaaaccactgtg

SEQ ID NO: 1816553 - DNA, 15 bp, Homo sapiens
ttaaaaccactgtga

SEQ ID NO: 1816554 - DNA, 15 bp, Homo sapiens
taaaaccactgtgaa

SEQ ID NO: 1816555 - DNA, 15 bp, Homo sapiens
aaaaccactgtgaaa

SEQ ID NO: 1816556 - DNA, 15 bp, Homo sapiens
aaaccactgtgaaat

SEQ ID NO: 1816557 - DNA, 15 bp, Homo sapiens
aaccactgtgaaatc

SEQ ID NO: 1816558 - DNA, 15 bp, Homo sapiens
accactgtgaaatca

SEQ ID NO: 1816559 - DNA, 15 bp, Homo sapiens
ccactgtgaaatcaa

SEQ ID NO: 1816560 - DNA, 15 bp, Homo sapiens
cactgtgaaatcaag

SEQ ID NO: 1816561 - DNA, 15 bp, Homo sapiens
actgtgaaatcaaga

SEQ ID NO: 1816562 - DNA, 15 bp, Homo sapiens
ctgtgaaatcaagat

SEQ ID NO: 1816563 - DNA, 15 bp, Homo sapiens
tgtgaaatcaagata

SEQ ID NO: 1816564 - DNA, 15 bp, Homo sapiens
gtgaaatcaagataa

SEQ ID NO: 1816565 - DNA, 15 bp, Homo sapiens
tgaaatcaagataat

SEQ ID NO: 1816566 - DNA, 15 bp, Homo sapiens
gaaatcaagataatc

SEQ ID NO: 1816567 - DNA, 15 bp, Homo sapiens
aaatcaagataatcc

SEQ ID NO: 1816568 - DNA, 15 bp, Homo sapiens
aatcaagataatcca

SEQ ID NO: 1816569 - DNA, 15 bp, Homo sapiens
atcaagataatccag

SEQ ID NO: 1816570 - DNA, 15 bp, Homo sapiens
tcaagataatccagg

SEQ ID NO: 1816571 - DNA, 15 bp, Homo sapiens
caagataatccagga

SEQ ID NO: 1816572 - DNA, 15 bp, Homo sapiens
aagataatccaggaa

SEQ ID NO: 1816573 - DNA, 15 bp, Homo sapiens
agataatccaggaac

SEQ ID NO: 1816574 - DNA, 15 bp, Homo sapiens
gataatccaggaact

SEQ ID NO: 1816575 - DNA, 15 bp, Homo sapiens
ataatccaggaactg

SEQ ID NO: 1816576 - DNA, 15 bp, Homo sapiens
taatccaggaactgt

SEQ ID NO: 1816577 - DNA, 15 bp, Homo sapiens
aatccaggaactgtt

SEQ ID NO: 1816578 - DNA, 15 bp, Homo sapiens
atccaggaactgttg

SEQ ID NO: 1816579 - DNA, 15 bp, Homo sapiens
tccaggaactgttgt

SEQ ID NO: 1816580 - DNA, 15 bp, Homo sapiens
ccaggaactgttgtg

SEQ ID NO: 1816581 - DNA, 15 bp, Homo sapiens
caggaactgttgtgg

SEQ ID NO: 1816582 - DNA, 15 bp, Homo sapiens
aggaactgttgtgga

SEQ ID NO: 1816583 - DNA, 15 bp, Homo sapiens
ggaactgttgtggag

SEQ ID NO: 1816584 - DNA, 15 bp, Homo sapiens
gaactgttgtggaga

SEQ ID NO: 1816585 - DNA, 15 bp, Homo sapiens
aactgttgtggagag

SEQ ID NO: 1816586 - DNA, 15 bp, Homo sapiens
actgttgtggagagg

SEQ ID NO: 1816587 - DNA, 15 bp, Homo sapiens
ctgttgtggagaggg

SEQ ID NO: 1816588 - DNA, 15 bp, Homo sapiens
tgttgtggagaggga

SEQ ID NO: 1816589 - DNA, 15 bp, Homo sapiens
gttgtggagagggac

SEQ ID NO: 1816590 - DNA, 15 bp, Homo sapiens
ttgtggagagggaca

SEQ ID NO: 1816591 - DNA, 15 bp, Homo sapiens
tgtggagagggacat

SEQ ID NO: 1816592 - DNA, 15 bp, Homo sapiens
gtggagagggacatg

SEQ ID NO: 1816593 - DNA, 15 bp, Homo sapiens
tggagagggacatgt

SEQ ID NO: 1816594 - DNA, 15 bp, Homo sapiens
ggagagggacatgtc

SEQ ID NO: 1816595 - DNA, 15 bp, Homo sapiens
gagagggacatgtca

SEQ ID NO: 1816596 - DNA, 15 bp, Homo sapiens
agagggacatgtcaa

SEQ ID NO: 1816597 - DNA, 15 bp, Homo sapiens
gagggacatgtcaat

SEQ ID NO: 1816598 - DNA, 15 bp, Homo sapiens
agggacatgtcaatt

SEQ ID NO: 1816599 - DNA, 15 bp, Homo sapiens
gggacatgtcaatta

SEQ ID NO: 1816600 - DNA, 15 bp, Homo sapiens
ggacatgtcaattat

SEQ ID NO: 1816601 - DNA, 15 bp, Homo sapiens
gacatgtcaattatg

SEQ ID NO: 1816602 - DNA, 15 bp, Homo sapiens
acatgtcaattatgt

SEQ ID NO: 1816603 - DNA, 15 bp, Homo sapiens
catgtcaattatgta

SEQ ID NO: 1816604 - DNA, 15 bp, Homo sapiens
atgtcaattatgtag

SEQ ID NO: 1816605 - DNA, 15 bp, Homo sapiens
tgtcaattatgtaga

SEQ ID NO: 1816606 - DNA, 15 bp, Homo sapiens
gtcaattatgtagaa

SEQ ID NO: 1816607 - DNA, 15 bp, Homo sapiens
tcaattatgtagaaa

SEQ ID NO: 1816608 - DNA, 15 bp, Homo sapiens
caattatgtagaaat

SEQ ID NO: 1816609 - DNA, 15 bp, Homo sapiens
aattatgtagaaatc

SEQ ID NO: 1816610 - DNA, 15 bp, Homo sapiens
attatgtagaaatct

SEQ ID NO: 1816611 - DNA, 15 bp, Homo sapiens
ttatgtagaaatcta

SEQ ID NO: 1816612 - DNA, 15 bp, Homo sapiens
tatgtagaaatctac

SEQ ID NO: 1816613 - DNA, 15 bp, Homo sapiens
atgtagaaatctaca

SEQ ID NO: 1816614 - DNA, 15 bp, Homo sapiens
tgtagaaatctacat

SEQ ID NO: 1816615 - DNA, 15 bp, Homo sapiens
gtagaaatctacatc

SEQ ID NO: 1816616 - DNA, 15 bp, Homo sapiens
tagaaatctacatca

SEQ ID NO: 1816617 - DNA, 15 bp, Homo sapiens
agaaatctacatcaa

SEQ ID NO: 1816618 - DNA, 15 bp, Homo sapiens
gaaatctacatcaac

SEQ ID NO: 1816619 - DNA, 15 bp, Homo sapiens
aaatctacatcaaca

SEQ ID NO: 1816620 - DNA, 15 bp, Homo sapiens
aatctacatcaacat

SEQ ID NO: 1816621 - DNA, 15 bp, Homo sapiens
atctacatcaacatc

SEQ ID NO: 1816622 - DNA, 15 bp, Homo sapiens
tctacatcaacatca

SEQ ID NO: 1816623 - DNA, 15 bp, Homo sapiens
ctacatcaacatcaa

SEQ ID NO: 1816624 - DNA, 15 bp, Homo sapiens
tacatcaacatcaag

SEQ ID NO: 1816625 - DNA, 15 bp, Homo sapiens
acatcaacatcaaga

SEQ ID NO: 1816626 - DNA, 15 bp, Homo sapiens
catcaacatcaagat

SEQ ID NO: 1816627 - DNA, 15 bp, Homo sapiens
atcaacatcaagatc

SEQ ID NO: 1816628 - DNA, 15 bp, Homo sapiens
tcaacatcaagatca

SEQ ID NO: 1816629 - DNA, 15 bp, Homo sapiens
caacatcaagatcat

SEQ ID NO: 1816630 - DNA, 15 bp, Homo sapiens
aacatcaagatcatc

SEQ ID NO: 1816631 - DNA, 15 bp, Homo sapiens
acatcaagatcatca

SEQ ID NO: 1816632 - DNA, 15 bp, Homo sapiens
catcaagatcatcag

SEQ ID NO: 1816633 - DNA, 15 bp, Homo sapiens
atcaagatcatcagc

SEQ ID NO: 1816634 - DNA, 15 bp, Homo sapiens
tcaagatcatcagct

SEQ ID NO: 1816635 - DNA, 15 bp, Homo sapiens
caagatcatcagctc

SEQ ID NO: 1816636 - DNA, 15 bp, Homo sapiens
aagatcatcagctca

SEQ ID NO: 1816637 - DNA, 15 bp, Homo sapiens
agatcatcagctcaa

SEQ ID NO: 1816638 - DNA, 15 bp, Homo sapiens
gatcatcagctcaac

SEQ ID NO: 1816639 - DNA, 15 bp, Homo sapiens
atcatcagctcaaca

SEQ ID NO: 1816640 - DNA, 15 bp, Homo sapiens
tcatcagctcaacat

SEQ ID NO: 1816641 - DNA, 15 bp, Homo sapiens
catcagctcaacatc

SEQ ID NO: 1816642 - DNA, 15 bp, Homo sapiens
atcagctcaacatca

SEQ ID NO: 1816643 - DNA, 15 bp, Homo sapiens
tcagctcaacatcaa

SEQ ID NO: 1816644 - DNA, 15 bp, Homo sapiens
cagctcaacatcaaa

SEQ ID NO: 1816645 - DNA, 15 bp, Homo sapiens
agctcaacatcaaaa

SEQ ID NO: 1816646 - DNA, 15 bp, Homo sapiens
gctcaacatcaaaaa

SEQ ID NO: 1816647 - DNA, 15 bp, Homo sapiens
ctcaacatcaaaaaa

SEQ ID NO: 1816648 - DNA, 15 bp, Homo sapiens
tcaacatcaaaaaag

SEQ ID NO: 1816649 - DNA, 15 bp, Homo sapiens
caacatcaaaaaagc

SEQ ID NO: 1816650 - DNA, 15 bp, Homo sapiens
aacatcaaaaaagct

SEQ ID NO: 1816651 - DNA, 15 bp, Homo sapiens
acatcaaaaaagctt

SEQ ID NO: 1816652 - DNA, 15 bp, Homo sapiens
catcaaaaaagcttt

SEQ ID NO: 1816653 - DNA, 15 bp, Homo sapiens
atcaaaaaagctttt

SEQ ID NO: 1816654 - DNA, 15 bp, Homo sapiens
tcaaaaaagcttttc

SEQ ID NO: 1816655 - DNA, 15 bp, Homo sapiens
caaaaaagcttttca

SEQ ID NO: 1816656 - DNA, 15 bp, Homo sapiens
aaaaaagcttttcat

SEQ ID NO: 1816657 - DNA, 15 bp, Homo sapiens
aaaaagcttttcatt

SEQ ID NO: 1816658 - DNA, 15 bp, Homo sapiens
aaaagcttttcattt

SEQ ID NO: 1816659 - DNA, 15 bp, Homo sapiens
aaagcttttcatttt

SEQ ID NO: 1816660 - DNA, 15 bp, Homo sapiens
aagcttttcattttt

SEQ ID NO: 1816661 - DNA, 15 bp, Homo sapiens
agcttttcatttttc

SEQ ID NO: 1816662 - DNA, 15 bp, Homo sapiens
gcttttcatttttct

SEQ ID NO: 1816663 - DNA, 15 bp, Homo sapiens
cttttcatttttcta

SEQ ID NO: 1816664 - DNA, 15 bp, Homo sapiens
ttttcatttttctat

SEQ ID NO: 1816665 - DNA, 15 bp, Homo sapiens
tttcatttttctatt

SEQ ID NO: 1816666 - DNA, 15 bp, Homo sapiens
ttcatttttctattg

SEQ ID NO: 1816667 - DNA, 15 bp, Homo sapiens
tcatttttctattgt

SEQ ID NO: 1816668 - DNA, 15 bp, Homo sapiens
catttttctattgta

SEQ ID NO: 1816669 - DNA, 15 bp, Homo sapiens
atttttctattgtaa

SEQ ID NO: 1816670 - DNA, 15 bp, Homo sapiens
tttttctattgtaaa

SEQ ID NO: 1816671 - DNA, 15 bp, Homo sapiens
ttttctattgtaaaa

SEQ ID NO: 1816672 - DNA, 15 bp, Homo sapiens
tttctattgtaaaat

SEQ ID NO: 1816673 - DNA, 15 bp, Homo sapiens
ttctattgtaaaata

SEQ ID NO: 1816674 - DNA, 15 bp, Homo sapiens
tctattgtaaaataa

SEQ ID NO: 1816675 - DNA, 15 bp, Homo sapiens
tattgtaaaataaac

SEQ ID NO: 1816676 - DNA, 15 bp, Homo sapiens
attgtaaaataaaca

SEQ ID NO: 1816677 - DNA, 15 bp, Homo sapiens
ttgtaaaataaacaa

SEQ ID NO: 1816678 - DNA, 15 bp, Homo sapiens
tgtaaaataaacaaa

SEQ ID NO: 1816679 - DNA, 15 bp, Homo sapiens
gtaaaataaacaaat

SEQ ID NO: 1816680 - DNA, 15 bp, Homo sapiens
taaaataaacaaata

SEQ ID NO: 1816681 - DNA, 15 bp, Homo sapiens
aaaataaacaaatat

SEQ ID NO: 1816682 - DNA, 15 bp, Homo sapiens
aaataaacaaatatg

SEQ ID NO: 1816683 - DNA, 15 bp, Homo sapiens
taaacaaatatggaa

SEQ ID NO: 1816684 - DNA, 15 bp, Homo sapiens
aaacaaatatggaaa

SEQ ID NO: 1816685 - DNA, 15 bp, Homo sapiens
aacaaatatggaaag

SEQ ID NO: 1816686 - DNA, 15 bp, Homo sapiens
acaaatatggaaagt

SEQ ID NO: 1816687 - DNA, 15 bp, Homo sapiens
caaatatggaaagta

SEQ ID NO: 1816688 - DNA, 15 bp, Homo sapiens
aaatatggaaagtat

SEQ ID NO: 1816689 - DNA, 15 bp, Homo sapiens
aatatggaaagtata

SEQ ID NO: 1816690 - DNA, 15 bp, Homo sapiens
atatggaaagtatag

SEQ ID NO: 1816691 - DNA, 15 bp, Homo sapiens
tatggaaagtatagt

SEQ ID NO: 1816692 - DNA, 15 bp, Homo sapiens
atggaaagtatagtt

SEQ ID NO: 1816693 - DNA, 15 bp, Homo sapiens
tggaaagtatagtta

SEQ ID NO: 1816694 - DNA, 15 bp, Homo sapiens
ggaaagtatagttag

SEQ ID NO: 1816695 - DNA, 15 bp, Homo sapiens
gaaagtatagttagc

SEQ ID NO: 1816696 - DNA, 15 bp, Homo sapiens
aaagtatagttagct

SEQ ID NO: 1816697 - DNA, 15 bp, Homo sapiens
aagtatagttagcta

SEQ ID NO: 1816698 - DNA, 15 bp, Homo sapiens
agtatagttagctac

SEQ ID NO: 1816699 - DNA, 15 bp, Homo sapiens
gtatagttagctaca

SEQ ID NO: 1816700 - DNA, 15 bp, Homo sapiens
tatagttagctacaa

SEQ ID NO: 1816701 - DNA, 15 bp, Homo sapiens
atagttagctacaat

SEQ ID NO: 1816702 - DNA, 15 bp, Homo sapiens
tagttagctacaatg

SEQ ID NO: 1816703 - DNA, 15 bp, Homo sapiens
agttagctacaatga

SEQ ID NO: 1816704 - DNA, 15 bp, Homo sapiens
gttagctacaatgat

SEQ ID NO: 1816705 - DNA, 15 bp, Homo sapiens
ttagctacaatgata

SEQ ID NO: 1816706 - DNA, 15 bp, Homo sapiens
tagctacaatgatac

SEQ ID NO: 1816707 - DNA, 15 bp, Homo sapiens
agctacaatgataca

SEQ ID NO: 1816708 - DNA, 15 bp, Homo sapiens
gctacaatgatacac

SEQ ID NO: 1816709 - DNA, 15 bp, Homo sapiens
ctacaatgatacaca

SEQ ID NO: 1816710 - DNA, 15 bp, Homo sapiens
tacaatgatacacac

SEQ ID NO: 1816711 - DNA, 15 bp, Homo sapiens
acaatgatacacaca

SEQ ID NO: 1816712 - DNA, 15 bp, Homo sapiens
caatgatacacacac

SEQ ID NO: 1816713 - DNA, 15 bp, Homo sapiens
aatgatacacacaca

SEQ ID NO: 1816714 - DNA, 15 bp, Homo sapiens
atgatacacacacac

SEQ ID NO: 1816715 - DNA, 15 bp, Homo sapiens
tgatacacacacaca

SEQ ID NO: 1816716 - DNA, 15 bp, Homo sapiens
gatacacacacacaa

SEQ ID NO: 1816717 - DNA, 15 bp, Homo sapiens
atacacacacacaaa

SEQ ID NO: 1816718 - DNA, 15 bp, Homo sapiens
tacacacacacaaaa

SEQ ID NO: 1816719 - DNA, 15 bp, Homo sapiens
cacacacacaaaaaa

SEQ ID NO: 1816720 - DNA, 15 bp, Homo sapiens
acacacacaaaaaac

SEQ ID NO: 1816721 - DNA, 15 bp, Homo sapiens
cacacacaaaaaacc

SEQ ID NO: 1816722 - DNA, 15 bp, Homo sapiens
acacacaaaaaacct

SEQ ID NO: 1816723 - DNA, 15 bp, Homo sapiens
cacacaaaaaaccta

SEQ ID NO: 1816724 - DNA, 15 bp, Homo sapiens
acacaaaaaacctat

SEQ ID NO: 1816725 - DNA, 15 bp, Homo sapiens
cacaaaaaacctata

SEQ ID NO: 1816726 - DNA, 15 bp, Homo sapiens
acaaaaaacctatag

SEQ ID NO: 1816727 - DNA, 15 bp, Homo sapiens
caaaaaacctatagg

SEQ ID NO: 1816728 - DNA, 15 bp, Homo sapiens
aaaaaacctataggc

SEQ ID NO: 1816729 - DNA, 15 bp, Homo sapiens
aaaaacctataggcc

SEQ ID NO: 1816730 - DNA, 15 bp, Homo sapiens
aaaacctataggccg

SEQ ID NO: 1816731 - DNA, 15 bp, Homo sapiens
aaacctataggccgg

SEQ ID NO: 1816732 - DNA, 15 bp, Homo sapiens
aacctataggccggg

SEQ ID NO: 1816733 - DNA, 15 bp, Homo sapiens
acctataggccgggc

SEQ ID NO: 1816734 - DNA, 15 bp, Homo sapiens
cctataggccgggcg

SEQ ID NO: 1816735 - DNA, 15 bp, Homo sapiens
ctataggccgggcgc

SEQ ID NO: 1816736 - DNA, 15 bp, Homo sapiens
tataggccgggcgca

SEQ ID NO: 1816737 - DNA, 15 bp, Homo sapiens
ataggccgggcgcag

SEQ ID NO: 1816738 - DNA, 15 bp, Homo sapiens
taggccgggcgcagt

SEQ ID NO: 1816739 - DNA, 15 bp, Homo sapiens
ttcctgaatcaccgc

SEQ ID NO: 1816740 - DNA, 15 bp, Homo sapiens
tcctgaatcaccgca

SEQ ID NO: 1816741 - DNA, 15 bp, Homo sapiens
cctgaatcaccgcaa

SEQ ID NO: 1816742 - DNA, 15 bp, Homo sapiens
ctgaatcaccgcaag

SEQ ID NO: 1816743 - DNA, 15 bp, Homo sapiens
tgaatcaccgcaaga

SEQ ID NO: 1816744 - DNA, 15 bp, Homo sapiens
gaatcaccgcaagaa

SEQ ID NO: 1816745 - DNA, 15 bp, Homo sapiens
aatcaccgcaagaac

SEQ ID NO: 1816746 - DNA, 15 bp, Homo sapiens
atcaccgcaagaaca

SEQ ID NO: 1816747 - DNA, 15 bp, Homo sapiens
tcaccgcaagaacaa

SEQ ID NO: 1816748 - DNA, 15 bp, Homo sapiens
caccgcaagaacaag

SEQ ID NO: 1816749 - DNA, 15 bp, Homo sapiens
accgcaagaacaagt

SEQ ID NO: 1816750 - DNA, 15 bp, Homo sapiens
ccgcaagaacaagtt

SEQ ID NO: 1816751 - DNA, 15 bp, Homo sapiens
cgcaagaacaagttt

SEQ ID NO: 1816752 - DNA, 15 bp, Homo sapiens
gcaagaacaagtttc

SEQ ID NO: 1816753 - DNA, 15 bp, Homo sapiens
caagaacaagtttca

SEQ ID NO: 1816754 - DNA, 15 bp, Homo sapiens
aagaacaagtttcag

SEQ ID NO: 1816755 - DNA, 15 bp, Homo sapiens
agaacaagtttcagt

SEQ ID NO: 1816756 - DNA, 15 bp, Homo sapiens
gaacaagtttcagtg

SEQ ID NO: 1816757 - DNA, 15 bp, Homo sapiens
aacaagtttcagtgt

SEQ ID NO: 1816758 - DNA, 15 bp, Homo sapiens
acaagtttcagtgtg

SEQ ID NO: 1816759 - DNA, 15 bp, Homo sapiens
caagtttcagtgtgg

SEQ ID NO: 1816760 - DNA, 15 bp, Homo sapiens
aagtttcagtgtggc

SEQ ID NO: 1816761 - DNA, 15 bp, Homo sapiens
agtttcagtgtggct

SEQ ID NO: 1816762 - DNA, 15 bp, Homo sapiens
gtttcagtgtggctt

SEQ ID NO: 1816763 - DNA, 15 bp, Homo sapiens
tttcagtgtggcttt

SEQ ID NO: 1816764 - DNA, 15 bp, Homo sapiens
ttcagtgtggctttg

SEQ ID NO: 1816765 - DNA, 15 bp, Homo sapiens
tcagtgtggctttgg

SEQ ID NO: 1816766 - DNA, 15 bp, Homo sapiens
cagtgtggctttggc

SEQ ID NO: 1816767 - DNA, 15 bp, Homo sapiens
agtgtggctttggcc

SEQ ID NO: 1816768 - DNA, 15 bp, Homo sapiens
gtgtggctttggcct

SEQ ID NO: 1816769 - DNA, 15 bp, Homo sapiens
tgtggctttggcctc

SEQ ID NO: 1816770 - DNA, 15 bp, Homo sapiens
gtggctttggcctca

SEQ ID NO: 1816771 - DNA, 15 bp, Homo sapiens
tggctttggcctcac

SEQ ID NO: 1816772 - DNA, 15 bp, Homo sapiens
ggctttggcctcacc

SEQ ID NO: 1816773 - DNA, 15 bp, Homo sapiens
gctttggcctcacca

SEQ ID NO: 1816774 - DNA, 15 bp, Homo sapiens
ctttggcctcaccat

SEQ ID NO: 1816775 - DNA, 15 bp, Homo sapiens
tttggcctcaccatc

SEQ ID NO: 1816776 - DNA, 15 bp, Homo sapiens
ttggcctcaccatcg

SEQ ID NO: 1816777 - DNA, 15 bp, Homo sapiens
tggcctcaccatcgg

SEQ ID NO: 1816778 - DNA, 15 bp, Homo sapiens
ggcctcaccatcggc

SEQ ID NO: 1816779 - DNA, 15 bp, Homo sapiens
gcctcaccatcggct

SEQ ID NO: 1816780 - DNA, 15 bp, Homo sapiens
cctcaccatcggctg

SEQ ID NO: 1816781 - DNA, 15 bp, Homo sapiens
ctcaccatcggctga

SEQ ID NO: 1816782 - DNA, 15 bp, Homo sapiens
tcaccatcggctgag

SEQ ID NO: 1816783 - DNA, 15 bp, Homo sapiens
caccatcggctgagc

SEQ ID NO: 1816784 - DNA, 15 bp, Homo sapiens
accatcggctgagcc

SEQ ID NO: 1816785 - DNA, 15 bp, Homo sapiens
ccatcggctgagccc

SEQ ID NO: 1816786 - DNA, 15 bp, Homo sapiens
catcggctgagccct

SEQ ID NO: 1816787 - DNA, 15 bp, Homo sapiens
atcggctgagccctc

SEQ ID NO: 1816788 - DNA, 15 bp, Homo sapiens
tcggctgagccctcc

SEQ ID NO: 1816789 - DNA, 15 bp, Homo sapiens
cggctgagccctcct

SEQ ID NO: 1816790 - DNA, 15 bp, Homo sapiens
ggctgagccctcctg

SEQ ID NO: 1816791 - DNA, 15 bp, Homo sapiens
gctgagccctcctgg

SEQ ID NO: 1816792 - DNA, 15 bp, Homo sapiens
ctgagccctcctggc

SEQ ID NO: 1816793 - DNA, 15 bp, Homo sapiens
tgagccctcctggcc

SEQ ID NO: 1816794 - DNA, 15 bp, Homo sapiens
gagccctcctggccc

SEQ ID NO: 1816795 - DNA, 15 bp, Homo sapiens
agccctcctggcccc

SEQ ID NO: 1816796 - DNA, 15 bp, Homo sapiens
gccctcctggccccc

SEQ ID NO: 1816797 - DNA, 15 bp, Homo sapiens
ccctcctggcccccg

SEQ ID NO: 1816798 - DNA, 15 bp, Homo sapiens
cctcctggcccccgc

SEQ ID NO: 1816799 - DNA, 15 bp, Homo sapiens
ctcctggcccccgcc

SEQ ID NO: 1816800 - DNA, 15 bp, Homo sapiens
tcctggcccccgcct

SEQ ID NO: 1816801 - DNA, 15 bp, Homo sapiens
cctggcccccgcctt

SEQ ID NO: 1816802 - DNA, 15 bp, Homo sapiens
ctggcccccgccttc

SEQ ID NO: 1816803 - DNA, 15 bp, Homo sapiens
tggcccccgccttcc

SEQ ID NO: 1816804 - DNA, 15 bp, Homo sapiens
ggcccccgccttcca

SEQ ID NO: 1816805 - DNA, 15 bp, Homo sapiens
gcccccgccttccac

SEQ ID NO: 1816806 - DNA, 15 bp, Homo sapiens
cccccgccttccacg

SEQ ID NO: 1816807 - DNA, 15 bp, Homo sapiens
ccccgccttccacgc

SEQ ID NO: 1816808 - DNA, 15 bp, Homo sapiens
cccgccttccacgcc

SEQ ID NO: 1816809 - DNA, 15 bp, Homo sapiens
ccgccttccacgccc

SEQ ID NO: 1816810 - DNA, 15 bp, Homo sapiens
cgccttccacgccct

SEQ ID NO: 1816811 - DNA, 15 bp, Homo sapiens
gccttccacgccctt

SEQ ID NO: 1816812 - DNA, 15 bp, Homo sapiens
ccttccacgcccttc

SEQ ID NO: 1816813 - DNA, 15 bp, Homo sapiens
cttccacgcccttcc

SEQ ID NO: 1816814 - DNA, 15 bp, Homo sapiens
ttccacgcccttccg

SEQ ID NO: 1816815 - DNA, 15 bp, Homo sapiens
tccacgcccttccga

SEQ ID NO: 1816816 - DNA, 15 bp, Homo sapiens
ccacgcccttccgat

SEQ ID NO: 1816817 - DNA, 15 bp, Homo sapiens
cacgcccttccgatt

SEQ ID NO: 1816818 - DNA, 15 bp, Homo sapiens
acgcccttccgattc

SEQ ID NO: 1816819 - DNA, 15 bp, Homo sapiens
cgcccttccgattcc

SEQ ID NO: 1816820 - DNA, 15 bp, Homo sapiens
gcccttccgattcca

SEQ ID NO: 1816821 - DNA, 15 bp, Homo sapiens
cccttccgattccac

SEQ ID NO: 1816822 - DNA, 15 bp, Homo sapiens
ccttccgattccacc

SEQ ID NO: 1816823 - DNA, 15 bp, Homo sapiens
cttccgattccacct

SEQ ID NO: 1816824 - DNA, 15 bp, Homo sapiens
ttccgattccacctc

SEQ ID NO: 1816825 - DNA, 15 bp, Homo sapiens
tccgattccacctcc

SEQ ID NO: 1816826 - DNA, 15 bp, Homo sapiens
ccgattccacctcca

SEQ ID NO: 1816827 - DNA, 15 bp, Homo sapiens
cgattccacctccac

SEQ ID NO: 1816828 - DNA, 15 bp, Homo sapiens
gattccacctccacc

SEQ ID NO: 1816829 - DNA, 15 bp, Homo sapiens
attccacctccacct

SEQ ID NO: 1816830 - DNA, 15 bp, Homo sapiens
ttccacctccacctc

SEQ ID NO: 1816831 - DNA, 15 bp, Homo sapiens
tccacctccacctcc

SEQ ID NO: 1816832 - DNA, 15 bp, Homo sapiens
ccacctccacctcca

SEQ ID NO: 1816833 - DNA, 15 bp, Homo sapiens
cacctccacctccac

SEQ ID NO: 1816834 - DNA, 15 bp, Homo sapiens
acctccacctccacc

SEQ ID NO: 1816835 - DNA, 15 bp, Homo sapiens
cctccacctccacct

SEQ ID NO: 1816836 - DNA, 15 bp, Homo sapiens
ctccacctccacctc

SEQ ID NO: 1816837 - DNA, 15 bp, Homo sapiens
ccacctccacctccc

SEQ ID NO: 1816838 - DNA, 15 bp, Homo sapiens
cacctccacctcccc

SEQ ID NO: 1816839 - DNA, 15 bp, Homo sapiens
acctccacctccccc

SEQ ID NO: 1816840 - DNA, 15 bp, Homo sapiens
cctccacctccccct

SEQ ID NO: 1816841 - DNA, 15 bp, Homo sapiens
ctccacctccccctg

SEQ ID NO: 1816842 - DNA, 15 bp, Homo sapiens
tccacctccccctgc

SEQ ID NO: 1816843 - DNA, 15 bp, Homo sapiens
ccacctccccctgcc

SEQ ID NO: 1816844 - DNA, 15 bp, Homo sapiens
cacctccccctgcca

SEQ ID NO: 1816845 - DNA, 15 bp, Homo sapiens
acctccccctgccac

SEQ ID NO: 1816846 - DNA, 15 bp, Homo sapiens
cctccccctgccaca

SEQ ID NO: 1816847 - DNA, 15 bp, Homo sapiens
ctccccctgccacag

SEQ ID NO: 1816848 - DNA, 15 bp, Homo sapiens
tccccctgccacaga

SEQ ID NO: 1816849 - DNA, 15 bp, Homo sapiens
ccccctgccacagag

SEQ ID NO: 1816850 - DNA, 15 bp, Homo sapiens
cccctgccacagagg

SEQ ID NO: 1816851 - DNA, 15 bp, Homo sapiens
ccctgccacagaggg

SEQ ID NO: 1816852 - DNA, 15 bp, Homo sapiens
cctgccacagagggg

SEQ ID NO: 1816853 - DNA, 15 bp, Homo sapiens
ctgccacagagggga

SEQ ID NO: 1816854 - DNA, 15 bp, Homo sapiens
tgccacagaggggag

SEQ ID NO: 1816855 - DNA, 15 bp, Homo sapiens
gccacagaggggaga

SEQ ID NO: 1816856 - DNA, 15 bp, Homo sapiens
ccacagaggggagac

SEQ ID NO: 1816857 - DNA, 15 bp, Homo sapiens
cacagaggggagacc

SEQ ID NO: 1816858 - DNA, 15 bp, Homo sapiens
acagaggggagacct

SEQ ID NO: 1816859 - DNA, 15 bp, Homo sapiens
cagaggggagacctg

SEQ ID NO: 1816860 - DNA, 15 bp, Homo sapiens
agaggggagacctga

SEQ ID NO: 1816861 - DNA, 15 bp, Homo sapiens
gaggggagacctgag

SEQ ID NO: 1816862 - DNA, 15 bp, Homo sapiens
aggggagacctgagc

SEQ ID NO: 1816863 - DNA, 15 bp, Homo sapiens
ggggagacctgagcc

SEQ ID NO: 1816864 - DNA, 15 bp, Homo sapiens
gggagacctgagccc

SEQ ID NO: 1816865 - DNA, 15 bp, Homo sapiens
ggagacctgagcccc

SEQ ID NO: 1816866 - DNA, 15 bp, Homo sapiens
gagacctgagccccc

SEQ ID NO: 1816867 - DNA, 15 bp, Homo sapiens
agacctgagcccccc

SEQ ID NO: 1816868 - DNA, 15 bp, Homo sapiens
gacctgagcccccct

SEQ ID NO: 1816869 - DNA, 15 bp, Homo sapiens
acctgagcccccctc

SEQ ID NO: 1816870 - DNA, 15 bp, Homo sapiens
cctgagcccccctcc

SEQ ID NO: 1816871 - DNA, 15 bp, Homo sapiens
ctgagcccccctccc

SEQ ID NO: 1816872 - DNA, 15 bp, Homo sapiens
tgagcccccctccct

SEQ ID NO: 1816873 - DNA, 15 bp, Homo sapiens
gagcccccctccctt

SEQ ID NO: 1816874 - DNA, 15 bp, Homo sapiens
agcccccctcccttc

SEQ ID NO: 1816875 - DNA, 15 bp, Homo sapiens
gcccccctcccttcc

SEQ ID NO: 1816876 - DNA, 15 bp, Homo sapiens
cccccctcccttccc

SEQ ID NO: 1816877 - DNA, 15 bp, Homo sapiens
ccccctcccttccct

SEQ ID NO: 1816878 - DNA, 15 bp, Homo sapiens
cccctcccttccctc

SEQ ID NO: 1816879 - DNA, 15 bp, Homo sapiens
ctcccttccctcccc

SEQ ID NO: 1816880 - DNA, 15 bp, Homo sapiens
tcccttccctccccc

SEQ ID NO: 1816881 - DNA, 15 bp, Homo sapiens
cccttccctcccccc

SEQ ID NO: 1816882 - DNA, 15 bp, Homo sapiens
ccttccctcccccct

SEQ ID NO: 1816883 - DNA, 15 bp, Homo sapiens
cttccctcccccctt

SEQ ID NO: 1816884 - DNA, 15 bp, Homo sapiens
ttccctccccccttg

SEQ ID NO: 1816885 - DNA, 15 bp, Homo sapiens
tccctccccccttgg

SEQ ID NO: 1816886 - DNA, 15 bp, Homo sapiens
ccctccccccttggg

SEQ ID NO: 1816887 - DNA, 15 bp, Homo sapiens
cctccccccttgggg

SEQ ID NO: 1816888 - DNA, 15 bp, Homo sapiens
ctccccccttggggg

SEQ ID NO: 1816889 - DNA, 15 bp, Homo sapiens
tccccccttgggggt

SEQ ID NO: 1816890 - DNA, 15 bp, Homo sapiens
ccccccttgggggtc

SEQ ID NO: 1816891 - DNA, 15 bp, Homo sapiens
cccccttgggggtcg

SEQ ID NO: 1816892 - DNA, 15 bp, Homo sapiens
ccccttgggggtcgg

SEQ ID NO: 1816893 - DNA, 15 bp, Homo sapiens
cccttgggggtcggg

SEQ ID NO: 1816894 - DNA, 15 bp, Homo sapiens
ccttgggggtcgggg

SEQ ID NO: 1816895 - DNA, 15 bp, Homo sapiens
cttgggggtcggggg

SEQ ID NO: 1816896 - DNA, 15 bp, Homo sapiens
ttgggggtcgggggg

SEQ ID NO: 1816897 - DNA, 15 bp, Homo sapiens
tgggggtcggggggg

SEQ ID NO: 1816898 - DNA, 15 bp, Homo sapiens
gggggtcggggggga

SEQ ID NO: 1816899 - DNA, 15 bp, Homo sapiens
ggggtcgggggggac

SEQ ID NO: 1816900 - DNA, 15 bp, Homo sapiens
gggtcgggggggaca

SEQ ID NO: 1816901 - DNA, 15 bp, Homo sapiens
ggtcgggggggacat

SEQ ID NO: 1816902 - DNA, 15 bp, Homo sapiens
gtcgggggggacatt

SEQ ID NO: 1816903 - DNA, 15 bp, Homo sapiens
tcgggggggacattg

SEQ ID NO: 1816904 - DNA, 15 bp, Homo sapiens
cgggggggacattgg

SEQ ID NO: 1816905 - DNA, 15 bp, Homo sapiens
gggggggacattgga

SEQ ID NO: 1816906 - DNA, 15 bp, Homo sapiens
ggggggacattggaa

SEQ ID NO: 1816907 - DNA, 15 bp, Homo sapiens
gggggacattggaaa

SEQ ID NO: 1816908 - DNA, 15 bp, Homo sapiens
ggggacattggaaag

SEQ ID NO: 1816909 - DNA, 15 bp, Homo sapiens
gggacattggaaagg

SEQ ID NO: 1816910 - DNA, 15 bp, Homo sapiens
ggacattggaaagga

SEQ ID NO: 1816911 - DNA, 15 bp, Homo sapiens
gacattggaaaggag

SEQ ID NO: 1816912 - DNA, 15 bp, Homo sapiens
acattggaaaggagg

SEQ ID NO: 1816913 - DNA, 15 bp, Homo sapiens
cattggaaaggaggg

SEQ ID NO: 1816914 - DNA, 15 bp, Homo sapiens
attggaaaggaggga

SEQ ID NO: 1816915 - DNA, 15 bp, Homo sapiens
ttggaaaggagggac

SEQ ID NO: 1816916 - DNA, 15 bp, Homo sapiens
tggaaaggagggacc

SEQ ID NO: 1816917 - DNA, 15 bp, Homo sapiens
ggaaaggagggaccc

SEQ ID NO: 1816918 - DNA, 15 bp, Homo sapiens
gaaaggagggacccc

SEQ ID NO: 1816919 - DNA, 15 bp, Homo sapiens
aaaggagggaccccg

SEQ ID NO: 1816920 - DNA, 15 bp, Homo sapiens
aaggagggaccccgc

SEQ ID NO: 1816921 - DNA, 15 bp, Homo sapiens
aggagggaccccgcc

SEQ ID NO: 1816922 - DNA, 15 bp, Homo sapiens
ggagggaccccgcca

SEQ ID NO: 1816923 - DNA, 15 bp, Homo sapiens
gagggaccccgccac

SEQ ID NO: 1816924 - DNA, 15 bp, Homo sapiens
agggaccccgccacc

SEQ ID NO: 1816925 - DNA, 15 bp, Homo sapiens
gggaccccgccaccc

SEQ ID NO: 1816926 - DNA, 15 bp, Homo sapiens
ggaccccgccacccc

SEQ ID NO: 1816927 - DNA, 15 bp, Homo sapiens
gaccccgccacccca

SEQ ID NO: 1816928 - DNA, 15 bp, Homo sapiens
accccgccaccccag

SEQ ID NO: 1816929 - DNA, 15 bp, Homo sapiens
ccccgccaccccagc

SEQ ID NO: 1816930 - DNA, 15 bp, Homo sapiens
cccgccaccccagca

SEQ ID NO: 1816931 - DNA, 15 bp, Homo sapiens
ccgccaccccagcag

SEQ ID NO: 1816932 - DNA, 15 bp, Homo sapiens
cgccaccccagcagc

SEQ ID NO: 1816933 - DNA, 15 bp, Homo sapiens
gccaccccagcagct

SEQ ID NO: 1816934 - DNA, 15 bp, Homo sapiens
ccaccccagcagctg

SEQ ID NO: 1816935 - DNA, 15 bp, Homo sapiens
caccccagcagctga

SEQ ID NO: 1816936 - DNA, 15 bp, Homo sapiens
accccagcagctgag

SEQ ID NO: 1816937 - DNA, 15 bp, Homo sapiens
ccccagcagctgagg

SEQ ID NO: 1816938 - DNA, 15 bp, Homo sapiens
cccagcagctgagga

SEQ ID NO: 1816939 - DNA, 15 bp, Homo sapiens
ccagcagctgaggag

SEQ ID NO: 1816940 - DNA, 15 bp, Homo sapiens
cagcagctgaggagg

SEQ ID NO: 1816941 - DNA, 15 bp, Homo sapiens
agcagctgaggaggg

SEQ ID NO: 1816942 - DNA, 15 bp, Homo sapiens
gcagctgaggagggg

SEQ ID NO: 1816943 - DNA, 15 bp, Homo sapiens
cagctgaggagggga

SEQ ID NO: 1816944 - DNA, 15 bp, Homo sapiens
agctgaggaggggat

SEQ ID NO: 1816945 - DNA, 15 bp, Homo sapiens
gctgaggaggggatt

SEQ ID NO: 1816946 - DNA, 15 bp, Homo sapiens
ctgaggaggggattc

SEQ ID NO: 1816947 - DNA, 15 bp, Homo sapiens
tgaggaggggattct

SEQ ID NO: 1816948 - DNA, 15 bp, Homo sapiens
gaggaggggattctg

SEQ ID NO: 1816949 - DNA, 15 bp, Homo sapiens
aggaggggattctgg

SEQ ID NO: 1816950 - DNA, 15 bp, Homo sapiens
ggaggggattctgga

SEQ ID NO: 1816951 - DNA, 15 bp, Homo sapiens
gaggggattctggaa

SEQ ID NO: 1816952 - DNA, 15 bp, Homo sapiens
aggggattctggaac

SEQ ID NO: 1816953 - DNA, 15 bp, Homo sapiens
ggggattctggaact

SEQ ID NO: 1816954 - DNA, 15 bp, Homo sapiens
gggattctggaactg

SEQ ID NO: 1816955 - DNA, 15 bp, Homo sapiens
ggattctggaactga

SEQ ID NO: 1816956 - DNA, 15 bp, Homo sapiens
gattctggaactgaa

SEQ ID NO: 1816957 - DNA, 15 bp, Homo sapiens
attctggaactgaat

SEQ ID NO: 1816958 - DNA, 15 bp, Homo sapiens
ttctggaactgaatg

SEQ ID NO: 1816959 - DNA, 15 bp, Homo sapiens
tctggaactgaatgg

SEQ ID NO: 1816960 - DNA, 15 bp, Homo sapiens
ctggaactgaatggc

SEQ ID NO: 1816961 - DNA, 15 bp, Homo sapiens
tggaactgaatggcg

SEQ ID NO: 1816962 - DNA, 15 bp, Homo sapiens
ggaactgaatggcgc

SEQ ID NO: 1816963 - DNA, 15 bp, Homo sapiens
gaactgaatggcgct

SEQ ID NO: 1816964 - DNA, 15 bp, Homo sapiens
aactgaatggcgctt

SEQ ID NO: 1816965 - DNA, 15 bp, Homo sapiens
actgaatggcgcttc

SEQ ID NO: 1816966 - DNA, 15 bp, Homo sapiens
ctgaatggcgcttcg

SEQ ID NO: 1816967 - DNA, 15 bp, Homo sapiens
tgaatggcgcttcgg

SEQ ID NO: 1816968 - DNA, 15 bp, Homo sapiens
gaatggcgcttcggg

SEQ ID NO: 1816969 - DNA, 15 bp, Homo sapiens
aatggcgcttcggga

SEQ ID NO: 1816970 - DNA, 15 bp, Homo sapiens
atggcgcttcgggat

SEQ ID NO: 1816971 - DNA, 15 bp, Homo sapiens
tggcgcttcgggatt

SEQ ID NO: 1816972 - DNA, 15 bp, Homo sapiens
ggcgcttcgggattc

SEQ ID NO: 1816973 - DNA, 15 bp, Homo sapiens
gcgcttcgggattct

SEQ ID NO: 1816974 - DNA, 15 bp, Homo sapiens
cgcttcgggattctg

SEQ ID NO: 1816975 - DNA, 15 bp, Homo sapiens
gcttcgggattctga

SEQ ID NO: 1816976 - DNA, 15 bp, Homo sapiens
cttcgggattctgag

SEQ ID NO: 1816977 - DNA, 15 bp, Homo sapiens
ttcgggattctgagt

SEQ ID NO: 1816978 - DNA, 15 bp, Homo sapiens
tcgggattctgagta

SEQ ID NO: 1816979 - DNA, 15 bp, Homo sapiens
cgggattctgagtag

SEQ ID NO: 1816980 - DNA, 15 bp, Homo sapiens
gggattctgagtagc

SEQ ID NO: 1816981 - DNA, 15 bp, Homo sapiens
ggattctgagtagca

SEQ ID NO: 1816982 - DNA, 15 bp, Homo sapiens
gattctgagtagcag

SEQ ID NO: 1816983 - DNA, 15 bp, Homo sapiens
attctgagtagcagg

SEQ ID NO: 1816984 - DNA, 15 bp, Homo sapiens
ttctgagtagcaggg

SEQ ID NO: 1816985 - DNA, 15 bp, Homo sapiens
tctgagtagcagggg

SEQ ID NO: 1816986 - DNA, 15 bp, Homo sapiens
ctgagtagcaggggc

SEQ ID NO: 1816987 - DNA, 15 bp, Homo sapiens
tgagtagcaggggca

SEQ ID NO: 1816988 - DNA, 15 bp, Homo sapiens
gagtagcaggggcag

SEQ ID NO: 1816989 - DNA, 15 bp, Homo sapiens
agtagcaggggcagc

SEQ ID NO: 1816990 - DNA, 15 bp, Homo sapiens
gtagcaggggcagca

SEQ ID NO: 1816991 - DNA, 15 bp, Homo sapiens
tagcaggggcagcat

SEQ ID NO: 1816992 - DNA, 15 bp, Homo sapiens
agcaggggcagcatg

SEQ ID NO: 1816993 - DNA, 15 bp, Homo sapiens
gcaggggcagcatgc

SEQ ID NO: 1816994 - DNA, 15 bp, Homo sapiens
caggggcagcatgcc

SEQ ID NO: 1816995 - DNA, 15 bp, Homo sapiens
aggggcagcatgccc

SEQ ID NO: 1816996 - DNA, 15 bp, Homo sapiens
ggggcagcatgccca

SEQ ID NO: 1816997 - DNA, 15 bp, Homo sapiens
gggcagcatgcccag

SEQ ID NO: 1816998 - DNA, 15 bp, Homo sapiens
ggcagcatgcccagt

SEQ ID NO: 1816999 - DNA, 15 bp, Homo sapiens
gcagcatgcccagtg

SEQ ID NO: 1817000 - DNA, 15 bp, Homo sapiens
cagcatgcccagtgg

SEQ ID NO: 1817001 - DNA, 15 bp, Homo sapiens
agcatgcccagtggg

SEQ ID NO: 1817002 - DNA, 15 bp, Homo sapiens
gcatgcccagtgggc

SEQ ID NO: 1817003 - DNA, 15 bp, Homo sapiens
catgcccagtgggcc

SEQ ID NO: 1817004 - DNA, 15 bp, Homo sapiens
atgcccagtgggcct

SEQ ID NO: 1817005 - DNA, 15 bp, Homo sapiens
tgcccagtgggcctg

SEQ ID NO: 1817006 - DNA, 15 bp, Homo sapiens
gcccagtgggcctgg

SEQ ID NO: 1817007 - DNA, 15 bp, Homo sapiens
cccagtgggcctggg

SEQ ID NO: 1817008 - DNA, 15 bp, Homo sapiens
ccagtgggcctgggg

SEQ ID NO: 1817009 - DNA, 15 bp, Homo sapiens
cagtgggcctggggt

SEQ ID NO: 1817010 - DNA, 15 bp, Homo sapiens
agtgggcctggggtc

SEQ ID NO: 1817011 - DNA, 15 bp, Homo sapiens
gtgggcctggggtcc

SEQ ID NO: 1817012 - DNA, 15 bp, Homo sapiens
tgggcctggggtccc

SEQ ID NO: 1817013 - DNA, 15 bp, Homo sapiens
gggcctggggtcccg

SEQ ID NO: 1817014 - DNA, 15 bp, Homo sapiens
ggcctggggtcccgg

SEQ ID NO: 1817015 - DNA, 15 bp, Homo sapiens
gcctggggtcccggg

SEQ ID NO: 1817016 - DNA, 15 bp, Homo sapiens
cctggggtcccggga

SEQ ID NO: 1817017 - DNA, 15 bp, Homo sapiens
ctggggtcccgggag

SEQ ID NO: 1817018 - DNA, 15 bp, Homo sapiens
tggggtcccgggagg

SEQ ID NO: 1817019 - DNA, 15 bp, Homo sapiens
ggggtcccgggaggg

SEQ ID NO: 1817020 - DNA, 15 bp, Homo sapiens
gggtcccgggaggga

SEQ ID NO: 1817021 - DNA, 15 bp, Homo sapiens
ggtcccgggagggat

SEQ ID NO: 1817022 - DNA, 15 bp, Homo sapiens
gtcccgggagggatt

SEQ ID NO: 1817023 - DNA, 15 bp, Homo sapiens
tcccgggagggattc

SEQ ID NO: 1817024 - DNA, 15 bp, Homo sapiens
cccgggagggattcc

SEQ ID NO: 1817025 - DNA, 15 bp, Homo sapiens
ccgggagggattccg

SEQ ID NO: 1817026 - DNA, 15 bp, Homo sapiens
cgggagggattccgg

SEQ ID NO: 1817027 - DNA, 15 bp, Homo sapiens
gggagggattccgga

SEQ ID NO: 1817028 - DNA, 15 bp, Homo sapiens
ggagggattccggaa

SEQ ID NO: 1817029 - DNA, 15 bp, Homo sapiens
gagggattccggaat

SEQ ID NO: 1817030 - DNA, 15 bp, Homo sapiens
agggattccggaatt

SEQ ID NO: 1817031 - DNA, 15 bp, Homo sapiens
gggattccggaattg

SEQ ID NO: 1817032 - DNA, 15 bp, Homo sapiens
ggattccggaattga

SEQ ID NO: 1817033 - DNA, 15 bp, Homo sapiens
gattccggaattgag

SEQ ID NO: 1817034 - DNA, 15 bp, Homo sapiens
attccggaattgagg

SEQ ID NO: 1817035 - DNA, 15 bp, Homo sapiens
ttccggaattgaggg

SEQ ID NO: 1817036 - DNA, 15 bp, Homo sapiens
tccggaattgagggg

SEQ ID NO: 1817037 - DNA, 15 bp, Homo sapiens
ccggaattgaggggc

SEQ ID NO: 1817038 - DNA, 15 bp, Homo sapiens
cggaattgaggggca

SEQ ID NO: 1817039 - DNA, 15 bp, Homo sapiens
ggaattgaggggcac

SEQ ID NO: 1817040 - DNA, 15 bp, Homo sapiens
gaattgaggggcacg

SEQ ID NO: 1817041 - DNA, 15 bp, Homo sapiens
aattgaggggcacgc

SEQ ID NO: 1817042 - DNA, 15 bp, Homo sapiens
attgaggggcacgca

SEQ ID NO: 1817043 - DNA, 15 bp, Homo sapiens
ttgaggggcacgcag

SEQ ID NO: 1817044 - DNA, 15 bp, Homo sapiens
tgaggggcacgcagg

SEQ ID NO: 1817045 - DNA, 15 bp, Homo sapiens
gaggggcacgcagga

SEQ ID NO: 1817046 - DNA, 15 bp, Homo sapiens
aggggcacgcaggat

SEQ ID NO: 1817047 - DNA, 15 bp, Homo sapiens
ggggcacgcaggatt

SEQ ID NO: 1817048 - DNA, 15 bp, Homo sapiens
gggcacgcaggattc

SEQ ID NO: 1817049 - DNA, 15 bp, Homo sapiens
ggcacgcaggattct

SEQ ID NO: 1817050 - DNA, 15 bp, Homo sapiens
gcacgcaggattctg

SEQ ID NO: 1817051 - DNA, 15 bp, Homo sapiens
cacgcaggattctga

SEQ ID NO: 1817052 - DNA, 15 bp, Homo sapiens
acgcaggattctgag

SEQ ID NO: 1817053 - DNA, 15 bp, Homo sapiens
cgcaggattctgagc

SEQ ID NO: 1817054 - DNA, 15 bp, Homo sapiens
gcaggattctgagca

SEQ ID NO: 1817055 - DNA, 15 bp, Homo sapiens
caggattctgagcac

SEQ ID NO: 1817056 - DNA, 15 bp, Homo sapiens
aggattctgagcacc

SEQ ID NO: 1817057 - DNA, 15 bp, Homo sapiens
ggattctgagcacca

SEQ ID NO: 1817058 - DNA, 15 bp, Homo sapiens
gattctgagcaccag

SEQ ID NO: 1817059 - DNA, 15 bp, Homo sapiens
attctgagcaccagg

SEQ ID NO: 1817060 - DNA, 15 bp, Homo sapiens
ttctgagcaccaggg

SEQ ID NO: 1817061 - DNA, 15 bp, Homo sapiens
tctgagcaccagggg

SEQ ID NO: 1817062 - DNA, 15 bp, Homo sapiens
ctgagcaccaggggc

SEQ ID NO: 1817063 - DNA, 15 bp, Homo sapiens
tgagcaccaggggca

SEQ ID NO: 1817064 - DNA, 15 bp, Homo sapiens
gagcaccaggggcag

SEQ ID NO: 1817065 - DNA, 15 bp, Homo sapiens
agcaccaggggcaga

SEQ ID NO: 1817066 - DNA, 15 bp, Homo sapiens
gcaccaggggcagag

SEQ ID NO: 1817067 - DNA, 15 bp, Homo sapiens
caccaggggcagagg

SEQ ID NO: 1817068 - DNA, 15 bp, Homo sapiens
accaggggcagaggc

SEQ ID NO: 1817069 - DNA, 15 bp, Homo sapiens
ccaggggcagaggcg

SEQ ID NO: 1817070 - DNA, 15 bp, Homo sapiens
caggggcagaggcgg

SEQ ID NO: 1817071 - DNA, 15 bp, Homo sapiens
aggggcagaggcggc

SEQ ID NO: 1817072 - DNA, 15 bp, Homo sapiens
ggggcagaggcggcc

SEQ ID NO: 1817073 - DNA, 15 bp, Homo sapiens
gggcagaggcggcca

SEQ ID NO: 1817074 - DNA, 15 bp, Homo sapiens
ggcagaggcggccag

SEQ ID NO: 1817075 - DNA, 15 bp, Homo sapiens
gcagaggcggccaga

SEQ ID NO: 1817076 - DNA, 15 bp, Homo sapiens
cagaggcggccagac

SEQ ID NO: 1817077 - DNA, 15 bp, Homo sapiens
agaggcggccagaca

SEQ ID NO: 1817078 - DNA, 15 bp, Homo sapiens
gaggcggccagacaa

SEQ ID NO: 1817079 - DNA, 15 bp, Homo sapiens
aggcggccagacaac

SEQ ID NO: 1817080 - DNA, 15 bp, Homo sapiens
ggcggccagacaacc

SEQ ID NO: 1817081 - DNA, 15 bp, Homo sapiens
gcggccagacaacct

SEQ ID NO: 1817082 - DNA, 15 bp, Homo sapiens
cggccagacaacctc

SEQ ID NO: 1817083 - DNA, 15 bp, Homo sapiens
ggccagacaacctca

SEQ ID NO: 1817084 - DNA, 15 bp, Homo sapiens
gccagacaacctcag

SEQ ID NO: 1817085 - DNA, 15 bp, Homo sapiens
ccagacaacctcagg

SEQ ID NO: 1817086 - DNA, 15 bp, Homo sapiens
cagacaacctcaggg

SEQ ID NO: 1817087 - DNA, 15 bp, Homo sapiens
agacaacctcaggga

SEQ ID NO: 1817088 - DNA, 15 bp, Homo sapiens
gacaacctcagggag

SEQ ID NO: 1817089 - DNA, 15 bp, Homo sapiens
acaacctcagggagg

SEQ ID NO: 1817090 - DNA, 15 bp, Homo sapiens
caacctcagggagga

SEQ ID NO: 1817091 - DNA, 15 bp, Homo sapiens
aacctcagggaggag

SEQ ID NO: 1817092 - DNA, 15 bp, Homo sapiens
acctcagggaggagt

SEQ ID NO: 1817093 - DNA, 15 bp, Homo sapiens
cctcagggaggagtg

SEQ ID NO: 1817094 - DNA, 15 bp, Homo sapiens
ctcagggaggagtgt

SEQ ID NO: 1817095 - DNA, 15 bp, Homo sapiens
tcagggaggagtgtc

SEQ ID NO: 1817096 - DNA, 15 bp, Homo sapiens
cagggaggagtgtcc

SEQ ID NO: 1817097 - DNA, 15 bp, Homo sapiens
agggaggagtgtcct

SEQ ID NO: 1817098 - DNA, 15 bp, Homo sapiens
gggaggagtgtcctg

SEQ ID NO: 1817099 - DNA, 15 bp, Homo sapiens
ggaggagtgtcctgg

SEQ ID NO: 1817100 - DNA, 15 bp, Homo sapiens
gaggagtgtcctggc

SEQ ID NO: 1817101 - DNA, 15 bp, Homo sapiens
aggagtgtcctggcg

SEQ ID NO: 1817102 - DNA, 15 bp, Homo sapiens
ggagtgtcctggcgt

SEQ ID NO: 1817103 - DNA, 15 bp, Homo sapiens
gagtgtcctggcgtc

SEQ ID NO: 1817104 - DNA, 15 bp, Homo sapiens
agtgtcctggcgtcc

SEQ ID NO: 1817105 - DNA, 15 bp, Homo sapiens
gtgtcctggcgtccc

SEQ ID NO: 1817106 - DNA, 15 bp, Homo sapiens
tgtcctggcgtcccc

SEQ ID NO: 1817107 - DNA, 15 bp, Homo sapiens
gtcctggcgtcccca

SEQ ID NO: 1817108 - DNA, 15 bp, Homo sapiens
tcctggcgtccccat

SEQ ID NO: 1817109 - DNA, 15 bp, Homo sapiens
cctggcgtccccatc

SEQ ID NO: 1817110 - DNA, 15 bp, Homo sapiens
ctggcgtccccatcc

SEQ ID NO: 1817111 - DNA, 15 bp, Homo sapiens
tggcgtccccatcct

SEQ ID NO: 1817112 - DNA, 15 bp, Homo sapiens
ggcgtccccatcctc

SEQ ID NO: 1817113 - DNA, 15 bp, Homo sapiens
gcgtccccatcctcc

SEQ ID NO: 1817114 - DNA, 15 bp, Homo sapiens
cgtccccatcctcca

SEQ ID NO: 1817115 - DNA, 15 bp, Homo sapiens
gtccccatcctccaa

SEQ ID NO: 1817116 - DNA, 15 bp, Homo sapiens
tccccatcctccaaa

SEQ ID NO: 1817117 - DNA, 15 bp, Homo sapiens
ccccatcctccaaag

SEQ ID NO: 1817118 - DNA, 15 bp, Homo sapiens
cccatcctccaaagg

SEQ ID NO: 1817119 - DNA, 15 bp, Homo sapiens
ccatcctccaaaggg

SEQ ID NO: 1817120 - DNA, 15 bp, Homo sapiens
catcctccaaagggc

SEQ ID NO: 1817121 - DNA, 15 bp, Homo sapiens
atcctccaaagggcc

SEQ ID NO: 1817122 - DNA, 15 bp, Homo sapiens
tcctccaaagggcct

SEQ ID NO: 1817123 - DNA, 15 bp, Homo sapiens
cctccaaagggcctg

SEQ ID NO: 1817124 - DNA, 15 bp, Homo sapiens
ctccaaagggcctgg

SEQ ID NO: 1817125 - DNA, 15 bp, Homo sapiens
tccaaagggcctggg

SEQ ID NO: 1817126 - DNA, 15 bp, Homo sapiens
ccaaagggcctgggc

SEQ ID NO: 1817127 - DNA, 15 bp, Homo sapiens
caaagggcctgggcc

SEQ ID NO: 1817128 - DNA, 15 bp, Homo sapiens
aaagggcctgggccc

SEQ ID NO: 1817129 - DNA, 15 bp, Homo sapiens
aagggcctgggcccg

SEQ ID NO: 1817130 - DNA, 15 bp, Homo sapiens
agggcctgggcccgc

SEQ ID NO: 1817131 - DNA, 15 bp, Homo sapiens
gggcctgggcccgcc

SEQ ID NO: 1817132 - DNA, 15 bp, Homo sapiens
ggcctgggcccgccc

SEQ ID NO: 1817133 - DNA, 15 bp, Homo sapiens
gcctgggcccgcccc

SEQ ID NO: 1817134 - DNA, 15 bp, Homo sapiens
cctgggcccgccccg

SEQ ID NO: 1817135 - DNA, 15 bp, Homo sapiens
ctgggcccgccccga

SEQ ID NO: 1817136 - DNA, 15 bp, Homo sapiens
tgggcccgccccgag

SEQ ID NO: 1817137 - DNA, 15 bp, Homo sapiens
gggcccgccccgagg

SEQ ID NO: 1817138 - DNA, 15 bp, Homo sapiens
ggcccgccccgaggg

SEQ ID NO: 1817139 - DNA, 15 bp, Homo sapiens
gcccgccccgagggg

SEQ ID NO: 1817140 - DNA, 15 bp, Homo sapiens
cccgccccgaggggg

SEQ ID NO: 1817141 - DNA, 15 bp, Homo sapiens
ccgccccgagggggc

SEQ ID NO: 1817142 - DNA, 15 bp, Homo sapiens
cgccccgagggggca

SEQ ID NO: 1817143 - DNA, 15 bp, Homo sapiens
gccccgagggggcag

SEQ ID NO: 1817144 - DNA, 15 bp, Homo sapiens
ccccgagggggcagc

SEQ ID NO: 1817145 - DNA, 15 bp, Homo sapiens
cccgagggggcagcg

SEQ ID NO: 1817146 - DNA, 15 bp, Homo sapiens
ccgagggggcagcga

SEQ ID NO: 1817147 - DNA, 15 bp, Homo sapiens
cgagggggcagcgag

SEQ ID NO: 1817148 - DNA, 15 bp, Homo sapiens
gagggggcagcgaga

SEQ ID NO: 1817149 - DNA, 15 bp, Homo sapiens
agggggcagcgagag

SEQ ID NO: 1817150 - DNA, 15 bp, Homo sapiens
gggggcagcgagagg

SEQ ID NO: 1817151 - DNA, 15 bp, Homo sapiens
ggggcagcgagagga

SEQ ID NO: 1817152 - DNA, 15 bp, Homo sapiens
gggcagcgagaggag

SEQ ID NO: 1817153 - DNA, 15 bp, Homo sapiens
ggcagcgagaggagc

SEQ ID NO: 1817154 - DNA, 15 bp, Homo sapiens
gcagcgagaggagct

SEQ ID NO: 1817155 - DNA, 15 bp, Homo sapiens
cagcgagaggagctt

SEQ ID NO: 1817156 - DNA, 15 bp, Homo sapiens
agcgagaggagcttc

SEQ ID NO: 1817157 - DNA, 15 bp, Homo sapiens
gcgagaggagcttcc

SEQ ID NO: 1817158 - DNA, 15 bp, Homo sapiens
cgagaggagcttccc

SEQ ID NO: 1817159 - DNA, 15 bp, Homo sapiens
gagaggagcttcccc

SEQ ID NO: 1817160 - DNA, 15 bp, Homo sapiens
agaggagcttcccca

SEQ ID NO: 1817161 - DNA, 15 bp, Homo sapiens
gaggagcttccccat

SEQ ID NO: 1817162 - DNA, 15 bp, Homo sapiens
aggagcttccccatc

SEQ ID NO: 1817163 - DNA, 15 bp, Homo sapiens
ggagcttccccatcc

SEQ ID NO: 1817164 - DNA, 15 bp, Homo sapiens
gagcttccccatccc

SEQ ID NO: 1817165 - DNA, 15 bp, Homo sapiens
agcttccccatcccc

SEQ ID NO: 1817166 - DNA, 15 bp, Homo sapiens
gcttccccatccccg

SEQ ID NO: 1817167 - DNA, 15 bp, Homo sapiens
cttccccatccccgg

SEQ ID NO: 1817168 - DNA, 15 bp, Homo sapiens
ttccccatccccggt

SEQ ID NO: 1817169 - DNA, 15 bp, Homo sapiens
tccccatccccggtc

SEQ ID NO: 1817170 - DNA, 15 bp, Homo sapiens
ccccatccccggtca

SEQ ID NO: 1817171 - DNA, 15 bp, Homo sapiens
cccatccccggtcag

SEQ ID NO: 1817172 - DNA, 15 bp, Homo sapiens
ccatccccggtcagt

SEQ ID NO: 1817173 - DNA, 15 bp, Homo sapiens
catccccggtcagtc

SEQ ID NO: 1817174 - DNA, 15 bp, Homo sapiens
atccccggtcagtcc

SEQ ID NO: 1817175 - DNA, 15 bp, Homo sapiens
tccccggtcagtcca

SEQ ID NO: 1817176 - DNA, 15 bp, Homo sapiens
ccccggtcagtccac

SEQ ID NO: 1817177 - DNA, 15 bp, Homo sapiens
cccggtcagtccacc

SEQ ID NO: 1817178 - DNA, 15 bp, Homo sapiens
ccggtcagtccaccc

SEQ ID NO: 1817179 - DNA, 15 bp, Homo sapiens
cggtcagtccaccct

SEQ ID NO: 1817180 - DNA, 15 bp, Homo sapiens
ggtcagtccaccctg

SEQ ID NO: 1817181 - DNA, 15 bp, Homo sapiens
gtcagtccaccctgc

SEQ ID NO: 1817182 - DNA, 15 bp, Homo sapiens
tcagtccaccctgcc

SEQ ID NO: 1817183 - DNA, 15 bp, Homo sapiens
cagtccaccctgccc

SEQ ID NO: 1817184 - DNA, 15 bp, Homo sapiens
agtccaccctgcccc

SEQ ID NO: 1817185 - DNA, 15 bp, Homo sapiens
gtccaccctgccccg

SEQ ID NO: 1817186 - DNA, 15 bp, Homo sapiens
tccaccctgccccgt

SEQ ID NO: 1817187 - DNA, 15 bp, Homo sapiens
ccaccctgccccgtc

SEQ ID NO: 1817188 - DNA, 15 bp, Homo sapiens
caccctgccccgtcc

SEQ ID NO: 1817189 - DNA, 15 bp, Homo sapiens
accctgccccgtcca

SEQ ID NO: 1817190 - DNA, 15 bp, Homo sapiens
ccctgccccgtccac

SEQ ID NO: 1817191 - DNA, 15 bp, Homo sapiens
cctgccccgtccact

SEQ ID NO: 1817192 - DNA, 15 bp, Homo sapiens
ctgccccgtccactt

SEQ ID NO: 1817193 - DNA, 15 bp, Homo sapiens
tgccccgtccacttt

SEQ ID NO: 1817194 - DNA, 15 bp, Homo sapiens
gccccgtccactttc

SEQ ID NO: 1817195 - DNA, 15 bp, Homo sapiens
ccccgtccactttcc

SEQ ID NO: 1817196 - DNA, 15 bp, Homo sapiens
cccgtccactttccc

SEQ ID NO: 1817197 - DNA, 15 bp, Homo sapiens
ccgtccactttccca

SEQ ID NO: 1817198 - DNA, 15 bp, Homo sapiens
cgtccactttcccat

SEQ ID NO: 1817199 - DNA, 15 bp, Homo sapiens
gtccactttcccatc

SEQ ID NO: 1817200 - DNA, 15 bp, Homo sapiens
tccactttcccatct

SEQ ID NO: 1817201 - DNA, 15 bp, Homo sapiens
ccactttcccatctc

SEQ ID NO: 1817202 - DNA, 15 bp, Homo sapiens
cactttcccatctcc

SEQ ID NO: 1817203 - DNA, 15 bp, Homo sapiens
actttcccatctcct

SEQ ID NO: 1817204 - DNA, 15 bp, Homo sapiens
ctttcccatctcctc

SEQ ID NO: 1817205 - DNA, 15 bp, Homo sapiens
tttcccatctcctcg

SEQ ID NO: 1817206 - DNA, 15 bp, Homo sapiens
ttcccatctcctcgg

SEQ ID NO: 1817207 - DNA, 15 bp, Homo sapiens
tcccatctcctcggt

SEQ ID NO: 1817208 - DNA, 15 bp, Homo sapiens
cccatctcctcggta

SEQ ID NO: 1817209 - DNA, 15 bp, Homo sapiens
ccatctcctcggtat

SEQ ID NO: 1817210 - DNA, 15 bp, Homo sapiens
catctcctcggtata

SEQ ID NO: 1817211 - DNA, 15 bp, Homo sapiens
atctcctcggtataa

SEQ ID NO: 1817212 - DNA, 15 bp, Homo sapiens
tctcctcggtataaa

SEQ ID NO: 1817213 - DNA, 15 bp, Homo sapiens
ctcctcggtataaat

SEQ ID NO: 1817214 - DNA, 15 bp, Homo sapiens
tcctcggtataaatc

SEQ ID NO: 1817215 - DNA, 15 bp, Homo sapiens
cctcggtataaatca

SEQ ID NO: 1817216 - DNA, 15 bp, Homo sapiens
ctcggtataaatcat

SEQ ID NO: 1817217 - DNA, 15 bp, Homo sapiens
tcggtataaatcatg

SEQ ID NO: 1817218 - DNA, 15 bp, Homo sapiens
cggtataaatcatgt

SEQ ID NO: 1817219 - DNA, 15 bp, Homo sapiens
ggtataaatcatgtt

SEQ ID NO: 1817220 - DNA, 15 bp, Homo sapiens
gtataaatcatgttt

SEQ ID NO: 1817221 - DNA, 15 bp, Homo sapiens
tataaatcatgttta

SEQ ID NO: 1817222 - DNA, 15 bp, Homo sapiens
ataaatcatgtttat

SEQ ID NO: 1817223 - DNA, 15 bp, Homo sapiens
taaatcatgtttata

SEQ ID NO: 1817224 - DNA, 15 bp, Homo sapiens
aaatcatgtttataa

SEQ ID NO: 1817225 - DNA, 15 bp, Homo sapiens
aatcatgtttataag

SEQ ID NO: 1817226 - DNA, 15 bp, Homo sapiens
atcatgtttataagt

SEQ ID NO: 1817227 - DNA, 15 bp, Homo sapiens
tcatgtttataagtt

SEQ ID NO: 1817228 - DNA, 15 bp, Homo sapiens
catgtttataagtta

SEQ ID NO: 1817229 - DNA, 15 bp, Homo sapiens
atgtttataagttat

SEQ ID NO: 1817230 - DNA, 15 bp, Homo sapiens
tgtttataagttatg

SEQ ID NO: 1817231 - DNA, 15 bp, Homo sapiens
gtttataagttatgg

SEQ ID NO: 1817232 - DNA, 15 bp, Homo sapiens
tttataagttatgga

SEQ ID NO: 1817233 - DNA, 15 bp, Homo sapiens
ttataagttatggaa

SEQ ID NO: 1817234 - DNA, 15 bp, Homo sapiens
tataagttatggaag

SEQ ID NO: 1817235 - DNA, 15 bp, Homo sapiens
ataagttatggaaga

SEQ ID NO: 1817236 - DNA, 15 bp, Homo sapiens
taagttatggaagaa

SEQ ID NO: 1817237 - DNA, 15 bp, Homo sapiens
aagttatggaagaac

SEQ ID NO: 1817238 - DNA, 15 bp, Homo sapiens
agttatggaagaacc

SEQ ID NO: 1817239 - DNA, 15 bp, Homo sapiens
gttatggaagaaccg

SEQ ID NO: 1817240 - DNA, 15 bp, Homo sapiens
ttatggaagaaccgg

SEQ ID NO: 1817241 - DNA, 15 bp, Homo sapiens
tatggaagaaccggg

SEQ ID NO: 1817242 - DNA, 15 bp, Homo sapiens
atggaagaaccggga

SEQ ID NO: 1817243 - DNA, 15 bp, Homo sapiens
tggaagaaccgggac

SEQ ID NO: 1817244 - DNA, 15 bp, Homo sapiens
ggaagaaccgggaca

SEQ ID NO: 1817245 - DNA, 15 bp, Homo sapiens
gaagaaccgggacat

SEQ ID NO: 1817246 - DNA, 15 bp, Homo sapiens
aagaaccgggacatt

SEQ ID NO: 1817247 - DNA, 15 bp, Homo sapiens
agaaccgggacattt

SEQ ID NO: 1817248 - DNA, 15 bp, Homo sapiens
gaaccgggacatttt

SEQ ID NO: 1817249 - DNA, 15 bp, Homo sapiens
aaccgggacatttta

SEQ ID NO: 1817250 - DNA, 15 bp, Homo sapiens
accgggacattttac

SEQ ID NO: 1817251 - DNA, 15 bp, Homo sapiens
ccgggacattttaca

SEQ ID NO: 1817252 - DNA, 15 bp, Homo sapiens
cgggacattttacag

SEQ ID NO: 1817253 - DNA, 15 bp, Homo sapiens
gggacattttacaga

SEQ ID NO: 1817254 - DNA, 15 bp, Homo sapiens
ggacattttacagaa

SEQ ID NO: 1817255 - DNA, 15 bp, Homo sapiens
gacattttacagaaa

SEQ ID NO: 1817256 - DNA, 15 bp, Homo sapiens
acattttacagaaaa

SEQ ID NO: 1817257 - DNA, 15 bp, Homo sapiens
cattttacagaaaaa

SEQ ID NO: 1817258 - DNA, 15 bp, Homo sapiens
attttacagaaaaaa

SEQ ID NO: 1817259 - DNA, 15 bp, Homo sapiens
ttttacagaaaaaaa

SEQ ID NO: 1817260 - DNA, 15 bp, Homo sapiens
tttacagaaaaaaaa

SEQ ID NO: 1817261 - DNA, 15 bp, Homo sapiens
ttacagaaaaaaaac

SEQ ID NO: 1817262 - DNA, 15 bp, Homo sapiens
tacagaaaaaaaaca

SEQ ID NO: 1817263 - DNA, 15 bp, Homo sapiens
acagaaaaaaaacaa

SEQ ID NO: 1817264 - DNA, 15 bp, Homo sapiens
cagaaaaaaaacaaa

SEQ ID NO: 1817265 - DNA, 15 bp, Homo sapiens
agaaaaaaaacaaaa

SEQ ID NO: 1817266 - DNA, 15 bp, Homo sapiens
aaaacaaaaaacaac

SEQ ID NO: 1817267 - DNA, 15 bp, Homo sapiens
aaacaaaaaacaaca

SEQ ID NO: 1817268 - DNA, 15 bp, Homo sapiens
aacaaaaaacaacaa

SEQ ID NO: 1817269 - DNA, 15 bp, Homo sapiens
acaaaaaacaacaaa

SEQ ID NO: 1817270 - DNA, 15 bp, Homo sapiens
caaaaaacaacaaaa

SEQ ID NO: 1817271 - DNA, 15 bp, Homo sapiens
aaaaaacaacaaaaa

SEQ ID NO: 1817272 - DNA, 15 bp, Homo sapiens
aaaaacaacaaaaaa

SEQ ID NO: 1817273 - DNA, 15 bp, Homo sapiens
aaaacaacaaaaaat

SEQ ID NO: 1817274 - DNA, 15 bp, Homo sapiens
aaacaacaaaaaata

SEQ ID NO: 1817275 - DNA, 15 bp, Homo sapiens
aacaacaaaaaatat

SEQ ID NO: 1817276 - DNA, 15 bp, Homo sapiens
acaacaaaaaatata

SEQ ID NO: 1817277 - DNA, 15 bp, Homo sapiens
caacaaaaaatatac

SEQ ID NO: 1817278 - DNA, 15 bp, Homo sapiens
aacaaaaaatatacg

SEQ ID NO: 1817279 - DNA, 15 bp, Homo sapiens
acaaaaaatatacgt

SEQ ID NO: 1817280 - DNA, 15 bp, Homo sapiens
caaaaaatatacgtg

SEQ ID NO: 1817281 - DNA, 15 bp, Homo sapiens
aaaaaatatacgtgg

SEQ ID NO: 1817282 - DNA, 15 bp, Homo sapiens
aaaaatatacgtggg

SEQ ID NO: 1817283 - DNA, 15 bp, Homo sapiens
aaaatatacgtggga

SEQ ID NO: 1817284 - DNA, 15 bp, Homo sapiens
aaatatacgtgggaa

SEQ ID NO: 1817285 - DNA, 15 bp, Homo sapiens
aatatacgtgggaaa

SEQ ID NO: 1817286 - DNA, 15 bp, Homo sapiens
atatacgtgggaaaa

SEQ ID NO: 1817287 - DNA, 15 bp, Homo sapiens
tatacgtgggaaaaa

SEQ ID NO: 1817288 - DNA, 15 bp, Homo sapiens
atacgtgggaaaaaa

SEQ ID NO: 1817289 - DNA, 15 bp, Homo sapiens
tacgtgggaaaaaaa

SEQ ID NO: 1817290 - DNA, 15 bp, Homo sapiens
acgtgggaaaaaaaa

SEQ ID NO: 1817291 - DNA, 15 bp, Homo sapiens
cgtgggaaaaaaaac

SEQ ID NO: 1817292 - DNA, 15 bp, Homo sapiens
gtgggaaaaaaaacg

SEQ ID NO: 1817293 - DNA, 15 bp, Homo sapiens
tgggaaaaaaaacga

SEQ ID NO: 1817294 - DNA, 15 bp, Homo sapiens
gggaaaaaaaacgat

SEQ ID NO: 1817295 - DNA, 15 bp, Homo sapiens
ggaaaaaaaacgatg

SEQ ID NO: 1817296 - DNA, 15 bp, Homo sapiens
gaaaaaaaacgatgg

SEQ ID NO: 1817297 - DNA, 15 bp, Homo sapiens
aaaaaaaacgatggg

SEQ ID NO: 1817298 - DNA, 15 bp, Homo sapiens
aaaaaaacgatggga

SEQ ID NO: 1817299 - DNA, 15 bp, Homo sapiens
aaaaaacgatgggag

SEQ ID NO: 1817300 - DNA, 15 bp, Homo sapiens
aaaaacgatgggagg

SEQ ID NO: 1817301 - DNA, 15 bp, Homo sapiens
aaaacgatgggaggc

SEQ ID NO: 1817302 - DNA, 15 bp, Homo sapiens
aaacgatgggaggcc

SEQ ID NO: 1817303 - DNA, 15 bp, Homo sapiens
aacgatgggaggcct

SEQ ID NO: 1817304 - DNA, 15 bp, Homo sapiens
acgatgggaggcctc

SEQ ID NO: 1817305 - DNA, 15 bp, Homo sapiens
cgatgggaggcctcc

SEQ ID NO: 1817306 - DNA, 15 bp, Homo sapiens
gatgggaggcctccg

SEQ ID NO: 1817307 - DNA, 15 bp, Homo sapiens
atgggaggcctccgt

SEQ ID NO: 1817308 - DNA, 15 bp, Homo sapiens
tgggaggcctccgtt

SEQ ID NO: 1817309 - DNA, 15 bp, Homo sapiens
gggaggcctccgttt

SEQ ID NO: 1817310 - DNA, 15 bp, Homo sapiens
ggaggcctccgtttt

SEQ ID NO: 1817311 - DNA, 15 bp, Homo sapiens
gaggcctccgttttc

SEQ ID NO: 1817312 - DNA, 15 bp, Homo sapiens
aggcctccgttttct

SEQ ID NO: 1817313 - DNA, 15 bp, Homo sapiens
ggcctccgttttctc

SEQ ID NO: 1817314 - DNA, 15 bp, Homo sapiens
gcctccgttttctca

SEQ ID NO: 1817315 - DNA, 15 bp, Homo sapiens
cctccgttttctcaa

SEQ ID NO: 1817316 - DNA, 15 bp, Homo sapiens
ctccgttttctcaag

SEQ ID NO: 1817317 - DNA, 15 bp, Homo sapiens
tccgttttctcaagt

SEQ ID NO: 1817318 - DNA, 15 bp, Homo sapiens
ccgttttctcaagtg

SEQ ID NO: 1817319 - DNA, 15 bp, Homo sapiens
cgttttctcaagtgt

SEQ ID NO: 1817320 - DNA, 15 bp, Homo sapiens
gttttctcaagtgtg

SEQ ID NO: 1817321 - DNA, 15 bp, Homo sapiens
ttttctcaagtgtgt

SEQ ID NO: 1817322 - DNA, 15 bp, Homo sapiens
tttctcaagtgtgtc

SEQ ID NO: 1817323 - DNA, 15 bp, Homo sapiens
ttctcaagtgtgtct

SEQ ID NO: 1817324 - DNA, 15 bp, Homo sapiens
tctcaagtgtgtctg

SEQ ID NO: 1817325 - DNA, 15 bp, Homo sapiens
ctcaagtgtgtctgg

SEQ ID NO: 1817326 - DNA, 15 bp, Homo sapiens
tcaagtgtgtctggc

SEQ ID NO: 1817327 - DNA, 15 bp, Homo sapiens
caagtgtgtctggcc

SEQ ID NO: 1817328 - DNA, 15 bp, Homo sapiens
aagtgtgtctggcct

SEQ ID NO: 1817329 - DNA, 15 bp, Homo sapiens
agtgtgtctggcctg

SEQ ID NO: 1817330 - DNA, 15 bp, Homo sapiens
gtgtgtctggcctgt

SEQ ID NO: 1817331 - DNA, 15 bp, Homo sapiens
tgtgtctggcctgtt

SEQ ID NO: 1817332 - DNA, 15 bp, Homo sapiens
gtgtctggcctgttt

SEQ ID NO: 1817333 - DNA, 15 bp, Homo sapiens
tgtctggcctgtttt

SEQ ID NO: 1817334 - DNA, 15 bp, Homo sapiens
gtctggcctgttttg

SEQ ID NO: 1817335 - DNA, 15 bp, Homo sapiens
tctggcctgttttga

SEQ ID NO: 1817336 - DNA, 15 bp, Homo sapiens
ctggcctgttttgag

SEQ ID NO: 1817337 - DNA, 15 bp, Homo sapiens
tggcctgttttgagc

SEQ ID NO: 1817338 - DNA, 15 bp, Homo sapiens
ggcctgttttgagca

SEQ ID NO: 1817339 - DNA, 15 bp, Homo sapiens
gcctgttttgagcat

SEQ ID NO: 1817340 - DNA, 15 bp, Homo sapiens
cctgttttgagcatt

SEQ ID NO: 1817341 - DNA, 15 bp, Homo sapiens
ctgttttgagcattt

SEQ ID NO: 1817342 - DNA, 15 bp, Homo sapiens
tgttttgagcatttc

SEQ ID NO: 1817343 - DNA, 15 bp, Homo sapiens
gttttgagcatttca

SEQ ID NO: 1817344 - DNA, 15 bp, Homo sapiens
ttttgagcatttcat

SEQ ID NO: 1817345 - DNA, 15 bp, Homo sapiens
tttgagcatttcatc

SEQ ID NO: 1817346 - DNA, 15 bp, Homo sapiens
ttgagcatttcatcc

SEQ ID NO: 1817347 - DNA, 15 bp, Homo sapiens
tgagcatttcatccg

SEQ ID NO: 1817348 - DNA, 15 bp, Homo sapiens
gagcatttcatccgg

SEQ ID NO: 1817349 - DNA, 15 bp, Homo sapiens
agcatttcatccgga

SEQ ID NO: 1817350 - DNA, 15 bp, Homo sapiens
gcatttcatccggag

SEQ ID NO: 1817351 - DNA, 15 bp, Homo sapiens
catttcatccggagt

SEQ ID NO: 1817352 - DNA, 15 bp, Homo sapiens
atttcatccggagtc

SEQ ID NO: 1817353 - DNA, 15 bp, Homo sapiens
tttcatccggagtct

SEQ ID NO: 1817354 - DNA, 15 bp, Homo sapiens
ttcatccggagtctg

SEQ ID NO: 1817355 - DNA, 15 bp, Homo sapiens
tcatccggagtctgg

SEQ ID NO: 1817356 - DNA, 15 bp, Homo sapiens
catccggagtctggc

SEQ ID NO: 1817357 - DNA, 15 bp, Homo sapiens
atccggagtctggcc

SEQ ID NO: 1817358 - DNA, 15 bp, Homo sapiens
tccggagtctggccg

SEQ ID NO: 1817359 - DNA, 15 bp, Homo sapiens
ccggagtctggccgc

SEQ ID NO: 1817360 - DNA, 15 bp, Homo sapiens
cggagtctggccgcc

SEQ ID NO: 1817361 - DNA, 15 bp, Homo sapiens
ggagtctggccgccc

SEQ ID NO: 1817362 - DNA, 15 bp, Homo sapiens
gagtctggccgccct

SEQ ID NO: 1817363 - DNA, 15 bp, Homo sapiens
agtctggccgccctg

SEQ ID NO: 1817364 - DNA, 15 bp, Homo sapiens
gtctggccgccctga

SEQ ID NO: 1817365 - DNA, 15 bp, Homo sapiens
tctggccgccctgac

SEQ ID NO: 1817366 - DNA, 15 bp, Homo sapiens
ctggccgccctgacc

SEQ ID NO: 1817367 - DNA, 15 bp, Homo sapiens
tggccgccctgacct

SEQ ID NO: 1817368 - DNA, 15 bp, Homo sapiens
ggccgccctgacctt

SEQ ID NO: 1817369 - DNA, 15 bp, Homo sapiens
gccgccctgaccttc

SEQ ID NO: 1817370 - DNA, 15 bp, Homo sapiens
ccgccctgaccttcc

SEQ ID NO: 1817371 - DNA, 15 bp, Homo sapiens
cgccctgaccttccc

SEQ ID NO: 1817372 - DNA, 15 bp, Homo sapiens
gccctgaccttcccc

SEQ ID NO: 1817373 - DNA, 15 bp, Homo sapiens
ccctgaccttccccc

SEQ ID NO: 1817374 - DNA, 15 bp, Homo sapiens
cctgaccttccccca

SEQ ID NO: 1817375 - DNA, 15 bp, Homo sapiens
ctgaccttcccccag

SEQ ID NO: 1817376 - DNA, 15 bp, Homo sapiens
tgaccttcccccagc

SEQ ID NO: 1817377 - DNA, 15 bp, Homo sapiens
gaccttcccccagcc

SEQ ID NO: 1817378 - DNA, 15 bp, Homo sapiens
accttcccccagccg

SEQ ID NO: 1817379 - DNA, 15 bp, Homo sapiens
ccttcccccagccgc

SEQ ID NO: 1817380 - DNA, 15 bp, Homo sapiens
cttcccccagccgcc

SEQ ID NO: 1817381 - DNA, 15 bp, Homo sapiens
ttcccccagccgcct

SEQ ID NO: 1817382 - DNA, 15 bp, Homo sapiens
tcccccagccgcctg

SEQ ID NO: 1817383 - DNA, 15 bp, Homo sapiens
cccccagccgcctgc

SEQ ID NO: 1817384 - DNA, 15 bp, Homo sapiens
ccccagccgcctgca

SEQ ID NO: 1817385 - DNA, 15 bp, Homo sapiens
cccagccgcctgcag

SEQ ID NO: 1817386 - DNA, 15 bp, Homo sapiens
ccagccgcctgcagg

SEQ ID NO: 1817387 - DNA, 15 bp, Homo sapiens
cagccgcctgcaggg

SEQ ID NO: 1817388 - DNA, 15 bp, Homo sapiens
agccgcctgcagggg

SEQ ID NO: 1817389 - DNA, 15 bp, Homo sapiens
gccgcctgcaggggg

SEQ ID NO: 1817390 - DNA, 15 bp, Homo sapiens
ccgcctgcagggggc

SEQ ID NO: 1817391 - DNA, 15 bp, Homo sapiens
cgcctgcagggggcg

SEQ ID NO: 1817392 - DNA, 15 bp, Homo sapiens
gcctgcagggggcgc

SEQ ID NO: 1817393 - DNA, 15 bp, Homo sapiens
cctgcagggggcgcc

SEQ ID NO: 1817394 - DNA, 15 bp, Homo sapiens
ctgcagggggcgcca

SEQ ID NO: 1817395 - DNA, 15 bp, Homo sapiens
tgcagggggcgccag

SEQ ID NO: 1817396 - DNA, 15 bp, Homo sapiens
gcagggggcgccaga

SEQ ID NO: 1817397 - DNA, 15 bp, Homo sapiens
cagggggcgccagag

SEQ ID NO: 1817398 - DNA, 15 bp, Homo sapiens
agggggcgccagagg

SEQ ID NO: 1817399 - DNA, 15 bp, Homo sapiens
gggggcgccagaggg

SEQ ID NO: 1817400 - DNA, 15 bp, Homo sapiens
ggggcgccagagggc

SEQ ID NO: 1817401 - DNA, 15 bp, Homo sapiens
gggcgccagagggcc

SEQ ID NO: 1817402 - DNA, 15 bp, Homo sapiens
ggcgccagagggccg

SEQ ID NO: 1817403 - DNA, 15 bp, Homo sapiens
gcgccagagggccgg

SEQ ID NO: 1817404 - DNA, 15 bp, Homo sapiens
cgccagagggccgga

SEQ ID NO: 1817405 - DNA, 15 bp, Homo sapiens
gccagagggccggag

SEQ ID NO: 1817406 - DNA, 15 bp, Homo sapiens
ccagagggccggagc

SEQ ID NO: 1817407 - DNA, 15 bp, Homo sapiens
cagagggccggagca

SEQ ID NO: 1817408 - DNA, 15 bp, Homo sapiens
agagggccggagcac

SEQ ID NO: 1817409 - DNA, 15 bp, Homo sapiens
gagggccggagcacg

SEQ ID NO: 1817410 - DNA, 15 bp, Homo sapiens
agggccggagcacgg

SEQ ID NO: 1817411 - DNA, 15 bp, Homo sapiens
gggccggagcacgga

SEQ ID NO: 1817412 - DNA, 15 bp, Homo sapiens
ggccggagcacggaa

SEQ ID NO: 1817413 - DNA, 15 bp, Homo sapiens
gccggagcacggaaa

SEQ ID NO: 1817414 - DNA, 15 bp, Homo sapiens
ccggagcacggaaag

SEQ ID NO: 1817415 - DNA, 15 bp, Homo sapiens
cggagcacggaaagc

SEQ ID NO: 1817416 - DNA, 15 bp, Homo sapiens
ggagcacggaaagca

SEQ ID NO: 1817417 - DNA, 15 bp, Homo sapiens
gagcacggaaagcag

SEQ ID NO: 1817418 - DNA, 15 bp, Homo sapiens
agcacggaaagcagc

SEQ ID NO: 1817419 - DNA, 15 bp, Homo sapiens
gcacggaaagcagcg

SEQ ID NO: 1817420 - DNA, 15 bp, Homo sapiens
cacggaaagcagcgg

SEQ ID NO: 1817421 - DNA, 15 bp, Homo sapiens
acggaaagcagcgga

SEQ ID NO: 1817422 - DNA, 15 bp, Homo sapiens
cggaaagcagcggat

SEQ ID NO: 1817423 - DNA, 15 bp, Homo sapiens
ggaaagcagcggatc

SEQ ID NO: 1817424 - DNA, 15 bp, Homo sapiens
gaaagcagcggatcc

SEQ ID NO: 1817425 - DNA, 15 bp, Homo sapiens
aaagcagcggatcct

SEQ ID NO: 1817426 - DNA, 15 bp, Homo sapiens
aagcagcggatcctt

SEQ ID NO: 1817427 - DNA, 15 bp, Homo sapiens
agcagcggatccttg

SEQ ID NO: 1817428 - DNA, 15 bp, Homo sapiens
gcagcggatccttga

SEQ ID NO: 1817429 - DNA, 15 bp, Homo sapiens
cagcggatccttgat

SEQ ID NO: 1817430 - DNA, 15 bp, Homo sapiens
agcggatccttgatg

SEQ ID NO: 1817431 - DNA, 15 bp, Homo sapiens
gcggatccttgatgc

SEQ ID NO: 1817432 - DNA, 15 bp, Homo sapiens
cggatccttgatgct

SEQ ID NO: 1817433 - DNA, 15 bp, Homo sapiens
ggatccttgatgctg

SEQ ID NO: 1817434 - DNA, 15 bp, Homo sapiens
gatccttgatgctgc

SEQ ID NO: 1817435 - DNA, 15 bp, Homo sapiens
atccttgatgctgcc

SEQ ID NO: 1817436 - DNA, 15 bp, Homo sapiens
tccttgatgctgcct

SEQ ID NO: 1817437 - DNA, 15 bp, Homo sapiens
ccttgatgctgcctt

SEQ ID NO: 1817438 - DNA, 15 bp, Homo sapiens
cttgatgctgcctta

SEQ ID NO: 1817439 - DNA, 15 bp, Homo sapiens
ttgatgctgccttaa

SEQ ID NO: 1817440 - DNA, 15 bp, Homo sapiens
tgatgctgccttaag

SEQ ID NO: 1817441 - DNA, 15 bp, Homo sapiens
gatgctgccttaagt

SEQ ID NO: 1817442 - DNA, 15 bp, Homo sapiens
atgctgccttaagtc

SEQ ID NO: 1817443 - DNA, 15 bp, Homo sapiens
tgctgccttaagtcc

SEQ ID NO: 1817444 - DNA, 15 bp, Homo sapiens
gctgccttaagtccg

SEQ ID NO: 1817445 - DNA, 15 bp, Homo sapiens
ctgccttaagtccgg

SEQ ID NO: 1817446 - DNA, 15 bp, Homo sapiens
tgccttaagtccggc

SEQ ID NO: 1817447 - DNA, 15 bp, Homo sapiens
gccttaagtccggct

SEQ ID NO: 1817448 - DNA, 15 bp, Homo sapiens
ccttaagtccggctc

SEQ ID NO: 1817449 - DNA, 15 bp, Homo sapiens
cttaagtccggctca

SEQ ID NO: 1817450 - DNA, 15 bp, Homo sapiens
ttaagtccggctcag

SEQ ID NO: 1817451 - DNA, 15 bp, Homo sapiens
taagtccggctcaga

SEQ ID NO: 1817452 - DNA, 15 bp, Homo sapiens
aagtccggctcagag

SEQ ID NO: 1817453 - DNA, 15 bp, Homo sapiens
agtccggctcagagg

SEQ ID NO: 1817454 - DNA, 15 bp, Homo sapiens
gtccggctcagaggg

SEQ ID NO: 1817455 - DNA, 15 bp, Homo sapiens
tccggctcagagggg

SEQ ID NO: 1817456 - DNA, 15 bp, Homo sapiens
ccggctcagaggggc

SEQ ID NO: 1817457 - DNA, 15 bp, Homo sapiens
cggctcagaggggcg

SEQ ID NO: 1817458 - DNA, 15 bp, Homo sapiens
ggctcagaggggcgc

SEQ ID NO: 1817459 - DNA, 15 bp, Homo sapiens
gctcagaggggcgca

SEQ ID NO: 1817460 - DNA, 15 bp, Homo sapiens
ctcagaggggcgcag

SEQ ID NO: 1817461 - DNA, 15 bp, Homo sapiens
tcagaggggcgcagc

SEQ ID NO: 1817462 - DNA, 15 bp, Homo sapiens
cagaggggcgcagcg

SEQ ID NO: 1817463 - DNA, 15 bp, Homo sapiens
agaggggcgcagcgt

SEQ ID NO: 1817464 - DNA, 15 bp, Homo sapiens
gaggggcgcagcgtg

SEQ ID NO: 1817465 - DNA, 15 bp, Homo sapiens
aggggcgcagcgtgg

SEQ ID NO: 1817466 - DNA, 15 bp, Homo sapiens
ggggcgcagcgtggc

SEQ ID NO: 1817467 - DNA, 15 bp, Homo sapiens
gggcgcagcgtggcc

SEQ ID NO: 1817468 - DNA, 15 bp, Homo sapiens
ggcgcagcgtggcct

SEQ ID NO: 1817469 - DNA, 15 bp, Homo sapiens
gcgcagcgtggcctg

SEQ ID NO: 1817470 - DNA, 15 bp, Homo sapiens
cgcagcgtggcctgg

SEQ ID NO: 1817471 - DNA, 15 bp, Homo sapiens
gcagcgtggcctggg

SEQ ID NO: 1817472 - DNA, 15 bp, Homo sapiens
cagcgtggcctgggg

SEQ ID NO: 1817473 - DNA, 15 bp, Homo sapiens
agcgtggcctggggt

SEQ ID NO: 1817474 - DNA, 15 bp, Homo sapiens
gcgtggcctggggtc

SEQ ID NO: 1817475 - DNA, 15 bp, Homo sapiens
cgtggcctggggtcg

SEQ ID NO: 1817476 - DNA, 15 bp, Homo sapiens
gtggcctggggtcgc

SEQ ID NO: 1817477 - DNA, 15 bp, Homo sapiens
tggcctggggtcgct

SEQ ID NO: 1817478 - DNA, 15 bp, Homo sapiens
ggcctggggtcgcta

SEQ ID NO: 1817479 - DNA, 15 bp, Homo sapiens
gcctggggtcgctat

SEQ ID NO: 1817480 - DNA, 15 bp, Homo sapiens
cctggggtcgctatc

SEQ ID NO: 1817481 - DNA, 15 bp, Homo sapiens
ctggggtcgctatct

SEQ ID NO: 1817482 - DNA, 15 bp, Homo sapiens
tggggtcgctatctt

SEQ ID NO: 1817483 - DNA, 15 bp, Homo sapiens
ggggtcgctatcttc

SEQ ID NO: 1817484 - DNA, 15 bp, Homo sapiens
gggtcgctatcttcc

SEQ ID NO: 1817485 - DNA, 15 bp, Homo sapiens
ggtcgctatcttccc

SEQ ID NO: 1817486 - DNA, 15 bp, Homo sapiens
gtcgctatcttccca

SEQ ID NO: 1817487 - DNA, 15 bp, Homo sapiens
tcgctatcttcccat

SEQ ID NO: 1817488 - DNA, 15 bp, Homo sapiens
cgctatcttcccatc

SEQ ID NO: 1817489 - DNA, 15 bp, Homo sapiens
gctatcttcccatcc

SEQ ID NO: 1817490 - DNA, 15 bp, Homo sapiens
ctatcttcccatccg

SEQ ID NO: 1817491 - DNA, 15 bp, Homo sapiens
tatcttcccatccgg

SEQ ID NO: 1817492 - DNA, 15 bp, Homo sapiens
atcttcccatccgga

SEQ ID NO: 1817493 - DNA, 15 bp, Homo sapiens
tcttcccatccggaa

SEQ ID NO: 1817494 - DNA, 15 bp, Homo sapiens
cttcccatccggaac

SEQ ID NO: 1817495 - DNA, 15 bp, Homo sapiens
ttcccatccggaaca

SEQ ID NO: 1817496 - DNA, 15 bp, Homo sapiens
tcccatccggaacat

SEQ ID NO: 1817497 - DNA, 15 bp, Homo sapiens
cccatccggaacatc

SEQ ID NO: 1817498 - DNA, 15 bp, Homo sapiens
ccatccggaacatct

SEQ ID NO: 1817499 - DNA, 15 bp, Homo sapiens
catccggaacatctg

SEQ ID NO: 1817500 - DNA, 15 bp, Homo sapiens
atccggaacatctgc

SEQ ID NO: 1817501 - DNA, 15 bp, Homo sapiens
tccggaacatctgcc

SEQ ID NO: 1817502 - DNA, 15 bp, Homo sapiens
ccggaacatctgccc

SEQ ID NO: 1817503 - DNA, 15 bp, Homo sapiens
cggaacatctgccct

SEQ ID NO: 1817504 - DNA, 15 bp, Homo sapiens
ggaacatctgccctg

SEQ ID NO: 1817505 - DNA, 15 bp, Homo sapiens
gaacatctgccctgc

SEQ ID NO: 1817506 - DNA, 15 bp, Homo sapiens
aacatctgccctgct

SEQ ID NO: 1817507 - DNA, 15 bp, Homo sapiens
catctgccctgctgg

SEQ ID NO: 1817508 - DNA, 15 bp, Homo sapiens
atctgccctgctggg

SEQ ID NO: 1817509 - DNA, 15 bp, Homo sapiens
tctgccctgctgggg

SEQ ID NO: 1817510 - DNA, 15 bp, Homo sapiens
ctgccctgctggggg

SEQ ID NO: 1817511 - DNA, 15 bp, Homo sapiens
tgccctgctggggga

SEQ ID NO: 1817512 - DNA, 15 bp, Homo sapiens
gccctgctgggggac

SEQ ID NO: 1817513 - DNA, 15 bp, Homo sapiens
ccctgctgggggaca

SEQ ID NO: 1817514 - DNA, 15 bp, Homo sapiens
cctgctgggggacac

SEQ ID NO: 1817515 - DNA, 15 bp, Homo sapiens
ctgctgggggacact

SEQ ID NO: 1817516 - DNA, 15 bp, Homo sapiens
tgctgggggacacta

SEQ ID NO: 1817517 - DNA, 15 bp, Homo sapiens
gctgggggacactac

SEQ ID NO: 1817518 - DNA, 15 bp, Homo sapiens
ctgggggacactacg

SEQ ID NO: 1817519 - DNA, 15 bp, Homo sapiens
tgggggacactacgg

SEQ ID NO: 1817520 - DNA, 15 bp, Homo sapiens
gggggacactacggg

SEQ ID NO: 1817521 - DNA, 15 bp, Homo sapiens
ggggacactacgggc

SEQ ID NO: 1817522 - DNA, 15 bp, Homo sapiens
gggacactacgggcc

SEQ ID NO: 1817523 - DNA, 15 bp, Homo sapiens
ggacactacgggcct

SEQ ID NO: 1817524 - DNA, 15 bp, Homo sapiens
gacactacgggcctt

SEQ ID NO: 1817525 - DNA, 15 bp, Homo sapiens
acactacgggccttc

SEQ ID NO: 1817526 - DNA, 15 bp, Homo sapiens
cactacgggccttcc

SEQ ID NO: 1817527 - DNA, 15 bp, Homo sapiens
actacgggccttccc

SEQ ID NO: 1817528 - DNA, 15 bp, Homo sapiens
ctacgggccttccct

SEQ ID NO: 1817529 - DNA, 15 bp, Homo sapiens
tacgggccttccctt

SEQ ID NO: 1817530 - DNA, 15 bp, Homo sapiens
acgggccttcccttg

SEQ ID NO: 1817531 - DNA, 15 bp, Homo sapiens
cgggccttcccttgc

SEQ ID NO: 1817532 - DNA, 15 bp, Homo sapiens
gggccttcccttgcc

SEQ ID NO: 1817533 - DNA, 15 bp, Homo sapiens
ggccttcccttgcct

SEQ ID NO: 1817534 - DNA, 15 bp, Homo sapiens
gccttcccttgcctg

SEQ ID NO: 1817535 - DNA, 15 bp, Homo sapiens
ccttcccttgcctga

SEQ ID NO: 1817536 - DNA, 15 bp, Homo sapiens
cttcccttgcctgag

SEQ ID NO: 1817537 - DNA, 15 bp, Homo sapiens
ttcccttgcctgagg

SEQ ID NO: 1817538 - DNA, 15 bp, Homo sapiens
tcccttgcctgaggg

SEQ ID NO: 1817539 - DNA, 15 bp, Homo sapiens
cccttgcctgagggt

SEQ ID NO: 1817540 - DNA, 15 bp, Homo sapiens
ccttgcctgagggta

SEQ ID NO: 1817541 - DNA, 15 bp, Homo sapiens
cttgcctgagggtag

SEQ ID NO: 1817542 - DNA, 15 bp, Homo sapiens
ttgcctgagggtagg

SEQ ID NO: 1817543 - DNA, 15 bp, Homo sapiens
tgcctgagggtaggg

SEQ ID NO: 1817544 - DNA, 15 bp, Homo sapiens
gcctgagggtagggt

SEQ ID NO: 1817545 - DNA, 15 bp, Homo sapiens
cctgagggtagggtc

SEQ ID NO: 1817546 - DNA, 15 bp, Homo sapiens
ctgagggtagggtct

SEQ ID NO: 1817547 - DNA, 15 bp, Homo sapiens
tgagggtagggtctc

SEQ ID NO: 1817548 - DNA, 15 bp, Homo sapiens
gagggtagggtctca

SEQ ID NO: 1817549 - DNA, 15 bp, Homo sapiens
agggtagggtctcaa

SEQ ID NO: 1817550 - DNA, 15 bp, Homo sapiens
gggtagggtctcaag

SEQ ID NO: 1817551 - DNA, 15 bp, Homo sapiens
ggtagggtctcaagg

SEQ ID NO: 1817552 - DNA, 15 bp, Homo sapiens
gtagggtctcaaggt

SEQ ID NO: 1817553 - DNA, 15 bp, Homo sapiens
tagggtctcaaggtc

SEQ ID NO: 1817554 - DNA, 15 bp, Homo sapiens
agggtctcaaggtca

SEQ ID NO: 1817555 - DNA, 15 bp, Homo sapiens
gggtctcaaggtcac

SEQ ID NO: 1817556 - DNA, 15 bp, Homo sapiens
ggtctcaaggtcact

SEQ ID NO: 1817557 - DNA, 15 bp, Homo sapiens
gtctcaaggtcactt

SEQ ID NO: 1817558 - DNA, 15 bp, Homo sapiens
tctcaaggtcacttg

SEQ ID NO: 1817559 - DNA, 15 bp, Homo sapiens
ctcaaggtcacttgc

SEQ ID NO: 1817560 - DNA, 15 bp, Homo sapiens
tcaaggtcacttgcc

SEQ ID NO: 1817561 - DNA, 15 bp, Homo sapiens
caaggtcacttgccc

SEQ ID NO: 1817562 - DNA, 15 bp, Homo sapiens
aaggtcacttgcccc

SEQ ID NO: 1817563 - DNA, 15 bp, Homo sapiens
aggtcacttgccccc

SEQ ID NO: 1817564 - DNA, 15 bp, Homo sapiens
ggtcacttgccccca

SEQ ID NO: 1817565 - DNA, 15 bp, Homo sapiens
gtcacttgcccccag

SEQ ID NO: 1817566 - DNA, 15 bp, Homo sapiens
tcacttgcccccagc

SEQ ID NO: 1817567 - DNA, 15 bp, Homo sapiens
cacttgcccccagct

SEQ ID NO: 1817568 - DNA, 15 bp, Homo sapiens
acttgcccccagctt

SEQ ID NO: 1817569 - DNA, 15 bp, Homo sapiens
cttgcccccagcttg

SEQ ID NO: 1817570 - DNA, 15 bp, Homo sapiens
ttgcccccagcttga

SEQ ID NO: 1817571 - DNA, 15 bp, Homo sapiens
tgcccccagcttgac

SEQ ID NO: 1817572 - DNA, 15 bp, Homo sapiens
gcccccagcttgacc

SEQ ID NO: 1817573 - DNA, 15 bp, Homo sapiens
cccccagcttgacct

SEQ ID NO: 1817574 - DNA, 15 bp, Homo sapiens
ccccagcttgacctg

SEQ ID NO: 1817575 - DNA, 15 bp, Homo sapiens
cccagcttgacctgg

SEQ ID NO: 1817576 - DNA, 15 bp, Homo sapiens
ccagcttgacctggc

SEQ ID NO: 1817577 - DNA, 15 bp, Homo sapiens
cagcttgacctggcc

SEQ ID NO: 1817578 - DNA, 15 bp, Homo sapiens
agcttgacctggccg

SEQ ID NO: 1817579 - DNA, 15 bp, Homo sapiens
gcttgacctggccgg

SEQ ID NO: 1817580 - DNA, 15 bp, Homo sapiens
cttgacctggccgga

SEQ ID NO: 1817581 - DNA, 15 bp, Homo sapiens
ttgacctggccggag

SEQ ID NO: 1817582 - DNA, 15 bp, Homo sapiens
tgacctggccggagt

SEQ ID NO: 1817583 - DNA, 15 bp, Homo sapiens
gacctggccggagtg

SEQ ID NO: 1817584 - DNA, 15 bp, Homo sapiens
acctggccggagtgg

SEQ ID NO: 1817585 - DNA, 15 bp, Homo sapiens
cctggccggagtggc

SEQ ID NO: 1817586 - DNA, 15 bp, Homo sapiens
ctggccggagtggct

SEQ ID NO: 1817587 - DNA, 15 bp, Homo sapiens
tggccggagtggcta

SEQ ID NO: 1817588 - DNA, 15 bp, Homo sapiens
ggccggagtggctat

SEQ ID NO: 1817589 - DNA, 15 bp, Homo sapiens
gccggagtggctata

SEQ ID NO: 1817590 - DNA, 15 bp, Homo sapiens
ccggagtggctatag

SEQ ID NO: 1817591 - DNA, 15 bp, Homo sapiens
cggagtggctataga

SEQ ID NO: 1817592 - DNA, 15 bp, Homo sapiens
ggagtggctatagag

SEQ ID NO: 1817593 - DNA, 15 bp, Homo sapiens
gagtggctatagagg

SEQ ID NO: 1817594 - DNA, 15 bp, Homo sapiens
agtggctatagagga

SEQ ID NO: 1817595 - DNA, 15 bp, Homo sapiens
gtggctatagaggac

SEQ ID NO: 1817596 - DNA, 15 bp, Homo sapiens
tggctatagaggact

SEQ ID NO: 1817597 - DNA, 15 bp, Homo sapiens
ggctatagaggactt

SEQ ID NO: 1817598 - DNA, 15 bp, Homo sapiens
gctatagaggacttt

SEQ ID NO: 1817599 - DNA, 15 bp, Homo sapiens
ctatagaggactttg

SEQ ID NO: 1817600 - DNA, 15 bp, Homo sapiens
tatagaggactttgt

SEQ ID NO: 1817601 - DNA, 15 bp, Homo sapiens
atagaggactttgtc

SEQ ID NO: 1817602 - DNA, 15 bp, Homo sapiens
tagaggactttgtcc

SEQ ID NO: 1817603 - DNA, 15 bp, Homo sapiens
agaggactttgtccc

SEQ ID NO: 1817604 - DNA, 15 bp, Homo sapiens
gaggactttgtccct

SEQ ID NO: 1817605 - DNA, 15 bp, Homo sapiens
aggactttgtccctg

SEQ ID NO: 1817606 - DNA, 15 bp, Homo sapiens
ggactttgtccctgc

SEQ ID NO: 1817607 - DNA, 15 bp, Homo sapiens
gactttgtccctgca

SEQ ID NO: 1817608 - DNA, 15 bp, Homo sapiens
actttgtccctgcag

SEQ ID NO: 1817609 - DNA, 15 bp, Homo sapiens
ctttgtccctgcaga

SEQ ID NO: 1817610 - DNA, 15 bp, Homo sapiens
tttgtccctgcagac

SEQ ID NO: 1817611 - DNA, 15 bp, Homo sapiens
ttgtccctgcagact

SEQ ID NO: 1817612 - DNA, 15 bp, Homo sapiens
tgtccctgcagactg

SEQ ID NO: 1817613 - DNA, 15 bp, Homo sapiens
gtccctgcagactgc

SEQ ID NO: 1817614 - DNA, 15 bp, Homo sapiens
tccctgcagactgca

SEQ ID NO: 1817615 - DNA, 15 bp, Homo sapiens
ccctgcagactgcag

SEQ ID NO: 1817616 - DNA, 15 bp, Homo sapiens
cctgcagactgcagc

SEQ ID NO: 1817617 - DNA, 15 bp, Homo sapiens
ctgcagactgcagca

SEQ ID NO: 1817618 - DNA, 15 bp, Homo sapiens
tgcagactgcagcag

SEQ ID NO: 1817619 - DNA, 15 bp, Homo sapiens
gcagactgcagcagc

SEQ ID NO: 1817620 - DNA, 15 bp, Homo sapiens
cagactgcagcagca

SEQ ID NO: 1817621 - DNA, 15 bp, Homo sapiens
agactgcagcagcag

SEQ ID NO: 1817622 - DNA, 15 bp, Homo sapiens
gactgcagcagcaga

SEQ ID NO: 1817623 - DNA, 15 bp, Homo sapiens
actgcagcagcagag

SEQ ID NO: 1817624 - DNA, 15 bp, Homo sapiens
ctgcagcagcagaga

SEQ ID NO: 1817625 - DNA, 15 bp, Homo sapiens
tgcagcagcagagat

SEQ ID NO: 1817626 - DNA, 15 bp, Homo sapiens
gcagcagcagagatg

SEQ ID NO: 1817627 - DNA, 15 bp, Homo sapiens
cagcagcagagatga

SEQ ID NO: 1817628 - DNA, 15 bp, Homo sapiens
agcagcagagatgac

SEQ ID NO: 1817629 - DNA, 15 bp, Homo sapiens
gcagcagagatgaca

SEQ ID NO: 1817630 - DNA, 15 bp, Homo sapiens
cagcagagatgacac

SEQ ID NO: 1817631 - DNA, 15 bp, Homo sapiens
agcagagatgacact

SEQ ID NO: 1817632 - DNA, 15 bp, Homo sapiens
gcagagatgacactg

SEQ ID NO: 1817633 - DNA, 15 bp, Homo sapiens
cagagatgacactgt

SEQ ID NO: 1817634 - DNA, 15 bp, Homo sapiens
agagatgacactgtc

SEQ ID NO: 1817635 - DNA, 15 bp, Homo sapiens
gagatgacactgtct

SEQ ID NO: 1817636 - DNA, 15 bp, Homo sapiens
agatgacactgtctc

SEQ ID NO: 1817637 - DNA, 15 bp, Homo sapiens
gatgacactgtctct

SEQ ID NO: 1817638 - DNA, 15 bp, Homo sapiens
atgacactgtctctg

SEQ ID NO: 1817639 - DNA, 15 bp, Homo sapiens
tgacactgtctctga

SEQ ID NO: 1817640 - DNA, 15 bp, Homo sapiens
gacactgtctctgag

SEQ ID NO: 1817641 - DNA, 15 bp, Homo sapiens
acactgtctctgagt

SEQ ID NO: 1817642 - DNA, 15 bp, Homo sapiens
cactgtctctgagtg

SEQ ID NO: 1817643 - DNA, 15 bp, Homo sapiens
actgtctctgagtgc

SEQ ID NO: 1817644 - DNA, 15 bp, Homo sapiens
ctgtctctgagtgca

SEQ ID NO: 1817645 - DNA, 15 bp, Homo sapiens
tgtctctgagtgcag

SEQ ID NO: 1817646 - DNA, 15 bp, Homo sapiens
gtctctgagtgcaga

SEQ ID NO: 1817647 - DNA, 15 bp, Homo sapiens
tctctgagtgcagag

SEQ ID NO: 1817648 - DNA, 15 bp, Homo sapiens
ctctgagtgcagaga

SEQ ID NO: 1817649 - DNA, 15 bp, Homo sapiens
tctgagtgcagagat

SEQ ID NO: 1817650 - DNA, 15 bp, Homo sapiens
ctgagtgcagagatg

SEQ ID NO: 1817651 - DNA, 15 bp, Homo sapiens
tgagtgcagagatgg

SEQ ID NO: 1817652 - DNA, 15 bp, Homo sapiens
gagtgcagagatggg

SEQ ID NO: 1817653 - DNA, 15 bp, Homo sapiens
agtgcagagatgggg

SEQ ID NO: 1817654 - DNA, 15 bp, Homo sapiens
gtgcagagatggggg

SEQ ID NO: 1817655 - DNA, 15 bp, Homo sapiens
tgcagagatgggggc

SEQ ID NO: 1817656 - DNA, 15 bp, Homo sapiens
gcagagatgggggca

SEQ ID NO: 1817657 - DNA, 15 bp, Homo sapiens
cagagatgggggcag

SEQ ID NO: 1817658 - DNA, 15 bp, Homo sapiens
agagatgggggcagg

SEQ ID NO: 1817659 - DNA, 15 bp, Homo sapiens
gagatgggggcaggg

SEQ ID NO: 1817660 - DNA, 15 bp, Homo sapiens
agatgggggcaggga

SEQ ID NO: 1817661 - DNA, 15 bp, Homo sapiens
gatgggggcagggag

SEQ ID NO: 1817662 - DNA, 15 bp, Homo sapiens
atgggggcagggagc

SEQ ID NO: 1817663 - DNA, 15 bp, Homo sapiens
tgggggcagggagct

SEQ ID NO: 1817664 - DNA, 15 bp, Homo sapiens
gggggcagggagctg

SEQ ID NO: 1817665 - DNA, 15 bp, Homo sapiens
ggggcagggagctgg

SEQ ID NO: 1817666 - DNA, 15 bp, Homo sapiens
gggcagggagctggg

SEQ ID NO: 1817667 - DNA, 15 bp, Homo sapiens
ggcagggagctggga

SEQ ID NO: 1817668 - DNA, 15 bp, Homo sapiens
gcagggagctgggag

SEQ ID NO: 1817669 - DNA, 15 bp, Homo sapiens
cagggagctgggaga

SEQ ID NO: 1817670 - DNA, 15 bp, Homo sapiens
agggagctgggagag

SEQ ID NO: 1817671 - DNA, 15 bp, Homo sapiens
gggagctgggagagg

SEQ ID NO: 1817672 - DNA, 15 bp, Homo sapiens
ggagctgggagaggg

SEQ ID NO: 1817673 - DNA, 15 bp, Homo sapiens
gagctgggagagggt

SEQ ID NO: 1817674 - DNA, 15 bp, Homo sapiens
agctgggagagggtt

SEQ ID NO: 1817675 - DNA, 15 bp, Homo sapiens
gctgggagagggttc

SEQ ID NO: 1817676 - DNA, 15 bp, Homo sapiens
ctgggagagggttca

SEQ ID NO: 1817677 - DNA, 15 bp, Homo sapiens
tgggagagggttcaa

SEQ ID NO: 1817678 - DNA, 15 bp, Homo sapiens
gggagagggttcaag

SEQ ID NO: 1817679 - DNA, 15 bp, Homo sapiens
ggagagggttcaagc

SEQ ID NO: 1817680 - DNA, 15 bp, Homo sapiens
gagagggttcaagct

SEQ ID NO: 1817681 - DNA, 15 bp, Homo sapiens
agagggttcaagcta

SEQ ID NO: 1817682 - DNA, 15 bp, Homo sapiens
gagggttcaagctac

SEQ ID NO: 1817683 - DNA, 15 bp, Homo sapiens
agggttcaagctact

SEQ ID NO: 1817684 - DNA, 15 bp, Homo sapiens
gggttcaagctactg

SEQ ID NO: 1817685 - DNA, 15 bp, Homo sapiens
ggttcaagctactgg

SEQ ID NO: 1817686 - DNA, 15 bp, Homo sapiens
gttcaagctactgga

SEQ ID NO: 1817687 - DNA, 15 bp, Homo sapiens
ttcaagctactggaa

SEQ ID NO: 1817688 - DNA, 15 bp, Homo sapiens
tcaagctactggaac

SEQ ID NO: 1817689 - DNA, 15 bp, Homo sapiens
caagctactggaaca

SEQ ID NO: 1817690 - DNA, 15 bp, Homo sapiens
aagctactggaacag

SEQ ID NO: 1817691 - DNA, 15 bp, Homo sapiens
agctactggaacagc

SEQ ID NO: 1817692 - DNA, 15 bp, Homo sapiens
gctactggaacagct

SEQ ID NO: 1817693 - DNA, 15 bp, Homo sapiens
ctactggaacagctt

SEQ ID NO: 1817694 - DNA, 15 bp, Homo sapiens
tactggaacagcttc

SEQ ID NO: 1817695 - DNA, 15 bp, Homo sapiens
actggaacagcttca

SEQ ID NO: 1817696 - DNA, 15 bp, Homo sapiens
ctggaacagcttcag

SEQ ID NO: 1817697 - DNA, 15 bp, Homo sapiens
tggaacagcttcaga

SEQ ID NO: 1817698 - DNA, 15 bp, Homo sapiens
ggaacagcttcagaa

SEQ ID NO: 1817699 - DNA, 15 bp, Homo sapiens
gaacagcttcagaac

SEQ ID NO: 1817700 - DNA, 15 bp, Homo sapiens
aacagcttcagaaca

SEQ ID NO: 1817701 - DNA, 15 bp, Homo sapiens
acagcttcagaacaa

SEQ ID NO: 1817702 - DNA, 15 bp, Homo sapiens
cagcttcagaacaac

SEQ ID NO: 1817703 - DNA, 15 bp, Homo sapiens
agcttcagaacaact

SEQ ID NO: 1817704 - DNA, 15 bp, Homo sapiens
gcttcagaacaacta

SEQ ID NO: 1817705 - DNA, 15 bp, Homo sapiens
cttcagaacaactag

SEQ ID NO: 1817706 - DNA, 15 bp, Homo sapiens
ttcagaacaactagg

SEQ ID NO: 1817707 - DNA, 15 bp, Homo sapiens
tcagaacaactaggg

SEQ ID NO: 1817708 - DNA, 15 bp, Homo sapiens
cagaacaactagggt

SEQ ID NO: 1817709 - DNA, 15 bp, Homo sapiens
agaacaactagggta

SEQ ID NO: 1817710 - DNA, 15 bp, Homo sapiens
gaacaactagggtac

SEQ ID NO: 1817711 - DNA, 15 bp, Homo sapiens
aacaactagggtact

SEQ ID NO: 1817712 - DNA, 15 bp, Homo sapiens
acaactagggtacta

SEQ ID NO: 1817713 - DNA, 15 bp, Homo sapiens
caactagggtactag

SEQ ID NO: 1817714 - DNA, 15 bp, Homo sapiens
aactagggtactagg

SEQ ID NO: 1817715 - DNA, 15 bp, Homo sapiens
actagggtactagga

SEQ ID NO: 1817716 - DNA, 15 bp, Homo sapiens
ctagggtactaggaa

SEQ ID NO: 1817717 - DNA, 15 bp, Homo sapiens
tagggtactaggaac

SEQ ID NO: 1817718 - DNA, 15 bp, Homo sapiens
agggtactaggaact

SEQ ID NO: 1817719 - DNA, 15 bp, Homo sapiens
gggtactaggaactg

SEQ ID NO: 1817720 - DNA, 15 bp, Homo sapiens
ggtactaggaactgc

SEQ ID NO: 1817721 - DNA, 15 bp, Homo sapiens
gtactaggaactgct

SEQ ID NO: 1817722 - DNA, 15 bp, Homo sapiens
tactaggaactgctg

SEQ ID NO: 1817723 - DNA, 15 bp, Homo sapiens
actaggaactgctgt

SEQ ID NO: 1817724 - DNA, 15 bp, Homo sapiens
ctaggaactgctgtg

SEQ ID NO: 1817725 - DNA, 15 bp, Homo sapiens
taggaactgctgtgt

SEQ ID NO: 1817726 - DNA, 15 bp, Homo sapiens
aggaactgctgtgtc

SEQ ID NO: 1817727 - DNA, 15 bp, Homo sapiens
ggaactgctgtgtca

SEQ ID NO: 1817728 - DNA, 15 bp, Homo sapiens
gaactgctgtgtcag

SEQ ID NO: 1817729 - DNA, 15 bp, Homo sapiens
aactgctgtgtcagg

SEQ ID NO: 1817730 - DNA, 15 bp, Homo sapiens
actgctgtgtcaggg

SEQ ID NO: 1817731 - DNA, 15 bp, Homo sapiens
ctgctgtgtcaggga

SEQ ID NO: 1817732 - DNA, 15 bp, Homo sapiens
tgctgtgtcagggag

SEQ ID NO: 1817733 - DNA, 15 bp, Homo sapiens
gctgtgtcagggaga

SEQ ID NO: 1817734 - DNA, 15 bp, Homo sapiens
ctgtgtcagggagaa

SEQ ID NO: 1817735 - DNA, 15 bp, Homo sapiens
tgtgtcagggagaag

SEQ ID NO: 1817736 - DNA, 15 bp, Homo sapiens
gtgtcagggagaagg

SEQ ID NO: 1817737 - DNA, 15 bp, Homo sapiens
tgtcagggagaaggg

SEQ ID NO: 1817738 - DNA, 15 bp, Homo sapiens
gtcagggagaagggg

SEQ ID NO: 1817739 - DNA, 15 bp, Homo sapiens
tcagggagaaggggc

SEQ ID NO: 1817740 - DNA, 15 bp, Homo sapiens
cagggagaaggggct

SEQ ID NO: 1817741 - DNA, 15 bp, Homo sapiens
agggagaaggggctc

SEQ ID NO: 1817742 - DNA, 15 bp, Homo sapiens
gggagaaggggctca

SEQ ID NO: 1817743 - DNA, 15 bp, Homo sapiens
ggagaaggggctcaa

SEQ ID NO: 1817744 - DNA, 15 bp, Homo sapiens
gagaaggggctcaag

SEQ ID NO: 1817745 - DNA, 15 bp, Homo sapiens
agaaggggctcaagg

SEQ ID NO: 1817746 - DNA, 15 bp, Homo sapiens
gaaggggctcaagga

SEQ ID NO: 1817747 - DNA, 15 bp, Homo sapiens
aaggggctcaaggac

SEQ ID NO: 1817748 - DNA, 15 bp, Homo sapiens
aggggctcaaggact

SEQ ID NO: 1817749 - DNA, 15 bp, Homo sapiens
ggggctcaaggactc

SEQ ID NO: 1817750 - DNA, 15 bp, Homo sapiens
gggctcaaggactcg

SEQ ID NO: 1817751 - DNA, 15 bp, Homo sapiens
ggctcaaggactcgc

SEQ ID NO: 1817752 - DNA, 15 bp, Homo sapiens
gctcaaggactcgca

SEQ ID NO: 1817753 - DNA, 15 bp, Homo sapiens
ctcaaggactcgcag

SEQ ID NO: 1817754 - DNA, 15 bp, Homo sapiens
tcaaggactcgcagg

SEQ ID NO: 1817755 - DNA, 15 bp, Homo sapiens
caaggactcgcaggc

SEQ ID NO: 1817756 - DNA, 15 bp, Homo sapiens
aaggactcgcaggcc

SEQ ID NO: 1817757 - DNA, 15 bp, Homo sapiens
aggactcgcaggcct

SEQ ID NO: 1817758 - DNA, 15 bp, Homo sapiens
ggactcgcaggcctg

SEQ ID NO: 1817759 - DNA, 15 bp, Homo sapiens
gactcgcaggcctgg

SEQ ID NO: 1817760 - DNA, 15 bp, Homo sapiens
actcgcaggcctggg

SEQ ID NO: 1817761 - DNA, 15 bp, Homo sapiens
ctcgcaggcctggga

SEQ ID NO: 1817762 - DNA, 15 bp, Homo sapiens
tcgcaggcctgggag

SEQ ID NO: 1817763 - DNA, 15 bp, Homo sapiens
cgcaggcctgggagg

SEQ ID NO: 1817764 - DNA, 15 bp, Homo sapiens
gcaggcctgggagga

SEQ ID NO: 1817765 - DNA, 15 bp, Homo sapiens
caggcctgggaggag

SEQ ID NO: 1817766 - DNA, 15 bp, Homo sapiens
aggcctgggaggagg

SEQ ID NO: 1817767 - DNA, 15 bp, Homo sapiens
ggcctgggaggaggg

SEQ ID NO: 1817768 - DNA, 15 bp, Homo sapiens
gcctgggaggagggg

SEQ ID NO: 1817769 - DNA, 15 bp, Homo sapiens
cctgggaggaggggc

SEQ ID NO: 1817770 - DNA, 15 bp, Homo sapiens
ctgggaggaggggcc

SEQ ID NO: 1817771 - DNA, 15 bp, Homo sapiens
tgggaggaggggcct

SEQ ID NO: 1817772 - DNA, 15 bp, Homo sapiens
gggaggaggggccta

SEQ ID NO: 1817773 - DNA, 15 bp, Homo sapiens
ggaggaggggcctag

SEQ ID NO: 1817774 - DNA, 15 bp, Homo sapiens
gaggaggggcctagg

SEQ ID NO: 1817775 - DNA, 15 bp, Homo sapiens
aggaggggcctaggc

SEQ ID NO: 1817776 - DNA, 15 bp, Homo sapiens
ggaggggcctaggcc

SEQ ID NO: 1817777 - DNA, 15 bp, Homo sapiens
gaggggcctaggcca

SEQ ID NO: 1817778 - DNA, 15 bp, Homo sapiens
aggggcctaggccag

SEQ ID NO: 1817779 - DNA, 15 bp, Homo sapiens
ggggcctaggccagc

SEQ ID NO: 1817780 - DNA, 15 bp, Homo sapiens
gggcctaggccagcc

SEQ ID NO: 1817781 - DNA, 15 bp, Homo sapiens
ggcctaggccagcca

SEQ ID NO: 1817782 - DNA, 15 bp, Homo sapiens
gcctaggccagccat

SEQ ID NO: 1817783 - DNA, 15 bp, Homo sapiens
cctaggccagccatg

SEQ ID NO: 1817784 - DNA, 15 bp, Homo sapiens
ctaggccagccatgg

SEQ ID NO: 1817785 - DNA, 15 bp, Homo sapiens
taggccagccatggg

SEQ ID NO: 1817786 - DNA, 15 bp, Homo sapiens
aggccagccatggga

SEQ ID NO: 1817787 - DNA, 15 bp, Homo sapiens
ggccagccatgggag

SEQ ID NO: 1817788 - DNA, 15 bp, Homo sapiens
gccagccatgggagt

SEQ ID NO: 1817789 - DNA, 15 bp, Homo sapiens
ccagccatgggagtt

SEQ ID NO: 1817790 - DNA, 15 bp, Homo sapiens
cagccatgggagttg

SEQ ID NO: 1817791 - DNA, 15 bp, Homo sapiens
agccatgggagttgg

SEQ ID NO: 1817792 - DNA, 15 bp, Homo sapiens
gccatgggagttggg

SEQ ID NO: 1817793 - DNA, 15 bp, Homo sapiens
ccatgggagttgggt

SEQ ID NO: 1817794 - DNA, 15 bp, Homo sapiens
catgggagttgggtc

SEQ ID NO: 1817795 - DNA, 15 bp, Homo sapiens
atgggagttgggtca

SEQ ID NO: 1817796 - DNA, 15 bp, Homo sapiens
tgggagttgggtcac

SEQ ID NO: 1817797 - DNA, 15 bp, Homo sapiens
gggagttgggtcacc

SEQ ID NO: 1817798 - DNA, 15 bp, Homo sapiens
ggagttgggtcacct

SEQ ID NO: 1817799 - DNA, 15 bp, Homo sapiens
gagttgggtcacctg

SEQ ID NO: 1817800 - DNA, 15 bp, Homo sapiens
agttgggtcacctgt

SEQ ID NO: 1817801 - DNA, 15 bp, Homo sapiens
gttgggtcacctgtg

SEQ ID NO: 1817802 - DNA, 15 bp, Homo sapiens
ttgggtcacctgtgt

SEQ ID NO: 1817803 - DNA, 15 bp, Homo sapiens
tgggtcacctgtgtc

SEQ ID NO: 1817804 - DNA, 15 bp, Homo sapiens
gggtcacctgtgtct

SEQ ID NO: 1817805 - DNA, 15 bp, Homo sapiens
ggtcacctgtgtctg

SEQ ID NO: 1817806 - DNA, 15 bp, Homo sapiens
gtcacctgtgtctga

SEQ ID NO: 1817807 - DNA, 15 bp, Homo sapiens
tcacctgtgtctgag

SEQ ID NO: 1817808 - DNA, 15 bp, Homo sapiens
cacctgtgtctgagg

SEQ ID NO: 1817809 - DNA, 15 bp, Homo sapiens
acctgtgtctgagga

SEQ ID NO: 1817810 - DNA, 15 bp, Homo sapiens
cctgtgtctgaggac

SEQ ID NO: 1817811 - DNA, 15 bp, Homo sapiens
ctgtgtctgaggact

SEQ ID NO: 1817812 - DNA, 15 bp, Homo sapiens
tgtgtctgaggactt

SEQ ID NO: 1817813 - DNA, 15 bp, Homo sapiens
gtgtctgaggacttg

SEQ ID NO: 1817814 - DNA, 15 bp, Homo sapiens
tgtctgaggacttgg

SEQ ID NO: 1817815 - DNA, 15 bp, Homo sapiens
gtctgaggacttggt

SEQ ID NO: 1817816 - DNA, 15 bp, Homo sapiens
tctgaggacttggtg

SEQ ID NO: 1817817 - DNA, 15 bp, Homo sapiens
ctgaggacttggtgc

SEQ ID NO: 1817818 - DNA, 15 bp, Homo sapiens
tgaggacttggtgct

SEQ ID NO: 1817819 - DNA, 15 bp, Homo sapiens
gaggacttggtgctg

SEQ ID NO: 1817820 - DNA, 15 bp, Homo sapiens
aggacttggtgctgt

SEQ ID NO: 1817821 - DNA, 15 bp, Homo sapiens
ggacttggtgctgtc

SEQ ID NO: 1817822 - DNA, 15 bp, Homo sapiens
gacttggtgctgtct

SEQ ID NO: 1817823 - DNA, 15 bp, Homo sapiens
acttggtgctgtctg

SEQ ID NO: 1817824 - DNA, 15 bp, Homo sapiens
cttggtgctgtctgg

SEQ ID NO: 1817825 - DNA, 15 bp, Homo sapiens
ttggtgctgtctgga

SEQ ID NO: 1817826 - DNA, 15 bp, Homo sapiens
tggtgctgtctggat

SEQ ID NO: 1817827 - DNA, 15 bp, Homo sapiens
ggtgctgtctggatt

SEQ ID NO: 1817828 - DNA, 15 bp, Homo sapiens
gtgctgtctggattt

SEQ ID NO: 1817829 - DNA, 15 bp, Homo sapiens
tgctgtctggatttt

SEQ ID NO: 1817830 - DNA, 15 bp, Homo sapiens
gctgtctggattttg

SEQ ID NO: 1817831 - DNA, 15 bp, Homo sapiens
ctgtctggattttgc

SEQ ID NO: 1817832 - DNA, 15 bp, Homo sapiens
tgtctggattttgcc

SEQ ID NO: 1817833 - DNA, 15 bp, Homo sapiens
gtctggattttgcca

SEQ ID NO: 1817834 - DNA, 15 bp, Homo sapiens
tctggattttgccaa

SEQ ID NO: 1817835 - DNA, 15 bp, Homo sapiens
ctggattttgccaac

SEQ ID NO: 1817836 - DNA, 15 bp, Homo sapiens
tggattttgccaacc

SEQ ID NO: 1817837 - DNA, 15 bp, Homo sapiens
ggattttgccaacct

SEQ ID NO: 1817838 - DNA, 15 bp, Homo sapiens
gattttgccaaccta

SEQ ID NO: 1817839 - DNA, 15 bp, Homo sapiens
attttgccaacctag

SEQ ID NO: 1817840 - DNA, 15 bp, Homo sapiens
ttttgccaacctagg

SEQ ID NO: 1817841 - DNA, 15 bp, Homo sapiens
tttgccaacctaggg

SEQ ID NO: 1817842 - DNA, 15 bp, Homo sapiens
ttgccaacctagggc

SEQ ID NO: 1817843 - DNA, 15 bp, Homo sapiens
tgccaacctagggct

SEQ ID NO: 1817844 - DNA, 15 bp, Homo sapiens
gccaacctagggctg

SEQ ID NO: 1817845 - DNA, 15 bp, Homo sapiens
ccaacctagggctgg

SEQ ID NO: 1817846 - DNA, 15 bp, Homo sapiens
caacctagggctggg

SEQ ID NO: 1817847 - DNA, 15 bp, Homo sapiens
aacctagggctgggg

SEQ ID NO: 1817848 - DNA, 15 bp, Homo sapiens
acctagggctggggt

SEQ ID NO: 1817849 - DNA, 15 bp, Homo sapiens
cctagggctggggtc

SEQ ID NO: 1817850 - DNA, 15 bp, Homo sapiens
ctagggctggggtca

SEQ ID NO: 1817851 - DNA, 15 bp, Homo sapiens
tagggctggggtcag

SEQ ID NO: 1817852 - DNA, 15 bp, Homo sapiens
agggctggggtcagc

SEQ ID NO: 1817853 - DNA, 15 bp, Homo sapiens
gggctggggtcagct

SEQ ID NO: 1817854 - DNA, 15 bp, Homo sapiens
ggctggggtcagctg

SEQ ID NO: 1817855 - DNA, 15 bp, Homo sapiens
gctggggtcagctga

SEQ ID NO: 1817856 - DNA, 15 bp, Homo sapiens
ctggggtcagctgat

SEQ ID NO: 1817857 - DNA, 15 bp, Homo sapiens
tggggtcagctgatg

SEQ ID NO: 1817858 - DNA, 15 bp, Homo sapiens
ggggtcagctgatgc

SEQ ID NO: 1817859 - DNA, 15 bp, Homo sapiens
gggtcagctgatgcc

SEQ ID NO: 1817860 - DNA, 15 bp, Homo sapiens
ggtcagctgatgccc

SEQ ID NO: 1817861 - DNA, 15 bp, Homo sapiens
gtcagctgatgccca

SEQ ID NO: 1817862 - DNA, 15 bp, Homo sapiens
tcagctgatgcccac

SEQ ID NO: 1817863 - DNA, 15 bp, Homo sapiens
cagctgatgcccacc

SEQ ID NO: 1817864 - DNA, 15 bp, Homo sapiens
agctgatgcccacca

SEQ ID NO: 1817865 - DNA, 15 bp, Homo sapiens
gctgatgcccaccac

SEQ ID NO: 1817866 - DNA, 15 bp, Homo sapiens
ctgatgcccaccacg

SEQ ID NO: 1817867 - DNA, 15 bp, Homo sapiens
tgatgcccaccacga

SEQ ID NO: 1817868 - DNA, 15 bp, Homo sapiens
gatgcccaccacgac

SEQ ID NO: 1817869 - DNA, 15 bp, Homo sapiens
atgcccaccacgact

SEQ ID NO: 1817870 - DNA, 15 bp, Homo sapiens
tgcccaccacgactc

SEQ ID NO: 1817871 - DNA, 15 bp, Homo sapiens
gcccaccacgactcc

SEQ ID NO: 1817872 - DNA, 15 bp, Homo sapiens
cccaccacgactccc

SEQ ID NO: 1817873 - DNA, 15 bp, Homo sapiens
ccaccacgactcccg

SEQ ID NO: 1817874 - DNA, 15 bp, Homo sapiens
caccacgactcccga

SEQ ID NO: 1817875 - DNA, 15 bp, Homo sapiens
accacgactcccgag

SEQ ID NO: 1817876 - DNA, 15 bp, Homo sapiens
ccacgactcccgagc

SEQ ID NO: 1817877 - DNA, 15 bp, Homo sapiens
cacgactcccgagcc

SEQ ID NO: 1817878 - DNA, 15 bp, Homo sapiens
acgactcccgagcct

SEQ ID NO: 1817879 - DNA, 15 bp, Homo sapiens
cgactcccgagcctc

SEQ ID NO: 1817880 - DNA, 15 bp, Homo sapiens
gactcccgagcctcc

SEQ ID NO: 1817881 - DNA, 15 bp, Homo sapiens
actcccgagcctcca

SEQ ID NO: 1817882 - DNA, 15 bp, Homo sapiens
ctcccgagcctccag

SEQ ID NO: 1817883 - DNA, 15 bp, Homo sapiens
tcccgagcctccagg

SEQ ID NO: 1817884 - DNA, 15 bp, Homo sapiens
cccgagcctccagga

SEQ ID NO: 1817885 - DNA, 15 bp, Homo sapiens
ccgagcctccaggaa

SEQ ID NO: 1817886 - DNA, 15 bp, Homo sapiens
cgagcctccaggaac

SEQ ID NO: 1817887 - DNA, 15 bp, Homo sapiens
gagcctccaggaact

SEQ ID NO: 1817888 - DNA, 15 bp, Homo sapiens
agcctccaggaactg

SEQ ID NO: 1817889 - DNA, 15 bp, Homo sapiens
gcctccaggaactga

SEQ ID NO: 1817890 - DNA, 15 bp, Homo sapiens
cctccaggaactgaa

SEQ ID NO: 1817891 - DNA, 15 bp, Homo sapiens
ctccaggaactgaaa

SEQ ID NO: 1817892 - DNA, 15 bp, Homo sapiens
tccaggaactgaaac

SEQ ID NO: 1817893 - DNA, 15 bp, Homo sapiens
ccaggaactgaaacc

SEQ ID NO: 1817894 - DNA, 15 bp, Homo sapiens
caggaactgaaaccc

SEQ ID NO: 1817895 - DNA, 15 bp, Homo sapiens
aggaactgaaaccct

SEQ ID NO: 1817896 - DNA, 15 bp, Homo sapiens
ggaactgaaaccctg

SEQ ID NO: 1817897 - DNA, 15 bp, Homo sapiens
gaactgaaaccctgt

SEQ ID NO: 1817898 - DNA, 15 bp, Homo sapiens
aactgaaaccctgtc

SEQ ID NO: 1817899 - DNA, 15 bp, Homo sapiens
actgaaaccctgtct

SEQ ID NO: 1817900 - DNA, 15 bp, Homo sapiens
ctgaaaccctgtctg

SEQ ID NO: 1817901 - DNA, 15 bp, Homo sapiens
tgaaaccctgtctgc

SEQ ID NO: 1817902 - DNA, 15 bp, Homo sapiens
gaaaccctgtctgcc

SEQ ID NO: 1817903 - DNA, 15 bp, Homo sapiens
aaaccctgtctgccc

SEQ ID NO: 1817904 - DNA, 15 bp, Homo sapiens
aaccctgtctgcccc

SEQ ID NO: 1817905 - DNA, 15 bp, Homo sapiens
accctgtctgccccc

SEQ ID NO: 1817906 - DNA, 15 bp, Homo sapiens
ccctgtctgccccca

SEQ ID NO: 1817907 - DNA, 15 bp, Homo sapiens
cctgtctgcccccag

SEQ ID NO: 1817908 - DNA, 15 bp, Homo sapiens
ctgtctgcccccagg

SEQ ID NO: 1817909 - DNA, 15 bp, Homo sapiens
tgtctgcccccaggg

SEQ ID NO: 1817910 - DNA, 15 bp, Homo sapiens
gtctgcccccagggt

SEQ ID NO: 1817911 - DNA, 15 bp, Homo sapiens
tctgcccccagggtc

SEQ ID NO: 1817912 - DNA, 15 bp, Homo sapiens
ctgcccccagggtct

SEQ ID NO: 1817913 - DNA, 15 bp, Homo sapiens
tgcccccagggtctg

SEQ ID NO: 1817914 - DNA, 15 bp, Homo sapiens
gcccccagggtctgg

SEQ ID NO: 1817915 - DNA, 15 bp, Homo sapiens
cccccagggtctggg

SEQ ID NO: 1817916 - DNA, 15 bp, Homo sapiens
ccccagggtctgggg

SEQ ID NO: 1817917 - DNA, 15 bp, Homo sapiens
cccagggtctgggga

SEQ ID NO: 1817918 - DNA, 15 bp, Homo sapiens
ccagggtctggggaa

SEQ ID NO: 1817919 - DNA, 15 bp, Homo sapiens
cagggtctggggaag

SEQ ID NO: 1817920 - DNA, 15 bp, Homo sapiens
agggtctggggaagg

SEQ ID NO: 1817921 - DNA, 15 bp, Homo sapiens
gggtctggggaagga

SEQ ID NO: 1817922 - DNA, 15 bp, Homo sapiens
ggtctggggaaggag

SEQ ID NO: 1817923 - DNA, 15 bp, Homo sapiens
gtctggggaaggagg

SEQ ID NO: 1817924 - DNA, 15 bp, Homo sapiens
tctggggaaggaggc

SEQ ID NO: 1817925 - DNA, 15 bp, Homo sapiens
ctggggaaggaggct

SEQ ID NO: 1817926 - DNA, 15 bp, Homo sapiens
tggggaaggaggctg

SEQ ID NO: 1817927 - DNA, 15 bp, Homo sapiens
ggggaaggaggctgc

SEQ ID NO: 1817928 - DNA, 15 bp, Homo sapiens
gggaaggaggctgct

SEQ ID NO: 1817929 - DNA, 15 bp, Homo sapiens
ggaaggaggctgctg

SEQ ID NO: 1817930 - DNA, 15 bp, Homo sapiens
gaaggaggctgctga

SEQ ID NO: 1817931 - DNA, 15 bp, Homo sapiens
aaggaggctgctgag

SEQ ID NO: 1817932 - DNA, 15 bp, Homo sapiens
aggaggctgctgagt

SEQ ID NO: 1817933 - DNA, 15 bp, Homo sapiens
ggaggctgctgagta

SEQ ID NO: 1817934 - DNA, 15 bp, Homo sapiens
gaggctgctgagtag

SEQ ID NO: 1817935 - DNA, 15 bp, Homo sapiens
aggctgctgagtaga

SEQ ID NO: 1817936 - DNA, 15 bp, Homo sapiens
ggctgctgagtagaa

SEQ ID NO: 1817937 - DNA, 15 bp, Homo sapiens
gctgctgagtagaac

SEQ ID NO: 1817938 - DNA, 15 bp, Homo sapiens
ctgctgagtagaacc

SEQ ID NO: 1817939 - DNA, 15 bp, Homo sapiens
tgctgagtagaacca

SEQ ID NO: 1817940 - DNA, 15 bp, Homo sapiens
gctgagtagaaccaa

SEQ ID NO: 1817941 - DNA, 15 bp, Homo sapiens
ctgagtagaaccaac

SEQ ID NO: 1817942 - DNA, 15 bp, Homo sapiens
tgagtagaaccaacc

SEQ ID NO: 1817943 - DNA, 15 bp, Homo sapiens
gagtagaaccaaccc

SEQ ID NO: 1817944 - DNA, 15 bp, Homo sapiens
agtagaaccaacccc

SEQ ID NO: 1817945 - DNA, 15 bp, Homo sapiens
gtagaaccaacccca

SEQ ID NO: 1817946 - DNA, 15 bp, Homo sapiens
tagaaccaaccccag

SEQ ID NO: 1817947 - DNA, 15 bp, Homo sapiens
agaaccaaccccagg

SEQ ID NO: 1817948 - DNA, 15 bp, Homo sapiens
gaaccaaccccaggt

SEQ ID NO: 1817949 - DNA, 15 bp, Homo sapiens
aaccaaccccaggtt

SEQ ID NO: 1817950 - DNA, 15 bp, Homo sapiens
accaaccccaggtta

SEQ ID NO: 1817951 - DNA, 15 bp, Homo sapiens
ccaaccccaggttac

SEQ ID NO: 1817952 - DNA, 15 bp, Homo sapiens
caaccccaggttacc

SEQ ID NO: 1817953 - DNA, 15 bp, Homo sapiens
aaccccaggttacca

SEQ ID NO: 1817954 - DNA, 15 bp, Homo sapiens
accccaggttaccaa

SEQ ID NO: 1817955 - DNA, 15 bp, Homo sapiens
ccccaggttaccaac

SEQ ID NO: 1817956 - DNA, 15 bp, Homo sapiens
cccaggttaccaacc

SEQ ID NO: 1817957 - DNA, 15 bp, Homo sapiens
ccaggttaccaaccc

SEQ ID NO: 1817958 - DNA, 15 bp, Homo sapiens
caggttaccaacccc

SEQ ID NO: 1817959 - DNA, 15 bp, Homo sapiens
aggttaccaacccca

SEQ ID NO: 1817960 - DNA, 15 bp, Homo sapiens
ggttaccaaccccac

SEQ ID NO: 1817961 - DNA, 15 bp, Homo sapiens
gttaccaaccccacc

SEQ ID NO: 1817962 - DNA, 15 bp, Homo sapiens
ttaccaaccccacct

SEQ ID NO: 1817963 - DNA, 15 bp, Homo sapiens
taccaaccccacctc

SEQ ID NO: 1817964 - DNA, 15 bp, Homo sapiens
accaaccccacctca

SEQ ID NO: 1817965 - DNA, 15 bp, Homo sapiens
ccaaccccacctcag

SEQ ID NO: 1817966 - DNA, 15 bp, Homo sapiens
caaccccacctcagc

SEQ ID NO: 1817967 - DNA, 15 bp, Homo sapiens
aaccccacctcagcc

SEQ ID NO: 1817968 - DNA, 15 bp, Homo sapiens
accccacctcagcca

SEQ ID NO: 1817969 - DNA, 15 bp, Homo sapiens
ccccacctcagccac

SEQ ID NO: 1817970 - DNA, 15 bp, Homo sapiens
ccacctcagccaccc

SEQ ID NO: 1817971 - DNA, 15 bp, Homo sapiens
cacctcagccacccc

SEQ ID NO: 1817972 - DNA, 15 bp, Homo sapiens
acctcagccacccct

SEQ ID NO: 1817973 - DNA, 15 bp, Homo sapiens
cctcagccacccctt

SEQ ID NO: 1817974 - DNA, 15 bp, Homo sapiens
ctcagccaccccttg

SEQ ID NO: 1817975 - DNA, 15 bp, Homo sapiens
tcagccaccccttgc

SEQ ID NO: 1817976 - DNA, 15 bp, Homo sapiens
cagccaccccttgcc

SEQ ID NO: 1817977 - DNA, 15 bp, Homo sapiens
agccaccccttgcca

SEQ ID NO: 1817978 - DNA, 15 bp, Homo sapiens
gccaccccttgccag

SEQ ID NO: 1817979 - DNA, 15 bp, Homo sapiens
ccaccccttgccagc

SEQ ID NO: 1817980 - DNA, 15 bp, Homo sapiens
caccccttgccagcc

SEQ ID NO: 1817981 - DNA, 15 bp, Homo sapiens
accccttgccagcca

SEQ ID NO: 1817982 - DNA, 15 bp, Homo sapiens
ccccttgccagccaa

SEQ ID NO: 1817983 - DNA, 15 bp, Homo sapiens
cccttgccagccaaa

SEQ ID NO: 1817984 - DNA, 15 bp, Homo sapiens
ccttgccagccaaag

SEQ ID NO: 1817985 - DNA, 15 bp, Homo sapiens
cttgccagccaaagc

SEQ ID NO: 1817986 - DNA, 15 bp, Homo sapiens
ttgccagccaaagca

SEQ ID NO: 1817987 - DNA, 15 bp, Homo sapiens
tgccagccaaagcaa

SEQ ID NO: 1817988 - DNA, 15 bp, Homo sapiens
gccagccaaagcaaa

SEQ ID NO: 1817989 - DNA, 15 bp, Homo sapiens
ccagccaaagcaaac

SEQ ID NO: 1817990 - DNA, 15 bp, Homo sapiens
cagccaaagcaaaca

SEQ ID NO: 1817991 - DNA, 15 bp, Homo sapiens
agccaaagcaaacag

SEQ ID NO: 1817992 - DNA, 15 bp, Homo sapiens
gccaaagcaaacagg

SEQ ID NO: 1817993 - DNA, 15 bp, Homo sapiens
ccaaagcaaacaggc

SEQ ID NO: 1817994 - DNA, 15 bp, Homo sapiens
caaagcaaacaggcc

SEQ ID NO: 1817995 - DNA, 15 bp, Homo sapiens
aaagcaaacaggccc

SEQ ID NO: 1817996 - DNA, 15 bp, Homo sapiens
aagcaaacaggcccg

SEQ ID NO: 1817997 - DNA, 15 bp, Homo sapiens
agcaaacaggcccgg

SEQ ID NO: 1817998 - DNA, 15 bp, Homo sapiens
gcaaacaggcccggc

SEQ ID NO: 1817999 - DNA, 15 bp, Homo sapiens
caaacaggcccggcc

SEQ ID NO: 1818000 - DNA, 15 bp, Homo sapiens
aaacaggcccggccc

SEQ ID NO: 1818001 - DNA, 15 bp, Homo sapiens
aacaggcccggcccg

SEQ ID NO: 1818002 - DNA, 15 bp, Homo sapiens
acaggcccggcccgg

SEQ ID NO: 1818003 - DNA, 15 bp, Homo sapiens
caggcccggcccggc

SEQ ID NO: 1818004 - DNA, 15 bp, Homo sapiens
aggcccggcccggca

SEQ ID NO: 1818005 - DNA, 15 bp, Homo sapiens
ggcccggcccggcac

SEQ ID NO: 1818006 - DNA, 15 bp, Homo sapiens
gcccggcccggcact

SEQ ID NO: 1818007 - DNA, 15 bp, Homo sapiens
cccggcccggcactg

SEQ ID NO: 1818008 - DNA, 15 bp, Homo sapiens
ccggcccggcactgg

SEQ ID NO: 1818009 - DNA, 15 bp, Homo sapiens
cggcccggcactggg

SEQ ID NO: 1818010 - DNA, 15 bp, Homo sapiens
ggcccggcactgggg

SEQ ID NO: 1818011 - DNA, 15 bp, Homo sapiens
gcccggcactggggg

SEQ ID NO: 1818012 - DNA, 15 bp, Homo sapiens
cccggcactgggggt

SEQ ID NO: 1818013 - DNA, 15 bp, Homo sapiens
ccggcactgggggtt

SEQ ID NO: 1818014 - DNA, 15 bp, Homo sapiens
cggcactgggggttc

SEQ ID NO: 1818015 - DNA, 15 bp, Homo sapiens
ggcactgggggttcc

SEQ ID NO: 1818016 - DNA, 15 bp, Homo sapiens
gcactgggggttcct

SEQ ID NO: 1818017 - DNA, 15 bp, Homo sapiens
cactgggggttcctt

SEQ ID NO: 1818018 - DNA, 15 bp, Homo sapiens
actgggggttccttc

SEQ ID NO: 1818019 - DNA, 15 bp, Homo sapiens
ctgggggttccttct

SEQ ID NO: 1818020 - DNA, 15 bp, Homo sapiens
tgggggttccttctc

SEQ ID NO: 1818021 - DNA, 15 bp, Homo sapiens
gggggttccttctcg

SEQ ID NO: 1818022 - DNA, 15 bp, Homo sapiens
ggggttccttctcga

SEQ ID NO: 1818023 - DNA, 15 bp, Homo sapiens
gggttccttctcgaa

SEQ ID NO: 1818024 - DNA, 15 bp, Homo sapiens
ggttccttctcgaac

SEQ ID NO: 1818025 - DNA, 15 bp, Homo sapiens
gttccttctcgaacc

SEQ ID NO: 1818026 - DNA, 15 bp, Homo sapiens
ttccttctcgaacca

SEQ ID NO: 1818027 - DNA, 15 bp, Homo sapiens
tccttctcgaaccag

SEQ ID NO: 1818028 - DNA, 15 bp, Homo sapiens
ccttctcgaaccagg

SEQ ID NO: 1818029 - DNA, 15 bp, Homo sapiens
cttctcgaaccagga

SEQ ID NO: 1818030 - DNA, 15 bp, Homo sapiens
ttctcgaaccaggag

SEQ ID NO: 1818031 - DNA, 15 bp, Homo sapiens
tctcgaaccaggagt

SEQ ID NO: 1818032 - DNA, 15 bp, Homo sapiens
ctcgaaccaggagtt

SEQ ID NO: 1818033 - DNA, 15 bp, Homo sapiens
tcgaaccaggagttc

SEQ ID NO: 1818034 - DNA, 15 bp, Homo sapiens
cgaaccaggagttca

SEQ ID NO: 1818035 - DNA, 15 bp, Homo sapiens
gaaccaggagttcag

SEQ ID NO: 1818036 - DNA, 15 bp, Homo sapiens
aaccaggagttcagc

SEQ ID NO: 1818037 - DNA, 15 bp, Homo sapiens
accaggagttcagcc

SEQ ID NO: 1818038 - DNA, 15 bp, Homo sapiens
ccaggagttcagcct

SEQ ID NO: 1818039 - DNA, 15 bp, Homo sapiens
caggagttcagcctc

SEQ ID NO: 1818040 - DNA, 15 bp, Homo sapiens
aggagttcagcctcc

SEQ ID NO: 1818041 - DNA, 15 bp, Homo sapiens
ggagttcagcctccc

SEQ ID NO: 1818042 - DNA, 15 bp, Homo sapiens
gagttcagcctcccc

SEQ ID NO: 1818043 - DNA, 15 bp, Homo sapiens
agttcagcctcccct

SEQ ID NO: 1818044 - DNA, 15 bp, Homo sapiens
gttcagcctcccctg

SEQ ID NO: 1818045 - DNA, 15 bp, Homo sapiens
ttcagcctcccctga

SEQ ID NO: 1818046 - DNA, 15 bp, Homo sapiens
tcagcctcccctgac

SEQ ID NO: 1818047 - DNA, 15 bp, Homo sapiens
cagcctcccctgacc

SEQ ID NO: 1818048 - DNA, 15 bp, Homo sapiens
agcctcccctgaccc

SEQ ID NO: 1818049 - DNA, 15 bp, Homo sapiens
gcctcccctgacccg

SEQ ID NO: 1818050 - DNA, 15 bp, Homo sapiens
cctcccctgacccgc

SEQ ID NO: 1818051 - DNA, 15 bp, Homo sapiens
ctcccctgacccgca

SEQ ID NO: 1818052 - DNA, 15 bp, Homo sapiens
tcccctgacccgcag

SEQ ID NO: 1818053 - DNA, 15 bp, Homo sapiens
cccctgacccgcaga

SEQ ID NO: 1818054 - DNA, 15 bp, Homo sapiens
ccctgacccgcagaa

SEQ ID NO: 1818055 - DNA, 15 bp, Homo sapiens
cctgacccgcagaat

SEQ ID NO: 1818056 - DNA, 15 bp, Homo sapiens
ctgacccgcagaatc

SEQ ID NO: 1818057 - DNA, 15 bp, Homo sapiens
tgacccgcagaatct

SEQ ID NO: 1818058 - DNA, 15 bp, Homo sapiens
gacccgcagaatctt

SEQ ID NO: 1818059 - DNA, 15 bp, Homo sapiens
acccgcagaatcttc

SEQ ID NO: 1818060 - DNA, 15 bp, Homo sapiens
cccgcagaatcttct

SEQ ID NO: 1818061 - DNA, 15 bp, Homo sapiens
ccgcagaatcttctg

SEQ ID NO: 1818062 - DNA, 15 bp, Homo sapiens
cgcagaatcttctga

SEQ ID NO: 1818063 - DNA, 15 bp, Homo sapiens
gcagaatcttctgat

SEQ ID NO: 1818064 - DNA, 15 bp, Homo sapiens
cagaatcttctgatc

SEQ ID NO: 1818065 - DNA, 15 bp, Homo sapiens
agaatcttctgatcc

SEQ ID NO: 1818066 - DNA, 15 bp, Homo sapiens
gaatcttctgatccc

SEQ ID NO: 1818067 - DNA, 15 bp, Homo sapiens
aatcttctgatccca

SEQ ID NO: 1818068 - DNA, 15 bp, Homo sapiens
atcttctgatcccac

SEQ ID NO: 1818069 - DNA, 15 bp, Homo sapiens
tcttctgatcccacc

SEQ ID NO: 1818070 - DNA, 15 bp, Homo sapiens
cttctgatcccaccc

SEQ ID NO: 1818071 - DNA, 15 bp, Homo sapiens
ttctgatcccacccg

SEQ ID NO: 1818072 - DNA, 15 bp, Homo sapiens
tctgatcccacccgc

SEQ ID NO: 1818073 - DNA, 15 bp, Homo sapiens
ctgatcccacccgct

SEQ ID NO: 1818074 - DNA, 15 bp, Homo sapiens
tgatcccacccgctc

SEQ ID NO: 1818075 - DNA, 15 bp, Homo sapiens
gatcccacccgctcc

SEQ ID NO: 1818076 - DNA, 15 bp, Homo sapiens
atcccacccgctcca

SEQ ID NO: 1818077 - DNA, 15 bp, Homo sapiens
tcccacccgctccag

SEQ ID NO: 1818078 - DNA, 15 bp, Homo sapiens
cccacccgctccagg

SEQ ID NO: 1818079 - DNA, 15 bp, Homo sapiens
ccacccgctccagga

SEQ ID NO: 1818080 - DNA, 15 bp, Homo sapiens
cacccgctccaggag

SEQ ID NO: 1818081 - DNA, 15 bp, Homo sapiens
acccgctccaggagc

SEQ ID NO: 1818082 - DNA, 15 bp, Homo sapiens
cccgctccaggagcc

SEQ ID NO: 1818083 - DNA, 15 bp, Homo sapiens
ccgctccaggagcca

SEQ ID NO: 1818084 - DNA, 15 bp, Homo sapiens
cgctccaggagccag

SEQ ID NO: 1818085 - DNA, 15 bp, Homo sapiens
gctccaggagccagg

SEQ ID NO: 1818086 - DNA, 15 bp, Homo sapiens
ctccaggagccagga

SEQ ID NO: 1818087 - DNA, 15 bp, Homo sapiens
tccaggagccaggaa

SEQ ID NO: 1818088 - DNA, 15 bp, Homo sapiens
ccaggagccaggaat

SEQ ID NO: 1818089 - DNA, 15 bp, Homo sapiens
caggagccaggaatg

SEQ ID NO: 1818090 - DNA, 15 bp, Homo sapiens
aggagccaggaatga

SEQ ID NO: 1818091 - DNA, 15 bp, Homo sapiens
ggagccaggaatgag

SEQ ID NO: 1818092 - DNA, 15 bp, Homo sapiens
gagccaggaatgagt

SEQ ID NO: 1818093 - DNA, 15 bp, Homo sapiens
agccaggaatgagtc

SEQ ID NO: 1818094 - DNA, 15 bp, Homo sapiens
gccaggaatgagtcc

SEQ ID NO: 1818095 - DNA, 15 bp, Homo sapiens
ccaggaatgagtccc

SEQ ID NO: 1818096 - DNA, 15 bp, Homo sapiens
caggaatgagtccca

SEQ ID NO: 1818097 - DNA, 15 bp, Homo sapiens
aggaatgagtcccag

SEQ ID NO: 1818098 - DNA, 15 bp, Homo sapiens
ggaatgagtcccagt

SEQ ID NO: 1818099 - DNA, 15 bp, Homo sapiens
gaatgagtcccagtc

SEQ ID NO: 1818100 - DNA, 15 bp, Homo sapiens
aatgagtcccagtct

SEQ ID NO: 1818101 - DNA, 15 bp, Homo sapiens
atgagtcccagtctc

SEQ ID NO: 1818102 - DNA, 15 bp, Homo sapiens
tgagtcccagtctct

SEQ ID NO: 1818103 - DNA, 15 bp, Homo sapiens
gagtcccagtctctc

SEQ ID NO: 1818104 - DNA, 15 bp, Homo sapiens
cccagtctctcccag

SEQ ID NO: 1818105 - DNA, 15 bp, Homo sapiens
ccagtctctcccagt

SEQ ID NO: 1818106 - DNA, 15 bp, Homo sapiens
cagtctctcccagtt

SEQ ID NO: 1818107 - DNA, 15 bp, Homo sapiens
agtctctcccagttc

SEQ ID NO: 1818108 - DNA, 15 bp, Homo sapiens
gtctctcccagttct

SEQ ID NO: 1818109 - DNA, 15 bp, Homo sapiens
tctctcccagttctc

SEQ ID NO: 1818110 - DNA, 15 bp, Homo sapiens
ctctcccagttctca

SEQ ID NO: 1818111 - DNA, 15 bp, Homo sapiens
tctcccagttctcac

SEQ ID NO: 1818112 - DNA, 15 bp, Homo sapiens
ctcccagttctcact

SEQ ID NO: 1818113 - DNA, 15 bp, Homo sapiens
tcccagttctcactg

SEQ ID NO: 1818114 - DNA, 15 bp, Homo sapiens
cccagttctcactgt

SEQ ID NO: 1818115 - DNA, 15 bp, Homo sapiens
ccagttctcactgtg

SEQ ID NO: 1818116 - DNA, 15 bp, Homo sapiens
cagttctcactgtgt

SEQ ID NO: 1818117 - DNA, 15 bp, Homo sapiens
agttctcactgtgtg

SEQ ID NO: 1818118 - DNA, 15 bp, Homo sapiens
gttctcactgtgtgg

SEQ ID NO: 1818119 - DNA, 15 bp, Homo sapiens
ttctcactgtgtggt

SEQ ID NO: 1818120 - DNA, 15 bp, Homo sapiens
tctcactgtgtggtt

SEQ ID NO: 1818121 - DNA, 15 bp, Homo sapiens
ctcactgtgtggttt

SEQ ID NO: 1818122 - DNA, 15 bp, Homo sapiens
tcactgtgtggtttt

SEQ ID NO: 1818123 - DNA, 15 bp, Homo sapiens
cactgtgtggttttg

SEQ ID NO: 1818124 - DNA, 15 bp, Homo sapiens
actgtgtggttttgc

SEQ ID NO: 1818125 - DNA, 15 bp, Homo sapiens
ctgtgtggttttgcc

SEQ ID NO: 1818126 - DNA, 15 bp, Homo sapiens
tgtgtggttttgcca

SEQ ID NO: 1818127 - DNA, 15 bp, Homo sapiens
gtgtggttttgccat

SEQ ID NO: 1818128 - DNA, 15 bp, Homo sapiens
tgtggttttgccatt

SEQ ID NO: 1818129 - DNA, 15 bp, Homo sapiens
gtggttttgccattc

SEQ ID NO: 1818130 - DNA, 15 bp, Homo sapiens
tggttttgccattcg

SEQ ID NO: 1818131 - DNA, 15 bp, Homo sapiens
ggttttgccattcgt

SEQ ID NO: 1818132 - DNA, 15 bp, Homo sapiens
gttttgccattcgtc

SEQ ID NO: 1818133 - DNA, 15 bp, Homo sapiens
ttttgccattcgtct

SEQ ID NO: 1818134 - DNA, 15 bp, Homo sapiens
tttgccattcgtctt

SEQ ID NO: 1818135 - DNA, 15 bp, Homo sapiens
ttgccattcgtcttg

SEQ ID NO: 1818136 - DNA, 15 bp, Homo sapiens
tgccattcgtcttgc

SEQ ID NO: 1818137 - DNA, 15 bp, Homo sapiens
gccattcgtcttgct

SEQ ID NO: 1818138 - DNA, 15 bp, Homo sapiens
ccattcgtcttgctg

SEQ ID NO: 1818139 - DNA, 15 bp, Homo sapiens
cattcgtcttgctgc

SEQ ID NO: 1818140 - DNA, 15 bp, Homo sapiens
attcgtcttgctgct

SEQ ID NO: 1818141 - DNA, 15 bp, Homo sapiens
ttcgtcttgctgctg

SEQ ID NO: 1818142 - DNA, 15 bp, Homo sapiens
tcgtcttgctgctga

SEQ ID NO: 1818143 - DNA, 15 bp, Homo sapiens
cgtcttgctgctgaa

SEQ ID NO: 1818144 - DNA, 15 bp, Homo sapiens
gtcttgctgctgaac

SEQ ID NO: 1818145 - DNA, 15 bp, Homo sapiens
tcttgctgctgaacc

SEQ ID NO: 1818146 - DNA, 15 bp, Homo sapiens
cttgctgctgaacca

SEQ ID NO: 1818147 - DNA, 15 bp, Homo sapiens
ttgctgctgaaccac

SEQ ID NO: 1818148 - DNA, 15 bp, Homo sapiens
tgctgctgaaccacg

SEQ ID NO: 1818149 - DNA, 15 bp, Homo sapiens
gctgctgaaccacgg

SEQ ID NO: 1818150 - DNA, 15 bp, Homo sapiens
ctgctgaaccacggg

SEQ ID NO: 1818151 - DNA, 15 bp, Homo sapiens
tgctgaaccacgggt

SEQ ID NO: 1818152 - DNA, 15 bp, Homo sapiens
gctgaaccacgggtt

SEQ ID NO: 1818153 - DNA, 15 bp, Homo sapiens
ctgaaccacgggttt

SEQ ID NO: 1818154 - DNA, 15 bp, Homo sapiens
tgaaccacgggtttc

SEQ ID NO: 1818155 - DNA, 15 bp, Homo sapiens
gaaccacgggtttct

SEQ ID NO: 1818156 - DNA, 15 bp, Homo sapiens
aaccacgggtttctc

SEQ ID NO: 1818157 - DNA, 15 bp, Homo sapiens
accacgggtttctcc

SEQ ID NO: 1818158 - DNA, 15 bp, Homo sapiens
ccacgggtttctcct

SEQ ID NO: 1818159 - DNA, 15 bp, Homo sapiens
cacgggtttctcctc

SEQ ID NO: 1818160 - DNA, 15 bp, Homo sapiens
acgggtttctcctct

SEQ ID NO: 1818161 - DNA, 15 bp, Homo sapiens
cgggtttctcctctg

SEQ ID NO: 1818162 - DNA, 15 bp, Homo sapiens
gggtttctcctctga

SEQ ID NO: 1818163 - DNA, 15 bp, Homo sapiens
ggtttctcctctgaa

SEQ ID NO: 1818164 - DNA, 15 bp, Homo sapiens
gtttctcctctgaaa

SEQ ID NO: 1818165 - DNA, 15 bp, Homo sapiens
tttctcctctgaaac

SEQ ID NO: 1818166 - DNA, 15 bp, Homo sapiens
ttctcctctgaaaca

SEQ ID NO: 1818167 - DNA, 15 bp, Homo sapiens
tctcctctgaaacat

SEQ ID NO: 1818168 - DNA, 15 bp, Homo sapiens
ctcctctgaaacatc

SEQ ID NO: 1818169 - DNA, 15 bp, Homo sapiens
tcctctgaaacatct

SEQ ID NO: 1818170 - DNA, 15 bp, Homo sapiens
cctctgaaacatctg

SEQ ID NO: 1818171 - DNA, 15 bp, Homo sapiens
ctctgaaacatctgg

SEQ ID NO: 1818172 - DNA, 15 bp, Homo sapiens
tctgaaacatctggg

SEQ ID NO: 1818173 - DNA, 15 bp, Homo sapiens
ctgaaacatctggga

SEQ ID NO: 1818174 - DNA, 15 bp, Homo sapiens
tgaaacatctgggat

SEQ ID NO: 1818175 - DNA, 15 bp, Homo sapiens
gaaacatctgggatt

SEQ ID NO: 1818176 - DNA, 15 bp, Homo sapiens
aaacatctgggattt

SEQ ID NO: 1818177 - DNA, 15 bp, Homo sapiens
aacatctgggattta

SEQ ID NO: 1818178 - DNA, 15 bp, Homo sapiens
acatctgggatttat

SEQ ID NO: 1818179 - DNA, 15 bp, Homo sapiens
catctgggatttata

SEQ ID NO: 1818180 - DNA, 15 bp, Homo sapiens
atctgggatttataa

SEQ ID NO: 1818181 - DNA, 15 bp, Homo sapiens
tctgggatttataac

SEQ ID NO: 1818182 - DNA, 15 bp, Homo sapiens
ctgggatttataaca

SEQ ID NO: 1818183 - DNA, 15 bp, Homo sapiens
tgggatttataacag

SEQ ID NO: 1818184 - DNA, 15 bp, Homo sapiens
gggatttataacagg

SEQ ID NO: 1818185 - DNA, 15 bp, Homo sapiens
ggatttataacaggg

SEQ ID NO: 1818186 - DNA, 15 bp, Homo sapiens
gatttataacagggc

SEQ ID NO: 1818187 - DNA, 15 bp, Homo sapiens
atttataacagggct

SEQ ID NO: 1818188 - DNA, 15 bp, Homo sapiens
tttataacagggctt

SEQ ID NO: 1818189 - DNA, 15 bp, Homo sapiens
ttataacagggctta

SEQ ID NO: 1818190 - DNA, 15 bp, Homo sapiens
tataacagggcttag

SEQ ID NO: 1818191 - DNA, 15 bp, Homo sapiens
ataacagggcttagg

SEQ ID NO: 1818192 - DNA, 15 bp, Homo sapiens
taacagggcttagga

SEQ ID NO: 1818193 - DNA, 15 bp, Homo sapiens
aacagggcttaggaa

SEQ ID NO: 1818194 - DNA, 15 bp, Homo sapiens
acagggcttaggaaa

SEQ ID NO: 1818195 - DNA, 15 bp, Homo sapiens
cagggcttaggaaag

SEQ ID NO: 1818196 - DNA, 15 bp, Homo sapiens
agggcttaggaaagt

SEQ ID NO: 1818197 - DNA, 15 bp, Homo sapiens
gggcttaggaaagtg

SEQ ID NO: 1818198 - DNA, 15 bp, Homo sapiens
ggcttaggaaagtga

SEQ ID NO: 1818199 - DNA, 15 bp, Homo sapiens
gcttaggaaagtgac

SEQ ID NO: 1818200 - DNA, 15 bp, Homo sapiens
cttaggaaagtgaca

SEQ ID NO: 1818201 - DNA, 15 bp, Homo sapiens
ttaggaaagtgacag

SEQ ID NO: 1818202 - DNA, 15 bp, Homo sapiens
taggaaagtgacagc

SEQ ID NO: 1818203 - DNA, 15 bp, Homo sapiens
aggaaagtgacagcg

SEQ ID NO: 1818204 - DNA, 15 bp, Homo sapiens
ggaaagtgacagcgt

SEQ ID NO: 1818205 - DNA, 15 bp, Homo sapiens
gaaagtgacagcgtc

SEQ ID NO: 1818206 - DNA, 15 bp, Homo sapiens
aaagtgacagcgtct

SEQ ID NO: 1818207 - DNA, 15 bp, Homo sapiens
aagtgacagcgtctg

SEQ ID NO: 1818208 - DNA, 15 bp, Homo sapiens
agtgacagcgtctga

SEQ ID NO: 1818209 - DNA, 15 bp, Homo sapiens
gtgacagcgtctgag

SEQ ID NO: 1818210 - DNA, 15 bp, Homo sapiens
tgacagcgtctgagc

SEQ ID NO: 1818211 - DNA, 15 bp, Homo sapiens
gacagcgtctgagcg

SEQ ID NO: 1818212 - DNA, 15 bp, Homo sapiens
acagcgtctgagcgt

SEQ ID NO: 1818213 - DNA, 15 bp, Homo sapiens
cagcgtctgagcgtt

SEQ ID NO: 1818214 - DNA, 15 bp, Homo sapiens
agcgtctgagcgttc

SEQ ID NO: 1818215 - DNA, 15 bp, Homo sapiens
gcgtctgagcgttca

SEQ ID NO: 1818216 - DNA, 15 bp, Homo sapiens
cgtctgagcgttcac

SEQ ID NO: 1818217 - DNA, 15 bp, Homo sapiens
gtctgagcgttcact

SEQ ID NO: 1818218 - DNA, 15 bp, Homo sapiens
tctgagcgttcactg

SEQ ID NO: 1818219 - DNA, 15 bp, Homo sapiens
ctgagcgttcactgt

SEQ ID NO: 1818220 - DNA, 15 bp, Homo sapiens
tgagcgttcactgtg

SEQ ID NO: 1818221 - DNA, 15 bp, Homo sapiens
gagcgttcactgtgg

SEQ ID NO: 1818222 - DNA, 15 bp, Homo sapiens
agcgttcactgtggc

SEQ ID NO: 1818223 - DNA, 15 bp, Homo sapiens
gcgttcactgtggcc

SEQ ID NO: 1818224 - DNA, 15 bp, Homo sapiens
cgttcactgtggcct

SEQ ID NO: 1818225 - DNA, 15 bp, Homo sapiens
gttcactgtggcctg

SEQ ID NO: 1818226 - DNA, 15 bp, Homo sapiens
ttcactgtggcctgt

SEQ ID NO: 1818227 - DNA, 15 bp, Homo sapiens
tcactgtggcctgtc

SEQ ID NO: 1818228 - DNA, 15 bp, Homo sapiens
cactgtggcctgtcc

SEQ ID NO: 1818229 - DNA, 15 bp, Homo sapiens
actgtggcctgtcca

SEQ ID NO: 1818230 - DNA, 15 bp, Homo sapiens
ctgtggcctgtccat

SEQ ID NO: 1818231 - DNA, 15 bp, Homo sapiens
tgtggcctgtccatt

SEQ ID NO: 1818232 - DNA, 15 bp, Homo sapiens
gtggcctgtccattg

SEQ ID NO: 1818233 - DNA, 15 bp, Homo sapiens
agaagcgcagtcggg

SEQ ID NO: 1818234 - DNA, 15 bp, Homo sapiens
gaagcgcagtcgggg

SEQ ID NO: 1818235 - DNA, 15 bp, Homo sapiens
aagcgcagtcggggg

SEQ ID NO: 1818236 - DNA, 15 bp, Homo sapiens
agcgcagtcgggggc

SEQ ID NO: 1818237 - DNA, 15 bp, Homo sapiens
gcgcagtcgggggca

SEQ ID NO: 1818238 - DNA, 15 bp, Homo sapiens
cgcagtcgggggcac

SEQ ID NO: 1818239 - DNA, 15 bp, Homo sapiens
gcagtcgggggcacg

SEQ ID NO: 1818240 - DNA, 15 bp, Homo sapiens
cagtcgggggcacgg

SEQ ID NO: 1818241 - DNA, 15 bp, Homo sapiens
agtcgggggcacggg

SEQ ID NO: 1818242 - DNA, 15 bp, Homo sapiens
gtcgggggcacgggg

SEQ ID NO: 1818243 - DNA, 15 bp, Homo sapiens
tcgggggcacgggga

SEQ ID NO: 1818244 - DNA, 15 bp, Homo sapiens
cgggggcacggggat

SEQ ID NO: 1818245 - DNA, 15 bp, Homo sapiens
gggggcacggggatg

SEQ ID NO: 1818246 - DNA, 15 bp, Homo sapiens
ggggcacggggatga

SEQ ID NO: 1818247 - DNA, 15 bp, Homo sapiens
gggcacggggatgag

SEQ ID NO: 1818248 - DNA, 15 bp, Homo sapiens
ggcacggggatgagc

SEQ ID NO: 1818249 - DNA, 15 bp, Homo sapiens
gcacggggatgagct

SEQ ID NO: 1818250 - DNA, 15 bp, Homo sapiens
cacggggatgagctc

SEQ ID NO: 1818251 - DNA, 15 bp, Homo sapiens
acggggatgagctca

SEQ ID NO: 1818252 - DNA, 15 bp, Homo sapiens
cggggatgagctcag

SEQ ID NO: 1818253 - DNA, 15 bp, Homo sapiens
ggggatgagctcagg

SEQ ID NO: 1818254 - DNA, 15 bp, Homo sapiens
gggatgagctcaggg

SEQ ID NO: 1818255 - DNA, 15 bp, Homo sapiens
ggatgagctcagggg

SEQ ID NO: 1818256 - DNA, 15 bp, Homo sapiens
gatgagctcaggggc

SEQ ID NO: 1818257 - DNA, 15 bp, Homo sapiens
atgagctcaggggcc

SEQ ID NO: 1818258 - DNA, 15 bp, Homo sapiens
tgagctcaggggcct

SEQ ID NO: 1818259 - DNA, 15 bp, Homo sapiens
gagctcaggggcctc

SEQ ID NO: 1818260 - DNA, 15 bp, Homo sapiens
agctcaggggcctct

SEQ ID NO: 1818261 - DNA, 15 bp, Homo sapiens
gctcaggggcctcta

SEQ ID NO: 1818262 - DNA, 15 bp, Homo sapiens
ctcaggggcctctag

SEQ ID NO: 1818263 - DNA, 15 bp, Homo sapiens
tcaggggcctctaga

SEQ ID NO: 1818264 - DNA, 15 bp, Homo sapiens
caggggcctctagaa

SEQ ID NO: 1818265 - DNA, 15 bp, Homo sapiens
aggggcctctagaaa

SEQ ID NO: 1818266 - DNA, 15 bp, Homo sapiens
ggggcctctagaaag

SEQ ID NO: 1818267 - DNA, 15 bp, Homo sapiens
gggcctctagaaaga

SEQ ID NO: 1818268 - DNA, 15 bp, Homo sapiens
ggcctctagaaagag

SEQ ID NO: 1818269 - DNA, 15 bp, Homo sapiens
gcctctagaaagagc

SEQ ID NO: 1818270 - DNA, 15 bp, Homo sapiens
cctctagaaagagct

SEQ ID NO: 1818271 - DNA, 15 bp, Homo sapiens
ctctagaaagagctg

SEQ ID NO: 1818272 - DNA, 15 bp, Homo sapiens
tctagaaagagctgg

SEQ ID NO: 1818273 - DNA, 15 bp, Homo sapiens
ctagaaagagctggg

SEQ ID NO: 1818274 - DNA, 15 bp, Homo sapiens
tagaaagagctggga

SEQ ID NO: 1818275 - DNA, 15 bp, Homo sapiens
agaaagagctgggac

SEQ ID NO: 1818276 - DNA, 15 bp, Homo sapiens
gaaagagctgggacc

SEQ ID NO: 1818277 - DNA, 15 bp, Homo sapiens
aaagagctgggaccc

SEQ ID NO: 1818278 - DNA, 15 bp, Homo sapiens
aagagctgggaccct

SEQ ID NO: 1818279 - DNA, 15 bp, Homo sapiens
agagctgggaccctg

SEQ ID NO: 1818280 - DNA, 15 bp, Homo sapiens
gagctgggaccctgg

SEQ ID NO: 1818281 - DNA, 15 bp, Homo sapiens
agctgggaccctggg

SEQ ID NO: 1818282 - DNA, 15 bp, Homo sapiens
gctgggaccctggga

SEQ ID NO: 1818283 - DNA, 15 bp, Homo sapiens
ctgggaccctgggaa

SEQ ID NO: 1818284 - DNA, 15 bp, Homo sapiens
tgggaccctgggaac

SEQ ID NO: 1818285 - DNA, 15 bp, Homo sapiens
gggaccctgggaacc

SEQ ID NO: 1818286 - DNA, 15 bp, Homo sapiens
ggaccctgggaaccc

SEQ ID NO: 1818287 - DNA, 15 bp, Homo sapiens
gaccctgggaacccc

SEQ ID NO: 1818288 - DNA, 15 bp, Homo sapiens
accctgggaacccct

SEQ ID NO: 1818289 - DNA, 15 bp, Homo sapiens
ccctgggaacccctg

SEQ ID NO: 1818290 - DNA, 15 bp, Homo sapiens
cctgggaacccctgg

SEQ ID NO: 1818291 - DNA, 15 bp, Homo sapiens
ctgggaacccctggc

SEQ ID NO: 1818292 - DNA, 15 bp, Homo sapiens
tgggaacccctggcc

SEQ ID NO: 1818293 - DNA, 15 bp, Homo sapiens
gggaacccctggcct

SEQ ID NO: 1818294 - DNA, 15 bp, Homo sapiens
ggaacccctggcctc

SEQ ID NO: 1818295 - DNA, 15 bp, Homo sapiens
gaacccctggcctcc

SEQ ID NO: 1818296 - DNA, 15 bp, Homo sapiens
aacccctggcctcca

SEQ ID NO: 1818297 - DNA, 15 bp, Homo sapiens
acccctggcctccag

SEQ ID NO: 1818298 - DNA, 15 bp, Homo sapiens
cccctggcctccagg

SEQ ID NO: 1818299 - DNA, 15 bp, Homo sapiens
ccctggcctccaggt

SEQ ID NO: 1818300 - DNA, 15 bp, Homo sapiens
cctggcctccaggta

SEQ ID NO: 1818301 - DNA, 15 bp, Homo sapiens
ctggcctccaggtag

SEQ ID NO: 1818302 - DNA, 15 bp, Homo sapiens
tggcctccaggtagt

SEQ ID NO: 1818303 - DNA, 15 bp, Homo sapiens
ggcctccaggtagtc

SEQ ID NO: 1818304 - DNA, 15 bp, Homo sapiens
gcctccaggtagtct

SEQ ID NO: 1818305 - DNA, 15 bp, Homo sapiens
cctccaggtagtctc

SEQ ID NO: 1818306 - DNA, 15 bp, Homo sapiens
ctccaggtagtctca

SEQ ID NO: 1818307 - DNA, 15 bp, Homo sapiens
tccaggtagtctcag

SEQ ID NO: 1818308 - DNA, 15 bp, Homo sapiens
ccaggtagtctcagg

SEQ ID NO: 1818309 - DNA, 15 bp, Homo sapiens
caggtagtctcagga

SEQ ID NO: 1818310 - DNA, 15 bp, Homo sapiens
aggtagtctcaggag

SEQ ID NO: 1818311 - DNA, 15 bp, Homo sapiens
ggtagtctcaggaga

SEQ ID NO: 1818312 - DNA, 15 bp, Homo sapiens
gtagtctcaggagag

SEQ ID NO: 1818313 - DNA, 15 bp, Homo sapiens
tagtctcaggagagc

SEQ ID NO: 1818314 - DNA, 15 bp, Homo sapiens
agtctcaggagagct

SEQ ID NO: 1818315 - DNA, 15 bp, Homo sapiens
gtctcaggagagcta

SEQ ID NO: 1818316 - DNA, 15 bp, Homo sapiens
tctcaggagagctac

SEQ ID NO: 1818317 - DNA, 15 bp, Homo sapiens
ctcaggagagctact

SEQ ID NO: 1818318 - DNA, 15 bp, Homo sapiens
tcaggagagctactc

SEQ ID NO: 1818319 - DNA, 15 bp, Homo sapiens
caggagagctactcg

SEQ ID NO: 1818320 - DNA, 15 bp, Homo sapiens
aggagagctactcgg

SEQ ID NO: 1818321 - DNA, 15 bp, Homo sapiens
ggagagctactcggg

SEQ ID NO: 1818322 - DNA, 15 bp, Homo sapiens
gagagctactcgggg

SEQ ID NO: 1818323 - DNA, 15 bp, Homo sapiens
agagctactcggggt

SEQ ID NO: 1818324 - DNA, 15 bp, Homo sapiens
gagctactcggggtc

SEQ ID NO: 1818325 - DNA, 15 bp, Homo sapiens
agctactcggggtcg

SEQ ID NO: 1818326 - DNA, 15 bp, Homo sapiens
gctactcggggtcgg

SEQ ID NO: 1818327 - DNA, 15 bp, Homo sapiens
ctactcggggtcggg

SEQ ID NO: 1818328 - DNA, 15 bp, Homo sapiens
tactcggggtcgggc

SEQ ID NO: 1818329 - DNA, 15 bp, Homo sapiens
actcggggtcgggct

SEQ ID NO: 1818330 - DNA, 15 bp, Homo sapiens
ctcggggtcgggctt

SEQ ID NO: 1818331 - DNA, 15 bp, Homo sapiens
tcggggtcgggcttg

SEQ ID NO: 1818332 - DNA, 15 bp, Homo sapiens
cggggtcgggcttgg

SEQ ID NO: 1818333 - DNA, 15 bp, Homo sapiens
ggggtcgggcttggg

SEQ ID NO: 1818334 - DNA, 15 bp, Homo sapiens
gggtcgggcttgggg

SEQ ID NO: 1818335 - DNA, 15 bp, Homo sapiens
ggtcgggcttgggga

SEQ ID NO: 1818336 - DNA, 15 bp, Homo sapiens
gtcgggcttggggag

SEQ ID NO: 1818337 - DNA, 15 bp, Homo sapiens
tcgggcttggggaga

SEQ ID NO: 1818338 - DNA, 15 bp, Homo sapiens
cgggcttggggagag

SEQ ID NO: 1818339 - DNA, 15 bp, Homo sapiens
gggcttggggagagg

SEQ ID NO: 1818340 - DNA, 15 bp, Homo sapiens
ggcttggggagagga

SEQ ID NO: 1818341 - DNA, 15 bp, Homo sapiens
gcttggggagaggag

SEQ ID NO: 1818342 - DNA, 15 bp, Homo sapiens
cttggggagaggagg

SEQ ID NO: 1818343 - DNA, 15 bp, Homo sapiens
ttggggagaggagga

SEQ ID NO: 1818344 - DNA, 15 bp, Homo sapiens
tggggagaggaggag

SEQ ID NO: 1818345 - DNA, 15 bp, Homo sapiens
ggggagaggaggagc

SEQ ID NO: 1818346 - DNA, 15 bp, Homo sapiens
gggagaggaggagcg

SEQ ID NO: 1818347 - DNA, 15 bp, Homo sapiens
ggagaggaggagcgg

SEQ ID NO: 1818348 - DNA, 15 bp, Homo sapiens
gagaggaggagcggg

SEQ ID NO: 1818349 - DNA, 15 bp, Homo sapiens
agaggaggagcgggg

SEQ ID NO: 1818350 - DNA, 15 bp, Homo sapiens
gaggaggagcggggg

SEQ ID NO: 1818351 - DNA, 15 bp, Homo sapiens
aggaggagcgggggt

SEQ ID NO: 1818352 - DNA, 15 bp, Homo sapiens
ggaggagcgggggtg

SEQ ID NO: 1818353 - DNA, 15 bp, Homo sapiens
gaggagcgggggtga

SEQ ID NO: 1818354 - DNA, 15 bp, Homo sapiens
aggagcgggggtgag

SEQ ID NO: 1818355 - DNA, 15 bp, Homo sapiens
ggagcgggggtgagg

SEQ ID NO: 1818356 - DNA, 15 bp, Homo sapiens
gagcgggggtgaggc

SEQ ID NO: 1818357 - DNA, 15 bp, Homo sapiens
agcgggggtgaggca

SEQ ID NO: 1818358 - DNA, 15 bp, Homo sapiens
gcgggggtgaggcaa

SEQ ID NO: 1818359 - DNA, 15 bp, Homo sapiens
cgggggtgaggcaag

SEQ ID NO: 1818360 - DNA, 15 bp, Homo sapiens
gggggtgaggcaagc

SEQ ID NO: 1818361 - DNA, 15 bp, Homo sapiens
ggggtgaggcaagca

SEQ ID NO: 1818362 - DNA, 15 bp, Homo sapiens
gggtgaggcaagcag

SEQ ID NO: 1818363 - DNA, 15 bp, Homo sapiens
ggtgaggcaagcagc

SEQ ID NO: 1818364 - DNA, 15 bp, Homo sapiens
gtgaggcaagcagca

SEQ ID NO: 1818365 - DNA, 15 bp, Homo sapiens
tgaggcaagcagcag

SEQ ID NO: 1818366 - DNA, 15 bp, Homo sapiens
gaggcaagcagcagg

SEQ ID NO: 1818367 - DNA, 15 bp, Homo sapiens
aggcaagcagcaggg

SEQ ID NO: 1818368 - DNA, 15 bp, Homo sapiens
ggcaagcagcagggg

SEQ ID NO: 1818369 - DNA, 15 bp, Homo sapiens
gcaagcagcagggga

SEQ ID NO: 1818370 - DNA, 15 bp, Homo sapiens
caagcagcaggggac

SEQ ID NO: 1818371 - DNA, 15 bp, Homo sapiens
aagcagcaggggact

SEQ ID NO: 1818372 - DNA, 15 bp, Homo sapiens
agcagcaggggactg

SEQ ID NO: 1818373 - DNA, 15 bp, Homo sapiens
gcagcaggggactgg

SEQ ID NO: 1818374 - DNA, 15 bp, Homo sapiens
cagcaggggactgga

SEQ ID NO: 1818375 - DNA, 15 bp, Homo sapiens
agcaggggactggac

SEQ ID NO: 1818376 - DNA, 15 bp, Homo sapiens
gcaggggactggacc

SEQ ID NO: 1818377 - DNA, 15 bp, Homo sapiens
caggggactggacct

SEQ ID NO: 1818378 - DNA, 15 bp, Homo sapiens
aggggactggacctg

SEQ ID NO: 1818379 - DNA, 15 bp, Homo sapiens
ggggactggacctgg

SEQ ID NO: 1818380 - DNA, 15 bp, Homo sapiens
gggactggacctggg

SEQ ID NO: 1818381 - DNA, 15 bp, Homo sapiens
ggactggacctggga

SEQ ID NO: 1818382 - DNA, 15 bp, Homo sapiens
gactggacctgggaa

SEQ ID NO: 1818383 - DNA, 15 bp, Homo sapiens
actggacctgggaag

SEQ ID NO: 1818384 - DNA, 15 bp, Homo sapiens
ctggacctgggaagg

SEQ ID NO: 1818385 - DNA, 15 bp, Homo sapiens
tggacctgggaaggg

SEQ ID NO: 1818386 - DNA, 15 bp, Homo sapiens
ggacctgggaagggc

SEQ ID NO: 1818387 - DNA, 15 bp, Homo sapiens
gacctgggaagggct

SEQ ID NO: 1818388 - DNA, 15 bp, Homo sapiens
acctgggaagggctg

SEQ ID NO: 1818389 - DNA, 15 bp, Homo sapiens
cctgggaagggctgg

SEQ ID NO: 1818390 - DNA, 15 bp, Homo sapiens
ctgggaagggctggg

SEQ ID NO: 1818391 - DNA, 15 bp, Homo sapiens
tgggaagggctgggc

SEQ ID NO: 1818392 - DNA, 15 bp, Homo sapiens
gggaagggctgggca

SEQ ID NO: 1818393 - DNA, 15 bp, Homo sapiens
ggaagggctgggcag

SEQ ID NO: 1818394 - DNA, 15 bp, Homo sapiens
gaagggctgggcagc

SEQ ID NO: 1818395 - DNA, 15 bp, Homo sapiens
aagggctgggcagca

SEQ ID NO: 1818396 - DNA, 15 bp, Homo sapiens
agggctgggcagcag

SEQ ID NO: 1818397 - DNA, 15 bp, Homo sapiens
gggctgggcagcaga

SEQ ID NO: 1818398 - DNA, 15 bp, Homo sapiens
ggctgggcagcagag

SEQ ID NO: 1818399 - DNA, 15 bp, Homo sapiens
gctgggcagcagaga

SEQ ID NO: 1818400 - DNA, 15 bp, Homo sapiens
ctgggcagcagagac

SEQ ID NO: 1818401 - DNA, 15 bp, Homo sapiens
tgggcagcagagacg

SEQ ID NO: 1818402 - DNA, 15 bp, Homo sapiens
gggcagcagagacga

SEQ ID NO: 1818403 - DNA, 15 bp, Homo sapiens
ggcagcagagacgac

SEQ ID NO: 1818404 - DNA, 15 bp, Homo sapiens
gcagcagagacgacc

SEQ ID NO: 1818405 - DNA, 15 bp, Homo sapiens
cagcagagacgaccc

SEQ ID NO: 1818406 - DNA, 15 bp, Homo sapiens
agcagagacgacccg

SEQ ID NO: 1818407 - DNA, 15 bp, Homo sapiens
gcagagacgacccga

SEQ ID NO: 1818408 - DNA, 15 bp, Homo sapiens
cagagacgacccgac

SEQ ID NO: 1818409 - DNA, 15 bp, Homo sapiens
agagacgacccgacc

SEQ ID NO: 1818410 - DNA, 15 bp, Homo sapiens
gagacgacccgaccc

SEQ ID NO: 1818411 - DNA, 15 bp, Homo sapiens
agacgacccgacccg

SEQ ID NO: 1818412 - DNA, 15 bp, Homo sapiens
gacgacccgacccgc

SEQ ID NO: 1818413 - DNA, 15 bp, Homo sapiens
acgacccgacccgct

SEQ ID NO: 1818414 - DNA, 15 bp, Homo sapiens
cgacccgacccgcta

SEQ ID NO: 1818415 - DNA, 15 bp, Homo sapiens
gacccgacccgctag

SEQ ID NO: 1818416 - DNA, 15 bp, Homo sapiens
acccgacccgctaga

SEQ ID NO: 1818417 - DNA, 15 bp, Homo sapiens
cccgacccgctagaa

SEQ ID NO: 1818418 - DNA, 15 bp, Homo sapiens
ccgacccgctagaag

SEQ ID NO: 1818419 - DNA, 15 bp, Homo sapiens
cgacccgctagaagg

SEQ ID NO: 1818420 - DNA, 15 bp, Homo sapiens
gacccgctagaaggt

SEQ ID NO: 1818421 - DNA, 15 bp, Homo sapiens
acccgctagaaggtg

SEQ ID NO: 1818422 - DNA, 15 bp, Homo sapiens
cccgctagaaggtgg

SEQ ID NO: 1818423 - DNA, 15 bp, Homo sapiens
ccgctagaaggtggg

SEQ ID NO: 1818424 - DNA, 15 bp, Homo sapiens
cgctagaaggtgggg

SEQ ID NO: 1818425 - DNA, 15 bp, Homo sapiens
gctagaaggtggggt

SEQ ID NO: 1818426 - DNA, 15 bp, Homo sapiens
ctagaaggtggggtg

SEQ ID NO: 1818427 - DNA, 15 bp, Homo sapiens
tagaaggtggggtgg

SEQ ID NO: 1818428 - DNA, 15 bp, Homo sapiens
gaaggtggggtgggg

SEQ ID NO: 1818429 - DNA, 15 bp, Homo sapiens
aaggtggggtgggga

SEQ ID NO: 1818430 - DNA, 15 bp, Homo sapiens
aggtggggtggggag

SEQ ID NO: 1818431 - DNA, 15 bp, Homo sapiens
ggtggggtggggaga

SEQ ID NO: 1818432 - DNA, 15 bp, Homo sapiens
gtggggtggggagag

SEQ ID NO: 1818433 - DNA, 15 bp, Homo sapiens
tggggtggggagagc

SEQ ID NO: 1818434 - DNA, 15 bp, Homo sapiens
ggggtggggagagca

SEQ ID NO: 1818435 - DNA, 15 bp, Homo sapiens
gggtggggagagcag

SEQ ID NO: 1818436 - DNA, 15 bp, Homo sapiens
ggtggggagagcagc

SEQ ID NO: 1818437 - DNA, 15 bp, Homo sapiens
gtggggagagcagct

SEQ ID NO: 1818438 - DNA, 15 bp, Homo sapiens
tggggagagcagctg

SEQ ID NO: 1818439 - DNA, 15 bp, Homo sapiens
ggggagagcagctgg

SEQ ID NO: 1818440 - DNA, 15 bp, Homo sapiens
gggagagcagctgga

SEQ ID NO: 1818441 - DNA, 15 bp, Homo sapiens
ggagagcagctggac

SEQ ID NO: 1818442 - DNA, 15 bp, Homo sapiens
gagagcagctggact

SEQ ID NO: 1818443 - DNA, 15 bp, Homo sapiens
agagcagctggactg

SEQ ID NO: 1818444 - DNA, 15 bp, Homo sapiens
gagcagctggactgg

SEQ ID NO: 1818445 - DNA, 15 bp, Homo sapiens
agcagctggactggg

SEQ ID NO: 1818446 - DNA, 15 bp, Homo sapiens
gcagctggactggga

SEQ ID NO: 1818447 - DNA, 15 bp, Homo sapiens
cagctggactgggat

SEQ ID NO: 1818448 - DNA, 15 bp, Homo sapiens
agctggactgggatg

SEQ ID NO: 1818449 - DNA, 15 bp, Homo sapiens
gctggactgggatgt

SEQ ID NO: 1818450 - DNA, 15 bp, Homo sapiens
ctggactgggatgta

SEQ ID NO: 1818451 - DNA, 15 bp, Homo sapiens
tggactgggatgtaa

SEQ ID NO: 1818452 - DNA, 15 bp, Homo sapiens
ggactgggatgtaag

SEQ ID NO: 1818453 - DNA, 15 bp, Homo sapiens
gactgggatgtaagc

SEQ ID NO: 1818454 - DNA, 15 bp, Homo sapiens
actgggatgtaagcc

SEQ ID NO: 1818455 - DNA, 15 bp, Homo sapiens
ctgggatgtaagcca

SEQ ID NO: 1818456 - DNA, 15 bp, Homo sapiens
tgggatgtaagccat

SEQ ID NO: 1818457 - DNA, 15 bp, Homo sapiens
gggatgtaagccata

SEQ ID NO: 1818458 - DNA, 15 bp, Homo sapiens
ggatgtaagccatag

SEQ ID NO: 1818459 - DNA, 15 bp, Homo sapiens
gatgtaagccatagc

SEQ ID NO: 1818460 - DNA, 15 bp, Homo sapiens
atgtaagccatagca

SEQ ID NO: 1818461 - DNA, 15 bp, Homo sapiens
tgtaagccatagcag

SEQ ID NO: 1818462 - DNA, 15 bp, Homo sapiens
gtaagccatagcagg

SEQ ID NO: 1818463 - DNA, 15 bp, Homo sapiens
taagccatagcagga

SEQ ID NO: 1818464 - DNA, 15 bp, Homo sapiens
aagccatagcaggac

SEQ ID NO: 1818465 - DNA, 15 bp, Homo sapiens
agccatagcaggact

SEQ ID NO: 1818466 - DNA, 15 bp, Homo sapiens
gccatagcaggactc

SEQ ID NO: 1818467 - DNA, 15 bp, Homo sapiens
ccatagcaggactcc

SEQ ID NO: 1818468 - DNA, 15 bp, Homo sapiens
catagcaggactcca

SEQ ID NO: 1818469 - DNA, 15 bp, Homo sapiens
atagcaggactccac

SEQ ID NO: 1818470 - DNA, 15 bp, Homo sapiens
tagcaggactccacg

SEQ ID NO: 1818471 - DNA, 15 bp, Homo sapiens
agcaggactccacga

SEQ ID NO: 1818472 - DNA, 15 bp, Homo sapiens
gcaggactccacgag

SEQ ID NO: 1818473 - DNA, 15 bp, Homo sapiens
caggactccacgagt

SEQ ID NO: 1818474 - DNA, 15 bp, Homo sapiens
aggactccacgagtt

SEQ ID NO: 1818475 - DNA, 15 bp, Homo sapiens
ggactccacgagttg

SEQ ID NO: 1818476 - DNA, 15 bp, Homo sapiens
gactccacgagttgt

SEQ ID NO: 1818477 - DNA, 15 bp, Homo sapiens
actccacgagttgtc

SEQ ID NO: 1818478 - DNA, 15 bp, Homo sapiens
ctccacgagttgtca

SEQ ID NO: 1818479 - DNA, 15 bp, Homo sapiens
tccacgagttgtcac

SEQ ID NO: 1818480 - DNA, 15 bp, Homo sapiens
ccacgagttgtcact

SEQ ID NO: 1818481 - DNA, 15 bp, Homo sapiens
cacgagttgtcacta

SEQ ID NO: 1818482 - DNA, 15 bp, Homo sapiens
acgagttgtcactat

SEQ ID NO: 1818483 - DNA, 15 bp, Homo sapiens
cgagttgtcactatc

SEQ ID NO: 1818484 - DNA, 15 bp, Homo sapiens
gagttgtcactatca

SEQ ID NO: 1818485 - DNA, 15 bp, Homo sapiens
agttgtcactatcat

SEQ ID NO: 1818486 - DNA, 15 bp, Homo sapiens
gttgtcactatcatt

SEQ ID NO: 1818487 - DNA, 15 bp, Homo sapiens
ttgtcactatcattt

SEQ ID NO: 1818488 - DNA, 15 bp, Homo sapiens
tgtcactatcattta

SEQ ID NO: 1818489 - DNA, 15 bp, Homo sapiens
gtcactatcatttat

SEQ ID NO: 1818490 - DNA, 15 bp, Homo sapiens
tcactatcatttatc

SEQ ID NO: 1818491 - DNA, 15 bp, Homo sapiens
cactatcatttatcg

SEQ ID NO: 1818492 - DNA, 15 bp, Homo sapiens
actatcatttatcga

SEQ ID NO: 1818493 - DNA, 15 bp, Homo sapiens
ctatcatttatcgag

SEQ ID NO: 1818494 - DNA, 15 bp, Homo sapiens
tatcatttatcgagc

SEQ ID NO: 1818495 - DNA, 15 bp, Homo sapiens
atcatttatcgagca

SEQ ID NO: 1818496 - DNA, 15 bp, Homo sapiens
tcatttatcgagcac

SEQ ID NO: 1818497 - DNA, 15 bp, Homo sapiens
catttatcgagcacc

SEQ ID NO: 1818498 - DNA, 15 bp, Homo sapiens
atttatcgagcacct

SEQ ID NO: 1818499 - DNA, 15 bp, Homo sapiens
tttatcgagcaccta

SEQ ID NO: 1818500 - DNA, 15 bp, Homo sapiens
ttatcgagcacctac

SEQ ID NO: 1818501 - DNA, 15 bp, Homo sapiens
tatcgagcacctact

SEQ ID NO: 1818502 - DNA, 15 bp, Homo sapiens
atcgagcacctactg

SEQ ID NO: 1818503 - DNA, 15 bp, Homo sapiens
tcgagcacctactgg

SEQ ID NO: 1818504 - DNA, 15 bp, Homo sapiens
cgagcacctactggg

SEQ ID NO: 1818505 - DNA, 15 bp, Homo sapiens
gagcacctactgggt

SEQ ID NO: 1818506 - DNA, 15 bp, Homo sapiens
agcacctactgggtg

SEQ ID NO: 1818507 - DNA, 15 bp, Homo sapiens
gcacctactgggtgt

SEQ ID NO: 1818508 - DNA, 15 bp, Homo sapiens
cacctactgggtgtc

SEQ ID NO: 1818509 - DNA, 15 bp, Homo sapiens
acctactgggtgtcc

SEQ ID NO: 1818510 - DNA, 15 bp, Homo sapiens
cctactgggtgtccc

SEQ ID NO: 1818511 - DNA, 15 bp, Homo sapiens
ctactgggtgtcccc

SEQ ID NO: 1818512 - DNA, 15 bp, Homo sapiens
tactgggtgtcccca

SEQ ID NO: 1818513 - DNA, 15 bp, Homo sapiens
actgggtgtccccag

SEQ ID NO: 1818514 - DNA, 15 bp, Homo sapiens
ctgggtgtccccagt

SEQ ID NO: 1818515 - DNA, 15 bp, Homo sapiens
tgggtgtccccagtg

SEQ ID NO: 1818516 - DNA, 15 bp, Homo sapiens
gggtgtccccagtgt

SEQ ID NO: 1818517 - DNA, 15 bp, Homo sapiens
ggtgtccccagtgtc

SEQ ID NO: 1818518 - DNA, 15 bp, Homo sapiens
gtgtccccagtgtcc

SEQ ID NO: 1818519 - DNA, 15 bp, Homo sapiens
tgtccccagtgtcct

SEQ ID NO: 1818520 - DNA, 15 bp, Homo sapiens
gtccccagtgtcctc

SEQ ID NO: 1818521 - DNA, 15 bp, Homo sapiens
tccccagtgtcctca

SEQ ID NO: 1818522 - DNA, 15 bp, Homo sapiens
ccccagtgtcctcag

SEQ ID NO: 1818523 - DNA, 15 bp, Homo sapiens
cccagtgtcctcaga

SEQ ID NO: 1818524 - DNA, 15 bp, Homo sapiens
ccagtgtcctcagat

SEQ ID NO: 1818525 - DNA, 15 bp, Homo sapiens
cagtgtcctcagatc

SEQ ID NO: 1818526 - DNA, 15 bp, Homo sapiens
agtgtcctcagatct

SEQ ID NO: 1818527 - DNA, 15 bp, Homo sapiens
gtgtcctcagatctc

SEQ ID NO: 1818528 - DNA, 15 bp, Homo sapiens
tgtcctcagatctcc

SEQ ID NO: 1818529 - DNA, 15 bp, Homo sapiens
gtcctcagatctcca

SEQ ID NO: 1818530 - DNA, 15 bp, Homo sapiens
tcctcagatctccat

SEQ ID NO: 1818531 - DNA, 15 bp, Homo sapiens
cctcagatctccata

SEQ ID NO: 1818532 - DNA, 15 bp, Homo sapiens
ctcagatctccataa

SEQ ID NO: 1818533 - DNA, 15 bp, Homo sapiens
tcagatctccataac

SEQ ID NO: 1818534 - DNA, 15 bp, Homo sapiens
cagatctccataact

SEQ ID NO: 1818535 - DNA, 15 bp, Homo sapiens
agatctccataactg

SEQ ID NO: 1818536 - DNA, 15 bp, Homo sapiens
gatctccataactgg

SEQ ID NO: 1818537 - DNA, 15 bp, Homo sapiens
atctccataactggg

SEQ ID NO: 1818538 - DNA, 15 bp, Homo sapiens
tctccataactgggg

SEQ ID NO: 1818539 - DNA, 15 bp, Homo sapiens
ctccataactgggga

SEQ ID NO: 1818540 - DNA, 15 bp, Homo sapiens
tccataactggggag

SEQ ID NO: 1818541 - DNA, 15 bp, Homo sapiens
ccataactggggagc

SEQ ID NO: 1818542 - DNA, 15 bp, Homo sapiens
cataactggggagcc

SEQ ID NO: 1818543 - DNA, 15 bp, Homo sapiens
ataactggggagcca

SEQ ID NO: 1818544 - DNA, 15 bp, Homo sapiens
taactggggagccag

SEQ ID NO: 1818545 - DNA, 15 bp, Homo sapiens
aactggggagccagg

SEQ ID NO: 1818546 - DNA, 15 bp, Homo sapiens
actggggagccaggg

SEQ ID NO: 1818547 - DNA, 15 bp, Homo sapiens
ctggggagccagggg

SEQ ID NO: 1818548 - DNA, 15 bp, Homo sapiens
tggggagccaggggc

SEQ ID NO: 1818549 - DNA, 15 bp, Homo sapiens
ggggagccaggggca

SEQ ID NO: 1818550 - DNA, 15 bp, Homo sapiens
gggagccaggggcag

SEQ ID NO: 1818551 - DNA, 15 bp, Homo sapiens
ggagccaggggcagc

SEQ ID NO: 1818552 - DNA, 15 bp, Homo sapiens
gagccaggggcagcg

SEQ ID NO: 1818553 - DNA, 15 bp, Homo sapiens
agccaggggcagcga

SEQ ID NO: 1818554 - DNA, 15 bp, Homo sapiens
gccaggggcagcgac

SEQ ID NO: 1818555 - DNA, 15 bp, Homo sapiens
ccaggggcagcgaca

SEQ ID NO: 1818556 - DNA, 15 bp, Homo sapiens
caggggcagcgacac

SEQ ID NO: 1818557 - DNA, 15 bp, Homo sapiens
aggggcagcgacacg

SEQ ID NO: 1818558 - DNA, 15 bp, Homo sapiens
ggggcagcgacacgg

SEQ ID NO: 1818559 - DNA, 15 bp, Homo sapiens
gggcagcgacacggt

SEQ ID NO: 1818560 - DNA, 15 bp, Homo sapiens
ggcagcgacacggta

SEQ ID NO: 1818561 - DNA, 15 bp, Homo sapiens
gcagcgacacggtag

SEQ ID NO: 1818562 - DNA, 15 bp, Homo sapiens
cagcgacacggtagc

SEQ ID NO: 1818563 - DNA, 15 bp, Homo sapiens
agcgacacggtagct

SEQ ID NO: 1818564 - DNA, 15 bp, Homo sapiens
gcgacacggtagcta

SEQ ID NO: 1818565 - DNA, 15 bp, Homo sapiens
cgacacggtagctag

SEQ ID NO: 1818566 - DNA, 15 bp, Homo sapiens
gacacggtagctagc

SEQ ID NO: 1818567 - DNA, 15 bp, Homo sapiens
acacggtagctagcc

SEQ ID NO: 1818568 - DNA, 15 bp, Homo sapiens
cacggtagctagccg

SEQ ID NO: 1818569 - DNA, 15 bp, Homo sapiens
acggtagctagccgt

SEQ ID NO: 1818570 - DNA, 15 bp, Homo sapiens
cggtagctagccgtc

SEQ ID NO: 1818571 - DNA, 15 bp, Homo sapiens
ggtagctagccgtcg

SEQ ID NO: 1818572 - DNA, 15 bp, Homo sapiens
gtagctagccgtcga

SEQ ID NO: 1818573 - DNA, 15 bp, Homo sapiens
tagctagccgtcgat

SEQ ID NO: 1818574 - DNA, 15 bp, Homo sapiens
agctagccgtcgatt

SEQ ID NO: 1818575 - DNA, 15 bp, Homo sapiens
gctagccgtcgattg

SEQ ID NO: 1818576 - DNA, 15 bp, Homo sapiens
ctagccgtcgattgg

SEQ ID NO: 1818577 - DNA, 15 bp, Homo sapiens
tagccgtcgattgga

SEQ ID NO: 1818578 - DNA, 15 bp, Homo sapiens
agccgtcgattggag

SEQ ID NO: 1818579 - DNA, 15 bp, Homo sapiens
gccgtcgattggaga

SEQ ID NO: 1818580 - DNA, 15 bp, Homo sapiens
ccgtcgattggagaa

SEQ ID NO: 1818581 - DNA, 15 bp, Homo sapiens
cgtcgattggagaac

SEQ ID NO: 1818582 - DNA, 15 bp, Homo sapiens
gtcgattggagaact

SEQ ID NO: 1818583 - DNA, 15 bp, Homo sapiens
tcgattggagaactt

SEQ ID NO: 1818584 - DNA, 15 bp, Homo sapiens
cgattggagaacttt

SEQ ID NO: 1818585 - DNA, 15 bp, Homo sapiens
gattggagaacttta

SEQ ID NO: 1818586 - DNA, 15 bp, Homo sapiens
attggagaactttaa

SEQ ID NO: 1818587 - DNA, 15 bp, Homo sapiens
ttggagaactttaaa

SEQ ID NO: 1818588 - DNA, 15 bp, Homo sapiens
tggagaactttaaaa

SEQ ID NO: 1818589 - DNA, 15 bp, Homo sapiens
ggagaactttaaaat

SEQ ID NO: 1818590 - DNA, 15 bp, Homo sapiens
gagaactttaaaatg

SEQ ID NO: 1818591 - DNA, 15 bp, Homo sapiens
agaactttaaaatga

SEQ ID NO: 1818592 - DNA, 15 bp, Homo sapiens
gaactttaaaatgag

SEQ ID NO: 1818593 - DNA, 15 bp, Homo sapiens
aactttaaaatgagg

SEQ ID NO: 1818594 - DNA, 15 bp, Homo sapiens
actttaaaatgagga

SEQ ID NO: 1818595 - DNA, 15 bp, Homo sapiens
ctttaaaatgaggac

SEQ ID NO: 1818596 - DNA, 15 bp, Homo sapiens
tttaaaatgaggact

SEQ ID NO: 1818597 - DNA, 15 bp, Homo sapiens
ttaaaatgaggactg

SEQ ID NO: 1818598 - DNA, 15 bp, Homo sapiens
taaaatgaggactga

SEQ ID NO: 1818599 - DNA, 15 bp, Homo sapiens
aaaatgaggactgaa

SEQ ID NO: 1818600 - DNA, 15 bp, Homo sapiens
aaatgaggactgaat

SEQ ID NO: 1818601 - DNA, 15 bp, Homo sapiens
aatgaggactgaatt

SEQ ID NO: 1818602 - DNA, 15 bp, Homo sapiens
atgaggactgaatta

SEQ ID NO: 1818603 - DNA, 15 bp, Homo sapiens
tgaggactgaattag

SEQ ID NO: 1818604 - DNA, 15 bp, Homo sapiens
gaggactgaattagc

SEQ ID NO: 1818605 - DNA, 15 bp, Homo sapiens
aggactgaattagct

SEQ ID NO: 1818606 - DNA, 15 bp, Homo sapiens
ggactgaattagctc

SEQ ID NO: 1818607 - DNA, 15 bp, Homo sapiens
gactgaattagctca

SEQ ID NO: 1818608 - DNA, 15 bp, Homo sapiens
actgaattagctcat

SEQ ID NO: 1818609 - DNA, 15 bp, Homo sapiens
ctgaattagctcata

SEQ ID NO: 1818610 - DNA, 15 bp, Homo sapiens
tgaattagctcataa

SEQ ID NO: 1818611 - DNA, 15 bp, Homo sapiens
gaattagctcataaa

SEQ ID NO: 1818612 - DNA, 15 bp, Homo sapiens
aattagctcataaat

SEQ ID NO: 1818613 - DNA, 15 bp, Homo sapiens
attagctcataaatg

SEQ ID NO: 1818614 - DNA, 15 bp, Homo sapiens
ttagctcataaatgg

SEQ ID NO: 1818615 - DNA, 15 bp, Homo sapiens
tagctcataaatgga

SEQ ID NO: 1818616 - DNA, 15 bp, Homo sapiens
agctcataaatggaa

SEQ ID NO: 1818617 - DNA, 15 bp, Homo sapiens
gctcataaatggaac

SEQ ID NO: 1818618 - DNA, 15 bp, Homo sapiens
ctcataaatggaaca

SEQ ID NO: 1818619 - DNA, 15 bp, Homo sapiens
tcataaatggaacac

SEQ ID NO: 1818620 - DNA, 15 bp, Homo sapiens
cataaatggaacacg

SEQ ID NO: 1818621 - DNA, 15 bp, Homo sapiens
ataaatggaacacgg

SEQ ID NO: 1818622 - DNA, 15 bp, Homo sapiens
taaatggaacacggc

SEQ ID NO: 1818623 - DNA, 15 bp, Homo sapiens
aaatggaacacggcg

SEQ ID NO: 1818624 - DNA, 15 bp, Homo sapiens
aatggaacacggcgc

SEQ ID NO: 1818625 - DNA, 15 bp, Homo sapiens
atggaacacggcgct

SEQ ID NO: 1818626 - DNA, 15 bp, Homo sapiens
tggaacacggcgctt

SEQ ID NO: 1818627 - DNA, 15 bp, Homo sapiens
ggaacacggcgctta

SEQ ID NO: 1818628 - DNA, 15 bp, Homo sapiens
gaacacggcgcttaa

SEQ ID NO: 1818629 - DNA, 15 bp, Homo sapiens
aacacggcgcttaac

SEQ ID NO: 1818630 - DNA, 15 bp, Homo sapiens
acacggcgcttaact

SEQ ID NO: 1818631 - DNA, 15 bp, Homo sapiens
cacggcgcttaactg

SEQ ID NO: 1818632 - DNA, 15 bp, Homo sapiens
acggcgcttaactgt

SEQ ID NO: 1818633 - DNA, 15 bp, Homo sapiens
cggcgcttaactgtg

SEQ ID NO: 1818634 - DNA, 15 bp, Homo sapiens
ggcgcttaactgtga

SEQ ID NO: 1818635 - DNA, 15 bp, Homo sapiens
gcgcttaactgtgag

SEQ ID NO: 1818636 - DNA, 15 bp, Homo sapiens
cgcttaactgtgagg

SEQ ID NO: 1818637 - DNA, 15 bp, Homo sapiens
gcttaactgtgaggt

SEQ ID NO: 1818638 - DNA, 15 bp, Homo sapiens
cttaactgtgaggtt

SEQ ID NO: 1818639 - DNA, 15 bp, Homo sapiens
ttaactgtgaggttg

SEQ ID NO: 1818640 - DNA, 15 bp, Homo sapiens
taactgtgaggttgg

SEQ ID NO: 1818641 - DNA, 15 bp, Homo sapiens
aactgtgaggttgga

SEQ ID NO: 1818642 - DNA, 15 bp, Homo sapiens
actgtgaggttggag

SEQ ID NO: 1818643 - DNA, 15 bp, Homo sapiens
ctgtgaggttggagc

SEQ ID NO: 1818644 - DNA, 15 bp, Homo sapiens
tgtgaggttggagct

SEQ ID NO: 1818645 - DNA, 15 bp, Homo sapiens
gtgaggttggagctt

SEQ ID NO: 1818646 - DNA, 15 bp, Homo sapiens
tgaggttggagctta

SEQ ID NO: 1818647 - DNA, 15 bp, Homo sapiens
gaggttggagcttag

SEQ ID NO: 1818648 - DNA, 15 bp, Homo sapiens
aggttggagcttaga

SEQ ID NO: 1818649 - DNA, 15 bp, Homo sapiens
ggttggagcttagaa

SEQ ID NO: 1818650 - DNA, 15 bp, Homo sapiens
gttggagcttagaat

SEQ ID NO: 1818651 - DNA, 15 bp, Homo sapiens
ttggagcttagaatg

SEQ ID NO: 1818652 - DNA, 15 bp, Homo sapiens
tggagcttagaatgt

SEQ ID NO: 1818653 - DNA, 15 bp, Homo sapiens
ggagcttagaatgtg

SEQ ID NO: 1818654 - DNA, 15 bp, Homo sapiens
gagcttagaatgtga

SEQ ID NO: 1818655 - DNA, 15 bp, Homo sapiens
agcttagaatgtgaa

SEQ ID NO: 1818656 - DNA, 15 bp, Homo sapiens
gcttagaatgtgaag

SEQ ID NO: 1818657 - DNA, 15 bp, Homo sapiens
cttagaatgtgaagg

SEQ ID NO: 1818658 - DNA, 15 bp, Homo sapiens
ttagaatgtgaaggg

SEQ ID NO: 1818659 - DNA, 15 bp, Homo sapiens
tagaatgtgaaggga

SEQ ID NO: 1818660 - DNA, 15 bp, Homo sapiens
agaatgtgaagggag

SEQ ID NO: 1818661 - DNA, 15 bp, Homo sapiens
gaatgtgaagggaga

SEQ ID NO: 1818662 - DNA, 15 bp, Homo sapiens
aatgtgaagggagaa

SEQ ID NO: 1818663 - DNA, 15 bp, Homo sapiens
atgtgaagggagaat

SEQ ID NO: 1818664 - DNA, 15 bp, Homo sapiens
tgtgaagggagaatg

SEQ ID NO: 1818665 - DNA, 15 bp, Homo sapiens
gtgaagggagaatga

SEQ ID NO: 1818666 - DNA, 15 bp, Homo sapiens
tgaagggagaatgag

SEQ ID NO: 1818667 - DNA, 15 bp, Homo sapiens
gaagggagaatgagg

SEQ ID NO: 1818668 - DNA, 15 bp, Homo sapiens
aagggagaatgagga

SEQ ID NO: 1818669 - DNA, 15 bp, Homo sapiens
agggagaatgaggaa

SEQ ID NO: 1818670 - DNA, 15 bp, Homo sapiens
gggagaatgaggaat

SEQ ID NO: 1818671 - DNA, 15 bp, Homo sapiens
ggagaatgaggaatg

SEQ ID NO: 1818672 - DNA, 15 bp, Homo sapiens
gagaatgaggaatgc

SEQ ID NO: 1818673 - DNA, 15 bp, Homo sapiens
agaatgaggaatgcg

SEQ ID NO: 1818674 - DNA, 15 bp, Homo sapiens
gaatgaggaatgcga

SEQ ID NO: 1818675 - DNA, 15 bp, Homo sapiens
aatgaggaatgcgag

SEQ ID NO: 1818676 - DNA, 15 bp, Homo sapiens
atgaggaatgcgaga

SEQ ID NO: 1818677 - DNA, 15 bp, Homo sapiens
tgaggaatgcgagac

SEQ ID NO: 1818678 - DNA, 15 bp, Homo sapiens
gaggaatgcgagact

SEQ ID NO: 1818679 - DNA, 15 bp, Homo sapiens
aggaatgcgagactg

SEQ ID NO: 1818680 - DNA, 15 bp, Homo sapiens
ggaatgcgagactgg

SEQ ID NO: 1818681 - DNA, 15 bp, Homo sapiens
gaatgcgagactggg

SEQ ID NO: 1818682 - DNA, 15 bp, Homo sapiens
aatgcgagactggga

SEQ ID NO: 1818683 - DNA, 15 bp, Homo sapiens
atgcgagactgggac

SEQ ID NO: 1818684 - DNA, 15 bp, Homo sapiens
tgcgagactgggact

SEQ ID NO: 1818685 - DNA, 15 bp, Homo sapiens
gcgagactgggactg

SEQ ID NO: 1818686 - DNA, 15 bp, Homo sapiens
cgagactgggactga

SEQ ID NO: 1818687 - DNA, 15 bp, Homo sapiens
gagactgggactgag

SEQ ID NO: 1818688 - DNA, 15 bp, Homo sapiens
agactgggactgaga

SEQ ID NO: 1818689 - DNA, 15 bp, Homo sapiens
gactgggactgagat

SEQ ID NO: 1818690 - DNA, 15 bp, Homo sapiens
actgggactgagatg

SEQ ID NO: 1818691 - DNA, 15 bp, Homo sapiens
ctgggactgagatgg

SEQ ID NO: 1818692 - DNA, 15 bp, Homo sapiens
tgggactgagatgga

SEQ ID NO: 1818693 - DNA, 15 bp, Homo sapiens
gggactgagatggaa

SEQ ID NO: 1818694 - DNA, 15 bp, Homo sapiens
ggactgagatggaac

SEQ ID NO: 1818695 - DNA, 15 bp, Homo sapiens
gactgagatggaacc

SEQ ID NO: 1818696 - DNA, 15 bp, Homo sapiens
actgagatggaaccg

SEQ ID NO: 1818697 - DNA, 15 bp, Homo sapiens
ctgagatggaaccgg

SEQ ID NO: 1818698 - DNA, 15 bp, Homo sapiens
tgagatggaaccggc

SEQ ID NO: 1818699 - DNA, 15 bp, Homo sapiens
gagatggaaccggcg

SEQ ID NO: 1818700 - DNA, 15 bp, Homo sapiens
agatggaaccggcgg

SEQ ID NO: 1818701 - DNA, 15 bp, Homo sapiens
gatggaaccggcggt

SEQ ID NO: 1818702 - DNA, 15 bp, Homo sapiens
atggaaccggcggtg

SEQ ID NO: 1818703 - DNA, 15 bp, Homo sapiens
tggaaccggcggtgg

SEQ ID NO: 1818704 - DNA, 15 bp, Homo sapiens
ggaaccggcggtggg

SEQ ID NO: 1818705 - DNA, 15 bp, Homo sapiens
gaaccggcggtgggg

SEQ ID NO: 1818706 - DNA, 15 bp, Homo sapiens
aaccggcggtgggga

SEQ ID NO: 1818707 - DNA, 15 bp, Homo sapiens
accggcggtggggag

SEQ ID NO: 1818708 - DNA, 15 bp, Homo sapiens
ccggcggtggggagg

SEQ ID NO: 1818709 - DNA, 15 bp, Homo sapiens
cggcggtggggaggg

SEQ ID NO: 1818710 - DNA, 15 bp, Homo sapiens
ggcggtggggagggg

SEQ ID NO: 1818711 - DNA, 15 bp, Homo sapiens
gcggtggggaggggg

SEQ ID NO: 1818712 - DNA, 15 bp, Homo sapiens
cggtggggagggggt

SEQ ID NO: 1818713 - DNA, 15 bp, Homo sapiens
ggtggggagggggtg

SEQ ID NO: 1818714 - DNA, 15 bp, Homo sapiens
gtggggagggggtgg

SEQ ID NO: 1818715 - DNA, 15 bp, Homo sapiens
tggggagggggtggg

SEQ ID NO: 1818716 - DNA, 15 bp, Homo sapiens
ggggagggggtgggg

SEQ ID NO: 1818717 - DNA, 15 bp, Homo sapiens
gggagggggtggggg

SEQ ID NO: 1818718 - DNA, 15 bp, Homo sapiens
ggagggggtgggggg

SEQ ID NO: 1818719 - DNA, 15 bp, Homo sapiens
gagggggtgggggga

SEQ ID NO: 1818720 - DNA, 15 bp, Homo sapiens
agggggtggggggat

SEQ ID NO: 1818721 - DNA, 15 bp, Homo sapiens
gggggtggggggatg

SEQ ID NO: 1818722 - DNA, 15 bp, Homo sapiens
gggtggggggatgga

SEQ ID NO: 1818723 - DNA, 15 bp, Homo sapiens
ggtggggggatggaa

SEQ ID NO: 1818724 - DNA, 15 bp, Homo sapiens
gtggggggatggaat

SEQ ID NO: 1818725 - DNA, 15 bp, Homo sapiens
tggggggatggaatt

SEQ ID NO: 1818726 - DNA, 15 bp, Homo sapiens
ggggggatggaattt

SEQ ID NO: 1818727 - DNA, 15 bp, Homo sapiens
gggggatggaatttg

SEQ ID NO: 1818728 - DNA, 15 bp, Homo sapiens
ggggatggaatttga

SEQ ID NO: 1818729 - DNA, 15 bp, Homo sapiens
gggatggaatttgaa

SEQ ID NO: 1818730 - DNA, 15 bp, Homo sapiens
ggatggaatttgaac

SEQ ID NO: 1818731 - DNA, 15 bp, Homo sapiens
gatggaatttgaacc

SEQ ID NO: 1818732 - DNA, 15 bp, Homo sapiens
atggaatttgaaccc

SEQ ID NO: 1818733 - DNA, 15 bp, Homo sapiens
tggaatttgaacccc

SEQ ID NO: 1818734 - DNA, 15 bp, Homo sapiens
ggaatttgaaccccg

SEQ ID NO: 1818735 - DNA, 15 bp, Homo sapiens
gaatttgaaccccgg

SEQ ID NO: 1818736 - DNA, 15 bp, Homo sapiens
aatttgaaccccggg

SEQ ID NO: 1818737 - DNA, 15 bp, Homo sapiens
atttgaaccccggga

SEQ ID NO: 1818738 - DNA, 15 bp, Homo sapiens
tttgaaccccgggag

SEQ ID NO: 1818739 - DNA, 15 bp, Homo sapiens
ttgaaccccgggaga

SEQ ID NO: 1818740 - DNA, 15 bp, Homo sapiens
tgaaccccgggagag

SEQ ID NO: 1818741 - DNA, 15 bp, Homo sapiens
gaaccccgggagagg

SEQ ID NO: 1818742 - DNA, 15 bp, Homo sapiens
aaccccgggagagga

SEQ ID NO: 1818743 - DNA, 15 bp, Homo sapiens
accccgggagaggaa

SEQ ID NO: 1818744 - DNA, 15 bp, Homo sapiens
ccccgggagaggaag

SEQ ID NO: 1818745 - DNA, 15 bp, Homo sapiens
cccgggagaggaaga

SEQ ID NO: 1818746 - DNA, 15 bp, Homo sapiens
ccgggagaggaagat

SEQ ID NO: 1818747 - DNA, 15 bp, Homo sapiens
cgggagaggaagatg

SEQ ID NO: 1818748 - DNA, 15 bp, Homo sapiens
gggagaggaagatgg

SEQ ID NO: 1818749 - DNA, 15 bp, Homo sapiens
ggagaggaagatgga

SEQ ID NO: 1818750 - DNA, 15 bp, Homo sapiens
gagaggaagatggaa

SEQ ID NO: 1818751 - DNA, 15 bp, Homo sapiens
agaggaagatggaat

SEQ ID NO: 1818752 - DNA, 15 bp, Homo sapiens
gaggaagatggaatt

SEQ ID NO: 1818753 - DNA, 15 bp, Homo sapiens
aggaagatggaattt

SEQ ID NO: 1818754 - DNA, 15 bp, Homo sapiens
ggaagatggaatttt

SEQ ID NO: 1818755 - DNA, 15 bp, Homo sapiens
gaagatggaattttc

SEQ ID NO: 1818756 - DNA, 15 bp, Homo sapiens
aagatggaattttct

SEQ ID NO: 1818757 - DNA, 15 bp, Homo sapiens
agatggaattttcta

SEQ ID NO: 1818758 - DNA, 15 bp, Homo sapiens
gatggaattttctat

SEQ ID NO: 1818759 - DNA, 15 bp, Homo sapiens
atggaattttctatg

SEQ ID NO: 1818760 - DNA, 15 bp, Homo sapiens
tggaattttctatgg

SEQ ID NO: 1818761 - DNA, 15 bp, Homo sapiens
ggaattttctatgga

SEQ ID NO: 1818762 - DNA, 15 bp, Homo sapiens
gaattttctatggag

SEQ ID NO: 1818763 - DNA, 15 bp, Homo sapiens
aattttctatggagg

SEQ ID NO: 1818764 - DNA, 15 bp, Homo sapiens
attttctatggaggc

SEQ ID NO: 1818765 - DNA, 15 bp, Homo sapiens
ttttctatggaggcc

SEQ ID NO: 1818766 - DNA, 15 bp, Homo sapiens
tttctatggaggccg

SEQ ID NO: 1818767 - DNA, 15 bp, Homo sapiens
ttctatggaggccga

SEQ ID NO: 1818768 - DNA, 15 bp, Homo sapiens
tctatggaggccgac

SEQ ID NO: 1818769 - DNA, 15 bp, Homo sapiens
ctatggaggccgacc

SEQ ID NO: 1818770 - DNA, 15 bp, Homo sapiens
tatggaggccgacct

SEQ ID NO: 1818771 - DNA, 15 bp, Homo sapiens
atggaggccgacctg

SEQ ID NO: 1818772 - DNA, 15 bp, Homo sapiens
tggaggccgacctgg

SEQ ID NO: 1818773 - DNA, 15 bp, Homo sapiens
ggaggccgacctggg

SEQ ID NO: 1818774 - DNA, 15 bp, Homo sapiens
gaggccgacctgggg

SEQ ID NO: 1818775 - DNA, 15 bp, Homo sapiens
aggccgacctgggga

SEQ ID NO: 1818776 - DNA, 15 bp, Homo sapiens
ggccgacctggggat

SEQ ID NO: 1818777 - DNA, 15 bp, Homo sapiens
gccgacctggggatg

SEQ ID NO: 1818778 - DNA, 15 bp, Homo sapiens
ccgacctggggatgg

SEQ ID NO: 1818779 - DNA, 15 bp, Homo sapiens
cgacctggggatggg

SEQ ID NO: 1818780 - DNA, 15 bp, Homo sapiens
gacctggggatgggg

SEQ ID NO: 1818781 - DNA, 15 bp, Homo sapiens
acctggggatgggga

SEQ ID NO: 1818782 - DNA, 15 bp, Homo sapiens
cctggggatggggag

SEQ ID NO: 1818783 - DNA, 15 bp, Homo sapiens
ctggggatggggaga

SEQ ID NO: 1818784 - DNA, 15 bp, Homo sapiens
tggggatggggagat

SEQ ID NO: 1818785 - DNA, 15 bp, Homo sapiens
ggggatggggagata

SEQ ID NO: 1818786 - DNA, 15 bp, Homo sapiens
gggatggggagataa

SEQ ID NO: 1818787 - DNA, 15 bp, Homo sapiens
ggatggggagataag

SEQ ID NO: 1818788 - DNA, 15 bp, Homo sapiens
gatggggagataaga

SEQ ID NO: 1818789 - DNA, 15 bp, Homo sapiens
atggggagataagag

SEQ ID NO: 1818790 - DNA, 15 bp, Homo sapiens
tggggagataagaga

SEQ ID NO: 1818791 - DNA, 15 bp, Homo sapiens
ggggagataagagaa

SEQ ID NO: 1818792 - DNA, 15 bp, Homo sapiens
gggagataagagaag

SEQ ID NO: 1818793 - DNA, 15 bp, Homo sapiens
ggagataagagaaga

SEQ ID NO: 1818794 - DNA, 15 bp, Homo sapiens
gagataagagaagac

SEQ ID NO: 1818795 - DNA, 15 bp, Homo sapiens
agataagagaagacc

SEQ ID NO: 1818796 - DNA, 15 bp, Homo sapiens
gataagagaagacca

SEQ ID NO: 1818797 - DNA, 15 bp, Homo sapiens
ataagagaagaccag

SEQ ID NO: 1818798 - DNA, 15 bp, Homo sapiens
taagagaagaccagg

SEQ ID NO: 1818799 - DNA, 15 bp, Homo sapiens
aagagaagaccagga

SEQ ID NO: 1818800 - DNA, 15 bp, Homo sapiens
agagaagaccaggag

SEQ ID NO: 1818801 - DNA, 15 bp, Homo sapiens
gagaagaccaggagg

SEQ ID NO: 1818802 - DNA, 15 bp, Homo sapiens
agaagaccaggaggg

SEQ ID NO: 1818803 - DNA, 15 bp, Homo sapiens
gaagaccaggaggga

SEQ ID NO: 1818804 - DNA, 15 bp, Homo sapiens
aagaccaggagggag

SEQ ID NO: 1818805 - DNA, 15 bp, Homo sapiens
agaccaggagggagt

SEQ ID NO: 1818806 - DNA, 15 bp, Homo sapiens
gaccaggagggagtt

SEQ ID NO: 1818807 - DNA, 15 bp, Homo sapiens
accaggagggagtta

SEQ ID NO: 1818808 - DNA, 15 bp, Homo sapiens
ccaggagggagttaa

SEQ ID NO: 1818809 - DNA, 15 bp, Homo sapiens
caggagggagttaaa

SEQ ID NO: 1818810 - DNA, 15 bp, Homo sapiens
aggagggagttaaat

SEQ ID NO: 1818811 - DNA, 15 bp, Homo sapiens
ggagggagttaaata

SEQ ID NO: 1818812 - DNA, 15 bp, Homo sapiens
gagggagttaaatag

SEQ ID NO: 1818813 - DNA, 15 bp, Homo sapiens
agggagttaaatagg

SEQ ID NO: 1818814 - DNA, 15 bp, Homo sapiens
gggagttaaataggg

SEQ ID NO: 1818815 - DNA, 15 bp, Homo sapiens
ggagttaaataggga

SEQ ID NO: 1818816 - DNA, 15 bp, Homo sapiens
gagttaaatagggaa

SEQ ID NO: 1818817 - DNA, 15 bp, Homo sapiens
agttaaatagggaat

SEQ ID NO: 1818818 - DNA, 15 bp, Homo sapiens
gttaaatagggaatg

SEQ ID NO: 1818819 - DNA, 15 bp, Homo sapiens
ttaaatagggaatgg

SEQ ID NO: 1818820 - DNA, 15 bp, Homo sapiens
taaatagggaatggg

SEQ ID NO: 1818821 - DNA, 15 bp, Homo sapiens
aaatagggaatgggt

SEQ ID NO: 1818822 - DNA, 15 bp, Homo sapiens
aatagggaatgggtt

SEQ ID NO: 1818823 - DNA, 15 bp, Homo sapiens
atagggaatgggttg

SEQ ID NO: 1818824 - DNA, 15 bp, Homo sapiens
tagggaatgggttgg

SEQ ID NO: 1818825 - DNA, 15 bp, Homo sapiens
agggaatgggttggg

SEQ ID NO: 1818826 - DNA, 15 bp, Homo sapiens
gggaatgggttgggg

SEQ ID NO: 1818827 - DNA, 15 bp, Homo sapiens
ggaatgggttggggg

SEQ ID NO: 1818828 - DNA, 15 bp, Homo sapiens
gaatgggttgggggc

SEQ ID NO: 1818829 - DNA, 15 bp, Homo sapiens
aatgggttgggggcg

SEQ ID NO: 1818830 - DNA, 15 bp, Homo sapiens
atgggttgggggcgg

SEQ ID NO: 1818831 - DNA, 15 bp, Homo sapiens
tgggttgggggcggc

SEQ ID NO: 1818832 - DNA, 15 bp, Homo sapiens
gggttgggggcggct

SEQ ID NO: 1818833 - DNA, 15 bp, Homo sapiens
ggttgggggcggctt

SEQ ID NO: 1818834 - DNA, 15 bp, Homo sapiens
gttgggggcggcttg

SEQ ID NO: 1818835 - DNA, 15 bp, Homo sapiens
ttgggggcggcttgg

SEQ ID NO: 1818836 - DNA, 15 bp, Homo sapiens
tgggggcggcttggt

SEQ ID NO: 1818837 - DNA, 15 bp, Homo sapiens
gggggcggcttggta

SEQ ID NO: 1818838 - DNA, 15 bp, Homo sapiens
ggggcggcttggtaa

SEQ ID NO: 1818839 - DNA, 15 bp, Homo sapiens
gggcggcttggtaaa

SEQ ID NO: 1818840 - DNA, 15 bp, Homo sapiens
ggcggcttggtaaat

SEQ ID NO: 1818841 - DNA, 15 bp, Homo sapiens
gcggcttggtaaatg

SEQ ID NO: 1818842 - DNA, 15 bp, Homo sapiens
cggcttggtaaatgt

SEQ ID NO: 1818843 - DNA, 15 bp, Homo sapiens
ggcttggtaaatgtg

SEQ ID NO: 1818844 - DNA, 15 bp, Homo sapiens
gcttggtaaatgtgc

SEQ ID NO: 1818845 - DNA, 15 bp, Homo sapiens
cttggtaaatgtgct

SEQ ID NO: 1818846 - DNA, 15 bp, Homo sapiens
ttggtaaatgtgctg

SEQ ID NO: 1818847 - DNA, 15 bp, Homo sapiens
tggtaaatgtgctgg

SEQ ID NO: 1818848 - DNA, 15 bp, Homo sapiens
ggtaaatgtgctggg

SEQ ID NO: 1818849 - DNA, 15 bp, Homo sapiens
gtaaatgtgctggga

SEQ ID NO: 1818850 - DNA, 15 bp, Homo sapiens
taaatgtgctgggat

SEQ ID NO: 1818851 - DNA, 15 bp, Homo sapiens
aaatgtgctgggatt

SEQ ID NO: 1818852 - DNA, 15 bp, Homo sapiens
aatgtgctgggatta

SEQ ID NO: 1818853 - DNA, 15 bp, Homo sapiens
atgtgctgggattag

SEQ ID NO: 1818854 - DNA, 15 bp, Homo sapiens
tgtgctgggattagg

SEQ ID NO: 1818855 - DNA, 15 bp, Homo sapiens
gtgctgggattaggc

SEQ ID NO: 1818856 - DNA, 15 bp, Homo sapiens
tgctgggattaggct

SEQ ID NO: 1818857 - DNA, 15 bp, Homo sapiens
gctgggattaggctg

SEQ ID NO: 1818858 - DNA, 15 bp, Homo sapiens
ctgggattaggctgt

SEQ ID NO: 1818859 - DNA, 15 bp, Homo sapiens
tgggattaggctgtt

SEQ ID NO: 1818860 - DNA, 15 bp, Homo sapiens
gggattaggctgttg

SEQ ID NO: 1818861 - DNA, 15 bp, Homo sapiens
ggattaggctgttgc

SEQ ID NO: 1818862 - DNA, 15 bp, Homo sapiens
gattaggctgttgca

SEQ ID NO: 1818863 - DNA, 15 bp, Homo sapiens
attaggctgttgcag

SEQ ID NO: 1818864 - DNA, 15 bp, Homo sapiens
ttaggctgttgcaga

SEQ ID NO: 1818865 - DNA, 15 bp, Homo sapiens
taggctgttgcagat

SEQ ID NO: 1818866 - DNA, 15 bp, Homo sapiens
aggctgttgcagata

SEQ ID NO: 1818867 - DNA, 15 bp, Homo sapiens
ggctgttgcagataa

SEQ ID NO: 1818868 - DNA, 15 bp, Homo sapiens
gctgttgcagataat

SEQ ID NO: 1818869 - DNA, 15 bp, Homo sapiens
ctgttgcagataatg

SEQ ID NO: 1818870 - DNA, 15 bp, Homo sapiens
tgttgcagataatgc

SEQ ID NO: 1818871 - DNA, 15 bp, Homo sapiens
gttgcagataatgca

SEQ ID NO: 1818872 - DNA, 15 bp, Homo sapiens
ttgcagataatgcaa

SEQ ID NO: 1818873 - DNA, 15 bp, Homo sapiens
tgcagataatgcaac

SEQ ID NO: 1818874 - DNA, 15 bp, Homo sapiens
gcagataatgcaaca

SEQ ID NO: 1818875 - DNA, 15 bp, Homo sapiens
cagataatgcaacaa

SEQ ID NO: 1818876 - DNA, 15 bp, Homo sapiens
agataatgcaacaag

SEQ ID NO: 1818877 - DNA, 15 bp, Homo sapiens
gataatgcaacaagg

SEQ ID NO: 1818878 - DNA, 15 bp, Homo sapiens
ataatgcaacaaggc

SEQ ID NO: 1818879 - DNA, 15 bp, Homo sapiens
taatgcaacaaggct

SEQ ID NO: 1818880 - DNA, 15 bp, Homo sapiens
aatgcaacaaggctt

SEQ ID NO: 1818881 - DNA, 15 bp, Homo sapiens
atgcaacaaggcttg

SEQ ID NO: 1818882 - DNA, 15 bp, Homo sapiens
tgcaacaaggcttgg

SEQ ID NO: 1818883 - DNA, 15 bp, Homo sapiens
gcaacaaggcttgga

SEQ ID NO: 1818884 - DNA, 15 bp, Homo sapiens
caacaaggcttggaa

SEQ ID NO: 1818885 - DNA, 15 bp, Homo sapiens
aacaaggcttggaag

SEQ ID NO: 1818886 - DNA, 15 bp, Homo sapiens
acaaggcttggaagg

SEQ ID NO: 1818887 - DNA, 15 bp, Homo sapiens
caaggcttggaaggc

SEQ ID NO: 1818888 - DNA, 15 bp, Homo sapiens
aaggcttggaaggct

SEQ ID NO: 1818889 - DNA, 15 bp, Homo sapiens
aggcttggaaggcta

SEQ ID NO: 1818890 - DNA, 15 bp, Homo sapiens
ggcttggaaggctaa

SEQ ID NO: 1818891 - DNA, 15 bp, Homo sapiens
gcttggaaggctaac

SEQ ID NO: 1818892 - DNA, 15 bp, Homo sapiens
cttggaaggctaacc

SEQ ID NO: 1818893 - DNA, 15 bp, Homo sapiens
ttggaaggctaacct

SEQ ID NO: 1818894 - DNA, 15 bp, Homo sapiens
tggaaggctaacctg

SEQ ID NO: 1818895 - DNA, 15 bp, Homo sapiens
ggaaggctaacctgg

SEQ ID NO: 1818896 - DNA, 15 bp, Homo sapiens
gaaggctaacctggg

SEQ ID NO: 1818897 - DNA, 15 bp, Homo sapiens
aaggctaacctgggg

SEQ ID NO: 1818898 - DNA, 15 bp, Homo sapiens
aggctaacctggggt

SEQ ID NO: 1818899 - DNA, 15 bp, Homo sapiens
ggctaacctggggtg

SEQ ID NO: 1818900 - DNA, 15 bp, Homo sapiens
gctaacctggggtga

SEQ ID NO: 1818901 - DNA, 15 bp, Homo sapiens
ctaacctggggtgag

SEQ ID NO: 1818902 - DNA, 15 bp, Homo sapiens
taacctggggtgagg

SEQ ID NO: 1818903 - DNA, 15 bp, Homo sapiens
aacctggggtgaggc

SEQ ID NO: 1818904 - DNA, 15 bp, Homo sapiens
acctggggtgaggcc

SEQ ID NO: 1818905 - DNA, 15 bp, Homo sapiens
cctggggtgaggccg

SEQ ID NO: 1818906 - DNA, 15 bp, Homo sapiens
ctggggtgaggccgg

SEQ ID NO: 1818907 - DNA, 15 bp, Homo sapiens
tggggtgaggccggg

SEQ ID NO: 1818908 - DNA, 15 bp, Homo sapiens
ggggtgaggccgggt

SEQ ID NO: 1818909 - DNA, 15 bp, Homo sapiens
gggtgaggccgggtt

SEQ ID NO: 1818910 - DNA, 15 bp, Homo sapiens
ggtgaggccgggttg

SEQ ID NO: 1818911 - DNA, 15 bp, Homo sapiens
gtgaggccgggttgg

SEQ ID NO: 1818912 - DNA, 15 bp, Homo sapiens
tgaggccgggttggg

SEQ ID NO: 1818913 - DNA, 15 bp, Homo sapiens
gaggccgggttgggg

SEQ ID NO: 1818914 - DNA, 15 bp, Homo sapiens
aggccgggttggggc

SEQ ID NO: 1818915 - DNA, 15 bp, Homo sapiens
ggccgggttggggcc

SEQ ID NO: 1818916 - DNA, 15 bp, Homo sapiens
gccgggttggggccg

SEQ ID NO: 1818917 - DNA, 15 bp, Homo sapiens
ccgggttggggccgg

SEQ ID NO: 1818918 - DNA, 15 bp, Homo sapiens
cgggttggggccggg

SEQ ID NO: 1818919 - DNA, 15 bp, Homo sapiens
gggttggggccgggc

SEQ ID NO: 1818920 - DNA, 15 bp, Homo sapiens
ggttggggccgggct

SEQ ID NO: 1818921 - DNA, 15 bp, Homo sapiens
gttggggccgggctg

SEQ ID NO: 1818922 - DNA, 15 bp, Homo sapiens
ttggggccgggctgg

SEQ ID NO: 1818923 - DNA, 15 bp, Homo sapiens
tggggccgggctggg

SEQ ID NO: 1818924 - DNA, 15 bp, Homo sapiens
ggggccgggctgggg

SEQ ID NO: 1818925 - DNA, 15 bp, Homo sapiens
gggccgggctggggg

SEQ ID NO: 1818926 - DNA, 15 bp, Homo sapiens
ggccgggctgggggt

SEQ ID NO: 1818927 - DNA, 15 bp, Homo sapiens
gccgggctgggggtg

SEQ ID NO: 1818928 - DNA, 15 bp, Homo sapiens
ccgggctgggggtgg

SEQ ID NO: 1818929 - DNA, 15 bp, Homo sapiens
cgggctgggggtggg

SEQ ID NO: 1818930 - DNA, 15 bp, Homo sapiens
gggctgggggtggga

SEQ ID NO: 1818931 - DNA, 15 bp, Homo sapiens
ggctgggggtgggag

SEQ ID NO: 1818932 - DNA, 15 bp, Homo sapiens
gctgggggtgggagg

SEQ ID NO: 1818933 - DNA, 15 bp, Homo sapiens
ctgggggtgggagga

SEQ ID NO: 1818934 - DNA, 15 bp, Homo sapiens
tgggggtgggaggag

SEQ ID NO: 1818935 - DNA, 15 bp, Homo sapiens
gggggtgggaggagt

SEQ ID NO: 1818936 - DNA, 15 bp, Homo sapiens
ggggtgggaggagtc

SEQ ID NO: 1818937 - DNA, 15 bp, Homo sapiens
gggtgggaggagtcc

SEQ ID NO: 1818938 - DNA, 15 bp, Homo sapiens
ggtgggaggagtcct

SEQ ID NO: 1818939 - DNA, 15 bp, Homo sapiens
gtgggaggagtcctc

SEQ ID NO: 1818940 - DNA, 15 bp, Homo sapiens
tgggaggagtcctca

SEQ ID NO: 1818941 - DNA, 15 bp, Homo sapiens
gggaggagtcctcac

SEQ ID NO: 1818942 - DNA, 15 bp, Homo sapiens
ggaggagtcctcact

SEQ ID NO: 1818943 - DNA, 15 bp, Homo sapiens
gaggagtcctcactg

SEQ ID NO: 1818944 - DNA, 15 bp, Homo sapiens
aggagtcctcactgg

SEQ ID NO: 1818945 - DNA, 15 bp, Homo sapiens
ggagtcctcactggc

SEQ ID NO: 1818946 - DNA, 15 bp, Homo sapiens
gagtcctcactggcg

SEQ ID NO: 1818947 - DNA, 15 bp, Homo sapiens
agtcctcactggcgg

SEQ ID NO: 1818948 - DNA, 15 bp, Homo sapiens
gtcctcactggcggt

SEQ ID NO: 1818949 - DNA, 15 bp, Homo sapiens
tcctcactggcggtt

SEQ ID NO: 1818950 - DNA, 15 bp, Homo sapiens
cctcactggcggttg

SEQ ID NO: 1818951 - DNA, 15 bp, Homo sapiens
ctcactggcggttga

SEQ ID NO: 1818952 - DNA, 15 bp, Homo sapiens
tcactggcggttgat

SEQ ID NO: 1818953 - DNA, 15 bp, Homo sapiens
cactggcggttgatt

SEQ ID NO: 1818954 - DNA, 15 bp, Homo sapiens
actggcggttgattg

SEQ ID NO: 1818955 - DNA, 15 bp, Homo sapiens
ctggcggttgattga

SEQ ID NO: 1818956 - DNA, 15 bp, Homo sapiens
tggcggttgattgac

SEQ ID NO: 1818957 - DNA, 15 bp, Homo sapiens
ggcggttgattgaca

SEQ ID NO: 1818958 - DNA, 15 bp, Homo sapiens
gcggttgattgacag

SEQ ID NO: 1818959 - DNA, 15 bp, Homo sapiens
cggttgattgacagt

SEQ ID NO: 1818960 - DNA, 15 bp, Homo sapiens
ggttgattgacagtt

SEQ ID NO: 1818961 - DNA, 15 bp, Homo sapiens
gttgattgacagttt

SEQ ID NO: 1818962 - DNA, 15 bp, Homo sapiens
ttgattgacagtttc

SEQ ID NO: 1818963 - DNA, 15 bp, Homo sapiens
tgattgacagtttct

SEQ ID NO: 1818964 - DNA, 15 bp, Homo sapiens
gattgacagtttctc

SEQ ID NO: 1818965 - DNA, 15 bp, Homo sapiens
attgacagtttctcc

SEQ ID NO: 1818966 - DNA, 15 bp, Homo sapiens
ttgacagtttctcct

SEQ ID NO: 1818967 - DNA, 15 bp, Homo sapiens
tgacagtttctcctt

SEQ ID NO: 1818968 - DNA, 15 bp, Homo sapiens
gacagtttctccttc

SEQ ID NO: 1818969 - DNA, 15 bp, Homo sapiens
acagtttctccttcc

SEQ ID NO: 1818970 - DNA, 15 bp, Homo sapiens
cagtttctccttccc

SEQ ID NO: 1818971 - DNA, 15 bp, Homo sapiens
agtttctccttcccc

SEQ ID NO: 1818972 - DNA, 15 bp, Homo sapiens
gtttctccttcccca

SEQ ID NO: 1818973 - DNA, 15 bp, Homo sapiens
tttctccttccccag

SEQ ID NO: 1818974 - DNA, 15 bp, Homo sapiens
ttctccttccccaga

SEQ ID NO: 1818975 - DNA, 15 bp, Homo sapiens
tctccttccccagac

SEQ ID NO: 1818976 - DNA, 15 bp, Homo sapiens
ctccttccccagact

SEQ ID NO: 1818977 - DNA, 15 bp, Homo sapiens
tccttccccagactg

SEQ ID NO: 1818978 - DNA, 15 bp, Homo sapiens
ccttccccagactgg

SEQ ID NO: 1818979 - DNA, 15 bp, Homo sapiens
cttccccagactggc

SEQ ID NO: 1818980 - DNA, 15 bp, Homo sapiens
ttccccagactggcc

SEQ ID NO: 1818981 - DNA, 15 bp, Homo sapiens
tccccagactggcca

SEQ ID NO: 1818982 - DNA, 15 bp, Homo sapiens
ccccagactggccaa

SEQ ID NO: 1818983 - DNA, 15 bp, Homo sapiens
cccagactggccaat

SEQ ID NO: 1818984 - DNA, 15 bp, Homo sapiens
ccagactggccaatc

SEQ ID NO: 1818985 - DNA, 15 bp, Homo sapiens
cagactggccaatca

SEQ ID NO: 1818986 - DNA, 15 bp, Homo sapiens
agactggccaatcac

SEQ ID NO: 1818987 - DNA, 15 bp, Homo sapiens
gactggccaatcaca

SEQ ID NO: 1818988 - DNA, 15 bp, Homo sapiens
actggccaatcacag

SEQ ID NO: 1818989 - DNA, 15 bp, Homo sapiens
ctggccaatcacagg

SEQ ID NO: 1818990 - DNA, 15 bp, Homo sapiens
tggccaatcacaggc

SEQ ID NO: 1818991 - DNA, 15 bp, Homo sapiens
ggccaatcacaggca

SEQ ID NO: 1818992 - DNA, 15 bp, Homo sapiens
gccaatcacaggcag

SEQ ID NO: 1818993 - DNA, 15 bp, Homo sapiens
ccaatcacaggcagg

SEQ ID NO: 1818994 - DNA, 15 bp, Homo sapiens
caatcacaggcagga

SEQ ID NO: 1818995 - DNA, 15 bp, Homo sapiens
aatcacaggcaggaa

SEQ ID NO: 1818996 - DNA, 15 bp, Homo sapiens
atcacaggcaggaag

SEQ ID NO: 1818997 - DNA, 15 bp, Homo sapiens
tcacaggcaggaaga

SEQ ID NO: 1818998 - DNA, 15 bp, Homo sapiens
cacaggcaggaagat

SEQ ID NO: 1818999 - DNA, 15 bp, Homo sapiens
acaggcaggaagatg

SEQ ID NO: 1819000 - DNA, 15 bp, Homo sapiens
caggcaggaagatga

SEQ ID NO: 1819001 - DNA, 15 bp, Homo sapiens
aggcaggaagatgaa

SEQ ID NO: 1819002 - DNA, 15 bp, Homo sapiens
ggcaggaagatgaag

SEQ ID NO: 1819003 - DNA, 15 bp, Homo sapiens
gcaggaagatgaagg

SEQ ID NO: 1819004 - DNA, 15 bp, Homo sapiens
caggaagatgaaggt

SEQ ID NO: 1819005 - DNA, 15 bp, Homo sapiens
aggaagatgaaggtt

SEQ ID NO: 1819006 - DNA, 15 bp, Homo sapiens
ggaagatgaaggttc

SEQ ID NO: 1819007 - DNA, 15 bp, Homo sapiens
gaagatgaaggttct

SEQ ID NO: 1819008 - DNA, 15 bp, Homo sapiens
aagatgaaggttctg

SEQ ID NO: 1819009 - DNA, 15 bp, Homo sapiens
agatgaaggttctgt

SEQ ID NO: 1819010 - DNA, 15 bp, Homo sapiens
gatgaaggttctgtg

SEQ ID NO: 1819011 - DNA, 15 bp, Homo sapiens
atgaaggttctgtgg

SEQ ID NO: 1819012 - DNA, 15 bp, Homo sapiens
tgaaggttctgtggg

SEQ ID NO: 1819013 - DNA, 15 bp, Homo sapiens
gaaggttctgtgggc

SEQ ID NO: 1819014 - DNA, 15 bp, Homo sapiens
aaggttctgtgggct

SEQ ID NO: 1819015 - DNA, 15 bp, Homo sapiens
aggttctgtgggctg

SEQ ID NO: 1819016 - DNA, 15 bp, Homo sapiens
ggttctgtgggctgc

SEQ ID NO: 1819017 - DNA, 15 bp, Homo sapiens
gttctgtgggctgcg

SEQ ID NO: 1819018 - DNA, 15 bp, Homo sapiens
ttctgtgggctgcgt

SEQ ID NO: 1819019 - DNA, 15 bp, Homo sapiens
tctgtgggctgcgtt

SEQ ID NO: 1819020 - DNA, 15 bp, Homo sapiens
ctgtgggctgcgttg

SEQ ID NO: 1819021 - DNA, 15 bp, Homo sapiens
tgtgggctgcgttgc

SEQ ID NO: 1819022 - DNA, 15 bp, Homo sapiens
gtgggctgcgttgct

SEQ ID NO: 1819023 - DNA, 15 bp, Homo sapiens
tgggctgcgttgctg

SEQ ID NO: 1819024 - DNA, 15 bp, Homo sapiens
gggctgcgttgctgg

SEQ ID NO: 1819025 - DNA, 15 bp, Homo sapiens
ggctgcgttgctggt

SEQ ID NO: 1819026 - DNA, 15 bp, Homo sapiens
gctgcgttgctggtc

SEQ ID NO: 1819027 - DNA, 15 bp, Homo sapiens
ctgcgttgctggtca

SEQ ID NO: 1819028 - DNA, 15 bp, Homo sapiens
tgcgttgctggtcac

SEQ ID NO: 1819029 - DNA, 15 bp, Homo sapiens
gcgttgctggtcaca

SEQ ID NO: 1819030 - DNA, 15 bp, Homo sapiens
cgttgctggtcacat

SEQ ID NO: 1819031 - DNA, 15 bp, Homo sapiens
gttgctggtcacatt

SEQ ID NO: 1819032 - DNA, 15 bp, Homo sapiens
ttgctggtcacattc

SEQ ID NO: 1819033 - DNA, 15 bp, Homo sapiens
tgctggtcacattcc

SEQ ID NO: 1819034 - DNA, 15 bp, Homo sapiens
gctggtcacattcct

SEQ ID NO: 1819035 - DNA, 15 bp, Homo sapiens
ctggtcacattcctg

SEQ ID NO: 1819036 - DNA, 15 bp, Homo sapiens
tggtcacattcctgg

SEQ ID NO: 1819037 - DNA, 15 bp, Homo sapiens
ggtcacattcctggc

SEQ ID NO: 1819038 - DNA, 15 bp, Homo sapiens
gtcacattcctggca

SEQ ID NO: 1819039 - DNA, 15 bp, Homo sapiens
tcacattcctggcag

SEQ ID NO: 1819040 - DNA, 15 bp, Homo sapiens
cacattcctggcagg

SEQ ID NO: 1819041 - DNA, 15 bp, Homo sapiens
acattcctggcaggt

SEQ ID NO: 1819042 - DNA, 15 bp, Homo sapiens
cattcctggcaggta

SEQ ID NO: 1819043 - DNA, 15 bp, Homo sapiens
attcctggcaggtat

SEQ ID NO: 1819044 - DNA, 15 bp, Homo sapiens
ttcctggcaggtatg

SEQ ID NO: 1819045 - DNA, 15 bp, Homo sapiens
tcctggcaggtatgg

SEQ ID NO: 1819046 - DNA, 15 bp, Homo sapiens
cctggcaggtatggg

SEQ ID NO: 1819047 - DNA, 15 bp, Homo sapiens
ctggcaggtatgggg

SEQ ID NO: 1819048 - DNA, 15 bp, Homo sapiens
tggcaggtatggggg

SEQ ID NO: 1819049 - DNA, 15 bp, Homo sapiens
ggcaggtatgggggc

SEQ ID NO: 1819050 - DNA, 15 bp, Homo sapiens
gcaggtatgggggcg

SEQ ID NO: 1819051 - DNA, 15 bp, Homo sapiens
caggtatgggggcgg

SEQ ID NO: 1819052 - DNA, 15 bp, Homo sapiens
aggtatgggggcggg

SEQ ID NO: 1819053 - DNA, 15 bp, Homo sapiens
ggtatgggggcgggg

SEQ ID NO: 1819054 - DNA, 15 bp, Homo sapiens
gtatgggggcggggc

SEQ ID NO: 1819055 - DNA, 15 bp, Homo sapiens
tatgggggcggggct

SEQ ID NO: 1819056 - DNA, 15 bp, Homo sapiens
atgggggcggggctt

SEQ ID NO: 1819057 - DNA, 15 bp, Homo sapiens
tgggggcggggcttg

SEQ ID NO: 1819058 - DNA, 15 bp, Homo sapiens
gggggcggggcttgc

SEQ ID NO: 1819059 - DNA, 15 bp, Homo sapiens
ggggcggggcttgct

SEQ ID NO: 1819060 - DNA, 15 bp, Homo sapiens
gggcggggcttgctc

SEQ ID NO: 1819061 - DNA, 15 bp, Homo sapiens
ggcggggcttgctcg

SEQ ID NO: 1819062 - DNA, 15 bp, Homo sapiens
gcggggcttgctcgg

SEQ ID NO: 1819063 - DNA, 15 bp, Homo sapiens
cggggcttgctcggt

SEQ ID NO: 1819064 - DNA, 15 bp, Homo sapiens
ggggcttgctcggtt

SEQ ID NO: 1819065 - DNA, 15 bp, Homo sapiens
gggcttgctcggttc

SEQ ID NO: 1819066 - DNA, 15 bp, Homo sapiens
ggcttgctcggttcc

SEQ ID NO: 1819067 - DNA, 15 bp, Homo sapiens
gcttgctcggttccc

SEQ ID NO: 1819068 - DNA, 15 bp, Homo sapiens
cttgctcggttcccc

SEQ ID NO: 1819069 - DNA, 15 bp, Homo sapiens
ttgctcggttccccc

SEQ ID NO: 1819070 - DNA, 15 bp, Homo sapiens
tgctcggttcccccc

SEQ ID NO: 1819071 - DNA, 15 bp, Homo sapiens
gctcggttccccccg

SEQ ID NO: 1819072 - DNA, 15 bp, Homo sapiens
ctcggttccccccgc

SEQ ID NO: 1819073 - DNA, 15 bp, Homo sapiens
tcggttccccccgct

SEQ ID NO: 1819074 - DNA, 15 bp, Homo sapiens
cggttccccccgctc

SEQ ID NO: 1819075 - DNA, 15 bp, Homo sapiens
ggttccccccgctcc

SEQ ID NO: 1819076 - DNA, 15 bp, Homo sapiens
gttccccccgctcct

SEQ ID NO: 1819077 - DNA, 15 bp, Homo sapiens
ttccccccgctcctc

SEQ ID NO: 1819078 - DNA, 15 bp, Homo sapiens
tccccccgctcctcc

SEQ ID NO: 1819079 - DNA, 15 bp, Homo sapiens
ccccccgctcctccc

SEQ ID NO: 1819080 - DNA, 15 bp, Homo sapiens
cccccgctcctcccc

SEQ ID NO: 1819081 - DNA, 15 bp, Homo sapiens
ccccgctcctccccc

SEQ ID NO: 1819082 - DNA, 15 bp, Homo sapiens
cccgctcctccccct

SEQ ID NO: 1819083 - DNA, 15 bp, Homo sapiens
ccgctcctccccctc

SEQ ID NO: 1819084 - DNA, 15 bp, Homo sapiens
cgctcctccccctct

SEQ ID NO: 1819085 - DNA, 15 bp, Homo sapiens
gctcctccccctctc

SEQ ID NO: 1819086 - DNA, 15 bp, Homo sapiens
ctcctccccctctca

SEQ ID NO: 1819087 - DNA, 15 bp, Homo sapiens
tcctccccctctcat

SEQ ID NO: 1819088 - DNA, 15 bp, Homo sapiens
cctccccctctcatc

SEQ ID NO: 1819089 - DNA, 15 bp, Homo sapiens
ctccccctctcatcc

SEQ ID NO: 1819090 - DNA, 15 bp, Homo sapiens
tccccctctcatcct

SEQ ID NO: 1819091 - DNA, 15 bp, Homo sapiens
ccccctctcatcctc

SEQ ID NO: 1819092 - DNA, 15 bp, Homo sapiens
cccctctcatcctca

SEQ ID NO: 1819093 - DNA, 15 bp, Homo sapiens
ccctctcatcctcac

SEQ ID NO: 1819094 - DNA, 15 bp, Homo sapiens
cctctcatcctcacc

SEQ ID NO: 1819095 - DNA, 15 bp, Homo sapiens
ctctcatcctcacct

SEQ ID NO: 1819096 - DNA, 15 bp, Homo sapiens
tctcatcctcacctc

SEQ ID NO: 1819097 - DNA, 15 bp, Homo sapiens
ctcatcctcacctca

SEQ ID NO: 1819098 - DNA, 15 bp, Homo sapiens
tcatcctcacctcaa

SEQ ID NO: 1819099 - DNA, 15 bp, Homo sapiens
catcctcacctcaac

SEQ ID NO: 1819100 - DNA, 15 bp, Homo sapiens
atcctcacctcaacc

SEQ ID NO: 1819101 - DNA, 15 bp, Homo sapiens
tcctcacctcaacct

SEQ ID NO: 1819102 - DNA, 15 bp, Homo sapiens
cctcacctcaacctc

SEQ ID NO: 1819103 - DNA, 15 bp, Homo sapiens
tcacctcaacctcct

SEQ ID NO: 1819104 - DNA, 15 bp, Homo sapiens
cacctcaacctcctg

SEQ ID NO: 1819105 - DNA, 15 bp, Homo sapiens
cctcaacctcctggc

SEQ ID NO: 1819106 - DNA, 15 bp, Homo sapiens
ctcaacctcctggcc

SEQ ID NO: 1819107 - DNA, 15 bp, Homo sapiens
tcaacctcctggccc

SEQ ID NO: 1819108 - DNA, 15 bp, Homo sapiens
caacctcctggcccc

SEQ ID NO: 1819109 - DNA, 15 bp, Homo sapiens
aacctcctggcccca

SEQ ID NO: 1819110 - DNA, 15 bp, Homo sapiens
acctcctggccccat

SEQ ID NO: 1819111 - DNA, 15 bp, Homo sapiens
cctcctggccccatt

SEQ ID NO: 1819112 - DNA, 15 bp, Homo sapiens
ctcctggccccattc

SEQ ID NO: 1819113 - DNA, 15 bp, Homo sapiens
tcctggccccattca

SEQ ID NO: 1819114 - DNA, 15 bp, Homo sapiens
cctggccccattcag

SEQ ID NO: 1819115 - DNA, 15 bp, Homo sapiens
ctggccccattcagg

SEQ ID NO: 1819116 - DNA, 15 bp, Homo sapiens
tggccccattcaggc

SEQ ID NO: 1819117 - DNA, 15 bp, Homo sapiens
ggccccattcaggca

SEQ ID NO: 1819118 - DNA, 15 bp, Homo sapiens
gccccattcaggcag

SEQ ID NO: 1819119 - DNA, 15 bp, Homo sapiens
ccccattcaggcaga

SEQ ID NO: 1819120 - DNA, 15 bp, Homo sapiens
cccattcaggcagac

SEQ ID NO: 1819121 - DNA, 15 bp, Homo sapiens
ccattcaggcagacc

SEQ ID NO: 1819122 - DNA, 15 bp, Homo sapiens
cattcaggcagaccc

SEQ ID NO: 1819123 - DNA, 15 bp, Homo sapiens
attcaggcagaccct

SEQ ID NO: 1819124 - DNA, 15 bp, Homo sapiens
ttcaggcagaccctg

SEQ ID NO: 1819125 - DNA, 15 bp, Homo sapiens
tcaggcagaccctgg

SEQ ID NO: 1819126 - DNA, 15 bp, Homo sapiens
caggcagaccctggg

SEQ ID NO: 1819127 - DNA, 15 bp, Homo sapiens
aggcagaccctgggc

SEQ ID NO: 1819128 - DNA, 15 bp, Homo sapiens
ggcagaccctgggcc

SEQ ID NO: 1819129 - DNA, 15 bp, Homo sapiens
gcagaccctgggccc

SEQ ID NO: 1819130 - DNA, 15 bp, Homo sapiens
cagaccctgggcccc

SEQ ID NO: 1819131 - DNA, 15 bp, Homo sapiens
agaccctgggccccc

SEQ ID NO: 1819132 - DNA, 15 bp, Homo sapiens
gaccctgggccccct

SEQ ID NO: 1819133 - DNA, 15 bp, Homo sapiens
accctgggccccctc

SEQ ID NO: 1819134 - DNA, 15 bp, Homo sapiens
ccctgggccccctct

SEQ ID NO: 1819135 - DNA, 15 bp, Homo sapiens
cctgggccccctctt

SEQ ID NO: 1819136 - DNA, 15 bp, Homo sapiens
ctgggccccctcttc

SEQ ID NO: 1819137 - DNA, 15 bp, Homo sapiens
tgggccccctcttct

SEQ ID NO: 1819138 - DNA, 15 bp, Homo sapiens
gggccccctcttctg

SEQ ID NO: 1819139 - DNA, 15 bp, Homo sapiens
ggccccctcttctga

SEQ ID NO: 1819140 - DNA, 15 bp, Homo sapiens
gccccctcttctgag

SEQ ID NO: 1819141 - DNA, 15 bp, Homo sapiens
ccccctcttctgagg

SEQ ID NO: 1819142 - DNA, 15 bp, Homo sapiens
cccctcttctgaggc

SEQ ID NO: 1819143 - DNA, 15 bp, Homo sapiens
ccctcttctgaggct

SEQ ID NO: 1819144 - DNA, 15 bp, Homo sapiens
cctcttctgaggctt

SEQ ID NO: 1819145 - DNA, 15 bp, Homo sapiens
ctcttctgaggcttc

SEQ ID NO: 1819146 - DNA, 15 bp, Homo sapiens
tcttctgaggcttct

SEQ ID NO: 1819147 - DNA, 15 bp, Homo sapiens
cttctgaggcttctg

SEQ ID NO: 1819148 - DNA, 15 bp, Homo sapiens
ttctgaggcttctgt

SEQ ID NO: 1819149 - DNA, 15 bp, Homo sapiens
tctgaggcttctgtg

SEQ ID NO: 1819150 - DNA, 15 bp, Homo sapiens
ctgaggcttctgtgc

SEQ ID NO: 1819151 - DNA, 15 bp, Homo sapiens
tgaggcttctgtgct

SEQ ID NO: 1819152 - DNA, 15 bp, Homo sapiens
gaggcttctgtgctg

SEQ ID NO: 1819153 - DNA, 15 bp, Homo sapiens
aggcttctgtgctgc

SEQ ID NO: 1819154 - DNA, 15 bp, Homo sapiens
ggcttctgtgctgct

SEQ ID NO: 1819155 - DNA, 15 bp, Homo sapiens
gcttctgtgctgctt

SEQ ID NO: 1819156 - DNA, 15 bp, Homo sapiens
cttctgtgctgcttc

SEQ ID NO: 1819157 - DNA, 15 bp, Homo sapiens
ttctgtgctgcttcc

SEQ ID NO: 1819158 - DNA, 15 bp, Homo sapiens
tctgtgctgcttcct

SEQ ID NO: 1819159 - DNA, 15 bp, Homo sapiens
ctgtgctgcttcctg

SEQ ID NO: 1819160 - DNA, 15 bp, Homo sapiens
tgtgctgcttcctgg

SEQ ID NO: 1819161 - DNA, 15 bp, Homo sapiens
gtgctgcttcctggc

SEQ ID NO: 1819162 - DNA, 15 bp, Homo sapiens
tgctgcttcctggct

SEQ ID NO: 1819163 - DNA, 15 bp, Homo sapiens
gctgcttcctggctc

SEQ ID NO: 1819164 - DNA, 15 bp, Homo sapiens
ctgcttcctggctct

SEQ ID NO: 1819165 - DNA, 15 bp, Homo sapiens
tgcttcctggctctg

SEQ ID NO: 1819166 - DNA, 15 bp, Homo sapiens
gcttcctggctctga

SEQ ID NO: 1819167 - DNA, 15 bp, Homo sapiens
cttcctggctctgaa

SEQ ID NO: 1819168 - DNA, 15 bp, Homo sapiens
ttcctggctctgaac

SEQ ID NO: 1819169 - DNA, 15 bp, Homo sapiens
tcctggctctgaaca

SEQ ID NO: 1819170 - DNA, 15 bp, Homo sapiens
cctggctctgaacag

SEQ ID NO: 1819171 - DNA, 15 bp, Homo sapiens
ctggctctgaacagc

SEQ ID NO: 1819172 - DNA, 15 bp, Homo sapiens
tggctctgaacagcg

SEQ ID NO: 1819173 - DNA, 15 bp, Homo sapiens
ggctctgaacagcga

SEQ ID NO: 1819174 - DNA, 15 bp, Homo sapiens
gctctgaacagcgat

SEQ ID NO: 1819175 - DNA, 15 bp, Homo sapiens
ctctgaacagcgatt

SEQ ID NO: 1819176 - DNA, 15 bp, Homo sapiens
tctgaacagcgattt

SEQ ID NO: 1819177 - DNA, 15 bp, Homo sapiens
ctgaacagcgatttg

SEQ ID NO: 1819178 - DNA, 15 bp, Homo sapiens
tgaacagcgatttga

SEQ ID NO: 1819179 - DNA, 15 bp, Homo sapiens
gaacagcgatttgac

SEQ ID NO: 1819180 - DNA, 15 bp, Homo sapiens
aacagcgatttgacg

SEQ ID NO: 1819181 - DNA, 15 bp, Homo sapiens
acagcgatttgacgc

SEQ ID NO: 1819182 - DNA, 15 bp, Homo sapiens
cagcgatttgacgct

SEQ ID NO: 1819183 - DNA, 15 bp, Homo sapiens
agcgatttgacgctc

SEQ ID NO: 1819184 - DNA, 15 bp, Homo sapiens
gcgatttgacgctct

SEQ ID NO: 1819185 - DNA, 15 bp, Homo sapiens
cgatttgacgctctc

SEQ ID NO: 1819186 - DNA, 15 bp, Homo sapiens
gatttgacgctctct

SEQ ID NO: 1819187 - DNA, 15 bp, Homo sapiens
atttgacgctctctg

SEQ ID NO: 1819188 - DNA, 15 bp, Homo sapiens
tttgacgctctctgg

SEQ ID NO: 1819189 - DNA, 15 bp, Homo sapiens
ttgacgctctctggg

SEQ ID NO: 1819190 - DNA, 15 bp, Homo sapiens
tgacgctctctgggc

SEQ ID NO: 1819191 - DNA, 15 bp, Homo sapiens
gacgctctctgggcc

SEQ ID NO: 1819192 - DNA, 15 bp, Homo sapiens
acgctctctgggcct

SEQ ID NO: 1819193 - DNA, 15 bp, Homo sapiens
cgctctctgggcctc

SEQ ID NO: 1819194 - DNA, 15 bp, Homo sapiens
gctctctgggcctcg

SEQ ID NO: 1819195 - DNA, 15 bp, Homo sapiens
ctctctgggcctcgg

SEQ ID NO: 1819196 - DNA, 15 bp, Homo sapiens
tctctgggcctcggt

SEQ ID NO: 1819197 - DNA, 15 bp, Homo sapiens
ctctgggcctcggtt

SEQ ID NO: 1819198 - DNA, 15 bp, Homo sapiens
tctgggcctcggttt

SEQ ID NO: 1819199 - DNA, 15 bp, Homo sapiens
ctgggcctcggtttc

SEQ ID NO: 1819200 - DNA, 15 bp, Homo sapiens
tgggcctcggtttcc

SEQ ID NO: 1819201 - DNA, 15 bp, Homo sapiens
gggcctcggtttccc

SEQ ID NO: 1819202 - DNA, 15 bp, Homo sapiens
ggcctcggtttcccc

SEQ ID NO: 1819203 - DNA, 15 bp, Homo sapiens
gcctcggtttccccc

SEQ ID NO: 1819204 - DNA, 15 bp, Homo sapiens
cctcggtttccccca

SEQ ID NO: 1819205 - DNA, 15 bp, Homo sapiens
ctcggtttcccccat

SEQ ID NO: 1819206 - DNA, 15 bp, Homo sapiens
tcggtttcccccatc

SEQ ID NO: 1819207 - DNA, 15 bp, Homo sapiens
cggtttcccccatcc

SEQ ID NO: 1819208 - DNA, 15 bp, Homo sapiens
ggtttcccccatcct

SEQ ID NO: 1819209 - DNA, 15 bp, Homo sapiens
gtttcccccatcctt

SEQ ID NO: 1819210 - DNA, 15 bp, Homo sapiens
tttcccccatccttg

SEQ ID NO: 1819211 - DNA, 15 bp, Homo sapiens
ttcccccatccttga

SEQ ID NO: 1819212 - DNA, 15 bp, Homo sapiens
tcccccatccttgag

SEQ ID NO: 1819213 - DNA, 15 bp, Homo sapiens
cccccatccttgaga

SEQ ID NO: 1819214 - DNA, 15 bp, Homo sapiens
ccccatccttgagat

SEQ ID NO: 1819215 - DNA, 15 bp, Homo sapiens
cccatccttgagata

SEQ ID NO: 1819216 - DNA, 15 bp, Homo sapiens
ccatccttgagatag

SEQ ID NO: 1819217 - DNA, 15 bp, Homo sapiens
catccttgagatagg

SEQ ID NO: 1819218 - DNA, 15 bp, Homo sapiens
atccttgagatagga

SEQ ID NO: 1819219 - DNA, 15 bp, Homo sapiens
tccttgagataggag

SEQ ID NO: 1819220 - DNA, 15 bp, Homo sapiens
ccttgagataggagt

SEQ ID NO: 1819221 - DNA, 15 bp, Homo sapiens
cttgagataggagtt

SEQ ID NO: 1819222 - DNA, 15 bp, Homo sapiens
ttgagataggagtta

SEQ ID NO: 1819223 - DNA, 15 bp, Homo sapiens
tgagataggagttag

SEQ ID NO: 1819224 - DNA, 15 bp, Homo sapiens
gagataggagttaga

SEQ ID NO: 1819225 - DNA, 15 bp, Homo sapiens
agataggagttagaa

SEQ ID NO: 1819226 - DNA, 15 bp, Homo sapiens
gataggagttagaag

SEQ ID NO: 1819227 - DNA, 15 bp, Homo sapiens
ataggagttagaagt

SEQ ID NO: 1819228 - DNA, 15 bp, Homo sapiens
taggagttagaagtt

SEQ ID NO: 1819229 - DNA, 15 bp, Homo sapiens
aggagttagaagttg

SEQ ID NO: 1819230 - DNA, 15 bp, Homo sapiens
ggagttagaagttgt

SEQ ID NO: 1819231 - DNA, 15 bp, Homo sapiens
gagttagaagttgtt

SEQ ID NO: 1819232 - DNA, 15 bp, Homo sapiens
agttagaagttgttt

SEQ ID NO: 1819233 - DNA, 15 bp, Homo sapiens
gttagaagttgtttt

SEQ ID NO: 1819234 - DNA, 15 bp, Homo sapiens
ttagaagttgttttg

SEQ ID NO: 1819235 - DNA, 15 bp, Homo sapiens
tagaagttgttttgt

SEQ ID NO: 1819236 - DNA, 15 bp, Homo sapiens
agaagttgttttgtt

SEQ ID NO: 1819237 - DNA, 15 bp, Homo sapiens
gaagttgttttgttg

SEQ ID NO: 1819238 - DNA, 15 bp, Homo sapiens
aagttgttttgttgt

SEQ ID NO: 1819239 - DNA, 15 bp, Homo sapiens
agttgttttgttgtt

SEQ ID NO: 1819240 - DNA, 15 bp, Homo sapiens
gttgttttgttgttg

SEQ ID NO: 1819241 - DNA, 15 bp, Homo sapiens
ttgttttgttgttgt

SEQ ID NO: 1819242 - DNA, 15 bp, Homo sapiens
tgttttgttgttgtt

SEQ ID NO: 1819243 - DNA, 15 bp, Homo sapiens
gttttgttgttgttg

SEQ ID NO: 1819244 - DNA, 15 bp, Homo sapiens
ttgttgttgttgttt

SEQ ID NO: 1819245 - DNA, 15 bp, Homo sapiens
tgttgttgttgtttg

SEQ ID NO: 1819246 - DNA, 15 bp, Homo sapiens
gttgttgttgtttgt

SEQ ID NO: 1819247 - DNA, 15 bp, Homo sapiens
ttgttgttgtttgtt

SEQ ID NO: 1819248 - DNA, 15 bp, Homo sapiens
tgttgttgtttgttg

SEQ ID NO: 1819249 - DNA, 15 bp, Homo sapiens
gttgttgtttgttgt

SEQ ID NO: 1819250 - DNA, 15 bp, Homo sapiens
ttgttgtttgttgtt

SEQ ID NO: 1819251 - DNA, 15 bp, Homo sapiens
tgttgtttgttgttg

SEQ ID NO: 1819252 - DNA, 15 bp, Homo sapiens
tgtttgttgttgttg

SEQ ID NO: 1819253 - DNA, 15 bp, Homo sapiens
gtttgttgttgttgt

SEQ ID NO: 1819254 - DNA, 15 bp, Homo sapiens
gttgttgttgttttg

SEQ ID NO: 1819255 - DNA, 15 bp, Homo sapiens
tgttttgtttttttg

SEQ ID NO: 1819256 - DNA, 15 bp, Homo sapiens
gttttgtttttttga

SEQ ID NO: 1819257 - DNA, 15 bp, Homo sapiens
ttttgtttttttgag

SEQ ID NO: 1819258 - DNA, 15 bp, Homo sapiens
tttgtttttttgaga

SEQ ID NO: 1819259 - DNA, 15 bp, Homo sapiens
ttgtttttttgagat

SEQ ID NO: 1819260 - DNA, 15 bp, Homo sapiens
tgtttttttgagatg

SEQ ID NO: 1819261 - DNA, 15 bp, Homo sapiens
gtttttttgagatga

SEQ ID NO: 1819262 - DNA, 15 bp, Homo sapiens
tttttttgagatgaa

SEQ ID NO: 1819263 - DNA, 15 bp, Homo sapiens
ttttttgagatgaag

SEQ ID NO: 1819264 - DNA, 15 bp, Homo sapiens
ttgagatgaagtctc

SEQ ID NO: 1819265 - DNA, 15 bp, Homo sapiens
tgagatgaagtctcg

SEQ ID NO: 1819266 - DNA, 15 bp, Homo sapiens
gagatgaagtctcgc

SEQ ID NO: 1819267 - DNA, 15 bp, Homo sapiens
agatgaagtctcgct

SEQ ID NO: 1819268 - DNA, 15 bp, Homo sapiens
gatgaagtctcgctc

SEQ ID NO: 1819269 - DNA, 15 bp, Homo sapiens
atgaagtctcgctct

SEQ ID NO: 1819270 - DNA, 15 bp, Homo sapiens
tgaagtctcgctctg

SEQ ID NO: 1819271 - DNA, 15 bp, Homo sapiens
gaagtctcgctctgt

SEQ ID NO: 1819272 - DNA, 15 bp, Homo sapiens
aagtctcgctctgtc

SEQ ID NO: 1819273 - DNA, 15 bp, Homo sapiens
ggagtgcagtggcgg

SEQ ID NO: 1819274 - DNA, 15 bp, Homo sapiens
gagtgcagtggcggg

SEQ ID NO: 1819275 - DNA, 15 bp, Homo sapiens
agtgcagtggcggga

SEQ ID NO: 1819276 - DNA, 15 bp, Homo sapiens
gtgcagtggcgggat

SEQ ID NO: 1819277 - DNA, 15 bp, Homo sapiens
tgcagtggcgggatc

SEQ ID NO: 1819278 - DNA, 15 bp, Homo sapiens
gcagtggcgggatct

SEQ ID NO: 1819279 - DNA, 15 bp, Homo sapiens
cagtggcgggatctc

SEQ ID NO: 1819280 - DNA, 15 bp, Homo sapiens
agtggcgggatctcg

SEQ ID NO: 1819281 - DNA, 15 bp, Homo sapiens
gtggcgggatctcgg

SEQ ID NO: 1819282 - DNA, 15 bp, Homo sapiens
tggcgggatctcggc

SEQ ID NO: 1819283 - DNA, 15 bp, Homo sapiens
ggcgggatctcggct

SEQ ID NO: 1819284 - DNA, 15 bp, Homo sapiens
gcgggatctcggctc

SEQ ID NO: 1819285 - DNA, 15 bp, Homo sapiens
cgggatctcggctca

SEQ ID NO: 1819286 - DNA, 15 bp, Homo sapiens
gggatctcggctcac

SEQ ID NO: 1819287 - DNA, 15 bp, Homo sapiens
ggatctcggctcact

SEQ ID NO: 1819288 - DNA, 15 bp, Homo sapiens
tccgcctcccaggtc

SEQ ID NO: 1819289 - DNA, 15 bp, Homo sapiens
ccgcctcccaggtcc

SEQ ID NO: 1819290 - DNA, 15 bp, Homo sapiens
cgcctcccaggtcca

SEQ ID NO: 1819291 - DNA, 15 bp, Homo sapiens
gcctcccaggtccac

SEQ ID NO: 1819292 - DNA, 15 bp, Homo sapiens
cctcccaggtccacg

SEQ ID NO: 1819293 - DNA, 15 bp, Homo sapiens
ctcccaggtccacgc

SEQ ID NO: 1819294 - DNA, 15 bp, Homo sapiens
tcccaggtccacgcc

SEQ ID NO: 1819295 - DNA, 15 bp, Homo sapiens
cccaggtccacgcca

SEQ ID NO: 1819296 - DNA, 15 bp, Homo sapiens
ccaggtccacgccat

SEQ ID NO: 1819297 - DNA, 15 bp, Homo sapiens
caggtccacgccatt

SEQ ID NO: 1819298 - DNA, 15 bp, Homo sapiens
aggtccacgccattc

SEQ ID NO: 1819299 - DNA, 15 bp, Homo sapiens
ggtccacgccattct

SEQ ID NO: 1819300 - DNA, 15 bp, Homo sapiens
gtccacgccattctc

SEQ ID NO: 1819301 - DNA, 15 bp, Homo sapiens
tccacgccattctcc

SEQ ID NO: 1819302 - DNA, 15 bp, Homo sapiens
ccacgccattctcct

SEQ ID NO: 1819303 - DNA, 15 bp, Homo sapiens
gcacatgccaccaca

SEQ ID NO: 1819304 - DNA, 15 bp, Homo sapiens
cacatgccaccacac

SEQ ID NO: 1819305 - DNA, 15 bp, Homo sapiens
acatgccaccacacc

SEQ ID NO: 1819306 - DNA, 15 bp, Homo sapiens
catgccaccacaccc

SEQ ID NO: 1819307 - DNA, 15 bp, Homo sapiens
atgccaccacacccg

SEQ ID NO: 1819308 - DNA, 15 bp, Homo sapiens
tgccaccacacccga

SEQ ID NO: 1819309 - DNA, 15 bp, Homo sapiens
gccaccacacccgac

SEQ ID NO: 1819310 - DNA, 15 bp, Homo sapiens
ccaccacacccgact

SEQ ID NO: 1819311 - DNA, 15 bp, Homo sapiens
caccacacccgacta

SEQ ID NO: 1819312 - DNA, 15 bp, Homo sapiens
accacacccgactaa

SEQ ID NO: 1819313 - DNA, 15 bp, Homo sapiens
ccacacccgactaac

SEQ ID NO: 1819314 - DNA, 15 bp, Homo sapiens
cacacccgactaact

SEQ ID NO: 1819315 - DNA, 15 bp, Homo sapiens
acacccgactaactt

SEQ ID NO: 1819316 - DNA, 15 bp, Homo sapiens
cacccgactaacttt

SEQ ID NO: 1819317 - DNA, 15 bp, Homo sapiens
acccgactaactttt

SEQ ID NO: 1819318 - DNA, 15 bp, Homo sapiens
cccgactaacttttt

SEQ ID NO: 1819319 - DNA, 15 bp, Homo sapiens
ccgactaactttttt

SEQ ID NO: 1819320 - DNA, 15 bp, Homo sapiens
cgactaacttttttg

SEQ ID NO: 1819321 - DNA, 15 bp, Homo sapiens
gactaacttttttgt

SEQ ID NO: 1819322 - DNA, 15 bp, Homo sapiens
actaacttttttgta

SEQ ID NO: 1819323 - DNA, 15 bp, Homo sapiens
cttttttgtattttc

SEQ ID NO: 1819324 - DNA, 15 bp, Homo sapiens
ttttcagtagagacg

SEQ ID NO: 1819325 - DNA, 15 bp, Homo sapiens
tttcagtagagacgg

SEQ ID NO: 1819326 - DNA, 15 bp, Homo sapiens
ttcagtagagacggg

SEQ ID NO: 1819327 - DNA, 15 bp, Homo sapiens
tcagtagagacgggg

SEQ ID NO: 1819328 - DNA, 15 bp, Homo sapiens
cagtagagacggggt

SEQ ID NO: 1819329 - DNA, 15 bp, Homo sapiens
ctcaggtgatctgcc

SEQ ID NO: 1819330 - DNA, 15 bp, Homo sapiens
aggtgatctgcccgt

SEQ ID NO: 1819331 - DNA, 15 bp, Homo sapiens
ggtgatctgcccgtt

SEQ ID NO: 1819332 - DNA, 15 bp, Homo sapiens
gtgatctgcccgttt

SEQ ID NO: 1819333 - DNA, 15 bp, Homo sapiens
tgatctgcccgtttc

SEQ ID NO: 1819334 - DNA, 15 bp, Homo sapiens
gatctgcccgtttcg

SEQ ID NO: 1819335 - DNA, 15 bp, Homo sapiens
atctgcccgtttcga

SEQ ID NO: 1819336 - DNA, 15 bp, Homo sapiens
tctgcccgtttcgat

SEQ ID NO: 1819337 - DNA, 15 bp, Homo sapiens
ctgcccgtttcgatc

SEQ ID NO: 1819338 - DNA, 15 bp, Homo sapiens
tgcccgtttcgatct

SEQ ID NO: 1819339 - DNA, 15 bp, Homo sapiens
gcccgtttcgatctc

SEQ ID NO: 1819340 - DNA, 15 bp, Homo sapiens
cccgtttcgatctcc

SEQ ID NO: 1819341 - DNA, 15 bp, Homo sapiens
ccgtttcgatctccc

SEQ ID NO: 1819342 - DNA, 15 bp, Homo sapiens
cgtttcgatctccca

SEQ ID NO: 1819343 - DNA, 15 bp, Homo sapiens
gtttcgatctcccaa

SEQ ID NO: 1819344 - DNA, 15 bp, Homo sapiens
tttcgatctcccaaa

SEQ ID NO: 1819345 - DNA, 15 bp, Homo sapiens
ttcgatctcccaaag

SEQ ID NO: 1819346 - DNA, 15 bp, Homo sapiens
tcgatctcccaaagt

SEQ ID NO: 1819347 - DNA, 15 bp, Homo sapiens
cgatctcccaaagtg

SEQ ID NO: 1819348 - DNA, 15 bp, Homo sapiens
gatctcccaaagtgc

SEQ ID NO: 1819349 - DNA, 15 bp, Homo sapiens
gcgtgagccaccgca

SEQ ID NO: 1819350 - DNA, 15 bp, Homo sapiens
cgtgagccaccgcac

SEQ ID NO: 1819351 - DNA, 15 bp, Homo sapiens
caccgcacctggctg

SEQ ID NO: 1819352 - DNA, 15 bp, Homo sapiens
accgcacctggctgg

SEQ ID NO: 1819353 - DNA, 15 bp, Homo sapiens
ccgcacctggctggg

SEQ ID NO: 1819354 - DNA, 15 bp, Homo sapiens
cgcacctggctggga

SEQ ID NO: 1819355 - DNA, 15 bp, Homo sapiens
gcacctggctgggag

SEQ ID NO: 1819356 - DNA, 15 bp, Homo sapiens
cacctggctgggagt

SEQ ID NO: 1819357 - DNA, 15 bp, Homo sapiens
acctggctgggagtt

SEQ ID NO: 1819358 - DNA, 15 bp, Homo sapiens
cctggctgggagtta

SEQ ID NO: 1819359 - DNA, 15 bp, Homo sapiens
ctggctgggagttag

SEQ ID NO: 1819360 - DNA, 15 bp, Homo sapiens
tggctgggagttaga

SEQ ID NO: 1819361 - DNA, 15 bp, Homo sapiens
ggctgggagttagag

SEQ ID NO: 1819362 - DNA, 15 bp, Homo sapiens
gctgggagttagagg

SEQ ID NO: 1819363 - DNA, 15 bp, Homo sapiens
ctgggagttagaggt

SEQ ID NO: 1819364 - DNA, 15 bp, Homo sapiens
tgggagttagaggtt

SEQ ID NO: 1819365 - DNA, 15 bp, Homo sapiens
gggagttagaggttt

SEQ ID NO: 1819366 - DNA, 15 bp, Homo sapiens
ggagttagaggtttc

SEQ ID NO: 1819367 - DNA, 15 bp, Homo sapiens
gagttagaggtttct

SEQ ID NO: 1819368 - DNA, 15 bp, Homo sapiens
agttagaggtttcta

SEQ ID NO: 1819369 - DNA, 15 bp, Homo sapiens
gttagaggtttctaa

SEQ ID NO: 1819370 - DNA, 15 bp, Homo sapiens
ttagaggtttctaat

SEQ ID NO: 1819371 - DNA, 15 bp, Homo sapiens
tagaggtttctaatg

SEQ ID NO: 1819372 - DNA, 15 bp, Homo sapiens
agaggtttctaatgc

SEQ ID NO: 1819373 - DNA, 15 bp, Homo sapiens
gaggtttctaatgca

SEQ ID NO: 1819374 - DNA, 15 bp, Homo sapiens
aggtttctaatgcat

SEQ ID NO: 1819375 - DNA, 15 bp, Homo sapiens
ggtttctaatgcatt

SEQ ID NO: 1819376 - DNA, 15 bp, Homo sapiens
gtttctaatgcattg

SEQ ID NO: 1819377 - DNA, 15 bp, Homo sapiens
tttctaatgcattgc

SEQ ID NO: 1819378 - DNA, 15 bp, Homo sapiens
ttctaatgcattgca

SEQ ID NO: 1819379 - DNA, 15 bp, Homo sapiens
tctaatgcattgcag

SEQ ID NO: 1819380 - DNA, 15 bp, Homo sapiens
ctaatgcattgcagg

SEQ ID NO: 1819381 - DNA, 15 bp, Homo sapiens
taatgcattgcaggc

SEQ ID NO: 1819382 - DNA, 15 bp, Homo sapiens
aatgcattgcaggca

SEQ ID NO: 1819383 - DNA, 15 bp, Homo sapiens
atgcattgcaggcag

SEQ ID NO: 1819384 - DNA, 15 bp, Homo sapiens
tgcattgcaggcaga

SEQ ID NO: 1819385 - DNA, 15 bp, Homo sapiens
gcattgcaggcagat

SEQ ID NO: 1819386 - DNA, 15 bp, Homo sapiens
cattgcaggcagata

SEQ ID NO: 1819387 - DNA, 15 bp, Homo sapiens
attgcaggcagatag

SEQ ID NO: 1819388 - DNA, 15 bp, Homo sapiens
ttgcaggcagatagt

SEQ ID NO: 1819389 - DNA, 15 bp, Homo sapiens
tgcaggcagatagtg

SEQ ID NO: 1819390 - DNA, 15 bp, Homo sapiens
gcaggcagatagtga

SEQ ID NO: 1819391 - DNA, 15 bp, Homo sapiens
caggcagatagtgaa

SEQ ID NO: 1819392 - DNA, 15 bp, Homo sapiens
aggcagatagtgaat

SEQ ID NO: 1819393 - DNA, 15 bp, Homo sapiens
ggcagatagtgaata

SEQ ID NO: 1819394 - DNA, 15 bp, Homo sapiens
gcagatagtgaatac

SEQ ID NO: 1819395 - DNA, 15 bp, Homo sapiens
cagatagtgaatacc

SEQ ID NO: 1819396 - DNA, 15 bp, Homo sapiens
agatagtgaatacca

SEQ ID NO: 1819397 - DNA, 15 bp, Homo sapiens
gatagtgaataccag

SEQ ID NO: 1819398 - DNA, 15 bp, Homo sapiens
atagtgaataccaga

SEQ ID NO: 1819399 - DNA, 15 bp, Homo sapiens
tagtgaataccagac

SEQ ID NO: 1819400 - DNA, 15 bp, Homo sapiens
agtgaataccagaca

SEQ ID NO: 1819401 - DNA, 15 bp, Homo sapiens
gtgaataccagacac

SEQ ID NO: 1819402 - DNA, 15 bp, Homo sapiens
tgaataccagacacg

SEQ ID NO: 1819403 - DNA, 15 bp, Homo sapiens
gaataccagacacgg

SEQ ID NO: 1819404 - DNA, 15 bp, Homo sapiens
aataccagacacggg

SEQ ID NO: 1819405 - DNA, 15 bp, Homo sapiens
ataccagacacgggg

SEQ ID NO: 1819406 - DNA, 15 bp, Homo sapiens
taccagacacggggc

SEQ ID NO: 1819407 - DNA, 15 bp, Homo sapiens
accagacacggggca

SEQ ID NO: 1819408 - DNA, 15 bp, Homo sapiens
ccagacacggggcag

SEQ ID NO: 1819409 - DNA, 15 bp, Homo sapiens
cagacacggggcagc

SEQ ID NO: 1819410 - DNA, 15 bp, Homo sapiens
agacacggggcagct

SEQ ID NO: 1819411 - DNA, 15 bp, Homo sapiens
gacacggggcagctg

SEQ ID NO: 1819412 - DNA, 15 bp, Homo sapiens
acacggggcagctgt

SEQ ID NO: 1819413 - DNA, 15 bp, Homo sapiens
cacggggcagctgtg

SEQ ID NO: 1819414 - DNA, 15 bp, Homo sapiens
acggggcagctgtga

SEQ ID NO: 1819415 - DNA, 15 bp, Homo sapiens
cggggcagctgtgat

SEQ ID NO: 1819416 - DNA, 15 bp, Homo sapiens
ggggcagctgtgatc

SEQ ID NO: 1819417 - DNA, 15 bp, Homo sapiens
gggcagctgtgatct

SEQ ID NO: 1819418 - DNA, 15 bp, Homo sapiens
ggcagctgtgatctt

SEQ ID NO: 1819419 - DNA, 15 bp, Homo sapiens
gcagctgtgatcttt

SEQ ID NO: 1819420 - DNA, 15 bp, Homo sapiens
cagctgtgatcttta

SEQ ID NO: 1819421 - DNA, 15 bp, Homo sapiens
agctgtgatctttat

SEQ ID NO: 1819422 - DNA, 15 bp, Homo sapiens
gctgtgatctttatt

SEQ ID NO: 1819423 - DNA, 15 bp, Homo sapiens
ctgtgatctttattc

SEQ ID NO: 1819424 - DNA, 15 bp, Homo sapiens
tgtgatctttattct

SEQ ID NO: 1819425 - DNA, 15 bp, Homo sapiens
gtgatctttattctc

SEQ ID NO: 1819426 - DNA, 15 bp, Homo sapiens
tgatctttattctcc

SEQ ID NO: 1819427 - DNA, 15 bp, Homo sapiens
gatctttattctcca

SEQ ID NO: 1819428 - DNA, 15 bp, Homo sapiens
atctttattctccat

SEQ ID NO: 1819429 - DNA, 15 bp, Homo sapiens
tctttattctccatc

SEQ ID NO: 1819430 - DNA, 15 bp, Homo sapiens
ctttattctccatca

SEQ ID NO: 1819431 - DNA, 15 bp, Homo sapiens
tttattctccatcac

SEQ ID NO: 1819432 - DNA, 15 bp, Homo sapiens
ttattctccatcacc

SEQ ID NO: 1819433 - DNA, 15 bp, Homo sapiens
tattctccatcaccc

SEQ ID NO: 1819434 - DNA, 15 bp, Homo sapiens
attctccatcacccc

SEQ ID NO: 1819435 - DNA, 15 bp, Homo sapiens
ttctccatcaccccc

SEQ ID NO: 1819436 - DNA, 15 bp, Homo sapiens
tctccatcaccccca

SEQ ID NO: 1819437 - DNA, 15 bp, Homo sapiens
ctccatcacccccac

SEQ ID NO: 1819438 - DNA, 15 bp, Homo sapiens
tccatcacccccaca

SEQ ID NO: 1819439 - DNA, 15 bp, Homo sapiens
ccatcacccccacac

SEQ ID NO: 1819440 - DNA, 15 bp, Homo sapiens
catcacccccacaca

SEQ ID NO: 1819441 - DNA, 15 bp, Homo sapiens
atcacccccacacag

SEQ ID NO: 1819442 - DNA, 15 bp, Homo sapiens
tcacccccacacagc

SEQ ID NO: 1819443 - DNA, 15 bp, Homo sapiens
cacccccacacagcc

SEQ ID NO: 1819444 - DNA, 15 bp, Homo sapiens
acccccacacagccc

SEQ ID NO: 1819445 - DNA, 15 bp, Homo sapiens
cccccacacagccct

SEQ ID NO: 1819446 - DNA, 15 bp, Homo sapiens
ccccacacagccctg

SEQ ID NO: 1819447 - DNA, 15 bp, Homo sapiens
cccacacagccctgc

SEQ ID NO: 1819448 - DNA, 15 bp, Homo sapiens
ccacacagccctgcc

SEQ ID NO: 1819449 - DNA, 15 bp, Homo sapiens
cacacagccctgcct

SEQ ID NO: 1819450 - DNA, 15 bp, Homo sapiens
acacagccctgcctg

SEQ ID NO: 1819451 - DNA, 15 bp, Homo sapiens
cacagccctgcctgg

SEQ ID NO: 1819452 - DNA, 15 bp, Homo sapiens
acagccctgcctggg

SEQ ID NO: 1819453 - DNA, 15 bp, Homo sapiens
cagccctgcctgggg

SEQ ID NO: 1819454 - DNA, 15 bp, Homo sapiens
agccctgcctggggc

SEQ ID NO: 1819455 - DNA, 15 bp, Homo sapiens
gccctgcctggggca

SEQ ID NO: 1819456 - DNA, 15 bp, Homo sapiens
ccctgcctggggcac

SEQ ID NO: 1819457 - DNA, 15 bp, Homo sapiens
cctgcctggggcaca

SEQ ID NO: 1819458 - DNA, 15 bp, Homo sapiens
ctgcctggggcacac

SEQ ID NO: 1819459 - DNA, 15 bp, Homo sapiens
tgcctggggcacaca

SEQ ID NO: 1819460 - DNA, 15 bp, Homo sapiens
gcctggggcacacaa

SEQ ID NO: 1819461 - DNA, 15 bp, Homo sapiens
cctggggcacacaag

SEQ ID NO: 1819462 - DNA, 15 bp, Homo sapiens
ctggggcacacaagg

SEQ ID NO: 1819463 - DNA, 15 bp, Homo sapiens
tggggcacacaagga

SEQ ID NO: 1819464 - DNA, 15 bp, Homo sapiens
ggggcacacaaggac

SEQ ID NO: 1819465 - DNA, 15 bp, Homo sapiens
gggcacacaaggaca

SEQ ID NO: 1819466 - DNA, 15 bp, Homo sapiens
ggcacacaaggacac

SEQ ID NO: 1819467 - DNA, 15 bp, Homo sapiens
gcacacaaggacact

SEQ ID NO: 1819468 - DNA, 15 bp, Homo sapiens
cacacaaggacactc

SEQ ID NO: 1819469 - DNA, 15 bp, Homo sapiens
acacaaggacactca

SEQ ID NO: 1819470 - DNA, 15 bp, Homo sapiens
cacaaggacactcaa

SEQ ID NO: 1819471 - DNA, 15 bp, Homo sapiens
acaaggacactcaat

SEQ ID NO: 1819472 - DNA, 15 bp, Homo sapiens
caaggacactcaata

SEQ ID NO: 1819473 - DNA, 15 bp, Homo sapiens
aaggacactcaatac

SEQ ID NO: 1819474 - DNA, 15 bp, Homo sapiens
aggacactcaataca

SEQ ID NO: 1819475 - DNA, 15 bp, Homo sapiens
ggacactcaatacat

SEQ ID NO: 1819476 - DNA, 15 bp, Homo sapiens
gacactcaatacatg

SEQ ID NO: 1819477 - DNA, 15 bp, Homo sapiens
acactcaatacatgc

SEQ ID NO: 1819478 - DNA, 15 bp, Homo sapiens
cactcaatacatgct

SEQ ID NO: 1819479 - DNA, 15 bp, Homo sapiens
actcaatacatgctt

SEQ ID NO: 1819480 - DNA, 15 bp, Homo sapiens
ctcaatacatgcttt

SEQ ID NO: 1819481 - DNA, 15 bp, Homo sapiens
tcaatacatgctttt

SEQ ID NO: 1819482 - DNA, 15 bp, Homo sapiens
caatacatgcttttc

SEQ ID NO: 1819483 - DNA, 15 bp, Homo sapiens
aatacatgcttttcc

SEQ ID NO: 1819484 - DNA, 15 bp, Homo sapiens
atacatgcttttccg

SEQ ID NO: 1819485 - DNA, 15 bp, Homo sapiens
tacatgcttttccgc

SEQ ID NO: 1819486 - DNA, 15 bp, Homo sapiens
acatgcttttccgct

SEQ ID NO: 1819487 - DNA, 15 bp, Homo sapiens
catgcttttccgctg

SEQ ID NO: 1819488 - DNA, 15 bp, Homo sapiens
atgcttttccgctgg

SEQ ID NO: 1819489 - DNA, 15 bp, Homo sapiens
tgcttttccgctggg

SEQ ID NO: 1819490 - DNA, 15 bp, Homo sapiens
gcttttccgctgggc

SEQ ID NO: 1819491 - DNA, 15 bp, Homo sapiens
cttttccgctgggcg

SEQ ID NO: 1819492 - DNA, 15 bp, Homo sapiens
ttttccgctgggcgc

SEQ ID NO: 1819493 - DNA, 15 bp, Homo sapiens
tttccgctgggcgcg

SEQ ID NO: 1819494 - DNA, 15 bp, Homo sapiens
ttccgctgggcgcgg

SEQ ID NO: 1819495 - DNA, 15 bp, Homo sapiens
tccgctgggcgcggt

SEQ ID NO: 1819496 - DNA, 15 bp, Homo sapiens
ccgctgggcgcggtg

SEQ ID NO: 1819497 - DNA, 15 bp, Homo sapiens
cgctgggcgcggtgg

SEQ ID NO: 1819498 - DNA, 15 bp, Homo sapiens
gcgcggtggctcacc

SEQ ID NO: 1819499 - DNA, 15 bp, Homo sapiens
cgcggtggctcaccc

SEQ ID NO: 1819500 - DNA, 15 bp, Homo sapiens
gcggtggctcacccc

SEQ ID NO: 1819501 - DNA, 15 bp, Homo sapiens
cggtggctcacccct

SEQ ID NO: 1819502 - DNA, 15 bp, Homo sapiens
ggtggctcacccctg

SEQ ID NO: 1819503 - DNA, 15 bp, Homo sapiens
gtggctcacccctgt

SEQ ID NO: 1819504 - DNA, 15 bp, Homo sapiens
tggctcacccctgta

SEQ ID NO: 1819505 - DNA, 15 bp, Homo sapiens
ggctcacccctgtaa

SEQ ID NO: 1819506 - DNA, 15 bp, Homo sapiens
gctcacccctgtaat

SEQ ID NO: 1819507 - DNA, 15 bp, Homo sapiens
ctcacccctgtaatc

SEQ ID NO: 1819508 - DNA, 15 bp, Homo sapiens
tcacccctgtaatcc

SEQ ID NO: 1819509 - DNA, 15 bp, Homo sapiens
gcccaggagttcaac

SEQ ID NO: 1819510 - DNA, 15 bp, Homo sapiens
cccaggagttcaaca

SEQ ID NO: 1819511 - DNA, 15 bp, Homo sapiens
ccaggagttcaacac

SEQ ID NO: 1819512 - DNA, 15 bp, Homo sapiens
caggagttcaacacc

SEQ ID NO: 1819513 - DNA, 15 bp, Homo sapiens
aggagttcaacacca

SEQ ID NO: 1819514 - DNA, 15 bp, Homo sapiens
ggagttcaacaccag

SEQ ID NO: 1819515 - DNA, 15 bp, Homo sapiens
gagttcaacaccagc

SEQ ID NO: 1819516 - DNA, 15 bp, Homo sapiens
agttcaacaccagcc

SEQ ID NO: 1819517 - DNA, 15 bp, Homo sapiens
gttcaacaccagcct

SEQ ID NO: 1819518 - DNA, 15 bp, Homo sapiens
ttcaacaccagcctg

SEQ ID NO: 1819519 - DNA, 15 bp, Homo sapiens
tcaacaccagcctgg

SEQ ID NO: 1819520 - DNA, 15 bp, Homo sapiens
caacaccagcctggg

SEQ ID NO: 1819521 - DNA, 15 bp, Homo sapiens
aacaccagcctgggc

SEQ ID NO: 1819522 - DNA, 15 bp, Homo sapiens
acaccagcctgggca

SEQ ID NO: 1819523 - DNA, 15 bp, Homo sapiens
caccagcctgggcaa

SEQ ID NO: 1819524 - DNA, 15 bp, Homo sapiens
agccaggcatggtgc

SEQ ID NO: 1819525 - DNA, 15 bp, Homo sapiens
gccaggcatggtgcc

SEQ ID NO: 1819526 - DNA, 15 bp, Homo sapiens
ccaggcatggtgcca

SEQ ID NO: 1819527 - DNA, 15 bp, Homo sapiens
caggcatggtgccac

SEQ ID NO: 1819528 - DNA, 15 bp, Homo sapiens
aggcatggtgccaca

SEQ ID NO: 1819529 - DNA, 15 bp, Homo sapiens
ggcatggtgccacac

SEQ ID NO: 1819530 - DNA, 15 bp, Homo sapiens
gcatggtgccacaca

SEQ ID NO: 1819531 - DNA, 15 bp, Homo sapiens
catggtgccacacac

SEQ ID NO: 1819532 - DNA, 15 bp, Homo sapiens
atggtgccacacacc

SEQ ID NO: 1819533 - DNA, 15 bp, Homo sapiens
tggtgccacacacct

SEQ ID NO: 1819534 - DNA, 15 bp, Homo sapiens
ggtgccacacacctg

SEQ ID NO: 1819535 - DNA, 15 bp, Homo sapiens
gtgccacacacctgt

SEQ ID NO: 1819536 - DNA, 15 bp, Homo sapiens
tgccacacacctgtg

SEQ ID NO: 1819537 - DNA, 15 bp, Homo sapiens
gccacacacctgtgc

SEQ ID NO: 1819538 - DNA, 15 bp, Homo sapiens
ccacacacctgtgct

SEQ ID NO: 1819539 - DNA, 15 bp, Homo sapiens
cacacacctgtgctc

SEQ ID NO: 1819540 - DNA, 15 bp, Homo sapiens
acacacctgtgctct

SEQ ID NO: 1819541 - DNA, 15 bp, Homo sapiens
cacacctgtgctctc

SEQ ID NO: 1819542 - DNA, 15 bp, Homo sapiens
acacctgtgctctca

SEQ ID NO: 1819543 - DNA, 15 bp, Homo sapiens
cacctgtgctctcag

SEQ ID NO: 1819544 - DNA, 15 bp, Homo sapiens
acctgtgctctcagc

SEQ ID NO: 1819545 - DNA, 15 bp, Homo sapiens
cctgtgctctcagct

SEQ ID NO: 1819546 - DNA, 15 bp, Homo sapiens
ctgtgctctcagcta

SEQ ID NO: 1819547 - DNA, 15 bp, Homo sapiens
tgtgctctcagctac

SEQ ID NO: 1819548 - DNA, 15 bp, Homo sapiens
gtgctctcagctact

SEQ ID NO: 1819549 - DNA, 15 bp, Homo sapiens
tgctctcagctactc

SEQ ID NO: 1819550 - DNA, 15 bp, Homo sapiens
gctctcagctactca

SEQ ID NO: 1819551 - DNA, 15 bp, Homo sapiens
ctctcagctactcag

SEQ ID NO: 1819552 - DNA, 15 bp, Homo sapiens
gaggcaggaggatcg

SEQ ID NO: 1819553 - DNA, 15 bp, Homo sapiens
cttgagcccagaagg

SEQ ID NO: 1819554 - DNA, 15 bp, Homo sapiens
ttgagcccagaaggt

SEQ ID NO: 1819555 - DNA, 15 bp, Homo sapiens
tgagcccagaaggtc

SEQ ID NO: 1819556 - DNA, 15 bp, Homo sapiens
gagcccagaaggtca

SEQ ID NO: 1819557 - DNA, 15 bp, Homo sapiens
agcccagaaggtcaa

SEQ ID NO: 1819558 - DNA, 15 bp, Homo sapiens
gcccagaaggtcaag

SEQ ID NO: 1819559 - DNA, 15 bp, Homo sapiens
cccagaaggtcaagg

SEQ ID NO: 1819560 - DNA, 15 bp, Homo sapiens
ccagaaggtcaaggt

SEQ ID NO: 1819561 - DNA, 15 bp, Homo sapiens
cagaaggtcaaggtt

SEQ ID NO: 1819562 - DNA, 15 bp, Homo sapiens
agaaggtcaaggttg

SEQ ID NO: 1819563 - DNA, 15 bp, Homo sapiens
gaaggtcaaggttgc

SEQ ID NO: 1819564 - DNA, 15 bp, Homo sapiens
aaggtcaaggttgca

SEQ ID NO: 1819565 - DNA, 15 bp, Homo sapiens
aggtcaaggttgcag

SEQ ID NO: 1819566 - DNA, 15 bp, Homo sapiens
ggtcaaggttgcagt

SEQ ID NO: 1819567 - DNA, 15 bp, Homo sapiens
gtcaaggttgcagtg

SEQ ID NO: 1819568 - DNA, 15 bp, Homo sapiens
tcaaggttgcagtga

SEQ ID NO: 1819569 - DNA, 15 bp, Homo sapiens
caaggttgcagtgaa

SEQ ID NO: 1819570 - DNA, 15 bp, Homo sapiens
aaggttgcagtgaac

SEQ ID NO: 1819571 - DNA, 15 bp, Homo sapiens
gttgcagtgaaccat

SEQ ID NO: 1819572 - DNA, 15 bp, Homo sapiens
ttgcagtgaaccatg

SEQ ID NO: 1819573 - DNA, 15 bp, Homo sapiens
tgcagtgaaccatgt

SEQ ID NO: 1819574 - DNA, 15 bp, Homo sapiens
gcagtgaaccatgtt

SEQ ID NO: 1819575 - DNA, 15 bp, Homo sapiens
cagtgaaccatgttc

SEQ ID NO: 1819576 - DNA, 15 bp, Homo sapiens
agtgaaccatgttca

SEQ ID NO: 1819577 - DNA, 15 bp, Homo sapiens
gtgaaccatgttcag

SEQ ID NO: 1819578 - DNA, 15 bp, Homo sapiens
tgaaccatgttcagg

SEQ ID NO: 1819579 - DNA, 15 bp, Homo sapiens
gaaccatgttcaggc

SEQ ID NO: 1819580 - DNA, 15 bp, Homo sapiens
aaccatgttcaggcc

SEQ ID NO: 1819581 - DNA, 15 bp, Homo sapiens
accatgttcaggccg

SEQ ID NO: 1819582 - DNA, 15 bp, Homo sapiens
ccatgttcaggccgc

SEQ ID NO: 1819583 - DNA, 15 bp, Homo sapiens
catgttcaggccgct

SEQ ID NO: 1819584 - DNA, 15 bp, Homo sapiens
atgttcaggccgctg

SEQ ID NO: 1819585 - DNA, 15 bp, Homo sapiens
tgttcaggccgctgc

SEQ ID NO: 1819586 - DNA, 15 bp, Homo sapiens
gttcaggccgctgca

SEQ ID NO: 1819587 - DNA, 15 bp, Homo sapiens
ttcaggccgctgcac

SEQ ID NO: 1819588 - DNA, 15 bp, Homo sapiens
tcaggccgctgcact

SEQ ID NO: 1819589 - DNA, 15 bp, Homo sapiens
caggccgctgcactc

SEQ ID NO: 1819590 - DNA, 15 bp, Homo sapiens
aggccgctgcactcc

SEQ ID NO: 1819591 - DNA, 15 bp, Homo sapiens
ggccgctgcactcca

SEQ ID NO: 1819592 - DNA, 15 bp, Homo sapiens
gccgctgcactccag

SEQ ID NO: 1819593 - DNA, 15 bp, Homo sapiens
ccgctgcactccagc

SEQ ID NO: 1819594 - DNA, 15 bp, Homo sapiens
cgctgcactccagcc

SEQ ID NO: 1819595 - DNA, 15 bp, Homo sapiens
gctgcactccagcct

SEQ ID NO: 1819596 - DNA, 15 bp, Homo sapiens
tgacagagcaagacc

SEQ ID NO: 1819597 - DNA, 15 bp, Homo sapiens
gacagagcaagaccc

SEQ ID NO: 1819598 - DNA, 15 bp, Homo sapiens
gagcaagaccctgtt

SEQ ID NO: 1819599 - DNA, 15 bp, Homo sapiens
agcaagaccctgttt

SEQ ID NO: 1819600 - DNA, 15 bp, Homo sapiens
gcaagaccctgttta

SEQ ID NO: 1819601 - DNA, 15 bp, Homo sapiens
caagaccctgtttat

SEQ ID NO: 1819602 - DNA, 15 bp, Homo sapiens
aagaccctgtttata

SEQ ID NO: 1819603 - DNA, 15 bp, Homo sapiens
agaccctgtttataa

SEQ ID NO: 1819604 - DNA, 15 bp, Homo sapiens
gaccctgtttataaa

SEQ ID NO: 1819605 - DNA, 15 bp, Homo sapiens
accctgtttataaat

SEQ ID NO: 1819606 - DNA, 15 bp, Homo sapiens
ccctgtttataaata

SEQ ID NO: 1819607 - DNA, 15 bp, Homo sapiens
cctgtttataaatac

SEQ ID NO: 1819608 - DNA, 15 bp, Homo sapiens
ctgtttataaataca

SEQ ID NO: 1819609 - DNA, 15 bp, Homo sapiens
tgtttataaatacat

SEQ ID NO: 1819610 - DNA, 15 bp, Homo sapiens
gtttataaatacata

SEQ ID NO: 1819611 - DNA, 15 bp, Homo sapiens
tttataaatacataa

SEQ ID NO: 1819612 - DNA, 15 bp, Homo sapiens
ttataaatacataat

SEQ ID NO: 1819613 - DNA, 15 bp, Homo sapiens
tataaatacataatg

SEQ ID NO: 1819614 - DNA, 15 bp, Homo sapiens
ataaatacataatgc

SEQ ID NO: 1819615 - DNA, 15 bp, Homo sapiens
taaatacataatgct

SEQ ID NO: 1819616 - DNA, 15 bp, Homo sapiens
aaatacataatgctt

SEQ ID NO: 1819617 - DNA, 15 bp, Homo sapiens
aatacataatgcttt

SEQ ID NO: 1819618 - DNA, 15 bp, Homo sapiens
atacataatgctttc

SEQ ID NO: 1819619 - DNA, 15 bp, Homo sapiens
tacataatgctttcc

SEQ ID NO: 1819620 - DNA, 15 bp, Homo sapiens
acataatgctttcca

SEQ ID NO: 1819621 - DNA, 15 bp, Homo sapiens
cataatgctttccaa

SEQ ID NO: 1819622 - DNA, 15 bp, Homo sapiens
ataatgctttccaag

SEQ ID NO: 1819623 - DNA, 15 bp, Homo sapiens
taatgctttccaagt

SEQ ID NO: 1819624 - DNA, 15 bp, Homo sapiens
atgctttccaagtga

SEQ ID NO: 1819625 - DNA, 15 bp, Homo sapiens
tgctttccaagtgat

SEQ ID NO: 1819626 - DNA, 15 bp, Homo sapiens
gctttccaagtgatt

SEQ ID NO: 1819627 - DNA, 15 bp, Homo sapiens
ctttccaagtgatta

SEQ ID NO: 1819628 - DNA, 15 bp, Homo sapiens
tttccaagtgattaa

SEQ ID NO: 1819629 - DNA, 15 bp, Homo sapiens
ttccaagtgattaaa

SEQ ID NO: 1819630 - DNA, 15 bp, Homo sapiens
tccaagtgattaaac

SEQ ID NO: 1819631 - DNA, 15 bp, Homo sapiens
ccaagtgattaaacc

SEQ ID NO: 1819632 - DNA, 15 bp, Homo sapiens
caagtgattaaaccg

SEQ ID NO: 1819633 - DNA, 15 bp, Homo sapiens
aagtgattaaaccga

SEQ ID NO: 1819634 - DNA, 15 bp, Homo sapiens
agtgattaaaccgac

SEQ ID NO: 1819635 - DNA, 15 bp, Homo sapiens
gtgattaaaccgact

SEQ ID NO: 1819636 - DNA, 15 bp, Homo sapiens
tgattaaaccgactc

SEQ ID NO: 1819637 - DNA, 15 bp, Homo sapiens
gattaaaccgactcc

SEQ ID NO: 1819638 - DNA, 15 bp, Homo sapiens
attaaaccgactccc

SEQ ID NO: 1819639 - DNA, 15 bp, Homo sapiens
ttaaaccgactcccc

SEQ ID NO: 1819640 - DNA, 15 bp, Homo sapiens
taaaccgactccccc

SEQ ID NO: 1819641 - DNA, 15 bp, Homo sapiens
aaaccgactcccccc

SEQ ID NO: 1819642 - DNA, 15 bp, Homo sapiens
aaccgactcccccct

SEQ ID NO: 1819643 - DNA, 15 bp, Homo sapiens
accgactcccccctc

SEQ ID NO: 1819644 - DNA, 15 bp, Homo sapiens
ccgactcccccctca

SEQ ID NO: 1819645 - DNA, 15 bp, Homo sapiens
cgactcccccctcac

SEQ ID NO: 1819646 - DNA, 15 bp, Homo sapiens
gactcccccctcacc

SEQ ID NO: 1819647 - DNA, 15 bp, Homo sapiens
actcccccctcaccc

SEQ ID NO: 1819648 - DNA, 15 bp, Homo sapiens
ctcccccctcaccct

SEQ ID NO: 1819649 - DNA, 15 bp, Homo sapiens
tcccccctcaccctg

SEQ ID NO: 1819650 - DNA, 15 bp, Homo sapiens
cccccctcaccctgc

SEQ ID NO: 1819651 - DNA, 15 bp, Homo sapiens
ccccctcaccctgcc

SEQ ID NO: 1819652 - DNA, 15 bp, Homo sapiens
cccctcaccctgccc

SEQ ID NO: 1819653 - DNA, 15 bp, Homo sapiens
ccctcaccctgccca

SEQ ID NO: 1819654 - DNA, 15 bp, Homo sapiens
cctcaccctgcccac

SEQ ID NO: 1819655 - DNA, 15 bp, Homo sapiens
ctcaccctgcccacc

SEQ ID NO: 1819656 - DNA, 15 bp, Homo sapiens
tcaccctgcccacca

SEQ ID NO: 1819657 - DNA, 15 bp, Homo sapiens
caccctgcccaccat

SEQ ID NO: 1819658 - DNA, 15 bp, Homo sapiens
accctgcccaccatg

SEQ ID NO: 1819659 - DNA, 15 bp, Homo sapiens
ccctgcccaccatgg

SEQ ID NO: 1819660 - DNA, 15 bp, Homo sapiens
cctgcccaccatggc

SEQ ID NO: 1819661 - DNA, 15 bp, Homo sapiens
ctgcccaccatggct

SEQ ID NO: 1819662 - DNA, 15 bp, Homo sapiens
tgcccaccatggctc

SEQ ID NO: 1819663 - DNA, 15 bp, Homo sapiens
gcccaccatggctcc

SEQ ID NO: 1819664 - DNA, 15 bp, Homo sapiens
cccaccatggctcca

SEQ ID NO: 1819665 - DNA, 15 bp, Homo sapiens
ccaccatggctccaa

SEQ ID NO: 1819666 - DNA, 15 bp, Homo sapiens
caccatggctccaaa

SEQ ID NO: 1819667 - DNA, 15 bp, Homo sapiens
accatggctccaaag

SEQ ID NO: 1819668 - DNA, 15 bp, Homo sapiens
ccatggctccaaaga

SEQ ID NO: 1819669 - DNA, 15 bp, Homo sapiens
catggctccaaagaa

SEQ ID NO: 1819670 - DNA, 15 bp, Homo sapiens
atggctccaaagaag

SEQ ID NO: 1819671 - DNA, 15 bp, Homo sapiens
tggctccaaagaagc

SEQ ID NO: 1819672 - DNA, 15 bp, Homo sapiens
ggctccaaagaagca

SEQ ID NO: 1819673 - DNA, 15 bp, Homo sapiens
gctccaaagaagcat

SEQ ID NO: 1819674 - DNA, 15 bp, Homo sapiens
ctccaaagaagcatt

SEQ ID NO: 1819675 - DNA, 15 bp, Homo sapiens
tccaaagaagcattt

SEQ ID NO: 1819676 - DNA, 15 bp, Homo sapiens
ccaaagaagcatttg

SEQ ID NO: 1819677 - DNA, 15 bp, Homo sapiens
caaagaagcatttgt

SEQ ID NO: 1819678 - DNA, 15 bp, Homo sapiens
aaagaagcatttgtg

SEQ ID NO: 1819679 - DNA, 15 bp, Homo sapiens
aagaagcatttgtgg

SEQ ID NO: 1819680 - DNA, 15 bp, Homo sapiens
agaagcatttgtgga

SEQ ID NO: 1819681 - DNA, 15 bp, Homo sapiens
gaagcatttgtggag

SEQ ID NO: 1819682 - DNA, 15 bp, Homo sapiens
aagcatttgtggagc

SEQ ID NO: 1819683 - DNA, 15 bp, Homo sapiens
agcatttgtggagca

SEQ ID NO: 1819684 - DNA, 15 bp, Homo sapiens
gcatttgtggagcac

SEQ ID NO: 1819685 - DNA, 15 bp, Homo sapiens
catttgtggagcacc

SEQ ID NO: 1819686 - DNA, 15 bp, Homo sapiens
atttgtggagcacct

SEQ ID NO: 1819687 - DNA, 15 bp, Homo sapiens
tttgtggagcacctt

SEQ ID NO: 1819688 - DNA, 15 bp, Homo sapiens
ttgtggagcaccttc

SEQ ID NO: 1819689 - DNA, 15 bp, Homo sapiens
tgtggagcaccttct

SEQ ID NO: 1819690 - DNA, 15 bp, Homo sapiens
gtggagcaccttctg

SEQ ID NO: 1819691 - DNA, 15 bp, Homo sapiens
tggagcaccttctgt

SEQ ID NO: 1819692 - DNA, 15 bp, Homo sapiens
ggagcaccttctgtg

SEQ ID NO: 1819693 - DNA, 15 bp, Homo sapiens
gagcaccttctgtgt

SEQ ID NO: 1819694 - DNA, 15 bp, Homo sapiens
agcaccttctgtgtg

SEQ ID NO: 1819695 - DNA, 15 bp, Homo sapiens
gcaccttctgtgtgc

SEQ ID NO: 1819696 - DNA, 15 bp, Homo sapiens
caccttctgtgtgcc

SEQ ID NO: 1819697 - DNA, 15 bp, Homo sapiens
accttctgtgtgccc

SEQ ID NO: 1819698 - DNA, 15 bp, Homo sapiens
ccttctgtgtgcccc

SEQ ID NO: 1819699 - DNA, 15 bp, Homo sapiens
cttctgtgtgcccct

SEQ ID NO: 1819700 - DNA, 15 bp, Homo sapiens
ttctgtgtgccccta

SEQ ID NO: 1819701 - DNA, 15 bp, Homo sapiens
tctgtgtgcccctag

SEQ ID NO: 1819702 - DNA, 15 bp, Homo sapiens
ctgtgtgcccctagg

SEQ ID NO: 1819703 - DNA, 15 bp, Homo sapiens
tgtgtgcccctaggt

SEQ ID NO: 1819704 - DNA, 15 bp, Homo sapiens
gtgtgcccctaggta

SEQ ID NO: 1819705 - DNA, 15 bp, Homo sapiens
tgtgcccctaggtac

SEQ ID NO: 1819706 - DNA, 15 bp, Homo sapiens
gtgcccctaggtact

SEQ ID NO: 1819707 - DNA, 15 bp, Homo sapiens
tgcccctaggtacta

SEQ ID NO: 1819708 - DNA, 15 bp, Homo sapiens
gcccctaggtactag

SEQ ID NO: 1819709 - DNA, 15 bp, Homo sapiens
cccctaggtactaga

SEQ ID NO: 1819710 - DNA, 15 bp, Homo sapiens
ccctaggtactagat

SEQ ID NO: 1819711 - DNA, 15 bp, Homo sapiens
cctaggtactagatg

SEQ ID NO: 1819712 - DNA, 15 bp, Homo sapiens
ctaggtactagatgc

SEQ ID NO: 1819713 - DNA, 15 bp, Homo sapiens
taggtactagatgcc

SEQ ID NO: 1819714 - DNA, 15 bp, Homo sapiens
aggtactagatgcct

SEQ ID NO: 1819715 - DNA, 15 bp, Homo sapiens
ggtactagatgcctg

SEQ ID NO: 1819716 - DNA, 15 bp, Homo sapiens
gtactagatgcctgg

SEQ ID NO: 1819717 - DNA, 15 bp, Homo sapiens
tactagatgcctgga

SEQ ID NO: 1819718 - DNA, 15 bp, Homo sapiens
actagatgcctggac

SEQ ID NO: 1819719 - DNA, 15 bp, Homo sapiens
ctagatgcctggacg

SEQ ID NO: 1819720 - DNA, 15 bp, Homo sapiens
tagatgcctggacgg

SEQ ID NO: 1819721 - DNA, 15 bp, Homo sapiens
agatgcctggacggg

SEQ ID NO: 1819722 - DNA, 15 bp, Homo sapiens
gatgcctggacgggg

SEQ ID NO: 1819723 - DNA, 15 bp, Homo sapiens
atgcctggacggggt

SEQ ID NO: 1819724 - DNA, 15 bp, Homo sapiens
tgcctggacggggtc

SEQ ID NO: 1819725 - DNA, 15 bp, Homo sapiens
gcctggacggggtca

SEQ ID NO: 1819726 - DNA, 15 bp, Homo sapiens
cctggacggggtcag

SEQ ID NO: 1819727 - DNA, 15 bp, Homo sapiens
ctggacggggtcaga

SEQ ID NO: 1819728 - DNA, 15 bp, Homo sapiens
tggacggggtcagaa

SEQ ID NO: 1819729 - DNA, 15 bp, Homo sapiens
ggacggggtcagaag

SEQ ID NO: 1819730 - DNA, 15 bp, Homo sapiens
gacggggtcagaagg

SEQ ID NO: 1819731 - DNA, 15 bp, Homo sapiens
acggggtcagaagga

SEQ ID NO: 1819732 - DNA, 15 bp, Homo sapiens
cggggtcagaaggac

SEQ ID NO: 1819733 - DNA, 15 bp, Homo sapiens
ggggtcagaaggacc

SEQ ID NO: 1819734 - DNA, 15 bp, Homo sapiens
gggtcagaaggaccc

SEQ ID NO: 1819735 - DNA, 15 bp, Homo sapiens
ggtcagaaggaccct

SEQ ID NO: 1819736 - DNA, 15 bp, Homo sapiens
gtcagaaggaccctg

SEQ ID NO: 1819737 - DNA, 15 bp, Homo sapiens
tcagaaggaccctga

SEQ ID NO: 1819738 - DNA, 15 bp, Homo sapiens
cagaaggaccctgac

SEQ ID NO: 1819739 - DNA, 15 bp, Homo sapiens
agaaggaccctgacc

SEQ ID NO: 1819740 - DNA, 15 bp, Homo sapiens
gaaggaccctgaccc

SEQ ID NO: 1819741 - DNA, 15 bp, Homo sapiens
aaggaccctgaccca

SEQ ID NO: 1819742 - DNA, 15 bp, Homo sapiens
aggaccctgacccac

SEQ ID NO: 1819743 - DNA, 15 bp, Homo sapiens
ggaccctgacccacc

SEQ ID NO: 1819744 - DNA, 15 bp, Homo sapiens
gaccctgacccacct

SEQ ID NO: 1819745 - DNA, 15 bp, Homo sapiens
accctgacccacctt

SEQ ID NO: 1819746 - DNA, 15 bp, Homo sapiens
ccctgacccaccttg

SEQ ID NO: 1819747 - DNA, 15 bp, Homo sapiens
cctgacccaccttga

SEQ ID NO: 1819748 - DNA, 15 bp, Homo sapiens
ctgacccaccttgaa

SEQ ID NO: 1819749 - DNA, 15 bp, Homo sapiens
tgacccaccttgaac

SEQ ID NO: 1819750 - DNA, 15 bp, Homo sapiens
gacccaccttgaact

SEQ ID NO: 1819751 - DNA, 15 bp, Homo sapiens
cccaccttgaacttg

SEQ ID NO: 1819752 - DNA, 15 bp, Homo sapiens
ccaccttgaacttgt

SEQ ID NO: 1819753 - DNA, 15 bp, Homo sapiens
caccttgaacttgtt

SEQ ID NO: 1819754 - DNA, 15 bp, Homo sapiens
accttgaacttgttc

SEQ ID NO: 1819755 - DNA, 15 bp, Homo sapiens
ccttgaacttgttcc

SEQ ID NO: 1819756 - DNA, 15 bp, Homo sapiens
cttgaacttgttcca

SEQ ID NO: 1819757 - DNA, 15 bp, Homo sapiens
ttgaacttgttccac

SEQ ID NO: 1819758 - DNA, 15 bp, Homo sapiens
tgaacttgttccaca

SEQ ID NO: 1819759 - DNA, 15 bp, Homo sapiens
gaacttgttccacac

SEQ ID NO: 1819760 - DNA, 15 bp, Homo sapiens
aacttgttccacaca

SEQ ID NO: 1819761 - DNA, 15 bp, Homo sapiens
acttgttccacacag

SEQ ID NO: 1819762 - DNA, 15 bp, Homo sapiens
cttgttccacacagg

SEQ ID NO: 1819763 - DNA, 15 bp, Homo sapiens
ttgttccacacagga

SEQ ID NO: 1819764 - DNA, 15 bp, Homo sapiens
tgttccacacaggat

SEQ ID NO: 1819765 - DNA, 15 bp, Homo sapiens
gttccacacaggatg

SEQ ID NO: 1819766 - DNA, 15 bp, Homo sapiens
ttccacacaggatgc

SEQ ID NO: 1819767 - DNA, 15 bp, Homo sapiens
tccacacaggatgcc

SEQ ID NO: 1819768 - DNA, 15 bp, Homo sapiens
ccacacaggatgcca

SEQ ID NO: 1819769 - DNA, 15 bp, Homo sapiens
cacacaggatgccag

SEQ ID NO: 1819770 - DNA, 15 bp, Homo sapiens
acacaggatgccagg

SEQ ID NO: 1819771 - DNA, 15 bp, Homo sapiens
cacaggatgccaggc

SEQ ID NO: 1819772 - DNA, 15 bp, Homo sapiens
acaggatgccaggcc

SEQ ID NO: 1819773 - DNA, 15 bp, Homo sapiens
caggatgccaggcca

SEQ ID NO: 1819774 - DNA, 15 bp, Homo sapiens
aggatgccaggccaa

SEQ ID NO: 1819775 - DNA, 15 bp, Homo sapiens
ggatgccaggccaag

SEQ ID NO: 1819776 - DNA, 15 bp, Homo sapiens
gatgccaggccaagg

SEQ ID NO: 1819777 - DNA, 15 bp, Homo sapiens
atgccaggccaaggt

SEQ ID NO: 1819778 - DNA, 15 bp, Homo sapiens
tgccaggccaaggtg

SEQ ID NO: 1819779 - DNA, 15 bp, Homo sapiens
ctgtccttccctagc

SEQ ID NO: 1819780 - DNA, 15 bp, Homo sapiens
tgtccttccctagct

SEQ ID NO: 1819781 - DNA, 15 bp, Homo sapiens
gtccttccctagctc

SEQ ID NO: 1819782 - DNA, 15 bp, Homo sapiens
tccttccctagctct

SEQ ID NO: 1819783 - DNA, 15 bp, Homo sapiens
ccttccctagctctt

SEQ ID NO: 1819784 - DNA, 15 bp, Homo sapiens
cttccctagctcttt

SEQ ID NO: 1819785 - DNA, 15 bp, Homo sapiens
ttccctagctctttt

SEQ ID NO: 1819786 - DNA, 15 bp, Homo sapiens
tccctagctctttta

SEQ ID NO: 1819787 - DNA, 15 bp, Homo sapiens
ccctagctcttttat

SEQ ID NO: 1819788 - DNA, 15 bp, Homo sapiens
cctagctcttttata

SEQ ID NO: 1819789 - DNA, 15 bp, Homo sapiens
ctagctcttttatat

SEQ ID NO: 1819790 - DNA, 15 bp, Homo sapiens
tagctcttttatata

SEQ ID NO: 1819791 - DNA, 15 bp, Homo sapiens
agctcttttatatag

SEQ ID NO: 1819792 - DNA, 15 bp, Homo sapiens
gctcttttatataga

SEQ ID NO: 1819793 - DNA, 15 bp, Homo sapiens
ctcttttatatagag

SEQ ID NO: 1819794 - DNA, 15 bp, Homo sapiens
tcttttatatagaga

SEQ ID NO: 1819795 - DNA, 15 bp, Homo sapiens
cttttatatagagac

SEQ ID NO: 1819796 - DNA, 15 bp, Homo sapiens
ttttatatagagaca

SEQ ID NO: 1819797 - DNA, 15 bp, Homo sapiens
tttatatagagacag

SEQ ID NO: 1819798 - DNA, 15 bp, Homo sapiens
ttatatagagacaga

SEQ ID NO: 1819799 - DNA, 15 bp, Homo sapiens
tatatagagacagag

SEQ ID NO: 1819800 - DNA, 15 bp, Homo sapiens
atatagagacagaga

SEQ ID NO: 1819801 - DNA, 15 bp, Homo sapiens
tatagagacagagag

SEQ ID NO: 1819802 - DNA, 15 bp, Homo sapiens
agagacagagagatg

SEQ ID NO: 1819803 - DNA, 15 bp, Homo sapiens
gagacagagagatgg

SEQ ID NO: 1819804 - DNA, 15 bp, Homo sapiens
agacagagagatggg

SEQ ID NO: 1819805 - DNA, 15 bp, Homo sapiens
gacagagagatgggg

SEQ ID NO: 1819806 - DNA, 15 bp, Homo sapiens
acagagagatggggt

SEQ ID NO: 1819807 - DNA, 15 bp, Homo sapiens
cagagagatggggtc

SEQ ID NO: 1819808 - DNA, 15 bp, Homo sapiens
agagagatggggtct

SEQ ID NO: 1819809 - DNA, 15 bp, Homo sapiens
gagagatggggtctc

SEQ ID NO: 1819810 - DNA, 15 bp, Homo sapiens
gggtctcactgtgtt

SEQ ID NO: 1819811 - DNA, 15 bp, Homo sapiens
ggtctcactgtgttg

SEQ ID NO: 1819812 - DNA, 15 bp, Homo sapiens
gtctcactgtgttgc

SEQ ID NO: 1819813 - DNA, 15 bp, Homo sapiens
tctcactgtgttgcc

SEQ ID NO: 1819814 - DNA, 15 bp, Homo sapiens
cactgtgttgcccag

SEQ ID NO: 1819815 - DNA, 15 bp, Homo sapiens
gctggtcttgaactt

SEQ ID NO: 1819816 - DNA, 15 bp, Homo sapiens
gtcttgaacttctgg

SEQ ID NO: 1819817 - DNA, 15 bp, Homo sapiens
tcttgaacttctggg

SEQ ID NO: 1819818 - DNA, 15 bp, Homo sapiens
cttgaacttctgggc

SEQ ID NO: 1819819 - DNA, 15 bp, Homo sapiens
ttgaacttctgggct

SEQ ID NO: 1819820 - DNA, 15 bp, Homo sapiens
tgaacttctgggctc

SEQ ID NO: 1819821 - DNA, 15 bp, Homo sapiens
gaacttctgggctca

SEQ ID NO: 1819822 - DNA, 15 bp, Homo sapiens
aacttctgggctcaa

SEQ ID NO: 1819823 - DNA, 15 bp, Homo sapiens
acttctgggctcaag

SEQ ID NO: 1819824 - DNA, 15 bp, Homo sapiens
caagcgatcctcccg

SEQ ID NO: 1819825 - DNA, 15 bp, Homo sapiens
aagcgatcctcccgc

SEQ ID NO: 1819826 - DNA, 15 bp, Homo sapiens
agcgatcctcccgcc

SEQ ID NO: 1819827 - DNA, 15 bp, Homo sapiens
gcgatcctcccgcct

SEQ ID NO: 1819828 - DNA, 15 bp, Homo sapiens
cgatcctcccgcctc

SEQ ID NO: 1819829 - DNA, 15 bp, Homo sapiens
gatcctcccgcctcg

SEQ ID NO: 1819830 - DNA, 15 bp, Homo sapiens
atcctcccgcctcgg

SEQ ID NO: 1819831 - DNA, 15 bp, Homo sapiens
tcctcccgcctcggc

SEQ ID NO: 1819832 - DNA, 15 bp, Homo sapiens
cctcccgcctcggcc

SEQ ID NO: 1819833 - DNA, 15 bp, Homo sapiens
ctcccgcctcggcct

SEQ ID NO: 1819834 - DNA, 15 bp, Homo sapiens
tcccgcctcggcctc

SEQ ID NO: 1819835 - DNA, 15 bp, Homo sapiens
aagtgctgggattag

SEQ ID NO: 1819836 - DNA, 15 bp, Homo sapiens
agtgctgggattaga

SEQ ID NO: 1819837 - DNA, 15 bp, Homo sapiens
gtgctgggattagag

SEQ ID NO: 1819838 - DNA, 15 bp, Homo sapiens
tgctgggattagagg

SEQ ID NO: 1819839 - DNA, 15 bp, Homo sapiens
gctgggattagaggc

SEQ ID NO: 1819840 - DNA, 15 bp, Homo sapiens
ctgggattagaggca

SEQ ID NO: 1819841 - DNA, 15 bp, Homo sapiens
tgggattagaggcat

SEQ ID NO: 1819842 - DNA, 15 bp, Homo sapiens
gggattagaggcatg

SEQ ID NO: 1819843 - DNA, 15 bp, Homo sapiens
ggattagaggcatga

SEQ ID NO: 1819844 - DNA, 15 bp, Homo sapiens
gattagaggcatgag

SEQ ID NO: 1819845 - DNA, 15 bp, Homo sapiens
attagaggcatgagc

SEQ ID NO: 1819846 - DNA, 15 bp, Homo sapiens
ttagaggcatgagcc

SEQ ID NO: 1819847 - DNA, 15 bp, Homo sapiens
tagaggcatgagcca

SEQ ID NO: 1819848 - DNA, 15 bp, Homo sapiens
agaggcatgagccac

SEQ ID NO: 1819849 - DNA, 15 bp, Homo sapiens
gaggcatgagccacc

SEQ ID NO: 1819850 - DNA, 15 bp, Homo sapiens
gagccaccttgcccg

SEQ ID NO: 1819851 - DNA, 15 bp, Homo sapiens
agccaccttgcccgg

SEQ ID NO: 1819852 - DNA, 15 bp, Homo sapiens
gccaccttgcccggc

SEQ ID NO: 1819853 - DNA, 15 bp, Homo sapiens
ccaccttgcccggcc

SEQ ID NO: 1819854 - DNA, 15 bp, Homo sapiens
caccttgcccggcct

SEQ ID NO: 1819855 - DNA, 15 bp, Homo sapiens
accttgcccggcctc

SEQ ID NO: 1819856 - DNA, 15 bp, Homo sapiens
ccttgcccggcctcc

SEQ ID NO: 1819857 - DNA, 15 bp, Homo sapiens
cttgcccggcctcct

SEQ ID NO: 1819858 - DNA, 15 bp, Homo sapiens
ttgcccggcctccta

SEQ ID NO: 1819859 - DNA, 15 bp, Homo sapiens
tgcccggcctcctag

SEQ ID NO: 1819860 - DNA, 15 bp, Homo sapiens
gcccggcctcctagc

SEQ ID NO: 1819861 - DNA, 15 bp, Homo sapiens
cccggcctcctagct

SEQ ID NO: 1819862 - DNA, 15 bp, Homo sapiens
ccggcctcctagctc

SEQ ID NO: 1819863 - DNA, 15 bp, Homo sapiens
cggcctcctagctcc

SEQ ID NO: 1819864 - DNA, 15 bp, Homo sapiens
ggcctcctagctcct

SEQ ID NO: 1819865 - DNA, 15 bp, Homo sapiens
gcctcctagctcctt

SEQ ID NO: 1819866 - DNA, 15 bp, Homo sapiens
cctcctagctccttc

SEQ ID NO: 1819867 - DNA, 15 bp, Homo sapiens
ctcctagctccttct

SEQ ID NO: 1819868 - DNA, 15 bp, Homo sapiens
tcctagctccttctt

SEQ ID NO: 1819869 - DNA, 15 bp, Homo sapiens
cctagctccttcttc

SEQ ID NO: 1819870 - DNA, 15 bp, Homo sapiens
ctagctccttcttcg

SEQ ID NO: 1819871 - DNA, 15 bp, Homo sapiens
tagctccttcttcgt

SEQ ID NO: 1819872 - DNA, 15 bp, Homo sapiens
agctccttcttcgtc

SEQ ID NO: 1819873 - DNA, 15 bp, Homo sapiens
gctccttcttcgtct

SEQ ID NO: 1819874 - DNA, 15 bp, Homo sapiens
ctccttcttcgtctc

SEQ ID NO: 1819875 - DNA, 15 bp, Homo sapiens
tccttcttcgtctct

SEQ ID NO: 1819876 - DNA, 15 bp, Homo sapiens
ccttcttcgtctctg

SEQ ID NO: 1819877 - DNA, 15 bp, Homo sapiens
cttcttcgtctctgc

SEQ ID NO: 1819878 - DNA, 15 bp, Homo sapiens
ttcttcgtctctgcc

SEQ ID NO: 1819879 - DNA, 15 bp, Homo sapiens
tcttcgtctctgcct

SEQ ID NO: 1819880 - DNA, 15 bp, Homo sapiens
cttcgtctctgcctc

SEQ ID NO: 1819881 - DNA, 15 bp, Homo sapiens
ttcgtctctgcctct

SEQ ID NO: 1819882 - DNA, 15 bp, Homo sapiens
tcgtctctgcctctg

SEQ ID NO: 1819883 - DNA, 15 bp, Homo sapiens
cgtctctgcctctgc

SEQ ID NO: 1819884 - DNA, 15 bp, Homo sapiens
gtctctgcctctgcc

SEQ ID NO: 1819885 - DNA, 15 bp, Homo sapiens
tctctgcctctgccc

SEQ ID NO: 1819886 - DNA, 15 bp, Homo sapiens
ctctgcctctgccct

SEQ ID NO: 1819887 - DNA, 15 bp, Homo sapiens
tctgcctctgccctc

SEQ ID NO: 1819888 - DNA, 15 bp, Homo sapiens
ctgcctctgccctct

SEQ ID NO: 1819889 - DNA, 15 bp, Homo sapiens
tgcctctgccctctg

SEQ ID NO: 1819890 - DNA, 15 bp, Homo sapiens
gcctctgccctctgc

SEQ ID NO: 1819891 - DNA, 15 bp, Homo sapiens
cctctgccctctgca

SEQ ID NO: 1819892 - DNA, 15 bp, Homo sapiens
ctctgccctctgcat

SEQ ID NO: 1819893 - DNA, 15 bp, Homo sapiens
tctgccctctgcatc

SEQ ID NO: 1819894 - DNA, 15 bp, Homo sapiens
ctgccctctgcatct

SEQ ID NO: 1819895 - DNA, 15 bp, Homo sapiens
tgccctctgcatctg

SEQ ID NO: 1819896 - DNA, 15 bp, Homo sapiens
gccctctgcatctgc

SEQ ID NO: 1819897 - DNA, 15 bp, Homo sapiens
ccctctgcatctgct

SEQ ID NO: 1819898 - DNA, 15 bp, Homo sapiens
cctctgcatctgctc

SEQ ID NO: 1819899 - DNA, 15 bp, Homo sapiens
ctctgcatctgctct

SEQ ID NO: 1819900 - DNA, 15 bp, Homo sapiens
tctgcatctgctctc

SEQ ID NO: 1819901 - DNA, 15 bp, Homo sapiens
ctgcatctgctctct

SEQ ID NO: 1819902 - DNA, 15 bp, Homo sapiens
tgcatctgctctctg

SEQ ID NO: 1819903 - DNA, 15 bp, Homo sapiens
gcatctgctctctgc

SEQ ID NO: 1819904 - DNA, 15 bp, Homo sapiens
catctgctctctgca

SEQ ID NO: 1819905 - DNA, 15 bp, Homo sapiens
atctgctctctgcat

SEQ ID NO: 1819906 - DNA, 15 bp, Homo sapiens
tctgctctctgcatc

SEQ ID NO: 1819907 - DNA, 15 bp, Homo sapiens
ctgctctctgcatct

SEQ ID NO: 1819908 - DNA, 15 bp, Homo sapiens
tgctctctgcatctg

SEQ ID NO: 1819909 - DNA, 15 bp, Homo sapiens
gctctctgcatctgt

SEQ ID NO: 1819910 - DNA, 15 bp, Homo sapiens
ctctctgcatctgtc

SEQ ID NO: 1819911 - DNA, 15 bp, Homo sapiens
ctctgcatctgtctc

SEQ ID NO: 1819912 - DNA, 15 bp, Homo sapiens
tctgcatctgtctct

SEQ ID NO: 1819913 - DNA, 15 bp, Homo sapiens
ctgcatctgtctctg

SEQ ID NO: 1819914 - DNA, 15 bp, Homo sapiens
tgcatctgtctctgt

SEQ ID NO: 1819915 - DNA, 15 bp, Homo sapiens
gcatctgtctctgtc

SEQ ID NO: 1819916 - DNA, 15 bp, Homo sapiens
catctgtctctgtct

SEQ ID NO: 1819917 - DNA, 15 bp, Homo sapiens
atctgtctctgtctc

SEQ ID NO: 1819918 - DNA, 15 bp, Homo sapiens
ctgtctctgtctcct

SEQ ID NO: 1819919 - DNA, 15 bp, Homo sapiens
tgtctctgtctcctt

SEQ ID NO: 1819920 - DNA, 15 bp, Homo sapiens
gtctctgtctccttc

SEQ ID NO: 1819921 - DNA, 15 bp, Homo sapiens
tctctgtctccttct

SEQ ID NO: 1819922 - DNA, 15 bp, Homo sapiens
ctctgtctccttctc

SEQ ID NO: 1819923 - DNA, 15 bp, Homo sapiens
tctgtctccttctct

SEQ ID NO: 1819924 - DNA, 15 bp, Homo sapiens
ctgtctccttctctc

SEQ ID NO: 1819925 - DNA, 15 bp, Homo sapiens
tgtctccttctctcg

SEQ ID NO: 1819926 - DNA, 15 bp, Homo sapiens
gtctccttctctcgg

SEQ ID NO: 1819927 - DNA, 15 bp, Homo sapiens
tctccttctctcggc

SEQ ID NO: 1819928 - DNA, 15 bp, Homo sapiens
ctccttctctcggcc

SEQ ID NO: 1819929 - DNA, 15 bp, Homo sapiens
tccttctctcggcct

SEQ ID NO: 1819930 - DNA, 15 bp, Homo sapiens
ccttctctcggcctc

SEQ ID NO: 1819931 - DNA, 15 bp, Homo sapiens
cttctctcggcctct

SEQ ID NO: 1819932 - DNA, 15 bp, Homo sapiens
ttctctcggcctctg

SEQ ID NO: 1819933 - DNA, 15 bp, Homo sapiens
tctctcggcctctgc

SEQ ID NO: 1819934 - DNA, 15 bp, Homo sapiens
ctctcggcctctgcc

SEQ ID NO: 1819935 - DNA, 15 bp, Homo sapiens
tctcggcctctgccc

SEQ ID NO: 1819936 - DNA, 15 bp, Homo sapiens
ctcggcctctgcccc

SEQ ID NO: 1819937 - DNA, 15 bp, Homo sapiens
tcggcctctgccccg

SEQ ID NO: 1819938 - DNA, 15 bp, Homo sapiens
cggcctctgccccgt

SEQ ID NO: 1819939 - DNA, 15 bp, Homo sapiens
ggcctctgccccgtt

SEQ ID NO: 1819940 - DNA, 15 bp, Homo sapiens
gcctctgccccgttc

SEQ ID NO: 1819941 - DNA, 15 bp, Homo sapiens
cctctgccccgttcc

SEQ ID NO: 1819942 - DNA, 15 bp, Homo sapiens
ctctgccccgttcct

SEQ ID NO: 1819943 - DNA, 15 bp, Homo sapiens
tctgccccgttcctt

SEQ ID NO: 1819944 - DNA, 15 bp, Homo sapiens
ctgccccgttccttc

SEQ ID NO: 1819945 - DNA, 15 bp, Homo sapiens
tgccccgttccttct

SEQ ID NO: 1819946 - DNA, 15 bp, Homo sapiens
gccccgttccttctc

SEQ ID NO: 1819947 - DNA, 15 bp, Homo sapiens
ccccgttccttctct

SEQ ID NO: 1819948 - DNA, 15 bp, Homo sapiens
cccgttccttctctc

SEQ ID NO: 1819949 - DNA, 15 bp, Homo sapiens
ccgttccttctctcc

SEQ ID NO: 1819950 - DNA, 15 bp, Homo sapiens
cgttccttctctccc

SEQ ID NO: 1819951 - DNA, 15 bp, Homo sapiens
gttccttctctccct

SEQ ID NO: 1819952 - DNA, 15 bp, Homo sapiens
ttccttctctccctc

SEQ ID NO: 1819953 - DNA, 15 bp, Homo sapiens
tccttctctccctct

SEQ ID NO: 1819954 - DNA, 15 bp, Homo sapiens
ccttctctccctctt

SEQ ID NO: 1819955 - DNA, 15 bp, Homo sapiens
cttctctccctcttg

SEQ ID NO: 1819956 - DNA, 15 bp, Homo sapiens
ttctctccctcttgg

SEQ ID NO: 1819957 - DNA, 15 bp, Homo sapiens
tctctccctcttggg

SEQ ID NO: 1819958 - DNA, 15 bp, Homo sapiens
ctctccctcttgggt

SEQ ID NO: 1819959 - DNA, 15 bp, Homo sapiens
tctccctcttgggtc

SEQ ID NO: 1819960 - DNA, 15 bp, Homo sapiens
ctccctcttgggtct

SEQ ID NO: 1819961 - DNA, 15 bp, Homo sapiens
tccctcttgggtctc

SEQ ID NO: 1819962 - DNA, 15 bp, Homo sapiens
ccctcttgggtctct

SEQ ID NO: 1819963 - DNA, 15 bp, Homo sapiens
cctcttgggtctctc

SEQ ID NO: 1819964 - DNA, 15 bp, Homo sapiens
ctcttgggtctctct

SEQ ID NO: 1819965 - DNA, 15 bp, Homo sapiens
tcttgggtctctctg

SEQ ID NO: 1819966 - DNA, 15 bp, Homo sapiens
cttgggtctctctgg

SEQ ID NO: 1819967 - DNA, 15 bp, Homo sapiens
ttgggtctctctggc

SEQ ID NO: 1819968 - DNA, 15 bp, Homo sapiens
tgggtctctctggct

SEQ ID NO: 1819969 - DNA, 15 bp, Homo sapiens
gggtctctctggctc

SEQ ID NO: 1819970 - DNA, 15 bp, Homo sapiens
ggtctctctggctca

SEQ ID NO: 1819971 - DNA, 15 bp, Homo sapiens
gtctctctggctcat

SEQ ID NO: 1819972 - DNA, 15 bp, Homo sapiens
tctctctggctcatc

SEQ ID NO: 1819973 - DNA, 15 bp, Homo sapiens
ctctctggctcatcc

SEQ ID NO: 1819974 - DNA, 15 bp, Homo sapiens
tctctggctcatccc

SEQ ID NO: 1819975 - DNA, 15 bp, Homo sapiens
ctctggctcatcccc

SEQ ID NO: 1819976 - DNA, 15 bp, Homo sapiens
tctggctcatcccca

SEQ ID NO: 1819977 - DNA, 15 bp, Homo sapiens
ctggctcatccccat

SEQ ID NO: 1819978 - DNA, 15 bp, Homo sapiens
tggctcatccccatc

SEQ ID NO: 1819979 - DNA, 15 bp, Homo sapiens
ggctcatccccatct

SEQ ID NO: 1819980 - DNA, 15 bp, Homo sapiens
gctcatccccatctc

SEQ ID NO: 1819981 - DNA, 15 bp, Homo sapiens
ctcatccccatctcg

SEQ ID NO: 1819982 - DNA, 15 bp, Homo sapiens
tcatccccatctcgc

SEQ ID NO: 1819983 - DNA, 15 bp, Homo sapiens
catccccatctcgcc

SEQ ID NO: 1819984 - DNA, 15 bp, Homo sapiens
atccccatctcgccc

SEQ ID NO: 1819985 - DNA, 15 bp, Homo sapiens
tccccatctcgcccg

SEQ ID NO: 1819986 - DNA, 15 bp, Homo sapiens
ccccatctcgcccgc

SEQ ID NO: 1819987 - DNA, 15 bp, Homo sapiens
cccatctcgcccgcc

SEQ ID NO: 1819988 - DNA, 15 bp, Homo sapiens
ccatctcgcccgccc

SEQ ID NO: 1819989 - DNA, 15 bp, Homo sapiens
catctcgcccgcccc

SEQ ID NO: 1819990 - DNA, 15 bp, Homo sapiens
atctcgcccgcccca

SEQ ID NO: 1819991 - DNA, 15 bp, Homo sapiens
tctcgcccgccccat

SEQ ID NO: 1819992 - DNA, 15 bp, Homo sapiens
ctcgcccgccccatc

SEQ ID NO: 1819993 - DNA, 15 bp, Homo sapiens
tcgcccgccccatcc

SEQ ID NO: 1819994 - DNA, 15 bp, Homo sapiens
cgcccgccccatccc

SEQ ID NO: 1819995 - DNA, 15 bp, Homo sapiens
gcccgccccatccca

SEQ ID NO: 1819996 - DNA, 15 bp, Homo sapiens
cccgccccatcccag

SEQ ID NO: 1819997 - DNA, 15 bp, Homo sapiens
ccgccccatcccagc

SEQ ID NO: 1819998 - DNA, 15 bp, Homo sapiens
cgccccatcccagcc

SEQ ID NO: 1819999 - DNA, 15 bp, Homo sapiens
gccccatcccagccc

SEQ ID NO: 1820000 - DNA, 15 bp, Homo sapiens
ccccatcccagccct

SEQ ID NO: 1820001 - DNA, 15 bp, Homo sapiens
cccatcccagccctt

SEQ ID NO: 1820002 - DNA, 15 bp, Homo sapiens
ccatcccagcccttc

SEQ ID NO: 1820003 - DNA, 15 bp, Homo sapiens
catcccagcccttct

SEQ ID NO: 1820004 - DNA, 15 bp, Homo sapiens
atcccagcccttctc

SEQ ID NO: 1820005 - DNA, 15 bp, Homo sapiens
tcccagcccttctcc

SEQ ID NO: 1820006 - DNA, 15 bp, Homo sapiens
cccagcccttctccc

SEQ ID NO: 1820007 - DNA, 15 bp, Homo sapiens
ccagcccttctcccc

SEQ ID NO: 1820008 - DNA, 15 bp, Homo sapiens
cagcccttctccccg

SEQ ID NO: 1820009 - DNA, 15 bp, Homo sapiens
agcccttctccccgc

SEQ ID NO: 1820010 - DNA, 15 bp, Homo sapiens
gcccttctccccgcc

SEQ ID NO: 1820011 - DNA, 15 bp, Homo sapiens
cccttctccccgcct

SEQ ID NO: 1820012 - DNA, 15 bp, Homo sapiens
ccttctccccgcctc

SEQ ID NO: 1820013 - DNA, 15 bp, Homo sapiens
cttctccccgcctcc

SEQ ID NO: 1820014 - DNA, 15 bp, Homo sapiens
ttctccccgcctccc

SEQ ID NO: 1820015 - DNA, 15 bp, Homo sapiens
tctccccgcctccca

SEQ ID NO: 1820016 - DNA, 15 bp, Homo sapiens
ctccccgcctcccac

SEQ ID NO: 1820017 - DNA, 15 bp, Homo sapiens
tccccgcctcccact

SEQ ID NO: 1820018 - DNA, 15 bp, Homo sapiens
ccccgcctcccactg

SEQ ID NO: 1820019 - DNA, 15 bp, Homo sapiens
cccgcctcccactgt

SEQ ID NO: 1820020 - DNA, 15 bp, Homo sapiens
ccgcctcccactgtg

SEQ ID NO: 1820021 - DNA, 15 bp, Homo sapiens
cgcctcccactgtgc

SEQ ID NO: 1820022 - DNA, 15 bp, Homo sapiens
gcctcccactgtgcg

SEQ ID NO: 1820023 - DNA, 15 bp, Homo sapiens
cctcccactgtgcga

SEQ ID NO: 1820024 - DNA, 15 bp, Homo sapiens
ctcccactgtgcgac

SEQ ID NO: 1820025 - DNA, 15 bp, Homo sapiens
tcccactgtgcgaca

SEQ ID NO: 1820026 - DNA, 15 bp, Homo sapiens
cccactgtgcgacac

SEQ ID NO: 1820027 - DNA, 15 bp, Homo sapiens
ccactgtgcgacacc

SEQ ID NO: 1820028 - DNA, 15 bp, Homo sapiens
cactgtgcgacaccc

SEQ ID NO: 1820029 - DNA, 15 bp, Homo sapiens
actgtgcgacaccct

SEQ ID NO: 1820030 - DNA, 15 bp, Homo sapiens
ctgtgcgacaccctc

SEQ ID NO: 1820031 - DNA, 15 bp, Homo sapiens
tgtgcgacaccctcc

SEQ ID NO: 1820032 - DNA, 15 bp, Homo sapiens
gtgcgacaccctccc

SEQ ID NO: 1820033 - DNA, 15 bp, Homo sapiens
tgcgacaccctcccg

SEQ ID NO: 1820034 - DNA, 15 bp, Homo sapiens
gcgacaccctcccgc

SEQ ID NO: 1820035 - DNA, 15 bp, Homo sapiens
cgacaccctcccgcc

SEQ ID NO: 1820036 - DNA, 15 bp, Homo sapiens
gacaccctcccgccc

SEQ ID NO: 1820037 - DNA, 15 bp, Homo sapiens
acaccctcccgccct

SEQ ID NO: 1820038 - DNA, 15 bp, Homo sapiens
caccctcccgccctc

SEQ ID NO: 1820039 - DNA, 15 bp, Homo sapiens
accctcccgccctct

SEQ ID NO: 1820040 - DNA, 15 bp, Homo sapiens
ccctcccgccctctc

SEQ ID NO: 1820041 - DNA, 15 bp, Homo sapiens
cctcccgccctctcg

SEQ ID NO: 1820042 - DNA, 15 bp, Homo sapiens
ctcccgccctctcgg

SEQ ID NO: 1820043 - DNA, 15 bp, Homo sapiens
tcccgccctctcggc

SEQ ID NO: 1820044 - DNA, 15 bp, Homo sapiens
cccgccctctcggcc

SEQ ID NO: 1820045 - DNA, 15 bp, Homo sapiens
ccgccctctcggccg

SEQ ID NO: 1820046 - DNA, 15 bp, Homo sapiens
cgccctctcggccgc

SEQ ID NO: 1820047 - DNA, 15 bp, Homo sapiens
gccctctcggccgca

SEQ ID NO: 1820048 - DNA, 15 bp, Homo sapiens
ccctctcggccgcag

SEQ ID NO: 1820049 - DNA, 15 bp, Homo sapiens
cctctcggccgcagg

SEQ ID NO: 1820050 - DNA, 15 bp, Homo sapiens
ctctcggccgcaggg

SEQ ID NO: 1820051 - DNA, 15 bp, Homo sapiens
tctcggccgcagggc

SEQ ID NO: 1820052 - DNA, 15 bp, Homo sapiens
ctcggccgcagggcg

SEQ ID NO: 1820053 - DNA, 15 bp, Homo sapiens
tcggccgcagggcgc

SEQ ID NO: 1820054 - DNA, 15 bp, Homo sapiens
cggccgcagggcgct

SEQ ID NO: 1820055 - DNA, 15 bp, Homo sapiens
ggccgcagggcgctg

SEQ ID NO: 1820056 - DNA, 15 bp, Homo sapiens
gccgcagggcgctga

SEQ ID NO: 1820057 - DNA, 15 bp, Homo sapiens
ccgcagggcgctgat

SEQ ID NO: 1820058 - DNA, 15 bp, Homo sapiens
cgcagggcgctgatg

SEQ ID NO: 1820059 - DNA, 15 bp, Homo sapiens
gcagggcgctgatgg

SEQ ID NO: 1820060 - DNA, 15 bp, Homo sapiens
cagggcgctgatgga

SEQ ID NO: 1820061 - DNA, 15 bp, Homo sapiens
agggcgctgatggac

SEQ ID NO: 1820062 - DNA, 15 bp, Homo sapiens
gggcgctgatggacg

SEQ ID NO: 1820063 - DNA, 15 bp, Homo sapiens
ggcgctgatggacga

SEQ ID NO: 1820064 - DNA, 15 bp, Homo sapiens
gcgctgatggacgag

SEQ ID NO: 1820065 - DNA, 15 bp, Homo sapiens
cgctgatggacgaga

SEQ ID NO: 1820066 - DNA, 15 bp, Homo sapiens
gctgatggacgagac

SEQ ID NO: 1820067 - DNA, 15 bp, Homo sapiens
ctgatggacgagacc

SEQ ID NO: 1820068 - DNA, 15 bp, Homo sapiens
tgatggacgagacca

SEQ ID NO: 1820069 - DNA, 15 bp, Homo sapiens
gatggacgagaccat

SEQ ID NO: 1820070 - DNA, 15 bp, Homo sapiens
atggacgagaccatg

SEQ ID NO: 1820071 - DNA, 15 bp, Homo sapiens
tggacgagaccatga

SEQ ID NO: 1820072 - DNA, 15 bp, Homo sapiens
ggacgagaccatgaa

SEQ ID NO: 1820073 - DNA, 15 bp, Homo sapiens
gacgagaccatgaag

SEQ ID NO: 1820074 - DNA, 15 bp, Homo sapiens
acgagaccatgaagg

SEQ ID NO: 1820075 - DNA, 15 bp, Homo sapiens
cgagaccatgaagga

SEQ ID NO: 1820076 - DNA, 15 bp, Homo sapiens
gagaccatgaaggag

SEQ ID NO: 1820077 - DNA, 15 bp, Homo sapiens
agaccatgaaggagt

SEQ ID NO: 1820078 - DNA, 15 bp, Homo sapiens
gaccatgaaggagtt

SEQ ID NO: 1820079 - DNA, 15 bp, Homo sapiens
accatgaaggagttg

SEQ ID NO: 1820080 - DNA, 15 bp, Homo sapiens
ccatgaaggagttga

SEQ ID NO: 1820081 - DNA, 15 bp, Homo sapiens
catgaaggagttgaa

SEQ ID NO: 1820082 - DNA, 15 bp, Homo sapiens
atgaaggagttgaag

SEQ ID NO: 1820083 - DNA, 15 bp, Homo sapiens
tgaaggagttgaagg

SEQ ID NO: 1820084 - DNA, 15 bp, Homo sapiens
gaaggagttgaaggc

SEQ ID NO: 1820085 - DNA, 15 bp, Homo sapiens
aaggagttgaaggcc

SEQ ID NO: 1820086 - DNA, 15 bp, Homo sapiens
aggagttgaaggcct

SEQ ID NO: 1820087 - DNA, 15 bp, Homo sapiens
ggagttgaaggccta

SEQ ID NO: 1820088 - DNA, 15 bp, Homo sapiens
gagttgaaggcctac

SEQ ID NO: 1820089 - DNA, 15 bp, Homo sapiens
agttgaaggcctaca

SEQ ID NO: 1820090 - DNA, 15 bp, Homo sapiens
gttgaaggcctacaa

SEQ ID NO: 1820091 - DNA, 15 bp, Homo sapiens
ttgaaggcctacaaa

SEQ ID NO: 1820092 - DNA, 15 bp, Homo sapiens
tgaaggcctacaaat

SEQ ID NO: 1820093 - DNA, 15 bp, Homo sapiens
gaaggcctacaaatc

SEQ ID NO: 1820094 - DNA, 15 bp, Homo sapiens
aaggcctacaaatcg

SEQ ID NO: 1820095 - DNA, 15 bp, Homo sapiens
aggcctacaaatcgg

SEQ ID NO: 1820096 - DNA, 15 bp, Homo sapiens
ggcctacaaatcgga

SEQ ID NO: 1820097 - DNA, 15 bp, Homo sapiens
gcctacaaatcggaa

SEQ ID NO: 1820098 - DNA, 15 bp, Homo sapiens
cctacaaatcggaac

SEQ ID NO: 1820099 - DNA, 15 bp, Homo sapiens
ctacaaatcggaact

SEQ ID NO: 1820100 - DNA, 15 bp, Homo sapiens
tacaaatcggaactg

SEQ ID NO: 1820101 - DNA, 15 bp, Homo sapiens
acaaatcggaactgg

SEQ ID NO: 1820102 - DNA, 15 bp, Homo sapiens
caaatcggaactgga

SEQ ID NO: 1820103 - DNA, 15 bp, Homo sapiens
aaatcggaactggag

SEQ ID NO: 1820104 - DNA, 15 bp, Homo sapiens
aatcggaactggagg

SEQ ID NO: 1820105 - DNA, 15 bp, Homo sapiens
atcggaactggagga

SEQ ID NO: 1820106 - DNA, 15 bp, Homo sapiens
tcggaactggaggaa

SEQ ID NO: 1820107 - DNA, 15 bp, Homo sapiens
cggaactggaggaac

SEQ ID NO: 1820108 - DNA, 15 bp, Homo sapiens
ggaactggaggaaca

SEQ ID NO: 1820109 - DNA, 15 bp, Homo sapiens
gaactggaggaacaa

SEQ ID NO: 1820110 - DNA, 15 bp, Homo sapiens
aactggaggaacaac

SEQ ID NO: 1820111 - DNA, 15 bp, Homo sapiens
actggaggaacaact

SEQ ID NO: 1820112 - DNA, 15 bp, Homo sapiens
ctggaggaacaactg

SEQ ID NO: 1820113 - DNA, 15 bp, Homo sapiens
tggaggaacaactga

SEQ ID NO: 1820114 - DNA, 15 bp, Homo sapiens
ggaggaacaactgac

SEQ ID NO: 1820115 - DNA, 15 bp, Homo sapiens
gaggaacaactgacc

SEQ ID NO: 1820116 - DNA, 15 bp, Homo sapiens
aggaacaactgaccc

SEQ ID NO: 1820117 - DNA, 15 bp, Homo sapiens
ggaacaactgacccc

SEQ ID NO: 1820118 - DNA, 15 bp, Homo sapiens
gaacaactgaccccg

SEQ ID NO: 1820119 - DNA, 15 bp, Homo sapiens
aacaactgaccccgg

SEQ ID NO: 1820120 - DNA, 15 bp, Homo sapiens
acaactgaccccggt

SEQ ID NO: 1820121 - DNA, 15 bp, Homo sapiens
caactgaccccggtg

SEQ ID NO: 1820122 - DNA, 15 bp, Homo sapiens
aactgaccccggtgg

SEQ ID NO: 1820123 - DNA, 15 bp, Homo sapiens
actgaccccggtggc

SEQ ID NO: 1820124 - DNA, 15 bp, Homo sapiens
ctgaccccggtggcg

SEQ ID NO: 1820125 - DNA, 15 bp, Homo sapiens
tgaccccggtggcgg

SEQ ID NO: 1820126 - DNA, 15 bp, Homo sapiens
gaccccggtggcgga

SEQ ID NO: 1820127 - DNA, 15 bp, Homo sapiens
accccggtggcggag

SEQ ID NO: 1820128 - DNA, 15 bp, Homo sapiens
ccccggtggcggagg

SEQ ID NO: 1820129 - DNA, 15 bp, Homo sapiens
cccggtggcggagga

SEQ ID NO: 1820130 - DNA, 15 bp, Homo sapiens
ccggtggcggaggag

SEQ ID NO: 1820131 - DNA, 15 bp, Homo sapiens
cggtggcggaggaga

SEQ ID NO: 1820132 - DNA, 15 bp, Homo sapiens
ggtggcggaggagac

SEQ ID NO: 1820133 - DNA, 15 bp, Homo sapiens
gtggcggaggagacg

SEQ ID NO: 1820134 - DNA, 15 bp, Homo sapiens
tggcggaggagacgc

SEQ ID NO: 1820135 - DNA, 15 bp, Homo sapiens
ggcggaggagacgcg

SEQ ID NO: 1820136 - DNA, 15 bp, Homo sapiens
gcggaggagacgcgg

SEQ ID NO: 1820137 - DNA, 15 bp, Homo sapiens
cggaggagacgcggg

SEQ ID NO: 1820138 - DNA, 15 bp, Homo sapiens
ggaggagacgcgggc

SEQ ID NO: 1820139 - DNA, 15 bp, Homo sapiens
gaggagacgcgggca

SEQ ID NO: 1820140 - DNA, 15 bp, Homo sapiens
aggagacgcgggcac

SEQ ID NO: 1820141 - DNA, 15 bp, Homo sapiens
ggagacgcgggcacg

SEQ ID NO: 1820142 - DNA, 15 bp, Homo sapiens
gagacgcgggcacgg

SEQ ID NO: 1820143 - DNA, 15 bp, Homo sapiens
agacgcgggcacggc

SEQ ID NO: 1820144 - DNA, 15 bp, Homo sapiens
gacgcgggcacggct

SEQ ID NO: 1820145 - DNA, 15 bp, Homo sapiens
acgcgggcacggctg

SEQ ID NO: 1820146 - DNA, 15 bp, Homo sapiens
cgcgggcacggctgt

SEQ ID NO: 1820147 - DNA, 15 bp, Homo sapiens
gcgggcacggctgtc

SEQ ID NO: 1820148 - DNA, 15 bp, Homo sapiens
cgggcacggctgtcc

SEQ ID NO: 1820149 - DNA, 15 bp, Homo sapiens
gggcacggctgtcca

SEQ ID NO: 1820150 - DNA, 15 bp, Homo sapiens
ggcacggctgtccaa

SEQ ID NO: 1820151 - DNA, 15 bp, Homo sapiens
gcacggctgtccaag

SEQ ID NO: 1820152 - DNA, 15 bp, Homo sapiens
cacggctgtccaagg

SEQ ID NO: 1820153 - DNA, 15 bp, Homo sapiens
acggctgtccaagga

SEQ ID NO: 1820154 - DNA, 15 bp, Homo sapiens
cggctgtccaaggag

SEQ ID NO: 1820155 - DNA, 15 bp, Homo sapiens
ggctgtccaaggagc

SEQ ID NO: 1820156 - DNA, 15 bp, Homo sapiens
gctgtccaaggagct

SEQ ID NO: 1820157 - DNA, 15 bp, Homo sapiens
ctgtccaaggagctg

SEQ ID NO: 1820158 - DNA, 15 bp, Homo sapiens
tgtccaaggagctgc

SEQ ID NO: 1820159 - DNA, 15 bp, Homo sapiens
gtccaaggagctgca

SEQ ID NO: 1820160 - DNA, 15 bp, Homo sapiens
tccaaggagctgcag

SEQ ID NO: 1820161 - DNA, 15 bp, Homo sapiens
ccaaggagctgcagg

SEQ ID NO: 1820162 - DNA, 15 bp, Homo sapiens
caaggagctgcaggc

SEQ ID NO: 1820163 - DNA, 15 bp, Homo sapiens
aaggagctgcaggcg

SEQ ID NO: 1820164 - DNA, 15 bp, Homo sapiens
aggagctgcaggcgg

SEQ ID NO: 1820165 - DNA, 15 bp, Homo sapiens
ggagctgcaggcggc

SEQ ID NO: 1820166 - DNA, 15 bp, Homo sapiens
gagctgcaggcggcg

SEQ ID NO: 1820167 - DNA, 15 bp, Homo sapiens
agctgcaggcggcgc

SEQ ID NO: 1820168 - DNA, 15 bp, Homo sapiens
gctgcaggcggcgca

SEQ ID NO: 1820169 - DNA, 15 bp, Homo sapiens
ctgcaggcggcgcag

SEQ ID NO: 1820170 - DNA, 15 bp, Homo sapiens
tgcaggcggcgcagg

SEQ ID NO: 1820171 - DNA, 15 bp, Homo sapiens
gcaggcggcgcaggc

SEQ ID NO: 1820172 - DNA, 15 bp, Homo sapiens
caggcggcgcaggcc

SEQ ID NO: 1820173 - DNA, 15 bp, Homo sapiens
aggcggcgcaggccc

SEQ ID NO: 1820174 - DNA, 15 bp, Homo sapiens
ggcggcgcaggcccg

SEQ ID NO: 1820175 - DNA, 15 bp, Homo sapiens
gcggcgcaggcccgg

SEQ ID NO: 1820176 - DNA, 15 bp, Homo sapiens
cggcgcaggcccggc

SEQ ID NO: 1820177 - DNA, 15 bp, Homo sapiens
ggcgcaggcccggct

SEQ ID NO: 1820178 - DNA, 15 bp, Homo sapiens
gcgcaggcccggctg

SEQ ID NO: 1820179 - DNA, 15 bp, Homo sapiens
cgcaggcccggctgg

SEQ ID NO: 1820180 - DNA, 15 bp, Homo sapiens
gcaggcccggctggg

SEQ ID NO: 1820181 - DNA, 15 bp, Homo sapiens
caggcccggctgggc

SEQ ID NO: 1820182 - DNA, 15 bp, Homo sapiens
aggcccggctgggcg

SEQ ID NO: 1820183 - DNA, 15 bp, Homo sapiens
ggcccggctgggcgc

SEQ ID NO: 1820184 - DNA, 15 bp, Homo sapiens
gcccggctgggcgcg

SEQ ID NO: 1820185 - DNA, 15 bp, Homo sapiens
cccggctgggcgcgg

SEQ ID NO: 1820186 - DNA, 15 bp, Homo sapiens
ccggctgggcgcgga

SEQ ID NO: 1820187 - DNA, 15 bp, Homo sapiens
cggctgggcgcggac

SEQ ID NO: 1820188 - DNA, 15 bp, Homo sapiens
ggctgggcgcggaca

SEQ ID NO: 1820189 - DNA, 15 bp, Homo sapiens
gctgggcgcggacat

SEQ ID NO: 1820190 - DNA, 15 bp, Homo sapiens
ctgggcgcggacatg

SEQ ID NO: 1820191 - DNA, 15 bp, Homo sapiens
tgggcgcggacatgg

SEQ ID NO: 1820192 - DNA, 15 bp, Homo sapiens
gggcgcggacatgga

SEQ ID NO: 1820193 - DNA, 15 bp, Homo sapiens
ggcgcggacatggag

SEQ ID NO: 1820194 - DNA, 15 bp, Homo sapiens
gcgcggacatggagg

SEQ ID NO: 1820195 - DNA, 15 bp, Homo sapiens
cgcggacatggagga

SEQ ID NO: 1820196 - DNA, 15 bp, Homo sapiens
gcggacatggaggac

SEQ ID NO: 1820197 - DNA, 15 bp, Homo sapiens
cggacatggaggacg

SEQ ID NO: 1820198 - DNA, 15 bp, Homo sapiens
ggacatggaggacgt

SEQ ID NO: 1820199 - DNA, 15 bp, Homo sapiens
gacatggaggacgtg

SEQ ID NO: 1820200 - DNA, 15 bp, Homo sapiens
acatggaggacgtgt

SEQ ID NO: 1820201 - DNA, 15 bp, Homo sapiens
catggaggacgtgtg

SEQ ID NO: 1820202 - DNA, 15 bp, Homo sapiens
atggaggacgtgtgc

SEQ ID NO: 1820203 - DNA, 15 bp, Homo sapiens
tggaggacgtgtgcg

SEQ ID NO: 1820204 - DNA, 15 bp, Homo sapiens
ggaggacgtgtgcgg

SEQ ID NO: 1820205 - DNA, 15 bp, Homo sapiens
gaggacgtgtgcggc

SEQ ID NO: 1820206 - DNA, 15 bp, Homo sapiens
aggacgtgtgcggcc

SEQ ID NO: 1820207 - DNA, 15 bp, Homo sapiens
ggacgtgtgcggccg

SEQ ID NO: 1820208 - DNA, 15 bp, Homo sapiens
gacgtgtgcggccgc

SEQ ID NO: 1820209 - DNA, 15 bp, Homo sapiens
acgtgtgcggccgcc

SEQ ID NO: 1820210 - DNA, 15 bp, Homo sapiens
cgtgtgcggccgcct

SEQ ID NO: 1820211 - DNA, 15 bp, Homo sapiens
gtgtgcggccgcctg

SEQ ID NO: 1820212 - DNA, 15 bp, Homo sapiens
tgtgcggccgcctgg

SEQ ID NO: 1820213 - DNA, 15 bp, Homo sapiens
gtgcggccgcctggt

SEQ ID NO: 1820214 - DNA, 15 bp, Homo sapiens
tgcggccgcctggtg

SEQ ID NO: 1820215 - DNA, 15 bp, Homo sapiens
gcggccgcctggtgc

SEQ ID NO: 1820216 - DNA, 15 bp, Homo sapiens
cggccgcctggtgca

SEQ ID NO: 1820217 - DNA, 15 bp, Homo sapiens
ggccgcctggtgcag

SEQ ID NO: 1820218 - DNA, 15 bp, Homo sapiens
gccgcctggtgcagt

SEQ ID NO: 1820219 - DNA, 15 bp, Homo sapiens
ccgcctggtgcagta

SEQ ID NO: 1820220 - DNA, 15 bp, Homo sapiens
cgcctggtgcagtac

SEQ ID NO: 1820221 - DNA, 15 bp, Homo sapiens
gcctggtgcagtacc

SEQ ID NO: 1820222 - DNA, 15 bp, Homo sapiens
cctggtgcagtaccg

SEQ ID NO: 1820223 - DNA, 15 bp, Homo sapiens
ctggtgcagtaccgc

SEQ ID NO: 1820224 - DNA, 15 bp, Homo sapiens
tggtgcagtaccgcg

SEQ ID NO: 1820225 - DNA, 15 bp, Homo sapiens
ggtgcagtaccgcgg

SEQ ID NO: 1820226 - DNA, 15 bp, Homo sapiens
gtgcagtaccgcggc

SEQ ID NO: 1820227 - DNA, 15 bp, Homo sapiens
tgcagtaccgcggcg

SEQ ID NO: 1820228 - DNA, 15 bp, Homo sapiens
gcagtaccgcggcga

SEQ ID NO: 1820229 - DNA, 15 bp, Homo sapiens
cagtaccgcggcgag

SEQ ID NO: 1820230 - DNA, 15 bp, Homo sapiens
agtaccgcggcgagg

SEQ ID NO: 1820231 - DNA, 15 bp, Homo sapiens
gtaccgcggcgaggt

SEQ ID NO: 1820232 - DNA, 15 bp, Homo sapiens
taccgcggcgaggtg

SEQ ID NO: 1820233 - DNA, 15 bp, Homo sapiens
accgcggcgaggtgc

SEQ ID NO: 1820234 - DNA, 15 bp, Homo sapiens
ccgcggcgaggtgca

SEQ ID NO: 1820235 - DNA, 15 bp, Homo sapiens
cgcggcgaggtgcag

SEQ ID NO: 1820236 - DNA, 15 bp, Homo sapiens
gcggcgaggtgcagg

SEQ ID NO: 1820237 - DNA, 15 bp, Homo sapiens
cggcgaggtgcaggc

SEQ ID NO: 1820238 - DNA, 15 bp, Homo sapiens
ggcgaggtgcaggcc

SEQ ID NO: 1820239 - DNA, 15 bp, Homo sapiens
gcgaggtgcaggcca

SEQ ID NO: 1820240 - DNA, 15 bp, Homo sapiens
cgaggtgcaggccat

SEQ ID NO: 1820241 - DNA, 15 bp, Homo sapiens
gaggtgcaggccatg

SEQ ID NO: 1820242 - DNA, 15 bp, Homo sapiens
aggtgcaggccatgc

SEQ ID NO: 1820243 - DNA, 15 bp, Homo sapiens
ggtgcaggccatgct

SEQ ID NO: 1820244 - DNA, 15 bp, Homo sapiens
gtgcaggccatgctc

SEQ ID NO: 1820245 - DNA, 15 bp, Homo sapiens
tgcaggccatgctcg

SEQ ID NO: 1820246 - DNA, 15 bp, Homo sapiens
gcaggccatgctcgg

SEQ ID NO: 1820247 - DNA, 15 bp, Homo sapiens
caggccatgctcggc

SEQ ID NO: 1820248 - DNA, 15 bp, Homo sapiens
aggccatgctcggcc

SEQ ID NO: 1820249 - DNA, 15 bp, Homo sapiens
ggccatgctcggcca

SEQ ID NO: 1820250 - DNA, 15 bp, Homo sapiens
gccatgctcggccag

SEQ ID NO: 1820251 - DNA, 15 bp, Homo sapiens
ccatgctcggccaga

SEQ ID NO: 1820252 - DNA, 15 bp, Homo sapiens
catgctcggccagag

SEQ ID NO: 1820253 - DNA, 15 bp, Homo sapiens
atgctcggccagagc

SEQ ID NO: 1820254 - DNA, 15 bp, Homo sapiens
tgctcggccagagca

SEQ ID NO: 1820255 - DNA, 15 bp, Homo sapiens
gctcggccagagcac

SEQ ID NO: 1820256 - DNA, 15 bp, Homo sapiens
ctcggccagagcacc

SEQ ID NO: 1820257 - DNA, 15 bp, Homo sapiens
tcggccagagcaccg

SEQ ID NO: 1820258 - DNA, 15 bp, Homo sapiens
cggccagagcaccga

SEQ ID NO: 1820259 - DNA, 15 bp, Homo sapiens
ggccagagcaccgag

SEQ ID NO: 1820260 - DNA, 15 bp, Homo sapiens
gccagagcaccgagg

SEQ ID NO: 1820261 - DNA, 15 bp, Homo sapiens
ccagagcaccgagga

SEQ ID NO: 1820262 - DNA, 15 bp, Homo sapiens
cagagcaccgaggag

SEQ ID NO: 1820263 - DNA, 15 bp, Homo sapiens
agagcaccgaggagc

SEQ ID NO: 1820264 - DNA, 15 bp, Homo sapiens
gagcaccgaggagct

SEQ ID NO: 1820265 - DNA, 15 bp, Homo sapiens
agcaccgaggagctg

SEQ ID NO: 1820266 - DNA, 15 bp, Homo sapiens
gcaccgaggagctgc

SEQ ID NO: 1820267 - DNA, 15 bp, Homo sapiens
caccgaggagctgcg

SEQ ID NO: 1820268 - DNA, 15 bp, Homo sapiens
accgaggagctgcgg

SEQ ID NO: 1820269 - DNA, 15 bp, Homo sapiens
ccgaggagctgcggg

SEQ ID NO: 1820270 - DNA, 15 bp, Homo sapiens
cgaggagctgcgggt

SEQ ID NO: 1820271 - DNA, 15 bp, Homo sapiens
gaggagctgcgggtg

SEQ ID NO: 1820272 - DNA, 15 bp, Homo sapiens
aggagctgcgggtgc

SEQ ID NO: 1820273 - DNA, 15 bp, Homo sapiens
ggagctgcgggtgcg

SEQ ID NO: 1820274 - DNA, 15 bp, Homo sapiens
gagctgcgggtgcgc

SEQ ID NO: 1820275 - DNA, 15 bp, Homo sapiens
agctgcgggtgcgcc

SEQ ID NO: 1820276 - DNA, 15 bp, Homo sapiens
gctgcgggtgcgcct

SEQ ID NO: 1820277 - DNA, 15 bp, Homo sapiens
ctgcgggtgcgcctc

SEQ ID NO: 1820278 - DNA, 15 bp, Homo sapiens
tgcgggtgcgcctcg

SEQ ID NO: 1820279 - DNA, 15 bp, Homo sapiens
gcgggtgcgcctcgc

SEQ ID NO: 1820280 - DNA, 15 bp, Homo sapiens
cgggtgcgcctcgcc

SEQ ID NO: 1820281 - DNA, 15 bp, Homo sapiens
gggtgcgcctcgcct

SEQ ID NO: 1820282 - DNA, 15 bp, Homo sapiens
ggtgcgcctcgcctc

SEQ ID NO: 1820283 - DNA, 15 bp, Homo sapiens
gtgcgcctcgcctcc

SEQ ID NO: 1820284 - DNA, 15 bp, Homo sapiens
tgcgcctcgcctccc

SEQ ID NO: 1820285 - DNA, 15 bp, Homo sapiens
gcgcctcgcctccca

SEQ ID NO: 1820286 - DNA, 15 bp, Homo sapiens
cgcctcgcctcccac

SEQ ID NO: 1820287 - DNA, 15 bp, Homo sapiens
gcctcgcctcccacc

SEQ ID NO: 1820288 - DNA, 15 bp, Homo sapiens
cctcgcctcccacct

SEQ ID NO: 1820289 - DNA, 15 bp, Homo sapiens
ctcgcctcccacctg

SEQ ID NO: 1820290 - DNA, 15 bp, Homo sapiens
tcgcctcccacctgc

SEQ ID NO: 1820291 - DNA, 15 bp, Homo sapiens
cgcctcccacctgcg

SEQ ID NO: 1820292 - DNA, 15 bp, Homo sapiens
gcctcccacctgcgc

SEQ ID NO: 1820293 - DNA, 15 bp, Homo sapiens
cctcccacctgcgca

SEQ ID NO: 1820294 - DNA, 15 bp, Homo sapiens
ctcccacctgcgcaa

SEQ ID NO: 1820295 - DNA, 15 bp, Homo sapiens
tcccacctgcgcaag

SEQ ID NO: 1820296 - DNA, 15 bp, Homo sapiens
cccacctgcgcaagc

SEQ ID NO: 1820297 - DNA, 15 bp, Homo sapiens
ccacctgcgcaagct

SEQ ID NO: 1820298 - DNA, 15 bp, Homo sapiens
cacctgcgcaagctg

SEQ ID NO: 1820299 - DNA, 15 bp, Homo sapiens
acctgcgcaagctgc

SEQ ID NO: 1820300 - DNA, 15 bp, Homo sapiens
cctgcgcaagctgcg

SEQ ID NO: 1820301 - DNA, 15 bp, Homo sapiens
ctgcgcaagctgcgt

SEQ ID NO: 1820302 - DNA, 15 bp, Homo sapiens
tgcgcaagctgcgta

SEQ ID NO: 1820303 - DNA, 15 bp, Homo sapiens
gcgcaagctgcgtaa

SEQ ID NO: 1820304 - DNA, 15 bp, Homo sapiens
cgcaagctgcgtaag

SEQ ID NO: 1820305 - DNA, 15 bp, Homo sapiens
gcaagctgcgtaagc

SEQ ID NO: 1820306 - DNA, 15 bp, Homo sapiens
caagctgcgtaagcg

SEQ ID NO: 1820307 - DNA, 15 bp, Homo sapiens
aagctgcgtaagcgg

SEQ ID NO: 1820308 - DNA, 15 bp, Homo sapiens
agctgcgtaagcggc

SEQ ID NO: 1820309 - DNA, 15 bp, Homo sapiens
gctgcgtaagcggct

SEQ ID NO: 1820310 - DNA, 15 bp, Homo sapiens
ctgcgtaagcggctc

SEQ ID NO: 1820311 - DNA, 15 bp, Homo sapiens
tgcgtaagcggctcc

SEQ ID NO: 1820312 - DNA, 15 bp, Homo sapiens
gcgtaagcggctcct

SEQ ID NO: 1820313 - DNA, 15 bp, Homo sapiens
cgtaagcggctcctc

SEQ ID NO: 1820314 - DNA, 15 bp, Homo sapiens
gtaagcggctcctcc

SEQ ID NO: 1820315 - DNA, 15 bp, Homo sapiens
taagcggctcctccg

SEQ ID NO: 1820316 - DNA, 15 bp, Homo sapiens
aagcggctcctccgc

SEQ ID NO: 1820317 - DNA, 15 bp, Homo sapiens
agcggctcctccgcg

SEQ ID NO: 1820318 - DNA, 15 bp, Homo sapiens
gcggctcctccgcga

SEQ ID NO: 1820319 - DNA, 15 bp, Homo sapiens
cggctcctccgcgat

SEQ ID NO: 1820320 - DNA, 15 bp, Homo sapiens
ggctcctccgcgatg

SEQ ID NO: 1820321 - DNA, 15 bp, Homo sapiens
gctcctccgcgatgc

SEQ ID NO: 1820322 - DNA, 15 bp, Homo sapiens
ctcctccgcgatgcc

SEQ ID NO: 1820323 - DNA, 15 bp, Homo sapiens
tcctccgcgatgccg

SEQ ID NO: 1820324 - DNA, 15 bp, Homo sapiens
cctccgcgatgccga

SEQ ID NO: 1820325 - DNA, 15 bp, Homo sapiens
ctccgcgatgccgat

SEQ ID NO: 1820326 - DNA, 15 bp, Homo sapiens
tccgcgatgccgatg

SEQ ID NO: 1820327 - DNA, 15 bp, Homo sapiens
ccgcgatgccgatga

SEQ ID NO: 1820328 - DNA, 15 bp, Homo sapiens
cgcgatgccgatgac

SEQ ID NO: 1820329 - DNA, 15 bp, Homo sapiens
gcgatgccgatgacc

SEQ ID NO: 1820330 - DNA, 15 bp, Homo sapiens
cgatgccgatgacct

SEQ ID NO: 1820331 - DNA, 15 bp, Homo sapiens
gatgccgatgacctg

SEQ ID NO: 1820332 - DNA, 15 bp, Homo sapiens
atgccgatgacctgc

SEQ ID NO: 1820333 - DNA, 15 bp, Homo sapiens
tgccgatgacctgca

SEQ ID NO: 1820334 - DNA, 15 bp, Homo sapiens
gccgatgacctgcag

SEQ ID NO: 1820335 - DNA, 15 bp, Homo sapiens
ccgatgacctgcaga

SEQ ID NO: 1820336 - DNA, 15 bp, Homo sapiens
cgatgacctgcagaa

SEQ ID NO: 1820337 - DNA, 15 bp, Homo sapiens
gatgacctgcagaag

SEQ ID NO: 1820338 - DNA, 15 bp, Homo sapiens
atgacctgcagaagc

SEQ ID NO: 1820339 - DNA, 15 bp, Homo sapiens
tgacctgcagaagcg

SEQ ID NO: 1820340 - DNA, 15 bp, Homo sapiens
gacctgcagaagcgc

SEQ ID NO: 1820341 - DNA, 15 bp, Homo sapiens
acctgcagaagcgcc

SEQ ID NO: 1820342 - DNA, 15 bp, Homo sapiens
cctgcagaagcgcct

SEQ ID NO: 1820343 - DNA, 15 bp, Homo sapiens
ctgcagaagcgcctg

SEQ ID NO: 1820344 - DNA, 15 bp, Homo sapiens
tgcagaagcgcctgg

SEQ ID NO: 1820345 - DNA, 15 bp, Homo sapiens
gcagaagcgcctggc

SEQ ID NO: 1820346 - DNA, 15 bp, Homo sapiens
cagaagcgcctggca

SEQ ID NO: 1820347 - DNA, 15 bp, Homo sapiens
agaagcgcctggcag

SEQ ID NO: 1820348 - DNA, 15 bp, Homo sapiens
gaagcgcctggcagt

SEQ ID NO: 1820349 - DNA, 15 bp, Homo sapiens
aagcgcctggcagtg

SEQ ID NO: 1820350 - DNA, 15 bp, Homo sapiens
agcgcctggcagtgt

SEQ ID NO: 1820351 - DNA, 15 bp, Homo sapiens
gcgcctggcagtgta

SEQ ID NO: 1820352 - DNA, 15 bp, Homo sapiens
cgcctggcagtgtac

SEQ ID NO: 1820353 - DNA, 15 bp, Homo sapiens
gcctggcagtgtacc

SEQ ID NO: 1820354 - DNA, 15 bp, Homo sapiens
cctggcagtgtacca

SEQ ID NO: 1820355 - DNA, 15 bp, Homo sapiens
ctggcagtgtaccag

SEQ ID NO: 1820356 - DNA, 15 bp, Homo sapiens
tggcagtgtaccagg

SEQ ID NO: 1820357 - DNA, 15 bp, Homo sapiens
ggcagtgtaccaggc

SEQ ID NO: 1820358 - DNA, 15 bp, Homo sapiens
gcagtgtaccaggcc

SEQ ID NO: 1820359 - DNA, 15 bp, Homo sapiens
cagtgtaccaggccg

SEQ ID NO: 1820360 - DNA, 15 bp, Homo sapiens
agtgtaccaggccgg

SEQ ID NO: 1820361 - DNA, 15 bp, Homo sapiens
gtgtaccaggccggg

SEQ ID NO: 1820362 - DNA, 15 bp, Homo sapiens
tgtaccaggccgggg

SEQ ID NO: 1820363 - DNA, 15 bp, Homo sapiens
gtaccaggccggggc

SEQ ID NO: 1820364 - DNA, 15 bp, Homo sapiens
taccaggccggggcc

SEQ ID NO: 1820365 - DNA, 15 bp, Homo sapiens
accaggccggggccc

SEQ ID NO: 1820366 - DNA, 15 bp, Homo sapiens
ccaggccggggcccg

SEQ ID NO: 1820367 - DNA, 15 bp, Homo sapiens
caggccggggcccgc

SEQ ID NO: 1820368 - DNA, 15 bp, Homo sapiens
aggccggggcccgcg

SEQ ID NO: 1820369 - DNA, 15 bp, Homo sapiens
ggccggggcccgcga

SEQ ID NO: 1820370 - DNA, 15 bp, Homo sapiens
gccggggcccgcgag

SEQ ID NO: 1820371 - DNA, 15 bp, Homo sapiens
ccggggcccgcgagg

SEQ ID NO: 1820372 - DNA, 15 bp, Homo sapiens
cggggcccgcgaggg

SEQ ID NO: 1820373 - DNA, 15 bp, Homo sapiens
ggggcccgcgagggc

SEQ ID NO: 1820374 - DNA, 15 bp, Homo sapiens
gggcccgcgagggcg

SEQ ID NO: 1820375 - DNA, 15 bp, Homo sapiens
ggcccgcgagggcgc

SEQ ID NO: 1820376 - DNA, 15 bp, Homo sapiens
gcccgcgagggcgcc

SEQ ID NO: 1820377 - DNA, 15 bp, Homo sapiens
cccgcgagggcgccg

SEQ ID NO: 1820378 - DNA, 15 bp, Homo sapiens
ccgcgagggcgccga

SEQ ID NO: 1820379 - DNA, 15 bp, Homo sapiens
cgcgagggcgccgag

SEQ ID NO: 1820380 - DNA, 15 bp, Homo sapiens
gcgagggcgccgagc

SEQ ID NO: 1820381 - DNA, 15 bp, Homo sapiens
cgagggcgccgagcg

SEQ ID NO: 1820382 - DNA, 15 bp, Homo sapiens
gagggcgccgagcgc

SEQ ID NO: 1820383 - DNA, 15 bp, Homo sapiens
agggcgccgagcgcg

SEQ ID NO: 1820384 - DNA, 15 bp, Homo sapiens
gggcgccgagcgcgg

SEQ ID NO: 1820385 - DNA, 15 bp, Homo sapiens
ggcgccgagcgcggc

SEQ ID NO: 1820386 - DNA, 15 bp, Homo sapiens
gcgccgagcgcggcc

SEQ ID NO: 1820387 - DNA, 15 bp, Homo sapiens
cgccgagcgcggcct

SEQ ID NO: 1820388 - DNA, 15 bp, Homo sapiens
gccgagcgcggcctc

SEQ ID NO: 1820389 - DNA, 15 bp, Homo sapiens
ccgagcgcggcctca

SEQ ID NO: 1820390 - DNA, 15 bp, Homo sapiens
cgagcgcggcctcag

SEQ ID NO: 1820391 - DNA, 15 bp, Homo sapiens
gagcgcggcctcagc

SEQ ID NO: 1820392 - DNA, 15 bp, Homo sapiens
agcgcggcctcagcg

SEQ ID NO: 1820393 - DNA, 15 bp, Homo sapiens
gcgcggcctcagcgc

SEQ ID NO: 1820394 - DNA, 15 bp, Homo sapiens
cgcggcctcagcgcc

SEQ ID NO: 1820395 - DNA, 15 bp, Homo sapiens
gcggcctcagcgcca

SEQ ID NO: 1820396 - DNA, 15 bp, Homo sapiens
cggcctcagcgccat

SEQ ID NO: 1820397 - DNA, 15 bp, Homo sapiens
ggcctcagcgccatc

SEQ ID NO: 1820398 - DNA, 15 bp, Homo sapiens
gcctcagcgccatcc

SEQ ID NO: 1820399 - DNA, 15 bp, Homo sapiens
cctcagcgccatccg

SEQ ID NO: 1820400 - DNA, 15 bp, Homo sapiens
ctcagcgccatccgc

SEQ ID NO: 1820401 - DNA, 15 bp, Homo sapiens
tcagcgccatccgcg

SEQ ID NO: 1820402 - DNA, 15 bp, Homo sapiens
cagcgccatccgcga

SEQ ID NO: 1820403 - DNA, 15 bp, Homo sapiens
agcgccatccgcgag

SEQ ID NO: 1820404 - DNA, 15 bp, Homo sapiens
gcgccatccgcgagc

SEQ ID NO: 1820405 - DNA, 15 bp, Homo sapiens
cgccatccgcgagcg

SEQ ID NO: 1820406 - DNA, 15 bp, Homo sapiens
gccatccgcgagcgc

SEQ ID NO: 1820407 - DNA, 15 bp, Homo sapiens
ccatccgcgagcgcc

SEQ ID NO: 1820408 - DNA, 15 bp, Homo sapiens
catccgcgagcgcct

SEQ ID NO: 1820409 - DNA, 15 bp, Homo sapiens
atccgcgagcgcctg

SEQ ID NO: 1820410 - DNA, 15 bp, Homo sapiens
tccgcgagcgcctgg

SEQ ID NO: 1820411 - DNA, 15 bp, Homo sapiens
ccgcgagcgcctggg

SEQ ID NO: 1820412 - DNA, 15 bp, Homo sapiens
cgcgagcgcctgggg

SEQ ID NO: 1820413 - DNA, 15 bp, Homo sapiens
gcgagcgcctggggc

SEQ ID NO: 1820414 - DNA, 15 bp, Homo sapiens
cgagcgcctggggcc

SEQ ID NO: 1820415 - DNA, 15 bp, Homo sapiens
gagcgcctggggccc

SEQ ID NO: 1820416 - DNA, 15 bp, Homo sapiens
agcgcctggggcccc

SEQ ID NO: 1820417 - DNA, 15 bp, Homo sapiens
gcgcctggggcccct

SEQ ID NO: 1820418 - DNA, 15 bp, Homo sapiens
cgcctggggcccctg

SEQ ID NO: 1820419 - DNA, 15 bp, Homo sapiens
gcctggggcccctgg

SEQ ID NO: 1820420 - DNA, 15 bp, Homo sapiens
cctggggcccctggt

SEQ ID NO: 1820421 - DNA, 15 bp, Homo sapiens
ctggggcccctggtg

SEQ ID NO: 1820422 - DNA, 15 bp, Homo sapiens
tggggcccctggtgg

SEQ ID NO: 1820423 - DNA, 15 bp, Homo sapiens
ggggcccctggtgga

SEQ ID NO: 1820424 - DNA, 15 bp, Homo sapiens
gggcccctggtggaa

SEQ ID NO: 1820425 - DNA, 15 bp, Homo sapiens
ggcccctggtggaac

SEQ ID NO: 1820426 - DNA, 15 bp, Homo sapiens
gcccctggtggaaca

SEQ ID NO: 1820427 - DNA, 15 bp, Homo sapiens
cccctggtggaacag

SEQ ID NO: 1820428 - DNA, 15 bp, Homo sapiens
ccctggtggaacagg

SEQ ID NO: 1820429 - DNA, 15 bp, Homo sapiens
cctggtggaacaggg

SEQ ID NO: 1820430 - DNA, 15 bp, Homo sapiens
ctggtggaacagggc

SEQ ID NO: 1820431 - DNA, 15 bp, Homo sapiens
tggtggaacagggcc

SEQ ID NO: 1820432 - DNA, 15 bp, Homo sapiens
ggtggaacagggccg

SEQ ID NO: 1820433 - DNA, 15 bp, Homo sapiens
gtggaacagggccgc

SEQ ID NO: 1820434 - DNA, 15 bp, Homo sapiens
tggaacagggccgcg

SEQ ID NO: 1820435 - DNA, 15 bp, Homo sapiens
ggaacagggccgcgt

SEQ ID NO: 1820436 - DNA, 15 bp, Homo sapiens
gaacagggccgcgtg

SEQ ID NO: 1820437 - DNA, 15 bp, Homo sapiens
aacagggccgcgtgc

SEQ ID NO: 1820438 - DNA, 15 bp, Homo sapiens
acagggccgcgtgcg

SEQ ID NO: 1820439 - DNA, 15 bp, Homo sapiens
cagggccgcgtgcgg

SEQ ID NO: 1820440 - DNA, 15 bp, Homo sapiens
agggccgcgtgcggg

SEQ ID NO: 1820441 - DNA, 15 bp, Homo sapiens
gggccgcgtgcgggc

SEQ ID NO: 1820442 - DNA, 15 bp, Homo sapiens
ggccgcgtgcgggcc

SEQ ID NO: 1820443 - DNA, 15 bp, Homo sapiens
gccgcgtgcgggccg

SEQ ID NO: 1820444 - DNA, 15 bp, Homo sapiens
ccgcgtgcgggccgc

SEQ ID NO: 1820445 - DNA, 15 bp, Homo sapiens
cgcgtgcgggccgcc

SEQ ID NO: 1820446 - DNA, 15 bp, Homo sapiens
gcgtgcgggccgcca

SEQ ID NO: 1820447 - DNA, 15 bp, Homo sapiens
cgtgcgggccgccac

SEQ ID NO: 1820448 - DNA, 15 bp, Homo sapiens
gtgcgggccgccact

SEQ ID NO: 1820449 - DNA, 15 bp, Homo sapiens
tgcgggccgccactg

SEQ ID NO: 1820450 - DNA, 15 bp, Homo sapiens
gcgggccgccactgt

SEQ ID NO: 1820451 - DNA, 15 bp, Homo sapiens
cgggccgccactgtg

SEQ ID NO: 1820452 - DNA, 15 bp, Homo sapiens
gggccgccactgtgg

SEQ ID NO: 1820453 - DNA, 15 bp, Homo sapiens
ggccgccactgtggg

SEQ ID NO: 1820454 - DNA, 15 bp, Homo sapiens
gccgccactgtgggc

SEQ ID NO: 1820455 - DNA, 15 bp, Homo sapiens
ccgccactgtgggct

SEQ ID NO: 1820456 - DNA, 15 bp, Homo sapiens
cgccactgtgggctc

SEQ ID NO: 1820457 - DNA, 15 bp, Homo sapiens
gccactgtgggctcc

SEQ ID NO: 1820458 - DNA, 15 bp, Homo sapiens
ccactgtgggctccc

SEQ ID NO: 1820459 - DNA, 15 bp, Homo sapiens
cactgtgggctccct

SEQ ID NO: 1820460 - DNA, 15 bp, Homo sapiens
actgtgggctccctg

SEQ ID NO: 1820461 - DNA, 15 bp, Homo sapiens
ctgtgggctccctgg

SEQ ID NO: 1820462 - DNA, 15 bp, Homo sapiens
tgtgggctccctggc

SEQ ID NO: 1820463 - DNA, 15 bp, Homo sapiens
gtgggctccctggcc

SEQ ID NO: 1820464 - DNA, 15 bp, Homo sapiens
tgggctccctggccg

SEQ ID NO: 1820465 - DNA, 15 bp, Homo sapiens
gggctccctggccgg

SEQ ID NO: 1820466 - DNA, 15 bp, Homo sapiens
ggctccctggccggc

SEQ ID NO: 1820467 - DNA, 15 bp, Homo sapiens
gctccctggccggcc

SEQ ID NO: 1820468 - DNA, 15 bp, Homo sapiens
ctccctggccggcca

SEQ ID NO: 1820469 - DNA, 15 bp, Homo sapiens
tccctggccggccag

SEQ ID NO: 1820470 - DNA, 15 bp, Homo sapiens
ccctggccggccagc

SEQ ID NO: 1820471 - DNA, 15 bp, Homo sapiens
cctggccggccagcc

SEQ ID NO: 1820472 - DNA, 15 bp, Homo sapiens
ctggccggccagccg

SEQ ID NO: 1820473 - DNA, 15 bp, Homo sapiens
tggccggccagccgc

SEQ ID NO: 1820474 - DNA, 15 bp, Homo sapiens
ggccggccagccgct

SEQ ID NO: 1820475 - DNA, 15 bp, Homo sapiens
gccggccagccgcta

SEQ ID NO: 1820476 - DNA, 15 bp, Homo sapiens
ccggccagccgctac

SEQ ID NO: 1820477 - DNA, 15 bp, Homo sapiens
cggccagccgctaca

SEQ ID NO: 1820478 - DNA, 15 bp, Homo sapiens
ggccagccgctacag

SEQ ID NO: 1820479 - DNA, 15 bp, Homo sapiens
gccagccgctacagg

SEQ ID NO: 1820480 - DNA, 15 bp, Homo sapiens
ccagccgctacagga

SEQ ID NO: 1820481 - DNA, 15 bp, Homo sapiens
cagccgctacaggag

SEQ ID NO: 1820482 - DNA, 15 bp, Homo sapiens
agccgctacaggagc

SEQ ID NO: 1820483 - DNA, 15 bp, Homo sapiens
gccgctacaggagcg

SEQ ID NO: 1820484 - DNA, 15 bp, Homo sapiens
ccgctacaggagcgg

SEQ ID NO: 1820485 - DNA, 15 bp, Homo sapiens
cgctacaggagcggg

SEQ ID NO: 1820486 - DNA, 15 bp, Homo sapiens
gctacaggagcgggc

SEQ ID NO: 1820487 - DNA, 15 bp, Homo sapiens
ctacaggagcgggcc

SEQ ID NO: 1820488 - DNA, 15 bp, Homo sapiens
tacaggagcgggccc

SEQ ID NO: 1820489 - DNA, 15 bp, Homo sapiens
acaggagcgggccca

SEQ ID NO: 1820490 - DNA, 15 bp, Homo sapiens
caggagcgggcccag

SEQ ID NO: 1820491 - DNA, 15 bp, Homo sapiens
aggagcgggcccagg

SEQ ID NO: 1820492 - DNA, 15 bp, Homo sapiens
ggagcgggcccaggc

SEQ ID NO: 1820493 - DNA, 15 bp, Homo sapiens
gagcgggcccaggcc

SEQ ID NO: 1820494 - DNA, 15 bp, Homo sapiens
agcgggcccaggcct

SEQ ID NO: 1820495 - DNA, 15 bp, Homo sapiens
gcgggcccaggcctg

SEQ ID NO: 1820496 - DNA, 15 bp, Homo sapiens
cgggcccaggcctgg

SEQ ID NO: 1820497 - DNA, 15 bp, Homo sapiens
gggcccaggcctggg

SEQ ID NO: 1820498 - DNA, 15 bp, Homo sapiens
ggcccaggcctgggg

SEQ ID NO: 1820499 - DNA, 15 bp, Homo sapiens
gcccaggcctggggc

SEQ ID NO: 1820500 - DNA, 15 bp, Homo sapiens
cccaggcctggggcg

SEQ ID NO: 1820501 - DNA, 15 bp, Homo sapiens
ccaggcctggggcga

SEQ ID NO: 1820502 - DNA, 15 bp, Homo sapiens
caggcctggggcgag

SEQ ID NO: 1820503 - DNA, 15 bp, Homo sapiens
aggcctggggcgagc

SEQ ID NO: 1820504 - DNA, 15 bp, Homo sapiens
ggcctggggcgagcg

SEQ ID NO: 1820505 - DNA, 15 bp, Homo sapiens
gcctggggcgagcgg

SEQ ID NO: 1820506 - DNA, 15 bp, Homo sapiens
cctggggcgagcggc

SEQ ID NO: 1820507 - DNA, 15 bp, Homo sapiens
ctggggcgagcggct

SEQ ID NO: 1820508 - DNA, 15 bp, Homo sapiens
tggggcgagcggctg

SEQ ID NO: 1820509 - DNA, 15 bp, Homo sapiens
ggggcgagcggctgc

SEQ ID NO: 1820510 - DNA, 15 bp, Homo sapiens
gggcgagcggctgcg

SEQ ID NO: 1820511 - DNA, 15 bp, Homo sapiens
ggcgagcggctgcgc

SEQ ID NO: 1820512 - DNA, 15 bp, Homo sapiens
gcgagcggctgcgcg

SEQ ID NO: 1820513 - DNA, 15 bp, Homo sapiens
cgagcggctgcgcgc

SEQ ID NO: 1820514 - DNA, 15 bp, Homo sapiens
gagcggctgcgcgcg

SEQ ID NO: 1820515 - DNA, 15 bp, Homo sapiens
agcggctgcgcgcgc

SEQ ID NO: 1820516 - DNA, 15 bp, Homo sapiens
gcggctgcgcgcgcg

SEQ ID NO: 1820517 - DNA, 15 bp, Homo sapiens
cggctgcgcgcgcgg

SEQ ID NO: 1820518 - DNA, 15 bp, Homo sapiens
ggctgcgcgcgcgga

SEQ ID NO: 1820519 - DNA, 15 bp, Homo sapiens
gctgcgcgcgcggat

SEQ ID NO: 1820520 - DNA, 15 bp, Homo sapiens
ctgcgcgcgcggatg

SEQ ID NO: 1820521 - DNA, 15 bp, Homo sapiens
tgcgcgcgcggatgg

SEQ ID NO: 1820522 - DNA, 15 bp, Homo sapiens
gcgcgcgcggatgga

SEQ ID NO: 1820523 - DNA, 15 bp, Homo sapiens
cgcgcgcggatggag

SEQ ID NO: 1820524 - DNA, 15 bp, Homo sapiens
gcgcgcggatggagg

SEQ ID NO: 1820525 - DNA, 15 bp, Homo sapiens
cgcgcggatggagga

SEQ ID NO: 1820526 - DNA, 15 bp, Homo sapiens
gcgcggatggaggag

SEQ ID NO: 1820527 - DNA, 15 bp, Homo sapiens
cgcggatggaggaga

SEQ ID NO: 1820528 - DNA, 15 bp, Homo sapiens
gcggatggaggagat

SEQ ID NO: 1820529 - DNA, 15 bp, Homo sapiens
cggatggaggagatg

SEQ ID NO: 1820530 - DNA, 15 bp, Homo sapiens
ggatggaggagatgg

SEQ ID NO: 1820531 - DNA, 15 bp, Homo sapiens
gatggaggagatggg

SEQ ID NO: 1820532 - DNA, 15 bp, Homo sapiens
atggaggagatgggc

SEQ ID NO: 1820533 - DNA, 15 bp, Homo sapiens
tggaggagatgggca

SEQ ID NO: 1820534 - DNA, 15 bp, Homo sapiens
ggaggagatgggcag

SEQ ID NO: 1820535 - DNA, 15 bp, Homo sapiens
gaggagatgggcagc

SEQ ID NO: 1820536 - DNA, 15 bp, Homo sapiens
aggagatgggcagcc

SEQ ID NO: 1820537 - DNA, 15 bp, Homo sapiens
ggagatgggcagccg

SEQ ID NO: 1820538 - DNA, 15 bp, Homo sapiens
gagatgggcagccgg

SEQ ID NO: 1820539 - DNA, 15 bp, Homo sapiens
agatgggcagccgga

SEQ ID NO: 1820540 - DNA, 15 bp, Homo sapiens
gatgggcagccggac

SEQ ID NO: 1820541 - DNA, 15 bp, Homo sapiens
atgggcagccggacc

SEQ ID NO: 1820542 - DNA, 15 bp, Homo sapiens
tgggcagccggaccc

SEQ ID NO: 1820543 - DNA, 15 bp, Homo sapiens
gggcagccggacccg

SEQ ID NO: 1820544 - DNA, 15 bp, Homo sapiens
ggcagccggacccgc

SEQ ID NO: 1820545 - DNA, 15 bp, Homo sapiens
gcagccggacccgcg

SEQ ID NO: 1820546 - DNA, 15 bp, Homo sapiens
cagccggacccgcga

SEQ ID NO: 1820547 - DNA, 15 bp, Homo sapiens
agccggacccgcgac

SEQ ID NO: 1820548 - DNA, 15 bp, Homo sapiens
gccggacccgcgacc

SEQ ID NO: 1820549 - DNA, 15 bp, Homo sapiens
ccggacccgcgaccg

SEQ ID NO: 1820550 - DNA, 15 bp, Homo sapiens
cggacccgcgaccgc

SEQ ID NO: 1820551 - DNA, 15 bp, Homo sapiens
ggacccgcgaccgcc

SEQ ID NO: 1820552 - DNA, 15 bp, Homo sapiens
gacccgcgaccgcct

SEQ ID NO: 1820553 - DNA, 15 bp, Homo sapiens
acccgcgaccgcctg

SEQ ID NO: 1820554 - DNA, 15 bp, Homo sapiens
cccgcgaccgcctgg

SEQ ID NO: 1820555 - DNA, 15 bp, Homo sapiens
ccgcgaccgcctgga

SEQ ID NO: 1820556 - DNA, 15 bp, Homo sapiens
cgcgaccgcctggac

SEQ ID NO: 1820557 - DNA, 15 bp, Homo sapiens
gcgaccgcctggacg

SEQ ID NO: 1820558 - DNA, 15 bp, Homo sapiens
cgaccgcctggacga

SEQ ID NO: 1820559 - DNA, 15 bp, Homo sapiens
gaccgcctggacgag

SEQ ID NO: 1820560 - DNA, 15 bp, Homo sapiens
accgcctggacgagg

SEQ ID NO: 1820561 - DNA, 15 bp, Homo sapiens
ccgcctggacgaggt

SEQ ID NO: 1820562 - DNA, 15 bp, Homo sapiens
cgcctggacgaggtg

SEQ ID NO: 1820563 - DNA, 15 bp, Homo sapiens
gcctggacgaggtga

SEQ ID NO: 1820564 - DNA, 15 bp, Homo sapiens
cctggacgaggtgaa

SEQ ID NO: 1820565 - DNA, 15 bp, Homo sapiens
ctggacgaggtgaag

SEQ ID NO: 1820566 - DNA, 15 bp, Homo sapiens
tggacgaggtgaagg

SEQ ID NO: 1820567 - DNA, 15 bp, Homo sapiens
ggacgaggtgaagga

SEQ ID NO: 1820568 - DNA, 15 bp, Homo sapiens
gacgaggtgaaggag

SEQ ID NO: 1820569 - DNA, 15 bp, Homo sapiens
acgaggtgaaggagc

SEQ ID NO: 1820570 - DNA, 15 bp, Homo sapiens
cgaggtgaaggagca

SEQ ID NO: 1820571 - DNA, 15 bp, Homo sapiens
gaggtgaaggagcag

SEQ ID NO: 1820572 - DNA, 15 bp, Homo sapiens
aggtgaaggagcagg

SEQ ID NO: 1820573 - DNA, 15 bp, Homo sapiens
ggtgaaggagcaggt

SEQ ID NO: 1820574 - DNA, 15 bp, Homo sapiens
gtgaaggagcaggtg

SEQ ID NO: 1820575 - DNA, 15 bp, Homo sapiens
tgaaggagcaggtgg

SEQ ID NO: 1820576 - DNA, 15 bp, Homo sapiens
gaaggagcaggtggc

SEQ ID NO: 1820577 - DNA, 15 bp, Homo sapiens
aaggagcaggtggcg

SEQ ID NO: 1820578 - DNA, 15 bp, Homo sapiens
aggagcaggtggcgg

SEQ ID NO: 1820579 - DNA, 15 bp, Homo sapiens
ggagcaggtggcgga

SEQ ID NO: 1820580 - DNA, 15 bp, Homo sapiens
gagcaggtggcggag

SEQ ID NO: 1820581 - DNA, 15 bp, Homo sapiens
agcaggtggcggagg

SEQ ID NO: 1820582 - DNA, 15 bp, Homo sapiens
gcaggtggcggaggt

SEQ ID NO: 1820583 - DNA, 15 bp, Homo sapiens
caggtggcggaggtg

SEQ ID NO: 1820584 - DNA, 15 bp, Homo sapiens
aggtggcggaggtgc

SEQ ID NO: 1820585 - DNA, 15 bp, Homo sapiens
ggtggcggaggtgcg

SEQ ID NO: 1820586 - DNA, 15 bp, Homo sapiens
gtggcggaggtgcgc

SEQ ID NO: 1820587 - DNA, 15 bp, Homo sapiens
tggcggaggtgcgcg

SEQ ID NO: 1820588 - DNA, 15 bp, Homo sapiens
ggcggaggtgcgcgc

SEQ ID NO: 1820589 - DNA, 15 bp, Homo sapiens
gcggaggtgcgcgcc

SEQ ID NO: 1820590 - DNA, 15 bp, Homo sapiens
cggaggtgcgcgcca

SEQ ID NO: 1820591 - DNA, 15 bp, Homo sapiens
ggaggtgcgcgccaa

SEQ ID NO: 1820592 - DNA, 15 bp, Homo sapiens
gaggtgcgcgccaag

SEQ ID NO: 1820593 - DNA, 15 bp, Homo sapiens
aggtgcgcgccaagc

SEQ ID NO: 1820594 - DNA, 15 bp, Homo sapiens
ggtgcgcgccaagct

SEQ ID NO: 1820595 - DNA, 15 bp, Homo sapiens
gtgcgcgccaagctg

SEQ ID NO: 1820596 - DNA, 15 bp, Homo sapiens
tgcgcgccaagctgg

SEQ ID NO: 1820597 - DNA, 15 bp, Homo sapiens
gcgcgccaagctgga

SEQ ID NO: 1820598 - DNA, 15 bp, Homo sapiens
cgcgccaagctggag

SEQ ID NO: 1820599 - DNA, 15 bp, Homo sapiens
gcgccaagctggagg

SEQ ID NO: 1820600 - DNA, 15 bp, Homo sapiens
cgccaagctggagga

SEQ ID NO: 1820601 - DNA, 15 bp, Homo sapiens
gccaagctggaggag

SEQ ID NO: 1820602 - DNA, 15 bp, Homo sapiens
ccaagctggaggagc

SEQ ID NO: 1820603 - DNA, 15 bp, Homo sapiens
caagctggaggagca

SEQ ID NO: 1820604 - DNA, 15 bp, Homo sapiens
aagctggaggagcag

SEQ ID NO: 1820605 - DNA, 15 bp, Homo sapiens
agctggaggagcagg

SEQ ID NO: 1820606 - DNA, 15 bp, Homo sapiens
gctggaggagcaggc

SEQ ID NO: 1820607 - DNA, 15 bp, Homo sapiens
ctggaggagcaggcc

SEQ ID NO: 1820608 - DNA, 15 bp, Homo sapiens
tggaggagcaggccc

SEQ ID NO: 1820609 - DNA, 15 bp, Homo sapiens
ggaggagcaggccca

SEQ ID NO: 1820610 - DNA, 15 bp, Homo sapiens
gaggagcaggcccag

SEQ ID NO: 1820611 - DNA, 15 bp, Homo sapiens
aggagcaggcccagc

SEQ ID NO: 1820612 - DNA, 15 bp, Homo sapiens
ggagcaggcccagca

SEQ ID NO: 1820613 - DNA, 15 bp, Homo sapiens
gagcaggcccagcag

SEQ ID NO: 1820614 - DNA, 15 bp, Homo sapiens
agcaggcccagcaga

SEQ ID NO: 1820615 - DNA, 15 bp, Homo sapiens
gcaggcccagcagat

SEQ ID NO: 1820616 - DNA, 15 bp, Homo sapiens
caggcccagcagata

SEQ ID NO: 1820617 - DNA, 15 bp, Homo sapiens
aggcccagcagatac

SEQ ID NO: 1820618 - DNA, 15 bp, Homo sapiens
ggcccagcagatacg

SEQ ID NO: 1820619 - DNA, 15 bp, Homo sapiens
gcccagcagatacgc

SEQ ID NO: 1820620 - DNA, 15 bp, Homo sapiens
cccagcagatacgcc

SEQ ID NO: 1820621 - DNA, 15 bp, Homo sapiens
ccagcagatacgcct

SEQ ID NO: 1820622 - DNA, 15 bp, Homo sapiens
cagcagatacgcctg

SEQ ID NO: 1820623 - DNA, 15 bp, Homo sapiens
agcagatacgcctgc

SEQ ID NO: 1820624 - DNA, 15 bp, Homo sapiens
gcagatacgcctgca

SEQ ID NO: 1820625 - DNA, 15 bp, Homo sapiens
cagatacgcctgcag

SEQ ID NO: 1820626 - DNA, 15 bp, Homo sapiens
agatacgcctgcagg

SEQ ID NO: 1820627 - DNA, 15 bp, Homo sapiens
gatacgcctgcaggc

SEQ ID NO: 1820628 - DNA, 15 bp, Homo sapiens
atacgcctgcaggcc

SEQ ID NO: 1820629 - DNA, 15 bp, Homo sapiens
tacgcctgcaggccg

SEQ ID NO: 1820630 - DNA, 15 bp, Homo sapiens
acgcctgcaggccga

SEQ ID NO: 1820631 - DNA, 15 bp, Homo sapiens
cgcctgcaggccgag

SEQ ID NO: 1820632 - DNA, 15 bp, Homo sapiens
gcctgcaggccgagg

SEQ ID NO: 1820633 - DNA, 15 bp, Homo sapiens
cctgcaggccgaggc

SEQ ID NO: 1820634 - DNA, 15 bp, Homo sapiens
ctgcaggccgaggcc

SEQ ID NO: 1820635 - DNA, 15 bp, Homo sapiens
tgcaggccgaggcct

SEQ ID NO: 1820636 - DNA, 15 bp, Homo sapiens
gcaggccgaggcctt

SEQ ID NO: 1820637 - DNA, 15 bp, Homo sapiens
aggccgaggccttcc

SEQ ID NO: 1820638 - DNA, 15 bp, Homo sapiens
ggccgaggccttcca

SEQ ID NO: 1820639 - DNA, 15 bp, Homo sapiens
gccgaggccttccag

SEQ ID NO: 1820640 - DNA, 15 bp, Homo sapiens
ccgaggccttccagg

SEQ ID NO: 1820641 - DNA, 15 bp, Homo sapiens
cgaggccttccaggc

SEQ ID NO: 1820642 - DNA, 15 bp, Homo sapiens
gaggccttccaggcc

SEQ ID NO: 1820643 - DNA, 15 bp, Homo sapiens
aggccttccaggccc

SEQ ID NO: 1820644 - DNA, 15 bp, Homo sapiens
ggccttccaggcccg

SEQ ID NO: 1820645 - DNA, 15 bp, Homo sapiens
gccttccaggcccgc

SEQ ID NO: 1820646 - DNA, 15 bp, Homo sapiens
ccttccaggcccgcc

SEQ ID NO: 1820647 - DNA, 15 bp, Homo sapiens
cttccaggcccgcct

SEQ ID NO: 1820648 - DNA, 15 bp, Homo sapiens
ttccaggcccgcctc

SEQ ID NO: 1820649 - DNA, 15 bp, Homo sapiens
tccaggcccgcctca

SEQ ID NO: 1820650 - DNA, 15 bp, Homo sapiens
ccaggcccgcctcaa

SEQ ID NO: 1820651 - DNA, 15 bp, Homo sapiens
caggcccgcctcaag

SEQ ID NO: 1820652 - DNA, 15 bp, Homo sapiens
aggcccgcctcaaga

SEQ ID NO: 1820653 - DNA, 15 bp, Homo sapiens
ggcccgcctcaagag

SEQ ID NO: 1820654 - DNA, 15 bp, Homo sapiens
gcccgcctcaagagc

SEQ ID NO: 1820655 - DNA, 15 bp, Homo sapiens
cccgcctcaagagct

SEQ ID NO: 1820656 - DNA, 15 bp, Homo sapiens
ccgcctcaagagctg

SEQ ID NO: 1820657 - DNA, 15 bp, Homo sapiens
cgcctcaagagctgg

SEQ ID NO: 1820658 - DNA, 15 bp, Homo sapiens
gcctcaagagctggt

SEQ ID NO: 1820659 - DNA, 15 bp, Homo sapiens
cctcaagagctggtt

SEQ ID NO: 1820660 - DNA, 15 bp, Homo sapiens
ctcaagagctggttc

SEQ ID NO: 1820661 - DNA, 15 bp, Homo sapiens
tcaagagctggttcg

SEQ ID NO: 1820662 - DNA, 15 bp, Homo sapiens
caagagctggttcga

SEQ ID NO: 1820663 - DNA, 15 bp, Homo sapiens
aagagctggttcgag

SEQ ID NO: 1820664 - DNA, 15 bp, Homo sapiens
agagctggttcgagc

SEQ ID NO: 1820665 - DNA, 15 bp, Homo sapiens
gagctggttcgagcc

SEQ ID NO: 1820666 - DNA, 15 bp, Homo sapiens
agctggttcgagccc

SEQ ID NO: 1820667 - DNA, 15 bp, Homo sapiens
gctggttcgagcccc

SEQ ID NO: 1820668 - DNA, 15 bp, Homo sapiens
ctggttcgagcccct

SEQ ID NO: 1820669 - DNA, 15 bp, Homo sapiens
tggttcgagcccctg

SEQ ID NO: 1820670 - DNA, 15 bp, Homo sapiens
ggttcgagcccctgg

SEQ ID NO: 1820671 - DNA, 15 bp, Homo sapiens
gttcgagcccctggt

SEQ ID NO: 1820672 - DNA, 15 bp, Homo sapiens
ttcgagcccctggtg

SEQ ID NO: 1820673 - DNA, 15 bp, Homo sapiens
tcgagcccctggtgg

SEQ ID NO: 1820674 - DNA, 15 bp, Homo sapiens
cgagcccctggtgga

SEQ ID NO: 1820675 - DNA, 15 bp, Homo sapiens
gagcccctggtggaa

SEQ ID NO: 1820676 - DNA, 15 bp, Homo sapiens
agcccctggtggaag

SEQ ID NO: 1820677 - DNA, 15 bp, Homo sapiens
gcccctggtggaaga

SEQ ID NO: 1820678 - DNA, 15 bp, Homo sapiens
cccctggtggaagac

SEQ ID NO: 1820679 - DNA, 15 bp, Homo sapiens
ccctggtggaagaca

SEQ ID NO: 1820680 - DNA, 15 bp, Homo sapiens
cctggtggaagacat

SEQ ID NO: 1820681 - DNA, 15 bp, Homo sapiens
ctggtggaagacatg

SEQ ID NO: 1820682 - DNA, 15 bp, Homo sapiens
tggtggaagacatgc

SEQ ID NO: 1820683 - DNA, 15 bp, Homo sapiens
ggtggaagacatgca

SEQ ID NO: 1820684 - DNA, 15 bp, Homo sapiens
gtggaagacatgcag

SEQ ID NO: 1820685 - DNA, 15 bp, Homo sapiens
tggaagacatgcagc

SEQ ID NO: 1820686 - DNA, 15 bp, Homo sapiens
ggaagacatgcagcg

SEQ ID NO: 1820687 - DNA, 15 bp, Homo sapiens
gaagacatgcagcgc

SEQ ID NO: 1820688 - DNA, 15 bp, Homo sapiens
aagacatgcagcgcc

SEQ ID NO: 1820689 - DNA, 15 bp, Homo sapiens
agacatgcagcgcca

SEQ ID NO: 1820690 - DNA, 15 bp, Homo sapiens
gacatgcagcgccag

SEQ ID NO: 1820691 - DNA, 15 bp, Homo sapiens
acatgcagcgccagt

SEQ ID NO: 1820692 - DNA, 15 bp, Homo sapiens
catgcagcgccagtg

SEQ ID NO: 1820693 - DNA, 15 bp, Homo sapiens
atgcagcgccagtgg

SEQ ID NO: 1820694 - DNA, 15 bp, Homo sapiens
tgcagcgccagtggg

SEQ ID NO: 1820695 - DNA, 15 bp, Homo sapiens
gcagcgccagtgggc

SEQ ID NO: 1820696 - DNA, 15 bp, Homo sapiens
cagcgccagtgggcc

SEQ ID NO: 1820697 - DNA, 15 bp, Homo sapiens
agcgccagtgggccg

SEQ ID NO: 1820698 - DNA, 15 bp, Homo sapiens
gcgccagtgggccgg

SEQ ID NO: 1820699 - DNA, 15 bp, Homo sapiens
cgccagtgggccggg

SEQ ID NO: 1820700 - DNA, 15 bp, Homo sapiens
gccagtgggccgggc

SEQ ID NO: 1820701 - DNA, 15 bp, Homo sapiens
ccagtgggccgggct

SEQ ID NO: 1820702 - DNA, 15 bp, Homo sapiens
cagtgggccgggctg

SEQ ID NO: 1820703 - DNA, 15 bp, Homo sapiens
agtgggccgggctgg

SEQ ID NO: 1820704 - DNA, 15 bp, Homo sapiens
tgggccgggctggtg

SEQ ID NO: 1820705 - DNA, 15 bp, Homo sapiens
gggccgggctggtgg

SEQ ID NO: 1820706 - DNA, 15 bp, Homo sapiens
ggccgggctggtgga

SEQ ID NO: 1820707 - DNA, 15 bp, Homo sapiens
gccgggctggtggag

SEQ ID NO: 1820708 - DNA, 15 bp, Homo sapiens
ccgggctggtggaga

SEQ ID NO: 1820709 - DNA, 15 bp, Homo sapiens
cgggctggtggagaa

SEQ ID NO: 1820710 - DNA, 15 bp, Homo sapiens
gggctggtggagaag

SEQ ID NO: 1820711 - DNA, 15 bp, Homo sapiens
ggctggtggagaagg

SEQ ID NO: 1820712 - DNA, 15 bp, Homo sapiens
gctggtggagaaggt

SEQ ID NO: 1820713 - DNA, 15 bp, Homo sapiens
ctggtggagaaggtg

SEQ ID NO: 1820714 - DNA, 15 bp, Homo sapiens
tggtggagaaggtgc

SEQ ID NO: 1820715 - DNA, 15 bp, Homo sapiens
ggtggagaaggtgca

SEQ ID NO: 1820716 - DNA, 15 bp, Homo sapiens
gtggagaaggtgcag

SEQ ID NO: 1820717 - DNA, 15 bp, Homo sapiens
tggagaaggtgcagg

SEQ ID NO: 1820718 - DNA, 15 bp, Homo sapiens
ggagaaggtgcaggc

SEQ ID NO: 1820719 - DNA, 15 bp, Homo sapiens
gagaaggtgcaggct

SEQ ID NO: 1820720 - DNA, 15 bp, Homo sapiens
agaaggtgcaggctg

SEQ ID NO: 1820721 - DNA, 15 bp, Homo sapiens
gaaggtgcaggctgc

SEQ ID NO: 1820722 - DNA, 15 bp, Homo sapiens
aaggtgcaggctgcc

SEQ ID NO: 1820723 - DNA, 15 bp, Homo sapiens
aggtgcaggctgccg

SEQ ID NO: 1820724 - DNA, 15 bp, Homo sapiens
ggtgcaggctgccgt

SEQ ID NO: 1820725 - DNA, 15 bp, Homo sapiens
gtgcaggctgccgtg

SEQ ID NO: 1820726 - DNA, 15 bp, Homo sapiens
tgcaggctgccgtgg

SEQ ID NO: 1820727 - DNA, 15 bp, Homo sapiens
gcaggctgccgtggg

SEQ ID NO: 1820728 - DNA, 15 bp, Homo sapiens
caggctgccgtgggc

SEQ ID NO: 1820729 - DNA, 15 bp, Homo sapiens
aggctgccgtgggca

SEQ ID NO: 1820730 - DNA, 15 bp, Homo sapiens
ggctgccgtgggcac

SEQ ID NO: 1820731 - DNA, 15 bp, Homo sapiens
gctgccgtgggcacc

SEQ ID NO: 1820732 - DNA, 15 bp, Homo sapiens
ctgccgtgggcacca

SEQ ID NO: 1820733 - DNA, 15 bp, Homo sapiens
tgccgtgggcaccag

SEQ ID NO: 1820734 - DNA, 15 bp, Homo sapiens
gccgtgggcaccagc

SEQ ID NO: 1820735 - DNA, 15 bp, Homo sapiens
ccgtgggcaccagcg

SEQ ID NO: 1820736 - DNA, 15 bp, Homo sapiens
cgtgggcaccagcgc

SEQ ID NO: 1820737 - DNA, 15 bp, Homo sapiens
gtgggcaccagcgcc

SEQ ID NO: 1820738 - DNA, 15 bp, Homo sapiens
tgggcaccagcgccg

SEQ ID NO: 1820739 - DNA, 15 bp, Homo sapiens
gggcaccagcgccgc

SEQ ID NO: 1820740 - DNA, 15 bp, Homo sapiens
ggcaccagcgccgcc

SEQ ID NO: 1820741 - DNA, 15 bp, Homo sapiens
gcaccagcgccgccc

SEQ ID NO: 1820742 - DNA, 15 bp, Homo sapiens
caccagcgccgcccc

SEQ ID NO: 1820743 - DNA, 15 bp, Homo sapiens
accagcgccgcccct

SEQ ID NO: 1820744 - DNA, 15 bp, Homo sapiens
ccagcgccgcccctg

SEQ ID NO: 1820745 - DNA, 15 bp, Homo sapiens
cagcgccgcccctgt

SEQ ID NO: 1820746 - DNA, 15 bp, Homo sapiens
agcgccgcccctgtg

SEQ ID NO: 1820747 - DNA, 15 bp, Homo sapiens
gcgccgcccctgtgc

SEQ ID NO: 1820748 - DNA, 15 bp, Homo sapiens
cgccgcccctgtgcc

SEQ ID NO: 1820749 - DNA, 15 bp, Homo sapiens
gccgcccctgtgccc

SEQ ID NO: 1820750 - DNA, 15 bp, Homo sapiens
ccgcccctgtgccca

SEQ ID NO: 1820751 - DNA, 15 bp, Homo sapiens
cgcccctgtgcccag

SEQ ID NO: 1820752 - DNA, 15 bp, Homo sapiens
gcccctgtgcccagc

SEQ ID NO: 1820753 - DNA, 15 bp, Homo sapiens
cccctgtgcccagcg

SEQ ID NO: 1820754 - DNA, 15 bp, Homo sapiens
ccctgtgcccagcga

SEQ ID NO: 1820755 - DNA, 15 bp, Homo sapiens
cctgtgcccagcgac

SEQ ID NO: 1820756 - DNA, 15 bp, Homo sapiens
ctgtgcccagcgaca

SEQ ID NO: 1820757 - DNA, 15 bp, Homo sapiens
tgtgcccagcgacaa

SEQ ID NO: 1820758 - DNA, 15 bp, Homo sapiens
gtgcccagcgacaat

SEQ ID NO: 1820759 - DNA, 15 bp, Homo sapiens
tgcccagcgacaatc

SEQ ID NO: 1820760 - DNA, 15 bp, Homo sapiens
gcccagcgacaatca

SEQ ID NO: 1820761 - DNA, 15 bp, Homo sapiens
cccagcgacaatcac

SEQ ID NO: 1820762 - DNA, 15 bp, Homo sapiens
ccagcgacaatcact

SEQ ID NO: 1820763 - DNA, 15 bp, Homo sapiens
cagcgacaatcactg

SEQ ID NO: 1820764 - DNA, 15 bp, Homo sapiens
agcgacaatcactga

SEQ ID NO: 1820765 - DNA, 15 bp, Homo sapiens
gcgacaatcactgaa

SEQ ID NO: 1820766 - DNA, 15 bp, Homo sapiens
cgacaatcactgaac

SEQ ID NO: 1820767 - DNA, 15 bp, Homo sapiens
gacaatcactgaacg

SEQ ID NO: 1820768 - DNA, 15 bp, Homo sapiens
acaatcactgaacgc

SEQ ID NO: 1820769 - DNA, 15 bp, Homo sapiens
caatcactgaacgcc

SEQ ID NO: 1820770 - DNA, 15 bp, Homo sapiens
aatcactgaacgccg

SEQ ID NO: 1820771 - DNA, 15 bp, Homo sapiens
atcactgaacgccga

SEQ ID NO: 1820772 - DNA, 15 bp, Homo sapiens
tcactgaacgccgaa

SEQ ID NO: 1820773 - DNA, 15 bp, Homo sapiens
cactgaacgccgaag

SEQ ID NO: 1820774 - DNA, 15 bp, Homo sapiens
actgaacgccgaagc

SEQ ID NO: 1820775 - DNA, 15 bp, Homo sapiens
ctgaacgccgaagcc

SEQ ID NO: 1820776 - DNA, 15 bp, Homo sapiens
tgaacgccgaagcct

SEQ ID NO: 1820777 - DNA, 15 bp, Homo sapiens
gaacgccgaagcctg

SEQ ID NO: 1820778 - DNA, 15 bp, Homo sapiens
aacgccgaagcctgc

SEQ ID NO: 1820779 - DNA, 15 bp, Homo sapiens
acgccgaagcctgca

SEQ ID NO: 1820780 - DNA, 15 bp, Homo sapiens
cgccgaagcctgcag

SEQ ID NO: 1820781 - DNA, 15 bp, Homo sapiens
gccgaagcctgcagc

SEQ ID NO: 1820782 - DNA, 15 bp, Homo sapiens
ccgaagcctgcagcc

SEQ ID NO: 1820783 - DNA, 15 bp, Homo sapiens
cgaagcctgcagcca

SEQ ID NO: 1820784 - DNA, 15 bp, Homo sapiens
gaagcctgcagccat

SEQ ID NO: 1820785 - DNA, 15 bp, Homo sapiens
aagcctgcagccatg

SEQ ID NO: 1820786 - DNA, 15 bp, Homo sapiens
agcctgcagccatgc

SEQ ID NO: 1820787 - DNA, 15 bp, Homo sapiens
gcctgcagccatgcg

SEQ ID NO: 1820788 - DNA, 15 bp, Homo sapiens
cctgcagccatgcga

SEQ ID NO: 1820789 - DNA, 15 bp, Homo sapiens
ctgcagccatgcgac

SEQ ID NO: 1820790 - DNA, 15 bp, Homo sapiens
tgcagccatgcgacc

SEQ ID NO: 1820791 - DNA, 15 bp, Homo sapiens
gcagccatgcgaccc

SEQ ID NO: 1820792 - DNA, 15 bp, Homo sapiens
cagccatgcgacccc

SEQ ID NO: 1820793 - DNA, 15 bp, Homo sapiens
agccatgcgacccca

SEQ ID NO: 1820794 - DNA, 15 bp, Homo sapiens
gccatgcgaccccac

SEQ ID NO: 1820795 - DNA, 15 bp, Homo sapiens
ccatgcgaccccacg

SEQ ID NO: 1820796 - DNA, 15 bp, Homo sapiens
catgcgaccccacgc

SEQ ID NO: 1820797 - DNA, 15 bp, Homo sapiens
atgcgaccccacgcc

SEQ ID NO: 1820798 - DNA, 15 bp, Homo sapiens
tgcgaccccacgcca

SEQ ID NO: 1820799 - DNA, 15 bp, Homo sapiens
gcgaccccacgccac

SEQ ID NO: 1820800 - DNA, 15 bp, Homo sapiens
cgaccccacgccacc

SEQ ID NO: 1820801 - DNA, 15 bp, Homo sapiens
gaccccacgccaccc

SEQ ID NO: 1820802 - DNA, 15 bp, Homo sapiens
accccacgccacccc

SEQ ID NO: 1820803 - DNA, 15 bp, Homo sapiens
ccccacgccaccccg

SEQ ID NO: 1820804 - DNA, 15 bp, Homo sapiens
cccacgccaccccgt

SEQ ID NO: 1820805 - DNA, 15 bp, Homo sapiens
ccacgccaccccgtg

SEQ ID NO: 1820806 - DNA, 15 bp, Homo sapiens
cacgccaccccgtgc

SEQ ID NO: 1820807 - DNA, 15 bp, Homo sapiens
acgccaccccgtgcc

SEQ ID NO: 1820808 - DNA, 15 bp, Homo sapiens
cgccaccccgtgcct

SEQ ID NO: 1820809 - DNA, 15 bp, Homo sapiens
gccaccccgtgcctc

SEQ ID NO: 1820810 - DNA, 15 bp, Homo sapiens
ccaccccgtgcctcc

SEQ ID NO: 1820811 - DNA, 15 bp, Homo sapiens
caccccgtgcctcct

SEQ ID NO: 1820812 - DNA, 15 bp, Homo sapiens
accccgtgcctcctg

SEQ ID NO: 1820813 - DNA, 15 bp, Homo sapiens
ccccgtgcctcctgc

SEQ ID NO: 1820814 - DNA, 15 bp, Homo sapiens
cccgtgcctcctgcc

SEQ ID NO: 1820815 - DNA, 15 bp, Homo sapiens
ccgtgcctcctgcct

SEQ ID NO: 1820816 - DNA, 15 bp, Homo sapiens
cgtgcctcctgcctc

SEQ ID NO: 1820817 - DNA, 15 bp, Homo sapiens
gtgcctcctgcctcc

SEQ ID NO: 1820818 - DNA, 15 bp, Homo sapiens
tgcctcctgcctccg

SEQ ID NO: 1820819 - DNA, 15 bp, Homo sapiens
gcctcctgcctccgc

SEQ ID NO: 1820820 - DNA, 15 bp, Homo sapiens
cctcctgcctccgcg

SEQ ID NO: 1820821 - DNA, 15 bp, Homo sapiens
ctcctgcctccgcgc

SEQ ID NO: 1820822 - DNA, 15 bp, Homo sapiens
tcctgcctccgcgca

SEQ ID NO: 1820823 - DNA, 15 bp, Homo sapiens
cctgcctccgcgcag

SEQ ID NO: 1820824 - DNA, 15 bp, Homo sapiens
ctgcctccgcgcagc

SEQ ID NO: 1820825 - DNA, 15 bp, Homo sapiens
tgcctccgcgcagcc

SEQ ID NO: 1820826 - DNA, 15 bp, Homo sapiens
gcctccgcgcagcct

SEQ ID NO: 1820827 - DNA, 15 bp, Homo sapiens
cctccgcgcagcctg

SEQ ID NO: 1820828 - DNA, 15 bp, Homo sapiens
ctccgcgcagcctgc

SEQ ID NO: 1820829 - DNA, 15 bp, Homo sapiens
tccgcgcagcctgca

SEQ ID NO: 1820830 - DNA, 15 bp, Homo sapiens
ccgcgcagcctgcag

SEQ ID NO: 1820831 - DNA, 15 bp, Homo sapiens
cgcgcagcctgcagc

SEQ ID NO: 1820832 - DNA, 15 bp, Homo sapiens
gcgcagcctgcagcg

SEQ ID NO: 1820833 - DNA, 15 bp, Homo sapiens
cgcagcctgcagcgg

SEQ ID NO: 1820834 - DNA, 15 bp, Homo sapiens
gcagcctgcagcggg

SEQ ID NO: 1820835 - DNA, 15 bp, Homo sapiens
cagcctgcagcggga

SEQ ID NO: 1820836 - DNA, 15 bp, Homo sapiens
agcctgcagcgggag

SEQ ID NO: 1820837 - DNA, 15 bp, Homo sapiens
gcctgcagcgggaga

SEQ ID NO: 1820838 - DNA, 15 bp, Homo sapiens
cctgcagcgggagac

SEQ ID NO: 1820839 - DNA, 15 bp, Homo sapiens
ctgcagcgggagacc

SEQ ID NO: 1820840 - DNA, 15 bp, Homo sapiens
tgcagcgggagaccc

SEQ ID NO: 1820841 - DNA, 15 bp, Homo sapiens
gcagcgggagaccct

SEQ ID NO: 1820842 - DNA, 15 bp, Homo sapiens
cagcgggagaccctg

SEQ ID NO: 1820843 - DNA, 15 bp, Homo sapiens
agcgggagaccctgt

SEQ ID NO: 1820844 - DNA, 15 bp, Homo sapiens
gcgggagaccctgtc

SEQ ID NO: 1820845 - DNA, 15 bp, Homo sapiens
cgggagaccctgtcc

SEQ ID NO: 1820846 - DNA, 15 bp, Homo sapiens
gggagaccctgtccc

SEQ ID NO: 1820847 - DNA, 15 bp, Homo sapiens
ggagaccctgtcccc

SEQ ID NO: 1820848 - DNA, 15 bp, Homo sapiens
gagaccctgtccccg

SEQ ID NO: 1820849 - DNA, 15 bp, Homo sapiens
agaccctgtccccgc

SEQ ID NO: 1820850 - DNA, 15 bp, Homo sapiens
gaccctgtccccgcc

SEQ ID NO: 1820851 - DNA, 15 bp, Homo sapiens
accctgtccccgccc

SEQ ID NO: 1820852 - DNA, 15 bp, Homo sapiens
ccctgtccccgcccc

SEQ ID NO: 1820853 - DNA, 15 bp, Homo sapiens
cctgtccccgcccca

SEQ ID NO: 1820854 - DNA, 15 bp, Homo sapiens
ctgtccccgccccag

SEQ ID NO: 1820855 - DNA, 15 bp, Homo sapiens
tgtccccgccccagc

SEQ ID NO: 1820856 - DNA, 15 bp, Homo sapiens
gtccccgccccagcc

SEQ ID NO: 1820857 - DNA, 15 bp, Homo sapiens
tccccgccccagccg

SEQ ID NO: 1820858 - DNA, 15 bp, Homo sapiens
ccccgccccagccgt

SEQ ID NO: 1820859 - DNA, 15 bp, Homo sapiens
cccgccccagccgtc

SEQ ID NO: 1820860 - DNA, 15 bp, Homo sapiens
ccgccccagccgtcc

SEQ ID NO: 1820861 - DNA, 15 bp, Homo sapiens
cgccccagccgtcct

SEQ ID NO: 1820862 - DNA, 15 bp, Homo sapiens
gccccagccgtcctc

SEQ ID NO: 1820863 - DNA, 15 bp, Homo sapiens
ccccagccgtcctcc

SEQ ID NO: 1820864 - DNA, 15 bp, Homo sapiens
cccagccgtcctcct

SEQ ID NO: 1820865 - DNA, 15 bp, Homo sapiens
ccagccgtcctcctg

SEQ ID NO: 1820866 - DNA, 15 bp, Homo sapiens
cagccgtcctcctgg

SEQ ID NO: 1820867 - DNA, 15 bp, Homo sapiens
agccgtcctcctggg

SEQ ID NO: 1820868 - DNA, 15 bp, Homo sapiens
gccgtcctcctgggg

SEQ ID NO: 1820869 - DNA, 15 bp, Homo sapiens
ccgtcctcctggggt

SEQ ID NO: 1820870 - DNA, 15 bp, Homo sapiens
cgtcctcctggggtg

SEQ ID NO: 1820871 - DNA, 15 bp, Homo sapiens
gtcctcctggggtgg

SEQ ID NO: 1820872 - DNA, 15 bp, Homo sapiens
tcctcctggggtgga

SEQ ID NO: 1820873 - DNA, 15 bp, Homo sapiens
cctcctggggtggac

SEQ ID NO: 1820874 - DNA, 15 bp, Homo sapiens
ctcctggggtggacc

SEQ ID NO: 1820875 - DNA, 15 bp, Homo sapiens
tcctggggtggaccc

SEQ ID NO: 1820876 - DNA, 15 bp, Homo sapiens
cctggggtggaccct

SEQ ID NO: 1820877 - DNA, 15 bp, Homo sapiens
ctggggtggacccta

SEQ ID NO: 1820878 - DNA, 15 bp, Homo sapiens
tggggtggaccctag

SEQ ID NO: 1820879 - DNA, 15 bp, Homo sapiens
ggggtggaccctagt

SEQ ID NO: 1820880 - DNA, 15 bp, Homo sapiens
gggtggaccctagtt

SEQ ID NO: 1820881 - DNA, 15 bp, Homo sapiens
ggtggaccctagttt

SEQ ID NO: 1820882 - DNA, 15 bp, Homo sapiens
gtggaccctagttta

SEQ ID NO: 1820883 - DNA, 15 bp, Homo sapiens
tggaccctagtttaa

SEQ ID NO: 1820884 - DNA, 15 bp, Homo sapiens
ggaccctagtttaat

SEQ ID NO: 1820885 - DNA, 15 bp, Homo sapiens
gaccctagtttaata

SEQ ID NO: 1820886 - DNA, 15 bp, Homo sapiens
accctagtttaataa

SEQ ID NO: 1820887 - DNA, 15 bp, Homo sapiens
ccctagtttaataaa

SEQ ID NO: 1820888 - DNA, 15 bp, Homo sapiens
cctagtttaataaag

SEQ ID NO: 1820889 - DNA, 15 bp, Homo sapiens
ctagtttaataaaga

SEQ ID NO: 1820890 - DNA, 15 bp, Homo sapiens
tagtttaataaagat

SEQ ID NO: 1820891 - DNA, 15 bp, Homo sapiens
agtttaataaagatt

SEQ ID NO: 1820892 - DNA, 15 bp, Homo sapiens
gtttaataaagattc

SEQ ID NO: 1820893 - DNA, 15 bp, Homo sapiens
tttaataaagattca

SEQ ID NO: 1820894 - DNA, 15 bp, Homo sapiens
ttaataaagattcac

SEQ ID NO: 1820895 - DNA, 15 bp, Homo sapiens
taataaagattcacc

SEQ ID NO: 1820896 - DNA, 15 bp, Homo sapiens
aataaagattcacca

SEQ ID NO: 1820897 - DNA, 15 bp, Homo sapiens
ataaagattcaccaa

SEQ ID NO: 1820898 - DNA, 15 bp, Homo sapiens
taaagattcaccaag

SEQ ID NO: 1820899 - DNA, 15 bp, Homo sapiens
aaagattcaccaagt

SEQ ID NO: 1820900 - DNA, 15 bp, Homo sapiens
aagattcaccaagtt

SEQ ID NO: 1820901 - DNA, 15 bp, Homo sapiens
agattcaccaagttt

SEQ ID NO: 1820902 - DNA, 15 bp, Homo sapiens
gattcaccaagtttc

SEQ ID NO: 1820903 - DNA, 15 bp, Homo sapiens
attcaccaagtttca

SEQ ID NO: 1820904 - DNA, 15 bp, Homo sapiens
ttcaccaagtttcac

SEQ ID NO: 1820905 - DNA, 15 bp, Homo sapiens
tcaccaagtttcacg

SEQ ID NO: 1820906 - DNA, 15 bp, Homo sapiens
caccaagtttcacgc

SEQ ID NO: 1820907 - DNA, 15 bp, Homo sapiens
accaagtttcacgca

SEQ ID NO: 1820908 - DNA, 15 bp, Homo sapiens
ccaagtttcacgcat

SEQ ID NO: 1820909 - DNA, 15 bp, Homo sapiens
caagtttcacgcatc

SEQ ID NO: 1820910 - DNA, 15 bp, Homo sapiens
aagtttcacgcatct

SEQ ID NO: 1820911 - DNA, 15 bp, Homo sapiens
agtttcacgcatctg

SEQ ID NO: 1820912 - DNA, 15 bp, Homo sapiens
gtttcacgcatctgc

SEQ ID NO: 1820913 - DNA, 15 bp, Homo sapiens
tttcacgcatctgct

SEQ ID NO: 1820914 - DNA, 15 bp, Homo sapiens
ttcacgcatctgctg

SEQ ID NO: 1820915 - DNA, 15 bp, Homo sapiens
tcacgcatctgctgg

SEQ ID NO: 1820916 - DNA, 15 bp, Homo sapiens
cacgcatctgctggc

SEQ ID NO: 1820917 - DNA, 15 bp, Homo sapiens
acgcatctgctggcc

SEQ ID NO: 1820918 - DNA, 15 bp, Homo sapiens
cgcatctgctggcct

SEQ ID NO: 1820919 - DNA, 15 bp, Homo sapiens
gcatctgctggcctc

SEQ ID NO: 1820920 - DNA, 15 bp, Homo sapiens
catctgctggcctcc

SEQ ID NO: 1820921 - DNA, 15 bp, Homo sapiens
atctgctggcctccc

SEQ ID NO: 1820922 - DNA, 15 bp, Homo sapiens
tctgctggcctcccc

SEQ ID NO: 1820923 - DNA, 15 bp, Homo sapiens
ctgctggcctccccc

SEQ ID NO: 1820924 - DNA, 15 bp, Homo sapiens
tgctggcctccccct

SEQ ID NO: 1820925 - DNA, 15 bp, Homo sapiens
gctggcctccccctg

SEQ ID NO: 1820926 - DNA, 15 bp, Homo sapiens
ctggcctccccctgt

SEQ ID NO: 1820927 - DNA, 15 bp, Homo sapiens
tggcctccccctgtg

SEQ ID NO: 1820928 - DNA, 15 bp, Homo sapiens
ggcctccccctgtga

SEQ ID NO: 1820929 - DNA, 15 bp, Homo sapiens
gcctccccctgtgat

SEQ ID NO: 1820930 - DNA, 15 bp, Homo sapiens
cctccccctgtgatt

SEQ ID NO: 1820931 - DNA, 15 bp, Homo sapiens
ctccccctgtgattt

SEQ ID NO: 1820932 - DNA, 15 bp, Homo sapiens
tccccctgtgatttc

SEQ ID NO: 1820933 - DNA, 15 bp, Homo sapiens
ccccctgtgatttcc

SEQ ID NO: 1820934 - DNA, 15 bp, Homo sapiens
cccctgtgatttcct

SEQ ID NO: 1820935 - DNA, 15 bp, Homo sapiens
ccctgtgatttcctc

SEQ ID NO: 1820936 - DNA, 15 bp, Homo sapiens
cctgtgatttcctct

SEQ ID NO: 1820937 - DNA, 15 bp, Homo sapiens
ctgtgatttcctcta

SEQ ID NO: 1820938 - DNA, 15 bp, Homo sapiens
tgtgatttcctctaa

SEQ ID NO: 1820939 - DNA, 15 bp, Homo sapiens
gtgatttcctctaag

SEQ ID NO: 1820940 - DNA, 15 bp, Homo sapiens
tgatttcctctaagc

SEQ ID NO: 1820941 - DNA, 15 bp, Homo sapiens
gatttcctctaagcc

SEQ ID NO: 1820942 - DNA, 15 bp, Homo sapiens
atttcctctaagccc

SEQ ID NO: 1820943 - DNA, 15 bp, Homo sapiens
tttcctctaagcccc

SEQ ID NO: 1820944 - DNA, 15 bp, Homo sapiens
ttcctctaagcccca

SEQ ID NO: 1820945 - DNA, 15 bp, Homo sapiens
tcctctaagccccag

SEQ ID NO: 1820946 - DNA, 15 bp, Homo sapiens
cctctaagccccagc

SEQ ID NO: 1820947 - DNA, 15 bp, Homo sapiens
ctctaagccccagcc

SEQ ID NO: 1820948 - DNA, 15 bp, Homo sapiens
tctaagccccagcct

SEQ ID NO: 1820949 - DNA, 15 bp, Homo sapiens
ctaagccccagcctc

SEQ ID NO: 1820950 - DNA, 15 bp, Homo sapiens
taagccccagcctca

SEQ ID NO: 1820951 - DNA, 15 bp, Homo sapiens
aagccccagcctcag

SEQ ID NO: 1820952 - DNA, 15 bp, Homo sapiens
agccccagcctcagt

SEQ ID NO: 1820953 - DNA, 15 bp, Homo sapiens
cagcctcagtttctc

SEQ ID NO: 1820954 - DNA, 15 bp, Homo sapiens
agcctcagtttctct

SEQ ID NO: 1820955 - DNA, 15 bp, Homo sapiens
gcctcagtttctctt

SEQ ID NO: 1820956 - DNA, 15 bp, Homo sapiens
cctcagtttctcttt

SEQ ID NO: 1820957 - DNA, 15 bp, Homo sapiens
ctcagtttctctttc

SEQ ID NO: 1820958 - DNA, 15 bp, Homo sapiens
tcagtttctctttct

SEQ ID NO: 1820959 - DNA, 15 bp, Homo sapiens
cagtttctctttctg

SEQ ID NO: 1820960 - DNA, 15 bp, Homo sapiens
agtttctctttctgc

SEQ ID NO: 1820961 - DNA, 15 bp, Homo sapiens
gtttctctttctgcc

SEQ ID NO: 1820962 - DNA, 15 bp, Homo sapiens
tttctctttctgccc

SEQ ID NO: 1820963 - DNA, 15 bp, Homo sapiens
ttctctttctgccca

SEQ ID NO: 1820964 - DNA, 15 bp, Homo sapiens
tctctttctgcccac

SEQ ID NO: 1820965 - DNA, 15 bp, Homo sapiens
ctctttctgcccaca

SEQ ID NO: 1820966 - DNA, 15 bp, Homo sapiens
tctttctgcccacat

SEQ ID NO: 1820967 - DNA, 15 bp, Homo sapiens
ctttctgcccacata

SEQ ID NO: 1820968 - DNA, 15 bp, Homo sapiens
tttctgcccacatac

SEQ ID NO: 1820969 - DNA, 15 bp, Homo sapiens
ttctgcccacatact

SEQ ID NO: 1820970 - DNA, 15 bp, Homo sapiens
tctgcccacatactg

SEQ ID NO: 1820971 - DNA, 15 bp, Homo sapiens
ctgcccacatactgg

SEQ ID NO: 1820972 - DNA, 15 bp, Homo sapiens
tgcccacatactggc

SEQ ID NO: 1820973 - DNA, 15 bp, Homo sapiens
gcccacatactggcc

SEQ ID NO: 1820974 - DNA, 15 bp, Homo sapiens
cccacatactggcca

SEQ ID NO: 1820975 - DNA, 15 bp, Homo sapiens
ccacatactggccac

SEQ ID NO: 1820976 - DNA, 15 bp, Homo sapiens
cacatactggccaca

SEQ ID NO: 1820977 - DNA, 15 bp, Homo sapiens
acatactggccacac

SEQ ID NO: 1820978 - DNA, 15 bp, Homo sapiens
catactggccacaca

SEQ ID NO: 1820979 - DNA, 15 bp, Homo sapiens
atactggccacacaa

SEQ ID NO: 1820980 - DNA, 15 bp, Homo sapiens
tactggccacacaat

SEQ ID NO: 1820981 - DNA, 15 bp, Homo sapiens
actggccacacaatt

SEQ ID NO: 1820982 - DNA, 15 bp, Homo sapiens
ctggccacacaattc

SEQ ID NO: 1820983 - DNA, 15 bp, Homo sapiens
tggccacacaattct

SEQ ID NO: 1820984 - DNA, 15 bp, Homo sapiens
ggccacacaattctc

SEQ ID NO: 1820985 - DNA, 15 bp, Homo sapiens
gccacacaattctca

SEQ ID NO: 1820986 - DNA, 15 bp, Homo sapiens
ccacacaattctcag

SEQ ID NO: 1820987 - DNA, 15 bp, Homo sapiens
cacacaattctcagc

SEQ ID NO: 1820988 - DNA, 15 bp, Homo sapiens
acacaattctcagcc

SEQ ID NO: 1820989 - DNA, 15 bp, Homo sapiens
cacaattctcagccc

SEQ ID NO: 1820990 - DNA, 15 bp, Homo sapiens
acaattctcagcccc

SEQ ID NO: 1820991 - DNA, 15 bp, Homo sapiens
caattctcagccccc

SEQ ID NO: 1820992 - DNA, 15 bp, Homo sapiens
aattctcagccccct

SEQ ID NO: 1820993 - DNA, 15 bp, Homo sapiens
attctcagccccctc

SEQ ID NO: 1820994 - DNA, 15 bp, Homo sapiens
ttctcagccccctcc

SEQ ID NO: 1820995 - DNA, 15 bp, Homo sapiens
tctcagccccctcct

SEQ ID NO: 1820996 - DNA, 15 bp, Homo sapiens
tcagccccctcctct

SEQ ID NO: 1820997 - DNA, 15 bp, Homo sapiens
cagccccctcctctc

SEQ ID NO: 1820998 - DNA, 15 bp, Homo sapiens
agccccctcctctcc

SEQ ID NO: 1820999 - DNA, 15 bp, Homo sapiens
gccccctcctctcca

SEQ ID NO: 1821000 - DNA, 15 bp, Homo sapiens
ccccctcctctccat

SEQ ID NO: 1821001 - DNA, 15 bp, Homo sapiens
cccctcctctccatc

SEQ ID NO: 1821002 - DNA, 15 bp, Homo sapiens
ccctcctctccatct

SEQ ID NO: 1821003 - DNA, 15 bp, Homo sapiens
cctcctctccatctg

SEQ ID NO: 1821004 - DNA, 15 bp, Homo sapiens
ctcctctccatctgt

SEQ ID NO: 1821005 - DNA, 15 bp, Homo sapiens
tcctctccatctgtg

SEQ ID NO: 1821006 - DNA, 15 bp, Homo sapiens
cctctccatctgtgt

SEQ ID NO: 1821007 - DNA, 15 bp, Homo sapiens
ctctccatctgtgtc

SEQ ID NO: 1821008 - DNA, 15 bp, Homo sapiens
tctccatctgtgtct

SEQ ID NO: 1821009 - DNA, 15 bp, Homo sapiens
ctccatctgtgtctg

SEQ ID NO: 1821010 - DNA, 15 bp, Homo sapiens
tccatctgtgtctgt

SEQ ID NO: 1821011 - DNA, 15 bp, Homo sapiens
ccatctgtgtctgtg

SEQ ID NO: 1821012 - DNA, 15 bp, Homo sapiens
catctgtgtctgtgt

SEQ ID NO: 1821013 - DNA, 15 bp, Homo sapiens
atctgtgtctgtgtg

SEQ ID NO: 1821014 - DNA, 15 bp, Homo sapiens
tctgtgtctgtgtgt

SEQ ID NO: 1821015 - DNA, 15 bp, Homo sapiens
ctgtgtctgtgtgta

SEQ ID NO: 1821016 - DNA, 15 bp, Homo sapiens
gtgtctgtgtgtatc

SEQ ID NO: 1821017 - DNA, 15 bp, Homo sapiens
tgtctgtgtgtatct

SEQ ID NO: 1821018 - DNA, 15 bp, Homo sapiens
gtctgtgtgtatctt

SEQ ID NO: 1821019 - DNA, 15 bp, Homo sapiens
tctgtgtgtatcttt

SEQ ID NO: 1821020 - DNA, 15 bp, Homo sapiens
ctgtgtgtatctttc

SEQ ID NO: 1821021 - DNA, 15 bp, Homo sapiens
tgtgtgtatctttct

SEQ ID NO: 1821022 - DNA, 15 bp, Homo sapiens
gtgtgtatctttctc

SEQ ID NO: 1821023 - DNA, 15 bp, Homo sapiens
tgtgtatctttctct

SEQ ID NO: 1821024 - DNA, 15 bp, Homo sapiens
gtgtatctttctctc

SEQ ID NO: 1821025 - DNA, 15 bp, Homo sapiens
tgtatctttctctct

SEQ ID NO: 1821026 - DNA, 15 bp, Homo sapiens
gtatctttctctctg

SEQ ID NO: 1821027 - DNA, 15 bp, Homo sapiens
tatctttctctctgc

SEQ ID NO: 1821028 - DNA, 15 bp, Homo sapiens
atctttctctctgcc

SEQ ID NO: 1821029 - DNA, 15 bp, Homo sapiens
tctttctctctgccc

SEQ ID NO: 1821030 - DNA, 15 bp, Homo sapiens
ctttctctctgccct

SEQ ID NO: 1821031 - DNA, 15 bp, Homo sapiens
tttctctctgccctt

SEQ ID NO: 1821032 - DNA, 15 bp, Homo sapiens
ttctctctgcccttt

SEQ ID NO: 1821033 - DNA, 15 bp, Homo sapiens
tctctctgccctttt

SEQ ID NO: 1821034 - DNA, 15 bp, Homo sapiens
ctctctgcccttttt

SEQ ID NO: 1821035 - DNA, 15 bp, Homo sapiens
tctctgccctttttt

SEQ ID NO: 1821036 - DNA, 15 bp, Homo sapiens
ctctgcccttttttt

SEQ ID NO: 1821037 - DNA, 15 bp, Homo sapiens
tctgccctttttttt

SEQ ID NO: 1821038 - DNA, 15 bp, Homo sapiens
ctgcccttttttttt

SEQ ID NO: 1821039 - DNA, 15 bp, Homo sapiens
tgccctttttttttt

SEQ ID NO: 1821040 - DNA, 15 bp, Homo sapiens
gcccttttttttttt

SEQ ID NO: 1821041 - DNA, 15 bp, Homo sapiens
ttttttttttagacg

SEQ ID NO: 1821042 - DNA, 15 bp, Homo sapiens
tttttttttagacgg

SEQ ID NO: 1821043 - DNA, 15 bp, Homo sapiens
ttttttttagacgga

SEQ ID NO: 1821044 - DNA, 15 bp, Homo sapiens
tttttttagacggag

SEQ ID NO: 1821045 - DNA, 15 bp, Homo sapiens
ttttttagacggagt

SEQ ID NO: 1821046 - DNA, 15 bp, Homo sapiens
tttttagacggagtc

SEQ ID NO: 1821047 - DNA, 15 bp, Homo sapiens
ttttagacggagtct

SEQ ID NO: 1821048 - DNA, 15 bp, Homo sapiens
tttagacggagtctg

SEQ ID NO: 1821049 - DNA, 15 bp, Homo sapiens
ttagacggagtctgg

SEQ ID NO: 1821050 - DNA, 15 bp, Homo sapiens
tagacggagtctggc

SEQ ID NO: 1821051 - DNA, 15 bp, Homo sapiens
cggagtctggctctg

SEQ ID NO: 1821052 - DNA, 15 bp, Homo sapiens
ggagtctggctctgt

SEQ ID NO: 1821053 - DNA, 15 bp, Homo sapiens
gagtctggctctgtc

SEQ ID NO: 1821054 - DNA, 15 bp, Homo sapiens
agtctggctctgtca

SEQ ID NO: 1821055 - DNA, 15 bp, Homo sapiens
gtctggctctgtcac

SEQ ID NO: 1821056 - DNA, 15 bp, Homo sapiens
tctggctctgtcacc

SEQ ID NO: 1821057 - DNA, 15 bp, Homo sapiens
ctggctctgtcaccc

SEQ ID NO: 1821058 - DNA, 15 bp, Homo sapiens
tggctctgtcaccca

SEQ ID NO: 1821059 - DNA, 15 bp, Homo sapiens
ggctctgtcacccag

SEQ ID NO: 1821060 - DNA, 15 bp, Homo sapiens
tgtcacccaggctag

SEQ ID NO: 1821061 - DNA, 15 bp, Homo sapiens
gtcacccaggctaga

SEQ ID NO: 1821062 - DNA, 15 bp, Homo sapiens
tcacccaggctagag

SEQ ID NO: 1821063 - DNA, 15 bp, Homo sapiens
cacccaggctagagt

SEQ ID NO: 1821064 - DNA, 15 bp, Homo sapiens
acccaggctagagtg

SEQ ID NO: 1821065 - DNA, 15 bp, Homo sapiens
ctagagtgcagtggc

SEQ ID NO: 1821066 - DNA, 15 bp, Homo sapiens
tagagtgcagtggca

SEQ ID NO: 1821067 - DNA, 15 bp, Homo sapiens
gttcaagcgattctg

SEQ ID NO: 1821068 - DNA, 15 bp, Homo sapiens
ttcaagcgattctgc

SEQ ID NO: 1821069 - DNA, 15 bp, Homo sapiens
tcaagcgattctgct

SEQ ID NO: 1821070 - DNA, 15 bp, Homo sapiens
caagcgattctgctg

SEQ ID NO: 1821071 - DNA, 15 bp, Homo sapiens
aagcgattctgctgc

SEQ ID NO: 1821072 - DNA, 15 bp, Homo sapiens
agcgattctgctgcc

SEQ ID NO: 1821073 - DNA, 15 bp, Homo sapiens
gcgattctgctgcct

SEQ ID NO: 1821074 - DNA, 15 bp, Homo sapiens
cgattctgctgcctc

SEQ ID NO: 1821075 - DNA, 15 bp, Homo sapiens
tctgctgcctcagta

SEQ ID NO: 1821076 - DNA, 15 bp, Homo sapiens
ctgctgcctcagtag

SEQ ID NO: 1821077 - DNA, 15 bp, Homo sapiens
tgctgcctcagtagc

SEQ ID NO: 1821078 - DNA, 15 bp, Homo sapiens
gctgcctcagtagct

SEQ ID NO: 1821079 - DNA, 15 bp, Homo sapiens
ctgcctcagtagctg

SEQ ID NO: 1821080 - DNA, 15 bp, Homo sapiens
tgcctcagtagctgg

SEQ ID NO: 1821081 - DNA, 15 bp, Homo sapiens
gcctcagtagctggg

SEQ ID NO: 1821082 - DNA, 15 bp, Homo sapiens
cctcagtagctggga

SEQ ID NO: 1821083 - DNA, 15 bp, Homo sapiens
ctcagtagctgggat

SEQ ID NO: 1821084 - DNA, 15 bp, Homo sapiens
tcagtagctgggatt

SEQ ID NO: 1821085 - DNA, 15 bp, Homo sapiens
tgggattacaggctc

SEQ ID NO: 1821086 - DNA, 15 bp, Homo sapiens
gggattacaggctca

SEQ ID NO: 1821087 - DNA, 15 bp, Homo sapiens
ggattacaggctcac

SEQ ID NO: 1821088 - DNA, 15 bp, Homo sapiens
gattacaggctcaca

SEQ ID NO: 1821089 - DNA, 15 bp, Homo sapiens
attacaggctcacac

SEQ ID NO: 1821090 - DNA, 15 bp, Homo sapiens
ttacaggctcacacc

SEQ ID NO: 1821091 - DNA, 15 bp, Homo sapiens
tacaggctcacacca

SEQ ID NO: 1821092 - DNA, 15 bp, Homo sapiens
acaggctcacaccac

SEQ ID NO: 1821093 - DNA, 15 bp, Homo sapiens
caggctcacaccacc

SEQ ID NO: 1821094 - DNA, 15 bp, Homo sapiens
aggctcacaccacca

SEQ ID NO: 1821095 - DNA, 15 bp, Homo sapiens
ggctcacaccaccac

SEQ ID NO: 1821096 - DNA, 15 bp, Homo sapiens
gctcacaccaccaca

SEQ ID NO: 1821097 - DNA, 15 bp, Homo sapiens
ctcacaccaccacac

SEQ ID NO: 1821098 - DNA, 15 bp, Homo sapiens
tcacaccaccacacc

SEQ ID NO: 1821099 - DNA, 15 bp, Homo sapiens
ttagtagagacgagc

SEQ ID NO: 1821100 - DNA, 15 bp, Homo sapiens
tagtagagacgagct

SEQ ID NO: 1821101 - DNA, 15 bp, Homo sapiens
agtagagacgagctt

SEQ ID NO: 1821102 - DNA, 15 bp, Homo sapiens
gtagagacgagcttt

SEQ ID NO: 1821103 - DNA, 15 bp, Homo sapiens
tagagacgagctttc

SEQ ID NO: 1821104 - DNA, 15 bp, Homo sapiens
agagacgagctttca

SEQ ID NO: 1821105 - DNA, 15 bp, Homo sapiens
gagacgagctttcac

SEQ ID NO: 1821106 - DNA, 15 bp, Homo sapiens
agacgagctttcacc

SEQ ID NO: 1821107 - DNA, 15 bp, Homo sapiens
gacgagctttcacca

SEQ ID NO: 1821108 - DNA, 15 bp, Homo sapiens
acgagctttcaccat

SEQ ID NO: 1821109 - DNA, 15 bp, Homo sapiens
cgagctttcaccatg

SEQ ID NO: 1821110 - DNA, 15 bp, Homo sapiens
gagctttcaccatgt

SEQ ID NO: 1821111 - DNA, 15 bp, Homo sapiens
agctttcaccatgtt

SEQ ID NO: 1821112 - DNA, 15 bp, Homo sapiens
gctttcaccatgttg

SEQ ID NO: 1821113 - DNA, 15 bp, Homo sapiens
ctttcaccatgttgg

SEQ ID NO: 1821114 - DNA, 15 bp, Homo sapiens
gcaggtctcaaactc

SEQ ID NO: 1821115 - DNA, 15 bp, Homo sapiens
caggtctcaaactcc

SEQ ID NO: 1821116 - DNA, 15 bp, Homo sapiens
aggtctcaaactcct

SEQ ID NO: 1821117 - DNA, 15 bp, Homo sapiens
tcaaactcctgacca

SEQ ID NO: 1821118 - DNA, 15 bp, Homo sapiens
caaactcctgaccaa

SEQ ID NO: 1821119 - DNA, 15 bp, Homo sapiens
aaactcctgaccaag

SEQ ID NO: 1821120 - DNA, 15 bp, Homo sapiens
aactcctgaccaagt

SEQ ID NO: 1821121 - DNA, 15 bp, Homo sapiens
actcctgaccaagtg

SEQ ID NO: 1821122 - DNA, 15 bp, Homo sapiens
ctcctgaccaagtga

SEQ ID NO: 1821123 - DNA, 15 bp, Homo sapiens
tcctgaccaagtgat

SEQ ID NO: 1821124 - DNA, 15 bp, Homo sapiens
cctgaccaagtgatc

SEQ ID NO: 1821125 - DNA, 15 bp, Homo sapiens
ctgaccaagtgatcc

SEQ ID NO: 1821126 - DNA, 15 bp, Homo sapiens
tgaccaagtgatcca

SEQ ID NO: 1821127 - DNA, 15 bp, Homo sapiens
gaccaagtgatccac

SEQ ID NO: 1821128 - DNA, 15 bp, Homo sapiens
accaagtgatccacc

SEQ ID NO: 1821129 - DNA, 15 bp, Homo sapiens
ccaagtgatccaccc

SEQ ID NO: 1821130 - DNA, 15 bp, Homo sapiens
gtgatccacccgccg

SEQ ID NO: 1821131 - DNA, 15 bp, Homo sapiens
tgatccacccgccgg

SEQ ID NO: 1821132 - DNA, 15 bp, Homo sapiens
gatccacccgccggc

SEQ ID NO: 1821133 - DNA, 15 bp, Homo sapiens
atccacccgccggcc

SEQ ID NO: 1821134 - DNA, 15 bp, Homo sapiens
tccacccgccggcct

SEQ ID NO: 1821135 - DNA, 15 bp, Homo sapiens
ccacccgccggcctc

SEQ ID NO: 1821136 - DNA, 15 bp, Homo sapiens
cacccgccggcctcc

SEQ ID NO: 1821137 - DNA, 15 bp, Homo sapiens
acccgccggcctccc

SEQ ID NO: 1821138 - DNA, 15 bp, Homo sapiens
cccgccggcctccca

SEQ ID NO: 1821139 - DNA, 15 bp, Homo sapiens
ccgccggcctcccaa

SEQ ID NO: 1821140 - DNA, 15 bp, Homo sapiens
cgccggcctcccaaa

SEQ ID NO: 1821141 - DNA, 15 bp, Homo sapiens
gccggcctcccaaag

SEQ ID NO: 1821142 - DNA, 15 bp, Homo sapiens
ctgagattacaggcc

SEQ ID NO: 1821143 - DNA, 15 bp, Homo sapiens
tgagattacaggcct

SEQ ID NO: 1821144 - DNA, 15 bp, Homo sapiens
gagattacaggcctg

SEQ ID NO: 1821145 - DNA, 15 bp, Homo sapiens
agattacaggcctga

SEQ ID NO: 1821146 - DNA, 15 bp, Homo sapiens
ggcctgagccaccat

SEQ ID NO: 1821147 - DNA, 15 bp, Homo sapiens
gcctgagccaccatg

SEQ ID NO: 1821148 - DNA, 15 bp, Homo sapiens
cctgagccaccatgc

SEQ ID NO: 1821149 - DNA, 15 bp, Homo sapiens
ctgagccaccatgcc

SEQ ID NO: 1821150 - DNA, 15 bp, Homo sapiens
gagccaccatgcccg

SEQ ID NO: 1821151 - DNA, 15 bp, Homo sapiens
agccaccatgcccgg

SEQ ID NO: 1821152 - DNA, 15 bp, Homo sapiens
ccaccatgcccggcc

SEQ ID NO: 1821153 - DNA, 15 bp, Homo sapiens
caccatgcccggcct

SEQ ID NO: 1821154 - DNA, 15 bp, Homo sapiens
accatgcccggcctc

SEQ ID NO: 1821155 - DNA, 15 bp, Homo sapiens
ccatgcccggcctct

SEQ ID NO: 1821156 - DNA, 15 bp, Homo sapiens
catgcccggcctctg

SEQ ID NO: 1821157 - DNA, 15 bp, Homo sapiens
atgcccggcctctgc

SEQ ID NO: 1821158 - DNA, 15 bp, Homo sapiens
tgcccggcctctgcc

SEQ ID NO: 1821159 - DNA, 15 bp, Homo sapiens
gcccggcctctgccc

SEQ ID NO: 1821160 - DNA, 15 bp, Homo sapiens
cccggcctctgcccc

SEQ ID NO: 1821161 - DNA, 15 bp, Homo sapiens
ccggcctctgcccct

SEQ ID NO: 1821162 - DNA, 15 bp, Homo sapiens
cggcctctgcccctc

SEQ ID NO: 1821163 - DNA, 15 bp, Homo sapiens
ggcctctgcccctct

SEQ ID NO: 1821164 - DNA, 15 bp, Homo sapiens
gcctctgcccctctt

SEQ ID NO: 1821165 - DNA, 15 bp, Homo sapiens
cctctgcccctcttt

SEQ ID NO: 1821166 - DNA, 15 bp, Homo sapiens
ctctgcccctctttc

SEQ ID NO: 1821167 - DNA, 15 bp, Homo sapiens
tctgcccctctttct

SEQ ID NO: 1821168 - DNA, 15 bp, Homo sapiens
ctgcccctctttctt

SEQ ID NO: 1821169 - DNA, 15 bp, Homo sapiens
tgcccctctttcttt

SEQ ID NO: 1821170 - DNA, 15 bp, Homo sapiens
gcccctctttctttt

SEQ ID NO: 1821171 - DNA, 15 bp, Homo sapiens
cccctctttcttttt

SEQ ID NO: 1821172 - DNA, 15 bp, Homo sapiens
ccctctttctttttt

SEQ ID NO: 1821173 - DNA, 15 bp, Homo sapiens
cctctttctttttta

SEQ ID NO: 1821174 - DNA, 15 bp, Homo sapiens
ctctttcttttttag

SEQ ID NO: 1821175 - DNA, 15 bp, Homo sapiens
tctttcttttttagg

SEQ ID NO: 1821176 - DNA, 15 bp, Homo sapiens
ctttcttttttaggg

SEQ ID NO: 1821177 - DNA, 15 bp, Homo sapiens
tttcttttttagggg

SEQ ID NO: 1821178 - DNA, 15 bp, Homo sapiens
ttcttttttaggggg

SEQ ID NO: 1821179 - DNA, 15 bp, Homo sapiens
tcttttttagggggc

SEQ ID NO: 1821180 - DNA, 15 bp, Homo sapiens
cttttttagggggca

SEQ ID NO: 1821181 - DNA, 15 bp, Homo sapiens
ttttttagggggcag

SEQ ID NO: 1821182 - DNA, 15 bp, Homo sapiens
tttttagggggcagg

SEQ ID NO: 1821183 - DNA, 15 bp, Homo sapiens
ttttagggggcaggg

SEQ ID NO: 1821184 - DNA, 15 bp, Homo sapiens
tttagggggcaggga

SEQ ID NO: 1821185 - DNA, 15 bp, Homo sapiens
ttagggggcagggaa

SEQ ID NO: 1821186 - DNA, 15 bp, Homo sapiens
tagggggcagggaaa

SEQ ID NO: 1821187 - DNA, 15 bp, Homo sapiens
agggggcagggaaag

SEQ ID NO: 1821188 - DNA, 15 bp, Homo sapiens
gggggcagggaaagg

SEQ ID NO: 1821189 - DNA, 15 bp, Homo sapiens
ggggcagggaaaggt

SEQ ID NO: 1821190 - DNA, 15 bp, Homo sapiens
gggcagggaaaggtc

SEQ ID NO: 1821191 - DNA, 15 bp, Homo sapiens
ggcagggaaaggtct

SEQ ID NO: 1821192 - DNA, 15 bp, Homo sapiens
gcagggaaaggtctc

SEQ ID NO: 1821193 - DNA, 15 bp, Homo sapiens
cagggaaaggtctca

SEQ ID NO: 1821194 - DNA, 15 bp, Homo sapiens
agggaaaggtctcac

SEQ ID NO: 1821195 - DNA, 15 bp, Homo sapiens
gggaaaggtctcacc

SEQ ID NO: 1821196 - DNA, 15 bp, Homo sapiens
ggaaaggtctcaccc

SEQ ID NO: 1821197 - DNA, 15 bp, Homo sapiens
gaaaggtctcaccct

SEQ ID NO: 1821198 - DNA, 15 bp, Homo sapiens
aaaggtctcaccctg

SEQ ID NO: 1821199 - DNA, 15 bp, Homo sapiens
aaggtctcaccctgt

SEQ ID NO: 1821200 - DNA, 15 bp, Homo sapiens
aggtctcaccctgtc

SEQ ID NO: 1821201 - DNA, 15 bp, Homo sapiens
ggtctcaccctgtca

SEQ ID NO: 1821202 - DNA, 15 bp, Homo sapiens
gtctcaccctgtcac

SEQ ID NO: 1821203 - DNA, 15 bp, Homo sapiens
tctcaccctgtcacc

SEQ ID NO: 1821204 - DNA, 15 bp, Homo sapiens
ctcaccctgtcaccc

SEQ ID NO: 1821205 - DNA, 15 bp, Homo sapiens
tcaccctgtcacccg

SEQ ID NO: 1821206 - DNA, 15 bp, Homo sapiens
caccctgtcacccgc

SEQ ID NO: 1821207 - DNA, 15 bp, Homo sapiens
accctgtcacccgcc

SEQ ID NO: 1821208 - DNA, 15 bp, Homo sapiens
ccctgtcacccgcca

SEQ ID NO: 1821209 - DNA, 15 bp, Homo sapiens
cctgtcacccgccat

SEQ ID NO: 1821210 - DNA, 15 bp, Homo sapiens
ctgtcacccgccatc

SEQ ID NO: 1821211 - DNA, 15 bp, Homo sapiens
tgtcacccgccatca

SEQ ID NO: 1821212 - DNA, 15 bp, Homo sapiens
gtcacccgccatcac

SEQ ID NO: 1821213 - DNA, 15 bp, Homo sapiens
tcacccgccatcaca

SEQ ID NO: 1821214 - DNA, 15 bp, Homo sapiens
cacccgccatcacag

SEQ ID NO: 1821215 - DNA, 15 bp, Homo sapiens
acccgccatcacagc

SEQ ID NO: 1821216 - DNA, 15 bp, Homo sapiens
cccgccatcacagct

SEQ ID NO: 1821217 - DNA, 15 bp, Homo sapiens
cagtagcccccatct

SEQ ID NO: 1821218 - DNA, 15 bp, Homo sapiens
agtagcccccatctt

SEQ ID NO: 1821219 - DNA, 15 bp, Homo sapiens
gtagcccccatcttt

SEQ ID NO: 1821220 - DNA, 15 bp, Homo sapiens
tagcccccatctttg

SEQ ID NO: 1821221 - DNA, 15 bp, Homo sapiens
agcccccatctttgc

SEQ ID NO: 1821222 - DNA, 15 bp, Homo sapiens
gcccccatctttgcc

SEQ ID NO: 1821223 - DNA, 15 bp, Homo sapiens
cccccatctttgccc

SEQ ID NO: 1821224 - DNA, 15 bp, Homo sapiens
ccccatctttgcccc

SEQ ID NO: 1821225 - DNA, 15 bp, Homo sapiens
cccatctttgcccct

SEQ ID NO: 1821226 - DNA, 15 bp, Homo sapiens
ccatctttgcccctc

SEQ ID NO: 1821227 - DNA, 15 bp, Homo sapiens
catctttgcccctcg

SEQ ID NO: 1821228 - DNA, 15 bp, Homo sapiens
atctttgcccctcgc

SEQ ID NO: 1821229 - DNA, 15 bp, Homo sapiens
tctttgcccctcgct

SEQ ID NO: 1821230 - DNA, 15 bp, Homo sapiens
ctttgcccctcgctg

SEQ ID NO: 1821231 - DNA, 15 bp, Homo sapiens
tttgcccctcgctga

SEQ ID NO: 1821232 - DNA, 15 bp, Homo sapiens
ttgcccctcgctgag

SEQ ID NO: 1821233 - DNA, 15 bp, Homo sapiens
tgcccctcgctgagc

SEQ ID NO: 1821234 - DNA, 15 bp, Homo sapiens
gcccctcgctgagcc

SEQ ID NO: 1821235 - DNA, 15 bp, Homo sapiens
cccctcgctgagccc

SEQ ID NO: 1821236 - DNA, 15 bp, Homo sapiens
ccctcgctgagccct

SEQ ID NO: 1821237 - DNA, 15 bp, Homo sapiens
cctcgctgagcccta

SEQ ID NO: 1821238 - DNA, 15 bp, Homo sapiens
ctcgctgagccctac

SEQ ID NO: 1821239 - DNA, 15 bp, Homo sapiens
tcgctgagccctact

SEQ ID NO: 1821240 - DNA, 15 bp, Homo sapiens
cgctgagccctactg

SEQ ID NO: 1821241 - DNA, 15 bp, Homo sapiens
gctgagccctactgg

SEQ ID NO: 1821242 - DNA, 15 bp, Homo sapiens
ctgagccctactgga

SEQ ID NO: 1821243 - DNA, 15 bp, Homo sapiens
tgagccctactggat

SEQ ID NO: 1821244 - DNA, 15 bp, Homo sapiens
gagccctactggatg

SEQ ID NO: 1821245 - DNA, 15 bp, Homo sapiens
agccctactggatgt

SEQ ID NO: 1821246 - DNA, 15 bp, Homo sapiens
gccctactggatgtt

SEQ ID NO: 1821247 - DNA, 15 bp, Homo sapiens
ccctactggatgttc

SEQ ID NO: 1821248 - DNA, 15 bp, Homo sapiens
cctactggatgttct

SEQ ID NO: 1821249 - DNA, 15 bp, Homo sapiens
ctactggatgttctt

SEQ ID NO: 1821250 - DNA, 15 bp, Homo sapiens
tactggatgttcttg

SEQ ID NO: 1821251 - DNA, 15 bp, Homo sapiens
actggatgttcttgg

SEQ ID NO: 1821252 - DNA, 15 bp, Homo sapiens
ctggatgttcttggt

SEQ ID NO: 1821253 - DNA, 15 bp, Homo sapiens
tggatgttcttggtt

SEQ ID NO: 1821254 - DNA, 15 bp, Homo sapiens
ggatgttcttggtta

SEQ ID NO: 1821255 - DNA, 15 bp, Homo sapiens
gatgttcttggttat

SEQ ID NO: 1821256 - DNA, 15 bp, Homo sapiens
atgttcttggttatg

SEQ ID NO: 1821257 - DNA, 15 bp, Homo sapiens
tgttcttggttatgc

SEQ ID NO: 1821258 - DNA, 15 bp, Homo sapiens
gttcttggttatgcg

SEQ ID NO: 1821259 - DNA, 15 bp, Homo sapiens
ttcttggttatgcga

SEQ ID NO: 1821260 - DNA, 15 bp, Homo sapiens
tcttggttatgcgac

SEQ ID NO: 1821261 - DNA, 15 bp, Homo sapiens
cttggttatgcgaca

SEQ ID NO: 1821262 - DNA, 15 bp, Homo sapiens
ttggttatgcgacag

SEQ ID NO: 1821263 - DNA, 15 bp, Homo sapiens
tggttatgcgacagt

SEQ ID NO: 1821264 - DNA, 15 bp, Homo sapiens
ggttatgcgacagtt

SEQ ID NO: 1821265 - DNA, 15 bp, Homo sapiens
gttatgcgacagttt

SEQ ID NO: 1821266 - DNA, 15 bp, Homo sapiens
ttatgcgacagtttc

SEQ ID NO: 1821267 - DNA, 15 bp, Homo sapiens
tatgcgacagtttcc

SEQ ID NO: 1821268 - DNA, 15 bp, Homo sapiens
atgcgacagtttccc

SEQ ID NO: 1821269 - DNA, 15 bp, Homo sapiens
tgcgacagtttcccc

SEQ ID NO: 1821270 - DNA, 15 bp, Homo sapiens
gcgacagtttcccca

SEQ ID NO: 1821271 - DNA, 15 bp, Homo sapiens
cgacagtttccccat

SEQ ID NO: 1821272 - DNA, 15 bp, Homo sapiens
gacagtttccccatc

SEQ ID NO: 1821273 - DNA, 15 bp, Homo sapiens
acagtttccccatct

SEQ ID NO: 1821274 - DNA, 15 bp, Homo sapiens
cagtttccccatcta

SEQ ID NO: 1821275 - DNA, 15 bp, Homo sapiens
agtttccccatctat

SEQ ID NO: 1821276 - DNA, 15 bp, Homo sapiens
gtttccccatctatt

SEQ ID NO: 1821277 - DNA, 15 bp, Homo sapiens
tttccccatctatta

SEQ ID NO: 1821278 - DNA, 15 bp, Homo sapiens
ttccccatctattaa

SEQ ID NO: 1821279 - DNA, 15 bp, Homo sapiens
tccccatctattaaa

SEQ ID NO: 1821280 - DNA, 15 bp, Homo sapiens
ccccatctattaaag

SEQ ID NO: 1821281 - DNA, 15 bp, Homo sapiens
cccatctattaaaga

SEQ ID NO: 1821282 - DNA, 15 bp, Homo sapiens
ccatctattaaagag

SEQ ID NO: 1821283 - DNA, 15 bp, Homo sapiens
catctattaaagaga

SEQ ID NO: 1821284 - DNA, 15 bp, Homo sapiens
atctattaaagagaa

SEQ ID NO: 1821285 - DNA, 15 bp, Homo sapiens
tctattaaagagaaa

SEQ ID NO: 1821286 - DNA, 15 bp, Homo sapiens
ctattaaagagaaac

SEQ ID NO: 1821287 - DNA, 15 bp, Homo sapiens
tattaaagagaaacc

SEQ ID NO: 1821288 - DNA, 15 bp, Homo sapiens
attaaagagaaaccc

SEQ ID NO: 1821289 - DNA, 15 bp, Homo sapiens
ttaaagagaaacccc

SEQ ID NO: 1821290 - DNA, 15 bp, Homo sapiens
taaagagaaacccct

SEQ ID NO: 1821291 - DNA, 15 bp, Homo sapiens
aaagagaaaccccta

SEQ ID NO: 1821292 - DNA, 15 bp, Homo sapiens
aagagaaacccctat

SEQ ID NO: 1821293 - DNA, 15 bp, Homo sapiens
agagaaacccctata

SEQ ID NO: 1821294 - DNA, 15 bp, Homo sapiens
gagaaacccctatag

SEQ ID NO: 1821295 - DNA, 15 bp, Homo sapiens
agaaacccctatagc

SEQ ID NO: 1821296 - DNA, 15 bp, Homo sapiens
gaaacccctatagca

SEQ ID NO: 1821297 - DNA, 15 bp, Homo sapiens
aaacccctatagcag

SEQ ID NO: 1821298 - DNA, 15 bp, Homo sapiens
aacccctatagcaga

SEQ ID NO: 1821299 - DNA, 15 bp, Homo sapiens
acccctatagcagag

SEQ ID NO: 1821300 - DNA, 15 bp, Homo sapiens
cccctatagcagagg

SEQ ID NO: 1821301 - DNA, 15 bp, Homo sapiens
ccctatagcagaggg

SEQ ID NO: 1821302 - DNA, 15 bp, Homo sapiens
cctatagcagagggg

SEQ ID NO: 1821303 - DNA, 15 bp, Homo sapiens
ctatagcagagggga

SEQ ID NO: 1821304 - DNA, 15 bp, Homo sapiens
tatagcagaggggag

SEQ ID NO: 1821305 - DNA, 15 bp, Homo sapiens
atagcagaggggagg

SEQ ID NO: 1821306 - DNA, 15 bp, Homo sapiens
tagcagaggggagga

SEQ ID NO: 1821307 - DNA, 15 bp, Homo sapiens
agcagaggggaggat

SEQ ID NO: 1821308 - DNA, 15 bp, Homo sapiens
gcagaggggaggatg

SEQ ID NO: 1821309 - DNA, 15 bp, Homo sapiens
cagaggggaggatga

SEQ ID NO: 1821310 - DNA, 15 bp, Homo sapiens
agaggggaggatgag

SEQ ID NO: 1821311 - DNA, 15 bp, Homo sapiens
gaggggaggatgagg

SEQ ID NO: 1821312 - DNA, 15 bp, Homo sapiens
aggggaggatgaggt

SEQ ID NO: 1821313 - DNA, 15 bp, Homo sapiens
ggggaggatgaggtt

SEQ ID NO: 1821314 - DNA, 15 bp, Homo sapiens
gggaggatgaggttg

SEQ ID NO: 1821315 - DNA, 15 bp, Homo sapiens
ggaggatgaggttgg

SEQ ID NO: 1821316 - DNA, 15 bp, Homo sapiens
gaggatgaggttgga

SEQ ID NO: 1821317 - DNA, 15 bp, Homo sapiens
aggatgaggttggaa

SEQ ID NO: 1821318 - DNA, 15 bp, Homo sapiens
ggatgaggttggaaa

SEQ ID NO: 1821319 - DNA, 15 bp, Homo sapiens
gatgaggttggaaaa

SEQ ID NO: 1821320 - DNA, 15 bp, Homo sapiens
atgaggttggaaaag

SEQ ID NO: 1821321 - DNA, 15 bp, Homo sapiens
tgaggttggaaaagc

SEQ ID NO: 1821322 - DNA, 15 bp, Homo sapiens
gaggttggaaaagca

SEQ ID NO: 1821323 - DNA, 15 bp, Homo sapiens
aggttggaaaagcag

SEQ ID NO: 1821324 - DNA, 15 bp, Homo sapiens
ggttggaaaagcagg

SEQ ID NO: 1821325 - DNA, 15 bp, Homo sapiens
gttggaaaagcagga

SEQ ID NO: 1821326 - DNA, 15 bp, Homo sapiens
ttggaaaagcaggag

SEQ ID NO: 1821327 - DNA, 15 bp, Homo sapiens
tggaaaagcaggagc

SEQ ID NO: 1821328 - DNA, 15 bp, Homo sapiens
ggaaaagcaggagca

SEQ ID NO: 1821329 - DNA, 15 bp, Homo sapiens
gaaaagcaggagcat

SEQ ID NO: 1821330 - DNA, 15 bp, Homo sapiens
aaaagcaggagcatt

SEQ ID NO: 1821331 - DNA, 15 bp, Homo sapiens
aaagcaggagcattg

SEQ ID NO: 1821332 - DNA, 15 bp, Homo sapiens
aagcaggagcattgt

SEQ ID NO: 1821333 - DNA, 15 bp, Homo sapiens
agcaggagcattgtt

SEQ ID NO: 1821334 - DNA, 15 bp, Homo sapiens
gcaggagcattgtta

SEQ ID NO: 1821335 - DNA, 15 bp, Homo sapiens
caggagcattgttat

SEQ ID NO: 1821336 - DNA, 15 bp, Homo sapiens
aggagcattgttatg

SEQ ID NO: 1821337 - DNA, 15 bp, Homo sapiens
ggagcattgttatgc

SEQ ID NO: 1821338 - DNA, 15 bp, Homo sapiens
gagcattgttatgct

SEQ ID NO: 1821339 - DNA, 15 bp, Homo sapiens
agcattgttatgcta

SEQ ID NO: 1821340 - DNA, 15 bp, Homo sapiens
gcattgttatgctat

SEQ ID NO: 1821341 - DNA, 15 bp, Homo sapiens
cattgttatgctatt

SEQ ID NO: 1821342 - DNA, 15 bp, Homo sapiens
attgttatgctattc

SEQ ID NO: 1821343 - DNA, 15 bp, Homo sapiens
ttgttatgctattct

SEQ ID NO: 1821344 - DNA, 15 bp, Homo sapiens
tgttatgctattctt

SEQ ID NO: 1821345 - DNA, 15 bp, Homo sapiens
gttatgctattcttg

SEQ ID NO: 1821346 - DNA, 15 bp, Homo sapiens
ttatgctattcttgt

SEQ ID NO: 1821347 - DNA, 15 bp, Homo sapiens
tatgctattcttgtg

SEQ ID NO: 1821348 - DNA, 15 bp, Homo sapiens
atgctattcttgtgg

SEQ ID NO: 1821349 - DNA, 15 bp, Homo sapiens
tgctattcttgtggg

SEQ ID NO: 1821350 - DNA, 15 bp, Homo sapiens
gctattcttgtgggg

SEQ ID NO: 1821351 - DNA, 15 bp, Homo sapiens
ctattcttgtggggt

SEQ ID NO: 1821352 - DNA, 15 bp, Homo sapiens
tattcttgtggggtc

SEQ ID NO: 1821353 - DNA, 15 bp, Homo sapiens
attcttgtggggtct

SEQ ID NO: 1821354 - DNA, 15 bp, Homo sapiens
ttcttgtggggtctg

SEQ ID NO: 1821355 - DNA, 15 bp, Homo sapiens
tcttgtggggtctgg

SEQ ID NO: 1821356 - DNA, 15 bp, Homo sapiens
cttgtggggtctggg

SEQ ID NO: 1821357 - DNA, 15 bp, Homo sapiens
ttgtggggtctggga

SEQ ID NO: 1821358 - DNA, 15 bp, Homo sapiens
tgtggggtctgggaa

SEQ ID NO: 1821359 - DNA, 15 bp, Homo sapiens
gtggggtctgggaag

SEQ ID NO: 1821360 - DNA, 15 bp, Homo sapiens
tggggtctgggaagc

SEQ ID NO: 1821361 - DNA, 15 bp, Homo sapiens
ggggtctgggaagca

SEQ ID NO: 1821362 - DNA, 15 bp, Homo sapiens
gggtctgggaagcag

SEQ ID NO: 1821363 - DNA, 15 bp, Homo sapiens
ggtctgggaagcaga

SEQ ID NO: 1821364 - DNA, 15 bp, Homo sapiens
gtctgggaagcagac

SEQ ID NO: 1821365 - DNA, 15 bp, Homo sapiens
tctgggaagcagaca

SEQ ID NO: 1821366 - DNA, 15 bp, Homo sapiens
ctgggaagcagacat

SEQ ID NO: 1821367 - DNA, 15 bp, Homo sapiens
tgggaagcagacatc

SEQ ID NO: 1821368 - DNA, 15 bp, Homo sapiens
gggaagcagacatct

SEQ ID NO: 1821369 - DNA, 15 bp, Homo sapiens
ggaagcagacatctg

SEQ ID NO: 1821370 - DNA, 15 bp, Homo sapiens
gaagcagacatctgg

SEQ ID NO: 1821371 - DNA, 15 bp, Homo sapiens
aagcagacatctggg

SEQ ID NO: 1821372 - DNA, 15 bp, Homo sapiens
agcagacatctgggt

SEQ ID NO: 1821373 - DNA, 15 bp, Homo sapiens
gcagacatctgggtg

SEQ ID NO: 1821374 - DNA, 15 bp, Homo sapiens
cagacatctgggtgg

SEQ ID NO: 1821375 - DNA, 15 bp, Homo sapiens
agacatctgggtgga

SEQ ID NO: 1821376 - DNA, 15 bp, Homo sapiens
gacatctgggtggat

SEQ ID NO: 1821377 - DNA, 15 bp, Homo sapiens
acatctgggtggatg

SEQ ID NO: 1821378 - DNA, 15 bp, Homo sapiens
catctgggtggatgt

SEQ ID NO: 1821379 - DNA, 15 bp, Homo sapiens
atctgggtggatgtt

SEQ ID NO: 1821380 - DNA, 15 bp, Homo sapiens
tctgggtggatgttt

SEQ ID NO: 1821381 - DNA, 15 bp, Homo sapiens
ctgggtggatgtttg

SEQ ID NO: 1821382 - DNA, 15 bp, Homo sapiens
tgggtggatgtttgg

SEQ ID NO: 1821383 - DNA, 15 bp, Homo sapiens
gggtggatgtttggg

SEQ ID NO: 1821384 - DNA, 15 bp, Homo sapiens
ggtggatgtttgggg

SEQ ID NO: 1821385 - DNA, 15 bp, Homo sapiens
gtggatgtttggggg

SEQ ID NO: 1821386 - DNA, 15 bp, Homo sapiens
tggatgtttgggggg

SEQ ID NO: 1821387 - DNA, 15 bp, Homo sapiens
ggatgtttggggggt

SEQ ID NO: 1821388 - DNA, 15 bp, Homo sapiens
gatgtttggggggtg

SEQ ID NO: 1821389 - DNA, 15 bp, Homo sapiens
atgtttggggggtgc

SEQ ID NO: 1821390 - DNA, 15 bp, Homo sapiens
tgtttggggggtgct

SEQ ID NO: 1821391 - DNA, 15 bp, Homo sapiens
gtttggggggtgctg

SEQ ID NO: 1821392 - DNA, 15 bp, Homo sapiens
tttggggggtgctgg

SEQ ID NO: 1821393 - DNA, 15 bp, Homo sapiens
ttggggggtgctggg

SEQ ID NO: 1821394 - DNA, 15 bp, Homo sapiens
tggggggtgctgggc

SEQ ID NO: 1821395 - DNA, 15 bp, Homo sapiens
ggggggtgctgggct

SEQ ID NO: 1821396 - DNA, 15 bp, Homo sapiens
gggggtgctgggctt

SEQ ID NO: 1821397 - DNA, 15 bp, Homo sapiens
ggggtgctgggctta

SEQ ID NO: 1821398 - DNA, 15 bp, Homo sapiens
gggtgctgggcttag

SEQ ID NO: 1821399 - DNA, 15 bp, Homo sapiens
ggtgctgggcttagt

SEQ ID NO: 1821400 - DNA, 15 bp, Homo sapiens
gtgctgggcttagtt

SEQ ID NO: 1821401 - DNA, 15 bp, Homo sapiens
tgctgggcttagttg

SEQ ID NO: 1821402 - DNA, 15 bp, Homo sapiens
gctgggcttagttgg

SEQ ID NO: 1821403 - DNA, 15 bp, Homo sapiens
ctgggcttagttggg

SEQ ID NO: 1821404 - DNA, 15 bp, Homo sapiens
tgggcttagttgggg

SEQ ID NO: 1821405 - DNA, 15 bp, Homo sapiens
gggcttagttgggga

SEQ ID NO: 1821406 - DNA, 15 bp, Homo sapiens
ggcttagttggggaa

SEQ ID NO: 1821407 - DNA, 15 bp, Homo sapiens
gcttagttggggaag

SEQ ID NO: 1821408 - DNA, 15 bp, Homo sapiens
cttagttggggaagt

SEQ ID NO: 1821409 - DNA, 15 bp, Homo sapiens
ttagttggggaagta

SEQ ID NO: 1821410 - DNA, 15 bp, Homo sapiens
tagttggggaagtag

SEQ ID NO: 1821411 - DNA, 15 bp, Homo sapiens
agttggggaagtagg

SEQ ID NO: 1821412 - DNA, 15 bp, Homo sapiens
gttggggaagtaggg

SEQ ID NO: 1821413 - DNA, 15 bp, Homo sapiens
ttggggaagtagggg

SEQ ID NO: 1821414 - DNA, 15 bp, Homo sapiens
tggggaagtaggggg

SEQ ID NO: 1821415 - DNA, 15 bp, Homo sapiens
ggggaagtagggggg

SEQ ID NO: 1821416 - DNA, 15 bp, Homo sapiens
gggaagtaggggggc

SEQ ID NO: 1821417 - DNA, 15 bp, Homo sapiens
ggaagtaggggggcc

SEQ ID NO: 1821418 - DNA, 15 bp, Homo sapiens
gaagtaggggggccc

SEQ ID NO: 1821419 - DNA, 15 bp, Homo sapiens
aagtaggggggcccc

SEQ ID NO: 1821420 - DNA, 15 bp, Homo sapiens
agtaggggggcccct

SEQ ID NO: 1821421 - DNA, 15 bp, Homo sapiens
gtaggggggcccctg

SEQ ID NO: 1821422 - DNA, 15 bp, Homo sapiens
taggggggcccctgg

SEQ ID NO: 1821423 - DNA, 15 bp, Homo sapiens
aggggggcccctggg

SEQ ID NO: 1821424 - DNA, 15 bp, Homo sapiens
ggggggcccctgggg

SEQ ID NO: 1821425 - DNA, 15 bp, Homo sapiens
gggggcccctggggc

SEQ ID NO: 1821426 - DNA, 15 bp, Homo sapiens
ggggcccctggggct

SEQ ID NO: 1821427 - DNA, 15 bp, Homo sapiens
gggcccctggggctg

SEQ ID NO: 1821428 - DNA, 15 bp, Homo sapiens
ggcccctggggctga

SEQ ID NO: 1821429 - DNA, 15 bp, Homo sapiens
gcccctggggctgac

SEQ ID NO: 1821430 - DNA, 15 bp, Homo sapiens
cccctggggctgaca

SEQ ID NO: 1821431 - DNA, 15 bp, Homo sapiens
ccctggggctgacag

SEQ ID NO: 1821432 - DNA, 15 bp, Homo sapiens
cctggggctgacagg

SEQ ID NO: 1821433 - DNA, 15 bp, Homo sapiens
ctggggctgacaggg

SEQ ID NO: 1821434 - DNA, 15 bp, Homo sapiens
tggggctgacaggga

SEQ ID NO: 1821435 - DNA, 15 bp, Homo sapiens
ggggctgacagggac

SEQ ID NO: 1821436 - DNA, 15 bp, Homo sapiens
gggctgacagggact

SEQ ID NO: 1821437 - DNA, 15 bp, Homo sapiens
ggctgacagggactg

SEQ ID NO: 1821438 - DNA, 15 bp, Homo sapiens
gctgacagggactgg

SEQ ID NO: 1821439 - DNA, 15 bp, Homo sapiens
ctgacagggactgga

SEQ ID NO: 1821440 - DNA, 15 bp, Homo sapiens
tgacagggactggaa

SEQ ID NO: 1821441 - DNA, 15 bp, Homo sapiens
gacagggactggaag

SEQ ID NO: 1821442 - DNA, 15 bp, Homo sapiens
acagggactggaagc

SEQ ID NO: 1821443 - DNA, 15 bp, Homo sapiens
cagggactggaagct

SEQ ID NO: 1821444 - DNA, 15 bp, Homo sapiens
agggactggaagctc

SEQ ID NO: 1821445 - DNA, 15 bp, Homo sapiens
gggactggaagctct

SEQ ID NO: 1821446 - DNA, 15 bp, Homo sapiens
ggactggaagctctg

SEQ ID NO: 1821447 - DNA, 15 bp, Homo sapiens
gactggaagctctga

SEQ ID NO: 1821448 - DNA, 15 bp, Homo sapiens
actggaagctctgag

SEQ ID NO: 1821449 - DNA, 15 bp, Homo sapiens
ctggaagctctgagc

SEQ ID NO: 1821450 - DNA, 15 bp, Homo sapiens
tggaagctctgagct

SEQ ID NO: 1821451 - DNA, 15 bp, Homo sapiens
ggaagctctgagctg

SEQ ID NO: 1821452 - DNA, 15 bp, Homo sapiens
gaagctctgagctgg

SEQ ID NO: 1821453 - DNA, 15 bp, Homo sapiens
aagctctgagctggc

SEQ ID NO: 1821454 - DNA, 15 bp, Homo sapiens
agctctgagctggcc

SEQ ID NO: 1821455 - DNA, 15 bp, Homo sapiens
gctctgagctggcca

SEQ ID NO: 1821456 - DNA, 15 bp, Homo sapiens
ctctgagctggccag

SEQ ID NO: 1821457 - DNA, 15 bp, Homo sapiens
tctgagctggccaga

SEQ ID NO: 1821458 - DNA, 15 bp, Homo sapiens
ctgagctggccagag

SEQ ID NO: 1821459 - DNA, 15 bp, Homo sapiens
tgagctggccagagg

SEQ ID NO: 1821460 - DNA, 15 bp, Homo sapiens
gagctggccagaggg

SEQ ID NO: 1821461 - DNA, 15 bp, Homo sapiens
agctggccagaggga

SEQ ID NO: 1821462 - DNA, 15 bp, Homo sapiens
gctggccagagggat

SEQ ID NO: 1821463 - DNA, 15 bp, Homo sapiens
ctggccagagggatg

SEQ ID NO: 1821464 - DNA, 15 bp, Homo sapiens
tggccagagggatgt

SEQ ID NO: 1821465 - DNA, 15 bp, Homo sapiens
ggccagagggatgtt

SEQ ID NO: 1821466 - DNA, 15 bp, Homo sapiens
gccagagggatgttg

SEQ ID NO: 1821467 - DNA, 15 bp, Homo sapiens
ccagagggatgttgc

SEQ ID NO: 1821468 - DNA, 15 bp, Homo sapiens
cagagggatgttgca

SEQ ID NO: 1821469 - DNA, 15 bp, Homo sapiens
agagggatgttgcaa

SEQ ID NO: 1821470 - DNA, 15 bp, Homo sapiens
gagggatgttgcaat

SEQ ID NO: 1821471 - DNA, 15 bp, Homo sapiens
agggatgttgcaatc

SEQ ID NO: 1821472 - DNA, 15 bp, Homo sapiens
gggatgttgcaatcc

SEQ ID NO: 1821473 - DNA, 15 bp, Homo sapiens
ggatgttgcaatcct

SEQ ID NO: 1821474 - DNA, 15 bp, Homo sapiens
gatgttgcaatcctg

SEQ ID NO: 1821475 - DNA, 15 bp, Homo sapiens
atgttgcaatcctgc

SEQ ID NO: 1821476 - DNA, 15 bp, Homo sapiens
tgttgcaatcctgcc

SEQ ID NO: 1821477 - DNA, 15 bp, Homo sapiens
gttgcaatcctgcca

SEQ ID NO: 1821478 - DNA, 15 bp, Homo sapiens
ttgcaatcctgccag

SEQ ID NO: 1821479 - DNA, 15 bp, Homo sapiens
tgcaatcctgccagg

SEQ ID NO: 1821480 - DNA, 15 bp, Homo sapiens
gcaatcctgccaggg

SEQ ID NO: 1821481 - DNA, 15 bp, Homo sapiens
caatcctgccagggt

SEQ ID NO: 1821482 - DNA, 15 bp, Homo sapiens
aatcctgccagggtc

SEQ ID NO: 1821483 - DNA, 15 bp, Homo sapiens
atcctgccagggtct

SEQ ID NO: 1821484 - DNA, 15 bp, Homo sapiens
tcctgccagggtctt

SEQ ID NO: 1821485 - DNA, 15 bp, Homo sapiens
cctgccagggtcttg

SEQ ID NO: 1821486 - DNA, 15 bp, Homo sapiens
ctgccagggtcttgt

SEQ ID NO: 1821487 - DNA, 15 bp, Homo sapiens
tgccagggtcttgtc

SEQ ID NO: 1821488 - DNA, 15 bp, Homo sapiens
gccagggtcttgtct

SEQ ID NO: 1821489 - DNA, 15 bp, Homo sapiens
ccagggtcttgtcta

SEQ ID NO: 1821490 - DNA, 15 bp, Homo sapiens
cagggtcttgtctat

SEQ ID NO: 1821491 - DNA, 15 bp, Homo sapiens
agggtcttgtctatg

SEQ ID NO: 1821492 - DNA, 15 bp, Homo sapiens
gggtcttgtctatgc

SEQ ID NO: 1821493 - DNA, 15 bp, Homo sapiens
ggtcttgtctatgct

SEQ ID NO: 1821494 - DNA, 15 bp, Homo sapiens
gtcttgtctatgctg

SEQ ID NO: 1821495 - DNA, 15 bp, Homo sapiens
tcttgtctatgctgt

SEQ ID NO: 1821496 - DNA, 15 bp, Homo sapiens
cttgtctatgctgtc

SEQ ID NO: 1821497 - DNA, 15 bp, Homo sapiens
ttgtctatgctgtcc

SEQ ID NO: 1821498 - DNA, 15 bp, Homo sapiens
tgtctatgctgtcct

SEQ ID NO: 1821499 - DNA, 15 bp, Homo sapiens
gtctatgctgtcctt

SEQ ID NO: 1821500 - DNA, 15 bp, Homo sapiens
tctatgctgtccttt

SEQ ID NO: 1821501 - DNA, 15 bp, Homo sapiens
ctatgctgtcctttt

SEQ ID NO: 1821502 - DNA, 15 bp, Homo sapiens
tatgctgtccttttc

SEQ ID NO: 1821503 - DNA, 15 bp, Homo sapiens
atgctgtccttttca

SEQ ID NO: 1821504 - DNA, 15 bp, Homo sapiens
tgctgtccttttcac

SEQ ID NO: 1821505 - DNA, 15 bp, Homo sapiens
gctgtccttttcaca

SEQ ID NO: 1821506 - DNA, 15 bp, Homo sapiens
ctgtccttttcacaa

SEQ ID NO: 1821507 - DNA, 15 bp, Homo sapiens
tgtccttttcacaac

SEQ ID NO: 1821508 - DNA, 15 bp, Homo sapiens
gtccttttcacaacc

SEQ ID NO: 1821509 - DNA, 15 bp, Homo sapiens
tccttttcacaacca

SEQ ID NO: 1821510 - DNA, 15 bp, Homo sapiens
ccttttcacaaccat

SEQ ID NO: 1821511 - DNA, 15 bp, Homo sapiens
cttttcacaaccatc

SEQ ID NO: 1821512 - DNA, 15 bp, Homo sapiens
ttttcacaaccatcc

SEQ ID NO: 1821513 - DNA, 15 bp, Homo sapiens
tttcacaaccatccc

SEQ ID NO: 1821514 - DNA, 15 bp, Homo sapiens
ttcacaaccatcccc

SEQ ID NO: 1821515 - DNA, 15 bp, Homo sapiens
tcacaaccatccccc

SEQ ID NO: 1821516 - DNA, 15 bp, Homo sapiens
cacaaccatccccct

SEQ ID NO: 1821517 - DNA, 15 bp, Homo sapiens
acaaccatcccccta

SEQ ID NO: 1821518 - DNA, 15 bp, Homo sapiens
caaccatccccctac

SEQ ID NO: 1821519 - DNA, 15 bp, Homo sapiens
aaccatccccctact

SEQ ID NO: 1821520 - DNA, 15 bp, Homo sapiens
accatccccctactg

SEQ ID NO: 1821521 - DNA, 15 bp, Homo sapiens
ccatccccctactgc

SEQ ID NO: 1821522 - DNA, 15 bp, Homo sapiens
catccccctactgcc

SEQ ID NO: 1821523 - DNA, 15 bp, Homo sapiens
atccccctactgcca

SEQ ID NO: 1821524 - DNA, 15 bp, Homo sapiens
tccccctactgccag

SEQ ID NO: 1821525 - DNA, 15 bp, Homo sapiens
ccccctactgccagg

SEQ ID NO: 1821526 - DNA, 15 bp, Homo sapiens
cccctactgccaggc

SEQ ID NO: 1821527 - DNA, 15 bp, Homo sapiens
ccctactgccaggct

SEQ ID NO: 1821528 - DNA, 15 bp, Homo sapiens
cctactgccaggctg

SEQ ID NO: 1821529 - DNA, 15 bp, Homo sapiens
ctactgccaggctga

SEQ ID NO: 1821530 - DNA, 15 bp, Homo sapiens
tactgccaggctgac

SEQ ID NO: 1821531 - DNA, 15 bp, Homo sapiens
actgccaggctgaca

SEQ ID NO: 1821532 - DNA, 15 bp, Homo sapiens
ctgccaggctgacac

SEQ ID NO: 1821533 - DNA, 15 bp, Homo sapiens
tgccaggctgacacg

SEQ ID NO: 1821534 - DNA, 15 bp, Homo sapiens
gccaggctgacacgt

SEQ ID NO: 1821535 - DNA, 15 bp, Homo sapiens
ccaggctgacacgtg

SEQ ID NO: 1821536 - DNA, 15 bp, Homo sapiens
caggctgacacgtgg

SEQ ID NO: 1821537 - DNA, 15 bp, Homo sapiens
aggctgacacgtggt

SEQ ID NO: 1821538 - DNA, 15 bp, Homo sapiens
ggctgacacgtggtt

SEQ ID NO: 1821539 - DNA, 15 bp, Homo sapiens
gctgacacgtggttg

SEQ ID NO: 1821540 - DNA, 15 bp, Homo sapiens
ctgacacgtggttgc

SEQ ID NO: 1821541 - DNA, 15 bp, Homo sapiens
tgacacgtggttgcg

SEQ ID NO: 1821542 - DNA, 15 bp, Homo sapiens
gacacgtggttgcgg

SEQ ID NO: 1821543 - DNA, 15 bp, Homo sapiens
acacgtggttgcggg

SEQ ID NO: 1821544 - DNA, 15 bp, Homo sapiens
cacgtggttgcgggg

SEQ ID NO: 1821545 - DNA, 15 bp, Homo sapiens
acgtggttgcggggg

SEQ ID NO: 1821546 - DNA, 15 bp, Homo sapiens
cgtggttgcgggggc

SEQ ID NO: 1821547 - DNA, 15 bp, Homo sapiens
gtggttgcgggggca

SEQ ID NO: 1821548 - DNA, 15 bp, Homo sapiens
tggttgcgggggcac

SEQ ID NO: 1821549 - DNA, 15 bp, Homo sapiens
ggttgcgggggcaca

SEQ ID NO: 1821550 - DNA, 15 bp, Homo sapiens
gttgcgggggcacaa

SEQ ID NO: 1821551 - DNA, 15 bp, Homo sapiens
ttgcgggggcacaag

SEQ ID NO: 1821552 - DNA, 15 bp, Homo sapiens
tgcgggggcacaagg

SEQ ID NO: 1821553 - DNA, 15 bp, Homo sapiens
gcgggggcacaaggc

SEQ ID NO: 1821554 - DNA, 15 bp, Homo sapiens
cgggggcacaaggcc

SEQ ID NO: 1821555 - DNA, 15 bp, Homo sapiens
gggggcacaaggcca

SEQ ID NO: 1821556 - DNA, 15 bp, Homo sapiens
ggggcacaaggccag

SEQ ID NO: 1821557 - DNA, 15 bp, Homo sapiens
gggcacaaggccagc

SEQ ID NO: 1821558 - DNA, 15 bp, Homo sapiens
ggcacaaggccagcc

SEQ ID NO: 1821559 - DNA, 15 bp, Homo sapiens
gcacaaggccagcca

SEQ ID NO: 1821560 - DNA, 15 bp, Homo sapiens
cacaaggccagccaa

SEQ ID NO: 1821561 - DNA, 15 bp, Homo sapiens
acaaggccagccaac

SEQ ID NO: 1821562 - DNA, 15 bp, Homo sapiens
caaggccagccaacc

SEQ ID NO: 1821563 - DNA, 15 bp, Homo sapiens
aaggccagccaacct

SEQ ID NO: 1821564 - DNA, 15 bp, Homo sapiens
aggccagccaaccta

SEQ ID NO: 1821565 - DNA, 15 bp, Homo sapiens
ggccagccaacctag

SEQ ID NO: 1821566 - DNA, 15 bp, Homo sapiens
gccagccaacctaga

SEQ ID NO: 1821567 - DNA, 15 bp, Homo sapiens
ccagccaacctagag

SEQ ID NO: 1821568 - DNA, 15 bp, Homo sapiens
cagccaacctagagt

SEQ ID NO: 1821569 - DNA, 15 bp, Homo sapiens
agccaacctagagtc

SEQ ID NO: 1821570 - DNA, 15 bp, Homo sapiens
gccaacctagagtct

SEQ ID NO: 1821571 - DNA, 15 bp, Homo sapiens
ccaacctagagtctg

SEQ ID NO: 1821572 - DNA, 15 bp, Homo sapiens
caacctagagtctga

SEQ ID NO: 1821573 - DNA, 15 bp, Homo sapiens
aacctagagtctgag

SEQ ID NO: 1821574 - DNA, 15 bp, Homo sapiens
acctagagtctgagg

SEQ ID NO: 1821575 - DNA, 15 bp, Homo sapiens
cctagagtctgaggc

SEQ ID NO: 1821576 - DNA, 15 bp, Homo sapiens
ctagagtctgaggct

SEQ ID NO: 1821577 - DNA, 15 bp, Homo sapiens
tagagtctgaggcta

SEQ ID NO: 1821578 - DNA, 15 bp, Homo sapiens
agagtctgaggctag

SEQ ID NO: 1821579 - DNA, 15 bp, Homo sapiens
gagtctgaggctagg

SEQ ID NO: 1821580 - DNA, 15 bp, Homo sapiens
agtctgaggctaggc

SEQ ID NO: 1821581 - DNA, 15 bp, Homo sapiens
gtctgaggctaggcg

SEQ ID NO: 1821582 - DNA, 15 bp, Homo sapiens
tctgaggctaggcgg

SEQ ID NO: 1821583 - DNA, 15 bp, Homo sapiens
ctgaggctaggcgga

SEQ ID NO: 1821584 - DNA, 15 bp, Homo sapiens
tgaggctaggcggag

SEQ ID NO: 1821585 - DNA, 15 bp, Homo sapiens
gaggctaggcggagg

SEQ ID NO: 1821586 - DNA, 15 bp, Homo sapiens
aggctaggcggagga

SEQ ID NO: 1821587 - DNA, 15 bp, Homo sapiens
ggctaggcggaggac

SEQ ID NO: 1821588 - DNA, 15 bp, Homo sapiens
gctaggcggaggaca

SEQ ID NO: 1821589 - DNA, 15 bp, Homo sapiens
ctaggcggaggacac

SEQ ID NO: 1821590 - DNA, 15 bp, Homo sapiens
taggcggaggacacc

SEQ ID NO: 1821591 - DNA, 15 bp, Homo sapiens
aggcggaggacaccc

SEQ ID NO: 1821592 - DNA, 15 bp, Homo sapiens
ggcggaggacaccct

SEQ ID NO: 1821593 - DNA, 15 bp, Homo sapiens
gcggaggacaccctc

SEQ ID NO: 1821594 - DNA, 15 bp, Homo sapiens
cggaggacaccctcc

SEQ ID NO: 1821595 - DNA, 15 bp, Homo sapiens
ggaggacaccctccc

SEQ ID NO: 1821596 - DNA, 15 bp, Homo sapiens
gaggacaccctcccc

SEQ ID NO: 1821597 - DNA, 15 bp, Homo sapiens
aggacaccctcccca

SEQ ID NO: 1821598 - DNA, 15 bp, Homo sapiens
ggacaccctccccac

SEQ ID NO: 1821599 - DNA, 15 bp, Homo sapiens
gacaccctccccacc

SEQ ID NO: 1821600 - DNA, 15 bp, Homo sapiens
acaccctccccacca

SEQ ID NO: 1821601 - DNA, 15 bp, Homo sapiens
caccctccccaccag

SEQ ID NO: 1821602 - DNA, 15 bp, Homo sapiens
accctccccaccagc

SEQ ID NO: 1821603 - DNA, 15 bp, Homo sapiens
ccctccccaccagct

SEQ ID NO: 1821604 - DNA, 15 bp, Homo sapiens
cctccccaccagctg

SEQ ID NO: 1821605 - DNA, 15 bp, Homo sapiens
ctccccaccagctgc

SEQ ID NO: 1821606 - DNA, 15 bp, Homo sapiens
ccccaccagctgcca

SEQ ID NO: 1821607 - DNA, 15 bp, Homo sapiens
cccaccagctgccag

SEQ ID NO: 1821608 - DNA, 15 bp, Homo sapiens
ccaccagctgccagg

SEQ ID NO: 1821609 - DNA, 15 bp, Homo sapiens
caccagctgccaggg

SEQ ID NO: 1821610 - DNA, 15 bp, Homo sapiens
accagctgccagggt

SEQ ID NO: 1821611 - DNA, 15 bp, Homo sapiens
ccagctgccagggtc

SEQ ID NO: 1821612 - DNA, 15 bp, Homo sapiens
cagctgccagggtca

SEQ ID NO: 1821613 - DNA, 15 bp, Homo sapiens
agctgccagggtcac

SEQ ID NO: 1821614 - DNA, 15 bp, Homo sapiens
gctgccagggtcact

SEQ ID NO: 1821615 - DNA, 15 bp, Homo sapiens
ctgccagggtcactg

SEQ ID NO: 1821616 - DNA, 15 bp, Homo sapiens
tgccagggtcactgg

SEQ ID NO: 1821617 - DNA, 15 bp, Homo sapiens
gccagggtcactggc

SEQ ID NO: 1821618 - DNA, 15 bp, Homo sapiens
ccagggtcactggcg

SEQ ID NO: 1821619 - DNA, 15 bp, Homo sapiens
cagggtcactggcgg

SEQ ID NO: 1821620 - DNA, 15 bp, Homo sapiens
agggtcactggcggt

SEQ ID NO: 1821621 - DNA, 15 bp, Homo sapiens
gggtcactggcggtc

SEQ ID NO: 1821622 - DNA, 15 bp, Homo sapiens
ggtcactggcggtca

SEQ ID NO: 1821623 - DNA, 15 bp, Homo sapiens
gtcactggcggtcaa

SEQ ID NO: 1821624 - DNA, 15 bp, Homo sapiens
tcactggcggtcaaa

SEQ ID NO: 1821625 - DNA, 15 bp, Homo sapiens
cactggcggtcaaag

SEQ ID NO: 1821626 - DNA, 15 bp, Homo sapiens
actggcggtcaaagg

SEQ ID NO: 1821627 - DNA, 15 bp, Homo sapiens
ctggcggtcaaaggc

SEQ ID NO: 1821628 - DNA, 15 bp, Homo sapiens
tggcggtcaaaggca

SEQ ID NO: 1821629 - DNA, 15 bp, Homo sapiens
ggcggtcaaaggcag

SEQ ID NO: 1821630 - DNA, 15 bp, Homo sapiens
gcggtcaaaggcagc

SEQ ID NO: 1821631 - DNA, 15 bp, Homo sapiens
cggtcaaaggcagct

SEQ ID NO: 1821632 - DNA, 15 bp, Homo sapiens
ggtcaaaggcagctg

SEQ ID NO: 1821633 - DNA, 15 bp, Homo sapiens
gtcaaaggcagctgg

SEQ ID NO: 1821634 - DNA, 15 bp, Homo sapiens
tcaaaggcagctggt

SEQ ID NO: 1821635 - DNA, 15 bp, Homo sapiens
caaaggcagctggtg

SEQ ID NO: 1821636 - DNA, 15 bp, Homo sapiens
aaaggcagctggtgg

SEQ ID NO: 1821637 - DNA, 15 bp, Homo sapiens
aaggcagctggtggg

SEQ ID NO: 1821638 - DNA, 15 bp, Homo sapiens
aggcagctggtgggg

SEQ ID NO: 1821639 - DNA, 15 bp, Homo sapiens
gcagctggtggggaa

SEQ ID NO: 1821640 - DNA, 15 bp, Homo sapiens
cagctggtggggaag

SEQ ID NO: 1821641 - DNA, 15 bp, Homo sapiens
agctggtggggaagg

SEQ ID NO: 1821642 - DNA, 15 bp, Homo sapiens
gctggtggggaaggc

SEQ ID NO: 1821643 - DNA, 15 bp, Homo sapiens
ctggtggggaaggca

SEQ ID NO: 1821644 - DNA, 15 bp, Homo sapiens
tggtggggaaggcat

SEQ ID NO: 1821645 - DNA, 15 bp, Homo sapiens
ggtggggaaggcatt

SEQ ID NO: 1821646 - DNA, 15 bp, Homo sapiens
gtggggaaggcattg

SEQ ID NO: 1821647 - DNA, 15 bp, Homo sapiens
tggggaaggcattgg

SEQ ID NO: 1821648 - DNA, 15 bp, Homo sapiens
ggggaaggcattgga

SEQ ID NO: 1821649 - DNA, 15 bp, Homo sapiens
gggaaggcattggac

SEQ ID NO: 1821650 - DNA, 15 bp, Homo sapiens
ggaaggcattggact

SEQ ID NO: 1821651 - DNA, 15 bp, Homo sapiens
gaaggcattggactc

SEQ ID NO: 1821652 - DNA, 15 bp, Homo sapiens
aaggcattggactcc

SEQ ID NO: 1821653 - DNA, 15 bp, Homo sapiens
aggcattggactcca

SEQ ID NO: 1821654 - DNA, 15 bp, Homo sapiens
ggcattggactccag

SEQ ID NO: 1821655 - DNA, 15 bp, Homo sapiens
gcattggactccagc

SEQ ID NO: 1821656 - DNA, 15 bp, Homo sapiens
cattggactccagcc

SEQ ID NO: 1821657 - DNA, 15 bp, Homo sapiens
attggactccagcct

SEQ ID NO: 1821658 - DNA, 15 bp, Homo sapiens
ttggactccagcctt

SEQ ID NO: 1821659 - DNA, 15 bp, Homo sapiens
tggactccagccttg

SEQ ID NO: 1821660 - DNA, 15 bp, Homo sapiens
ggactccagccttgg

SEQ ID NO: 1821661 - DNA, 15 bp, Homo sapiens
gactccagccttggg

SEQ ID NO: 1821662 - DNA, 15 bp, Homo sapiens
actccagccttgggg

SEQ ID NO: 1821663 - DNA, 15 bp, Homo sapiens
ctccagccttggggg

SEQ ID NO: 1821664 - DNA, 15 bp, Homo sapiens
tccagccttggggga

SEQ ID NO: 1821665 - DNA, 15 bp, Homo sapiens
ccagccttgggggac

SEQ ID NO: 1821666 - DNA, 15 bp, Homo sapiens
cagccttgggggacg

SEQ ID NO: 1821667 - DNA, 15 bp, Homo sapiens
agccttgggggacgg

SEQ ID NO: 1821668 - DNA, 15 bp, Homo sapiens
gccttgggggacgga

SEQ ID NO: 1821669 - DNA, 15 bp, Homo sapiens
ccttgggggacggat

SEQ ID NO: 1821670 - DNA, 15 bp, Homo sapiens
cttgggggacggatg

SEQ ID NO: 1821671 - DNA, 15 bp, Homo sapiens
ttgggggacggatgt

SEQ ID NO: 1821672 - DNA, 15 bp, Homo sapiens
tgggggacggatgta

SEQ ID NO: 1821673 - DNA, 15 bp, Homo sapiens
gggggacggatgtag

SEQ ID NO: 1821674 - DNA, 15 bp, Homo sapiens
ggggacggatgtagt

SEQ ID NO: 1821675 - DNA, 15 bp, Homo sapiens
gggacggatgtagtg

SEQ ID NO: 1821676 - DNA, 15 bp, Homo sapiens
ggacggatgtagtga

SEQ ID NO: 1821677 - DNA, 15 bp, Homo sapiens
gacggatgtagtgat

SEQ ID NO: 1821678 - DNA, 15 bp, Homo sapiens
acggatgtagtgatg

SEQ ID NO: 1821679 - DNA, 15 bp, Homo sapiens
cggatgtagtgatgg

SEQ ID NO: 1821680 - DNA, 15 bp, Homo sapiens
ggatgtagtgatggt

SEQ ID NO: 1821681 - DNA, 15 bp, Homo sapiens
gatgtagtgatggtg

SEQ ID NO: 1821682 - DNA, 15 bp, Homo sapiens
atgtagtgatggtgg

SEQ ID NO: 1821683 - DNA, 15 bp, Homo sapiens
tgtagtgatggtggg

SEQ ID NO: 1821684 - DNA, 15 bp, Homo sapiens
gtagtgatggtggga

SEQ ID NO: 1821685 - DNA, 15 bp, Homo sapiens
tagtgatggtgggaa

SEQ ID NO: 1821686 - DNA, 15 bp, Homo sapiens
agtgatggtgggaag

SEQ ID NO: 1821687 - DNA, 15 bp, Homo sapiens
gtgatggtgggaagc

SEQ ID NO: 1821688 - DNA, 15 bp, Homo sapiens
tgatggtgggaagca

SEQ ID NO: 1821689 - DNA, 15 bp, Homo sapiens
gatggtgggaagcag

SEQ ID NO: 1821690 - DNA, 15 bp, Homo sapiens
atggtgggaagcagg

SEQ ID NO: 1821691 - DNA, 15 bp, Homo sapiens
ggtgggaagcaggct

SEQ ID NO: 1821692 - DNA, 15 bp, Homo sapiens
gtgggaagcaggctt

SEQ ID NO: 1821693 - DNA, 15 bp, Homo sapiens
tgggaagcaggcttg

SEQ ID NO: 1821694 - DNA, 15 bp, Homo sapiens
gggaagcaggcttgg

SEQ ID NO: 1821695 - DNA, 15 bp, Homo sapiens
ggaagcaggcttggt

SEQ ID NO: 1821696 - DNA, 15 bp, Homo sapiens
gaagcaggcttggtg

SEQ ID NO: 1821697 - DNA, 15 bp, Homo sapiens
aagcaggcttggtgc

SEQ ID NO: 1821698 - DNA, 15 bp, Homo sapiens
agcaggcttggtgcc

SEQ ID NO: 1821699 - DNA, 15 bp, Homo sapiens
gcaggcttggtgcca

SEQ ID NO: 1821700 - DNA, 15 bp, Homo sapiens
caggcttggtgccag

SEQ ID NO: 1821701 - DNA, 15 bp, Homo sapiens
aggcttggtgccagg

SEQ ID NO: 1821702 - DNA, 15 bp, Homo sapiens
ggcttggtgccagga

SEQ ID NO: 1821703 - DNA, 15 bp, Homo sapiens
gcttggtgccaggag

SEQ ID NO: 1821704 - DNA, 15 bp, Homo sapiens
cttggtgccaggagg

SEQ ID NO: 1821705 - DNA, 15 bp, Homo sapiens
ttggtgccaggaggg

SEQ ID NO: 1821706 - DNA, 15 bp, Homo sapiens
tggtgccaggagggg

SEQ ID NO: 1821707 - DNA, 15 bp, Homo sapiens
ggtgccaggaggggc

SEQ ID NO: 1821708 - DNA, 15 bp, Homo sapiens
gtgccaggaggggcg

SEQ ID NO: 1821709 - DNA, 15 bp, Homo sapiens
tgccaggaggggcgt

SEQ ID NO: 1821710 - DNA, 15 bp, Homo sapiens
gccaggaggggcgtc

SEQ ID NO: 1821711 - DNA, 15 bp, Homo sapiens
ccaggaggggcgtca

SEQ ID NO: 1821712 - DNA, 15 bp, Homo sapiens
caggaggggcgtcag

SEQ ID NO: 1821713 - DNA, 15 bp, Homo sapiens
aggaggggcgtcaga

SEQ ID NO: 1821714 - DNA, 15 bp, Homo sapiens
ggaggggcgtcagag

SEQ ID NO: 1821715 - DNA, 15 bp, Homo sapiens
gaggggcgtcagagg

SEQ ID NO: 1821716 - DNA, 15 bp, Homo sapiens
aggggcgtcagaggg

SEQ ID NO: 1821717 - DNA, 15 bp, Homo sapiens
ggggcgtcagagggt

SEQ ID NO: 1821718 - DNA, 15 bp, Homo sapiens
gggcgtcagagggtg

SEQ ID NO: 1821719 - DNA, 15 bp, Homo sapiens
ggcgtcagagggtga

SEQ ID NO: 1821720 - DNA, 15 bp, Homo sapiens
gcgtcagagggtgaa

SEQ ID NO: 1821721 - DNA, 15 bp, Homo sapiens
cgtcagagggtgaat

SEQ ID NO: 1821722 - DNA, 15 bp, Homo sapiens
gtcagagggtgaata

SEQ ID NO: 1821723 - DNA, 15 bp, Homo sapiens
tcagagggtgaataa

SEQ ID NO: 1821724 - DNA, 15 bp, Homo sapiens
cagagggtgaataaa

SEQ ID NO: 1821725 - DNA, 15 bp, Homo sapiens
agagggtgaataaaa

SEQ ID NO: 1821726 - DNA, 15 bp, Homo sapiens
gagggtgaataaaag

SEQ ID NO: 1821727 - DNA, 15 bp, Homo sapiens
agggtgaataaaagc

SEQ ID NO: 1821728 - DNA, 15 bp, Homo sapiens
gggtgaataaaagca

SEQ ID NO: 1821729 - DNA, 15 bp, Homo sapiens
ggtgaataaaagcag

SEQ ID NO: 1821730 - DNA, 15 bp, Homo sapiens
gtgaataaaagcaga

SEQ ID NO: 1821731 - DNA, 15 bp, Homo sapiens
tgaataaaagcagat

SEQ ID NO: 1821732 - DNA, 15 bp, Homo sapiens
gaataaaagcagata

SEQ ID NO: 1821733 - DNA, 15 bp, Homo sapiens
aataaaagcagatag

SEQ ID NO: 1821734 - DNA, 15 bp, Homo sapiens
ataaaagcagataga

SEQ ID NO: 1821735 - DNA, 15 bp, Homo sapiens
taaaagcagatagag

SEQ ID NO: 1821736 - DNA, 15 bp, Homo sapiens
aaaagcagatagagt

SEQ ID NO: 1821737 - DNA, 15 bp, Homo sapiens
aaagcagatagagtg

SEQ ID NO: 1821738 - DNA, 15 bp, Homo sapiens
aagcagatagagtgt

SEQ ID NO: 1821739 - DNA, 15 bp, Homo sapiens
agcagatagagtgtt

SEQ ID NO: 1821740 - DNA, 15 bp, Homo sapiens
gcagatagagtgttt

SEQ ID NO: 1821741 - DNA, 15 bp, Homo sapiens
cagatagagtgtttg

SEQ ID NO: 1821742 - DNA, 15 bp, Homo sapiens
agatagagtgtttgg

SEQ ID NO: 1821743 - DNA, 15 bp, Homo sapiens
gatagagtgtttggg

SEQ ID NO: 1821744 - DNA, 15 bp, Homo sapiens
atagagtgtttgggg

SEQ ID NO: 1821745 - DNA, 15 bp, Homo sapiens
tagagtgtttggggg

SEQ ID NO: 1821746 - DNA, 15 bp, Homo sapiens
agagtgtttggggga

SEQ ID NO: 1821747 - DNA, 15 bp, Homo sapiens
gagtgtttgggggag

SEQ ID NO: 1821748 - DNA, 15 bp, Homo sapiens
agtgtttgggggagg

SEQ ID NO: 1821749 - DNA, 15 bp, Homo sapiens
gtgtttgggggaggt

SEQ ID NO: 1821750 - DNA, 15 bp, Homo sapiens
tgtttgggggaggta

SEQ ID NO: 1821751 - DNA, 15 bp, Homo sapiens
gtttgggggaggtag

SEQ ID NO: 1821752 - DNA, 15 bp, Homo sapiens
tttgggggaggtagc

SEQ ID NO: 1821753 - DNA, 15 bp, Homo sapiens
ttgggggaggtagcc

SEQ ID NO: 1821754 - DNA, 15 bp, Homo sapiens
tgggggaggtagcca

SEQ ID NO: 1821755 - DNA, 15 bp, Homo sapiens
gggggaggtagccag

SEQ ID NO: 1821756 - DNA, 15 bp, Homo sapiens
ggggaggtagccagc

SEQ ID NO: 1821757 - DNA, 15 bp, Homo sapiens
gggaggtagccagcc

SEQ ID NO: 1821758 - DNA, 15 bp, Homo sapiens
ggaggtagccagcca

SEQ ID NO: 1821759 - DNA, 15 bp, Homo sapiens
gaggtagccagccaa

SEQ ID NO: 1821760 - DNA, 15 bp, Homo sapiens
aggtagccagccaaa

SEQ ID NO: 1821761 - DNA, 15 bp, Homo sapiens
ggtagccagccaaag

SEQ ID NO: 1821762 - DNA, 15 bp, Homo sapiens
gtagccagccaaagg

SEQ ID NO: 1821763 - DNA, 15 bp, Homo sapiens
tagccagccaaaggg

SEQ ID NO: 1821764 - DNA, 15 bp, Homo sapiens
agccagccaaagggg

SEQ ID NO: 1821765 - DNA, 15 bp, Homo sapiens
gccagccaaaggggg

SEQ ID NO: 1821766 - DNA, 15 bp, Homo sapiens
ccagccaaagggggt

SEQ ID NO: 1821767 - DNA, 15 bp, Homo sapiens
cagccaaagggggtg

SEQ ID NO: 1821768 - DNA, 15 bp, Homo sapiens
agccaaagggggtga

SEQ ID NO: 1821769 - DNA, 15 bp, Homo sapiens
gccaaagggggtgag

SEQ ID NO: 1821770 - DNA, 15 bp, Homo sapiens
ccaaagggggtgagg

SEQ ID NO: 1821771 - DNA, 15 bp, Homo sapiens
caaagggggtgaggc

SEQ ID NO: 1821772 - DNA, 15 bp, Homo sapiens
aaagggggtgaggcc

SEQ ID NO: 1821773 - DNA, 15 bp, Homo sapiens
aagggggtgaggccc

SEQ ID NO: 1821774 - DNA, 15 bp, Homo sapiens
agggggtgaggcccg

SEQ ID NO: 1821775 - DNA, 15 bp, Homo sapiens
gggggtgaggcccgg

SEQ ID NO: 1821776 - DNA, 15 bp, Homo sapiens
ggggtgaggcccggt

SEQ ID NO: 1821777 - DNA, 15 bp, Homo sapiens
gggtgaggcccggtg

SEQ ID NO: 1821778 - DNA, 15 bp, Homo sapiens
ggtgaggcccggtgg

SEQ ID NO: 1821779 - DNA, 15 bp, Homo sapiens
gtgaggcccggtgga

SEQ ID NO: 1821780 - DNA, 15 bp, Homo sapiens
tgaggcccggtggaa

SEQ ID NO: 1821781 - DNA, 15 bp, Homo sapiens
gaggcccggtggaag

SEQ ID NO: 1821782 - DNA, 15 bp, Homo sapiens
aggcccggtggaagg

SEQ ID NO: 1821783 - DNA, 15 bp, Homo sapiens
ggcccggtggaaggg

SEQ ID NO: 1821784 - DNA, 15 bp, Homo sapiens
gcccggtggaaggga

SEQ ID NO: 1821785 - DNA, 15 bp, Homo sapiens
cccggtggaagggaa

SEQ ID NO: 1821786 - DNA, 15 bp, Homo sapiens
ccggtggaagggaag

SEQ ID NO: 1821787 - DNA, 15 bp, Homo sapiens
cggtggaagggaaga

SEQ ID NO: 1821788 - DNA, 15 bp, Homo sapiens
ggtggaagggaagaa

SEQ ID NO: 1821789 - DNA, 15 bp, Homo sapiens
gtggaagggaagaag

SEQ ID NO: 1821790 - DNA, 15 bp, Homo sapiens
tggaagggaagaagg

SEQ ID NO: 1821791 - DNA, 15 bp, Homo sapiens
ggaagggaagaaggg

SEQ ID NO: 1821792 - DNA, 15 bp, Homo sapiens
gaagggaagaaggga

SEQ ID NO: 1821793 - DNA, 15 bp, Homo sapiens
aagggaagaagggac

SEQ ID NO: 1821794 - DNA, 15 bp, Homo sapiens
agggaagaagggaca

SEQ ID NO: 1821795 - DNA, 15 bp, Homo sapiens
gggaagaagggacat

SEQ ID NO: 1821796 - DNA, 15 bp, Homo sapiens
ggaagaagggacata

SEQ ID NO: 1821797 - DNA, 15 bp, Homo sapiens
gaagaagggacatac

SEQ ID NO: 1821798 - DNA, 15 bp, Homo sapiens
aagaagggacataca

SEQ ID NO: 1821799 - DNA, 15 bp, Homo sapiens
agaagggacatacac

SEQ ID NO: 1821800 - DNA, 15 bp, Homo sapiens
gaagggacatacacg

SEQ ID NO: 1821801 - DNA, 15 bp, Homo sapiens
aagggacatacacgc

SEQ ID NO: 1821802 - DNA, 15 bp, Homo sapiens
agggacatacacgca

SEQ ID NO: 1821803 - DNA, 15 bp, Homo sapiens
gggacatacacgcag

SEQ ID NO: 1821804 - DNA, 15 bp, Homo sapiens
ggacatacacgcaga

SEQ ID NO: 1821805 - DNA, 15 bp, Homo sapiens
gacatacacgcagag

SEQ ID NO: 1821806 - DNA, 15 bp, Homo sapiens
acatacacgcagagc

SEQ ID NO: 1821807 - DNA, 15 bp, Homo sapiens
catacacgcagagct

SEQ ID NO: 1821808 - DNA, 15 bp, Homo sapiens
atacacgcagagctt

SEQ ID NO: 1821809 - DNA, 15 bp, Homo sapiens
tacacgcagagcttt

SEQ ID NO: 1821810 - DNA, 15 bp, Homo sapiens
acacgcagagctttg

SEQ ID NO: 1821811 - DNA, 15 bp, Homo sapiens
cacgcagagctttgc

SEQ ID NO: 1821812 - DNA, 15 bp, Homo sapiens
acgcagagctttgca

SEQ ID NO: 1821813 - DNA, 15 bp, Homo sapiens
cgcagagctttgcag

SEQ ID NO: 1821814 - DNA, 15 bp, Homo sapiens
gcagagctttgcagc

SEQ ID NO: 1821815 - DNA, 15 bp, Homo sapiens
cagagctttgcagct

SEQ ID NO: 1821816 - DNA, 15 bp, Homo sapiens
agagctttgcagctg

SEQ ID NO: 1821817 - DNA, 15 bp, Homo sapiens
gagctttgcagctga

SEQ ID NO: 1821818 - DNA, 15 bp, Homo sapiens
agctttgcagctgag

SEQ ID NO: 1821819 - DNA, 15 bp, Homo sapiens
gctttgcagctgagg

SEQ ID NO: 1821820 - DNA, 15 bp, Homo sapiens
ctttgcagctgaggg

SEQ ID NO: 1821821 - DNA, 15 bp, Homo sapiens
tttgcagctgagggt

SEQ ID NO: 1821822 - DNA, 15 bp, Homo sapiens
ttgcagctgagggtt

SEQ ID NO: 1821823 - DNA, 15 bp, Homo sapiens
tgcagctgagggttt

SEQ ID NO: 1821824 - DNA, 15 bp, Homo sapiens
gcagctgagggtttt

SEQ ID NO: 1821825 - DNA, 15 bp, Homo sapiens
cagctgagggtttta

SEQ ID NO: 1821826 - DNA, 15 bp, Homo sapiens
agctgagggttttaa

SEQ ID NO: 1821827 - DNA, 15 bp, Homo sapiens
gctgagggttttaat

SEQ ID NO: 1821828 - DNA, 15 bp, Homo sapiens
ctgagggttttaatt

SEQ ID NO: 1821829 - DNA, 15 bp, Homo sapiens
tgagggttttaattt

SEQ ID NO: 1821830 - DNA, 15 bp, Homo sapiens
gagggttttaatttt

SEQ ID NO: 1821831 - DNA, 15 bp, Homo sapiens
agggttttaattttt

SEQ ID NO: 1821832 - DNA, 15 bp, Homo sapiens
gggttttaatttttt

SEQ ID NO: 1821833 - DNA, 15 bp, Homo sapiens
ggttttaattttttg

SEQ ID NO: 1821834 - DNA, 15 bp, Homo sapiens
gttttaattttttga

SEQ ID NO: 1821835 - DNA, 15 bp, Homo sapiens
tttaattttttgaga

SEQ ID NO: 1821836 - DNA, 15 bp, Homo sapiens
ttaattttttgagat

SEQ ID NO: 1821837 - DNA, 15 bp, Homo sapiens
taattttttgagatg

SEQ ID NO: 1821838 - DNA, 15 bp, Homo sapiens
aattttttgagatgg

SEQ ID NO: 1821839 - DNA, 15 bp, Homo sapiens
attttttgagatggg

SEQ ID NO: 1821840 - DNA, 15 bp, Homo sapiens
tgagatggggtctct

SEQ ID NO: 1821841 - DNA, 15 bp, Homo sapiens
gagatggggtctctg

SEQ ID NO: 1821842 - DNA, 15 bp, Homo sapiens
agatggggtctctgt

SEQ ID NO: 1821843 - DNA, 15 bp, Homo sapiens
gatggggtctctgtc

SEQ ID NO: 1821844 - DNA, 15 bp, Homo sapiens
atggggtctctgtcc

SEQ ID NO: 1821845 - DNA, 15 bp, Homo sapiens
tggggtctctgtccc

SEQ ID NO: 1821846 - DNA, 15 bp, Homo sapiens
ggggtctctgtccca

SEQ ID NO: 1821847 - DNA, 15 bp, Homo sapiens
gggtctctgtcccac

SEQ ID NO: 1821848 - DNA, 15 bp, Homo sapiens
ggtctctgtcccacc

SEQ ID NO: 1821849 - DNA, 15 bp, Homo sapiens
gtctctgtcccacca

SEQ ID NO: 1821850 - DNA, 15 bp, Homo sapiens
tctctgtcccaccag

SEQ ID NO: 1821851 - DNA, 15 bp, Homo sapiens
ctctgtcccaccagg

SEQ ID NO: 1821852 - DNA, 15 bp, Homo sapiens
tctgtcccaccaggc

SEQ ID NO: 1821853 - DNA, 15 bp, Homo sapiens
ctgtcccaccaggct

SEQ ID NO: 1821854 - DNA, 15 bp, Homo sapiens
tgtcccaccaggctg

SEQ ID NO: 1821855 - DNA, 15 bp, Homo sapiens
gtcccaccaggctgg

SEQ ID NO: 1821856 - DNA, 15 bp, Homo sapiens
tcccaccaggctgga

SEQ ID NO: 1821857 - DNA, 15 bp, Homo sapiens
cccaccaggctggag

SEQ ID NO: 1821858 - DNA, 15 bp, Homo sapiens
ccaccaggctggagt

SEQ ID NO: 1821859 - DNA, 15 bp, Homo sapiens
gtggcacaatcacag

SEQ ID NO: 1821860 - DNA, 15 bp, Homo sapiens
tggcacaatcacagc

SEQ ID NO: 1821861 - DNA, 15 bp, Homo sapiens
ggcacaatcacagct

SEQ ID NO: 1821862 - DNA, 15 bp, Homo sapiens
gcacaatcacagctc

SEQ ID NO: 1821863 - DNA, 15 bp, Homo sapiens
cacaatcacagctca

SEQ ID NO: 1821864 - DNA, 15 bp, Homo sapiens
acaatcacagctcac

SEQ ID NO: 1821865 - DNA, 15 bp, Homo sapiens
caagcaatcttccta

SEQ ID NO: 1821866 - DNA, 15 bp, Homo sapiens
aagcaatcttcctac

SEQ ID NO: 1821867 - DNA, 15 bp, Homo sapiens
agcaatcttcctacc

SEQ ID NO: 1821868 - DNA, 15 bp, Homo sapiens
gcaatcttcctacct

SEQ ID NO: 1821869 - DNA, 15 bp, Homo sapiens
caatcttcctacctc

SEQ ID NO: 1821870 - DNA, 15 bp, Homo sapiens
aatcttcctacctca

SEQ ID NO: 1821871 - DNA, 15 bp, Homo sapiens
atcttcctacctcag

SEQ ID NO: 1821872 - DNA, 15 bp, Homo sapiens
tcttcctacctcagc

SEQ ID NO: 1821873 - DNA, 15 bp, Homo sapiens
cttcctacctcagcc

SEQ ID NO: 1821874 - DNA, 15 bp, Homo sapiens
ttcctacctcagcct

SEQ ID NO: 1821875 - DNA, 15 bp, Homo sapiens
tcctacctcagcctc

SEQ ID NO: 1821876 - DNA, 15 bp, Homo sapiens
cctacctcagcctct

SEQ ID NO: 1821877 - DNA, 15 bp, Homo sapiens
ctacctcagcctctt

SEQ ID NO: 1821878 - DNA, 15 bp, Homo sapiens
tacctcagcctcttg

SEQ ID NO: 1821879 - DNA, 15 bp, Homo sapiens
cctcagcctcttgag

SEQ ID NO: 1821880 - DNA, 15 bp, Homo sapiens
ctcagcctcttgagt

SEQ ID NO: 1821881 - DNA, 15 bp, Homo sapiens
tcagcctcttgagta

SEQ ID NO: 1821882 - DNA, 15 bp, Homo sapiens
cagcctcttgagtag

SEQ ID NO: 1821883 - DNA, 15 bp, Homo sapiens
cctcttgagtagctg

SEQ ID NO: 1821884 - DNA, 15 bp, Homo sapiens
ctcttgagtagctgg

SEQ ID NO: 1821885 - DNA, 15 bp, Homo sapiens
tcttgagtagctggg

SEQ ID NO: 1821886 - DNA, 15 bp, Homo sapiens
cttgagtagctggga

SEQ ID NO: 1821887 - DNA, 15 bp, Homo sapiens
ttgagtagctgggac

SEQ ID NO: 1821888 - DNA, 15 bp, Homo sapiens
gactacaggcatgcg

SEQ ID NO: 1821889 - DNA, 15 bp, Homo sapiens
actacaggcatgcgc

SEQ ID NO: 1821890 - DNA, 15 bp, Homo sapiens
ctacaggcatgcgcc

SEQ ID NO: 1821891 - DNA, 15 bp, Homo sapiens
gcatgcgccaccacg

SEQ ID NO: 1821892 - DNA, 15 bp, Homo sapiens
catgcgccaccacgc

SEQ ID NO: 1821893 - DNA, 15 bp, Homo sapiens
atgcgccaccacgct

SEQ ID NO: 1821894 - DNA, 15 bp, Homo sapiens
tgcgccaccacgctc

SEQ ID NO: 1821895 - DNA, 15 bp, Homo sapiens
gcgccaccacgctcg

SEQ ID NO: 1821896 - DNA, 15 bp, Homo sapiens
cgccaccacgctcgg

SEQ ID NO: 1821897 - DNA, 15 bp, Homo sapiens
gccaccacgctcggc

SEQ ID NO: 1821898 - DNA, 15 bp, Homo sapiens
ccaccacgctcggct

SEQ ID NO: 1821899 - DNA, 15 bp, Homo sapiens
caccacgctcggcta

SEQ ID NO: 1821900 - DNA, 15 bp, Homo sapiens
accacgctcggctaa

SEQ ID NO: 1821901 - DNA, 15 bp, Homo sapiens
ccacgctcggctaat

SEQ ID NO: 1821902 - DNA, 15 bp, Homo sapiens
cacgctcggctaatt

SEQ ID NO: 1821903 - DNA, 15 bp, Homo sapiens
acgctcggctaattt

SEQ ID NO: 1821904 - DNA, 15 bp, Homo sapiens
cgctcggctaatttt

SEQ ID NO: 1821905 - DNA, 15 bp, Homo sapiens
gctcggctaattttt

SEQ ID NO: 1821906 - DNA, 15 bp, Homo sapiens
ctcggctaatttttg

SEQ ID NO: 1821907 - DNA, 15 bp, Homo sapiens
tcggctaatttttga

SEQ ID NO: 1821908 - DNA, 15 bp, Homo sapiens
cggctaatttttgaa

SEQ ID NO: 1821909 - DNA, 15 bp, Homo sapiens
ggctaatttttgaac

SEQ ID NO: 1821910 - DNA, 15 bp, Homo sapiens
gctaatttttgaact

SEQ ID NO: 1821911 - DNA, 15 bp, Homo sapiens
ctaatttttgaactt

SEQ ID NO: 1821912 - DNA, 15 bp, Homo sapiens
taatttttgaacttt

SEQ ID NO: 1821913 - DNA, 15 bp, Homo sapiens
aatttttgaactttt

SEQ ID NO: 1821914 - DNA, 15 bp, Homo sapiens
atttttgaacttttt

SEQ ID NO: 1821915 - DNA, 15 bp, Homo sapiens
tttttgaactttttt

SEQ ID NO: 1821916 - DNA, 15 bp, Homo sapiens
ttttgaacttttttg

SEQ ID NO: 1821917 - DNA, 15 bp, Homo sapiens
tttgaacttttttgt

SEQ ID NO: 1821918 - DNA, 15 bp, Homo sapiens
ttgaacttttttgta

SEQ ID NO: 1821919 - DNA, 15 bp, Homo sapiens
tgaacttttttgtag

SEQ ID NO: 1821920 - DNA, 15 bp, Homo sapiens
gaacttttttgtaga

SEQ ID NO: 1821921 - DNA, 15 bp, Homo sapiens
tttttgtagagatga

SEQ ID NO: 1821922 - DNA, 15 bp, Homo sapiens
tagagatgaggtctc

SEQ ID NO: 1821923 - DNA, 15 bp, Homo sapiens
agagatgaggtctcc

SEQ ID NO: 1821924 - DNA, 15 bp, Homo sapiens
gagatgaggtctccc

SEQ ID NO: 1821925 - DNA, 15 bp, Homo sapiens
agatgaggtctccct

SEQ ID NO: 1821926 - DNA, 15 bp, Homo sapiens
gatgaggtctcccta

SEQ ID NO: 1821927 - DNA, 15 bp, Homo sapiens
atgaggtctccctat

SEQ ID NO: 1821928 - DNA, 15 bp, Homo sapiens
tgaggtctccctata

SEQ ID NO: 1821929 - DNA, 15 bp, Homo sapiens
gaggtctccctatat

SEQ ID NO: 1821930 - DNA, 15 bp, Homo sapiens
aggtctccctatatt

SEQ ID NO: 1821931 - DNA, 15 bp, Homo sapiens
ggtctccctatattg

SEQ ID NO: 1821932 - DNA, 15 bp, Homo sapiens
gtctccctatattgc

SEQ ID NO: 1821933 - DNA, 15 bp, Homo sapiens
tctccctatattgcc

SEQ ID NO: 1821934 - DNA, 15 bp, Homo sapiens
ctccctatattgccc

SEQ ID NO: 1821935 - DNA, 15 bp, Homo sapiens
tccctatattgccca

SEQ ID NO: 1821936 - DNA, 15 bp, Homo sapiens
ccctatattgcccag

SEQ ID NO: 1821937 - DNA, 15 bp, Homo sapiens
cctatattgcccagg

SEQ ID NO: 1821938 - DNA, 15 bp, Homo sapiens
ggtctcgaactccca

SEQ ID NO: 1821939 - DNA, 15 bp, Homo sapiens
gtctcgaactcccag

SEQ ID NO: 1821940 - DNA, 15 bp, Homo sapiens
tctcgaactcccagg

SEQ ID NO: 1821941 - DNA, 15 bp, Homo sapiens
ctcgaactcccaggc

SEQ ID NO: 1821942 - DNA, 15 bp, Homo sapiens
tcgaactcccaggct

SEQ ID NO: 1821943 - DNA, 15 bp, Homo sapiens
cgaactcccaggctc

SEQ ID NO: 1821944 - DNA, 15 bp, Homo sapiens
gaactcccaggctca

SEQ ID NO: 1821945 - DNA, 15 bp, Homo sapiens
aactcccaggctcaa

SEQ ID NO: 1821946 - DNA, 15 bp, Homo sapiens
actcccaggctcaag

SEQ ID NO: 1821947 - DNA, 15 bp, Homo sapiens
ctcccaggctcaagt

SEQ ID NO: 1821948 - DNA, 15 bp, Homo sapiens
tcccaggctcaagtg

SEQ ID NO: 1821949 - DNA, 15 bp, Homo sapiens
cccaggctcaagtga

SEQ ID NO: 1821950 - DNA, 15 bp, Homo sapiens
ccaggctcaagtgat

SEQ ID NO: 1821951 - DNA, 15 bp, Homo sapiens
aggctcaagtgatcc

SEQ ID NO: 1821952 - DNA, 15 bp, Homo sapiens
agtgatcctccctct

SEQ ID NO: 1821953 - DNA, 15 bp, Homo sapiens
gtgatcctccctctt

SEQ ID NO: 1821954 - DNA, 15 bp, Homo sapiens
tgatcctccctcttc

SEQ ID NO: 1821955 - DNA, 15 bp, Homo sapiens
gatcctccctcttca

SEQ ID NO: 1821956 - DNA, 15 bp, Homo sapiens
atcctccctcttcag

SEQ ID NO: 1821957 - DNA, 15 bp, Homo sapiens
tcctccctcttcagc

SEQ ID NO: 1821958 - DNA, 15 bp, Homo sapiens
cctccctcttcagct

SEQ ID NO: 1821959 - DNA, 15 bp, Homo sapiens
ctccctcttcagctt

SEQ ID NO: 1821960 - DNA, 15 bp, Homo sapiens
tccctcttcagcttc

SEQ ID NO: 1821961 - DNA, 15 bp, Homo sapiens
ccctcttcagcttcc

SEQ ID NO: 1821962 - DNA, 15 bp, Homo sapiens
cctcttcagcttccc

SEQ ID NO: 1821963 - DNA, 15 bp, Homo sapiens
ctcttcagcttccca

SEQ ID NO: 1821964 - DNA, 15 bp, Homo sapiens
tcttcagcttcccaa

SEQ ID NO: 1821965 - DNA, 15 bp, Homo sapiens
cttcagcttcccaaa

SEQ ID NO: 1821966 - DNA, 15 bp, Homo sapiens
ttcagcttcccaaag

SEQ ID NO: 1821967 - DNA, 15 bp, Homo sapiens
atgcctggctaatgc

SEQ ID NO: 1821968 - DNA, 15 bp, Homo sapiens
tgcctggctaatgca

SEQ ID NO: 1821969 - DNA, 15 bp, Homo sapiens
gcctggctaatgcag

SEQ ID NO: 1821970 - DNA, 15 bp, Homo sapiens
cctggctaatgcagg

SEQ ID NO: 1821971 - DNA, 15 bp, Homo sapiens
ctggctaatgcaggt

SEQ ID NO: 1821972 - DNA, 15 bp, Homo sapiens
tggctaatgcaggtg

SEQ ID NO: 1821973 - DNA, 15 bp, Homo sapiens
ggctaatgcaggtga

SEQ ID NO: 1821974 - DNA, 15 bp, Homo sapiens
gctaatgcaggtgag

SEQ ID NO: 1821975 - DNA, 15 bp, Homo sapiens
ctaatgcaggtgagg

SEQ ID NO: 1821976 - DNA, 15 bp, Homo sapiens
taatgcaggtgaggt

SEQ ID NO: 1821977 - DNA, 15 bp, Homo sapiens
aatgcaggtgaggtt

SEQ ID NO: 1821978 - DNA, 15 bp, Homo sapiens
atgcaggtgaggttt

SEQ ID NO: 1821979 - DNA, 15 bp, Homo sapiens
tgcaggtgaggtttt

SEQ ID NO: 1821980 - DNA, 15 bp, Homo sapiens
gcaggtgaggttttt

SEQ ID NO: 1821981 - DNA, 15 bp, Homo sapiens
caggtgaggtttttg

SEQ ID NO: 1821982 - DNA, 15 bp, Homo sapiens
aggtgaggtttttgc

SEQ ID NO: 1821983 - DNA, 15 bp, Homo sapiens
ggtgaggtttttgca

SEQ ID NO: 1821984 - DNA, 15 bp, Homo sapiens
gtgaggtttttgcag

SEQ ID NO: 1821985 - DNA, 15 bp, Homo sapiens
tgaggtttttgcagt

SEQ ID NO: 1821986 - DNA, 15 bp, Homo sapiens
gaggtttttgcagtg

SEQ ID NO: 1821987 - DNA, 15 bp, Homo sapiens
aggtttttgcagtgt

SEQ ID NO: 1821988 - DNA, 15 bp, Homo sapiens
ggtttttgcagtgtc

SEQ ID NO: 1821989 - DNA, 15 bp, Homo sapiens
gtttttgcagtgtca

SEQ ID NO: 1821990 - DNA, 15 bp, Homo sapiens
tttttgcagtgtcat

SEQ ID NO: 1821991 - DNA, 15 bp, Homo sapiens
ttttgcagtgtcatc

SEQ ID NO: 1821992 - DNA, 15 bp, Homo sapiens
tttgcagtgtcatcc

SEQ ID NO: 1821993 - DNA, 15 bp, Homo sapiens
ttgcagtgtcatcca

SEQ ID NO: 1821994 - DNA, 15 bp, Homo sapiens
tgcagtgtcatccag

SEQ ID NO: 1821995 - DNA, 15 bp, Homo sapiens
gcagtgtcatccagc

SEQ ID NO: 1821996 - DNA, 15 bp, Homo sapiens
cagtgtcatccagct

SEQ ID NO: 1821997 - DNA, 15 bp, Homo sapiens
agtgtcatccagcta

SEQ ID NO: 1821998 - DNA, 15 bp, Homo sapiens
gtgtcatccagctaa

SEQ ID NO: 1821999 - DNA, 15 bp, Homo sapiens
tgtcatccagctaag

SEQ ID NO: 1822000 - DNA, 15 bp, Homo sapiens
gtcatccagctaagg

SEQ ID NO: 1822001 - DNA, 15 bp, Homo sapiens
tcatccagctaaggc

SEQ ID NO: 1822002 - DNA, 15 bp, Homo sapiens
catccagctaaggcg

SEQ ID NO: 1822003 - DNA, 15 bp, Homo sapiens
atccagctaaggcga

SEQ ID NO: 1822004 - DNA, 15 bp, Homo sapiens
tccagctaaggcgac

SEQ ID NO: 1822005 - DNA, 15 bp, Homo sapiens
ccagctaaggcgacc

SEQ ID NO: 1822006 - DNA, 15 bp, Homo sapiens
cagctaaggcgaccc

SEQ ID NO: 1822007 - DNA, 15 bp, Homo sapiens
agctaaggcgacccg

SEQ ID NO: 1822008 - DNA, 15 bp, Homo sapiens
gctaaggcgacccgt

SEQ ID NO: 1822009 - DNA, 15 bp, Homo sapiens
ctaaggcgacccgtt

SEQ ID NO: 1822010 - DNA, 15 bp, Homo sapiens
taaggcgacccgttc

SEQ ID NO: 1822011 - DNA, 15 bp, Homo sapiens
aaggcgacccgttcc

SEQ ID NO: 1822012 - DNA, 15 bp, Homo sapiens
aggcgacccgttccc

SEQ ID NO: 1822013 - DNA, 15 bp, Homo sapiens
ggcgacccgttcccc

SEQ ID NO: 1822014 - DNA, 15 bp, Homo sapiens
gcgacccgttcccct

SEQ ID NO: 1822015 - DNA, 15 bp, Homo sapiens
cgacccgttcccctc

SEQ ID NO: 1822016 - DNA, 15 bp, Homo sapiens
gacccgttcccctcc

SEQ ID NO: 1822017 - DNA, 15 bp, Homo sapiens
acccgttcccctccc

SEQ ID NO: 1822018 - DNA, 15 bp, Homo sapiens
cccgttcccctccca

SEQ ID NO: 1822019 - DNA, 15 bp, Homo sapiens
ccgttcccctcccaa

SEQ ID NO: 1822020 - DNA, 15 bp, Homo sapiens
cgttcccctcccaaa

SEQ ID NO: 1822021 - DNA, 15 bp, Homo sapiens
gttcccctcccaaaa

SEQ ID NO: 1822022 - DNA, 15 bp, Homo sapiens
ttcccctcccaaaaa

SEQ ID NO: 1822023 - DNA, 15 bp, Homo sapiens
tcccctcccaaaaaa

SEQ ID NO: 1822024 - DNA, 15 bp, Homo sapiens
cccctcccaaaaaag

SEQ ID NO: 1822025 - DNA, 15 bp, Homo sapiens
ccctcccaaaaaagg

SEQ ID NO: 1822026 - DNA, 15 bp, Homo sapiens
cctcccaaaaaaggg

SEQ ID NO: 1822027 - DNA, 15 bp, Homo sapiens
ctcccaaaaaaggga

SEQ ID NO: 1822028 - DNA, 15 bp, Homo sapiens
tcccaaaaaagggag

SEQ ID NO: 1822029 - DNA, 15 bp, Homo sapiens
cccaaaaaagggaga

SEQ ID NO: 1822030 - DNA, 15 bp, Homo sapiens
ccaaaaaagggagac

SEQ ID NO: 1822031 - DNA, 15 bp, Homo sapiens
caaaaaagggagact

SEQ ID NO: 1822032 - DNA, 15 bp, Homo sapiens
aaaaaagggagactg

SEQ ID NO: 1822033 - DNA, 15 bp, Homo sapiens
aaaaagggagactga

SEQ ID NO: 1822034 - DNA, 15 bp, Homo sapiens
aaaagggagactgag

SEQ ID NO: 1822035 - DNA, 15 bp, Homo sapiens
aaagggagactgaga

SEQ ID NO: 1822036 - DNA, 15 bp, Homo sapiens
aagggagactgagaa

SEQ ID NO: 1822037 - DNA, 15 bp, Homo sapiens
agggagactgagaac

SEQ ID NO: 1822038 - DNA, 15 bp, Homo sapiens
gggagactgagaacc

SEQ ID NO: 1822039 - DNA, 15 bp, Homo sapiens
ggagactgagaacca

SEQ ID NO: 1822040 - DNA, 15 bp, Homo sapiens
gagactgagaaccat

SEQ ID NO: 1822041 - DNA, 15 bp, Homo sapiens
agactgagaaccatg

SEQ ID NO: 1822042 - DNA, 15 bp, Homo sapiens
gactgagaaccatga

SEQ ID NO: 1822043 - DNA, 15 bp, Homo sapiens
actgagaaccatgaa

SEQ ID NO: 1822044 - DNA, 15 bp, Homo sapiens
ctgagaaccatgaag

SEQ ID NO: 1822045 - DNA, 15 bp, Homo sapiens
tgagaaccatgaagt

SEQ ID NO: 1822046 - DNA, 15 bp, Homo sapiens
gagaaccatgaagtt

SEQ ID NO: 1822047 - DNA, 15 bp, Homo sapiens
agaaccatgaagtta

SEQ ID NO: 1822048 - DNA, 15 bp, Homo sapiens
gaaccatgaagttaa

SEQ ID NO: 1822049 - DNA, 15 bp, Homo sapiens
aaccatgaagttaag

SEQ ID NO: 1822050 - DNA, 15 bp, Homo sapiens
accatgaagttaaga

SEQ ID NO: 1822051 - DNA, 15 bp, Homo sapiens
ccatgaagttaagag

SEQ ID NO: 1822052 - DNA, 15 bp, Homo sapiens
catgaagttaagagc

SEQ ID NO: 1822053 - DNA, 15 bp, Homo sapiens
atgaagttaagagcc

SEQ ID NO: 1822054 - DNA, 15 bp, Homo sapiens
tgaagttaagagccc

SEQ ID NO: 1822055 - DNA, 15 bp, Homo sapiens
gaagttaagagccca

SEQ ID NO: 1822056 - DNA, 15 bp, Homo sapiens
aagttaagagcccag

SEQ ID NO: 1822057 - DNA, 15 bp, Homo sapiens
agttaagagcccaga

SEQ ID NO: 1822058 - DNA, 15 bp, Homo sapiens
gttaagagcccagag

SEQ ID NO: 1822059 - DNA, 15 bp, Homo sapiens
ttaagagcccagaga

SEQ ID NO: 1822060 - DNA, 15 bp, Homo sapiens
taagagcccagagaa

SEQ ID NO: 1822061 - DNA, 15 bp, Homo sapiens
aagagcccagagaat

SEQ ID NO: 1822062 - DNA, 15 bp, Homo sapiens
agagcccagagaata

SEQ ID NO: 1822063 - DNA, 15 bp, Homo sapiens
gagcccagagaatat

SEQ ID NO: 1822064 - DNA, 15 bp, Homo sapiens
agcccagagaatatc

SEQ ID NO: 1822065 - DNA, 15 bp, Homo sapiens
gcccagagaatatca

SEQ ID NO: 1822066 - DNA, 15 bp, Homo sapiens
cccagagaatatcac

SEQ ID NO: 1822067 - DNA, 15 bp, Homo sapiens
ccagagaatatcacg

SEQ ID NO: 1822068 - DNA, 15 bp, Homo sapiens
cagagaatatcacgg

SEQ ID NO: 1822069 - DNA, 15 bp, Homo sapiens
agagaatatcacggt

SEQ ID NO: 1822070 - DNA, 15 bp, Homo sapiens
agaatatcacggtgg

SEQ ID NO: 1822071 - DNA, 15 bp, Homo sapiens
gaatatcacggtggt

SEQ ID NO: 1822072 - DNA, 15 bp, Homo sapiens
aatatcacggtggtc

SEQ ID NO: 1822073 - DNA, 15 bp, Homo sapiens
atatcacggtggtct

SEQ ID NO: 1822074 - DNA, 15 bp, Homo sapiens
tatcacggtggtctg

SEQ ID NO: 1822075 - DNA, 15 bp, Homo sapiens
atcacggtggtctgg

SEQ ID NO: 1822076 - DNA, 15 bp, Homo sapiens
tcacggtggtctggg

SEQ ID NO: 1822077 - DNA, 15 bp, Homo sapiens
cacggtggtctgggg

SEQ ID NO: 1822078 - DNA, 15 bp, Homo sapiens
acggtggtctggggt

SEQ ID NO: 1822079 - DNA, 15 bp, Homo sapiens
cggtggtctggggtg

SEQ ID NO: 1822080 - DNA, 15 bp, Homo sapiens
ggtggtctggggtgc

SEQ ID NO: 1822081 - DNA, 15 bp, Homo sapiens
gtggtctggggtgct

SEQ ID NO: 1822082 - DNA, 15 bp, Homo sapiens
tggtctggggtgctt

SEQ ID NO: 1822083 - DNA, 15 bp, Homo sapiens
ggtctggggtgcttc

SEQ ID NO: 1822084 - DNA, 15 bp, Homo sapiens
gtctggggtgcttca

SEQ ID NO: 1822085 - DNA, 15 bp, Homo sapiens
tctggggtgcttcaa

SEQ ID NO: 1822086 - DNA, 15 bp, Homo sapiens
ctggggtgcttcaag

SEQ ID NO: 1822087 - DNA, 15 bp, Homo sapiens
tggggtgcttcaagg

SEQ ID NO: 1822088 - DNA, 15 bp, Homo sapiens
ggggtgcttcaaggg

SEQ ID NO: 1822089 - DNA, 15 bp, Homo sapiens
gggtgcttcaagggc

SEQ ID NO: 1822090 - DNA, 15 bp, Homo sapiens
ggtgcttcaagggct

SEQ ID NO: 1822091 - DNA, 15 bp, Homo sapiens
gtgcttcaagggctg

SEQ ID NO: 1822092 - DNA, 15 bp, Homo sapiens
tgcttcaagggctgg

SEQ ID NO: 1822093 - DNA, 15 bp, Homo sapiens
gcttcaagggctggt

SEQ ID NO: 1822094 - DNA, 15 bp, Homo sapiens
cttcaagggctggtc

SEQ ID NO: 1822095 - DNA, 15 bp, Homo sapiens
ttcaagggctggtct

SEQ ID NO: 1822096 - DNA, 15 bp, Homo sapiens
tcaagggctggtctg

SEQ ID NO: 1822097 - DNA, 15 bp, Homo sapiens
caagggctggtctgg

SEQ ID NO: 1822098 - DNA, 15 bp, Homo sapiens
aagggctggtctgga

SEQ ID NO: 1822099 - DNA, 15 bp, Homo sapiens
agggctggtctggaa

SEQ ID NO: 1822100 - DNA, 15 bp, Homo sapiens
gggctggtctggaat

SEQ ID NO: 1822101 - DNA, 15 bp, Homo sapiens
ggctggtctggaata

SEQ ID NO: 1822102 - DNA, 15 bp, Homo sapiens
gctggtctggaataa

SEQ ID NO: 1822103 - DNA, 15 bp, Homo sapiens
ctggtctggaataaa

SEQ ID NO: 1822104 - DNA, 15 bp, Homo sapiens
tggtctggaataaat

SEQ ID NO: 1822105 - DNA, 15 bp, Homo sapiens
ggtctggaataaatt

SEQ ID NO: 1822106 - DNA, 15 bp, Homo sapiens
gtctggaataaattg

SEQ ID NO: 1822107 - DNA, 15 bp, Homo sapiens
tctggaataaattgg

SEQ ID NO: 1822108 - DNA, 15 bp, Homo sapiens
ctggaataaattgga

SEQ ID NO: 1822109 - DNA, 15 bp, Homo sapiens
tggaataaattggag

SEQ ID NO: 1822110 - DNA, 15 bp, Homo sapiens
ggaataaattggagg

SEQ ID NO: 1822111 - DNA, 15 bp, Homo sapiens
gaataaattggaggt

SEQ ID NO: 1822112 - DNA, 15 bp, Homo sapiens
aataaattggaggtg

SEQ ID NO: 1822113 - DNA, 15 bp, Homo sapiens
ataaattggaggtgg

SEQ ID NO: 1822114 - DNA, 15 bp, Homo sapiens
taaattggaggtggc

SEQ ID NO: 1822115 - DNA, 15 bp, Homo sapiens
aaattggaggtggca

SEQ ID NO: 1822116 - DNA, 15 bp, Homo sapiens
aattggaggtggcac

SEQ ID NO: 1822117 - DNA, 15 bp, Homo sapiens
attggaggtggcacg

SEQ ID NO: 1822118 - DNA, 15 bp, Homo sapiens
ttggaggtggcacgc

SEQ ID NO: 1822119 - DNA, 15 bp, Homo sapiens
tggaggtggcacgca

SEQ ID NO: 1822120 - DNA, 15 bp, Homo sapiens
ggaggtggcacgcag

SEQ ID NO: 1822121 - DNA, 15 bp, Homo sapiens
gaggtggcacgcagg

SEQ ID NO: 1822122 - DNA, 15 bp, Homo sapiens
aggtggcacgcaggg

SEQ ID NO: 1822123 - DNA, 15 bp, Homo sapiens
ggtggcacgcagggt

SEQ ID NO: 1822124 - DNA, 15 bp, Homo sapiens
gtggcacgcagggta

SEQ ID NO: 1822125 - DNA, 15 bp, Homo sapiens
tggcacgcagggtag

SEQ ID NO: 1822126 - DNA, 15 bp, Homo sapiens
ggcacgcagggtagg

SEQ ID NO: 1822127 - DNA, 15 bp, Homo sapiens
gcacgcagggtagga

SEQ ID NO: 1822128 - DNA, 15 bp, Homo sapiens
cacgcagggtaggag

SEQ ID NO: 1822129 - DNA, 15 bp, Homo sapiens
acgcagggtaggagc

SEQ ID NO: 1822130 - DNA, 15 bp, Homo sapiens
cgcagggtaggagcg

SEQ ID NO: 1822131 - DNA, 15 bp, Homo sapiens
gcagggtaggagcgc

SEQ ID NO: 1822132 - DNA, 15 bp, Homo sapiens
cagggtaggagcgcc

SEQ ID NO: 1822133 - DNA, 15 bp, Homo sapiens
agggtaggagcgccg

SEQ ID NO: 1822134 - DNA, 15 bp, Homo sapiens
gggtaggagcgccgg

SEQ ID NO: 1822135 - DNA, 15 bp, Homo sapiens
ggtaggagcgccggg

SEQ ID NO: 1822136 - DNA, 15 bp, Homo sapiens
gtaggagcgccgggc

SEQ ID NO: 1822137 - DNA, 15 bp, Homo sapiens
taggagcgccgggcc

SEQ ID NO: 1822138 - DNA, 15 bp, Homo sapiens
aggagcgccgggcca

SEQ ID NO: 1822139 - DNA, 15 bp, Homo sapiens
ggagcgccgggccaa

SEQ ID NO: 1822140 - DNA, 15 bp, Homo sapiens
gagcgccgggccaac

SEQ ID NO: 1822141 - DNA, 15 bp, Homo sapiens
agcgccgggccaact

SEQ ID NO: 1822142 - DNA, 15 bp, Homo sapiens
gcgccgggccaactg

SEQ ID NO: 1822143 - DNA, 15 bp, Homo sapiens
cgccgggccaactgg

SEQ ID NO: 1822144 - DNA, 15 bp, Homo sapiens
gccgggccaactggg

SEQ ID NO: 1822145 - DNA, 15 bp, Homo sapiens
ccgggccaactggga

SEQ ID NO: 1822146 - DNA, 15 bp, Homo sapiens
cgggccaactgggag

SEQ ID NO: 1822147 - DNA, 15 bp, Homo sapiens
gggccaactgggaga

SEQ ID NO: 1822148 - DNA, 15 bp, Homo sapiens
ggccaactgggagac

SEQ ID NO: 1822149 - DNA, 15 bp, Homo sapiens
gccaactgggagacc

SEQ ID NO: 1822150 - DNA, 15 bp, Homo sapiens
ccaactgggagaccc

SEQ ID NO: 1822151 - DNA, 15 bp, Homo sapiens
caactgggagaccca

SEQ ID NO: 1822152 - DNA, 15 bp, Homo sapiens
aactgggagacccag

SEQ ID NO: 1822153 - DNA, 15 bp, Homo sapiens
actgggagacccagc

SEQ ID NO: 1822154 - DNA, 15 bp, Homo sapiens
ctgggagacccagca

SEQ ID NO: 1822155 - DNA, 15 bp, Homo sapiens
tgggagacccagcaa

SEQ ID NO: 1822156 - DNA, 15 bp, Homo sapiens
gggagacccagcaac

SEQ ID NO: 1822157 - DNA, 15 bp, Homo sapiens
ggagacccagcaaca

SEQ ID NO: 1822158 - DNA, 15 bp, Homo sapiens
gagacccagcaacat

SEQ ID NO: 1822159 - DNA, 15 bp, Homo sapiens
agacccagcaacata

SEQ ID NO: 1822160 - DNA, 15 bp, Homo sapiens
gacccagcaacataa

SEQ ID NO: 1822161 - DNA, 15 bp, Homo sapiens
acccagcaacataaa

SEQ ID NO: 1822162 - DNA, 15 bp, Homo sapiens
cccagcaacataaag

SEQ ID NO: 1822163 - DNA, 15 bp, Homo sapiens
ccagcaacataaagg

SEQ ID NO: 1822164 - DNA, 15 bp, Homo sapiens
cagcaacataaagga

SEQ ID NO: 1822165 - DNA, 15 bp, Homo sapiens
agcaacataaaggaa

SEQ ID NO: 1822166 - DNA, 15 bp, Homo sapiens
gcaacataaaggaaa

SEQ ID NO: 1822167 - DNA, 15 bp, Homo sapiens
caacataaaggaaaa

SEQ ID NO: 1822168 - DNA, 15 bp, Homo sapiens
aacataaaggaaaag

SEQ ID NO: 1822169 - DNA, 15 bp, Homo sapiens
acataaaggaaaagt

SEQ ID NO: 1822170 - DNA, 15 bp, Homo sapiens
cataaaggaaaagtt

SEQ ID NO: 1822171 - DNA, 15 bp, Homo sapiens
ataaaggaaaagttg

SEQ ID NO: 1822172 - DNA, 15 bp, Homo sapiens
taaaggaaaagttgt

SEQ ID NO: 1822173 - DNA, 15 bp, Homo sapiens
aaaggaaaagttgtt

SEQ ID NO: 1822174 - DNA, 15 bp, Homo sapiens
aaggaaaagttgttg

SEQ ID NO: 1822175 - DNA, 15 bp, Homo sapiens
aggaaaagttgttgg

SEQ ID NO: 1822176 - DNA, 15 bp, Homo sapiens
ggaaaagttgttggg

SEQ ID NO: 1822177 - DNA, 15 bp, Homo sapiens
gaaaagttgttgggg

SEQ ID NO: 1822178 - DNA, 15 bp, Homo sapiens
aaaagttgttggggc

SEQ ID NO: 1822179 - DNA, 15 bp, Homo sapiens
aaagttgttggggct

SEQ ID NO: 1822180 - DNA, 15 bp, Homo sapiens
aagttgttggggctg

SEQ ID NO: 1822181 - DNA, 15 bp, Homo sapiens
agttgttggggctga

SEQ ID NO: 1822182 - DNA, 15 bp, Homo sapiens
gttgttggggctgag

SEQ ID NO: 1822183 - DNA, 15 bp, Homo sapiens
ttgttggggctgagg

SEQ ID NO: 1822184 - DNA, 15 bp, Homo sapiens
tgttggggctgagga

SEQ ID NO: 1822185 - DNA, 15 bp, Homo sapiens
gttggggctgaggag

SEQ ID NO: 1822186 - DNA, 15 bp, Homo sapiens
ttggggctgaggagg

SEQ ID NO: 1822187 - DNA, 15 bp, Homo sapiens
tggggctgaggaggc

SEQ ID NO: 1822188 - DNA, 15 bp, Homo sapiens
ggggctgaggaggct

SEQ ID NO: 1822189 - DNA, 15 bp, Homo sapiens
gggctgaggaggctt

SEQ ID NO: 1822190 - DNA, 15 bp, Homo sapiens
ggctgaggaggcttg

SEQ ID NO: 1822191 - DNA, 15 bp, Homo sapiens
gctgaggaggcttgc

SEQ ID NO: 1822192 - DNA, 15 bp, Homo sapiens
ctgaggaggcttgct

SEQ ID NO: 1822193 - DNA, 15 bp, Homo sapiens
tgaggaggcttgctg

SEQ ID NO: 1822194 - DNA, 15 bp, Homo sapiens
gaggaggcttgctga

SEQ ID NO: 1822195 - DNA, 15 bp, Homo sapiens
aggaggcttgctgag

SEQ ID NO: 1822196 - DNA, 15 bp, Homo sapiens
ggaggcttgctgaga

SEQ ID NO: 1822197 - DNA, 15 bp, Homo sapiens
gaggcttgctgagag

SEQ ID NO: 1822198 - DNA, 15 bp, Homo sapiens
aggcttgctgagaga

SEQ ID NO: 1822199 - DNA, 15 bp, Homo sapiens
ggcttgctgagagag

SEQ ID NO: 1822200 - DNA, 15 bp, Homo sapiens
gcttgctgagagagg

SEQ ID NO: 1822201 - DNA, 15 bp, Homo sapiens
cttgctgagagaggg

SEQ ID NO: 1822202 - DNA, 15 bp, Homo sapiens
ttgctgagagagggg

SEQ ID NO: 1822203 - DNA, 15 bp, Homo sapiens
tgctgagagagggga

SEQ ID NO: 1822204 - DNA, 15 bp, Homo sapiens
gctgagagaggggaa

SEQ ID NO: 1822205 - DNA, 15 bp, Homo sapiens
ctgagagaggggaag

SEQ ID NO: 1822206 - DNA, 15 bp, Homo sapiens
tgagagaggggaagt

SEQ ID NO: 1822207 - DNA, 15 bp, Homo sapiens
gagagaggggaagtg

SEQ ID NO: 1822208 - DNA, 15 bp, Homo sapiens
agagaggggaagtga

SEQ ID NO: 1822209 - DNA, 15 bp, Homo sapiens
gagaggggaagtgag

SEQ ID NO: 1822210 - DNA, 15 bp, Homo sapiens
agaggggaagtgagg

SEQ ID NO: 1822211 - DNA, 15 bp, Homo sapiens
gaggggaagtgaggg

SEQ ID NO: 1822212 - DNA, 15 bp, Homo sapiens
aggggaagtgaggga

SEQ ID NO: 1822213 - DNA, 15 bp, Homo sapiens
ggggaagtgagggaa

SEQ ID NO: 1822214 - DNA, 15 bp, Homo sapiens
gggaagtgagggaaa

SEQ ID NO: 1822215 - DNA, 15 bp, Homo sapiens
ggaagtgagggaaag

SEQ ID NO: 1822216 - DNA, 15 bp, Homo sapiens
gaagtgagggaaaga

SEQ ID NO: 1822217 - DNA, 15 bp, Homo sapiens
aagtgagggaaagag

SEQ ID NO: 1822218 - DNA, 15 bp, Homo sapiens
agtgagggaaagagg

SEQ ID NO: 1822219 - DNA, 15 bp, Homo sapiens
gtgagggaaagaggt

SEQ ID NO: 1822220 - DNA, 15 bp, Homo sapiens
tgagggaaagaggtg

SEQ ID NO: 1822221 - DNA, 15 bp, Homo sapiens
gagggaaagaggtga

SEQ ID NO: 1822222 - DNA, 15 bp, Homo sapiens
agggaaagaggtgat

SEQ ID NO: 1822223 - DNA, 15 bp, Homo sapiens
gggaaagaggtgatc

SEQ ID NO: 1822224 - DNA, 15 bp, Homo sapiens
ggaaagaggtgatct

SEQ ID NO: 1822225 - DNA, 15 bp, Homo sapiens
gaaagaggtgatcta

SEQ ID NO: 1822226 - DNA, 15 bp, Homo sapiens
aaagaggtgatctag

SEQ ID NO: 1822227 - DNA, 15 bp, Homo sapiens
aagaggtgatctagg

SEQ ID NO: 1822228 - DNA, 15 bp, Homo sapiens
agaggtgatctaggg

SEQ ID NO: 1822229 - DNA, 15 bp, Homo sapiens
gaggtgatctaggga

SEQ ID NO: 1822230 - DNA, 15 bp, Homo sapiens
aggtgatctagggac

SEQ ID NO: 1822231 - DNA, 15 bp, Homo sapiens
ggtgatctagggaca

SEQ ID NO: 1822232 - DNA, 15 bp, Homo sapiens
gtgatctagggacac

SEQ ID NO: 1822233 - DNA, 15 bp, Homo sapiens
tgatctagggacacg

SEQ ID NO: 1822234 - DNA, 15 bp, Homo sapiens
gatctagggacacgg

SEQ ID NO: 1822235 - DNA, 15 bp, Homo sapiens
atctagggacacggt

SEQ ID NO: 1822236 - DNA, 15 bp, Homo sapiens
tctagggacacggtg

SEQ ID NO: 1822237 - DNA, 15 bp, Homo sapiens
ctagggacacggtgt

SEQ ID NO: 1822238 - DNA, 15 bp, Homo sapiens
tagggacacggtgtg

SEQ ID NO: 1822239 - DNA, 15 bp, Homo sapiens
agggacacggtgtga

SEQ ID NO: 1822240 - DNA, 15 bp, Homo sapiens
gggacacggtgtgaa

SEQ ID NO: 1822241 - DNA, 15 bp, Homo sapiens
ggacacggtgtgaat

SEQ ID NO: 1822242 - DNA, 15 bp, Homo sapiens
gacacggtgtgaatg

SEQ ID NO: 1822243 - DNA, 15 bp, Homo sapiens
acacggtgtgaatga

SEQ ID NO: 1822244 - DNA, 15 bp, Homo sapiens
cacggtgtgaatgag

SEQ ID NO: 1822245 - DNA, 15 bp, Homo sapiens
acggtgtgaatgagg

SEQ ID NO: 1822246 - DNA, 15 bp, Homo sapiens
cggtgtgaatgaggg

SEQ ID NO: 1822247 - DNA, 15 bp, Homo sapiens
ggtgtgaatgagggg

SEQ ID NO: 1822248 - DNA, 15 bp, Homo sapiens
gtgtgaatgaggggg

SEQ ID NO: 1822249 - DNA, 15 bp, Homo sapiens
tgtgaatgagggggg

SEQ ID NO: 1822250 - DNA, 15 bp, Homo sapiens
gtgaatgaggggggg

SEQ ID NO: 1822251 - DNA, 15 bp, Homo sapiens
tgaatgaggggggga

SEQ ID NO: 1822252 - DNA, 15 bp, Homo sapiens
gaatgagggggggat

SEQ ID NO: 1822253 - DNA, 15 bp, Homo sapiens
aatgagggggggatg

SEQ ID NO: 1822254 - DNA, 15 bp, Homo sapiens
atgagggggggatga

SEQ ID NO: 1822255 - DNA, 15 bp, Homo sapiens
tgagggggggatgag

SEQ ID NO: 1822256 - DNA, 15 bp, Homo sapiens
gagggggggatgaga

SEQ ID NO: 1822257 - DNA, 15 bp, Homo sapiens
agggggggatgagat

SEQ ID NO: 1822258 - DNA, 15 bp, Homo sapiens
gggggggatgagatc

SEQ ID NO: 1822259 - DNA, 15 bp, Homo sapiens
ggggggatgagatca

SEQ ID NO: 1822260 - DNA, 15 bp, Homo sapiens
gggggatgagatcac

SEQ ID NO: 1822261 - DNA, 15 bp, Homo sapiens
ggggatgagatcaca

SEQ ID NO: 1822262 - DNA, 15 bp, Homo sapiens
gggatgagatcacag

SEQ ID NO: 1822263 - DNA, 15 bp, Homo sapiens
ggatgagatcacagg

SEQ ID NO: 1822264 - DNA, 15 bp, Homo sapiens
gatgagatcacaggg

SEQ ID NO: 1822265 - DNA, 15 bp, Homo sapiens
atgagatcacagggt

SEQ ID NO: 1822266 - DNA, 15 bp, Homo sapiens
gagatcacagggtta

SEQ ID NO: 1822267 - DNA, 15 bp, Homo sapiens
agatcacagggttat

SEQ ID NO: 1822268 - DNA, 15 bp, Homo sapiens
gatcacagggttatt

SEQ ID NO: 1822269 - DNA, 15 bp, Homo sapiens
atcacagggttatta

SEQ ID NO: 1822270 - DNA, 15 bp, Homo sapiens
tcacagggttattac

SEQ ID NO: 1822271 - DNA, 15 bp, Homo sapiens
cacagggttattact

SEQ ID NO: 1822272 - DNA, 15 bp, Homo sapiens
acagggttattactg

SEQ ID NO: 1822273 - DNA, 15 bp, Homo sapiens
cagggttattactgg

SEQ ID NO: 1822274 - DNA, 15 bp, Homo sapiens
agggttattactggg

SEQ ID NO: 1822275 - DNA, 15 bp, Homo sapiens
gggttattactggga

SEQ ID NO: 1822276 - DNA, 15 bp, Homo sapiens
ggttattactgggag

SEQ ID NO: 1822277 - DNA, 15 bp, Homo sapiens
gttattactgggaga

SEQ ID NO: 1822278 - DNA, 15 bp, Homo sapiens
ttattactgggagac

SEQ ID NO: 1822279 - DNA, 15 bp, Homo sapiens
tattactgggagacc

SEQ ID NO: 1822280 - DNA, 15 bp, Homo sapiens
attactgggagaccc

SEQ ID NO: 1822281 - DNA, 15 bp, Homo sapiens
ttactgggagacccc

SEQ ID NO: 1822282 - DNA, 15 bp, Homo sapiens
tactgggagacccct

SEQ ID NO: 1822283 - DNA, 15 bp, Homo sapiens
actgggagacccctg

SEQ ID NO: 1822284 - DNA, 15 bp, Homo sapiens
ctgggagacccctga

SEQ ID NO: 1822285 - DNA, 15 bp, Homo sapiens
tgggagacccctgag

SEQ ID NO: 1822286 - DNA, 15 bp, Homo sapiens
gggagacccctgagg

SEQ ID NO: 1822287 - DNA, 15 bp, Homo sapiens
ggagacccctgaggg

SEQ ID NO: 1822288 - DNA, 15 bp, Homo sapiens
gagacccctgaggga

SEQ ID NO: 1822289 - DNA, 15 bp, Homo sapiens
agacccctgagggaa

SEQ ID NO: 1822290 - DNA, 15 bp, Homo sapiens
gacccctgagggaag

SEQ ID NO: 1822291 - DNA, 15 bp, Homo sapiens
acccctgagggaaga

SEQ ID NO: 1822292 - DNA, 15 bp, Homo sapiens
cccctgagggaagat

SEQ ID NO: 1822293 - DNA, 15 bp, Homo sapiens
ccctgagggaagatg

SEQ ID NO: 1822294 - DNA, 15 bp, Homo sapiens
cctgagggaagatgg

SEQ ID NO: 1822295 - DNA, 15 bp, Homo sapiens
ctgagggaagatggc

SEQ ID NO: 1822296 - DNA, 15 bp, Homo sapiens
tgagggaagatggcc

SEQ ID NO: 1822297 - DNA, 15 bp, Homo sapiens
gagggaagatggcca

SEQ ID NO: 1822298 - DNA, 15 bp, Homo sapiens
agggaagatggccac

SEQ ID NO: 1822299 - DNA, 15 bp, Homo sapiens
gggaagatggccaca

SEQ ID NO: 1822300 - DNA, 15 bp, Homo sapiens
ggaagatggccacag

SEQ ID NO: 1822301 - DNA, 15 bp, Homo sapiens
gaagatggccacagg

SEQ ID NO: 1822302 - DNA, 15 bp, Homo sapiens
aagatggccacaggg

SEQ ID NO: 1822303 - DNA, 15 bp, Homo sapiens
agatggccacaggga

SEQ ID NO: 1822304 - DNA, 15 bp, Homo sapiens
gatggccacagggac

SEQ ID NO: 1822305 - DNA, 15 bp, Homo sapiens
atggccacagggaca

SEQ ID NO: 1822306 - DNA, 15 bp, Homo sapiens
tggccacagggacag

SEQ ID NO: 1822307 - DNA, 15 bp, Homo sapiens
ggccacagggacagg

SEQ ID NO: 1822308 - DNA, 15 bp, Homo sapiens
gccacagggacagga

SEQ ID NO: 1822309 - DNA, 15 bp, Homo sapiens
ccacagggacaggac

SEQ ID NO: 1822310 - DNA, 15 bp, Homo sapiens
cacagggacaggaca

SEQ ID NO: 1822311 - DNA, 15 bp, Homo sapiens
acagggacaggacaa

SEQ ID NO: 1822312 - DNA, 15 bp, Homo sapiens
cagggacaggacaag

SEQ ID NO: 1822313 - DNA, 15 bp, Homo sapiens
agggacaggacaagg

SEQ ID NO: 1822314 - DNA, 15 bp, Homo sapiens
gggacaggacaaggc

SEQ ID NO: 1822315 - DNA, 15 bp, Homo sapiens
ggacaggacaaggct

SEQ ID NO: 1822316 - DNA, 15 bp, Homo sapiens
gacaggacaaggctg

SEQ ID NO: 1822317 - DNA, 15 bp, Homo sapiens
acaggacaaggctgt

SEQ ID NO: 1822318 - DNA, 15 bp, Homo sapiens
caggacaaggctgtc

SEQ ID NO: 1822319 - DNA, 15 bp, Homo sapiens
aggacaaggctgtct

SEQ ID NO: 1822320 - DNA, 15 bp, Homo sapiens
ggacaaggctgtctt

SEQ ID NO: 1822321 - DNA, 15 bp, Homo sapiens
gacaaggctgtcttc

SEQ ID NO: 1822322 - DNA, 15 bp, Homo sapiens
acaaggctgtcttct

SEQ ID NO: 1822323 - DNA, 15 bp, Homo sapiens
caaggctgtcttctt

SEQ ID NO: 1822324 - DNA, 15 bp, Homo sapiens
aaggctgtcttctta

SEQ ID NO: 1822325 - DNA, 15 bp, Homo sapiens
aggctgtcttcttaa

SEQ ID NO: 1822326 - DNA, 15 bp, Homo sapiens
ggctgtcttcttaag

SEQ ID NO: 1822327 - DNA, 15 bp, Homo sapiens
gctgtcttcttaagg

SEQ ID NO: 1822328 - DNA, 15 bp, Homo sapiens
ctgtcttcttaaggg

SEQ ID NO: 1822329 - DNA, 15 bp, Homo sapiens
tgtcttcttaaggga

SEQ ID NO: 1822330 - DNA, 15 bp, Homo sapiens
gtcttcttaagggag

SEQ ID NO: 1822331 - DNA, 15 bp, Homo sapiens
tcttcttaagggagg

SEQ ID NO: 1822332 - DNA, 15 bp, Homo sapiens
cttcttaagggagga

SEQ ID NO: 1822333 - DNA, 15 bp, Homo sapiens
ttcttaagggaggag

SEQ ID NO: 1822334 - DNA, 15 bp, Homo sapiens
tcttaagggaggaga

SEQ ID NO: 1822335 - DNA, 15 bp, Homo sapiens
cttaagggaggagac

SEQ ID NO: 1822336 - DNA, 15 bp, Homo sapiens
ttaagggaggagacc

SEQ ID NO: 1822337 - DNA, 15 bp, Homo sapiens
taagggaggagacca

SEQ ID NO: 1822338 - DNA, 15 bp, Homo sapiens
aagggaggagaccac

SEQ ID NO: 1822339 - DNA, 15 bp, Homo sapiens
agggaggagaccacc

SEQ ID NO: 1822340 - DNA, 15 bp, Homo sapiens
gggaggagaccaccc

SEQ ID NO: 1822341 - DNA, 15 bp, Homo sapiens
ggaggagaccacccc

SEQ ID NO: 1822342 - DNA, 15 bp, Homo sapiens
gaggagaccacccct

SEQ ID NO: 1822343 - DNA, 15 bp, Homo sapiens
aggagaccacccctc

SEQ ID NO: 1822344 - DNA, 15 bp, Homo sapiens
ggagaccacccctca

SEQ ID NO: 1822345 - DNA, 15 bp, Homo sapiens
gagaccacccctcat

SEQ ID NO: 1822346 - DNA, 15 bp, Homo sapiens
agaccacccctcata

SEQ ID NO: 1822347 - DNA, 15 bp, Homo sapiens
gaccacccctcatat

SEQ ID NO: 1822348 - DNA, 15 bp, Homo sapiens
accacccctcatatt

SEQ ID NO: 1822349 - DNA, 15 bp, Homo sapiens
ccacccctcatattg

SEQ ID NO: 1822350 - DNA, 15 bp, Homo sapiens
cacccctcatattgt

SEQ ID NO: 1822351 - DNA, 15 bp, Homo sapiens
acccctcatattgtc

SEQ ID NO: 1822352 - DNA, 15 bp, Homo sapiens
cccctcatattgtct

SEQ ID NO: 1822353 - DNA, 15 bp, Homo sapiens
ccctcatattgtctt

SEQ ID NO: 1822354 - DNA, 15 bp, Homo sapiens
cctcatattgtctta

SEQ ID NO: 1822355 - DNA, 15 bp, Homo sapiens
ctcatattgtcttat

SEQ ID NO: 1822356 - DNA, 15 bp, Homo sapiens
tcatattgtcttatg

SEQ ID NO: 1822357 - DNA, 15 bp, Homo sapiens
catattgtcttatgc

SEQ ID NO: 1822358 - DNA, 15 bp, Homo sapiens
atattgtcttatgcc

SEQ ID NO: 1822359 - DNA, 15 bp, Homo sapiens
tattgtcttatgccc

SEQ ID NO: 1822360 - DNA, 15 bp, Homo sapiens
attgtcttatgccca

SEQ ID NO: 1822361 - DNA, 15 bp, Homo sapiens
ttgtcttatgcccaa

SEQ ID NO: 1822362 - DNA, 15 bp, Homo sapiens
tgtcttatgcccaat

SEQ ID NO: 1822363 - DNA, 15 bp, Homo sapiens
gtcttatgcccaatt

SEQ ID NO: 1822364 - DNA, 15 bp, Homo sapiens
tcttatgcccaattt

SEQ ID NO: 1822365 - DNA, 15 bp, Homo sapiens
cttatgcccaatttc

SEQ ID NO: 1822366 - DNA, 15 bp, Homo sapiens
ttatgcccaatttct

SEQ ID NO: 1822367 - DNA, 15 bp, Homo sapiens
tatgcccaatttctg

SEQ ID NO: 1822368 - DNA, 15 bp, Homo sapiens
atgcccaatttctgc

SEQ ID NO: 1822369 - DNA, 15 bp, Homo sapiens
tgcccaatttctgcc

SEQ ID NO: 1822370 - DNA, 15 bp, Homo sapiens
gcccaatttctgcct

SEQ ID NO: 1822371 - DNA, 15 bp, Homo sapiens
cccaatttctgcctc

SEQ ID NO: 1822372 - DNA, 15 bp, Homo sapiens
ccaatttctgcctcc

SEQ ID NO: 1822373 - DNA, 15 bp, Homo sapiens
caatttctgcctcca

SEQ ID NO: 1822374 - DNA, 15 bp, Homo sapiens
aatttctgcctccaa

SEQ ID NO: 1822375 - DNA, 15 bp, Homo sapiens
atttctgcctccaaa

SEQ ID NO: 1822376 - DNA, 15 bp, Homo sapiens
tttctgcctccaaag

SEQ ID NO: 1822377 - DNA, 15 bp, Homo sapiens
ttctgcctccaaaga

SEQ ID NO: 1822378 - DNA, 15 bp, Homo sapiens
tctgcctccaaagaa

SEQ ID NO: 1822379 - DNA, 15 bp, Homo sapiens
ctgcctccaaagaaa

SEQ ID NO: 1822380 - DNA, 15 bp, Homo sapiens
tgcctccaaagaaag

SEQ ID NO: 1822381 - DNA, 15 bp, Homo sapiens
gcctccaaagaaaga

SEQ ID NO: 1822382 - DNA, 15 bp, Homo sapiens
cctccaaagaaagaa

SEQ ID NO: 1822383 - DNA, 15 bp, Homo sapiens
ctccaaagaaagaaa

SEQ ID NO: 1822384 - DNA, 15 bp, Homo sapiens
tccaaagaaagaaaa

SEQ ID NO: 1822385 - DNA, 15 bp, Homo sapiens
ccaaagaaagaaaaa

SEQ ID NO: 1822386 - DNA, 15 bp, Homo sapiens
caaagaaagaaaaag

SEQ ID NO: 1822387 - DNA, 15 bp, Homo sapiens
aaagaaagaaaaagt

SEQ ID NO: 1822388 - DNA, 15 bp, Homo sapiens
aagaaagaaaaagta

SEQ ID NO: 1822389 - DNA, 15 bp, Homo sapiens
agaaagaaaaagtaa

SEQ ID NO: 1822390 - DNA, 15 bp, Homo sapiens
gaaagaaaaagtaaa

SEQ ID NO: 1822391 - DNA, 15 bp, Homo sapiens
aaagaaaaagtaaaa

SEQ ID NO: 1822392 - DNA, 15 bp, Homo sapiens
aagaaaaagtaaaaa

SEQ ID NO: 1822393 - DNA, 15 bp, Homo sapiens
agaaaaagtaaaaac

SEQ ID NO: 1822394 - DNA, 15 bp, Homo sapiens
gaaaaagtaaaaact

SEQ ID NO: 1822395 - DNA, 15 bp, Homo sapiens
aaaaagtaaaaacta

SEQ ID NO: 1822396 - DNA, 15 bp, Homo sapiens
aaaagtaaaaactaa

SEQ ID NO: 1822397 - DNA, 15 bp, Homo sapiens
aaagtaaaaactaaa

SEQ ID NO: 1822398 - DNA, 15 bp, Homo sapiens
aagtaaaaactaaaa

SEQ ID NO: 1822399 - DNA, 15 bp, Homo sapiens
agtaaaaactaaaag

SEQ ID NO: 1822400 - DNA, 15 bp, Homo sapiens
gtaaaaactaaaagg

SEQ ID NO: 1822401 - DNA, 15 bp, Homo sapiens
taaaaactaaaaggc

SEQ ID NO: 1822402 - DNA, 15 bp, Homo sapiens
aaaaactaaaaggca

SEQ ID NO: 1822403 - DNA, 15 bp, Homo sapiens
aaaactaaaaggcag

SEQ ID NO: 1822404 - DNA, 15 bp, Homo sapiens
aaactaaaaggcaga

SEQ ID NO: 1822405 - DNA, 15 bp, Homo sapiens
aactaaaaggcagaa

SEQ ID NO: 1822406 - DNA, 15 bp, Homo sapiens
actaaaaggcagaaa

SEQ ID NO: 1822407 - DNA, 15 bp, Homo sapiens
ctaaaaggcagaaat

SEQ ID NO: 1822408 - DNA, 15 bp, Homo sapiens
taaaaggcagaaatg

SEQ ID NO: 1822409 - DNA, 15 bp, Homo sapiens
aaaaggcagaaatga

SEQ ID NO: 1822410 - DNA, 15 bp, Homo sapiens
aaaggcagaaatgaa

SEQ ID NO: 1822411 - DNA, 15 bp, Homo sapiens
aaggcagaaatgaaa

SEQ ID NO: 1822412 - DNA, 15 bp, Homo sapiens
aggcagaaatgaaat

SEQ ID NO: 1822413 - DNA, 15 bp, Homo sapiens
ggcagaaatgaaatc

SEQ ID NO: 1822414 - DNA, 15 bp, Homo sapiens
gcagaaatgaaatcc

SEQ ID NO: 1822415 - DNA, 15 bp, Homo sapiens
cagaaatgaaatcca

SEQ ID NO: 1822416 - DNA, 15 bp, Homo sapiens
agaaatgaaatccac

SEQ ID NO: 1822417 - DNA, 15 bp, Homo sapiens
gaaatgaaatccaca

SEQ ID NO: 1822418 - DNA, 15 bp, Homo sapiens
aaatgaaatccacaa

SEQ ID NO: 1822419 - DNA, 15 bp, Homo sapiens
aatgaaatccacaag

SEQ ID NO: 1822420 - DNA, 15 bp, Homo sapiens
atgaaatccacaagc

SEQ ID NO: 1822421 - DNA, 15 bp, Homo sapiens
tgaaatccacaagca

SEQ ID NO: 1822422 - DNA, 15 bp, Homo sapiens
gaaatccacaagcag

SEQ ID NO: 1822423 - DNA, 15 bp, Homo sapiens
aaatccacaagcaga

SEQ ID NO: 1822424 - DNA, 15 bp, Homo sapiens
aatccacaagcagac

SEQ ID NO: 1822425 - DNA, 15 bp, Homo sapiens
atccacaagcagaca

SEQ ID NO: 1822426 - DNA, 15 bp, Homo sapiens
ccacaagcagacagc

SEQ ID NO: 1822427 - DNA, 15 bp, Homo sapiens
cacaagcagacagcc

SEQ ID NO: 1822428 - DNA, 15 bp, Homo sapiens
acaagcagacagccc

SEQ ID NO: 1822429 - DNA, 15 bp, Homo sapiens
caagcagacagcccg

SEQ ID NO: 1822430 - DNA, 15 bp, Homo sapiens
aagcagacagcccgc

SEQ ID NO: 1822431 - DNA, 15 bp, Homo sapiens
agcagacagcccgcg

SEQ ID NO: 1822432 - DNA, 15 bp, Homo sapiens
gcagacagcccgcgc

SEQ ID NO: 1822433 - DNA, 15 bp, Homo sapiens
cagacagcccgcgcc

SEQ ID NO: 1822434 - DNA, 15 bp, Homo sapiens
agacagcccgcgcca

SEQ ID NO: 1822435 - DNA, 15 bp, Homo sapiens
gacagcccgcgccac

SEQ ID NO: 1822436 - DNA, 15 bp, Homo sapiens
acagcccgcgccaca

SEQ ID NO: 1822437 - DNA, 15 bp, Homo sapiens
cagcccgcgccacac

SEQ ID NO: 1822438 - DNA, 15 bp, Homo sapiens
agcccgcgccacacc

SEQ ID NO: 1822439 - DNA, 15 bp, Homo sapiens
gcccgcgccacaccc

SEQ ID NO: 1822440 - DNA, 15 bp, Homo sapiens
cccgcgccacaccct

SEQ ID NO: 1822441 - DNA, 15 bp, Homo sapiens
ccgcgccacaccctg

SEQ ID NO: 1822442 - DNA, 15 bp, Homo sapiens
cgcgccacaccctgg

SEQ ID NO: 1822443 - DNA, 15 bp, Homo sapiens
gcgccacaccctggg

SEQ ID NO: 1822444 - DNA, 15 bp, Homo sapiens
cgccacaccctgggc

SEQ ID NO: 1822445 - DNA, 15 bp, Homo sapiens
gccacaccctgggcc

SEQ ID NO: 1822446 - DNA, 15 bp, Homo sapiens
ccacaccctgggcct

SEQ ID NO: 1822447 - DNA, 15 bp, Homo sapiens
cacaccctgggcctg

SEQ ID NO: 1822448 - DNA, 15 bp, Homo sapiens
acaccctgggcctgg

SEQ ID NO: 1822449 - DNA, 15 bp, Homo sapiens
caccctgggcctggt

SEQ ID NO: 1822450 - DNA, 15 bp, Homo sapiens
accctgggcctggtg

SEQ ID NO: 1822451 - DNA, 15 bp, Homo sapiens
ccctgggcctggtgg

SEQ ID NO: 1822452 - DNA, 15 bp, Homo sapiens
cctgggcctggtggt

SEQ ID NO: 1822453 - DNA, 15 bp, Homo sapiens
ctgggcctggtggtt

SEQ ID NO: 1822454 - DNA, 15 bp, Homo sapiens
tgggcctggtggtta

SEQ ID NO: 1822455 - DNA, 15 bp, Homo sapiens
gggcctggtggttaa

SEQ ID NO: 1822456 - DNA, 15 bp, Homo sapiens
ggcctggtggttaaa

SEQ ID NO: 1822457 - DNA, 15 bp, Homo sapiens
gcctggtggttaaag

SEQ ID NO: 1822458 - DNA, 15 bp, Homo sapiens
cctggtggttaaaga

SEQ ID NO: 1822459 - DNA, 15 bp, Homo sapiens
ctggtggttaaagat

SEQ ID NO: 1822460 - DNA, 15 bp, Homo sapiens
tggtggttaaagatt

SEQ ID NO: 1822461 - DNA, 15 bp, Homo sapiens
ggtggttaaagattg

SEQ ID NO: 1822462 - DNA, 15 bp, Homo sapiens
gtggttaaagattga

SEQ ID NO: 1822463 - DNA, 15 bp, Homo sapiens
tggttaaagattgac

SEQ ID NO: 1822464 - DNA, 15 bp, Homo sapiens
ggttaaagattgacc

SEQ ID NO: 1822465 - DNA, 15 bp, Homo sapiens
gttaaagattgaccc

SEQ ID NO: 1822466 - DNA, 15 bp, Homo sapiens
ttaaagattgacccc

SEQ ID NO: 1822467 - DNA, 15 bp, Homo sapiens
taaagattgacccct

SEQ ID NO: 1822468 - DNA, 15 bp, Homo sapiens
aaagattgacccctg

SEQ ID NO: 1822469 - DNA, 15 bp, Homo sapiens
aagattgacccctga

SEQ ID NO: 1822470 - DNA, 15 bp, Homo sapiens
agattgacccctgac

SEQ ID NO: 1822471 - DNA, 15 bp, Homo sapiens
gattgacccctgacc

SEQ ID NO: 1822472 - DNA, 15 bp, Homo sapiens
attgacccctgacct

SEQ ID NO: 1822473 - DNA, 15 bp, Homo sapiens
ttgacccctgaccta

SEQ ID NO: 1822474 - DNA, 15 bp, Homo sapiens
tgacccctgacctaa

SEQ ID NO: 1822475 - DNA, 15 bp, Homo sapiens
gacccctgacctaat

SEQ ID NO: 1822476 - DNA, 15 bp, Homo sapiens
acccctgacctaatc

SEQ ID NO: 1822477 - DNA, 15 bp, Homo sapiens
cccctgacctaatcc

SEQ ID NO: 1822478 - DNA, 15 bp, Homo sapiens
ccctgacctaatccg

SEQ ID NO: 1822479 - DNA, 15 bp, Homo sapiens
cctgacctaatccgt

SEQ ID NO: 1822480 - DNA, 15 bp, Homo sapiens
ctgacctaatccgtt

SEQ ID NO: 1822481 - DNA, 15 bp, Homo sapiens
tgacctaatccgtta

SEQ ID NO: 1822482 - DNA, 15 bp, Homo sapiens
gacctaatccgttag

SEQ ID NO: 1822483 - DNA, 15 bp, Homo sapiens
acctaatccgttagg

SEQ ID NO: 1822484 - DNA, 15 bp, Homo sapiens
cctaatccgttaggt

SEQ ID NO: 1822485 - DNA, 15 bp, Homo sapiens
ctaatccgttaggtt

SEQ ID NO: 1822486 - DNA, 15 bp, Homo sapiens
taatccgttaggtta

SEQ ID NO: 1822487 - DNA, 15 bp, Homo sapiens
aatccgttaggttat

SEQ ID NO: 1822488 - DNA, 15 bp, Homo sapiens
atccgttaggttatc

SEQ ID NO: 1822489 - DNA, 15 bp, Homo sapiens
tccgttaggttatct

SEQ ID NO: 1822490 - DNA, 15 bp, Homo sapiens
ccgttaggttatcta

SEQ ID NO: 1822491 - DNA, 15 bp, Homo sapiens
cgttaggttatctat

SEQ ID NO: 1822492 - DNA, 15 bp, Homo sapiens
gttaggttatctata

SEQ ID NO: 1822493 - DNA, 15 bp, Homo sapiens
ttaggttatctatag

SEQ ID NO: 1822494 - DNA, 15 bp, Homo sapiens
taggttatctataga

SEQ ID NO: 1822495 - DNA, 15 bp, Homo sapiens
aggttatctatagat

SEQ ID NO: 1822496 - DNA, 15 bp, Homo sapiens
ggttatctatagatt

SEQ ID NO: 1822497 - DNA, 15 bp, Homo sapiens
gttatctatagatta

SEQ ID NO: 1822498 - DNA, 15 bp, Homo sapiens
ttatctatagattac

SEQ ID NO: 1822499 - DNA, 15 bp, Homo sapiens
tatctatagattaca

SEQ ID NO: 1822500 - DNA, 15 bp, Homo sapiens
atctatagattacag

SEQ ID NO: 1822501 - DNA, 15 bp, Homo sapiens
tctatagattacaga

SEQ ID NO: 1822502 - DNA, 15 bp, Homo sapiens
ctatagattacagac

SEQ ID NO: 1822503 - DNA, 15 bp, Homo sapiens
tatagattacagaca

SEQ ID NO: 1822504 - DNA, 15 bp, Homo sapiens
atagattacagacat

SEQ ID NO: 1822505 - DNA, 15 bp, Homo sapiens
tagattacagacatt

SEQ ID NO: 1822506 - DNA, 15 bp, Homo sapiens
agattacagacattg

SEQ ID NO: 1822507 - DNA, 15 bp, Homo sapiens
gattacagacattgt

SEQ ID NO: 1822508 - DNA, 15 bp, Homo sapiens
attacagacattgta

SEQ ID NO: 1822509 - DNA, 15 bp, Homo sapiens
ttacagacattgtat

SEQ ID NO: 1822510 - DNA, 15 bp, Homo sapiens
tacagacattgtata

SEQ ID NO: 1822511 - DNA, 15 bp, Homo sapiens
acagacattgtatag

SEQ ID NO: 1822512 - DNA, 15 bp, Homo sapiens
cagacattgtataga

SEQ ID NO: 1822513 - DNA, 15 bp, Homo sapiens
agacattgtatagaa

SEQ ID NO: 1822514 - DNA, 15 bp, Homo sapiens
gacattgtatagaaa

SEQ ID NO: 1822515 - DNA, 15 bp, Homo sapiens
acattgtatagaaaa

SEQ ID NO: 1822516 - DNA, 15 bp, Homo sapiens
cattgtatagaaaag

SEQ ID NO: 1822517 - DNA, 15 bp, Homo sapiens
attgtatagaaaagc

SEQ ID NO: 1822518 - DNA, 15 bp, Homo sapiens
ttgtatagaaaagca

SEQ ID NO: 1822519 - DNA, 15 bp, Homo sapiens
tgtatagaaaagcac

SEQ ID NO: 1822520 - DNA, 15 bp, Homo sapiens
gtatagaaaagcact

SEQ ID NO: 1822521 - DNA, 15 bp, Homo sapiens
tatagaaaagcactg

SEQ ID NO: 1822522 - DNA, 15 bp, Homo sapiens
atagaaaagcactgt

SEQ ID NO: 1822523 - DNA, 15 bp, Homo sapiens
tagaaaagcactgtg

SEQ ID NO: 1822524 - DNA, 15 bp, Homo sapiens
agaaaagcactgtga

SEQ ID NO: 1822525 - DNA, 15 bp, Homo sapiens
gaaaagcactgtgaa

SEQ ID NO: 1822526 - DNA, 15 bp, Homo sapiens
aaaagcactgtgaaa

SEQ ID NO: 1822527 - DNA, 15 bp, Homo sapiens
aaagcactgtgaaaa

SEQ ID NO: 1822528 - DNA, 15 bp, Homo sapiens
aagcactgtgaaaat

SEQ ID NO: 1822529 - DNA, 15 bp, Homo sapiens
agcactgtgaaaatc

SEQ ID NO: 1822530 - DNA, 15 bp, Homo sapiens
gcactgtgaaaatcc

SEQ ID NO: 1822531 - DNA, 15 bp, Homo sapiens
cactgtgaaaatccc

SEQ ID NO: 1822532 - DNA, 15 bp, Homo sapiens
actgtgaaaatccct

SEQ ID NO: 1822533 - DNA, 15 bp, Homo sapiens
ctgtgaaaatcccta

SEQ ID NO: 1822534 - DNA, 15 bp, Homo sapiens
tgtgaaaatccctat

SEQ ID NO: 1822535 - DNA, 15 bp, Homo sapiens
gtgaaaatccctatt

SEQ ID NO: 1822536 - DNA, 15 bp, Homo sapiens
tgaaaatccctattc

SEQ ID NO: 1822537 - DNA, 15 bp, Homo sapiens
gaaaatccctattct

SEQ ID NO: 1822538 - DNA, 15 bp, Homo sapiens
aaaatccctattctg

SEQ ID NO: 1822539 - DNA, 15 bp, Homo sapiens
aaatccctattctgt

SEQ ID NO: 1822540 - DNA, 15 bp, Homo sapiens
aatccctattctgtt

SEQ ID NO: 1822541 - DNA, 15 bp, Homo sapiens
atccctattctgttt

SEQ ID NO: 1822542 - DNA, 15 bp, Homo sapiens
tccctattctgtttt

SEQ ID NO: 1822543 - DNA, 15 bp, Homo sapiens
ccctattctgttttg

SEQ ID NO: 1822544 - DNA, 15 bp, Homo sapiens
cctattctgttttgt

SEQ ID NO: 1822545 - DNA, 15 bp, Homo sapiens
ctattctgttttgtt

SEQ ID NO: 1822546 - DNA, 15 bp, Homo sapiens
tattctgttttgttc

SEQ ID NO: 1822547 - DNA, 15 bp, Homo sapiens
attctgttttgttcc

SEQ ID NO: 1822548 - DNA, 15 bp, Homo sapiens
ttctgttttgttccg

SEQ ID NO: 1822549 - DNA, 15 bp, Homo sapiens
tctgttttgttccga

SEQ ID NO: 1822550 - DNA, 15 bp, Homo sapiens
ctgttttgttccgat

SEQ ID NO: 1822551 - DNA, 15 bp, Homo sapiens
tgttttgttccgatc

SEQ ID NO: 1822552 - DNA, 15 bp, Homo sapiens
gttttgttccgatct

SEQ ID NO: 1822553 - DNA, 15 bp, Homo sapiens
ttttgttccgatcta

SEQ ID NO: 1822554 - DNA, 15 bp, Homo sapiens
tttgttccgatctaa

SEQ ID NO: 1822555 - DNA, 15 bp, Homo sapiens
ttgttccgatctaat

SEQ ID NO: 1822556 - DNA, 15 bp, Homo sapiens
tgttccgatctaatt

SEQ ID NO: 1822557 - DNA, 15 bp, Homo sapiens
gttccgatctaatta

SEQ ID NO: 1822558 - DNA, 15 bp, Homo sapiens
ttccgatctaattac

SEQ ID NO: 1822559 - DNA, 15 bp, Homo sapiens
tccgatctaattacc

SEQ ID NO: 1822560 - DNA, 15 bp, Homo sapiens
ccgatctaattaccg

SEQ ID NO: 1822561 - DNA, 15 bp, Homo sapiens
cgatctaattaccgg

SEQ ID NO: 1822562 - DNA, 15 bp, Homo sapiens
gatctaattaccggt

SEQ ID NO: 1822563 - DNA, 15 bp, Homo sapiens
atctaattaccggtg

SEQ ID NO: 1822564 - DNA, 15 bp, Homo sapiens
tctaattaccggtgc

SEQ ID NO: 1822565 - DNA, 15 bp, Homo sapiens
ctaattaccggtgca

SEQ ID NO: 1822566 - DNA, 15 bp, Homo sapiens
taattaccggtgcat

SEQ ID NO: 1822567 - DNA, 15 bp, Homo sapiens
aattaccggtgcatg

SEQ ID NO: 1822568 - DNA, 15 bp, Homo sapiens
attaccggtgcatgc

SEQ ID NO: 1822569 - DNA, 15 bp, Homo sapiens
ttaccggtgcatgca

SEQ ID NO: 1822570 - DNA, 15 bp, Homo sapiens
taccggtgcatgcag

SEQ ID NO: 1822571 - DNA, 15 bp, Homo sapiens
accggtgcatgcagc

SEQ ID NO: 1822572 - DNA, 15 bp, Homo sapiens
ccggtgcatgcagcc

SEQ ID NO: 1822573 - DNA, 15 bp, Homo sapiens
cggtgcatgcagccc

SEQ ID NO: 1822574 - DNA, 15 bp, Homo sapiens
ggtgcatgcagcccc

SEQ ID NO: 1822575 - DNA, 15 bp, Homo sapiens
gtgcatgcagccccc

SEQ ID NO: 1822576 - DNA, 15 bp, Homo sapiens
tgcatgcagccccca

SEQ ID NO: 1822577 - DNA, 15 bp, Homo sapiens
gcatgcagcccccag

SEQ ID NO: 1822578 - DNA, 15 bp, Homo sapiens
catgcagcccccagt

SEQ ID NO: 1822579 - DNA, 15 bp, Homo sapiens
atgcagcccccagtc

SEQ ID NO: 1822580 - DNA, 15 bp, Homo sapiens
tgcagcccccagtca

SEQ ID NO: 1822581 - DNA, 15 bp, Homo sapiens
gcagcccccagtcac

SEQ ID NO: 1822582 - DNA, 15 bp, Homo sapiens
cagcccccagtcacg

SEQ ID NO: 1822583 - DNA, 15 bp, Homo sapiens
agcccccagtcacgc

SEQ ID NO: 1822584 - DNA, 15 bp, Homo sapiens
gcccccagtcacgca

SEQ ID NO: 1822585 - DNA, 15 bp, Homo sapiens
cccccagtcacgcat

SEQ ID NO: 1822586 - DNA, 15 bp, Homo sapiens
ccccagtcacgcatc

SEQ ID NO: 1822587 - DNA, 15 bp, Homo sapiens
cccagtcacgcatcc

SEQ ID NO: 1822588 - DNA, 15 bp, Homo sapiens
ccagtcacgcatccc

SEQ ID NO: 1822589 - DNA, 15 bp, Homo sapiens
cagtcacgcatcccc

SEQ ID NO: 1822590 - DNA, 15 bp, Homo sapiens
agtcacgcatcccct

SEQ ID NO: 1822591 - DNA, 15 bp, Homo sapiens
gtcacgcatcccctg

SEQ ID NO: 1822592 - DNA, 15 bp, Homo sapiens
tcacgcatcccctgc

SEQ ID NO: 1822593 - DNA, 15 bp, Homo sapiens
cacgcatcccctgct

SEQ ID NO: 1822594 - DNA, 15 bp, Homo sapiens
acgcatcccctgctt

SEQ ID NO: 1822595 - DNA, 15 bp, Homo sapiens
cgcatcccctgcttg

SEQ ID NO: 1822596 - DNA, 15 bp, Homo sapiens
gcatcccctgcttgt

SEQ ID NO: 1822597 - DNA, 15 bp, Homo sapiens
catcccctgcttgtt

SEQ ID NO: 1822598 - DNA, 15 bp, Homo sapiens
atcccctgcttgttc

SEQ ID NO: 1822599 - DNA, 15 bp, Homo sapiens
tcccctgcttgttca

SEQ ID NO: 1822600 - DNA, 15 bp, Homo sapiens
cccctgcttgttcaa

SEQ ID NO: 1822601 - DNA, 15 bp, Homo sapiens
ccctgcttgttcaat

SEQ ID NO: 1822602 - DNA, 15 bp, Homo sapiens
cctgcttgttcaatc

SEQ ID NO: 1822603 - DNA, 15 bp, Homo sapiens
ctgcttgttcaatcg

SEQ ID NO: 1822604 - DNA, 15 bp, Homo sapiens
tgcttgttcaatcga

SEQ ID NO: 1822605 - DNA, 15 bp, Homo sapiens
gcttgttcaatcgat

SEQ ID NO: 1822606 - DNA, 15 bp, Homo sapiens
cttgttcaatcgatc

SEQ ID NO: 1822607 - DNA, 15 bp, Homo sapiens
ttgttcaatcgatca

SEQ ID NO: 1822608 - DNA, 15 bp, Homo sapiens
tgttcaatcgatcac

SEQ ID NO: 1822609 - DNA, 15 bp, Homo sapiens
gttcaatcgatcacg

SEQ ID NO: 1822610 - DNA, 15 bp, Homo sapiens
ttcaatcgatcacga

SEQ ID NO: 1822611 - DNA, 15 bp, Homo sapiens
tcaatcgatcacgac

SEQ ID NO: 1822612 - DNA, 15 bp, Homo sapiens
caatcgatcacgacc

SEQ ID NO: 1822613 - DNA, 15 bp, Homo sapiens
aatcgatcacgaccc

SEQ ID NO: 1822614 - DNA, 15 bp, Homo sapiens
atcgatcacgaccct

SEQ ID NO: 1822615 - DNA, 15 bp, Homo sapiens
tcgatcacgaccctc

SEQ ID NO: 1822616 - DNA, 15 bp, Homo sapiens
cgatcacgaccctct

SEQ ID NO: 1822617 - DNA, 15 bp, Homo sapiens
gatcacgaccctctc

SEQ ID NO: 1822618 - DNA, 15 bp, Homo sapiens
atcacgaccctctca

SEQ ID NO: 1822619 - DNA, 15 bp, Homo sapiens
tcacgaccctctcac

SEQ ID NO: 1822620 - DNA, 15 bp, Homo sapiens
cacgaccctctcacg

SEQ ID NO: 1822621 - DNA, 15 bp, Homo sapiens
acgaccctctcacgt

SEQ ID NO: 1822622 - DNA, 15 bp, Homo sapiens
cgaccctctcacgtg

SEQ ID NO: 1822623 - DNA, 15 bp, Homo sapiens
gaccctctcacgtgc

SEQ ID NO: 1822624 - DNA, 15 bp, Homo sapiens
accctctcacgtgca

SEQ ID NO: 1822625 - DNA, 15 bp, Homo sapiens
ccctctcacgtgcac

SEQ ID NO: 1822626 - DNA, 15 bp, Homo sapiens
cctctcacgtgcacc

SEQ ID NO: 1822627 - DNA, 15 bp, Homo sapiens
ctctcacgtgcaccc

SEQ ID NO: 1822628 - DNA, 15 bp, Homo sapiens
tctcacgtgcaccca

SEQ ID NO: 1822629 - DNA, 15 bp, Homo sapiens
ctcacgtgcacccac

SEQ ID NO: 1822630 - DNA, 15 bp, Homo sapiens
tcacgtgcacccact

SEQ ID NO: 1822631 - DNA, 15 bp, Homo sapiens
cacgtgcacccactt

SEQ ID NO: 1822632 - DNA, 15 bp, Homo sapiens
acgtgcacccactta

SEQ ID NO: 1822633 - DNA, 15 bp, Homo sapiens
cgtgcacccacttag

SEQ ID NO: 1822634 - DNA, 15 bp, Homo sapiens
gtgcacccacttaga

SEQ ID NO: 1822635 - DNA, 15 bp, Homo sapiens
tgcacccacttagag

SEQ ID NO: 1822636 - DNA, 15 bp, Homo sapiens
gcacccacttagagt

SEQ ID NO: 1822637 - DNA, 15 bp, Homo sapiens
cacccacttagagtt

SEQ ID NO: 1822638 - DNA, 15 bp, Homo sapiens
acccacttagagttg

SEQ ID NO: 1822639 - DNA, 15 bp, Homo sapiens
cccacttagagttgt

SEQ ID NO: 1822640 - DNA, 15 bp, Homo sapiens
ccacttagagttgtg

SEQ ID NO: 1822641 - DNA, 15 bp, Homo sapiens
cacttagagttgtga

SEQ ID NO: 1822642 - DNA, 15 bp, Homo sapiens
acttagagttgtgag

SEQ ID NO: 1822643 - DNA, 15 bp, Homo sapiens
cttagagttgtgagc

SEQ ID NO: 1822644 - DNA, 15 bp, Homo sapiens
ttagagttgtgagcc

SEQ ID NO: 1822645 - DNA, 15 bp, Homo sapiens
tagagttgtgagccc

SEQ ID NO: 1822646 - DNA, 15 bp, Homo sapiens
agagttgtgagccct

SEQ ID NO: 1822647 - DNA, 15 bp, Homo sapiens
gagttgtgagccctt

SEQ ID NO: 1822648 - DNA, 15 bp, Homo sapiens
agttgtgagccctta

SEQ ID NO: 1822649 - DNA, 15 bp, Homo sapiens
gttgtgagcccttaa

SEQ ID NO: 1822650 - DNA, 15 bp, Homo sapiens
ttgtgagcccttaaa

SEQ ID NO: 1822651 - DNA, 15 bp, Homo sapiens
tgtgagcccttaaaa

SEQ ID NO: 1822652 - DNA, 15 bp, Homo sapiens
gtgagcccttaaaag

SEQ ID NO: 1822653 - DNA, 15 bp, Homo sapiens
tgagcccttaaaagg

SEQ ID NO: 1822654 - DNA, 15 bp, Homo sapiens
gagcccttaaaagga

SEQ ID NO: 1822655 - DNA, 15 bp, Homo sapiens
agcccttaaaaggaa

SEQ ID NO: 1822656 - DNA, 15 bp, Homo sapiens
gcccttaaaaggaac

SEQ ID NO: 1822657 - DNA, 15 bp, Homo sapiens
cccttaaaaggaaca

SEQ ID NO: 1822658 - DNA, 15 bp, Homo sapiens
ccttaaaaggaacag

SEQ ID NO: 1822659 - DNA, 15 bp, Homo sapiens
cttaaaaggaacagg

SEQ ID NO: 1822660 - DNA, 15 bp, Homo sapiens
ttaaaaggaacaggg

SEQ ID NO: 1822661 - DNA, 15 bp, Homo sapiens
taaaaggaacaggga

SEQ ID NO: 1822662 - DNA, 15 bp, Homo sapiens
aaaaggaacagggat

SEQ ID NO: 1822663 - DNA, 15 bp, Homo sapiens
aaaggaacagggatt

SEQ ID NO: 1822664 - DNA, 15 bp, Homo sapiens
aaggaacagggattg

SEQ ID NO: 1822665 - DNA, 15 bp, Homo sapiens
aggaacagggattgc

SEQ ID NO: 1822666 - DNA, 15 bp, Homo sapiens
ggaacagggattgct

SEQ ID NO: 1822667 - DNA, 15 bp, Homo sapiens
gaacagggattgctc

SEQ ID NO: 1822668 - DNA, 15 bp, Homo sapiens
aacagggattgctca

SEQ ID NO: 1822669 - DNA, 15 bp, Homo sapiens
acagggattgctcac

SEQ ID NO: 1822670 - DNA, 15 bp, Homo sapiens
cagggattgctcact

SEQ ID NO: 1822671 - DNA, 15 bp, Homo sapiens
agggattgctcactc

SEQ ID NO: 1822672 - DNA, 15 bp, Homo sapiens
gggattgctcactcg

SEQ ID NO: 1822673 - DNA, 15 bp, Homo sapiens
ggattgctcactcgg

SEQ ID NO: 1822674 - DNA, 15 bp, Homo sapiens
gattgctcactcggg

SEQ ID NO: 1822675 - DNA, 15 bp, Homo sapiens
attgctcactcgggg

SEQ ID NO: 1822676 - DNA, 15 bp, Homo sapiens
ttgctcactcgggga

SEQ ID NO: 1822677 - DNA, 15 bp, Homo sapiens
tgctcactcggggag

SEQ ID NO: 1822678 - DNA, 15 bp, Homo sapiens
gctcactcggggagc

SEQ ID NO: 1822679 - DNA, 15 bp, Homo sapiens
ctcactcggggagct

SEQ ID NO: 1822680 - DNA, 15 bp, Homo sapiens
tcactcggggagctc

SEQ ID NO: 1822681 - DNA, 15 bp, Homo sapiens
cactcggggagctcg

SEQ ID NO: 1822682 - DNA, 15 bp, Homo sapiens
actcggggagctcgg

SEQ ID NO: 1822683 - DNA, 15 bp, Homo sapiens
ctcggggagctcggc

SEQ ID NO: 1822684 - DNA, 15 bp, Homo sapiens
tcggggagctcggct

SEQ ID NO: 1822685 - DNA, 15 bp, Homo sapiens
cggggagctcggctc

SEQ ID NO: 1822686 - DNA, 15 bp, Homo sapiens
ggggagctcggctct

SEQ ID NO: 1822687 - DNA, 15 bp, Homo sapiens
gggagctcggctctt

SEQ ID NO: 1822688 - DNA, 15 bp, Homo sapiens
ggagctcggctcttg

SEQ ID NO: 1822689 - DNA, 15 bp, Homo sapiens
gagctcggctcttga

SEQ ID NO: 1822690 - DNA, 15 bp, Homo sapiens
agctcggctcttgag

SEQ ID NO: 1822691 - DNA, 15 bp, Homo sapiens
gctcggctcttgaga

SEQ ID NO: 1822692 - DNA, 15 bp, Homo sapiens
ctcggctcttgagac

SEQ ID NO: 1822693 - DNA, 15 bp, Homo sapiens
tcggctcttgagaca

SEQ ID NO: 1822694 - DNA, 15 bp, Homo sapiens
cggctcttgagacag

SEQ ID NO: 1822695 - DNA, 15 bp, Homo sapiens
ggctcttgagacagg

SEQ ID NO: 1822696 - DNA, 15 bp, Homo sapiens
gctcttgagacagga

SEQ ID NO: 1822697 - DNA, 15 bp, Homo sapiens
ctcttgagacaggaa

SEQ ID NO: 1822698 - DNA, 15 bp, Homo sapiens
tcttgagacaggaat

SEQ ID NO: 1822699 - DNA, 15 bp, Homo sapiens
cttgagacaggaatc

SEQ ID NO: 1822700 - DNA, 15 bp, Homo sapiens
ttgagacaggaatct

SEQ ID NO: 1822701 - DNA, 15 bp, Homo sapiens
tgagacaggaatctt

SEQ ID NO: 1822702 - DNA, 15 bp, Homo sapiens
gagacaggaatcttg

SEQ ID NO: 1822703 - DNA, 15 bp, Homo sapiens
agacaggaatcttgc

SEQ ID NO: 1822704 - DNA, 15 bp, Homo sapiens
gacaggaatcttgcc

SEQ ID NO: 1822705 - DNA, 15 bp, Homo sapiens
acaggaatcttgccc

SEQ ID NO: 1822706 - DNA, 15 bp, Homo sapiens
caggaatcttgccca

SEQ ID NO: 1822707 - DNA, 15 bp, Homo sapiens
aggaatcttgcccat

SEQ ID NO: 1822708 - DNA, 15 bp, Homo sapiens
ggaatcttgcccatt

SEQ ID NO: 1822709 - DNA, 15 bp, Homo sapiens
gaatcttgcccattc

SEQ ID NO: 1822710 - DNA, 15 bp, Homo sapiens
aatcttgcccattcc

SEQ ID NO: 1822711 - DNA, 15 bp, Homo sapiens
atcttgcccattccc

SEQ ID NO: 1822712 - DNA, 15 bp, Homo sapiens
tcttgcccattcccc

SEQ ID NO: 1822713 - DNA, 15 bp, Homo sapiens
cttgcccattccccg

SEQ ID NO: 1822714 - DNA, 15 bp, Homo sapiens
ttgcccattccccga

SEQ ID NO: 1822715 - DNA, 15 bp, Homo sapiens
tgcccattccccgaa

SEQ ID NO: 1822716 - DNA, 15 bp, Homo sapiens
gcccattccccgaac

SEQ ID NO: 1822717 - DNA, 15 bp, Homo sapiens
cccattccccgaacg

SEQ ID NO: 1822718 - DNA, 15 bp, Homo sapiens
ccattccccgaacga

SEQ ID NO: 1822719 - DNA, 15 bp, Homo sapiens
cattccccgaacgaa

SEQ ID NO: 1822720 - DNA, 15 bp, Homo sapiens
attccccgaacgaat

SEQ ID NO: 1822721 - DNA, 15 bp, Homo sapiens
ttccccgaacgaata

SEQ ID NO: 1822722 - DNA, 15 bp, Homo sapiens
tccccgaacgaataa

SEQ ID NO: 1822723 - DNA, 15 bp, Homo sapiens
ccccgaacgaataaa

SEQ ID NO: 1822724 - DNA, 15 bp, Homo sapiens
cccgaacgaataaac

SEQ ID NO: 1822725 - DNA, 15 bp, Homo sapiens
ccgaacgaataaacc

SEQ ID NO: 1822726 - DNA, 15 bp, Homo sapiens
cgaacgaataaaccc

SEQ ID NO: 1822727 - DNA, 15 bp, Homo sapiens
gaacgaataaacccc

SEQ ID NO: 1822728 - DNA, 15 bp, Homo sapiens
aacgaataaacccct

SEQ ID NO: 1822729 - DNA, 15 bp, Homo sapiens
acgaataaacccctt

SEQ ID NO: 1822730 - DNA, 15 bp, Homo sapiens
cgaataaaccccttc

SEQ ID NO: 1822731 - DNA, 15 bp, Homo sapiens
gaataaaccccttcc

SEQ ID NO: 1822732 - DNA, 15 bp, Homo sapiens
aataaaccccttcct

SEQ ID NO: 1822733 - DNA, 15 bp, Homo sapiens
ataaaccccttcctt

SEQ ID NO: 1822734 - DNA, 15 bp, Homo sapiens
taaaccccttcctta

SEQ ID NO: 1822735 - DNA, 15 bp, Homo sapiens
aaaccccttccttaa

SEQ ID NO: 1822736 - DNA, 15 bp, Homo sapiens
aaccccttccttaac

SEQ ID NO: 1822737 - DNA, 15 bp, Homo sapiens
accccttccttaact

SEQ ID NO: 1822738 - DNA, 15 bp, Homo sapiens
ccccttccttaactc

SEQ ID NO: 1822739 - DNA, 15 bp, Homo sapiens
cccttccttaactca

SEQ ID NO: 1822740 - DNA, 15 bp, Homo sapiens
ccttccttaactcag

SEQ ID NO: 1822741 - DNA, 15 bp, Homo sapiens
cttccttaactcagc

SEQ ID NO: 1822742 - DNA, 15 bp, Homo sapiens
ttccttaactcagcg

SEQ ID NO: 1822743 - DNA, 15 bp, Homo sapiens
tccttaactcagcgt

SEQ ID NO: 1822744 - DNA, 15 bp, Homo sapiens
ccttaactcagcgtc

SEQ ID NO: 1822745 - DNA, 15 bp, Homo sapiens
cttaactcagcgtct

SEQ ID NO: 1822746 - DNA, 15 bp, Homo sapiens
ttaactcagcgtctg

SEQ ID NO: 1822747 - DNA, 15 bp, Homo sapiens
taactcagcgtctga

SEQ ID NO: 1822748 - DNA, 15 bp, Homo sapiens
aactcagcgtctgag

SEQ ID NO: 1822749 - DNA, 15 bp, Homo sapiens
actcagcgtctgagg

SEQ ID NO: 1822750 - DNA, 15 bp, Homo sapiens
ctcagcgtctgagga

SEQ ID NO: 1822751 - DNA, 15 bp, Homo sapiens
tcagcgtctgaggaa

SEQ ID NO: 1822752 - DNA, 15 bp, Homo sapiens
cagcgtctgaggaat

SEQ ID NO: 1822753 - DNA, 15 bp, Homo sapiens
agcgtctgaggaatt

SEQ ID NO: 1822754 - DNA, 15 bp, Homo sapiens
gcgtctgaggaattt

SEQ ID NO: 1822755 - DNA, 15 bp, Homo sapiens
cgtctgaggaatttt

SEQ ID NO: 1822756 - DNA, 15 bp, Homo sapiens
gtctgaggaattttg

SEQ ID NO: 1822757 - DNA, 15 bp, Homo sapiens
tctgaggaattttgt

SEQ ID NO: 1822758 - DNA, 15 bp, Homo sapiens
ctgaggaattttgtc

SEQ ID NO: 1822759 - DNA, 15 bp, Homo sapiens
tgaggaattttgtct

SEQ ID NO: 1822760 - DNA, 15 bp, Homo sapiens
gaggaattttgtctg

SEQ ID NO: 1822761 - DNA, 15 bp, Homo sapiens
aggaattttgtctgc

SEQ ID NO: 1822762 - DNA, 15 bp, Homo sapiens
ggaattttgtctgcg

SEQ ID NO: 1822763 - DNA, 15 bp, Homo sapiens
gaattttgtctgcgg

SEQ ID NO: 1822764 - DNA, 15 bp, Homo sapiens
aattttgtctgcggc

SEQ ID NO: 1822765 - DNA, 15 bp, Homo sapiens
attttgtctgcggct

SEQ ID NO: 1822766 - DNA, 15 bp, Homo sapiens
ttttgtctgcggctc

SEQ ID NO: 1822767 - DNA, 15 bp, Homo sapiens
tttgtctgcggctcc

SEQ ID NO: 1822768 - DNA, 15 bp, Homo sapiens
ttgtctgcggctcct

SEQ ID NO: 1822769 - DNA, 15 bp, Homo sapiens
tgtctgcggctcctc

SEQ ID NO: 1822770 - DNA, 15 bp, Homo sapiens
gtctgcggctcctcc

SEQ ID NO: 1822771 - DNA, 15 bp, Homo sapiens
tctgcggctcctcct

SEQ ID NO: 1822772 - DNA, 15 bp, Homo sapiens
ctgcggctcctcctg

SEQ ID NO: 1822773 - DNA, 15 bp, Homo sapiens
tgcggctcctcctgc

SEQ ID NO: 1822774 - DNA, 15 bp, Homo sapiens
gcggctcctcctgct

SEQ ID NO: 1822775 - DNA, 15 bp, Homo sapiens
cggctcctcctgcta

SEQ ID NO: 1822776 - DNA, 15 bp, Homo sapiens
ggctcctcctgctac

SEQ ID NO: 1822777 - DNA, 15 bp, Homo sapiens
gctcctcctgctaca

SEQ ID NO: 1822778 - DNA, 15 bp, Homo sapiens
ctcctcctgctacat

SEQ ID NO: 1822779 - DNA, 15 bp, Homo sapiens
tcctcctgctacatt

SEQ ID NO: 1822780 - DNA, 15 bp, Homo sapiens
cctcctgctacattc

SEQ ID NO: 1822781 - DNA, 15 bp, Homo sapiens
ctcctgctacattct

SEQ ID NO: 1822782 - DNA, 15 bp, Homo sapiens
tcctgctacattctg

SEQ ID NO: 1822783 - DNA, 15 bp, Homo sapiens
cctgctacattctga

SEQ ID NO: 1822784 - DNA, 15 bp, Homo sapiens
ctgctacattctgag

SEQ ID NO: 1822785 - DNA, 15 bp, Homo sapiens
tgctacattctgagt

SEQ ID NO: 1822786 - DNA, 15 bp, Homo sapiens
gctacattctgagtg

SEQ ID NO: 1822787 - DNA, 15 bp, Homo sapiens
ctacattctgagtgg

SEQ ID NO: 1822788 - DNA, 15 bp, Homo sapiens
tacattctgagtggg

SEQ ID NO: 1822789 - DNA, 15 bp, Homo sapiens
acattctgagtgggg

SEQ ID NO: 1822790 - DNA, 15 bp, Homo sapiens
cattctgagtgggga

SEQ ID NO: 1822791 - DNA, 15 bp, Homo sapiens
attctgagtggggaa

SEQ ID NO: 1822792 - DNA, 15 bp, Homo sapiens
ttctgagtggggaaa

SEQ ID NO: 1822793 - DNA, 15 bp, Homo sapiens
tctgagtggggaaag

SEQ ID NO: 1822794 - DNA, 15 bp, Homo sapiens
ctgagtggggaaagg

SEQ ID NO: 1822795 - DNA, 15 bp, Homo sapiens
tgagtggggaaaggg

SEQ ID NO: 1822796 - DNA, 15 bp, Homo sapiens
gagtggggaaaggga

SEQ ID NO: 1822797 - DNA, 15 bp, Homo sapiens
agtggggaaagggac

SEQ ID NO: 1822798 - DNA, 15 bp, Homo sapiens
gtggggaaagggact

SEQ ID NO: 1822799 - DNA, 15 bp, Homo sapiens
tggggaaagggacta

SEQ ID NO: 1822800 - DNA, 15 bp, Homo sapiens
ggggaaagggactaa

SEQ ID NO: 1822801 - DNA, 15 bp, Homo sapiens
gggaaagggactaag

SEQ ID NO: 1822802 - DNA, 15 bp, Homo sapiens
ggaaagggactaagg

SEQ ID NO: 1822803 - DNA, 15 bp, Homo sapiens
gaaagggactaaggt

SEQ ID NO: 1822804 - DNA, 15 bp, Homo sapiens
aaagggactaaggtg

SEQ ID NO: 1822805 - DNA, 15 bp, Homo sapiens
aagggactaaggtgg

SEQ ID NO: 1822806 - DNA, 15 bp, Homo sapiens
agggactaaggtggt

SEQ ID NO: 1822807 - DNA, 15 bp, Homo sapiens
gggactaaggtggtc

SEQ ID NO: 1822808 - DNA, 15 bp, Homo sapiens
ggactaaggtggtct

SEQ ID NO: 1822809 - DNA, 15 bp, Homo sapiens
gactaaggtggtctg

SEQ ID NO: 1822810 - DNA, 15 bp, Homo sapiens
actaaggtggtctga

SEQ ID NO: 1822811 - DNA, 15 bp, Homo sapiens
ctaaggtggtctgag

SEQ ID NO: 1822812 - DNA, 15 bp, Homo sapiens
taaggtggtctgagg

SEQ ID NO: 1822813 - DNA, 15 bp, Homo sapiens
aaggtggtctgagga

SEQ ID NO: 1822814 - DNA, 15 bp, Homo sapiens
aggtggtctgaggac

SEQ ID NO: 1822815 - DNA, 15 bp, Homo sapiens
ggtggtctgaggacc

SEQ ID NO: 1822816 - DNA, 15 bp, Homo sapiens
gtggtctgaggaccc

SEQ ID NO: 1822817 - DNA, 15 bp, Homo sapiens
tggtctgaggacccc

SEQ ID NO: 1822818 - DNA, 15 bp, Homo sapiens
ggtctgaggacccca

SEQ ID NO: 1822819 - DNA, 15 bp, Homo sapiens
gtctgaggaccccac

SEQ ID NO: 1822820 - DNA, 15 bp, Homo sapiens
tctgaggaccccaca

SEQ ID NO: 1822821 - DNA, 15 bp, Homo sapiens
ctgaggaccccacag

SEQ ID NO: 1822822 - DNA, 15 bp, Homo sapiens
tgaggaccccacaga

SEQ ID NO: 1822823 - DNA, 15 bp, Homo sapiens
gaggaccccacagag

SEQ ID NO: 1822824 - DNA, 15 bp, Homo sapiens
aggaccccacagagt

SEQ ID NO: 1822825 - DNA, 15 bp, Homo sapiens
ggaccccacagagtc

SEQ ID NO: 1822826 - DNA, 15 bp, Homo sapiens
gaccccacagagtca

SEQ ID NO: 1822827 - DNA, 15 bp, Homo sapiens
accccacagagtcag

SEQ ID NO: 1822828 - DNA, 15 bp, Homo sapiens
ccccacagagtcagg

SEQ ID NO: 1822829 - DNA, 15 bp, Homo sapiens
cccacagagtcagga

SEQ ID NO: 1822830 - DNA, 15 bp, Homo sapiens
ccacagagtcaggaa

SEQ ID NO: 1822831 - DNA, 15 bp, Homo sapiens
cacagagtcaggaag

SEQ ID NO: 1822832 - DNA, 15 bp, Homo sapiens
acagagtcaggaaga

SEQ ID NO: 1822833 - DNA, 15 bp, Homo sapiens
cagagtcaggaagat

SEQ ID NO: 1822834 - DNA, 15 bp, Homo sapiens
agagtcaggaagatt

SEQ ID NO: 1822835 - DNA, 15 bp, Homo sapiens
gagtcaggaagattg

SEQ ID NO: 1822836 - DNA, 15 bp, Homo sapiens
agtcaggaagattga

SEQ ID NO: 1822837 - DNA, 15 bp, Homo sapiens
gtcaggaagattgag

SEQ ID NO: 1822838 - DNA, 15 bp, Homo sapiens
tcaggaagattgaga

SEQ ID NO: 1822839 - DNA, 15 bp, Homo sapiens
caggaagattgagag

SEQ ID NO: 1822840 - DNA, 15 bp, Homo sapiens
aggaagattgagagg

SEQ ID NO: 1822841 - DNA, 15 bp, Homo sapiens
ggaagattgagaggt

SEQ ID NO: 1822842 - DNA, 15 bp, Homo sapiens
gaagattgagaggtg

SEQ ID NO: 1822843 - DNA, 15 bp, Homo sapiens
aagattgagaggtga

SEQ ID NO: 1822844 - DNA, 15 bp, Homo sapiens
agattgagaggtgag

SEQ ID NO: 1822845 - DNA, 15 bp, Homo sapiens
gattgagaggtgaga

SEQ ID NO: 1822846 - DNA, 15 bp, Homo sapiens
attgagaggtgagag

SEQ ID NO: 1822847 - DNA, 15 bp, Homo sapiens
ttgagaggtgagagt

SEQ ID NO: 1822848 - DNA, 15 bp, Homo sapiens
gagaggtgagagtgc

SEQ ID NO: 1822849 - DNA, 15 bp, Homo sapiens
agaggtgagagtgct

SEQ ID NO: 1822850 - DNA, 15 bp, Homo sapiens
gaggtgagagtgctg

SEQ ID NO: 1822851 - DNA, 15 bp, Homo sapiens
aggtgagagtgctga

SEQ ID NO: 1822852 - DNA, 15 bp, Homo sapiens
ggtgagagtgctgaa

SEQ ID NO: 1822853 - DNA, 15 bp, Homo sapiens
gtgagagtgctgaac

SEQ ID NO: 1822854 - DNA, 15 bp, Homo sapiens
tgagagtgctgaacg

SEQ ID NO: 1822855 - DNA, 15 bp, Homo sapiens
gagagtgctgaacgg

SEQ ID NO: 1822856 - DNA, 15 bp, Homo sapiens
agagtgctgaacggg

SEQ ID NO: 1822857 - DNA, 15 bp, Homo sapiens
gagtgctgaacgggg

SEQ ID NO: 1822858 - DNA, 15 bp, Homo sapiens
agtgctgaacgggga

SEQ ID NO: 1822859 - DNA, 15 bp, Homo sapiens
gtgctgaacggggag

SEQ ID NO: 1822860 - DNA, 15 bp, Homo sapiens
tgctgaacggggagg

SEQ ID NO: 1822861 - DNA, 15 bp, Homo sapiens
gctgaacggggaggg

SEQ ID NO: 1822862 - DNA, 15 bp, Homo sapiens
ctgaacggggagggg

SEQ ID NO: 1822863 - DNA, 15 bp, Homo sapiens
tgaacggggaggggc

SEQ ID NO: 1822864 - DNA, 15 bp, Homo sapiens
gaacggggaggggct

SEQ ID NO: 1822865 - DNA, 15 bp, Homo sapiens
aacggggaggggctt

SEQ ID NO: 1822866 - DNA, 15 bp, Homo sapiens
acggggaggggcttt

SEQ ID NO: 1822867 - DNA, 15 bp, Homo sapiens
cggggaggggctttg

SEQ ID NO: 1822868 - DNA, 15 bp, Homo sapiens
ggggaggggctttgg

SEQ ID NO: 1822869 - DNA, 15 bp, Homo sapiens
gggaggggctttggg

SEQ ID NO: 1822870 - DNA, 15 bp, Homo sapiens
ggaggggctttgggg

SEQ ID NO: 1822871 - DNA, 15 bp, Homo sapiens
gaggggctttggggc

SEQ ID NO: 1822872 - DNA, 15 bp, Homo sapiens
aggggctttggggct

SEQ ID NO: 1822873 - DNA, 15 bp, Homo sapiens
ggggctttggggcta

SEQ ID NO: 1822874 - DNA, 15 bp, Homo sapiens
gggctttggggctaa

SEQ ID NO: 1822875 - DNA, 15 bp, Homo sapiens
ggctttggggctaag

SEQ ID NO: 1822876 - DNA, 15 bp, Homo sapiens
gctttggggctaagg

SEQ ID NO: 1822877 - DNA, 15 bp, Homo sapiens
ctttggggctaaggg

SEQ ID NO: 1822878 - DNA, 15 bp, Homo sapiens
tttggggctaaggga

SEQ ID NO: 1822879 - DNA, 15 bp, Homo sapiens
ttggggctaagggaa

SEQ ID NO: 1822880 - DNA, 15 bp, Homo sapiens
tggggctaagggaag

SEQ ID NO: 1822881 - DNA, 15 bp, Homo sapiens
ggggctaagggaagt

SEQ ID NO: 1822882 - DNA, 15 bp, Homo sapiens
gggctaagggaagtg

SEQ ID NO: 1822883 - DNA, 15 bp, Homo sapiens
ggctaagggaagtgc

SEQ ID NO: 1822884 - DNA, 15 bp, Homo sapiens
gctaagggaagtgcc

SEQ ID NO: 1822885 - DNA, 15 bp, Homo sapiens
ctaagggaagtgccc

SEQ ID NO: 1822886 - DNA, 15 bp, Homo sapiens
taagggaagtgcccg

SEQ ID NO: 1822887 - DNA, 15 bp, Homo sapiens
aagggaagtgcccgg

SEQ ID NO: 1822888 - DNA, 15 bp, Homo sapiens
agggaagtgcccggg

SEQ ID NO: 1822889 - DNA, 15 bp, Homo sapiens
gggaagtgcccggga

SEQ ID NO: 1822890 - DNA, 15 bp, Homo sapiens
ggaagtgcccgggac

SEQ ID NO: 1822891 - DNA, 15 bp, Homo sapiens
gaagtgcccgggacc

SEQ ID NO: 1822892 - DNA, 15 bp, Homo sapiens
aagtgcccgggaccc

SEQ ID NO: 1822893 - DNA, 15 bp, Homo sapiens
agtgcccgggacccc

SEQ ID NO: 1822894 - DNA, 15 bp, Homo sapiens
gtgcccgggacccca

SEQ ID NO: 1822895 - DNA, 15 bp, Homo sapiens
tgcccgggaccccac

SEQ ID NO: 1822896 - DNA, 15 bp, Homo sapiens
gcccgggaccccacc

SEQ ID NO: 1822897 - DNA, 15 bp, Homo sapiens
cccgggaccccacct

SEQ ID NO: 1822898 - DNA, 15 bp, Homo sapiens
ccgggaccccacctg

SEQ ID NO: 1822899 - DNA, 15 bp, Homo sapiens
cgggaccccacctga

SEQ ID NO: 1822900 - DNA, 15 bp, Homo sapiens
gggaccccacctgac

SEQ ID NO: 1822901 - DNA, 15 bp, Homo sapiens
ggaccccacctgacc

SEQ ID NO: 1822902 - DNA, 15 bp, Homo sapiens
gaccccacctgaccc

SEQ ID NO: 1822903 - DNA, 15 bp, Homo sapiens
accccacctgacccc

SEQ ID NO: 1822904 - DNA, 15 bp, Homo sapiens
ccccacctgacccca

SEQ ID NO: 1822905 - DNA, 15 bp, Homo sapiens
cccacctgaccccaa

SEQ ID NO: 1822906 - DNA, 15 bp, Homo sapiens
ccacctgaccccaac

SEQ ID NO: 1822907 - DNA, 15 bp, Homo sapiens
cacctgaccccaacg

SEQ ID NO: 1822908 - DNA, 15 bp, Homo sapiens
acctgaccccaacgc

SEQ ID NO: 1822909 - DNA, 15 bp, Homo sapiens
cctgaccccaacgct

SEQ ID NO: 1822910 - DNA, 15 bp, Homo sapiens
ctgaccccaacgctc

SEQ ID NO: 1822911 - DNA, 15 bp, Homo sapiens
tgaccccaacgctca

SEQ ID NO: 1822912 - DNA, 15 bp, Homo sapiens
gaccccaacgctcac

SEQ ID NO: 1822913 - DNA, 15 bp, Homo sapiens
accccaacgctcacg

SEQ ID NO: 1822914 - DNA, 15 bp, Homo sapiens
ccccaacgctcacgg

SEQ ID NO: 1822915 - DNA, 15 bp, Homo sapiens
cccaacgctcacggg

SEQ ID NO: 1822916 - DNA, 15 bp, Homo sapiens
ccaacgctcacggga

SEQ ID NO: 1822917 - DNA, 15 bp, Homo sapiens
caacgctcacgggac

SEQ ID NO: 1822918 - DNA, 15 bp, Homo sapiens
aacgctcacgggaca

SEQ ID NO: 1822919 - DNA, 15 bp, Homo sapiens
acgctcacgggacag

SEQ ID NO: 1822920 - DNA, 15 bp, Homo sapiens
cgctcacgggacagg

SEQ ID NO: 1822921 - DNA, 15 bp, Homo sapiens
gctcacgggacaggg

SEQ ID NO: 1822922 - DNA, 15 bp, Homo sapiens
ctcacgggacagggg

SEQ ID NO: 1822923 - DNA, 15 bp, Homo sapiens
tcacgggacaggggc

SEQ ID NO: 1822924 - DNA, 15 bp, Homo sapiens
cacgggacaggggca

SEQ ID NO: 1822925 - DNA, 15 bp, Homo sapiens
acgggacaggggcag

SEQ ID NO: 1822926 - DNA, 15 bp, Homo sapiens
cgggacaggggcaga

SEQ ID NO: 1822927 - DNA, 15 bp, Homo sapiens
gggacaggggcagag

SEQ ID NO: 1822928 - DNA, 15 bp, Homo sapiens
ggacaggggcagagg

SEQ ID NO: 1822929 - DNA, 15 bp, Homo sapiens
gacaggggcagagga

SEQ ID NO: 1822930 - DNA, 15 bp, Homo sapiens
acaggggcagaggag

SEQ ID NO: 1822931 - DNA, 15 bp, Homo sapiens
caggggcagaggaga

SEQ ID NO: 1822932 - DNA, 15 bp, Homo sapiens
aggggcagaggagaa

SEQ ID NO: 1822933 - DNA, 15 bp, Homo sapiens
ggggcagaggagaaa

SEQ ID NO: 1822934 - DNA, 15 bp, Homo sapiens
gggcagaggagaaaa

SEQ ID NO: 1822935 - DNA, 15 bp, Homo sapiens
ggcagaggagaaaaa

SEQ ID NO: 1822936 - DNA, 15 bp, Homo sapiens
gcagaggagaaaaac

SEQ ID NO: 1822937 - DNA, 15 bp, Homo sapiens
cagaggagaaaaacg

SEQ ID NO: 1822938 - DNA, 15 bp, Homo sapiens
agaggagaaaaacgt

SEQ ID NO: 1822939 - DNA, 15 bp, Homo sapiens
gaggagaaaaacgtg

SEQ ID NO: 1822940 - DNA, 15 bp, Homo sapiens
aggagaaaaacgtgg

SEQ ID NO: 1822941 - DNA, 15 bp, Homo sapiens
ggagaaaaacgtggg

SEQ ID NO: 1822942 - DNA, 15 bp, Homo sapiens
gagaaaaacgtgggt

SEQ ID NO: 1822943 - DNA, 15 bp, Homo sapiens
agaaaaacgtgggtg

SEQ ID NO: 1822944 - DNA, 15 bp, Homo sapiens
gaaaaacgtgggtgg

SEQ ID NO: 1822945 - DNA, 15 bp, Homo sapiens
aaaaacgtgggtgga

SEQ ID NO: 1822946 - DNA, 15 bp, Homo sapiens
aaaacgtgggtggac

SEQ ID NO: 1822947 - DNA, 15 bp, Homo sapiens
aaacgtgggtggaca

SEQ ID NO: 1822948 - DNA, 15 bp, Homo sapiens
aacgtgggtggacag

SEQ ID NO: 1822949 - DNA, 15 bp, Homo sapiens
acgtgggtggacaga

SEQ ID NO: 1822950 - DNA, 15 bp, Homo sapiens
cgtgggtggacagag

SEQ ID NO: 1822951 - DNA, 15 bp, Homo sapiens
gtgggtggacagagg

SEQ ID NO: 1822952 - DNA, 15 bp, Homo sapiens
tgggtggacagaggg

SEQ ID NO: 1822953 - DNA, 15 bp, Homo sapiens
gggtggacagaggga

SEQ ID NO: 1822954 - DNA, 15 bp, Homo sapiens
ggtggacagagggag

SEQ ID NO: 1822955 - DNA, 15 bp, Homo sapiens
gtggacagagggagg

SEQ ID NO: 1822956 - DNA, 15 bp, Homo sapiens
tggacagagggaggc

SEQ ID NO: 1822957 - DNA, 15 bp, Homo sapiens
ggacagagggaggca

SEQ ID NO: 1822958 - DNA, 15 bp, Homo sapiens
gacagagggaggcag

SEQ ID NO: 1822959 - DNA, 15 bp, Homo sapiens
acagagggaggcagg

SEQ ID NO: 1822960 - DNA, 15 bp, Homo sapiens
cagagggaggcaggc

SEQ ID NO: 1822961 - DNA, 15 bp, Homo sapiens
agagggaggcaggcg

SEQ ID NO: 1822962 - DNA, 15 bp, Homo sapiens
gagggaggcaggcgg

SEQ ID NO: 1822963 - DNA, 15 bp, Homo sapiens
agggaggcaggcggt

SEQ ID NO: 1822964 - DNA, 15 bp, Homo sapiens
gggaggcaggcggtc

SEQ ID NO: 1822965 - DNA, 15 bp, Homo sapiens
ggaggcaggcggtca

SEQ ID NO: 1822966 - DNA, 15 bp, Homo sapiens
gaggcaggcggtcag

SEQ ID NO: 1822967 - DNA, 15 bp, Homo sapiens
aggcaggcggtcagg

SEQ ID NO: 1822968 - DNA, 15 bp, Homo sapiens
ggcaggcggtcaggg

SEQ ID NO: 1822969 - DNA, 15 bp, Homo sapiens
gcaggcggtcagggg

SEQ ID NO: 1822970 - DNA, 15 bp, Homo sapiens
caggcggtcagggga

SEQ ID NO: 1822971 - DNA, 15 bp, Homo sapiens
aggcggtcaggggaa

SEQ ID NO: 1822972 - DNA, 15 bp, Homo sapiens
ggcggtcaggggaag

SEQ ID NO: 1822973 - DNA, 15 bp, Homo sapiens
gcggtcaggggaagg

SEQ ID NO: 1822974 - DNA, 15 bp, Homo sapiens
cggtcaggggaaggc

SEQ ID NO: 1822975 - DNA, 15 bp, Homo sapiens
ggtcaggggaaggct

SEQ ID NO: 1822976 - DNA, 15 bp, Homo sapiens
gtcaggggaaggctc

SEQ ID NO: 1822977 - DNA, 15 bp, Homo sapiens
tcaggggaaggctca

SEQ ID NO: 1822978 - DNA, 15 bp, Homo sapiens
caggggaaggctcag

SEQ ID NO: 1822979 - DNA, 15 bp, Homo sapiens
aggggaaggctcagg

SEQ ID NO: 1822980 - DNA, 15 bp, Homo sapiens
ggggaaggctcagga

SEQ ID NO: 1822981 - DNA, 15 bp, Homo sapiens
gggaaggctcaggag

SEQ ID NO: 1822982 - DNA, 15 bp, Homo sapiens
ggaaggctcaggagg

SEQ ID NO: 1822983 - DNA, 15 bp, Homo sapiens
gaaggctcaggagga

SEQ ID NO: 1822984 - DNA, 15 bp, Homo sapiens
ggctcaggaggaggg

SEQ ID NO: 1822985 - DNA, 15 bp, Homo sapiens
gctcaggaggaggga

SEQ ID NO: 1822986 - DNA, 15 bp, Homo sapiens
ctcaggaggagggag

SEQ ID NO: 1822987 - DNA, 15 bp, Homo sapiens
tcaggaggagggaga

SEQ ID NO: 1822988 - DNA, 15 bp, Homo sapiens
caggaggagggagat

SEQ ID NO: 1822989 - DNA, 15 bp, Homo sapiens
aggaggagggagatc

SEQ ID NO: 1822990 - DNA, 15 bp, Homo sapiens
ggaggagggagatca

SEQ ID NO: 1822991 - DNA, 15 bp, Homo sapiens
gaggagggagatcaa

SEQ ID NO: 1822992 - DNA, 15 bp, Homo sapiens
aggagggagatcaac

SEQ ID NO: 1822993 - DNA, 15 bp, Homo sapiens
ggagggagatcaaca

SEQ ID NO: 1822994 - DNA, 15 bp, Homo sapiens
gagggagatcaacat

SEQ ID NO: 1822995 - DNA, 15 bp, Homo sapiens
agggagatcaacatc

SEQ ID NO: 1822996 - DNA, 15 bp, Homo sapiens
gggagatcaacatca

SEQ ID NO: 1822997 - DNA, 15 bp, Homo sapiens
ggagatcaacatcaa

SEQ ID NO: 1822998 - DNA, 15 bp, Homo sapiens
gagatcaacatcaac

SEQ ID NO: 1822999 - DNA, 15 bp, Homo sapiens
agatcaacatcaacc

SEQ ID NO: 1823000 - DNA, 15 bp, Homo sapiens
gatcaacatcaacct

SEQ ID NO: 1823001 - DNA, 15 bp, Homo sapiens
atcaacatcaacctg

SEQ ID NO: 1823002 - DNA, 15 bp, Homo sapiens
tcaacatcaacctgc

SEQ ID NO: 1823003 - DNA, 15 bp, Homo sapiens
caacatcaacctgcc

SEQ ID NO: 1823004 - DNA, 15 bp, Homo sapiens
aacatcaacctgccc

SEQ ID NO: 1823005 - DNA, 15 bp, Homo sapiens
acatcaacctgcccc

SEQ ID NO: 1823006 - DNA, 15 bp, Homo sapiens
catcaacctgccccg

SEQ ID NO: 1823007 - DNA, 15 bp, Homo sapiens
atcaacctgccccgc

SEQ ID NO: 1823008 - DNA, 15 bp, Homo sapiens
tcaacctgccccgcc

SEQ ID NO: 1823009 - DNA, 15 bp, Homo sapiens
caacctgccccgccc

SEQ ID NO: 1823010 - DNA, 15 bp, Homo sapiens
aacctgccccgcccc

SEQ ID NO: 1823011 - DNA, 15 bp, Homo sapiens
acctgccccgccccc

SEQ ID NO: 1823012 - DNA, 15 bp, Homo sapiens
cctgccccgccccct

SEQ ID NO: 1823013 - DNA, 15 bp, Homo sapiens
ctgccccgccccctc

SEQ ID NO: 1823014 - DNA, 15 bp, Homo sapiens
tgccccgccccctcc

SEQ ID NO: 1823015 - DNA, 15 bp, Homo sapiens
gccccgccccctccc

SEQ ID NO: 1823016 - DNA, 15 bp, Homo sapiens
cgccccctccccagc

SEQ ID NO: 1823017 - DNA, 15 bp, Homo sapiens
gccccctccccagcc

SEQ ID NO: 1823018 - DNA, 15 bp, Homo sapiens
ccccctccccagcct

SEQ ID NO: 1823019 - DNA, 15 bp, Homo sapiens
cccctccccagcctg

SEQ ID NO: 1823020 - DNA, 15 bp, Homo sapiens
ccctccccagcctga

SEQ ID NO: 1823021 - DNA, 15 bp, Homo sapiens
cctccccagcctgat

SEQ ID NO: 1823022 - DNA, 15 bp, Homo sapiens
ctccccagcctgata

SEQ ID NO: 1823023 - DNA, 15 bp, Homo sapiens
tccccagcctgataa

SEQ ID NO: 1823024 - DNA, 15 bp, Homo sapiens
ccccagcctgataaa

SEQ ID NO: 1823025 - DNA, 15 bp, Homo sapiens
cccagcctgataaag

SEQ ID NO: 1823026 - DNA, 15 bp, Homo sapiens
ccagcctgataaagg

SEQ ID NO: 1823027 - DNA, 15 bp, Homo sapiens
cagcctgataaaggt

SEQ ID NO: 1823028 - DNA, 15 bp, Homo sapiens
agcctgataaaggtc

SEQ ID NO: 1823029 - DNA, 15 bp, Homo sapiens
gcctgataaaggtcc

SEQ ID NO: 1823030 - DNA, 15 bp, Homo sapiens
cctgataaaggtcct

SEQ ID NO: 1823031 - DNA, 15 bp, Homo sapiens
ctgataaaggtcctg

SEQ ID NO: 1823032 - DNA, 15 bp, Homo sapiens
tgataaaggtcctgc

SEQ ID NO: 1823033 - DNA, 15 bp, Homo sapiens
gataaaggtcctgcg

SEQ ID NO: 1823034 - DNA, 15 bp, Homo sapiens
ataaaggtcctgcgg

SEQ ID NO: 1823035 - DNA, 15 bp, Homo sapiens
taaaggtcctgcggg

SEQ ID NO: 1823036 - DNA, 15 bp, Homo sapiens
aaaggtcctgcgggc

SEQ ID NO: 1823037 - DNA, 15 bp, Homo sapiens
aaggtcctgcgggca

SEQ ID NO: 1823038 - DNA, 15 bp, Homo sapiens
aggtcctgcgggcag

SEQ ID NO: 1823039 - DNA, 15 bp, Homo sapiens
ggtcctgcgggcagg

SEQ ID NO: 1823040 - DNA, 15 bp, Homo sapiens
gtcctgcgggcagga

SEQ ID NO: 1823041 - DNA, 15 bp, Homo sapiens
tcctgcgggcaggac

SEQ ID NO: 1823042 - DNA, 15 bp, Homo sapiens
cctgcgggcaggaca

SEQ ID NO: 1823043 - DNA, 15 bp, Homo sapiens
ctgcgggcaggacag

SEQ ID NO: 1823044 - DNA, 15 bp, Homo sapiens
tgcgggcaggacagg

SEQ ID NO: 1823045 - DNA, 15 bp, Homo sapiens
gcgggcaggacagga

SEQ ID NO: 1823046 - DNA, 15 bp, Homo sapiens
cgggcaggacaggac

SEQ ID NO: 1823047 - DNA, 15 bp, Homo sapiens
gggcaggacaggacc

SEQ ID NO: 1823048 - DNA, 15 bp, Homo sapiens
ggcaggacaggacct

SEQ ID NO: 1823049 - DNA, 15 bp, Homo sapiens
gcaggacaggacctc

SEQ ID NO: 1823050 - DNA, 15 bp, Homo sapiens
caggacaggacctcc

SEQ ID NO: 1823051 - DNA, 15 bp, Homo sapiens
aggacaggacctccc

SEQ ID NO: 1823052 - DNA, 15 bp, Homo sapiens
ggacaggacctccca

SEQ ID NO: 1823053 - DNA, 15 bp, Homo sapiens
gacaggacctcccaa

SEQ ID NO: 1823054 - DNA, 15 bp, Homo sapiens
acaggacctcccaac

SEQ ID NO: 1823055 - DNA, 15 bp, Homo sapiens
caggacctcccaacc

SEQ ID NO: 1823056 - DNA, 15 bp, Homo sapiens
aggacctcccaacca

SEQ ID NO: 1823057 - DNA, 15 bp, Homo sapiens
ggacctcccaaccaa

SEQ ID NO: 1823058 - DNA, 15 bp, Homo sapiens
gacctcccaaccaag

SEQ ID NO: 1823059 - DNA, 15 bp, Homo sapiens
acctcccaaccaagc

SEQ ID NO: 1823060 - DNA, 15 bp, Homo sapiens
cctcccaaccaagcc

SEQ ID NO: 1823061 - DNA, 15 bp, Homo sapiens
ctcccaaccaagccc

SEQ ID NO: 1823062 - DNA, 15 bp, Homo sapiens
tcccaaccaagccct

SEQ ID NO: 1823063 - DNA, 15 bp, Homo sapiens
cccaaccaagccctc

SEQ ID NO: 1823064 - DNA, 15 bp, Homo sapiens
ccaaccaagccctcc

SEQ ID NO: 1823065 - DNA, 15 bp, Homo sapiens
caaccaagccctcca

SEQ ID NO: 1823066 - DNA, 15 bp, Homo sapiens
aaccaagccctccag

SEQ ID NO: 1823067 - DNA, 15 bp, Homo sapiens
accaagccctccagc

SEQ ID NO: 1823068 - DNA, 15 bp, Homo sapiens
ccaagccctccagca

SEQ ID NO: 1823069 - DNA, 15 bp, Homo sapiens
caagccctccagcaa

SEQ ID NO: 1823070 - DNA, 15 bp, Homo sapiens
aagccctccagcaag

SEQ ID NO: 1823071 - DNA, 15 bp, Homo sapiens
agccctccagcaagg

SEQ ID NO: 1823072 - DNA, 15 bp, Homo sapiens
gccctccagcaagga

SEQ ID NO: 1823073 - DNA, 15 bp, Homo sapiens
ccctccagcaaggat

SEQ ID NO: 1823074 - DNA, 15 bp, Homo sapiens
cctccagcaaggatt

SEQ ID NO: 1823075 - DNA, 15 bp, Homo sapiens
ctccagcaaggattc

SEQ ID NO: 1823076 - DNA, 15 bp, Homo sapiens
tccagcaaggattca

SEQ ID NO: 1823077 - DNA, 15 bp, Homo sapiens
ccagcaaggattcag

SEQ ID NO: 1823078 - DNA, 15 bp, Homo sapiens
cagcaaggattcagg

SEQ ID NO: 1823079 - DNA, 15 bp, Homo sapiens
agcaaggattcaggt

SEQ ID NO: 1823080 - DNA, 15 bp, Homo sapiens
gcaaggattcaggtt

SEQ ID NO: 1823081 - DNA, 15 bp, Homo sapiens
caaggattcaggttg

SEQ ID NO: 1823082 - DNA, 15 bp, Homo sapiens
aaggattcaggttgg

SEQ ID NO: 1823083 - DNA, 15 bp, Homo sapiens
aggattcaggttggt

SEQ ID NO: 1823084 - DNA, 15 bp, Homo sapiens
ggattcaggttggtg

SEQ ID NO: 1823085 - DNA, 15 bp, Homo sapiens
gtggccgggtccagc

SEQ ID NO: 1823086 - DNA, 15 bp, Homo sapiens
tggccgggtccagcc

SEQ ID NO: 1823087 - DNA, 15 bp, Homo sapiens
ggccgggtccagccc

SEQ ID NO: 1823088 - DNA, 15 bp, Homo sapiens
gccgggtccagcccc

SEQ ID NO: 1823089 - DNA, 15 bp, Homo sapiens
ccgggtccagcccca

SEQ ID NO: 1823090 - DNA, 15 bp, Homo sapiens
cgggtccagccccag

SEQ ID NO: 1823091 - DNA, 15 bp, Homo sapiens
gggtccagccccagg

SEQ ID NO: 1823092 - DNA, 15 bp, Homo sapiens
ggtccagccccaggc

SEQ ID NO: 1823093 - DNA, 15 bp, Homo sapiens
gtccagccccaggca

SEQ ID NO: 1823094 - DNA, 15 bp, Homo sapiens
tccagccccaggcaa

SEQ ID NO: 1823095 - DNA, 15 bp, Homo sapiens
ccagccccaggcaag

SEQ ID NO: 1823096 - DNA, 15 bp, Homo sapiens
cagccccaggcaagg

SEQ ID NO: 1823097 - DNA, 15 bp, Homo sapiens
agccccaggcaaggt

SEQ ID NO: 1823098 - DNA, 15 bp, Homo sapiens
gccccaggcaaggtt

SEQ ID NO: 1823099 - DNA, 15 bp, Homo sapiens
ccccaggcaaggttc

SEQ ID NO: 1823100 - DNA, 15 bp, Homo sapiens
cccaggcaaggttcc

SEQ ID NO: 1823101 - DNA, 15 bp, Homo sapiens
ccaggcaaggttcca

SEQ ID NO: 1823102 - DNA, 15 bp, Homo sapiens
caggcaaggttccag

SEQ ID NO: 1823103 - DNA, 15 bp, Homo sapiens
aggcaaggttccagg

SEQ ID NO: 1823104 - DNA, 15 bp, Homo sapiens
ggcaaggttccaggc

SEQ ID NO: 1823105 - DNA, 15 bp, Homo sapiens
gcaaggttccaggca

SEQ ID NO: 1823106 - DNA, 15 bp, Homo sapiens
caaggttccaggcat

SEQ ID NO: 1823107 - DNA, 15 bp, Homo sapiens
aaggttccaggcatg

SEQ ID NO: 1823108 - DNA, 15 bp, Homo sapiens
aggttccaggcatgc

SEQ ID NO: 1823109 - DNA, 15 bp, Homo sapiens
ggttccaggcatgcc

SEQ ID NO: 1823110 - DNA, 15 bp, Homo sapiens
gttccaggcatgccc

SEQ ID NO: 1823111 - DNA, 15 bp, Homo sapiens
ttccaggcatgcccc

SEQ ID NO: 1823112 - DNA, 15 bp, Homo sapiens
tccaggcatgcccct

SEQ ID NO: 1823113 - DNA, 15 bp, Homo sapiens
ccaggcatgcccctg

SEQ ID NO: 1823114 - DNA, 15 bp, Homo sapiens
caggcatgcccctgg

SEQ ID NO: 1823115 - DNA, 15 bp, Homo sapiens
aggcatgcccctggg

SEQ ID NO: 1823116 - DNA, 15 bp, Homo sapiens
ggcatgcccctggga

SEQ ID NO: 1823117 - DNA, 15 bp, Homo sapiens
gcatgcccctgggac

SEQ ID NO: 1823118 - DNA, 15 bp, Homo sapiens
catgcccctgggaca

SEQ ID NO: 1823119 - DNA, 15 bp, Homo sapiens
atgcccctgggacag

SEQ ID NO: 1823120 - DNA, 15 bp, Homo sapiens
tgcccctgggacaga

SEQ ID NO: 1823121 - DNA, 15 bp, Homo sapiens
gcccctgggacagac

SEQ ID NO: 1823122 - DNA, 15 bp, Homo sapiens
cccctgggacagacg

SEQ ID NO: 1823123 - DNA, 15 bp, Homo sapiens
ccctgggacagacgt

SEQ ID NO: 1823124 - DNA, 15 bp, Homo sapiens
cctgggacagacgtg

SEQ ID NO: 1823125 - DNA, 15 bp, Homo sapiens
ctgggacagacgtgg

SEQ ID NO: 1823126 - DNA, 15 bp, Homo sapiens
tgggacagacgtggg

SEQ ID NO: 1823127 - DNA, 15 bp, Homo sapiens
gggacagacgtggga

SEQ ID NO: 1823128 - DNA, 15 bp, Homo sapiens
ggacagacgtgggag

SEQ ID NO: 1823129 - DNA, 15 bp, Homo sapiens
gacagacgtgggagg

SEQ ID NO: 1823130 - DNA, 15 bp, Homo sapiens
acagacgtgggaggg

SEQ ID NO: 1823131 - DNA, 15 bp, Homo sapiens
cagacgtgggaggga

SEQ ID NO: 1823132 - DNA, 15 bp, Homo sapiens
agacgtgggagggag

SEQ ID NO: 1823133 - DNA, 15 bp, Homo sapiens
gacgtgggagggaga

SEQ ID NO: 1823134 - DNA, 15 bp, Homo sapiens
acgtgggagggagac

SEQ ID NO: 1823135 - DNA, 15 bp, Homo sapiens
cgtgggagggagacc

SEQ ID NO: 1823136 - DNA, 15 bp, Homo sapiens
gtgggagggagacca

SEQ ID NO: 1823137 - DNA, 15 bp, Homo sapiens
tgggagggagaccag

SEQ ID NO: 1823138 - DNA, 15 bp, Homo sapiens
gggagggagaccagc

SEQ ID NO: 1823139 - DNA, 15 bp, Homo sapiens
ggagggagaccagca

SEQ ID NO: 1823140 - DNA, 15 bp, Homo sapiens
gagggagaccagcag

SEQ ID NO: 1823141 - DNA, 15 bp, Homo sapiens
agggagaccagcagg

SEQ ID NO: 1823142 - DNA, 15 bp, Homo sapiens
gggagaccagcaggc

SEQ ID NO: 1823143 - DNA, 15 bp, Homo sapiens
ggagaccagcaggca

SEQ ID NO: 1823144 - DNA, 15 bp, Homo sapiens
gagaccagcaggcag

SEQ ID NO: 1823145 - DNA, 15 bp, Homo sapiens
agaccagcaggcagg

SEQ ID NO: 1823146 - DNA, 15 bp, Homo sapiens
gaccagcaggcaggt

SEQ ID NO: 1823147 - DNA, 15 bp, Homo sapiens
accagcaggcaggtc

SEQ ID NO: 1823148 - DNA, 15 bp, Homo sapiens
ccagcaggcaggtcc

SEQ ID NO: 1823149 - DNA, 15 bp, Homo sapiens
cagcaggcaggtccc

SEQ ID NO: 1823150 - DNA, 15 bp, Homo sapiens
agcaggcaggtcccc

SEQ ID NO: 1823151 - DNA, 15 bp, Homo sapiens
gcaggcaggtccccc

SEQ ID NO: 1823152 - DNA, 15 bp, Homo sapiens
caggcaggtccccct

SEQ ID NO: 1823153 - DNA, 15 bp, Homo sapiens
aggcaggtccccctc

SEQ ID NO: 1823154 - DNA, 15 bp, Homo sapiens
ggcaggtccccctca

SEQ ID NO: 1823155 - DNA, 15 bp, Homo sapiens
gcaggtccccctcag

SEQ ID NO: 1823156 - DNA, 15 bp, Homo sapiens
caggtccccctcagg

SEQ ID NO: 1823157 - DNA, 15 bp, Homo sapiens
aggtccccctcaggg

SEQ ID NO: 1823158 - DNA, 15 bp, Homo sapiens
ggtccccctcaggga

SEQ ID NO: 1823159 - DNA, 15 bp, Homo sapiens
gtccccctcagggag

SEQ ID NO: 1823160 - DNA, 15 bp, Homo sapiens
tccccctcagggagg

SEQ ID NO: 1823161 - DNA, 15 bp, Homo sapiens
ccccctcagggaggt

SEQ ID NO: 1823162 - DNA, 15 bp, Homo sapiens
cccctcagggaggta

SEQ ID NO: 1823163 - DNA, 15 bp, Homo sapiens
ccctcagggaggtat

SEQ ID NO: 1823164 - DNA, 15 bp, Homo sapiens
cctcagggaggtatg

SEQ ID NO: 1823165 - DNA, 15 bp, Homo sapiens
ctcagggaggtatgg

SEQ ID NO: 1823166 - DNA, 15 bp, Homo sapiens
tcagggaggtatgga

SEQ ID NO: 1823167 - DNA, 15 bp, Homo sapiens
cagggaggtatggag

SEQ ID NO: 1823168 - DNA, 15 bp, Homo sapiens
agggaggtatggagc

SEQ ID NO: 1823169 - DNA, 15 bp, Homo sapiens
gggaggtatggagcg

SEQ ID NO: 1823170 - DNA, 15 bp, Homo sapiens
ggaggtatggagcgg

SEQ ID NO: 1823171 - DNA, 15 bp, Homo sapiens
gaggtatggagcggg

SEQ ID NO: 1823172 - DNA, 15 bp, Homo sapiens
aggtatggagcgggt

SEQ ID NO: 1823173 - DNA, 15 bp, Homo sapiens
ggtatggagcgggtc

SEQ ID NO: 1823174 - DNA, 15 bp, Homo sapiens
gtatggagcgggtcc

SEQ ID NO: 1823175 - DNA, 15 bp, Homo sapiens
tatggagcgggtccc

SEQ ID NO: 1823176 - DNA, 15 bp, Homo sapiens
atggagcgggtcccc

SEQ ID NO: 1823177 - DNA, 15 bp, Homo sapiens
tggagcgggtccccg

SEQ ID NO: 1823178 - DNA, 15 bp, Homo sapiens
ggagcgggtccccgg

SEQ ID NO: 1823179 - DNA, 15 bp, Homo sapiens
gagcgggtccccggg

SEQ ID NO: 1823180 - DNA, 15 bp, Homo sapiens
agcgggtccccgggg

SEQ ID NO: 1823181 - DNA, 15 bp, Homo sapiens
gcgggtccccggggc

SEQ ID NO: 1823182 - DNA, 15 bp, Homo sapiens
cgggtccccggggcc

SEQ ID NO: 1823183 - DNA, 15 bp, Homo sapiens
gggtccccggggcca

SEQ ID NO: 1823184 - DNA, 15 bp, Homo sapiens
ggtccccggggccag

SEQ ID NO: 1823185 - DNA, 15 bp, Homo sapiens
gtccccggggccagg

SEQ ID NO: 1823186 - DNA, 15 bp, Homo sapiens
tccccggggccaggt

SEQ ID NO: 1823187 - DNA, 15 bp, Homo sapiens
ccccggggccaggtg

SEQ ID NO: 1823188 - DNA, 15 bp, Homo sapiens
cccggggccaggtgg

SEQ ID NO: 1823189 - DNA, 15 bp, Homo sapiens
ccggggccaggtgga

SEQ ID NO: 1823190 - DNA, 15 bp, Homo sapiens
cggggccaggtggag

SEQ ID NO: 1823191 - DNA, 15 bp, Homo sapiens
ggggccaggtggagc

SEQ ID NO: 1823192 - DNA, 15 bp, Homo sapiens
gggccaggtggagcc

SEQ ID NO: 1823193 - DNA, 15 bp, Homo sapiens
ggccaggtggagccc

SEQ ID NO: 1823194 - DNA, 15 bp, Homo sapiens
gccaggtggagcccc

SEQ ID NO: 1823195 - DNA, 15 bp, Homo sapiens
ccaggtggagcccct

SEQ ID NO: 1823196 - DNA, 15 bp, Homo sapiens
caggtggagcccctc

SEQ ID NO: 1823197 - DNA, 15 bp, Homo sapiens
aggtggagcccctca

SEQ ID NO: 1823198 - DNA, 15 bp, Homo sapiens
ggtggagcccctcac

SEQ ID NO: 1823199 - DNA, 15 bp, Homo sapiens
gtggagcccctcaca

SEQ ID NO: 1823200 - DNA, 15 bp, Homo sapiens
tggagcccctcacac

SEQ ID NO: 1823201 - DNA, 15 bp, Homo sapiens
ggagcccctcacacc

SEQ ID NO: 1823202 - DNA, 15 bp, Homo sapiens
gagcccctcacacct

SEQ ID NO: 1823203 - DNA, 15 bp, Homo sapiens
agcccctcacacctg

SEQ ID NO: 1823204 - DNA, 15 bp, Homo sapiens
gcccctcacacctgt

SEQ ID NO: 1823205 - DNA, 15 bp, Homo sapiens
cccctcacacctgtg

SEQ ID NO: 1823206 - DNA, 15 bp, Homo sapiens
ccctcacacctgtgt

SEQ ID NO: 1823207 - DNA, 15 bp, Homo sapiens
cctcacacctgtgtc

SEQ ID NO: 1823208 - DNA, 15 bp, Homo sapiens
ctcacacctgtgtcc

SEQ ID NO: 1823209 - DNA, 15 bp, Homo sapiens
tcacacctgtgtcct

SEQ ID NO: 1823210 - DNA, 15 bp, Homo sapiens
cacacctgtgtcctc

SEQ ID NO: 1823211 - DNA, 15 bp, Homo sapiens
acacctgtgtcctca

SEQ ID NO: 1823212 - DNA, 15 bp, Homo sapiens
cacctgtgtcctcaa

SEQ ID NO: 1823213 - DNA, 15 bp, Homo sapiens
acctgtgtcctcaag

SEQ ID NO: 1823214 - DNA, 15 bp, Homo sapiens
cctgtgtcctcaagg

SEQ ID NO: 1823215 - DNA, 15 bp, Homo sapiens
ctgtgtcctcaagga

SEQ ID NO: 1823216 - DNA, 15 bp, Homo sapiens
tgtgtcctcaaggac

SEQ ID NO: 1823217 - DNA, 15 bp, Homo sapiens
gtgtcctcaaggacc

SEQ ID NO: 1823218 - DNA, 15 bp, Homo sapiens
tgtcctcaaggaccc

SEQ ID NO: 1823219 - DNA, 15 bp, Homo sapiens
gtcctcaaggaccca

SEQ ID NO: 1823220 - DNA, 15 bp, Homo sapiens
tcctcaaggacccac

SEQ ID NO: 1823221 - DNA, 15 bp, Homo sapiens
cctcaaggacccaca

SEQ ID NO: 1823222 - DNA, 15 bp, Homo sapiens
ctcaaggacccacac

SEQ ID NO: 1823223 - DNA, 15 bp, Homo sapiens
tcaaggacccacacc

SEQ ID NO: 1823224 - DNA, 15 bp, Homo sapiens
caaggacccacacca

SEQ ID NO: 1823225 - DNA, 15 bp, Homo sapiens
aaggacccacaccag

SEQ ID NO: 1823226 - DNA, 15 bp, Homo sapiens
aggacccacaccagg

SEQ ID NO: 1823227 - DNA, 15 bp, Homo sapiens
ggacccacaccagga

SEQ ID NO: 1823228 - DNA, 15 bp, Homo sapiens
gacccacaccaggac

SEQ ID NO: 1823229 - DNA, 15 bp, Homo sapiens
acccacaccaggaca

SEQ ID NO: 1823230 - DNA, 15 bp, Homo sapiens
cccacaccaggacaa

SEQ ID NO: 1823231 - DNA, 15 bp, Homo sapiens
ccacaccaggacaat

SEQ ID NO: 1823232 - DNA, 15 bp, Homo sapiens
cacaccaggacaatg

SEQ ID NO: 1823233 - DNA, 15 bp, Homo sapiens
acaccaggacaatgg

SEQ ID NO: 1823234 - DNA, 15 bp, Homo sapiens
caccaggacaatggc

SEQ ID NO: 1823235 - DNA, 15 bp, Homo sapiens
accaggacaatggcc

SEQ ID NO: 1823236 - DNA, 15 bp, Homo sapiens
ccaggacaatggcca

SEQ ID NO: 1823237 - DNA, 15 bp, Homo sapiens
caggacaatggccat

SEQ ID NO: 1823238 - DNA, 15 bp, Homo sapiens
aggacaatggccata

SEQ ID NO: 1823239 - DNA, 15 bp, Homo sapiens
ggacaatggccatag

SEQ ID NO: 1823240 - DNA, 15 bp, Homo sapiens
gacaatggccatagg

SEQ ID NO: 1823241 - DNA, 15 bp, Homo sapiens
acaatggccataggc

SEQ ID NO: 1823242 - DNA, 15 bp, Homo sapiens
caatggccataggcg

SEQ ID NO: 1823243 - DNA, 15 bp, Homo sapiens
aatggccataggcgg

SEQ ID NO: 1823244 - DNA, 15 bp, Homo sapiens
atggccataggcggg

SEQ ID NO: 1823245 - DNA, 15 bp, Homo sapiens
tggccataggcgggc

SEQ ID NO: 1823246 - DNA, 15 bp, Homo sapiens
ggccataggcgggca

SEQ ID NO: 1823247 - DNA, 15 bp, Homo sapiens
gccataggcgggcac

SEQ ID NO: 1823248 - DNA, 15 bp, Homo sapiens
ccataggcgggcacc

SEQ ID NO: 1823249 - DNA, 15 bp, Homo sapiens
cataggcgggcacct

SEQ ID NO: 1823250 - DNA, 15 bp, Homo sapiens
ataggcgggcacctg

SEQ ID NO: 1823251 - DNA, 15 bp, Homo sapiens
taggcgggcacctgc

SEQ ID NO: 1823252 - DNA, 15 bp, Homo sapiens
aggcgggcacctgca

SEQ ID NO: 1823253 - DNA, 15 bp, Homo sapiens
ggcgggcacctgcag

SEQ ID NO: 1823254 - DNA, 15 bp, Homo sapiens
gcgggcacctgcagc

SEQ ID NO: 1823255 - DNA, 15 bp, Homo sapiens
cgggcacctgcagcc

SEQ ID NO: 1823256 - DNA, 15 bp, Homo sapiens
gggcacctgcagccg

SEQ ID NO: 1823257 - DNA, 15 bp, Homo sapiens
ggcacctgcagccgc

SEQ ID NO: 1823258 - DNA, 15 bp, Homo sapiens
gcacctgcagccgcc

SEQ ID NO: 1823259 - DNA, 15 bp, Homo sapiens
cacctgcagccgccc

SEQ ID NO: 1823260 - DNA, 15 bp, Homo sapiens
acctgcagccgccct

SEQ ID NO: 1823261 - DNA, 15 bp, Homo sapiens
cctgcagccgccctg

SEQ ID NO: 1823262 - DNA, 15 bp, Homo sapiens
ctgcagccgccctgg

SEQ ID NO: 1823263 - DNA, 15 bp, Homo sapiens
tgcagccgccctggc

SEQ ID NO: 1823264 - DNA, 15 bp, Homo sapiens
gcagccgccctggcc

SEQ ID NO: 1823265 - DNA, 15 bp, Homo sapiens
cagccgccctggcca

SEQ ID NO: 1823266 - DNA, 15 bp, Homo sapiens
agccgccctggccag

SEQ ID NO: 1823267 - DNA, 15 bp, Homo sapiens
gccgccctggccagc

SEQ ID NO: 1823268 - DNA, 15 bp, Homo sapiens
ccgccctggccagca

SEQ ID NO: 1823269 - DNA, 15 bp, Homo sapiens
cgccctggccagcag

SEQ ID NO: 1823270 - DNA, 15 bp, Homo sapiens
gccctggccagcagt

SEQ ID NO: 1823271 - DNA, 15 bp, Homo sapiens
ccctggccagcagtg

SEQ ID NO: 1823272 - DNA, 15 bp, Homo sapiens
cctggccagcagtga

SEQ ID NO: 1823273 - DNA, 15 bp, Homo sapiens
ctggccagcagtgag

SEQ ID NO: 1823274 - DNA, 15 bp, Homo sapiens
tggccagcagtgaga

SEQ ID NO: 1823275 - DNA, 15 bp, Homo sapiens
ggccagcagtgagac

SEQ ID NO: 1823276 - DNA, 15 bp, Homo sapiens
gccagcagtgagacg

SEQ ID NO: 1823277 - DNA, 15 bp, Homo sapiens
ccagcagtgagacgg

SEQ ID NO: 1823278 - DNA, 15 bp, Homo sapiens
cagcagtgagacggg

SEQ ID NO: 1823279 - DNA, 15 bp, Homo sapiens
agcagtgagacgggc

SEQ ID NO: 1823280 - DNA, 15 bp, Homo sapiens
gcagtgagacgggca

SEQ ID NO: 1823281 - DNA, 15 bp, Homo sapiens
cagtgagacgggcag

SEQ ID NO: 1823282 - DNA, 15 bp, Homo sapiens
agtgagacgggcaga

SEQ ID NO: 1823283 - DNA, 15 bp, Homo sapiens
gtgagacgggcagag

SEQ ID NO: 1823284 - DNA, 15 bp, Homo sapiens
tgagacgggcagaga

SEQ ID NO: 1823285 - DNA, 15 bp, Homo sapiens
gagacgggcagagag

SEQ ID NO: 1823286 - DNA, 15 bp, Homo sapiens
agacgggcagagagc

SEQ ID NO: 1823287 - DNA, 15 bp, Homo sapiens
gacgggcagagagcc

SEQ ID NO: 1823288 - DNA, 15 bp, Homo sapiens
acgggcagagagccc

SEQ ID NO: 1823289 - DNA, 15 bp, Homo sapiens
cgggcagagagccca

SEQ ID NO: 1823290 - DNA, 15 bp, Homo sapiens
gggcagagagcccag

SEQ ID NO: 1823291 - DNA, 15 bp, Homo sapiens
ggcagagagcccagc

SEQ ID NO: 1823292 - DNA, 15 bp, Homo sapiens
gcagagagcccagcc

SEQ ID NO: 1823293 - DNA, 15 bp, Homo sapiens
cagagagcccagcca

SEQ ID NO: 1823294 - DNA, 15 bp, Homo sapiens
agagagcccagccag

SEQ ID NO: 1823295 - DNA, 15 bp, Homo sapiens
gagagcccagccaga

SEQ ID NO: 1823296 - DNA, 15 bp, Homo sapiens
agagcccagccagat

SEQ ID NO: 1823297 - DNA, 15 bp, Homo sapiens
gagcccagccagata

SEQ ID NO: 1823298 - DNA, 15 bp, Homo sapiens
agcccagccagatag

SEQ ID NO: 1823299 - DNA, 15 bp, Homo sapiens
gcccagccagatagc

SEQ ID NO: 1823300 - DNA, 15 bp, Homo sapiens
cccagccagatagcc

SEQ ID NO: 1823301 - DNA, 15 bp, Homo sapiens
ccagccagatagccc

SEQ ID NO: 1823302 - DNA, 15 bp, Homo sapiens
cagccagatagcccg

SEQ ID NO: 1823303 - DNA, 15 bp, Homo sapiens
agccagatagcccgg

SEQ ID NO: 1823304 - DNA, 15 bp, Homo sapiens
gccagatagcccggt

SEQ ID NO: 1823305 - DNA, 15 bp, Homo sapiens
ccagatagcccggtt

SEQ ID NO: 1823306 - DNA, 15 bp, Homo sapiens
cagatagcccggttc

SEQ ID NO: 1823307 - DNA, 15 bp, Homo sapiens
agatagcccggttcc

SEQ ID NO: 1823308 - DNA, 15 bp, Homo sapiens
gatagcccggttcct

SEQ ID NO: 1823309 - DNA, 15 bp, Homo sapiens
atagcccggttcctg

SEQ ID NO: 1823310 - DNA, 15 bp, Homo sapiens
tagcccggttcctgc

SEQ ID NO: 1823311 - DNA, 15 bp, Homo sapiens
agcccggttcctgcc

SEQ ID NO: 1823312 - DNA, 15 bp, Homo sapiens
gcccggttcctgccc

SEQ ID NO: 1823313 - DNA, 15 bp, Homo sapiens
cccggttcctgcccc

SEQ ID NO: 1823314 - DNA, 15 bp, Homo sapiens
ccggttcctgccccc

SEQ ID NO: 1823315 - DNA, 15 bp, Homo sapiens
cggttcctgccccct

SEQ ID NO: 1823316 - DNA, 15 bp, Homo sapiens
ggttcctgccccctc

SEQ ID NO: 1823317 - DNA, 15 bp, Homo sapiens
gttcctgccccctcc

SEQ ID NO: 1823318 - DNA, 15 bp, Homo sapiens
ttcctgccccctccc

SEQ ID NO: 1823319 - DNA, 15 bp, Homo sapiens
tcctgccccctcccg

SEQ ID NO: 1823320 - DNA, 15 bp, Homo sapiens
cctgccccctcccgc

SEQ ID NO: 1823321 - DNA, 15 bp, Homo sapiens
ctgccccctcccgcc

SEQ ID NO: 1823322 - DNA, 15 bp, Homo sapiens
tgccccctcccgcct

SEQ ID NO: 1823323 - DNA, 15 bp, Homo sapiens
gccccctcccgcctg

SEQ ID NO: 1823324 - DNA, 15 bp, Homo sapiens
ccccctcccgcctgc

SEQ ID NO: 1823325 - DNA, 15 bp, Homo sapiens
cccctcccgcctgcc

SEQ ID NO: 1823326 - DNA, 15 bp, Homo sapiens
ccctcccgcctgccc

SEQ ID NO: 1823327 - DNA, 15 bp, Homo sapiens
cctcccgcctgcccg

SEQ ID NO: 1823328 - DNA, 15 bp, Homo sapiens
ctcccgcctgcccgc

SEQ ID NO: 1823329 - DNA, 15 bp, Homo sapiens
tcccgcctgcccgca

SEQ ID NO: 1823330 - DNA, 15 bp, Homo sapiens
cccgcctgcccgcac

SEQ ID NO: 1823331 - DNA, 15 bp, Homo sapiens
ccgcctgcccgcaca

SEQ ID NO: 1823332 - DNA, 15 bp, Homo sapiens
cgcctgcccgcacag

SEQ ID NO: 1823333 - DNA, 15 bp, Homo sapiens
gcctgcccgcacaga

SEQ ID NO: 1823334 - DNA, 15 bp, Homo sapiens
cctgcccgcacagag

SEQ ID NO: 1823335 - DNA, 15 bp, Homo sapiens
ctgcccgcacagaga

SEQ ID NO: 1823336 - DNA, 15 bp, Homo sapiens
tgcccgcacagagag

SEQ ID NO: 1823337 - DNA, 15 bp, Homo sapiens
gcccgcacagagagg

SEQ ID NO: 1823338 - DNA, 15 bp, Homo sapiens
cccgcacagagaggg

SEQ ID NO: 1823339 - DNA, 15 bp, Homo sapiens
ccgcacagagagggc

SEQ ID NO: 1823340 - DNA, 15 bp, Homo sapiens
cgcacagagagggct

SEQ ID NO: 1823341 - DNA, 15 bp, Homo sapiens
gcacagagagggctg

SEQ ID NO: 1823342 - DNA, 15 bp, Homo sapiens
cacagagagggctgc

SEQ ID NO: 1823343 - DNA, 15 bp, Homo sapiens
acagagagggctgca

SEQ ID NO: 1823344 - DNA, 15 bp, Homo sapiens
cagagagggctgcat

SEQ ID NO: 1823345 - DNA, 15 bp, Homo sapiens
agagagggctgcatg

SEQ ID NO: 1823346 - DNA, 15 bp, Homo sapiens
gagagggctgcatgc

SEQ ID NO: 1823347 - DNA, 15 bp, Homo sapiens
agagggctgcatgca

SEQ ID NO: 1823348 - DNA, 15 bp, Homo sapiens
gagggctgcatgcag

SEQ ID NO: 1823349 - DNA, 15 bp, Homo sapiens
agggctgcatgcagg

SEQ ID NO: 1823350 - DNA, 15 bp, Homo sapiens
gggctgcatgcaggt

SEQ ID NO: 1823351 - DNA, 15 bp, Homo sapiens
ggctgcatgcaggtg

SEQ ID NO: 1823352 - DNA, 15 bp, Homo sapiens
gctgcatgcaggtga

SEQ ID NO: 1823353 - DNA, 15 bp, Homo sapiens
ctgcatgcaggtgag

SEQ ID NO: 1823354 - DNA, 15 bp, Homo sapiens
tgcatgcaggtgagg

SEQ ID NO: 1823355 - DNA, 15 bp, Homo sapiens
gcatgcaggtgaggg

SEQ ID NO: 1823356 - DNA, 15 bp, Homo sapiens
catgcaggtgagggt

SEQ ID NO: 1823357 - DNA, 15 bp, Homo sapiens
atgcaggtgagggtc

SEQ ID NO: 1823358 - DNA, 15 bp, Homo sapiens
tgcaggtgagggtcc

SEQ ID NO: 1823359 - DNA, 15 bp, Homo sapiens
gcaggtgagggtcca

SEQ ID NO: 1823360 - DNA, 15 bp, Homo sapiens
caggtgagggtccat

SEQ ID NO: 1823361 - DNA, 15 bp, Homo sapiens
aggtgagggtccatc

SEQ ID NO: 1823362 - DNA, 15 bp, Homo sapiens
ggtgagggtccatca

SEQ ID NO: 1823363 - DNA, 15 bp, Homo sapiens
gtgagggtccatcac

SEQ ID NO: 1823364 - DNA, 15 bp, Homo sapiens
tgagggtccatcacc

SEQ ID NO: 1823365 - DNA, 15 bp, Homo sapiens
gagggtccatcacct

SEQ ID NO: 1823366 - DNA, 15 bp, Homo sapiens
agggtccatcacctg

SEQ ID NO: 1823367 - DNA, 15 bp, Homo sapiens
gggtccatcacctga

SEQ ID NO: 1823368 - DNA, 15 bp, Homo sapiens
ggtccatcacctgaa

SEQ ID NO: 1823369 - DNA, 15 bp, Homo sapiens
gtccatcacctgaag

SEQ ID NO: 1823370 - DNA, 15 bp, Homo sapiens
tccatcacctgaaga

SEQ ID NO: 1823371 - DNA, 15 bp, Homo sapiens
ccatcacctgaagag

SEQ ID NO: 1823372 - DNA, 15 bp, Homo sapiens
catcacctgaagagc

SEQ ID NO: 1823373 - DNA, 15 bp, Homo sapiens
atcacctgaagagct

SEQ ID NO: 1823374 - DNA, 15 bp, Homo sapiens
tcacctgaagagctt

SEQ ID NO: 1823375 - DNA, 15 bp, Homo sapiens
cacctgaagagcttc

SEQ ID NO: 1823376 - DNA, 15 bp, Homo sapiens
acctgaagagcttca

SEQ ID NO: 1823377 - DNA, 15 bp, Homo sapiens
cctgaagagcttcac

SEQ ID NO: 1823378 - DNA, 15 bp, Homo sapiens
ctgaagagcttcacc

SEQ ID NO: 1823379 - DNA, 15 bp, Homo sapiens
tgaagagcttcacca

SEQ ID NO: 1823380 - DNA, 15 bp, Homo sapiens
gaagagcttcaccag

SEQ ID NO: 1823381 - DNA, 15 bp, Homo sapiens
aagagcttcaccagc

SEQ ID NO: 1823382 - DNA, 15 bp, Homo sapiens
agagcttcaccagcc

SEQ ID NO: 1823383 - DNA, 15 bp, Homo sapiens
gagcttcaccagccc

SEQ ID NO: 1823384 - DNA, 15 bp, Homo sapiens
agcttcaccagcccc

SEQ ID NO: 1823385 - DNA, 15 bp, Homo sapiens
gcttcaccagccccg

SEQ ID NO: 1823386 - DNA, 15 bp, Homo sapiens
cttcaccagccccga

SEQ ID NO: 1823387 - DNA, 15 bp, Homo sapiens
ttcaccagccccgag

SEQ ID NO: 1823388 - DNA, 15 bp, Homo sapiens
tcaccagccccgagg

SEQ ID NO: 1823389 - DNA, 15 bp, Homo sapiens
caccagccccgaggc

SEQ ID NO: 1823390 - DNA, 15 bp, Homo sapiens
accagccccgaggcc

SEQ ID NO: 1823391 - DNA, 15 bp, Homo sapiens
ccagccccgaggcca

SEQ ID NO: 1823392 - DNA, 15 bp, Homo sapiens
cagccccgaggccat

SEQ ID NO: 1823393 - DNA, 15 bp, Homo sapiens
agccccgaggccatg

SEQ ID NO: 1823394 - DNA, 15 bp, Homo sapiens
gccccgaggccatga

SEQ ID NO: 1823395 - DNA, 15 bp, Homo sapiens
ccccgaggccatgag

SEQ ID NO: 1823396 - DNA, 15 bp, Homo sapiens
cccgaggccatgagc

SEQ ID NO: 1823397 - DNA, 15 bp, Homo sapiens
ccgaggccatgagcc

SEQ ID NO: 1823398 - DNA, 15 bp, Homo sapiens
cgaggccatgagcca

SEQ ID NO: 1823399 - DNA, 15 bp, Homo sapiens
gaggccatgagccac

SEQ ID NO: 1823400 - DNA, 15 bp, Homo sapiens
aggccatgagccact

SEQ ID NO: 1823401 - DNA, 15 bp, Homo sapiens
ggccatgagccactg

SEQ ID NO: 1823402 - DNA, 15 bp, Homo sapiens
gccatgagccactga

SEQ ID NO: 1823403 - DNA, 15 bp, Homo sapiens
ccatgagccactgaa

SEQ ID NO: 1823404 - DNA, 15 bp, Homo sapiens
catgagccactgaat

SEQ ID NO: 1823405 - DNA, 15 bp, Homo sapiens
atgagccactgaatc

SEQ ID NO: 1823406 - DNA, 15 bp, Homo sapiens
tgagccactgaatct

SEQ ID NO: 1823407 - DNA, 15 bp, Homo sapiens
gagccactgaatctc

SEQ ID NO: 1823408 - DNA, 15 bp, Homo sapiens
agccactgaatctct

SEQ ID NO: 1823409 - DNA, 15 bp, Homo sapiens
gccactgaatctctc

SEQ ID NO: 1823410 - DNA, 15 bp, Homo sapiens
ccactgaatctctca

SEQ ID NO: 1823411 - DNA, 15 bp, Homo sapiens
cactgaatctctcag

SEQ ID NO: 1823412 - DNA, 15 bp, Homo sapiens
actgaatctctcagg

SEQ ID NO: 1823413 - DNA, 15 bp, Homo sapiens
ctgaatctctcaggg

SEQ ID NO: 1823414 - DNA, 15 bp, Homo sapiens
tgaatctctcagggg

SEQ ID NO: 1823415 - DNA, 15 bp, Homo sapiens
gaatctctcaggggg

SEQ ID NO: 1823416 - DNA, 15 bp, Homo sapiens
aatctctcagggggt

SEQ ID NO: 1823417 - DNA, 15 bp, Homo sapiens
atctctcagggggtt

SEQ ID NO: 1823418 - DNA, 15 bp, Homo sapiens
tctctcagggggttt

SEQ ID NO: 1823419 - DNA, 15 bp, Homo sapiens
ctctcagggggtttt

SEQ ID NO: 1823420 - DNA, 15 bp, Homo sapiens
tctcagggggttttg

SEQ ID NO: 1823421 - DNA, 15 bp, Homo sapiens
ctcagggggttttgg

SEQ ID NO: 1823422 - DNA, 15 bp, Homo sapiens
tcagggggttttggc

SEQ ID NO: 1823423 - DNA, 15 bp, Homo sapiens
cagggggttttggcg

SEQ ID NO: 1823424 - DNA, 15 bp, Homo sapiens
agggggttttggcgc

SEQ ID NO: 1823425 - DNA, 15 bp, Homo sapiens
gggggttttggcgct

SEQ ID NO: 1823426 - DNA, 15 bp, Homo sapiens
ggggttttggcgctt

SEQ ID NO: 1823427 - DNA, 15 bp, Homo sapiens
gggttttggcgcttg

SEQ ID NO: 1823428 - DNA, 15 bp, Homo sapiens
ggttttggcgcttga

SEQ ID NO: 1823429 - DNA, 15 bp, Homo sapiens
gttttggcgcttgag

SEQ ID NO: 1823430 - DNA, 15 bp, Homo sapiens
ttttggcgcttgagg

SEQ ID NO: 1823431 - DNA, 15 bp, Homo sapiens
tttggcgcttgaggt

SEQ ID NO: 1823432 - DNA, 15 bp, Homo sapiens
ttggcgcttgaggtt

SEQ ID NO: 1823433 - DNA, 15 bp, Homo sapiens
tggcgcttgaggttc

SEQ ID NO: 1823434 - DNA, 15 bp, Homo sapiens
ggcgcttgaggttcc

SEQ ID NO: 1823435 - DNA, 15 bp, Homo sapiens
gcgcttgaggttccc

SEQ ID NO: 1823436 - DNA, 15 bp, Homo sapiens
cgcttgaggttcccc

SEQ ID NO: 1823437 - DNA, 15 bp, Homo sapiens
gcttgaggttcccca

SEQ ID NO: 1823438 - DNA, 15 bp, Homo sapiens
cttgaggttccccag

SEQ ID NO: 1823439 - DNA, 15 bp, Homo sapiens
ttgaggttccccagg

SEQ ID NO: 1823440 - DNA, 15 bp, Homo sapiens
tgaggttccccaggt

SEQ ID NO: 1823441 - DNA, 15 bp, Homo sapiens
gaggttccccaggtc

SEQ ID NO: 1823442 - DNA, 15 bp, Homo sapiens
aggttccccaggtca

SEQ ID NO: 1823443 - DNA, 15 bp, Homo sapiens
ggttccccaggtcat

SEQ ID NO: 1823444 - DNA, 15 bp, Homo sapiens
gttccccaggtcatt

SEQ ID NO: 1823445 - DNA, 15 bp, Homo sapiens
ttccccaggtcattc

SEQ ID NO: 1823446 - DNA, 15 bp, Homo sapiens
tccccaggtcattct

SEQ ID NO: 1823447 - DNA, 15 bp, Homo sapiens
ccccaggtcattctg

SEQ ID NO: 1823448 - DNA, 15 bp, Homo sapiens
cccaggtcattctgc

SEQ ID NO: 1823449 - DNA, 15 bp, Homo sapiens
ccaggtcattctgct

SEQ ID NO: 1823450 - DNA, 15 bp, Homo sapiens
caggtcattctgctg

SEQ ID NO: 1823451 - DNA, 15 bp, Homo sapiens
aggtcattctgctgc

SEQ ID NO: 1823452 - DNA, 15 bp, Homo sapiens
ggtcattctgctgcc

SEQ ID NO: 1823453 - DNA, 15 bp, Homo sapiens
gtcattctgctgccc

SEQ ID NO: 1823454 - DNA, 15 bp, Homo sapiens
tcattctgctgccca

SEQ ID NO: 1823455 - DNA, 15 bp, Homo sapiens
cattctgctgcccag

SEQ ID NO: 1823456 - DNA, 15 bp, Homo sapiens
attctgctgcccaga

SEQ ID NO: 1823457 - DNA, 15 bp, Homo sapiens
ttctgctgcccagag

SEQ ID NO: 1823458 - DNA, 15 bp, Homo sapiens
tctgctgcccagaga

SEQ ID NO: 1823459 - DNA, 15 bp, Homo sapiens
ctgctgcccagagag

SEQ ID NO: 1823460 - DNA, 15 bp, Homo sapiens
tgctgcccagagagg

SEQ ID NO: 1823461 - DNA, 15 bp, Homo sapiens
gctgcccagagaggg

SEQ ID NO: 1823462 - DNA, 15 bp, Homo sapiens
ctgcccagagagggt

SEQ ID NO: 1823463 - DNA, 15 bp, Homo sapiens
tgcccagagagggtt

SEQ ID NO: 1823464 - DNA, 15 bp, Homo sapiens
gcccagagagggttg

SEQ ID NO: 1823465 - DNA, 15 bp, Homo sapiens
cccagagagggttga

SEQ ID NO: 1823466 - DNA, 15 bp, Homo sapiens
ccagagagggttgag

SEQ ID NO: 1823467 - DNA, 15 bp, Homo sapiens
cagagagggttgagg

SEQ ID NO: 1823468 - DNA, 15 bp, Homo sapiens
agagagggttgagga

SEQ ID NO: 1823469 - DNA, 15 bp, Homo sapiens
gagagggttgaggac

SEQ ID NO: 1823470 - DNA, 15 bp, Homo sapiens
agagggttgaggacc

SEQ ID NO: 1823471 - DNA, 15 bp, Homo sapiens
gagggttgaggacct

SEQ ID NO: 1823472 - DNA, 15 bp, Homo sapiens
agggttgaggacctc

SEQ ID NO: 1823473 - DNA, 15 bp, Homo sapiens
gggttgaggacctct

SEQ ID NO: 1823474 - DNA, 15 bp, Homo sapiens
ggttgaggacctctg

SEQ ID NO: 1823475 - DNA, 15 bp, Homo sapiens
gttgaggacctctga

SEQ ID NO: 1823476 - DNA, 15 bp, Homo sapiens
ttgaggacctctgac

SEQ ID NO: 1823477 - DNA, 15 bp, Homo sapiens
tgaggacctctgacc

SEQ ID NO: 1823478 - DNA, 15 bp, Homo sapiens
gaggacctctgacct

SEQ ID NO: 1823479 - DNA, 15 bp, Homo sapiens
aggacctctgacctg

SEQ ID NO: 1823480 - DNA, 15 bp, Homo sapiens
ggacctctgacctgg

SEQ ID NO: 1823481 - DNA, 15 bp, Homo sapiens
gacctctgacctgga

SEQ ID NO: 1823482 - DNA, 15 bp, Homo sapiens
acctctgacctggag

SEQ ID NO: 1823483 - DNA, 15 bp, Homo sapiens
cctctgacctggagc

SEQ ID NO: 1823484 - DNA, 15 bp, Homo sapiens
ctctgacctggagcc

SEQ ID NO: 1823485 - DNA, 15 bp, Homo sapiens
tctgacctggagccc

SEQ ID NO: 1823486 - DNA, 15 bp, Homo sapiens
ctgacctggagcccc

SEQ ID NO: 1823487 - DNA, 15 bp, Homo sapiens
tgacctggagcccca

SEQ ID NO: 1823488 - DNA, 15 bp, Homo sapiens
gacctggagccccaa

SEQ ID NO: 1823489 - DNA, 15 bp, Homo sapiens
acctggagccccaaa

SEQ ID NO: 1823490 - DNA, 15 bp, Homo sapiens
cctggagccccaaag

SEQ ID NO: 1823491 - DNA, 15 bp, Homo sapiens
ctggagccccaaagg

SEQ ID NO: 1823492 - DNA, 15 bp, Homo sapiens
tggagccccaaaggg

SEQ ID NO: 1823493 - DNA, 15 bp, Homo sapiens
ggagccccaaagggg

SEQ ID NO: 1823494 - DNA, 15 bp, Homo sapiens
gagccccaaagggga

SEQ ID NO: 1823495 - DNA, 15 bp, Homo sapiens
agccccaaaggggaa

SEQ ID NO: 1823496 - DNA, 15 bp, Homo sapiens
gccccaaaggggaag

SEQ ID NO: 1823497 - DNA, 15 bp, Homo sapiens
ccccaaaggggaagg

SEQ ID NO: 1823498 - DNA, 15 bp, Homo sapiens
cccaaaggggaaggg

SEQ ID NO: 1823499 - DNA, 15 bp, Homo sapiens
ccaaaggggaagggt

SEQ ID NO: 1823500 - DNA, 15 bp, Homo sapiens
caaaggggaagggta

SEQ ID NO: 1823501 - DNA, 15 bp, Homo sapiens
aaaggggaagggtac

SEQ ID NO: 1823502 - DNA, 15 bp, Homo sapiens
aaggggaagggtacc

SEQ ID NO: 1823503 - DNA, 15 bp, Homo sapiens
aggggaagggtaccc

SEQ ID NO: 1823504 - DNA, 15 bp, Homo sapiens
ggggaagggtaccct

SEQ ID NO: 1823505 - DNA, 15 bp, Homo sapiens
gggaagggtacccta

SEQ ID NO: 1823506 - DNA, 15 bp, Homo sapiens
ggaagggtaccctaa

SEQ ID NO: 1823507 - DNA, 15 bp, Homo sapiens
gaagggtaccctaag

SEQ ID NO: 1823508 - DNA, 15 bp, Homo sapiens
aagggtaccctaaga

SEQ ID NO: 1823509 - DNA, 15 bp, Homo sapiens
agggtaccctaagac

SEQ ID NO: 1823510 - DNA, 15 bp, Homo sapiens
gggtaccctaagacc

SEQ ID NO: 1823511 - DNA, 15 bp, Homo sapiens
ggtaccctaagacca

SEQ ID NO: 1823512 - DNA, 15 bp, Homo sapiens
gtaccctaagaccag

SEQ ID NO: 1823513 - DNA, 15 bp, Homo sapiens
taccctaagaccagc

SEQ ID NO: 1823514 - DNA, 15 bp, Homo sapiens
accctaagaccagcc

SEQ ID NO: 1823515 - DNA, 15 bp, Homo sapiens
ccctaagaccagcca

SEQ ID NO: 1823516 - DNA, 15 bp, Homo sapiens
cctaagaccagccag

SEQ ID NO: 1823517 - DNA, 15 bp, Homo sapiens
ctaagaccagccagc

SEQ ID NO: 1823518 - DNA, 15 bp, Homo sapiens
taagaccagccagcc

SEQ ID NO: 1823519 - DNA, 15 bp, Homo sapiens
aagaccagccagcca

SEQ ID NO: 1823520 - DNA, 15 bp, Homo sapiens
agaccagccagccat

SEQ ID NO: 1823521 - DNA, 15 bp, Homo sapiens
gaccagccagccatc

SEQ ID NO: 1823522 - DNA, 15 bp, Homo sapiens
accagccagccatct

SEQ ID NO: 1823523 - DNA, 15 bp, Homo sapiens
ccagccagccatcta

SEQ ID NO: 1823524 - DNA, 15 bp, Homo sapiens
cagccagccatctac

SEQ ID NO: 1823525 - DNA, 15 bp, Homo sapiens
agccagccatctact

SEQ ID NO: 1823526 - DNA, 15 bp, Homo sapiens
gccagccatctactc

SEQ ID NO: 1823527 - DNA, 15 bp, Homo sapiens
ccagccatctactct

SEQ ID NO: 1823528 - DNA, 15 bp, Homo sapiens
cagccatctactctc

SEQ ID NO: 1823529 - DNA, 15 bp, Homo sapiens
agccatctactctca

SEQ ID NO: 1823530 - DNA, 15 bp, Homo sapiens
gccatctactctcag

SEQ ID NO: 1823531 - DNA, 15 bp, Homo sapiens
ccatctactctcagg

SEQ ID NO: 1823532 - DNA, 15 bp, Homo sapiens
catctactctcaggt

SEQ ID NO: 1823533 - DNA, 15 bp, Homo sapiens
atctactctcaggtg

SEQ ID NO: 1823534 - DNA, 15 bp, Homo sapiens
tctactctcaggtgg

SEQ ID NO: 1823535 - DNA, 15 bp, Homo sapiens
ctactctcaggtggg

SEQ ID NO: 1823536 - DNA, 15 bp, Homo sapiens
tactctcaggtggga

SEQ ID NO: 1823537 - DNA, 15 bp, Homo sapiens
actctcaggtgggaa

SEQ ID NO: 1823538 - DNA, 15 bp, Homo sapiens
ctctcaggtgggaaa

SEQ ID NO: 1823539 - DNA, 15 bp, Homo sapiens
tctcaggtgggaaag

SEQ ID NO: 1823540 - DNA, 15 bp, Homo sapiens
ctcaggtgggaaagg

SEQ ID NO: 1823541 - DNA, 15 bp, Homo sapiens
tcaggtgggaaaggg

SEQ ID NO: 1823542 - DNA, 15 bp, Homo sapiens
caggtgggaaagggg

SEQ ID NO: 1823543 - DNA, 15 bp, Homo sapiens
aggtgggaaaggggt

SEQ ID NO: 1823544 - DNA, 15 bp, Homo sapiens
ggtgggaaaggggta

SEQ ID NO: 1823545 - DNA, 15 bp, Homo sapiens
gtgggaaaggggtag

SEQ ID NO: 1823546 - DNA, 15 bp, Homo sapiens
tgggaaaggggtagg

SEQ ID NO: 1823547 - DNA, 15 bp, Homo sapiens
gggaaaggggtaggg

SEQ ID NO: 1823548 - DNA, 15 bp, Homo sapiens
ggaaaggggtagggt

SEQ ID NO: 1823549 - DNA, 15 bp, Homo sapiens
gaaaggggtagggtt

SEQ ID NO: 1823550 - DNA, 15 bp, Homo sapiens
aaaggggtagggttt

SEQ ID NO: 1823551 - DNA, 15 bp, Homo sapiens
aaggggtagggttta

SEQ ID NO: 1823552 - DNA, 15 bp, Homo sapiens
aggggtagggtttag

SEQ ID NO: 1823553 - DNA, 15 bp, Homo sapiens
ggggtagggtttaga

SEQ ID NO: 1823554 - DNA, 15 bp, Homo sapiens
gggtagggtttagat

SEQ ID NO: 1823555 - DNA, 15 bp, Homo sapiens
ggtagggtttagata

SEQ ID NO: 1823556 - DNA, 15 bp, Homo sapiens
gtagggtttagatat

SEQ ID NO: 1823557 - DNA, 15 bp, Homo sapiens
tagggtttagatatg

SEQ ID NO: 1823558 - DNA, 15 bp, Homo sapiens
agggtttagatatgg

SEQ ID NO: 1823559 - DNA, 15 bp, Homo sapiens
gggtttagatatggc

SEQ ID NO: 1823560 - DNA, 15 bp, Homo sapiens
ggtttagatatggcc

SEQ ID NO: 1823561 - DNA, 15 bp, Homo sapiens
gtttagatatggccc

SEQ ID NO: 1823562 - DNA, 15 bp, Homo sapiens
tttagatatggcccc

SEQ ID NO: 1823563 - DNA, 15 bp, Homo sapiens
ttagatatggccccc

SEQ ID NO: 1823564 - DNA, 15 bp, Homo sapiens
tagatatggccccct

SEQ ID NO: 1823565 - DNA, 15 bp, Homo sapiens
agatatggccccctc

SEQ ID NO: 1823566 - DNA, 15 bp, Homo sapiens
gatatggccccctcc

SEQ ID NO: 1823567 - DNA, 15 bp, Homo sapiens
atatggccccctccc

SEQ ID NO: 1823568 - DNA, 15 bp, Homo sapiens
tatggccccctcccc

SEQ ID NO: 1823569 - DNA, 15 bp, Homo sapiens
atggccccctcccct

SEQ ID NO: 1823570 - DNA, 15 bp, Homo sapiens
tggccccctcccctc

SEQ ID NO: 1823571 - DNA, 15 bp, Homo sapiens
gccccctcccctcca

SEQ ID NO: 1823572 - DNA, 15 bp, Homo sapiens
ccccctcccctccac

SEQ ID NO: 1823573 - DNA, 15 bp, Homo sapiens
cccctcccctccacg

SEQ ID NO: 1823574 - DNA, 15 bp, Homo sapiens
ccctcccctccacgt

SEQ ID NO: 1823575 - DNA, 15 bp, Homo sapiens
cctcccctccacgtc

SEQ ID NO: 1823576 - DNA, 15 bp, Homo sapiens
ctcccctccacgtcc

SEQ ID NO: 1823577 - DNA, 15 bp, Homo sapiens
tcccctccacgtcct

SEQ ID NO: 1823578 - DNA, 15 bp, Homo sapiens
cccctccacgtcctg

SEQ ID NO: 1823579 - DNA, 15 bp, Homo sapiens
ccctccacgtcctga

SEQ ID NO: 1823580 - DNA, 15 bp, Homo sapiens
cctccacgtcctgaa

SEQ ID NO: 1823581 - DNA, 15 bp, Homo sapiens
ctccacgtcctgaaa

SEQ ID NO: 1823582 - DNA, 15 bp, Homo sapiens
tccacgtcctgaaat

SEQ ID NO: 1823583 - DNA, 15 bp, Homo sapiens
ccacgtcctgaaatt

SEQ ID NO: 1823584 - DNA, 15 bp, Homo sapiens
cacgtcctgaaatta

SEQ ID NO: 1823585 - DNA, 15 bp, Homo sapiens
acgtcctgaaattac

SEQ ID NO: 1823586 - DNA, 15 bp, Homo sapiens
cgtcctgaaattacc

SEQ ID NO: 1823587 - DNA, 15 bp, Homo sapiens
gtcctgaaattacct

SEQ ID NO: 1823588 - DNA, 15 bp, Homo sapiens
tcctgaaattacctt

SEQ ID NO: 1823589 - DNA, 15 bp, Homo sapiens
cctgaaattaccttg

SEQ ID NO: 1823590 - DNA, 15 bp, Homo sapiens
ctgaaattaccttgg

SEQ ID NO: 1823591 - DNA, 15 bp, Homo sapiens
tgaaattaccttggg

SEQ ID NO: 1823592 - DNA, 15 bp, Homo sapiens
gaaattaccttgggc

SEQ ID NO: 1823593 - DNA, 15 bp, Homo sapiens
aaattaccttgggct

SEQ ID NO: 1823594 - DNA, 15 bp, Homo sapiens
aattaccttgggctg

SEQ ID NO: 1823595 - DNA, 15 bp, Homo sapiens
attaccttgggctgt

SEQ ID NO: 1823596 - DNA, 15 bp, Homo sapiens
ttaccttgggctgtg

SEQ ID NO: 1823597 - DNA, 15 bp, Homo sapiens
taccttgggctgtgc

SEQ ID NO: 1823598 - DNA, 15 bp, Homo sapiens
accttgggctgtgct

SEQ ID NO: 1823599 - DNA, 15 bp, Homo sapiens
ccttgggctgtgctg

SEQ ID NO: 1823600 - DNA, 15 bp, Homo sapiens
cttgggctgtgctgg

SEQ ID NO: 1823601 - DNA, 15 bp, Homo sapiens
ttgggctgtgctggc

SEQ ID NO: 1823602 - DNA, 15 bp, Homo sapiens
tgggctgtgctggcc

SEQ ID NO: 1823603 - DNA, 15 bp, Homo sapiens
gggctgtgctggccg

SEQ ID NO: 1823604 - DNA, 15 bp, Homo sapiens
ggctgtgctggccga

SEQ ID NO: 1823605 - DNA, 15 bp, Homo sapiens
gctgtgctggccgag

SEQ ID NO: 1823606 - DNA, 15 bp, Homo sapiens
ctgtgctggccgaga

SEQ ID NO: 1823607 - DNA, 15 bp, Homo sapiens
tgtgctggccgagag

SEQ ID NO: 1823608 - DNA, 15 bp, Homo sapiens
gtgctggccgagagc

SEQ ID NO: 1823609 - DNA, 15 bp, Homo sapiens
tgctggccgagagcc

SEQ ID NO: 1823610 - DNA, 15 bp, Homo sapiens
gctggccgagagccg

SEQ ID NO: 1823611 - DNA, 15 bp, Homo sapiens
ctggccgagagccgc

SEQ ID NO: 1823612 - DNA, 15 bp, Homo sapiens
tggccgagagccgcg

SEQ ID NO: 1823613 - DNA, 15 bp, Homo sapiens
ggccgagagccgcgg

SEQ ID NO: 1823614 - DNA, 15 bp, Homo sapiens
gccgagagccgcggg

SEQ ID NO: 1823615 - DNA, 15 bp, Homo sapiens
ccgagagccgcgggg

SEQ ID NO: 1823616 - DNA, 15 bp, Homo sapiens
cgagagccgcgggga

SEQ ID NO: 1823617 - DNA, 15 bp, Homo sapiens
gagagccgcggggac

SEQ ID NO: 1823618 - DNA, 15 bp, Homo sapiens
agagccgcggggacc

SEQ ID NO: 1823619 - DNA, 15 bp, Homo sapiens
gagccgcggggacca

SEQ ID NO: 1823620 - DNA, 15 bp, Homo sapiens
agccgcggggaccag

SEQ ID NO: 1823621 - DNA, 15 bp, Homo sapiens
gccgcggggaccaga

SEQ ID NO: 1823622 - DNA, 15 bp, Homo sapiens
ccgcggggaccagat

SEQ ID NO: 1823623 - DNA, 15 bp, Homo sapiens
cgcggggaccagatt

SEQ ID NO: 1823624 - DNA, 15 bp, Homo sapiens
gcggggaccagattt

SEQ ID NO: 1823625 - DNA, 15 bp, Homo sapiens
cggggaccagatttg

SEQ ID NO: 1823626 - DNA, 15 bp, Homo sapiens
ggggaccagatttga

SEQ ID NO: 1823627 - DNA, 15 bp, Homo sapiens
gggaccagatttgag

SEQ ID NO: 1823628 - DNA, 15 bp, Homo sapiens
ggaccagatttgagc

SEQ ID NO: 1823629 - DNA, 15 bp, Homo sapiens
gaccagatttgagct

SEQ ID NO: 1823630 - DNA, 15 bp, Homo sapiens
accagatttgagctg

SEQ ID NO: 1823631 - DNA, 15 bp, Homo sapiens
ccagatttgagctgg

SEQ ID NO: 1823632 - DNA, 15 bp, Homo sapiens
cagatttgagctgga

SEQ ID NO: 1823633 - DNA, 15 bp, Homo sapiens
agatttgagctggac

SEQ ID NO: 1823634 - DNA, 15 bp, Homo sapiens
gatttgagctggacg

SEQ ID NO: 1823635 - DNA, 15 bp, Homo sapiens
atttgagctggacgt

SEQ ID NO: 1823636 - DNA, 15 bp, Homo sapiens
tttgagctggacgtg

SEQ ID NO: 1823637 - DNA, 15 bp, Homo sapiens
ttgagctggacgtga

SEQ ID NO: 1823638 - DNA, 15 bp, Homo sapiens
tgagctggacgtgag

SEQ ID NO: 1823639 - DNA, 15 bp, Homo sapiens
gagctggacgtgagc

SEQ ID NO: 1823640 - DNA, 15 bp, Homo sapiens
agctggacgtgagct

SEQ ID NO: 1823641 - DNA, 15 bp, Homo sapiens
gctggacgtgagctt

SEQ ID NO: 1823642 - DNA, 15 bp, Homo sapiens
ctggacgtgagcttt

SEQ ID NO: 1823643 - DNA, 15 bp, Homo sapiens
tggacgtgagcttta

SEQ ID NO: 1823644 - DNA, 15 bp, Homo sapiens
ggacgtgagctttat

SEQ ID NO: 1823645 - DNA, 15 bp, Homo sapiens
gacgtgagctttatt

SEQ ID NO: 1823646 - DNA, 15 bp, Homo sapiens
acgtgagctttattc

SEQ ID NO: 1823647 - DNA, 15 bp, Homo sapiens
cgtgagctttattcc

SEQ ID NO: 1823648 - DNA, 15 bp, Homo sapiens
gtgagctttattcca

SEQ ID NO: 1823649 - DNA, 15 bp, Homo sapiens
tgagctttattccag

SEQ ID NO: 1823650 - DNA, 15 bp, Homo sapiens
gagctttattccaga

SEQ ID NO: 1823651 - DNA, 15 bp, Homo sapiens
gctttattccagacg

SEQ ID NO: 1823652 - DNA, 15 bp, Homo sapiens
ctttattccagacgg

SEQ ID NO: 1823653 - DNA, 15 bp, Homo sapiens
tttattccagacgga

SEQ ID NO: 1823654 - DNA, 15 bp, Homo sapiens
ttattccagacggag

SEQ ID NO: 1823655 - DNA, 15 bp, Homo sapiens
tattccagacggagc

SEQ ID NO: 1823656 - DNA, 15 bp, Homo sapiens
attccagacggagca

SEQ ID NO: 1823657 - DNA, 15 bp, Homo sapiens
ttccagacggagcag

SEQ ID NO: 1823658 - DNA, 15 bp, Homo sapiens
tccagacggagcagc

SEQ ID NO: 1823659 - DNA, 15 bp, Homo sapiens
ccagacggagcagct

SEQ ID NO: 1823660 - DNA, 15 bp, Homo sapiens
cagacggagcagcta

SEQ ID NO: 1823661 - DNA, 15 bp, Homo sapiens
agacggagcagctac

SEQ ID NO: 1823662 - DNA, 15 bp, Homo sapiens
gacggagcagctact

SEQ ID NO: 1823663 - DNA, 15 bp, Homo sapiens
acggagcagctactt

SEQ ID NO: 1823664 - DNA, 15 bp, Homo sapiens
cggagcagctacttt

SEQ ID NO: 1823665 - DNA, 15 bp, Homo sapiens
ggagcagctactttg

SEQ ID NO: 1823666 - DNA, 15 bp, Homo sapiens
gagcagctactttgt

SEQ ID NO: 1823667 - DNA, 15 bp, Homo sapiens
agcagctactttgta

SEQ ID NO: 1823668 - DNA, 15 bp, Homo sapiens
gcagctactttgtaa

SEQ ID NO: 1823669 - DNA, 15 bp, Homo sapiens
cagctactttgtaag

SEQ ID NO: 1823670 - DNA, 15 bp, Homo sapiens
agctactttgtaagc

SEQ ID NO: 1823671 - DNA, 15 bp, Homo sapiens
gctactttgtaagcg

SEQ ID NO: 1823672 - DNA, 15 bp, Homo sapiens
ctactttgtaagcga

SEQ ID NO: 1823673 - DNA, 15 bp, Homo sapiens
tactttgtaagcgat

SEQ ID NO: 1823674 - DNA, 15 bp, Homo sapiens
actttgtaagcgatc

SEQ ID NO: 1823675 - DNA, 15 bp, Homo sapiens
ctttgtaagcgatct

SEQ ID NO: 1823676 - DNA, 15 bp, Homo sapiens
tttgtaagcgatctc

SEQ ID NO: 1823677 - DNA, 15 bp, Homo sapiens
ttgtaagcgatctcc

SEQ ID NO: 1823678 - DNA, 15 bp, Homo sapiens
tgtaagcgatctccc

SEQ ID NO: 1823679 - DNA, 15 bp, Homo sapiens
gtaagcgatctccct

SEQ ID NO: 1823680 - DNA, 15 bp, Homo sapiens
taagcgatctccctg

SEQ ID NO: 1823681 - DNA, 15 bp, Homo sapiens
aagcgatctccctgg

SEQ ID NO: 1823682 - DNA, 15 bp, Homo sapiens
agcgatctccctggg

SEQ ID NO: 1823683 - DNA, 15 bp, Homo sapiens
gcgatctccctggga

SEQ ID NO: 1823684 - DNA, 15 bp, Homo sapiens
cgatctccctgggat

SEQ ID NO: 1823685 - DNA, 15 bp, Homo sapiens
gatctccctgggatc

SEQ ID NO: 1823686 - DNA, 15 bp, Homo sapiens
atctccctgggatcg

SEQ ID NO: 1823687 - DNA, 15 bp, Homo sapiens
tctccctgggatcga

SEQ ID NO: 1823688 - DNA, 15 bp, Homo sapiens
ctccctgggatcgat

SEQ ID NO: 1823689 - DNA, 15 bp, Homo sapiens
tccctgggatcgata

SEQ ID NO: 1823690 - DNA, 15 bp, Homo sapiens
ccctgggatcgatat

SEQ ID NO: 1823691 - DNA, 15 bp, Homo sapiens
cctgggatcgatatc

SEQ ID NO: 1823692 - DNA, 15 bp, Homo sapiens
ctgggatcgatatca

SEQ ID NO: 1823693 - DNA, 15 bp, Homo sapiens
tgggatcgatatcat

SEQ ID NO: 1823694 - DNA, 15 bp, Homo sapiens
gggatcgatatcatg

SEQ ID NO: 1823695 - DNA, 15 bp, Homo sapiens
ggatcgatatcatgg

SEQ ID NO: 1823696 - DNA, 15 bp, Homo sapiens
gatcgatatcatgga

SEQ ID NO: 1823697 - DNA, 15 bp, Homo sapiens
atcgatatcatggag

SEQ ID NO: 1823698 - DNA, 15 bp, Homo sapiens
tcgatatcatggagg

SEQ ID NO: 1823699 - DNA, 15 bp, Homo sapiens
cgatatcatggaggg

SEQ ID NO: 1823700 - DNA, 15 bp, Homo sapiens
gatatcatggagggg

SEQ ID NO: 1823701 - DNA, 15 bp, Homo sapiens
atatcatggaggggc

SEQ ID NO: 1823702 - DNA, 15 bp, Homo sapiens
tatcatggaggggca

SEQ ID NO: 1823703 - DNA, 15 bp, Homo sapiens
atcatggaggggcac

SEQ ID NO: 1823704 - DNA, 15 bp, Homo sapiens
tcatggaggggcaca

SEQ ID NO: 1823705 - DNA, 15 bp, Homo sapiens
catggaggggcacag

SEQ ID NO: 1823706 - DNA, 15 bp, Homo sapiens
atggaggggcacaga

SEQ ID NO: 1823707 - DNA, 15 bp, Homo sapiens
tggaggggcacagat

SEQ ID NO: 1823708 - DNA, 15 bp, Homo sapiens
ggaggggcacagatg

SEQ ID NO: 1823709 - DNA, 15 bp, Homo sapiens
gaggggcacagatgg

SEQ ID NO: 1823710 - DNA, 15 bp, Homo sapiens
aggggcacagatggg

SEQ ID NO: 1823711 - DNA, 15 bp, Homo sapiens
ggggcacagatgggc

SEQ ID NO: 1823712 - DNA, 15 bp, Homo sapiens
gggcacagatgggct

SEQ ID NO: 1823713 - DNA, 15 bp, Homo sapiens
ggcacagatgggctt

SEQ ID NO: 1823714 - DNA, 15 bp, Homo sapiens
gcacagatgggcttc

SEQ ID NO: 1823715 - DNA, 15 bp, Homo sapiens
cacagatgggcttca

SEQ ID NO: 1823716 - DNA, 15 bp, Homo sapiens
acagatgggcttcag

SEQ ID NO: 1823717 - DNA, 15 bp, Homo sapiens
cagatgggcttcagc

SEQ ID NO: 1823718 - DNA, 15 bp, Homo sapiens
agatgggcttcagct

SEQ ID NO: 1823719 - DNA, 15 bp, Homo sapiens
gatgggcttcagctg

SEQ ID NO: 1823720 - DNA, 15 bp, Homo sapiens
atgggcttcagctgt

SEQ ID NO: 1823721 - DNA, 15 bp, Homo sapiens
tgggcttcagctgtg

SEQ ID NO: 1823722 - DNA, 15 bp, Homo sapiens
gggcttcagctgtgc

SEQ ID NO: 1823723 - DNA, 15 bp, Homo sapiens
ggcttcagctgtgct

SEQ ID NO: 1823724 - DNA, 15 bp, Homo sapiens
gcttcagctgtgctg

SEQ ID NO: 1823725 - DNA, 15 bp, Homo sapiens
cttcagctgtgctgg

SEQ ID NO: 1823726 - DNA, 15 bp, Homo sapiens
ttcagctgtgctggg

SEQ ID NO: 1823727 - DNA, 15 bp, Homo sapiens
tcagctgtgctgggt

SEQ ID NO: 1823728 - DNA, 15 bp, Homo sapiens
cagctgtgctgggtg

SEQ ID NO: 1823729 - DNA, 15 bp, Homo sapiens
agctgtgctgggtgg

SEQ ID NO: 1823730 - DNA, 15 bp, Homo sapiens
gctgtgctgggtgga

SEQ ID NO: 1823731 - DNA, 15 bp, Homo sapiens
ctgtgctgggtggaa

SEQ ID NO: 1823732 - DNA, 15 bp, Homo sapiens
tgtgctgggtggaag

SEQ ID NO: 1823733 - DNA, 15 bp, Homo sapiens
gtgctgggtggaaga

SEQ ID NO: 1823734 - DNA, 15 bp, Homo sapiens
tgctgggtggaagag

SEQ ID NO: 1823735 - DNA, 15 bp, Homo sapiens
gctgggtggaagaga

SEQ ID NO: 1823736 - DNA, 15 bp, Homo sapiens
ctgggtggaagagaa

SEQ ID NO: 1823737 - DNA, 15 bp, Homo sapiens
tgggtggaagagaaa

SEQ ID NO: 1823738 - DNA, 15 bp, Homo sapiens
gggtggaagagaaaa

SEQ ID NO: 1823739 - DNA, 15 bp, Homo sapiens
ggtggaagagaaaac

SEQ ID NO: 1823740 - DNA, 15 bp, Homo sapiens
gtggaagagaaaaca

SEQ ID NO: 1823741 - DNA, 15 bp, Homo sapiens
tggaagagaaaacat

SEQ ID NO: 1823742 - DNA, 15 bp, Homo sapiens
ggaagagaaaacatg

SEQ ID NO: 1823743 - DNA, 15 bp, Homo sapiens
gaagagaaaacatgc

SEQ ID NO: 1823744 - DNA, 15 bp, Homo sapiens
aagagaaaacatgcc

SEQ ID NO: 1823745 - DNA, 15 bp, Homo sapiens
agagaaaacatgccc

SEQ ID NO: 1823746 - DNA, 15 bp, Homo sapiens
gagaaaacatgccct

SEQ ID NO: 1823747 - DNA, 15 bp, Homo sapiens
agaaaacatgccctg

SEQ ID NO: 1823748 - DNA, 15 bp, Homo sapiens
gaaaacatgccctgt

SEQ ID NO: 1823749 - DNA, 15 bp, Homo sapiens
aaaacatgccctgtc

SEQ ID NO: 1823750 - DNA, 15 bp, Homo sapiens
aaacatgccctgtcg

SEQ ID NO: 1823751 - DNA, 15 bp, Homo sapiens
aacatgccctgtcgg

SEQ ID NO: 1823752 - DNA, 15 bp, Homo sapiens
acatgccctgtcggc

SEQ ID NO: 1823753 - DNA, 15 bp, Homo sapiens
catgccctgtcggcc

SEQ ID NO: 1823754 - DNA, 15 bp, Homo sapiens
atgccctgtcggccc

SEQ ID NO: 1823755 - DNA, 15 bp, Homo sapiens
tgccctgtcggcccc

SEQ ID NO: 1823756 - DNA, 15 bp, Homo sapiens
gccctgtcggcccct

SEQ ID NO: 1823757 - DNA, 15 bp, Homo sapiens
ccctgtcggcccctc

SEQ ID NO: 1823758 - DNA, 15 bp, Homo sapiens
cctgtcggcccctca

SEQ ID NO: 1823759 - DNA, 15 bp, Homo sapiens
ctgtcggcccctcag

SEQ ID NO: 1823760 - DNA, 15 bp, Homo sapiens
tgtcggcccctcagc

SEQ ID NO: 1823761 - DNA, 15 bp, Homo sapiens
gtcggcccctcagca

SEQ ID NO: 1823762 - DNA, 15 bp, Homo sapiens
tcggcccctcagcaa

SEQ ID NO: 1823763 - DNA, 15 bp, Homo sapiens
cggcccctcagcaag

SEQ ID NO: 1823764 - DNA, 15 bp, Homo sapiens
ggcccctcagcaagt

SEQ ID NO: 1823765 - DNA, 15 bp, Homo sapiens
gcccctcagcaagtg

SEQ ID NO: 1823766 - DNA, 15 bp, Homo sapiens
cccctcagcaagtgc

SEQ ID NO: 1823767 - DNA, 15 bp, Homo sapiens
ccctcagcaagtgct

SEQ ID NO: 1823768 - DNA, 15 bp, Homo sapiens
cctcagcaagtgctc

SEQ ID NO: 1823769 - DNA, 15 bp, Homo sapiens
ctcagcaagtgctct

SEQ ID NO: 1823770 - DNA, 15 bp, Homo sapiens
tcagcaagtgctctg

SEQ ID NO: 1823771 - DNA, 15 bp, Homo sapiens
cagcaagtgctctgc

SEQ ID NO: 1823772 - DNA, 15 bp, Homo sapiens
agcaagtgctctgct

SEQ ID NO: 1823773 - DNA, 15 bp, Homo sapiens
gcaagtgctctgctc

SEQ ID NO: 1823774 - DNA, 15 bp, Homo sapiens
caagtgctctgctct

SEQ ID NO: 1823775 - DNA, 15 bp, Homo sapiens
aagtgctctgctctc

SEQ ID NO: 1823776 - DNA, 15 bp, Homo sapiens
agtgctctgctctct

SEQ ID NO: 1823777 - DNA, 15 bp, Homo sapiens
gtgctctgctctctg

SEQ ID NO: 1823778 - DNA, 15 bp, Homo sapiens
tgctctgctctctgg

SEQ ID NO: 1823779 - DNA, 15 bp, Homo sapiens
gctctgctctctgga

SEQ ID NO: 1823780 - DNA, 15 bp, Homo sapiens
ctctgctctctggac

SEQ ID NO: 1823781 - DNA, 15 bp, Homo sapiens
tctgctctctggact

SEQ ID NO: 1823782 - DNA, 15 bp, Homo sapiens
ctgctctctggactg

SEQ ID NO: 1823783 - DNA, 15 bp, Homo sapiens
tgctctctggactga

SEQ ID NO: 1823784 - DNA, 15 bp, Homo sapiens
gctctctggactgag

SEQ ID NO: 1823785 - DNA, 15 bp, Homo sapiens
ctctctggactgaga

SEQ ID NO: 1823786 - DNA, 15 bp, Homo sapiens
tctctggactgagat

SEQ ID NO: 1823787 - DNA, 15 bp, Homo sapiens
ctctggactgagatg

SEQ ID NO: 1823788 - DNA, 15 bp, Homo sapiens
tctggactgagatgc

SEQ ID NO: 1823789 - DNA, 15 bp, Homo sapiens
ctggactgagatgca

SEQ ID NO: 1823790 - DNA, 15 bp, Homo sapiens
tggactgagatgcag

SEQ ID NO: 1823791 - DNA, 15 bp, Homo sapiens
ggactgagatgcagg

SEQ ID NO: 1823792 - DNA, 15 bp, Homo sapiens
gactgagatgcaggt

SEQ ID NO: 1823793 - DNA, 15 bp, Homo sapiens
actgagatgcaggtc

SEQ ID NO: 1823794 - DNA, 15 bp, Homo sapiens
ctgagatgcaggtca

SEQ ID NO: 1823795 - DNA, 15 bp, Homo sapiens
tgagatgcaggtcag

SEQ ID NO: 1823796 - DNA, 15 bp, Homo sapiens
gagatgcaggtcagc

SEQ ID NO: 1823797 - DNA, 15 bp, Homo sapiens
agatgcaggtcagca

SEQ ID NO: 1823798 - DNA, 15 bp, Homo sapiens
gatgcaggtcagcag

SEQ ID NO: 1823799 - DNA, 15 bp, Homo sapiens
atgcaggtcagcagc

SEQ ID NO: 1823800 - DNA, 15 bp, Homo sapiens
tgcaggtcagcagca

SEQ ID NO: 1823801 - DNA, 15 bp, Homo sapiens
gcaggtcagcagcaa

SEQ ID NO: 1823802 - DNA, 15 bp, Homo sapiens
caggtcagcagcaag

SEQ ID NO: 1823803 - DNA, 15 bp, Homo sapiens
aggtcagcagcaagc

SEQ ID NO: 1823804 - DNA, 15 bp, Homo sapiens
ggtcagcagcaagca

SEQ ID NO: 1823805 - DNA, 15 bp, Homo sapiens
gtcagcagcaagcag

SEQ ID NO: 1823806 - DNA, 15 bp, Homo sapiens
tcagcagcaagcagg

SEQ ID NO: 1823807 - DNA, 15 bp, Homo sapiens
cagcagcaagcaggg

SEQ ID NO: 1823808 - DNA, 15 bp, Homo sapiens
agcagcaagcaggga

SEQ ID NO: 1823809 - DNA, 15 bp, Homo sapiens
gcagcaagcagggag

SEQ ID NO: 1823810 - DNA, 15 bp, Homo sapiens
cagcaagcagggagg

SEQ ID NO: 1823811 - DNA, 15 bp, Homo sapiens
agcaagcagggaggc

SEQ ID NO: 1823812 - DNA, 15 bp, Homo sapiens
gcaagcagggaggct

SEQ ID NO: 1823813 - DNA, 15 bp, Homo sapiens
caagcagggaggctt

SEQ ID NO: 1823814 - DNA, 15 bp, Homo sapiens
aagcagggaggcttt

SEQ ID NO: 1823815 - DNA, 15 bp, Homo sapiens
agcagggaggctttg

SEQ ID NO: 1823816 - DNA, 15 bp, Homo sapiens
gcagggaggctttgg

SEQ ID NO: 1823817 - DNA, 15 bp, Homo sapiens
cagggaggctttggg

SEQ ID NO: 1823818 - DNA, 15 bp, Homo sapiens
agggaggctttgggg

SEQ ID NO: 1823819 - DNA, 15 bp, Homo sapiens
gggaggctttggggg

SEQ ID NO: 1823820 - DNA, 15 bp, Homo sapiens
ggaggctttgggggt

SEQ ID NO: 1823821 - DNA, 15 bp, Homo sapiens
gaggctttgggggtg

SEQ ID NO: 1823822 - DNA, 15 bp, Homo sapiens
aggctttgggggtgc

SEQ ID NO: 1823823 - DNA, 15 bp, Homo sapiens
ggctttgggggtgct

SEQ ID NO: 1823824 - DNA, 15 bp, Homo sapiens
gctttgggggtgctg

SEQ ID NO: 1823825 - DNA, 15 bp, Homo sapiens
ctttgggggtgctgg

SEQ ID NO: 1823826 - DNA, 15 bp, Homo sapiens
tttgggggtgctggg

SEQ ID NO: 1823827 - DNA, 15 bp, Homo sapiens
ttgggggtgctgggg

SEQ ID NO: 1823828 - DNA, 15 bp, Homo sapiens
tgggggtgctggggg

SEQ ID NO: 1823829 - DNA, 15 bp, Homo sapiens
gggggtgctgggggc

SEQ ID NO: 1823830 - DNA, 15 bp, Homo sapiens
ggggtgctgggggct

SEQ ID NO: 1823831 - DNA, 15 bp, Homo sapiens
gggtgctgggggctg

SEQ ID NO: 1823832 - DNA, 15 bp, Homo sapiens
ggtgctgggggctgc

SEQ ID NO: 1823833 - DNA, 15 bp, Homo sapiens
gtgctgggggctgct

SEQ ID NO: 1823834 - DNA, 15 bp, Homo sapiens
tgctgggggctgctt

SEQ ID NO: 1823835 - DNA, 15 bp, Homo sapiens
gctgggggctgcttt

SEQ ID NO: 1823836 - DNA, 15 bp, Homo sapiens
ctgggggctgctttg

SEQ ID NO: 1823837 - DNA, 15 bp, Homo sapiens
tgggggctgctttga

SEQ ID NO: 1823838 - DNA, 15 bp, Homo sapiens
gggggctgctttgaa

SEQ ID NO: 1823839 - DNA, 15 bp, Homo sapiens
ggggctgctttgaaa

SEQ ID NO: 1823840 - DNA, 15 bp, Homo sapiens
gggctgctttgaaag

SEQ ID NO: 1823841 - DNA, 15 bp, Homo sapiens
ggctgctttgaaagg

SEQ ID NO: 1823842 - DNA, 15 bp, Homo sapiens
gctgctttgaaaggc

SEQ ID NO: 1823843 - DNA, 15 bp, Homo sapiens
ctgctttgaaaggca

SEQ ID NO: 1823844 - DNA, 15 bp, Homo sapiens
tgctttgaaaggcac

SEQ ID NO: 1823845 - DNA, 15 bp, Homo sapiens
gctttgaaaggcacc

SEQ ID NO: 1823846 - DNA, 15 bp, Homo sapiens
ctttgaaaggcaccc

SEQ ID NO: 1823847 - DNA, 15 bp, Homo sapiens
tttgaaaggcacccc

SEQ ID NO: 1823848 - DNA, 15 bp, Homo sapiens
ttgaaaggcacccct

SEQ ID NO: 1823849 - DNA, 15 bp, Homo sapiens
tgaaaggcacccctg

SEQ ID NO: 1823850 - DNA, 15 bp, Homo sapiens
gaaaggcacccctga

SEQ ID NO: 1823851 - DNA, 15 bp, Homo sapiens
aaaggcacccctgag

SEQ ID NO: 1823852 - DNA, 15 bp, Homo sapiens
aaggcacccctgagc

SEQ ID NO: 1823853 - DNA, 15 bp, Homo sapiens
aggcacccctgagct

SEQ ID NO: 1823854 - DNA, 15 bp, Homo sapiens
ggcacccctgagcta

SEQ ID NO: 1823855 - DNA, 15 bp, Homo sapiens
gcacccctgagctaa

SEQ ID NO: 1823856 - DNA, 15 bp, Homo sapiens
cacccctgagctaag

SEQ ID NO: 1823857 - DNA, 15 bp, Homo sapiens
acccctgagctaaga

SEQ ID NO: 1823858 - DNA, 15 bp, Homo sapiens
cccctgagctaagac

SEQ ID NO: 1823859 - DNA, 15 bp, Homo sapiens
ccctgagctaagact

SEQ ID NO: 1823860 - DNA, 15 bp, Homo sapiens
cctgagctaagactt

SEQ ID NO: 1823861 - DNA, 15 bp, Homo sapiens
ctgagctaagacttg

SEQ ID NO: 1823862 - DNA, 15 bp, Homo sapiens
tgagctaagacttgg

SEQ ID NO: 1823863 - DNA, 15 bp, Homo sapiens
gagctaagacttggc

SEQ ID NO: 1823864 - DNA, 15 bp, Homo sapiens
agctaagacttggct

SEQ ID NO: 1823865 - DNA, 15 bp, Homo sapiens
gctaagacttggctg

SEQ ID NO: 1823866 - DNA, 15 bp, Homo sapiens
ctaagacttggctgt

SEQ ID NO: 1823867 - DNA, 15 bp, Homo sapiens
taagacttggctgtt

SEQ ID NO: 1823868 - DNA, 15 bp, Homo sapiens
aagacttggctgttg

SEQ ID NO: 1823869 - DNA, 15 bp, Homo sapiens
agacttggctgttgg

SEQ ID NO: 1823870 - DNA, 15 bp, Homo sapiens
gacttggctgttggg

SEQ ID NO: 1823871 - DNA, 15 bp, Homo sapiens
acttggctgttggga

SEQ ID NO: 1823872 - DNA, 15 bp, Homo sapiens
cttggctgttgggaa

SEQ ID NO: 1823873 - DNA, 15 bp, Homo sapiens
ttggctgttgggaag

SEQ ID NO: 1823874 - DNA, 15 bp, Homo sapiens
tggctgttgggaagg

SEQ ID NO: 1823875 - DNA, 15 bp, Homo sapiens
ggctgttgggaagga

SEQ ID NO: 1823876 - DNA, 15 bp, Homo sapiens
gctgttgggaaggaa

SEQ ID NO: 1823877 - DNA, 15 bp, Homo sapiens
ctgttgggaaggaat

SEQ ID NO: 1823878 - DNA, 15 bp, Homo sapiens
tgttgggaaggaatc

SEQ ID NO: 1823879 - DNA, 15 bp, Homo sapiens
gttgggaaggaatca

SEQ ID NO: 1823880 - DNA, 15 bp, Homo sapiens
ttgggaaggaatcac

SEQ ID NO: 1823881 - DNA, 15 bp, Homo sapiens
tgggaaggaatcacc

SEQ ID NO: 1823882 - DNA, 15 bp, Homo sapiens
gggaaggaatcacct

SEQ ID NO: 1823883 - DNA, 15 bp, Homo sapiens
ggaaggaatcacctc

SEQ ID NO: 1823884 - DNA, 15 bp, Homo sapiens
gaaggaatcacctcc

SEQ ID NO: 1823885 - DNA, 15 bp, Homo sapiens
aaggaatcacctccc

SEQ ID NO: 1823886 - DNA, 15 bp, Homo sapiens
aggaatcacctccct

SEQ ID NO: 1823887 - DNA, 15 bp, Homo sapiens
ggaatcacctccctc

SEQ ID NO: 1823888 - DNA, 15 bp, Homo sapiens
gaatcacctccctcc

SEQ ID NO: 1823889 - DNA, 15 bp, Homo sapiens
aatcacctccctccc

SEQ ID NO: 1823890 - DNA, 15 bp, Homo sapiens
atcacctccctccct

SEQ ID NO: 1823891 - DNA, 15 bp, Homo sapiens
tcacctccctccctc

SEQ ID NO: 1823892 - DNA, 15 bp, Homo sapiens
cacctccctccctcc

SEQ ID NO: 1823893 - DNA, 15 bp, Homo sapiens
acctccctccctcca

SEQ ID NO: 1823894 - DNA, 15 bp, Homo sapiens
cctccctccctccag

SEQ ID NO: 1823895 - DNA, 15 bp, Homo sapiens
ctccctccctccagc

SEQ ID NO: 1823896 - DNA, 15 bp, Homo sapiens
tccctccctccagcc

SEQ ID NO: 1823897 - DNA, 15 bp, Homo sapiens
ccctccctccagccg

SEQ ID NO: 1823898 - DNA, 15 bp, Homo sapiens
cctccctccagccgt

SEQ ID NO: 1823899 - DNA, 15 bp, Homo sapiens
ctccctccagccgta

SEQ ID NO: 1823900 - DNA, 15 bp, Homo sapiens
tccctccagccgtaa

SEQ ID NO: 1823901 - DNA, 15 bp, Homo sapiens
ccctccagccgtaaa

SEQ ID NO: 1823902 - DNA, 15 bp, Homo sapiens
cctccagccgtaaaa

SEQ ID NO: 1823903 - DNA, 15 bp, Homo sapiens
ctccagccgtaaaaa

SEQ ID NO: 1823904 - DNA, 15 bp, Homo sapiens
tccagccgtaaaaag

SEQ ID NO: 1823905 - DNA, 15 bp, Homo sapiens
ccagccgtaaaaaga

SEQ ID NO: 1823906 - DNA, 15 bp, Homo sapiens
cagccgtaaaaagaa

SEQ ID NO: 1823907 - DNA, 15 bp, Homo sapiens
agccgtaaaaagaac

SEQ ID NO: 1823908 - DNA, 15 bp, Homo sapiens
gccgtaaaaagaact

SEQ ID NO: 1823909 - DNA, 15 bp, Homo sapiens
ccgtaaaaagaactg

SEQ ID NO: 1823910 - DNA, 15 bp, Homo sapiens
cgtaaaaagaactgg

SEQ ID NO: 1823911 - DNA, 15 bp, Homo sapiens
gtaaaaagaactgga

SEQ ID NO: 1823912 - DNA, 15 bp, Homo sapiens
taaaaagaactggac

SEQ ID NO: 1823913 - DNA, 15 bp, Homo sapiens
aaaaagaactggaca

SEQ ID NO: 1823914 - DNA, 15 bp, Homo sapiens
aaaagaactggacat

SEQ ID NO: 1823915 - DNA, 15 bp, Homo sapiens
aaagaactggacatc

SEQ ID NO: 1823916 - DNA, 15 bp, Homo sapiens
aagaactggacatca

SEQ ID NO: 1823917 - DNA, 15 bp, Homo sapiens
agaactggacatcag

SEQ ID NO: 1823918 - DNA, 15 bp, Homo sapiens
gaactggacatcagc

SEQ ID NO: 1823919 - DNA, 15 bp, Homo sapiens
aactggacatcagct

SEQ ID NO: 1823920 - DNA, 15 bp, Homo sapiens
actggacatcagctt

SEQ ID NO: 1823921 - DNA, 15 bp, Homo sapiens
ctggacatcagcttc

SEQ ID NO: 1823922 - DNA, 15 bp, Homo sapiens
tggacatcagcttcc

SEQ ID NO: 1823923 - DNA, 15 bp, Homo sapiens
ggacatcagcttcca

SEQ ID NO: 1823924 - DNA, 15 bp, Homo sapiens
gacatcagcttccaa

SEQ ID NO: 1823925 - DNA, 15 bp, Homo sapiens
acatcagcttccaaa

SEQ ID NO: 1823926 - DNA, 15 bp, Homo sapiens
catcagcttccaaag

SEQ ID NO: 1823927 - DNA, 15 bp, Homo sapiens
atcagcttccaaaga

SEQ ID NO: 1823928 - DNA, 15 bp, Homo sapiens
tcagcttccaaagaa

SEQ ID NO: 1823929 - DNA, 15 bp, Homo sapiens
cagcttccaaagaag

SEQ ID NO: 1823930 - DNA, 15 bp, Homo sapiens
agcttccaaagaagt

SEQ ID NO: 1823931 - DNA, 15 bp, Homo sapiens
gcttccaaagaagtc

SEQ ID NO: 1823932 - DNA, 15 bp, Homo sapiens
cttccaaagaagtca

SEQ ID NO: 1823933 - DNA, 15 bp, Homo sapiens
ttccaaagaagtcat

SEQ ID NO: 1823934 - DNA, 15 bp, Homo sapiens
tccaaagaagtcatc

SEQ ID NO: 1823935 - DNA, 15 bp, Homo sapiens
ccaaagaagtcatca

SEQ ID NO: 1823936 - DNA, 15 bp, Homo sapiens
caaagaagtcatcag

SEQ ID NO: 1823937 - DNA, 15 bp, Homo sapiens
aaagaagtcatcagc

SEQ ID NO: 1823938 - DNA, 15 bp, Homo sapiens
aagaagtcatcagca

SEQ ID NO: 1823939 - DNA, 15 bp, Homo sapiens
agaagtcatcagcaa

SEQ ID NO: 1823940 - DNA, 15 bp, Homo sapiens
gaagtcatcagcaat

SEQ ID NO: 1823941 - DNA, 15 bp, Homo sapiens
aagtcatcagcaatg

SEQ ID NO: 1823942 - DNA, 15 bp, Homo sapiens
agtcatcagcaatgc

SEQ ID NO: 1823943 - DNA, 15 bp, Homo sapiens
gtcatcagcaatgca

SEQ ID NO: 1823944 - DNA, 15 bp, Homo sapiens
tcatcagcaatgcaa

SEQ ID NO: 1823945 - DNA, 15 bp, Homo sapiens
catcagcaatgcaac

SEQ ID NO: 1823946 - DNA, 15 bp, Homo sapiens
atcagcaatgcaact

SEQ ID NO: 1823947 - DNA, 15 bp, Homo sapiens
tcagcaatgcaactg

SEQ ID NO: 1823948 - DNA, 15 bp, Homo sapiens
cagcaatgcaactgt

SEQ ID NO: 1823949 - DNA, 15 bp, Homo sapiens
agcaatgcaactgtt

SEQ ID NO: 1823950 - DNA, 15 bp, Homo sapiens
gcaatgcaactgttc

SEQ ID NO: 1823951 - DNA, 15 bp, Homo sapiens
caatgcaactgttca

SEQ ID NO: 1823952 - DNA, 15 bp, Homo sapiens
aatgcaactgttcac

SEQ ID NO: 1823953 - DNA, 15 bp, Homo sapiens
atgcaactgttcaca

SEQ ID NO: 1823954 - DNA, 15 bp, Homo sapiens
tgcaactgttcacat

SEQ ID NO: 1823955 - DNA, 15 bp, Homo sapiens
gcaactgttcacatg

SEQ ID NO: 1823956 - DNA, 15 bp, Homo sapiens
caactgttcacatgg

SEQ ID NO: 1823957 - DNA, 15 bp, Homo sapiens
aactgttcacatgga

SEQ ID NO: 1823958 - DNA, 15 bp, Homo sapiens
actgttcacatggag

SEQ ID NO: 1823959 - DNA, 15 bp, Homo sapiens
ctgttcacatggagg

SEQ ID NO: 1823960 - DNA, 15 bp, Homo sapiens
tgttcacatggagga

SEQ ID NO: 1823961 - DNA, 15 bp, Homo sapiens
gttcacatggaggat

SEQ ID NO: 1823962 - DNA, 15 bp, Homo sapiens
ttcacatggaggata

SEQ ID NO: 1823963 - DNA, 15 bp, Homo sapiens
tcacatggaggatac

SEQ ID NO: 1823964 - DNA, 15 bp, Homo sapiens
cacatggaggatact

SEQ ID NO: 1823965 - DNA, 15 bp, Homo sapiens
acatggaggatactc

SEQ ID NO: 1823966 - DNA, 15 bp, Homo sapiens
catggaggatactcc

SEQ ID NO: 1823967 - DNA, 15 bp, Homo sapiens
atggaggatactccc

SEQ ID NO: 1823968 - DNA, 15 bp, Homo sapiens
tggaggatactccct

SEQ ID NO: 1823969 - DNA, 15 bp, Homo sapiens
ggaggatactccctg

SEQ ID NO: 1823970 - DNA, 15 bp, Homo sapiens
gaggatactccctgc

SEQ ID NO: 1823971 - DNA, 15 bp, Homo sapiens
aggatactccctgct

SEQ ID NO: 1823972 - DNA, 15 bp, Homo sapiens
ggatactccctgctt

SEQ ID NO: 1823973 - DNA, 15 bp, Homo sapiens
gatactccctgcttg

SEQ ID NO: 1823974 - DNA, 15 bp, Homo sapiens
atactccctgcttga

SEQ ID NO: 1823975 - DNA, 15 bp, Homo sapiens
tactccctgcttgag

SEQ ID NO: 1823976 - DNA, 15 bp, Homo sapiens
actccctgcttgagg

SEQ ID NO: 1823977 - DNA, 15 bp, Homo sapiens
ctccctgcttgaggg

SEQ ID NO: 1823978 - DNA, 15 bp, Homo sapiens
tccctgcttgagggg

SEQ ID NO: 1823979 - DNA, 15 bp, Homo sapiens
ccctgcttgaggggt

SEQ ID NO: 1823980 - DNA, 15 bp, Homo sapiens
cctgcttgaggggtc

SEQ ID NO: 1823981 - DNA, 15 bp, Homo sapiens
ctgcttgaggggtca

SEQ ID NO: 1823982 - DNA, 15 bp, Homo sapiens
tgcttgaggggtcag

SEQ ID NO: 1823983 - DNA, 15 bp, Homo sapiens
gcttgaggggtcaga

SEQ ID NO: 1823984 - DNA, 15 bp, Homo sapiens
cttgaggggtcagac

SEQ ID NO: 1823985 - DNA, 15 bp, Homo sapiens
ttgaggggtcagaca

SEQ ID NO: 1823986 - DNA, 15 bp, Homo sapiens
tgaggggtcagacag

SEQ ID NO: 1823987 - DNA, 15 bp, Homo sapiens
gaggggtcagacagg

SEQ ID NO: 1823988 - DNA, 15 bp, Homo sapiens
aggggtcagacaggc

SEQ ID NO: 1823989 - DNA, 15 bp, Homo sapiens
ggggtcagacaggcc

SEQ ID NO: 1823990 - DNA, 15 bp, Homo sapiens
gggtcagacaggcct

SEQ ID NO: 1823991 - DNA, 15 bp, Homo sapiens
ggtcagacaggcctg

SEQ ID NO: 1823992 - DNA, 15 bp, Homo sapiens
gtcagacaggcctgc

SEQ ID NO: 1823993 - DNA, 15 bp, Homo sapiens
tcagacaggcctgct

SEQ ID NO: 1823994 - DNA, 15 bp, Homo sapiens
cagacaggcctgctg

SEQ ID NO: 1823995 - DNA, 15 bp, Homo sapiens
agacaggcctgctgg

SEQ ID NO: 1823996 - DNA, 15 bp, Homo sapiens
gacaggcctgctggg

SEQ ID NO: 1823997 - DNA, 15 bp, Homo sapiens
acaggcctgctgggc

SEQ ID NO: 1823998 - DNA, 15 bp, Homo sapiens
caggcctgctgggca

SEQ ID NO: 1823999 - DNA, 15 bp, Homo sapiens
aggcctgctgggcaa

SEQ ID NO: 1824000 - DNA, 15 bp, Homo sapiens
ggcctgctgggcaac

SEQ ID NO: 1824001 - DNA, 15 bp, Homo sapiens
gcctgctgggcaacc

SEQ ID NO: 1824002 - DNA, 15 bp, Homo sapiens
cctgctgggcaaccc

SEQ ID NO: 1824003 - DNA, 15 bp, Homo sapiens
ctgctgggcaaccca

SEQ ID NO: 1824004 - DNA, 15 bp, Homo sapiens
tgctgggcaacccag

SEQ ID NO: 1824005 - DNA, 15 bp, Homo sapiens
gctgggcaacccagg

SEQ ID NO: 1824006 - DNA, 15 bp, Homo sapiens
ctgggcaacccagga

SEQ ID NO: 1824007 - DNA, 15 bp, Homo sapiens
tgggcaacccaggag

SEQ ID NO: 1824008 - DNA, 15 bp, Homo sapiens
gggcaacccaggagg

SEQ ID NO: 1824009 - DNA, 15 bp, Homo sapiens
ggcaacccaggaggc

SEQ ID NO: 1824010 - DNA, 15 bp, Homo sapiens
gcaacccaggaggct

SEQ ID NO: 1824011 - DNA, 15 bp, Homo sapiens
caacccaggaggctt

SEQ ID NO: 1824012 - DNA, 15 bp, Homo sapiens
aacccaggaggcttg

SEQ ID NO: 1824013 - DNA, 15 bp, Homo sapiens
acccaggaggcttgg

SEQ ID NO: 1824014 - DNA, 15 bp, Homo sapiens
cccaggaggcttgga

SEQ ID NO: 1824015 - DNA, 15 bp, Homo sapiens
ccaggaggcttggat

SEQ ID NO: 1824016 - DNA, 15 bp, Homo sapiens
caggaggcttggatg

SEQ ID NO: 1824017 - DNA, 15 bp, Homo sapiens
aggaggcttggatga

SEQ ID NO: 1824018 - DNA, 15 bp, Homo sapiens
ggaggcttggatgac

SEQ ID NO: 1824019 - DNA, 15 bp, Homo sapiens
gaggcttggatgacc

SEQ ID NO: 1824020 - DNA, 15 bp, Homo sapiens
aggcttggatgaccg

SEQ ID NO: 1824021 - DNA, 15 bp, Homo sapiens
ggcttggatgaccgt

SEQ ID NO: 1824022 - DNA, 15 bp, Homo sapiens
gcttggatgaccgtc

SEQ ID NO: 1824023 - DNA, 15 bp, Homo sapiens
cttggatgaccgtct

SEQ ID NO: 1824024 - DNA, 15 bp, Homo sapiens
ttggatgaccgtcta

SEQ ID NO: 1824025 - DNA, 15 bp, Homo sapiens
tggatgaccgtctac

SEQ ID NO: 1824026 - DNA, 15 bp, Homo sapiens
ggatgaccgtctacc

SEQ ID NO: 1824027 - DNA, 15 bp, Homo sapiens
gatgaccgtctaccc

SEQ ID NO: 1824028 - DNA, 15 bp, Homo sapiens
atgaccgtctacccc

SEQ ID NO: 1824029 - DNA, 15 bp, Homo sapiens
tgaccgtctacccca

SEQ ID NO: 1824030 - DNA, 15 bp, Homo sapiens
gaccgtctaccccag

SEQ ID NO: 1824031 - DNA, 15 bp, Homo sapiens
accgtctaccccagt

SEQ ID NO: 1824032 - DNA, 15 bp, Homo sapiens
ccgtctaccccagtg

SEQ ID NO: 1824033 - DNA, 15 bp, Homo sapiens
cgtctaccccagtgt

SEQ ID NO: 1824034 - DNA, 15 bp, Homo sapiens
gtctaccccagtgtt

SEQ ID NO: 1824035 - DNA, 15 bp, Homo sapiens
tctaccccagtgttt

SEQ ID NO: 1824036 - DNA, 15 bp, Homo sapiens
ctaccccagtgtttt

SEQ ID NO: 1824037 - DNA, 15 bp, Homo sapiens
taccccagtgttttt

SEQ ID NO: 1824038 - DNA, 15 bp, Homo sapiens
accccagtgtttttg

SEQ ID NO: 1824039 - DNA, 15 bp, Homo sapiens
ccccagtgtttttgg

SEQ ID NO: 1824040 - DNA, 15 bp, Homo sapiens
cccagtgtttttggg

SEQ ID NO: 1824041 - DNA, 15 bp, Homo sapiens
ccagtgtttttggga

SEQ ID NO: 1824042 - DNA, 15 bp, Homo sapiens
cagtgtttttgggat

SEQ ID NO: 1824043 - DNA, 15 bp, Homo sapiens
agtgtttttgggatg

SEQ ID NO: 1824044 - DNA, 15 bp, Homo sapiens
gtgtttttgggatgg

SEQ ID NO: 1824045 - DNA, 15 bp, Homo sapiens
tgtttttgggatgga

SEQ ID NO: 1824046 - DNA, 15 bp, Homo sapiens
gtttttgggatggaa

SEQ ID NO: 1824047 - DNA, 15 bp, Homo sapiens
tttttgggatggaaa

SEQ ID NO: 1824048 - DNA, 15 bp, Homo sapiens
ttttgggatggaaag

SEQ ID NO: 1824049 - DNA, 15 bp, Homo sapiens
tttgggatggaaagt

SEQ ID NO: 1824050 - DNA, 15 bp, Homo sapiens
ttgggatggaaagtt

SEQ ID NO: 1824051 - DNA, 15 bp, Homo sapiens
tgggatggaaagttc

SEQ ID NO: 1824052 - DNA, 15 bp, Homo sapiens
gggatggaaagttcc

SEQ ID NO: 1824053 - DNA, 15 bp, Homo sapiens
ggatggaaagttcca

SEQ ID NO: 1824054 - DNA, 15 bp, Homo sapiens
gatggaaagttccac

SEQ ID NO: 1824055 - DNA, 15 bp, Homo sapiens
atggaaagttccaca

SEQ ID NO: 1824056 - DNA, 15 bp, Homo sapiens
tggaaagttccacat

SEQ ID NO: 1824057 - DNA, 15 bp, Homo sapiens
ggaaagttccacatt

SEQ ID NO: 1824058 - DNA, 15 bp, Homo sapiens
gaaagttccacattc

SEQ ID NO: 1824059 - DNA, 15 bp, Homo sapiens
aaagttccacattct

SEQ ID NO: 1824060 - DNA, 15 bp, Homo sapiens
aagttccacattctg

SEQ ID NO: 1824061 - DNA, 15 bp, Homo sapiens
agttccacattctga

SEQ ID NO: 1824062 - DNA, 15 bp, Homo sapiens
gttccacattctgag

SEQ ID NO: 1824063 - DNA, 15 bp, Homo sapiens
ttccacattctgaga

SEQ ID NO: 1824064 - DNA, 15 bp, Homo sapiens
tccacattctgagaa

SEQ ID NO: 1824065 - DNA, 15 bp, Homo sapiens
ccacattctgagaac

SEQ ID NO: 1824066 - DNA, 15 bp, Homo sapiens
cacattctgagaacc

SEQ ID NO: 1824067 - DNA, 15 bp, Homo sapiens
acattctgagaaccc

SEQ ID NO: 1824068 - DNA, 15 bp, Homo sapiens
cattctgagaaccct

SEQ ID NO: 1824069 - DNA, 15 bp, Homo sapiens
attctgagaaccctc

SEQ ID NO: 1824070 - DNA, 15 bp, Homo sapiens
ttctgagaaccctca

SEQ ID NO: 1824071 - DNA, 15 bp, Homo sapiens
tctgagaaccctcag

SEQ ID NO: 1824072 - DNA, 15 bp, Homo sapiens
ctgagaaccctcagt

SEQ ID NO: 1824073 - DNA, 15 bp, Homo sapiens
tgagaaccctcagtc

SEQ ID NO: 1824074 - DNA, 15 bp, Homo sapiens
gagaaccctcagtcc

SEQ ID NO: 1824075 - DNA, 15 bp, Homo sapiens
agaaccctcagtccc

SEQ ID NO: 1824076 - DNA, 15 bp, Homo sapiens
gaaccctcagtccct

SEQ ID NO: 1824077 - DNA, 15 bp, Homo sapiens
aaccctcagtccctg

SEQ ID NO: 1824078 - DNA, 15 bp, Homo sapiens
accctcagtccctgg

SEQ ID NO: 1824079 - DNA, 15 bp, Homo sapiens
ccctcagtccctggg

SEQ ID NO: 1824080 - DNA, 15 bp, Homo sapiens
cctcagtccctgggc

SEQ ID NO: 1824081 - DNA, 15 bp, Homo sapiens
ctcagtccctgggca

SEQ ID NO: 1824082 - DNA, 15 bp, Homo sapiens
tcagtccctgggcaa

SEQ ID NO: 1824083 - DNA, 15 bp, Homo sapiens
cagtccctgggcaac

SEQ ID NO: 1824084 - DNA, 15 bp, Homo sapiens
agtccctgggcaacc

SEQ ID NO: 1824085 - DNA, 15 bp, Homo sapiens
gtccctgggcaacct

SEQ ID NO: 1824086 - DNA, 15 bp, Homo sapiens
tccctgggcaacctg

SEQ ID NO: 1824087 - DNA, 15 bp, Homo sapiens
ccctgggcaacctgg

SEQ ID NO: 1824088 - DNA, 15 bp, Homo sapiens
cctgggcaacctggg

SEQ ID NO: 1824089 - DNA, 15 bp, Homo sapiens
ctgggcaacctgggg

SEQ ID NO: 1824090 - DNA, 15 bp, Homo sapiens
tgggcaacctggggt

SEQ ID NO: 1824091 - DNA, 15 bp, Homo sapiens
gggcaacctggggtg

SEQ ID NO: 1824092 - DNA, 15 bp, Homo sapiens
ggcaacctggggtgg

SEQ ID NO: 1824093 - DNA, 15 bp, Homo sapiens
gcaacctggggtggt

SEQ ID NO: 1824094 - DNA, 15 bp, Homo sapiens
caacctggggtggtt

SEQ ID NO: 1824095 - DNA, 15 bp, Homo sapiens
aacctggggtggtta

SEQ ID NO: 1824096 - DNA, 15 bp, Homo sapiens
acctggggtggttag

SEQ ID NO: 1824097 - DNA, 15 bp, Homo sapiens
cctggggtggttagt

SEQ ID NO: 1824098 - DNA, 15 bp, Homo sapiens
ctggggtggttagtc

SEQ ID NO: 1824099 - DNA, 15 bp, Homo sapiens
tggggtggttagtca

SEQ ID NO: 1824100 - DNA, 15 bp, Homo sapiens
ggggtggttagtcac

SEQ ID NO: 1824101 - DNA, 15 bp, Homo sapiens
gggtggttagtcacc

SEQ ID NO: 1824102 - DNA, 15 bp, Homo sapiens
ggtggttagtcacca

SEQ ID NO: 1824103 - DNA, 15 bp, Homo sapiens
gtggttagtcaccac

SEQ ID NO: 1824104 - DNA, 15 bp, Homo sapiens
tggttagtcaccaca

SEQ ID NO: 1824105 - DNA, 15 bp, Homo sapiens
ggttagtcaccacag

SEQ ID NO: 1824106 - DNA, 15 bp, Homo sapiens
gttagtcaccacagc

SEQ ID NO: 1824107 - DNA, 15 bp, Homo sapiens
ttagtcaccacagct

SEQ ID NO: 1824108 - DNA, 15 bp, Homo sapiens
tagtcaccacagctt

SEQ ID NO: 1824109 - DNA, 15 bp, Homo sapiens
agtcaccacagcttg

SEQ ID NO: 1824110 - DNA, 15 bp, Homo sapiens
gtcaccacagcttgt

SEQ ID NO: 1824111 - DNA, 15 bp, Homo sapiens
tcaccacagcttgtg

SEQ ID NO: 1824112 - DNA, 15 bp, Homo sapiens
caccacagcttgtgg

SEQ ID NO: 1824113 - DNA, 15 bp, Homo sapiens
accacagcttgtggc

SEQ ID NO: 1824114 - DNA, 15 bp, Homo sapiens
ccacagcttgtggct

SEQ ID NO: 1824115 - DNA, 15 bp, Homo sapiens
cacagcttgtggctt

SEQ ID NO: 1824116 - DNA, 15 bp, Homo sapiens
acagcttgtggcttg

SEQ ID NO: 1824117 - DNA, 15 bp, Homo sapiens
cagcttgtggcttgg

SEQ ID NO: 1824118 - DNA, 15 bp, Homo sapiens
agcttgtggcttggg

SEQ ID NO: 1824119 - DNA, 15 bp, Homo sapiens
gcttgtggcttgggc

SEQ ID NO: 1824120 - DNA, 15 bp, Homo sapiens
cttgtggcttgggcc

SEQ ID NO: 1824121 - DNA, 15 bp, Homo sapiens
ttgtggcttgggccc

SEQ ID NO: 1824122 - DNA, 15 bp, Homo sapiens
tgtggcttgggccca

SEQ ID NO: 1824123 - DNA, 15 bp, Homo sapiens
gtggcttgggcccat

SEQ ID NO: 1824124 - DNA, 15 bp, Homo sapiens
tggcttgggcccatg

SEQ ID NO: 1824125 - DNA, 15 bp, Homo sapiens
ggcttgggcccatga

SEQ ID NO: 1824126 - DNA, 15 bp, Homo sapiens
gcttgggcccatgac

SEQ ID NO: 1824127 - DNA, 15 bp, Homo sapiens
cttgggcccatgaca

SEQ ID NO: 1824128 - DNA, 15 bp, Homo sapiens
ttgggcccatgacag

SEQ ID NO: 1824129 - DNA, 15 bp, Homo sapiens
tgggcccatgacagc

SEQ ID NO: 1824130 - DNA, 15 bp, Homo sapiens
gggcccatgacagca

SEQ ID NO: 1824131 - DNA, 15 bp, Homo sapiens
ggcccatgacagcag

SEQ ID NO: 1824132 - DNA, 15 bp, Homo sapiens
gcccatgacagcagg

SEQ ID NO: 1824133 - DNA, 15 bp, Homo sapiens
cccatgacagcaggt

SEQ ID NO: 1824134 - DNA, 15 bp, Homo sapiens
ccatgacagcaggta

SEQ ID NO: 1824135 - DNA, 15 bp, Homo sapiens
catgacagcaggtag

SEQ ID NO: 1824136 - DNA, 15 bp, Homo sapiens
atgacagcaggtaga

SEQ ID NO: 1824137 - DNA, 15 bp, Homo sapiens
tgacagcaggtagaa

SEQ ID NO: 1824138 - DNA, 15 bp, Homo sapiens
gacagcaggtagaaa

SEQ ID NO: 1824139 - DNA, 15 bp, Homo sapiens
acagcaggtagaaat

SEQ ID NO: 1824140 - DNA, 15 bp, Homo sapiens
cagcaggtagaaatg

SEQ ID NO: 1824141 - DNA, 15 bp, Homo sapiens
agcaggtagaaatga

SEQ ID NO: 1824142 - DNA, 15 bp, Homo sapiens
gcaggtagaaatgac

SEQ ID NO: 1824143 - DNA, 15 bp, Homo sapiens
caggtagaaatgacg

SEQ ID NO: 1824144 - DNA, 15 bp, Homo sapiens
aggtagaaatgacgt

SEQ ID NO: 1824145 - DNA, 15 bp, Homo sapiens
ggtagaaatgacgtg

SEQ ID NO: 1824146 - DNA, 15 bp, Homo sapiens
gtagaaatgacgtgg

SEQ ID NO: 1824147 - DNA, 15 bp, Homo sapiens
tagaaatgacgtgga

SEQ ID NO: 1824148 - DNA, 15 bp, Homo sapiens
agaaatgacgtggac

SEQ ID NO: 1824149 - DNA, 15 bp, Homo sapiens
gaaatgacgtggact

SEQ ID NO: 1824150 - DNA, 15 bp, Homo sapiens
aaatgacgtggactg

SEQ ID NO: 1824151 - DNA, 15 bp, Homo sapiens
aatgacgtggactgc

SEQ ID NO: 1824152 - DNA, 15 bp, Homo sapiens
atgacgtggactgcc

SEQ ID NO: 1824153 - DNA, 15 bp, Homo sapiens
tgacgtggactgccg

SEQ ID NO: 1824154 - DNA, 15 bp, Homo sapiens
gacgtggactgccgc

SEQ ID NO: 1824155 - DNA, 15 bp, Homo sapiens
acgtggactgccgcc

SEQ ID NO: 1824156 - DNA, 15 bp, Homo sapiens
cgtggactgccgcca

SEQ ID NO: 1824157 - DNA, 15 bp, Homo sapiens
gtggactgccgccag

SEQ ID NO: 1824158 - DNA, 15 bp, Homo sapiens
tggactgccgccagc

SEQ ID NO: 1824159 - DNA, 15 bp, Homo sapiens
ggactgccgccagcc

SEQ ID NO: 1824160 - DNA, 15 bp, Homo sapiens
gactgccgccagccg

SEQ ID NO: 1824161 - DNA, 15 bp, Homo sapiens
actgccgccagccgg

SEQ ID NO: 1824162 - DNA, 15 bp, Homo sapiens
ctgccgccagccggg

SEQ ID NO: 1824163 - DNA, 15 bp, Homo sapiens
tgccgccagccgggc

SEQ ID NO: 1824164 - DNA, 15 bp, Homo sapiens
gccgccagccgggca

SEQ ID NO: 1824165 - DNA, 15 bp, Homo sapiens
ccgccagccgggcac

SEQ ID NO: 1824166 - DNA, 15 bp, Homo sapiens
cgccagccgggcaca

SEQ ID NO: 1824167 - DNA, 15 bp, Homo sapiens
gccagccgggcacag

SEQ ID NO: 1824168 - DNA, 15 bp, Homo sapiens
ccagccgggcacagt

SEQ ID NO: 1824169 - DNA, 15 bp, Homo sapiens
cagccgggcacagtg

SEQ ID NO: 1824170 - DNA, 15 bp, Homo sapiens
agccgggcacagtgg

SEQ ID NO: 1824171 - DNA, 15 bp, Homo sapiens
gggaggctgaggcat

SEQ ID NO: 1824172 - DNA, 15 bp, Homo sapiens
ggaggctgaggcatg

SEQ ID NO: 1824173 - DNA, 15 bp, Homo sapiens
gaggctgaggcatgt

SEQ ID NO: 1824174 - DNA, 15 bp, Homo sapiens
aggctgaggcatgtg

SEQ ID NO: 1824175 - DNA, 15 bp, Homo sapiens
ggctgaggcatgtgg

SEQ ID NO: 1824176 - DNA, 15 bp, Homo sapiens
gctgaggcatgtgga

SEQ ID NO: 1824177 - DNA, 15 bp, Homo sapiens
ctgaggcatgtggat

SEQ ID NO: 1824178 - DNA, 15 bp, Homo sapiens
tgaggcatgtggatc

SEQ ID NO: 1824179 - DNA, 15 bp, Homo sapiens
gaggcatgtggatca

SEQ ID NO: 1824180 - DNA, 15 bp, Homo sapiens
aggcatgtggatcac

SEQ ID NO: 1824181 - DNA, 15 bp, Homo sapiens
ggcatgtggatcact

SEQ ID NO: 1824182 - DNA, 15 bp, Homo sapiens
gcatgtggatcactt

SEQ ID NO: 1824183 - DNA, 15 bp, Homo sapiens
catgtggatcacttg

SEQ ID NO: 1824184 - DNA, 15 bp, Homo sapiens
atgtggatcacttga

SEQ ID NO: 1824185 - DNA, 15 bp, Homo sapiens
tgtggatcacttgag

SEQ ID NO: 1824186 - DNA, 15 bp, Homo sapiens
cgaaaccagcctggt

SEQ ID NO: 1824187 - DNA, 15 bp, Homo sapiens
gaaaccagcctggtc

SEQ ID NO: 1824188 - DNA, 15 bp, Homo sapiens
aaaccagcctggtca

SEQ ID NO: 1824189 - DNA, 15 bp, Homo sapiens
aaccagcctggtcaa

SEQ ID NO: 1824190 - DNA, 15 bp, Homo sapiens
cagcctggtcaacac

SEQ ID NO: 1824191 - DNA, 15 bp, Homo sapiens
agcctggtcaacacg

SEQ ID NO: 1824192 - DNA, 15 bp, Homo sapiens
gcctggtcaacacgg

SEQ ID NO: 1824193 - DNA, 15 bp, Homo sapiens
cctggtcaacacggt

SEQ ID NO: 1824194 - DNA, 15 bp, Homo sapiens
ctggtcaacacggtg

SEQ ID NO: 1824195 - DNA, 15 bp, Homo sapiens
tggtcaacacggtga

SEQ ID NO: 1824196 - DNA, 15 bp, Homo sapiens
ggtcaacacggtgaa

SEQ ID NO: 1824197 - DNA, 15 bp, Homo sapiens
gtcaacacggtgaaa

SEQ ID NO: 1824198 - DNA, 15 bp, Homo sapiens
tcaacacggtgaaac

SEQ ID NO: 1824199 - DNA, 15 bp, Homo sapiens
gaaaccccatctctg

SEQ ID NO: 1824200 - DNA, 15 bp, Homo sapiens
aaaccccatctctgc

SEQ ID NO: 1824201 - DNA, 15 bp, Homo sapiens
aaccccatctctgct

SEQ ID NO: 1824202 - DNA, 15 bp, Homo sapiens
accccatctctgcta

SEQ ID NO: 1824203 - DNA, 15 bp, Homo sapiens
ccccatctctgctaa

SEQ ID NO: 1824204 - DNA, 15 bp, Homo sapiens
cccatctctgctaaa

SEQ ID NO: 1824205 - DNA, 15 bp, Homo sapiens
ccatctctgctaaaa

SEQ ID NO: 1824206 - DNA, 15 bp, Homo sapiens
catctctgctaaaaa

SEQ ID NO: 1824207 - DNA, 15 bp, Homo sapiens
atctctgctaaaaaa

SEQ ID NO: 1824208 - DNA, 15 bp, Homo sapiens
tctctgctaaaaaaa

SEQ ID NO: 1824209 - DNA, 15 bp, Homo sapiens
ctctgctaaaaaaaa

SEQ ID NO: 1824210 - DNA, 15 bp, Homo sapiens
tctgctaaaaaaaaa

SEQ ID NO: 1824211 - DNA, 15 bp, Homo sapiens
ctgctaaaaaaaaaa

SEQ ID NO: 1824212 - DNA, 15 bp, Homo sapiens
tgctaaaaaaaaaaa

SEQ ID NO: 1824213 - DNA, 15 bp, Homo sapiens
gctaaaaaaaaaaaa

SEQ ID NO: 1824214 - DNA, 15 bp, Homo sapiens
atatatatatataaa

SEQ ID NO: 1824215 - DNA, 15 bp, Homo sapiens
atatatataaattag

SEQ ID NO: 1824216 - DNA, 15 bp, Homo sapiens
tatatataaattagc

SEQ ID NO: 1824217 - DNA, 15 bp, Homo sapiens
atatataaattagcc

SEQ ID NO: 1824218 - DNA, 15 bp, Homo sapiens
tatataaattagcca

SEQ ID NO: 1824219 - DNA, 15 bp, Homo sapiens
atataaattagccag

SEQ ID NO: 1824220 - DNA, 15 bp, Homo sapiens
tataaattagccagg

SEQ ID NO: 1824221 - DNA, 15 bp, Homo sapiens
ataaattagccaggc

SEQ ID NO: 1824222 - DNA, 15 bp, Homo sapiens
taaattagccaggca

SEQ ID NO: 1824223 - DNA, 15 bp, Homo sapiens
gccaggcatggtgac

SEQ ID NO: 1824224 - DNA, 15 bp, Homo sapiens
ccaggcatggtgacg

SEQ ID NO: 1824225 - DNA, 15 bp, Homo sapiens
caggcatggtgacgt

SEQ ID NO: 1824226 - DNA, 15 bp, Homo sapiens
aggcatggtgacgtg

SEQ ID NO: 1824227 - DNA, 15 bp, Homo sapiens
ggcatggtgacgtgc

SEQ ID NO: 1824228 - DNA, 15 bp, Homo sapiens
gcatggtgacgtgca

SEQ ID NO: 1824229 - DNA, 15 bp, Homo sapiens
catggtgacgtgcac

SEQ ID NO: 1824230 - DNA, 15 bp, Homo sapiens
atggtgacgtgcacc

SEQ ID NO: 1824231 - DNA, 15 bp, Homo sapiens
tggtgacgtgcacct

SEQ ID NO: 1824232 - DNA, 15 bp, Homo sapiens
ggtgacgtgcacctg

SEQ ID NO: 1824233 - DNA, 15 bp, Homo sapiens
gtgacgtgcacctgt

SEQ ID NO: 1824234 - DNA, 15 bp, Homo sapiens
tgacgtgcacctgtg

SEQ ID NO: 1824235 - DNA, 15 bp, Homo sapiens
gacgtgcacctgtgg

SEQ ID NO: 1824236 - DNA, 15 bp, Homo sapiens
acgtgcacctgtggt

SEQ ID NO: 1824237 - DNA, 15 bp, Homo sapiens
cgtgcacctgtggtc

SEQ ID NO: 1824238 - DNA, 15 bp, Homo sapiens
tcacttgaacccggg

SEQ ID NO: 1824239 - DNA, 15 bp, Homo sapiens
cacttgaacccggga

SEQ ID NO: 1824240 - DNA, 15 bp, Homo sapiens
acttgaacccgggag

SEQ ID NO: 1824241 - DNA, 15 bp, Homo sapiens
gaggttgcagtgaga

SEQ ID NO: 1824242 - DNA, 15 bp, Homo sapiens
aggttgcagtgagat

SEQ ID NO: 1824243 - DNA, 15 bp, Homo sapiens
ggttgcagtgagatt

SEQ ID NO: 1824244 - DNA, 15 bp, Homo sapiens
gttgcagtgagattg

SEQ ID NO: 1824245 - DNA, 15 bp, Homo sapiens
ttgcagtgagattgc

SEQ ID NO: 1824246 - DNA, 15 bp, Homo sapiens
tgcagtgagattgca

SEQ ID NO: 1824247 - DNA, 15 bp, Homo sapiens
gcagtgagattgcac

SEQ ID NO: 1824248 - DNA, 15 bp, Homo sapiens
cagtgagattgcacc

SEQ ID NO: 1824249 - DNA, 15 bp, Homo sapiens
agtgagattgcacca

SEQ ID NO: 1824250 - DNA, 15 bp, Homo sapiens
gtgagattgcaccag

SEQ ID NO: 1824251 - DNA, 15 bp, Homo sapiens
tgagattgcaccagt

SEQ ID NO: 1824252 - DNA, 15 bp, Homo sapiens
gagattgcaccagtg

SEQ ID NO: 1824253 - DNA, 15 bp, Homo sapiens
agattgcaccagtgc

SEQ ID NO: 1824254 - DNA, 15 bp, Homo sapiens
gattgcaccagtgca

SEQ ID NO: 1824255 - DNA, 15 bp, Homo sapiens
attgcaccagtgcac

SEQ ID NO: 1824256 - DNA, 15 bp, Homo sapiens
ttgcaccagtgcact

SEQ ID NO: 1824257 - DNA, 15 bp, Homo sapiens
tgcaccagtgcactc

SEQ ID NO: 1824258 - DNA, 15 bp, Homo sapiens
gcaccagtgcactct

SEQ ID NO: 1824259 - DNA, 15 bp, Homo sapiens
caccagtgcactctc

SEQ ID NO: 1824260 - DNA, 15 bp, Homo sapiens
accagtgcactctcc

SEQ ID NO: 1824261 - DNA, 15 bp, Homo sapiens
ccagtgcactctcca

SEQ ID NO: 1824262 - DNA, 15 bp, Homo sapiens
cagtgcactctccag

SEQ ID NO: 1824263 - DNA, 15 bp, Homo sapiens
agtgcactctccagc

SEQ ID NO: 1824264 - DNA, 15 bp, Homo sapiens
gtgcactctccagcc

SEQ ID NO: 1824265 - DNA, 15 bp, Homo sapiens
tgcactctccagcct

SEQ ID NO: 1824266 - DNA, 15 bp, Homo sapiens
gcactctccagcctg

SEQ ID NO: 1824267 - DNA, 15 bp, Homo sapiens
cactctccagcctgg

SEQ ID NO: 1824268 - DNA, 15 bp, Homo sapiens
actctccagcctggc

SEQ ID NO: 1824269 - DNA, 15 bp, Homo sapiens
ctctccagcctggca

SEQ ID NO: 1824270 - DNA, 15 bp, Homo sapiens
tctccagcctggcaa

SEQ ID NO: 1824271 - DNA, 15 bp, Homo sapiens
ccagcctggcaacag

SEQ ID NO: 1824272 - DNA, 15 bp, Homo sapiens
cagcctggcaacaga

SEQ ID NO: 1824273 - DNA, 15 bp, Homo sapiens
agcctggcaacagag

SEQ ID NO: 1824274 - DNA, 15 bp, Homo sapiens
gcctggcaacagagc

SEQ ID NO: 1824275 - DNA, 15 bp, Homo sapiens
cctggcaacagagca

SEQ ID NO: 1824276 - DNA, 15 bp, Homo sapiens
ctggcaacagagcaa

SEQ ID NO: 1824277 - DNA, 15 bp, Homo sapiens
tggcaacagagcaag

SEQ ID NO: 1824278 - DNA, 15 bp, Homo sapiens
gactctgtctcaaac

SEQ ID NO: 1824279 - DNA, 15 bp, Homo sapiens
actctgtctcaaaca

SEQ ID NO: 1824280 - DNA, 15 bp, Homo sapiens
ctctgtctcaaacaa

SEQ ID NO: 1824281 - DNA, 15 bp, Homo sapiens
tctgtctcaaacaaa

SEQ ID NO: 1824282 - DNA, 15 bp, Homo sapiens
ctgtctcaaacaaac

SEQ ID NO: 1824283 - DNA, 15 bp, Homo sapiens
tgtctcaaacaaaca

SEQ ID NO: 1824284 - DNA, 15 bp, Homo sapiens
gtctcaaacaaacaa

SEQ ID NO: 1824285 - DNA, 15 bp, Homo sapiens
tctcaaacaaacaaa

SEQ ID NO: 1824286 - DNA, 15 bp, Homo sapiens
ctcaaacaaacaaaa

SEQ ID NO: 1824287 - DNA, 15 bp, Homo sapiens
tcaaacaaacaaaac

SEQ ID NO: 1824288 - DNA, 15 bp, Homo sapiens
caaacaaacaaaaca

SEQ ID NO: 1824289 - DNA, 15 bp, Homo sapiens
aaacaaacaaaacaa

SEQ ID NO: 1824290 - DNA, 15 bp, Homo sapiens
aacaaacaaaacaaa

SEQ ID NO: 1824291 - DNA, 15 bp, Homo sapiens
acaaacaaaacaaaa

SEQ ID NO: 1824292 - DNA, 15 bp, Homo sapiens
caaacaaaacaaaac

SEQ ID NO: 1824293 - DNA, 15 bp, Homo sapiens
caaaacaaaacaaac

SEQ ID NO: 1824294 - DNA, 15 bp, Homo sapiens
aaaacaaaacaaaca

SEQ ID NO: 1824295 - DNA, 15 bp, Homo sapiens
aaacaaaacaaacaa

SEQ ID NO: 1824296 - DNA, 15 bp, Homo sapiens
aacaaaacaaacaaa

SEQ ID NO: 1824297 - DNA, 15 bp, Homo sapiens
acaaaacaaacaaaa

SEQ ID NO: 1824298 - DNA, 15 bp, Homo sapiens
caaaacaaacaaaaa

SEQ ID NO: 1824299 - DNA, 15 bp, Homo sapiens
aaaacaaacaaaaag

SEQ ID NO: 1824300 - DNA, 15 bp, Homo sapiens
aaacaaacaaaaaga

SEQ ID NO: 1824301 - DNA, 15 bp, Homo sapiens
aacaaacaaaaagac

SEQ ID NO: 1824302 - DNA, 15 bp, Homo sapiens
acaaacaaaaagacg

SEQ ID NO: 1824303 - DNA, 15 bp, Homo sapiens
caaacaaaaagacgt

SEQ ID NO: 1824304 - DNA, 15 bp, Homo sapiens
aaacaaaaagacgta

SEQ ID NO: 1824305 - DNA, 15 bp, Homo sapiens
aacaaaaagacgtaa

SEQ ID NO: 1824306 - DNA, 15 bp, Homo sapiens
acaaaaagacgtaag

SEQ ID NO: 1824307 - DNA, 15 bp, Homo sapiens
caaaaagacgtaaga

SEQ ID NO: 1824308 - DNA, 15 bp, Homo sapiens
aaaaagacgtaagat

SEQ ID NO: 1824309 - DNA, 15 bp, Homo sapiens
aaaagacgtaagatg

SEQ ID NO: 1824310 - DNA, 15 bp, Homo sapiens
aaagacgtaagatgt

SEQ ID NO: 1824311 - DNA, 15 bp, Homo sapiens
aagacgtaagatgtg

SEQ ID NO: 1824312 - DNA, 15 bp, Homo sapiens
agacgtaagatgtgg

SEQ ID NO: 1824313 - DNA, 15 bp, Homo sapiens
gacgtaagatgtgga

SEQ ID NO: 1824314 - DNA, 15 bp, Homo sapiens
acgtaagatgtggac

SEQ ID NO: 1824315 - DNA, 15 bp, Homo sapiens
cgtaagatgtggacc

SEQ ID NO: 1824316 - DNA, 15 bp, Homo sapiens
gtaagatgtggaccg

SEQ ID NO: 1824317 - DNA, 15 bp, Homo sapiens
taagatgtggaccgc

SEQ ID NO: 1824318 - DNA, 15 bp, Homo sapiens
aagatgtggaccgct

SEQ ID NO: 1824319 - DNA, 15 bp, Homo sapiens
agatgtggaccgctg

SEQ ID NO: 1824320 - DNA, 15 bp, Homo sapiens
gatgtggaccgctgg

SEQ ID NO: 1824321 - DNA, 15 bp, Homo sapiens
atgtggaccgctgga

SEQ ID NO: 1824322 - DNA, 15 bp, Homo sapiens
tgtggaccgctggag

SEQ ID NO: 1824323 - DNA, 15 bp, Homo sapiens
gtggaccgctggaga

SEQ ID NO: 1824324 - DNA, 15 bp, Homo sapiens
tggaccgctggagaa

SEQ ID NO: 1824325 - DNA, 15 bp, Homo sapiens
ggaccgctggagaat

SEQ ID NO: 1824326 - DNA, 15 bp, Homo sapiens
gaccgctggagaatg

SEQ ID NO: 1824327 - DNA, 15 bp, Homo sapiens
accgctggagaatgg

SEQ ID NO: 1824328 - DNA, 15 bp, Homo sapiens
ccgctggagaatggg

SEQ ID NO: 1824329 - DNA, 15 bp, Homo sapiens
cgctggagaatgggg

SEQ ID NO: 1824330 - DNA, 15 bp, Homo sapiens
gctggagaatggggg

SEQ ID NO: 1824331 - DNA, 15 bp, Homo sapiens
ctggagaatgggggt

SEQ ID NO: 1824332 - DNA, 15 bp, Homo sapiens
tggagaatgggggtg

SEQ ID NO: 1824333 - DNA, 15 bp, Homo sapiens
ggagaatgggggtgc

SEQ ID NO: 1824334 - DNA, 15 bp, Homo sapiens
gagaatgggggtgct

SEQ ID NO: 1824335 - DNA, 15 bp, Homo sapiens
agaatgggggtgctg

SEQ ID NO: 1824336 - DNA, 15 bp, Homo sapiens
gaatgggggtgctgc

SEQ ID NO: 1824337 - DNA, 15 bp, Homo sapiens
aatgggggtgctgcc

SEQ ID NO: 1824338 - DNA, 15 bp, Homo sapiens
atgggggtgctgcct

SEQ ID NO: 1824339 - DNA, 15 bp, Homo sapiens
tgggggtgctgcctg

SEQ ID NO: 1824340 - DNA, 15 bp, Homo sapiens
gggggtgctgcctgc

SEQ ID NO: 1824341 - DNA, 15 bp, Homo sapiens
ggggtgctgcctgca

SEQ ID NO: 1824342 - DNA, 15 bp, Homo sapiens
gggtgctgcctgcag

SEQ ID NO: 1824343 - DNA, 15 bp, Homo sapiens
ggtgctgcctgcagt

SEQ ID NO: 1824344 - DNA, 15 bp, Homo sapiens
gtgctgcctgcagtc

SEQ ID NO: 1824345 - DNA, 15 bp, Homo sapiens
tgctgcctgcagtca

SEQ ID NO: 1824346 - DNA, 15 bp, Homo sapiens
gctgcctgcagtcaa

SEQ ID NO: 1824347 - DNA, 15 bp, Homo sapiens
ctgcctgcagtcaaa

SEQ ID NO: 1824348 - DNA, 15 bp, Homo sapiens
tgcctgcagtcaaaa

SEQ ID NO: 1824349 - DNA, 15 bp, Homo sapiens
gcctgcagtcaaaac

SEQ ID NO: 1824350 - DNA, 15 bp, Homo sapiens
cctgcagtcaaaacg

SEQ ID NO: 1824351 - DNA, 15 bp, Homo sapiens
ctgcagtcaaaacgg

SEQ ID NO: 1824352 - DNA, 15 bp, Homo sapiens
tgcagtcaaaacgga

SEQ ID NO: 1824353 - DNA, 15 bp, Homo sapiens
gcagtcaaaacggag

SEQ ID NO: 1824354 - DNA, 15 bp, Homo sapiens
cagtcaaaacggagt

SEQ ID NO: 1824355 - DNA, 15 bp, Homo sapiens
agtcaaaacggagtg

SEQ ID NO: 1824356 - DNA, 15 bp, Homo sapiens
gtcaaaacggagtgg

SEQ ID NO: 1824357 - DNA, 15 bp, Homo sapiens
tcaaaacggagtggg

SEQ ID NO: 1824358 - DNA, 15 bp, Homo sapiens
caaaacggagtgggg

SEQ ID NO: 1824359 - DNA, 15 bp, Homo sapiens
aaaacggagtggggg

SEQ ID NO: 1824360 - DNA, 15 bp, Homo sapiens
aaacggagtgggggt

SEQ ID NO: 1824361 - DNA, 15 bp, Homo sapiens
aacggagtgggggtg

SEQ ID NO: 1824362 - DNA, 15 bp, Homo sapiens
acggagtgggggtgc

SEQ ID NO: 1824363 - DNA, 15 bp, Homo sapiens
cggagtgggggtgcc

SEQ ID NO: 1824364 - DNA, 15 bp, Homo sapiens
ggagtgggggtgccc

SEQ ID NO: 1824365 - DNA, 15 bp, Homo sapiens
gagtgggggtgccca

SEQ ID NO: 1824366 - DNA, 15 bp, Homo sapiens
agtgggggtgcccag

SEQ ID NO: 1824367 - DNA, 15 bp, Homo sapiens
gtgggggtgcccagc

SEQ ID NO: 1824368 - DNA, 15 bp, Homo sapiens
tgggggtgcccagct

SEQ ID NO: 1824369 - DNA, 15 bp, Homo sapiens
gggggtgcccagctc

SEQ ID NO: 1824370 - DNA, 15 bp, Homo sapiens
ggggtgcccagctca

SEQ ID NO: 1824371 - DNA, 15 bp, Homo sapiens
gggtgcccagctcag

SEQ ID NO: 1824372 - DNA, 15 bp, Homo sapiens
ggtgcccagctcagg

SEQ ID NO: 1824373 - DNA, 15 bp, Homo sapiens
gtgcccagctcaggg

SEQ ID NO: 1824374 - DNA, 15 bp, Homo sapiens
tgcccagctcagggc

SEQ ID NO: 1824375 - DNA, 15 bp, Homo sapiens
cccagctcagggcca

SEQ ID NO: 1824376 - DNA, 15 bp, Homo sapiens
ccagctcagggccag

SEQ ID NO: 1824377 - DNA, 15 bp, Homo sapiens
cagctcagggccaga

SEQ ID NO: 1824378 - DNA, 15 bp, Homo sapiens
agctcagggccagaa

SEQ ID NO: 1824379 - DNA, 15 bp, Homo sapiens
gctcagggccagaat

SEQ ID NO: 1824380 - DNA, 15 bp, Homo sapiens
ctcagggccagaatg

SEQ ID NO: 1824381 - DNA, 15 bp, Homo sapiens
tcagggccagaatga

SEQ ID NO: 1824382 - DNA, 15 bp, Homo sapiens
cagggccagaatgat

SEQ ID NO: 1824383 - DNA, 15 bp, Homo sapiens
agggccagaatgatc

SEQ ID NO: 1824384 - DNA, 15 bp, Homo sapiens
gggccagaatgatcc

SEQ ID NO: 1824385 - DNA, 15 bp, Homo sapiens
ggccagaatgatcct

SEQ ID NO: 1824386 - DNA, 15 bp, Homo sapiens
gccagaatgatccta

SEQ ID NO: 1824387 - DNA, 15 bp, Homo sapiens
ccagaatgatcctat

SEQ ID NO: 1824388 - DNA, 15 bp, Homo sapiens
cagaatgatcctatt

SEQ ID NO: 1824389 - DNA, 15 bp, Homo sapiens
agaatgatcctattc

SEQ ID NO: 1824390 - DNA, 15 bp, Homo sapiens
gaatgatcctattcc

SEQ ID NO: 1824391 - DNA, 15 bp, Homo sapiens
aatgatcctattccc

SEQ ID NO: 1824392 - DNA, 15 bp, Homo sapiens
atgatcctattcccg

SEQ ID NO: 1824393 - DNA, 15 bp, Homo sapiens
tgatcctattcccgg

SEQ ID NO: 1824394 - DNA, 15 bp, Homo sapiens
gatcctattcccggc

SEQ ID NO: 1824395 - DNA, 15 bp, Homo sapiens
gggtgtcccgggagc

SEQ ID NO: 1824396 - DNA, 15 bp, Homo sapiens
ggtgtcccgggagcg

SEQ ID NO: 1824397 - DNA, 15 bp, Homo sapiens
gtgtcccgggagcgt

SEQ ID NO: 1824398 - DNA, 15 bp, Homo sapiens
tgtcccgggagcgtg

SEQ ID NO: 1824399 - DNA, 15 bp, Homo sapiens
gtcccgggagcgtgg

SEQ ID NO: 1824400 - DNA, 15 bp, Homo sapiens
tcccgggagcgtggg

SEQ ID NO: 1824401 - DNA, 15 bp, Homo sapiens
cccgggagcgtgggt

SEQ ID NO: 1824402 - DNA, 15 bp, Homo sapiens
ccgggagcgtgggtg

SEQ ID NO: 1824403 - DNA, 15 bp, Homo sapiens
cgggagcgtgggtgt

SEQ ID NO: 1824404 - DNA, 15 bp, Homo sapiens
gggagcgtgggtgtc

SEQ ID NO: 1824405 - DNA, 15 bp, Homo sapiens
ggagcgtgggtgtcc

SEQ ID NO: 1824406 - DNA, 15 bp, Homo sapiens
gagcgtgggtgtccc

SEQ ID NO: 1824407 - DNA, 15 bp, Homo sapiens
agcgtgggtgtcccg

SEQ ID NO: 1824408 - DNA, 15 bp, Homo sapiens
gggagtgtgggtgtt

SEQ ID NO: 1824409 - DNA, 15 bp, Homo sapiens
ggagtgtgggtgttc

SEQ ID NO: 1824410 - DNA, 15 bp, Homo sapiens
gagtgtgggtgttcc

SEQ ID NO: 1824411 - DNA, 15 bp, Homo sapiens
agtgtgggtgttccg

SEQ ID NO: 1824412 - DNA, 15 bp, Homo sapiens
gtgtgggtgttccgg

SEQ ID NO: 1824413 - DNA, 15 bp, Homo sapiens
tgtgggtgttccgga

SEQ ID NO: 1824414 - DNA, 15 bp, Homo sapiens
gtgggtgttccggag

SEQ ID NO: 1824415 - DNA, 15 bp, Homo sapiens
tgggtgttccggagg

SEQ ID NO: 1824416 - DNA, 15 bp, Homo sapiens
gggtgttccggaggc

SEQ ID NO: 1824417 - DNA, 15 bp, Homo sapiens
ggtgttccggaggcg

SEQ ID NO: 1824418 - DNA, 15 bp, Homo sapiens
gtgttccggaggcga

SEQ ID NO: 1824419 - DNA, 15 bp, Homo sapiens
tgttccggaggcgag

SEQ ID NO: 1824420 - DNA, 15 bp, Homo sapiens
gttccggaggcgagg

SEQ ID NO: 1824421 - DNA, 15 bp, Homo sapiens
ttccggaggcgaggg

SEQ ID NO: 1824422 - DNA, 15 bp, Homo sapiens
tccggaggcgagggt

SEQ ID NO: 1824423 - DNA, 15 bp, Homo sapiens
gtcccgggagtgtgc

SEQ ID NO: 1824424 - DNA, 15 bp, Homo sapiens
tcccgggagtgtgcg

SEQ ID NO: 1824425 - DNA, 15 bp, Homo sapiens
cccgggagtgtgcgt

SEQ ID NO: 1824426 - DNA, 15 bp, Homo sapiens
ccgggagtgtgcgtg

SEQ ID NO: 1824427 - DNA, 15 bp, Homo sapiens
cgggagtgtgcgtgt

SEQ ID NO: 1824428 - DNA, 15 bp, Homo sapiens
gggagtgtgcgtgtc

SEQ ID NO: 1824429 - DNA, 15 bp, Homo sapiens
ggagtgtgcgtgtcc

SEQ ID NO: 1824430 - DNA, 15 bp, Homo sapiens
gagtgtgcgtgtccc

SEQ ID NO: 1824431 - DNA, 15 bp, Homo sapiens
agtgtgcgtgtcccg

SEQ ID NO: 1824432 - DNA, 15 bp, Homo sapiens
gtgtgcgtgtcccgg

SEQ ID NO: 1824433 - DNA, 15 bp, Homo sapiens
tgtgcgtgtcccggg

SEQ ID NO: 1824434 - DNA, 15 bp, Homo sapiens
gtgcgtgtcccgggg

SEQ ID NO: 1824435 - DNA, 15 bp, Homo sapiens
tgcgtgtcccggggg

SEQ ID NO: 1824436 - DNA, 15 bp, Homo sapiens
gcgtgtcccgggggc

SEQ ID NO: 1824437 - DNA, 15 bp, Homo sapiens
cgtgtcccgggggcg

SEQ ID NO: 1824438 - DNA, 15 bp, Homo sapiens
gggggcgtgggtgtt

SEQ ID NO: 1824439 - DNA, 15 bp, Homo sapiens
ggggcgtgggtgttc

SEQ ID NO: 1824440 - DNA, 15 bp, Homo sapiens
gggtgttccggaggt

SEQ ID NO: 1824441 - DNA, 15 bp, Homo sapiens
ggtgttccggaggtg

SEQ ID NO: 1824442 - DNA, 15 bp, Homo sapiens
gtgttccggaggtga

SEQ ID NO: 1824443 - DNA, 15 bp, Homo sapiens
tgttccggaggtgag

SEQ ID NO: 1824444 - DNA, 15 bp, Homo sapiens
gttccggaggtgagg

SEQ ID NO: 1824445 - DNA, 15 bp, Homo sapiens
ttccggaggtgaggg

SEQ ID NO: 1824446 - DNA, 15 bp, Homo sapiens
tccggaggtgagggt

SEQ ID NO: 1824447 - DNA, 15 bp, Homo sapiens
ccggaggtgagggtg

SEQ ID NO: 1824448 - DNA, 15 bp, Homo sapiens
cggaggtgagggtgt

SEQ ID NO: 1824449 - DNA, 15 bp, Homo sapiens
ggaggtgagggtgtc

SEQ ID NO: 1824450 - DNA, 15 bp, Homo sapiens
gaggtgagggtgtcc

SEQ ID NO: 1824451 - DNA, 15 bp, Homo sapiens
aggtgagggtgtccc

SEQ ID NO: 1824452 - DNA, 15 bp, Homo sapiens
ggtgagggtgtcccg

SEQ ID NO: 1824453 - DNA, 15 bp, Homo sapiens
gtgagggtgtcccgg

SEQ ID NO: 1824454 - DNA, 15 bp, Homo sapiens
tgagggtgtcccggg

SEQ ID NO: 1824455 - DNA, 15 bp, Homo sapiens
agtgtgggtgtccca

SEQ ID NO: 1824456 - DNA, 15 bp, Homo sapiens
gtgtgggtgtcccag

SEQ ID NO: 1824457 - DNA, 15 bp, Homo sapiens
tgtgggtgtcccagg

SEQ ID NO: 1824458 - DNA, 15 bp, Homo sapiens
gtgggtgtcccaggg

SEQ ID NO: 1824459 - DNA, 15 bp, Homo sapiens
tgggtgtcccagggg

SEQ ID NO: 1824460 - DNA, 15 bp, Homo sapiens
gggtgtcccaggggc

SEQ ID NO: 1824461 - DNA, 15 bp, Homo sapiens
ggtgtcccaggggcg

SEQ ID NO: 1824462 - DNA, 15 bp, Homo sapiens
ggtgtcccgggggtt

SEQ ID NO: 1824463 - DNA, 15 bp, Homo sapiens
gtgtcccgggggttg

SEQ ID NO: 1824464 - DNA, 15 bp, Homo sapiens
tgtcccgggggttgt

SEQ ID NO: 1824465 - DNA, 15 bp, Homo sapiens
gtcccgggggttgtg

SEQ ID NO: 1824466 - DNA, 15 bp, Homo sapiens
agtgtgggtgttcca

SEQ ID NO: 1824467 - DNA, 15 bp, Homo sapiens
gtgtgggtgttccag

SEQ ID NO: 1824468 - DNA, 15 bp, Homo sapiens
tgtgggtgttccaga

SEQ ID NO: 1824469 - DNA, 15 bp, Homo sapiens
gtgggtgttccagag

SEQ ID NO: 1824470 - DNA, 15 bp, Homo sapiens
tgggtgttccagagg

SEQ ID NO: 1824471 - DNA, 15 bp, Homo sapiens
gggtgttccagaggc

SEQ ID NO: 1824472 - DNA, 15 bp, Homo sapiens
ggtgttccagaggcg

SEQ ID NO: 1824473 - DNA, 15 bp, Homo sapiens
gtgttccagaggcga

SEQ ID NO: 1824474 - DNA, 15 bp, Homo sapiens
tgttccagaggcgag

SEQ ID NO: 1824475 - DNA, 15 bp, Homo sapiens
gttccagaggcgagg

SEQ ID NO: 1824476 - DNA, 15 bp, Homo sapiens
ttccagaggcgaggg

SEQ ID NO: 1824477 - DNA, 15 bp, Homo sapiens
tccagaggcgagggt

SEQ ID NO: 1824478 - DNA, 15 bp, Homo sapiens
ccagaggcgagggta

SEQ ID NO: 1824479 - DNA, 15 bp, Homo sapiens
cagaggcgagggtat

SEQ ID NO: 1824480 - DNA, 15 bp, Homo sapiens
agaggcgagggtatc

SEQ ID NO: 1824481 - DNA, 15 bp, Homo sapiens
agtgtgagtgtcccg

SEQ ID NO: 1824482 - DNA, 15 bp, Homo sapiens
gtgtgagtgtcccgg

SEQ ID NO: 1824483 - DNA, 15 bp, Homo sapiens
tgtgagtgtcccggg

SEQ ID NO: 1824484 - DNA, 15 bp, Homo sapiens
gtgagtgtcccgggg

SEQ ID NO: 1824485 - DNA, 15 bp, Homo sapiens
tgagtgtcccggggg

SEQ ID NO: 1824486 - DNA, 15 bp, Homo sapiens
gagtgtcccgggggt

SEQ ID NO: 1824487 - DNA, 15 bp, Homo sapiens
agtgtcccgggggtg

SEQ ID NO: 1824488 - DNA, 15 bp, Homo sapiens
ggtgtcccgggggtc

SEQ ID NO: 1824489 - DNA, 15 bp, Homo sapiens
gtgtcccgggggtcg

SEQ ID NO: 1824490 - DNA, 15 bp, Homo sapiens
tgtcccgggggtcgt

SEQ ID NO: 1824491 - DNA, 15 bp, Homo sapiens
gtcccgggggtcgtg

SEQ ID NO: 1824492 - DNA, 15 bp, Homo sapiens
tcccgggggtcgtgg

SEQ ID NO: 1824493 - DNA, 15 bp, Homo sapiens
cccgggggtcgtggg

SEQ ID NO: 1824494 - DNA, 15 bp, Homo sapiens
ccgggggtcgtgggt

SEQ ID NO: 1824495 - DNA, 15 bp, Homo sapiens
cgggggtcgtgggtg

SEQ ID NO: 1824496 - DNA, 15 bp, Homo sapiens
gggggtcgtgggtgt

SEQ ID NO: 1824497 - DNA, 15 bp, Homo sapiens
ggggtcgtgggtgtc

SEQ ID NO: 1824498 - DNA, 15 bp, Homo sapiens
gggtcgtgggtgtcc

SEQ ID NO: 1824499 - DNA, 15 bp, Homo sapiens
ggtcgtgggtgtccc

SEQ ID NO: 1824500 - DNA, 15 bp, Homo sapiens
gtcgtgggtgtcccg

SEQ ID NO: 1824501 - DNA, 15 bp, Homo sapiens
tcgtgggtgtcccgg

SEQ ID NO: 1824502 - DNA, 15 bp, Homo sapiens
ccagaggcgagggtg

SEQ ID NO: 1824503 - DNA, 15 bp, Homo sapiens
cagaggcgagggtgt

SEQ ID NO: 1824504 - DNA, 15 bp, Homo sapiens
agaggcgagggtgtc

SEQ ID NO: 1824505 - DNA, 15 bp, Homo sapiens
acacctcacactcag

SEQ ID NO: 1824506 - DNA, 15 bp, Homo sapiens
cacctcacactcagg

SEQ ID NO: 1824507 - DNA, 15 bp, Homo sapiens
acctcacactcaggg

SEQ ID NO: 1824508 - DNA, 15 bp, Homo sapiens
cctcacactcagggc

SEQ ID NO: 1824509 - DNA, 15 bp, Homo sapiens
ctcacactcagggcg

SEQ ID NO: 1824510 - DNA, 15 bp, Homo sapiens
tcacactcagggcgc

SEQ ID NO: 1824511 - DNA, 15 bp, Homo sapiens
cacactcagggcgca

SEQ ID NO: 1824512 - DNA, 15 bp, Homo sapiens
acactcagggcgcac

SEQ ID NO: 1824513 - DNA, 15 bp, Homo sapiens
cactcagggcgcact

SEQ ID NO: 1824514 - DNA, 15 bp, Homo sapiens
actcagggcgcactt

SEQ ID NO: 1824515 - DNA, 15 bp, Homo sapiens
ctcagggcgcacttc

SEQ ID NO: 1824516 - DNA, 15 bp, Homo sapiens
tcagggcgcacttca

SEQ ID NO: 1824517 - DNA, 15 bp, Homo sapiens
cagggcgcacttcac

SEQ ID NO: 1824518 - DNA, 15 bp, Homo sapiens
agggcgcacttcaca

SEQ ID NO: 1824519 - DNA, 15 bp, Homo sapiens
gggcgcacttcacac

SEQ ID NO: 1824520 - DNA, 15 bp, Homo sapiens
ggcgcacttcacact

SEQ ID NO: 1824521 - DNA, 15 bp, Homo sapiens
gcgcacttcacactc

SEQ ID NO: 1824522 - DNA, 15 bp, Homo sapiens
cgcacttcacactca

SEQ ID NO: 1824523 - DNA, 15 bp, Homo sapiens
gcacttcacactcac

SEQ ID NO: 1824524 - DNA, 15 bp, Homo sapiens
gggtcacctcacacc

SEQ ID NO: 1824525 - DNA, 15 bp, Homo sapiens
caggacacctcacag

SEQ ID NO: 1824526 - DNA, 15 bp, Homo sapiens
aggacacctcacaga

SEQ ID NO: 1824527 - DNA, 15 bp, Homo sapiens
ggacacctcacagag

SEQ ID NO: 1824528 - DNA, 15 bp, Homo sapiens
gacacctcacagagg

SEQ ID NO: 1824529 - DNA, 15 bp, Homo sapiens
acacctcacagaggt

SEQ ID NO: 1824530 - DNA, 15 bp, Homo sapiens
cacctcacagaggtc

SEQ ID NO: 1824531 - DNA, 15 bp, Homo sapiens
acctcacagaggtca

SEQ ID NO: 1824532 - DNA, 15 bp, Homo sapiens
cctcacagaggtcac

SEQ ID NO: 1824533 - DNA, 15 bp, Homo sapiens
ctcacagaggtcacc

SEQ ID NO: 1824534 - DNA, 15 bp, Homo sapiens
tcacagaggtcacct

SEQ ID NO: 1824535 - DNA, 15 bp, Homo sapiens
cacagaggtcacctc

SEQ ID NO: 1824536 - DNA, 15 bp, Homo sapiens
acagaggtcacctca

SEQ ID NO: 1824537 - DNA, 15 bp, Homo sapiens
cagaggtcacctcac

SEQ ID NO: 1824538 - DNA, 15 bp, Homo sapiens
agaggtcacctcaca

SEQ ID NO: 1824539 - DNA, 15 bp, Homo sapiens
gaggtcacctcacac

SEQ ID NO: 1824540 - DNA, 15 bp, Homo sapiens
aggtcacctcacaca

SEQ ID NO: 1824541 - DNA, 15 bp, Homo sapiens
ggtcacctcacacag

SEQ ID NO: 1824542 - DNA, 15 bp, Homo sapiens
gtcacctcacacagg

SEQ ID NO: 1824543 - DNA, 15 bp, Homo sapiens
tcacctcacacagga

SEQ ID NO: 1824544 - DNA, 15 bp, Homo sapiens
cacctcacacaggac

SEQ ID NO: 1824545 - DNA, 15 bp, Homo sapiens
acctcacacaggaca

SEQ ID NO: 1824546 - DNA, 15 bp, Homo sapiens
cctcacacaggacac

SEQ ID NO: 1824547 - DNA, 15 bp, Homo sapiens
ctcacacaggacacc

SEQ ID NO: 1824548 - DNA, 15 bp, Homo sapiens
tcacacaggacacct

SEQ ID NO: 1824549 - DNA, 15 bp, Homo sapiens
cacacaggacacctc

SEQ ID NO: 1824550 - DNA, 15 bp, Homo sapiens
acacaggacacctca

SEQ ID NO: 1824551 - DNA, 15 bp, Homo sapiens
cctcacactcagggt

SEQ ID NO: 1824552 - DNA, 15 bp, Homo sapiens
ctcacactcagggtg

SEQ ID NO: 1824553 - DNA, 15 bp, Homo sapiens
tcacactcagggtgc

SEQ ID NO: 1824554 - DNA, 15 bp, Homo sapiens
cacactcagggtgca

SEQ ID NO: 1824555 - DNA, 15 bp, Homo sapiens
acactcagggtgcac

SEQ ID NO: 1824556 - DNA, 15 bp, Homo sapiens
cactcagggtgcact

SEQ ID NO: 1824557 - DNA, 15 bp, Homo sapiens
actcagggtgcactt

SEQ ID NO: 1824558 - DNA, 15 bp, Homo sapiens
ctcagggtgcacttc

SEQ ID NO: 1824559 - DNA, 15 bp, Homo sapiens
tcagggtgcacttca

SEQ ID NO: 1824560 - DNA, 15 bp, Homo sapiens
cagggtgcacttcaa

SEQ ID NO: 1824561 - DNA, 15 bp, Homo sapiens
agggtgcacttcaaa

SEQ ID NO: 1824562 - DNA, 15 bp, Homo sapiens
gggtgcacttcaaac

SEQ ID NO: 1824563 - DNA, 15 bp, Homo sapiens
ggtgcacttcaaacc

SEQ ID NO: 1824564 - DNA, 15 bp, Homo sapiens
gtgcacttcaaaccc

SEQ ID NO: 1824565 - DNA, 15 bp, Homo sapiens
tgcacttcaaaccca

SEQ ID NO: 1824566 - DNA, 15 bp, Homo sapiens
gcacttcaaacccac

SEQ ID NO: 1824567 - DNA, 15 bp, Homo sapiens
cacttcaaacccaca

SEQ ID NO: 1824568 - DNA, 15 bp, Homo sapiens
acttcaaacccacag

SEQ ID NO: 1824569 - DNA, 15 bp, Homo sapiens
cttcaaacccacagg

SEQ ID NO: 1824570 - DNA, 15 bp, Homo sapiens
ttcaaacccacaggt

SEQ ID NO: 1824571 - DNA, 15 bp, Homo sapiens
tcaaacccacaggtc

SEQ ID NO: 1824572 - DNA, 15 bp, Homo sapiens
caaacccacaggtca

SEQ ID NO: 1824573 - DNA, 15 bp, Homo sapiens
aaacccacaggtcat

SEQ ID NO: 1824574 - DNA, 15 bp, Homo sapiens
aacccacaggtcatt

SEQ ID NO: 1824575 - DNA, 15 bp, Homo sapiens
acccacaggtcattt

SEQ ID NO: 1824576 - DNA, 15 bp, Homo sapiens
cccacaggtcatttc

SEQ ID NO: 1824577 - DNA, 15 bp, Homo sapiens
ccacaggtcatttca

SEQ ID NO: 1824578 - DNA, 15 bp, Homo sapiens
cacaggtcatttcac

SEQ ID NO: 1824579 - DNA, 15 bp, Homo sapiens
acaggtcatttcacc

SEQ ID NO: 1824580 - DNA, 15 bp, Homo sapiens
caggtcatttcacct

SEQ ID NO: 1824581 - DNA, 15 bp, Homo sapiens
aggtcatttcacctc

SEQ ID NO: 1824582 - DNA, 15 bp, Homo sapiens
ggtcatttcacctca

SEQ ID NO: 1824583 - DNA, 15 bp, Homo sapiens
gtcatttcacctcac

SEQ ID NO: 1824584 - DNA, 15 bp, Homo sapiens
tcatttcacctcaca

SEQ ID NO: 1824585 - DNA, 15 bp, Homo sapiens
catttcacctcacac

SEQ ID NO: 1824586 - DNA, 15 bp, Homo sapiens
atttcacctcacact

SEQ ID NO: 1824587 - DNA, 15 bp, Homo sapiens
tttcacctcacactc

SEQ ID NO: 1824588 - DNA, 15 bp, Homo sapiens
ttcacctcacactca

SEQ ID NO: 1824589 - DNA, 15 bp, Homo sapiens
cacctcacacaagat

SEQ ID NO: 1824590 - DNA, 15 bp, Homo sapiens
acctcacacaagata

SEQ ID NO: 1824591 - DNA, 15 bp, Homo sapiens
cctcacacaagatac

SEQ ID NO: 1824592 - DNA, 15 bp, Homo sapiens
ctcacacaagatacc

SEQ ID NO: 1824593 - DNA, 15 bp, Homo sapiens
tcacacaagatacca

SEQ ID NO: 1824594 - DNA, 15 bp, Homo sapiens
cacacaagataccac

SEQ ID NO: 1824595 - DNA, 15 bp, Homo sapiens
acacaagataccaca

SEQ ID NO: 1824596 - DNA, 15 bp, Homo sapiens
cacaagataccacac

SEQ ID NO: 1824597 - DNA, 15 bp, Homo sapiens
acaagataccacacg

SEQ ID NO: 1824598 - DNA, 15 bp, Homo sapiens
caagataccacacgg

SEQ ID NO: 1824599 - DNA, 15 bp, Homo sapiens
aagataccacacggg

SEQ ID NO: 1824600 - DNA, 15 bp, Homo sapiens
agataccacacgggg

SEQ ID NO: 1824601 - DNA, 15 bp, Homo sapiens
gataccacacggggc

SEQ ID NO: 1824602 - DNA, 15 bp, Homo sapiens
ataccacacggggca

SEQ ID NO: 1824603 - DNA, 15 bp, Homo sapiens
taccacacggggcac

SEQ ID NO: 1824604 - DNA, 15 bp, Homo sapiens
accacacggggcaca

SEQ ID NO: 1824605 - DNA, 15 bp, Homo sapiens
ccacacggggcacac

SEQ ID NO: 1824606 - DNA, 15 bp, Homo sapiens
aggtcacctcacacg

SEQ ID NO: 1824607 - DNA, 15 bp, Homo sapiens
ggtcacctcacacgg

SEQ ID NO: 1824608 - DNA, 15 bp, Homo sapiens
gtcacctcacacggg

SEQ ID NO: 1824609 - DNA, 15 bp, Homo sapiens
tcacctcacacgggg

SEQ ID NO: 1824610 - DNA, 15 bp, Homo sapiens
acacctcacacagga

SEQ ID NO: 1824611 - DNA, 15 bp, Homo sapiens
acacctcacactcat

SEQ ID NO: 1824612 - DNA, 15 bp, Homo sapiens
cacctcacactcata

SEQ ID NO: 1824613 - DNA, 15 bp, Homo sapiens
acctcacactcatag

SEQ ID NO: 1824614 - DNA, 15 bp, Homo sapiens
cctcacactcatagg

SEQ ID NO: 1824615 - DNA, 15 bp, Homo sapiens
ctcacactcataggt

SEQ ID NO: 1824616 - DNA, 15 bp, Homo sapiens
tcacactcataggtc

SEQ ID NO: 1824617 - DNA, 15 bp, Homo sapiens
cacactcataggtca

SEQ ID NO: 1824618 - DNA, 15 bp, Homo sapiens
acactcataggtcac

SEQ ID NO: 1824619 - DNA, 15 bp, Homo sapiens
cactcataggtcacc

SEQ ID NO: 1824620 - DNA, 15 bp, Homo sapiens
actcataggtcacct

SEQ ID NO: 1824621 - DNA, 15 bp, Homo sapiens
ctcataggtcacctc

SEQ ID NO: 1824622 - DNA, 15 bp, Homo sapiens
tcataggtcacctca

SEQ ID NO: 1824623 - DNA, 15 bp, Homo sapiens
cataggtcacctcag

SEQ ID NO: 1824624 - DNA, 15 bp, Homo sapiens
ataggtcacctcagt

SEQ ID NO: 1824625 - DNA, 15 bp, Homo sapiens
taggtcacctcagtc

SEQ ID NO: 1824626 - DNA, 15 bp, Homo sapiens
ggtcacctcagtctt

SEQ ID NO: 1824627 - DNA, 15 bp, Homo sapiens
gtcacctcagtctta

SEQ ID NO: 1824628 - DNA, 15 bp, Homo sapiens
tcacctcagtcttac

SEQ ID NO: 1824629 - DNA, 15 bp, Homo sapiens
cacctcagtcttaca

SEQ ID NO: 1824630 - DNA, 15 bp, Homo sapiens
acctcagtcttacag

SEQ ID NO: 1824631 - DNA, 15 bp, Homo sapiens
cctcagtcttacagg

SEQ ID NO: 1824632 - DNA, 15 bp, Homo sapiens
ctcagtcttacagga

SEQ ID NO: 1824633 - DNA, 15 bp, Homo sapiens
tcagtcttacaggac

SEQ ID NO: 1824634 - DNA, 15 bp, Homo sapiens
cagtcttacaggaca

SEQ ID NO: 1824635 - DNA, 15 bp, Homo sapiens
agtcttacaggacaa

SEQ ID NO: 1824636 - DNA, 15 bp, Homo sapiens
gtcttacaggacaac

SEQ ID NO: 1824637 - DNA, 15 bp, Homo sapiens
tcttacaggacaact

SEQ ID NO: 1824638 - DNA, 15 bp, Homo sapiens
cttacaggacaactc

SEQ ID NO: 1824639 - DNA, 15 bp, Homo sapiens
ttacaggacaactca

SEQ ID NO: 1824640 - DNA, 15 bp, Homo sapiens
tacaggacaactcac

SEQ ID NO: 1824641 - DNA, 15 bp, Homo sapiens
acaggacaactcaca

SEQ ID NO: 1824642 - DNA, 15 bp, Homo sapiens
caggacaactcacac

SEQ ID NO: 1824643 - DNA, 15 bp, Homo sapiens
aggacaactcacact

SEQ ID NO: 1824644 - DNA, 15 bp, Homo sapiens
ggacaactcacactc

SEQ ID NO: 1824645 - DNA, 15 bp, Homo sapiens
gacaactcacactca

SEQ ID NO: 1824646 - DNA, 15 bp, Homo sapiens
acaactcacactcac

SEQ ID NO: 1824647 - DNA, 15 bp, Homo sapiens
caactcacactcaca

SEQ ID NO: 1824648 - DNA, 15 bp, Homo sapiens
aactcacactcacag

SEQ ID NO: 1824649 - DNA, 15 bp, Homo sapiens
actcacactcacagg

SEQ ID NO: 1824650 - DNA, 15 bp, Homo sapiens
ctcacactcacaggt

SEQ ID NO: 1824651 - DNA, 15 bp, Homo sapiens
ctcacaggtcacctt

SEQ ID NO: 1824652 - DNA, 15 bp, Homo sapiens
tcacaggtcacctta

SEQ ID NO: 1824653 - DNA, 15 bp, Homo sapiens
cacaggtcaccttac

SEQ ID NO: 1824654 - DNA, 15 bp, Homo sapiens
acaggtcaccttact

SEQ ID NO: 1824655 - DNA, 15 bp, Homo sapiens
caggtcaccttactc

SEQ ID NO: 1824656 - DNA, 15 bp, Homo sapiens
aggtcaccttactct

SEQ ID NO: 1824657 - DNA, 15 bp, Homo sapiens
ggtcaccttactctc

SEQ ID NO: 1824658 - DNA, 15 bp, Homo sapiens
gtcaccttactctca

SEQ ID NO: 1824659 - DNA, 15 bp, Homo sapiens
tcaccttactctcac

SEQ ID NO: 1824660 - DNA, 15 bp, Homo sapiens
caccttactctcaca

SEQ ID NO: 1824661 - DNA, 15 bp, Homo sapiens
accttactctcacag

SEQ ID NO: 1824662 - DNA, 15 bp, Homo sapiens
ccttactctcacagg

SEQ ID NO: 1824663 - DNA, 15 bp, Homo sapiens
cttactctcacagga

SEQ ID NO: 1824664 - DNA, 15 bp, Homo sapiens
ttactctcacaggac

SEQ ID NO: 1824665 - DNA, 15 bp, Homo sapiens
tactctcacaggaca

SEQ ID NO: 1824666 - DNA, 15 bp, Homo sapiens
actctcacaggacac

SEQ ID NO: 1824667 - DNA, 15 bp, Homo sapiens
ctctcacaggacacc

SEQ ID NO: 1824668 - DNA, 15 bp, Homo sapiens
tctcacaggacacct

SEQ ID NO: 1824669 - DNA, 15 bp, Homo sapiens
acaggacacctcact

SEQ ID NO: 1824670 - DNA, 15 bp, Homo sapiens
caggacacctcactc

SEQ ID NO: 1824671 - DNA, 15 bp, Homo sapiens
aggacacctcactct

SEQ ID NO: 1824672 - DNA, 15 bp, Homo sapiens
ggacacctcactctc

SEQ ID NO: 1824673 - DNA, 15 bp, Homo sapiens
gacacctcactctca

SEQ ID NO: 1824674 - DNA, 15 bp, Homo sapiens
acacctcactctcac

SEQ ID NO: 1824675 - DNA, 15 bp, Homo sapiens
cacctcactctcaca

SEQ ID NO: 1824676 - DNA, 15 bp, Homo sapiens
acctcactctcacag

SEQ ID NO: 1824677 - DNA, 15 bp, Homo sapiens
cctcactctcacagg

SEQ ID NO: 1824678 - DNA, 15 bp, Homo sapiens
ctcactctcacagga

SEQ ID NO: 1824679 - DNA, 15 bp, Homo sapiens
tcactctcacaggac

SEQ ID NO: 1824680 - DNA, 15 bp, Homo sapiens
cactctcacaggaca

SEQ ID NO: 1824681 - DNA, 15 bp, Homo sapiens
agggcacacttcact

SEQ ID NO: 1824682 - DNA, 15 bp, Homo sapiens
gggcacacttcactc

SEQ ID NO: 1824683 - DNA, 15 bp, Homo sapiens
ggcacacttcactcc

SEQ ID NO: 1824684 - DNA, 15 bp, Homo sapiens
gcacacttcactccc

SEQ ID NO: 1824685 - DNA, 15 bp, Homo sapiens
cacacttcactccca

SEQ ID NO: 1824686 - DNA, 15 bp, Homo sapiens
acacttcactcccac

SEQ ID NO: 1824687 - DNA, 15 bp, Homo sapiens
cacttcactcccaca

SEQ ID NO: 1824688 - DNA, 15 bp, Homo sapiens
acttcactcccacag

SEQ ID NO: 1824689 - DNA, 15 bp, Homo sapiens
cttcactcccacagg

SEQ ID NO: 1824690 - DNA, 15 bp, Homo sapiens
ttcactcccacaggt

SEQ ID NO: 1824691 - DNA, 15 bp, Homo sapiens
tcactcccacaggtc

SEQ ID NO: 1824692 - DNA, 15 bp, Homo sapiens
cactcccacaggtca

SEQ ID NO: 1824693 - DNA, 15 bp, Homo sapiens
actcccacaggtcac

SEQ ID NO: 1824694 - DNA, 15 bp, Homo sapiens
ctcccacaggtcacc

SEQ ID NO: 1824695 - DNA, 15 bp, Homo sapiens
tcccacaggtcacca

SEQ ID NO: 1824696 - DNA, 15 bp, Homo sapiens
cccacaggtcaccat

SEQ ID NO: 1824697 - DNA, 15 bp, Homo sapiens
ccacaggtcaccata

SEQ ID NO: 1824698 - DNA, 15 bp, Homo sapiens
cacaggtcaccatac

SEQ ID NO: 1824699 - DNA, 15 bp, Homo sapiens
acaggtcaccatacc

SEQ ID NO: 1824700 - DNA, 15 bp, Homo sapiens
caggtcaccatacct

SEQ ID NO: 1824701 - DNA, 15 bp, Homo sapiens
aggtcaccatacctc

SEQ ID NO: 1824702 - DNA, 15 bp, Homo sapiens
ggtcaccatacctca

SEQ ID NO: 1824703 - DNA, 15 bp, Homo sapiens
gtcaccatacctcac

SEQ ID NO: 1824704 - DNA, 15 bp, Homo sapiens
tcaccatacctcaca

SEQ ID NO: 1824705 - DNA, 15 bp, Homo sapiens
caccatacctcacac

SEQ ID NO: 1824706 - DNA, 15 bp, Homo sapiens
accatacctcacaca

SEQ ID NO: 1824707 - DNA, 15 bp, Homo sapiens
ccatacctcacacag

SEQ ID NO: 1824708 - DNA, 15 bp, Homo sapiens
catacctcacacaga

SEQ ID NO: 1824709 - DNA, 15 bp, Homo sapiens
atacctcacacagat

SEQ ID NO: 1824710 - DNA, 15 bp, Homo sapiens
tacctcacacagatc

SEQ ID NO: 1824711 - DNA, 15 bp, Homo sapiens
acctcacacagatca

SEQ ID NO: 1824712 - DNA, 15 bp, Homo sapiens
cctcacacagatcac

SEQ ID NO: 1824713 - DNA, 15 bp, Homo sapiens
ctcacacagatcacc

SEQ ID NO: 1824714 - DNA, 15 bp, Homo sapiens
tcacacagatcacct

SEQ ID NO: 1824715 - DNA, 15 bp, Homo sapiens
cacacagatcacctc

SEQ ID NO: 1824716 - DNA, 15 bp, Homo sapiens
acacagatcacctca

SEQ ID NO: 1824717 - DNA, 15 bp, Homo sapiens
cacagatcacctcat

SEQ ID NO: 1824718 - DNA, 15 bp, Homo sapiens
acagatcacctcata

SEQ ID NO: 1824719 - DNA, 15 bp, Homo sapiens
cagatcacctcatac

SEQ ID NO: 1824720 - DNA, 15 bp, Homo sapiens
agatcacctcatact

SEQ ID NO: 1824721 - DNA, 15 bp, Homo sapiens
gatcacctcatactc

SEQ ID NO: 1824722 - DNA, 15 bp, Homo sapiens
atcacctcatactca

SEQ ID NO: 1824723 - DNA, 15 bp, Homo sapiens
tcacctcatactcac

SEQ ID NO: 1824724 - DNA, 15 bp, Homo sapiens
cacctcatactcaca

SEQ ID NO: 1824725 - DNA, 15 bp, Homo sapiens
acctcatactcacag

SEQ ID NO: 1824726 - DNA, 15 bp, Homo sapiens
cctcatactcacaga

SEQ ID NO: 1824727 - DNA, 15 bp, Homo sapiens
ctcatactcacagat

SEQ ID NO: 1824728 - DNA, 15 bp, Homo sapiens
tcatactcacagatc

SEQ ID NO: 1824729 - DNA, 15 bp, Homo sapiens
catactcacagatca

SEQ ID NO: 1824730 - DNA, 15 bp, Homo sapiens
atactcacagatcac

SEQ ID NO: 1824731 - DNA, 15 bp, Homo sapiens
tactcacagatcact

SEQ ID NO: 1824732 - DNA, 15 bp, Homo sapiens
actcacagatcactt

SEQ ID NO: 1824733 - DNA, 15 bp, Homo sapiens
ctcacagatcacttc

SEQ ID NO: 1824734 - DNA, 15 bp, Homo sapiens
tcacagatcacttca

SEQ ID NO: 1824735 - DNA, 15 bp, Homo sapiens
cacagatcacttcat

SEQ ID NO: 1824736 - DNA, 15 bp, Homo sapiens
acagatcacttcatt

SEQ ID NO: 1824737 - DNA, 15 bp, Homo sapiens
cagatcacttcattc

SEQ ID NO: 1824738 - DNA, 15 bp, Homo sapiens
agatcacttcattct

SEQ ID NO: 1824739 - DNA, 15 bp, Homo sapiens
gatcacttcattctc

SEQ ID NO: 1824740 - DNA, 15 bp, Homo sapiens
atcacttcattctca

SEQ ID NO: 1824741 - DNA, 15 bp, Homo sapiens
tcacttcattctcac

SEQ ID NO: 1824742 - DNA, 15 bp, Homo sapiens
cacttcattctcaca

SEQ ID NO: 1824743 - DNA, 15 bp, Homo sapiens
acttcattctcacag

SEQ ID NO: 1824744 - DNA, 15 bp, Homo sapiens
cttcattctcacagg

SEQ ID NO: 1824745 - DNA, 15 bp, Homo sapiens
ttcattctcacagga

SEQ ID NO: 1824746 - DNA, 15 bp, Homo sapiens
tcattctcacaggat

SEQ ID NO: 1824747 - DNA, 15 bp, Homo sapiens
cattctcacaggata

SEQ ID NO: 1824748 - DNA, 15 bp, Homo sapiens
attctcacaggatac

SEQ ID NO: 1824749 - DNA, 15 bp, Homo sapiens
ttctcacaggatacc

SEQ ID NO: 1824750 - DNA, 15 bp, Homo sapiens
tctcacaggatacct

SEQ ID NO: 1824751 - DNA, 15 bp, Homo sapiens
ctcacaggatacctc

SEQ ID NO: 1824752 - DNA, 15 bp, Homo sapiens
tcacaggatacctca

SEQ ID NO: 1824753 - DNA, 15 bp, Homo sapiens
cacaggatacctcac

SEQ ID NO: 1824754 - DNA, 15 bp, Homo sapiens
acaggatacctcaca

SEQ ID NO: 1824755 - DNA, 15 bp, Homo sapiens
caggatacctcacac

SEQ ID NO: 1824756 - DNA, 15 bp, Homo sapiens
aggatacctcacact

SEQ ID NO: 1824757 - DNA, 15 bp, Homo sapiens
ggatacctcacactc

SEQ ID NO: 1824758 - DNA, 15 bp, Homo sapiens
gatacctcacactca

SEQ ID NO: 1824759 - DNA, 15 bp, Homo sapiens
atacctcacactcag

SEQ ID NO: 1824760 - DNA, 15 bp, Homo sapiens
tacctcacactcagg

SEQ ID NO: 1824761 - DNA, 15 bp, Homo sapiens
ctcacactcagggca

SEQ ID NO: 1824762 - DNA, 15 bp, Homo sapiens
tcacactcagggcac

SEQ ID NO: 1824763 - DNA, 15 bp, Homo sapiens
cacactcagggcaca

SEQ ID NO: 1824764 - DNA, 15 bp, Homo sapiens
acactcagggcacac

SEQ ID NO: 1824765 - DNA, 15 bp, Homo sapiens
cactcagggcacact

SEQ ID NO: 1824766 - DNA, 15 bp, Homo sapiens
actcagggcacactt

SEQ ID NO: 1824767 - DNA, 15 bp, Homo sapiens
ctcagggcacacttc

SEQ ID NO: 1824768 - DNA, 15 bp, Homo sapiens
tcagggcacacttca

SEQ ID NO: 1824769 - DNA, 15 bp, Homo sapiens
cactcacaggtcaca

SEQ ID NO: 1824770 - DNA, 15 bp, Homo sapiens
actcacaggtcacac

SEQ ID NO: 1824771 - DNA, 15 bp, Homo sapiens
ctcacaggtcacacc

SEQ ID NO: 1824772 - DNA, 15 bp, Homo sapiens
tcacaggtcacacct

SEQ ID NO: 1824773 - DNA, 15 bp, Homo sapiens
cacaggtcacacctc

SEQ ID NO: 1824774 - DNA, 15 bp, Homo sapiens
acaggtcacacctca

SEQ ID NO: 1824775 - DNA, 15 bp, Homo sapiens
caggtcacacctcac

SEQ ID NO: 1824776 - DNA, 15 bp, Homo sapiens
aggtcacacctcaca

SEQ ID NO: 1824777 - DNA, 15 bp, Homo sapiens
ggtcacacctcacac

SEQ ID NO: 1824778 - DNA, 15 bp, Homo sapiens
gtcacacctcacaca

SEQ ID NO: 1824779 - DNA, 15 bp, Homo sapiens
tcacacctcacacag

SEQ ID NO: 1824780 - DNA, 15 bp, Homo sapiens
cacacctcacacaga

SEQ ID NO: 1824781 - DNA, 15 bp, Homo sapiens
acacctcacacagat

SEQ ID NO: 1824782 - DNA, 15 bp, Homo sapiens
cacctcacacagatc

SEQ ID NO: 1824783 - DNA, 15 bp, Homo sapiens
cctcacacagatcat

SEQ ID NO: 1824784 - DNA, 15 bp, Homo sapiens
ctcacacagatcatc

SEQ ID NO: 1824785 - DNA, 15 bp, Homo sapiens
tcacacagatcatct

SEQ ID NO: 1824786 - DNA, 15 bp, Homo sapiens
cacacagatcatctc

SEQ ID NO: 1824787 - DNA, 15 bp, Homo sapiens
acacagatcatctca

SEQ ID NO: 1824788 - DNA, 15 bp, Homo sapiens
cacagatcatctcat

SEQ ID NO: 1824789 - DNA, 15 bp, Homo sapiens
acagatcatctcatt

SEQ ID NO: 1824790 - DNA, 15 bp, Homo sapiens
cagatcatctcattc

SEQ ID NO: 1824791 - DNA, 15 bp, Homo sapiens
agatcatctcattct

SEQ ID NO: 1824792 - DNA, 15 bp, Homo sapiens
gatcatctcattctc

SEQ ID NO: 1824793 - DNA, 15 bp, Homo sapiens
atcatctcattctca

SEQ ID NO: 1824794 - DNA, 15 bp, Homo sapiens
tcatctcattctcac

SEQ ID NO: 1824795 - DNA, 15 bp, Homo sapiens
catctcattctcaca

SEQ ID NO: 1824796 - DNA, 15 bp, Homo sapiens
atctcattctcacag

SEQ ID NO: 1824797 - DNA, 15 bp, Homo sapiens
tctcattctcacagg

SEQ ID NO: 1824798 - DNA, 15 bp, Homo sapiens
ctcattctcacagga

SEQ ID NO: 1824799 - DNA, 15 bp, Homo sapiens
tcattctcacaggac

SEQ ID NO: 1824800 - DNA, 15 bp, Homo sapiens
cattctcacaggaca

SEQ ID NO: 1824801 - DNA, 15 bp, Homo sapiens
attctcacaggacac

SEQ ID NO: 1824802 - DNA, 15 bp, Homo sapiens
ttctcacaggacacc

SEQ ID NO: 1824803 - DNA, 15 bp, Homo sapiens
tcacaggacacctcc

SEQ ID NO: 1824804 - DNA, 15 bp, Homo sapiens
cacaggacacctccc

SEQ ID NO: 1824805 - DNA, 15 bp, Homo sapiens
acaggacacctccct

SEQ ID NO: 1824806 - DNA, 15 bp, Homo sapiens
caggacacctccctc

SEQ ID NO: 1824807 - DNA, 15 bp, Homo sapiens
aggacacctccctct

SEQ ID NO: 1824808 - DNA, 15 bp, Homo sapiens
ggacacctccctctc

SEQ ID NO: 1824809 - DNA, 15 bp, Homo sapiens
gacacctccctctca

SEQ ID NO: 1824810 - DNA, 15 bp, Homo sapiens
acacctccctctcac

SEQ ID NO: 1824811 - DNA, 15 bp, Homo sapiens
cacctccctctcaca

SEQ ID NO: 1824812 - DNA, 15 bp, Homo sapiens
acctccctctcacag

SEQ ID NO: 1824813 - DNA, 15 bp, Homo sapiens
cctccctctcacagg

SEQ ID NO: 1824814 - DNA, 15 bp, Homo sapiens
ctccctctcacaggt

SEQ ID NO: 1824815 - DNA, 15 bp, Homo sapiens
tccctctcacaggtc

SEQ ID NO: 1824816 - DNA, 15 bp, Homo sapiens
ccctctcacaggtca

SEQ ID NO: 1824817 - DNA, 15 bp, Homo sapiens
cctctcacaggtcac

SEQ ID NO: 1824818 - DNA, 15 bp, Homo sapiens
ctctcacaggtcacc

SEQ ID NO: 1824819 - DNA, 15 bp, Homo sapiens
tctcacaggtcacct

SEQ ID NO: 1824820 - DNA, 15 bp, Homo sapiens
acacttcacactcag

SEQ ID NO: 1824821 - DNA, 15 bp, Homo sapiens
cacttcacactcagg

SEQ ID NO: 1824822 - DNA, 15 bp, Homo sapiens
acttcacactcaggt

SEQ ID NO: 1824823 - DNA, 15 bp, Homo sapiens
cttcacactcaggtc

SEQ ID NO: 1824824 - DNA, 15 bp, Homo sapiens
ttcacactcaggtca

SEQ ID NO: 1824825 - DNA, 15 bp, Homo sapiens
tcacactcaggtcac

SEQ ID NO: 1824826 - DNA, 15 bp, Homo sapiens
cacactcaggtcacc

SEQ ID NO: 1824827 - DNA, 15 bp, Homo sapiens
acactcaggtcacct

SEQ ID NO: 1824828 - DNA, 15 bp, Homo sapiens
cactcaggtcacctc

SEQ ID NO: 1824829 - DNA, 15 bp, Homo sapiens
actcaggtcacctca

SEQ ID NO: 1824830 - DNA, 15 bp, Homo sapiens
ctcaggtcacctcac

SEQ ID NO: 1824831 - DNA, 15 bp, Homo sapiens
tcaggtcacctcaca

SEQ ID NO: 1824832 - DNA, 15 bp, Homo sapiens
acacccacaggacaa

SEQ ID NO: 1824833 - DNA, 15 bp, Homo sapiens
cacccacaggacaac

SEQ ID NO: 1824834 - DNA, 15 bp, Homo sapiens
acccacaggacaact

SEQ ID NO: 1824835 - DNA, 15 bp, Homo sapiens
cccacaggacaactc

SEQ ID NO: 1824836 - DNA, 15 bp, Homo sapiens
ccacaggacaactca

SEQ ID NO: 1824837 - DNA, 15 bp, Homo sapiens
cacaggacaactcac

SEQ ID NO: 1824838 - DNA, 15 bp, Homo sapiens
caggacaactcacag

SEQ ID NO: 1824839 - DNA, 15 bp, Homo sapiens
aggacaactcacaga

SEQ ID NO: 1824840 - DNA, 15 bp, Homo sapiens
ggacaactcacagag

SEQ ID NO: 1824841 - DNA, 15 bp, Homo sapiens
gacaactcacagagg

SEQ ID NO: 1824842 - DNA, 15 bp, Homo sapiens
acaactcacagaggt

SEQ ID NO: 1824843 - DNA, 15 bp, Homo sapiens
caactcacagaggtc

SEQ ID NO: 1824844 - DNA, 15 bp, Homo sapiens
aactcacagaggtca

SEQ ID NO: 1824845 - DNA, 15 bp, Homo sapiens
actcacagaggtcac

SEQ ID NO: 1824846 - DNA, 15 bp, Homo sapiens
caggacacctcacaa

SEQ ID NO: 1824847 - DNA, 15 bp, Homo sapiens
aggacacctcacaaa

SEQ ID NO: 1824848 - DNA, 15 bp, Homo sapiens
ggacacctcacaaag

SEQ ID NO: 1824849 - DNA, 15 bp, Homo sapiens
gacacctcacaaagg

SEQ ID NO: 1824850 - DNA, 15 bp, Homo sapiens
acacctcacaaaggt

SEQ ID NO: 1824851 - DNA, 15 bp, Homo sapiens
cacctcacaaaggtc

SEQ ID NO: 1824852 - DNA, 15 bp, Homo sapiens
acctcacaaaggtca

SEQ ID NO: 1824853 - DNA, 15 bp, Homo sapiens
cctcacaaaggtcac

SEQ ID NO: 1824854 - DNA, 15 bp, Homo sapiens
ctcacaaaggtcacc

SEQ ID NO: 1824855 - DNA, 15 bp, Homo sapiens
tcacaaaggtcacct

SEQ ID NO: 1824856 - DNA, 15 bp, Homo sapiens
cacaaaggtcacctc

SEQ ID NO: 1824857 - DNA, 15 bp, Homo sapiens
acaaaggtcacctca

SEQ ID NO: 1824858 - DNA, 15 bp, Homo sapiens
caaaggtcacctcac

SEQ ID NO: 1824859 - DNA, 15 bp, Homo sapiens
aaaggtcacctcaca

SEQ ID NO: 1824860 - DNA, 15 bp, Homo sapiens
aaggtcacctcacac

SEQ ID NO: 1824861 - DNA, 15 bp, Homo sapiens
acaggtcaccttaca

SEQ ID NO: 1824862 - DNA, 15 bp, Homo sapiens
caggtcaccttacac

SEQ ID NO: 1824863 - DNA, 15 bp, Homo sapiens
aggtcaccttacact

SEQ ID NO: 1824864 - DNA, 15 bp, Homo sapiens
ggtcaccttacactc

SEQ ID NO: 1824865 - DNA, 15 bp, Homo sapiens
gtcaccttacactca

SEQ ID NO: 1824866 - DNA, 15 bp, Homo sapiens
tcaccttacactcat

SEQ ID NO: 1824867 - DNA, 15 bp, Homo sapiens
caccttacactcatc

SEQ ID NO: 1824868 - DNA, 15 bp, Homo sapiens
accttacactcatct

SEQ ID NO: 1824869 - DNA, 15 bp, Homo sapiens
ccttacactcatctc

SEQ ID NO: 1824870 - DNA, 15 bp, Homo sapiens
cttacactcatctca

SEQ ID NO: 1824871 - DNA, 15 bp, Homo sapiens
ttacactcatctcac

SEQ ID NO: 1824872 - DNA, 15 bp, Homo sapiens
tacactcatctcaca

SEQ ID NO: 1824873 - DNA, 15 bp, Homo sapiens
acactcatctcacac

SEQ ID NO: 1824874 - DNA, 15 bp, Homo sapiens
cactcatctcacact

SEQ ID NO: 1824875 - DNA, 15 bp, Homo sapiens
actcatctcacactc

SEQ ID NO: 1824876 - DNA, 15 bp, Homo sapiens
ctcatctcacactca

SEQ ID NO: 1824877 - DNA, 15 bp, Homo sapiens
tcatctcacactcac

SEQ ID NO: 1824878 - DNA, 15 bp, Homo sapiens
catctcacactcaca

SEQ ID NO: 1824879 - DNA, 15 bp, Homo sapiens
atctcacactcacag

SEQ ID NO: 1824880 - DNA, 15 bp, Homo sapiens
tctcacactcacagg

SEQ ID NO: 1824881 - DNA, 15 bp, Homo sapiens
cacactcacaggtcg

SEQ ID NO: 1824882 - DNA, 15 bp, Homo sapiens
acactcacaggtcgc

SEQ ID NO: 1824883 - DNA, 15 bp, Homo sapiens
cactcacaggtcgcc

SEQ ID NO: 1824884 - DNA, 15 bp, Homo sapiens
actcacaggtcgcca

SEQ ID NO: 1824885 - DNA, 15 bp, Homo sapiens
ctcacaggtcgccac

SEQ ID NO: 1824886 - DNA, 15 bp, Homo sapiens
tcacaggtcgccaca

SEQ ID NO: 1824887 - DNA, 15 bp, Homo sapiens
cacaggtcgccacac

SEQ ID NO: 1824888 - DNA, 15 bp, Homo sapiens
acaggtcgccacacc

SEQ ID NO: 1824889 - DNA, 15 bp, Homo sapiens
caggtcgccacacct

SEQ ID NO: 1824890 - DNA, 15 bp, Homo sapiens
aggtcgccacacctc

SEQ ID NO: 1824891 - DNA, 15 bp, Homo sapiens
ggtcgccacacctca

SEQ ID NO: 1824892 - DNA, 15 bp, Homo sapiens
gtcgccacacctcac

SEQ ID NO: 1824893 - DNA, 15 bp, Homo sapiens
tcgccacacctcaca

SEQ ID NO: 1824894 - DNA, 15 bp, Homo sapiens
cgccacacctcacac

SEQ ID NO: 1824895 - DNA, 15 bp, Homo sapiens
gccacacctcacact

SEQ ID NO: 1824896 - DNA, 15 bp, Homo sapiens
ccacacctcacactc

SEQ ID NO: 1824897 - DNA, 15 bp, Homo sapiens
cacacctcacactca

SEQ ID NO: 1824898 - DNA, 15 bp, Homo sapiens
tcacactcacaggat

SEQ ID NO: 1824899 - DNA, 15 bp, Homo sapiens
cacactcacaggatg

SEQ ID NO: 1824900 - DNA, 15 bp, Homo sapiens
acactcacaggatgc

SEQ ID NO: 1824901 - DNA, 15 bp, Homo sapiens
cactcacaggatgcc

SEQ ID NO: 1824902 - DNA, 15 bp, Homo sapiens
actcacaggatgcct

SEQ ID NO: 1824903 - DNA, 15 bp, Homo sapiens
ctcacaggatgcctc

SEQ ID NO: 1824904 - DNA, 15 bp, Homo sapiens
tcacaggatgcctca

SEQ ID NO: 1824905 - DNA, 15 bp, Homo sapiens
cacaggatgcctcac

SEQ ID NO: 1824906 - DNA, 15 bp, Homo sapiens
acaggatgcctcaca

SEQ ID NO: 1824907 - DNA, 15 bp, Homo sapiens
caggatgcctcacac

SEQ ID NO: 1824908 - DNA, 15 bp, Homo sapiens
aggatgcctcacact

SEQ ID NO: 1824909 - DNA, 15 bp, Homo sapiens
ggatgcctcacactc

SEQ ID NO: 1824910 - DNA, 15 bp, Homo sapiens
gatgcctcacactca

SEQ ID NO: 1824911 - DNA, 15 bp, Homo sapiens
atgcctcacactcac

SEQ ID NO: 1824912 - DNA, 15 bp, Homo sapiens
tgcctcacactcaca

SEQ ID NO: 1824913 - DNA, 15 bp, Homo sapiens
gcctcacactcacag

SEQ ID NO: 1824914 - DNA, 15 bp, Homo sapiens
cctcacactcacaga

SEQ ID NO: 1824915 - DNA, 15 bp, Homo sapiens
ctcacactcacagaa

SEQ ID NO: 1824916 - DNA, 15 bp, Homo sapiens
tcacactcacagaac

SEQ ID NO: 1824917 - DNA, 15 bp, Homo sapiens
cacactcacagaacc

SEQ ID NO: 1824918 - DNA, 15 bp, Homo sapiens
acactcacagaacca

SEQ ID NO: 1824919 - DNA, 15 bp, Homo sapiens
cactcacagaaccac

SEQ ID NO: 1824920 - DNA, 15 bp, Homo sapiens
actcacagaaccaca

SEQ ID NO: 1824921 - DNA, 15 bp, Homo sapiens
ctcacagaaccacat

SEQ ID NO: 1824922 - DNA, 15 bp, Homo sapiens
tcacagaaccacatc

SEQ ID NO: 1824923 - DNA, 15 bp, Homo sapiens
cacagaaccacatct

SEQ ID NO: 1824924 - DNA, 15 bp, Homo sapiens
acagaaccacatctc

SEQ ID NO: 1824925 - DNA, 15 bp, Homo sapiens
cagaaccacatctca

SEQ ID NO: 1824926 - DNA, 15 bp, Homo sapiens
agaaccacatctcat

SEQ ID NO: 1824927 - DNA, 15 bp, Homo sapiens
gaaccacatctcata

SEQ ID NO: 1824928 - DNA, 15 bp, Homo sapiens
aaccacatctcatat

SEQ ID NO: 1824929 - DNA, 15 bp, Homo sapiens
accacatctcatatg

SEQ ID NO: 1824930 - DNA, 15 bp, Homo sapiens
ccacatctcatatgc

SEQ ID NO: 1824931 - DNA, 15 bp, Homo sapiens
cacatctcatatgca

SEQ ID NO: 1824932 - DNA, 15 bp, Homo sapiens
acatctcatatgcac

SEQ ID NO: 1824933 - DNA, 15 bp, Homo sapiens
catctcatatgcaca

SEQ ID NO: 1824934 - DNA, 15 bp, Homo sapiens
atctcatatgcacaa

SEQ ID NO: 1824935 - DNA, 15 bp, Homo sapiens
tctcatatgcacaag

SEQ ID NO: 1824936 - DNA, 15 bp, Homo sapiens
ctcatatgcacaaga

SEQ ID NO: 1824937 - DNA, 15 bp, Homo sapiens
tcatatgcacaagac

SEQ ID NO: 1824938 - DNA, 15 bp, Homo sapiens
catatgcacaagaca

SEQ ID NO: 1824939 - DNA, 15 bp, Homo sapiens
atatgcacaagacac

SEQ ID NO: 1824940 - DNA, 15 bp, Homo sapiens
tatgcacaagacacc

SEQ ID NO: 1824941 - DNA, 15 bp, Homo sapiens
atgcacaagacacct

SEQ ID NO: 1824942 - DNA, 15 bp, Homo sapiens
tgcacaagacacctc

SEQ ID NO: 1824943 - DNA, 15 bp, Homo sapiens
gcacaagacacctca

SEQ ID NO: 1824944 - DNA, 15 bp, Homo sapiens
aagacacctcacact

SEQ ID NO: 1824945 - DNA, 15 bp, Homo sapiens
agacacctcacactc

SEQ ID NO: 1824946 - DNA, 15 bp, Homo sapiens
acctcacactcagga

SEQ ID NO: 1824947 - DNA, 15 bp, Homo sapiens
cctcacactcaggac

SEQ ID NO: 1824948 - DNA, 15 bp, Homo sapiens
ctcacactcaggaca

SEQ ID NO: 1824949 - DNA, 15 bp, Homo sapiens
tcacactcaggacac

SEQ ID NO: 1824950 - DNA, 15 bp, Homo sapiens
cacactcaggacacc

SEQ ID NO: 1824951 - DNA, 15 bp, Homo sapiens
acactcaggacacct

SEQ ID NO: 1824952 - DNA, 15 bp, Homo sapiens
cactcaggacacctc

SEQ ID NO: 1824953 - DNA, 15 bp, Homo sapiens
actcaggacacctca

SEQ ID NO: 1824954 - DNA, 15 bp, Homo sapiens
ctcaggacacctcat

SEQ ID NO: 1824955 - DNA, 15 bp, Homo sapiens
tcaggacacctcatg

SEQ ID NO: 1824956 - DNA, 15 bp, Homo sapiens
caggacacctcatgc

SEQ ID NO: 1824957 - DNA, 15 bp, Homo sapiens
aggacacctcatgct

SEQ ID NO: 1824958 - DNA, 15 bp, Homo sapiens
ggacacctcatgctc

SEQ ID NO: 1824959 - DNA, 15 bp, Homo sapiens
gacacctcatgctca

SEQ ID NO: 1824960 - DNA, 15 bp, Homo sapiens
acacctcatgctcaa

SEQ ID NO: 1824961 - DNA, 15 bp, Homo sapiens
cacctcatgctcaaa

SEQ ID NO: 1824962 - DNA, 15 bp, Homo sapiens
acctcatgctcaaag

SEQ ID NO: 1824963 - DNA, 15 bp, Homo sapiens
cctcatgctcaaaga

SEQ ID NO: 1824964 - DNA, 15 bp, Homo sapiens
ctcatgctcaaagaa

SEQ ID NO: 1824965 - DNA, 15 bp, Homo sapiens
tcatgctcaaagaag

SEQ ID NO: 1824966 - DNA, 15 bp, Homo sapiens
catgctcaaagaagc

SEQ ID NO: 1824967 - DNA, 15 bp, Homo sapiens
atgctcaaagaagcc

SEQ ID NO: 1824968 - DNA, 15 bp, Homo sapiens
tgctcaaagaagcct

SEQ ID NO: 1824969 - DNA, 15 bp, Homo sapiens
gctcaaagaagcctc

SEQ ID NO: 1824970 - DNA, 15 bp, Homo sapiens
ctcaaagaagcctca

SEQ ID NO: 1824971 - DNA, 15 bp, Homo sapiens
tcaaagaagcctcac

SEQ ID NO: 1824972 - DNA, 15 bp, Homo sapiens
caaagaagcctcaca

SEQ ID NO: 1824973 - DNA, 15 bp, Homo sapiens
aaagaagcctcacac

SEQ ID NO: 1824974 - DNA, 15 bp, Homo sapiens
aagaagcctcacact

SEQ ID NO: 1824975 - DNA, 15 bp, Homo sapiens
agaagcctcacactc

SEQ ID NO: 1824976 - DNA, 15 bp, Homo sapiens
gaagcctcacactca

SEQ ID NO: 1824977 - DNA, 15 bp, Homo sapiens
aagcctcacactcac

SEQ ID NO: 1824978 - DNA, 15 bp, Homo sapiens
agcctcacactcaca

SEQ ID NO: 1824979 - DNA, 15 bp, Homo sapiens
tcacactcacaggag

SEQ ID NO: 1824980 - DNA, 15 bp, Homo sapiens
cacactcacaggagg

SEQ ID NO: 1824981 - DNA, 15 bp, Homo sapiens
acactcacaggaggt

SEQ ID NO: 1824982 - DNA, 15 bp, Homo sapiens
cactcacaggaggtc

SEQ ID NO: 1824983 - DNA, 15 bp, Homo sapiens
actcacaggaggtcc

SEQ ID NO: 1824984 - DNA, 15 bp, Homo sapiens
ctcacaggaggtcca

SEQ ID NO: 1824985 - DNA, 15 bp, Homo sapiens
tcacaggaggtccag

SEQ ID NO: 1824986 - DNA, 15 bp, Homo sapiens
cacaggaggtccagc

SEQ ID NO: 1824987 - DNA, 15 bp, Homo sapiens
acaggaggtccagct

SEQ ID NO: 1824988 - DNA, 15 bp, Homo sapiens
caggaggtccagctg

SEQ ID NO: 1824989 - DNA, 15 bp, Homo sapiens
aggaggtccagctgt

SEQ ID NO: 1824990 - DNA, 15 bp, Homo sapiens
ggaggtccagctgtc

SEQ ID NO: 1824991 - DNA, 15 bp, Homo sapiens
gaggtccagctgtct

SEQ ID NO: 1824992 - DNA, 15 bp, Homo sapiens
aggtccagctgtctg

SEQ ID NO: 1824993 - DNA, 15 bp, Homo sapiens
ggtccagctgtctga

SEQ ID NO: 1824994 - DNA, 15 bp, Homo sapiens
gtccagctgtctgag

SEQ ID NO: 1824995 - DNA, 15 bp, Homo sapiens
tccagctgtctgagg

SEQ ID NO: 1824996 - DNA, 15 bp, Homo sapiens
ccagctgtctgaggc

SEQ ID NO: 1824997 - DNA, 15 bp, Homo sapiens
cagctgtctgaggca

SEQ ID NO: 1824998 - DNA, 15 bp, Homo sapiens
agctgtctgaggcaa

SEQ ID NO: 1824999 - DNA, 15 bp, Homo sapiens
gctgtctgaggcaaa

SEQ ID NO: 1825000 - DNA, 15 bp, Homo sapiens
ctgtctgaggcaaag

SEQ ID NO: 1825001 - DNA, 15 bp, Homo sapiens
tgtctgaggcaaagg

SEQ ID NO: 1825002 - DNA, 15 bp, Homo sapiens
gtctgaggcaaaggc

SEQ ID NO: 1825003 - DNA, 15 bp, Homo sapiens
tctgaggcaaaggct

SEQ ID NO: 1825004 - DNA, 15 bp, Homo sapiens
ctgaggcaaaggcta

SEQ ID NO: 1825005 - DNA, 15 bp, Homo sapiens
tgaggcaaaggctaa

SEQ ID NO: 1825006 - DNA, 15 bp, Homo sapiens
gaggcaaaggctaac

SEQ ID NO: 1825007 - DNA, 15 bp, Homo sapiens
aggcaaaggctaaca

SEQ ID NO: 1825008 - DNA, 15 bp, Homo sapiens
ggcaaaggctaacat

SEQ ID NO: 1825009 - DNA, 15 bp, Homo sapiens
gcaaaggctaacatg

SEQ ID NO: 1825010 - DNA, 15 bp, Homo sapiens
caaaggctaacatga

SEQ ID NO: 1825011 - DNA, 15 bp, Homo sapiens
aaaggctaacatgac

SEQ ID NO: 1825012 - DNA, 15 bp, Homo sapiens
aaggctaacatgacc

SEQ ID NO: 1825013 - DNA, 15 bp, Homo sapiens
aggctaacatgaccc

SEQ ID NO: 1825014 - DNA, 15 bp, Homo sapiens
ggctaacatgaccct

SEQ ID NO: 1825015 - DNA, 15 bp, Homo sapiens
gctaacatgaccctt

SEQ ID NO: 1825016 - DNA, 15 bp, Homo sapiens
ctaacatgacccttt

SEQ ID NO: 1825017 - DNA, 15 bp, Homo sapiens
taacatgaccctttc

SEQ ID NO: 1825018 - DNA, 15 bp, Homo sapiens
aacatgaccctttcc

SEQ ID NO: 1825019 - DNA, 15 bp, Homo sapiens
acatgaccctttcca

SEQ ID NO: 1825020 - DNA, 15 bp, Homo sapiens
catgaccctttccag

SEQ ID NO: 1825021 - DNA, 15 bp, Homo sapiens
atgaccctttccaga

SEQ ID NO: 1825022 - DNA, 15 bp, Homo sapiens
tgaccctttccagac

SEQ ID NO: 1825023 - DNA, 15 bp, Homo sapiens
gaccctttccagaca

SEQ ID NO: 1825024 - DNA, 15 bp, Homo sapiens
accctttccagacaa

SEQ ID NO: 1825025 - DNA, 15 bp, Homo sapiens
ccctttccagacaaa

SEQ ID NO: 1825026 - DNA, 15 bp, Homo sapiens
cctttccagacaaat

SEQ ID NO: 1825027 - DNA, 15 bp, Homo sapiens
ctttccagacaaatt

SEQ ID NO: 1825028 - DNA, 15 bp, Homo sapiens
tttccagacaaattg

SEQ ID NO: 1825029 - DNA, 15 bp, Homo sapiens
ttccagacaaattga

SEQ ID NO: 1825030 - DNA, 15 bp, Homo sapiens
tccagacaaattgag

SEQ ID NO: 1825031 - DNA, 15 bp, Homo sapiens
ccagacaaattgagg

SEQ ID NO: 1825032 - DNA, 15 bp, Homo sapiens
cagacaaattgagga

SEQ ID NO: 1825033 - DNA, 15 bp, Homo sapiens
agacaaattgaggat

SEQ ID NO: 1825034 - DNA, 15 bp, Homo sapiens
gacaaattgaggatg

SEQ ID NO: 1825035 - DNA, 15 bp, Homo sapiens
acaaattgaggatgg

SEQ ID NO: 1825036 - DNA, 15 bp, Homo sapiens
caaattgaggatggt

SEQ ID NO: 1825037 - DNA, 15 bp, Homo sapiens
aaattgaggatggtc

SEQ ID NO: 1825038 - DNA, 15 bp, Homo sapiens
aattgaggatggtca

SEQ ID NO: 1825039 - DNA, 15 bp, Homo sapiens
attgaggatggtcat

SEQ ID NO: 1825040 - DNA, 15 bp, Homo sapiens
ttgaggatggtcatg

SEQ ID NO: 1825041 - DNA, 15 bp, Homo sapiens
tgaggatggtcatgc

SEQ ID NO: 1825042 - DNA, 15 bp, Homo sapiens
gaggatggtcatgcc

SEQ ID NO: 1825043 - DNA, 15 bp, Homo sapiens
aggatggtcatgcct

SEQ ID NO: 1825044 - DNA, 15 bp, Homo sapiens
ggatggtcatgccta

SEQ ID NO: 1825045 - DNA, 15 bp, Homo sapiens
gatggtcatgcctag

SEQ ID NO: 1825046 - DNA, 15 bp, Homo sapiens
atggtcatgcctagc

SEQ ID NO: 1825047 - DNA, 15 bp, Homo sapiens
tggtcatgcctagca

SEQ ID NO: 1825048 - DNA, 15 bp, Homo sapiens
ggtcatgcctagcat

SEQ ID NO: 1825049 - DNA, 15 bp, Homo sapiens
gtcatgcctagcatt

SEQ ID NO: 1825050 - DNA, 15 bp, Homo sapiens
tcatgcctagcattt

SEQ ID NO: 1825051 - DNA, 15 bp, Homo sapiens
catgcctagcatttt

SEQ ID NO: 1825052 - DNA, 15 bp, Homo sapiens
atgcctagcattttt

SEQ ID NO: 1825053 - DNA, 15 bp, Homo sapiens
tgcctagcattttta

SEQ ID NO: 1825054 - DNA, 15 bp, Homo sapiens
gcctagcatttttat

SEQ ID NO: 1825055 - DNA, 15 bp, Homo sapiens
cctagcatttttata

SEQ ID NO: 1825056 - DNA, 15 bp, Homo sapiens
ctagcatttttatac

SEQ ID NO: 1825057 - DNA, 15 bp, Homo sapiens
tagcatttttataca

SEQ ID NO: 1825058 - DNA, 15 bp, Homo sapiens
gcatttttatacacc

SEQ ID NO: 1825059 - DNA, 15 bp, Homo sapiens
catttttatacacct

SEQ ID NO: 1825060 - DNA, 15 bp, Homo sapiens
atttttatacaccta

SEQ ID NO: 1825061 - DNA, 15 bp, Homo sapiens
tttttatacacctag

SEQ ID NO: 1825062 - DNA, 15 bp, Homo sapiens
ttttatacacctagt

SEQ ID NO: 1825063 - DNA, 15 bp, Homo sapiens
tttatacacctagtt

SEQ ID NO: 1825064 - DNA, 15 bp, Homo sapiens
ttatacacctagttt

SEQ ID NO: 1825065 - DNA, 15 bp, Homo sapiens
tatacacctagtttt

SEQ ID NO: 1825066 - DNA, 15 bp, Homo sapiens
atacacctagttttg

SEQ ID NO: 1825067 - DNA, 15 bp, Homo sapiens
tacacctagttttga

SEQ ID NO: 1825068 - DNA, 15 bp, Homo sapiens
acacctagttttgaa

SEQ ID NO: 1825069 - DNA, 15 bp, Homo sapiens
cacctagttttgaaa

SEQ ID NO: 1825070 - DNA, 15 bp, Homo sapiens
acctagttttgaaag

SEQ ID NO: 1825071 - DNA, 15 bp, Homo sapiens
cctagttttgaaagc

SEQ ID NO: 1825072 - DNA, 15 bp, Homo sapiens
ctagttttgaaagca

SEQ ID NO: 1825073 - DNA, 15 bp, Homo sapiens
tagttttgaaagcat

SEQ ID NO: 1825074 - DNA, 15 bp, Homo sapiens
agttttgaaagcatt

SEQ ID NO: 1825075 - DNA, 15 bp, Homo sapiens
gttttgaaagcattt

SEQ ID NO: 1825076 - DNA, 15 bp, Homo sapiens
ttttgaaagcatttc

SEQ ID NO: 1825077 - DNA, 15 bp, Homo sapiens
tttgaaagcatttct

SEQ ID NO: 1825078 - DNA, 15 bp, Homo sapiens
ttgaaagcatttctc

SEQ ID NO: 1825079 - DNA, 15 bp, Homo sapiens
tgaaagcatttctca

SEQ ID NO: 1825080 - DNA, 15 bp, Homo sapiens
gaaagcatttctcat

SEQ ID NO: 1825081 - DNA, 15 bp, Homo sapiens
aaagcatttctcatc

SEQ ID NO: 1825082 - DNA, 15 bp, Homo sapiens
aagcatttctcatct

SEQ ID NO: 1825083 - DNA, 15 bp, Homo sapiens
agcatttctcatctg

SEQ ID NO: 1825084 - DNA, 15 bp, Homo sapiens
gcatttctcatctgt

SEQ ID NO: 1825085 - DNA, 15 bp, Homo sapiens
catttctcatctgtt

SEQ ID NO: 1825086 - DNA, 15 bp, Homo sapiens
atttctcatctgttg

SEQ ID NO: 1825087 - DNA, 15 bp, Homo sapiens
tttctcatctgttgt

SEQ ID NO: 1825088 - DNA, 15 bp, Homo sapiens
ttctcatctgttgta

SEQ ID NO: 1825089 - DNA, 15 bp, Homo sapiens
tctcatctgttgtat

SEQ ID NO: 1825090 - DNA, 15 bp, Homo sapiens
ctcatctgttgtatt

SEQ ID NO: 1825091 - DNA, 15 bp, Homo sapiens
tcatctgttgtattc

SEQ ID NO: 1825092 - DNA, 15 bp, Homo sapiens
catctgttgtattct

SEQ ID NO: 1825093 - DNA, 15 bp, Homo sapiens
atctgttgtattctc

SEQ ID NO: 1825094 - DNA, 15 bp, Homo sapiens
tctgttgtattctca

SEQ ID NO: 1825095 - DNA, 15 bp, Homo sapiens
ctgttgtattctcac

SEQ ID NO: 1825096 - DNA, 15 bp, Homo sapiens
tgttgtattctcaca

SEQ ID NO: 1825097 - DNA, 15 bp, Homo sapiens
gttgtattctcacag

SEQ ID NO: 1825098 - DNA, 15 bp, Homo sapiens
ttgtattctcacagc

SEQ ID NO: 1825099 - DNA, 15 bp, Homo sapiens
tgtattctcacagca

SEQ ID NO: 1825100 - DNA, 15 bp, Homo sapiens
gtattctcacagcac

SEQ ID NO: 1825101 - DNA, 15 bp, Homo sapiens
tattctcacagcacc

SEQ ID NO: 1825102 - DNA, 15 bp, Homo sapiens
attctcacagcaccc

SEQ ID NO: 1825103 - DNA, 15 bp, Homo sapiens
ttctcacagcacccc

SEQ ID NO: 1825104 - DNA, 15 bp, Homo sapiens
tctcacagcaccccg

SEQ ID NO: 1825105 - DNA, 15 bp, Homo sapiens
ctcacagcaccccgt

SEQ ID NO: 1825106 - DNA, 15 bp, Homo sapiens
tcacagcaccccgtg

SEQ ID NO: 1825107 - DNA, 15 bp, Homo sapiens
cacagcaccccgtga

SEQ ID NO: 1825108 - DNA, 15 bp, Homo sapiens
acagcaccccgtgag

SEQ ID NO: 1825109 - DNA, 15 bp, Homo sapiens
cagcaccccgtgagt

SEQ ID NO: 1825110 - DNA, 15 bp, Homo sapiens
agcaccccgtgagtt

SEQ ID NO: 1825111 - DNA, 15 bp, Homo sapiens
gcaccccgtgagttt

SEQ ID NO: 1825112 - DNA, 15 bp, Homo sapiens
caccccgtgagttta

SEQ ID NO: 1825113 - DNA, 15 bp, Homo sapiens
accccgtgagtttaa

SEQ ID NO: 1825114 - DNA, 15 bp, Homo sapiens
ccccgtgagtttaag

SEQ ID NO: 1825115 - DNA, 15 bp, Homo sapiens
cccgtgagtttaagt

SEQ ID NO: 1825116 - DNA, 15 bp, Homo sapiens
ccgtgagtttaagtt

SEQ ID NO: 1825117 - DNA, 15 bp, Homo sapiens
cgtgagtttaagttc

SEQ ID NO: 1825118 - DNA, 15 bp, Homo sapiens
gtgagtttaagttca

SEQ ID NO: 1825119 - DNA, 15 bp, Homo sapiens
tgagtttaagttcag

SEQ ID NO: 1825120 - DNA, 15 bp, Homo sapiens
gagtttaagttcagg

SEQ ID NO: 1825121 - DNA, 15 bp, Homo sapiens
agtttaagttcaggt

SEQ ID NO: 1825122 - DNA, 15 bp, Homo sapiens
gtttaagttcaggtg

SEQ ID NO: 1825123 - DNA, 15 bp, Homo sapiens
tttaagttcaggtgg

SEQ ID NO: 1825124 - DNA, 15 bp, Homo sapiens
ttaagttcaggtggc

SEQ ID NO: 1825125 - DNA, 15 bp, Homo sapiens
taagttcaggtggcc

SEQ ID NO: 1825126 - DNA, 15 bp, Homo sapiens
aagttcaggtggcca

SEQ ID NO: 1825127 - DNA, 15 bp, Homo sapiens
agttcaggtggccaa

SEQ ID NO: 1825128 - DNA, 15 bp, Homo sapiens
gttcaggtggccaac

SEQ ID NO: 1825129 - DNA, 15 bp, Homo sapiens
ttcaggtggccaaca

SEQ ID NO: 1825130 - DNA, 15 bp, Homo sapiens
tcaggtggccaacag

SEQ ID NO: 1825131 - DNA, 15 bp, Homo sapiens
caggtggccaacagt

SEQ ID NO: 1825132 - DNA, 15 bp, Homo sapiens
aggtggccaacagtt

SEQ ID NO: 1825133 - DNA, 15 bp, Homo sapiens
ggtggccaacagttt

SEQ ID NO: 1825134 - DNA, 15 bp, Homo sapiens
gtggccaacagtttc

SEQ ID NO: 1825135 - DNA, 15 bp, Homo sapiens
tggccaacagtttct

SEQ ID NO: 1825136 - DNA, 15 bp, Homo sapiens
ggccaacagtttctt

SEQ ID NO: 1825137 - DNA, 15 bp, Homo sapiens
gccaacagtttcttc

SEQ ID NO: 1825138 - DNA, 15 bp, Homo sapiens
ccaacagtttcttca

SEQ ID NO: 1825139 - DNA, 15 bp, Homo sapiens
caacagtttcttcag

SEQ ID NO: 1825140 - DNA, 15 bp, Homo sapiens
aacagtttcttcagc

SEQ ID NO: 1825141 - DNA, 15 bp, Homo sapiens
acagtttcttcagca

SEQ ID NO: 1825142 - DNA, 15 bp, Homo sapiens
cagtttcttcagcaa

SEQ ID NO: 1825143 - DNA, 15 bp, Homo sapiens
agtttcttcagcaat

SEQ ID NO: 1825144 - DNA, 15 bp, Homo sapiens
gtttcttcagcaatc

SEQ ID NO: 1825145 - DNA, 15 bp, Homo sapiens
tttcttcagcaatca

SEQ ID NO: 1825146 - DNA, 15 bp, Homo sapiens
ttcttcagcaatcac

SEQ ID NO: 1825147 - DNA, 15 bp, Homo sapiens
tcttcagcaatcact

SEQ ID NO: 1825148 - DNA, 15 bp, Homo sapiens
cttcagcaatcactt

SEQ ID NO: 1825149 - DNA, 15 bp, Homo sapiens
ttcagcaatcacttt

SEQ ID NO: 1825150 - DNA, 15 bp, Homo sapiens
tcagcaatcactttt

SEQ ID NO: 1825151 - DNA, 15 bp, Homo sapiens
cagcaatcacttttt

SEQ ID NO: 1825152 - DNA, 15 bp, Homo sapiens
agcaatcactttttt

SEQ ID NO: 1825153 - DNA, 15 bp, Homo sapiens
gcaatcacttttttc

SEQ ID NO: 1825154 - DNA, 15 bp, Homo sapiens
caatcacttttttct

SEQ ID NO: 1825155 - DNA, 15 bp, Homo sapiens
aatcacttttttctg

SEQ ID NO: 1825156 - DNA, 15 bp, Homo sapiens
atcacttttttctgt

SEQ ID NO: 1825157 - DNA, 15 bp, Homo sapiens
tcacttttttctgtg

SEQ ID NO: 1825158 - DNA, 15 bp, Homo sapiens
cacttttttctgtgg

SEQ ID NO: 1825159 - DNA, 15 bp, Homo sapiens
acttttttctgtgga

SEQ ID NO: 1825160 - DNA, 15 bp, Homo sapiens
cttttttctgtggag

SEQ ID NO: 1825161 - DNA, 15 bp, Homo sapiens
ttttttctgtggagt

SEQ ID NO: 1825162 - DNA, 15 bp, Homo sapiens
tttttctgtggagtg

SEQ ID NO: 1825163 - DNA, 15 bp, Homo sapiens
ttttctgtggagtgc

SEQ ID NO: 1825164 - DNA, 15 bp, Homo sapiens
tttctgtggagtgct

SEQ ID NO: 1825165 - DNA, 15 bp, Homo sapiens
ttctgtggagtgctt

SEQ ID NO: 1825166 - DNA, 15 bp, Homo sapiens
tctgtggagtgcttt

SEQ ID NO: 1825167 - DNA, 15 bp, Homo sapiens
ctgtggagtgctttt

SEQ ID NO: 1825168 - DNA, 15 bp, Homo sapiens
tgtggagtgcttttg

SEQ ID NO: 1825169 - DNA, 15 bp, Homo sapiens
gtggagtgcttttgc

SEQ ID NO: 1825170 - DNA, 15 bp, Homo sapiens
tggagtgcttttgct

SEQ ID NO: 1825171 - DNA, 15 bp, Homo sapiens
ggagtgcttttgctg

SEQ ID NO: 1825172 - DNA, 15 bp, Homo sapiens
gagtgcttttgctgt

SEQ ID NO: 1825173 - DNA, 15 bp, Homo sapiens
gtgcttttgctgttt

SEQ ID NO: 1825174 - DNA, 15 bp, Homo sapiens
tgcttttgctgtttg

SEQ ID NO: 1825175 - DNA, 15 bp, Homo sapiens
gcttttgctgtttgt

SEQ ID NO: 1825176 - DNA, 15 bp, Homo sapiens
cttttgctgtttgtg

SEQ ID NO: 1825177 - DNA, 15 bp, Homo sapiens
ttttgctgtttgtgg

SEQ ID NO: 1825178 - DNA, 15 bp, Homo sapiens
tttgctgtttgtgga

SEQ ID NO: 1825179 - DNA, 15 bp, Homo sapiens
ttgctgtttgtggaa

SEQ ID NO: 1825180 - DNA, 15 bp, Homo sapiens
tgctgtttgtggaat

SEQ ID NO: 1825181 - DNA, 15 bp, Homo sapiens
gctgtttgtggaata

SEQ ID NO: 1825182 - DNA, 15 bp, Homo sapiens
ctgtttgtggaatat

SEQ ID NO: 1825183 - DNA, 15 bp, Homo sapiens
tgtttgtggaatatt

SEQ ID NO: 1825184 - DNA, 15 bp, Homo sapiens
gtttgtggaatattt

SEQ ID NO: 1825185 - DNA, 15 bp, Homo sapiens
tttgtggaatatttt

SEQ ID NO: 1825186 - DNA, 15 bp, Homo sapiens
ttgtggaatattttg

SEQ ID NO: 1825187 - DNA, 15 bp, Homo sapiens
tgtggaatattttgc

SEQ ID NO: 1825188 - DNA, 15 bp, Homo sapiens
gtggaatattttgca

SEQ ID NO: 1825189 - DNA, 15 bp, Homo sapiens
tggaatattttgcat

SEQ ID NO: 1825190 - DNA, 15 bp, Homo sapiens
ggaatattttgcatc

SEQ ID NO: 1825191 - DNA, 15 bp, Homo sapiens
gaatattttgcatct

SEQ ID NO: 1825192 - DNA, 15 bp, Homo sapiens
aatattttgcatctg

SEQ ID NO: 1825193 - DNA, 15 bp, Homo sapiens
atattttgcatctgc

SEQ ID NO: 1825194 - DNA, 15 bp, Homo sapiens
tattttgcatctgct

SEQ ID NO: 1825195 - DNA, 15 bp, Homo sapiens
attttgcatctgcta

SEQ ID NO: 1825196 - DNA, 15 bp, Homo sapiens
ttttgcatctgctac

SEQ ID NO: 1825197 - DNA, 15 bp, Homo sapiens
tttgcatctgctact

SEQ ID NO: 1825198 - DNA, 15 bp, Homo sapiens
ttgcatctgctactg

SEQ ID NO: 1825199 - DNA, 15 bp, Homo sapiens
tgcatctgctactgc

SEQ ID NO: 1825200 - DNA, 15 bp, Homo sapiens
gcatctgctactgca

SEQ ID NO: 1825201 - DNA, 15 bp, Homo sapiens
catctgctactgcac

SEQ ID NO: 1825202 - DNA, 15 bp, Homo sapiens
atctgctactgcacc

SEQ ID NO: 1825203 - DNA, 15 bp, Homo sapiens
tctgctactgcaccc

SEQ ID NO: 1825204 - DNA, 15 bp, Homo sapiens
ctgctactgcaccct

SEQ ID NO: 1825205 - DNA, 15 bp, Homo sapiens
tgctactgcaccctc

SEQ ID NO: 1825206 - DNA, 15 bp, Homo sapiens
gctactgcaccctct

SEQ ID NO: 1825207 - DNA, 15 bp, Homo sapiens
ctactgcaccctctc

SEQ ID NO: 1825208 - DNA, 15 bp, Homo sapiens
tactgcaccctctcc

SEQ ID NO: 1825209 - DNA, 15 bp, Homo sapiens
actgcaccctctccc

SEQ ID NO: 1825210 - DNA, 15 bp, Homo sapiens
ctgcaccctctcccc

SEQ ID NO: 1825211 - DNA, 15 bp, Homo sapiens
tgcaccctctccccg

SEQ ID NO: 1825212 - DNA, 15 bp, Homo sapiens
gcaccctctccccgt

SEQ ID NO: 1825213 - DNA, 15 bp, Homo sapiens
caccctctccccgta

SEQ ID NO: 1825214 - DNA, 15 bp, Homo sapiens
accctctccccgtat

SEQ ID NO: 1825215 - DNA, 15 bp, Homo sapiens
ccctctccccgtatg

SEQ ID NO: 1825216 - DNA, 15 bp, Homo sapiens
cctctccccgtatgt

SEQ ID NO: 1825217 - DNA, 15 bp, Homo sapiens
ctctccccgtatgtg

SEQ ID NO: 1825218 - DNA, 15 bp, Homo sapiens
tctccccgtatgtgt

SEQ ID NO: 1825219 - DNA, 15 bp, Homo sapiens
ctccccgtatgtgtg

SEQ ID NO: 1825220 - DNA, 15 bp, Homo sapiens
tccccgtatgtgtgg

SEQ ID NO: 1825221 - DNA, 15 bp, Homo sapiens
ccccgtatgtgtggc

SEQ ID NO: 1825222 - DNA, 15 bp, Homo sapiens
cccgtatgtgtggcc

SEQ ID NO: 1825223 - DNA, 15 bp, Homo sapiens
ccgtatgtgtggcca

SEQ ID NO: 1825224 - DNA, 15 bp, Homo sapiens
cgtatgtgtggccac

SEQ ID NO: 1825225 - DNA, 15 bp, Homo sapiens
gtatgtgtggccacc

SEQ ID NO: 1825226 - DNA, 15 bp, Homo sapiens
tatgtgtggccaccc

SEQ ID NO: 1825227 - DNA, 15 bp, Homo sapiens
atgtgtggccaccct

SEQ ID NO: 1825228 - DNA, 15 bp, Homo sapiens
tgtgtggccaccctg

SEQ ID NO: 1825229 - DNA, 15 bp, Homo sapiens
gtgtggccaccctgt

SEQ ID NO: 1825230 - DNA, 15 bp, Homo sapiens
tgtggccaccctgtc

SEQ ID NO: 1825231 - DNA, 15 bp, Homo sapiens
gtggccaccctgtca

SEQ ID NO: 1825232 - DNA, 15 bp, Homo sapiens
tggccaccctgtcag

SEQ ID NO: 1825233 - DNA, 15 bp, Homo sapiens
ggccaccctgtcaga

SEQ ID NO: 1825234 - DNA, 15 bp, Homo sapiens
gccaccctgtcagag

SEQ ID NO: 1825235 - DNA, 15 bp, Homo sapiens
ccaccctgtcagagg

SEQ ID NO: 1825236 - DNA, 15 bp, Homo sapiens
caccctgtcagaggt

SEQ ID NO: 1825237 - DNA, 15 bp, Homo sapiens
accctgtcagaggtg

SEQ ID NO: 1825238 - DNA, 15 bp, Homo sapiens
ccctgtcagaggtgg

SEQ ID NO: 1825239 - DNA, 15 bp, Homo sapiens
cctgtcagaggtgga

SEQ ID NO: 1825240 - DNA, 15 bp, Homo sapiens
ctgtcagaggtggag

SEQ ID NO: 1825241 - DNA, 15 bp, Homo sapiens
tgtcagaggtggagc

SEQ ID NO: 1825242 - DNA, 15 bp, Homo sapiens
gtcagaggtggagct

SEQ ID NO: 1825243 - DNA, 15 bp, Homo sapiens
tcagaggtggagctg

SEQ ID NO: 1825244 - DNA, 15 bp, Homo sapiens
cagaggtggagctgt

SEQ ID NO: 1825245 - DNA, 15 bp, Homo sapiens
agaggtggagctgtg

SEQ ID NO: 1825246 - DNA, 15 bp, Homo sapiens
gaggtggagctgtgg

SEQ ID NO: 1825247 - DNA, 15 bp, Homo sapiens
aggtggagctgtggc

SEQ ID NO: 1825248 - DNA, 15 bp, Homo sapiens
ggtggagctgtggct

SEQ ID NO: 1825249 - DNA, 15 bp, Homo sapiens
gtggagctgtggctc

SEQ ID NO: 1825250 - DNA, 15 bp, Homo sapiens
tggagctgtggctca

SEQ ID NO: 1825251 - DNA, 15 bp, Homo sapiens
ggagctgtggctcag

SEQ ID NO: 1825252 - DNA, 15 bp, Homo sapiens
gagctgtggctcaga

SEQ ID NO: 1825253 - DNA, 15 bp, Homo sapiens
agctgtggctcagag

SEQ ID NO: 1825254 - DNA, 15 bp, Homo sapiens
gctgtggctcagagc

SEQ ID NO: 1825255 - DNA, 15 bp, Homo sapiens
ctgtggctcagagcc

SEQ ID NO: 1825256 - DNA, 15 bp, Homo sapiens
tgtggctcagagcct

SEQ ID NO: 1825257 - DNA, 15 bp, Homo sapiens
gtggctcagagcctg

SEQ ID NO: 1825258 - DNA, 15 bp, Homo sapiens
tggctcagagcctgt

SEQ ID NO: 1825259 - DNA, 15 bp, Homo sapiens
ggctcagagcctgtg

SEQ ID NO: 1825260 - DNA, 15 bp, Homo sapiens
gctcagagcctgtgt

SEQ ID NO: 1825261 - DNA, 15 bp, Homo sapiens
ctcagagcctgtgta

SEQ ID NO: 1825262 - DNA, 15 bp, Homo sapiens
tcagagcctgtgtac

SEQ ID NO: 1825263 - DNA, 15 bp, Homo sapiens
cagagcctgtgtacc

SEQ ID NO: 1825264 - DNA, 15 bp, Homo sapiens
agagcctgtgtacct

SEQ ID NO: 1825265 - DNA, 15 bp, Homo sapiens
gagcctgtgtacctc

SEQ ID NO: 1825266 - DNA, 15 bp, Homo sapiens
agcctgtgtacctcg

SEQ ID NO: 1825267 - DNA, 15 bp, Homo sapiens
gcctgtgtacctcgt

SEQ ID NO: 1825268 - DNA, 15 bp, Homo sapiens
cctgtgtacctcgtc

SEQ ID NO: 1825269 - DNA, 15 bp, Homo sapiens
ctgtgtacctcgtcc

SEQ ID NO: 1825270 - DNA, 15 bp, Homo sapiens
tgtgtacctcgtccc

SEQ ID NO: 1825271 - DNA, 15 bp, Homo sapiens
gtgtacctcgtccca

SEQ ID NO: 1825272 - DNA, 15 bp, Homo sapiens
tgtacctcgtcccag

SEQ ID NO: 1825273 - DNA, 15 bp, Homo sapiens
gtacctcgtcccagg

SEQ ID NO: 1825274 - DNA, 15 bp, Homo sapiens
tacctcgtcccaggt

SEQ ID NO: 1825275 - DNA, 15 bp, Homo sapiens
acctcgtcccaggtc

SEQ ID NO: 1825276 - DNA, 15 bp, Homo sapiens
cctcgtcccaggtcc

SEQ ID NO: 1825277 - DNA, 15 bp, Homo sapiens
ctcgtcccaggtcca

SEQ ID NO: 1825278 - DNA, 15 bp, Homo sapiens
tcgtcccaggtccac

SEQ ID NO: 1825279 - DNA, 15 bp, Homo sapiens
cgtcccaggtccaca

SEQ ID NO: 1825280 - DNA, 15 bp, Homo sapiens
gtcccaggtccacag

SEQ ID NO: 1825281 - DNA, 15 bp, Homo sapiens
tcccaggtccacagc

SEQ ID NO: 1825282 - DNA, 15 bp, Homo sapiens
cccaggtccacagct

SEQ ID NO: 1825283 - DNA, 15 bp, Homo sapiens
ccaggtccacagctc

SEQ ID NO: 1825284 - DNA, 15 bp, Homo sapiens
caggtccacagctca

SEQ ID NO: 1825285 - DNA, 15 bp, Homo sapiens
aggtccacagctcag

SEQ ID NO: 1825286 - DNA, 15 bp, Homo sapiens
ggtccacagctcagc

SEQ ID NO: 1825287 - DNA, 15 bp, Homo sapiens
gtccacagctcagcg

SEQ ID NO: 1825288 - DNA, 15 bp, Homo sapiens
tccacagctcagcga

SEQ ID NO: 1825289 - DNA, 15 bp, Homo sapiens
ccacagctcagcgac

SEQ ID NO: 1825290 - DNA, 15 bp, Homo sapiens
cacagctcagcgaca

SEQ ID NO: 1825291 - DNA, 15 bp, Homo sapiens
acagctcagcgacag

SEQ ID NO: 1825292 - DNA, 15 bp, Homo sapiens
cagctcagcgacaga

SEQ ID NO: 1825293 - DNA, 15 bp, Homo sapiens
agctcagcgacagaa

SEQ ID NO: 1825294 - DNA, 15 bp, Homo sapiens
gctcagcgacagaag

SEQ ID NO: 1825295 - DNA, 15 bp, Homo sapiens
ctcagcgacagaaga

SEQ ID NO: 1825296 - DNA, 15 bp, Homo sapiens
tcagcgacagaagag

SEQ ID NO: 1825297 - DNA, 15 bp, Homo sapiens
cagcgacagaagagt

SEQ ID NO: 1825298 - DNA, 15 bp, Homo sapiens
agcgacagaagagtc

SEQ ID NO: 1825299 - DNA, 15 bp, Homo sapiens
gcgacagaagagtca

SEQ ID NO: 1825300 - DNA, 15 bp, Homo sapiens
cgacagaagagtcag

SEQ ID NO: 1825301 - DNA, 15 bp, Homo sapiens
gacagaagagtcagg

SEQ ID NO: 1825302 - DNA, 15 bp, Homo sapiens
acagaagagtcaggg

SEQ ID NO: 1825303 - DNA, 15 bp, Homo sapiens
cagaagagtcagggt

SEQ ID NO: 1825304 - DNA, 15 bp, Homo sapiens
agaagagtcagggtt

SEQ ID NO: 1825305 - DNA, 15 bp, Homo sapiens
gaagagtcagggttg

SEQ ID NO: 1825306 - DNA, 15 bp, Homo sapiens
aagagtcagggttga

SEQ ID NO: 1825307 - DNA, 15 bp, Homo sapiens
agagtcagggttgaa

SEQ ID NO: 1825308 - DNA, 15 bp, Homo sapiens
gagtcagggttgaac

SEQ ID NO: 1825309 - DNA, 15 bp, Homo sapiens
agtcagggttgaacc

SEQ ID NO: 1825310 - DNA, 15 bp, Homo sapiens
gtcagggttgaacct

SEQ ID NO: 1825311 - DNA, 15 bp, Homo sapiens
tcagggttgaacctc

SEQ ID NO: 1825312 - DNA, 15 bp, Homo sapiens
cagggttgaacctcg

SEQ ID NO: 1825313 - DNA, 15 bp, Homo sapiens
agggttgaacctcgg

SEQ ID NO: 1825314 - DNA, 15 bp, Homo sapiens
gggttgaacctcggg

SEQ ID NO: 1825315 - DNA, 15 bp, Homo sapiens
ggttgaacctcgggt

SEQ ID NO: 1825316 - DNA, 15 bp, Homo sapiens
gttgaacctcgggtg

SEQ ID NO: 1825317 - DNA, 15 bp, Homo sapiens
ttgaacctcgggtgt

SEQ ID NO: 1825318 - DNA, 15 bp, Homo sapiens
tgaacctcgggtgtt

SEQ ID NO: 1825319 - DNA, 15 bp, Homo sapiens
gaacctcgggtgttc

SEQ ID NO: 1825320 - DNA, 15 bp, Homo sapiens
aacctcgggtgttct

SEQ ID NO: 1825321 - DNA, 15 bp, Homo sapiens
acctcgggtgttctg

SEQ ID NO: 1825322 - DNA, 15 bp, Homo sapiens
cctcgggtgttctga

SEQ ID NO: 1825323 - DNA, 15 bp, Homo sapiens
ctcgggtgttctgac

SEQ ID NO: 1825324 - DNA, 15 bp, Homo sapiens
tcgggtgttctgact

SEQ ID NO: 1825325 - DNA, 15 bp, Homo sapiens
cgggtgttctgactt

SEQ ID NO: 1825326 - DNA, 15 bp, Homo sapiens
gggtgttctgacttg

SEQ ID NO: 1825327 - DNA, 15 bp, Homo sapiens
ggtgttctgacttgg

SEQ ID NO: 1825328 - DNA, 15 bp, Homo sapiens
gtgttctgacttggg

SEQ ID NO: 1825329 - DNA, 15 bp, Homo sapiens
tgttctgacttggga

SEQ ID NO: 1825330 - DNA, 15 bp, Homo sapiens
gttctgacttgggag

SEQ ID NO: 1825331 - DNA, 15 bp, Homo sapiens
ttctgacttgggagc

SEQ ID NO: 1825332 - DNA, 15 bp, Homo sapiens
tctgacttgggagca

SEQ ID NO: 1825333 - DNA, 15 bp, Homo sapiens
ctgacttgggagcag

SEQ ID NO: 1825334 - DNA, 15 bp, Homo sapiens
tgacttgggagcagg

SEQ ID NO: 1825335 - DNA, 15 bp, Homo sapiens
gacttgggagcagga

SEQ ID NO: 1825336 - DNA, 15 bp, Homo sapiens
acttgggagcaggaa

SEQ ID NO: 1825337 - DNA, 15 bp, Homo sapiens
cttgggagcaggaaa

SEQ ID NO: 1825338 - DNA, 15 bp, Homo sapiens
ttgggagcaggaaat

SEQ ID NO: 1825339 - DNA, 15 bp, Homo sapiens
tgggagcaggaaatg

SEQ ID NO: 1825340 - DNA, 15 bp, Homo sapiens
gggagcaggaaatgt

SEQ ID NO: 1825341 - DNA, 15 bp, Homo sapiens
ggagcaggaaatgtg

SEQ ID NO: 1825342 - DNA, 15 bp, Homo sapiens
gagcaggaaatgtgt

SEQ ID NO: 1825343 - DNA, 15 bp, Homo sapiens
agcaggaaatgtgtg

SEQ ID NO: 1825344 - DNA, 15 bp, Homo sapiens
gcaggaaatgtgtgg

SEQ ID NO: 1825345 - DNA, 15 bp, Homo sapiens
caggaaatgtgtggt

SEQ ID NO: 1825346 - DNA, 15 bp, Homo sapiens
aggaaatgtgtggtc

SEQ ID NO: 1825347 - DNA, 15 bp, Homo sapiens
ggaaatgtgtggtca

SEQ ID NO: 1825348 - DNA, 15 bp, Homo sapiens
gaaatgtgtggtcac

SEQ ID NO: 1825349 - DNA, 15 bp, Homo sapiens
aaatgtgtggtcacc

SEQ ID NO: 1825350 - DNA, 15 bp, Homo sapiens
aatgtgtggtcaccc

SEQ ID NO: 1825351 - DNA, 15 bp, Homo sapiens
atgtgtggtcaccca

SEQ ID NO: 1825352 - DNA, 15 bp, Homo sapiens
tgtgtggtcacccat

SEQ ID NO: 1825353 - DNA, 15 bp, Homo sapiens
gtgtggtcacccata

SEQ ID NO: 1825354 - DNA, 15 bp, Homo sapiens
tgtggtcacccatag

SEQ ID NO: 1825355 - DNA, 15 bp, Homo sapiens
gtggtcacccatagt

SEQ ID NO: 1825356 - DNA, 15 bp, Homo sapiens
tggtcacccatagtt

SEQ ID NO: 1825357 - DNA, 15 bp, Homo sapiens
ggtcacccatagttc

SEQ ID NO: 1825358 - DNA, 15 bp, Homo sapiens
gtcacccatagttcc

SEQ ID NO: 1825359 - DNA, 15 bp, Homo sapiens
tcacccatagttcca

SEQ ID NO: 1825360 - DNA, 15 bp, Homo sapiens
cacccatagttccag

SEQ ID NO: 1825361 - DNA, 15 bp, Homo sapiens
acccatagttccaga

SEQ ID NO: 1825362 - DNA, 15 bp, Homo sapiens
cccatagttccagat

SEQ ID NO: 1825363 - DNA, 15 bp, Homo sapiens
ccatagttccagatg

SEQ ID NO: 1825364 - DNA, 15 bp, Homo sapiens
catagttccagatgt

SEQ ID NO: 1825365 - DNA, 15 bp, Homo sapiens
atagttccagatgtc

SEQ ID NO: 1825366 - DNA, 15 bp, Homo sapiens
tagttccagatgtcc

SEQ ID NO: 1825367 - DNA, 15 bp, Homo sapiens
agttccagatgtcct

SEQ ID NO: 1825368 - DNA, 15 bp, Homo sapiens
gttccagatgtcctg

SEQ ID NO: 1825369 - DNA, 15 bp, Homo sapiens
ttccagatgtcctgg

SEQ ID NO: 1825370 - DNA, 15 bp, Homo sapiens
tccagatgtcctggg

SEQ ID NO: 1825371 - DNA, 15 bp, Homo sapiens
ccagatgtcctgggg

SEQ ID NO: 1825372 - DNA, 15 bp, Homo sapiens
cagatgtcctgggga

SEQ ID NO: 1825373 - DNA, 15 bp, Homo sapiens
agatgtcctggggag

SEQ ID NO: 1825374 - DNA, 15 bp, Homo sapiens
gatgtcctggggagg

SEQ ID NO: 1825375 - DNA, 15 bp, Homo sapiens
atgtcctggggaggg

SEQ ID NO: 1825376 - DNA, 15 bp, Homo sapiens
tgtcctggggagggg

SEQ ID NO: 1825377 - DNA, 15 bp, Homo sapiens
gtcctggggaggggc

SEQ ID NO: 1825378 - DNA, 15 bp, Homo sapiens
tcctggggaggggcc

SEQ ID NO: 1825379 - DNA, 15 bp, Homo sapiens
cctggggaggggcca

SEQ ID NO: 1825380 - DNA, 15 bp, Homo sapiens
ctggggaggggccaa

SEQ ID NO: 1825381 - DNA, 15 bp, Homo sapiens
tggggaggggccaag

SEQ ID NO: 1825382 - DNA, 15 bp, Homo sapiens
ggggaggggccaaga

SEQ ID NO: 1825383 - DNA, 15 bp, Homo sapiens
gggaggggccaagat

SEQ ID NO: 1825384 - DNA, 15 bp, Homo sapiens
ggaggggccaagatt

SEQ ID NO: 1825385 - DNA, 15 bp, Homo sapiens
gaggggccaagatta

SEQ ID NO: 1825386 - DNA, 15 bp, Homo sapiens
aggggccaagattag

SEQ ID NO: 1825387 - DNA, 15 bp, Homo sapiens
ggggccaagattaga

SEQ ID NO: 1825388 - DNA, 15 bp, Homo sapiens
gggccaagattagaa

SEQ ID NO: 1825389 - DNA, 15 bp, Homo sapiens
ggccaagattagaag

SEQ ID NO: 1825390 - DNA, 15 bp, Homo sapiens
gccaagattagaaga

SEQ ID NO: 1825391 - DNA, 15 bp, Homo sapiens
ccaagattagaagaa

SEQ ID NO: 1825392 - DNA, 15 bp, Homo sapiens
caagattagaagaaa

SEQ ID NO: 1825393 - DNA, 15 bp, Homo sapiens
aagattagaagaaac

SEQ ID NO: 1825394 - DNA, 15 bp, Homo sapiens
agattagaagaaacc

SEQ ID NO: 1825395 - DNA, 15 bp, Homo sapiens
gattagaagaaacct

SEQ ID NO: 1825396 - DNA, 15 bp, Homo sapiens
attagaagaaaccta

SEQ ID NO: 1825397 - DNA, 15 bp, Homo sapiens
ttagaagaaacctac

SEQ ID NO: 1825398 - DNA, 15 bp, Homo sapiens
tagaagaaacctacc

SEQ ID NO: 1825399 - DNA, 15 bp, Homo sapiens
agaagaaacctacct

SEQ ID NO: 1825400 - DNA, 15 bp, Homo sapiens
gaagaaacctacctc

SEQ ID NO: 1825401 - DNA, 15 bp, Homo sapiens
aagaaacctacctca

SEQ ID NO: 1825402 - DNA, 15 bp, Homo sapiens
agaaacctacctcag

SEQ ID NO: 1825403 - DNA, 15 bp, Homo sapiens
gaaacctacctcagc

SEQ ID NO: 1825404 - DNA, 15 bp, Homo sapiens
aaacctacctcagct

SEQ ID NO: 1825405 - DNA, 15 bp, Homo sapiens
aacctacctcagctc

SEQ ID NO: 1825406 - DNA, 15 bp, Homo sapiens
acctacctcagctcc

SEQ ID NO: 1825407 - DNA, 15 bp, Homo sapiens
cctacctcagctcca

SEQ ID NO: 1825408 - DNA, 15 bp, Homo sapiens
ctacctcagctccag

SEQ ID NO: 1825409 - DNA, 15 bp, Homo sapiens
tacctcagctccaga

SEQ ID NO: 1825410 - DNA, 15 bp, Homo sapiens
acctcagctccagag

SEQ ID NO: 1825411 - DNA, 15 bp, Homo sapiens
cctcagctccagagg

SEQ ID NO: 1825412 - DNA, 15 bp, Homo sapiens
ctcagctccagagga

SEQ ID NO: 1825413 - DNA, 15 bp, Homo sapiens
tcagctccagaggaa

SEQ ID NO: 1825414 - DNA, 15 bp, Homo sapiens
cagctccagaggaaa

SEQ ID NO: 1825415 - DNA, 15 bp, Homo sapiens
agctccagaggaaag

SEQ ID NO: 1825416 - DNA, 15 bp, Homo sapiens
gctccagaggaaagt

SEQ ID NO: 1825417 - DNA, 15 bp, Homo sapiens
ctccagaggaaagtc

SEQ ID NO: 1825418 - DNA, 15 bp, Homo sapiens
tccagaggaaagtct

SEQ ID NO: 1825419 - DNA, 15 bp, Homo sapiens
ccagaggaaagtctg

SEQ ID NO: 1825420 - DNA, 15 bp, Homo sapiens
cagaggaaagtctgg

SEQ ID NO: 1825421 - DNA, 15 bp, Homo sapiens
agaggaaagtctggc

SEQ ID NO: 1825422 - DNA, 15 bp, Homo sapiens
gaggaaagtctggct

SEQ ID NO: 1825423 - DNA, 15 bp, Homo sapiens
aggaaagtctggctt

SEQ ID NO: 1825424 - DNA, 15 bp, Homo sapiens
ggaaagtctggcttc

SEQ ID NO: 1825425 - DNA, 15 bp, Homo sapiens
gaaagtctggcttcc

SEQ ID NO: 1825426 - DNA, 15 bp, Homo sapiens
aaagtctggcttcct

SEQ ID NO: 1825427 - DNA, 15 bp, Homo sapiens
aagtctggcttcctg

SEQ ID NO: 1825428 - DNA, 15 bp, Homo sapiens
agtctggcttcctga

SEQ ID NO: 1825429 - DNA, 15 bp, Homo sapiens
gtctggcttcctgag

SEQ ID NO: 1825430 - DNA, 15 bp, Homo sapiens
tctggcttcctgagc

SEQ ID NO: 1825431 - DNA, 15 bp, Homo sapiens
ctggcttcctgagcc

SEQ ID NO: 1825432 - DNA, 15 bp, Homo sapiens
tggcttcctgagccc

SEQ ID NO: 1825433 - DNA, 15 bp, Homo sapiens
ggcttcctgagccca

SEQ ID NO: 1825434 - DNA, 15 bp, Homo sapiens
gcttcctgagcccac

SEQ ID NO: 1825435 - DNA, 15 bp, Homo sapiens
cttcctgagcccacc

SEQ ID NO: 1825436 - DNA, 15 bp, Homo sapiens
ttcctgagcccaccc

SEQ ID NO: 1825437 - DNA, 15 bp, Homo sapiens
tcctgagcccacccc

SEQ ID NO: 1825438 - DNA, 15 bp, Homo sapiens
cctgagcccaccccg

SEQ ID NO: 1825439 - DNA, 15 bp, Homo sapiens
ctgagcccaccccgc

SEQ ID NO: 1825440 - DNA, 15 bp, Homo sapiens
tgagcccaccccgcc

SEQ ID NO: 1825441 - DNA, 15 bp, Homo sapiens
gagcccaccccgcca

SEQ ID NO: 1825442 - DNA, 15 bp, Homo sapiens
agcccaccccgccag

SEQ ID NO: 1825443 - DNA, 15 bp, Homo sapiens
gcccaccccgccaga

SEQ ID NO: 1825444 - DNA, 15 bp, Homo sapiens
cccaccccgccagac

SEQ ID NO: 1825445 - DNA, 15 bp, Homo sapiens
ccaccccgccagacc

SEQ ID NO: 1825446 - DNA, 15 bp, Homo sapiens
caccccgccagaccc

SEQ ID NO: 1825447 - DNA, 15 bp, Homo sapiens
accccgccagaccca

SEQ ID NO: 1825448 - DNA, 15 bp, Homo sapiens
ccccgccagacccag

SEQ ID NO: 1825449 - DNA, 15 bp, Homo sapiens
cccgccagacccagg

SEQ ID NO: 1825450 - DNA, 15 bp, Homo sapiens
ccgccagacccaggt

SEQ ID NO: 1825451 - DNA, 15 bp, Homo sapiens
cgccagacccaggtc

SEQ ID NO: 1825452 - DNA, 15 bp, Homo sapiens
gccagacccaggtcc

SEQ ID NO: 1825453 - DNA, 15 bp, Homo sapiens
ccagacccaggtcca

SEQ ID NO: 1825454 - DNA, 15 bp, Homo sapiens
cagacccaggtccaa

SEQ ID NO: 1825455 - DNA, 15 bp, Homo sapiens
agacccaggtccaag

SEQ ID NO: 1825456 - DNA, 15 bp, Homo sapiens
gacccaggtccaagt

SEQ ID NO: 1825457 - DNA, 15 bp, Homo sapiens
acccaggtccaagtc

SEQ ID NO: 1825458 - DNA, 15 bp, Homo sapiens
cccaggtccaagtcc

SEQ ID NO: 1825459 - DNA, 15 bp, Homo sapiens
ccaggtccaagtccc

SEQ ID NO: 1825460 - DNA, 15 bp, Homo sapiens
caggtccaagtcccc

SEQ ID NO: 1825461 - DNA, 15 bp, Homo sapiens
aggtccaagtccccc

SEQ ID NO: 1825462 - DNA, 15 bp, Homo sapiens
ggtccaagtccccca

SEQ ID NO: 1825463 - DNA, 15 bp, Homo sapiens
gtccaagtcccccaa

SEQ ID NO: 1825464 - DNA, 15 bp, Homo sapiens
tccaagtcccccaac

SEQ ID NO: 1825465 - DNA, 15 bp, Homo sapiens
ccaagtcccccaacc

SEQ ID NO: 1825466 - DNA, 15 bp, Homo sapiens
caagtcccccaaccc

SEQ ID NO: 1825467 - DNA, 15 bp, Homo sapiens
aagtcccccaacccc

SEQ ID NO: 1825468 - DNA, 15 bp, Homo sapiens
agtcccccaacccca

SEQ ID NO: 1825469 - DNA, 15 bp, Homo sapiens
gtcccccaaccccag

SEQ ID NO: 1825470 - DNA, 15 bp, Homo sapiens
tcccccaaccccagt

SEQ ID NO: 1825471 - DNA, 15 bp, Homo sapiens
cccccaaccccagtt

SEQ ID NO: 1825472 - DNA, 15 bp, Homo sapiens
ccccaaccccagttc

SEQ ID NO: 1825473 - DNA, 15 bp, Homo sapiens
cccaaccccagttca

SEQ ID NO: 1825474 - DNA, 15 bp, Homo sapiens
ccaaccccagttcat

SEQ ID NO: 1825475 - DNA, 15 bp, Homo sapiens
caaccccagttcatg

SEQ ID NO: 1825476 - DNA, 15 bp, Homo sapiens
aaccccagttcatgg

SEQ ID NO: 1825477 - DNA, 15 bp, Homo sapiens
accccagttcatggt

SEQ ID NO: 1825478 - DNA, 15 bp, Homo sapiens
ccccagttcatggtg

SEQ ID NO: 1825479 - DNA, 15 bp, Homo sapiens
cccagttcatggtgt

SEQ ID NO: 1825480 - DNA, 15 bp, Homo sapiens
ccagttcatggtgtg

SEQ ID NO: 1825481 - DNA, 15 bp, Homo sapiens
cagttcatggtgtgt

SEQ ID NO: 1825482 - DNA, 15 bp, Homo sapiens
agttcatggtgtgtc

SEQ ID NO: 1825483 - DNA, 15 bp, Homo sapiens
gttcatggtgtgtcc

SEQ ID NO: 1825484 - DNA, 15 bp, Homo sapiens
ttcatggtgtgtcca

SEQ ID NO: 1825485 - DNA, 15 bp, Homo sapiens
tcatggtgtgtccag

SEQ ID NO: 1825486 - DNA, 15 bp, Homo sapiens
catggtgtgtccagt

SEQ ID NO: 1825487 - DNA, 15 bp, Homo sapiens
atggtgtgtccagtg

SEQ ID NO: 1825488 - DNA, 15 bp, Homo sapiens
tggtgtgtccagtgc

SEQ ID NO: 1825489 - DNA, 15 bp, Homo sapiens
ggtgtgtccagtgct

SEQ ID NO: 1825490 - DNA, 15 bp, Homo sapiens
gtgtgtccagtgctt

SEQ ID NO: 1825491 - DNA, 15 bp, Homo sapiens
tgtgtccagtgctta

SEQ ID NO: 1825492 - DNA, 15 bp, Homo sapiens
gtgtccagtgcttac

SEQ ID NO: 1825493 - DNA, 15 bp, Homo sapiens
tgtccagtgcttacc

SEQ ID NO: 1825494 - DNA, 15 bp, Homo sapiens
gtccagtgcttaccg

SEQ ID NO: 1825495 - DNA, 15 bp, Homo sapiens
tccagtgcttaccgt

SEQ ID NO: 1825496 - DNA, 15 bp, Homo sapiens
ccagtgcttaccgtt

SEQ ID NO: 1825497 - DNA, 15 bp, Homo sapiens
cagtgcttaccgttg

SEQ ID NO: 1825498 - DNA, 15 bp, Homo sapiens
agtgcttaccgttgg

SEQ ID NO: 1825499 - DNA, 15 bp, Homo sapiens
gtgcttaccgttggg

SEQ ID NO: 1825500 - DNA, 15 bp, Homo sapiens
tgcttaccgttgggt

SEQ ID NO: 1825501 - DNA, 15 bp, Homo sapiens
gcttaccgttgggtg

SEQ ID NO: 1825502 - DNA, 15 bp, Homo sapiens
cttaccgttgggtgc

SEQ ID NO: 1825503 - DNA, 15 bp, Homo sapiens
ttaccgttgggtgct

SEQ ID NO: 1825504 - DNA, 15 bp, Homo sapiens
taccgttgggtgctc

SEQ ID NO: 1825505 - DNA, 15 bp, Homo sapiens
accgttgggtgctct

SEQ ID NO: 1825506 - DNA, 15 bp, Homo sapiens
ccgttgggtgctctg

SEQ ID NO: 1825507 - DNA, 15 bp, Homo sapiens
cgttgggtgctctgg

SEQ ID NO: 1825508 - DNA, 15 bp, Homo sapiens
gttgggtgctctggt

SEQ ID NO: 1825509 - DNA, 15 bp, Homo sapiens
ttgggtgctctggtg

SEQ ID NO: 1825510 - DNA, 15 bp, Homo sapiens
tgggtgctctggtga

SEQ ID NO: 1825511 - DNA, 15 bp, Homo sapiens
gggtgctctggtgaa

SEQ ID NO: 1825512 - DNA, 15 bp, Homo sapiens
ggtgctctggtgaag

SEQ ID NO: 1825513 - DNA, 15 bp, Homo sapiens
gtgctctggtgaagg

SEQ ID NO: 1825514 - DNA, 15 bp, Homo sapiens
tgctctggtgaaggt

SEQ ID NO: 1825515 - DNA, 15 bp, Homo sapiens
gctctggtgaaggtg

SEQ ID NO: 1825516 - DNA, 15 bp, Homo sapiens
ctctggtgaaggtgc

SEQ ID NO: 1825517 - DNA, 15 bp, Homo sapiens
tctggtgaaggtgca

SEQ ID NO: 1825518 - DNA, 15 bp, Homo sapiens
ctggtgaaggtgcat

SEQ ID NO: 1825519 - DNA, 15 bp, Homo sapiens
tggtgaaggtgcatc

SEQ ID NO: 1825520 - DNA, 15 bp, Homo sapiens
ggtgaaggtgcatct

SEQ ID NO: 1825521 - DNA, 15 bp, Homo sapiens
gtgaaggtgcatctc

SEQ ID NO: 1825522 - DNA, 15 bp, Homo sapiens
tgaaggtgcatctca

SEQ ID NO: 1825523 - DNA, 15 bp, Homo sapiens
gaaggtgcatctcac

SEQ ID NO: 1825524 - DNA, 15 bp, Homo sapiens
aaggtgcatctcacg

SEQ ID NO: 1825525 - DNA, 15 bp, Homo sapiens
aggtgcatctcacga

SEQ ID NO: 1825526 - DNA, 15 bp, Homo sapiens
ggtgcatctcacgag

SEQ ID NO: 1825527 - DNA, 15 bp, Homo sapiens
gtgcatctcacgagg

SEQ ID NO: 1825528 - DNA, 15 bp, Homo sapiens
tgcatctcacgaggc

SEQ ID NO: 1825529 - DNA, 15 bp, Homo sapiens
gcatctcacgaggct

SEQ ID NO: 1825530 - DNA, 15 bp, Homo sapiens
catctcacgaggctt

SEQ ID NO: 1825531 - DNA, 15 bp, Homo sapiens
atctcacgaggcttg

SEQ ID NO: 1825532 - DNA, 15 bp, Homo sapiens
tctcacgaggcttgc

SEQ ID NO: 1825533 - DNA, 15 bp, Homo sapiens
ctcacgaggcttgct

SEQ ID NO: 1825534 - DNA, 15 bp, Homo sapiens
tcacgaggcttgctc

SEQ ID NO: 1825535 - DNA, 15 bp, Homo sapiens
cacgaggcttgctct

SEQ ID NO: 1825536 - DNA, 15 bp, Homo sapiens
acgaggcttgctctc

SEQ ID NO: 1825537 - DNA, 15 bp, Homo sapiens
cgaggcttgctctct

SEQ ID NO: 1825538 - DNA, 15 bp, Homo sapiens
gaggcttgctctctt

SEQ ID NO: 1825539 - DNA, 15 bp, Homo sapiens
aggcttgctctcttg

SEQ ID NO: 1825540 - DNA, 15 bp, Homo sapiens
ggcttgctctcttgt

SEQ ID NO: 1825541 - DNA, 15 bp, Homo sapiens
gcttgctctcttgtt

SEQ ID NO: 1825542 - DNA, 15 bp, Homo sapiens
cttgctctcttgttc

SEQ ID NO: 1825543 - DNA, 15 bp, Homo sapiens
ttgctctcttgttcc

SEQ ID NO: 1825544 - DNA, 15 bp, Homo sapiens
tgctctcttgttcct

SEQ ID NO: 1825545 - DNA, 15 bp, Homo sapiens
gctctcttgttcctt

SEQ ID NO: 1825546 - DNA, 15 bp, Homo sapiens
ctctcttgttccttc

SEQ ID NO: 1825547 - DNA, 15 bp, Homo sapiens
tctcttgttccttca

SEQ ID NO: 1825548 - DNA, 15 bp, Homo sapiens
ctcttgttccttcag

SEQ ID NO: 1825549 - DNA, 15 bp, Homo sapiens
tcttgttccttcaga

SEQ ID NO: 1825550 - DNA, 15 bp, Homo sapiens
cttgttccttcagaa

SEQ ID NO: 1825551 - DNA, 15 bp, Homo sapiens
ttgttccttcagaag

SEQ ID NO: 1825552 - DNA, 15 bp, Homo sapiens
tgttccttcagaagc

SEQ ID NO: 1825553 - DNA, 15 bp, Homo sapiens
gttccttcagaagct

SEQ ID NO: 1825554 - DNA, 15 bp, Homo sapiens
ttccttcagaagctg

SEQ ID NO: 1825555 - DNA, 15 bp, Homo sapiens
tccttcagaagctgt

SEQ ID NO: 1825556 - DNA, 15 bp, Homo sapiens
ccttcagaagctgtt

SEQ ID NO: 1825557 - DNA, 15 bp, Homo sapiens
cttcagaagctgttc

SEQ ID NO: 1825558 - DNA, 15 bp, Homo sapiens
ttcagaagctgttct

SEQ ID NO: 1825559 - DNA, 15 bp, Homo sapiens
tcagaagctgttctg

SEQ ID NO: 1825560 - DNA, 15 bp, Homo sapiens
cagaagctgttctgg

SEQ ID NO: 1825561 - DNA, 15 bp, Homo sapiens
agaagctgttctgga

SEQ ID NO: 1825562 - DNA, 15 bp, Homo sapiens
gaagctgttctggat

SEQ ID NO: 1825563 - DNA, 15 bp, Homo sapiens
aagctgttctggatt

SEQ ID NO: 1825564 - DNA, 15 bp, Homo sapiens
agctgttctggattt

SEQ ID NO: 1825565 - DNA, 15 bp, Homo sapiens
gctgttctggatttc

SEQ ID NO: 1825566 - DNA, 15 bp, Homo sapiens
ctgttctggatttct

SEQ ID NO: 1825567 - DNA, 15 bp, Homo sapiens
tgttctggatttctt

SEQ ID NO: 1825568 - DNA, 15 bp, Homo sapiens
gttctggatttctta

SEQ ID NO: 1825569 - DNA, 15 bp, Homo sapiens
ttctggatttcttac

SEQ ID NO: 1825570 - DNA, 15 bp, Homo sapiens
tctggatttcttaca

SEQ ID NO: 1825571 - DNA, 15 bp, Homo sapiens
ctggatttcttacag

SEQ ID NO: 1825572 - DNA, 15 bp, Homo sapiens
tggatttcttacagt

SEQ ID NO: 1825573 - DNA, 15 bp, Homo sapiens
ggatttcttacagtg

SEQ ID NO: 1825574 - DNA, 15 bp, Homo sapiens
gatttcttacagtgg

SEQ ID NO: 1825575 - DNA, 15 bp, Homo sapiens
atttcttacagtggt

SEQ ID NO: 1825576 - DNA, 15 bp, Homo sapiens
tttcttacagtggtg

SEQ ID NO: 1825577 - DNA, 15 bp, Homo sapiens
ttcttacagtggtga

SEQ ID NO: 1825578 - DNA, 15 bp, Homo sapiens
tcttacagtggtgag

SEQ ID NO: 1825579 - DNA, 15 bp, Homo sapiens
cttacagtggtgagt

SEQ ID NO: 1825580 - DNA, 15 bp, Homo sapiens
ttacagtggtgagtg

SEQ ID NO: 1825581 - DNA, 15 bp, Homo sapiens
tacagtggtgagtgg

SEQ ID NO: 1825582 - DNA, 15 bp, Homo sapiens
acagtggtgagtgga

SEQ ID NO: 1825583 - DNA, 15 bp, Homo sapiens
cagtggtgagtggat

SEQ ID NO: 1825584 - DNA, 15 bp, Homo sapiens
agtggtgagtggatg

SEQ ID NO: 1825585 - DNA, 15 bp, Homo sapiens
gtggtgagtggatga

SEQ ID NO: 1825586 - DNA, 15 bp, Homo sapiens
tggtgagtggatgat

SEQ ID NO: 1825587 - DNA, 15 bp, Homo sapiens
ggtgagtggatgatc

SEQ ID NO: 1825588 - DNA, 15 bp, Homo sapiens
gtgagtggatgatca

SEQ ID NO: 1825589 - DNA, 15 bp, Homo sapiens
tgagtggatgatcac

SEQ ID NO: 1825590 - DNA, 15 bp, Homo sapiens
gagtggatgatcacc

SEQ ID NO: 1825591 - DNA, 15 bp, Homo sapiens
agtggatgatcacca

SEQ ID NO: 1825592 - DNA, 15 bp, Homo sapiens
gtggatgatcaccac

SEQ ID NO: 1825593 - DNA, 15 bp, Homo sapiens
tggatgatcaccacc

SEQ ID NO: 1825594 - DNA, 15 bp, Homo sapiens
ggatgatcaccacca

SEQ ID NO: 1825595 - DNA, 15 bp, Homo sapiens
gatgatcaccaccag

SEQ ID NO: 1825596 - DNA, 15 bp, Homo sapiens
atgatcaccaccagt

SEQ ID NO: 1825597 - DNA, 15 bp, Homo sapiens
tgatcaccaccagtc

SEQ ID NO: 1825598 - DNA, 15 bp, Homo sapiens
gatcaccaccagtcc

SEQ ID NO: 1825599 - DNA, 15 bp, Homo sapiens
atcaccaccagtcct

SEQ ID NO: 1825600 - DNA, 15 bp, Homo sapiens
tcaccaccagtcctg

SEQ ID NO: 1825601 - DNA, 15 bp, Homo sapiens
caccaccagtcctgc

SEQ ID NO: 1825602 - DNA, 15 bp, Homo sapiens
accaccagtcctgcc

SEQ ID NO: 1825603 - DNA, 15 bp, Homo sapiens
ccaccagtcctgcct

SEQ ID NO: 1825604 - DNA, 15 bp, Homo sapiens
caccagtcctgcctg

SEQ ID NO: 1825605 - DNA, 15 bp, Homo sapiens
accagtcctgcctgc

SEQ ID NO: 1825606 - DNA, 15 bp, Homo sapiens
ccagtcctgcctgca

SEQ ID NO: 1825607 - DNA, 15 bp, Homo sapiens
cagtcctgcctgcaa

SEQ ID NO: 1825608 - DNA, 15 bp, Homo sapiens
agtcctgcctgcaac

SEQ ID NO: 1825609 - DNA, 15 bp, Homo sapiens
gtcctgcctgcaacc

SEQ ID NO: 1825610 - DNA, 15 bp, Homo sapiens
tcctgcctgcaaccc

SEQ ID NO: 1825611 - DNA, 15 bp, Homo sapiens
cctgcctgcaaccct

SEQ ID NO: 1825612 - DNA, 15 bp, Homo sapiens
ctgcctgcaaccctt

SEQ ID NO: 1825613 - DNA, 15 bp, Homo sapiens
tgcctgcaacccttc

SEQ ID NO: 1825614 - DNA, 15 bp, Homo sapiens
gcctgcaacccttct

SEQ ID NO: 1825615 - DNA, 15 bp, Homo sapiens
cctgcaacccttctc

SEQ ID NO: 1825616 - DNA, 15 bp, Homo sapiens
ctgcaacccttctca

SEQ ID NO: 1825617 - DNA, 15 bp, Homo sapiens
tgcaacccttctcag

SEQ ID NO: 1825618 - DNA, 15 bp, Homo sapiens
gcaacccttctcagc

SEQ ID NO: 1825619 - DNA, 15 bp, Homo sapiens
caacccttctcagct

SEQ ID NO: 1825620 - DNA, 15 bp, Homo sapiens
aacccttctcagctt

SEQ ID NO: 1825621 - DNA, 15 bp, Homo sapiens
acccttctcagctta

SEQ ID NO: 1825622 - DNA, 15 bp, Homo sapiens
cccttctcagcttac

SEQ ID NO: 1825623 - DNA, 15 bp, Homo sapiens
ccttctcagcttact

SEQ ID NO: 1825624 - DNA, 15 bp, Homo sapiens
cttctcagcttactg

SEQ ID NO: 1825625 - DNA, 15 bp, Homo sapiens
ttctcagcttactga

SEQ ID NO: 1825626 - DNA, 15 bp, Homo sapiens
tctcagcttactgac

SEQ ID NO: 1825627 - DNA, 15 bp, Homo sapiens
ctcagcttactgaca

SEQ ID NO: 1825628 - DNA, 15 bp, Homo sapiens
tcagcttactgacac

SEQ ID NO: 1825629 - DNA, 15 bp, Homo sapiens
cagcttactgacacc

SEQ ID NO: 1825630 - DNA, 15 bp, Homo sapiens
agcttactgacacca

SEQ ID NO: 1825631 - DNA, 15 bp, Homo sapiens
gcttactgacaccag

SEQ ID NO: 1825632 - DNA, 15 bp, Homo sapiens
cttactgacaccagc

SEQ ID NO: 1825633 - DNA, 15 bp, Homo sapiens
ttactgacaccagcc

SEQ ID NO: 1825634 - DNA, 15 bp, Homo sapiens
tactgacaccagccc

SEQ ID NO: 1825635 - DNA, 15 bp, Homo sapiens
actgacaccagccca

SEQ ID NO: 1825636 - DNA, 15 bp, Homo sapiens
ctgacaccagcccac

SEQ ID NO: 1825637 - DNA, 15 bp, Homo sapiens
tgacaccagcccact

SEQ ID NO: 1825638 - DNA, 15 bp, Homo sapiens
gacaccagcccactc

SEQ ID NO: 1825639 - DNA, 15 bp, Homo sapiens
acaccagcccactcc

SEQ ID NO: 1825640 - DNA, 15 bp, Homo sapiens
caccagcccactcca

SEQ ID NO: 1825641 - DNA, 15 bp, Homo sapiens
accagcccactccac

SEQ ID NO: 1825642 - DNA, 15 bp, Homo sapiens
ccagcccactccaca

SEQ ID NO: 1825643 - DNA, 15 bp, Homo sapiens
cagcccactccacag

SEQ ID NO: 1825644 - DNA, 15 bp, Homo sapiens
agcccactccacaga

SEQ ID NO: 1825645 - DNA, 15 bp, Homo sapiens
gcccactccacagat

SEQ ID NO: 1825646 - DNA, 15 bp, Homo sapiens
cccactccacagatg

SEQ ID NO: 1825647 - DNA, 15 bp, Homo sapiens
ccactccacagatgg

SEQ ID NO: 1825648 - DNA, 15 bp, Homo sapiens
cactccacagatggg

SEQ ID NO: 1825649 - DNA, 15 bp, Homo sapiens
actccacagatgggg

SEQ ID NO: 1825650 - DNA, 15 bp, Homo sapiens
ctccacagatgggga

SEQ ID NO: 1825651 - DNA, 15 bp, Homo sapiens
tccacagatggggac

SEQ ID NO: 1825652 - DNA, 15 bp, Homo sapiens
ccacagatggggacc

SEQ ID NO: 1825653 - DNA, 15 bp, Homo sapiens
cacagatggggacca

SEQ ID NO: 1825654 - DNA, 15 bp, Homo sapiens
acagatggggaccag

SEQ ID NO: 1825655 - DNA, 15 bp, Homo sapiens
cagatggggaccagt

SEQ ID NO: 1825656 - DNA, 15 bp, Homo sapiens
agatggggaccagtg

SEQ ID NO: 1825657 - DNA, 15 bp, Homo sapiens
gatggggaccagtgt

SEQ ID NO: 1825658 - DNA, 15 bp, Homo sapiens
atggggaccagtgtg

SEQ ID NO: 1825659 - DNA, 15 bp, Homo sapiens
tggggaccagtgtgc

SEQ ID NO: 1825660 - DNA, 15 bp, Homo sapiens
ggggaccagtgtgcc

SEQ ID NO: 1825661 - DNA, 15 bp, Homo sapiens
gggaccagtgtgcct

SEQ ID NO: 1825662 - DNA, 15 bp, Homo sapiens
ggaccagtgtgcctc

SEQ ID NO: 1825663 - DNA, 15 bp, Homo sapiens
gaccagtgtgcctca

SEQ ID NO: 1825664 - DNA, 15 bp, Homo sapiens
accagtgtgcctcaa

SEQ ID NO: 1825665 - DNA, 15 bp, Homo sapiens
ccagtgtgcctcaag

SEQ ID NO: 1825666 - DNA, 15 bp, Homo sapiens
cagtgtgcctcaagt

SEQ ID NO: 1825667 - DNA, 15 bp, Homo sapiens
agtgtgcctcaagtc

SEQ ID NO: 1825668 - DNA, 15 bp, Homo sapiens
gtgtgcctcaagtcc

SEQ ID NO: 1825669 - DNA, 15 bp, Homo sapiens
tgtgcctcaagtcca

SEQ ID NO: 1825670 - DNA, 15 bp, Homo sapiens
gtgcctcaagtccat

SEQ ID NO: 1825671 - DNA, 15 bp, Homo sapiens
tgcctcaagtccatg

SEQ ID NO: 1825672 - DNA, 15 bp, Homo sapiens
gcctcaagtccatgc

SEQ ID NO: 1825673 - DNA, 15 bp, Homo sapiens
cctcaagtccatgcc

SEQ ID NO: 1825674 - DNA, 15 bp, Homo sapiens
ctcaagtccatgcca

SEQ ID NO: 1825675 - DNA, 15 bp, Homo sapiens
tcaagtccatgccag

SEQ ID NO: 1825676 - DNA, 15 bp, Homo sapiens
caagtccatgccaga

SEQ ID NO: 1825677 - DNA, 15 bp, Homo sapiens
aagtccatgccagaa

SEQ ID NO: 1825678 - DNA, 15 bp, Homo sapiens
agtccatgccagaat

SEQ ID NO: 1825679 - DNA, 15 bp, Homo sapiens
gtccatgccagaatg

SEQ ID NO: 1825680 - DNA, 15 bp, Homo sapiens
tccatgccagaatgg

SEQ ID NO: 1825681 - DNA, 15 bp, Homo sapiens
ccatgccagaatggg

SEQ ID NO: 1825682 - DNA, 15 bp, Homo sapiens
catgccagaatgggg

SEQ ID NO: 1825683 - DNA, 15 bp, Homo sapiens
atgccagaatggggg

SEQ ID NO: 1825684 - DNA, 15 bp, Homo sapiens
tgccagaatgggggc

SEQ ID NO: 1825685 - DNA, 15 bp, Homo sapiens
gccagaatgggggct

SEQ ID NO: 1825686 - DNA, 15 bp, Homo sapiens
ccagaatgggggctc

SEQ ID NO: 1825687 - DNA, 15 bp, Homo sapiens
cagaatgggggctcc

SEQ ID NO: 1825688 - DNA, 15 bp, Homo sapiens
agaatgggggctcct

SEQ ID NO: 1825689 - DNA, 15 bp, Homo sapiens
gaatgggggctcctg

SEQ ID NO: 1825690 - DNA, 15 bp, Homo sapiens
aatgggggctcctgc

SEQ ID NO: 1825691 - DNA, 15 bp, Homo sapiens
atgggggctcctgca

SEQ ID NO: 1825692 - DNA, 15 bp, Homo sapiens
tgggggctcctgcaa

SEQ ID NO: 1825693 - DNA, 15 bp, Homo sapiens
gggggctcctgcaag

SEQ ID NO: 1825694 - DNA, 15 bp, Homo sapiens
ggggctcctgcaagg

SEQ ID NO: 1825695 - DNA, 15 bp, Homo sapiens
gggctcctgcaagga

SEQ ID NO: 1825696 - DNA, 15 bp, Homo sapiens
ggctcctgcaaggac

SEQ ID NO: 1825697 - DNA, 15 bp, Homo sapiens
gctcctgcaaggacc

SEQ ID NO: 1825698 - DNA, 15 bp, Homo sapiens
ctcctgcaaggacca

SEQ ID NO: 1825699 - DNA, 15 bp, Homo sapiens
gctgcacttccaaaa

SEQ ID NO: 1825700 - DNA, 15 bp, Homo sapiens
ctgcacttccaaaag

SEQ ID NO: 1825701 - DNA, 15 bp, Homo sapiens
tgcacttccaaaagc

SEQ ID NO: 1825702 - DNA, 15 bp, Homo sapiens
gcacttccaaaagca

SEQ ID NO: 1825703 - DNA, 15 bp, Homo sapiens
cacttccaaaagcag

SEQ ID NO: 1825704 - DNA, 15 bp, Homo sapiens
acttccaaaagcagg

SEQ ID NO: 1825705 - DNA, 15 bp, Homo sapiens
cttccaaaagcaggg

SEQ ID NO: 1825706 - DNA, 15 bp, Homo sapiens
ttccaaaagcaggga

SEQ ID NO: 1825707 - DNA, 15 bp, Homo sapiens
tccaaaagcagggac

SEQ ID NO: 1825708 - DNA, 15 bp, Homo sapiens
ccaaaagcagggaca

SEQ ID NO: 1825709 - DNA, 15 bp, Homo sapiens
caaaagcagggacac

SEQ ID NO: 1825710 - DNA, 15 bp, Homo sapiens
aaaagcagggacacc

SEQ ID NO: 1825711 - DNA, 15 bp, Homo sapiens
aaagcagggacaccc

SEQ ID NO: 1825712 - DNA, 15 bp, Homo sapiens
aagcagggacacccc

SEQ ID NO: 1825713 - DNA, 15 bp, Homo sapiens
agcagggacacccca

SEQ ID NO: 1825714 - DNA, 15 bp, Homo sapiens
gcagggacaccccac

SEQ ID NO: 1825715 - DNA, 15 bp, Homo sapiens
cagggacaccccaca

SEQ ID NO: 1825716 - DNA, 15 bp, Homo sapiens
agggacaccccacac

SEQ ID NO: 1825717 - DNA, 15 bp, Homo sapiens
gggacaccccacacc

SEQ ID NO: 1825718 - DNA, 15 bp, Homo sapiens
ggacaccccacaccc

SEQ ID NO: 1825719 - DNA, 15 bp, Homo sapiens
gacaccccacaccca

SEQ ID NO: 1825720 - DNA, 15 bp, Homo sapiens
acaccccacacccac

SEQ ID NO: 1825721 - DNA, 15 bp, Homo sapiens
caccccacacccact

SEQ ID NO: 1825722 - DNA, 15 bp, Homo sapiens
accccacacccactg

SEQ ID NO: 1825723 - DNA, 15 bp, Homo sapiens
ccccacacccactgt

SEQ ID NO: 1825724 - DNA, 15 bp, Homo sapiens
cccacacccactgtg

SEQ ID NO: 1825725 - DNA, 15 bp, Homo sapiens
ccacacccactgtgt

SEQ ID NO: 1825726 - DNA, 15 bp, Homo sapiens
cacacccactgtgtc

SEQ ID NO: 1825727 - DNA, 15 bp, Homo sapiens
acacccactgtgtct

SEQ ID NO: 1825728 - DNA, 15 bp, Homo sapiens
cacccactgtgtctc

SEQ ID NO: 1825729 - DNA, 15 bp, Homo sapiens
acccactgtgtctca

SEQ ID NO: 1825730 - DNA, 15 bp, Homo sapiens
cccactgtgtctcaa

SEQ ID NO: 1825731 - DNA, 15 bp, Homo sapiens
ccactgtgtctcaaa

SEQ ID NO: 1825732 - DNA, 15 bp, Homo sapiens
cactgtgtctcaaag

SEQ ID NO: 1825733 - DNA, 15 bp, Homo sapiens
actgtgtctcaaaga

SEQ ID NO: 1825734 - DNA, 15 bp, Homo sapiens
ctgtgtctcaaagag

SEQ ID NO: 1825735 - DNA, 15 bp, Homo sapiens
tgtgtctcaaagagg

SEQ ID NO: 1825736 - DNA, 15 bp, Homo sapiens
gtgtctcaaagaggc

SEQ ID NO: 1825737 - DNA, 15 bp, Homo sapiens
tgtctcaaagaggcg

SEQ ID NO: 1825738 - DNA, 15 bp, Homo sapiens
gtctcaaagaggcgg

SEQ ID NO: 1825739 - DNA, 15 bp, Homo sapiens
tctcaaagaggcgga

SEQ ID NO: 1825740 - DNA, 15 bp, Homo sapiens
ctcaaagaggcggac

SEQ ID NO: 1825741 - DNA, 15 bp, Homo sapiens
tcaaagaggcggacg

SEQ ID NO: 1825742 - DNA, 15 bp, Homo sapiens
caaagaggcggacgt

SEQ ID NO: 1825743 - DNA, 15 bp, Homo sapiens
aaagaggcggacgtg

SEQ ID NO: 1825744 - DNA, 15 bp, Homo sapiens
aagaggcggacgtgc

SEQ ID NO: 1825745 - DNA, 15 bp, Homo sapiens
agaggcggacgtgcc

SEQ ID NO: 1825746 - DNA, 15 bp, Homo sapiens
gaggcggacgtgccc

SEQ ID NO: 1825747 - DNA, 15 bp, Homo sapiens
aggcggacgtgccca

SEQ ID NO: 1825748 - DNA, 15 bp, Homo sapiens
ggcggacgtgcccac

SEQ ID NO: 1825749 - DNA, 15 bp, Homo sapiens
gcggacgtgcccacc

SEQ ID NO: 1825750 - DNA, 15 bp, Homo sapiens
cggacgtgcccaccc

SEQ ID NO: 1825751 - DNA, 15 bp, Homo sapiens
ggacgtgcccaccct

SEQ ID NO: 1825752 - DNA, 15 bp, Homo sapiens
gacgtgcccaccctg

SEQ ID NO: 1825753 - DNA, 15 bp, Homo sapiens
acgtgcccaccctgg

SEQ ID NO: 1825754 - DNA, 15 bp, Homo sapiens
cgtgcccaccctggc

SEQ ID NO: 1825755 - DNA, 15 bp, Homo sapiens
gtgcccaccctggcc

SEQ ID NO: 1825756 - DNA, 15 bp, Homo sapiens
tgcccaccctggcca

SEQ ID NO: 1825757 - DNA, 15 bp, Homo sapiens
gcccaccctggccac

SEQ ID NO: 1825758 - DNA, 15 bp, Homo sapiens
cccaccctggccaca

SEQ ID NO: 1825759 - DNA, 15 bp, Homo sapiens
ccaccctggccacac

SEQ ID NO: 1825760 - DNA, 15 bp, Homo sapiens
caccctggccacaca

SEQ ID NO: 1825761 - DNA, 15 bp, Homo sapiens
accctggccacacag

SEQ ID NO: 1825762 - DNA, 15 bp, Homo sapiens
ccctggccacacagc

SEQ ID NO: 1825763 - DNA, 15 bp, Homo sapiens
cctggccacacagcc

SEQ ID NO: 1825764 - DNA, 15 bp, Homo sapiens
ctggccacacagcct

SEQ ID NO: 1825765 - DNA, 15 bp, Homo sapiens
tggccacacagcctg

SEQ ID NO: 1825766 - DNA, 15 bp, Homo sapiens
ggccacacagcctgg

SEQ ID NO: 1825767 - DNA, 15 bp, Homo sapiens
gccacacagcctggg

SEQ ID NO: 1825768 - DNA, 15 bp, Homo sapiens
ccacacagcctggga

SEQ ID NO: 1825769 - DNA, 15 bp, Homo sapiens
cacacagcctgggac

SEQ ID NO: 1825770 - DNA, 15 bp, Homo sapiens
acacagcctgggact

SEQ ID NO: 1825771 - DNA, 15 bp, Homo sapiens
cacagcctgggactc

SEQ ID NO: 1825772 - DNA, 15 bp, Homo sapiens
acagcctgggactca

SEQ ID NO: 1825773 - DNA, 15 bp, Homo sapiens
cagcctgggactcag

SEQ ID NO: 1825774 - DNA, 15 bp, Homo sapiens
agcctgggactcagc

SEQ ID NO: 1825775 - DNA, 15 bp, Homo sapiens
gcctgggactcagcc

SEQ ID NO: 1825776 - DNA, 15 bp, Homo sapiens
cctgggactcagcct

SEQ ID NO: 1825777 - DNA, 15 bp, Homo sapiens
ctgggactcagcctg

SEQ ID NO: 1825778 - DNA, 15 bp, Homo sapiens
tgggactcagcctgc

SEQ ID NO: 1825779 - DNA, 15 bp, Homo sapiens
gggactcagcctgcc

SEQ ID NO: 1825780 - DNA, 15 bp, Homo sapiens
ggactcagcctgcca

SEQ ID NO: 1825781 - DNA, 15 bp, Homo sapiens
gactcagcctgccac

SEQ ID NO: 1825782 - DNA, 15 bp, Homo sapiens
actcagcctgccacc

SEQ ID NO: 1825783 - DNA, 15 bp, Homo sapiens
ctcagcctgccacct

SEQ ID NO: 1825784 - DNA, 15 bp, Homo sapiens
tcagcctgccacctc

SEQ ID NO: 1825785 - DNA, 15 bp, Homo sapiens
cagcctgccacctcc

SEQ ID NO: 1825786 - DNA, 15 bp, Homo sapiens
agcctgccacctcct

SEQ ID NO: 1825787 - DNA, 15 bp, Homo sapiens
gcctgccacctcctc

SEQ ID NO: 1825788 - DNA, 15 bp, Homo sapiens
cctgccacctcctcg

SEQ ID NO: 1825789 - DNA, 15 bp, Homo sapiens
ctgccacctcctcgg

SEQ ID NO: 1825790 - DNA, 15 bp, Homo sapiens
tgccacctcctcggg

SEQ ID NO: 1825791 - DNA, 15 bp, Homo sapiens
gccacctcctcgggc

SEQ ID NO: 1825792 - DNA, 15 bp, Homo sapiens
ccacctcctcgggct

SEQ ID NO: 1825793 - DNA, 15 bp, Homo sapiens
cacctcctcgggctt

SEQ ID NO: 1825794 - DNA, 15 bp, Homo sapiens
acctcctcgggcttc

SEQ ID NO: 1825795 - DNA, 15 bp, Homo sapiens
cctcctcgggcttcc

SEQ ID NO: 1825796 - DNA, 15 bp, Homo sapiens
ctcctcgggcttcct

SEQ ID NO: 1825797 - DNA, 15 bp, Homo sapiens
tcctcgggcttcctt

SEQ ID NO: 1825798 - DNA, 15 bp, Homo sapiens
cctcgggcttccttt

SEQ ID NO: 1825799 - DNA, 15 bp, Homo sapiens
ctcgggcttcctttc

SEQ ID NO: 1825800 - DNA, 15 bp, Homo sapiens
tcgggcttcctttct

SEQ ID NO: 1825801 - DNA, 15 bp, Homo sapiens
cgggcttcctttctg

SEQ ID NO: 1825802 - DNA, 15 bp, Homo sapiens
gggcttcctttctgg

SEQ ID NO: 1825803 - DNA, 15 bp, Homo sapiens
ggcttcctttctggc

SEQ ID NO: 1825804 - DNA, 15 bp, Homo sapiens
gcttcctttctggcc

SEQ ID NO: 1825805 - DNA, 15 bp, Homo sapiens
cttcctttctggccc

SEQ ID NO: 1825806 - DNA, 15 bp, Homo sapiens
ttcctttctggccca

SEQ ID NO: 1825807 - DNA, 15 bp, Homo sapiens
tcctttctggcccaa

SEQ ID NO: 1825808 - DNA, 15 bp, Homo sapiens
cctttctggcccaag

SEQ ID NO: 1825809 - DNA, 15 bp, Homo sapiens
ctttctggcccaaga

SEQ ID NO: 1825810 - DNA, 15 bp, Homo sapiens
tttctggcccaagac

SEQ ID NO: 1825811 - DNA, 15 bp, Homo sapiens
ttctggcccaagacc

SEQ ID NO: 1825812 - DNA, 15 bp, Homo sapiens
tctggcccaagacct

SEQ ID NO: 1825813 - DNA, 15 bp, Homo sapiens
ctggcccaagacctt

SEQ ID NO: 1825814 - DNA, 15 bp, Homo sapiens
tggcccaagaccttg

SEQ ID NO: 1825815 - DNA, 15 bp, Homo sapiens
ggcccaagaccttga

SEQ ID NO: 1825816 - DNA, 15 bp, Homo sapiens
gcccaagaccttgat

SEQ ID NO: 1825817 - DNA, 15 bp, Homo sapiens
cccaagaccttgatt

SEQ ID NO: 1825818 - DNA, 15 bp, Homo sapiens
ccaagaccttgattg

SEQ ID NO: 1825819 - DNA, 15 bp, Homo sapiens
caagaccttgattga

SEQ ID NO: 1825820 - DNA, 15 bp, Homo sapiens
aagaccttgattgaa

SEQ ID NO: 1825821 - DNA, 15 bp, Homo sapiens
agaccttgattgaag

SEQ ID NO: 1825822 - DNA, 15 bp, Homo sapiens
gaccttgattgaagc

SEQ ID NO: 1825823 - DNA, 15 bp, Homo sapiens
accttgattgaagca

SEQ ID NO: 1825824 - DNA, 15 bp, Homo sapiens
ccttgattgaagcag

SEQ ID NO: 1825825 - DNA, 15 bp, Homo sapiens
cttgattgaagcaga

SEQ ID NO: 1825826 - DNA, 15 bp, Homo sapiens
ttgattgaagcagat

SEQ ID NO: 1825827 - DNA, 15 bp, Homo sapiens
tgattgaagcagatc

SEQ ID NO: 1825828 - DNA, 15 bp, Homo sapiens
gattgaagcagatca

SEQ ID NO: 1825829 - DNA, 15 bp, Homo sapiens
attgaagcagatcaa

SEQ ID NO: 1825830 - DNA, 15 bp, Homo sapiens
ttgaagcagatcaaa

SEQ ID NO: 1825831 - DNA, 15 bp, Homo sapiens
tgaagcagatcaaaa

SEQ ID NO: 1825832 - DNA, 15 bp, Homo sapiens
gaagcagatcaaaac

SEQ ID NO: 1825833 - DNA, 15 bp, Homo sapiens
aagcagatcaaaact

SEQ ID NO: 1825834 - DNA, 15 bp, Homo sapiens
agcagatcaaaacta

SEQ ID NO: 1825835 - DNA, 15 bp, Homo sapiens
gcagatcaaaactaa

SEQ ID NO: 1825836 - DNA, 15 bp, Homo sapiens
cagatcaaaactaag

SEQ ID NO: 1825837 - DNA, 15 bp, Homo sapiens
agatcaaaactaagc

SEQ ID NO: 1825838 - DNA, 15 bp, Homo sapiens
gatcaaaactaagca

SEQ ID NO: 1825839 - DNA, 15 bp, Homo sapiens
atcaaaactaagcat

SEQ ID NO: 1825840 - DNA, 15 bp, Homo sapiens
tcaaaactaagcatg

SEQ ID NO: 1825841 - DNA, 15 bp, Homo sapiens
caaaactaagcatgg

SEQ ID NO: 1825842 - DNA, 15 bp, Homo sapiens
aaaactaagcatggg

SEQ ID NO: 1825843 - DNA, 15 bp, Homo sapiens
aaactaagcatggga

SEQ ID NO: 1825844 - DNA, 15 bp, Homo sapiens
aactaagcatgggat

SEQ ID NO: 1825845 - DNA, 15 bp, Homo sapiens
actaagcatgggatc

SEQ ID NO: 1825846 - DNA, 15 bp, Homo sapiens
ctaagcatgggatca

SEQ ID NO: 1825847 - DNA, 15 bp, Homo sapiens
taagcatgggatcaa

SEQ ID NO: 1825848 - DNA, 15 bp, Homo sapiens
aagcatgggatcaaa

SEQ ID NO: 1825849 - DNA, 15 bp, Homo sapiens
agcatgggatcaaaa

SEQ ID NO: 1825850 - DNA, 15 bp, Homo sapiens
gcatgggatcaaaac

SEQ ID NO: 1825851 - DNA, 15 bp, Homo sapiens
catgggatcaaaaca

SEQ ID NO: 1825852 - DNA, 15 bp, Homo sapiens
atgggatcaaaacaa

SEQ ID NO: 1825853 - DNA, 15 bp, Homo sapiens
tgggatcaaaacaac

SEQ ID NO: 1825854 - DNA, 15 bp, Homo sapiens
gggatcaaaacaaca

SEQ ID NO: 1825855 - DNA, 15 bp, Homo sapiens
ggatcaaaacaacac

SEQ ID NO: 1825856 - DNA, 15 bp, Homo sapiens
gatcaaaacaacaca

SEQ ID NO: 1825857 - DNA, 15 bp, Homo sapiens
atcaaaacaacacag

SEQ ID NO: 1825858 - DNA, 15 bp, Homo sapiens
tcaaaacaacacagt

SEQ ID NO: 1825859 - DNA, 15 bp, Homo sapiens
caaaacaacacagtt

SEQ ID NO: 1825860 - DNA, 15 bp, Homo sapiens
aaaacaacacagttt

SEQ ID NO: 1825861 - DNA, 15 bp, Homo sapiens
aaacaacacagtttg

SEQ ID NO: 1825862 - DNA, 15 bp, Homo sapiens
aacaacacagtttga

SEQ ID NO: 1825863 - DNA, 15 bp, Homo sapiens
acaacacagtttgat

SEQ ID NO: 1825864 - DNA, 15 bp, Homo sapiens
caacacagtttgatt

SEQ ID NO: 1825865 - DNA, 15 bp, Homo sapiens
aacacagtttgattc

SEQ ID NO: 1825866 - DNA, 15 bp, Homo sapiens
acacagtttgattca

SEQ ID NO: 1825867 - DNA, 15 bp, Homo sapiens
cacagtttgattcat

SEQ ID NO: 1825868 - DNA, 15 bp, Homo sapiens
acagtttgattcatc

SEQ ID NO: 1825869 - DNA, 15 bp, Homo sapiens
cagtttgattcatct

SEQ ID NO: 1825870 - DNA, 15 bp, Homo sapiens
agtttgattcatctt

SEQ ID NO: 1825871 - DNA, 15 bp, Homo sapiens
gtttgattcatcttt

SEQ ID NO: 1825872 - DNA, 15 bp, Homo sapiens
tttgattcatcttta

SEQ ID NO: 1825873 - DNA, 15 bp, Homo sapiens
ttgattcatctttag

SEQ ID NO: 1825874 - DNA, 15 bp, Homo sapiens
tgattcatctttagg

SEQ ID NO: 1825875 - DNA, 15 bp, Homo sapiens
gattcatctttaggt

SEQ ID NO: 1825876 - DNA, 15 bp, Homo sapiens
attcatctttaggta

SEQ ID NO: 1825877 - DNA, 15 bp, Homo sapiens
ttcatctttaggtag

SEQ ID NO: 1825878 - DNA, 15 bp, Homo sapiens
tcatctttaggtaga

SEQ ID NO: 1825879 - DNA, 15 bp, Homo sapiens
catctttaggtagaa

SEQ ID NO: 1825880 - DNA, 15 bp, Homo sapiens
atctttaggtagaat

SEQ ID NO: 1825881 - DNA, 15 bp, Homo sapiens
tctttaggtagaatt

SEQ ID NO: 1825882 - DNA, 15 bp, Homo sapiens
ctttaggtagaattt

SEQ ID NO: 1825883 - DNA, 15 bp, Homo sapiens
tttaggtagaatttc

SEQ ID NO: 1825884 - DNA, 15 bp, Homo sapiens
ttaggtagaatttca

SEQ ID NO: 1825885 - DNA, 15 bp, Homo sapiens
taggtagaatttcat

SEQ ID NO: 1825886 - DNA, 15 bp, Homo sapiens
aggtagaatttcatt

SEQ ID NO: 1825887 - DNA, 15 bp, Homo sapiens
ggtagaatttcattc

SEQ ID NO: 1825888 - DNA, 15 bp, Homo sapiens
gtagaatttcattca

SEQ ID NO: 1825889 - DNA, 15 bp, Homo sapiens
tagaatttcattcac

SEQ ID NO: 1825890 - DNA, 15 bp, Homo sapiens
agaatttcattcacc

SEQ ID NO: 1825891 - DNA, 15 bp, Homo sapiens
gaatttcattcacct

SEQ ID NO: 1825892 - DNA, 15 bp, Homo sapiens
aatttcattcacctt

SEQ ID NO: 1825893 - DNA, 15 bp, Homo sapiens
atttcattcaccttc

SEQ ID NO: 1825894 - DNA, 15 bp, Homo sapiens
tttcattcaccttct

SEQ ID NO: 1825895 - DNA, 15 bp, Homo sapiens
ttcattcaccttcta

SEQ ID NO: 1825896 - DNA, 15 bp, Homo sapiens
tcattcaccttctac

SEQ ID NO: 1825897 - DNA, 15 bp, Homo sapiens
cattcaccttctact

SEQ ID NO: 1825898 - DNA, 15 bp, Homo sapiens
attcaccttctacta

SEQ ID NO: 1825899 - DNA, 15 bp, Homo sapiens
ttcaccttctactaa

SEQ ID NO: 1825900 - DNA, 15 bp, Homo sapiens
tcaccttctactaaa

SEQ ID NO: 1825901 - DNA, 15 bp, Homo sapiens
caccttctactaaag

SEQ ID NO: 1825902 - DNA, 15 bp, Homo sapiens
accttctactaaagt

SEQ ID NO: 1825903 - DNA, 15 bp, Homo sapiens
ccttctactaaagtc

SEQ ID NO: 1825904 - DNA, 15 bp, Homo sapiens
cttctactaaagtca

SEQ ID NO: 1825905 - DNA, 15 bp, Homo sapiens
ttctactaaagtcaa

SEQ ID NO: 1825906 - DNA, 15 bp, Homo sapiens
tctactaaagtcaaa

SEQ ID NO: 1825907 - DNA, 15 bp, Homo sapiens
ctactaaagtcaaac

SEQ ID NO: 1825908 - DNA, 15 bp, Homo sapiens
tactaaagtcaaaca

SEQ ID NO: 1825909 - DNA, 15 bp, Homo sapiens
actaaagtcaaacaa

SEQ ID NO: 1825910 - DNA, 15 bp, Homo sapiens
ctaaagtcaaacaac

SEQ ID NO: 1825911 - DNA, 15 bp, Homo sapiens
taaagtcaaacaaca

SEQ ID NO: 1825912 - DNA, 15 bp, Homo sapiens
aaagtcaaacaacac

SEQ ID NO: 1825913 - DNA, 15 bp, Homo sapiens
aagtcaaacaacaca

SEQ ID NO: 1825914 - DNA, 15 bp, Homo sapiens
agtcaaacaacacat

SEQ ID NO: 1825915 - DNA, 15 bp, Homo sapiens
gtcaaacaacacatc

SEQ ID NO: 1825916 - DNA, 15 bp, Homo sapiens
caaacaacacatctt

SEQ ID NO: 1825917 - DNA, 15 bp, Homo sapiens
aaacaacacatcttc

SEQ ID NO: 1825918 - DNA, 15 bp, Homo sapiens
aacaacacatcttct

SEQ ID NO: 1825919 - DNA, 15 bp, Homo sapiens
acaacacatcttctc

SEQ ID NO: 1825920 - DNA, 15 bp, Homo sapiens
caacacatcttctcc

SEQ ID NO: 1825921 - DNA, 15 bp, Homo sapiens
aacacatcttctccc

SEQ ID NO: 1825922 - DNA, 15 bp, Homo sapiens
acacatcttctccct

SEQ ID NO: 1825923 - DNA, 15 bp, Homo sapiens
cacatcttctccctg

SEQ ID NO: 1825924 - DNA, 15 bp, Homo sapiens
acatcttctccctga

SEQ ID NO: 1825925 - DNA, 15 bp, Homo sapiens
catcttctccctgaa

SEQ ID NO: 1825926 - DNA, 15 bp, Homo sapiens
atcttctccctgaaa

SEQ ID NO: 1825927 - DNA, 15 bp, Homo sapiens
tcttctccctgaaaa

SEQ ID NO: 1825928 - DNA, 15 bp, Homo sapiens
cttctccctgaaaag

SEQ ID NO: 1825929 - DNA, 15 bp, Homo sapiens
ttctccctgaaaagt

SEQ ID NO: 1825930 - DNA, 15 bp, Homo sapiens
tctccctgaaaagtg

SEQ ID NO: 1825931 - DNA, 15 bp, Homo sapiens
ctccctgaaaagtga

SEQ ID NO: 1825932 - DNA, 15 bp, Homo sapiens
tccctgaaaagtgag

SEQ ID NO: 1825933 - DNA, 15 bp, Homo sapiens
ccctgaaaagtgagc

SEQ ID NO: 1825934 - DNA, 15 bp, Homo sapiens
cctgaaaagtgagca

SEQ ID NO: 1825935 - DNA, 15 bp, Homo sapiens
ctgaaaagtgagcag

SEQ ID NO: 1825936 - DNA, 15 bp, Homo sapiens
tgaaaagtgagcaga

SEQ ID NO: 1825937 - DNA, 15 bp, Homo sapiens
gaaaagtgagcagag

SEQ ID NO: 1825938 - DNA, 15 bp, Homo sapiens
aaaagtgagcagagg

SEQ ID NO: 1825939 - DNA, 15 bp, Homo sapiens
aaagtgagcagaggg

SEQ ID NO: 1825940 - DNA, 15 bp, Homo sapiens
aagtgagcagagggc

SEQ ID NO: 1825941 - DNA, 15 bp, Homo sapiens
agtgagcagagggcg

SEQ ID NO: 1825942 - DNA, 15 bp, Homo sapiens
gtgagcagagggcgg

SEQ ID NO: 1825943 - DNA, 15 bp, Homo sapiens
tgagcagagggcggt

SEQ ID NO: 1825944 - DNA, 15 bp, Homo sapiens
gagcagagggcggtt

SEQ ID NO: 1825945 - DNA, 15 bp, Homo sapiens
agcagagggcggttt

SEQ ID NO: 1825946 - DNA, 15 bp, Homo sapiens
gcagagggcggtttt

SEQ ID NO: 1825947 - DNA, 15 bp, Homo sapiens
cagagggcggtttta

SEQ ID NO: 1825948 - DNA, 15 bp, Homo sapiens
agagggcggttttaa

SEQ ID NO: 1825949 - DNA, 15 bp, Homo sapiens
gagggcggttttaag

SEQ ID NO: 1825950 - DNA, 15 bp, Homo sapiens
agggcggttttaaga

SEQ ID NO: 1825951 - DNA, 15 bp, Homo sapiens
gggcggttttaagac

SEQ ID NO: 1825952 - DNA, 15 bp, Homo sapiens
ggcggttttaagacg

SEQ ID NO: 1825953 - DNA, 15 bp, Homo sapiens
gcggttttaagacgt

SEQ ID NO: 1825954 - DNA, 15 bp, Homo sapiens
cggttttaagacgta

SEQ ID NO: 1825955 - DNA, 15 bp, Homo sapiens
ggttttaagacgtaa

SEQ ID NO: 1825956 - DNA, 15 bp, Homo sapiens
gttttaagacgtaag

SEQ ID NO: 1825957 - DNA, 15 bp, Homo sapiens
ttttaagacgtaagc

SEQ ID NO: 1825958 - DNA, 15 bp, Homo sapiens
tttaagacgtaagcc

SEQ ID NO: 1825959 - DNA, 15 bp, Homo sapiens
ttaagacgtaagccc

SEQ ID NO: 1825960 - DNA, 15 bp, Homo sapiens
taagacgtaagccct

SEQ ID NO: 1825961 - DNA, 15 bp, Homo sapiens
aagacgtaagccctc

SEQ ID NO: 1825962 - DNA, 15 bp, Homo sapiens
agacgtaagccctct

SEQ ID NO: 1825963 - DNA, 15 bp, Homo sapiens
gacgtaagccctctg

SEQ ID NO: 1825964 - DNA, 15 bp, Homo sapiens
acgtaagccctctgt

SEQ ID NO: 1825965 - DNA, 15 bp, Homo sapiens
cgtaagccctctgtt

SEQ ID NO: 1825966 - DNA, 15 bp, Homo sapiens
gtaagccctctgttt

SEQ ID NO: 1825967 - DNA, 15 bp, Homo sapiens
taagccctctgtttc

SEQ ID NO: 1825968 - DNA, 15 bp, Homo sapiens
aagccctctgtttcc

SEQ ID NO: 1825969 - DNA, 15 bp, Homo sapiens
agccctctgtttcct

SEQ ID NO: 1825970 - DNA, 15 bp, Homo sapiens
gccctctgtttcctc

SEQ ID NO: 1825971 - DNA, 15 bp, Homo sapiens
ccctctgtttcctcc

SEQ ID NO: 1825972 - DNA, 15 bp, Homo sapiens
cctctgtttcctcca

SEQ ID NO: 1825973 - DNA, 15 bp, Homo sapiens
ctctgtttcctccaa

SEQ ID NO: 1825974 - DNA, 15 bp, Homo sapiens
tctgtttcctccaaa

SEQ ID NO: 1825975 - DNA, 15 bp, Homo sapiens
ctgtttcctccaaaa

SEQ ID NO: 1825976 - DNA, 15 bp, Homo sapiens
tgtttcctccaaaac

SEQ ID NO: 1825977 - DNA, 15 bp, Homo sapiens
gtttcctccaaaacc

SEQ ID NO: 1825978 - DNA, 15 bp, Homo sapiens
tttcctccaaaacca

SEQ ID NO: 1825979 - DNA, 15 bp, Homo sapiens
ttcctccaaaaccag

SEQ ID NO: 1825980 - DNA, 15 bp, Homo sapiens
tcctccaaaaccagc

SEQ ID NO: 1825981 - DNA, 15 bp, Homo sapiens
cctccaaaaccagcc

SEQ ID NO: 1825982 - DNA, 15 bp, Homo sapiens
ctccaaaaccagccc

SEQ ID NO: 1825983 - DNA, 15 bp, Homo sapiens
tccaaaaccagccct

SEQ ID NO: 1825984 - DNA, 15 bp, Homo sapiens
ccaaaaccagccctg

SEQ ID NO: 1825985 - DNA, 15 bp, Homo sapiens
caaaaccagccctga

SEQ ID NO: 1825986 - DNA, 15 bp, Homo sapiens
aaaaccagccctgac

SEQ ID NO: 1825987 - DNA, 15 bp, Homo sapiens
aaaccagccctgacc

SEQ ID NO: 1825988 - DNA, 15 bp, Homo sapiens
aaccagccctgacca

SEQ ID NO: 1825989 - DNA, 15 bp, Homo sapiens
accagccctgaccat

SEQ ID NO: 1825990 - DNA, 15 bp, Homo sapiens
ccagccctgaccatt

SEQ ID NO: 1825991 - DNA, 15 bp, Homo sapiens
cagccctgaccattg

SEQ ID NO: 1825992 - DNA, 15 bp, Homo sapiens
agccctgaccattgt

SEQ ID NO: 1825993 - DNA, 15 bp, Homo sapiens
gccctgaccattgtc

SEQ ID NO: 1825994 - DNA, 15 bp, Homo sapiens
ccctgaccattgtct

SEQ ID NO: 1825995 - DNA, 15 bp, Homo sapiens
cctgaccattgtctc

SEQ ID NO: 1825996 - DNA, 15 bp, Homo sapiens
ctgaccattgtctcc

SEQ ID NO: 1825997 - DNA, 15 bp, Homo sapiens
tgaccattgtctcct

SEQ ID NO: 1825998 - DNA, 15 bp, Homo sapiens
gaccattgtctcctc

SEQ ID NO: 1825999 - DNA, 15 bp, Homo sapiens
accattgtctcctca

SEQ ID NO: 1826000 - DNA, 15 bp, Homo sapiens
ccattgtctcctcag

SEQ ID NO: 1826001 - DNA, 15 bp, Homo sapiens
cattgtctcctcagc

SEQ ID NO: 1826002 - DNA, 15 bp, Homo sapiens
attgtctcctcagcc

SEQ ID NO: 1826003 - DNA, 15 bp, Homo sapiens
ttgtctcctcagcca

SEQ ID NO: 1826004 - DNA, 15 bp, Homo sapiens
tgtctcctcagccag

SEQ ID NO: 1826005 - DNA, 15 bp, Homo sapiens
gtctcctcagccagc

SEQ ID NO: 1826006 - DNA, 15 bp, Homo sapiens
tctcctcagccagcc

SEQ ID NO: 1826007 - DNA, 15 bp, Homo sapiens
ctcctcagccagcca

SEQ ID NO: 1826008 - DNA, 15 bp, Homo sapiens
tcctcagccagccac

SEQ ID NO: 1826009 - DNA, 15 bp, Homo sapiens
cctcagccagccact

SEQ ID NO: 1826010 - DNA, 15 bp, Homo sapiens
ctcagccagccactt

SEQ ID NO: 1826011 - DNA, 15 bp, Homo sapiens
tcagccagccacttc

SEQ ID NO: 1826012 - DNA, 15 bp, Homo sapiens
cagccagccacttct

SEQ ID NO: 1826013 - DNA, 15 bp, Homo sapiens
agccagccacttctt

SEQ ID NO: 1826014 - DNA, 15 bp, Homo sapiens
gccagccacttcttc

SEQ ID NO: 1826015 - DNA, 15 bp, Homo sapiens
ccagccacttcttca

SEQ ID NO: 1826016 - DNA, 15 bp, Homo sapiens
cagccacttcttcaa

SEQ ID NO: 1826017 - DNA, 15 bp, Homo sapiens
agccacttcttcaag

SEQ ID NO: 1826018 - DNA, 15 bp, Homo sapiens
gccacttcttcaagg

SEQ ID NO: 1826019 - DNA, 15 bp, Homo sapiens
ccacttcttcaaggg

SEQ ID NO: 1826020 - DNA, 15 bp, Homo sapiens
cacttcttcaagggc

SEQ ID NO: 1826021 - DNA, 15 bp, Homo sapiens
acttcttcaagggcc

SEQ ID NO: 1826022 - DNA, 15 bp, Homo sapiens
cttcttcaagggcct

SEQ ID NO: 1826023 - DNA, 15 bp, Homo sapiens
ttcttcaagggcctc

SEQ ID NO: 1826024 - DNA, 15 bp, Homo sapiens
tcttcaagggcctct

SEQ ID NO: 1826025 - DNA, 15 bp, Homo sapiens
cttcaagggcctctc

SEQ ID NO: 1826026 - DNA, 15 bp, Homo sapiens
ttcaagggcctctca

SEQ ID NO: 1826027 - DNA, 15 bp, Homo sapiens
tcaagggcctctcat

SEQ ID NO: 1826028 - DNA, 15 bp, Homo sapiens
caagggcctctcatg

SEQ ID NO: 1826029 - DNA, 15 bp, Homo sapiens
aagggcctctcatgg

SEQ ID NO: 1826030 - DNA, 15 bp, Homo sapiens
agggcctctcatggc

SEQ ID NO: 1826031 - DNA, 15 bp, Homo sapiens
gggcctctcatggcc

SEQ ID NO: 1826032 - DNA, 15 bp, Homo sapiens
ggcctctcatggccg

SEQ ID NO: 1826033 - DNA, 15 bp, Homo sapiens
gcctctcatggccgg

SEQ ID NO: 1826034 - DNA, 15 bp, Homo sapiens
cctctcatggccggg

SEQ ID NO: 1826035 - DNA, 15 bp, Homo sapiens
ctctcatggccgggc

SEQ ID NO: 1826036 - DNA, 15 bp, Homo sapiens
tctcatggccgggcc

SEQ ID NO: 1826037 - DNA, 15 bp, Homo sapiens
ctcatggccgggccc

SEQ ID NO: 1826038 - DNA, 15 bp, Homo sapiens
tcatggccgggcccc

SEQ ID NO: 1826039 - DNA, 15 bp, Homo sapiens
catggccgggcccca

SEQ ID NO: 1826040 - DNA, 15 bp, Homo sapiens
atggccgggccccac

SEQ ID NO: 1826041 - DNA, 15 bp, Homo sapiens
tggccgggccccacc

SEQ ID NO: 1826042 - DNA, 15 bp, Homo sapiens
ggccgggccccacca

SEQ ID NO: 1826043 - DNA, 15 bp, Homo sapiens
gccgggccccaccag

SEQ ID NO: 1826044 - DNA, 15 bp, Homo sapiens
ccgggccccaccagt

SEQ ID NO: 1826045 - DNA, 15 bp, Homo sapiens
cgggccccaccagtc

SEQ ID NO: 1826046 - DNA, 15 bp, Homo sapiens
gggccccaccagtca

SEQ ID NO: 1826047 - DNA, 15 bp, Homo sapiens
ggccccaccagtcag

SEQ ID NO: 1826048 - DNA, 15 bp, Homo sapiens
gccccaccagtcagg

SEQ ID NO: 1826049 - DNA, 15 bp, Homo sapiens
ccccaccagtcaggc

SEQ ID NO: 1826050 - DNA, 15 bp, Homo sapiens
cccaccagtcaggcc

SEQ ID NO: 1826051 - DNA, 15 bp, Homo sapiens
ccaccagtcaggccc

SEQ ID NO: 1826052 - DNA, 15 bp, Homo sapiens
caccagtcaggccca

SEQ ID NO: 1826053 - DNA, 15 bp, Homo sapiens
accagtcaggcccag

SEQ ID NO: 1826054 - DNA, 15 bp, Homo sapiens
ccagtcaggcccagc

SEQ ID NO: 1826055 - DNA, 15 bp, Homo sapiens
cagtcaggcccagcc

SEQ ID NO: 1826056 - DNA, 15 bp, Homo sapiens
agtcaggcccagccg

SEQ ID NO: 1826057 - DNA, 15 bp, Homo sapiens
gtcaggcccagccga

SEQ ID NO: 1826058 - DNA, 15 bp, Homo sapiens
tcaggcccagccgag

SEQ ID NO: 1826059 - DNA, 15 bp, Homo sapiens
caggcccagccgagg

SEQ ID NO: 1826060 - DNA, 15 bp, Homo sapiens
aggcccagccgaggc

SEQ ID NO: 1826061 - DNA, 15 bp, Homo sapiens
ggcccagccgaggcc

SEQ ID NO: 1826062 - DNA, 15 bp, Homo sapiens
gcccagccgaggccc

SEQ ID NO: 1826063 - DNA, 15 bp, Homo sapiens
cccagccgaggccct

SEQ ID NO: 1826064 - DNA, 15 bp, Homo sapiens
ccagccgaggccctg

SEQ ID NO: 1826065 - DNA, 15 bp, Homo sapiens
cagccgaggccctgc

SEQ ID NO: 1826066 - DNA, 15 bp, Homo sapiens
agccgaggccctgcc

SEQ ID NO: 1826067 - DNA, 15 bp, Homo sapiens
gccgaggccctgcct

SEQ ID NO: 1826068 - DNA, 15 bp, Homo sapiens
ccgaggccctgcctt

SEQ ID NO: 1826069 - DNA, 15 bp, Homo sapiens
cgaggccctgccttc

SEQ ID NO: 1826070 - DNA, 15 bp, Homo sapiens
gaggccctgccttcc

SEQ ID NO: 1826071 - DNA, 15 bp, Homo sapiens
aggccctgccttcca

SEQ ID NO: 1826072 - DNA, 15 bp, Homo sapiens
ggccctgccttccac

SEQ ID NO: 1826073 - DNA, 15 bp, Homo sapiens
gccctgccttccacc

SEQ ID NO: 1826074 - DNA, 15 bp, Homo sapiens
ccctgccttccacca

SEQ ID NO: 1826075 - DNA, 15 bp, Homo sapiens
cctgccttccaccac

SEQ ID NO: 1826076 - DNA, 15 bp, Homo sapiens
ctgccttccaccacc

SEQ ID NO: 1826077 - DNA, 15 bp, Homo sapiens
tgccttccaccaccc

SEQ ID NO: 1826078 - DNA, 15 bp, Homo sapiens
gccttccaccacccc

SEQ ID NO: 1826079 - DNA, 15 bp, Homo sapiens
ccttccaccacccct

SEQ ID NO: 1826080 - DNA, 15 bp, Homo sapiens
cttccaccacccctg

SEQ ID NO: 1826081 - DNA, 15 bp, Homo sapiens
ttccaccacccctgg

SEQ ID NO: 1826082 - DNA, 15 bp, Homo sapiens
tccaccacccctggg

SEQ ID NO: 1826083 - DNA, 15 bp, Homo sapiens
ccaccacccctgggc

SEQ ID NO: 1826084 - DNA, 15 bp, Homo sapiens
caccacccctgggcc

SEQ ID NO: 1826085 - DNA, 15 bp, Homo sapiens
accacccctgggccc

SEQ ID NO: 1826086 - DNA, 15 bp, Homo sapiens
ccacccctgggccct

SEQ ID NO: 1826087 - DNA, 15 bp, Homo sapiens
cacccctgggccctg

SEQ ID NO: 1826088 - DNA, 15 bp, Homo sapiens
acccctgggccctgg

SEQ ID NO: 1826089 - DNA, 15 bp, Homo sapiens
cccctgggccctggg

SEQ ID NO: 1826090 - DNA, 15 bp, Homo sapiens
ccctgggccctggga

SEQ ID NO: 1826091 - DNA, 15 bp, Homo sapiens
cctgggccctgggag

SEQ ID NO: 1826092 - DNA, 15 bp, Homo sapiens
ctgggccctgggagc

SEQ ID NO: 1826093 - DNA, 15 bp, Homo sapiens
tgggccctgggagct

SEQ ID NO: 1826094 - DNA, 15 bp, Homo sapiens
gggccctgggagctc

SEQ ID NO: 1826095 - DNA, 15 bp, Homo sapiens
ggccctgggagctcc

SEQ ID NO: 1826096 - DNA, 15 bp, Homo sapiens
gccctgggagctcct

SEQ ID NO: 1826097 - DNA, 15 bp, Homo sapiens
ccctgggagctcctg

SEQ ID NO: 1826098 - DNA, 15 bp, Homo sapiens
cctgggagctcctgc

SEQ ID NO: 1826099 - DNA, 15 bp, Homo sapiens
ctgggagctcctgct

SEQ ID NO: 1826100 - DNA, 15 bp, Homo sapiens
tgggagctcctgctc

SEQ ID NO: 1826101 - DNA, 15 bp, Homo sapiens
gggagctcctgctcc

SEQ ID NO: 1826102 - DNA, 15 bp, Homo sapiens
ggagctcctgctcct

SEQ ID NO: 1826103 - DNA, 15 bp, Homo sapiens
gagctcctgctcctg

SEQ ID NO: 1826104 - DNA, 15 bp, Homo sapiens
agctcctgctcctgg

SEQ ID NO: 1826105 - DNA, 15 bp, Homo sapiens
gctcctgctcctggg

SEQ ID NO: 1826106 - DNA, 15 bp, Homo sapiens
ctcctgctcctgggg

SEQ ID NO: 1826107 - DNA, 15 bp, Homo sapiens
tcctgctcctggggg

SEQ ID NO: 1826108 - DNA, 15 bp, Homo sapiens
cctgctcctgggggc

SEQ ID NO: 1826109 - DNA, 15 bp, Homo sapiens
ctgctcctgggggcc

SEQ ID NO: 1826110 - DNA, 15 bp, Homo sapiens
tgctcctgggggcct

SEQ ID NO: 1826111 - DNA, 15 bp, Homo sapiens
gctcctgggggcctc

SEQ ID NO: 1826112 - DNA, 15 bp, Homo sapiens
ctcctgggggcctcc

SEQ ID NO: 1826113 - DNA, 15 bp, Homo sapiens
tcctgggggcctccc

SEQ ID NO: 1826114 - DNA, 15 bp, Homo sapiens
cctgggggcctccca

SEQ ID NO: 1826115 - DNA, 15 bp, Homo sapiens
ctgggggcctcccat

SEQ ID NO: 1826116 - DNA, 15 bp, Homo sapiens
tgggggcctcccata

SEQ ID NO: 1826117 - DNA, 15 bp, Homo sapiens
gggggcctcccatag

SEQ ID NO: 1826118 - DNA, 15 bp, Homo sapiens
ggggcctcccatagc

SEQ ID NO: 1826119 - DNA, 15 bp, Homo sapiens
gggcctcccatagcc

SEQ ID NO: 1826120 - DNA, 15 bp, Homo sapiens
ggcctcccatagcct

SEQ ID NO: 1826121 - DNA, 15 bp, Homo sapiens
gcctcccatagcctc

SEQ ID NO: 1826122 - DNA, 15 bp, Homo sapiens
cctcccatagcctcg

SEQ ID NO: 1826123 - DNA, 15 bp, Homo sapiens
ctcccatagcctcgg

SEQ ID NO: 1826124 - DNA, 15 bp, Homo sapiens
tcccatagcctcggc

SEQ ID NO: 1826125 - DNA, 15 bp, Homo sapiens
cccatagcctcggcc

SEQ ID NO: 1826126 - DNA, 15 bp, Homo sapiens
ccatagcctcggcct

SEQ ID NO: 1826127 - DNA, 15 bp, Homo sapiens
catagcctcggcctc

SEQ ID NO: 1826128 - DNA, 15 bp, Homo sapiens
atagcctcggcctca

SEQ ID NO: 1826129 - DNA, 15 bp, Homo sapiens
tagcctcggcctcaa

SEQ ID NO: 1826130 - DNA, 15 bp, Homo sapiens
agcctcggcctcaag

SEQ ID NO: 1826131 - DNA, 15 bp, Homo sapiens
gcctcggcctcaagg

SEQ ID NO: 1826132 - DNA, 15 bp, Homo sapiens
cctcggcctcaaggc

SEQ ID NO: 1826133 - DNA, 15 bp, Homo sapiens
ctcggcctcaaggcc

SEQ ID NO: 1826134 - DNA, 15 bp, Homo sapiens
tcggcctcaaggcct

SEQ ID NO: 1826135 - DNA, 15 bp, Homo sapiens
cggcctcaaggcctc

SEQ ID NO: 1826136 - DNA, 15 bp, Homo sapiens
ggcctcaaggcctct

SEQ ID NO: 1826137 - DNA, 15 bp, Homo sapiens
gcctcaaggcctctc

SEQ ID NO: 1826138 - DNA, 15 bp, Homo sapiens
cctcaaggcctctca

SEQ ID NO: 1826139 - DNA, 15 bp, Homo sapiens
ctcaaggcctctcag

SEQ ID NO: 1826140 - DNA, 15 bp, Homo sapiens
tcaaggcctctcaga

SEQ ID NO: 1826141 - DNA, 15 bp, Homo sapiens
caaggcctctcagag

SEQ ID NO: 1826142 - DNA, 15 bp, Homo sapiens
aaggcctctcagagg

SEQ ID NO: 1826143 - DNA, 15 bp, Homo sapiens
aggcctctcagagga

SEQ ID NO: 1826144 - DNA, 15 bp, Homo sapiens
ggcctctcagaggat

SEQ ID NO: 1826145 - DNA, 15 bp, Homo sapiens
gcctctcagaggatg

SEQ ID NO: 1826146 - DNA, 15 bp, Homo sapiens
cctctcagaggatgg

SEQ ID NO: 1826147 - DNA, 15 bp, Homo sapiens
ctctcagaggatggg

SEQ ID NO: 1826148 - DNA, 15 bp, Homo sapiens
tctcagaggatgggt

SEQ ID NO: 1826149 - DNA, 15 bp, Homo sapiens
ctcagaggatgggtg

SEQ ID NO: 1826150 - DNA, 15 bp, Homo sapiens
tcagaggatgggtgt

SEQ ID NO: 1826151 - DNA, 15 bp, Homo sapiens
cagaggatgggtgtt

SEQ ID NO: 1826152 - DNA, 15 bp, Homo sapiens
agaggatgggtgttt

SEQ ID NO: 1826153 - DNA, 15 bp, Homo sapiens
gaggatgggtgtttc

SEQ ID NO: 1826154 - DNA, 15 bp, Homo sapiens
aggatgggtgtttct

SEQ ID NO: 1826155 - DNA, 15 bp, Homo sapiens
ggatgggtgtttctg

SEQ ID NO: 1826156 - DNA, 15 bp, Homo sapiens
gatgggtgtttctga

SEQ ID NO: 1826157 - DNA, 15 bp, Homo sapiens
atgggtgtttctgaa

SEQ ID NO: 1826158 - DNA, 15 bp, Homo sapiens
tgggtgtttctgaat

SEQ ID NO: 1826159 - DNA, 15 bp, Homo sapiens
gggtgtttctgaatc

SEQ ID NO: 1826160 - DNA, 15 bp, Homo sapiens
ggtgtttctgaatct

SEQ ID NO: 1826161 - DNA, 15 bp, Homo sapiens
gtgtttctgaatctt

SEQ ID NO: 1826162 - DNA, 15 bp, Homo sapiens
tgtttctgaatcttt

SEQ ID NO: 1826163 - DNA, 15 bp, Homo sapiens
gtttctgaatctttc

SEQ ID NO: 1826164 - DNA, 15 bp, Homo sapiens
tttctgaatctttcc

SEQ ID NO: 1826165 - DNA, 15 bp, Homo sapiens
ttctgaatctttcct

SEQ ID NO: 1826166 - DNA, 15 bp, Homo sapiens
tctgaatctttccta

SEQ ID NO: 1826167 - DNA, 15 bp, Homo sapiens
ctgaatctttcctag

SEQ ID NO: 1826168 - DNA, 15 bp, Homo sapiens
tgaatctttcctagt

SEQ ID NO: 1826169 - DNA, 15 bp, Homo sapiens
gaatctttcctagtg

SEQ ID NO: 1826170 - DNA, 15 bp, Homo sapiens
aatctttcctagtgg

SEQ ID NO: 1826171 - DNA, 15 bp, Homo sapiens
atctttcctagtggc

SEQ ID NO: 1826172 - DNA, 15 bp, Homo sapiens
tctttcctagtggca

SEQ ID NO: 1826173 - DNA, 15 bp, Homo sapiens
ctttcctagtggcac

SEQ ID NO: 1826174 - DNA, 15 bp, Homo sapiens
tttcctagtggcacg

SEQ ID NO: 1826175 - DNA, 15 bp, Homo sapiens
ttcctagtggcacgt

SEQ ID NO: 1826176 - DNA, 15 bp, Homo sapiens
tcctagtggcacgtt

SEQ ID NO: 1826177 - DNA, 15 bp, Homo sapiens
cctagtggcacgttc

SEQ ID NO: 1826178 - DNA, 15 bp, Homo sapiens
ctagtggcacgttca

SEQ ID NO: 1826179 - DNA, 15 bp, Homo sapiens
tagtggcacgttcat

SEQ ID NO: 1826180 - DNA, 15 bp, Homo sapiens
agtggcacgttcatc

SEQ ID NO: 1826181 - DNA, 15 bp, Homo sapiens
gtggcacgttcatcc

SEQ ID NO: 1826182 - DNA, 15 bp, Homo sapiens
tggcacgttcatccc

SEQ ID NO: 1826183 - DNA, 15 bp, Homo sapiens
ggcacgttcatccct

SEQ ID NO: 1826184 - DNA, 15 bp, Homo sapiens
gcacgttcatccctc

SEQ ID NO: 1826185 - DNA, 15 bp, Homo sapiens
cacgttcatccctca

SEQ ID NO: 1826186 - DNA, 15 bp, Homo sapiens
acgttcatccctcac

SEQ ID NO: 1826187 - DNA, 15 bp, Homo sapiens
cgttcatccctcaca

SEQ ID NO: 1826188 - DNA, 15 bp, Homo sapiens
gttcatccctcacaa

SEQ ID NO: 1826189 - DNA, 15 bp, Homo sapiens
ttcatccctcacaaa

SEQ ID NO: 1826190 - DNA, 15 bp, Homo sapiens
tcatccctcacaaat

SEQ ID NO: 1826191 - DNA, 15 bp, Homo sapiens
catccctcacaaatc

SEQ ID NO: 1826192 - DNA, 15 bp, Homo sapiens
atccctcacaaatct

SEQ ID NO: 1826193 - DNA, 15 bp, Homo sapiens
tccctcacaaatctc

SEQ ID NO: 1826194 - DNA, 15 bp, Homo sapiens
ccctcacaaatctct

SEQ ID NO: 1826195 - DNA, 15 bp, Homo sapiens
cctcacaaatctctg

SEQ ID NO: 1826196 - DNA, 15 bp, Homo sapiens
ctcacaaatctctgc

SEQ ID NO: 1826197 - DNA, 15 bp, Homo sapiens
tcacaaatctctgca

SEQ ID NO: 1826198 - DNA, 15 bp, Homo sapiens
cacaaatctctgcat

SEQ ID NO: 1826199 - DNA, 15 bp, Homo sapiens
acaaatctctgcatc

SEQ ID NO: 1826200 - DNA, 15 bp, Homo sapiens
caaatctctgcatct

SEQ ID NO: 1826201 - DNA, 15 bp, Homo sapiens
aaatctctgcatctt

SEQ ID NO: 1826202 - DNA, 15 bp, Homo sapiens
aatctctgcatcttt

SEQ ID NO: 1826203 - DNA, 15 bp, Homo sapiens
atctctgcatctttc

SEQ ID NO: 1826204 - DNA, 15 bp, Homo sapiens
tctctgcatctttct

SEQ ID NO: 1826205 - DNA, 15 bp, Homo sapiens
ctctgcatctttctg

SEQ ID NO: 1826206 - DNA, 15 bp, Homo sapiens
tctgcatctttctga

SEQ ID NO: 1826207 - DNA, 15 bp, Homo sapiens
ctgcatctttctgac

SEQ ID NO: 1826208 - DNA, 15 bp, Homo sapiens
tgcatctttctgact

SEQ ID NO: 1826209 - DNA, 15 bp, Homo sapiens
gcatctttctgactt

SEQ ID NO: 1826210 - DNA, 15 bp, Homo sapiens
catctttctgacttt

SEQ ID NO: 1826211 - DNA, 15 bp, Homo sapiens
atctttctgactttt

SEQ ID NO: 1826212 - DNA, 15 bp, Homo sapiens
tctttctgacttttg

SEQ ID NO: 1826213 - DNA, 15 bp, Homo sapiens
ctttctgacttttgt

SEQ ID NO: 1826214 - DNA, 15 bp, Homo sapiens
tttctgacttttgtt

SEQ ID NO: 1826215 - DNA, 15 bp, Homo sapiens
ttctgacttttgttt

SEQ ID NO: 1826216 - DNA, 15 bp, Homo sapiens
tctgacttttgtttt

SEQ ID NO: 1826217 - DNA, 15 bp, Homo sapiens
ctgacttttgtttta

SEQ ID NO: 1826218 - DNA, 15 bp, Homo sapiens
tgacttttgttttac

SEQ ID NO: 1826219 - DNA, 15 bp, Homo sapiens
gacttttgttttaca

SEQ ID NO: 1826220 - DNA, 15 bp, Homo sapiens
acttttgttttacac

SEQ ID NO: 1826221 - DNA, 15 bp, Homo sapiens
cttttgttttacaca

SEQ ID NO: 1826222 - DNA, 15 bp, Homo sapiens
ttttgttttacacag

SEQ ID NO: 1826223 - DNA, 15 bp, Homo sapiens
tttgttttacacagt

SEQ ID NO: 1826224 - DNA, 15 bp, Homo sapiens
ttgttttacacagtt

SEQ ID NO: 1826225 - DNA, 15 bp, Homo sapiens
tgttttacacagttg

SEQ ID NO: 1826226 - DNA, 15 bp, Homo sapiens
gttttacacagttga

SEQ ID NO: 1826227 - DNA, 15 bp, Homo sapiens
ttttacacagttgaa

SEQ ID NO: 1826228 - DNA, 15 bp, Homo sapiens
tttacacagttgaat

SEQ ID NO: 1826229 - DNA, 15 bp, Homo sapiens
ttacacagttgaata

SEQ ID NO: 1826230 - DNA, 15 bp, Homo sapiens
tacacagttgaatat

SEQ ID NO: 1826231 - DNA, 15 bp, Homo sapiens
acacagttgaatatc

SEQ ID NO: 1826232 - DNA, 15 bp, Homo sapiens
cacagttgaatatcc

SEQ ID NO: 1826233 - DNA, 15 bp, Homo sapiens
acagttgaatatcca

SEQ ID NO: 1826234 - DNA, 15 bp, Homo sapiens
cagttgaatatccat

SEQ ID NO: 1826235 - DNA, 15 bp, Homo sapiens
agttgaatatccatg

SEQ ID NO: 1826236 - DNA, 15 bp, Homo sapiens
gttgaatatccatgt

SEQ ID NO: 1826237 - DNA, 15 bp, Homo sapiens
ttgaatatccatgtg

SEQ ID NO: 1826238 - DNA, 15 bp, Homo sapiens
tgaatatccatgtgg

SEQ ID NO: 1826239 - DNA, 15 bp, Homo sapiens
gaatatccatgtgga

SEQ ID NO: 1826240 - DNA, 15 bp, Homo sapiens
aatatccatgtggaa

SEQ ID NO: 1826241 - DNA, 15 bp, Homo sapiens
atatccatgtggaaa

SEQ ID NO: 1826242 - DNA, 15 bp, Homo sapiens
tatccatgtggaaaa

SEQ ID NO: 1826243 - DNA, 15 bp, Homo sapiens
atccatgtggaaaaa

SEQ ID NO: 1826244 - DNA, 15 bp, Homo sapiens
tccatgtggaaaaat

SEQ ID NO: 1826245 - DNA, 15 bp, Homo sapiens
ccatgtggaaaaata

SEQ ID NO: 1826246 - DNA, 15 bp, Homo sapiens
catgtggaaaaatac

SEQ ID NO: 1826247 - DNA, 15 bp, Homo sapiens
atgtggaaaaatacc

SEQ ID NO: 1826248 - DNA, 15 bp, Homo sapiens
tgtggaaaaatacct

SEQ ID NO: 1826249 - DNA, 15 bp, Homo sapiens
gtggaaaaataccta

SEQ ID NO: 1826250 - DNA, 15 bp, Homo sapiens
tggaaaaatacctat

SEQ ID NO: 1826251 - DNA, 15 bp, Homo sapiens
ggaaaaatacctatt

SEQ ID NO: 1826252 - DNA, 15 bp, Homo sapiens
gaaaaatacctattc

SEQ ID NO: 1826253 - DNA, 15 bp, Homo sapiens
aaaaatacctattct

SEQ ID NO: 1826254 - DNA, 15 bp, Homo sapiens
aaaatacctattcta

SEQ ID NO: 1826255 - DNA, 15 bp, Homo sapiens
aaatacctattctag

SEQ ID NO: 1826256 - DNA, 15 bp, Homo sapiens
aatacctattctaga

SEQ ID NO: 1826257 - DNA, 15 bp, Homo sapiens
atacctattctagaa

SEQ ID NO: 1826258 - DNA, 15 bp, Homo sapiens
tacctattctagaaa

SEQ ID NO: 1826259 - DNA, 15 bp, Homo sapiens
acctattctagaaaa

SEQ ID NO: 1826260 - DNA, 15 bp, Homo sapiens
cctattctagaaaaa

SEQ ID NO: 1826261 - DNA, 15 bp, Homo sapiens
ctattctagaaaaaa

SEQ ID NO: 1826262 - DNA, 15 bp, Homo sapiens
tattctagaaaaaag

SEQ ID NO: 1826263 - DNA, 15 bp, Homo sapiens
attctagaaaaaaga

SEQ ID NO: 1826264 - DNA, 15 bp, Homo sapiens
ttctagaaaaaagaa

SEQ ID NO: 1826265 - DNA, 15 bp, Homo sapiens
tctagaaaaaagaaa

SEQ ID NO: 1826266 - DNA, 15 bp, Homo sapiens
ctagaaaaaagaaat

SEQ ID NO: 1826267 - DNA, 15 bp, Homo sapiens
tagaaaaaagaaatg

SEQ ID NO: 1826268 - DNA, 15 bp, Homo sapiens
agaaaaaagaaatgc

SEQ ID NO: 1826269 - DNA, 15 bp, Homo sapiens
gaaaaaagaaatgcc

SEQ ID NO: 1826270 - DNA, 15 bp, Homo sapiens
aaaaagaaatgccag

SEQ ID NO: 1826271 - DNA, 15 bp, Homo sapiens
aaaagaaatgccagc

SEQ ID NO: 1826272 - DNA, 15 bp, Homo sapiens
aagaaatgccagcaa

SEQ ID NO: 1826273 - DNA, 15 bp, Homo sapiens
agaaatgccagcaaa

SEQ ID NO: 1826274 - DNA, 15 bp, Homo sapiens
gaaatgccagcaaac

SEQ ID NO: 1826275 - DNA, 15 bp, Homo sapiens
aaatgccagcaaacc

SEQ ID NO: 1826276 - DNA, 15 bp, Homo sapiens
aatgccagcaaaccc

SEQ ID NO: 1826277 - DNA, 15 bp, Homo sapiens
atgccagcaaacccc

SEQ ID NO: 1826278 - DNA, 15 bp, Homo sapiens
tgccagcaaacccca

SEQ ID NO: 1826279 - DNA, 15 bp, Homo sapiens
gccagcaaaccccaa

SEQ ID NO: 1826280 - DNA, 15 bp, Homo sapiens
ccagcaaaccccaag

SEQ ID NO: 1826281 - DNA, 15 bp, Homo sapiens
cagcaaaccccaagg

SEQ ID NO: 1826282 - DNA, 15 bp, Homo sapiens
agcaaaccccaaggc

SEQ ID NO: 1826283 - DNA, 15 bp, Homo sapiens
gcaaaccccaaggcc

SEQ ID NO: 1826284 - DNA, 15 bp, Homo sapiens
caaaccccaaggccg

SEQ ID NO: 1826285 - DNA, 15 bp, Homo sapiens
aaaccccaaggccga

SEQ ID NO: 1826286 - DNA, 15 bp, Homo sapiens
aaccccaaggccgaa

SEQ ID NO: 1826287 - DNA, 15 bp, Homo sapiens
accccaaggccgaat

SEQ ID NO: 1826288 - DNA, 15 bp, Homo sapiens
ccccaaggccgaatt

SEQ ID NO: 1826289 - DNA, 15 bp, Homo sapiens
cccaaggccgaattg

SEQ ID NO: 1826290 - DNA, 15 bp, Homo sapiens
ccaaggccgaattgt

SEQ ID NO: 1826291 - DNA, 15 bp, Homo sapiens
caaggccgaattgtg

SEQ ID NO: 1826292 - DNA, 15 bp, Homo sapiens
aaggccgaattgtgg

SEQ ID NO: 1826293 - DNA, 15 bp, Homo sapiens
aggccgaattgtggg

SEQ ID NO: 1826294 - DNA, 15 bp, Homo sapiens
ggccgaattgtgggg

SEQ ID NO: 1826295 - DNA, 15 bp, Homo sapiens
gccgaattgtggggg

SEQ ID NO: 1826296 - DNA, 15 bp, Homo sapiens
ccgaattgtgggggg

SEQ ID NO: 1826297 - DNA, 15 bp, Homo sapiens
cgaattgtggggggc

SEQ ID NO: 1826298 - DNA, 15 bp, Homo sapiens
gaattgtggggggca

SEQ ID NO: 1826299 - DNA, 15 bp, Homo sapiens
aattgtggggggcaa

SEQ ID NO: 1826300 - DNA, 15 bp, Homo sapiens
attgtggggggcaag

SEQ ID NO: 1826301 - DNA, 15 bp, Homo sapiens
ttgtggggggcaagg

SEQ ID NO: 1826302 - DNA, 15 bp, Homo sapiens
tgtggggggcaaggt

SEQ ID NO: 1826303 - DNA, 15 bp, Homo sapiens
gtggggggcaaggtg

SEQ ID NO: 1826304 - DNA, 15 bp, Homo sapiens
tggggggcaaggtgt

SEQ ID NO: 1826305 - DNA, 15 bp, Homo sapiens
ggggggcaaggtgtg

SEQ ID NO: 1826306 - DNA, 15 bp, Homo sapiens
gggggcaaggtgtgc

SEQ ID NO: 1826307 - DNA, 15 bp, Homo sapiens
ggggcaaggtgtgcc

SEQ ID NO: 1826308 - DNA, 15 bp, Homo sapiens
gggcaaggtgtgccc

SEQ ID NO: 1826309 - DNA, 15 bp, Homo sapiens
ggcaaggtgtgcccc

SEQ ID NO: 1826310 - DNA, 15 bp, Homo sapiens
gcaaggtgtgcccca

SEQ ID NO: 1826311 - DNA, 15 bp, Homo sapiens
caaggtgtgccccaa

SEQ ID NO: 1826312 - DNA, 15 bp, Homo sapiens
aaggtgtgccccaaa

SEQ ID NO: 1826313 - DNA, 15 bp, Homo sapiens
aggtgtgccccaaag

SEQ ID NO: 1826314 - DNA, 15 bp, Homo sapiens
ggtgtgccccaaagg

SEQ ID NO: 1826315 - DNA, 15 bp, Homo sapiens
gtgtgccccaaaggg

SEQ ID NO: 1826316 - DNA, 15 bp, Homo sapiens
tgtgccccaaagggg

SEQ ID NO: 1826317 - DNA, 15 bp, Homo sapiens
gtgccccaaagggga

SEQ ID NO: 1826318 - DNA, 15 bp, Homo sapiens
tgccccaaaggggag

SEQ ID NO: 1826319 - DNA, 15 bp, Homo sapiens
gccccaaaggggagt

SEQ ID NO: 1826320 - DNA, 15 bp, Homo sapiens
ccccaaaggggagtg

SEQ ID NO: 1826321 - DNA, 15 bp, Homo sapiens
cccaaaggggagtgt

SEQ ID NO: 1826322 - DNA, 15 bp, Homo sapiens
ccaaaggggagtgtc

SEQ ID NO: 1826323 - DNA, 15 bp, Homo sapiens
caaaggggagtgtcc

SEQ ID NO: 1826324 - DNA, 15 bp, Homo sapiens
aaaggggagtgtcca

SEQ ID NO: 1826325 - DNA, 15 bp, Homo sapiens
aaggggagtgtccat

SEQ ID NO: 1826326 - DNA, 15 bp, Homo sapiens
aggggagtgtccatg

SEQ ID NO: 1826327 - DNA, 15 bp, Homo sapiens
ggggagtgtccatgg

SEQ ID NO: 1826328 - DNA, 15 bp, Homo sapiens
gggagtgtccatggc

SEQ ID NO: 1826329 - DNA, 15 bp, Homo sapiens
ggagtgtccatggca

SEQ ID NO: 1826330 - DNA, 15 bp, Homo sapiens
gagtgtccatggcag

SEQ ID NO: 1826331 - DNA, 15 bp, Homo sapiens
agtgtccatggcagg

SEQ ID NO: 1826332 - DNA, 15 bp, Homo sapiens
gtgtccatggcaggt

SEQ ID NO: 1826333 - DNA, 15 bp, Homo sapiens
tgtccatggcaggta

SEQ ID NO: 1826334 - DNA, 15 bp, Homo sapiens
gtccatggcaggtaa

SEQ ID NO: 1826335 - DNA, 15 bp, Homo sapiens
tccatggcaggtaag

SEQ ID NO: 1826336 - DNA, 15 bp, Homo sapiens
ccatggcaggtaagg

SEQ ID NO: 1826337 - DNA, 15 bp, Homo sapiens
catggcaggtaaggc

SEQ ID NO: 1826338 - DNA, 15 bp, Homo sapiens
atggcaggtaaggct

SEQ ID NO: 1826339 - DNA, 15 bp, Homo sapiens
tggcaggtaaggctt

SEQ ID NO: 1826340 - DNA, 15 bp, Homo sapiens
ggcaggtaaggcttc

SEQ ID NO: 1826341 - DNA, 15 bp, Homo sapiens
gcaggtaaggcttcc

SEQ ID NO: 1826342 - DNA, 15 bp, Homo sapiens
caggtaaggcttccc

SEQ ID NO: 1826343 - DNA, 15 bp, Homo sapiens
aggtaaggcttcccc

SEQ ID NO: 1826344 - DNA, 15 bp, Homo sapiens
ggtaaggcttcccct

SEQ ID NO: 1826345 - DNA, 15 bp, Homo sapiens
gtaaggcttcccctg

SEQ ID NO: 1826346 - DNA, 15 bp, Homo sapiens
taaggcttcccctgg

SEQ ID NO: 1826347 - DNA, 15 bp, Homo sapiens
aaggcttcccctggc

SEQ ID NO: 1826348 - DNA, 15 bp, Homo sapiens
aggcttcccctggct

SEQ ID NO: 1826349 - DNA, 15 bp, Homo sapiens
ggcttcccctggctt

SEQ ID NO: 1826350 - DNA, 15 bp, Homo sapiens
gcttcccctggcttc

SEQ ID NO: 1826351 - DNA, 15 bp, Homo sapiens
cttcccctggcttca

SEQ ID NO: 1826352 - DNA, 15 bp, Homo sapiens
ttcccctggcttcag

SEQ ID NO: 1826353 - DNA, 15 bp, Homo sapiens
tcccctggcttcagg

SEQ ID NO: 1826354 - DNA, 15 bp, Homo sapiens
cccctggcttcagga

SEQ ID NO: 1826355 - DNA, 15 bp, Homo sapiens
ccctggcttcaggat

SEQ ID NO: 1826356 - DNA, 15 bp, Homo sapiens
cctggcttcaggatt

SEQ ID NO: 1826357 - DNA, 15 bp, Homo sapiens
ctggcttcaggattc

SEQ ID NO: 1826358 - DNA, 15 bp, Homo sapiens
tggcttcaggattcc

SEQ ID NO: 1826359 - DNA, 15 bp, Homo sapiens
ggcttcaggattcca

SEQ ID NO: 1826360 - DNA, 15 bp, Homo sapiens
gcttcaggattccaa

SEQ ID NO: 1826361 - DNA, 15 bp, Homo sapiens
cttcaggattccaag

SEQ ID NO: 1826362 - DNA, 15 bp, Homo sapiens
ttcaggattccaagc

SEQ ID NO: 1826363 - DNA, 15 bp, Homo sapiens
tcaggattccaagcc

SEQ ID NO: 1826364 - DNA, 15 bp, Homo sapiens
caggattccaagccc

SEQ ID NO: 1826365 - DNA, 15 bp, Homo sapiens
aggattccaagccct

SEQ ID NO: 1826366 - DNA, 15 bp, Homo sapiens
ggattccaagccctg

SEQ ID NO: 1826367 - DNA, 15 bp, Homo sapiens
gattccaagccctga

SEQ ID NO: 1826368 - DNA, 15 bp, Homo sapiens
attccaagccctgag

SEQ ID NO: 1826369 - DNA, 15 bp, Homo sapiens
ttccaagccctgagg

SEQ ID NO: 1826370 - DNA, 15 bp, Homo sapiens
tccaagccctgaggg

SEQ ID NO: 1826371 - DNA, 15 bp, Homo sapiens
ccaagccctgagggt

SEQ ID NO: 1826372 - DNA, 15 bp, Homo sapiens
caagccctgagggtc

SEQ ID NO: 1826373 - DNA, 15 bp, Homo sapiens
aagccctgagggtct

SEQ ID NO: 1826374 - DNA, 15 bp, Homo sapiens
agccctgagggtctt

SEQ ID NO: 1826375 - DNA, 15 bp, Homo sapiens
gccctgagggtcttg

SEQ ID NO: 1826376 - DNA, 15 bp, Homo sapiens
ccctgagggtcttga

SEQ ID NO: 1826377 - DNA, 15 bp, Homo sapiens
cctgagggtcttgaa

SEQ ID NO: 1826378 - DNA, 15 bp, Homo sapiens
ctgagggtcttgaag

SEQ ID NO: 1826379 - DNA, 15 bp, Homo sapiens
tgagggtcttgaagc

SEQ ID NO: 1826380 - DNA, 15 bp, Homo sapiens
gagggtcttgaagcc

SEQ ID NO: 1826381 - DNA, 15 bp, Homo sapiens
agggtcttgaagcct

SEQ ID NO: 1826382 - DNA, 15 bp, Homo sapiens
gggtcttgaagcctt

SEQ ID NO: 1826383 - DNA, 15 bp, Homo sapiens
ggtcttgaagccttt

SEQ ID NO: 1826384 - DNA, 15 bp, Homo sapiens
gtcttgaagcctttt

SEQ ID NO: 1826385 - DNA, 15 bp, Homo sapiens
tcttgaagccttttg

SEQ ID NO: 1826386 - DNA, 15 bp, Homo sapiens
cttgaagccttttga

SEQ ID NO: 1826387 - DNA, 15 bp, Homo sapiens
ttgaagccttttgaa

SEQ ID NO: 1826388 - DNA, 15 bp, Homo sapiens
tgaagccttttgaat

SEQ ID NO: 1826389 - DNA, 15 bp, Homo sapiens
gaagccttttgaatg

SEQ ID NO: 1826390 - DNA, 15 bp, Homo sapiens
aagccttttgaatgt

SEQ ID NO: 1826391 - DNA, 15 bp, Homo sapiens
agccttttgaatgtg

SEQ ID NO: 1826392 - DNA, 15 bp, Homo sapiens
gccttttgaatgtga

SEQ ID NO: 1826393 - DNA, 15 bp, Homo sapiens
ccttttgaatgtgaa

SEQ ID NO: 1826394 - DNA, 15 bp, Homo sapiens
cttttgaatgtgaac

SEQ ID NO: 1826395 - DNA, 15 bp, Homo sapiens
ttttgaatgtgaaca

SEQ ID NO: 1826396 - DNA, 15 bp, Homo sapiens
tttgaatgtgaacaa

SEQ ID NO: 1826397 - DNA, 15 bp, Homo sapiens
ttgaatgtgaacaac

SEQ ID NO: 1826398 - DNA, 15 bp, Homo sapiens
tgaatgtgaacaaca

SEQ ID NO: 1826399 - DNA, 15 bp, Homo sapiens
gaatgtgaacaacag

SEQ ID NO: 1826400 - DNA, 15 bp, Homo sapiens
aatgtgaacaacagc

SEQ ID NO: 1826401 - DNA, 15 bp, Homo sapiens
atgtgaacaacagct

SEQ ID NO: 1826402 - DNA, 15 bp, Homo sapiens
tgtgaacaacagctc

SEQ ID NO: 1826403 - DNA, 15 bp, Homo sapiens
gtgaacaacagctct

SEQ ID NO: 1826404 - DNA, 15 bp, Homo sapiens
tgaacaacagctctg

SEQ ID NO: 1826405 - DNA, 15 bp, Homo sapiens
gaacaacagctctgg

SEQ ID NO: 1826406 - DNA, 15 bp, Homo sapiens
aacaacagctctgga

SEQ ID NO: 1826407 - DNA, 15 bp, Homo sapiens
acaacagctctggaa

SEQ ID NO: 1826408 - DNA, 15 bp, Homo sapiens
caacagctctggaag

SEQ ID NO: 1826409 - DNA, 15 bp, Homo sapiens
aacagctctggaagg

SEQ ID NO: 1826410 - DNA, 15 bp, Homo sapiens
acagctctggaaggg

SEQ ID NO: 1826411 - DNA, 15 bp, Homo sapiens
cagctctggaaggga

SEQ ID NO: 1826412 - DNA, 15 bp, Homo sapiens
agctctggaagggaa

SEQ ID NO: 1826413 - DNA, 15 bp, Homo sapiens
gctctggaagggaaa

SEQ ID NO: 1826414 - DNA, 15 bp, Homo sapiens
ctctggaagggaaaa

SEQ ID NO: 1826415 - DNA, 15 bp, Homo sapiens
tctggaagggaaaat

SEQ ID NO: 1826416 - DNA, 15 bp, Homo sapiens
ctggaagggaaaatg

SEQ ID NO: 1826417 - DNA, 15 bp, Homo sapiens
tggaagggaaaatgg

SEQ ID NO: 1826418 - DNA, 15 bp, Homo sapiens
ggaagggaaaatggg

SEQ ID NO: 1826419 - DNA, 15 bp, Homo sapiens
gaagggaaaatgggc

SEQ ID NO: 1826420 - DNA, 15 bp, Homo sapiens
aagggaaaatgggca

SEQ ID NO: 1826421 - DNA, 15 bp, Homo sapiens
agggaaaatgggcag

SEQ ID NO: 1826422 - DNA, 15 bp, Homo sapiens
gggaaaatgggcagg

SEQ ID NO: 1826423 - DNA, 15 bp, Homo sapiens
ggaaaatgggcaggt

SEQ ID NO: 1826424 - DNA, 15 bp, Homo sapiens
gaaaatgggcaggtc

SEQ ID NO: 1826425 - DNA, 15 bp, Homo sapiens
aaaatgggcaggtca

SEQ ID NO: 1826426 - DNA, 15 bp, Homo sapiens
aaatgggcaggtcag

SEQ ID NO: 1826427 - DNA, 15 bp, Homo sapiens
aatgggcaggtcagc

SEQ ID NO: 1826428 - DNA, 15 bp, Homo sapiens
atgggcaggtcagcc

SEQ ID NO: 1826429 - DNA, 15 bp, Homo sapiens
tgggcaggtcagccc

SEQ ID NO: 1826430 - DNA, 15 bp, Homo sapiens
gggcaggtcagcccc

SEQ ID NO: 1826431 - DNA, 15 bp, Homo sapiens
ggcaggtcagcccca

SEQ ID NO: 1826432 - DNA, 15 bp, Homo sapiens
gcaggtcagccccaa

SEQ ID NO: 1826433 - DNA, 15 bp, Homo sapiens
caggtcagccccaag

SEQ ID NO: 1826434 - DNA, 15 bp, Homo sapiens
aggtcagccccaagc

SEQ ID NO: 1826435 - DNA, 15 bp, Homo sapiens
ggtcagccccaagcc

SEQ ID NO: 1826436 - DNA, 15 bp, Homo sapiens
gtcagccccaagccc

SEQ ID NO: 1826437 - DNA, 15 bp, Homo sapiens
tcagccccaagccca

SEQ ID NO: 1826438 - DNA, 15 bp, Homo sapiens
cagccccaagcccac

SEQ ID NO: 1826439 - DNA, 15 bp, Homo sapiens
agccccaagcccacc

SEQ ID NO: 1826440 - DNA, 15 bp, Homo sapiens
gccccaagcccacca

SEQ ID NO: 1826441 - DNA, 15 bp, Homo sapiens
ccccaagcccaccag

SEQ ID NO: 1826442 - DNA, 15 bp, Homo sapiens
cccaagcccaccagg

SEQ ID NO: 1826443 - DNA, 15 bp, Homo sapiens
ccaagcccaccaggc

SEQ ID NO: 1826444 - DNA, 15 bp, Homo sapiens
caagcccaccaggct

SEQ ID NO: 1826445 - DNA, 15 bp, Homo sapiens
aagcccaccaggctc

SEQ ID NO: 1826446 - DNA, 15 bp, Homo sapiens
agcccaccaggctcc

SEQ ID NO: 1826447 - DNA, 15 bp, Homo sapiens
gcccaccaggctcca

SEQ ID NO: 1826448 - DNA, 15 bp, Homo sapiens
cccaccaggctccaa

SEQ ID NO: 1826449 - DNA, 15 bp, Homo sapiens
ccaccaggctccaag

SEQ ID NO: 1826450 - DNA, 15 bp, Homo sapiens
caccaggctccaagt

SEQ ID NO: 1826451 - DNA, 15 bp, Homo sapiens
accaggctccaagtc

SEQ ID NO: 1826452 - DNA, 15 bp, Homo sapiens
ccaggctccaagtca

SEQ ID NO: 1826453 - DNA, 15 bp, Homo sapiens
caggctccaagtcag

SEQ ID NO: 1826454 - DNA, 15 bp, Homo sapiens
aggctccaagtcagc

SEQ ID NO: 1826455 - DNA, 15 bp, Homo sapiens
ggctccaagtcagca

SEQ ID NO: 1826456 - DNA, 15 bp, Homo sapiens
gctccaagtcagcac

SEQ ID NO: 1826457 - DNA, 15 bp, Homo sapiens
ctccaagtcagcaca

SEQ ID NO: 1826458 - DNA, 15 bp, Homo sapiens
tccaagtcagcacac

SEQ ID NO: 1826459 - DNA, 15 bp, Homo sapiens
ccaagtcagcacacc

SEQ ID NO: 1826460 - DNA, 15 bp, Homo sapiens
caagtcagcacacct

SEQ ID NO: 1826461 - DNA, 15 bp, Homo sapiens
aagtcagcacaccta

SEQ ID NO: 1826462 - DNA, 15 bp, Homo sapiens
agtcagcacacctag

SEQ ID NO: 1826463 - DNA, 15 bp, Homo sapiens
gtcagcacacctagc

SEQ ID NO: 1826464 - DNA, 15 bp, Homo sapiens
tcagcacacctagca

SEQ ID NO: 1826465 - DNA, 15 bp, Homo sapiens
cagcacacctagcac

SEQ ID NO: 1826466 - DNA, 15 bp, Homo sapiens
agcacacctagcacc

SEQ ID NO: 1826467 - DNA, 15 bp, Homo sapiens
gcacacctagcacct

SEQ ID NO: 1826468 - DNA, 15 bp, Homo sapiens
cacacctagcacctc

SEQ ID NO: 1826469 - DNA, 15 bp, Homo sapiens
acacctagcacctcc

SEQ ID NO: 1826470 - DNA, 15 bp, Homo sapiens
cacctagcacctcca

SEQ ID NO: 1826471 - DNA, 15 bp, Homo sapiens
acctagcacctccag

SEQ ID NO: 1826472 - DNA, 15 bp, Homo sapiens
cctagcacctccagc

SEQ ID NO: 1826473 - DNA, 15 bp, Homo sapiens
ctagcacctccagct

SEQ ID NO: 1826474 - DNA, 15 bp, Homo sapiens
tagcacctccagctc

SEQ ID NO: 1826475 - DNA, 15 bp, Homo sapiens
agcacctccagctcg

SEQ ID NO: 1826476 - DNA, 15 bp, Homo sapiens
gcacctccagctcgc

SEQ ID NO: 1826477 - DNA, 15 bp, Homo sapiens
cacctccagctcgcg

SEQ ID NO: 1826478 - DNA, 15 bp, Homo sapiens
acctccagctcgcgg

SEQ ID NO: 1826479 - DNA, 15 bp, Homo sapiens
cctccagctcgcggc

SEQ ID NO: 1826480 - DNA, 15 bp, Homo sapiens
ctccagctcgcggca

SEQ ID NO: 1826481 - DNA, 15 bp, Homo sapiens
tccagctcgcggcac

SEQ ID NO: 1826482 - DNA, 15 bp, Homo sapiens
ccagctcgcggcacc

SEQ ID NO: 1826483 - DNA, 15 bp, Homo sapiens
cagctcgcggcaccc

SEQ ID NO: 1826484 - DNA, 15 bp, Homo sapiens
agctcgcggcacccc

SEQ ID NO: 1826485 - DNA, 15 bp, Homo sapiens
gctcgcggcaccccc

SEQ ID NO: 1826486 - DNA, 15 bp, Homo sapiens
ctcgcggcaccccca

SEQ ID NO: 1826487 - DNA, 15 bp, Homo sapiens
tcgcggcacccccat

SEQ ID NO: 1826488 - DNA, 15 bp, Homo sapiens
cgcggcacccccatg

SEQ ID NO: 1826489 - DNA, 15 bp, Homo sapiens
gcggcacccccatgc

SEQ ID NO: 1826490 - DNA, 15 bp, Homo sapiens
cggcacccccatgct

SEQ ID NO: 1826491 - DNA, 15 bp, Homo sapiens
ggcacccccatgctt

SEQ ID NO: 1826492 - DNA, 15 bp, Homo sapiens
gcacccccatgcttt

SEQ ID NO: 1826493 - DNA, 15 bp, Homo sapiens
cacccccatgctttt

SEQ ID NO: 1826494 - DNA, 15 bp, Homo sapiens
acccccatgctttta

SEQ ID NO: 1826495 - DNA, 15 bp, Homo sapiens
cccccatgcttttag

SEQ ID NO: 1826496 - DNA, 15 bp, Homo sapiens
ccccatgcttttagt

SEQ ID NO: 1826497 - DNA, 15 bp, Homo sapiens
cccatgcttttagtg

SEQ ID NO: 1826498 - DNA, 15 bp, Homo sapiens
ccatgcttttagtgg

SEQ ID NO: 1826499 - DNA, 15 bp, Homo sapiens
catgcttttagtggg

SEQ ID NO: 1826500 - DNA, 15 bp, Homo sapiens
atgcttttagtgggg

SEQ ID NO: 1826501 - DNA, 15 bp, Homo sapiens
tgcttttagtggggc

SEQ ID NO: 1826502 - DNA, 15 bp, Homo sapiens
gcttttagtggggca

SEQ ID NO: 1826503 - DNA, 15 bp, Homo sapiens
cttttagtggggcaa

SEQ ID NO: 1826504 - DNA, 15 bp, Homo sapiens
ttttagtggggcaag

SEQ ID NO: 1826505 - DNA, 15 bp, Homo sapiens
tttagtggggcaagg

SEQ ID NO: 1826506 - DNA, 15 bp, Homo sapiens
ttagtggggcaagga

SEQ ID NO: 1826507 - DNA, 15 bp, Homo sapiens
tagtggggcaaggaa

SEQ ID NO: 1826508 - DNA, 15 bp, Homo sapiens
agtggggcaaggaag

SEQ ID NO: 1826509 - DNA, 15 bp, Homo sapiens
gtggggcaaggaagg

SEQ ID NO: 1826510 - DNA, 15 bp, Homo sapiens
tggggcaaggaagga

SEQ ID NO: 1826511 - DNA, 15 bp, Homo sapiens
ggggcaaggaaggag

SEQ ID NO: 1826512 - DNA, 15 bp, Homo sapiens
gggcaaggaaggaga

SEQ ID NO: 1826513 - DNA, 15 bp, Homo sapiens
ggcaaggaaggagaa

SEQ ID NO: 1826514 - DNA, 15 bp, Homo sapiens
gcaaggaaggagaaa

SEQ ID NO: 1826515 - DNA, 15 bp, Homo sapiens
caaggaaggagaaaa

SEQ ID NO: 1826516 - DNA, 15 bp, Homo sapiens
aaggaaggagaaaag

SEQ ID NO: 1826517 - DNA, 15 bp, Homo sapiens
aggaaggagaaaaga

SEQ ID NO: 1826518 - DNA, 15 bp, Homo sapiens
ggaaggagaaaagaa

SEQ ID NO: 1826519 - DNA, 15 bp, Homo sapiens
gaaggagaaaagaaa

SEQ ID NO: 1826520 - DNA, 15 bp, Homo sapiens
aaggagaaaagaaaa

SEQ ID NO: 1826521 - DNA, 15 bp, Homo sapiens
aggagaaaagaaaac

SEQ ID NO: 1826522 - DNA, 15 bp, Homo sapiens
ggagaaaagaaaacg

SEQ ID NO: 1826523 - DNA, 15 bp, Homo sapiens
gagaaaagaaaacga

SEQ ID NO: 1826524 - DNA, 15 bp, Homo sapiens
agaaaagaaaacgac

SEQ ID NO: 1826525 - DNA, 15 bp, Homo sapiens
gaaaagaaaacgaca

SEQ ID NO: 1826526 - DNA, 15 bp, Homo sapiens
aaaagaaaacgacac

SEQ ID NO: 1826527 - DNA, 15 bp, Homo sapiens
aaagaaaacgacact

SEQ ID NO: 1826528 - DNA, 15 bp, Homo sapiens
aagaaaacgacactc

SEQ ID NO: 1826529 - DNA, 15 bp, Homo sapiens
agaaaacgacactca

SEQ ID NO: 1826530 - DNA, 15 bp, Homo sapiens
gaaaacgacactcac

SEQ ID NO: 1826531 - DNA, 15 bp, Homo sapiens
aaaacgacactcact

SEQ ID NO: 1826532 - DNA, 15 bp, Homo sapiens
aaacgacactcactg

SEQ ID NO: 1826533 - DNA, 15 bp, Homo sapiens
aacgacactcactga

SEQ ID NO: 1826534 - DNA, 15 bp, Homo sapiens
acgacactcactgag

SEQ ID NO: 1826535 - DNA, 15 bp, Homo sapiens
cgacactcactgagg

SEQ ID NO: 1826536 - DNA, 15 bp, Homo sapiens
gacactcactgaggg

SEQ ID NO: 1826537 - DNA, 15 bp, Homo sapiens
acactcactgagggt

SEQ ID NO: 1826538 - DNA, 15 bp, Homo sapiens
cactcactgagggtc

SEQ ID NO: 1826539 - DNA, 15 bp, Homo sapiens
actcactgagggtct

SEQ ID NO: 1826540 - DNA, 15 bp, Homo sapiens
ctcactgagggtcta

SEQ ID NO: 1826541 - DNA, 15 bp, Homo sapiens
tcactgagggtctac

SEQ ID NO: 1826542 - DNA, 15 bp, Homo sapiens
cactgagggtctacc

SEQ ID NO: 1826543 - DNA, 15 bp, Homo sapiens
actgagggtctaccc

SEQ ID NO: 1826544 - DNA, 15 bp, Homo sapiens
ctgagggtctaccct

SEQ ID NO: 1826545 - DNA, 15 bp, Homo sapiens
tgagggtctaccctg

SEQ ID NO: 1826546 - DNA, 15 bp, Homo sapiens
gagggtctaccctgt

SEQ ID NO: 1826547 - DNA, 15 bp, Homo sapiens
agggtctaccctgtg

SEQ ID NO: 1826548 - DNA, 15 bp, Homo sapiens
gggtctaccctgtgc

SEQ ID NO: 1826549 - DNA, 15 bp, Homo sapiens
ggtctaccctgtgca

SEQ ID NO: 1826550 - DNA, 15 bp, Homo sapiens
gtctaccctgtgcag

SEQ ID NO: 1826551 - DNA, 15 bp, Homo sapiens
tctaccctgtgcaga

SEQ ID NO: 1826552 - DNA, 15 bp, Homo sapiens
ctaccctgtgcagag

SEQ ID NO: 1826553 - DNA, 15 bp, Homo sapiens
taccctgtgcagaga

SEQ ID NO: 1826554 - DNA, 15 bp, Homo sapiens
accctgtgcagagaa

SEQ ID NO: 1826555 - DNA, 15 bp, Homo sapiens
ccctgtgcagagaac

SEQ ID NO: 1826556 - DNA, 15 bp, Homo sapiens
cctgtgcagagaacc

SEQ ID NO: 1826557 - DNA, 15 bp, Homo sapiens
ctgtgcagagaaccc

SEQ ID NO: 1826558 - DNA, 15 bp, Homo sapiens
tgtgcagagaaccct

SEQ ID NO: 1826559 - DNA, 15 bp, Homo sapiens
gtgcagagaaccctg

SEQ ID NO: 1826560 - DNA, 15 bp, Homo sapiens
tgcagagaaccctgc

SEQ ID NO: 1826561 - DNA, 15 bp, Homo sapiens
gcagagaaccctgcg

SEQ ID NO: 1826562 - DNA, 15 bp, Homo sapiens
cagagaaccctgcga

SEQ ID NO: 1826563 - DNA, 15 bp, Homo sapiens
agagaaccctgcgag

SEQ ID NO: 1826564 - DNA, 15 bp, Homo sapiens
gagaaccctgcgaga

SEQ ID NO: 1826565 - DNA, 15 bp, Homo sapiens
agaaccctgcgagat

SEQ ID NO: 1826566 - DNA, 15 bp, Homo sapiens
gaaccctgcgagatg

SEQ ID NO: 1826567 - DNA, 15 bp, Homo sapiens
aaccctgcgagatgc

SEQ ID NO: 1826568 - DNA, 15 bp, Homo sapiens
accctgcgagatgcc

SEQ ID NO: 1826569 - DNA, 15 bp, Homo sapiens
ccctgcgagatgccc

SEQ ID NO: 1826570 - DNA, 15 bp, Homo sapiens
cctgcgagatgcccc

SEQ ID NO: 1826571 - DNA, 15 bp, Homo sapiens
ctgcgagatgcccca

SEQ ID NO: 1826572 - DNA, 15 bp, Homo sapiens
tgcgagatgccccat

SEQ ID NO: 1826573 - DNA, 15 bp, Homo sapiens
gcgagatgccccatc

SEQ ID NO: 1826574 - DNA, 15 bp, Homo sapiens
cgagatgccccatcc

SEQ ID NO: 1826575 - DNA, 15 bp, Homo sapiens
gagatgccccatccg

SEQ ID NO: 1826576 - DNA, 15 bp, Homo sapiens
agatgccccatccga

SEQ ID NO: 1826577 - DNA, 15 bp, Homo sapiens
gatgccccatccgag

SEQ ID NO: 1826578 - DNA, 15 bp, Homo sapiens
atgccccatccgagt

SEQ ID NO: 1826579 - DNA, 15 bp, Homo sapiens
tgccccatccgagtt

SEQ ID NO: 1826580 - DNA, 15 bp, Homo sapiens
gccccatccgagttg

SEQ ID NO: 1826581 - DNA, 15 bp, Homo sapiens
ccccatccgagttgt

SEQ ID NO: 1826582 - DNA, 15 bp, Homo sapiens
cccatccgagttgtc

SEQ ID NO: 1826583 - DNA, 15 bp, Homo sapiens
ccatccgagttgtca

SEQ ID NO: 1826584 - DNA, 15 bp, Homo sapiens
catccgagttgtcac

SEQ ID NO: 1826585 - DNA, 15 bp, Homo sapiens
atccgagttgtcacg

SEQ ID NO: 1826586 - DNA, 15 bp, Homo sapiens
tccgagttgtcacgt

SEQ ID NO: 1826587 - DNA, 15 bp, Homo sapiens
ccgagttgtcacgtc

SEQ ID NO: 1826588 - DNA, 15 bp, Homo sapiens
cgagttgtcacgtcg

SEQ ID NO: 1826589 - DNA, 15 bp, Homo sapiens
gagttgtcacgtcgt

SEQ ID NO: 1826590 - DNA, 15 bp, Homo sapiens
agttgtcacgtcgtc

SEQ ID NO: 1826591 - DNA, 15 bp, Homo sapiens
gttgtcacgtcgtcc

SEQ ID NO: 1826592 - DNA, 15 bp, Homo sapiens
ttgtcacgtcgtcct

SEQ ID NO: 1826593 - DNA, 15 bp, Homo sapiens
tgtcacgtcgtcctc

SEQ ID NO: 1826594 - DNA, 15 bp, Homo sapiens
gtcacgtcgtcctca

SEQ ID NO: 1826595 - DNA, 15 bp, Homo sapiens
tcacgtcgtcctcac

SEQ ID NO: 1826596 - DNA, 15 bp, Homo sapiens
cacgtcgtcctcacg

SEQ ID NO: 1826597 - DNA, 15 bp, Homo sapiens
acgtcgtcctcacgg

SEQ ID NO: 1826598 - DNA, 15 bp, Homo sapiens
cgtcgtcctcacggt

SEQ ID NO: 1826599 - DNA, 15 bp, Homo sapiens
gtcgtcctcacggtt

SEQ ID NO: 1826600 - DNA, 15 bp, Homo sapiens
tcgtcctcacggtta

SEQ ID NO: 1826601 - DNA, 15 bp, Homo sapiens
cgtcctcacggttac

SEQ ID NO: 1826602 - DNA, 15 bp, Homo sapiens
gtcctcacggttact

SEQ ID NO: 1826603 - DNA, 15 bp, Homo sapiens
tcctcacggttactc

SEQ ID NO: 1826604 - DNA, 15 bp, Homo sapiens
cctcacggttactct

SEQ ID NO: 1826605 - DNA, 15 bp, Homo sapiens
ctcacggttactctt

SEQ ID NO: 1826606 - DNA, 15 bp, Homo sapiens
tcacggttactcttt

SEQ ID NO: 1826607 - DNA, 15 bp, Homo sapiens
cacggttactctttg

SEQ ID NO: 1826608 - DNA, 15 bp, Homo sapiens
acggttactctttga

SEQ ID NO: 1826609 - DNA, 15 bp, Homo sapiens
cggttactctttgag

SEQ ID NO: 1826610 - DNA, 15 bp, Homo sapiens
ggttactctttgagg

SEQ ID NO: 1826611 - DNA, 15 bp, Homo sapiens
gttactctttgaggt

SEQ ID NO: 1826612 - DNA, 15 bp, Homo sapiens
ttactctttgaggtg

SEQ ID NO: 1826613 - DNA, 15 bp, Homo sapiens
tactctttgaggtgg

SEQ ID NO: 1826614 - DNA, 15 bp, Homo sapiens
actctttgaggtggg

SEQ ID NO: 1826615 - DNA, 15 bp, Homo sapiens
ctctttgaggtggga

SEQ ID NO: 1826616 - DNA, 15 bp, Homo sapiens
tctttgaggtgggat

SEQ ID NO: 1826617 - DNA, 15 bp, Homo sapiens
ctttgaggtgggatc

SEQ ID NO: 1826618 - DNA, 15 bp, Homo sapiens
tttgaggtgggatct

SEQ ID NO: 1826619 - DNA, 15 bp, Homo sapiens
ttgaggtgggatctt

SEQ ID NO: 1826620 - DNA, 15 bp, Homo sapiens
tgaggtgggatcttt

SEQ ID NO: 1826621 - DNA, 15 bp, Homo sapiens
gaggtgggatctttg

SEQ ID NO: 1826622 - DNA, 15 bp, Homo sapiens
aggtgggatctttgc

SEQ ID NO: 1826623 - DNA, 15 bp, Homo sapiens
ggtgggatctttgcc

SEQ ID NO: 1826624 - DNA, 15 bp, Homo sapiens
gtgggatctttgcct

SEQ ID NO: 1826625 - DNA, 15 bp, Homo sapiens
tgggatctttgcctg

SEQ ID NO: 1826626 - DNA, 15 bp, Homo sapiens
gggatctttgcctga

SEQ ID NO: 1826627 - DNA, 15 bp, Homo sapiens
ggatctttgcctgat

SEQ ID NO: 1826628 - DNA, 15 bp, Homo sapiens
gatctttgcctgatc

SEQ ID NO: 1826629 - DNA, 15 bp, Homo sapiens
atctttgcctgatct

SEQ ID NO: 1826630 - DNA, 15 bp, Homo sapiens
tctttgcctgatctt

SEQ ID NO: 1826631 - DNA, 15 bp, Homo sapiens
ctttgcctgatcttt

SEQ ID NO: 1826632 - DNA, 15 bp, Homo sapiens
tttgcctgatctttg

SEQ ID NO: 1826633 - DNA, 15 bp, Homo sapiens
ttgcctgatctttgc

SEQ ID NO: 1826634 - DNA, 15 bp, Homo sapiens
tgcctgatctttgca

SEQ ID NO: 1826635 - DNA, 15 bp, Homo sapiens
gcctgatctttgcaa

SEQ ID NO: 1826636 - DNA, 15 bp, Homo sapiens
cctgatctttgcaaa

SEQ ID NO: 1826637 - DNA, 15 bp, Homo sapiens
ctgatctttgcaaaa

SEQ ID NO: 1826638 - DNA, 15 bp, Homo sapiens
tgatctttgcaaaat

SEQ ID NO: 1826639 - DNA, 15 bp, Homo sapiens
gatctttgcaaaatc

SEQ ID NO: 1826640 - DNA, 15 bp, Homo sapiens
atctttgcaaaatca

SEQ ID NO: 1826641 - DNA, 15 bp, Homo sapiens
tctttgcaaaatcag

SEQ ID NO: 1826642 - DNA, 15 bp, Homo sapiens
ctttgcaaaatcagg

SEQ ID NO: 1826643 - DNA, 15 bp, Homo sapiens
tttgcaaaatcagga

SEQ ID NO: 1826644 - DNA, 15 bp, Homo sapiens
ttgcaaaatcaggag

SEQ ID NO: 1826645 - DNA, 15 bp, Homo sapiens
tgcaaaatcaggagc

SEQ ID NO: 1826646 - DNA, 15 bp, Homo sapiens
gcaaaatcaggagca

SEQ ID NO: 1826647 - DNA, 15 bp, Homo sapiens
caaaatcaggagcat

SEQ ID NO: 1826648 - DNA, 15 bp, Homo sapiens
aaaatcaggagcatt

SEQ ID NO: 1826649 - DNA, 15 bp, Homo sapiens
aaatcaggagcattg

SEQ ID NO: 1826650 - DNA, 15 bp, Homo sapiens
aatcaggagcattgg

SEQ ID NO: 1826651 - DNA, 15 bp, Homo sapiens
atcaggagcattgga

SEQ ID NO: 1826652 - DNA, 15 bp, Homo sapiens
tcaggagcattggat

SEQ ID NO: 1826653 - DNA, 15 bp, Homo sapiens
caggagcattggatc

SEQ ID NO: 1826654 - DNA, 15 bp, Homo sapiens
aggagcattggatca

SEQ ID NO: 1826655 - DNA, 15 bp, Homo sapiens
ggagcattggatcaa

SEQ ID NO: 1826656 - DNA, 15 bp, Homo sapiens
gagcattggatcaaa

SEQ ID NO: 1826657 - DNA, 15 bp, Homo sapiens
agcattggatcaaag

SEQ ID NO: 1826658 - DNA, 15 bp, Homo sapiens
gcattggatcaaagc

SEQ ID NO: 1826659 - DNA, 15 bp, Homo sapiens
cattggatcaaagct

SEQ ID NO: 1826660 - DNA, 15 bp, Homo sapiens
attggatcaaagcta

SEQ ID NO: 1826661 - DNA, 15 bp, Homo sapiens
ttggatcaaagctat

SEQ ID NO: 1826662 - DNA, 15 bp, Homo sapiens
tggatcaaagctatg

SEQ ID NO: 1826663 - DNA, 15 bp, Homo sapiens
ggatcaaagctatgt

SEQ ID NO: 1826664 - DNA, 15 bp, Homo sapiens
gatcaaagctatgtg

SEQ ID NO: 1826665 - DNA, 15 bp, Homo sapiens
atcaaagctatgtga

SEQ ID NO: 1826666 - DNA, 15 bp, Homo sapiens
tcaaagctatgtgaa

SEQ ID NO: 1826667 - DNA, 15 bp, Homo sapiens
caaagctatgtgaag

SEQ ID NO: 1826668 - DNA, 15 bp, Homo sapiens
aaagctatgtgaaga

SEQ ID NO: 1826669 - DNA, 15 bp, Homo sapiens
aagctatgtgaagat

SEQ ID NO: 1826670 - DNA, 15 bp, Homo sapiens
agctatgtgaagatc

SEQ ID NO: 1826671 - DNA, 15 bp, Homo sapiens
gctatgtgaagatcc

SEQ ID NO: 1826672 - DNA, 15 bp, Homo sapiens
ctatgtgaagatcct

SEQ ID NO: 1826673 - DNA, 15 bp, Homo sapiens
tatgtgaagatcctg

SEQ ID NO: 1826674 - DNA, 15 bp, Homo sapiens
atgtgaagatcctgt

SEQ ID NO: 1826675 - DNA, 15 bp, Homo sapiens
tgtgaagatcctgtg

SEQ ID NO: 1826676 - DNA, 15 bp, Homo sapiens
gtgaagatcctgtga

SEQ ID NO: 1826677 - DNA, 15 bp, Homo sapiens
tgaagatcctgtgag

SEQ ID NO: 1826678 - DNA, 15 bp, Homo sapiens
gaagatcctgtgagg

SEQ ID NO: 1826679 - DNA, 15 bp, Homo sapiens
aagatcctgtgaggt

SEQ ID NO: 1826680 - DNA, 15 bp, Homo sapiens
agatcctgtgaggtg

SEQ ID NO: 1826681 - DNA, 15 bp, Homo sapiens
gatcctgtgaggtga

SEQ ID NO: 1826682 - DNA, 15 bp, Homo sapiens
atcctgtgaggtgaa

SEQ ID NO: 1826683 - DNA, 15 bp, Homo sapiens
tcctgtgaggtgaac

SEQ ID NO: 1826684 - DNA, 15 bp, Homo sapiens
cctgtgaggtgaaca

SEQ ID NO: 1826685 - DNA, 15 bp, Homo sapiens
ctgtgaggtgaacag

SEQ ID NO: 1826686 - DNA, 15 bp, Homo sapiens
tgtgaggtgaacagt

SEQ ID NO: 1826687 - DNA, 15 bp, Homo sapiens
gtgaggtgaacagtg

SEQ ID NO: 1826688 - DNA, 15 bp, Homo sapiens
tgaggtgaacagtga

SEQ ID NO: 1826689 - DNA, 15 bp, Homo sapiens
gaggtgaacagtgaa

SEQ ID NO: 1826690 - DNA, 15 bp, Homo sapiens
aggtgaacagtgaaa

SEQ ID NO: 1826691 - DNA, 15 bp, Homo sapiens
ggtgaacagtgaaat

SEQ ID NO: 1826692 - DNA, 15 bp, Homo sapiens
gtgaacagtgaaatc

SEQ ID NO: 1826693 - DNA, 15 bp, Homo sapiens
tgaacagtgaaatct

SEQ ID NO: 1826694 - DNA, 15 bp, Homo sapiens
gaacagtgaaatctc

SEQ ID NO: 1826695 - DNA, 15 bp, Homo sapiens
aacagtgaaatctca

SEQ ID NO: 1826696 - DNA, 15 bp, Homo sapiens
acagtgaaatctcac

SEQ ID NO: 1826697 - DNA, 15 bp, Homo sapiens
cagtgaaatctcaca

SEQ ID NO: 1826698 - DNA, 15 bp, Homo sapiens
agtgaaatctcacag

SEQ ID NO: 1826699 - DNA, 15 bp, Homo sapiens
gtgaaatctcacagc

SEQ ID NO: 1826700 - DNA, 15 bp, Homo sapiens
tgaaatctcacagcg

SEQ ID NO: 1826701 - DNA, 15 bp, Homo sapiens
gaaatctcacagcga

SEQ ID NO: 1826702 - DNA, 15 bp, Homo sapiens
aaatctcacagcgac

SEQ ID NO: 1826703 - DNA, 15 bp, Homo sapiens
aatctcacagcgaca

SEQ ID NO: 1826704 - DNA, 15 bp, Homo sapiens
atctcacagcgacat

SEQ ID NO: 1826705 - DNA, 15 bp, Homo sapiens
tctcacagcgacatt

SEQ ID NO: 1826706 - DNA, 15 bp, Homo sapiens
ctcacagcgacattt

SEQ ID NO: 1826707 - DNA, 15 bp, Homo sapiens
tcacagcgacatttg

SEQ ID NO: 1826708 - DNA, 15 bp, Homo sapiens
cacagcgacatttgt

SEQ ID NO: 1826709 - DNA, 15 bp, Homo sapiens
acagcgacatttgta

SEQ ID NO: 1826710 - DNA, 15 bp, Homo sapiens
cagcgacatttgtat

SEQ ID NO: 1826711 - DNA, 15 bp, Homo sapiens
agcgacatttgtatt

SEQ ID NO: 1826712 - DNA, 15 bp, Homo sapiens
gcgacatttgtattc

SEQ ID NO: 1826713 - DNA, 15 bp, Homo sapiens
cgacatttgtattct

SEQ ID NO: 1826714 - DNA, 15 bp, Homo sapiens
gacatttgtattctt

SEQ ID NO: 1826715 - DNA, 15 bp, Homo sapiens
acatttgtattcttg

SEQ ID NO: 1826716 - DNA, 15 bp, Homo sapiens
catttgtattcttgg

SEQ ID NO: 1826717 - DNA, 15 bp, Homo sapiens
atttgtattcttggg

SEQ ID NO: 1826718 - DNA, 15 bp, Homo sapiens
tttgtattcttgggc

SEQ ID NO: 1826719 - DNA, 15 bp, Homo sapiens
ttgtattcttgggcc

SEQ ID NO: 1826720 - DNA, 15 bp, Homo sapiens
tgtattcttgggccg

SEQ ID NO: 1826721 - DNA, 15 bp, Homo sapiens
gtattcttgggccgt

SEQ ID NO: 1826722 - DNA, 15 bp, Homo sapiens
tattcttgggccgtg

SEQ ID NO: 1826723 - DNA, 15 bp, Homo sapiens
attcttgggccgtgc

SEQ ID NO: 1826724 - DNA, 15 bp, Homo sapiens
ttcttgggccgtgcc

SEQ ID NO: 1826725 - DNA, 15 bp, Homo sapiens
tcttgggccgtgccc

SEQ ID NO: 1826726 - DNA, 15 bp, Homo sapiens
cttgggccgtgccca

SEQ ID NO: 1826727 - DNA, 15 bp, Homo sapiens
ttgggccgtgcccaa

SEQ ID NO: 1826728 - DNA, 15 bp, Homo sapiens
tgggccgtgcccaag

SEQ ID NO: 1826729 - DNA, 15 bp, Homo sapiens
gggccgtgcccaaga

SEQ ID NO: 1826730 - DNA, 15 bp, Homo sapiens
ggccgtgcccaagag

SEQ ID NO: 1826731 - DNA, 15 bp, Homo sapiens
gccgtgcccaagagc

SEQ ID NO: 1826732 - DNA, 15 bp, Homo sapiens
ccgtgcccaagagca

SEQ ID NO: 1826733 - DNA, 15 bp, Homo sapiens
cgtgcccaagagcac

SEQ ID NO: 1826734 - DNA, 15 bp, Homo sapiens
gtgcccaagagcacg

SEQ ID NO: 1826735 - DNA, 15 bp, Homo sapiens
tgcccaagagcacgt

SEQ ID NO: 1826736 - DNA, 15 bp, Homo sapiens
gcccaagagcacgtc

SEQ ID NO: 1826737 - DNA, 15 bp, Homo sapiens
cccaagagcacgtct

SEQ ID NO: 1826738 - DNA, 15 bp, Homo sapiens
ccaagagcacgtctc

SEQ ID NO: 1826739 - DNA, 15 bp, Homo sapiens
caagagcacgtctcg

SEQ ID NO: 1826740 - DNA, 15 bp, Homo sapiens
aagagcacgtctcgg

SEQ ID NO: 1826741 - DNA, 15 bp, Homo sapiens
agagcacgtctcggc

SEQ ID NO: 1826742 - DNA, 15 bp, Homo sapiens
gagcacgtctcggct

SEQ ID NO: 1826743 - DNA, 15 bp, Homo sapiens
agcacgtctcggcta

SEQ ID NO: 1826744 - DNA, 15 bp, Homo sapiens
gcacgtctcggctag

SEQ ID NO: 1826745 - DNA, 15 bp, Homo sapiens
cacgtctcggctaga

SEQ ID NO: 1826746 - DNA, 15 bp, Homo sapiens
acgtctcggctagag

SEQ ID NO: 1826747 - DNA, 15 bp, Homo sapiens
cgtctcggctagaga

SEQ ID NO: 1826748 - DNA, 15 bp, Homo sapiens
gtctcggctagagag

SEQ ID NO: 1826749 - DNA, 15 bp, Homo sapiens
tctcggctagagagg

SEQ ID NO: 1826750 - DNA, 15 bp, Homo sapiens
ctcggctagagaggg

SEQ ID NO: 1826751 - DNA, 15 bp, Homo sapiens
tcggctagagagggg

SEQ ID NO: 1826752 - DNA, 15 bp, Homo sapiens
cggctagagaggggc

SEQ ID NO: 1826753 - DNA, 15 bp, Homo sapiens
ggctagagaggggca

SEQ ID NO: 1826754 - DNA, 15 bp, Homo sapiens
gctagagaggggcac

SEQ ID NO: 1826755 - DNA, 15 bp, Homo sapiens
ctagagaggggcaca

SEQ ID NO: 1826756 - DNA, 15 bp, Homo sapiens
tagagaggggcacag

SEQ ID NO: 1826757 - DNA, 15 bp, Homo sapiens
agagaggggcacagc

SEQ ID NO: 1826758 - DNA, 15 bp, Homo sapiens
gagaggggcacagcc

SEQ ID NO: 1826759 - DNA, 15 bp, Homo sapiens
agaggggcacagcct

SEQ ID NO: 1826760 - DNA, 15 bp, Homo sapiens
gaggggcacagcctc

SEQ ID NO: 1826761 - DNA, 15 bp, Homo sapiens
aggggcacagcctcc

SEQ ID NO: 1826762 - DNA, 15 bp, Homo sapiens
ggggcacagcctccc

SEQ ID NO: 1826763 - DNA, 15 bp, Homo sapiens
gggcacagcctccca

SEQ ID NO: 1826764 - DNA, 15 bp, Homo sapiens
ggcacagcctcccag

SEQ ID NO: 1826765 - DNA, 15 bp, Homo sapiens
gcacagcctcccaga

SEQ ID NO: 1826766 - DNA, 15 bp, Homo sapiens
cacagcctcccagag

SEQ ID NO: 1826767 - DNA, 15 bp, Homo sapiens
acagcctcccagagc

SEQ ID NO: 1826768 - DNA, 15 bp, Homo sapiens
cagcctcccagagcc

SEQ ID NO: 1826769 - DNA, 15 bp, Homo sapiens
agcctcccagagcca

SEQ ID NO: 1826770 - DNA, 15 bp, Homo sapiens
gcctcccagagccag

SEQ ID NO: 1826771 - DNA, 15 bp, Homo sapiens
cctcccagagccagg

SEQ ID NO: 1826772 - DNA, 15 bp, Homo sapiens
ctcccagagccaggt

SEQ ID NO: 1826773 - DNA, 15 bp, Homo sapiens
tcccagagccaggtc

SEQ ID NO: 1826774 - DNA, 15 bp, Homo sapiens
cccagagccaggtct

SEQ ID NO: 1826775 - DNA, 15 bp, Homo sapiens
ccagagccaggtctg

SEQ ID NO: 1826776 - DNA, 15 bp, Homo sapiens
cagagccaggtctga

SEQ ID NO: 1826777 - DNA, 15 bp, Homo sapiens
agagccaggtctgag

SEQ ID NO: 1826778 - DNA, 15 bp, Homo sapiens
gagccaggtctgagc

SEQ ID NO: 1826779 - DNA, 15 bp, Homo sapiens
agccaggtctgagca

SEQ ID NO: 1826780 - DNA, 15 bp, Homo sapiens
gccaggtctgagcag

SEQ ID NO: 1826781 - DNA, 15 bp, Homo sapiens
ccaggtctgagcagc

SEQ ID NO: 1826782 - DNA, 15 bp, Homo sapiens
caggtctgagcagct

SEQ ID NO: 1826783 - DNA, 15 bp, Homo sapiens
aggtctgagcagctt

SEQ ID NO: 1826784 - DNA, 15 bp, Homo sapiens
ggtctgagcagcttt

SEQ ID NO: 1826785 - DNA, 15 bp, Homo sapiens
gtctgagcagctttg

SEQ ID NO: 1826786 - DNA, 15 bp, Homo sapiens
tctgagcagctttgc

SEQ ID NO: 1826787 - DNA, 15 bp, Homo sapiens
ctgagcagctttgcc

SEQ ID NO: 1826788 - DNA, 15 bp, Homo sapiens
tgagcagctttgcct

SEQ ID NO: 1826789 - DNA, 15 bp, Homo sapiens
gagcagctttgcctg

SEQ ID NO: 1826790 - DNA, 15 bp, Homo sapiens
agcagctttgcctgg

SEQ ID NO: 1826791 - DNA, 15 bp, Homo sapiens
gcagctttgcctggg

SEQ ID NO: 1826792 - DNA, 15 bp, Homo sapiens
cagctttgcctggga

SEQ ID NO: 1826793 - DNA, 15 bp, Homo sapiens
agctttgcctgggag

SEQ ID NO: 1826794 - DNA, 15 bp, Homo sapiens
gctttgcctgggagg

SEQ ID NO: 1826795 - DNA, 15 bp, Homo sapiens
ctttgcctgggaggg

SEQ ID NO: 1826796 - DNA, 15 bp, Homo sapiens
tttgcctgggaggga

SEQ ID NO: 1826797 - DNA, 15 bp, Homo sapiens
ttgcctgggagggat

SEQ ID NO: 1826798 - DNA, 15 bp, Homo sapiens
tgcctgggagggatc

SEQ ID NO: 1826799 - DNA, 15 bp, Homo sapiens
gcctgggagggatct

SEQ ID NO: 1826800 - DNA, 15 bp, Homo sapiens
cctgggagggatctg

SEQ ID NO: 1826801 - DNA, 15 bp, Homo sapiens
ctgggagggatctgc

SEQ ID NO: 1826802 - DNA, 15 bp, Homo sapiens
tgggagggatctgca

SEQ ID NO: 1826803 - DNA, 15 bp, Homo sapiens
gggagggatctgcaa

SEQ ID NO: 1826804 - DNA, 15 bp, Homo sapiens
ggagggatctgcaaa

SEQ ID NO: 1826805 - DNA, 15 bp, Homo sapiens
gagggatctgcaaag

SEQ ID NO: 1826806 - DNA, 15 bp, Homo sapiens
agggatctgcaaaga

SEQ ID NO: 1826807 - DNA, 15 bp, Homo sapiens
gggatctgcaaagac

SEQ ID NO: 1826808 - DNA, 15 bp, Homo sapiens
ggatctgcaaagacc

SEQ ID NO: 1826809 - DNA, 15 bp, Homo sapiens
gatctgcaaagaccc

SEQ ID NO: 1826810 - DNA, 15 bp, Homo sapiens
atctgcaaagacccc

SEQ ID NO: 1826811 - DNA, 15 bp, Homo sapiens
tctgcaaagacccca

SEQ ID NO: 1826812 - DNA, 15 bp, Homo sapiens
ctgcaaagaccccag

SEQ ID NO: 1826813 - DNA, 15 bp, Homo sapiens
tgcaaagaccccagg

SEQ ID NO: 1826814 - DNA, 15 bp, Homo sapiens
gcaaagaccccagga

SEQ ID NO: 1826815 - DNA, 15 bp, Homo sapiens
caaagaccccaggat

SEQ ID NO: 1826816 - DNA, 15 bp, Homo sapiens
aaagaccccaggatt

SEQ ID NO: 1826817 - DNA, 15 bp, Homo sapiens
aagaccccaggattt

SEQ ID NO: 1826818 - DNA, 15 bp, Homo sapiens
agaccccaggatttc

SEQ ID NO: 1826819 - DNA, 15 bp, Homo sapiens
gaccccaggatttca

SEQ ID NO: 1826820 - DNA, 15 bp, Homo sapiens
accccaggatttcag

SEQ ID NO: 1826821 - DNA, 15 bp, Homo sapiens
ccccaggatttcaga

SEQ ID NO: 1826822 - DNA, 15 bp, Homo sapiens
cccaggatttcagaa

SEQ ID NO: 1826823 - DNA, 15 bp, Homo sapiens
ccaggatttcagaaa

SEQ ID NO: 1826824 - DNA, 15 bp, Homo sapiens
caggatttcagaaag

SEQ ID NO: 1826825 - DNA, 15 bp, Homo sapiens
aggatttcagaaaga

SEQ ID NO: 1826826 - DNA, 15 bp, Homo sapiens
ggatttcagaaagaa

SEQ ID NO: 1826827 - DNA, 15 bp, Homo sapiens
gatttcagaaagaaa

SEQ ID NO: 1826828 - DNA, 15 bp, Homo sapiens
atttcagaaagaaat

SEQ ID NO: 1826829 - DNA, 15 bp, Homo sapiens
tttcagaaagaaatt

SEQ ID NO: 1826830 - DNA, 15 bp, Homo sapiens
ttcagaaagaaattg

SEQ ID NO: 1826831 - DNA, 15 bp, Homo sapiens
tcagaaagaaattgt

SEQ ID NO: 1826832 - DNA, 15 bp, Homo sapiens
cagaaagaaattgtg

SEQ ID NO: 1826833 - DNA, 15 bp, Homo sapiens
agaaagaaattgtgc

SEQ ID NO: 1826834 - DNA, 15 bp, Homo sapiens
gaaagaaattgtgca

SEQ ID NO: 1826835 - DNA, 15 bp, Homo sapiens
aaagaaattgtgcaa

SEQ ID NO: 1826836 - DNA, 15 bp, Homo sapiens
aagaaattgtgcaat

SEQ ID NO: 1826837 - DNA, 15 bp, Homo sapiens
agaaattgtgcaatg

SEQ ID NO: 1826838 - DNA, 15 bp, Homo sapiens
gaaattgtgcaatgc

SEQ ID NO: 1826839 - DNA, 15 bp, Homo sapiens
aaattgtgcaatgcc

SEQ ID NO: 1826840 - DNA, 15 bp, Homo sapiens
aattgtgcaatgcca

SEQ ID NO: 1826841 - DNA, 15 bp, Homo sapiens
attgtgcaatgccag

SEQ ID NO: 1826842 - DNA, 15 bp, Homo sapiens
ttgtgcaatgccaga

SEQ ID NO: 1826843 - DNA, 15 bp, Homo sapiens
tgtgcaatgccagag

SEQ ID NO: 1826844 - DNA, 15 bp, Homo sapiens
gtgcaatgccagagg

SEQ ID NO: 1826845 - DNA, 15 bp, Homo sapiens
tgcaatgccagaggt

SEQ ID NO: 1826846 - DNA, 15 bp, Homo sapiens
gcaatgccagaggtt

SEQ ID NO: 1826847 - DNA, 15 bp, Homo sapiens
caatgccagaggttc

SEQ ID NO: 1826848 - DNA, 15 bp, Homo sapiens
aatgccagaggttcc

SEQ ID NO: 1826849 - DNA, 15 bp, Homo sapiens
atgccagaggttcct

SEQ ID NO: 1826850 - DNA, 15 bp, Homo sapiens
tgccagaggttcctt

SEQ ID NO: 1826851 - DNA, 15 bp, Homo sapiens
gccagaggttccttg

SEQ ID NO: 1826852 - DNA, 15 bp, Homo sapiens
ccagaggttccttgg

SEQ ID NO: 1826853 - DNA, 15 bp, Homo sapiens
cagaggttccttggc

SEQ ID NO: 1826854 - DNA, 15 bp, Homo sapiens
agaggttccttggca

SEQ ID NO: 1826855 - DNA, 15 bp, Homo sapiens
gaggttccttggcat

SEQ ID NO: 1826856 - DNA, 15 bp, Homo sapiens
aggttccttggcatg

SEQ ID NO: 1826857 - DNA, 15 bp, Homo sapiens
ggttccttggcatgc

SEQ ID NO: 1826858 - DNA, 15 bp, Homo sapiens
gttccttggcatgcc

SEQ ID NO: 1826859 - DNA, 15 bp, Homo sapiens
ttccttggcatgccc

SEQ ID NO: 1826860 - DNA, 15 bp, Homo sapiens
tccttggcatgcccg

SEQ ID NO: 1826861 - DNA, 15 bp, Homo sapiens
ccttggcatgcccgg

SEQ ID NO: 1826862 - DNA, 15 bp, Homo sapiens
cttggcatgcccggg

SEQ ID NO: 1826863 - DNA, 15 bp, Homo sapiens
ttggcatgcccggga

SEQ ID NO: 1826864 - DNA, 15 bp, Homo sapiens
tggcatgcccgggag

SEQ ID NO: 1826865 - DNA, 15 bp, Homo sapiens
ggcatgcccgggagg

SEQ ID NO: 1826866 - DNA, 15 bp, Homo sapiens
gcatgcccgggaggg

SEQ ID NO: 1826867 - DNA, 15 bp, Homo sapiens
catgcccgggagggc

SEQ ID NO: 1826868 - DNA, 15 bp, Homo sapiens
atgcccgggagggcg

SEQ ID NO: 1826869 - DNA, 15 bp, Homo sapiens
tgcccgggagggcga

SEQ ID NO: 1826870 - DNA, 15 bp, Homo sapiens
gcccgggagggcgag

SEQ ID NO: 1826871 - DNA, 15 bp, Homo sapiens
cccgggagggcgagt

SEQ ID NO: 1826872 - DNA, 15 bp, Homo sapiens
ccgggagggcgagtc

SEQ ID NO: 1826873 - DNA, 15 bp, Homo sapiens
cgggagggcgagtca

SEQ ID NO: 1826874 - DNA, 15 bp, Homo sapiens
gggagggcgagtcat

SEQ ID NO: 1826875 - DNA, 15 bp, Homo sapiens
ggagggcgagtcatc

SEQ ID NO: 1826876 - DNA, 15 bp, Homo sapiens
gagggcgagtcatca

SEQ ID NO: 1826877 - DNA, 15 bp, Homo sapiens
agggcgagtcatcag

SEQ ID NO: 1826878 - DNA, 15 bp, Homo sapiens
gggcgagtcatcaga

SEQ ID NO: 1826879 - DNA, 15 bp, Homo sapiens
ggcgagtcatcagag

SEQ ID NO: 1826880 - DNA, 15 bp, Homo sapiens
gcgagtcatcagaga

SEQ ID NO: 1826881 - DNA, 15 bp, Homo sapiens
cgagtcatcagagaa

SEQ ID NO: 1826882 - DNA, 15 bp, Homo sapiens
gagtcatcagagaaa

SEQ ID NO: 1826883 - DNA, 15 bp, Homo sapiens
agtcatcagagaaac

SEQ ID NO: 1826884 - DNA, 15 bp, Homo sapiens
gtcatcagagaaaca

SEQ ID NO: 1826885 - DNA, 15 bp, Homo sapiens
tcatcagagaaacaa

SEQ ID NO: 1826886 - DNA, 15 bp, Homo sapiens
catcagagaaacaat

SEQ ID NO: 1826887 - DNA, 15 bp, Homo sapiens
atcagagaaacaatg

SEQ ID NO: 1826888 - DNA, 15 bp, Homo sapiens
tcagagaaacaatga

SEQ ID NO: 1826889 - DNA, 15 bp, Homo sapiens
cagagaaacaatgac

SEQ ID NO: 1826890 - DNA, 15 bp, Homo sapiens
agagaaacaatgaca

SEQ ID NO: 1826891 - DNA, 15 bp, Homo sapiens
gagaaacaatgacag

SEQ ID NO: 1826892 - DNA, 15 bp, Homo sapiens
agaaacaatgacagc

SEQ ID NO: 1826893 - DNA, 15 bp, Homo sapiens
gaaacaatgacagca

SEQ ID NO: 1826894 - DNA, 15 bp, Homo sapiens
aaacaatgacagcaa

SEQ ID NO: 1826895 - DNA, 15 bp, Homo sapiens
aacaatgacagcaat

SEQ ID NO: 1826896 - DNA, 15 bp, Homo sapiens
acaatgacagcaatg

SEQ ID NO: 1826897 - DNA, 15 bp, Homo sapiens
caatgacagcaatgt

SEQ ID NO: 1826898 - DNA, 15 bp, Homo sapiens
aatgacagcaatgtg

SEQ ID NO: 1826899 - DNA, 15 bp, Homo sapiens
atgacagcaatgtga

SEQ ID NO: 1826900 - DNA, 15 bp, Homo sapiens
tgacagcaatgtgac

SEQ ID NO: 1826901 - DNA, 15 bp, Homo sapiens
gacagcaatgtgact

SEQ ID NO: 1826902 - DNA, 15 bp, Homo sapiens
acagcaatgtgactt

SEQ ID NO: 1826903 - DNA, 15 bp, Homo sapiens
cagcaatgtgacttc

SEQ ID NO: 1826904 - DNA, 15 bp, Homo sapiens
agcaatgtgacttcc

SEQ ID NO: 1826905 - DNA, 15 bp, Homo sapiens
gcaatgtgacttcca

SEQ ID NO: 1826906 - DNA, 15 bp, Homo sapiens
caatgtgacttccac

SEQ ID NO: 1826907 - DNA, 15 bp, Homo sapiens
aatgtgacttccaca

SEQ ID NO: 1826908 - DNA, 15 bp, Homo sapiens
atgtgacttccacac

SEQ ID NO: 1826909 - DNA, 15 bp, Homo sapiens
tgtgacttccacacc

SEQ ID NO: 1826910 - DNA, 15 bp, Homo sapiens
gtgacttccacacct

SEQ ID NO: 1826911 - DNA, 15 bp, Homo sapiens
tgacttccacacctc

SEQ ID NO: 1826912 - DNA, 15 bp, Homo sapiens
gacttccacacctcc

SEQ ID NO: 1826913 - DNA, 15 bp, Homo sapiens
acttccacacctcct

SEQ ID NO: 1826914 - DNA, 15 bp, Homo sapiens
cttccacacctcctg

SEQ ID NO: 1826915 - DNA, 15 bp, Homo sapiens
ttccacacctcctgt

SEQ ID NO: 1826916 - DNA, 15 bp, Homo sapiens
tccacacctcctgtc

SEQ ID NO: 1826917 - DNA, 15 bp, Homo sapiens
ccacacctcctgtcc

SEQ ID NO: 1826918 - DNA, 15 bp, Homo sapiens
cacacctcctgtccc

SEQ ID NO: 1826919 - DNA, 15 bp, Homo sapiens
acacctcctgtcccc

SEQ ID NO: 1826920 - DNA, 15 bp, Homo sapiens
cacctcctgtccccc

SEQ ID NO: 1826921 - DNA, 15 bp, Homo sapiens
acctcctgtcccccc

SEQ ID NO: 1826922 - DNA, 15 bp, Homo sapiens
cctcctgtccccccg

SEQ ID NO: 1826923 - DNA, 15 bp, Homo sapiens
ctcctgtccccccgc

SEQ ID NO: 1826924 - DNA, 15 bp, Homo sapiens
tcctgtccccccgcc

SEQ ID NO: 1826925 - DNA, 15 bp, Homo sapiens
cctgtccccccgccc

SEQ ID NO: 1826926 - DNA, 15 bp, Homo sapiens
ctgtccccccgccca

SEQ ID NO: 1826927 - DNA, 15 bp, Homo sapiens
tgtccccccgcccag

SEQ ID NO: 1826928 - DNA, 15 bp, Homo sapiens
gtccccccgcccagg

SEQ ID NO: 1826929 - DNA, 15 bp, Homo sapiens
tccccccgcccaggt

SEQ ID NO: 1826930 - DNA, 15 bp, Homo sapiens
ccccccgcccaggtc

SEQ ID NO: 1826931 - DNA, 15 bp, Homo sapiens
cccccgcccaggtcc

SEQ ID NO: 1826932 - DNA, 15 bp, Homo sapiens
ccccgcccaggtcct

SEQ ID NO: 1826933 - DNA, 15 bp, Homo sapiens
cccgcccaggtcctg

SEQ ID NO: 1826934 - DNA, 15 bp, Homo sapiens
ccgcccaggtcctgt

SEQ ID NO: 1826935 - DNA, 15 bp, Homo sapiens
cgcccaggtcctgtt

SEQ ID NO: 1826936 - DNA, 15 bp, Homo sapiens
gcccaggtcctgttg

SEQ ID NO: 1826937 - DNA, 15 bp, Homo sapiens
cccaggtcctgttgt

SEQ ID NO: 1826938 - DNA, 15 bp, Homo sapiens
ccaggtcctgttgtt

SEQ ID NO: 1826939 - DNA, 15 bp, Homo sapiens
caggtcctgttgttg

SEQ ID NO: 1826940 - DNA, 15 bp, Homo sapiens
aggtcctgttgttgg

SEQ ID NO: 1826941 - DNA, 15 bp, Homo sapiens
ggtcctgttgttggt

SEQ ID NO: 1826942 - DNA, 15 bp, Homo sapiens
gtcctgttgttggtg

SEQ ID NO: 1826943 - DNA, 15 bp, Homo sapiens
tcctgttgttggtga

SEQ ID NO: 1826944 - DNA, 15 bp, Homo sapiens
cctgttgttggtgaa

SEQ ID NO: 1826945 - DNA, 15 bp, Homo sapiens
ctgttgttggtgaat

SEQ ID NO: 1826946 - DNA, 15 bp, Homo sapiens
tgttgttggtgaatg

SEQ ID NO: 1826947 - DNA, 15 bp, Homo sapiens
gttgttggtgaatgg

SEQ ID NO: 1826948 - DNA, 15 bp, Homo sapiens
ttgttggtgaatgga

SEQ ID NO: 1826949 - DNA, 15 bp, Homo sapiens
tgttggtgaatggag

SEQ ID NO: 1826950 - DNA, 15 bp, Homo sapiens
gttggtgaatggagc

SEQ ID NO: 1826951 - DNA, 15 bp, Homo sapiens
ttggtgaatggagct

SEQ ID NO: 1826952 - DNA, 15 bp, Homo sapiens
tggtgaatggagctc

SEQ ID NO: 1826953 - DNA, 15 bp, Homo sapiens
ggtgaatggagctca

SEQ ID NO: 1826954 - DNA, 15 bp, Homo sapiens
gtgaatggagctcag

SEQ ID NO: 1826955 - DNA, 15 bp, Homo sapiens
tgaatggagctcagt

SEQ ID NO: 1826956 - DNA, 15 bp, Homo sapiens
gaatggagctcagtt

SEQ ID NO: 1826957 - DNA, 15 bp, Homo sapiens
aatggagctcagttg

SEQ ID NO: 1826958 - DNA, 15 bp, Homo sapiens
atggagctcagttgt

SEQ ID NO: 1826959 - DNA, 15 bp, Homo sapiens
tggagctcagttgtg

SEQ ID NO: 1826960 - DNA, 15 bp, Homo sapiens
ggagctcagttgtgt

SEQ ID NO: 1826961 - DNA, 15 bp, Homo sapiens
gagctcagttgtgtg

SEQ ID NO: 1826962 - DNA, 15 bp, Homo sapiens
agctcagttgtgtgg

SEQ ID NO: 1826963 - DNA, 15 bp, Homo sapiens
gctcagttgtgtggg

SEQ ID NO: 1826964 - DNA, 15 bp, Homo sapiens
ctcagttgtgtgggg

SEQ ID NO: 1826965 - DNA, 15 bp, Homo sapiens
tcagttgtgtggggg

SEQ ID NO: 1826966 - DNA, 15 bp, Homo sapiens
cagttgtgtgggggg

SEQ ID NO: 1826967 - DNA, 15 bp, Homo sapiens
agttgtgtgggggga

SEQ ID NO: 1826968 - DNA, 15 bp, Homo sapiens
gttgtgtggggggac

SEQ ID NO: 1826969 - DNA, 15 bp, Homo sapiens
ttgtgtggggggacc

SEQ ID NO: 1826970 - DNA, 15 bp, Homo sapiens
tgtgtggggggaccc

SEQ ID NO: 1826971 - DNA, 15 bp, Homo sapiens
gtgtggggggaccct

SEQ ID NO: 1826972 - DNA, 15 bp, Homo sapiens
tgtggggggaccctg

SEQ ID NO: 1826973 - DNA, 15 bp, Homo sapiens
gtggggggaccctga

SEQ ID NO: 1826974 - DNA, 15 bp, Homo sapiens
tggggggaccctgat

SEQ ID NO: 1826975 - DNA, 15 bp, Homo sapiens
ggggggaccctgatc

SEQ ID NO: 1826976 - DNA, 15 bp, Homo sapiens
gggggaccctgatca

SEQ ID NO: 1826977 - DNA, 15 bp, Homo sapiens
ggggaccctgatcaa

SEQ ID NO: 1826978 - DNA, 15 bp, Homo sapiens
gggaccctgatcaac

SEQ ID NO: 1826979 - DNA, 15 bp, Homo sapiens
ggaccctgatcaaca

SEQ ID NO: 1826980 - DNA, 15 bp, Homo sapiens
gaccctgatcaacac

SEQ ID NO: 1826981 - DNA, 15 bp, Homo sapiens
accctgatcaacacc

SEQ ID NO: 1826982 - DNA, 15 bp, Homo sapiens
ccctgatcaacacca

SEQ ID NO: 1826983 - DNA, 15 bp, Homo sapiens
cctgatcaacaccat

SEQ ID NO: 1826984 - DNA, 15 bp, Homo sapiens
ctgatcaacaccatc

SEQ ID NO: 1826985 - DNA, 15 bp, Homo sapiens
tgatcaacaccatct

SEQ ID NO: 1826986 - DNA, 15 bp, Homo sapiens
gatcaacaccatctg

SEQ ID NO: 1826987 - DNA, 15 bp, Homo sapiens
atcaacaccatctgg

SEQ ID NO: 1826988 - DNA, 15 bp, Homo sapiens
tcaacaccatctggg

SEQ ID NO: 1826989 - DNA, 15 bp, Homo sapiens
caacaccatctgggt

SEQ ID NO: 1826990 - DNA, 15 bp, Homo sapiens
aacaccatctgggtg

SEQ ID NO: 1826991 - DNA, 15 bp, Homo sapiens
acaccatctgggtgg

SEQ ID NO: 1826992 - DNA, 15 bp, Homo sapiens
caccatctgggtggt

SEQ ID NO: 1826993 - DNA, 15 bp, Homo sapiens
accatctgggtggtc

SEQ ID NO: 1826994 - DNA, 15 bp, Homo sapiens
ccatctgggtggtct

SEQ ID NO: 1826995 - DNA, 15 bp, Homo sapiens
catctgggtggtctc

SEQ ID NO: 1826996 - DNA, 15 bp, Homo sapiens
atctgggtggtctcc

SEQ ID NO: 1826997 - DNA, 15 bp, Homo sapiens
tctgggtggtctccg

SEQ ID NO: 1826998 - DNA, 15 bp, Homo sapiens
ctgggtggtctccgc

SEQ ID NO: 1826999 - DNA, 15 bp, Homo sapiens
tgggtggtctccgcg

SEQ ID NO: 1827000 - DNA, 15 bp, Homo sapiens
gggtggtctccgcgg

SEQ ID NO: 1827001 - DNA, 15 bp, Homo sapiens
ggtggtctccgcggc

SEQ ID NO: 1827002 - DNA, 15 bp, Homo sapiens
gtggtctccgcggcc

SEQ ID NO: 1827003 - DNA, 15 bp, Homo sapiens
tggtctccgcggccc

SEQ ID NO: 1827004 - DNA, 15 bp, Homo sapiens
ggtctccgcggccca

SEQ ID NO: 1827005 - DNA, 15 bp, Homo sapiens
gtctccgcggcccac

SEQ ID NO: 1827006 - DNA, 15 bp, Homo sapiens
tctccgcggcccact

SEQ ID NO: 1827007 - DNA, 15 bp, Homo sapiens
ctccgcggcccactg

SEQ ID NO: 1827008 - DNA, 15 bp, Homo sapiens
tccgcggcccactgt

SEQ ID NO: 1827009 - DNA, 15 bp, Homo sapiens
ccgcggcccactgtt

SEQ ID NO: 1827010 - DNA, 15 bp, Homo sapiens
cgcggcccactgttt

SEQ ID NO: 1827011 - DNA, 15 bp, Homo sapiens
gcggcccactgtttc

SEQ ID NO: 1827012 - DNA, 15 bp, Homo sapiens
cggcccactgtttcg

SEQ ID NO: 1827013 - DNA, 15 bp, Homo sapiens
ggcccactgtttcga

SEQ ID NO: 1827014 - DNA, 15 bp, Homo sapiens
gcccactgtttcgac

SEQ ID NO: 1827015 - DNA, 15 bp, Homo sapiens
cccactgtttcgaca

SEQ ID NO: 1827016 - DNA, 15 bp, Homo sapiens
ccactgtttcgacaa

SEQ ID NO: 1827017 - DNA, 15 bp, Homo sapiens
cactgtttcgacaaa

SEQ ID NO: 1827018 - DNA, 15 bp, Homo sapiens
actgtttcgacaaaa

SEQ ID NO: 1827019 - DNA, 15 bp, Homo sapiens
ctgtttcgacaaaat

SEQ ID NO: 1827020 - DNA, 15 bp, Homo sapiens
tgtttcgacaaaatc

SEQ ID NO: 1827021 - DNA, 15 bp, Homo sapiens
gtttcgacaaaatca

SEQ ID NO: 1827022 - DNA, 15 bp, Homo sapiens
tttcgacaaaatcaa

SEQ ID NO: 1827023 - DNA, 15 bp, Homo sapiens
ttcgacaaaatcaag

SEQ ID NO: 1827024 - DNA, 15 bp, Homo sapiens
tcgacaaaatcaaga

SEQ ID NO: 1827025 - DNA, 15 bp, Homo sapiens
cgacaaaatcaagaa

SEQ ID NO: 1827026 - DNA, 15 bp, Homo sapiens
gacaaaatcaagaac

SEQ ID NO: 1827027 - DNA, 15 bp, Homo sapiens
acaaaatcaagaact

SEQ ID NO: 1827028 - DNA, 15 bp, Homo sapiens
caaaatcaagaactg

SEQ ID NO: 1827029 - DNA, 15 bp, Homo sapiens
aaaatcaagaactgg

SEQ ID NO: 1827030 - DNA, 15 bp, Homo sapiens
aaatcaagaactgga

SEQ ID NO: 1827031 - DNA, 15 bp, Homo sapiens
aatcaagaactggag

SEQ ID NO: 1827032 - DNA, 15 bp, Homo sapiens
atcaagaactggagg

SEQ ID NO: 1827033 - DNA, 15 bp, Homo sapiens
tcaagaactggagga

SEQ ID NO: 1827034 - DNA, 15 bp, Homo sapiens
caagaactggaggaa

SEQ ID NO: 1827035 - DNA, 15 bp, Homo sapiens
aagaactggaggaac

SEQ ID NO: 1827036 - DNA, 15 bp, Homo sapiens
agaactggaggaacc

SEQ ID NO: 1827037 - DNA, 15 bp, Homo sapiens
gaactggaggaacct

SEQ ID NO: 1827038 - DNA, 15 bp, Homo sapiens
aactggaggaacctg

SEQ ID NO: 1827039 - DNA, 15 bp, Homo sapiens
actggaggaacctga

SEQ ID NO: 1827040 - DNA, 15 bp, Homo sapiens
ctggaggaacctgat

SEQ ID NO: 1827041 - DNA, 15 bp, Homo sapiens
tggaggaacctgatc

SEQ ID NO: 1827042 - DNA, 15 bp, Homo sapiens
ggaggaacctgatcg

SEQ ID NO: 1827043 - DNA, 15 bp, Homo sapiens
gaggaacctgatcgc

SEQ ID NO: 1827044 - DNA, 15 bp, Homo sapiens
aggaacctgatcgcg

SEQ ID NO: 1827045 - DNA, 15 bp, Homo sapiens
ggaacctgatcgcgg

SEQ ID NO: 1827046 - DNA, 15 bp, Homo sapiens
gaacctgatcgcggt

SEQ ID NO: 1827047 - DNA, 15 bp, Homo sapiens
aacctgatcgcggtg

SEQ ID NO: 1827048 - DNA, 15 bp, Homo sapiens
acctgatcgcggtgc

SEQ ID NO: 1827049 - DNA, 15 bp, Homo sapiens
cctgatcgcggtgct

SEQ ID NO: 1827050 - DNA, 15 bp, Homo sapiens
ctgatcgcggtgctg

SEQ ID NO: 1827051 - DNA, 15 bp, Homo sapiens
tgatcgcggtgctgg

SEQ ID NO: 1827052 - DNA, 15 bp, Homo sapiens
gatcgcggtgctggg

SEQ ID NO: 1827053 - DNA, 15 bp, Homo sapiens
atcgcggtgctgggt

SEQ ID NO: 1827054 - DNA, 15 bp, Homo sapiens
tcgcggtgctgggtg

SEQ ID NO: 1827055 - DNA, 15 bp, Homo sapiens
cgcggtgctgggtgg

SEQ ID NO: 1827056 - DNA, 15 bp, Homo sapiens
gcggtgctgggtggg

SEQ ID NO: 1827057 - DNA, 15 bp, Homo sapiens
cggtgctgggtgggt

SEQ ID NO: 1827058 - DNA, 15 bp, Homo sapiens
ggtgctgggtgggta

SEQ ID NO: 1827059 - DNA, 15 bp, Homo sapiens
gtgctgggtgggtac

SEQ ID NO: 1827060 - DNA, 15 bp, Homo sapiens
tgctgggtgggtacc

SEQ ID NO: 1827061 - DNA, 15 bp, Homo sapiens
gctgggtgggtacca

SEQ ID NO: 1827062 - DNA, 15 bp, Homo sapiens
ctgggtgggtaccac

SEQ ID NO: 1827063 - DNA, 15 bp, Homo sapiens
tgggtgggtaccact

SEQ ID NO: 1827064 - DNA, 15 bp, Homo sapiens
gggtgggtaccactc

SEQ ID NO: 1827065 - DNA, 15 bp, Homo sapiens
ggtgggtaccactct

SEQ ID NO: 1827066 - DNA, 15 bp, Homo sapiens
gtgggtaccactctc

SEQ ID NO: 1827067 - DNA, 15 bp, Homo sapiens
tgggtaccactctcc

SEQ ID NO: 1827068 - DNA, 15 bp, Homo sapiens
gggtaccactctccc

SEQ ID NO: 1827069 - DNA, 15 bp, Homo sapiens
ggtaccactctcccc

SEQ ID NO: 1827070 - DNA, 15 bp, Homo sapiens
gtaccactctcccct

SEQ ID NO: 1827071 - DNA, 15 bp, Homo sapiens
taccactctcccctg

SEQ ID NO: 1827072 - DNA, 15 bp, Homo sapiens
accactctcccctgt

SEQ ID NO: 1827073 - DNA, 15 bp, Homo sapiens
ccactctcccctgtc

SEQ ID NO: 1827074 - DNA, 15 bp, Homo sapiens
cactctcccctgtcc

SEQ ID NO: 1827075 - DNA, 15 bp, Homo sapiens
actctcccctgtccg

SEQ ID NO: 1827076 - DNA, 15 bp, Homo sapiens
ctctcccctgtccga

SEQ ID NO: 1827077 - DNA, 15 bp, Homo sapiens
tctcccctgtccgac

SEQ ID NO: 1827078 - DNA, 15 bp, Homo sapiens
ctcccctgtccgacc

SEQ ID NO: 1827079 - DNA, 15 bp, Homo sapiens
tcccctgtccgaccg

SEQ ID NO: 1827080 - DNA, 15 bp, Homo sapiens
cccctgtccgaccgc

SEQ ID NO: 1827081 - DNA, 15 bp, Homo sapiens
ccctgtccgaccgcg

SEQ ID NO: 1827082 - DNA, 15 bp, Homo sapiens
cctgtccgaccgcgg

SEQ ID NO: 1827083 - DNA, 15 bp, Homo sapiens
ctgtccgaccgcggt

SEQ ID NO: 1827084 - DNA, 15 bp, Homo sapiens
tgtccgaccgcggtg

SEQ ID NO: 1827085 - DNA, 15 bp, Homo sapiens
gtccgaccgcggtgc

SEQ ID NO: 1827086 - DNA, 15 bp, Homo sapiens
tccgaccgcggtgct

SEQ ID NO: 1827087 - DNA, 15 bp, Homo sapiens
ccgaccgcggtgctg

SEQ ID NO: 1827088 - DNA, 15 bp, Homo sapiens
cgaccgcggtgctgg

SEQ ID NO: 1827089 - DNA, 15 bp, Homo sapiens
gaccgcggtgctggg

SEQ ID NO: 1827090 - DNA, 15 bp, Homo sapiens
accgcggtgctgggt

SEQ ID NO: 1827091 - DNA, 15 bp, Homo sapiens
ccgcggtgctgggtg

SEQ ID NO: 1827092 - DNA, 15 bp, Homo sapiens
ggtgctgggtgggtg

SEQ ID NO: 1827093 - DNA, 15 bp, Homo sapiens
gtgctgggtgggtgc

SEQ ID NO: 1827094 - DNA, 15 bp, Homo sapiens
tgctgggtgggtgcc

SEQ ID NO: 1827095 - DNA, 15 bp, Homo sapiens
gctgggtgggtgcca

SEQ ID NO: 1827096 - DNA, 15 bp, Homo sapiens
ctgggtgggtgccac

SEQ ID NO: 1827097 - DNA, 15 bp, Homo sapiens
tgggtgggtgccact

SEQ ID NO: 1827098 - DNA, 15 bp, Homo sapiens
gggtgggtgccactc

SEQ ID NO: 1827099 - DNA, 15 bp, Homo sapiens
ggtgggtgccactct

SEQ ID NO: 1827100 - DNA, 15 bp, Homo sapiens
gtgggtgccactctt

SEQ ID NO: 1827101 - DNA, 15 bp, Homo sapiens
tgggtgccactcttc

SEQ ID NO: 1827102 - DNA, 15 bp, Homo sapiens
gggtgccactcttcc

SEQ ID NO: 1827103 - DNA, 15 bp, Homo sapiens
ggtgccactcttccc

SEQ ID NO: 1827104 - DNA, 15 bp, Homo sapiens
gtgccactcttccct

SEQ ID NO: 1827105 - DNA, 15 bp, Homo sapiens
tgccactcttccctg

SEQ ID NO: 1827106 - DNA, 15 bp, Homo sapiens
gccactcttccctgt

SEQ ID NO: 1827107 - DNA, 15 bp, Homo sapiens
ccactcttccctgtc

SEQ ID NO: 1827108 - DNA, 15 bp, Homo sapiens
cactcttccctgtcc

SEQ ID NO: 1827109 - DNA, 15 bp, Homo sapiens
actcttccctgtccg

SEQ ID NO: 1827110 - DNA, 15 bp, Homo sapiens
ctcttccctgtccga

SEQ ID NO: 1827111 - DNA, 15 bp, Homo sapiens
tcttccctgtccgac

SEQ ID NO: 1827112 - DNA, 15 bp, Homo sapiens
cttccctgtccgacc

SEQ ID NO: 1827113 - DNA, 15 bp, Homo sapiens
ttccctgtccgaccg

SEQ ID NO: 1827114 - DNA, 15 bp, Homo sapiens
tccctgtccgaccgc

SEQ ID NO: 1827115 - DNA, 15 bp, Homo sapiens
gtgggtgccactctc

SEQ ID NO: 1827116 - DNA, 15 bp, Homo sapiens
tgggtgccactctcc

SEQ ID NO: 1827117 - DNA, 15 bp, Homo sapiens
gggtgccactctccc

SEQ ID NO: 1827118 - DNA, 15 bp, Homo sapiens
ggtgccactctcccc

SEQ ID NO: 1827119 - DNA, 15 bp, Homo sapiens
gtgccactctcccct

SEQ ID NO: 1827120 - DNA, 15 bp, Homo sapiens
tgccactctcccctg

SEQ ID NO: 1827121 - DNA, 15 bp, Homo sapiens
gccactctcccctgt

SEQ ID NO: 1827122 - DNA, 15 bp, Homo sapiens
gggtgccactctccg

SEQ ID NO: 1827123 - DNA, 15 bp, Homo sapiens
ggtgccactctccgc

SEQ ID NO: 1827124 - DNA, 15 bp, Homo sapiens
gtgccactctccgct

SEQ ID NO: 1827125 - DNA, 15 bp, Homo sapiens
tgccactctccgctg

SEQ ID NO: 1827126 - DNA, 15 bp, Homo sapiens
gccactctccgctgt

SEQ ID NO: 1827127 - DNA, 15 bp, Homo sapiens
ccactctccgctgtc

SEQ ID NO: 1827128 - DNA, 15 bp, Homo sapiens
cactctccgctgtcc

SEQ ID NO: 1827129 - DNA, 15 bp, Homo sapiens
actctccgctgtccg

SEQ ID NO: 1827130 - DNA, 15 bp, Homo sapiens
ctctccgctgtccga

SEQ ID NO: 1827131 - DNA, 15 bp, Homo sapiens
tctccgctgtccgac

SEQ ID NO: 1827132 - DNA, 15 bp, Homo sapiens
ctccgctgtccgacc

SEQ ID NO: 1827133 - DNA, 15 bp, Homo sapiens
tccgctgtccgaccg

SEQ ID NO: 1827134 - DNA, 15 bp, Homo sapiens
ccgctgtccgaccgc

SEQ ID NO: 1827135 - DNA, 15 bp, Homo sapiens
cgctgtccgaccgcg

SEQ ID NO: 1827136 - DNA, 15 bp, Homo sapiens
gctgtccgaccgcgg

SEQ ID NO: 1827137 - DNA, 15 bp, Homo sapiens
cactctcccctgtct

SEQ ID NO: 1827138 - DNA, 15 bp, Homo sapiens
actctcccctgtctg

SEQ ID NO: 1827139 - DNA, 15 bp, Homo sapiens
ctctcccctgtctga

SEQ ID NO: 1827140 - DNA, 15 bp, Homo sapiens
tctcccctgtctgac

SEQ ID NO: 1827141 - DNA, 15 bp, Homo sapiens
ctcccctgtctgacc

SEQ ID NO: 1827142 - DNA, 15 bp, Homo sapiens
tcccctgtctgaccg

SEQ ID NO: 1827143 - DNA, 15 bp, Homo sapiens
cccctgtctgaccgc

SEQ ID NO: 1827144 - DNA, 15 bp, Homo sapiens
ccctgtctgaccgca

SEQ ID NO: 1827145 - DNA, 15 bp, Homo sapiens
cctgtctgaccgcag

SEQ ID NO: 1827146 - DNA, 15 bp, Homo sapiens
ctgtctgaccgcagc

SEQ ID NO: 1827147 - DNA, 15 bp, Homo sapiens
tgtctgaccgcagct

SEQ ID NO: 1827148 - DNA, 15 bp, Homo sapiens
gtctgaccgcagctc

SEQ ID NO: 1827149 - DNA, 15 bp, Homo sapiens
tctgaccgcagctct

SEQ ID NO: 1827150 - DNA, 15 bp, Homo sapiens
ctgaccgcagctctc

SEQ ID NO: 1827151 - DNA, 15 bp, Homo sapiens
tgaccgcagctctca

SEQ ID NO: 1827152 - DNA, 15 bp, Homo sapiens
gaccgcagctctcaa

SEQ ID NO: 1827153 - DNA, 15 bp, Homo sapiens
accgcagctctcaag

SEQ ID NO: 1827154 - DNA, 15 bp, Homo sapiens
ccgcagctctcaagt

SEQ ID NO: 1827155 - DNA, 15 bp, Homo sapiens
cgcagctctcaagtg

SEQ ID NO: 1827156 - DNA, 15 bp, Homo sapiens
gcagctctcaagtgt

SEQ ID NO: 1827157 - DNA, 15 bp, Homo sapiens
cagctctcaagtgtc

SEQ ID NO: 1827158 - DNA, 15 bp, Homo sapiens
agctctcaagtgtct

SEQ ID NO: 1827159 - DNA, 15 bp, Homo sapiens
gctctcaagtgtctc

SEQ ID NO: 1827160 - DNA, 15 bp, Homo sapiens
ctctcaagtgtctca

SEQ ID NO: 1827161 - DNA, 15 bp, Homo sapiens
tctcaagtgtctcag

SEQ ID NO: 1827162 - DNA, 15 bp, Homo sapiens
ctcaagtgtctcagg

SEQ ID NO: 1827163 - DNA, 15 bp, Homo sapiens
tcaagtgtctcaggg

SEQ ID NO: 1827164 - DNA, 15 bp, Homo sapiens
caagtgtctcagggg

SEQ ID NO: 1827165 - DNA, 15 bp, Homo sapiens
aagtgtctcaggggc

SEQ ID NO: 1827166 - DNA, 15 bp, Homo sapiens
agtgtctcaggggct

SEQ ID NO: 1827167 - DNA, 15 bp, Homo sapiens
gtgtctcaggggctg

SEQ ID NO: 1827168 - DNA, 15 bp, Homo sapiens
tgtctcaggggctgt

SEQ ID NO: 1827169 - DNA, 15 bp, Homo sapiens
gtctcaggggctgtg

SEQ ID NO: 1827170 - DNA, 15 bp, Homo sapiens
tctcaggggctgtgg

SEQ ID NO: 1827171 - DNA, 15 bp, Homo sapiens
ctcaggggctgtggc

SEQ ID NO: 1827172 - DNA, 15 bp, Homo sapiens
tcaggggctgtggct

SEQ ID NO: 1827173 - DNA, 15 bp, Homo sapiens
caggggctgtggctc

SEQ ID NO: 1827174 - DNA, 15 bp, Homo sapiens
aggggctgtggctct

SEQ ID NO: 1827175 - DNA, 15 bp, Homo sapiens
ggggctgtggctctg

SEQ ID NO: 1827176 - DNA, 15 bp, Homo sapiens
gggctgtggctctgg

SEQ ID NO: 1827177 - DNA, 15 bp, Homo sapiens
ggctgtggctctggg

SEQ ID NO: 1827178 - DNA, 15 bp, Homo sapiens
gctgtggctctgggc

SEQ ID NO: 1827179 - DNA, 15 bp, Homo sapiens
ctgtggctctgggct

SEQ ID NO: 1827180 - DNA, 15 bp, Homo sapiens
tgtggctctgggctt

SEQ ID NO: 1827181 - DNA, 15 bp, Homo sapiens
gtggctctgggcttc

SEQ ID NO: 1827182 - DNA, 15 bp, Homo sapiens
tggctctgggcttcg

SEQ ID NO: 1827183 - DNA, 15 bp, Homo sapiens
ggctctgggcttcgt

SEQ ID NO: 1827184 - DNA, 15 bp, Homo sapiens
gctctgggcttcgtg

SEQ ID NO: 1827185 - DNA, 15 bp, Homo sapiens
ctctgggcttcgtgc

SEQ ID NO: 1827186 - DNA, 15 bp, Homo sapiens
tctgggcttcgtgct

SEQ ID NO: 1827187 - DNA, 15 bp, Homo sapiens
ctgggcttcgtgctg

SEQ ID NO: 1827188 - DNA, 15 bp, Homo sapiens
tgggcttcgtgctgt

SEQ ID NO: 1827189 - DNA, 15 bp, Homo sapiens
gggcttcgtgctgtc

SEQ ID NO: 1827190 - DNA, 15 bp, Homo sapiens
ggcttcgtgctgtca

SEQ ID NO: 1827191 - DNA, 15 bp, Homo sapiens
gcttcgtgctgtcac

SEQ ID NO: 1827192 - DNA, 15 bp, Homo sapiens
cttcgtgctgtcact

SEQ ID NO: 1827193 - DNA, 15 bp, Homo sapiens
ttcgtgctgtcactt

SEQ ID NO: 1827194 - DNA, 15 bp, Homo sapiens
tcgtgctgtcacttc

SEQ ID NO: 1827195 - DNA, 15 bp, Homo sapiens
cgtgctgtcacttcc

SEQ ID NO: 1827196 - DNA, 15 bp, Homo sapiens
gtgctgtcacttcca

SEQ ID NO: 1827197 - DNA, 15 bp, Homo sapiens
tgctgtcacttccac

SEQ ID NO: 1827198 - DNA, 15 bp, Homo sapiens
gctgtcacttccaca

SEQ ID NO: 1827199 - DNA, 15 bp, Homo sapiens
ctgtcacttccacag

SEQ ID NO: 1827200 - DNA, 15 bp, Homo sapiens
tgtcacttccacaga

SEQ ID NO: 1827201 - DNA, 15 bp, Homo sapiens
gtcacttccacagac

SEQ ID NO: 1827202 - DNA, 15 bp, Homo sapiens
tcacttccacagaca

SEQ ID NO: 1827203 - DNA, 15 bp, Homo sapiens
cacttccacagacag

SEQ ID NO: 1827204 - DNA, 15 bp, Homo sapiens
acttccacagacaga

SEQ ID NO: 1827205 - DNA, 15 bp, Homo sapiens
cttccacagacagac

SEQ ID NO: 1827206 - DNA, 15 bp, Homo sapiens
ttccacagacagaca

SEQ ID NO: 1827207 - DNA, 15 bp, Homo sapiens
tccacagacagacag

SEQ ID NO: 1827208 - DNA, 15 bp, Homo sapiens
ccacagacagacaga

SEQ ID NO: 1827209 - DNA, 15 bp, Homo sapiens
cacagacagacagac

SEQ ID NO: 1827210 - DNA, 15 bp, Homo sapiens
acagacagacagaca

SEQ ID NO: 1827211 - DNA, 15 bp, Homo sapiens
cagacagacagacat

SEQ ID NO: 1827212 - DNA, 15 bp, Homo sapiens
agacagacagacatc

SEQ ID NO: 1827213 - DNA, 15 bp, Homo sapiens
gacagacagacatcc

SEQ ID NO: 1827214 - DNA, 15 bp, Homo sapiens
acagacagacatccc

SEQ ID NO: 1827215 - DNA, 15 bp, Homo sapiens
cagacagacatcccc

SEQ ID NO: 1827216 - DNA, 15 bp, Homo sapiens
agacagacatcccca

SEQ ID NO: 1827217 - DNA, 15 bp, Homo sapiens
gacagacatccccaa

SEQ ID NO: 1827218 - DNA, 15 bp, Homo sapiens
acagacatccccaaa

SEQ ID NO: 1827219 - DNA, 15 bp, Homo sapiens
cagacatccccaaaa

SEQ ID NO: 1827220 - DNA, 15 bp, Homo sapiens
agacatccccaaaag

SEQ ID NO: 1827221 - DNA, 15 bp, Homo sapiens
gacatccccaaaagg

SEQ ID NO: 1827222 - DNA, 15 bp, Homo sapiens
acatccccaaaaggg

SEQ ID NO: 1827223 - DNA, 15 bp, Homo sapiens
catccccaaaagggg

SEQ ID NO: 1827224 - DNA, 15 bp, Homo sapiens
atccccaaaagggga

SEQ ID NO: 1827225 - DNA, 15 bp, Homo sapiens
tccccaaaaggggag

SEQ ID NO: 1827226 - DNA, 15 bp, Homo sapiens
ccccaaaaggggagc

SEQ ID NO: 1827227 - DNA, 15 bp, Homo sapiens
cccaaaaggggagca

SEQ ID NO: 1827228 - DNA, 15 bp, Homo sapiens
ccaaaaggggagcaa

SEQ ID NO: 1827229 - DNA, 15 bp, Homo sapiens
caaaaggggagcaac

SEQ ID NO: 1827230 - DNA, 15 bp, Homo sapiens
aaaaggggagcaacc

SEQ ID NO: 1827231 - DNA, 15 bp, Homo sapiens
aaaggggagcaacca

SEQ ID NO: 1827232 - DNA, 15 bp, Homo sapiens
aaggggagcaaccat

SEQ ID NO: 1827233 - DNA, 15 bp, Homo sapiens
aggggagcaaccatg

SEQ ID NO: 1827234 - DNA, 15 bp, Homo sapiens
ggggagcaaccatgc

SEQ ID NO: 1827235 - DNA, 15 bp, Homo sapiens
gggagcaaccatgct

SEQ ID NO: 1827236 - DNA, 15 bp, Homo sapiens
ggagcaaccatgctg

SEQ ID NO: 1827237 - DNA, 15 bp, Homo sapiens
gagcaaccatgctgg

SEQ ID NO: 1827238 - DNA, 15 bp, Homo sapiens
agcaaccatgctggg

SEQ ID NO: 1827239 - DNA, 15 bp, Homo sapiens
gcaaccatgctgggc

SEQ ID NO: 1827240 - DNA, 15 bp, Homo sapiens
caaccatgctgggca

SEQ ID NO: 1827241 - DNA, 15 bp, Homo sapiens
aaccatgctgggcac

SEQ ID NO: 1827242 - DNA, 15 bp, Homo sapiens
accatgctgggcacg

SEQ ID NO: 1827243 - DNA, 15 bp, Homo sapiens
ccatgctgggcacga

SEQ ID NO: 1827244 - DNA, 15 bp, Homo sapiens
catgctgggcacgac

SEQ ID NO: 1827245 - DNA, 15 bp, Homo sapiens
atgctgggcacgact

SEQ ID NO: 1827246 - DNA, 15 bp, Homo sapiens
tgctgggcacgactg

SEQ ID NO: 1827247 - DNA, 15 bp, Homo sapiens
gctgggcacgactgc

SEQ ID NO: 1827248 - DNA, 15 bp, Homo sapiens
ctgggcacgactgct

SEQ ID NO: 1827249 - DNA, 15 bp, Homo sapiens
tgggcacgactgctg

SEQ ID NO: 1827250 - DNA, 15 bp, Homo sapiens
gggcacgactgctgt

SEQ ID NO: 1827251 - DNA, 15 bp, Homo sapiens
ggcacgactgctgtg

SEQ ID NO: 1827252 - DNA, 15 bp, Homo sapiens
gcacgactgctgtgg

SEQ ID NO: 1827253 - DNA, 15 bp, Homo sapiens
cacgactgctgtggc

SEQ ID NO: 1827254 - DNA, 15 bp, Homo sapiens
acgactgctgtggcc

SEQ ID NO: 1827255 - DNA, 15 bp, Homo sapiens
cgactgctgtggcca

SEQ ID NO: 1827256 - DNA, 15 bp, Homo sapiens
gactgctgtggccac

SEQ ID NO: 1827257 - DNA, 15 bp, Homo sapiens
actgctgtggccacc

SEQ ID NO: 1827258 - DNA, 15 bp, Homo sapiens
ctgctgtggccaccg

SEQ ID NO: 1827259 - DNA, 15 bp, Homo sapiens
tgctgtggccaccgt

SEQ ID NO: 1827260 - DNA, 15 bp, Homo sapiens
gctgtggccaccgtg

SEQ ID NO: 1827261 - DNA, 15 bp, Homo sapiens
ctgtggccaccgtgc

SEQ ID NO: 1827262 - DNA, 15 bp, Homo sapiens
tgtggccaccgtgct

SEQ ID NO: 1827263 - DNA, 15 bp, Homo sapiens
gtggccaccgtgctc

SEQ ID NO: 1827264 - DNA, 15 bp, Homo sapiens
tggccaccgtgctct

SEQ ID NO: 1827265 - DNA, 15 bp, Homo sapiens
ggccaccgtgctctc

SEQ ID NO: 1827266 - DNA, 15 bp, Homo sapiens
gccaccgtgctctca

SEQ ID NO: 1827267 - DNA, 15 bp, Homo sapiens
ccaccgtgctctcag

SEQ ID NO: 1827268 - DNA, 15 bp, Homo sapiens
caccgtgctctcagc

SEQ ID NO: 1827269 - DNA, 15 bp, Homo sapiens
accgtgctctcagcc

SEQ ID NO: 1827270 - DNA, 15 bp, Homo sapiens
ccgtgctctcagcca

SEQ ID NO: 1827271 - DNA, 15 bp, Homo sapiens
cgtgctctcagccac

SEQ ID NO: 1827272 - DNA, 15 bp, Homo sapiens
gtgctctcagccact

SEQ ID NO: 1827273 - DNA, 15 bp, Homo sapiens
tgctctcagccactt

SEQ ID NO: 1827274 - DNA, 15 bp, Homo sapiens
gctctcagccacttt

SEQ ID NO: 1827275 - DNA, 15 bp, Homo sapiens
ctctcagccactttc

SEQ ID NO: 1827276 - DNA, 15 bp, Homo sapiens
tctcagccactttcc

SEQ ID NO: 1827277 - DNA, 15 bp, Homo sapiens
ctcagccactttccc

SEQ ID NO: 1827278 - DNA, 15 bp, Homo sapiens
tcagccactttccca

SEQ ID NO: 1827279 - DNA, 15 bp, Homo sapiens
cagccactttcccat

SEQ ID NO: 1827280 - DNA, 15 bp, Homo sapiens
agccactttcccatg

SEQ ID NO: 1827281 - DNA, 15 bp, Homo sapiens
gccactttcccatgc

SEQ ID NO: 1827282 - DNA, 15 bp, Homo sapiens
ccactttcccatgcc

SEQ ID NO: 1827283 - DNA, 15 bp, Homo sapiens
cactttcccatgccc

SEQ ID NO: 1827284 - DNA, 15 bp, Homo sapiens
actttcccatgccca

SEQ ID NO: 1827285 - DNA, 15 bp, Homo sapiens
ctttcccatgcccaa

SEQ ID NO: 1827286 - DNA, 15 bp, Homo sapiens
tttcccatgcccaaa

SEQ ID NO: 1827287 - DNA, 15 bp, Homo sapiens
ttcccatgcccaaat

SEQ ID NO: 1827288 - DNA, 15 bp, Homo sapiens
tcccatgcccaaata

SEQ ID NO: 1827289 - DNA, 15 bp, Homo sapiens
cccatgcccaaataa

SEQ ID NO: 1827290 - DNA, 15 bp, Homo sapiens
ccatgcccaaataaa

SEQ ID NO: 1827291 - DNA, 15 bp, Homo sapiens
catgcccaaataaaa

SEQ ID NO: 1827292 - DNA, 15 bp, Homo sapiens
atgcccaaataaaac

SEQ ID NO: 1827293 - DNA, 15 bp, Homo sapiens
tgcccaaataaaacg

SEQ ID NO: 1827294 - DNA, 15 bp, Homo sapiens
gcccaaataaaacga

SEQ ID NO: 1827295 - DNA, 15 bp, Homo sapiens
cccaaataaaacgat

SEQ ID NO: 1827296 - DNA, 15 bp, Homo sapiens
ccaaataaaacgata

SEQ ID NO: 1827297 - DNA, 15 bp, Homo sapiens
caaataaaacgataa

SEQ ID NO: 1827298 - DNA, 15 bp, Homo sapiens
aaataaaacgataaa

SEQ ID NO: 1827299 - DNA, 15 bp, Homo sapiens
aataaaacgataaaa

SEQ ID NO: 1827300 - DNA, 15 bp, Homo sapiens
ataaaacgataaaag

SEQ ID NO: 1827301 - DNA, 15 bp, Homo sapiens
taaaacgataaaaga

SEQ ID NO: 1827302 - DNA, 15 bp, Homo sapiens
aaaacgataaaagac

SEQ ID NO: 1827303 - DNA, 15 bp, Homo sapiens
aaacgataaaagact

SEQ ID NO: 1827304 - DNA, 15 bp, Homo sapiens
aacgataaaagactg

SEQ ID NO: 1827305 - DNA, 15 bp, Homo sapiens
acgataaaagactgg

SEQ ID NO: 1827306 - DNA, 15 bp, Homo sapiens
cgataaaagactggg

SEQ ID NO: 1827307 - DNA, 15 bp, Homo sapiens
gataaaagactgggg

SEQ ID NO: 1827308 - DNA, 15 bp, Homo sapiens
ataaaagactggggg

SEQ ID NO: 1827309 - DNA, 15 bp, Homo sapiens
taaaagactgggggc

SEQ ID NO: 1827310 - DNA, 15 bp, Homo sapiens
aaaagactgggggct

SEQ ID NO: 1827311 - DNA, 15 bp, Homo sapiens
aaagactgggggctt

SEQ ID NO: 1827312 - DNA, 15 bp, Homo sapiens
aagactgggggcttc

SEQ ID NO: 1827313 - DNA, 15 bp, Homo sapiens
agactgggggcttct

SEQ ID NO: 1827314 - DNA, 15 bp, Homo sapiens
gactgggggcttctg

SEQ ID NO: 1827315 - DNA, 15 bp, Homo sapiens
actgggggcttctgc

SEQ ID NO: 1827316 - DNA, 15 bp, Homo sapiens
ctgggggcttctgcc

SEQ ID NO: 1827317 - DNA, 15 bp, Homo sapiens
tgggggcttctgccc

SEQ ID NO: 1827318 - DNA, 15 bp, Homo sapiens
gggggcttctgccca

SEQ ID NO: 1827319 - DNA, 15 bp, Homo sapiens
ggggcttctgcccat

SEQ ID NO: 1827320 - DNA, 15 bp, Homo sapiens
gggcttctgcccatc

SEQ ID NO: 1827321 - DNA, 15 bp, Homo sapiens
ggcttctgcccatcc

SEQ ID NO: 1827322 - DNA, 15 bp, Homo sapiens
gcttctgcccatcct

SEQ ID NO: 1827323 - DNA, 15 bp, Homo sapiens
cttctgcccatcctg

SEQ ID NO: 1827324 - DNA, 15 bp, Homo sapiens
ttctgcccatcctgc

SEQ ID NO: 1827325 - DNA, 15 bp, Homo sapiens
tctgcccatcctgcc

SEQ ID NO: 1827326 - DNA, 15 bp, Homo sapiens
ctgcccatcctgcct

SEQ ID NO: 1827327 - DNA, 15 bp, Homo sapiens
tgcccatcctgcctc

SEQ ID NO: 1827328 - DNA, 15 bp, Homo sapiens
gcccatcctgcctca

SEQ ID NO: 1827329 - DNA, 15 bp, Homo sapiens
cccatcctgcctcac

SEQ ID NO: 1827330 - DNA, 15 bp, Homo sapiens
ccatcctgcctcact

SEQ ID NO: 1827331 - DNA, 15 bp, Homo sapiens
catcctgcctcactt

SEQ ID NO: 1827332 - DNA, 15 bp, Homo sapiens
atcctgcctcacttg

SEQ ID NO: 1827333 - DNA, 15 bp, Homo sapiens
tcctgcctcacttga

SEQ ID NO: 1827334 - DNA, 15 bp, Homo sapiens
cctgcctcacttgac

SEQ ID NO: 1827335 - DNA, 15 bp, Homo sapiens
ctgcctcacttgacc

SEQ ID NO: 1827336 - DNA, 15 bp, Homo sapiens
tgcctcacttgacca

SEQ ID NO: 1827337 - DNA, 15 bp, Homo sapiens
gcctcacttgaccaa

SEQ ID NO: 1827338 - DNA, 15 bp, Homo sapiens
cctcacttgaccaag

SEQ ID NO: 1827339 - DNA, 15 bp, Homo sapiens
ctcacttgaccaaga

SEQ ID NO: 1827340 - DNA, 15 bp, Homo sapiens
tcacttgaccaagag

SEQ ID NO: 1827341 - DNA, 15 bp, Homo sapiens
cacttgaccaagagc

SEQ ID NO: 1827342 - DNA, 15 bp, Homo sapiens
acttgaccaagagcc

SEQ ID NO: 1827343 - DNA, 15 bp, Homo sapiens
cttgaccaagagccc

SEQ ID NO: 1827344 - DNA, 15 bp, Homo sapiens
ttgaccaagagccca

SEQ ID NO: 1827345 - DNA, 15 bp, Homo sapiens
tgaccaagagcccag

SEQ ID NO: 1827346 - DNA, 15 bp, Homo sapiens
gaccaagagcccaga

SEQ ID NO: 1827347 - DNA, 15 bp, Homo sapiens
accaagagcccagaa

SEQ ID NO: 1827348 - DNA, 15 bp, Homo sapiens
ccaagagcccagaag

SEQ ID NO: 1827349 - DNA, 15 bp, Homo sapiens
caagagcccagaaga

SEQ ID NO: 1827350 - DNA, 15 bp, Homo sapiens
aagagcccagaagag

SEQ ID NO: 1827351 - DNA, 15 bp, Homo sapiens
agagcccagaagagg

SEQ ID NO: 1827352 - DNA, 15 bp, Homo sapiens
gagcccagaagagga

SEQ ID NO: 1827353 - DNA, 15 bp, Homo sapiens
agcccagaagaggat

SEQ ID NO: 1827354 - DNA, 15 bp, Homo sapiens
gcccagaagaggatg

SEQ ID NO: 1827355 - DNA, 15 bp, Homo sapiens
cccagaagaggatgc

SEQ ID NO: 1827356 - DNA, 15 bp, Homo sapiens
ccagaagaggatgcg

SEQ ID NO: 1827357 - DNA, 15 bp, Homo sapiens
cagaagaggatgcga

SEQ ID NO: 1827358 - DNA, 15 bp, Homo sapiens
agaagaggatgcgac

SEQ ID NO: 1827359 - DNA, 15 bp, Homo sapiens
gaagaggatgcgaca

SEQ ID NO: 1827360 - DNA, 15 bp, Homo sapiens
aagaggatgcgacac

SEQ ID NO: 1827361 - DNA, 15 bp, Homo sapiens
agaggatgcgacacc

SEQ ID NO: 1827362 - DNA, 15 bp, Homo sapiens
gaggatgcgacaccc

SEQ ID NO: 1827363 - DNA, 15 bp, Homo sapiens
aggatgcgacaccca

SEQ ID NO: 1827364 - DNA, 15 bp, Homo sapiens
ggatgcgacacccag

SEQ ID NO: 1827365 - DNA, 15 bp, Homo sapiens
gatgcgacacccagg

SEQ ID NO: 1827366 - DNA, 15 bp, Homo sapiens
atgcgacacccaggg

SEQ ID NO: 1827367 - DNA, 15 bp, Homo sapiens
tgcgacacccagggc

SEQ ID NO: 1827368 - DNA, 15 bp, Homo sapiens
gcgacacccagggcc

SEQ ID NO: 1827369 - DNA, 15 bp, Homo sapiens
cgacacccagggcct

SEQ ID NO: 1827370 - DNA, 15 bp, Homo sapiens
gacacccagggcctc

SEQ ID NO: 1827371 - DNA, 15 bp, Homo sapiens
acacccagggcctca

SEQ ID NO: 1827372 - DNA, 15 bp, Homo sapiens
cacccagggcctcat

SEQ ID NO: 1827373 - DNA, 15 bp, Homo sapiens
acccagggcctcatg

SEQ ID NO: 1827374 - DNA, 15 bp, Homo sapiens
cccagggcctcatgg

SEQ ID NO: 1827375 - DNA, 15 bp, Homo sapiens
ccagggcctcatggg

SEQ ID NO: 1827376 - DNA, 15 bp, Homo sapiens
cagggcctcatggga

SEQ ID NO: 1827377 - DNA, 15 bp, Homo sapiens
agggcctcatgggac

SEQ ID NO: 1827378 - DNA, 15 bp, Homo sapiens
gggcctcatgggacc

SEQ ID NO: 1827379 - DNA, 15 bp, Homo sapiens
ggcctcatgggacca

SEQ ID NO: 1827380 - DNA, 15 bp, Homo sapiens
gcctcatgggaccac

SEQ ID NO: 1827381 - DNA, 15 bp, Homo sapiens
cctcatgggaccacc

SEQ ID NO: 1827382 - DNA, 15 bp, Homo sapiens
ctcatgggaccaccg

SEQ ID NO: 1827383 - DNA, 15 bp, Homo sapiens
tcatgggaccaccgg

SEQ ID NO: 1827384 - DNA, 15 bp, Homo sapiens
catgggaccaccggc

SEQ ID NO: 1827385 - DNA, 15 bp, Homo sapiens
atgggaccaccggct

SEQ ID NO: 1827386 - DNA, 15 bp, Homo sapiens
tgggaccaccggctg

SEQ ID NO: 1827387 - DNA, 15 bp, Homo sapiens
gggaccaccggctgg

SEQ ID NO: 1827388 - DNA, 15 bp, Homo sapiens
ggaccaccggctggc

SEQ ID NO: 1827389 - DNA, 15 bp, Homo sapiens
gaccaccggctggca

SEQ ID NO: 1827390 - DNA, 15 bp, Homo sapiens
accaccggctggcag

SEQ ID NO: 1827391 - DNA, 15 bp, Homo sapiens
ccaccggctggcagg

SEQ ID NO: 1827392 - DNA, 15 bp, Homo sapiens
caccggctggcaggg

SEQ ID NO: 1827393 - DNA, 15 bp, Homo sapiens
accggctggcagggg

SEQ ID NO: 1827394 - DNA, 15 bp, Homo sapiens
ccggctggcaggggt

SEQ ID NO: 1827395 - DNA, 15 bp, Homo sapiens
cggctggcaggggtt

SEQ ID NO: 1827396 - DNA, 15 bp, Homo sapiens
ggctggcaggggttc

SEQ ID NO: 1827397 - DNA, 15 bp, Homo sapiens
gctggcaggggttct

SEQ ID NO: 1827398 - DNA, 15 bp, Homo sapiens
ctggcaggggttctg

SEQ ID NO: 1827399 - DNA, 15 bp, Homo sapiens
tggcaggggttctgc

SEQ ID NO: 1827400 - DNA, 15 bp, Homo sapiens
ggcaggggttctgct

SEQ ID NO: 1827401 - DNA, 15 bp, Homo sapiens
gcaggggttctgctc

SEQ ID NO: 1827402 - DNA, 15 bp, Homo sapiens
caggggttctgctca

SEQ ID NO: 1827403 - DNA, 15 bp, Homo sapiens
aggggttctgctcac

SEQ ID NO: 1827404 - DNA, 15 bp, Homo sapiens
ggggttctgctcact

SEQ ID NO: 1827405 - DNA, 15 bp, Homo sapiens
gggttctgctcactg

SEQ ID NO: 1827406 - DNA, 15 bp, Homo sapiens
ggttctgctcactgg

SEQ ID NO: 1827407 - DNA, 15 bp, Homo sapiens
gttctgctcactggg

SEQ ID NO: 1827408 - DNA, 15 bp, Homo sapiens
ttctgctcactgggt

SEQ ID NO: 1827409 - DNA, 15 bp, Homo sapiens
tctgctcactgggtt

SEQ ID NO: 1827410 - DNA, 15 bp, Homo sapiens
ctgctcactgggttt

SEQ ID NO: 1827411 - DNA, 15 bp, Homo sapiens
tgctcactgggttta

SEQ ID NO: 1827412 - DNA, 15 bp, Homo sapiens
gctcactgggtttat

SEQ ID NO: 1827413 - DNA, 15 bp, Homo sapiens
ctcactgggtttatg

SEQ ID NO: 1827414 - DNA, 15 bp, Homo sapiens
tcactgggtttatgg

SEQ ID NO: 1827415 - DNA, 15 bp, Homo sapiens
cactgggtttatggg

SEQ ID NO: 1827416 - DNA, 15 bp, Homo sapiens
actgggtttatgggt

SEQ ID NO: 1827417 - DNA, 15 bp, Homo sapiens
ctgggtttatgggtg

SEQ ID NO: 1827418 - DNA, 15 bp, Homo sapiens
tgggtttatgggtga

SEQ ID NO: 1827419 - DNA, 15 bp, Homo sapiens
gggtttatgggtgag

SEQ ID NO: 1827420 - DNA, 15 bp, Homo sapiens
ggtttatgggtgaga

SEQ ID NO: 1827421 - DNA, 15 bp, Homo sapiens
gtttatgggtgagac

SEQ ID NO: 1827422 - DNA, 15 bp, Homo sapiens
tttatgggtgagacg

SEQ ID NO: 1827423 - DNA, 15 bp, Homo sapiens
ttatgggtgagacga

SEQ ID NO: 1827424 - DNA, 15 bp, Homo sapiens
tatgggtgagacgag

SEQ ID NO: 1827425 - DNA, 15 bp, Homo sapiens
atgggtgagacgagc

SEQ ID NO: 1827426 - DNA, 15 bp, Homo sapiens
tgggtgagacgagca

SEQ ID NO: 1827427 - DNA, 15 bp, Homo sapiens
gggtgagacgagcac

SEQ ID NO: 1827428 - DNA, 15 bp, Homo sapiens
ggtgagacgagcact

SEQ ID NO: 1827429 - DNA, 15 bp, Homo sapiens
gtgagacgagcactc

SEQ ID NO: 1827430 - DNA, 15 bp, Homo sapiens
tgagacgagcactcc

SEQ ID NO: 1827431 - DNA, 15 bp, Homo sapiens
gagacgagcactccc

SEQ ID NO: 1827432 - DNA, 15 bp, Homo sapiens
agacgagcactccca

SEQ ID NO: 1827433 - DNA, 15 bp, Homo sapiens
gacgagcactcccag

SEQ ID NO: 1827434 - DNA, 15 bp, Homo sapiens
acgagcactcccagg

SEQ ID NO: 1827435 - DNA, 15 bp, Homo sapiens
cgagcactcccagga

SEQ ID NO: 1827436 - DNA, 15 bp, Homo sapiens
gagcactcccaggag

SEQ ID NO: 1827437 - DNA, 15 bp, Homo sapiens
agcactcccaggagg

SEQ ID NO: 1827438 - DNA, 15 bp, Homo sapiens
gcactcccaggaggg

SEQ ID NO: 1827439 - DNA, 15 bp, Homo sapiens
cactcccaggagggc

SEQ ID NO: 1827440 - DNA, 15 bp, Homo sapiens
actcccaggagggcc

SEQ ID NO: 1827441 - DNA, 15 bp, Homo sapiens
ctcccaggagggcca

SEQ ID NO: 1827442 - DNA, 15 bp, Homo sapiens
tcccaggagggccac

SEQ ID NO: 1827443 - DNA, 15 bp, Homo sapiens
cccaggagggccact

SEQ ID NO: 1827444 - DNA, 15 bp, Homo sapiens
ccaggagggccactg

SEQ ID NO: 1827445 - DNA, 15 bp, Homo sapiens
caggagggccactgg

SEQ ID NO: 1827446 - DNA, 15 bp, Homo sapiens
aggagggccactggg

SEQ ID NO: 1827447 - DNA, 15 bp, Homo sapiens
ggagggccactgggc

SEQ ID NO: 1827448 - DNA, 15 bp, Homo sapiens
gagggccactgggcc

SEQ ID NO: 1827449 - DNA, 15 bp, Homo sapiens
agggccactgggccg

SEQ ID NO: 1827450 - DNA, 15 bp, Homo sapiens
gggccactgggccgg

SEQ ID NO: 1827451 - DNA, 15 bp, Homo sapiens
ggccactgggccggg

SEQ ID NO: 1827452 - DNA, 15 bp, Homo sapiens
gccactgggccggga

SEQ ID NO: 1827453 - DNA, 15 bp, Homo sapiens
ccactgggccgggaa

SEQ ID NO: 1827454 - DNA, 15 bp, Homo sapiens
cactgggccgggaag

SEQ ID NO: 1827455 - DNA, 15 bp, Homo sapiens
actgggccgggaaga

SEQ ID NO: 1827456 - DNA, 15 bp, Homo sapiens
ctgggccgggaagaa

SEQ ID NO: 1827457 - DNA, 15 bp, Homo sapiens
tgggccgggaagaac

SEQ ID NO: 1827458 - DNA, 15 bp, Homo sapiens
gggccgggaagaact

SEQ ID NO: 1827459 - DNA, 15 bp, Homo sapiens
ggccgggaagaactg

SEQ ID NO: 1827460 - DNA, 15 bp, Homo sapiens
gccgggaagaactgt

SEQ ID NO: 1827461 - DNA, 15 bp, Homo sapiens
ccgggaagaactgtg

SEQ ID NO: 1827462 - DNA, 15 bp, Homo sapiens
cgggaagaactgtgg

SEQ ID NO: 1827463 - DNA, 15 bp, Homo sapiens
gggaagaactgtgga

SEQ ID NO: 1827464 - DNA, 15 bp, Homo sapiens
ggaagaactgtggag

SEQ ID NO: 1827465 - DNA, 15 bp, Homo sapiens
gaagaactgtggaga

SEQ ID NO: 1827466 - DNA, 15 bp, Homo sapiens
aagaactgtggagaa

SEQ ID NO: 1827467 - DNA, 15 bp, Homo sapiens
agaactgtggagaat

SEQ ID NO: 1827468 - DNA, 15 bp, Homo sapiens
gaactgtggagaatc

SEQ ID NO: 1827469 - DNA, 15 bp, Homo sapiens
aactgtggagaatcg

SEQ ID NO: 1827470 - DNA, 15 bp, Homo sapiens
actgtggagaatcgg

SEQ ID NO: 1827471 - DNA, 15 bp, Homo sapiens
ctgtggagaatcggg

SEQ ID NO: 1827472 - DNA, 15 bp, Homo sapiens
tgtggagaatcgggg

SEQ ID NO: 1827473 - DNA, 15 bp, Homo sapiens
gtggagaatcggggc

SEQ ID NO: 1827474 - DNA, 15 bp, Homo sapiens
tggagaatcggggca

SEQ ID NO: 1827475 - DNA, 15 bp, Homo sapiens
ggagaatcggggcac

SEQ ID NO: 1827476 - DNA, 15 bp, Homo sapiens
gagaatcggggcacg

SEQ ID NO: 1827477 - DNA, 15 bp, Homo sapiens
agaatcggggcacgc

SEQ ID NO: 1827478 - DNA, 15 bp, Homo sapiens
gaatcggggcacgcc

SEQ ID NO: 1827479 - DNA, 15 bp, Homo sapiens
aatcggggcacgccc

SEQ ID NO: 1827480 - DNA, 15 bp, Homo sapiens
atcggggcacgccct

SEQ ID NO: 1827481 - DNA, 15 bp, Homo sapiens
tcggggcacgccctg

SEQ ID NO: 1827482 - DNA, 15 bp, Homo sapiens
cggggcacgccctgt

SEQ ID NO: 1827483 - DNA, 15 bp, Homo sapiens
ggggcacgccctgtc

SEQ ID NO: 1827484 - DNA, 15 bp, Homo sapiens
gggcacgccctgtcc

SEQ ID NO: 1827485 - DNA, 15 bp, Homo sapiens
ggcacgccctgtcct

SEQ ID NO: 1827486 - DNA, 15 bp, Homo sapiens
gcacgccctgtcctc

SEQ ID NO: 1827487 - DNA, 15 bp, Homo sapiens
cacgccctgtcctcc

SEQ ID NO: 1827488 - DNA, 15 bp, Homo sapiens
acgccctgtcctccc

SEQ ID NO: 1827489 - DNA, 15 bp, Homo sapiens
cgccctgtcctccca

SEQ ID NO: 1827490 - DNA, 15 bp, Homo sapiens
gccctgtcctcccag

SEQ ID NO: 1827491 - DNA, 15 bp, Homo sapiens
ccctgtcctcccagc

SEQ ID NO: 1827492 - DNA, 15 bp, Homo sapiens
cctgtcctcccagct

SEQ ID NO: 1827493 - DNA, 15 bp, Homo sapiens
ctgtcctcccagctg

SEQ ID NO: 1827494 - DNA, 15 bp, Homo sapiens
tgtcctcccagctgc

SEQ ID NO: 1827495 - DNA, 15 bp, Homo sapiens
gtcctcccagctgcc

SEQ ID NO: 1827496 - DNA, 15 bp, Homo sapiens
tcctcccagctgcca

SEQ ID NO: 1827497 - DNA, 15 bp, Homo sapiens
cctcccagctgccag

SEQ ID NO: 1827498 - DNA, 15 bp, Homo sapiens
ctcccagctgccagg

SEQ ID NO: 1827499 - DNA, 15 bp, Homo sapiens
tcccagctgccaggg

SEQ ID NO: 1827500 - DNA, 15 bp, Homo sapiens
cccagctgccagggc

SEQ ID NO: 1827501 - DNA, 15 bp, Homo sapiens
ccagctgccagggca

SEQ ID NO: 1827502 - DNA, 15 bp, Homo sapiens
cagctgccagggcac

SEQ ID NO: 1827503 - DNA, 15 bp, Homo sapiens
agctgccagggcaca

SEQ ID NO: 1827504 - DNA, 15 bp, Homo sapiens
gctgccagggcacag

SEQ ID NO: 1827505 - DNA, 15 bp, Homo sapiens
ctgccagggcacagc

SEQ ID NO: 1827506 - DNA, 15 bp, Homo sapiens
tgccagggcacagca

SEQ ID NO: 1827507 - DNA, 15 bp, Homo sapiens
gccagggcacagcat

SEQ ID NO: 1827508 - DNA, 15 bp, Homo sapiens
ccagggcacagcatc

SEQ ID NO: 1827509 - DNA, 15 bp, Homo sapiens
cagggcacagcatcc

SEQ ID NO: 1827510 - DNA, 15 bp, Homo sapiens
agggcacagcatccc

SEQ ID NO: 1827511 - DNA, 15 bp, Homo sapiens
gggcacagcatccct

SEQ ID NO: 1827512 - DNA, 15 bp, Homo sapiens
ggcacagcatccctt

SEQ ID NO: 1827513 - DNA, 15 bp, Homo sapiens
gcacagcatcccttc

SEQ ID NO: 1827514 - DNA, 15 bp, Homo sapiens
cacagcatcccttcc

SEQ ID NO: 1827515 - DNA, 15 bp, Homo sapiens
acagcatcccttccc

SEQ ID NO: 1827516 - DNA, 15 bp, Homo sapiens
cagcatcccttcccc

SEQ ID NO: 1827517 - DNA, 15 bp, Homo sapiens
agcatcccttcccca

SEQ ID NO: 1827518 - DNA, 15 bp, Homo sapiens
gcatcccttccccac

SEQ ID NO: 1827519 - DNA, 15 bp, Homo sapiens
catcccttccccacc

SEQ ID NO: 1827520 - DNA, 15 bp, Homo sapiens
atcccttccccacct

SEQ ID NO: 1827521 - DNA, 15 bp, Homo sapiens
tcccttccccacctc

SEQ ID NO: 1827522 - DNA, 15 bp, Homo sapiens
cccttccccacctca

SEQ ID NO: 1827523 - DNA, 15 bp, Homo sapiens
ccttccccacctcaa

SEQ ID NO: 1827524 - DNA, 15 bp, Homo sapiens
cttccccacctcaac

SEQ ID NO: 1827525 - DNA, 15 bp, Homo sapiens
ttccccacctcaaca

SEQ ID NO: 1827526 - DNA, 15 bp, Homo sapiens
tccccacctcaacac

SEQ ID NO: 1827527 - DNA, 15 bp, Homo sapiens
ccccacctcaacacc

SEQ ID NO: 1827528 - DNA, 15 bp, Homo sapiens
cccacctcaacaccc

SEQ ID NO: 1827529 - DNA, 15 bp, Homo sapiens
ccacctcaacaccca

SEQ ID NO: 1827530 - DNA, 15 bp, Homo sapiens
cacctcaacacccag

SEQ ID NO: 1827531 - DNA, 15 bp, Homo sapiens
acctcaacacccaga

SEQ ID NO: 1827532 - DNA, 15 bp, Homo sapiens
cctcaacacccagac

SEQ ID NO: 1827533 - DNA, 15 bp, Homo sapiens
ctcaacacccagacc

SEQ ID NO: 1827534 - DNA, 15 bp, Homo sapiens
tcaacacccagaccc

SEQ ID NO: 1827535 - DNA, 15 bp, Homo sapiens
caacacccagacccc

SEQ ID NO: 1827536 - DNA, 15 bp, Homo sapiens
aacacccagacccca

SEQ ID NO: 1827537 - DNA, 15 bp, Homo sapiens
acacccagaccccag

SEQ ID NO: 1827538 - DNA, 15 bp, Homo sapiens
cacccagaccccaga

SEQ ID NO: 1827539 - DNA, 15 bp, Homo sapiens
acccagaccccagat

SEQ ID NO: 1827540 - DNA, 15 bp, Homo sapiens
cccagaccccagatt

SEQ ID NO: 1827541 - DNA, 15 bp, Homo sapiens
ccagaccccagattc

SEQ ID NO: 1827542 - DNA, 15 bp, Homo sapiens
cagaccccagattca

SEQ ID NO: 1827543 - DNA, 15 bp, Homo sapiens
agaccccagattcac

SEQ ID NO: 1827544 - DNA, 15 bp, Homo sapiens
gaccccagattcacc

SEQ ID NO: 1827545 - DNA, 15 bp, Homo sapiens
accccagattcaccc

SEQ ID NO: 1827546 - DNA, 15 bp, Homo sapiens
ccccagattcacccc

SEQ ID NO: 1827547 - DNA, 15 bp, Homo sapiens
cccagattcacccca

SEQ ID NO: 1827548 - DNA, 15 bp, Homo sapiens
ccagattcaccccag

SEQ ID NO: 1827549 - DNA, 15 bp, Homo sapiens
cagattcaccccagt

SEQ ID NO: 1827550 - DNA, 15 bp, Homo sapiens
agattcaccccagtt

SEQ ID NO: 1827551 - DNA, 15 bp, Homo sapiens
gattcaccccagttc

SEQ ID NO: 1827552 - DNA, 15 bp, Homo sapiens
attcaccccagttca

SEQ ID NO: 1827553 - DNA, 15 bp, Homo sapiens
ttcaccccagttcac

SEQ ID NO: 1827554 - DNA, 15 bp, Homo sapiens
tcaccccagttcact

SEQ ID NO: 1827555 - DNA, 15 bp, Homo sapiens
caccccagttcactt

SEQ ID NO: 1827556 - DNA, 15 bp, Homo sapiens
accccagttcacttg

SEQ ID NO: 1827557 - DNA, 15 bp, Homo sapiens
ccccagttcacttgt

SEQ ID NO: 1827558 - DNA, 15 bp, Homo sapiens
cccagttcacttgtc

SEQ ID NO: 1827559 - DNA, 15 bp, Homo sapiens
ccagttcacttgtcc

SEQ ID NO: 1827560 - DNA, 15 bp, Homo sapiens
cagttcacttgtccc

SEQ ID NO: 1827561 - DNA, 15 bp, Homo sapiens
agttcacttgtcccc

SEQ ID NO: 1827562 - DNA, 15 bp, Homo sapiens
gttcacttgtcccca

SEQ ID NO: 1827563 - DNA, 15 bp, Homo sapiens
ttcacttgtccccac

SEQ ID NO: 1827564 - DNA, 15 bp, Homo sapiens
tcacttgtccccaca

SEQ ID NO: 1827565 - DNA, 15 bp, Homo sapiens
cacttgtccccacac

SEQ ID NO: 1827566 - DNA, 15 bp, Homo sapiens
acttgtccccacacg

SEQ ID NO: 1827567 - DNA, 15 bp, Homo sapiens
cttgtccccacacga

SEQ ID NO: 1827568 - DNA, 15 bp, Homo sapiens
ttgtccccacacgag

SEQ ID NO: 1827569 - DNA, 15 bp, Homo sapiens
tgtccccacacgagc

SEQ ID NO: 1827570 - DNA, 15 bp, Homo sapiens
gtccccacacgagcc

SEQ ID NO: 1827571 - DNA, 15 bp, Homo sapiens
tccccacacgagcca

SEQ ID NO: 1827572 - DNA, 15 bp, Homo sapiens
ccccacacgagccac

SEQ ID NO: 1827573 - DNA, 15 bp, Homo sapiens
cccacacgagccaca

SEQ ID NO: 1827574 - DNA, 15 bp, Homo sapiens
ccacacgagccacag

SEQ ID NO: 1827575 - DNA, 15 bp, Homo sapiens
cacacgagccacagg

SEQ ID NO: 1827576 - DNA, 15 bp, Homo sapiens
acacgagccacaggc

SEQ ID NO: 1827577 - DNA, 15 bp, Homo sapiens
cacgagccacaggct

SEQ ID NO: 1827578 - DNA, 15 bp, Homo sapiens
acgagccacaggctg

SEQ ID NO: 1827579 - DNA, 15 bp, Homo sapiens
cgagccacaggctgc

SEQ ID NO: 1827580 - DNA, 15 bp, Homo sapiens
gagccacaggctgcc

SEQ ID NO: 1827581 - DNA, 15 bp, Homo sapiens
agccacaggctgcca

SEQ ID NO: 1827582 - DNA, 15 bp, Homo sapiens
gccacaggctgccac

SEQ ID NO: 1827583 - DNA, 15 bp, Homo sapiens
ccacaggctgccacc

SEQ ID NO: 1827584 - DNA, 15 bp, Homo sapiens
cacaggctgccacct

SEQ ID NO: 1827585 - DNA, 15 bp, Homo sapiens
acaggctgccacctg

SEQ ID NO: 1827586 - DNA, 15 bp, Homo sapiens
caggctgccacctgg

SEQ ID NO: 1827587 - DNA, 15 bp, Homo sapiens
aggctgccacctggg

SEQ ID NO: 1827588 - DNA, 15 bp, Homo sapiens
ggctgccacctgggg

SEQ ID NO: 1827589 - DNA, 15 bp, Homo sapiens
gctgccacctggggc

SEQ ID NO: 1827590 - DNA, 15 bp, Homo sapiens
ctgccacctggggca

SEQ ID NO: 1827591 - DNA, 15 bp, Homo sapiens
tgccacctggggcag

SEQ ID NO: 1827592 - DNA, 15 bp, Homo sapiens
gccacctggggcagg

SEQ ID NO: 1827593 - DNA, 15 bp, Homo sapiens
ccacctggggcaggc

SEQ ID NO: 1827594 - DNA, 15 bp, Homo sapiens
cacctggggcaggct

SEQ ID NO: 1827595 - DNA, 15 bp, Homo sapiens
acctggggcaggctg

SEQ ID NO: 1827596 - DNA, 15 bp, Homo sapiens
cctggggcaggctgg

SEQ ID NO: 1827597 - DNA, 15 bp, Homo sapiens
ctggggcaggctggc

SEQ ID NO: 1827598 - DNA, 15 bp, Homo sapiens
tggggcaggctggcc

SEQ ID NO: 1827599 - DNA, 15 bp, Homo sapiens
ggggcaggctggccc

SEQ ID NO: 1827600 - DNA, 15 bp, Homo sapiens
gggcaggctggcccc

SEQ ID NO: 1827601 - DNA, 15 bp, Homo sapiens
ggcaggctggcccca

SEQ ID NO: 1827602 - DNA, 15 bp, Homo sapiens
gcaggctggccccac

SEQ ID NO: 1827603 - DNA, 15 bp, Homo sapiens
caggctggccccacc

SEQ ID NO: 1827604 - DNA, 15 bp, Homo sapiens
aggctggccccacct

SEQ ID NO: 1827605 - DNA, 15 bp, Homo sapiens
ggctggccccacctt

SEQ ID NO: 1827606 - DNA, 15 bp, Homo sapiens
gctggccccaccttg

SEQ ID NO: 1827607 - DNA, 15 bp, Homo sapiens
ctggccccaccttgg

SEQ ID NO: 1827608 - DNA, 15 bp, Homo sapiens
tggccccaccttggg

SEQ ID NO: 1827609 - DNA, 15 bp, Homo sapiens
ggccccaccttgggg

SEQ ID NO: 1827610 - DNA, 15 bp, Homo sapiens
gccccaccttggggt

SEQ ID NO: 1827611 - DNA, 15 bp, Homo sapiens
ccccaccttggggtt

SEQ ID NO: 1827612 - DNA, 15 bp, Homo sapiens
cccaccttggggtta

SEQ ID NO: 1827613 - DNA, 15 bp, Homo sapiens
ccaccttggggttag

SEQ ID NO: 1827614 - DNA, 15 bp, Homo sapiens
caccttggggttaga

SEQ ID NO: 1827615 - DNA, 15 bp, Homo sapiens
accttggggttagat

SEQ ID NO: 1827616 - DNA, 15 bp, Homo sapiens
ccttggggttagatg

SEQ ID NO: 1827617 - DNA, 15 bp, Homo sapiens
cttggggttagatgc

SEQ ID NO: 1827618 - DNA, 15 bp, Homo sapiens
ttggggttagatgca

SEQ ID NO: 1827619 - DNA, 15 bp, Homo sapiens
tggggttagatgcag

SEQ ID NO: 1827620 - DNA, 15 bp, Homo sapiens
ggggttagatgcagg

SEQ ID NO: 1827621 - DNA, 15 bp, Homo sapiens
gggttagatgcaggt

SEQ ID NO: 1827622 - DNA, 15 bp, Homo sapiens
ggttagatgcaggtc

SEQ ID NO: 1827623 - DNA, 15 bp, Homo sapiens
gttagatgcaggtcc

SEQ ID NO: 1827624 - DNA, 15 bp, Homo sapiens
ttagatgcaggtccc

SEQ ID NO: 1827625 - DNA, 15 bp, Homo sapiens
tagatgcaggtcccc

SEQ ID NO: 1827626 - DNA, 15 bp, Homo sapiens
agatgcaggtcccct

SEQ ID NO: 1827627 - DNA, 15 bp, Homo sapiens
gatgcaggtcccctt

SEQ ID NO: 1827628 - DNA, 15 bp, Homo sapiens
atgcaggtccccttg

SEQ ID NO: 1827629 - DNA, 15 bp, Homo sapiens
tgcaggtccccttgc

SEQ ID NO: 1827630 - DNA, 15 bp, Homo sapiens
gcaggtccccttgcc

SEQ ID NO: 1827631 - DNA, 15 bp, Homo sapiens
caggtccccttgccc

SEQ ID NO: 1827632 - DNA, 15 bp, Homo sapiens
aggtccccttgcccc

SEQ ID NO: 1827633 - DNA, 15 bp, Homo sapiens
ggtccccttgcccca

SEQ ID NO: 1827634 - DNA, 15 bp, Homo sapiens
gtccccttgccccag

SEQ ID NO: 1827635 - DNA, 15 bp, Homo sapiens
tccccttgccccaga

SEQ ID NO: 1827636 - DNA, 15 bp, Homo sapiens
ccccttgccccagaa

SEQ ID NO: 1827637 - DNA, 15 bp, Homo sapiens
cccttgccccagaag

SEQ ID NO: 1827638 - DNA, 15 bp, Homo sapiens
ccttgccccagaagg

SEQ ID NO: 1827639 - DNA, 15 bp, Homo sapiens
cttgccccagaagga

SEQ ID NO: 1827640 - DNA, 15 bp, Homo sapiens
ttgccccagaaggag

SEQ ID NO: 1827641 - DNA, 15 bp, Homo sapiens
tgccccagaaggaga

SEQ ID NO: 1827642 - DNA, 15 bp, Homo sapiens
gccccagaaggagac

SEQ ID NO: 1827643 - DNA, 15 bp, Homo sapiens
ccccagaaggagact

SEQ ID NO: 1827644 - DNA, 15 bp, Homo sapiens
cccagaaggagactg

SEQ ID NO: 1827645 - DNA, 15 bp, Homo sapiens
ccagaaggagactgc

SEQ ID NO: 1827646 - DNA, 15 bp, Homo sapiens
cagaaggagactgca

SEQ ID NO: 1827647 - DNA, 15 bp, Homo sapiens
agaaggagactgcag

SEQ ID NO: 1827648 - DNA, 15 bp, Homo sapiens
gaaggagactgcagc

SEQ ID NO: 1827649 - DNA, 15 bp, Homo sapiens
aaggagactgcagcc

SEQ ID NO: 1827650 - DNA, 15 bp, Homo sapiens
aggagactgcagccc

SEQ ID NO: 1827651 - DNA, 15 bp, Homo sapiens
ggagactgcagcccc

SEQ ID NO: 1827652 - DNA, 15 bp, Homo sapiens
gagactgcagcccct

SEQ ID NO: 1827653 - DNA, 15 bp, Homo sapiens
agactgcagcccctg

SEQ ID NO: 1827654 - DNA, 15 bp, Homo sapiens
gactgcagcccctgc

SEQ ID NO: 1827655 - DNA, 15 bp, Homo sapiens
actgcagcccctgca

SEQ ID NO: 1827656 - DNA, 15 bp, Homo sapiens
ctgcagcccctgcag

SEQ ID NO: 1827657 - DNA, 15 bp, Homo sapiens
tgcagcccctgcaga

SEQ ID NO: 1827658 - DNA, 15 bp, Homo sapiens
gcagcccctgcagac

SEQ ID NO: 1827659 - DNA, 15 bp, Homo sapiens
agcccctgcagacct

SEQ ID NO: 1827660 - DNA, 15 bp, Homo sapiens
gcccctgcagaccta

SEQ ID NO: 1827661 - DNA, 15 bp, Homo sapiens
cccctgcagacctag

SEQ ID NO: 1827662 - DNA, 15 bp, Homo sapiens
ccctgcagacctaga

SEQ ID NO: 1827663 - DNA, 15 bp, Homo sapiens
cctgcagacctagaa

SEQ ID NO: 1827664 - DNA, 15 bp, Homo sapiens
ctgcagacctagaaa

SEQ ID NO: 1827665 - DNA, 15 bp, Homo sapiens
tgcagacctagaaat

SEQ ID NO: 1827666 - DNA, 15 bp, Homo sapiens
gcagacctagaaatg

SEQ ID NO: 1827667 - DNA, 15 bp, Homo sapiens
cagacctagaaatgg

SEQ ID NO: 1827668 - DNA, 15 bp, Homo sapiens
agacctagaaatggc

SEQ ID NO: 1827669 - DNA, 15 bp, Homo sapiens
gacctagaaatggcc

SEQ ID NO: 1827670 - DNA, 15 bp, Homo sapiens
acctagaaatggcca

SEQ ID NO: 1827671 - DNA, 15 bp, Homo sapiens
cctagaaatggccac

SEQ ID NO: 1827672 - DNA, 15 bp, Homo sapiens
ctagaaatggccaca

SEQ ID NO: 1827673 - DNA, 15 bp, Homo sapiens
tagaaatggccacag

SEQ ID NO: 1827674 - DNA, 15 bp, Homo sapiens
agaaatggccacagc

SEQ ID NO: 1827675 - DNA, 15 bp, Homo sapiens
gaaatggccacagcc

SEQ ID NO: 1827676 - DNA, 15 bp, Homo sapiens
aaatggccacagccc

SEQ ID NO: 1827677 - DNA, 15 bp, Homo sapiens
aatggccacagccca

SEQ ID NO: 1827678 - DNA, 15 bp, Homo sapiens
atggccacagcccat

SEQ ID NO: 1827679 - DNA, 15 bp, Homo sapiens
tggccacagcccatc

SEQ ID NO: 1827680 - DNA, 15 bp, Homo sapiens
ggccacagcccatcc

SEQ ID NO: 1827681 - DNA, 15 bp, Homo sapiens
gccacagcccatccc

SEQ ID NO: 1827682 - DNA, 15 bp, Homo sapiens
ccacagcccatcccc

SEQ ID NO: 1827683 - DNA, 15 bp, Homo sapiens
cacagcccatcccca

SEQ ID NO: 1827684 - DNA, 15 bp, Homo sapiens
acagcccatccccat

SEQ ID NO: 1827685 - DNA, 15 bp, Homo sapiens
cagcccatccccatg

SEQ ID NO: 1827686 - DNA, 15 bp, Homo sapiens
agcccatccccatgc

SEQ ID NO: 1827687 - DNA, 15 bp, Homo sapiens
gcccatccccatgca

SEQ ID NO: 1827688 - DNA, 15 bp, Homo sapiens
cccatccccatgcac

SEQ ID NO: 1827689 - DNA, 15 bp, Homo sapiens
ccatccccatgcacc

SEQ ID NO: 1827690 - DNA, 15 bp, Homo sapiens
catccccatgcacca

SEQ ID NO: 1827691 - DNA, 15 bp, Homo sapiens
atccccatgcaccag

SEQ ID NO: 1827692 - DNA, 15 bp, Homo sapiens
tccccatgcaccagg

SEQ ID NO: 1827693 - DNA, 15 bp, Homo sapiens
ccccatgcaccaggg

SEQ ID NO: 1827694 - DNA, 15 bp, Homo sapiens
cccatgcaccagggg

SEQ ID NO: 1827695 - DNA, 15 bp, Homo sapiens
ccatgcaccaggggg

SEQ ID NO: 1827696 - DNA, 15 bp, Homo sapiens
catgcaccagggggt

SEQ ID NO: 1827697 - DNA, 15 bp, Homo sapiens
atgcaccagggggtg

SEQ ID NO: 1827698 - DNA, 15 bp, Homo sapiens
tgcaccagggggtga

SEQ ID NO: 1827699 - DNA, 15 bp, Homo sapiens
gcaccagggggtgag

SEQ ID NO: 1827700 - DNA, 15 bp, Homo sapiens
caccagggggtgagg

SEQ ID NO: 1827701 - DNA, 15 bp, Homo sapiens
accagggggtgaggt

SEQ ID NO: 1827702 - DNA, 15 bp, Homo sapiens
ccagggggtgaggtg

SEQ ID NO: 1827703 - DNA, 15 bp, Homo sapiens
cagggggtgaggtgg

SEQ ID NO: 1827704 - DNA, 15 bp, Homo sapiens
agggggtgaggtggc

SEQ ID NO: 1827705 - DNA, 15 bp, Homo sapiens
gggggtgaggtggca

SEQ ID NO: 1827706 - DNA, 15 bp, Homo sapiens
ggggtgaggtggcag

SEQ ID NO: 1827707 - DNA, 15 bp, Homo sapiens
gggtgaggtggcagg

SEQ ID NO: 1827708 - DNA, 15 bp, Homo sapiens
ggtgaggtggcaggt

SEQ ID NO: 1827709 - DNA, 15 bp, Homo sapiens
gtgaggtggcaggtg

SEQ ID NO: 1827710 - DNA, 15 bp, Homo sapiens
tgaggtggcaggtgg

SEQ ID NO: 1827711 - DNA, 15 bp, Homo sapiens
gaggtggcaggtggt

SEQ ID NO: 1827712 - DNA, 15 bp, Homo sapiens
aggtggcaggtggtg

SEQ ID NO: 1827713 - DNA, 15 bp, Homo sapiens
ggtggcaggtggtgg

SEQ ID NO: 1827714 - DNA, 15 bp, Homo sapiens
gtggcaggtggtgga

SEQ ID NO: 1827715 - DNA, 15 bp, Homo sapiens
tggcaggtggtggaa

SEQ ID NO: 1827716 - DNA, 15 bp, Homo sapiens
ggcaggtggtggaaa

SEQ ID NO: 1827717 - DNA, 15 bp, Homo sapiens
gcaggtggtggaaag

SEQ ID NO: 1827718 - DNA, 15 bp, Homo sapiens
caggtggtggaaagg

SEQ ID NO: 1827719 - DNA, 15 bp, Homo sapiens
aggtggtggaaaggg

SEQ ID NO: 1827720 - DNA, 15 bp, Homo sapiens
ggtggtggaaagggc

SEQ ID NO: 1827721 - DNA, 15 bp, Homo sapiens
gtggtggaaagggcc

SEQ ID NO: 1827722 - DNA, 15 bp, Homo sapiens
tggtggaaagggcct

SEQ ID NO: 1827723 - DNA, 15 bp, Homo sapiens
ggtggaaagggcctg

SEQ ID NO: 1827724 - DNA, 15 bp, Homo sapiens
gtggaaagggcctga

SEQ ID NO: 1827725 - DNA, 15 bp, Homo sapiens
tggaaagggcctgag

SEQ ID NO: 1827726 - DNA, 15 bp, Homo sapiens
ggaaagggcctgagg

SEQ ID NO: 1827727 - DNA, 15 bp, Homo sapiens
gaaagggcctgaggg

SEQ ID NO: 1827728 - DNA, 15 bp, Homo sapiens
aaagggcctgagggg

SEQ ID NO: 1827729 - DNA, 15 bp, Homo sapiens
aagggcctgaggggg

SEQ ID NO: 1827730 - DNA, 15 bp, Homo sapiens
agggcctgagggggg

SEQ ID NO: 1827731 - DNA, 15 bp, Homo sapiens
gggcctgaggggggc

SEQ ID NO: 1827732 - DNA, 15 bp, Homo sapiens
ggcctgaggggggct

SEQ ID NO: 1827733 - DNA, 15 bp, Homo sapiens
gcctgaggggggctt

SEQ ID NO: 1827734 - DNA, 15 bp, Homo sapiens
cctgaggggggcttc

SEQ ID NO: 1827735 - DNA, 15 bp, Homo sapiens
ctgaggggggcttct

SEQ ID NO: 1827736 - DNA, 15 bp, Homo sapiens
tgaggggggcttctt

SEQ ID NO: 1827737 - DNA, 15 bp, Homo sapiens
gaggggggcttcttc

SEQ ID NO: 1827738 - DNA, 15 bp, Homo sapiens
aggggggcttcttcc

SEQ ID NO: 1827739 - DNA, 15 bp, Homo sapiens
ggggggcttcttcct

SEQ ID NO: 1827740 - DNA, 15 bp, Homo sapiens
gggggcttcttcctt

SEQ ID NO: 1827741 - DNA, 15 bp, Homo sapiens
ggggcttcttccttc

SEQ ID NO: 1827742 - DNA, 15 bp, Homo sapiens
gggcttcttccttcc

SEQ ID NO: 1827743 - DNA, 15 bp, Homo sapiens
ggcttcttccttcca

SEQ ID NO: 1827744 - DNA, 15 bp, Homo sapiens
gcttcttccttccag

SEQ ID NO: 1827745 - DNA, 15 bp, Homo sapiens
cttcttccttccagg

SEQ ID NO: 1827746 - DNA, 15 bp, Homo sapiens
ttcttccttccaggc

SEQ ID NO: 1827747 - DNA, 15 bp, Homo sapiens
tcttccttccaggcg

SEQ ID NO: 1827748 - DNA, 15 bp, Homo sapiens
cttccttccaggcga

SEQ ID NO: 1827749 - DNA, 15 bp, Homo sapiens
ttccttccaggcgag

SEQ ID NO: 1827750 - DNA, 15 bp, Homo sapiens
tccttccaggcgagc

SEQ ID NO: 1827751 - DNA, 15 bp, Homo sapiens
ccttccaggcgagca

SEQ ID NO: 1827752 - DNA, 15 bp, Homo sapiens
cttccaggcgagcac

SEQ ID NO: 1827753 - DNA, 15 bp, Homo sapiens
ttccaggcgagcacg

SEQ ID NO: 1827754 - DNA, 15 bp, Homo sapiens
tccaggcgagcacga

SEQ ID NO: 1827755 - DNA, 15 bp, Homo sapiens
ccaggcgagcacgac

SEQ ID NO: 1827756 - DNA, 15 bp, Homo sapiens
caggcgagcacgacc

SEQ ID NO: 1827757 - DNA, 15 bp, Homo sapiens
aggcgagcacgacct

SEQ ID NO: 1827758 - DNA, 15 bp, Homo sapiens
ggcgagcacgacctc

SEQ ID NO: 1827759 - DNA, 15 bp, Homo sapiens
gcgagcacgacctca

SEQ ID NO: 1827760 - DNA, 15 bp, Homo sapiens
cgagcacgacctcag

SEQ ID NO: 1827761 - DNA, 15 bp, Homo sapiens
gagcacgacctcagc

SEQ ID NO: 1827762 - DNA, 15 bp, Homo sapiens
agcacgacctcagcg

SEQ ID NO: 1827763 - DNA, 15 bp, Homo sapiens
gcacgacctcagcga

SEQ ID NO: 1827764 - DNA, 15 bp, Homo sapiens
cacgacctcagcgag

SEQ ID NO: 1827765 - DNA, 15 bp, Homo sapiens
acgacctcagcgagc

SEQ ID NO: 1827766 - DNA, 15 bp, Homo sapiens
cgacctcagcgagca

SEQ ID NO: 1827767 - DNA, 15 bp, Homo sapiens
gacctcagcgagcac

SEQ ID NO: 1827768 - DNA, 15 bp, Homo sapiens
acctcagcgagcacg

SEQ ID NO: 1827769 - DNA, 15 bp, Homo sapiens
cctcagcgagcacga

SEQ ID NO: 1827770 - DNA, 15 bp, Homo sapiens
ctcagcgagcacgac

SEQ ID NO: 1827771 - DNA, 15 bp, Homo sapiens
tcagcgagcacgacg

SEQ ID NO: 1827772 - DNA, 15 bp, Homo sapiens
cagcgagcacgacgg

SEQ ID NO: 1827773 - DNA, 15 bp, Homo sapiens
agcgagcacgacggg

SEQ ID NO: 1827774 - DNA, 15 bp, Homo sapiens
gcgagcacgacgggg

SEQ ID NO: 1827775 - DNA, 15 bp, Homo sapiens
cgagcacgacgggga

SEQ ID NO: 1827776 - DNA, 15 bp, Homo sapiens
gagcacgacggggat

SEQ ID NO: 1827777 - DNA, 15 bp, Homo sapiens
agcacgacggggatg

SEQ ID NO: 1827778 - DNA, 15 bp, Homo sapiens
gcacgacggggatga

SEQ ID NO: 1827779 - DNA, 15 bp, Homo sapiens
cacgacggggatgag

SEQ ID NO: 1827780 - DNA, 15 bp, Homo sapiens
acgacggggatgagc

SEQ ID NO: 1827781 - DNA, 15 bp, Homo sapiens
cgacggggatgagca

SEQ ID NO: 1827782 - DNA, 15 bp, Homo sapiens
gacggggatgagcag

SEQ ID NO: 1827783 - DNA, 15 bp, Homo sapiens
acggggatgagcaga

SEQ ID NO: 1827784 - DNA, 15 bp, Homo sapiens
cggggatgagcagag

SEQ ID NO: 1827785 - DNA, 15 bp, Homo sapiens
ggggatgagcagagc

SEQ ID NO: 1827786 - DNA, 15 bp, Homo sapiens
gggatgagcagagcc

SEQ ID NO: 1827787 - DNA, 15 bp, Homo sapiens
ggatgagcagagccg

SEQ ID NO: 1827788 - DNA, 15 bp, Homo sapiens
gatgagcagagccgg

SEQ ID NO: 1827789 - DNA, 15 bp, Homo sapiens
atgagcagagccggc

SEQ ID NO: 1827790 - DNA, 15 bp, Homo sapiens
tgagcagagccggcg

SEQ ID NO: 1827791 - DNA, 15 bp, Homo sapiens
gagcagagccggcgg

SEQ ID NO: 1827792 - DNA, 15 bp, Homo sapiens
agcagagccggcggg

SEQ ID NO: 1827793 - DNA, 15 bp, Homo sapiens
gcagagccggcgggt

SEQ ID NO: 1827794 - DNA, 15 bp, Homo sapiens
cagagccggcgggtg

SEQ ID NO: 1827795 - DNA, 15 bp, Homo sapiens
agagccggcgggtgg

SEQ ID NO: 1827796 - DNA, 15 bp, Homo sapiens
gagccggcgggtggc

SEQ ID NO: 1827797 - DNA, 15 bp, Homo sapiens
agccggcgggtggcg

SEQ ID NO: 1827798 - DNA, 15 bp, Homo sapiens
gccggcgggtggcgc

SEQ ID NO: 1827799 - DNA, 15 bp, Homo sapiens
ccggcgggtggcgca

SEQ ID NO: 1827800 - DNA, 15 bp, Homo sapiens
cggcgggtggcgcag

SEQ ID NO: 1827801 - DNA, 15 bp, Homo sapiens
ggcgggtggcgcagg

SEQ ID NO: 1827802 - DNA, 15 bp, Homo sapiens
gcgggtggcgcaggt

SEQ ID NO: 1827803 - DNA, 15 bp, Homo sapiens
cgggtggcgcaggtc

SEQ ID NO: 1827804 - DNA, 15 bp, Homo sapiens
gggtggcgcaggtca

SEQ ID NO: 1827805 - DNA, 15 bp, Homo sapiens
ggtggcgcaggtcat

SEQ ID NO: 1827806 - DNA, 15 bp, Homo sapiens
gtggcgcaggtcatc

SEQ ID NO: 1827807 - DNA, 15 bp, Homo sapiens
tggcgcaggtcatca

SEQ ID NO: 1827808 - DNA, 15 bp, Homo sapiens
ggcgcaggtcatcat

SEQ ID NO: 1827809 - DNA, 15 bp, Homo sapiens
gcgcaggtcatcatc

SEQ ID NO: 1827810 - DNA, 15 bp, Homo sapiens
cgcaggtcatcatcc

SEQ ID NO: 1827811 - DNA, 15 bp, Homo sapiens
gcaggtcatcatccc

SEQ ID NO: 1827812 - DNA, 15 bp, Homo sapiens
caggtcatcatcccc

SEQ ID NO: 1827813 - DNA, 15 bp, Homo sapiens
aggtcatcatcccca

SEQ ID NO: 1827814 - DNA, 15 bp, Homo sapiens
ggtcatcatccccag

SEQ ID NO: 1827815 - DNA, 15 bp, Homo sapiens
gtcatcatccccagc

SEQ ID NO: 1827816 - DNA, 15 bp, Homo sapiens
tcatcatccccagca

SEQ ID NO: 1827817 - DNA, 15 bp, Homo sapiens
catcatccccagcac

SEQ ID NO: 1827818 - DNA, 15 bp, Homo sapiens
atcatccccagcacg

SEQ ID NO: 1827819 - DNA, 15 bp, Homo sapiens
tcatccccagcacgt

SEQ ID NO: 1827820 - DNA, 15 bp, Homo sapiens
catccccagcacgta

SEQ ID NO: 1827821 - DNA, 15 bp, Homo sapiens
atccccagcacgtac

SEQ ID NO: 1827822 - DNA, 15 bp, Homo sapiens
tccccagcacgtacg

SEQ ID NO: 1827823 - DNA, 15 bp, Homo sapiens
ccccagcacgtacgt

SEQ ID NO: 1827824 - DNA, 15 bp, Homo sapiens
cccagcacgtacgtc

SEQ ID NO: 1827825 - DNA, 15 bp, Homo sapiens
ccagcacgtacgtcc

SEQ ID NO: 1827826 - DNA, 15 bp, Homo sapiens
cagcacgtacgtccc

SEQ ID NO: 1827827 - DNA, 15 bp, Homo sapiens
agcacgtacgtcccg

SEQ ID NO: 1827828 - DNA, 15 bp, Homo sapiens
gcacgtacgtcccgg

SEQ ID NO: 1827829 - DNA, 15 bp, Homo sapiens
cacgtacgtcccggg

SEQ ID NO: 1827830 - DNA, 15 bp, Homo sapiens
acgtacgtcccgggc

SEQ ID NO: 1827831 - DNA, 15 bp, Homo sapiens
cgtacgtcccgggca

SEQ ID NO: 1827832 - DNA, 15 bp, Homo sapiens
gtacgtcccgggcac

SEQ ID NO: 1827833 - DNA, 15 bp, Homo sapiens
tacgtcccgggcacc

SEQ ID NO: 1827834 - DNA, 15 bp, Homo sapiens
acgtcccgggcacca

SEQ ID NO: 1827835 - DNA, 15 bp, Homo sapiens
cgtcccgggcaccac

SEQ ID NO: 1827836 - DNA, 15 bp, Homo sapiens
gtcccgggcaccacc

SEQ ID NO: 1827837 - DNA, 15 bp, Homo sapiens
tcccgggcaccacca

SEQ ID NO: 1827838 - DNA, 15 bp, Homo sapiens
cccgggcaccaccaa

SEQ ID NO: 1827839 - DNA, 15 bp, Homo sapiens
ccgggcaccaccaac

SEQ ID NO: 1827840 - DNA, 15 bp, Homo sapiens
cgggcaccaccaacc

SEQ ID NO: 1827841 - DNA, 15 bp, Homo sapiens
gggcaccaccaacca

SEQ ID NO: 1827842 - DNA, 15 bp, Homo sapiens
ggcaccaccaaccac

SEQ ID NO: 1827843 - DNA, 15 bp, Homo sapiens
gcaccaccaaccacg

SEQ ID NO: 1827844 - DNA, 15 bp, Homo sapiens
caccaccaaccacga

SEQ ID NO: 1827845 - DNA, 15 bp, Homo sapiens
accaccaaccacgac

SEQ ID NO: 1827846 - DNA, 15 bp, Homo sapiens
ccaccaaccacgaca

SEQ ID NO: 1827847 - DNA, 15 bp, Homo sapiens
caccaaccacgacat

SEQ ID NO: 1827848 - DNA, 15 bp, Homo sapiens
accaaccacgacatc

SEQ ID NO: 1827849 - DNA, 15 bp, Homo sapiens
ccaaccacgacatcg

SEQ ID NO: 1827850 - DNA, 15 bp, Homo sapiens
caaccacgacatcgc

SEQ ID NO: 1827851 - DNA, 15 bp, Homo sapiens
aaccacgacatcgcg

SEQ ID NO: 1827852 - DNA, 15 bp, Homo sapiens
accacgacatcgcgc

SEQ ID NO: 1827853 - DNA, 15 bp, Homo sapiens
ccacgacatcgcgct

SEQ ID NO: 1827854 - DNA, 15 bp, Homo sapiens
cacgacatcgcgctg

SEQ ID NO: 1827855 - DNA, 15 bp, Homo sapiens
acgacatcgcgctgc

SEQ ID NO: 1827856 - DNA, 15 bp, Homo sapiens
cgacatcgcgctgct

SEQ ID NO: 1827857 - DNA, 15 bp, Homo sapiens
gacatcgcgctgctc

SEQ ID NO: 1827858 - DNA, 15 bp, Homo sapiens
acatcgcgctgctcc

SEQ ID NO: 1827859 - DNA, 15 bp, Homo sapiens
catcgcgctgctccg

SEQ ID NO: 1827860 - DNA, 15 bp, Homo sapiens
atcgcgctgctccgc

SEQ ID NO: 1827861 - DNA, 15 bp, Homo sapiens
tcgcgctgctccgcc

SEQ ID NO: 1827862 - DNA, 15 bp, Homo sapiens
cgcgctgctccgcct

SEQ ID NO: 1827863 - DNA, 15 bp, Homo sapiens
gcgctgctccgcctg

SEQ ID NO: 1827864 - DNA, 15 bp, Homo sapiens
cgctgctccgcctgc

SEQ ID NO: 1827865 - DNA, 15 bp, Homo sapiens
gctgctccgcctgca

SEQ ID NO: 1827866 - DNA, 15 bp, Homo sapiens
ctgctccgcctgcac

SEQ ID NO: 1827867 - DNA, 15 bp, Homo sapiens
tgctccgcctgcacc

SEQ ID NO: 1827868 - DNA, 15 bp, Homo sapiens
gctccgcctgcacca

SEQ ID NO: 1827869 - DNA, 15 bp, Homo sapiens
ctccgcctgcaccag

SEQ ID NO: 1827870 - DNA, 15 bp, Homo sapiens
tccgcctgcaccagc

SEQ ID NO: 1827871 - DNA, 15 bp, Homo sapiens
ccgcctgcaccagcc

SEQ ID NO: 1827872 - DNA, 15 bp, Homo sapiens
cgcctgcaccagccc

SEQ ID NO: 1827873 - DNA, 15 bp, Homo sapiens
gcctgcaccagcccg

SEQ ID NO: 1827874 - DNA, 15 bp, Homo sapiens
cctgcaccagcccgt

SEQ ID NO: 1827875 - DNA, 15 bp, Homo sapiens
ctgcaccagcccgtg

SEQ ID NO: 1827876 - DNA, 15 bp, Homo sapiens
tgcaccagcccgtgg

SEQ ID NO: 1827877 - DNA, 15 bp, Homo sapiens
gcaccagcccgtggt

SEQ ID NO: 1827878 - DNA, 15 bp, Homo sapiens
caccagcccgtggtc

SEQ ID NO: 1827879 - DNA, 15 bp, Homo sapiens
accagcccgtggtcc

SEQ ID NO: 1827880 - DNA, 15 bp, Homo sapiens
ccagcccgtggtcct

SEQ ID NO: 1827881 - DNA, 15 bp, Homo sapiens
cagcccgtggtcctc

SEQ ID NO: 1827882 - DNA, 15 bp, Homo sapiens
agcccgtggtcctca

SEQ ID NO: 1827883 - DNA, 15 bp, Homo sapiens
gcccgtggtcctcac

SEQ ID NO: 1827884 - DNA, 15 bp, Homo sapiens
cccgtggtcctcact

SEQ ID NO: 1827885 - DNA, 15 bp, Homo sapiens
ccgtggtcctcactg

SEQ ID NO: 1827886 - DNA, 15 bp, Homo sapiens
cgtggtcctcactga

SEQ ID NO: 1827887 - DNA, 15 bp, Homo sapiens
gtggtcctcactgac

SEQ ID NO: 1827888 - DNA, 15 bp, Homo sapiens
tggtcctcactgacc

SEQ ID NO: 1827889 - DNA, 15 bp, Homo sapiens
ggtcctcactgacca

SEQ ID NO: 1827890 - DNA, 15 bp, Homo sapiens
gtcctcactgaccat

SEQ ID NO: 1827891 - DNA, 15 bp, Homo sapiens
tcctcactgaccatg

SEQ ID NO: 1827892 - DNA, 15 bp, Homo sapiens
cctcactgaccatgt

SEQ ID NO: 1827893 - DNA, 15 bp, Homo sapiens
ctcactgaccatgtg

SEQ ID NO: 1827894 - DNA, 15 bp, Homo sapiens
tcactgaccatgtgg

SEQ ID NO: 1827895 - DNA, 15 bp, Homo sapiens
cactgaccatgtggt

SEQ ID NO: 1827896 - DNA, 15 bp, Homo sapiens
actgaccatgtggtg

SEQ ID NO: 1827897 - DNA, 15 bp, Homo sapiens
ctgaccatgtggtgc

SEQ ID NO: 1827898 - DNA, 15 bp, Homo sapiens
tgaccatgtggtgcc

SEQ ID NO: 1827899 - DNA, 15 bp, Homo sapiens
gaccatgtggtgccc

SEQ ID NO: 1827900 - DNA, 15 bp, Homo sapiens
accatgtggtgcccc

SEQ ID NO: 1827901 - DNA, 15 bp, Homo sapiens
ccatgtggtgcccct

SEQ ID NO: 1827902 - DNA, 15 bp, Homo sapiens
catgtggtgcccctc

SEQ ID NO: 1827903 - DNA, 15 bp, Homo sapiens
atgtggtgcccctct

SEQ ID NO: 1827904 - DNA, 15 bp, Homo sapiens
tgtggtgcccctctg

SEQ ID NO: 1827905 - DNA, 15 bp, Homo sapiens
gtggtgcccctctgc

SEQ ID NO: 1827906 - DNA, 15 bp, Homo sapiens
tggtgcccctctgcc

SEQ ID NO: 1827907 - DNA, 15 bp, Homo sapiens
ggtgcccctctgcct

SEQ ID NO: 1827908 - DNA, 15 bp, Homo sapiens
gtgcccctctgcctg

SEQ ID NO: 1827909 - DNA, 15 bp, Homo sapiens
tgcccctctgcctgc

SEQ ID NO: 1827910 - DNA, 15 bp, Homo sapiens
gcccctctgcctgcc

SEQ ID NO: 1827911 - DNA, 15 bp, Homo sapiens
ccctctgcctgcccg

SEQ ID NO: 1827912 - DNA, 15 bp, Homo sapiens
cctctgcctgcccga

SEQ ID NO: 1827913 - DNA, 15 bp, Homo sapiens
ctctgcctgcccgaa

SEQ ID NO: 1827914 - DNA, 15 bp, Homo sapiens
tctgcctgcccgaac

SEQ ID NO: 1827915 - DNA, 15 bp, Homo sapiens
ctgcctgcccgaacg

SEQ ID NO: 1827916 - DNA, 15 bp, Homo sapiens
tgcctgcccgaacgg

SEQ ID NO: 1827917 - DNA, 15 bp, Homo sapiens
gcctgcccgaacgga

SEQ ID NO: 1827918 - DNA, 15 bp, Homo sapiens
cctgcccgaacggac

SEQ ID NO: 1827919 - DNA, 15 bp, Homo sapiens
ctgcccgaacggacg

SEQ ID NO: 1827920 - DNA, 15 bp, Homo sapiens
tgcccgaacggacgt

SEQ ID NO: 1827921 - DNA, 15 bp, Homo sapiens
gcccgaacggacgtt

SEQ ID NO: 1827922 - DNA, 15 bp, Homo sapiens
cccgaacggacgttc

SEQ ID NO: 1827923 - DNA, 15 bp, Homo sapiens
ccgaacggacgttct

SEQ ID NO: 1827924 - DNA, 15 bp, Homo sapiens
cgaacggacgttctc

SEQ ID NO: 1827925 - DNA, 15 bp, Homo sapiens
gaacggacgttctct

SEQ ID NO: 1827926 - DNA, 15 bp, Homo sapiens
aacggacgttctctg

SEQ ID NO: 1827927 - DNA, 15 bp, Homo sapiens
acggacgttctctga

SEQ ID NO: 1827928 - DNA, 15 bp, Homo sapiens
cggacgttctctgag

SEQ ID NO: 1827929 - DNA, 15 bp, Homo sapiens
ggacgttctctgaga

SEQ ID NO: 1827930 - DNA, 15 bp, Homo sapiens
gacgttctctgagag

SEQ ID NO: 1827931 - DNA, 15 bp, Homo sapiens
acgttctctgagagg

SEQ ID NO: 1827932 - DNA, 15 bp, Homo sapiens
cgttctctgagagga

SEQ ID NO: 1827933 - DNA, 15 bp, Homo sapiens
gttctctgagaggac

SEQ ID NO: 1827934 - DNA, 15 bp, Homo sapiens
ttctctgagaggacg

SEQ ID NO: 1827935 - DNA, 15 bp, Homo sapiens
tctctgagaggacgc

SEQ ID NO: 1827936 - DNA, 15 bp, Homo sapiens
ctctgagaggacgct

SEQ ID NO: 1827937 - DNA, 15 bp, Homo sapiens
tctgagaggacgctg

SEQ ID NO: 1827938 - DNA, 15 bp, Homo sapiens
ctgagaggacgctgg

SEQ ID NO: 1827939 - DNA, 15 bp, Homo sapiens
tgagaggacgctggc

SEQ ID NO: 1827940 - DNA, 15 bp, Homo sapiens
gagaggacgctggcc

SEQ ID NO: 1827941 - DNA, 15 bp, Homo sapiens
agaggacgctggcct

SEQ ID NO: 1827942 - DNA, 15 bp, Homo sapiens
gaggacgctggcctt

SEQ ID NO: 1827943 - DNA, 15 bp, Homo sapiens
aggacgctggccttc

SEQ ID NO: 1827944 - DNA, 15 bp, Homo sapiens
ggacgctggccttcg

SEQ ID NO: 1827945 - DNA, 15 bp, Homo sapiens
gacgctggccttcgt

SEQ ID NO: 1827946 - DNA, 15 bp, Homo sapiens
acgctggccttcgtg

SEQ ID NO: 1827947 - DNA, 15 bp, Homo sapiens
cgctggccttcgtgc

SEQ ID NO: 1827948 - DNA, 15 bp, Homo sapiens
gctggccttcgtgcg

SEQ ID NO: 1827949 - DNA, 15 bp, Homo sapiens
ctggccttcgtgcgc

SEQ ID NO: 1827950 - DNA, 15 bp, Homo sapiens
tggccttcgtgcgct

SEQ ID NO: 1827951 - DNA, 15 bp, Homo sapiens
ggccttcgtgcgctt

SEQ ID NO: 1827952 - DNA, 15 bp, Homo sapiens
gccttcgtgcgcttc

SEQ ID NO: 1827953 - DNA, 15 bp, Homo sapiens
ccttcgtgcgcttct

SEQ ID NO: 1827954 - DNA, 15 bp, Homo sapiens
cttcgtgcgcttctc

SEQ ID NO: 1827955 - DNA, 15 bp, Homo sapiens
ttcgtgcgcttctca

SEQ ID NO: 1827956 - DNA, 15 bp, Homo sapiens
tcgtgcgcttctcat

SEQ ID NO: 1827957 - DNA, 15 bp, Homo sapiens
cgtgcgcttctcatt

SEQ ID NO: 1827958 - DNA, 15 bp, Homo sapiens
gtgcgcttctcattg

SEQ ID NO: 1827959 - DNA, 15 bp, Homo sapiens
tgcgcttctcattgg

SEQ ID NO: 1827960 - DNA, 15 bp, Homo sapiens
gcgcttctcattggt

SEQ ID NO: 1827961 - DNA, 15 bp, Homo sapiens
cgcttctcattggtc

SEQ ID NO: 1827962 - DNA, 15 bp, Homo sapiens
gcttctcattggtca

SEQ ID NO: 1827963 - DNA, 15 bp, Homo sapiens
cttctcattggtcag

SEQ ID NO: 1827964 - DNA, 15 bp, Homo sapiens
ttctcattggtcagc

SEQ ID NO: 1827965 - DNA, 15 bp, Homo sapiens
tctcattggtcagcg

SEQ ID NO: 1827966 - DNA, 15 bp, Homo sapiens
ctcattggtcagcgg

SEQ ID NO: 1827967 - DNA, 15 bp, Homo sapiens
tcattggtcagcggc

SEQ ID NO: 1827968 - DNA, 15 bp, Homo sapiens
cattggtcagcggct

SEQ ID NO: 1827969 - DNA, 15 bp, Homo sapiens
attggtcagcggctg

SEQ ID NO: 1827970 - DNA, 15 bp, Homo sapiens
ttggtcagcggctgg

SEQ ID NO: 1827971 - DNA, 15 bp, Homo sapiens
tggtcagcggctggg

SEQ ID NO: 1827972 - DNA, 15 bp, Homo sapiens
ggtcagcggctgggg

SEQ ID NO: 1827973 - DNA, 15 bp, Homo sapiens
gtcagcggctggggc

SEQ ID NO: 1827974 - DNA, 15 bp, Homo sapiens
tcagcggctggggcc

SEQ ID NO: 1827975 - DNA, 15 bp, Homo sapiens
cagcggctggggcca

SEQ ID NO: 1827976 - DNA, 15 bp, Homo sapiens
agcggctggggccag

SEQ ID NO: 1827977 - DNA, 15 bp, Homo sapiens
gcggctggggccagc

SEQ ID NO: 1827978 - DNA, 15 bp, Homo sapiens
cggctggggccagct

SEQ ID NO: 1827979 - DNA, 15 bp, Homo sapiens
ggctggggccagctg

SEQ ID NO: 1827980 - DNA, 15 bp, Homo sapiens
gctggggccagctgc

SEQ ID NO: 1827981 - DNA, 15 bp, Homo sapiens
ctggggccagctgct

SEQ ID NO: 1827982 - DNA, 15 bp, Homo sapiens
tggggccagctgctg

SEQ ID NO: 1827983 - DNA, 15 bp, Homo sapiens
ggggccagctgctgg

SEQ ID NO: 1827984 - DNA, 15 bp, Homo sapiens
gggccagctgctgga

SEQ ID NO: 1827985 - DNA, 15 bp, Homo sapiens
ggccagctgctggac

SEQ ID NO: 1827986 - DNA, 15 bp, Homo sapiens
gccagctgctggacc

SEQ ID NO: 1827987 - DNA, 15 bp, Homo sapiens
ccagctgctggaccg

SEQ ID NO: 1827988 - DNA, 15 bp, Homo sapiens
cagctgctggaccgt

SEQ ID NO: 1827989 - DNA, 15 bp, Homo sapiens
agctgctggaccgtg

SEQ ID NO: 1827990 - DNA, 15 bp, Homo sapiens
gctgctggaccgtgg

SEQ ID NO: 1827991 - DNA, 15 bp, Homo sapiens
ctgctggaccgtggc

SEQ ID NO: 1827992 - DNA, 15 bp, Homo sapiens
tgctggaccgtggcg

SEQ ID NO: 1827993 - DNA, 15 bp, Homo sapiens
gctggaccgtggcgc

SEQ ID NO: 1827994 - DNA, 15 bp, Homo sapiens
ctggaccgtggcgcc

SEQ ID NO: 1827995 - DNA, 15 bp, Homo sapiens
tggaccgtggcgcca

SEQ ID NO: 1827996 - DNA, 15 bp, Homo sapiens
ggaccgtggcgccac

SEQ ID NO: 1827997 - DNA, 15 bp, Homo sapiens
gaccgtggcgccacg

SEQ ID NO: 1827998 - DNA, 15 bp, Homo sapiens
accgtggcgccacgg

SEQ ID NO: 1827999 - DNA, 15 bp, Homo sapiens
ccgtggcgccacggc

SEQ ID NO: 1828000 - DNA, 15 bp, Homo sapiens
cgtggcgccacggcc

SEQ ID NO: 1828001 - DNA, 15 bp, Homo sapiens
gtggcgccacggccc

SEQ ID NO: 1828002 - DNA, 15 bp, Homo sapiens
tggcgccacggccct

SEQ ID NO: 1828003 - DNA, 15 bp, Homo sapiens
ggcgccacggccctg

SEQ ID NO: 1828004 - DNA, 15 bp, Homo sapiens
gcgccacggccctgg

SEQ ID NO: 1828005 - DNA, 15 bp, Homo sapiens
cgccacggccctgga

SEQ ID NO: 1828006 - DNA, 15 bp, Homo sapiens
gccacggccctggag

SEQ ID NO: 1828007 - DNA, 15 bp, Homo sapiens
ccacggccctggagc

SEQ ID NO: 1828008 - DNA, 15 bp, Homo sapiens
cacggccctggagct

SEQ ID NO: 1828009 - DNA, 15 bp, Homo sapiens
acggccctggagctc

SEQ ID NO: 1828010 - DNA, 15 bp, Homo sapiens
cggccctggagctca

SEQ ID NO: 1828011 - DNA, 15 bp, Homo sapiens
ggccctggagctcat

SEQ ID NO: 1828012 - DNA, 15 bp, Homo sapiens
gccctggagctcatg

SEQ ID NO: 1828013 - DNA, 15 bp, Homo sapiens
ccctggagctcatgg

SEQ ID NO: 1828014 - DNA, 15 bp, Homo sapiens
cctggagctcatggt

SEQ ID NO: 1828015 - DNA, 15 bp, Homo sapiens
ctggagctcatggtc

SEQ ID NO: 1828016 - DNA, 15 bp, Homo sapiens
tggagctcatggtcc

SEQ ID NO: 1828017 - DNA, 15 bp, Homo sapiens
ggagctcatggtcct

SEQ ID NO: 1828018 - DNA, 15 bp, Homo sapiens
gagctcatggtcctc

SEQ ID NO: 1828019 - DNA, 15 bp, Homo sapiens
agctcatggtcctca

SEQ ID NO: 1828020 - DNA, 15 bp, Homo sapiens
gctcatggtcctcaa

SEQ ID NO: 1828021 - DNA, 15 bp, Homo sapiens
ctcatggtcctcaac

SEQ ID NO: 1828022 - DNA, 15 bp, Homo sapiens
tcatggtcctcaacg

SEQ ID NO: 1828023 - DNA, 15 bp, Homo sapiens
catggtcctcaacgt

SEQ ID NO: 1828024 - DNA, 15 bp, Homo sapiens
atggtcctcaacgtg

SEQ ID NO: 1828025 - DNA, 15 bp, Homo sapiens
tggtcctcaacgtgc

SEQ ID NO: 1828026 - DNA, 15 bp, Homo sapiens
ggtcctcaacgtgcc

SEQ ID NO: 1828027 - DNA, 15 bp, Homo sapiens
gtcctcaacgtgccc

SEQ ID NO: 1828028 - DNA, 15 bp, Homo sapiens
tcctcaacgtgcccc

SEQ ID NO: 1828029 - DNA, 15 bp, Homo sapiens
cctcaacgtgccccg

SEQ ID NO: 1828030 - DNA, 15 bp, Homo sapiens
ctcaacgtgccccgg

SEQ ID NO: 1828031 - DNA, 15 bp, Homo sapiens
tcaacgtgccccggc

SEQ ID NO: 1828032 - DNA, 15 bp, Homo sapiens
caacgtgccccggct

SEQ ID NO: 1828033 - DNA, 15 bp, Homo sapiens
aacgtgccccggctg

SEQ ID NO: 1828034 - DNA, 15 bp, Homo sapiens
acgtgccccggctga

SEQ ID NO: 1828035 - DNA, 15 bp, Homo sapiens
cgtgccccggctgat

SEQ ID NO: 1828036 - DNA, 15 bp, Homo sapiens
gtgccccggctgatg

SEQ ID NO: 1828037 - DNA, 15 bp, Homo sapiens
tgccccggctgatga

SEQ ID NO: 1828038 - DNA, 15 bp, Homo sapiens
gccccggctgatgac

SEQ ID NO: 1828039 - DNA, 15 bp, Homo sapiens
ccccggctgatgacc

SEQ ID NO: 1828040 - DNA, 15 bp, Homo sapiens
cccggctgatgaccc

SEQ ID NO: 1828041 - DNA, 15 bp, Homo sapiens
ccggctgatgaccca

SEQ ID NO: 1828042 - DNA, 15 bp, Homo sapiens
cggctgatgacccag

SEQ ID NO: 1828043 - DNA, 15 bp, Homo sapiens
ggctgatgacccagg

SEQ ID NO: 1828044 - DNA, 15 bp, Homo sapiens
gctgatgacccagga

SEQ ID NO: 1828045 - DNA, 15 bp, Homo sapiens
ctgatgacccaggac

SEQ ID NO: 1828046 - DNA, 15 bp, Homo sapiens
tgatgacccaggact

SEQ ID NO: 1828047 - DNA, 15 bp, Homo sapiens
gatgacccaggactg

SEQ ID NO: 1828048 - DNA, 15 bp, Homo sapiens
atgacccaggactgc

SEQ ID NO: 1828049 - DNA, 15 bp, Homo sapiens
tgacccaggactgcc

SEQ ID NO: 1828050 - DNA, 15 bp, Homo sapiens
gacccaggactgcct

SEQ ID NO: 1828051 - DNA, 15 bp, Homo sapiens
acccaggactgcctg

SEQ ID NO: 1828052 - DNA, 15 bp, Homo sapiens
cccaggactgcctgc

SEQ ID NO: 1828053 - DNA, 15 bp, Homo sapiens
ccaggactgcctgca

SEQ ID NO: 1828054 - DNA, 15 bp, Homo sapiens
caggactgcctgcag

SEQ ID NO: 1828055 - DNA, 15 bp, Homo sapiens
aggactgcctgcagc

SEQ ID NO: 1828056 - DNA, 15 bp, Homo sapiens
ggactgcctgcagca

SEQ ID NO: 1828057 - DNA, 15 bp, Homo sapiens
gactgcctgcagcag

SEQ ID NO: 1828058 - DNA, 15 bp, Homo sapiens
actgcctgcagcagt

SEQ ID NO: 1828059 - DNA, 15 bp, Homo sapiens
ctgcctgcagcagtc

SEQ ID NO: 1828060 - DNA, 15 bp, Homo sapiens
tgcctgcagcagtca

SEQ ID NO: 1828061 - DNA, 15 bp, Homo sapiens
gcctgcagcagtcac

SEQ ID NO: 1828062 - DNA, 15 bp, Homo sapiens
cctgcagcagtcacg

SEQ ID NO: 1828063 - DNA, 15 bp, Homo sapiens
ctgcagcagtcacgg

SEQ ID NO: 1828064 - DNA, 15 bp, Homo sapiens
tgcagcagtcacgga

SEQ ID NO: 1828065 - DNA, 15 bp, Homo sapiens
gcagcagtcacggaa

SEQ ID NO: 1828066 - DNA, 15 bp, Homo sapiens
cagcagtcacggaag

SEQ ID NO: 1828067 - DNA, 15 bp, Homo sapiens
agcagtcacggaagg

SEQ ID NO: 1828068 - DNA, 15 bp, Homo sapiens
gcagtcacggaaggt

SEQ ID NO: 1828069 - DNA, 15 bp, Homo sapiens
cagtcacggaaggtg

SEQ ID NO: 1828070 - DNA, 15 bp, Homo sapiens
agtcacggaaggtgg

SEQ ID NO: 1828071 - DNA, 15 bp, Homo sapiens
gtcacggaaggtggg

SEQ ID NO: 1828072 - DNA, 15 bp, Homo sapiens
tcacggaaggtggga

SEQ ID NO: 1828073 - DNA, 15 bp, Homo sapiens
cacggaaggtgggag

SEQ ID NO: 1828074 - DNA, 15 bp, Homo sapiens
acggaaggtgggaga

SEQ ID NO: 1828075 - DNA, 15 bp, Homo sapiens
cggaaggtgggagac

SEQ ID NO: 1828076 - DNA, 15 bp, Homo sapiens
ggaaggtgggagact

SEQ ID NO: 1828077 - DNA, 15 bp, Homo sapiens
gaaggtgggagactc

SEQ ID NO: 1828078 - DNA, 15 bp, Homo sapiens
aaggtgggagactcc

SEQ ID NO: 1828079 - DNA, 15 bp, Homo sapiens
aggtgggagactccc

SEQ ID NO: 1828080 - DNA, 15 bp, Homo sapiens
ggtgggagactcccc

SEQ ID NO: 1828081 - DNA, 15 bp, Homo sapiens
gtgggagactcccca

SEQ ID NO: 1828082 - DNA, 15 bp, Homo sapiens
tgggagactccccaa

SEQ ID NO: 1828083 - DNA, 15 bp, Homo sapiens
gggagactccccaaa

SEQ ID NO: 1828084 - DNA, 15 bp, Homo sapiens
ggagactccccaaat

SEQ ID NO: 1828085 - DNA, 15 bp, Homo sapiens
gagactccccaaata

SEQ ID NO: 1828086 - DNA, 15 bp, Homo sapiens
agactccccaaatat

SEQ ID NO: 1828087 - DNA, 15 bp, Homo sapiens
gactccccaaatatc

SEQ ID NO: 1828088 - DNA, 15 bp, Homo sapiens
actccccaaatatca

SEQ ID NO: 1828089 - DNA, 15 bp, Homo sapiens
ctccccaaatatcac

SEQ ID NO: 1828090 - DNA, 15 bp, Homo sapiens
tccccaaatatcacg

SEQ ID NO: 1828091 - DNA, 15 bp, Homo sapiens
ccccaaatatcacgg

SEQ ID NO: 1828092 - DNA, 15 bp, Homo sapiens
cccaaatatcacgga

SEQ ID NO: 1828093 - DNA, 15 bp, Homo sapiens
ccaaatatcacggag

SEQ ID NO: 1828094 - DNA, 15 bp, Homo sapiens
caaatatcacggagt

SEQ ID NO: 1828095 - DNA, 15 bp, Homo sapiens
aaatatcacggagta

SEQ ID NO: 1828096 - DNA, 15 bp, Homo sapiens
aatatcacggagtac

SEQ ID NO: 1828097 - DNA, 15 bp, Homo sapiens
atatcacggagtaca

SEQ ID NO: 1828098 - DNA, 15 bp, Homo sapiens
tatcacggagtacat

SEQ ID NO: 1828099 - DNA, 15 bp, Homo sapiens
atcacggagtacatg

SEQ ID NO: 1828100 - DNA, 15 bp, Homo sapiens
tcacggagtacatgt

SEQ ID NO: 1828101 - DNA, 15 bp, Homo sapiens
cacggagtacatgtt

SEQ ID NO: 1828102 - DNA, 15 bp, Homo sapiens
acggagtacatgttc

SEQ ID NO: 1828103 - DNA, 15 bp, Homo sapiens
cggagtacatgttct

SEQ ID NO: 1828104 - DNA, 15 bp, Homo sapiens
ggagtacatgttctg

SEQ ID NO: 1828105 - DNA, 15 bp, Homo sapiens
gagtacatgttctgt

SEQ ID NO: 1828106 - DNA, 15 bp, Homo sapiens
agtacatgttctgtg

SEQ ID NO: 1828107 - DNA, 15 bp, Homo sapiens
gtacatgttctgtgc

SEQ ID NO: 1828108 - DNA, 15 bp, Homo sapiens
tacatgttctgtgcc

SEQ ID NO: 1828109 - DNA, 15 bp, Homo sapiens
acatgttctgtgccg

SEQ ID NO: 1828110 - DNA, 15 bp, Homo sapiens
catgttctgtgccgg

SEQ ID NO: 1828111 - DNA, 15 bp, Homo sapiens
atgttctgtgccggc

SEQ ID NO: 1828112 - DNA, 15 bp, Homo sapiens
tgttctgtgccggct

SEQ ID NO: 1828113 - DNA, 15 bp, Homo sapiens
gttctgtgccggcta

SEQ ID NO: 1828114 - DNA, 15 bp, Homo sapiens
ttctgtgccggctac

SEQ ID NO: 1828115 - DNA, 15 bp, Homo sapiens
tctgtgccggctact

SEQ ID NO: 1828116 - DNA, 15 bp, Homo sapiens
ctgtgccggctactc

SEQ ID NO: 1828117 - DNA, 15 bp, Homo sapiens
tgtgccggctactcg

SEQ ID NO: 1828118 - DNA, 15 bp, Homo sapiens
gtgccggctactcgg

SEQ ID NO: 1828119 - DNA, 15 bp, Homo sapiens
tgccggctactcgga

SEQ ID NO: 1828120 - DNA, 15 bp, Homo sapiens
gccggctactcggat

SEQ ID NO: 1828121 - DNA, 15 bp, Homo sapiens
ccggctactcggatg

SEQ ID NO: 1828122 - DNA, 15 bp, Homo sapiens
cggctactcggatgg

SEQ ID NO: 1828123 - DNA, 15 bp, Homo sapiens
ggctactcggatggc

SEQ ID NO: 1828124 - DNA, 15 bp, Homo sapiens
gctactcggatggca

SEQ ID NO: 1828125 - DNA, 15 bp, Homo sapiens
ctactcggatggcag

SEQ ID NO: 1828126 - DNA, 15 bp, Homo sapiens
tactcggatggcagc

SEQ ID NO: 1828127 - DNA, 15 bp, Homo sapiens
actcggatggcagca

SEQ ID NO: 1828128 - DNA, 15 bp, Homo sapiens
ctcggatggcagcaa

SEQ ID NO: 1828129 - DNA, 15 bp, Homo sapiens
tcggatggcagcaag

SEQ ID NO: 1828130 - DNA, 15 bp, Homo sapiens
cggatggcagcaagg

SEQ ID NO: 1828131 - DNA, 15 bp, Homo sapiens
ggatggcagcaagga

SEQ ID NO: 1828132 - DNA, 15 bp, Homo sapiens
gatggcagcaaggac

SEQ ID NO: 1828133 - DNA, 15 bp, Homo sapiens
atggcagcaaggact

SEQ ID NO: 1828134 - DNA, 15 bp, Homo sapiens
tggcagcaaggactc

SEQ ID NO: 1828135 - DNA, 15 bp, Homo sapiens
ggcagcaaggactcc

SEQ ID NO: 1828136 - DNA, 15 bp, Homo sapiens
gcagcaaggactcct

SEQ ID NO: 1828137 - DNA, 15 bp, Homo sapiens
cagcaaggactcctg

SEQ ID NO: 1828138 - DNA, 15 bp, Homo sapiens
agcaaggactcctgc

SEQ ID NO: 1828139 - DNA, 15 bp, Homo sapiens
gcaaggactcctgca

SEQ ID NO: 1828140 - DNA, 15 bp, Homo sapiens
caaggactcctgcaa

SEQ ID NO: 1828141 - DNA, 15 bp, Homo sapiens
aaggactcctgcaag

SEQ ID NO: 1828142 - DNA, 15 bp, Homo sapiens
aggactcctgcaagg

SEQ ID NO: 1828143 - DNA, 15 bp, Homo sapiens
ggactcctgcaaggg

SEQ ID NO: 1828144 - DNA, 15 bp, Homo sapiens
gactcctgcaagggg

SEQ ID NO: 1828145 - DNA, 15 bp, Homo sapiens
actcctgcaaggggg

SEQ ID NO: 1828146 - DNA, 15 bp, Homo sapiens
ctcctgcaaggggga

SEQ ID NO: 1828147 - DNA, 15 bp, Homo sapiens
tcctgcaagggggac

SEQ ID NO: 1828148 - DNA, 15 bp, Homo sapiens
cctgcaagggggaca

SEQ ID NO: 1828149 - DNA, 15 bp, Homo sapiens
ctgcaagggggacag

SEQ ID NO: 1828150 - DNA, 15 bp, Homo sapiens
tgcaagggggacagt

SEQ ID NO: 1828151 - DNA, 15 bp, Homo sapiens
gcaagggggacagtg

SEQ ID NO: 1828152 - DNA, 15 bp, Homo sapiens
caagggggacagtgg

SEQ ID NO: 1828153 - DNA, 15 bp, Homo sapiens
aagggggacagtgga

SEQ ID NO: 1828154 - DNA, 15 bp, Homo sapiens
agggggacagtggag

SEQ ID NO: 1828155 - DNA, 15 bp, Homo sapiens
gggggacagtggagg

SEQ ID NO: 1828156 - DNA, 15 bp, Homo sapiens
ggggacagtggaggc

SEQ ID NO: 1828157 - DNA, 15 bp, Homo sapiens
gggacagtggaggcc

SEQ ID NO: 1828158 - DNA, 15 bp, Homo sapiens
ggacagtggaggccc

SEQ ID NO: 1828159 - DNA, 15 bp, Homo sapiens
gacagtggaggccca

SEQ ID NO: 1828160 - DNA, 15 bp, Homo sapiens
acagtggaggcccac

SEQ ID NO: 1828161 - DNA, 15 bp, Homo sapiens
cagtggaggcccaca

SEQ ID NO: 1828162 - DNA, 15 bp, Homo sapiens
agtggaggcccacat

SEQ ID NO: 1828163 - DNA, 15 bp, Homo sapiens
gtggaggcccacatg

SEQ ID NO: 1828164 - DNA, 15 bp, Homo sapiens
tggaggcccacatgc

SEQ ID NO: 1828165 - DNA, 15 bp, Homo sapiens
ggaggcccacatgcc

SEQ ID NO: 1828166 - DNA, 15 bp, Homo sapiens
gaggcccacatgcca

SEQ ID NO: 1828167 - DNA, 15 bp, Homo sapiens
aggcccacatgccac

SEQ ID NO: 1828168 - DNA, 15 bp, Homo sapiens
ggcccacatgccacc

SEQ ID NO: 1828169 - DNA, 15 bp, Homo sapiens
gcccacatgccaccc

SEQ ID NO: 1828170 - DNA, 15 bp, Homo sapiens
cccacatgccaccca

SEQ ID NO: 1828171 - DNA, 15 bp, Homo sapiens
ccacatgccacccac

SEQ ID NO: 1828172 - DNA, 15 bp, Homo sapiens
cacatgccacccact

SEQ ID NO: 1828173 - DNA, 15 bp, Homo sapiens
acatgccacccacta

SEQ ID NO: 1828174 - DNA, 15 bp, Homo sapiens
catgccacccactac

SEQ ID NO: 1828175 - DNA, 15 bp, Homo sapiens
atgccacccactacc

SEQ ID NO: 1828176 - DNA, 15 bp, Homo sapiens
tgccacccactaccg

SEQ ID NO: 1828177 - DNA, 15 bp, Homo sapiens
gccacccactaccgg

SEQ ID NO: 1828178 - DNA, 15 bp, Homo sapiens
ccacccactaccggg

SEQ ID NO: 1828179 - DNA, 15 bp, Homo sapiens
cacccactaccgggg

SEQ ID NO: 1828180 - DNA, 15 bp, Homo sapiens
acccactaccggggc

SEQ ID NO: 1828181 - DNA, 15 bp, Homo sapiens
cccactaccggggca

SEQ ID NO: 1828182 - DNA, 15 bp, Homo sapiens
ccactaccggggcac

SEQ ID NO: 1828183 - DNA, 15 bp, Homo sapiens
cactaccggggcacg

SEQ ID NO: 1828184 - DNA, 15 bp, Homo sapiens
actaccggggcacgt

SEQ ID NO: 1828185 - DNA, 15 bp, Homo sapiens
ctaccggggcacgtg

SEQ ID NO: 1828186 - DNA, 15 bp, Homo sapiens
taccggggcacgtgg

SEQ ID NO: 1828187 - DNA, 15 bp, Homo sapiens
accggggcacgtggt

SEQ ID NO: 1828188 - DNA, 15 bp, Homo sapiens
ccggggcacgtggta

SEQ ID NO: 1828189 - DNA, 15 bp, Homo sapiens
cggggcacgtggtac

SEQ ID NO: 1828190 - DNA, 15 bp, Homo sapiens
ggggcacgtggtacc

SEQ ID NO: 1828191 - DNA, 15 bp, Homo sapiens
gggcacgtggtacct

SEQ ID NO: 1828192 - DNA, 15 bp, Homo sapiens
ggcacgtggtacctg

SEQ ID NO: 1828193 - DNA, 15 bp, Homo sapiens
gcacgtggtacctga

SEQ ID NO: 1828194 - DNA, 15 bp, Homo sapiens
cacgtggtacctgac

SEQ ID NO: 1828195 - DNA, 15 bp, Homo sapiens
acgtggtacctgacg

SEQ ID NO: 1828196 - DNA, 15 bp, Homo sapiens
cgtggtacctgacgg

SEQ ID NO: 1828197 - DNA, 15 bp, Homo sapiens
gtggtacctgacggg

SEQ ID NO: 1828198 - DNA, 15 bp, Homo sapiens
tggtacctgacgggc

SEQ ID NO: 1828199 - DNA, 15 bp, Homo sapiens
ggtacctgacgggca

SEQ ID NO: 1828200 - DNA, 15 bp, Homo sapiens
gtacctgacgggcat

SEQ ID NO: 1828201 - DNA, 15 bp, Homo sapiens
tacctgacgggcatc

SEQ ID NO: 1828202 - DNA, 15 bp, Homo sapiens
acctgacgggcatcg

SEQ ID NO: 1828203 - DNA, 15 bp, Homo sapiens
cctgacgggcatcgt

SEQ ID NO: 1828204 - DNA, 15 bp, Homo sapiens
ctgacgggcatcgtc

SEQ ID NO: 1828205 - DNA, 15 bp, Homo sapiens
tgacgggcatcgtca

SEQ ID NO: 1828206 - DNA, 15 bp, Homo sapiens
gacgggcatcgtcag

SEQ ID NO: 1828207 - DNA, 15 bp, Homo sapiens
acgggcatcgtcagc

SEQ ID NO: 1828208 - DNA, 15 bp, Homo sapiens
cgggcatcgtcagct

SEQ ID NO: 1828209 - DNA, 15 bp, Homo sapiens
gggcatcgtcagctg

SEQ ID NO: 1828210 - DNA, 15 bp, Homo sapiens
ggcatcgtcagctgg

SEQ ID NO: 1828211 - DNA, 15 bp, Homo sapiens
gcatcgtcagctggg

SEQ ID NO: 1828212 - DNA, 15 bp, Homo sapiens
catcgtcagctgggg

SEQ ID NO: 1828213 - DNA, 15 bp, Homo sapiens
atcgtcagctggggc

SEQ ID NO: 1828214 - DNA, 15 bp, Homo sapiens
tcgtcagctggggcc

SEQ ID NO: 1828215 - DNA, 15 bp, Homo sapiens
cgtcagctggggcca

SEQ ID NO: 1828216 - DNA, 15 bp, Homo sapiens
gtcagctggggccag

SEQ ID NO: 1828217 - DNA, 15 bp, Homo sapiens
tcagctggggccagg

SEQ ID NO: 1828218 - DNA, 15 bp, Homo sapiens
cagctggggccaggg

SEQ ID NO: 1828219 - DNA, 15 bp, Homo sapiens
agctggggccagggc

SEQ ID NO: 1828220 - DNA, 15 bp, Homo sapiens
gctggggccagggct

SEQ ID NO: 1828221 - DNA, 15 bp, Homo sapiens
ctggggccagggctg

SEQ ID NO: 1828222 - DNA, 15 bp, Homo sapiens
tggggccagggctgc

SEQ ID NO: 1828223 - DNA, 15 bp, Homo sapiens
ggggccagggctgcg

SEQ ID NO: 1828224 - DNA, 15 bp, Homo sapiens
gggccagggctgcgc

SEQ ID NO: 1828225 - DNA, 15 bp, Homo sapiens
ggccagggctgcgca

SEQ ID NO: 1828226 - DNA, 15 bp, Homo sapiens
gccagggctgcgcaa

SEQ ID NO: 1828227 - DNA, 15 bp, Homo sapiens
ccagggctgcgcaac

SEQ ID NO: 1828228 - DNA, 15 bp, Homo sapiens
cagggctgcgcaacc

SEQ ID NO: 1828229 - DNA, 15 bp, Homo sapiens
agggctgcgcaaccg

SEQ ID NO: 1828230 - DNA, 15 bp, Homo sapiens
gggctgcgcaaccgt

SEQ ID NO: 1828231 - DNA, 15 bp, Homo sapiens
ggctgcgcaaccgtg

SEQ ID NO: 1828232 - DNA, 15 bp, Homo sapiens
gctgcgcaaccgtgg

SEQ ID NO: 1828233 - DNA, 15 bp, Homo sapiens
ctgcgcaaccgtggg

SEQ ID NO: 1828234 - DNA, 15 bp, Homo sapiens
tgcgcaaccgtgggc

SEQ ID NO: 1828235 - DNA, 15 bp, Homo sapiens
gcgcaaccgtgggcc

SEQ ID NO: 1828236 - DNA, 15 bp, Homo sapiens
cgcaaccgtgggcca

SEQ ID NO: 1828237 - DNA, 15 bp, Homo sapiens
gcaaccgtgggccac

SEQ ID NO: 1828238 - DNA, 15 bp, Homo sapiens
caaccgtgggccact

SEQ ID NO: 1828239 - DNA, 15 bp, Homo sapiens
aaccgtgggccactt

SEQ ID NO: 1828240 - DNA, 15 bp, Homo sapiens
accgtgggccacttt

SEQ ID NO: 1828241 - DNA, 15 bp, Homo sapiens
ccgtgggccactttg

SEQ ID NO: 1828242 - DNA, 15 bp, Homo sapiens
cgtgggccactttgg

SEQ ID NO: 1828243 - DNA, 15 bp, Homo sapiens
gtgggccactttggg

SEQ ID NO: 1828244 - DNA, 15 bp, Homo sapiens
tgggccactttgggg

SEQ ID NO: 1828245 - DNA, 15 bp, Homo sapiens
gggccactttggggt

SEQ ID NO: 1828246 - DNA, 15 bp, Homo sapiens
ggccactttggggtg

SEQ ID NO: 1828247 - DNA, 15 bp, Homo sapiens
gccactttggggtgt

SEQ ID NO: 1828248 - DNA, 15 bp, Homo sapiens
ccactttggggtgta

SEQ ID NO: 1828249 - DNA, 15 bp, Homo sapiens
cactttggggtgtac

SEQ ID NO: 1828250 - DNA, 15 bp, Homo sapiens
actttggggtgtaca

SEQ ID NO: 1828251 - DNA, 15 bp, Homo sapiens
ctttggggtgtacac

SEQ ID NO: 1828252 - DNA, 15 bp, Homo sapiens
tttggggtgtacacc

SEQ ID NO: 1828253 - DNA, 15 bp, Homo sapiens
ttggggtgtacacca

SEQ ID NO: 1828254 - DNA, 15 bp, Homo sapiens
tggggtgtacaccag

SEQ ID NO: 1828255 - DNA, 15 bp, Homo sapiens
ggggtgtacaccagg

SEQ ID NO: 1828256 - DNA, 15 bp, Homo sapiens
gggtgtacaccaggg

SEQ ID NO: 1828257 - DNA, 15 bp, Homo sapiens
ggtgtacaccagggt

SEQ ID NO: 1828258 - DNA, 15 bp, Homo sapiens
gtgtacaccagggtc

SEQ ID NO: 1828259 - DNA, 15 bp, Homo sapiens
tgtacaccagggtct

SEQ ID NO: 1828260 - DNA, 15 bp, Homo sapiens
gtacaccagggtctc

SEQ ID NO: 1828261 - DNA, 15 bp, Homo sapiens
tacaccagggtctcc

SEQ ID NO: 1828262 - DNA, 15 bp, Homo sapiens
acaccagggtctccc

SEQ ID NO: 1828263 - DNA, 15 bp, Homo sapiens
caccagggtctccca

SEQ ID NO: 1828264 - DNA, 15 bp, Homo sapiens
accagggtctcccag

SEQ ID NO: 1828265 - DNA, 15 bp, Homo sapiens
ccagggtctcccagt

SEQ ID NO: 1828266 - DNA, 15 bp, Homo sapiens
cagggtctcccagta

SEQ ID NO: 1828267 - DNA, 15 bp, Homo sapiens
agggtctcccagtac

SEQ ID NO: 1828268 - DNA, 15 bp, Homo sapiens
gggtctcccagtaca

SEQ ID NO: 1828269 - DNA, 15 bp, Homo sapiens
ggtctcccagtacat

SEQ ID NO: 1828270 - DNA, 15 bp, Homo sapiens
gtctcccagtacatc

SEQ ID NO: 1828271 - DNA, 15 bp, Homo sapiens
tctcccagtacatcg

SEQ ID NO: 1828272 - DNA, 15 bp, Homo sapiens
ctcccagtacatcga

SEQ ID NO: 1828273 - DNA, 15 bp, Homo sapiens
tcccagtacatcgag

SEQ ID NO: 1828274 - DNA, 15 bp, Homo sapiens
cccagtacatcgagt

SEQ ID NO: 1828275 - DNA, 15 bp, Homo sapiens
ccagtacatcgagtg

SEQ ID NO: 1828276 - DNA, 15 bp, Homo sapiens
cagtacatcgagtgg

SEQ ID NO: 1828277 - DNA, 15 bp, Homo sapiens
agtacatcgagtggc

SEQ ID NO: 1828278 - DNA, 15 bp, Homo sapiens
gtacatcgagtggct

SEQ ID NO: 1828279 - DNA, 15 bp, Homo sapiens
tacatcgagtggctg

SEQ ID NO: 1828280 - DNA, 15 bp, Homo sapiens
acatcgagtggctgc

SEQ ID NO: 1828281 - DNA, 15 bp, Homo sapiens
catcgagtggctgca

SEQ ID NO: 1828282 - DNA, 15 bp, Homo sapiens
atcgagtggctgcaa

SEQ ID NO: 1828283 - DNA, 15 bp, Homo sapiens
tcgagtggctgcaaa

SEQ ID NO: 1828284 - DNA, 15 bp, Homo sapiens
cgagtggctgcaaaa

SEQ ID NO: 1828285 - DNA, 15 bp, Homo sapiens
gagtggctgcaaaag

SEQ ID NO: 1828286 - DNA, 15 bp, Homo sapiens
agtggctgcaaaagc

SEQ ID NO: 1828287 - DNA, 15 bp, Homo sapiens
gtggctgcaaaagct

SEQ ID NO: 1828288 - DNA, 15 bp, Homo sapiens
tggctgcaaaagctc

SEQ ID NO: 1828289 - DNA, 15 bp, Homo sapiens
ggctgcaaaagctca

SEQ ID NO: 1828290 - DNA, 15 bp, Homo sapiens
gctgcaaaagctcat

SEQ ID NO: 1828291 - DNA, 15 bp, Homo sapiens
ctgcaaaagctcatg

SEQ ID NO: 1828292 - DNA, 15 bp, Homo sapiens
tgcaaaagctcatgc

SEQ ID NO: 1828293 - DNA, 15 bp, Homo sapiens
gcaaaagctcatgcg

SEQ ID NO: 1828294 - DNA, 15 bp, Homo sapiens
caaaagctcatgcgc

SEQ ID NO: 1828295 - DNA, 15 bp, Homo sapiens
aaaagctcatgcgct

SEQ ID NO: 1828296 - DNA, 15 bp, Homo sapiens
aaagctcatgcgctc

SEQ ID NO: 1828297 - DNA, 15 bp, Homo sapiens
aagctcatgcgctca

SEQ ID NO: 1828298 - DNA, 15 bp, Homo sapiens
agctcatgcgctcag

SEQ ID NO: 1828299 - DNA, 15 bp, Homo sapiens
gctcatgcgctcaga

SEQ ID NO: 1828300 - DNA, 15 bp, Homo sapiens
ctcatgcgctcagag

SEQ ID NO: 1828301 - DNA, 15 bp, Homo sapiens
tcatgcgctcagagc

SEQ ID NO: 1828302 - DNA, 15 bp, Homo sapiens
catgcgctcagagcc

SEQ ID NO: 1828303 - DNA, 15 bp, Homo sapiens
atgcgctcagagcca

SEQ ID NO: 1828304 - DNA, 15 bp, Homo sapiens
tgcgctcagagccac

SEQ ID NO: 1828305 - DNA, 15 bp, Homo sapiens
gcgctcagagccacg

SEQ ID NO: 1828306 - DNA, 15 bp, Homo sapiens
cgctcagagccacgc

SEQ ID NO: 1828307 - DNA, 15 bp, Homo sapiens
gctcagagccacgcc

SEQ ID NO: 1828308 - DNA, 15 bp, Homo sapiens
ctcagagccacgccc

SEQ ID NO: 1828309 - DNA, 15 bp, Homo sapiens
tcagagccacgccca

SEQ ID NO: 1828310 - DNA, 15 bp, Homo sapiens
cagagccacgcccag

SEQ ID NO: 1828311 - DNA, 15 bp, Homo sapiens
agagccacgcccagg

SEQ ID NO: 1828312 - DNA, 15 bp, Homo sapiens
gagccacgcccagga

SEQ ID NO: 1828313 - DNA, 15 bp, Homo sapiens
agccacgcccaggag

SEQ ID NO: 1828314 - DNA, 15 bp, Homo sapiens
gccacgcccaggagt

SEQ ID NO: 1828315 - DNA, 15 bp, Homo sapiens
ccacgcccaggagtc

SEQ ID NO: 1828316 - DNA, 15 bp, Homo sapiens
cacgcccaggagtcc

SEQ ID NO: 1828317 - DNA, 15 bp, Homo sapiens
acgcccaggagtcct

SEQ ID NO: 1828318 - DNA, 15 bp, Homo sapiens
cgcccaggagtcctc

SEQ ID NO: 1828319 - DNA, 15 bp, Homo sapiens
gcccaggagtcctcc

SEQ ID NO: 1828320 - DNA, 15 bp, Homo sapiens
cccaggagtcctcct

SEQ ID NO: 1828321 - DNA, 15 bp, Homo sapiens
ccaggagtcctcctg

SEQ ID NO: 1828322 - DNA, 15 bp, Homo sapiens
caggagtcctcctgc

SEQ ID NO: 1828323 - DNA, 15 bp, Homo sapiens
aggagtcctcctgcg

SEQ ID NO: 1828324 - DNA, 15 bp, Homo sapiens
ggagtcctcctgcga

SEQ ID NO: 1828325 - DNA, 15 bp, Homo sapiens
gagtcctcctgcgag

SEQ ID NO: 1828326 - DNA, 15 bp, Homo sapiens
agtcctcctgcgagc

SEQ ID NO: 1828327 - DNA, 15 bp, Homo sapiens
gtcctcctgcgagcc

SEQ ID NO: 1828328 - DNA, 15 bp, Homo sapiens
tcctcctgcgagccc

SEQ ID NO: 1828329 - DNA, 15 bp, Homo sapiens
cctcctgcgagcccc

SEQ ID NO: 1828330 - DNA, 15 bp, Homo sapiens
ctcctgcgagcccca

SEQ ID NO: 1828331 - DNA, 15 bp, Homo sapiens
tcctgcgagccccat

SEQ ID NO: 1828332 - DNA, 15 bp, Homo sapiens
cctgcgagccccatt

SEQ ID NO: 1828333 - DNA, 15 bp, Homo sapiens
ctgcgagccccattt

SEQ ID NO: 1828334 - DNA, 15 bp, Homo sapiens
tgcgagccccatttc

SEQ ID NO: 1828335 - DNA, 15 bp, Homo sapiens
gcgagccccatttcc

SEQ ID NO: 1828336 - DNA, 15 bp, Homo sapiens
cgagccccatttccc

SEQ ID NO: 1828337 - DNA, 15 bp, Homo sapiens
gagccccatttccct

SEQ ID NO: 1828338 - DNA, 15 bp, Homo sapiens
agccccatttcccta

SEQ ID NO: 1828339 - DNA, 15 bp, Homo sapiens
gccccatttccctag

SEQ ID NO: 1828340 - DNA, 15 bp, Homo sapiens
ccccatttccctagc

SEQ ID NO: 1828341 - DNA, 15 bp, Homo sapiens
cccatttccctagcc

SEQ ID NO: 1828342 - DNA, 15 bp, Homo sapiens
ccatttccctagccc

SEQ ID NO: 1828343 - DNA, 15 bp, Homo sapiens
catttccctagccca

SEQ ID NO: 1828344 - DNA, 15 bp, Homo sapiens
atttccctagcccag

SEQ ID NO: 1828345 - DNA, 15 bp, Homo sapiens
tttccctagcccagc

SEQ ID NO: 1828346 - DNA, 15 bp, Homo sapiens
ttccctagcccagca

SEQ ID NO: 1828347 - DNA, 15 bp, Homo sapiens
tccctagcccagcag

SEQ ID NO: 1828348 - DNA, 15 bp, Homo sapiens
ccctagcccagcagc

SEQ ID NO: 1828349 - DNA, 15 bp, Homo sapiens
cctagcccagcagcc

SEQ ID NO: 1828350 - DNA, 15 bp, Homo sapiens
ctagcccagcagccc

SEQ ID NO: 1828351 - DNA, 15 bp, Homo sapiens
tagcccagcagccct

SEQ ID NO: 1828352 - DNA, 15 bp, Homo sapiens
agcccagcagccctg

SEQ ID NO: 1828353 - DNA, 15 bp, Homo sapiens
cccagcagccctggc

SEQ ID NO: 1828354 - DNA, 15 bp, Homo sapiens
ccagcagccctggcc

SEQ ID NO: 1828355 - DNA, 15 bp, Homo sapiens
cagcagccctggcct

SEQ ID NO: 1828356 - DNA, 15 bp, Homo sapiens
agcagccctggcctg

SEQ ID NO: 1828357 - DNA, 15 bp, Homo sapiens
gcagccctggcctgt

SEQ ID NO: 1828358 - DNA, 15 bp, Homo sapiens
cagccctggcctgtg

SEQ ID NO: 1828359 - DNA, 15 bp, Homo sapiens
agccctggcctgtgg

SEQ ID NO: 1828360 - DNA, 15 bp, Homo sapiens
gccctggcctgtgga

SEQ ID NO: 1828361 - DNA, 15 bp, Homo sapiens
ccctggcctgtggag

SEQ ID NO: 1828362 - DNA, 15 bp, Homo sapiens
cctggcctgtggaga

SEQ ID NO: 1828363 - DNA, 15 bp, Homo sapiens
ctggcctgtggagag

SEQ ID NO: 1828364 - DNA, 15 bp, Homo sapiens
tggcctgtggagaga

SEQ ID NO: 1828365 - DNA, 15 bp, Homo sapiens
ggcctgtggagagaa

SEQ ID NO: 1828366 - DNA, 15 bp, Homo sapiens
gcctgtggagagaaa

SEQ ID NO: 1828367 - DNA, 15 bp, Homo sapiens
cctgtggagagaaag

SEQ ID NO: 1828368 - DNA, 15 bp, Homo sapiens
ctgtggagagaaagc

SEQ ID NO: 1828369 - DNA, 15 bp, Homo sapiens
tgtggagagaaagcc

SEQ ID NO: 1828370 - DNA, 15 bp, Homo sapiens
gtggagagaaagcca

SEQ ID NO: 1828371 - DNA, 15 bp, Homo sapiens
tggagagaaagccaa

SEQ ID NO: 1828372 - DNA, 15 bp, Homo sapiens
ggagagaaagccaag

SEQ ID NO: 1828373 - DNA, 15 bp, Homo sapiens
gagagaaagccaagg

SEQ ID NO: 1828374 - DNA, 15 bp, Homo sapiens
agagaaagccaaggc

SEQ ID NO: 1828375 - DNA, 15 bp, Homo sapiens
gagaaagccaaggct

SEQ ID NO: 1828376 - DNA, 15 bp, Homo sapiens
agaaagccaaggctg

SEQ ID NO: 1828377 - DNA, 15 bp, Homo sapiens
gaaagccaaggctgc

SEQ ID NO: 1828378 - DNA, 15 bp, Homo sapiens
aaagccaaggctgcg

SEQ ID NO: 1828379 - DNA, 15 bp, Homo sapiens
aagccaaggctgcgt

SEQ ID NO: 1828380 - DNA, 15 bp, Homo sapiens
agccaaggctgcgtc

SEQ ID NO: 1828381 - DNA, 15 bp, Homo sapiens
gccaaggctgcgtcg

SEQ ID NO: 1828382 - DNA, 15 bp, Homo sapiens
ccaaggctgcgtcga

SEQ ID NO: 1828383 - DNA, 15 bp, Homo sapiens
caaggctgcgtcgaa

SEQ ID NO: 1828384 - DNA, 15 bp, Homo sapiens
aaggctgcgtcgaac

SEQ ID NO: 1828385 - DNA, 15 bp, Homo sapiens
aggctgcgtcgaact

SEQ ID NO: 1828386 - DNA, 15 bp, Homo sapiens
ggctgcgtcgaactg

SEQ ID NO: 1828387 - DNA, 15 bp, Homo sapiens
gctgcgtcgaactgt

SEQ ID NO: 1828388 - DNA, 15 bp, Homo sapiens
ctgcgtcgaactgtc

SEQ ID NO: 1828389 - DNA, 15 bp, Homo sapiens
tgcgtcgaactgtcc

SEQ ID NO: 1828390 - DNA, 15 bp, Homo sapiens
gcgtcgaactgtcct

SEQ ID NO: 1828391 - DNA, 15 bp, Homo sapiens
cgtcgaactgtcctg

SEQ ID NO: 1828392 - DNA, 15 bp, Homo sapiens
gtcgaactgtcctgg

SEQ ID NO: 1828393 - DNA, 15 bp, Homo sapiens
tcgaactgtcctggc

SEQ ID NO: 1828394 - DNA, 15 bp, Homo sapiens
cgaactgtcctggca

SEQ ID NO: 1828395 - DNA, 15 bp, Homo sapiens
gaactgtcctggcac

SEQ ID NO: 1828396 - DNA, 15 bp, Homo sapiens
aactgtcctggcacc

SEQ ID NO: 1828397 - DNA, 15 bp, Homo sapiens
actgtcctggcacca

SEQ ID NO: 1828398 - DNA, 15 bp, Homo sapiens
ctgtcctggcaccaa

SEQ ID NO: 1828399 - DNA, 15 bp, Homo sapiens
tgtcctggcaccaaa

SEQ ID NO: 1828400 - DNA, 15 bp, Homo sapiens
gtcctggcaccaaat

SEQ ID NO: 1828401 - DNA, 15 bp, Homo sapiens
tcctggcaccaaatc

SEQ ID NO: 1828402 - DNA, 15 bp, Homo sapiens
cctggcaccaaatcc

SEQ ID NO: 1828403 - DNA, 15 bp, Homo sapiens
ctggcaccaaatccc

SEQ ID NO: 1828404 - DNA, 15 bp, Homo sapiens
tggcaccaaatccca

SEQ ID NO: 1828405 - DNA, 15 bp, Homo sapiens
ggcaccaaatcccat

SEQ ID NO: 1828406 - DNA, 15 bp, Homo sapiens
gcaccaaatcccata

SEQ ID NO: 1828407 - DNA, 15 bp, Homo sapiens
caccaaatcccatat

SEQ ID NO: 1828408 - DNA, 15 bp, Homo sapiens
accaaatcccatata

SEQ ID NO: 1828409 - DNA, 15 bp, Homo sapiens
ccaaatcccatatat

SEQ ID NO: 1828410 - DNA, 15 bp, Homo sapiens
caaatcccatatatt

SEQ ID NO: 1828411 - DNA, 15 bp, Homo sapiens
aaatcccatatattc

SEQ ID NO: 1828412 - DNA, 15 bp, Homo sapiens
aatcccatatattct

SEQ ID NO: 1828413 - DNA, 15 bp, Homo sapiens
atcccatatattctt

SEQ ID NO: 1828414 - DNA, 15 bp, Homo sapiens
tcccatatattcttc

SEQ ID NO: 1828415 - DNA, 15 bp, Homo sapiens
cccatatattcttct

SEQ ID NO: 1828416 - DNA, 15 bp, Homo sapiens
ccatatattcttctg

SEQ ID NO: 1828417 - DNA, 15 bp, Homo sapiens
catatattcttctgc

SEQ ID NO: 1828418 - DNA, 15 bp, Homo sapiens
atatattcttctgca

SEQ ID NO: 1828419 - DNA, 15 bp, Homo sapiens
tatattcttctgcag

SEQ ID NO: 1828420 - DNA, 15 bp, Homo sapiens
atattcttctgcagt

SEQ ID NO: 1828421 - DNA, 15 bp, Homo sapiens
tattcttctgcagtt

SEQ ID NO: 1828422 - DNA, 15 bp, Homo sapiens
attcttctgcagtta

SEQ ID NO: 1828423 - DNA, 15 bp, Homo sapiens
ttcttctgcagttaa

SEQ ID NO: 1828424 - DNA, 15 bp, Homo sapiens
tcttctgcagttaat

SEQ ID NO: 1828425 - DNA, 15 bp, Homo sapiens
cttctgcagttaatg

SEQ ID NO: 1828426 - DNA, 15 bp, Homo sapiens
ttctgcagttaatgg

SEQ ID NO: 1828427 - DNA, 15 bp, Homo sapiens
tctgcagttaatggg

SEQ ID NO: 1828428 - DNA, 15 bp, Homo sapiens
ctgcagttaatgggg

SEQ ID NO: 1828429 - DNA, 15 bp, Homo sapiens
tgcagttaatggggt

SEQ ID NO: 1828430 - DNA, 15 bp, Homo sapiens
gcagttaatggggta

SEQ ID NO: 1828431 - DNA, 15 bp, Homo sapiens
cagttaatggggtag

SEQ ID NO: 1828432 - DNA, 15 bp, Homo sapiens
agttaatggggtaga

SEQ ID NO: 1828433 - DNA, 15 bp, Homo sapiens
gttaatggggtagag

SEQ ID NO: 1828434 - DNA, 15 bp, Homo sapiens
ttaatggggtagagg

SEQ ID NO: 1828435 - DNA, 15 bp, Homo sapiens
taatggggtagagga

SEQ ID NO: 1828436 - DNA, 15 bp, Homo sapiens
aatggggtagaggag

SEQ ID NO: 1828437 - DNA, 15 bp, Homo sapiens
atggggtagaggagg

SEQ ID NO: 1828438 - DNA, 15 bp, Homo sapiens
tggggtagaggaggg

SEQ ID NO: 1828439 - DNA, 15 bp, Homo sapiens
ggggtagaggagggc

SEQ ID NO: 1828440 - DNA, 15 bp, Homo sapiens
gggtagaggagggca

SEQ ID NO: 1828441 - DNA, 15 bp, Homo sapiens
ggtagaggagggcat

SEQ ID NO: 1828442 - DNA, 15 bp, Homo sapiens
gtagaggagggcatg

SEQ ID NO: 1828443 - DNA, 15 bp, Homo sapiens
tagaggagggcatgg

SEQ ID NO: 1828444 - DNA, 15 bp, Homo sapiens
agaggagggcatggg

SEQ ID NO: 1828445 - DNA, 15 bp, Homo sapiens
gaggagggcatggga

SEQ ID NO: 1828446 - DNA, 15 bp, Homo sapiens
aggagggcatgggag

SEQ ID NO: 1828447 - DNA, 15 bp, Homo sapiens
ggagggcatgggagg

SEQ ID NO: 1828448 - DNA, 15 bp, Homo sapiens
gagggcatgggaggg

SEQ ID NO: 1828449 - DNA, 15 bp, Homo sapiens
agggcatgggaggga

SEQ ID NO: 1828450 - DNA, 15 bp, Homo sapiens
gggcatgggagggag

SEQ ID NO: 1828451 - DNA, 15 bp, Homo sapiens
ggcatgggagggagg

SEQ ID NO: 1828452 - DNA, 15 bp, Homo sapiens
gcatgggagggaggg

SEQ ID NO: 1828453 - DNA, 15 bp, Homo sapiens
catgggagggaggga

SEQ ID NO: 1828454 - DNA, 15 bp, Homo sapiens
atgggagggagggag

SEQ ID NO: 1828455 - DNA, 15 bp, Homo sapiens
tgggagggagggaga

SEQ ID NO: 1828456 - DNA, 15 bp, Homo sapiens
gggagggagggagag

SEQ ID NO: 1828457 - DNA, 15 bp, Homo sapiens
ggagggagggagagg

SEQ ID NO: 1828458 - DNA, 15 bp, Homo sapiens
gagggagggagaggt

SEQ ID NO: 1828459 - DNA, 15 bp, Homo sapiens
agggagggagaggtg

SEQ ID NO: 1828460 - DNA, 15 bp, Homo sapiens
gggagggagaggtgg

SEQ ID NO: 1828461 - DNA, 15 bp, Homo sapiens
ggagggagaggtggg

SEQ ID NO: 1828462 - DNA, 15 bp, Homo sapiens
gagggagaggtgggg

SEQ ID NO: 1828463 - DNA, 15 bp, Homo sapiens
agggagaggtgggga

SEQ ID NO: 1828464 - DNA, 15 bp, Homo sapiens
gggagaggtggggag

SEQ ID NO: 1828465 - DNA, 15 bp, Homo sapiens
ggagaggtggggagg

SEQ ID NO: 1828466 - DNA, 15 bp, Homo sapiens
gagaggtggggaggg

SEQ ID NO: 1828467 - DNA, 15 bp, Homo sapiens
agaggtggggaggga

SEQ ID NO: 1828468 - DNA, 15 bp, Homo sapiens
gaggtggggagggag

SEQ ID NO: 1828469 - DNA, 15 bp, Homo sapiens
aggtggggagggaga

SEQ ID NO: 1828470 - DNA, 15 bp, Homo sapiens
ggtggggagggagac

SEQ ID NO: 1828471 - DNA, 15 bp, Homo sapiens
gtggggagggagaca

SEQ ID NO: 1828472 - DNA, 15 bp, Homo sapiens
tggggagggagacag

SEQ ID NO: 1828473 - DNA, 15 bp, Homo sapiens
ggggagggagacaga

SEQ ID NO: 1828474 - DNA, 15 bp, Homo sapiens
gggagggagacagag

SEQ ID NO: 1828475 - DNA, 15 bp, Homo sapiens
ggagggagacagaga

SEQ ID NO: 1828476 - DNA, 15 bp, Homo sapiens
gagggagacagagac

SEQ ID NO: 1828477 - DNA, 15 bp, Homo sapiens
agggagacagagaca

SEQ ID NO: 1828478 - DNA, 15 bp, Homo sapiens
gggagacagagacag

SEQ ID NO: 1828479 - DNA, 15 bp, Homo sapiens
gagacagagacagaa

SEQ ID NO: 1828480 - DNA, 15 bp, Homo sapiens
agacagagacagaaa

SEQ ID NO: 1828481 - DNA, 15 bp, Homo sapiens
gacagagacagaaac

SEQ ID NO: 1828482 - DNA, 15 bp, Homo sapiens
acagagacagaaaca

SEQ ID NO: 1828483 - DNA, 15 bp, Homo sapiens
cagagacagaaacag

SEQ ID NO: 1828484 - DNA, 15 bp, Homo sapiens
agagacagaaacaga

SEQ ID NO: 1828485 - DNA, 15 bp, Homo sapiens
gagacagaaacagag

SEQ ID NO: 1828486 - DNA, 15 bp, Homo sapiens
agacagaaacagaga

SEQ ID NO: 1828487 - DNA, 15 bp, Homo sapiens
gacagaaacagagag

SEQ ID NO: 1828488 - DNA, 15 bp, Homo sapiens
acagaaacagagaga

SEQ ID NO: 1828489 - DNA, 15 bp, Homo sapiens
cagaaacagagagag

SEQ ID NO: 1828490 - DNA, 15 bp, Homo sapiens
agaaacagagagaga

SEQ ID NO: 1828491 - DNA, 15 bp, Homo sapiens
gaaacagagagagac

SEQ ID NO: 1828492 - DNA, 15 bp, Homo sapiens
aaacagagagagaca

SEQ ID NO: 1828493 - DNA, 15 bp, Homo sapiens
aacagagagagacag

SEQ ID NO: 1828494 - DNA, 15 bp, Homo sapiens
acagagagagacaga

SEQ ID NO: 1828495 - DNA, 15 bp, Homo sapiens
cagagagagacagag

SEQ ID NO: 1828496 - DNA, 15 bp, Homo sapiens
agagagagacagaga

SEQ ID NO: 1828497 - DNA, 15 bp, Homo sapiens
gagagagacagagac

SEQ ID NO: 1828498 - DNA, 15 bp, Homo sapiens
agagagacagagaca

SEQ ID NO: 1828499 - DNA, 15 bp, Homo sapiens
gagagacagagacag

SEQ ID NO: 1828500 - DNA, 15 bp, Homo sapiens
agagacagagacaga

SEQ ID NO: 1828501 - DNA, 15 bp, Homo sapiens
gagacagagacagag

SEQ ID NO: 1828502 - DNA, 15 bp, Homo sapiens
agacagagacagaga

SEQ ID NO: 1828503 - DNA, 15 bp, Homo sapiens
gacagagacagagag

SEQ ID NO: 1828504 - DNA, 15 bp, Homo sapiens
acagagacagagaga

SEQ ID NO: 1828505 - DNA, 15 bp, Homo sapiens
cagagacagagagag

SEQ ID NO: 1828506 - DNA, 15 bp, Homo sapiens
agagacagagagaga

SEQ ID NO: 1828507 - DNA, 15 bp, Homo sapiens
gagacagagagagac

SEQ ID NO: 1828508 - DNA, 15 bp, Homo sapiens
agacagagagagact

SEQ ID NO: 1828509 - DNA, 15 bp, Homo sapiens
gacagagagagactg

SEQ ID NO: 1828510 - DNA, 15 bp, Homo sapiens
acagagagagactga

SEQ ID NO: 1828511 - DNA, 15 bp, Homo sapiens
cagagagagactgag

SEQ ID NO: 1828512 - DNA, 15 bp, Homo sapiens
agagagagactgagg

SEQ ID NO: 1828513 - DNA, 15 bp, Homo sapiens
gagagagactgaggg

SEQ ID NO: 1828514 - DNA, 15 bp, Homo sapiens
agagagactgaggga

SEQ ID NO: 1828515 - DNA, 15 bp, Homo sapiens
gagagactgagggag

SEQ ID NO: 1828516 - DNA, 15 bp, Homo sapiens
agagactgagggaga

SEQ ID NO: 1828517 - DNA, 15 bp, Homo sapiens
gagactgagggagag

SEQ ID NO: 1828518 - DNA, 15 bp, Homo sapiens
agactgagggagaga

SEQ ID NO: 1828519 - DNA, 15 bp, Homo sapiens
gactgagggagagac

SEQ ID NO: 1828520 - DNA, 15 bp, Homo sapiens
actgagggagagact

SEQ ID NO: 1828521 - DNA, 15 bp, Homo sapiens
ctgagggagagactc

SEQ ID NO: 1828522 - DNA, 15 bp, Homo sapiens
tgagggagagactct

SEQ ID NO: 1828523 - DNA, 15 bp, Homo sapiens
gagggagagactctg

SEQ ID NO: 1828524 - DNA, 15 bp, Homo sapiens
agggagagactctga

SEQ ID NO: 1828525 - DNA, 15 bp, Homo sapiens
gggagagactctgag

SEQ ID NO: 1828526 - DNA, 15 bp, Homo sapiens
ggagagactctgagg

SEQ ID NO: 1828527 - DNA, 15 bp, Homo sapiens
gagagactctgagga

SEQ ID NO: 1828528 - DNA, 15 bp, Homo sapiens
agagactctgaggac

SEQ ID NO: 1828529 - DNA, 15 bp, Homo sapiens
gagactctgaggaca

SEQ ID NO: 1828530 - DNA, 15 bp, Homo sapiens
agactctgaggacat

SEQ ID NO: 1828531 - DNA, 15 bp, Homo sapiens
gactctgaggacatg

SEQ ID NO: 1828532 - DNA, 15 bp, Homo sapiens
actctgaggacatgg

SEQ ID NO: 1828533 - DNA, 15 bp, Homo sapiens
ctctgaggacatgga

SEQ ID NO: 1828534 - DNA, 15 bp, Homo sapiens
agtcatgcggggtcc

SEQ ID NO: 1828535 - DNA, 15 bp, Homo sapiens
gtcatgcggggtcct

SEQ ID NO: 1828536 - DNA, 15 bp, Homo sapiens
tcatgcggggtcctg

SEQ ID NO: 1828537 - DNA, 15 bp, Homo sapiens
catgcggggtcctgg

SEQ ID NO: 1828538 - DNA, 15 bp, Homo sapiens
atgcggggtcctggt

SEQ ID NO: 1828539 - DNA, 15 bp, Homo sapiens
tgcggggtcctggtg

SEQ ID NO: 1828540 - DNA, 15 bp, Homo sapiens
gcggggtcctggtgg

SEQ ID NO: 1828541 - DNA, 15 bp, Homo sapiens
cggggtcctggtgga

SEQ ID NO: 1828542 - DNA, 15 bp, Homo sapiens
ggggtcctggtggag

SEQ ID NO: 1828543 - DNA, 15 bp, Homo sapiens
gggtcctggtggagc

SEQ ID NO: 1828544 - DNA, 15 bp, Homo sapiens
ggtcctggtggagcg

SEQ ID NO: 1828545 - DNA, 15 bp, Homo sapiens
gtcctggtggagcgc

SEQ ID NO: 1828546 - DNA, 15 bp, Homo sapiens
tcctggtggagcgcc

SEQ ID NO: 1828547 - DNA, 15 bp, Homo sapiens
cctggtggagcgcca

SEQ ID NO: 1828548 - DNA, 15 bp, Homo sapiens
ctggtggagcgccag

SEQ ID NO: 1828549 - DNA, 15 bp, Homo sapiens
tggtggagcgccagc

SEQ ID NO: 1828550 - DNA, 15 bp, Homo sapiens
ggtggagcgccagcc

SEQ ID NO: 1828551 - DNA, 15 bp, Homo sapiens
gtggagcgccagcct

SEQ ID NO: 1828552 - DNA, 15 bp, Homo sapiens
tggagcgccagcctc

SEQ ID NO: 1828553 - DNA, 15 bp, Homo sapiens
ggagcgccagcctcc

SEQ ID NO: 1828554 - DNA, 15 bp, Homo sapiens
gagcgccagcctccc

SEQ ID NO: 1828555 - DNA, 15 bp, Homo sapiens
agcgccagcctccct

SEQ ID NO: 1828556 - DNA, 15 bp, Homo sapiens
gcgccagcctccctt

SEQ ID NO: 1828557 - DNA, 15 bp, Homo sapiens
cgccagcctcccttc

SEQ ID NO: 1828558 - DNA, 15 bp, Homo sapiens
gccagcctcccttcc

SEQ ID NO: 1828559 - DNA, 15 bp, Homo sapiens
ccagcctcccttcct

SEQ ID NO: 1828560 - DNA, 15 bp, Homo sapiens
cagcctcccttcctg

SEQ ID NO: 1828561 - DNA, 15 bp, Homo sapiens
agcctcccttcctgc

SEQ ID NO: 1828562 - DNA, 15 bp, Homo sapiens
gcctcccttcctgcc

SEQ ID NO: 1828563 - DNA, 15 bp, Homo sapiens
cctcccttcctgcca

SEQ ID NO: 1828564 - DNA, 15 bp, Homo sapiens
ctcccttcctgccaa

SEQ ID NO: 1828565 - DNA, 15 bp, Homo sapiens
tcccttcctgccaat

SEQ ID NO: 1828566 - DNA, 15 bp, Homo sapiens
cccttcctgccaatg

SEQ ID NO: 1828567 - DNA, 15 bp, Homo sapiens
ccttcctgccaatgg

SEQ ID NO: 1828568 - DNA, 15 bp, Homo sapiens
cttcctgccaatggg

SEQ ID NO: 1828569 - DNA, 15 bp, Homo sapiens
ttcctgccaatggga

SEQ ID NO: 1828570 - DNA, 15 bp, Homo sapiens
tcctgccaatgggaa

SEQ ID NO: 1828571 - DNA, 15 bp, Homo sapiens
cctgccaatgggaaa

SEQ ID NO: 1828572 - DNA, 15 bp, Homo sapiens
ctgccaatgggaaat

SEQ ID NO: 1828573 - DNA, 15 bp, Homo sapiens
tgccaatgggaaatg

SEQ ID NO: 1828574 - DNA, 15 bp, Homo sapiens
gccaatgggaaatgc

SEQ ID NO: 1828575 - DNA, 15 bp, Homo sapiens
ccaatgggaaatgca

SEQ ID NO: 1828576 - DNA, 15 bp, Homo sapiens
caatgggaaatgcag

SEQ ID NO: 1828577 - DNA, 15 bp, Homo sapiens
aatgggaaatgcagg

SEQ ID NO: 1828578 - DNA, 15 bp, Homo sapiens
atgggaaatgcaggc

SEQ ID NO: 1828579 - DNA, 15 bp, Homo sapiens
tgggaaatgcaggcg

SEQ ID NO: 1828580 - DNA, 15 bp, Homo sapiens
gggaaatgcaggcgc

SEQ ID NO: 1828581 - DNA, 15 bp, Homo sapiens
ggaaatgcaggcgcc

SEQ ID NO: 1828582 - DNA, 15 bp, Homo sapiens
gaaatgcaggcgccc

SEQ ID NO: 1828583 - DNA, 15 bp, Homo sapiens
aaatgcaggcgccca

SEQ ID NO: 1828584 - DNA, 15 bp, Homo sapiens
aatgcaggcgcccac

SEQ ID NO: 1828585 - DNA, 15 bp, Homo sapiens
atgcaggcgcccacc

SEQ ID NO: 1828586 - DNA, 15 bp, Homo sapiens
tgcaggcgcccacct

SEQ ID NO: 1828587 - DNA, 15 bp, Homo sapiens
gcaggcgcccacctc

SEQ ID NO: 1828588 - DNA, 15 bp, Homo sapiens
caggcgcccacctca

SEQ ID NO: 1828589 - DNA, 15 bp, Homo sapiens
aggcgcccacctcat

SEQ ID NO: 1828590 - DNA, 15 bp, Homo sapiens
ggcgcccacctcatg

SEQ ID NO: 1828591 - DNA, 15 bp, Homo sapiens
gcgcccacctcatgg

SEQ ID NO: 1828592 - DNA, 15 bp, Homo sapiens
cgcccacctcatggt

SEQ ID NO: 1828593 - DNA, 15 bp, Homo sapiens
gcccacctcatggtg

SEQ ID NO: 1828594 - DNA, 15 bp, Homo sapiens
cccacctcatggtgc

SEQ ID NO: 1828595 - DNA, 15 bp, Homo sapiens
ccacctcatggtgct

SEQ ID NO: 1828596 - DNA, 15 bp, Homo sapiens
cacctcatggtgctg

SEQ ID NO: 1828597 - DNA, 15 bp, Homo sapiens
acctcatggtgctgc

SEQ ID NO: 1828598 - DNA, 15 bp, Homo sapiens
cctcatggtgctgcc

SEQ ID NO: 1828599 - DNA, 15 bp, Homo sapiens
ctcatggtgctgccg

SEQ ID NO: 1828600 - DNA, 15 bp, Homo sapiens
tcatggtgctgccgg

SEQ ID NO: 1828601 - DNA, 15 bp, Homo sapiens
catggtgctgccgga

SEQ ID NO: 1828602 - DNA, 15 bp, Homo sapiens
atggtgctgccggag

SEQ ID NO: 1828603 - DNA, 15 bp, Homo sapiens
tggtgctgccggagg

SEQ ID NO: 1828604 - DNA, 15 bp, Homo sapiens
ggtgctgccggagga

SEQ ID NO: 1828605 - DNA, 15 bp, Homo sapiens
gtgctgccggaggag

SEQ ID NO: 1828606 - DNA, 15 bp, Homo sapiens
tgctgccggaggagg

SEQ ID NO: 1828607 - DNA, 15 bp, Homo sapiens
gcgacaagacggtaa

SEQ ID NO: 1828608 - DNA, 15 bp, Homo sapiens
cgacaagacggtaag

SEQ ID NO: 1828609 - DNA, 15 bp, Homo sapiens
gacaagacggtaagg

SEQ ID NO: 1828610 - DNA, 15 bp, Homo sapiens
acaagacggtaaggg

SEQ ID NO: 1828611 - DNA, 15 bp, Homo sapiens
caagacggtaagggc

SEQ ID NO: 1828612 - DNA, 15 bp, Homo sapiens
aagacggtaagggct

SEQ ID NO: 1828613 - DNA, 15 bp, Homo sapiens
agacggtaagggctg

SEQ ID NO: 1828614 - DNA, 15 bp, Homo sapiens
gacggtaagggctgg

SEQ ID NO: 1828615 - DNA, 15 bp, Homo sapiens
acggtaagggctggg

SEQ ID NO: 1828616 - DNA, 15 bp, Homo sapiens
cggtaagggctgggg

SEQ ID NO: 1828617 - DNA, 15 bp, Homo sapiens
ggtaagggctgggga

SEQ ID NO: 1828618 - DNA, 15 bp, Homo sapiens
gtaagggctggggat

SEQ ID NO: 1828619 - DNA, 15 bp, Homo sapiens
taagggctggggata

SEQ ID NO: 1828620 - DNA, 15 bp, Homo sapiens
aagggctggggatag

SEQ ID NO: 1828621 - DNA, 15 bp, Homo sapiens
agggctggggatagc

SEQ ID NO: 1828622 - DNA, 15 bp, Homo sapiens
gggctggggatagcc

SEQ ID NO: 1828623 - DNA, 15 bp, Homo sapiens
ggctggggatagcct

SEQ ID NO: 1828624 - DNA, 15 bp, Homo sapiens
gctggggatagcctg

SEQ ID NO: 1828625 - DNA, 15 bp, Homo sapiens
ctggggatagcctgg

SEQ ID NO: 1828626 - DNA, 15 bp, Homo sapiens
tggggatagcctggc

SEQ ID NO: 1828627 - DNA, 15 bp, Homo sapiens
ggggatagcctggct

SEQ ID NO: 1828628 - DNA, 15 bp, Homo sapiens
gggatagcctggctg

SEQ ID NO: 1828629 - DNA, 15 bp, Homo sapiens
ggatagcctggctgt

SEQ ID NO: 1828630 - DNA, 15 bp, Homo sapiens
gatagcctggctgtt

SEQ ID NO: 1828631 - DNA, 15 bp, Homo sapiens
atagcctggctgttg

SEQ ID NO: 1828632 - DNA, 15 bp, Homo sapiens
tagcctggctgttgg

SEQ ID NO: 1828633 - DNA, 15 bp, Homo sapiens
agcctggctgttggt

SEQ ID NO: 1828634 - DNA, 15 bp, Homo sapiens
gcctggctgttggta

SEQ ID NO: 1828635 - DNA, 15 bp, Homo sapiens
cctggctgttggtaa

SEQ ID NO: 1828636 - DNA, 15 bp, Homo sapiens
ctggctgttggtaag

SEQ ID NO: 1828637 - DNA, 15 bp, Homo sapiens
tggctgttggtaagg

SEQ ID NO: 1828638 - DNA, 15 bp, Homo sapiens
ggctgttggtaagga

SEQ ID NO: 1828639 - DNA, 15 bp, Homo sapiens
gctgttggtaaggag

SEQ ID NO: 1828640 - DNA, 15 bp, Homo sapiens
ctgttggtaaggagc

SEQ ID NO: 1828641 - DNA, 15 bp, Homo sapiens
tgttggtaaggagct

SEQ ID NO: 1828642 - DNA, 15 bp, Homo sapiens
gttggtaaggagctc

SEQ ID NO: 1828643 - DNA, 15 bp, Homo sapiens
ttggtaaggagctca

SEQ ID NO: 1828644 - DNA, 15 bp, Homo sapiens
tggtaaggagctcag

SEQ ID NO: 1828645 - DNA, 15 bp, Homo sapiens
ggtaaggagctcagg

SEQ ID NO: 1828646 - DNA, 15 bp, Homo sapiens
gtaaggagctcaggc

SEQ ID NO: 1828647 - DNA, 15 bp, Homo sapiens
taaggagctcaggcc

SEQ ID NO: 1828648 - DNA, 15 bp, Homo sapiens
aaggagctcaggcca

SEQ ID NO: 1828649 - DNA, 15 bp, Homo sapiens
aggagctcaggccac

SEQ ID NO: 1828650 - DNA, 15 bp, Homo sapiens
ggagctcaggccaca

SEQ ID NO: 1828651 - DNA, 15 bp, Homo sapiens
gagctcaggccacag

SEQ ID NO: 1828652 - DNA, 15 bp, Homo sapiens
agctcaggccacagc

SEQ ID NO: 1828653 - DNA, 15 bp, Homo sapiens
gctcaggccacagcg

SEQ ID NO: 1828654 - DNA, 15 bp, Homo sapiens
ctcaggccacagcgc

SEQ ID NO: 1828655 - DNA, 15 bp, Homo sapiens
tcaggccacagcgcc

SEQ ID NO: 1828656 - DNA, 15 bp, Homo sapiens
caggccacagcgccc

SEQ ID NO: 1828657 - DNA, 15 bp, Homo sapiens
aggccacagcgccct

SEQ ID NO: 1828658 - DNA, 15 bp, Homo sapiens
ggccacagcgccctc

SEQ ID NO: 1828659 - DNA, 15 bp, Homo sapiens
gccacagcgccctcg

SEQ ID NO: 1828660 - DNA, 15 bp, Homo sapiens
ccacagcgccctcgc

SEQ ID NO: 1828661 - DNA, 15 bp, Homo sapiens
cacagcgccctcgct

SEQ ID NO: 1828662 - DNA, 15 bp, Homo sapiens
acagcgccctcgctg

SEQ ID NO: 1828663 - DNA, 15 bp, Homo sapiens
cagcgccctcgctgg

SEQ ID NO: 1828664 - DNA, 15 bp, Homo sapiens
agcgccctcgctggc

SEQ ID NO: 1828665 - DNA, 15 bp, Homo sapiens
gcgccctcgctggcc

SEQ ID NO: 1828666 - DNA, 15 bp, Homo sapiens
cgccctcgctggccc

SEQ ID NO: 1828667 - DNA, 15 bp, Homo sapiens
gccctcgctggcccc

SEQ ID NO: 1828668 - DNA, 15 bp, Homo sapiens
ccctcgctggccccg

SEQ ID NO: 1828669 - DNA, 15 bp, Homo sapiens
cctcgctggccccgc

SEQ ID NO: 1828670 - DNA, 15 bp, Homo sapiens
ctcgctggccccgct

SEQ ID NO: 1828671 - DNA, 15 bp, Homo sapiens
tcgctggccccgctg

SEQ ID NO: 1828672 - DNA, 15 bp, Homo sapiens
cgctggccccgctgc

SEQ ID NO: 1828673 - DNA, 15 bp, Homo sapiens
gctggccccgctgct

SEQ ID NO: 1828674 - DNA, 15 bp, Homo sapiens
ctggccccgctgctc

SEQ ID NO: 1828675 - DNA, 15 bp, Homo sapiens
tggccccgctgctcc

SEQ ID NO: 1828676 - DNA, 15 bp, Homo sapiens
ggccccgctgctccg

SEQ ID NO: 1828677 - DNA, 15 bp, Homo sapiens
gccccgctgctccgt

SEQ ID NO: 1828678 - DNA, 15 bp, Homo sapiens
ccccgctgctccgtc

SEQ ID NO: 1828679 - DNA, 15 bp, Homo sapiens
cccgctgctccgtcc

SEQ ID NO: 1828680 - DNA, 15 bp, Homo sapiens
ccgctgctccgtcca

SEQ ID NO: 1828681 - DNA, 15 bp, Homo sapiens
cgctgctccgtccat

SEQ ID NO: 1828682 - DNA, 15 bp, Homo sapiens
gctgctccgtccatc

SEQ ID NO: 1828683 - DNA, 15 bp, Homo sapiens
ctgctccgtccatcc

SEQ ID NO: 1828684 - DNA, 15 bp, Homo sapiens
tgctccgtccatcca

SEQ ID NO: 1828685 - DNA, 15 bp, Homo sapiens
gctccgtccatccag

SEQ ID NO: 1828686 - DNA, 15 bp, Homo sapiens
ctccgtccatccagg

SEQ ID NO: 1828687 - DNA, 15 bp, Homo sapiens
tccgtccatccaggg

SEQ ID NO: 1828688 - DNA, 15 bp, Homo sapiens
ccgtccatccagggg

SEQ ID NO: 1828689 - DNA, 15 bp, Homo sapiens
cgtccatccaggggg

SEQ ID NO: 1828690 - DNA, 15 bp, Homo sapiens
gtccatccagggggg

SEQ ID NO: 1828691 - DNA, 15 bp, Homo sapiens
tccatccaggggggc

SEQ ID NO: 1828692 - DNA, 15 bp, Homo sapiens
ccatccaggggggcg

SEQ ID NO: 1828693 - DNA, 15 bp, Homo sapiens
catccaggggggcgg

SEQ ID NO: 1828694 - DNA, 15 bp, Homo sapiens
atccaggggggcggc

SEQ ID NO: 1828695 - DNA, 15 bp, Homo sapiens
tccaggggggcggcc

SEQ ID NO: 1828696 - DNA, 15 bp, Homo sapiens
ccaggggggcggcct

SEQ ID NO: 1828697 - DNA, 15 bp, Homo sapiens
caggggggcggcctg

SEQ ID NO: 1828698 - DNA, 15 bp, Homo sapiens
aggggggcggcctgg

SEQ ID NO: 1828699 - DNA, 15 bp, Homo sapiens
ggggggcggcctgga

SEQ ID NO: 1828700 - DNA, 15 bp, Homo sapiens
gggggcggcctggag

SEQ ID NO: 1828701 - DNA, 15 bp, Homo sapiens
ggggcggcctggagg

SEQ ID NO: 1828702 - DNA, 15 bp, Homo sapiens
gggcggcctggagga

SEQ ID NO: 1828703 - DNA, 15 bp, Homo sapiens
ggcggcctggaggaa

SEQ ID NO: 1828704 - DNA, 15 bp, Homo sapiens
gcggcctggaggaag

SEQ ID NO: 1828705 - DNA, 15 bp, Homo sapiens
cggcctggaggaagg

SEQ ID NO: 1828706 - DNA, 15 bp, Homo sapiens
ggcctggaggaaggg

SEQ ID NO: 1828707 - DNA, 15 bp, Homo sapiens
gcctggaggaagggg

SEQ ID NO: 1828708 - DNA, 15 bp, Homo sapiens
cctggaggaaggggc

SEQ ID NO: 1828709 - DNA, 15 bp, Homo sapiens
ctggaggaaggggca

SEQ ID NO: 1828710 - DNA, 15 bp, Homo sapiens
tggaggaaggggcag

SEQ ID NO: 1828711 - DNA, 15 bp, Homo sapiens
ggaggaaggggcagc

SEQ ID NO: 1828712 - DNA, 15 bp, Homo sapiens
gaggaaggggcagcg

SEQ ID NO: 1828713 - DNA, 15 bp, Homo sapiens
aggaaggggcagcgt

SEQ ID NO: 1828714 - DNA, 15 bp, Homo sapiens
ggaaggggcagcgtg

SEQ ID NO: 1828715 - DNA, 15 bp, Homo sapiens
gaaggggcagcgtgc

SEQ ID NO: 1828716 - DNA, 15 bp, Homo sapiens
aaggggcagcgtgcg

SEQ ID NO: 1828717 - DNA, 15 bp, Homo sapiens
aggggcagcgtgcgc

SEQ ID NO: 1828718 - DNA, 15 bp, Homo sapiens
ggggcagcgtgcgcg

SEQ ID NO: 1828719 - DNA, 15 bp, Homo sapiens
gggcagcgtgcgcga

SEQ ID NO: 1828720 - DNA, 15 bp, Homo sapiens
ggcagcgtgcgcgaa

SEQ ID NO: 1828721 - DNA, 15 bp, Homo sapiens
gcagcgtgcgcgaag

SEQ ID NO: 1828722 - DNA, 15 bp, Homo sapiens
cagcgtgcgcgaagg

SEQ ID NO: 1828723 - DNA, 15 bp, Homo sapiens
agcgtgcgcgaaggc

SEQ ID NO: 1828724 - DNA, 15 bp, Homo sapiens
gcgtgcgcgaaggct

SEQ ID NO: 1828725 - DNA, 15 bp, Homo sapiens
cgtgcgcgaaggctt

SEQ ID NO: 1828726 - DNA, 15 bp, Homo sapiens
gtgcgcgaaggcttt

SEQ ID NO: 1828727 - DNA, 15 bp, Homo sapiens
tgcgcgaaggctttc

SEQ ID NO: 1828728 - DNA, 15 bp, Homo sapiens
gcgcgaaggctttca

SEQ ID NO: 1828729 - DNA, 15 bp, Homo sapiens
cgcgaaggctttcag

SEQ ID NO: 1828730 - DNA, 15 bp, Homo sapiens
gcgaaggctttcagg

SEQ ID NO: 1828731 - DNA, 15 bp, Homo sapiens
cgaaggctttcaggg

SEQ ID NO: 1828732 - DNA, 15 bp, Homo sapiens
gaaggctttcagggg

SEQ ID NO: 1828733 - DNA, 15 bp, Homo sapiens
aaggctttcaggggc

SEQ ID NO: 1828734 - DNA, 15 bp, Homo sapiens
aggctttcaggggcg

SEQ ID NO: 1828735 - DNA, 15 bp, Homo sapiens
ggctttcaggggcgg

SEQ ID NO: 1828736 - DNA, 15 bp, Homo sapiens
gctttcaggggcggg

SEQ ID NO: 1828737 - DNA, 15 bp, Homo sapiens
ctttcaggggcgggg

SEQ ID NO: 1828738 - DNA, 15 bp, Homo sapiens
tttcaggggcggggc

SEQ ID NO: 1828739 - DNA, 15 bp, Homo sapiens
ttcaggggcggggcc

SEQ ID NO: 1828740 - DNA, 15 bp, Homo sapiens
tcaggggcggggccc

SEQ ID NO: 1828741 - DNA, 15 bp, Homo sapiens
caggggcggggccca

SEQ ID NO: 1828742 - DNA, 15 bp, Homo sapiens
aggggcggggcccag

SEQ ID NO: 1828743 - DNA, 15 bp, Homo sapiens
ggggcggggcccagc

SEQ ID NO: 1828744 - DNA, 15 bp, Homo sapiens
gggcggggcccagca

SEQ ID NO: 1828745 - DNA, 15 bp, Homo sapiens
ggcggggcccagcaa

SEQ ID NO: 1828746 - DNA, 15 bp, Homo sapiens
gcggggcccagcaaa

SEQ ID NO: 1828747 - DNA, 15 bp, Homo sapiens
cggggcccagcaaat

SEQ ID NO: 1828748 - DNA, 15 bp, Homo sapiens
ggggcccagcaaatc

SEQ ID NO: 1828749 - DNA, 15 bp, Homo sapiens
gggcccagcaaatcg

SEQ ID NO: 1828750 - DNA, 15 bp, Homo sapiens
ggcccagcaaatcga

SEQ ID NO: 1828751 - DNA, 15 bp, Homo sapiens
gcccagcaaatcgag

SEQ ID NO: 1828752 - DNA, 15 bp, Homo sapiens
cccagcaaatcgagg

SEQ ID NO: 1828753 - DNA, 15 bp, Homo sapiens
ccagcaaatcgaggc

SEQ ID NO: 1828754 - DNA, 15 bp, Homo sapiens
cagcaaatcgaggcc

SEQ ID NO: 1828755 - DNA, 15 bp, Homo sapiens
agcaaatcgaggcct

SEQ ID NO: 1828756 - DNA, 15 bp, Homo sapiens
gcaaatcgaggcctc

SEQ ID NO: 1828757 - DNA, 15 bp, Homo sapiens
caaatcgaggcctcg

SEQ ID NO: 1828758 - DNA, 15 bp, Homo sapiens
aaatcgaggcctcgg

SEQ ID NO: 1828759 - DNA, 15 bp, Homo sapiens
aatcgaggcctcggc

SEQ ID NO: 1828760 - DNA, 15 bp, Homo sapiens
atcgaggcctcggcg

SEQ ID NO: 1828761 - DNA, 15 bp, Homo sapiens
tcgaggcctcggcgg

SEQ ID NO: 1828762 - DNA, 15 bp, Homo sapiens
cgaggcctcggcgga

SEQ ID NO: 1828763 - DNA, 15 bp, Homo sapiens
gaggcctcggcggag

SEQ ID NO: 1828764 - DNA, 15 bp, Homo sapiens
aggcctcggcggagt

SEQ ID NO: 1828765 - DNA, 15 bp, Homo sapiens
ggcctcggcggagtc

SEQ ID NO: 1828766 - DNA, 15 bp, Homo sapiens
gcctcggcggagtcc

SEQ ID NO: 1828767 - DNA, 15 bp, Homo sapiens
cctcggcggagtcct

SEQ ID NO: 1828768 - DNA, 15 bp, Homo sapiens
ctcggcggagtcctg

SEQ ID NO: 1828769 - DNA, 15 bp, Homo sapiens
tcggcggagtcctgc

SEQ ID NO: 1828770 - DNA, 15 bp, Homo sapiens
cggcggagtcctgcc

SEQ ID NO: 1828771 - DNA, 15 bp, Homo sapiens
ggcggagtcctgccc

SEQ ID NO: 1828772 - DNA, 15 bp, Homo sapiens
gcggagtcctgccca

SEQ ID NO: 1828773 - DNA, 15 bp, Homo sapiens
cggagtcctgcccac

SEQ ID NO: 1828774 - DNA, 15 bp, Homo sapiens
ggagtcctgcccaca

SEQ ID NO: 1828775 - DNA, 15 bp, Homo sapiens
gagtcctgcccacag

SEQ ID NO: 1828776 - DNA, 15 bp, Homo sapiens
agtcctgcccacagg

SEQ ID NO: 1828777 - DNA, 15 bp, Homo sapiens
gtcctgcccacaggg

SEQ ID NO: 1828778 - DNA, 15 bp, Homo sapiens
tcctgcccacaggga

SEQ ID NO: 1828779 - DNA, 15 bp, Homo sapiens
cctgcccacagggac

SEQ ID NO: 1828780 - DNA, 15 bp, Homo sapiens
ctgcccacagggaca

SEQ ID NO: 1828781 - DNA, 15 bp, Homo sapiens
tgcccacagggacat

SEQ ID NO: 1828782 - DNA, 15 bp, Homo sapiens
gcccacagggacatc

SEQ ID NO: 1828783 - DNA, 15 bp, Homo sapiens
cccacagggacatca

SEQ ID NO: 1828784 - DNA, 15 bp, Homo sapiens
ccacagggacatcag

SEQ ID NO: 1828785 - DNA, 15 bp, Homo sapiens
cacagggacatcagt

SEQ ID NO: 1828786 - DNA, 15 bp, Homo sapiens
acagggacatcagtg

SEQ ID NO: 1828787 - DNA, 15 bp, Homo sapiens
cagggacatcagtgc

SEQ ID NO: 1828788 - DNA, 15 bp, Homo sapiens
agggacatcagtgcc

SEQ ID NO: 1828789 - DNA, 15 bp, Homo sapiens
gggacatcagtgccg

SEQ ID NO: 1828790 - DNA, 15 bp, Homo sapiens
ggacatcagtgccgc

SEQ ID NO: 1828791 - DNA, 15 bp, Homo sapiens
gacatcagtgccgcc

SEQ ID NO: 1828792 - DNA, 15 bp, Homo sapiens
acatcagtgccgccc

SEQ ID NO: 1828793 - DNA, 15 bp, Homo sapiens
catcagtgccgcccc

SEQ ID NO: 1828794 - DNA, 15 bp, Homo sapiens
atcagtgccgccccc

SEQ ID NO: 1828795 - DNA, 15 bp, Homo sapiens
tcagtgccgcccccg

SEQ ID NO: 1828796 - DNA, 15 bp, Homo sapiens
cagtgccgcccccgc

SEQ ID NO: 1828797 - DNA, 15 bp, Homo sapiens
agtgccgcccccgcg

SEQ ID NO: 1828798 - DNA, 15 bp, Homo sapiens
gtgccgcccccgcgc

SEQ ID NO: 1828799 - DNA, 15 bp, Homo sapiens
tgccgcccccgcgct

SEQ ID NO: 1828800 - DNA, 15 bp, Homo sapiens
gccgcccccgcgctg

SEQ ID NO: 1828801 - DNA, 15 bp, Homo sapiens
ccgcccccgcgctga

SEQ ID NO: 1828802 - DNA, 15 bp, Homo sapiens
cgcccccgcgctgac

SEQ ID NO: 1828803 - DNA, 15 bp, Homo sapiens
gcccccgcgctgact

SEQ ID NO: 1828804 - DNA, 15 bp, Homo sapiens
cccccgcgctgactc

SEQ ID NO: 1828805 - DNA, 15 bp, Homo sapiens
ccccgcgctgactcc

SEQ ID NO: 1828806 - DNA, 15 bp, Homo sapiens
cccgcgctgactcct

SEQ ID NO: 1828807 - DNA, 15 bp, Homo sapiens
ccgcgctgactcctt

SEQ ID NO: 1828808 - DNA, 15 bp, Homo sapiens
cgcgctgactccttc

SEQ ID NO: 1828809 - DNA, 15 bp, Homo sapiens
gcgctgactccttcc

SEQ ID NO: 1828810 - DNA, 15 bp, Homo sapiens
cgctgactccttccc

SEQ ID NO: 1828811 - DNA, 15 bp, Homo sapiens
gctgactccttcccg

SEQ ID NO: 1828812 - DNA, 15 bp, Homo sapiens
ctgactccttcccgg

SEQ ID NO: 1828813 - DNA, 15 bp, Homo sapiens
tgactccttcccggc

SEQ ID NO: 1828814 - DNA, 15 bp, Homo sapiens
gactccttcccggcg

SEQ ID NO: 1828815 - DNA, 15 bp, Homo sapiens
actccttcccggcga

SEQ ID NO: 1828816 - DNA, 15 bp, Homo sapiens
ctccttcccggcgag

SEQ ID NO: 1828817 - DNA, 15 bp, Homo sapiens
tccttcccggcgagg

SEQ ID NO: 1828818 - DNA, 15 bp, Homo sapiens
ccttcccggcgagga

SEQ ID NO: 1828819 - DNA, 15 bp, Homo sapiens
cttcccggcgaggac

SEQ ID NO: 1828820 - DNA, 15 bp, Homo sapiens
ttcccggcgaggact

SEQ ID NO: 1828821 - DNA, 15 bp, Homo sapiens
tcccggcgaggactc

SEQ ID NO: 1828822 - DNA, 15 bp, Homo sapiens
cccggcgaggactca

SEQ ID NO: 1828823 - DNA, 15 bp, Homo sapiens
ccggcgaggactcag

SEQ ID NO: 1828824 - DNA, 15 bp, Homo sapiens
cggcgaggactcagc

SEQ ID NO: 1828825 - DNA, 15 bp, Homo sapiens
ggcgaggactcagcg

SEQ ID NO: 1828826 - DNA, 15 bp, Homo sapiens
gcgaggactcagcgg

SEQ ID NO: 1828827 - DNA, 15 bp, Homo sapiens
cgaggactcagcggg

SEQ ID NO: 1828828 - DNA, 15 bp, Homo sapiens
gaggactcagcgggg

SEQ ID NO: 1828829 - DNA, 15 bp, Homo sapiens
aggactcagcgggga

SEQ ID NO: 1828830 - DNA, 15 bp, Homo sapiens
ggactcagcggggag

SEQ ID NO: 1828831 - DNA, 15 bp, Homo sapiens
gactcagcggggagg

SEQ ID NO: 1828832 - DNA, 15 bp, Homo sapiens
actcagcggggaggg

SEQ ID NO: 1828833 - DNA, 15 bp, Homo sapiens
ctcagcggggaggga

SEQ ID NO: 1828834 - DNA, 15 bp, Homo sapiens
tcagcggggagggat

SEQ ID NO: 1828835 - DNA, 15 bp, Homo sapiens
cagcggggagggatg

SEQ ID NO: 1828836 - DNA, 15 bp, Homo sapiens
agcggggagggatgc

SEQ ID NO: 1828837 - DNA, 15 bp, Homo sapiens
gcggggagggatgcg

SEQ ID NO: 1828838 - DNA, 15 bp, Homo sapiens
cggggagggatgcgc

SEQ ID NO: 1828839 - DNA, 15 bp, Homo sapiens
ggggagggatgcgcc

SEQ ID NO: 1828840 - DNA, 15 bp, Homo sapiens
gggagggatgcgccc

SEQ ID NO: 1828841 - DNA, 15 bp, Homo sapiens
ggagggatgcgccca

SEQ ID NO: 1828842 - DNA, 15 bp, Homo sapiens
gagggatgcgcccaa

SEQ ID NO: 1828843 - DNA, 15 bp, Homo sapiens
agggatgcgcccaag

SEQ ID NO: 1828844 - DNA, 15 bp, Homo sapiens
gggatgcgcccaagt

SEQ ID NO: 1828845 - DNA, 15 bp, Homo sapiens
ggatgcgcccaagtc

SEQ ID NO: 1828846 - DNA, 15 bp, Homo sapiens
gatgcgcccaagtcc

SEQ ID NO: 1828847 - DNA, 15 bp, Homo sapiens
atgcgcccaagtccc

SEQ ID NO: 1828848 - DNA, 15 bp, Homo sapiens
tgcgcccaagtccct

SEQ ID NO: 1828849 - DNA, 15 bp, Homo sapiens
gcgcccaagtccctt

SEQ ID NO: 1828850 - DNA, 15 bp, Homo sapiens
cgcccaagtcccttg

SEQ ID NO: 1828851 - DNA, 15 bp, Homo sapiens
gcccaagtcccttga

SEQ ID NO: 1828852 - DNA, 15 bp, Homo sapiens
cccaagtcccttgag

SEQ ID NO: 1828853 - DNA, 15 bp, Homo sapiens
ccaagtcccttgagg

SEQ ID NO: 1828854 - DNA, 15 bp, Homo sapiens
caagtcccttgaggg

SEQ ID NO: 1828855 - DNA, 15 bp, Homo sapiens
aagtcccttgagggt

SEQ ID NO: 1828856 - DNA, 15 bp, Homo sapiens
agtcccttgagggtc

SEQ ID NO: 1828857 - DNA, 15 bp, Homo sapiens
gtcccttgagggtca

SEQ ID NO: 1828858 - DNA, 15 bp, Homo sapiens
tcccttgagggtcac

SEQ ID NO: 1828859 - DNA, 15 bp, Homo sapiens
cccttgagggtcaca

SEQ ID NO: 1828860 - DNA, 15 bp, Homo sapiens
ccttgagggtcacag

SEQ ID NO: 1828861 - DNA, 15 bp, Homo sapiens
cttgagggtcacagg

SEQ ID NO: 1828862 - DNA, 15 bp, Homo sapiens
ttgagggtcacaggg

SEQ ID NO: 1828863 - DNA, 15 bp, Homo sapiens
tgagggtcacagggc

SEQ ID NO: 1828864 - DNA, 15 bp, Homo sapiens
gagggtcacagggct

SEQ ID NO: 1828865 - DNA, 15 bp, Homo sapiens
agggtcacagggctt

SEQ ID NO: 1828866 - DNA, 15 bp, Homo sapiens
gggtcacagggcttc

SEQ ID NO: 1828867 - DNA, 15 bp, Homo sapiens
ggtcacagggcttct

SEQ ID NO: 1828868 - DNA, 15 bp, Homo sapiens
gtcacagggcttctg

SEQ ID NO: 1828869 - DNA, 15 bp, Homo sapiens
tcacagggcttctgc

SEQ ID NO: 1828870 - DNA, 15 bp, Homo sapiens
cacagggcttctgcc

SEQ ID NO: 1828871 - DNA, 15 bp, Homo sapiens
acagggcttctgcca

SEQ ID NO: 1828872 - DNA, 15 bp, Homo sapiens
cagggcttctgccag

SEQ ID NO: 1828873 - DNA, 15 bp, Homo sapiens
agggcttctgccaga

SEQ ID NO: 1828874 - DNA, 15 bp, Homo sapiens
gggcttctgccagag

SEQ ID NO: 1828875 - DNA, 15 bp, Homo sapiens
ggcttctgccagagt

SEQ ID NO: 1828876 - DNA, 15 bp, Homo sapiens
gcttctgccagagtt

SEQ ID NO: 1828877 - DNA, 15 bp, Homo sapiens
cttctgccagagtta

SEQ ID NO: 1828878 - DNA, 15 bp, Homo sapiens
ttctgccagagttaa

SEQ ID NO: 1828879 - DNA, 15 bp, Homo sapiens
tctgccagagttaag

SEQ ID NO: 1828880 - DNA, 15 bp, Homo sapiens
ctgccagagttaagt

SEQ ID NO: 1828881 - DNA, 15 bp, Homo sapiens
tgccagagttaagtt

SEQ ID NO: 1828882 - DNA, 15 bp, Homo sapiens
gccagagttaagttc

SEQ ID NO: 1828883 - DNA, 15 bp, Homo sapiens
ccagagttaagttct

SEQ ID NO: 1828884 - DNA, 15 bp, Homo sapiens
cagagttaagttcta

SEQ ID NO: 1828885 - DNA, 15 bp, Homo sapiens
agagttaagttctat

SEQ ID NO: 1828886 - DNA, 15 bp, Homo sapiens
gagttaagttctatt

SEQ ID NO: 1828887 - DNA, 15 bp, Homo sapiens
agttaagttctattt

SEQ ID NO: 1828888 - DNA, 15 bp, Homo sapiens
gttaagttctattta

SEQ ID NO: 1828889 - DNA, 15 bp, Homo sapiens
ttaagttctatttaa

SEQ ID NO: 1828890 - DNA, 15 bp, Homo sapiens
taagttctatttaaa

SEQ ID NO: 1828891 - DNA, 15 bp, Homo sapiens
aagttctatttaaaa

SEQ ID NO: 1828892 - DNA, 15 bp, Homo sapiens
agttctatttaaaaa

SEQ ID NO: 1828893 - DNA, 15 bp, Homo sapiens
gttctatttaaaaat

SEQ ID NO: 1828894 - DNA, 15 bp, Homo sapiens
ttctatttaaaaata

SEQ ID NO: 1828895 - DNA, 15 bp, Homo sapiens
tctatttaaaaataa

SEQ ID NO: 1828896 - DNA, 15 bp, Homo sapiens
ctatttaaaaataaa

SEQ ID NO: 1828897 - DNA, 15 bp, Homo sapiens
tatttaaaaataaaa

SEQ ID NO: 1828898 - DNA, 15 bp, Homo sapiens
atttaaaaataaaat

SEQ ID NO: 1828899 - DNA, 15 bp, Homo sapiens
tttaaaaataaaatg

SEQ ID NO: 1828900 - DNA, 15 bp, Homo sapiens
ttaaaaataaaatgt

SEQ ID NO: 1828901 - DNA, 15 bp, Homo sapiens
taaaaataaaatgtt

SEQ ID NO: 1828902 - DNA, 15 bp, Homo sapiens
aaaaataaaatgtta

SEQ ID NO: 1828903 - DNA, 15 bp, Homo sapiens
aaaataaaatgttaa

SEQ ID NO: 1828904 - DNA, 15 bp, Homo sapiens
aaataaaatgttaac

SEQ ID NO: 1828905 - DNA, 15 bp, Homo sapiens
aataaaatgttaacc

SEQ ID NO: 1828906 - DNA, 15 bp, Homo sapiens
ataaaatgttaacct

SEQ ID NO: 1828907 - DNA, 15 bp, Homo sapiens
taaaatgttaaccta

SEQ ID NO: 1828908 - DNA, 15 bp, Homo sapiens
aaaatgttaacctaa

SEQ ID NO: 1828909 - DNA, 15 bp, Homo sapiens
aaatgttaacctaaa

SEQ ID NO: 1828910 - DNA, 15 bp, Homo sapiens
aatgttaacctaaaa

SEQ ID NO: 1828911 - DNA, 15 bp, Homo sapiens
atgttaacctaaaaa

SEQ ID NO: 1828912 - DNA, 15 bp, Homo sapiens
tgttaacctaaaaac

SEQ ID NO: 1828913 - DNA, 15 bp, Homo sapiens
gttaacctaaaaacc

SEQ ID NO: 1828914 - DNA, 15 bp, Homo sapiens
ttaacctaaaaacca

SEQ ID NO: 1828915 - DNA, 15 bp, Homo sapiens
taacctaaaaaccaa

SEQ ID NO: 1828916 - DNA, 15 bp, Homo sapiens
aacctaaaaaccaat

SEQ ID NO: 1828917 - DNA, 15 bp, Homo sapiens
acctaaaaaccaata

SEQ ID NO: 1828918 - DNA, 15 bp, Homo sapiens
cctaaaaaccaatag

SEQ ID NO: 1828919 - DNA, 15 bp, Homo sapiens
ctaaaaaccaatagt

SEQ ID NO: 1828920 - DNA, 15 bp, Homo sapiens
taaaaaccaatagtc

SEQ ID NO: 1828921 - DNA, 15 bp, Homo sapiens
aaaaaccaatagtca

SEQ ID NO: 1828922 - DNA, 15 bp, Homo sapiens
aaaaccaatagtcat

SEQ ID NO: 1828923 - DNA, 15 bp, Homo sapiens
aaaccaatagtcatg

SEQ ID NO: 1828924 - DNA, 15 bp, Homo sapiens
aaccaatagtcatgg

SEQ ID NO: 1828925 - DNA, 15 bp, Homo sapiens
accaatagtcatggt

SEQ ID NO: 1828926 - DNA, 15 bp, Homo sapiens
ccaatagtcatggtc

SEQ ID NO: 1828927 - DNA, 15 bp, Homo sapiens
caatagtcatggtct

SEQ ID NO: 1828928 - DNA, 15 bp, Homo sapiens
aatagtcatggtctc

SEQ ID NO: 1828929 - DNA, 15 bp, Homo sapiens
atagtcatggtctcg

SEQ ID NO: 1828930 - DNA, 15 bp, Homo sapiens
tagtcatggtctcgg

SEQ ID NO: 1828931 - DNA, 15 bp, Homo sapiens
agtcatggtctcggc

SEQ ID NO: 1828932 - DNA, 15 bp, Homo sapiens
gtcatggtctcggcc

SEQ ID NO: 1828933 - DNA, 15 bp, Homo sapiens
tcatggtctcggcca

SEQ ID NO: 1828934 - DNA, 15 bp, Homo sapiens
catggtctcggccag

SEQ ID NO: 1828935 - DNA, 15 bp, Homo sapiens
atggtctcggccagc

SEQ ID NO: 1828936 - DNA, 15 bp, Homo sapiens
tggtctcggccagcg

SEQ ID NO: 1828937 - DNA, 15 bp, Homo sapiens
ggtctcggccagcgc

SEQ ID NO: 1828938 - DNA, 15 bp, Homo sapiens
gtctcggccagcgcc

SEQ ID NO: 1828939 - DNA, 15 bp, Homo sapiens
tctcggccagcgcct

SEQ ID NO: 1828940 - DNA, 15 bp, Homo sapiens
ctcggccagcgcctc

SEQ ID NO: 1828941 - DNA, 15 bp, Homo sapiens
tcggccagcgcctcg

SEQ ID NO: 1828942 - DNA, 15 bp, Homo sapiens
cggccagcgcctcgc

SEQ ID NO: 1828943 - DNA, 15 bp, Homo sapiens
ggccagcgcctcgcc

SEQ ID NO: 1828944 - DNA, 15 bp, Homo sapiens
gccagcgcctcgccg

SEQ ID NO: 1828945 - DNA, 15 bp, Homo sapiens
ccagcgcctcgccga

SEQ ID NO: 1828946 - DNA, 15 bp, Homo sapiens
cagcgcctcgccgag

SEQ ID NO: 1828947 - DNA, 15 bp, Homo sapiens
agcgcctcgccgagt

SEQ ID NO: 1828948 - DNA, 15 bp, Homo sapiens
gcgcctcgccgagtt

SEQ ID NO: 1828949 - DNA, 15 bp, Homo sapiens
cgcctcgccgagttg

SEQ ID NO: 1828950 - DNA, 15 bp, Homo sapiens
gcctcgccgagttgc

SEQ ID NO: 1828951 - DNA, 15 bp, Homo sapiens
cctcgccgagttgca

SEQ ID NO: 1828952 - DNA, 15 bp, Homo sapiens
ctcgccgagttgcag

SEQ ID NO: 1828953 - DNA, 15 bp, Homo sapiens
tcgccgagttgcagt

SEQ ID NO: 1828954 - DNA, 15 bp, Homo sapiens
cgccgagttgcagtg

SEQ ID NO: 1828955 - DNA, 15 bp, Homo sapiens
gccgagttgcagtga

SEQ ID NO: 1828956 - DNA, 15 bp, Homo sapiens
ccgagttgcagtgag

SEQ ID NO: 1828957 - DNA, 15 bp, Homo sapiens
cgagttgcagtgagc

SEQ ID NO: 1828958 - DNA, 15 bp, Homo sapiens
gagttgcagtgagct

SEQ ID NO: 1828959 - DNA, 15 bp, Homo sapiens
agttgcagtgagctg

SEQ ID NO: 1828960 - DNA, 15 bp, Homo sapiens
gctgagatcgtgccc

SEQ ID NO: 1828961 - DNA, 15 bp, Homo sapiens
ctgagatcgtgccct

SEQ ID NO: 1828962 - DNA, 15 bp, Homo sapiens
tgagatcgtgccctc

SEQ ID NO: 1828963 - DNA, 15 bp, Homo sapiens
gagatcgtgccctcc

SEQ ID NO: 1828964 - DNA, 15 bp, Homo sapiens
agatcgtgccctccc

SEQ ID NO: 1828965 - DNA, 15 bp, Homo sapiens
gatcgtgccctccca

SEQ ID NO: 1828966 - DNA, 15 bp, Homo sapiens
atcgtgccctcccac

SEQ ID NO: 1828967 - DNA, 15 bp, Homo sapiens
tcgtgccctcccacg

SEQ ID NO: 1828968 - DNA, 15 bp, Homo sapiens
cgtgccctcccacgc

SEQ ID NO: 1828969 - DNA, 15 bp, Homo sapiens
gtgccctcccacgcc

SEQ ID NO: 1828970 - DNA, 15 bp, Homo sapiens
tgccctcccacgccc

SEQ ID NO: 1828971 - DNA, 15 bp, Homo sapiens
gccctcccacgcccg

SEQ ID NO: 1828972 - DNA, 15 bp, Homo sapiens
ccctcccacgcccgc

SEQ ID NO: 1828973 - DNA, 15 bp, Homo sapiens
cctcccacgcccgca

SEQ ID NO: 1828974 - DNA, 15 bp, Homo sapiens
ctcccacgcccgcag

SEQ ID NO: 1828975 - DNA, 15 bp, Homo sapiens
tcccacgcccgcagc

SEQ ID NO: 1828976 - DNA, 15 bp, Homo sapiens
cccacgcccgcagcc

SEQ ID NO: 1828977 - DNA, 15 bp, Homo sapiens
ccacgcccgcagccc

SEQ ID NO: 1828978 - DNA, 15 bp, Homo sapiens
cacgcccgcagcccg

SEQ ID NO: 1828979 - DNA, 15 bp, Homo sapiens
acgcccgcagcccgc

SEQ ID NO: 1828980 - DNA, 15 bp, Homo sapiens
cgcccgcagcccgcg

SEQ ID NO: 1828981 - DNA, 15 bp, Homo sapiens
gcccgcagcccgcgt

SEQ ID NO: 1828982 - DNA, 15 bp, Homo sapiens
cccgcagcccgcgtc

SEQ ID NO: 1828983 - DNA, 15 bp, Homo sapiens
ccgcagcccgcgtcc

SEQ ID NO: 1828984 - DNA, 15 bp, Homo sapiens
cgcagcccgcgtcct

SEQ ID NO: 1828985 - DNA, 15 bp, Homo sapiens
gcagcccgcgtcctg

SEQ ID NO: 1828986 - DNA, 15 bp, Homo sapiens
cagcccgcgtcctgc

SEQ ID NO: 1828987 - DNA, 15 bp, Homo sapiens
agcccgcgtcctgcc

SEQ ID NO: 1828988 - DNA, 15 bp, Homo sapiens
gcccgcgtcctgcct

SEQ ID NO: 1828989 - DNA, 15 bp, Homo sapiens
cccgcgtcctgcctt

SEQ ID NO: 1828990 - DNA, 15 bp, Homo sapiens
ccgcgtcctgccttg

SEQ ID NO: 1828991 - DNA, 15 bp, Homo sapiens
cgcgtcctgccttgg

SEQ ID NO: 1828992 - DNA, 15 bp, Homo sapiens
gcgtcctgccttggc

SEQ ID NO: 1828993 - DNA, 15 bp, Homo sapiens
cgtcctgccttggcc

SEQ ID NO: 1828994 - DNA, 15 bp, Homo sapiens
gtcctgccttggcct

SEQ ID NO: 1828995 - DNA, 15 bp, Homo sapiens
ctgccttggcctccg

SEQ ID NO: 1828996 - DNA, 15 bp, Homo sapiens
tgccttggcctccgt

SEQ ID NO: 1828997 - DNA, 15 bp, Homo sapiens
gccttggcctccgta

SEQ ID NO: 1828998 - DNA, 15 bp, Homo sapiens
ccttggcctccgtag

SEQ ID NO: 1828999 - DNA, 15 bp, Homo sapiens
cttggcctccgtagt

SEQ ID NO: 1829000 - DNA, 15 bp, Homo sapiens
ttggcctccgtagtc

SEQ ID NO: 1829001 - DNA, 15 bp, Homo sapiens
tggcctccgtagtcg

SEQ ID NO: 1829002 - DNA, 15 bp, Homo sapiens
ggcctccgtagtcgc

SEQ ID NO: 1829003 - DNA, 15 bp, Homo sapiens
gcctccgtagtcgct

SEQ ID NO: 1829004 - DNA, 15 bp, Homo sapiens
cctccgtagtcgctg

SEQ ID NO: 1829005 - DNA, 15 bp, Homo sapiens
ctccgtagtcgctga

SEQ ID NO: 1829006 - DNA, 15 bp, Homo sapiens
tccgtagtcgctgag

SEQ ID NO: 1829007 - DNA, 15 bp, Homo sapiens
ccgtagtcgctgaga

SEQ ID NO: 1829008 - DNA, 15 bp, Homo sapiens
cgtagtcgctgagag

SEQ ID NO: 1829009 - DNA, 15 bp, Homo sapiens
gtagtcgctgagagc

SEQ ID NO: 1829010 - DNA, 15 bp, Homo sapiens
tagtcgctgagagcc

SEQ ID NO: 1829011 - DNA, 15 bp, Homo sapiens
agtcgctgagagcca

SEQ ID NO: 1829012 - DNA, 15 bp, Homo sapiens
gtcgctgagagccac

SEQ ID NO: 1829013 - DNA, 15 bp, Homo sapiens
tcgctgagagccaca

SEQ ID NO: 1829014 - DNA, 15 bp, Homo sapiens
cgctgagagccacag

SEQ ID NO: 1829015 - DNA, 15 bp, Homo sapiens
gctgagagccacagc

SEQ ID NO: 1829016 - DNA, 15 bp, Homo sapiens
ctgagagccacagcc

SEQ ID NO: 1829017 - DNA, 15 bp, Homo sapiens
tgagagccacagcct

SEQ ID NO: 1829018 - DNA, 15 bp, Homo sapiens
gagagccacagccta

SEQ ID NO: 1829019 - DNA, 15 bp, Homo sapiens
agagccacagcctag

SEQ ID NO: 1829020 - DNA, 15 bp, Homo sapiens
gagccacagcctaga

SEQ ID NO: 1829021 - DNA, 15 bp, Homo sapiens
agccacagcctagag

SEQ ID NO: 1829022 - DNA, 15 bp, Homo sapiens
gccacagcctagagc

SEQ ID NO: 1829023 - DNA, 15 bp, Homo sapiens
ccacagcctagagcg

SEQ ID NO: 1829024 - DNA, 15 bp, Homo sapiens
cacagcctagagcgc

SEQ ID NO: 1829025 - DNA, 15 bp, Homo sapiens
acagcctagagcgcc

SEQ ID NO: 1829026 - DNA, 15 bp, Homo sapiens
cagcctagagcgcca

SEQ ID NO: 1829027 - DNA, 15 bp, Homo sapiens
agcctagagcgccag

SEQ ID NO: 1829028 - DNA, 15 bp, Homo sapiens
gcctagagcgccagc

SEQ ID NO: 1829029 - DNA, 15 bp, Homo sapiens
cctagagcgccagcg

SEQ ID NO: 1829030 - DNA, 15 bp, Homo sapiens
ctagagcgccagcgc

SEQ ID NO: 1829031 - DNA, 15 bp, Homo sapiens
tagagcgccagcgcg

SEQ ID NO: 1829032 - DNA, 15 bp, Homo sapiens
agagcgccagcgcgc

SEQ ID NO: 1829033 - DNA, 15 bp, Homo sapiens
gagcgccagcgcgca

SEQ ID NO: 1829034 - DNA, 15 bp, Homo sapiens
agcgccagcgcgcag

SEQ ID NO: 1829035 - DNA, 15 bp, Homo sapiens
gcgccagcgcgcagg

SEQ ID NO: 1829036 - DNA, 15 bp, Homo sapiens
cgccagcgcgcaggc

SEQ ID NO: 1829037 - DNA, 15 bp, Homo sapiens
gccagcgcgcaggcg

SEQ ID NO: 1829038 - DNA, 15 bp, Homo sapiens
ccagcgcgcaggcgc

SEQ ID NO: 1829039 - DNA, 15 bp, Homo sapiens
cagcgcgcaggcgca

SEQ ID NO: 1829040 - DNA, 15 bp, Homo sapiens
agcgcgcaggcgcac

SEQ ID NO: 1829041 - DNA, 15 bp, Homo sapiens
gcgcgcaggcgcaca

SEQ ID NO: 1829042 - DNA, 15 bp, Homo sapiens
cgcgcaggcgcacaa

SEQ ID NO: 1829043 - DNA, 15 bp, Homo sapiens
gcgcaggcgcacaac

SEQ ID NO: 1829044 - DNA, 15 bp, Homo sapiens
cgcaggcgcacaact

SEQ ID NO: 1829045 - DNA, 15 bp, Homo sapiens
gcaggcgcacaactg

SEQ ID NO: 1829046 - DNA, 15 bp, Homo sapiens
caggcgcacaactga

SEQ ID NO: 1829047 - DNA, 15 bp, Homo sapiens
aggcgcacaactgac

SEQ ID NO: 1829048 - DNA, 15 bp, Homo sapiens
ggcgcacaactgacg

SEQ ID NO: 1829049 - DNA, 15 bp, Homo sapiens
gcgcacaactgacgc

SEQ ID NO: 1829050 - DNA, 15 bp, Homo sapiens
cgcacaactgacgcc

SEQ ID NO: 1829051 - DNA, 15 bp, Homo sapiens
gcacaactgacgcca

SEQ ID NO: 1829052 - DNA, 15 bp, Homo sapiens
cacaactgacgccag

SEQ ID NO: 1829053 - DNA, 15 bp, Homo sapiens
acaactgacgccagg

SEQ ID NO: 1829054 - DNA, 15 bp, Homo sapiens
caactgacgccaggc

SEQ ID NO: 1829055 - DNA, 15 bp, Homo sapiens
aactgacgccaggcc

SEQ ID NO: 1829056 - DNA, 15 bp, Homo sapiens
actgacgccaggcca

SEQ ID NO: 1829057 - DNA, 15 bp, Homo sapiens
ctgacgccaggccac

SEQ ID NO: 1829058 - DNA, 15 bp, Homo sapiens
tgacgccaggccacg

SEQ ID NO: 1829059 - DNA, 15 bp, Homo sapiens
gacgccaggccacga

SEQ ID NO: 1829060 - DNA, 15 bp, Homo sapiens
acgccaggccacgaa

SEQ ID NO: 1829061 - DNA, 15 bp, Homo sapiens
cgccaggccacgaac

SEQ ID NO: 1829062 - DNA, 15 bp, Homo sapiens
gccaggccacgaacc

SEQ ID NO: 1829063 - DNA, 15 bp, Homo sapiens
ccaggccacgaaccc

SEQ ID NO: 1829064 - DNA, 15 bp, Homo sapiens
caggccacgaaccca

SEQ ID NO: 1829065 - DNA, 15 bp, Homo sapiens
aggccacgaacccag

SEQ ID NO: 1829066 - DNA, 15 bp, Homo sapiens
ggccacgaacccagt

SEQ ID NO: 1829067 - DNA, 15 bp, Homo sapiens
gccacgaacccagta

SEQ ID NO: 1829068 - DNA, 15 bp, Homo sapiens
ccacgaacccagtac

SEQ ID NO: 1829069 - DNA, 15 bp, Homo sapiens
cacgaacccagtact

SEQ ID NO: 1829070 - DNA, 15 bp, Homo sapiens
acgaacccagtactg

SEQ ID NO: 1829071 - DNA, 15 bp, Homo sapiens
cgaacccagtactgc

SEQ ID NO: 1829072 - DNA, 15 bp, Homo sapiens
gaacccagtactgct

SEQ ID NO: 1829073 - DNA, 15 bp, Homo sapiens
aacccagtactgctc

SEQ ID NO: 1829074 - DNA, 15 bp, Homo sapiens
acccagtactgctcc

SEQ ID NO: 1829075 - DNA, 15 bp, Homo sapiens
cccagtactgctcct

SEQ ID NO: 1829076 - DNA, 15 bp, Homo sapiens
ccagtactgctcctg

SEQ ID NO: 1829077 - DNA, 15 bp, Homo sapiens
cagtactgctcctgc

SEQ ID NO: 1829078 - DNA, 15 bp, Homo sapiens
agtactgctcctgca

SEQ ID NO: 1829079 - DNA, 15 bp, Homo sapiens
gtactgctcctgcac

SEQ ID NO: 1829080 - DNA, 15 bp, Homo sapiens
tactgctcctgcaca

SEQ ID NO: 1829081 - DNA, 15 bp, Homo sapiens
actgctcctgcacag

SEQ ID NO: 1829082 - DNA, 15 bp, Homo sapiens
ctgctcctgcacagc

SEQ ID NO: 1829083 - DNA, 15 bp, Homo sapiens
tgctcctgcacagca

SEQ ID NO: 1829084 - DNA, 15 bp, Homo sapiens
gctcctgcacagcag

SEQ ID NO: 1829085 - DNA, 15 bp, Homo sapiens
ctcctgcacagcaga

SEQ ID NO: 1829086 - DNA, 15 bp, Homo sapiens
tcctgcacagcagaa

SEQ ID NO: 1829087 - DNA, 15 bp, Homo sapiens
cctgcacagcagaag

SEQ ID NO: 1829088 - DNA, 15 bp, Homo sapiens
ctgcacagcagaagc

SEQ ID NO: 1829089 - DNA, 15 bp, Homo sapiens
tgcacagcagaagca

SEQ ID NO: 1829090 - DNA, 15 bp, Homo sapiens
gcacagcagaagcac

SEQ ID NO: 1829091 - DNA, 15 bp, Homo sapiens
cacagcagaagcact

SEQ ID NO: 1829092 - DNA, 15 bp, Homo sapiens
acagcagaagcacta

SEQ ID NO: 1829093 - DNA, 15 bp, Homo sapiens
cagcagaagcactag

SEQ ID NO: 1829094 - DNA, 15 bp, Homo sapiens
agcagaagcactagc

SEQ ID NO: 1829095 - DNA, 15 bp, Homo sapiens
gcagaagcactagca

SEQ ID NO: 1829096 - DNA, 15 bp, Homo sapiens
cagaagcactagcac

SEQ ID NO: 1829097 - DNA, 15 bp, Homo sapiens
agaagcactagcact

SEQ ID NO: 1829098 - DNA, 15 bp, Homo sapiens
gaagcactagcactg

SEQ ID NO: 1829099 - DNA, 15 bp, Homo sapiens
aagcactagcactga

SEQ ID NO: 1829100 - DNA, 15 bp, Homo sapiens
agcactagcactgag

SEQ ID NO: 1829101 - DNA, 15 bp, Homo sapiens
gcactagcactgagg

SEQ ID NO: 1829102 - DNA, 15 bp, Homo sapiens
cactagcactgaggc

SEQ ID NO: 1829103 - DNA, 15 bp, Homo sapiens
actagcactgaggcc

SEQ ID NO: 1829104 - DNA, 15 bp, Homo sapiens
ctagcactgaggccg

SEQ ID NO: 1829105 - DNA, 15 bp, Homo sapiens
tagcactgaggccgg

SEQ ID NO: 1829106 - DNA, 15 bp, Homo sapiens
agcactgaggccggg

SEQ ID NO: 1829107 - DNA, 15 bp, Homo sapiens
gcactgaggccgggc

SEQ ID NO: 1829108 - DNA, 15 bp, Homo sapiens
cactgaggccgggcg

SEQ ID NO: 1829109 - DNA, 15 bp, Homo sapiens
actgaggccgggcgg

SEQ ID NO: 1829110 - DNA, 15 bp, Homo sapiens
ctgaggccgggcggc

SEQ ID NO: 1829111 - DNA, 15 bp, Homo sapiens
tgaggccgggcggcg

SEQ ID NO: 1829112 - DNA, 15 bp, Homo sapiens
gaggccgggcggcga

SEQ ID NO: 1829113 - DNA, 15 bp, Homo sapiens
aggccgggcggcgaa

SEQ ID NO: 1829114 - DNA, 15 bp, Homo sapiens
ggccgggcggcgaac

SEQ ID NO: 1829115 - DNA, 15 bp, Homo sapiens
gccgggcggcgaacc

SEQ ID NO: 1829116 - DNA, 15 bp, Homo sapiens
ccgggcggcgaaccc

SEQ ID NO: 1829117 - DNA, 15 bp, Homo sapiens
cgggcggcgaacccg

SEQ ID NO: 1829118 - DNA, 15 bp, Homo sapiens
gggcggcgaacccgg

SEQ ID NO: 1829119 - DNA, 15 bp, Homo sapiens
ggcggcgaacccggc

SEQ ID NO: 1829120 - DNA, 15 bp, Homo sapiens
gcggcgaacccggca

SEQ ID NO: 1829121 - DNA, 15 bp, Homo sapiens
cggcgaacccggcac

SEQ ID NO: 1829122 - DNA, 15 bp, Homo sapiens
ggcgaacccggcact

SEQ ID NO: 1829123 - DNA, 15 bp, Homo sapiens
gcgaacccggcactg

SEQ ID NO: 1829124 - DNA, 15 bp, Homo sapiens
cgaacccggcactgc

SEQ ID NO: 1829125 - DNA, 15 bp, Homo sapiens
gaacccggcactgcg

SEQ ID NO: 1829126 - DNA, 15 bp, Homo sapiens
aacccggcactgcgc

SEQ ID NO: 1829127 - DNA, 15 bp, Homo sapiens
acccggcactgcgcc

SEQ ID NO: 1829128 - DNA, 15 bp, Homo sapiens
cccggcactgcgcct

SEQ ID NO: 1829129 - DNA, 15 bp, Homo sapiens
ccggcactgcgcctg

SEQ ID NO: 1829130 - DNA, 15 bp, Homo sapiens
cggcactgcgcctgc

SEQ ID NO: 1829131 - DNA, 15 bp, Homo sapiens
ggcactgcgcctgcg

SEQ ID NO: 1829132 - DNA, 15 bp, Homo sapiens
gcactgcgcctgcgc

SEQ ID NO: 1829133 - DNA, 15 bp, Homo sapiens
cactgcgcctgcgca

SEQ ID NO: 1829134 - DNA, 15 bp, Homo sapiens
actgcgcctgcgcag

SEQ ID NO: 1829135 - DNA, 15 bp, Homo sapiens
ctgcgcctgcgcagc

SEQ ID NO: 1829136 - DNA, 15 bp, Homo sapiens
tgcgcctgcgcagca

SEQ ID NO: 1829137 - DNA, 15 bp, Homo sapiens
gcgcctgcgcagcaa

SEQ ID NO: 1829138 - DNA, 15 bp, Homo sapiens
cgcctgcgcagcaaa

SEQ ID NO: 1829139 - DNA, 15 bp, Homo sapiens
gcctgcgcagcaaaa

SEQ ID NO: 1829140 - DNA, 15 bp, Homo sapiens
cctgcgcagcaaaag

SEQ ID NO: 1829141 - DNA, 15 bp, Homo sapiens
ctgcgcagcaaaagg

SEQ ID NO: 1829142 - DNA, 15 bp, Homo sapiens
tgcgcagcaaaagga

SEQ ID NO: 1829143 - DNA, 15 bp, Homo sapiens
gcgcagcaaaaggac

SEQ ID NO: 1829144 - DNA, 15 bp, Homo sapiens
cgcagcaaaaggaca

SEQ ID NO: 1829145 - DNA, 15 bp, Homo sapiens
gcagcaaaaggacac

SEQ ID NO: 1829146 - DNA, 15 bp, Homo sapiens
cagcaaaaggacacg

SEQ ID NO: 1829147 - DNA, 15 bp, Homo sapiens
agcaaaaggacacgc

SEQ ID NO: 1829148 - DNA, 15 bp, Homo sapiens
gcaaaaggacacgca

SEQ ID NO: 1829149 - DNA, 15 bp, Homo sapiens
caaaaggacacgcac

SEQ ID NO: 1829150 - DNA, 15 bp, Homo sapiens
aaaaggacacgcact

SEQ ID NO: 1829151 - DNA, 15 bp, Homo sapiens
aaaggacacgcactg

SEQ ID NO: 1829152 - DNA, 15 bp, Homo sapiens
aaggacacgcactga

SEQ ID NO: 1829153 - DNA, 15 bp, Homo sapiens
aggacacgcactgag

SEQ ID NO: 1829154 - DNA, 15 bp, Homo sapiens
ggacacgcactgagg

SEQ ID NO: 1829155 - DNA, 15 bp, Homo sapiens
gacacgcactgaggc

SEQ ID NO: 1829156 - DNA, 15 bp, Homo sapiens
acacgcactgaggcc

SEQ ID NO: 1829157 - DNA, 15 bp, Homo sapiens
cacgcactgaggcca

SEQ ID NO: 1829158 - DNA, 15 bp, Homo sapiens
acgcactgaggccag

SEQ ID NO: 1829159 - DNA, 15 bp, Homo sapiens
cgcactgaggccagg

SEQ ID NO: 1829160 - DNA, 15 bp, Homo sapiens
gcactgaggccaggc

SEQ ID NO: 1829161 - DNA, 15 bp, Homo sapiens
cactgaggccaggcc

SEQ ID NO: 1829162 - DNA, 15 bp, Homo sapiens
actgaggccaggccg

SEQ ID NO: 1829163 - DNA, 15 bp, Homo sapiens
ctgaggccaggccgc

SEQ ID NO: 1829164 - DNA, 15 bp, Homo sapiens
tgaggccaggccgcg

SEQ ID NO: 1829165 - DNA, 15 bp, Homo sapiens
gaggccaggccgcga

SEQ ID NO: 1829166 - DNA, 15 bp, Homo sapiens
aggccaggccgcgaa

SEQ ID NO: 1829167 - DNA, 15 bp, Homo sapiens
ggccaggccgcgaac

SEQ ID NO: 1829168 - DNA, 15 bp, Homo sapiens
gccaggccgcgaacc

SEQ ID NO: 1829169 - DNA, 15 bp, Homo sapiens
ccaggccgcgaaccc

SEQ ID NO: 1829170 - DNA, 15 bp, Homo sapiens
caggccgcgaaccca

SEQ ID NO: 1829171 - DNA, 15 bp, Homo sapiens
aggccgcgaacccag

SEQ ID NO: 1829172 - DNA, 15 bp, Homo sapiens
ggccgcgaacccagc

SEQ ID NO: 1829173 - DNA, 15 bp, Homo sapiens
gccgcgaacccagca

SEQ ID NO: 1829174 - DNA, 15 bp, Homo sapiens
ccgcgaacccagcac

SEQ ID NO: 1829175 - DNA, 15 bp, Homo sapiens
cgcgaacccagcacg

SEQ ID NO: 1829176 - DNA, 15 bp, Homo sapiens
gcgaacccagcacgg

SEQ ID NO: 1829177 - DNA, 15 bp, Homo sapiens
cgaacccagcacggt

SEQ ID NO: 1829178 - DNA, 15 bp, Homo sapiens
gaacccagcacggtg

SEQ ID NO: 1829179 - DNA, 15 bp, Homo sapiens
aacccagcacggtgc

SEQ ID NO: 1829180 - DNA, 15 bp, Homo sapiens
acccagcacggtgcc

SEQ ID NO: 1829181 - DNA, 15 bp, Homo sapiens
cccagcacggtgcct

SEQ ID NO: 1829182 - DNA, 15 bp, Homo sapiens
ccagcacggtgcctg

SEQ ID NO: 1829183 - DNA, 15 bp, Homo sapiens
cagcacggtgcctgc

SEQ ID NO: 1829184 - DNA, 15 bp, Homo sapiens
agcacggtgcctgcg

SEQ ID NO: 1829185 - DNA, 15 bp, Homo sapiens
gcacggtgcctgcgc

SEQ ID NO: 1829186 - DNA, 15 bp, Homo sapiens
cacggtgcctgcgca

SEQ ID NO: 1829187 - DNA, 15 bp, Homo sapiens
acggtgcctgcgcag

SEQ ID NO: 1829188 - DNA, 15 bp, Homo sapiens
cggtgcctgcgcagc

SEQ ID NO: 1829189 - DNA, 15 bp, Homo sapiens
ggtgcctgcgcagca

SEQ ID NO: 1829190 - DNA, 15 bp, Homo sapiens
gtgcctgcgcagcag

SEQ ID NO: 1829191 - DNA, 15 bp, Homo sapiens
tgcctgcgcagcagg

SEQ ID NO: 1829192 - DNA, 15 bp, Homo sapiens
gcctgcgcagcagga

SEQ ID NO: 1829193 - DNA, 15 bp, Homo sapiens
cctgcgcagcaggaa

SEQ ID NO: 1829194 - DNA, 15 bp, Homo sapiens
ctgcgcagcaggaag

SEQ ID NO: 1829195 - DNA, 15 bp, Homo sapiens
tgcgcagcaggaaga

SEQ ID NO: 1829196 - DNA, 15 bp, Homo sapiens
gcgcagcaggaagac

SEQ ID NO: 1829197 - DNA, 15 bp, Homo sapiens
cgcagcaggaagacc

SEQ ID NO: 1829198 - DNA, 15 bp, Homo sapiens
gcagcaggaagaccg

SEQ ID NO: 1829199 - DNA, 15 bp, Homo sapiens
cagcaggaagaccgg

SEQ ID NO: 1829200 - DNA, 15 bp, Homo sapiens
agcaggaagaccggc

SEQ ID NO: 1829201 - DNA, 15 bp, Homo sapiens
gcaggaagaccggca

SEQ ID NO: 1829202 - DNA, 15 bp, Homo sapiens
caggaagaccggcat

SEQ ID NO: 1829203 - DNA, 15 bp, Homo sapiens
aggaagaccggcatc

SEQ ID NO: 1829204 - DNA, 15 bp, Homo sapiens
ggaagaccggcatcc

SEQ ID NO: 1829205 - DNA, 15 bp, Homo sapiens
gaagaccggcatcca

SEQ ID NO: 1829206 - DNA, 15 bp, Homo sapiens
aagaccggcatccac

SEQ ID NO: 1829207 - DNA, 15 bp, Homo sapiens
agaccggcatccaca

SEQ ID NO: 1829208 - DNA, 15 bp, Homo sapiens
gaccggcatccacac

SEQ ID NO: 1829209 - DNA, 15 bp, Homo sapiens
accggcatccacacc

SEQ ID NO: 1829210 - DNA, 15 bp, Homo sapiens
ccggcatccacaccg

SEQ ID NO: 1829211 - DNA, 15 bp, Homo sapiens
cggcatccacaccgg

SEQ ID NO: 1829212 - DNA, 15 bp, Homo sapiens
ggcatccacaccgga

SEQ ID NO: 1829213 - DNA, 15 bp, Homo sapiens
gcatccacaccggac

SEQ ID NO: 1829214 - DNA, 15 bp, Homo sapiens
catccacaccggacg

SEQ ID NO: 1829215 - DNA, 15 bp, Homo sapiens
atccacaccggacga

SEQ ID NO: 1829216 - DNA, 15 bp, Homo sapiens
tccacaccggacgac

SEQ ID NO: 1829217 - DNA, 15 bp, Homo sapiens
ccacaccggacgacg

SEQ ID NO: 1829218 - DNA, 15 bp, Homo sapiens
cacaccggacgacga

SEQ ID NO: 1829219 - DNA, 15 bp, Homo sapiens
acaccggacgacgaa

SEQ ID NO: 1829220 - DNA, 15 bp, Homo sapiens
caccggacgacgaac

SEQ ID NO: 1829221 - DNA, 15 bp, Homo sapiens
accggacgacgaacc

SEQ ID NO: 1829222 - DNA, 15 bp, Homo sapiens
ccggacgacgaaccc

SEQ ID NO: 1829223 - DNA, 15 bp, Homo sapiens
cggacgacgaaccca

SEQ ID NO: 1829224 - DNA, 15 bp, Homo sapiens
ggacgacgaacccag

SEQ ID NO: 1829225 - DNA, 15 bp, Homo sapiens
gacgacgaacccagc

SEQ ID NO: 1829226 - DNA, 15 bp, Homo sapiens
acgacgaacccagca

SEQ ID NO: 1829227 - DNA, 15 bp, Homo sapiens
cgacgaacccagcat

SEQ ID NO: 1829228 - DNA, 15 bp, Homo sapiens
gacgaacccagcatc

SEQ ID NO: 1829229 - DNA, 15 bp, Homo sapiens
acgaacccagcatcg

SEQ ID NO: 1829230 - DNA, 15 bp, Homo sapiens
cgaacccagcatcgc

SEQ ID NO: 1829231 - DNA, 15 bp, Homo sapiens
gaacccagcatcgcg

SEQ ID NO: 1829232 - DNA, 15 bp, Homo sapiens
aacccagcatcgcgc

SEQ ID NO: 1829233 - DNA, 15 bp, Homo sapiens
acccagcatcgcgcc

SEQ ID NO: 1829234 - DNA, 15 bp, Homo sapiens
cccagcatcgcgcct

SEQ ID NO: 1829235 - DNA, 15 bp, Homo sapiens
ccagcatcgcgcctg

SEQ ID NO: 1829236 - DNA, 15 bp, Homo sapiens
cagcatcgcgcctgc

SEQ ID NO: 1829237 - DNA, 15 bp, Homo sapiens
agcatcgcgcctgcg

SEQ ID NO: 1829238 - DNA, 15 bp, Homo sapiens
gcatcgcgcctgcgc

SEQ ID NO: 1829239 - DNA, 15 bp, Homo sapiens
catcgcgcctgcgca

SEQ ID NO: 1829240 - DNA, 15 bp, Homo sapiens
atcgcgcctgcgcag

SEQ ID NO: 1829241 - DNA, 15 bp, Homo sapiens
tcgcgcctgcgcagt

SEQ ID NO: 1829242 - DNA, 15 bp, Homo sapiens
cgcgcctgcgcagta

SEQ ID NO: 1829243 - DNA, 15 bp, Homo sapiens
gcgcctgcgcagtag

SEQ ID NO: 1829244 - DNA, 15 bp, Homo sapiens
cgcctgcgcagtagg

SEQ ID NO: 1829245 - DNA, 15 bp, Homo sapiens
gcctgcgcagtagga

SEQ ID NO: 1829246 - DNA, 15 bp, Homo sapiens
cctgcgcagtaggag

SEQ ID NO: 1829247 - DNA, 15 bp, Homo sapiens
ctgcgcagtaggagg

SEQ ID NO: 1829248 - DNA, 15 bp, Homo sapiens
tgcgcagtaggagga

SEQ ID NO: 1829249 - DNA, 15 bp, Homo sapiens
gcgcagtaggaggag

SEQ ID NO: 1829250 - DNA, 15 bp, Homo sapiens
cgcagtaggaggaga

SEQ ID NO: 1829251 - DNA, 15 bp, Homo sapiens
gcagtaggaggagag

SEQ ID NO: 1829252 - DNA, 15 bp, Homo sapiens
cagtaggaggagagc

SEQ ID NO: 1829253 - DNA, 15 bp, Homo sapiens
agtaggaggagagca

SEQ ID NO: 1829254 - DNA, 15 bp, Homo sapiens
gtaggaggagagcaa

SEQ ID NO: 1829255 - DNA, 15 bp, Homo sapiens
taggaggagagcaat

SEQ ID NO: 1829256 - DNA, 15 bp, Homo sapiens
aggaggagagcaatg

SEQ ID NO: 1829257 - DNA, 15 bp, Homo sapiens
ggaggagagcaatgc

SEQ ID NO: 1829258 - DNA, 15 bp, Homo sapiens
gaggagagcaatgcc

SEQ ID NO: 1829259 - DNA, 15 bp, Homo sapiens
aggagagcaatgcca

SEQ ID NO: 1829260 - DNA, 15 bp, Homo sapiens
ggagagcaatgccac

SEQ ID NO: 1829261 - DNA, 15 bp, Homo sapiens
gagagcaatgccacc

SEQ ID NO: 1829262 - DNA, 15 bp, Homo sapiens
agagcaatgccacca

SEQ ID NO: 1829263 - DNA, 15 bp, Homo sapiens
gagcaatgccaccag

SEQ ID NO: 1829264 - DNA, 15 bp, Homo sapiens
agcaatgccaccagg

SEQ ID NO: 1829265 - DNA, 15 bp, Homo sapiens
gcaatgccaccaggc

SEQ ID NO: 1829266 - DNA, 15 bp, Homo sapiens
caatgccaccaggcc

SEQ ID NO: 1829267 - DNA, 15 bp, Homo sapiens
aatgccaccaggccg

SEQ ID NO: 1829268 - DNA, 15 bp, Homo sapiens
atgccaccaggccgc

SEQ ID NO: 1829269 - DNA, 15 bp, Homo sapiens
tgccaccaggccgcg

SEQ ID NO: 1829270 - DNA, 15 bp, Homo sapiens
gccaccaggccgcga

SEQ ID NO: 1829271 - DNA, 15 bp, Homo sapiens
ccaccaggccgcgat

SEQ ID NO: 1829272 - DNA, 15 bp, Homo sapiens
caccaggccgcgatt

SEQ ID NO: 1829273 - DNA, 15 bp, Homo sapiens
accaggccgcgattg

SEQ ID NO: 1829274 - DNA, 15 bp, Homo sapiens
ccaggccgcgattgc

SEQ ID NO: 1829275 - DNA, 15 bp, Homo sapiens
caggccgcgattgcg

SEQ ID NO: 1829276 - DNA, 15 bp, Homo sapiens
aggccgcgattgcgc

SEQ ID NO: 1829277 - DNA, 15 bp, Homo sapiens
ggccgcgattgcgca

SEQ ID NO: 1829278 - DNA, 15 bp, Homo sapiens
gccgcgattgcgcag

SEQ ID NO: 1829279 - DNA, 15 bp, Homo sapiens
ccgcgattgcgcagc

SEQ ID NO: 1829280 - DNA, 15 bp, Homo sapiens
cgcgattgcgcagcc

SEQ ID NO: 1829281 - DNA, 15 bp, Homo sapiens
gcgattgcgcagccg

SEQ ID NO: 1829282 - DNA, 15 bp, Homo sapiens
cgattgcgcagccgc

SEQ ID NO: 1829283 - DNA, 15 bp, Homo sapiens
gattgcgcagccgca

SEQ ID NO: 1829284 - DNA, 15 bp, Homo sapiens
attgcgcagccgcag

SEQ ID NO: 1829285 - DNA, 15 bp, Homo sapiens
ttgcgcagccgcagc

SEQ ID NO: 1829286 - DNA, 15 bp, Homo sapiens
tgcgcagccgcagca

SEQ ID NO: 1829287 - DNA, 15 bp, Homo sapiens
gcgcagccgcagcag

SEQ ID NO: 1829288 - DNA, 15 bp, Homo sapiens
cgcagccgcagcagc

SEQ ID NO: 1829289 - DNA, 15 bp, Homo sapiens
gcagccgcagcagcc

SEQ ID NO: 1829290 - DNA, 15 bp, Homo sapiens
cagccgcagcagccc

SEQ ID NO: 1829291 - DNA, 15 bp, Homo sapiens
agccgcagcagcccc

SEQ ID NO: 1829292 - DNA, 15 bp, Homo sapiens
gccgcagcagccccg

SEQ ID NO: 1829293 - DNA, 15 bp, Homo sapiens
ccgcagcagccccgc

SEQ ID NO: 1829294 - DNA, 15 bp, Homo sapiens
cgcagcagccccgcg

SEQ ID NO: 1829295 - DNA, 15 bp, Homo sapiens
gcagcagccccgcgc

SEQ ID NO: 1829296 - DNA, 15 bp, Homo sapiens
cagcagccccgcgcg

SEQ ID NO: 1829297 - DNA, 15 bp, Homo sapiens
agcagccccgcgcgg

SEQ ID NO: 1829298 - DNA, 15 bp, Homo sapiens
gcagccccgcgcgga

SEQ ID NO: 1829299 - DNA, 15 bp, Homo sapiens
cagccccgcgcggaa

SEQ ID NO: 1829300 - DNA, 15 bp, Homo sapiens
agccccgcgcggaag

SEQ ID NO: 1829301 - DNA, 15 bp, Homo sapiens
gccccgcgcggaaga

SEQ ID NO: 1829302 - DNA, 15 bp, Homo sapiens
ccccgcgcggaagac

SEQ ID NO: 1829303 - DNA, 15 bp, Homo sapiens
cccgcgcggaagacg

SEQ ID NO: 1829304 - DNA, 15 bp, Homo sapiens
ccgcgcggaagacgc

SEQ ID NO: 1829305 - DNA, 15 bp, Homo sapiens
cgcgcggaagacgct

SEQ ID NO: 1829306 - DNA, 15 bp, Homo sapiens
gcgcggaagacgcta

SEQ ID NO: 1829307 - DNA, 15 bp, Homo sapiens
cgcggaagacgctac

SEQ ID NO: 1829308 - DNA, 15 bp, Homo sapiens
gcggaagacgctacc

SEQ ID NO: 1829309 - DNA, 15 bp, Homo sapiens
cggaagacgctaccc

SEQ ID NO: 1829310 - DNA, 15 bp, Homo sapiens
ggaagacgctaccct

SEQ ID NO: 1829311 - DNA, 15 bp, Homo sapiens
gaagacgctaccctc

SEQ ID NO: 1829312 - DNA, 15 bp, Homo sapiens
aagacgctaccctcc

SEQ ID NO: 1829313 - DNA, 15 bp, Homo sapiens
agacgctaccctcct

SEQ ID NO: 1829314 - DNA, 15 bp, Homo sapiens
gacgctaccctcctc

SEQ ID NO: 1829315 - DNA, 15 bp, Homo sapiens
acgctaccctcctct

SEQ ID NO: 1829316 - DNA, 15 bp, Homo sapiens
cgctaccctcctctc

SEQ ID NO: 1829317 - DNA, 15 bp, Homo sapiens
gctaccctcctctcc

SEQ ID NO: 1829318 - DNA, 15 bp, Homo sapiens
ctaccctcctctccc

SEQ ID NO: 1829319 - DNA, 15 bp, Homo sapiens
taccctcctctcccc

SEQ ID NO: 1829320 - DNA, 15 bp, Homo sapiens
accctcctctccccc

SEQ ID NO: 1829321 - DNA, 15 bp, Homo sapiens
ccctcctctcccccg

SEQ ID NO: 1829322 - DNA, 15 bp, Homo sapiens
cctcctctcccccga

SEQ ID NO: 1829323 - DNA, 15 bp, Homo sapiens
ctcctctcccccgaa

SEQ ID NO: 1829324 - DNA, 15 bp, Homo sapiens
tcctctcccccgaag

SEQ ID NO: 1829325 - DNA, 15 bp, Homo sapiens
cctctcccccgaaga

SEQ ID NO: 1829326 - DNA, 15 bp, Homo sapiens
ctctcccccgaagag

SEQ ID NO: 1829327 - DNA, 15 bp, Homo sapiens
tctcccccgaagagg

SEQ ID NO: 1829328 - DNA, 15 bp, Homo sapiens
ctcccccgaagaggc

SEQ ID NO: 1829329 - DNA, 15 bp, Homo sapiens
tcccccgaagaggcg

SEQ ID NO: 1829330 - DNA, 15 bp, Homo sapiens
cccccgaagaggcgg

SEQ ID NO: 1829331 - DNA, 15 bp, Homo sapiens
ccccgaagaggcggg

SEQ ID NO: 1829332 - DNA, 15 bp, Homo sapiens
cccgaagaggcgggg

SEQ ID NO: 1829333 - DNA, 15 bp, Homo sapiens
ccgaagaggcggggc

SEQ ID NO: 1829334 - DNA, 15 bp, Homo sapiens
cgaagaggcggggct

SEQ ID NO: 1829335 - DNA, 15 bp, Homo sapiens
gaagaggcggggctt

SEQ ID NO: 1829336 - DNA, 15 bp, Homo sapiens
aagaggcggggcttc

SEQ ID NO: 1829337 - DNA, 15 bp, Homo sapiens
agaggcggggcttcg

SEQ ID NO: 1829338 - DNA, 15 bp, Homo sapiens
gaggcggggcttcga

SEQ ID NO: 1829339 - DNA, 15 bp, Homo sapiens
aggcggggcttcgaa

SEQ ID NO: 1829340 - DNA, 15 bp, Homo sapiens
ggcggggcttcgaac

SEQ ID NO: 1829341 - DNA, 15 bp, Homo sapiens
gcggggcttcgaacg

SEQ ID NO: 1829342 - DNA, 15 bp, Homo sapiens
cggggcttcgaacga

SEQ ID NO: 1829343 - DNA, 15 bp, Homo sapiens
ggggcttcgaacgaa

SEQ ID NO: 1829344 - DNA, 15 bp, Homo sapiens
gggcttcgaacgaac

SEQ ID NO: 1829345 - DNA, 15 bp, Homo sapiens
ggcttcgaacgaacc

SEQ ID NO: 1829346 - DNA, 15 bp, Homo sapiens
gcttcgaacgaacct

SEQ ID NO: 1829347 - DNA, 15 bp, Homo sapiens
cttcgaacgaacctg

SEQ ID NO: 1829348 - DNA, 15 bp, Homo sapiens
ttcgaacgaacctgg

SEQ ID NO: 1829349 - DNA, 15 bp, Homo sapiens
tcgaacgaacctgga

SEQ ID NO: 1829350 - DNA, 15 bp, Homo sapiens
cgaacgaacctggaa

SEQ ID NO: 1829351 - DNA, 15 bp, Homo sapiens
gaacgaacctggaaa

SEQ ID NO: 1829352 - DNA, 15 bp, Homo sapiens
aacgaacctggaaat

SEQ ID NO: 1829353 - DNA, 15 bp, Homo sapiens
acgaacctggaaatg

SEQ ID NO: 1829354 - DNA, 15 bp, Homo sapiens
cgaacctggaaatgg

SEQ ID NO: 1829355 - DNA, 15 bp, Homo sapiens
gaacctggaaatggc

SEQ ID NO: 1829356 - DNA, 15 bp, Homo sapiens
aacctggaaatggcc

SEQ ID NO: 1829357 - DNA, 15 bp, Homo sapiens
acctggaaatggccg

SEQ ID NO: 1829358 - DNA, 15 bp, Homo sapiens
cctggaaatggccga

SEQ ID NO: 1829359 - DNA, 15 bp, Homo sapiens
ctggaaatggccgag

SEQ ID NO: 1829360 - DNA, 15 bp, Homo sapiens
tggaaatggccgagg

SEQ ID NO: 1829361 - DNA, 15 bp, Homo sapiens
ggaaatggccgaggg

SEQ ID NO: 1829362 - DNA, 15 bp, Homo sapiens
gaaatggccgagggg

SEQ ID NO: 1829363 - DNA, 15 bp, Homo sapiens
aaatggccgaggggt

SEQ ID NO: 1829364 - DNA, 15 bp, Homo sapiens
aatggccgaggggtc

SEQ ID NO: 1829365 - DNA, 15 bp, Homo sapiens
atggccgaggggtct

SEQ ID NO: 1829366 - DNA, 15 bp, Homo sapiens
tggccgaggggtctc

SEQ ID NO: 1829367 - DNA, 15 bp, Homo sapiens
ggccgaggggtctcg

SEQ ID NO: 1829368 - DNA, 15 bp, Homo sapiens
gccgaggggtctcga

SEQ ID NO: 1829369 - DNA, 15 bp, Homo sapiens
ccgaggggtctcgac

SEQ ID NO: 1829370 - DNA, 15 bp, Homo sapiens
cgaggggtctcgact

SEQ ID NO: 1829371 - DNA, 15 bp, Homo sapiens
gaggggtctcgactt

SEQ ID NO: 1829372 - DNA, 15 bp, Homo sapiens
aggggtctcgacttc

SEQ ID NO: 1829373 - DNA, 15 bp, Homo sapiens
ggggtctcgacttcc

SEQ ID NO: 1829374 - DNA, 15 bp, Homo sapiens
gggtctcgacttcct

SEQ ID NO: 1829375 - DNA, 15 bp, Homo sapiens
ggtctcgacttcctc

SEQ ID NO: 1829376 - DNA, 15 bp, Homo sapiens
gtctcgacttcctca

SEQ ID NO: 1829377 - DNA, 15 bp, Homo sapiens
tctcgacttcctcac

SEQ ID NO: 1829378 - DNA, 15 bp, Homo sapiens
ctcgacttcctcacc

SEQ ID NO: 1829379 - DNA, 15 bp, Homo sapiens
tcgacttcctcaccc

SEQ ID NO: 1829380 - DNA, 15 bp, Homo sapiens
cgacttcctcacccc

SEQ ID NO: 1829381 - DNA, 15 bp, Homo sapiens
gacttcctcacccca

SEQ ID NO: 1829382 - DNA, 15 bp, Homo sapiens
acttcctcaccccag

SEQ ID NO: 1829383 - DNA, 15 bp, Homo sapiens
cttcctcaccccagg

SEQ ID NO: 1829384 - DNA, 15 bp, Homo sapiens
ttcctcaccccaggc

SEQ ID NO: 1829385 - DNA, 15 bp, Homo sapiens
tcctcaccccaggca

SEQ ID NO: 1829386 - DNA, 15 bp, Homo sapiens
cctcaccccaggcat

SEQ ID NO: 1829387 - DNA, 15 bp, Homo sapiens
ctcaccccaggcatc

SEQ ID NO: 1829388 - DNA, 15 bp, Homo sapiens
tcaccccaggcatca

SEQ ID NO: 1829389 - DNA, 15 bp, Homo sapiens
caccccaggcatcag

SEQ ID NO: 1829390 - DNA, 15 bp, Homo sapiens
accccaggcatcagg

SEQ ID NO: 1829391 - DNA, 15 bp, Homo sapiens
ccccaggcatcagga

SEQ ID NO: 1829392 - DNA, 15 bp, Homo sapiens
cccaggcatcaggaa

SEQ ID NO: 1829393 - DNA, 15 bp, Homo sapiens
ccaggcatcaggaaa

SEQ ID NO: 1829394 - DNA, 15 bp, Homo sapiens
caggcatcaggaaag

SEQ ID NO: 1829395 - DNA, 15 bp, Homo sapiens
aggcatcaggaaagg

SEQ ID NO: 1829396 - DNA, 15 bp, Homo sapiens
ggcatcaggaaaggt

SEQ ID NO: 1829397 - DNA, 15 bp, Homo sapiens
gcatcaggaaaggtg

SEQ ID NO: 1829398 - DNA, 15 bp, Homo sapiens
catcaggaaaggtgc

SEQ ID NO: 1829399 - DNA, 15 bp, Homo sapiens
atcaggaaaggtgcc

SEQ ID NO: 1829400 - DNA, 15 bp, Homo sapiens
tcaggaaaggtgcct

SEQ ID NO: 1829401 - DNA, 15 bp, Homo sapiens
caggaaaggtgcctg

SEQ ID NO: 1829402 - DNA, 15 bp, Homo sapiens
aggaaaggtgcctgc

SEQ ID NO: 1829403 - DNA, 15 bp, Homo sapiens
ggaaaggtgcctgca

SEQ ID NO: 1829404 - DNA, 15 bp, Homo sapiens
gaaaggtgcctgcag

SEQ ID NO: 1829405 - DNA, 15 bp, Homo sapiens
aaaggtgcctgcagg

SEQ ID NO: 1829406 - DNA, 15 bp, Homo sapiens
aaggtgcctgcagga

SEQ ID NO: 1829407 - DNA, 15 bp, Homo sapiens
aggtgcctgcaggac

SEQ ID NO: 1829408 - DNA, 15 bp, Homo sapiens
ggtgcctgcaggaca

SEQ ID NO: 1829409 - DNA, 15 bp, Homo sapiens
gtgcctgcaggacag

SEQ ID NO: 1829410 - DNA, 15 bp, Homo sapiens
tgcctgcaggacagg

SEQ ID NO: 1829411 - DNA, 15 bp, Homo sapiens
cctgcaggacagggc

SEQ ID NO: 1829412 - DNA, 15 bp, Homo sapiens
ctgcaggacagggct

SEQ ID NO: 1829413 - DNA, 15 bp, Homo sapiens
tgcaggacagggctc

SEQ ID NO: 1829414 - DNA, 15 bp, Homo sapiens
gcaggacagggctct

SEQ ID NO: 1829415 - DNA, 15 bp, Homo sapiens
caggacagggctctg

SEQ ID NO: 1829416 - DNA, 15 bp, Homo sapiens
aggacagggctctga

SEQ ID NO: 1829417 - DNA, 15 bp, Homo sapiens
ggacagggctctgaa

SEQ ID NO: 1829418 - DNA, 15 bp, Homo sapiens
gacagggctctgaag

SEQ ID NO: 1829419 - DNA, 15 bp, Homo sapiens
acagggctctgaagt

SEQ ID NO: 1829420 - DNA, 15 bp, Homo sapiens
cagggctctgaagtg

SEQ ID NO: 1829421 - DNA, 15 bp, Homo sapiens
agggctctgaagtgg

SEQ ID NO: 1829422 - DNA, 15 bp, Homo sapiens
gggctctgaagtgga

SEQ ID NO: 1829423 - DNA, 15 bp, Homo sapiens
ggctctgaagtggaa

SEQ ID NO: 1829424 - DNA, 15 bp, Homo sapiens
gctctgaagtggaag

SEQ ID NO: 1829425 - DNA, 15 bp, Homo sapiens
ctctgaagtggaagt

SEQ ID NO: 1829426 - DNA, 15 bp, Homo sapiens
tctgaagtggaagtg

SEQ ID NO: 1829427 - DNA, 15 bp, Homo sapiens
ctgaagtggaagtgg

SEQ ID NO: 1829428 - DNA, 15 bp, Homo sapiens
tgaagtggaagtggg

SEQ ID NO: 1829429 - DNA, 15 bp, Homo sapiens
gaagtggaagtgggc

SEQ ID NO: 1829430 - DNA, 15 bp, Homo sapiens
aagtggaagtgggcg

SEQ ID NO: 1829431 - DNA, 15 bp, Homo sapiens
agtggaagtgggcgg

SEQ ID NO: 1829432 - DNA, 15 bp, Homo sapiens
gtggaagtgggcggt

SEQ ID NO: 1829433 - DNA, 15 bp, Homo sapiens
tggaagtgggcggtg

SEQ ID NO: 1829434 - DNA, 15 bp, Homo sapiens
ggaagtgggcggtgg

SEQ ID NO: 1829435 - DNA, 15 bp, Homo sapiens
gaagtgggcggtggt

SEQ ID NO: 1829436 - DNA, 15 bp, Homo sapiens
aagtgggcggtggtg

SEQ ID NO: 1829437 - DNA, 15 bp, Homo sapiens
agtgggcggtggtga

SEQ ID NO: 1829438 - DNA, 15 bp, Homo sapiens
gtgggcggtggtgat

SEQ ID NO: 1829439 - DNA, 15 bp, Homo sapiens
tgggcggtggtgatg

SEQ ID NO: 1829440 - DNA, 15 bp, Homo sapiens
gggcggtggtgatgc

SEQ ID NO: 1829441 - DNA, 15 bp, Homo sapiens
ggcggtggtgatgcc

SEQ ID NO: 1829442 - DNA, 15 bp, Homo sapiens
gcggtggtgatgccg

SEQ ID NO: 1829443 - DNA, 15 bp, Homo sapiens
cggtggtgatgccga

SEQ ID NO: 1829444 - DNA, 15 bp, Homo sapiens
ggtggtgatgccgaa

SEQ ID NO: 1829445 - DNA, 15 bp, Homo sapiens
gtggtgatgccgaac

SEQ ID NO: 1829446 - DNA, 15 bp, Homo sapiens
tggtgatgccgaact

SEQ ID NO: 1829447 - DNA, 15 bp, Homo sapiens
ggtgatgccgaactg

SEQ ID NO: 1829448 - DNA, 15 bp, Homo sapiens
gtgatgccgaactga

SEQ ID NO: 1829449 - DNA, 15 bp, Homo sapiens
tgatgccgaactgac

SEQ ID NO: 1829450 - DNA, 15 bp, Homo sapiens
gatgccgaactgaca

SEQ ID NO: 1829451 - DNA, 15 bp, Homo sapiens
atgccgaactgacaa

SEQ ID NO: 1829452 - DNA, 15 bp, Homo sapiens
tgccgaactgacaag

SEQ ID NO: 1829453 - DNA, 15 bp, Homo sapiens
gccgaactgacaaga

SEQ ID NO: 1829454 - DNA, 15 bp, Homo sapiens
ccgaactgacaagaa

SEQ ID NO: 1829455 - DNA, 15 bp, Homo sapiens
cgaactgacaagaat

SEQ ID NO: 1829456 - DNA, 15 bp, Homo sapiens
gaactgacaagaatg

SEQ ID NO: 1829457 - DNA, 15 bp, Homo sapiens
aactgacaagaatga

SEQ ID NO: 1829458 - DNA, 15 bp, Homo sapiens
actgacaagaatgag

SEQ ID NO: 1829459 - DNA, 15 bp, Homo sapiens
ctgacaagaatgagc

SEQ ID NO: 1829460 - DNA, 15 bp, Homo sapiens
tgacaagaatgagct

SEQ ID NO: 1829461 - DNA, 15 bp, Homo sapiens
gacaagaatgagctg

SEQ ID NO: 1829462 - DNA, 15 bp, Homo sapiens
acaagaatgagctga

SEQ ID NO: 1829463 - DNA, 15 bp, Homo sapiens
caagaatgagctgaa

SEQ ID NO: 1829464 - DNA, 15 bp, Homo sapiens
aagaatgagctgaag

SEQ ID NO: 1829465 - DNA, 15 bp, Homo sapiens
agaatgagctgaaga

SEQ ID NO: 1829466 - DNA, 15 bp, Homo sapiens
gaatgagctgaagag

SEQ ID NO: 1829467 - DNA, 15 bp, Homo sapiens
aatgagctgaagaga

SEQ ID NO: 1829468 - DNA, 15 bp, Homo sapiens
atgagctgaagagaa

SEQ ID NO: 1829469 - DNA, 15 bp, Homo sapiens
tgagctgaagagaag

SEQ ID NO: 1829470 - DNA, 15 bp, Homo sapiens
gagctgaagagaaga

SEQ ID NO: 1829471 - DNA, 15 bp, Homo sapiens
agctgaagagaagaa

SEQ ID NO: 1829472 - DNA, 15 bp, Homo sapiens
gctgaagagaagaaa

SEQ ID NO: 1829473 - DNA, 15 bp, Homo sapiens
ctgaagagaagaaag

SEQ ID NO: 1829474 - DNA, 15 bp, Homo sapiens
tgaagagaagaaagt

SEQ ID NO: 1829475 - DNA, 15 bp, Homo sapiens
gaagagaagaaagta

SEQ ID NO: 1829476 - DNA, 15 bp, Homo sapiens
aagagaagaaagtag

SEQ ID NO: 1829477 - DNA, 15 bp, Homo sapiens
agagaagaaagtagc

SEQ ID NO: 1829478 - DNA, 15 bp, Homo sapiens
gagaagaaagtagcc

SEQ ID NO: 1829479 - DNA, 15 bp, Homo sapiens
agaagaaagtagccg

SEQ ID NO: 1829480 - DNA, 15 bp, Homo sapiens
gaagaaagtagccga

SEQ ID NO: 1829481 - DNA, 15 bp, Homo sapiens
aagaaagtagccgag

SEQ ID NO: 1829482 - DNA, 15 bp, Homo sapiens
agaaagtagccgaga

SEQ ID NO: 1829483 - DNA, 15 bp, Homo sapiens
gaaagtagccgagaa

SEQ ID NO: 1829484 - DNA, 15 bp, Homo sapiens
aaagtagccgagaag

SEQ ID NO: 1829485 - DNA, 15 bp, Homo sapiens
aagtagccgagaagg

SEQ ID NO: 1829486 - DNA, 15 bp, Homo sapiens
agtagccgagaaggg

SEQ ID NO: 1829487 - DNA, 15 bp, Homo sapiens
gtagccgagaagggg

SEQ ID NO: 1829488 - DNA, 15 bp, Homo sapiens
tagccgagaaggggg

SEQ ID NO: 1829489 - DNA, 15 bp, Homo sapiens
agccgagaagggggc

SEQ ID NO: 1829490 - DNA, 15 bp, Homo sapiens
gccgagaagggggcc

SEQ ID NO: 1829491 - DNA, 15 bp, Homo sapiens
ccgagaagggggcca

SEQ ID NO: 1829492 - DNA, 15 bp, Homo sapiens
cgagaagggggccaa

SEQ ID NO: 1829493 - DNA, 15 bp, Homo sapiens
gagaagggggccaag

SEQ ID NO: 1829494 - DNA, 15 bp, Homo sapiens
agaagggggccaagc

SEQ ID NO: 1829495 - DNA, 15 bp, Homo sapiens
gaagggggccaagcc

SEQ ID NO: 1829496 - DNA, 15 bp, Homo sapiens
aagggggccaagccg

SEQ ID NO: 1829497 - DNA, 15 bp, Homo sapiens
agggggccaagccgg

SEQ ID NO: 1829498 - DNA, 15 bp, Homo sapiens
gggggccaagccgga

SEQ ID NO: 1829499 - DNA, 15 bp, Homo sapiens
ggggccaagccggag

SEQ ID NO: 1829500 - DNA, 15 bp, Homo sapiens
gggccaagccggagc

SEQ ID NO: 1829501 - DNA, 15 bp, Homo sapiens
ggccaagccggagct

SEQ ID NO: 1829502 - DNA, 15 bp, Homo sapiens
gccaagccggagctc

SEQ ID NO: 1829503 - DNA, 15 bp, Homo sapiens
ccaagccggagctca

SEQ ID NO: 1829504 - DNA, 15 bp, Homo sapiens
caagccggagctcag

SEQ ID NO: 1829505 - DNA, 15 bp, Homo sapiens
aagccggagctcagt

SEQ ID NO: 1829506 - DNA, 15 bp, Homo sapiens
agccggagctcagtg

SEQ ID NO: 1829507 - DNA, 15 bp, Homo sapiens
gccggagctcagtga

SEQ ID NO: 1829508 - DNA, 15 bp, Homo sapiens
ccggagctcagtgag

SEQ ID NO: 1829509 - DNA, 15 bp, Homo sapiens
cggagctcagtgagc

SEQ ID NO: 1829510 - DNA, 15 bp, Homo sapiens
ggagctcagtgagca

SEQ ID NO: 1829511 - DNA, 15 bp, Homo sapiens
gagctcagtgagcaa

SEQ ID NO: 1829512 - DNA, 15 bp, Homo sapiens
agctcagtgagcaac

SEQ ID NO: 1829513 - DNA, 15 bp, Homo sapiens
gctcagtgagcaaca

SEQ ID NO: 1829514 - DNA, 15 bp, Homo sapiens
ctcagtgagcaacag

SEQ ID NO: 1829515 - DNA, 15 bp, Homo sapiens
tcagtgagcaacagc

SEQ ID NO: 1829516 - DNA, 15 bp, Homo sapiens
cagtgagcaacagct

SEQ ID NO: 1829517 - DNA, 15 bp, Homo sapiens
agtgagcaacagcta

SEQ ID NO: 1829518 - DNA, 15 bp, Homo sapiens
gtgagcaacagctag

SEQ ID NO: 1829519 - DNA, 15 bp, Homo sapiens
tgagcaacagctagg

SEQ ID NO: 1829520 - DNA, 15 bp, Homo sapiens
gagcaacagctaggc

SEQ ID NO: 1829521 - DNA, 15 bp, Homo sapiens
agcaacagctaggcc

SEQ ID NO: 1829522 - DNA, 15 bp, Homo sapiens
gcaacagctaggcca

SEQ ID NO: 1829523 - DNA, 15 bp, Homo sapiens
caacagctaggccag

SEQ ID NO: 1829524 - DNA, 15 bp, Homo sapiens
aacagctaggccagc

SEQ ID NO: 1829525 - DNA, 15 bp, Homo sapiens
acagctaggccagcc

SEQ ID NO: 1829526 - DNA, 15 bp, Homo sapiens
cagctaggccagccg

SEQ ID NO: 1829527 - DNA, 15 bp, Homo sapiens
agctaggccagccgc

SEQ ID NO: 1829528 - DNA, 15 bp, Homo sapiens
gctaggccagccgcg

SEQ ID NO: 1829529 - DNA, 15 bp, Homo sapiens
ctaggccagccgcgg

SEQ ID NO: 1829530 - DNA, 15 bp, Homo sapiens
taggccagccgcggc

SEQ ID NO: 1829531 - DNA, 15 bp, Homo sapiens
aggccagccgcggct

SEQ ID NO: 1829532 - DNA, 15 bp, Homo sapiens
ggccagccgcggctg

SEQ ID NO: 1829533 - DNA, 15 bp, Homo sapiens
gccagccgcggctgg

SEQ ID NO: 1829534 - DNA, 15 bp, Homo sapiens
ccagccgcggctggt

SEQ ID NO: 1829535 - DNA, 15 bp, Homo sapiens
cagccgcggctggtg

SEQ ID NO: 1829536 - DNA, 15 bp, Homo sapiens
agccgcggctggtgc

SEQ ID NO: 1829537 - DNA, 15 bp, Homo sapiens
gccgcggctggtgcc

SEQ ID NO: 1829538 - DNA, 15 bp, Homo sapiens
ccgcggctggtgcca

SEQ ID NO: 1829539 - DNA, 15 bp, Homo sapiens
cgcggctggtgccat

SEQ ID NO: 1829540 - DNA, 15 bp, Homo sapiens
gcggctggtgccatc

SEQ ID NO: 1829541 - DNA, 15 bp, Homo sapiens
cggctggtgccatca

SEQ ID NO: 1829542 - DNA, 15 bp, Homo sapiens
ggctggtgccatcag

SEQ ID NO: 1829543 - DNA, 15 bp, Homo sapiens
gctggtgccatcagc

SEQ ID NO: 1829544 - DNA, 15 bp, Homo sapiens
ctggtgccatcagcc

SEQ ID NO: 1829545 - DNA, 15 bp, Homo sapiens
tggtgccatcagcca

SEQ ID NO: 1829546 - DNA, 15 bp, Homo sapiens
ggtgccatcagccac

SEQ ID NO: 1829547 - DNA, 15 bp, Homo sapiens
gtgccatcagccaca

SEQ ID NO: 1829548 - DNA, 15 bp, Homo sapiens
tgccatcagccacac

SEQ ID NO: 1829549 - DNA, 15 bp, Homo sapiens
gccatcagccacacc

SEQ ID NO: 1829550 - DNA, 15 bp, Homo sapiens
ccatcagccacacca

SEQ ID NO: 1829551 - DNA, 15 bp, Homo sapiens
catcagccacaccac

SEQ ID NO: 1829552 - DNA, 15 bp, Homo sapiens
atcagccacaccact

SEQ ID NO: 1829553 - DNA, 15 bp, Homo sapiens
tcagccacaccacta

SEQ ID NO: 1829554 - DNA, 15 bp, Homo sapiens
cagccacaccactaa

SEQ ID NO: 1829555 - DNA, 15 bp, Homo sapiens
agccacaccactaac

SEQ ID NO: 1829556 - DNA, 15 bp, Homo sapiens
gccacaccactaact

SEQ ID NO: 1829557 - DNA, 15 bp, Homo sapiens
ccacaccactaactg

SEQ ID NO: 1829558 - DNA, 15 bp, Homo sapiens
cacaccactaactgt

SEQ ID NO: 1829559 - DNA, 15 bp, Homo sapiens
acaccactaactgtg

SEQ ID NO: 1829560 - DNA, 15 bp, Homo sapiens
caccactaactgtgg

SEQ ID NO: 1829561 - DNA, 15 bp, Homo sapiens
accactaactgtgga

SEQ ID NO: 1829562 - DNA, 15 bp, Homo sapiens
ccactaactgtggac

SEQ ID NO: 1829563 - DNA, 15 bp, Homo sapiens
cactaactgtggacc

SEQ ID NO: 1829564 - DNA, 15 bp, Homo sapiens
actaactgtggaccc

SEQ ID NO: 1829565 - DNA, 15 bp, Homo sapiens
ctaactgtggaccca

SEQ ID NO: 1829566 - DNA, 15 bp, Homo sapiens
taactgtggacccaa

SEQ ID NO: 1829567 - DNA, 15 bp, Homo sapiens
aactgtggacccaaa

SEQ ID NO: 1829568 - DNA, 15 bp, Homo sapiens
actgtggacccaaat

SEQ ID NO: 1829569 - DNA, 15 bp, Homo sapiens
ctgtggacccaaatg

SEQ ID NO: 1829570 - DNA, 15 bp, Homo sapiens
tgtggacccaaatgg

SEQ ID NO: 1829571 - DNA, 15 bp, Homo sapiens
gtggacccaaatgga

SEQ ID NO: 1829572 - DNA, 15 bp, Homo sapiens
tggacccaaatggaa

SEQ ID NO: 1829573 - DNA, 15 bp, Homo sapiens
ggacccaaatggaaa

SEQ ID NO: 1829574 - DNA, 15 bp, Homo sapiens
gacccaaatggaaac

SEQ ID NO: 1829575 - DNA, 15 bp, Homo sapiens
acccaaatggaaact

SEQ ID NO: 1829576 - DNA, 15 bp, Homo sapiens
cccaaatggaaactt

SEQ ID NO: 1829577 - DNA, 15 bp, Homo sapiens
ccaaatggaaacttt

SEQ ID NO: 1829578 - DNA, 15 bp, Homo sapiens
caaatggaaactttg

SEQ ID NO: 1829579 - DNA, 15 bp, Homo sapiens
aaatggaaactttga

SEQ ID NO: 1829580 - DNA, 15 bp, Homo sapiens
aatggaaactttgag

SEQ ID NO: 1829581 - DNA, 15 bp, Homo sapiens
atggaaactttgagg

SEQ ID NO: 1829582 - DNA, 15 bp, Homo sapiens
tggaaactttgaggc

SEQ ID NO: 1829583 - DNA, 15 bp, Homo sapiens
ggaaactttgaggcc

SEQ ID NO: 1829584 - DNA, 15 bp, Homo sapiens
gaaactttgaggccc

SEQ ID NO: 1829585 - DNA, 15 bp, Homo sapiens
aaactttgaggcccc

SEQ ID NO: 1829586 - DNA, 15 bp, Homo sapiens
aactttgaggcccct

SEQ ID NO: 1829587 - DNA, 15 bp, Homo sapiens
actttgaggcccctt

SEQ ID NO: 1829588 - DNA, 15 bp, Homo sapiens
ctttgaggcccctta

SEQ ID NO: 1829589 - DNA, 15 bp, Homo sapiens
tttgaggccccttac

SEQ ID NO: 1829590 - DNA, 15 bp, Homo sapiens
ttgaggccccttaca

SEQ ID NO: 1829591 - DNA, 15 bp, Homo sapiens
tgaggccccttacag

SEQ ID NO: 1829592 - DNA, 15 bp, Homo sapiens
gaggccccttacagg

SEQ ID NO: 1829593 - DNA, 15 bp, Homo sapiens
aggccccttacaggt

SEQ ID NO: 1829594 - DNA, 15 bp, Homo sapiens
ggccccttacaggtc

SEQ ID NO: 1829595 - DNA, 15 bp, Homo sapiens
gccccttacaggtcc

SEQ ID NO: 1829596 - DNA, 15 bp, Homo sapiens
ccccttacaggtccc

SEQ ID NO: 1829597 - DNA, 15 bp, Homo sapiens
cccttacaggtcccc

SEQ ID NO: 1829598 - DNA, 15 bp, Homo sapiens
ccttacaggtccccc

SEQ ID NO: 1829599 - DNA, 15 bp, Homo sapiens
cttacaggtccccca

SEQ ID NO: 1829600 - DNA, 15 bp, Homo sapiens
ttacaggtcccccag

SEQ ID NO: 1829601 - DNA, 15 bp, Homo sapiens
tacaggtcccccagc

SEQ ID NO: 1829602 - DNA, 15 bp, Homo sapiens
acaggtcccccagcg

SEQ ID NO: 1829603 - DNA, 15 bp, Homo sapiens
caggtcccccagcgc

SEQ ID NO: 1829604 - DNA, 15 bp, Homo sapiens
aggtcccccagcgca

SEQ ID NO: 1829605 - DNA, 15 bp, Homo sapiens
ggtcccccagcgcag

SEQ ID NO: 1829606 - DNA, 15 bp, Homo sapiens
gtcccccagcgcagg

SEQ ID NO: 1829607 - DNA, 15 bp, Homo sapiens
tcccccagcgcaggc

SEQ ID NO: 1829608 - DNA, 15 bp, Homo sapiens
cccccagcgcaggcc

SEQ ID NO: 1829609 - DNA, 15 bp, Homo sapiens
ccccagcgcaggcca

SEQ ID NO: 1829610 - DNA, 15 bp, Homo sapiens
cccagcgcaggccac

SEQ ID NO: 1829611 - DNA, 15 bp, Homo sapiens
ccagcgcaggccacc

SEQ ID NO: 1829612 - DNA, 15 bp, Homo sapiens
cagcgcaggccaccg

SEQ ID NO: 1829613 - DNA, 15 bp, Homo sapiens
agcgcaggccaccgc

SEQ ID NO: 1829614 - DNA, 15 bp, Homo sapiens
gcgcaggccaccgcc

SEQ ID NO: 1829615 - DNA, 15 bp, Homo sapiens
cgcaggccaccgccg

SEQ ID NO: 1829616 - DNA, 15 bp, Homo sapiens
gcaggccaccgccga

SEQ ID NO: 1829617 - DNA, 15 bp, Homo sapiens
caggccaccgccgaa

SEQ ID NO: 1829618 - DNA, 15 bp, Homo sapiens
aggccaccgccgaag

SEQ ID NO: 1829619 - DNA, 15 bp, Homo sapiens
ggccaccgccgaagg

SEQ ID NO: 1829620 - DNA, 15 bp, Homo sapiens
gccaccgccgaaggt

SEQ ID NO: 1829621 - DNA, 15 bp, Homo sapiens
ccaccgccgaaggtt

SEQ ID NO: 1829622 - DNA, 15 bp, Homo sapiens
caccgccgaaggtta

SEQ ID NO: 1829623 - DNA, 15 bp, Homo sapiens
accgccgaaggttac

SEQ ID NO: 1829624 - DNA, 15 bp, Homo sapiens
ccgccgaaggttact

SEQ ID NO: 1829625 - DNA, 15 bp, Homo sapiens
cgccgaaggttactg

SEQ ID NO: 1829626 - DNA, 15 bp, Homo sapiens
gccgaaggttactgg

SEQ ID NO: 1829627 - DNA, 15 bp, Homo sapiens
ccgaaggttactggg

SEQ ID NO: 1829628 - DNA, 15 bp, Homo sapiens
cgaaggttactgggg

SEQ ID NO: 1829629 - DNA, 15 bp, Homo sapiens
gaaggttactgggga

SEQ ID NO: 1829630 - DNA, 15 bp, Homo sapiens
aaggttactggggaa

SEQ ID NO: 1829631 - DNA, 15 bp, Homo sapiens
aggttactggggaag

SEQ ID NO: 1829632 - DNA, 15 bp, Homo sapiens
ggttactggggaaga

SEQ ID NO: 1829633 - DNA, 15 bp, Homo sapiens
gttactggggaagac

SEQ ID NO: 1829634 - DNA, 15 bp, Homo sapiens
ttactggggaagacc

SEQ ID NO: 1829635 - DNA, 15 bp, Homo sapiens
tactggggaagaccc

SEQ ID NO: 1829636 - DNA, 15 bp, Homo sapiens
actggggaagacccc

SEQ ID NO: 1829637 - DNA, 15 bp, Homo sapiens
ctggggaagacccct

SEQ ID NO: 1829638 - DNA, 15 bp, Homo sapiens
tggggaagacccctg

SEQ ID NO: 1829639 - DNA, 15 bp, Homo sapiens
ggggaagacccctgc

SEQ ID NO: 1829640 - DNA, 15 bp, Homo sapiens
gggaagacccctgca

SEQ ID NO: 1829641 - DNA, 15 bp, Homo sapiens
ggaagacccctgcag

SEQ ID NO: 1829642 - DNA, 15 bp, Homo sapiens
gaagacccctgcagc

SEQ ID NO: 1829643 - DNA, 15 bp, Homo sapiens
aagacccctgcagct

SEQ ID NO: 1829644 - DNA, 15 bp, Homo sapiens
agacccctgcagctt

SEQ ID NO: 1829645 - DNA, 15 bp, Homo sapiens
gacccctgcagcttc

SEQ ID NO: 1829646 - DNA, 15 bp, Homo sapiens
acccctgcagcttcc

SEQ ID NO: 1829647 - DNA, 15 bp, Homo sapiens
cccctgcagcttcca

SEQ ID NO: 1829648 - DNA, 15 bp, Homo sapiens
ccctgcagcttccat

SEQ ID NO: 1829649 - DNA, 15 bp, Homo sapiens
cctgcagcttccatg

SEQ ID NO: 1829650 - DNA, 15 bp, Homo sapiens
ctgcagcttccatgt

SEQ ID NO: 1829651 - DNA, 15 bp, Homo sapiens
tgcagcttccatgtg

SEQ ID NO: 1829652 - DNA, 15 bp, Homo sapiens
gcagcttccatgtgg

SEQ ID NO: 1829653 - DNA, 15 bp, Homo sapiens
cagcttccatgtgga

SEQ ID NO: 1829654 - DNA, 15 bp, Homo sapiens
agcttccatgtggac

SEQ ID NO: 1829655 - DNA, 15 bp, Homo sapiens
gcttccatgtggaca

SEQ ID NO: 1829656 - DNA, 15 bp, Homo sapiens
cttccatgtggacat

SEQ ID NO: 1829657 - DNA, 15 bp, Homo sapiens
ttccatgtggacatt

SEQ ID NO: 1829658 - DNA, 15 bp, Homo sapiens
tccatgtggacatta

SEQ ID NO: 1829659 - DNA, 15 bp, Homo sapiens
ccatgtggacattac

SEQ ID NO: 1829660 - DNA, 15 bp, Homo sapiens
catgtggacattact

SEQ ID NO: 1829661 - DNA, 15 bp, Homo sapiens
atgtggacattactc

SEQ ID NO: 1829662 - DNA, 15 bp, Homo sapiens
tgtggacattactcg

SEQ ID NO: 1829663 - DNA, 15 bp, Homo sapiens
gtggacattactcgc

SEQ ID NO: 1829664 - DNA, 15 bp, Homo sapiens
tggacattactcgct

SEQ ID NO: 1829665 - DNA, 15 bp, Homo sapiens
ggacattactcgctt

SEQ ID NO: 1829666 - DNA, 15 bp, Homo sapiens
gacattactcgcttg

SEQ ID NO: 1829667 - DNA, 15 bp, Homo sapiens
acattactcgcttgc

SEQ ID NO: 1829668 - DNA, 15 bp, Homo sapiens
cattactcgcttgct

SEQ ID NO: 1829669 - DNA, 15 bp, Homo sapiens
attactcgcttgctt

SEQ ID NO: 1829670 - DNA, 15 bp, Homo sapiens
ttactcgcttgcttc

SEQ ID NO: 1829671 - DNA, 15 bp, Homo sapiens
tactcgcttgcttca

SEQ ID NO: 1829672 - DNA, 15 bp, Homo sapiens
actcgcttgcttcat

SEQ ID NO: 1829673 - DNA, 15 bp, Homo sapiens
ctcgcttgcttcatc

SEQ ID NO: 1829674 - DNA, 15 bp, Homo sapiens
tcgcttgcttcatcc

SEQ ID NO: 1829675 - DNA, 15 bp, Homo sapiens
cgcttgcttcatccc

SEQ ID NO: 1829676 - DNA, 15 bp, Homo sapiens
gcttgcttcatcccg

SEQ ID NO: 1829677 - DNA, 15 bp, Homo sapiens
cttgcttcatcccgg

SEQ ID NO: 1829678 - DNA, 15 bp, Homo sapiens
ttgcttcatcccgga

SEQ ID NO: 1829679 - DNA, 15 bp, Homo sapiens
tgcttcatcccggag

SEQ ID NO: 1829680 - DNA, 15 bp, Homo sapiens
gcttcatcccggagt

SEQ ID NO: 1829681 - DNA, 15 bp, Homo sapiens
cttcatcccggagtg

SEQ ID NO: 1829682 - DNA, 15 bp, Homo sapiens
ttcatcccggagtgc

SEQ ID NO: 1829683 - DNA, 15 bp, Homo sapiens
tcatcccggagtgca

SEQ ID NO: 1829684 - DNA, 15 bp, Homo sapiens
catcccggagtgcag

SEQ ID NO: 1829685 - DNA, 15 bp, Homo sapiens
atcccggagtgcagt

SEQ ID NO: 1829686 - DNA, 15 bp, Homo sapiens
tcccggagtgcagtc

SEQ ID NO: 1829687 - DNA, 15 bp, Homo sapiens
cccggagtgcagtca

SEQ ID NO: 1829688 - DNA, 15 bp, Homo sapiens
ccggagtgcagtcac

SEQ ID NO: 1829689 - DNA, 15 bp, Homo sapiens
cggagtgcagtcacc

SEQ ID NO: 1829690 - DNA, 15 bp, Homo sapiens
ggagtgcagtcacct

SEQ ID NO: 1829691 - DNA, 15 bp, Homo sapiens
gagtgcagtcacctg

SEQ ID NO: 1829692 - DNA, 15 bp, Homo sapiens
agtgcagtcacctgc

SEQ ID NO: 1829693 - DNA, 15 bp, Homo sapiens
gtgcagtcacctgca

SEQ ID NO: 1829694 - DNA, 15 bp, Homo sapiens
tgcagtcacctgcag

SEQ ID NO: 1829695 - DNA, 15 bp, Homo sapiens
gcagtcacctgcagc

SEQ ID NO: 1829696 - DNA, 15 bp, Homo sapiens
cagtcacctgcagcc

SEQ ID NO: 1829697 - DNA, 15 bp, Homo sapiens
agtcacctgcagcct

SEQ ID NO: 1829698 - DNA, 15 bp, Homo sapiens
gtcacctgcagcctg

SEQ ID NO: 1829699 - DNA, 15 bp, Homo sapiens
tcacctgcagcctgg

SEQ ID NO: 1829700 - DNA, 15 bp, Homo sapiens
cacctgcagcctggg

SEQ ID NO: 1829701 - DNA, 15 bp, Homo sapiens
acctgcagcctggga

SEQ ID NO: 1829702 - DNA, 15 bp, Homo sapiens
cctgcagcctgggac

SEQ ID NO: 1829703 - DNA, 15 bp, Homo sapiens
ctgcagcctgggacc

SEQ ID NO: 1829704 - DNA, 15 bp, Homo sapiens
tgcagcctgggacca

SEQ ID NO: 1829705 - DNA, 15 bp, Homo sapiens
gcagcctgggaccac

SEQ ID NO: 1829706 - DNA, 15 bp, Homo sapiens
cagcctgggaccacc

SEQ ID NO: 1829707 - DNA, 15 bp, Homo sapiens
agcctgggaccacct

SEQ ID NO: 1829708 - DNA, 15 bp, Homo sapiens
gcctgggaccacctg

SEQ ID NO: 1829709 - DNA, 15 bp, Homo sapiens
cctgggaccacctga

SEQ ID NO: 1829710 - DNA, 15 bp, Homo sapiens
ctgggaccacctgac

SEQ ID NO: 1829711 - DNA, 15 bp, Homo sapiens
tgggaccacctgact

SEQ ID NO: 1829712 - DNA, 15 bp, Homo sapiens
gggaccacctgactg

SEQ ID NO: 1829713 - DNA, 15 bp, Homo sapiens
ggaccacctgactga

SEQ ID NO: 1829714 - DNA, 15 bp, Homo sapiens
gaccacctgactgat

SEQ ID NO: 1829715 - DNA, 15 bp, Homo sapiens
accacctgactgatg

SEQ ID NO: 1829716 - DNA, 15 bp, Homo sapiens
ccacctgactgatgt

SEQ ID NO: 1829717 - DNA, 15 bp, Homo sapiens
cacctgactgatgtc

SEQ ID NO: 1829718 - DNA, 15 bp, Homo sapiens
acctgactgatgtca

SEQ ID NO: 1829719 - DNA, 15 bp, Homo sapiens
cctgactgatgtcac

SEQ ID NO: 1829720 - DNA, 15 bp, Homo sapiens
ctgactgatgtcacc

SEQ ID NO: 1829721 - DNA, 15 bp, Homo sapiens
tgactgatgtcaccc

SEQ ID NO: 1829722 - DNA, 15 bp, Homo sapiens
gactgatgtcaccct

SEQ ID NO: 1829723 - DNA, 15 bp, Homo sapiens
actgatgtcaccctg

SEQ ID NO: 1829724 - DNA, 15 bp, Homo sapiens
ctgatgtcaccctgg

SEQ ID NO: 1829725 - DNA, 15 bp, Homo sapiens
tgatgtcaccctgga

SEQ ID NO: 1829726 - DNA, 15 bp, Homo sapiens
gatgtcaccctggag

SEQ ID NO: 1829727 - DNA, 15 bp, Homo sapiens
atgtcaccctggaga

SEQ ID NO: 1829728 - DNA, 15 bp, Homo sapiens
tgtcaccctggagat

SEQ ID NO: 1829729 - DNA, 15 bp, Homo sapiens
gtcaccctggagatc

SEQ ID NO: 1829730 - DNA, 15 bp, Homo sapiens
tcaccctggagatcc

SEQ ID NO: 1829731 - DNA, 15 bp, Homo sapiens
caccctggagatcca

SEQ ID NO: 1829732 - DNA, 15 bp, Homo sapiens
accctggagatccat

SEQ ID NO: 1829733 - DNA, 15 bp, Homo sapiens
ccctggagatccatg

SEQ ID NO: 1829734 - DNA, 15 bp, Homo sapiens
cctggagatccatgc

SEQ ID NO: 1829735 - DNA, 15 bp, Homo sapiens
ctggagatccatgcc

SEQ ID NO: 1829736 - DNA, 15 bp, Homo sapiens
tggagatccatgcca

SEQ ID NO: 1829737 - DNA, 15 bp, Homo sapiens
ggagatccatgccaa

SEQ ID NO: 1829738 - DNA, 15 bp, Homo sapiens
gagatccatgccaaa

SEQ ID NO: 1829739 - DNA, 15 bp, Homo sapiens
agatccatgccaaaa

SEQ ID NO: 1829740 - DNA, 15 bp, Homo sapiens
gatccatgccaaaag

SEQ ID NO: 1829741 - DNA, 15 bp, Homo sapiens
atccatgccaaaaga

SEQ ID NO: 1829742 - DNA, 15 bp, Homo sapiens
tccatgccaaaagag

SEQ ID NO: 1829743 - DNA, 15 bp, Homo sapiens
ccatgccaaaagagc

SEQ ID NO: 1829744 - DNA, 15 bp, Homo sapiens
catgccaaaagagct

SEQ ID NO: 1829745 - DNA, 15 bp, Homo sapiens
atgccaaaagagctg

SEQ ID NO: 1829746 - DNA, 15 bp, Homo sapiens
tgccaaaagagctgg

SEQ ID NO: 1829747 - DNA, 15 bp, Homo sapiens
gccaaaagagctggg

SEQ ID NO: 1829748 - DNA, 15 bp, Homo sapiens
ccaaaagagctgggg

SEQ ID NO: 1829749 - DNA, 15 bp, Homo sapiens
caaaagagctgggga

SEQ ID NO: 1829750 - DNA, 15 bp, Homo sapiens
aaaagagctggggaa

SEQ ID NO: 1829751 - DNA, 15 bp, Homo sapiens
aaagagctggggaaa

SEQ ID NO: 1829752 - DNA, 15 bp, Homo sapiens
aagagctggggaaag

SEQ ID NO: 1829753 - DNA, 15 bp, Homo sapiens
agagctggggaaagt

SEQ ID NO: 1829754 - DNA, 15 bp, Homo sapiens
gagctggggaaagtt

SEQ ID NO: 1829755 - DNA, 15 bp, Homo sapiens
agctggggaaagttc

SEQ ID NO: 1829756 - DNA, 15 bp, Homo sapiens
gctggggaaagttca

SEQ ID NO: 1829757 - DNA, 15 bp, Homo sapiens
ctggggaaagttcac

SEQ ID NO: 1829758 - DNA, 15 bp, Homo sapiens
tggggaaagttcacc

SEQ ID NO: 1829759 - DNA, 15 bp, Homo sapiens
ggggaaagttcacct

SEQ ID NO: 1829760 - DNA, 15 bp, Homo sapiens
gggaaagttcacctt

SEQ ID NO: 1829761 - DNA, 15 bp, Homo sapiens
ggaaagttcaccttc

SEQ ID NO: 1829762 - DNA, 15 bp, Homo sapiens
gaaagttcaccttct

SEQ ID NO: 1829763 - DNA, 15 bp, Homo sapiens
aaagttcaccttcta

SEQ ID NO: 1829764 - DNA, 15 bp, Homo sapiens
aagttcaccttctaa

SEQ ID NO: 1829765 - DNA, 15 bp, Homo sapiens
agttcaccttctaat

SEQ ID NO: 1829766 - DNA, 15 bp, Homo sapiens
gttcaccttctaatg

SEQ ID NO: 1829767 - DNA, 15 bp, Homo sapiens
ttcaccttctaatga

SEQ ID NO: 1829768 - DNA, 15 bp, Homo sapiens
tcaccttctaatgac

SEQ ID NO: 1829769 - DNA, 15 bp, Homo sapiens
caccttctaatgacc

SEQ ID NO: 1829770 - DNA, 15 bp, Homo sapiens
accttctaatgaccc

SEQ ID NO: 1829771 - DNA, 15 bp, Homo sapiens
ccttctaatgacccc

SEQ ID NO: 1829772 - DNA, 15 bp, Homo sapiens
cttctaatgacccct

SEQ ID NO: 1829773 - DNA, 15 bp, Homo sapiens
ttctaatgacccctg

SEQ ID NO: 1829774 - DNA, 15 bp, Homo sapiens
tctaatgacccctgc

SEQ ID NO: 1829775 - DNA, 15 bp, Homo sapiens
ctaatgacccctgcg

SEQ ID NO: 1829776 - DNA, 15 bp, Homo sapiens
taatgacccctgcgg

SEQ ID NO: 1829777 - DNA, 15 bp, Homo sapiens
aatgacccctgcgga

SEQ ID NO: 1829778 - DNA, 15 bp, Homo sapiens
atgacccctgcggac

SEQ ID NO: 1829779 - DNA, 15 bp, Homo sapiens
tgacccctgcggacc

SEQ ID NO: 1829780 - DNA, 15 bp, Homo sapiens
gacccctgcggacca

SEQ ID NO: 1829781 - DNA, 15 bp, Homo sapiens
acccctgcggaccag

SEQ ID NO: 1829782 - DNA, 15 bp, Homo sapiens
cccctgcggaccagg

SEQ ID NO: 1829783 - DNA, 15 bp, Homo sapiens
ccctgcggaccaggg

SEQ ID NO: 1829784 - DNA, 15 bp, Homo sapiens
cctgcggaccagggt

SEQ ID NO: 1829785 - DNA, 15 bp, Homo sapiens
ctgcggaccagggtg

SEQ ID NO: 1829786 - DNA, 15 bp, Homo sapiens
tgcggaccagggtga

SEQ ID NO: 1829787 - DNA, 15 bp, Homo sapiens
gcggaccagggtgaa

SEQ ID NO: 1829788 - DNA, 15 bp, Homo sapiens
cggaccagggtgaag

SEQ ID NO: 1829789 - DNA, 15 bp, Homo sapiens
ggaccagggtgaagt

SEQ ID NO: 1829790 - DNA, 15 bp, Homo sapiens
gaccagggtgaagtt

SEQ ID NO: 1829791 - DNA, 15 bp, Homo sapiens
accagggtgaagtta

SEQ ID NO: 1829792 - DNA, 15 bp, Homo sapiens
ccagggtgaagttac

SEQ ID NO: 1829793 - DNA, 15 bp, Homo sapiens
cagggtgaagttaca

SEQ ID NO: 1829794 - DNA, 15 bp, Homo sapiens
agggtgaagttacaa

SEQ ID NO: 1829795 - DNA, 15 bp, Homo sapiens
gggtgaagttacaag

SEQ ID NO: 1829796 - DNA, 15 bp, Homo sapiens
ggtgaagttacaagt

SEQ ID NO: 1829797 - DNA, 15 bp, Homo sapiens
gtgaagttacaagtt

SEQ ID NO: 1829798 - DNA, 15 bp, Homo sapiens
tgaagttacaagtta

SEQ ID NO: 1829799 - DNA, 15 bp, Homo sapiens
gaagttacaagttat

SEQ ID NO: 1829800 - DNA, 15 bp, Homo sapiens
aagttacaagttatg

SEQ ID NO: 1829801 - DNA, 15 bp, Homo sapiens
agttacaagttatgg

SEQ ID NO: 1829802 - DNA, 15 bp, Homo sapiens
gttacaagttatggc

SEQ ID NO: 1829803 - DNA, 15 bp, Homo sapiens
ttacaagttatggcc

SEQ ID NO: 1829804 - DNA, 15 bp, Homo sapiens
tacaagttatggcca

SEQ ID NO: 1829805 - DNA, 15 bp, Homo sapiens
acaagttatggccag

SEQ ID NO: 1829806 - DNA, 15 bp, Homo sapiens
caagttatggccagg

SEQ ID NO: 1829807 - DNA, 15 bp, Homo sapiens
aagttatggccaggt

SEQ ID NO: 1829808 - DNA, 15 bp, Homo sapiens
agttatggccaggtc

SEQ ID NO: 1829809 - DNA, 15 bp, Homo sapiens
gttatggccaggtca

SEQ ID NO: 1829810 - DNA, 15 bp, Homo sapiens
ttatggccaggtcaa

SEQ ID NO: 1829811 - DNA, 15 bp, Homo sapiens
tatggccaggtcaag

SEQ ID NO: 1829812 - DNA, 15 bp, Homo sapiens
atggccaggtcaagg

SEQ ID NO: 1829813 - DNA, 15 bp, Homo sapiens
tggccaggtcaagga

SEQ ID NO: 1829814 - DNA, 15 bp, Homo sapiens
ggccaggtcaaggaa

SEQ ID NO: 1829815 - DNA, 15 bp, Homo sapiens
gccaggtcaaggaat

SEQ ID NO: 1829816 - DNA, 15 bp, Homo sapiens
ccaggtcaaggaatt

SEQ ID NO: 1829817 - DNA, 15 bp, Homo sapiens
caggtcaaggaatta

SEQ ID NO: 1829818 - DNA, 15 bp, Homo sapiens
aggtcaaggaattat

SEQ ID NO: 1829819 - DNA, 15 bp, Homo sapiens
ggtcaaggaattata

SEQ ID NO: 1829820 - DNA, 15 bp, Homo sapiens
gtcaaggaattataa

SEQ ID NO: 1829821 - DNA, 15 bp, Homo sapiens
tcaaggaattataag

SEQ ID NO: 1829822 - DNA, 15 bp, Homo sapiens
caaggaattataagt

SEQ ID NO: 1829823 - DNA, 15 bp, Homo sapiens
aaggaattataagtc

SEQ ID NO: 1829824 - DNA, 15 bp, Homo sapiens
aggaattataagtca

SEQ ID NO: 1829825 - DNA, 15 bp, Homo sapiens
ggaattataagtcaa

SEQ ID NO: 1829826 - DNA, 15 bp, Homo sapiens
gaattataagtcaat

SEQ ID NO: 1829827 - DNA, 15 bp, Homo sapiens
aattataagtcaata

SEQ ID NO: 1829828 - DNA, 15 bp, Homo sapiens
attataagtcaataa

SEQ ID NO: 1829829 - DNA, 15 bp, Homo sapiens
ttataagtcaataaa

SEQ ID NO: 1829830 - DNA, 15 bp, Homo sapiens
tataagtcaataaat

SEQ ID NO: 1829831 - DNA, 15 bp, Homo sapiens
ataagtcaataaata

SEQ ID NO: 1829832 - DNA, 15 bp, Homo sapiens
taagtcaataaataa

SEQ ID NO: 1829833 - DNA, 15 bp, Homo sapiens
aagtcaataaataaa

SEQ ID NO: 1829834 - DNA, 15 bp, Homo sapiens
agtcaataaataaac

SEQ ID NO: 1829835 - DNA, 15 bp, Homo sapiens
gtcaataaataaact

SEQ ID NO: 1829836 - DNA, 15 bp, Homo sapiens
tcaataaataaactg

SEQ ID NO: 1829837 - DNA, 15 bp, Homo sapiens
caataaataaactgc

SEQ ID NO: 1829838 - DNA, 15 bp, Homo sapiens
aataaataaactgcc

SEQ ID NO: 1829839 - DNA, 15 bp, Homo sapiens
ataaataaactgcct

SEQ ID NO: 1829840 - DNA, 15 bp, Homo sapiens
taaataaactgcctc

SEQ ID NO: 1829841 - DNA, 15 bp, Homo sapiens
aaataaactgcctca

SEQ ID NO: 1829842 - DNA, 15 bp, Homo sapiens
aataaactgcctcag

SEQ ID NO: 1829843 - DNA, 15 bp, Homo sapiens
ataaactgcctcagg

SEQ ID NO: 1829844 - DNA, 15 bp, Homo sapiens
taaactgcctcaggg

SEQ ID NO: 1829845 - DNA, 15 bp, Homo sapiens
aaactgcctcaggga

SEQ ID NO: 1829846 - DNA, 15 bp, Homo sapiens
aactgcctcagggag

SEQ ID NO: 1829847 - DNA, 15 bp, Homo sapiens
actgcctcagggaga

SEQ ID NO: 1829848 - DNA, 15 bp, Homo sapiens
ctgcctcagggagac

SEQ ID NO: 1829849 - DNA, 15 bp, Homo sapiens
tgcctcagggagacg

SEQ ID NO: 1829850 - DNA, 15 bp, Homo sapiens
gcctcagggagacgt

SEQ ID NO: 1829851 - DNA, 15 bp, Homo sapiens
cctcagggagacgta

SEQ ID NO: 1829852 - DNA, 15 bp, Homo sapiens
ctcagggagacgtac

SEQ ID NO: 1829853 - DNA, 15 bp, Homo sapiens
tcagggagacgtact

SEQ ID NO: 1829854 - DNA, 15 bp, Homo sapiens
cagggagacgtactc

SEQ ID NO: 1829855 - DNA, 15 bp, Homo sapiens
agggagacgtactca

SEQ ID NO: 1829856 - DNA, 15 bp, Homo sapiens
gggagacgtactcag

SEQ ID NO: 1829857 - DNA, 15 bp, Homo sapiens
ggagacgtactcaga

SEQ ID NO: 1829858 - DNA, 15 bp, Homo sapiens
gagacgtactcagag

SEQ ID NO: 1829859 - DNA, 15 bp, Homo sapiens
agacgtactcagagt

SEQ ID NO: 1829860 - DNA, 15 bp, Homo sapiens
gacgtactcagagtc

SEQ ID NO: 1829861 - DNA, 15 bp, Homo sapiens
acgtactcagagtcc

SEQ ID NO: 1829862 - DNA, 15 bp, Homo sapiens
cgtactcagagtcca

SEQ ID NO: 1829863 - DNA, 15 bp, Homo sapiens
gtactcagagtccag

SEQ ID NO: 1829864 - DNA, 15 bp, Homo sapiens
tactcagagtccagg

SEQ ID NO: 1829865 - DNA, 15 bp, Homo sapiens
actcagagtccagga

SEQ ID NO: 1829866 - DNA, 15 bp, Homo sapiens
ctcagagtccaggaa

SEQ ID NO: 1829867 - DNA, 15 bp, Homo sapiens
tcagagtccaggaaa

SEQ ID NO: 1829868 - DNA, 15 bp, Homo sapiens
cagagtccaggaaaa

SEQ ID NO: 1829869 - DNA, 15 bp, Homo sapiens
agagtccaggaaaat

SEQ ID NO: 1829870 - DNA, 15 bp, Homo sapiens
gagtccaggaaaatc

SEQ ID NO: 1829871 - DNA, 15 bp, Homo sapiens
agtccaggaaaatct

SEQ ID NO: 1829872 - DNA, 15 bp, Homo sapiens
gtccaggaaaatcta

SEQ ID NO: 1829873 - DNA, 15 bp, Homo sapiens
tccaggaaaatctag

SEQ ID NO: 1829874 - DNA, 15 bp, Homo sapiens
ccaggaaaatctagg

SEQ ID NO: 1829875 - DNA, 15 bp, Homo sapiens
caggaaaatctagga

SEQ ID NO: 1829876 - DNA, 15 bp, Homo sapiens
aggaaaatctaggaa

SEQ ID NO: 1829877 - DNA, 15 bp, Homo sapiens
ggaaaatctaggaaa

SEQ ID NO: 1829878 - DNA, 15 bp, Homo sapiens
gaaaatctaggaaac

SEQ ID NO: 1829879 - DNA, 15 bp, Homo sapiens
aaaatctaggaaaca

SEQ ID NO: 1829880 - DNA, 15 bp, Homo sapiens
aaatctaggaaacac

SEQ ID NO: 1829881 - DNA, 15 bp, Homo sapiens
aatctaggaaacacc

SEQ ID NO: 1829882 - DNA, 15 bp, Homo sapiens
atctaggaaacacca

SEQ ID NO: 1829883 - DNA, 15 bp, Homo sapiens
tctaggaaacaccaa

SEQ ID NO: 1829884 - DNA, 15 bp, Homo sapiens
ctaggaaacaccaag

SEQ ID NO: 1829885 - DNA, 15 bp, Homo sapiens
taggaaacaccaaga

SEQ ID NO: 1829886 - DNA, 15 bp, Homo sapiens
aggaaacaccaagaa

SEQ ID NO: 1829887 - DNA, 15 bp, Homo sapiens
ggaaacaccaagaag

SEQ ID NO: 1829888 - DNA, 15 bp, Homo sapiens
gaaacaccaagaagg

SEQ ID NO: 1829889 - DNA, 15 bp, Homo sapiens
aaacaccaagaaggg

SEQ ID NO: 1829890 - DNA, 15 bp, Homo sapiens
aacaccaagaagggc

SEQ ID NO: 1829891 - DNA, 15 bp, Homo sapiens
acaccaagaagggcg

SEQ ID NO: 1829892 - DNA, 15 bp, Homo sapiens
caccaagaagggcga

SEQ ID NO: 1829893 - DNA, 15 bp, Homo sapiens
accaagaagggcgag

SEQ ID NO: 1829894 - DNA, 15 bp, Homo sapiens
ccaagaagggcgagc

SEQ ID NO: 1829895 - DNA, 15 bp, Homo sapiens
caagaagggcgagcg

SEQ ID NO: 1829896 - DNA, 15 bp, Homo sapiens
aagaagggcgagcgc

SEQ ID NO: 1829897 - DNA, 15 bp, Homo sapiens
agaagggcgagcgca

SEQ ID NO: 1829898 - DNA, 15 bp, Homo sapiens
gaagggcgagcgcag

SEQ ID NO: 1829899 - DNA, 15 bp, Homo sapiens
aagggcgagcgcagc

SEQ ID NO: 1829900 - DNA, 15 bp, Homo sapiens
agggcgagcgcagca

SEQ ID NO: 1829901 - DNA, 15 bp, Homo sapiens
gggcgagcgcagcat

SEQ ID NO: 1829902 - DNA, 15 bp, Homo sapiens
ggcgagcgcagcatc

SEQ ID NO: 1829903 - DNA, 15 bp, Homo sapiens
gcgagcgcagcatca

SEQ ID NO: 1829904 - DNA, 15 bp, Homo sapiens
cgagcgcagcatcag

SEQ ID NO: 1829905 - DNA, 15 bp, Homo sapiens
gagcgcagcatcagc

SEQ ID NO: 1829906 - DNA, 15 bp, Homo sapiens
agcgcagcatcagcc

SEQ ID NO: 1829907 - DNA, 15 bp, Homo sapiens
gcgcagcatcagccc

SEQ ID NO: 1829908 - DNA, 15 bp, Homo sapiens
cgcagcatcagcccc

SEQ ID NO: 1829909 - DNA, 15 bp, Homo sapiens
gcagcatcagcccct

SEQ ID NO: 1829910 - DNA, 15 bp, Homo sapiens
cagcatcagcccctg

SEQ ID NO: 1829911 - DNA, 15 bp, Homo sapiens
agcatcagcccctgc

SEQ ID NO: 1829912 - DNA, 15 bp, Homo sapiens
gcatcagcccctgca

SEQ ID NO: 1829913 - DNA, 15 bp, Homo sapiens
catcagcccctgcaa

SEQ ID NO: 1829914 - DNA, 15 bp, Homo sapiens
atcagcccctgcaaa

SEQ ID NO: 1829915 - DNA, 15 bp, Homo sapiens
tcagcccctgcaaaa

SEQ ID NO: 1829916 - DNA, 15 bp, Homo sapiens
cagcccctgcaaaat

SEQ ID NO: 1829917 - DNA, 15 bp, Homo sapiens
agcccctgcaaaatt

SEQ ID NO: 1829918 - DNA, 15 bp, Homo sapiens
gcccctgcaaaattg

SEQ ID NO: 1829919 - DNA, 15 bp, Homo sapiens
cccctgcaaaattgc

SEQ ID NO: 1829920 - DNA, 15 bp, Homo sapiens
ccctgcaaaattgca

SEQ ID NO: 1829921 - DNA, 15 bp, Homo sapiens
cctgcaaaattgcac

SEQ ID NO: 1829922 - DNA, 15 bp, Homo sapiens
ctgcaaaattgcact

SEQ ID NO: 1829923 - DNA, 15 bp, Homo sapiens
tgcaaaattgcactg

SEQ ID NO: 1829924 - DNA, 15 bp, Homo sapiens
gcaaaattgcactgc

SEQ ID NO: 1829925 - DNA, 15 bp, Homo sapiens
caaaattgcactgct

SEQ ID NO: 1829926 - DNA, 15 bp, Homo sapiens
aaaattgcactgctg

SEQ ID NO: 1829927 - DNA, 15 bp, Homo sapiens
aaattgcactgctgc

SEQ ID NO: 1829928 - DNA, 15 bp, Homo sapiens
aattgcactgctgcc

SEQ ID NO: 1829929 - DNA, 15 bp, Homo sapiens
attgcactgctgcct

SEQ ID NO: 1829930 - DNA, 15 bp, Homo sapiens
ttgcactgctgcctc

SEQ ID NO: 1829931 - DNA, 15 bp, Homo sapiens
gcactgctgcctcct

SEQ ID NO: 1829932 - DNA, 15 bp, Homo sapiens
cactgctgcctcctg

SEQ ID NO: 1829933 - DNA, 15 bp, Homo sapiens
actgctgcctcctgg

SEQ ID NO: 1829934 - DNA, 15 bp, Homo sapiens
ctgctgcctcctggc

SEQ ID NO: 1829935 - DNA, 15 bp, Homo sapiens
tgctgcctcctggct

SEQ ID NO: 1829936 - DNA, 15 bp, Homo sapiens
gctgcctcctggctc

SEQ ID NO: 1829937 - DNA, 15 bp, Homo sapiens
ctgcctcctggctca

SEQ ID NO: 1829938 - DNA, 15 bp, Homo sapiens
tgcctcctggctcac

SEQ ID NO: 1829939 - DNA, 15 bp, Homo sapiens
gcctcctggctcaca

SEQ ID NO: 1829940 - DNA, 15 bp, Homo sapiens
cctcctggctcacat

SEQ ID NO: 1829941 - DNA, 15 bp, Homo sapiens
ctcctggctcacatg

SEQ ID NO: 1829942 - DNA, 15 bp, Homo sapiens
tcctggctcacatgt

SEQ ID NO: 1829943 - DNA, 15 bp, Homo sapiens
cctggctcacatgtt

SEQ ID NO: 1829944 - DNA, 15 bp, Homo sapiens
ctggctcacatgttg

SEQ ID NO: 1829945 - DNA, 15 bp, Homo sapiens
tggctcacatgttgc

SEQ ID NO: 1829946 - DNA, 15 bp, Homo sapiens
ggctcacatgttgcc

SEQ ID NO: 1829947 - DNA, 15 bp, Homo sapiens
gctcacatgttgccc

SEQ ID NO: 1829948 - DNA, 15 bp, Homo sapiens
ctcacatgttgcccc

SEQ ID NO: 1829949 - DNA, 15 bp, Homo sapiens
tcacatgttgcccca

SEQ ID NO: 1829950 - DNA, 15 bp, Homo sapiens
cacatgttgccccat

SEQ ID NO: 1829951 - DNA, 15 bp, Homo sapiens
acatgttgccccatc

SEQ ID NO: 1829952 - DNA, 15 bp, Homo sapiens
catgttgccccatcc

SEQ ID NO: 1829953 - DNA, 15 bp, Homo sapiens
atgttgccccatcct

SEQ ID NO: 1829954 - DNA, 15 bp, Homo sapiens
tgttgccccatcctt

SEQ ID NO: 1829955 - DNA, 15 bp, Homo sapiens
gttgccccatcctta

SEQ ID NO: 1829956 - DNA, 15 bp, Homo sapiens
ttgccccatccttac

SEQ ID NO: 1829957 - DNA, 15 bp, Homo sapiens
tgccccatccttact

SEQ ID NO: 1829958 - DNA, 15 bp, Homo sapiens
gccccatccttactt

SEQ ID NO: 1829959 - DNA, 15 bp, Homo sapiens
ccccatccttacttt

SEQ ID NO: 1829960 - DNA, 15 bp, Homo sapiens
cccatccttacttta

SEQ ID NO: 1829961 - DNA, 15 bp, Homo sapiens
ccatccttactttag

SEQ ID NO: 1829962 - DNA, 15 bp, Homo sapiens
catccttactttagc

SEQ ID NO: 1829963 - DNA, 15 bp, Homo sapiens
atccttactttagcc

SEQ ID NO: 1829964 - DNA, 15 bp, Homo sapiens
tccttactttagcct

SEQ ID NO: 1829965 - DNA, 15 bp, Homo sapiens
ccttactttagcctc

SEQ ID NO: 1829966 - DNA, 15 bp, Homo sapiens
cttactttagcctca

SEQ ID NO: 1829967 - DNA, 15 bp, Homo sapiens
ttactttagcctcaa

SEQ ID NO: 1829968 - DNA, 15 bp, Homo sapiens
tactttagcctcaaa

SEQ ID NO: 1829969 - DNA, 15 bp, Homo sapiens
actttagcctcaaag

SEQ ID NO: 1829970 - DNA, 15 bp, Homo sapiens
ctttagcctcaaagg

SEQ ID NO: 1829971 - DNA, 15 bp, Homo sapiens
tttagcctcaaaggc

SEQ ID NO: 1829972 - DNA, 15 bp, Homo sapiens
ttagcctcaaaggca

SEQ ID NO: 1829973 - DNA, 15 bp, Homo sapiens
tagcctcaaaggcaa

SEQ ID NO: 1829974 - DNA, 15 bp, Homo sapiens
agcctcaaaggcaag

SEQ ID NO: 1829975 - DNA, 15 bp, Homo sapiens
gcctcaaaggcaagg

SEQ ID NO: 1829976 - DNA, 15 bp, Homo sapiens
cctcaaaggcaagga

SEQ ID NO: 1829977 - DNA, 15 bp, Homo sapiens
ctcaaaggcaaggag

SEQ ID NO: 1829978 - DNA, 15 bp, Homo sapiens
tcaaaggcaaggaga

SEQ ID NO: 1829979 - DNA, 15 bp, Homo sapiens
caaaggcaaggagac

SEQ ID NO: 1829980 - DNA, 15 bp, Homo sapiens
aaaggcaaggagacc

SEQ ID NO: 1829981 - DNA, 15 bp, Homo sapiens
aaggcaaggagaccc

SEQ ID NO: 1829982 - DNA, 15 bp, Homo sapiens
aggcaaggagaccca

SEQ ID NO: 1829983 - DNA, 15 bp, Homo sapiens
ggcaaggagacccaa

SEQ ID NO: 1829984 - DNA, 15 bp, Homo sapiens
gcaaggagacccaat

SEQ ID NO: 1829985 - DNA, 15 bp, Homo sapiens
caaggagacccaata

SEQ ID NO: 1829986 - DNA, 15 bp, Homo sapiens
aaggagacccaatat

SEQ ID NO: 1829987 - DNA, 15 bp, Homo sapiens
aggagacccaatatt

SEQ ID NO: 1829988 - DNA, 15 bp, Homo sapiens
ggagacccaatatta

SEQ ID NO: 1829989 - DNA, 15 bp, Homo sapiens
gagacccaatattat

SEQ ID NO: 1829990 - DNA, 15 bp, Homo sapiens
agacccaatattatt

SEQ ID NO: 1829991 - DNA, 15 bp, Homo sapiens
gacccaatattattt

SEQ ID NO: 1829992 - DNA, 15 bp, Homo sapiens
acccaatattatttg

SEQ ID NO: 1829993 - DNA, 15 bp, Homo sapiens
cccaatattatttga

SEQ ID NO: 1829994 - DNA, 15 bp, Homo sapiens
ccaatattatttgag

SEQ ID NO: 1829995 - DNA, 15 bp, Homo sapiens
caatattatttgagt

SEQ ID NO: 1829996 - DNA, 15 bp, Homo sapiens
aatattatttgagta

SEQ ID NO: 1829997 - DNA, 15 bp, Homo sapiens
atattatttgagtac

SEQ ID NO: 1829998 - DNA, 15 bp, Homo sapiens
tattatttgagtact

SEQ ID NO: 1829999 - DNA, 15 bp, Homo sapiens
attatttgagtactt

SEQ ID NO: 1830000 - DNA, 15 bp, Homo sapiens
ttatttgagtacttg

SEQ ID NO: 1830001 - DNA, 15 bp, Homo sapiens
tatttgagtacttgg

SEQ ID NO: 1830002 - DNA, 15 bp, Homo sapiens
atttgagtacttgga

SEQ ID NO: 1830003 - DNA, 15 bp, Homo sapiens
tttgagtacttggat

SEQ ID NO: 1830004 - DNA, 15 bp, Homo sapiens
ttgagtacttggatt

SEQ ID NO: 1830005 - DNA, 15 bp, Homo sapiens
tgagtacttggattt

SEQ ID NO: 1830006 - DNA, 15 bp, Homo sapiens
gagtacttggatttg

SEQ ID NO: 1830007 - DNA, 15 bp, Homo sapiens
agtacttggatttga

SEQ ID NO: 1830008 - DNA, 15 bp, Homo sapiens
gtacttggatttgat

SEQ ID NO: 1830009 - DNA, 15 bp, Homo sapiens
tacttggatttgatc

SEQ ID NO: 1830010 - DNA, 15 bp, Homo sapiens
acttggatttgatcc

SEQ ID NO: 1830011 - DNA, 15 bp, Homo sapiens
cttggatttgatcct

SEQ ID NO: 1830012 - DNA, 15 bp, Homo sapiens
ttggatttgatcctg

SEQ ID NO: 1830013 - DNA, 15 bp, Homo sapiens
tggatttgatcctga

SEQ ID NO: 1830014 - DNA, 15 bp, Homo sapiens
ggatttgatcctgag

SEQ ID NO: 1830015 - DNA, 15 bp, Homo sapiens
gatttgatcctgagt

SEQ ID NO: 1830016 - DNA, 15 bp, Homo sapiens
atttgatcctgagtg

SEQ ID NO: 1830017 - DNA, 15 bp, Homo sapiens
tttgatcctgagtga

SEQ ID NO: 1830018 - DNA, 15 bp, Homo sapiens
ttgatcctgagtgac

SEQ ID NO: 1830019 - DNA, 15 bp, Homo sapiens
tgatcctgagtgact

SEQ ID NO: 1830020 - DNA, 15 bp, Homo sapiens
gatcctgagtgactt

SEQ ID NO: 1830021 - DNA, 15 bp, Homo sapiens
atcctgagtgacttt

SEQ ID NO: 1830022 - DNA, 15 bp, Homo sapiens
tcctgagtgactttc

SEQ ID NO: 1830023 - DNA, 15 bp, Homo sapiens
cctgagtgactttct

SEQ ID NO: 1830024 - DNA, 15 bp, Homo sapiens
ctgagtgactttctg

SEQ ID NO: 1830025 - DNA, 15 bp, Homo sapiens
tgagtgactttctga

SEQ ID NO: 1830026 - DNA, 15 bp, Homo sapiens
gagtgactttctgag

SEQ ID NO: 1830027 - DNA, 15 bp, Homo sapiens
agtgactttctgaga

SEQ ID NO: 1830028 - DNA, 15 bp, Homo sapiens
gtgactttctgagaa

SEQ ID NO: 1830029 - DNA, 15 bp, Homo sapiens
tgactttctgagaaa

SEQ ID NO: 1830030 - DNA, 15 bp, Homo sapiens
gactttctgagaaag

SEQ ID NO: 1830031 - DNA, 15 bp, Homo sapiens
actttctgagaaagc

SEQ ID NO: 1830032 - DNA, 15 bp, Homo sapiens
ctttctgagaaagca

SEQ ID NO: 1830033 - DNA, 15 bp, Homo sapiens
tttctgagaaagcag

SEQ ID NO: 1830034 - DNA, 15 bp, Homo sapiens
ttctgagaaagcagt

SEQ ID NO: 1830035 - DNA, 15 bp, Homo sapiens
tctgagaaagcagtg

SEQ ID NO: 1830036 - DNA, 15 bp, Homo sapiens
ctgagaaagcagtgt

SEQ ID NO: 1830037 - DNA, 15 bp, Homo sapiens
tgagaaagcagtgta

SEQ ID NO: 1830038 - DNA, 15 bp, Homo sapiens
gagaaagcagtgtat

SEQ ID NO: 1830039 - DNA, 15 bp, Homo sapiens
agaaagcagtgtatc

SEQ ID NO: 1830040 - DNA, 15 bp, Homo sapiens
gaaagcagtgtatca

SEQ ID NO: 1830041 - DNA, 15 bp, Homo sapiens
aaagcagtgtatcat

SEQ ID NO: 1830042 - DNA, 15 bp, Homo sapiens
aagcagtgtatcatc

SEQ ID NO: 1830043 - DNA, 15 bp, Homo sapiens
agcagtgtatcatct

SEQ ID NO: 1830044 - DNA, 15 bp, Homo sapiens
gcagtgtatcatctg

SEQ ID NO: 1830045 - DNA, 15 bp, Homo sapiens
cagtgtatcatctgc

SEQ ID NO: 1830046 - DNA, 15 bp, Homo sapiens
agtgtatcatctgcc

SEQ ID NO: 1830047 - DNA, 15 bp, Homo sapiens
gtgtatcatctgccc

SEQ ID NO: 1830048 - DNA, 15 bp, Homo sapiens
tgtatcatctgccct

SEQ ID NO: 1830049 - DNA, 15 bp, Homo sapiens
gtatcatctgcccta

SEQ ID NO: 1830050 - DNA, 15 bp, Homo sapiens
tatcatctgccctaa

SEQ ID NO: 1830051 - DNA, 15 bp, Homo sapiens
atcatctgccctaag

SEQ ID NO: 1830052 - DNA, 15 bp, Homo sapiens
tcatctgccctaaga

SEQ ID NO: 1830053 - DNA, 15 bp, Homo sapiens
catctgccctaagat

SEQ ID NO: 1830054 - DNA, 15 bp, Homo sapiens
atctgccctaagatc

SEQ ID NO: 1830055 - DNA, 15 bp, Homo sapiens
tctgccctaagatca

SEQ ID NO: 1830056 - DNA, 15 bp, Homo sapiens
ctgccctaagatcac

SEQ ID NO: 1830057 - DNA, 15 bp, Homo sapiens
tgccctaagatcacc

SEQ ID NO: 1830058 - DNA, 15 bp, Homo sapiens
gccctaagatcacca

SEQ ID NO: 1830059 - DNA, 15 bp, Homo sapiens
ccctaagatcaccac

SEQ ID NO: 1830060 - DNA, 15 bp, Homo sapiens
cctaagatcaccaca

SEQ ID NO: 1830061 - DNA, 15 bp, Homo sapiens
ctaagatcaccacat

SEQ ID NO: 1830062 - DNA, 15 bp, Homo sapiens
taagatcaccacata

SEQ ID NO: 1830063 - DNA, 15 bp, Homo sapiens
aagatcaccacatat

SEQ ID NO: 1830064 - DNA, 15 bp, Homo sapiens
agatcaccacatata

SEQ ID NO: 1830065 - DNA, 15 bp, Homo sapiens
gatcaccacatatat

SEQ ID NO: 1830066 - DNA, 15 bp, Homo sapiens
atcaccacatatatg

SEQ ID NO: 1830067 - DNA, 15 bp, Homo sapiens
tcaccacatatatga

SEQ ID NO: 1830068 - DNA, 15 bp, Homo sapiens
caccacatatatgac

SEQ ID NO: 1830069 - DNA, 15 bp, Homo sapiens
accacatatatgaca

SEQ ID NO: 1830070 - DNA, 15 bp, Homo sapiens
ccacatatatgacaa

SEQ ID NO: 1830071 - DNA, 15 bp, Homo sapiens
cacatatatgacaag

SEQ ID NO: 1830072 - DNA, 15 bp, Homo sapiens
acatatatgacaagg

SEQ ID NO: 1830073 - DNA, 15 bp, Homo sapiens
catatatgacaaggt

SEQ ID NO: 1830074 - DNA, 15 bp, Homo sapiens
atatatgacaaggtt

SEQ ID NO: 1830075 - DNA, 15 bp, Homo sapiens
tatatgacaaggttt

SEQ ID NO: 1830076 - DNA, 15 bp, Homo sapiens
atatgacaaggtttt

SEQ ID NO: 1830077 - DNA, 15 bp, Homo sapiens
tatgacaaggttttt

SEQ ID NO: 1830078 - DNA, 15 bp, Homo sapiens
atgacaaggtttttg

SEQ ID NO: 1830079 - DNA, 15 bp, Homo sapiens
tgacaaggtttttgg

SEQ ID NO: 1830080 - DNA, 15 bp, Homo sapiens
gacaaggtttttgga

SEQ ID NO: 1830081 - DNA, 15 bp, Homo sapiens
acaaggtttttggat

SEQ ID NO: 1830082 - DNA, 15 bp, Homo sapiens
caaggtttttggatg

SEQ ID NO: 1830083 - DNA, 15 bp, Homo sapiens
aaggtttttggatga

SEQ ID NO: 1830084 - DNA, 15 bp, Homo sapiens
aggtttttggatgag

SEQ ID NO: 1830085 - DNA, 15 bp, Homo sapiens
ggtttttggatgagt

SEQ ID NO: 1830086 - DNA, 15 bp, Homo sapiens
gtttttggatgagtt

SEQ ID NO: 1830087 - DNA, 15 bp, Homo sapiens
tttttggatgagttg

SEQ ID NO: 1830088 - DNA, 15 bp, Homo sapiens
ttttggatgagttga

SEQ ID NO: 1830089 - DNA, 15 bp, Homo sapiens
tttggatgagttgag

SEQ ID NO: 1830090 - DNA, 15 bp, Homo sapiens
ttggatgagttgaga

SEQ ID NO: 1830091 - DNA, 15 bp, Homo sapiens
tggatgagttgagat

SEQ ID NO: 1830092 - DNA, 15 bp, Homo sapiens
ggatgagttgagatt

SEQ ID NO: 1830093 - DNA, 15 bp, Homo sapiens
gatgagttgagattt

SEQ ID NO: 1830094 - DNA, 15 bp, Homo sapiens
atgagttgagatttc

SEQ ID NO: 1830095 - DNA, 15 bp, Homo sapiens
tgagttgagatttct

SEQ ID NO: 1830096 - DNA, 15 bp, Homo sapiens
gagttgagatttcta

SEQ ID NO: 1830097 - DNA, 15 bp, Homo sapiens
agttgagatttctag

SEQ ID NO: 1830098 - DNA, 15 bp, Homo sapiens
gttgagatttctaga

SEQ ID NO: 1830099 - DNA, 15 bp, Homo sapiens
ttgagatttctagac

SEQ ID NO: 1830100 - DNA, 15 bp, Homo sapiens
tgagatttctagaca

SEQ ID NO: 1830101 - DNA, 15 bp, Homo sapiens
gagatttctagacat

SEQ ID NO: 1830102 - DNA, 15 bp, Homo sapiens
agatttctagacatt

SEQ ID NO: 1830103 - DNA, 15 bp, Homo sapiens
gatttctagacattg

SEQ ID NO: 1830104 - DNA, 15 bp, Homo sapiens
atttctagacattga

SEQ ID NO: 1830105 - DNA, 15 bp, Homo sapiens
tttctagacattgaa

SEQ ID NO: 1830106 - DNA, 15 bp, Homo sapiens
ttctagacattgaaa

SEQ ID NO: 1830107 - DNA, 15 bp, Homo sapiens
tctagacattgaaac

SEQ ID NO: 1830108 - DNA, 15 bp, Homo sapiens
ctagacattgaaacc

SEQ ID NO: 1830109 - DNA, 15 bp, Homo sapiens
tagacattgaaaccc

SEQ ID NO: 1830110 - DNA, 15 bp, Homo sapiens
agacattgaaaccct

SEQ ID NO: 1830111 - DNA, 15 bp, Homo sapiens
gacattgaaaccctc

SEQ ID NO: 1830112 - DNA, 15 bp, Homo sapiens
acattgaaaccctca

SEQ ID NO: 1830113 - DNA, 15 bp, Homo sapiens
cattgaaaccctcat

SEQ ID NO: 1830114 - DNA, 15 bp, Homo sapiens
attgaaaccctcatg

SEQ ID NO: 1830115 - DNA, 15 bp, Homo sapiens
ttgaaaccctcatga

SEQ ID NO: 1830116 - DNA, 15 bp, Homo sapiens
tgaaaccctcatgat

SEQ ID NO: 1830117 - DNA, 15 bp, Homo sapiens
gaaaccctcatgatg

SEQ ID NO: 1830118 - DNA, 15 bp, Homo sapiens
aaaccctcatgatga

SEQ ID NO: 1830119 - DNA, 15 bp, Homo sapiens
aaccctcatgatgaa

SEQ ID NO: 1830120 - DNA, 15 bp, Homo sapiens
accctcatgatgaac

SEQ ID NO: 1830121 - DNA, 15 bp, Homo sapiens
ccctcatgatgaacg

SEQ ID NO: 1830122 - DNA, 15 bp, Homo sapiens
cctcatgatgaacgt

SEQ ID NO: 1830123 - DNA, 15 bp, Homo sapiens
ctcatgatgaacgtc

SEQ ID NO: 1830124 - DNA, 15 bp, Homo sapiens
tcatgatgaacgtca

SEQ ID NO: 1830125 - DNA, 15 bp, Homo sapiens
catgatgaacgtcat

SEQ ID NO: 1830126 - DNA, 15 bp, Homo sapiens
atgatgaacgtcatc

SEQ ID NO: 1830127 - DNA, 15 bp, Homo sapiens
tgatgaacgtcatcc

SEQ ID NO: 1830128 - DNA, 15 bp, Homo sapiens
gatgaacgtcatccc

SEQ ID NO: 1830129 - DNA, 15 bp, Homo sapiens
atgaacgtcatcccg

SEQ ID NO: 1830130 - DNA, 15 bp, Homo sapiens
tgaacgtcatcccgg

SEQ ID NO: 1830131 - DNA, 15 bp, Homo sapiens
gaacgtcatcccggg

SEQ ID NO: 1830132 - DNA, 15 bp, Homo sapiens
aacgtcatcccgggt

SEQ ID NO: 1830133 - DNA, 15 bp, Homo sapiens
acgtcatcccgggta

SEQ ID NO: 1830134 - DNA, 15 bp, Homo sapiens
cgtcatcccgggtag

SEQ ID NO: 1830135 - DNA, 15 bp, Homo sapiens
gtcatcccgggtagc

SEQ ID NO: 1830136 - DNA, 15 bp, Homo sapiens
tcatcccgggtagca

SEQ ID NO: 1830137 - DNA, 15 bp, Homo sapiens
catcccgggtagcag

SEQ ID NO: 1830138 - DNA, 15 bp, Homo sapiens
atcccgggtagcagg

SEQ ID NO: 1830139 - DNA, 15 bp, Homo sapiens
tcccgggtagcaggg

SEQ ID NO: 1830140 - DNA, 15 bp, Homo sapiens
cccgggtagcagggg

SEQ ID NO: 1830141 - DNA, 15 bp, Homo sapiens
ccgggtagcaggggc

SEQ ID NO: 1830142 - DNA, 15 bp, Homo sapiens
cgggtagcaggggct

SEQ ID NO: 1830143 - DNA, 15 bp, Homo sapiens
gggtagcaggggcta

SEQ ID NO: 1830144 - DNA, 15 bp, Homo sapiens
ggtagcaggggctaa

SEQ ID NO: 1830145 - DNA, 15 bp, Homo sapiens
gtagcaggggctaag

SEQ ID NO: 1830146 - DNA, 15 bp, Homo sapiens
tagcaggggctaagc

SEQ ID NO: 1830147 - DNA, 15 bp, Homo sapiens
agcaggggctaagcc

SEQ ID NO: 1830148 - DNA, 15 bp, Homo sapiens
gcaggggctaagcct

SEQ ID NO: 1830149 - DNA, 15 bp, Homo sapiens
caggggctaagcctt

SEQ ID NO: 1830150 - DNA, 15 bp, Homo sapiens
aggggctaagccttt

SEQ ID NO: 1830151 - DNA, 15 bp, Homo sapiens
ggggctaagcctttc

SEQ ID NO: 1830152 - DNA, 15 bp, Homo sapiens
gggctaagcctttca

SEQ ID NO: 1830153 - DNA, 15 bp, Homo sapiens
ggctaagcctttcat

SEQ ID NO: 1830154 - DNA, 15 bp, Homo sapiens
gctaagcctttcatc

SEQ ID NO: 1830155 - DNA, 15 bp, Homo sapiens
ctaagcctttcatca

SEQ ID NO: 1830156 - DNA, 15 bp, Homo sapiens
taagcctttcatcac

SEQ ID NO: 1830157 - DNA, 15 bp, Homo sapiens
aagcctttcatcacc

SEQ ID NO: 1830158 - DNA, 15 bp, Homo sapiens
agcctttcatcacct

SEQ ID NO: 1830159 - DNA, 15 bp, Homo sapiens
gcctttcatcacctg

SEQ ID NO: 1830160 - DNA, 15 bp, Homo sapiens
cctttcatcacctgc

SEQ ID NO: 1830161 - DNA, 15 bp, Homo sapiens
ctttcatcacctgct

SEQ ID NO: 1830162 - DNA, 15 bp, Homo sapiens
tttcatcacctgcta

SEQ ID NO: 1830163 - DNA, 15 bp, Homo sapiens
ttcatcacctgctac

SEQ ID NO: 1830164 - DNA, 15 bp, Homo sapiens
tcatcacctgctaca

SEQ ID NO: 1830165 - DNA, 15 bp, Homo sapiens
catcacctgctacaa

SEQ ID NO: 1830166 - DNA, 15 bp, Homo sapiens
atcacctgctacaac

SEQ ID NO: 1830167 - DNA, 15 bp, Homo sapiens
tcacctgctacaaca

SEQ ID NO: 1830168 - DNA, 15 bp, Homo sapiens
cacctgctacaacaa

SEQ ID NO: 1830169 - DNA, 15 bp, Homo sapiens
acctgctacaacaag

SEQ ID NO: 1830170 - DNA, 15 bp, Homo sapiens
cctgctacaacaagc

SEQ ID NO: 1830171 - DNA, 15 bp, Homo sapiens
ctgctacaacaagct

SEQ ID NO: 1830172 - DNA, 15 bp, Homo sapiens
tgctacaacaagctg

SEQ ID NO: 1830173 - DNA, 15 bp, Homo sapiens
gctacaacaagctgg

SEQ ID NO: 1830174 - DNA, 15 bp, Homo sapiens
ctacaacaagctgga

SEQ ID NO: 1830175 - DNA, 15 bp, Homo sapiens
tacaacaagctggac

SEQ ID NO: 1830176 - DNA, 15 bp, Homo sapiens
acaacaagctggaca

SEQ ID NO: 1830177 - DNA, 15 bp, Homo sapiens
caacaagctggacat

SEQ ID NO: 1830178 - DNA, 15 bp, Homo sapiens
aacaagctggacatt

SEQ ID NO: 1830179 - DNA, 15 bp, Homo sapiens
acaagctggacatta

SEQ ID NO: 1830180 - DNA, 15 bp, Homo sapiens
caagctggacattaa

SEQ ID NO: 1830181 - DNA, 15 bp, Homo sapiens
aagctggacattaac

SEQ ID NO: 1830182 - DNA, 15 bp, Homo sapiens
agctggacattaact

SEQ ID NO: 1830183 - DNA, 15 bp, Homo sapiens
gctggacattaactt

SEQ ID NO: 1830184 - DNA, 15 bp, Homo sapiens
ctggacattaacttg

SEQ ID NO: 1830185 - DNA, 15 bp, Homo sapiens
tggacattaacttgt

SEQ ID NO: 1830186 - DNA, 15 bp, Homo sapiens
ggacattaacttgta

SEQ ID NO: 1830187 - DNA, 15 bp, Homo sapiens
gacattaacttgtat

SEQ ID NO: 1830188 - DNA, 15 bp, Homo sapiens
acattaacttgtatt

SEQ ID NO: 1830189 - DNA, 15 bp, Homo sapiens
cattaacttgtattt

SEQ ID NO: 1830190 - DNA, 15 bp, Homo sapiens
attaacttgtatttg

SEQ ID NO: 1830191 - DNA, 15 bp, Homo sapiens
ttaacttgtatttga

SEQ ID NO: 1830192 - DNA, 15 bp, Homo sapiens
taacttgtatttgag

SEQ ID NO: 1830193 - DNA, 15 bp, Homo sapiens
aacttgtatttgaga

SEQ ID NO: 1830194 - DNA, 15 bp, Homo sapiens
acttgtatttgagaa

SEQ ID NO: 1830195 - DNA, 15 bp, Homo sapiens
cttgtatttgagaat

SEQ ID NO: 1830196 - DNA, 15 bp, Homo sapiens
ttgtatttgagaatt

SEQ ID NO: 1830197 - DNA, 15 bp, Homo sapiens
tgtatttgagaattg

SEQ ID NO: 1830198 - DNA, 15 bp, Homo sapiens
gtatttgagaattgc

SEQ ID NO: 1830199 - DNA, 15 bp, Homo sapiens
tatttgagaattgct

SEQ ID NO: 1830200 - DNA, 15 bp, Homo sapiens
atttgagaattgctc

SEQ ID NO: 1830201 - DNA, 15 bp, Homo sapiens
tttgagaattgctcc

SEQ ID NO: 1830202 - DNA, 15 bp, Homo sapiens
ttgagaattgctcca

SEQ ID NO: 1830203 - DNA, 15 bp, Homo sapiens
tgagaattgctccag

SEQ ID NO: 1830204 - DNA, 15 bp, Homo sapiens
gagaattgctccagg

SEQ ID NO: 1830205 - DNA, 15 bp, Homo sapiens
agaattgctccagga

SEQ ID NO: 1830206 - DNA, 15 bp, Homo sapiens
gaattgctccaggac

SEQ ID NO: 1830207 - DNA, 15 bp, Homo sapiens
aattgctccaggact

SEQ ID NO: 1830208 - DNA, 15 bp, Homo sapiens
attgctccaggactc

SEQ ID NO: 1830209 - DNA, 15 bp, Homo sapiens
ttgctccaggactct

SEQ ID NO: 1830210 - DNA, 15 bp, Homo sapiens
tgctccaggactcta

SEQ ID NO: 1830211 - DNA, 15 bp, Homo sapiens
gctccaggactctac

SEQ ID NO: 1830212 - DNA, 15 bp, Homo sapiens
ctccaggactctacc

SEQ ID NO: 1830213 - DNA, 15 bp, Homo sapiens
tccaggactctacct

SEQ ID NO: 1830214 - DNA, 15 bp, Homo sapiens
ccaggactctacctt

SEQ ID NO: 1830215 - DNA, 15 bp, Homo sapiens
caggactctaccttc

SEQ ID NO: 1830216 - DNA, 15 bp, Homo sapiens
aggactctaccttca

SEQ ID NO: 1830217 - DNA, 15 bp, Homo sapiens
ggactctaccttcag

SEQ ID NO: 1830218 - DNA, 15 bp, Homo sapiens
gactctaccttcaga

SEQ ID NO: 1830219 - DNA, 15 bp, Homo sapiens
actctaccttcagat

SEQ ID NO: 1830220 - DNA, 15 bp, Homo sapiens
ctctaccttcagatg

SEQ ID NO: 1830221 - DNA, 15 bp, Homo sapiens
tctaccttcagatgc

SEQ ID NO: 1830222 - DNA, 15 bp, Homo sapiens
ctaccttcagatgct

SEQ ID NO: 1830223 - DNA, 15 bp, Homo sapiens
taccttcagatgctg

SEQ ID NO: 1830224 - DNA, 15 bp, Homo sapiens
accttcagatgctgg

SEQ ID NO: 1830225 - DNA, 15 bp, Homo sapiens
ccttcagatgctggt

SEQ ID NO: 1830226 - DNA, 15 bp, Homo sapiens
cttcagatgctggtt

SEQ ID NO: 1830227 - DNA, 15 bp, Homo sapiens
ttcagatgctggtta

SEQ ID NO: 1830228 - DNA, 15 bp, Homo sapiens
tcagatgctggttag

SEQ ID NO: 1830229 - DNA, 15 bp, Homo sapiens
cagatgctggttagt

SEQ ID NO: 1830230 - DNA, 15 bp, Homo sapiens
agatgctggttagta

SEQ ID NO: 1830231 - DNA, 15 bp, Homo sapiens
gatgctggttagtag

SEQ ID NO: 1830232 - DNA, 15 bp, Homo sapiens
atgctggttagtagc

SEQ ID NO: 1830233 - DNA, 15 bp, Homo sapiens
tgctggttagtagca

SEQ ID NO: 1830234 - DNA, 15 bp, Homo sapiens
gctggttagtagcat

SEQ ID NO: 1830235 - DNA, 15 bp, Homo sapiens
ctggttagtagcatt

SEQ ID NO: 1830236 - DNA, 15 bp, Homo sapiens
tggttagtagcattg

SEQ ID NO: 1830237 - DNA, 15 bp, Homo sapiens
ggttagtagcattga

SEQ ID NO: 1830238 - DNA, 15 bp, Homo sapiens
gttagtagcattgac

SEQ ID NO: 1830239 - DNA, 15 bp, Homo sapiens
ttagtagcattgact

SEQ ID NO: 1830240 - DNA, 15 bp, Homo sapiens
tagtagcattgactg

SEQ ID NO: 1830241 - DNA, 15 bp, Homo sapiens
agtagcattgactgg

SEQ ID NO: 1830242 - DNA, 15 bp, Homo sapiens
gtagcattgactgga

SEQ ID NO: 1830243 - DNA, 15 bp, Homo sapiens
tagcattgactggat

SEQ ID NO: 1830244 - DNA, 15 bp, Homo sapiens
agcattgactggatt

SEQ ID NO: 1830245 - DNA, 15 bp, Homo sapiens
gcattgactggattt

SEQ ID NO: 1830246 - DNA, 15 bp, Homo sapiens
cattgactggattta

SEQ ID NO: 1830247 - DNA, 15 bp, Homo sapiens
attgactggatttat

SEQ ID NO: 1830248 - DNA, 15 bp, Homo sapiens
ttgactggatttatg

SEQ ID NO: 1830249 - DNA, 15 bp, Homo sapiens
tgactggatttatga

SEQ ID NO: 1830250 - DNA, 15 bp, Homo sapiens
gactggatttatgaa

SEQ ID NO: 1830251 - DNA, 15 bp, Homo sapiens
actggatttatgaaa

SEQ ID NO: 1830252 - DNA, 15 bp, Homo sapiens
ctggatttatgaaat

SEQ ID NO: 1830253 - DNA, 15 bp, Homo sapiens
tggatttatgaaatt

SEQ ID NO: 1830254 - DNA, 15 bp, Homo sapiens
ggatttatgaaattg

SEQ ID NO: 1830255 - DNA, 15 bp, Homo sapiens
gatttatgaaattgg

SEQ ID NO: 1830256 - DNA, 15 bp, Homo sapiens
atttatgaaattgga

SEQ ID NO: 1830257 - DNA, 15 bp, Homo sapiens
tttatgaaattggat

SEQ ID NO: 1830258 - DNA, 15 bp, Homo sapiens
ttatgaaattggatg

SEQ ID NO: 1830259 - DNA, 15 bp, Homo sapiens
tatgaaattggatgc

SEQ ID NO: 1830260 - DNA, 15 bp, Homo sapiens
atgaaattggatgcc

SEQ ID NO: 1830261 - DNA, 15 bp, Homo sapiens
tgaaattggatgcca

SEQ ID NO: 1830262 - DNA, 15 bp, Homo sapiens
gaaattggatgccag

SEQ ID NO: 1830263 - DNA, 15 bp, Homo sapiens
aaattggatgccagt

SEQ ID NO: 1830264 - DNA, 15 bp, Homo sapiens
aattggatgccagtt

SEQ ID NO: 1830265 - DNA, 15 bp, Homo sapiens
attggatgccagtta

SEQ ID NO: 1830266 - DNA, 15 bp, Homo sapiens
ttggatgccagttaa

SEQ ID NO: 1830267 - DNA, 15 bp, Homo sapiens
tggatgccagttaag

SEQ ID NO: 1830268 - DNA, 15 bp, Homo sapiens
ggatgccagttaagg

SEQ ID NO: 1830269 - DNA, 15 bp, Homo sapiens
gatgccagttaagga

SEQ ID NO: 1830270 - DNA, 15 bp, Homo sapiens
atgccagttaaggaa

SEQ ID NO: 1830271 - DNA, 15 bp, Homo sapiens
tgccagttaaggaat

SEQ ID NO: 1830272 - DNA, 15 bp, Homo sapiens
gccagttaaggaata

SEQ ID NO: 1830273 - DNA, 15 bp, Homo sapiens
ccagttaaggaataa

SEQ ID NO: 1830274 - DNA, 15 bp, Homo sapiens
cagttaaggaataag

SEQ ID NO: 1830275 - DNA, 15 bp, Homo sapiens
agttaaggaataaga

SEQ ID NO: 1830276 - DNA, 15 bp, Homo sapiens
gttaaggaataagag

SEQ ID NO: 1830277 - DNA, 15 bp, Homo sapiens
ttaaggaataagaga

SEQ ID NO: 1830278 - DNA, 15 bp, Homo sapiens
taaggaataagagaa

SEQ ID NO: 1830279 - DNA, 15 bp, Homo sapiens
aaggaataagagaat

SEQ ID NO: 1830280 - DNA, 15 bp, Homo sapiens
aggaataagagaatg

SEQ ID NO: 1830281 - DNA, 15 bp, Homo sapiens
ggaataagagaatgt

SEQ ID NO: 1830282 - DNA, 15 bp, Homo sapiens
gaataagagaatgta

SEQ ID NO: 1830283 - DNA, 15 bp, Homo sapiens
aataagagaatgtat

SEQ ID NO: 1830284 - DNA, 15 bp, Homo sapiens
ataagagaatgtatt

SEQ ID NO: 1830285 - DNA, 15 bp, Homo sapiens
taagagaatgtattt

SEQ ID NO: 1830286 - DNA, 15 bp, Homo sapiens
aagagaatgtatttg

SEQ ID NO: 1830287 - DNA, 15 bp, Homo sapiens
agagaatgtatttga

SEQ ID NO: 1830288 - DNA, 15 bp, Homo sapiens
gagaatgtatttgat

SEQ ID NO: 1830289 - DNA, 15 bp, Homo sapiens
agaatgtatttgatt

SEQ ID NO: 1830290 - DNA, 15 bp, Homo sapiens
gaatgtatttgattt

SEQ ID NO: 1830291 - DNA, 15 bp, Homo sapiens
aatgtatttgatttg

SEQ ID NO: 1830292 - DNA, 15 bp, Homo sapiens
atgtatttgatttgc

SEQ ID NO: 1830293 - DNA, 15 bp, Homo sapiens
tgtatttgatttgcc

SEQ ID NO: 1830294 - DNA, 15 bp, Homo sapiens
gtatttgatttgcca

SEQ ID NO: 1830295 - DNA, 15 bp, Homo sapiens
tatttgatttgccac

SEQ ID NO: 1830296 - DNA, 15 bp, Homo sapiens
atttgatttgccacc

SEQ ID NO: 1830297 - DNA, 15 bp, Homo sapiens
tttgatttgccaccc

SEQ ID NO: 1830298 - DNA, 15 bp, Homo sapiens
ttgatttgccaccct

SEQ ID NO: 1830299 - DNA, 15 bp, Homo sapiens
tgatttgccacccta

SEQ ID NO: 1830300 - DNA, 15 bp, Homo sapiens
gatttgccaccctat

SEQ ID NO: 1830301 - DNA, 15 bp, Homo sapiens
atttgccaccctata

SEQ ID NO: 1830302 - DNA, 15 bp, Homo sapiens
tttgccaccctatat

SEQ ID NO: 1830303 - DNA, 15 bp, Homo sapiens
ttgccaccctatatg

SEQ ID NO: 1830304 - DNA, 15 bp, Homo sapiens
tgccaccctatatgg

SEQ ID NO: 1830305 - DNA, 15 bp, Homo sapiens
gccaccctatatggt

SEQ ID NO: 1830306 - DNA, 15 bp, Homo sapiens
ccaccctatatggtc

SEQ ID NO: 1830307 - DNA, 15 bp, Homo sapiens
caccctatatggtct

SEQ ID NO: 1830308 - DNA, 15 bp, Homo sapiens
accctatatggtctg

SEQ ID NO: 1830309 - DNA, 15 bp, Homo sapiens
ccctatatggtctgt

SEQ ID NO: 1830310 - DNA, 15 bp, Homo sapiens
cctatatggtctgtg

SEQ ID NO: 1830311 - DNA, 15 bp, Homo sapiens
ctatatggtctgtgc

SEQ ID NO: 1830312 - DNA, 15 bp, Homo sapiens
tatatggtctgtgca

SEQ ID NO: 1830313 - DNA, 15 bp, Homo sapiens
atatggtctgtgcag

SEQ ID NO: 1830314 - DNA, 15 bp, Homo sapiens
tatggtctgtgcaga

SEQ ID NO: 1830315 - DNA, 15 bp, Homo sapiens
atggtctgtgcagac

SEQ ID NO: 1830316 - DNA, 15 bp, Homo sapiens
tggtctgtgcagact

SEQ ID NO: 1830317 - DNA, 15 bp, Homo sapiens
ggtctgtgcagactg

SEQ ID NO: 1830318 - DNA, 15 bp, Homo sapiens
gtctgtgcagactgt

SEQ ID NO: 1830319 - DNA, 15 bp, Homo sapiens
tctgtgcagactgtc

SEQ ID NO: 1830320 - DNA, 15 bp, Homo sapiens
ctgtgcagactgtca

SEQ ID NO: 1830321 - DNA, 15 bp, Homo sapiens
tgtgcagactgtcat

SEQ ID NO: 1830322 - DNA, 15 bp, Homo sapiens
gtgcagactgtcatg

SEQ ID NO: 1830323 - DNA, 15 bp, Homo sapiens
tgcagactgtcatga

SEQ ID NO: 1830324 - DNA, 15 bp, Homo sapiens
gcagactgtcatgat

SEQ ID NO: 1830325 - DNA, 15 bp, Homo sapiens
cagactgtcatgatc

SEQ ID NO: 1830326 - DNA, 15 bp, Homo sapiens
agactgtcatgatct

SEQ ID NO: 1830327 - DNA, 15 bp, Homo sapiens
gactgtcatgatctc

SEQ ID NO: 1830328 - DNA, 15 bp, Homo sapiens
actgtcatgatctca

SEQ ID NO: 1830329 - DNA, 15 bp, Homo sapiens
ctgtcatgatctcat

SEQ ID NO: 1830330 - DNA, 15 bp, Homo sapiens
tgtcatgatctcatt

SEQ ID NO: 1830331 - DNA, 15 bp, Homo sapiens
gtcatgatctcattg

SEQ ID NO: 1830332 - DNA, 15 bp, Homo sapiens
tcatgatctcattga

SEQ ID NO: 1830333 - DNA, 15 bp, Homo sapiens
catgatctcattgaa

SEQ ID NO: 1830334 - DNA, 15 bp, Homo sapiens
atgatctcattgaaa

SEQ ID NO: 1830335 - DNA, 15 bp, Homo sapiens
tgatctcattgaaat

SEQ ID NO: 1830336 - DNA, 15 bp, Homo sapiens
gatctcattgaaatc

SEQ ID NO: 1830337 - DNA, 15 bp, Homo sapiens
atctcattgaaatcc

SEQ ID NO: 1830338 - DNA, 15 bp, Homo sapiens
tctcattgaaatcca

SEQ ID NO: 1830339 - DNA, 15 bp, Homo sapiens
ctcattgaaatccaa

SEQ ID NO: 1830340 - DNA, 15 bp, Homo sapiens
tcattgaaatccaag

SEQ ID NO: 1830341 - DNA, 15 bp, Homo sapiens
cattgaaatccaaga

SEQ ID NO: 1830342 - DNA, 15 bp, Homo sapiens
attgaaatccaagaa

SEQ ID NO: 1830343 - DNA, 15 bp, Homo sapiens
ttgaaatccaagaaa

SEQ ID NO: 1830344 - DNA, 15 bp, Homo sapiens
tgaaatccaagaaaa

SEQ ID NO: 1830345 - DNA, 15 bp, Homo sapiens
gaaatccaagaaaag

SEQ ID NO: 1830346 - DNA, 15 bp, Homo sapiens
aaatccaagaaaaga

SEQ ID NO: 1830347 - DNA, 15 bp, Homo sapiens
aatccaagaaaagat

SEQ ID NO: 1830348 - DNA, 15 bp, Homo sapiens
atccaagaaaagatt

SEQ ID NO: 1830349 - DNA, 15 bp, Homo sapiens
tccaagaaaagatta

SEQ ID NO: 1830350 - DNA, 15 bp, Homo sapiens
ccaagaaaagattat

SEQ ID NO: 1830351 - DNA, 15 bp, Homo sapiens
caagaaaagattatg

SEQ ID NO: 1830352 - DNA, 15 bp, Homo sapiens
aagaaaagattatgt

SEQ ID NO: 1830353 - DNA, 15 bp, Homo sapiens
agaaaagattatgtc

SEQ ID NO: 1830354 - DNA, 15 bp, Homo sapiens
gaaaagattatgtca

SEQ ID NO: 1830355 - DNA, 15 bp, Homo sapiens
aaaagattatgtcag

SEQ ID NO: 1830356 - DNA, 15 bp, Homo sapiens
aaagattatgtcagg

SEQ ID NO: 1830357 - DNA, 15 bp, Homo sapiens
aagattatgtcaggg

SEQ ID NO: 1830358 - DNA, 15 bp, Homo sapiens
agattatgtcaggga

SEQ ID NO: 1830359 - DNA, 15 bp, Homo sapiens
gattatgtcagggat

SEQ ID NO: 1830360 - DNA, 15 bp, Homo sapiens
attatgtcagggatg

SEQ ID NO: 1830361 - DNA, 15 bp, Homo sapiens
ttatgtcagggatga

SEQ ID NO: 1830362 - DNA, 15 bp, Homo sapiens
tatgtcagggatgaa

SEQ ID NO: 1830363 - DNA, 15 bp, Homo sapiens
atgtcagggatgaag

SEQ ID NO: 1830364 - DNA, 15 bp, Homo sapiens
tgtcagggatgaagc

SEQ ID NO: 1830365 - DNA, 15 bp, Homo sapiens
gtcagggatgaagca

SEQ ID NO: 1830366 - DNA, 15 bp, Homo sapiens
tcagggatgaagcac

SEQ ID NO: 1830367 - DNA, 15 bp, Homo sapiens
cagggatgaagcaca

SEQ ID NO: 1830368 - DNA, 15 bp, Homo sapiens
agggatgaagcacat

SEQ ID NO: 1830369 - DNA, 15 bp, Homo sapiens
gggatgaagcacatc

SEQ ID NO: 1830370 - DNA, 15 bp, Homo sapiens
ggatgaagcacatca

SEQ ID NO: 1830371 - DNA, 15 bp, Homo sapiens
gatgaagcacatcac

SEQ ID NO: 1830372 - DNA, 15 bp, Homo sapiens
atgaagcacatcaca

SEQ ID NO: 1830373 - DNA, 15 bp, Homo sapiens
tgaagcacatcacag

SEQ ID NO: 1830374 - DNA, 15 bp, Homo sapiens
gaagcacatcacagg

SEQ ID NO: 1830375 - DNA, 15 bp, Homo sapiens
aagcacatcacaggt

SEQ ID NO: 1830376 - DNA, 15 bp, Homo sapiens
agcacatcacaggtg

SEQ ID NO: 1830377 - DNA, 15 bp, Homo sapiens
gcacatcacaggtgg

SEQ ID NO: 1830378 - DNA, 15 bp, Homo sapiens
cacatcacaggtggt

SEQ ID NO: 1830379 - DNA, 15 bp, Homo sapiens
acatcacaggtggtt

SEQ ID NO: 1830380 - DNA, 15 bp, Homo sapiens
catcacaggtggtta

SEQ ID NO: 1830381 - DNA, 15 bp, Homo sapiens
atcacaggtggttac

SEQ ID NO: 1830382 - DNA, 15 bp, Homo sapiens
tcacaggtggttaca

SEQ ID NO: 1830383 - DNA, 15 bp, Homo sapiens
cacaggtggttacaa

SEQ ID NO: 1830384 - DNA, 15 bp, Homo sapiens
acaggtggttacaag

SEQ ID NO: 1830385 - DNA, 15 bp, Homo sapiens
caggtggttacaagg

SEQ ID NO: 1830386 - DNA, 15 bp, Homo sapiens
aggtggttacaaggt

SEQ ID NO: 1830387 - DNA, 15 bp, Homo sapiens
ggtggttacaaggtc

SEQ ID NO: 1830388 - DNA, 15 bp, Homo sapiens
gtggttacaaggtca

SEQ ID NO: 1830389 - DNA, 15 bp, Homo sapiens
tggttacaaggtcac

SEQ ID NO: 1830390 - DNA, 15 bp, Homo sapiens
ggttacaaggtcacc

SEQ ID NO: 1830391 - DNA, 15 bp, Homo sapiens
gttacaaggtcaccc

SEQ ID NO: 1830392 - DNA, 15 bp, Homo sapiens
ttacaaggtcaccca

SEQ ID NO: 1830393 - DNA, 15 bp, Homo sapiens
tacaaggtcacccac

SEQ ID NO: 1830394 - DNA, 15 bp, Homo sapiens
acaaggtcacccacc

SEQ ID NO: 1830395 - DNA, 15 bp, Homo sapiens
caaggtcacccacca

SEQ ID NO: 1830396 - DNA, 15 bp, Homo sapiens
aaggtcacccaccat

SEQ ID NO: 1830397 - DNA, 15 bp, Homo sapiens
aggtcacccaccatc

SEQ ID NO: 1830398 - DNA, 15 bp, Homo sapiens
ggtcacccaccatcc

SEQ ID NO: 1830399 - DNA, 15 bp, Homo sapiens
gtcacccaccatcca

SEQ ID NO: 1830400 - DNA, 15 bp, Homo sapiens
tcacccaccatccag

SEQ ID NO: 1830401 - DNA, 15 bp, Homo sapiens
cacccaccatccaga

SEQ ID NO: 1830402 - DNA, 15 bp, Homo sapiens
acccaccatccagat

SEQ ID NO: 1830403 - DNA, 15 bp, Homo sapiens
cccaccatccagatg

SEQ ID NO: 1830404 - DNA, 15 bp, Homo sapiens
ccaccatccagatgg

SEQ ID NO: 1830405 - DNA, 15 bp, Homo sapiens
caccatccagatggc

SEQ ID NO: 1830406 - DNA, 15 bp, Homo sapiens
accatccagatggct

SEQ ID NO: 1830407 - DNA, 15 bp, Homo sapiens
ccatccagatggctc

SEQ ID NO: 1830408 - DNA, 15 bp, Homo sapiens
catccagatggctca

SEQ ID NO: 1830409 - DNA, 15 bp, Homo sapiens
atccagatggctcag

SEQ ID NO: 1830410 - DNA, 15 bp, Homo sapiens
tccagatggctcaga

SEQ ID NO: 1830411 - DNA, 15 bp, Homo sapiens
ccagatggctcagaa

SEQ ID NO: 1830412 - DNA, 15 bp, Homo sapiens
cagatggctcagaaa

SEQ ID NO: 1830413 - DNA, 15 bp, Homo sapiens
agatggctcagaaag

SEQ ID NO: 1830414 - DNA, 15 bp, Homo sapiens
gatggctcagaaagc

SEQ ID NO: 1830415 - DNA, 15 bp, Homo sapiens
atggctcagaaagcc

SEQ ID NO: 1830416 - DNA, 15 bp, Homo sapiens
tggctcagaaagcca

SEQ ID NO: 1830417 - DNA, 15 bp, Homo sapiens
ggctcagaaagccaa

SEQ ID NO: 1830418 - DNA, 15 bp, Homo sapiens
gctcagaaagccaaa

SEQ ID NO: 1830419 - DNA, 15 bp, Homo sapiens
ctcagaaagccaaac

SEQ ID NO: 1830420 - DNA, 15 bp, Homo sapiens
tcagaaagccaaacc

SEQ ID NO: 1830421 - DNA, 15 bp, Homo sapiens
cagaaagccaaacct

SEQ ID NO: 1830422 - DNA, 15 bp, Homo sapiens
agaaagccaaaccta

SEQ ID NO: 1830423 - DNA, 15 bp, Homo sapiens
gaaagccaaacctat

SEQ ID NO: 1830424 - DNA, 15 bp, Homo sapiens
aaagccaaacctatg

SEQ ID NO: 1830425 - DNA, 15 bp, Homo sapiens
aagccaaacctatgg

SEQ ID NO: 1830426 - DNA, 15 bp, Homo sapiens
agccaaacctatggg

SEQ ID NO: 1830427 - DNA, 15 bp, Homo sapiens
gccaaacctatgggt

SEQ ID NO: 1830428 - DNA, 15 bp, Homo sapiens
ccaaacctatgggtt

SEQ ID NO: 1830429 - DNA, 15 bp, Homo sapiens
caaacctatgggttg

SEQ ID NO: 1830430 - DNA, 15 bp, Homo sapiens
aaacctatgggttga

SEQ ID NO: 1830431 - DNA, 15 bp, Homo sapiens
aacctatgggttgac

SEQ ID NO: 1830432 - DNA, 15 bp, Homo sapiens
acctatgggttgact

SEQ ID NO: 1830433 - DNA, 15 bp, Homo sapiens
cctatgggttgactt

SEQ ID NO: 1830434 - DNA, 15 bp, Homo sapiens
ctatgggttgacttc

SEQ ID NO: 1830435 - DNA, 15 bp, Homo sapiens
tatgggttgacttct

SEQ ID NO: 1830436 - DNA, 15 bp, Homo sapiens
atgggttgacttctc

SEQ ID NO: 1830437 - DNA, 15 bp, Homo sapiens
tgggttgacttctcc

SEQ ID NO: 1830438 - DNA, 15 bp, Homo sapiens
gggttgacttctcct

SEQ ID NO: 1830439 - DNA, 15 bp, Homo sapiens
ggttgacttctcctc

SEQ ID NO: 1830440 - DNA, 15 bp, Homo sapiens
gttgacttctcctca

SEQ ID NO: 1830441 - DNA, 15 bp, Homo sapiens
ttgacttctcctcac

SEQ ID NO: 1830442 - DNA, 15 bp, Homo sapiens
tgacttctcctcacc

SEQ ID NO: 1830443 - DNA, 15 bp, Homo sapiens
gacttctcctcaccc

SEQ ID NO: 1830444 - DNA, 15 bp, Homo sapiens
acttctcctcaccct

SEQ ID NO: 1830445 - DNA, 15 bp, Homo sapiens
cttctcctcaccctt

SEQ ID NO: 1830446 - DNA, 15 bp, Homo sapiens
ttctcctcacccttc

SEQ ID NO: 1830447 - DNA, 15 bp, Homo sapiens
tctcctcacccttct

SEQ ID NO: 1830448 - DNA, 15 bp, Homo sapiens
ctcctcacccttctg

SEQ ID NO: 1830449 - DNA, 15 bp, Homo sapiens
tcctcacccttctgg

SEQ ID NO: 1830450 - DNA, 15 bp, Homo sapiens
cctcacccttctgga

SEQ ID NO: 1830451 - DNA, 15 bp, Homo sapiens
ctcacccttctggag

SEQ ID NO: 1830452 - DNA, 15 bp, Homo sapiens
tcacccttctggaga

SEQ ID NO: 1830453 - DNA, 15 bp, Homo sapiens
cacccttctggagaa

SEQ ID NO: 1830454 - DNA, 15 bp, Homo sapiens
acccttctggagaat

SEQ ID NO: 1830455 - DNA, 15 bp, Homo sapiens
cccttctggagaatc

SEQ ID NO: 1830456 - DNA, 15 bp, Homo sapiens
ccttctggagaatca

SEQ ID NO: 1830457 - DNA, 15 bp, Homo sapiens
cttctggagaatcag

SEQ ID NO: 1830458 - DNA, 15 bp, Homo sapiens
ttctggagaatcagt

SEQ ID NO: 1830459 - DNA, 15 bp, Homo sapiens
tctggagaatcagtg

SEQ ID NO: 1830460 - DNA, 15 bp, Homo sapiens
ctggagaatcagtgt

SEQ ID NO: 1830461 - DNA, 15 bp, Homo sapiens
tggagaatcagtgtg

SEQ ID NO: 1830462 - DNA, 15 bp, Homo sapiens
ggagaatcagtgtgg

SEQ ID NO: 1830463 - DNA, 15 bp, Homo sapiens
gagaatcagtgtggt

SEQ ID NO: 1830464 - DNA, 15 bp, Homo sapiens
agaatcagtgtggta

SEQ ID NO: 1830465 - DNA, 15 bp, Homo sapiens
gaatcagtgtggtag

SEQ ID NO: 1830466 - DNA, 15 bp, Homo sapiens
aatcagtgtggtaga

SEQ ID NO: 1830467 - DNA, 15 bp, Homo sapiens
atcagtgtggtagaa

SEQ ID NO: 1830468 - DNA, 15 bp, Homo sapiens
tcagtgtggtagaag

SEQ ID NO: 1830469 - DNA, 15 bp, Homo sapiens
cagtgtggtagaaga

SEQ ID NO: 1830470 - DNA, 15 bp, Homo sapiens
agtgtggtagaagag

SEQ ID NO: 1830471 - DNA, 15 bp, Homo sapiens
gtgtggtagaagagc

SEQ ID NO: 1830472 - DNA, 15 bp, Homo sapiens
tgtggtagaagagct

SEQ ID NO: 1830473 - DNA, 15 bp, Homo sapiens
gtggtagaagagctt

SEQ ID NO: 1830474 - DNA, 15 bp, Homo sapiens
tggtagaagagcttg

SEQ ID NO: 1830475 - DNA, 15 bp, Homo sapiens
ggtagaagagcttga

SEQ ID NO: 1830476 - DNA, 15 bp, Homo sapiens
gtagaagagcttgaa

SEQ ID NO: 1830477 - DNA, 15 bp, Homo sapiens
tagaagagcttgaaa

SEQ ID NO: 1830478 - DNA, 15 bp, Homo sapiens
agaagagcttgaaaa

SEQ ID NO: 1830479 - DNA, 15 bp, Homo sapiens
gaagagcttgaaaaa

SEQ ID NO: 1830480 - DNA, 15 bp, Homo sapiens
aagagcttgaaaaag

SEQ ID NO: 1830481 - DNA, 15 bp, Homo sapiens
agagcttgaaaaagt

SEQ ID NO: 1830482 - DNA, 15 bp, Homo sapiens
gagcttgaaaaagtg

SEQ ID NO: 1830483 - DNA, 15 bp, Homo sapiens
agcttgaaaaagtgc

SEQ ID NO: 1830484 - DNA, 15 bp, Homo sapiens
gcttgaaaaagtgct

SEQ ID NO: 1830485 - DNA, 15 bp, Homo sapiens
cttgaaaaagtgctg

SEQ ID NO: 1830486 - DNA, 15 bp, Homo sapiens
ttgaaaaagtgctgg

SEQ ID NO: 1830487 - DNA, 15 bp, Homo sapiens
tgaaaaagtgctggg

SEQ ID NO: 1830488 - DNA, 15 bp, Homo sapiens
gaaaaagtgctgggt

SEQ ID NO: 1830489 - DNA, 15 bp, Homo sapiens
aaaaagtgctgggtg

SEQ ID NO: 1830490 - DNA, 15 bp, Homo sapiens
aaaagtgctgggtgt

SEQ ID NO: 1830491 - DNA, 15 bp, Homo sapiens
aaagtgctgggtgtg

SEQ ID NO: 1830492 - DNA, 15 bp, Homo sapiens
aagtgctgggtgtga

SEQ ID NO: 1830493 - DNA, 15 bp, Homo sapiens
agtgctgggtgtgac

SEQ ID NO: 1830494 - DNA, 15 bp, Homo sapiens
gtgctgggtgtgacg

SEQ ID NO: 1830495 - DNA, 15 bp, Homo sapiens
tgctgggtgtgacgc

SEQ ID NO: 1830496 - DNA, 15 bp, Homo sapiens
gctgggtgtgacgct

SEQ ID NO: 1830497 - DNA, 15 bp, Homo sapiens
ctgggtgtgacgctg

SEQ ID NO: 1830498 - DNA, 15 bp, Homo sapiens
tgggtgtgacgctgc

SEQ ID NO: 1830499 - DNA, 15 bp, Homo sapiens
gggtgtgacgctgcc

SEQ ID NO: 1830500 - DNA, 15 bp, Homo sapiens
ggtgtgacgctgcca

SEQ ID NO: 1830501 - DNA, 15 bp, Homo sapiens
gtgtgacgctgccag

SEQ ID NO: 1830502 - DNA, 15 bp, Homo sapiens
tgtgacgctgccaga

SEQ ID NO: 1830503 - DNA, 15 bp, Homo sapiens
gtgacgctgccagaa

SEQ ID NO: 1830504 - DNA, 15 bp, Homo sapiens
tgacgctgccagaaa

SEQ ID NO: 1830505 - DNA, 15 bp, Homo sapiens
gacgctgccagaaac

SEQ ID NO: 1830506 - DNA, 15 bp, Homo sapiens
acgctgccagaaact

SEQ ID NO: 1830507 - DNA, 15 bp, Homo sapiens
cgctgccagaaacta

SEQ ID NO: 1830508 - DNA, 15 bp, Homo sapiens
gctgccagaaactaa

SEQ ID NO: 1830509 - DNA, 15 bp, Homo sapiens
ctgccagaaactaac

SEQ ID NO: 1830510 - DNA, 15 bp, Homo sapiens
tgccagaaactaacc

SEQ ID NO: 1830511 - DNA, 15 bp, Homo sapiens
gccagaaactaacct

SEQ ID NO: 1830512 - DNA, 15 bp, Homo sapiens
ccagaaactaacctc

SEQ ID NO: 1830513 - DNA, 15 bp, Homo sapiens
cagaaactaacctct

SEQ ID NO: 1830514 - DNA, 15 bp, Homo sapiens
agaaactaacctctt

SEQ ID NO: 1830515 - DNA, 15 bp, Homo sapiens
gaaactaacctcttt

SEQ ID NO: 1830516 - DNA, 15 bp, Homo sapiens
aaactaacctctttg

SEQ ID NO: 1830517 - DNA, 15 bp, Homo sapiens
aactaacctctttgg

SEQ ID NO: 1830518 - DNA, 15 bp, Homo sapiens
actaacctctttgga

SEQ ID NO: 1830519 - DNA, 15 bp, Homo sapiens
ctaacctctttggaa

SEQ ID NO: 1830520 - DNA, 15 bp, Homo sapiens
taacctctttggaac

SEQ ID NO: 1830521 - DNA, 15 bp, Homo sapiens
aacctctttggaact

SEQ ID NO: 1830522 - DNA, 15 bp, Homo sapiens
acctctttggaactg

SEQ ID NO: 1830523 - DNA, 15 bp, Homo sapiens
cctctttggaactga

SEQ ID NO: 1830524 - DNA, 15 bp, Homo sapiens
ctctttggaactgaa

SEQ ID NO: 1830525 - DNA, 15 bp, Homo sapiens
tctttggaactgaag

SEQ ID NO: 1830526 - DNA, 15 bp, Homo sapiens
ctttggaactgaaga

SEQ ID NO: 1830527 - DNA, 15 bp, Homo sapiens
tttggaactgaagaa

SEQ ID NO: 1830528 - DNA, 15 bp, Homo sapiens
ttggaactgaagaaa

SEQ ID NO: 1830529 - DNA, 15 bp, Homo sapiens
tggaactgaagaaac

SEQ ID NO: 1830530 - DNA, 15 bp, Homo sapiens
ggaactgaagaaact

SEQ ID NO: 1830531 - DNA, 15 bp, Homo sapiens
gaactgaagaaactc

SEQ ID NO: 1830532 - DNA, 15 bp, Homo sapiens
aactgaagaaactca

SEQ ID NO: 1830533 - DNA, 15 bp, Homo sapiens
actgaagaaactcaa

SEQ ID NO: 1830534 - DNA, 15 bp, Homo sapiens
ctgaagaaactcaaa

SEQ ID NO: 1830535 - DNA, 15 bp, Homo sapiens
tgaagaaactcaaaa

SEQ ID NO: 1830536 - DNA, 15 bp, Homo sapiens
gaagaaactcaaaaa

SEQ ID NO: 1830537 - DNA, 15 bp, Homo sapiens
aagaaactcaaaaaa

SEQ ID NO: 1830538 - DNA, 15 bp, Homo sapiens
agaaactcaaaaaat

SEQ ID NO: 1830539 - DNA, 15 bp, Homo sapiens
gaaactcaaaaaatt

SEQ ID NO: 1830540 - DNA, 15 bp, Homo sapiens
aaactcaaaaaatta

SEQ ID NO: 1830541 - DNA, 15 bp, Homo sapiens
aactcaaaaaattat

SEQ ID NO: 1830542 - DNA, 15 bp, Homo sapiens
actcaaaaaattatt

SEQ ID NO: 1830543 - DNA, 15 bp, Homo sapiens
ctcaaaaaattattg

SEQ ID NO: 1830544 - DNA, 15 bp, Homo sapiens
tcaaaaaattattgg

SEQ ID NO: 1830545 - DNA, 15 bp, Homo sapiens
caaaaaattattggt

SEQ ID NO: 1830546 - DNA, 15 bp, Homo sapiens
aaaaaattattggtg

SEQ ID NO: 1830547 - DNA, 15 bp, Homo sapiens
aaaaattattggtga

SEQ ID NO: 1830548 - DNA, 15 bp, Homo sapiens
aaaattattggtgat

SEQ ID NO: 1830549 - DNA, 15 bp, Homo sapiens
aaattattggtgata

SEQ ID NO: 1830550 - DNA, 15 bp, Homo sapiens
aattattggtgatat

SEQ ID NO: 1830551 - DNA, 15 bp, Homo sapiens
attattggtgatatc

SEQ ID NO: 1830552 - DNA, 15 bp, Homo sapiens
ttattggtgatatct

SEQ ID NO: 1830553 - DNA, 15 bp, Homo sapiens
tattggtgatatcta

SEQ ID NO: 1830554 - DNA, 15 bp, Homo sapiens
attggtgatatctat

SEQ ID NO: 1830555 - DNA, 15 bp, Homo sapiens
ttggtgatatctatg

SEQ ID NO: 1830556 - DNA, 15 bp, Homo sapiens
tggtgatatctatgt

SEQ ID NO: 1830557 - DNA, 15 bp, Homo sapiens
ggtgatatctatgta

SEQ ID NO: 1830558 - DNA, 15 bp, Homo sapiens
gtgatatctatgtaa

SEQ ID NO: 1830559 - DNA, 15 bp, Homo sapiens
tgatatctatgtaac

SEQ ID NO: 1830560 - DNA, 15 bp, Homo sapiens
gatatctatgtaaca

SEQ ID NO: 1830561 - DNA, 15 bp, Homo sapiens
atatctatgtaacaa

SEQ ID NO: 1830562 - DNA, 15 bp, Homo sapiens
tatctatgtaacaaa

SEQ ID NO: 1830563 - DNA, 15 bp, Homo sapiens
atctatgtaacaaaa

SEQ ID NO: 1830564 - DNA, 15 bp, Homo sapiens
tctatgtaacaaaag

SEQ ID NO: 1830565 - DNA, 15 bp, Homo sapiens
ctatgtaacaaaagc

SEQ ID NO: 1830566 - DNA, 15 bp, Homo sapiens
tatgtaacaaaagct

SEQ ID NO: 1830567 - DNA, 15 bp, Homo sapiens
atgtaacaaaagctt

SEQ ID NO: 1830568 - DNA, 15 bp, Homo sapiens
tgtaacaaaagcttt

SEQ ID NO: 1830569 - DNA, 15 bp, Homo sapiens
gtaacaaaagctttt

SEQ ID NO: 1830570 - DNA, 15 bp, Homo sapiens
taacaaaagcttttg

SEQ ID NO: 1830571 - DNA, 15 bp, Homo sapiens
aacaaaagcttttga

SEQ ID NO: 1830572 - DNA, 15 bp, Homo sapiens
acaaaagcttttgaa

SEQ ID NO: 1830573 - DNA, 15 bp, Homo sapiens
caaaagcttttgaaa

SEQ ID NO: 1830574 - DNA, 15 bp, Homo sapiens
aaaagcttttgaaag

SEQ ID NO: 1830575 - DNA, 15 bp, Homo sapiens
aaagcttttgaaagt

SEQ ID NO: 1830576 - DNA, 15 bp, Homo sapiens
aagcttttgaaagtc

SEQ ID NO: 1830577 - DNA, 15 bp, Homo sapiens
agcttttgaaagtct

SEQ ID NO: 1830578 - DNA, 15 bp, Homo sapiens
gcttttgaaagtctt

SEQ ID NO: 1830579 - DNA, 15 bp, Homo sapiens
cttttgaaagtcttc

SEQ ID NO: 1830580 - DNA, 15 bp, Homo sapiens
ttttgaaagtcttct

SEQ ID NO: 1830581 - DNA, 15 bp, Homo sapiens
tttgaaagtcttcta

SEQ ID NO: 1830582 - DNA, 15 bp, Homo sapiens
ttgaaagtcttctac

SEQ ID NO: 1830583 - DNA, 15 bp, Homo sapiens
tgaaagtcttctacc

SEQ ID NO: 1830584 - DNA, 15 bp, Homo sapiens
gaaagtcttctacct

SEQ ID NO: 1830585 - DNA, 15 bp, Homo sapiens
aaagtcttctacctc

SEQ ID NO: 1830586 - DNA, 15 bp, Homo sapiens
aagtcttctacctca

SEQ ID NO: 1830587 - DNA, 15 bp, Homo sapiens
agtcttctacctcag

SEQ ID NO: 1830588 - DNA, 15 bp, Homo sapiens
gtcttctacctcaga

SEQ ID NO: 1830589 - DNA, 15 bp, Homo sapiens
tcttctacctcagaa

SEQ ID NO: 1830590 - DNA, 15 bp, Homo sapiens
cttctacctcagaac

SEQ ID NO: 1830591 - DNA, 15 bp, Homo sapiens
ttctacctcagaaca

SEQ ID NO: 1830592 - DNA, 15 bp, Homo sapiens
tctacctcagaacat

SEQ ID NO: 1830593 - DNA, 15 bp, Homo sapiens
ctacctcagaacata

SEQ ID NO: 1830594 - DNA, 15 bp, Homo sapiens
tacctcagaacatat

SEQ ID NO: 1830595 - DNA, 15 bp, Homo sapiens
acctcagaacatatt

SEQ ID NO: 1830596 - DNA, 15 bp, Homo sapiens
cctcagaacatattc

SEQ ID NO: 1830597 - DNA, 15 bp, Homo sapiens
ctcagaacatattca

SEQ ID NO: 1830598 - DNA, 15 bp, Homo sapiens
tcagaacatattcag

SEQ ID NO: 1830599 - DNA, 15 bp, Homo sapiens
cagaacatattcagg

SEQ ID NO: 1830600 - DNA, 15 bp, Homo sapiens
agaacatattcaggc

SEQ ID NO: 1830601 - DNA, 15 bp, Homo sapiens
gaacatattcaggcg

SEQ ID NO: 1830602 - DNA, 15 bp, Homo sapiens
aacatattcaggcgc

SEQ ID NO: 1830603 - DNA, 15 bp, Homo sapiens
acatattcaggcgcc

SEQ ID NO: 1830604 - DNA, 15 bp, Homo sapiens
catattcaggcgcct

SEQ ID NO: 1830605 - DNA, 15 bp, Homo sapiens
atattcaggcgcctt

SEQ ID NO: 1830606 - DNA, 15 bp, Homo sapiens
tattcaggcgccttg

SEQ ID NO: 1830607 - DNA, 15 bp, Homo sapiens
attcaggcgccttga

SEQ ID NO: 1830608 - DNA, 15 bp, Homo sapiens
ttcaggcgccttgat

SEQ ID NO: 1830609 - DNA, 15 bp, Homo sapiens
tcaggcgccttgata

SEQ ID NO: 1830610 - DNA, 15 bp, Homo sapiens
caggcgccttgataa

SEQ ID NO: 1830611 - DNA, 15 bp, Homo sapiens
aggcgccttgataaa

SEQ ID NO: 1830612 - DNA, 15 bp, Homo sapiens
ggcgccttgataaac

SEQ ID NO: 1830613 - DNA, 15 bp, Homo sapiens
gcgccttgataaact

SEQ ID NO: 1830614 - DNA, 15 bp, Homo sapiens
cgccttgataaactt

SEQ ID NO: 1830615 - DNA, 15 bp, Homo sapiens
gccttgataaacttg

SEQ ID NO: 1830616 - DNA, 15 bp, Homo sapiens
ccttgataaacttgt

SEQ ID NO: 1830617 - DNA, 15 bp, Homo sapiens
cttgataaacttgtc

SEQ ID NO: 1830618 - DNA, 15 bp, Homo sapiens
ttgataaacttgtca

SEQ ID NO: 1830619 - DNA, 15 bp, Homo sapiens
tgataaacttgtcaa

SEQ ID NO: 1830620 - DNA, 15 bp, Homo sapiens
gataaacttgtcaag

SEQ ID NO: 1830621 - DNA, 15 bp, Homo sapiens
ataaacttgtcaagg

SEQ ID NO: 1830622 - DNA, 15 bp, Homo sapiens
taaacttgtcaagga

SEQ ID NO: 1830623 - DNA, 15 bp, Homo sapiens
aaacttgtcaaggag

SEQ ID NO: 1830624 - DNA, 15 bp, Homo sapiens
aacttgtcaaggagt

SEQ ID NO: 1830625 - DNA, 15 bp, Homo sapiens
acttgtcaaggagtt

SEQ ID NO: 1830626 - DNA, 15 bp, Homo sapiens
cttgtcaaggagttc

SEQ ID NO: 1830627 - DNA, 15 bp, Homo sapiens
ttgtcaaggagttcc

SEQ ID NO: 1830628 - DNA, 15 bp, Homo sapiens
tgtcaaggagttcct

SEQ ID NO: 1830629 - DNA, 15 bp, Homo sapiens
gtcaaggagttcctg

SEQ ID NO: 1830630 - DNA, 15 bp, Homo sapiens
tcaaggagttcctga

SEQ ID NO: 1830631 - DNA, 15 bp, Homo sapiens
caaggagttcctgaa

SEQ ID NO: 1830632 - DNA, 15 bp, Homo sapiens
aaggagttcctgaaa

SEQ ID NO: 1830633 - DNA, 15 bp, Homo sapiens
aggagttcctgaaag

SEQ ID NO: 1830634 - DNA, 15 bp, Homo sapiens
ggagttcctgaaagt

SEQ ID NO: 1830635 - DNA, 15 bp, Homo sapiens
gagttcctgaaagtg

SEQ ID NO: 1830636 - DNA, 15 bp, Homo sapiens
agttcctgaaagtga

SEQ ID NO: 1830637 - DNA, 15 bp, Homo sapiens
gttcctgaaagtgac

SEQ ID NO: 1830638 - DNA, 15 bp, Homo sapiens
ttcctgaaagtgact

SEQ ID NO: 1830639 - DNA, 15 bp, Homo sapiens
tcctgaaagtgactt

SEQ ID NO: 1830640 - DNA, 15 bp, Homo sapiens
cctgaaagtgactta

SEQ ID NO: 1830641 - DNA, 15 bp, Homo sapiens
ctgaaagtgacttac

SEQ ID NO: 1830642 - DNA, 15 bp, Homo sapiens
tgaaagtgacttaca

SEQ ID NO: 1830643 - DNA, 15 bp, Homo sapiens
gaaagtgacttacat

SEQ ID NO: 1830644 - DNA, 15 bp, Homo sapiens
aaagtgacttacatc

SEQ ID NO: 1830645 - DNA, 15 bp, Homo sapiens
aagtgacttacatca

SEQ ID NO: 1830646 - DNA, 15 bp, Homo sapiens
agtgacttacatcag

SEQ ID NO: 1830647 - DNA, 15 bp, Homo sapiens
gtgacttacatcagt

SEQ ID NO: 1830648 - DNA, 15 bp, Homo sapiens
tgacttacatcagtc

SEQ ID NO: 1830649 - DNA, 15 bp, Homo sapiens
gacttacatcagtcc

SEQ ID NO: 1830650 - DNA, 15 bp, Homo sapiens
acttacatcagtccc

SEQ ID NO: 1830651 - DNA, 15 bp, Homo sapiens
cttacatcagtccca

SEQ ID NO: 1830652 - DNA, 15 bp, Homo sapiens
ttacatcagtcccac

SEQ ID NO: 1830653 - DNA, 15 bp, Homo sapiens
tacatcagtcccaca

SEQ ID NO: 1830654 - DNA, 15 bp, Homo sapiens
acatcagtcccacat

SEQ ID NO: 1830655 - DNA, 15 bp, Homo sapiens
catcagtcccacatt

SEQ ID NO: 1830656 - DNA, 15 bp, Homo sapiens
atcagtcccacattt

SEQ ID NO: 1830657 - DNA, 15 bp, Homo sapiens
tcagtcccacattta

SEQ ID NO: 1830658 - DNA, 15 bp, Homo sapiens
cagtcccacatttat

SEQ ID NO: 1830659 - DNA, 15 bp, Homo sapiens
agtcccacatttatc

SEQ ID NO: 1830660 - DNA, 15 bp, Homo sapiens
gtcccacatttatct

SEQ ID NO: 1830661 - DNA, 15 bp, Homo sapiens
tcccacatttatctg

SEQ ID NO: 1830662 - DNA, 15 bp, Homo sapiens
cccacatttatctgt

SEQ ID NO: 1830663 - DNA, 15 bp, Homo sapiens
ccacatttatctgtt

SEQ ID NO: 1830664 - DNA, 15 bp, Homo sapiens
cacatttatctgtta

SEQ ID NO: 1830665 - DNA, 15 bp, Homo sapiens
acatttatctgttat

SEQ ID NO: 1830666 - DNA, 15 bp, Homo sapiens
catttatctgttatc

SEQ ID NO: 1830667 - DNA, 15 bp, Homo sapiens
atttatctgttatca

SEQ ID NO: 1830668 - DNA, 15 bp, Homo sapiens
tttatctgttatcac

SEQ ID NO: 1830669 - DNA, 15 bp, Homo sapiens
ttatctgttatcacc

SEQ ID NO: 1830670 - DNA, 15 bp, Homo sapiens
tatctgttatcacct

SEQ ID NO: 1830671 - DNA, 15 bp, Homo sapiens
atctgttatcacctg

SEQ ID NO: 1830672 - DNA, 15 bp, Homo sapiens
tctgttatcacctgc

SEQ ID NO: 1830673 - DNA, 15 bp, Homo sapiens
ctgttatcacctgca

SEQ ID NO: 1830674 - DNA, 15 bp, Homo sapiens
tgttatcacctgcag

SEQ ID NO: 1830675 - DNA, 15 bp, Homo sapiens
gttatcacctgcaga

SEQ ID NO: 1830676 - DNA, 15 bp, Homo sapiens
ttatcacctgcagat

SEQ ID NO: 1830677 - DNA, 15 bp, Homo sapiens
tatcacctgcagata

SEQ ID NO: 1830678 - DNA, 15 bp, Homo sapiens
atcacctgcagataa

SEQ ID NO: 1830679 - DNA, 15 bp, Homo sapiens
tcacctgcagataat

SEQ ID NO: 1830680 - DNA, 15 bp, Homo sapiens
cacctgcagataatg

SEQ ID NO: 1830681 - DNA, 15 bp, Homo sapiens
acctgcagataatga

SEQ ID NO: 1830682 - DNA, 15 bp, Homo sapiens
cctgcagataatgag

SEQ ID NO: 1830683 - DNA, 15 bp, Homo sapiens
ctgcagataatgagc

SEQ ID NO: 1830684 - DNA, 15 bp, Homo sapiens
tgcagataatgagct

SEQ ID NO: 1830685 - DNA, 15 bp, Homo sapiens
gcagataatgagctc

SEQ ID NO: 1830686 - DNA, 15 bp, Homo sapiens
cagataatgagctct

SEQ ID NO: 1830687 - DNA, 15 bp, Homo sapiens
agataatgagctctt

SEQ ID NO: 1830688 - DNA, 15 bp, Homo sapiens
gataatgagctcttt

SEQ ID NO: 1830689 - DNA, 15 bp, Homo sapiens
ataatgagctctttg

SEQ ID NO: 1830690 - DNA, 15 bp, Homo sapiens
taatgagctctttga

SEQ ID NO: 1830691 - DNA, 15 bp, Homo sapiens
aatgagctctttgac

SEQ ID NO: 1830692 - DNA, 15 bp, Homo sapiens
atgagctctttgacc

SEQ ID NO: 1830693 - DNA, 15 bp, Homo sapiens
tgagctctttgacca

SEQ ID NO: 1830694 - DNA, 15 bp, Homo sapiens
gagctctttgaccaa

SEQ ID NO: 1830695 - DNA, 15 bp, Homo sapiens
agctctttgaccaaa

SEQ ID NO: 1830696 - DNA, 15 bp, Homo sapiens
gctctttgaccaaat

SEQ ID NO: 1830697 - DNA, 15 bp, Homo sapiens
ctctttgaccaaatg

SEQ ID NO: 1830698 - DNA, 15 bp, Homo sapiens
tctttgaccaaatga

SEQ ID NO: 1830699 - DNA, 15 bp, Homo sapiens
ctttgaccaaatgat

SEQ ID NO: 1830700 - DNA, 15 bp, Homo sapiens
tttgaccaaatgatc

SEQ ID NO: 1830701 - DNA, 15 bp, Homo sapiens
ttgaccaaatgatct

SEQ ID NO: 1830702 - DNA, 15 bp, Homo sapiens
tgaccaaatgatctc

SEQ ID NO: 1830703 - DNA, 15 bp, Homo sapiens
gaccaaatgatctct

SEQ ID NO: 1830704 - DNA, 15 bp, Homo sapiens
accaaatgatctctc

SEQ ID NO: 1830705 - DNA, 15 bp, Homo sapiens
ccaaatgatctctct

SEQ ID NO: 1830706 - DNA, 15 bp, Homo sapiens
caaatgatctctcta

SEQ ID NO: 1830707 - DNA, 15 bp, Homo sapiens
aaatgatctctctaa

SEQ ID NO: 1830708 - DNA, 15 bp, Homo sapiens
aatgatctctctaag

SEQ ID NO: 1830709 - DNA, 15 bp, Homo sapiens
atgatctctctaaga

SEQ ID NO: 1830710 - DNA, 15 bp, Homo sapiens
tgatctctctaagag

SEQ ID NO: 1830711 - DNA, 15 bp, Homo sapiens
gatctctctaagagg

SEQ ID NO: 1830712 - DNA, 15 bp, Homo sapiens
atctctctaagaggg

SEQ ID NO: 1830713 - DNA, 15 bp, Homo sapiens
tctctctaagagggt

SEQ ID NO: 1830714 - DNA, 15 bp, Homo sapiens
ctctctaagagggtc

SEQ ID NO: 1830715 - DNA, 15 bp, Homo sapiens
tctctaagagggtct

SEQ ID NO: 1830716 - DNA, 15 bp, Homo sapiens
ctctaagagggtctc

SEQ ID NO: 1830717 - DNA, 15 bp, Homo sapiens
tctaagagggtctca

SEQ ID NO: 1830718 - DNA, 15 bp, Homo sapiens
ctaagagggtctcac

SEQ ID NO: 1830719 - DNA, 15 bp, Homo sapiens
taagagggtctcact

SEQ ID NO: 1830720 - DNA, 15 bp, Homo sapiens
aagagggtctcactg

SEQ ID NO: 1830721 - DNA, 15 bp, Homo sapiens
agagggtctcactga

SEQ ID NO: 1830722 - DNA, 15 bp, Homo sapiens
gagggtctcactgag

SEQ ID NO: 1830723 - DNA, 15 bp, Homo sapiens
agggtctcactgagc

SEQ ID NO: 1830724 - DNA, 15 bp, Homo sapiens
gggtctcactgagca

SEQ ID NO: 1830725 - DNA, 15 bp, Homo sapiens
ggtctcactgagcac

SEQ ID NO: 1830726 - DNA, 15 bp, Homo sapiens
gtctcactgagcact

SEQ ID NO: 1830727 - DNA, 15 bp, Homo sapiens
tctcactgagcactt

SEQ ID NO: 1830728 - DNA, 15 bp, Homo sapiens
ctcactgagcacttt

SEQ ID NO: 1830729 - DNA, 15 bp, Homo sapiens
tcactgagcactttg

SEQ ID NO: 1830730 - DNA, 15 bp, Homo sapiens
cactgagcactttga

SEQ ID NO: 1830731 - DNA, 15 bp, Homo sapiens
actgagcactttgag

SEQ ID NO: 1830732 - DNA, 15 bp, Homo sapiens
ctgagcactttgagc

SEQ ID NO: 1830733 - DNA, 15 bp, Homo sapiens
tgagcactttgagct

SEQ ID NO: 1830734 - DNA, 15 bp, Homo sapiens
gagcactttgagcta

SEQ ID NO: 1830735 - DNA, 15 bp, Homo sapiens
agcactttgagctat

SEQ ID NO: 1830736 - DNA, 15 bp, Homo sapiens
gcactttgagctatt

SEQ ID NO: 1830737 - DNA, 15 bp, Homo sapiens
cactttgagctattt

SEQ ID NO: 1830738 - DNA, 15 bp, Homo sapiens
actttgagctatttg

SEQ ID NO: 1830739 - DNA, 15 bp, Homo sapiens
ctttgagctatttgt

SEQ ID NO: 1830740 - DNA, 15 bp, Homo sapiens
tttgagctatttgtc

SEQ ID NO: 1830741 - DNA, 15 bp, Homo sapiens
ttgagctatttgtca

SEQ ID NO: 1830742 - DNA, 15 bp, Homo sapiens
tgagctatttgtcat

SEQ ID NO: 1830743 - DNA, 15 bp, Homo sapiens
gagctatttgtcatg

SEQ ID NO: 1830744 - DNA, 15 bp, Homo sapiens
agctatttgtcatga

SEQ ID NO: 1830745 - DNA, 15 bp, Homo sapiens
gctatttgtcatgaa

SEQ ID NO: 1830746 - DNA, 15 bp, Homo sapiens
ctatttgtcatgaag

SEQ ID NO: 1830747 - DNA, 15 bp, Homo sapiens
tatttgtcatgaaga

SEQ ID NO: 1830748 - DNA, 15 bp, Homo sapiens
atttgtcatgaagat

SEQ ID NO: 1830749 - DNA, 15 bp, Homo sapiens
tttgtcatgaagata

SEQ ID NO: 1830750 - DNA, 15 bp, Homo sapiens
ttgtcatgaagatag

SEQ ID NO: 1830751 - DNA, 15 bp, Homo sapiens
tgtcatgaagatagc

SEQ ID NO: 1830752 - DNA, 15 bp, Homo sapiens
gtcatgaagatagct

SEQ ID NO: 1830753 - DNA, 15 bp, Homo sapiens
tcatgaagatagctg

SEQ ID NO: 1830754 - DNA, 15 bp, Homo sapiens
catgaagatagctga

SEQ ID NO: 1830755 - DNA, 15 bp, Homo sapiens
atgaagatagctgaa

SEQ ID NO: 1830756 - DNA, 15 bp, Homo sapiens
tgaagatagctgaat

SEQ ID NO: 1830757 - DNA, 15 bp, Homo sapiens
gaagatagctgaatg

SEQ ID NO: 1830758 - DNA, 15 bp, Homo sapiens
aagatagctgaatgt

SEQ ID NO: 1830759 - DNA, 15 bp, Homo sapiens
agatagctgaatgtt

SEQ ID NO: 1830760 - DNA, 15 bp, Homo sapiens
gatagctgaatgttt

SEQ ID NO: 1830761 - DNA, 15 bp, Homo sapiens
atagctgaatgtttc

SEQ ID NO: 1830762 - DNA, 15 bp, Homo sapiens
tagctgaatgtttcc

SEQ ID NO: 1830763 - DNA, 15 bp, Homo sapiens
agctgaatgtttcca

SEQ ID NO: 1830764 - DNA, 15 bp, Homo sapiens
gctgaatgtttccat

SEQ ID NO: 1830765 - DNA, 15 bp, Homo sapiens
ctgaatgtttccatg

SEQ ID NO: 1830766 - DNA, 15 bp, Homo sapiens
tgaatgtttccatgc

SEQ ID NO: 1830767 - DNA, 15 bp, Homo sapiens
gaatgtttccatgca

SEQ ID NO: 1830768 - DNA, 15 bp, Homo sapiens
aatgtttccatgcag

SEQ ID NO: 1830769 - DNA, 15 bp, Homo sapiens
atgtttccatgcagc

SEQ ID NO: 1830770 - DNA, 15 bp, Homo sapiens
tgtttccatgcagca

SEQ ID NO: 1830771 - DNA, 15 bp, Homo sapiens
gtttccatgcagcaa

SEQ ID NO: 1830772 - DNA, 15 bp, Homo sapiens
tttccatgcagcaac

SEQ ID NO: 1830773 - DNA, 15 bp, Homo sapiens
ttccatgcagcaaca

SEQ ID NO: 1830774 - DNA, 15 bp, Homo sapiens
tccatgcagcaacag

SEQ ID NO: 1830775 - DNA, 15 bp, Homo sapiens
ccatgcagcaacagc

SEQ ID NO: 1830776 - DNA, 15 bp, Homo sapiens
catgcagcaacagca

SEQ ID NO: 1830777 - DNA, 15 bp, Homo sapiens
atgcagcaacagcag

SEQ ID NO: 1830778 - DNA, 15 bp, Homo sapiens
tgcagcaacagcagc

SEQ ID NO: 1830779 - DNA, 15 bp, Homo sapiens
gcagcaacagcagca

SEQ ID NO: 1830780 - DNA, 15 bp, Homo sapiens
cagcaacagcagcag

SEQ ID NO: 1830781 - DNA, 15 bp, Homo sapiens
agcaacagcagcagc

SEQ ID NO: 1830782 - DNA, 15 bp, Homo sapiens
gcaacagcagcagct

SEQ ID NO: 1830783 - DNA, 15 bp, Homo sapiens
caacagcagcagctg

SEQ ID NO: 1830784 - DNA, 15 bp, Homo sapiens
aacagcagcagctgt

SEQ ID NO: 1830785 - DNA, 15 bp, Homo sapiens
acagcagcagctgtt

SEQ ID NO: 1830786 - DNA, 15 bp, Homo sapiens
cagcagcagctgttg

SEQ ID NO: 1830787 - DNA, 15 bp, Homo sapiens
agcagcagctgttga

SEQ ID NO: 1830788 - DNA, 15 bp, Homo sapiens
gcagcagctgttgac

SEQ ID NO: 1830789 - DNA, 15 bp, Homo sapiens
cagcagctgttgaca

SEQ ID NO: 1830790 - DNA, 15 bp, Homo sapiens
agcagctgttgacaa

SEQ ID NO: 1830791 - DNA, 15 bp, Homo sapiens
gcagctgttgacaaa

SEQ ID NO: 1830792 - DNA, 15 bp, Homo sapiens
cagctgttgacaaac

SEQ ID NO: 1830793 - DNA, 15 bp, Homo sapiens
agctgttgacaaaca

SEQ ID NO: 1830794 - DNA, 15 bp, Homo sapiens
gctgttgacaaacaa

SEQ ID NO: 1830795 - DNA, 15 bp, Homo sapiens
ctgttgacaaacaag

SEQ ID NO: 1830796 - DNA, 15 bp, Homo sapiens
tgttgacaaacaaga

SEQ ID NO: 1830797 - DNA, 15 bp, Homo sapiens
gttgacaaacaagac

SEQ ID NO: 1830798 - DNA, 15 bp, Homo sapiens
ttgacaaacaagaca

SEQ ID NO: 1830799 - DNA, 15 bp, Homo sapiens
tgacaaacaagacaa

SEQ ID NO: 1830800 - DNA, 15 bp, Homo sapiens
gacaaacaagacaag

SEQ ID NO: 1830801 - DNA, 15 bp, Homo sapiens
acaaacaagacaagg

SEQ ID NO: 1830802 - DNA, 15 bp, Homo sapiens
caaacaagacaaggc

SEQ ID NO: 1830803 - DNA, 15 bp, Homo sapiens
aaacaagacaaggcc

SEQ ID NO: 1830804 - DNA, 15 bp, Homo sapiens
aacaagacaaggcca

SEQ ID NO: 1830805 - DNA, 15 bp, Homo sapiens
acaagacaaggccag

SEQ ID NO: 1830806 - DNA, 15 bp, Homo sapiens
caagacaaggccagc

SEQ ID NO: 1830807 - DNA, 15 bp, Homo sapiens
aagacaaggccagca

SEQ ID NO: 1830808 - DNA, 15 bp, Homo sapiens
agacaaggccagcaa

SEQ ID NO: 1830809 - DNA, 15 bp, Homo sapiens
gacaaggccagcaaa

SEQ ID NO: 1830810 - DNA, 15 bp, Homo sapiens
acaaggccagcaaag

SEQ ID NO: 1830811 - DNA, 15 bp, Homo sapiens
caaggccagcaaaga

SEQ ID NO: 1830812 - DNA, 15 bp, Homo sapiens
aaggccagcaaagat

SEQ ID NO: 1830813 - DNA, 15 bp, Homo sapiens
aggccagcaaagatg

SEQ ID NO: 1830814 - DNA, 15 bp, Homo sapiens
ggccagcaaagatga

SEQ ID NO: 1830815 - DNA, 15 bp, Homo sapiens
gccagcaaagatgat

SEQ ID NO: 1830816 - DNA, 15 bp, Homo sapiens
ccagcaaagatgatg

SEQ ID NO: 1830817 - DNA, 15 bp, Homo sapiens
cagcaaagatgatga

SEQ ID NO: 1830818 - DNA, 15 bp, Homo sapiens
agcaaagatgatgag

SEQ ID NO: 1830819 - DNA, 15 bp, Homo sapiens
gcaaagatgatgagg

SEQ ID NO: 1830820 - DNA, 15 bp, Homo sapiens
caaagatgatgaggc

SEQ ID NO: 1830821 - DNA, 15 bp, Homo sapiens
aaagatgatgaggcc

SEQ ID NO: 1830822 - DNA, 15 bp, Homo sapiens
aagatgatgaggcca

SEQ ID NO: 1830823 - DNA, 15 bp, Homo sapiens
agatgatgaggccac

SEQ ID NO: 1830824 - DNA, 15 bp, Homo sapiens
gatgatgaggccaca

SEQ ID NO: 1830825 - DNA, 15 bp, Homo sapiens
atgatgaggccacat

SEQ ID NO: 1830826 - DNA, 15 bp, Homo sapiens
tgatgaggccacatt

SEQ ID NO: 1830827 - DNA, 15 bp, Homo sapiens
gatgaggccacattc

SEQ ID NO: 1830828 - DNA, 15 bp, Homo sapiens
atgaggccacattca

SEQ ID NO: 1830829 - DNA, 15 bp, Homo sapiens
tgaggccacattcat

SEQ ID NO: 1830830 - DNA, 15 bp, Homo sapiens
gaggccacattcata

SEQ ID NO: 1830831 - DNA, 15 bp, Homo sapiens
aggccacattcatag

SEQ ID NO: 1830832 - DNA, 15 bp, Homo sapiens
ggccacattcataga

SEQ ID NO: 1830833 - DNA, 15 bp, Homo sapiens
gccacattcatagat

SEQ ID NO: 1830834 - DNA, 15 bp, Homo sapiens
ccacattcatagatg

SEQ ID NO: 1830835 - DNA, 15 bp, Homo sapiens
cacattcatagatga

SEQ ID NO: 1830836 - DNA, 15 bp, Homo sapiens
acattcatagatgaa

SEQ ID NO: 1830837 - DNA, 15 bp, Homo sapiens
cattcatagatgaaa

SEQ ID NO: 1830838 - DNA, 15 bp, Homo sapiens
attcatagatgaaag

SEQ ID NO: 1830839 - DNA, 15 bp, Homo sapiens
ttcatagatgaaagc

SEQ ID NO: 1830840 - DNA, 15 bp, Homo sapiens
tcatagatgaaagct

SEQ ID NO: 1830841 - DNA, 15 bp, Homo sapiens
catagatgaaagctt

SEQ ID NO: 1830842 - DNA, 15 bp, Homo sapiens
atagatgaaagcttc

SEQ ID NO: 1830843 - DNA, 15 bp, Homo sapiens
tagatgaaagcttcc

SEQ ID NO: 1830844 - DNA, 15 bp, Homo sapiens
agatgaaagcttcca

SEQ ID NO: 1830845 - DNA, 15 bp, Homo sapiens
gatgaaagcttccat

SEQ ID NO: 1830846 - DNA, 15 bp, Homo sapiens
atgaaagcttccatg

SEQ ID NO: 1830847 - DNA, 15 bp, Homo sapiens
tgaaagcttccatgc

SEQ ID NO: 1830848 - DNA, 15 bp, Homo sapiens
gaaagcttccatgca

SEQ ID NO: 1830849 - DNA, 15 bp, Homo sapiens
aaagcttccatgcaa

SEQ ID NO: 1830850 - DNA, 15 bp, Homo sapiens
aagcttccatgcaac

SEQ ID NO: 1830851 - DNA, 15 bp, Homo sapiens
agcttccatgcaacc

SEQ ID NO: 1830852 - DNA, 15 bp, Homo sapiens
gcttccatgcaaccc

SEQ ID NO: 1830853 - DNA, 15 bp, Homo sapiens
cttccatgcaaccct

SEQ ID NO: 1830854 - DNA, 15 bp, Homo sapiens
ttccatgcaaccctg

SEQ ID NO: 1830855 - DNA, 15 bp, Homo sapiens
tccatgcaaccctgg

SEQ ID NO: 1830856 - DNA, 15 bp, Homo sapiens
ccatgcaaccctgga

SEQ ID NO: 1830857 - DNA, 15 bp, Homo sapiens
catgcaaccctggaa

SEQ ID NO: 1830858 - DNA, 15 bp, Homo sapiens
atgcaaccctggaat

SEQ ID NO: 1830859 - DNA, 15 bp, Homo sapiens
tgcaaccctggaata

SEQ ID NO: 1830860 - DNA, 15 bp, Homo sapiens
gcaaccctggaatat

SEQ ID NO: 1830861 - DNA, 15 bp, Homo sapiens
caaccctggaatatg

SEQ ID NO: 1830862 - DNA, 15 bp, Homo sapiens
aaccctggaatatgg

SEQ ID NO: 1830863 - DNA, 15 bp, Homo sapiens
accctggaatatggg

SEQ ID NO: 1830864 - DNA, 15 bp, Homo sapiens
ccctggaatatgggc

SEQ ID NO: 1830865 - DNA, 15 bp, Homo sapiens
cctggaatatgggct

SEQ ID NO: 1830866 - DNA, 15 bp, Homo sapiens
ctggaatatgggctt

SEQ ID NO: 1830867 - DNA, 15 bp, Homo sapiens
tggaatatgggcttc

SEQ ID NO: 1830868 - DNA, 15 bp, Homo sapiens
ggaatatgggcttcc

SEQ ID NO: 1830869 - DNA, 15 bp, Homo sapiens
gaatatgggcttccg

SEQ ID NO: 1830870 - DNA, 15 bp, Homo sapiens
aatatgggcttccgc

SEQ ID NO: 1830871 - DNA, 15 bp, Homo sapiens
atatgggcttccgcc

SEQ ID NO: 1830872 - DNA, 15 bp, Homo sapiens
tatgggcttccgccc

SEQ ID NO: 1830873 - DNA, 15 bp, Homo sapiens
atgggcttccgccca

SEQ ID NO: 1830874 - DNA, 15 bp, Homo sapiens
tgggcttccgcccac

SEQ ID NO: 1830875 - DNA, 15 bp, Homo sapiens
gggcttccgcccaca

SEQ ID NO: 1830876 - DNA, 15 bp, Homo sapiens
ggcttccgcccacag

SEQ ID NO: 1830877 - DNA, 15 bp, Homo sapiens
gcttccgcccacagc

SEQ ID NO: 1830878 - DNA, 15 bp, Homo sapiens
cttccgcccacagct

SEQ ID NO: 1830879 - DNA, 15 bp, Homo sapiens
ttccgcccacagctg

SEQ ID NO: 1830880 - DNA, 15 bp, Homo sapiens
tccgcccacagctgg

SEQ ID NO: 1830881 - DNA, 15 bp, Homo sapiens
ccgcccacagctggt

SEQ ID NO: 1830882 - DNA, 15 bp, Homo sapiens
cgcccacagctggtt

SEQ ID NO: 1830883 - DNA, 15 bp, Homo sapiens
gcccacagctggttg

SEQ ID NO: 1830884 - DNA, 15 bp, Homo sapiens
cccacagctggttgg

SEQ ID NO: 1830885 - DNA, 15 bp, Homo sapiens
ccacagctggttgga

SEQ ID NO: 1830886 - DNA, 15 bp, Homo sapiens
cacagctggttggag

SEQ ID NO: 1830887 - DNA, 15 bp, Homo sapiens
acagctggttggagc

SEQ ID NO: 1830888 - DNA, 15 bp, Homo sapiens
cagctggttggagcg

SEQ ID NO: 1830889 - DNA, 15 bp, Homo sapiens
agctggttggagcgt

SEQ ID NO: 1830890 - DNA, 15 bp, Homo sapiens
gctggttggagcgtg

SEQ ID NO: 1830891 - DNA, 15 bp, Homo sapiens
ctggttggagcgtga

SEQ ID NO: 1830892 - DNA, 15 bp, Homo sapiens
tggttggagcgtgac

SEQ ID NO: 1830893 - DNA, 15 bp, Homo sapiens
ggttggagcgtgaca

SEQ ID NO: 1830894 - DNA, 15 bp, Homo sapiens
gttggagcgtgacaa

SEQ ID NO: 1830895 - DNA, 15 bp, Homo sapiens
ttggagcgtgacaat

SEQ ID NO: 1830896 - DNA, 15 bp, Homo sapiens
tggagcgtgacaatc

SEQ ID NO: 1830897 - DNA, 15 bp, Homo sapiens
ggagcgtgacaatca

SEQ ID NO: 1830898 - DNA, 15 bp, Homo sapiens
gagcgtgacaatcaa

SEQ ID NO: 1830899 - DNA, 15 bp, Homo sapiens
agcgtgacaatcaaa

SEQ ID NO: 1830900 - DNA, 15 bp, Homo sapiens
gcgtgacaatcaaat

SEQ ID NO: 1830901 - DNA, 15 bp, Homo sapiens
cgtgacaatcaaatg

SEQ ID NO: 1830902 - DNA, 15 bp, Homo sapiens
gtgacaatcaaatgt

SEQ ID NO: 1830903 - DNA, 15 bp, Homo sapiens
tgacaatcaaatgtg

SEQ ID NO: 1830904 - DNA, 15 bp, Homo sapiens
gacaatcaaatgtgt

SEQ ID NO: 1830905 - DNA, 15 bp, Homo sapiens
acaatcaaatgtgtt

SEQ ID NO: 1830906 - DNA, 15 bp, Homo sapiens
caatcaaatgtgtta

SEQ ID NO: 1830907 - DNA, 15 bp, Homo sapiens
aatcaaatgtgttac

SEQ ID NO: 1830908 - DNA, 15 bp, Homo sapiens
atcaaatgtgttacc

SEQ ID NO: 1830909 - DNA, 15 bp, Homo sapiens
tcaaatgtgttacca

SEQ ID NO: 1830910 - DNA, 15 bp, Homo sapiens
caaatgtgttaccat

SEQ ID NO: 1830911 - DNA, 15 bp, Homo sapiens
aaatgtgttaccatg

SEQ ID NO: 1830912 - DNA, 15 bp, Homo sapiens
aatgtgttaccatgt

SEQ ID NO: 1830913 - DNA, 15 bp, Homo sapiens
atgtgttaccatgtt

SEQ ID NO: 1830914 - DNA, 15 bp, Homo sapiens
tgtgttaccatgttt

SEQ ID NO: 1830915 - DNA, 15 bp, Homo sapiens
gtgttaccatgtttc

SEQ ID NO: 1830916 - DNA, 15 bp, Homo sapiens
tgttaccatgtttct

SEQ ID NO: 1830917 - DNA, 15 bp, Homo sapiens
gttaccatgtttctc

SEQ ID NO: 1830918 - DNA, 15 bp, Homo sapiens
ttaccatgtttctca

SEQ ID NO: 1830919 - DNA, 15 bp, Homo sapiens
taccatgtttctcac

SEQ ID NO: 1830920 - DNA, 15 bp, Homo sapiens
accatgtttctcaca

SEQ ID NO: 1830921 - DNA, 15 bp, Homo sapiens
ccatgtttctcacag

SEQ ID NO: 1830922 - DNA, 15 bp, Homo sapiens
catgtttctcacaga

SEQ ID NO: 1830923 - DNA, 15 bp, Homo sapiens
atgtttctcacagac

SEQ ID NO: 1830924 - DNA, 15 bp, Homo sapiens
tgtttctcacagact

SEQ ID NO: 1830925 - DNA, 15 bp, Homo sapiens
gtttctcacagactc

SEQ ID NO: 1830926 - DNA, 15 bp, Homo sapiens
tttctcacagactcc

SEQ ID NO: 1830927 - DNA, 15 bp, Homo sapiens
ttctcacagactccc

SEQ ID NO: 1830928 - DNA, 15 bp, Homo sapiens
tctcacagactccca

SEQ ID NO: 1830929 - DNA, 15 bp, Homo sapiens
ctcacagactcccac

SEQ ID NO: 1830930 - DNA, 15 bp, Homo sapiens
tcacagactcccaca

SEQ ID NO: 1830931 - DNA, 15 bp, Homo sapiens
cacagactcccacaa

SEQ ID NO: 1830932 - DNA, 15 bp, Homo sapiens
acagactcccacaac

SEQ ID NO: 1830933 - DNA, 15 bp, Homo sapiens
cagactcccacaaca

SEQ ID NO: 1830934 - DNA, 15 bp, Homo sapiens
agactcccacaacat

SEQ ID NO: 1830935 - DNA, 15 bp, Homo sapiens
gactcccacaacatc

SEQ ID NO: 1830936 - DNA, 15 bp, Homo sapiens
actcccacaacatca

SEQ ID NO: 1830937 - DNA, 15 bp, Homo sapiens
ctcccacaacatcaa

SEQ ID NO: 1830938 - DNA, 15 bp, Homo sapiens
tcccacaacatcaag

SEQ ID NO: 1830939 - DNA, 15 bp, Homo sapiens
cccacaacatcaagg

SEQ ID NO: 1830940 - DNA, 15 bp, Homo sapiens
ccacaacatcaagga

SEQ ID NO: 1830941 - DNA, 15 bp, Homo sapiens
cacaacatcaaggaa

SEQ ID NO: 1830942 - DNA, 15 bp, Homo sapiens
acaacatcaaggaaa

SEQ ID NO: 1830943 - DNA, 15 bp, Homo sapiens
caacatcaaggaaat

SEQ ID NO: 1830944 - DNA, 15 bp, Homo sapiens
aacatcaaggaaata

SEQ ID NO: 1830945 - DNA, 15 bp, Homo sapiens
acatcaaggaaatat

SEQ ID NO: 1830946 - DNA, 15 bp, Homo sapiens
catcaaggaaatatt

SEQ ID NO: 1830947 - DNA, 15 bp, Homo sapiens
atcaaggaaatattt

SEQ ID NO: 1830948 - DNA, 15 bp, Homo sapiens
tcaaggaaatatttc

SEQ ID NO: 1830949 - DNA, 15 bp, Homo sapiens
caaggaaatatttct

SEQ ID NO: 1830950 - DNA, 15 bp, Homo sapiens
aaggaaatatttctg

SEQ ID NO: 1830951 - DNA, 15 bp, Homo sapiens
aggaaatatttctga

SEQ ID NO: 1830952 - DNA, 15 bp, Homo sapiens
ggaaatatttctgac

SEQ ID NO: 1830953 - DNA, 15 bp, Homo sapiens
gaaatatttctgact

SEQ ID NO: 1830954 - DNA, 15 bp, Homo sapiens
aaatatttctgactc

SEQ ID NO: 1830955 - DNA, 15 bp, Homo sapiens
aatatttctgactcc

SEQ ID NO: 1830956 - DNA, 15 bp, Homo sapiens
atatttctgactcct

SEQ ID NO: 1830957 - DNA, 15 bp, Homo sapiens
tatttctgactcctg

SEQ ID NO: 1830958 - DNA, 15 bp, Homo sapiens
ttctgactcctggca

SEQ ID NO: 1830959 - DNA, 15 bp, Homo sapiens
tctgactcctggcat

SEQ ID NO: 1830960 - DNA, 15 bp, Homo sapiens
ctgactcctggcatg

SEQ ID NO: 1830961 - DNA, 15 bp, Homo sapiens
tgactcctggcatga

SEQ ID NO: 1830962 - DNA, 15 bp, Homo sapiens
gactcctggcatgaa

SEQ ID NO: 1830963 - DNA, 15 bp, Homo sapiens
actcctggcatgaaa

SEQ ID NO: 1830964 - DNA, 15 bp, Homo sapiens
ctcctggcatgaaac

SEQ ID NO: 1830965 - DNA, 15 bp, Homo sapiens
tcctggcatgaaact

SEQ ID NO: 1830966 - DNA, 15 bp, Homo sapiens
cctggcatgaaactt

SEQ ID NO: 1830967 - DNA, 15 bp, Homo sapiens
ctggcatgaaacttg

SEQ ID NO: 1830968 - DNA, 15 bp, Homo sapiens
tggcatgaaacttga

SEQ ID NO: 1830969 - DNA, 15 bp, Homo sapiens
ggcatgaaacttgaa

SEQ ID NO: 1830970 - DNA, 15 bp, Homo sapiens
gcatgaaacttgaag

SEQ ID NO: 1830971 - DNA, 15 bp, Homo sapiens
catgaaacttgaaga

SEQ ID NO: 1830972 - DNA, 15 bp, Homo sapiens
atgaaacttgaagaa

SEQ ID NO: 1830973 - DNA, 15 bp, Homo sapiens
tgaaacttgaagaaa

SEQ ID NO: 1830974 - DNA, 15 bp, Homo sapiens
gaaacttgaagaaag

SEQ ID NO: 1830975 - DNA, 15 bp, Homo sapiens
aaacttgaagaaaga

SEQ ID NO: 1830976 - DNA, 15 bp, Homo sapiens
aacttgaagaaagag

SEQ ID NO: 1830977 - DNA, 15 bp, Homo sapiens
acttgaagaaagaga

SEQ ID NO: 1830978 - DNA, 15 bp, Homo sapiens
cttgaagaaagagaa

SEQ ID NO: 1830979 - DNA, 15 bp, Homo sapiens
ttgaagaaagagaat

SEQ ID NO: 1830980 - DNA, 15 bp, Homo sapiens
tgaagaaagagaatg

SEQ ID NO: 1830981 - DNA, 15 bp, Homo sapiens
gaagaaagagaatgt

SEQ ID NO: 1830982 - DNA, 15 bp, Homo sapiens
aagaaagagaatgta

SEQ ID NO: 1830983 - DNA, 15 bp, Homo sapiens
agaaagagaatgtag

SEQ ID NO: 1830984 - DNA, 15 bp, Homo sapiens
gaaagagaatgtagc

SEQ ID NO: 1830985 - DNA, 15 bp, Homo sapiens
aaagagaatgtagca

SEQ ID NO: 1830986 - DNA, 15 bp, Homo sapiens
aagagaatgtagcag

SEQ ID NO: 1830987 - DNA, 15 bp, Homo sapiens
agagaatgtagcagc

SEQ ID NO: 1830988 - DNA, 15 bp, Homo sapiens
gagaatgtagcagcc

SEQ ID NO: 1830989 - DNA, 15 bp, Homo sapiens
agaatgtagcagcca

SEQ ID NO: 1830990 - DNA, 15 bp, Homo sapiens
gaatgtagcagccac

SEQ ID NO: 1830991 - DNA, 15 bp, Homo sapiens
aatgtagcagccact

SEQ ID NO: 1830992 - DNA, 15 bp, Homo sapiens
atgtagcagccacta

SEQ ID NO: 1830993 - DNA, 15 bp, Homo sapiens
tgtagcagccactaa

SEQ ID NO: 1830994 - DNA, 15 bp, Homo sapiens
gtagcagccactaat

SEQ ID NO: 1830995 - DNA, 15 bp, Homo sapiens
tagcagccactaata

SEQ ID NO: 1830996 - DNA, 15 bp, Homo sapiens
agcagccactaatac

SEQ ID NO: 1830997 - DNA, 15 bp, Homo sapiens
gcagccactaataca

SEQ ID NO: 1830998 - DNA, 15 bp, Homo sapiens
cagccactaatacaa

SEQ ID NO: 1830999 - DNA, 15 bp, Homo sapiens
agccactaatacaat

SEQ ID NO: 1831000 - DNA, 15 bp, Homo sapiens
gccactaatacaatg

SEQ ID NO: 1831001 - DNA, 15 bp, Homo sapiens
ccactaatacaatgg

SEQ ID NO: 1831002 - DNA, 15 bp, Homo sapiens
cactaatacaatgga

SEQ ID NO: 1831003 - DNA, 15 bp, Homo sapiens
actaatacaatggaa

SEQ ID NO: 1831004 - DNA, 15 bp, Homo sapiens
ctaatacaatggaaa

SEQ ID NO: 1831005 - DNA, 15 bp, Homo sapiens
taatacaatggaaag

SEQ ID NO: 1831006 - DNA, 15 bp, Homo sapiens
aatacaatggaaagc

SEQ ID NO: 1831007 - DNA, 15 bp, Homo sapiens
atacaatggaaagcg

SEQ ID NO: 1831008 - DNA, 15 bp, Homo sapiens
tacaatggaaagcgc

SEQ ID NO: 1831009 - DNA, 15 bp, Homo sapiens
acaatggaaagcgca

SEQ ID NO: 1831010 - DNA, 15 bp, Homo sapiens
caatggaaagcgcaa

SEQ ID NO: 1831011 - DNA, 15 bp, Homo sapiens
aatggaaagcgcaac

SEQ ID NO: 1831012 - DNA, 15 bp, Homo sapiens
atggaaagcgcaaca

SEQ ID NO: 1831013 - DNA, 15 bp, Homo sapiens
tggaaagcgcaacat

SEQ ID NO: 1831014 - DNA, 15 bp, Homo sapiens
ggaaagcgcaacatt

SEQ ID NO: 1831015 - DNA, 15 bp, Homo sapiens
gaaagcgcaacattg

SEQ ID NO: 1831016 - DNA, 15 bp, Homo sapiens
aaagcgcaacattga

SEQ ID NO: 1831017 - DNA, 15 bp, Homo sapiens
aagcgcaacattgac

SEQ ID NO: 1831018 - DNA, 15 bp, Homo sapiens
agcgcaacattgaca

SEQ ID NO: 1831019 - DNA, 15 bp, Homo sapiens
gcgcaacattgacac

SEQ ID NO: 1831020 - DNA, 15 bp, Homo sapiens
cgcaacattgacacg

SEQ ID NO: 1831021 - DNA, 15 bp, Homo sapiens
gcaacattgacacgt

SEQ ID NO: 1831022 - DNA, 15 bp, Homo sapiens
caacattgacacgtc

SEQ ID NO: 1831023 - DNA, 15 bp, Homo sapiens
aacattgacacgtct

SEQ ID NO: 1831024 - DNA, 15 bp, Homo sapiens
acattgacacgtcta

SEQ ID NO: 1831025 - DNA, 15 bp, Homo sapiens
cattgacacgtctat

SEQ ID NO: 1831026 - DNA, 15 bp, Homo sapiens
attgacacgtctatc

SEQ ID NO: 1831027 - DNA, 15 bp, Homo sapiens
ttgacacgtctatct

SEQ ID NO: 1831028 - DNA, 15 bp, Homo sapiens
tgacacgtctatcta

SEQ ID NO: 1831029 - DNA, 15 bp, Homo sapiens
gacacgtctatctag

SEQ ID NO: 1831030 - DNA, 15 bp, Homo sapiens
acacgtctatctaga

SEQ ID NO: 1831031 - DNA, 15 bp, Homo sapiens
cacgtctatctagaa

SEQ ID NO: 1831032 - DNA, 15 bp, Homo sapiens
acgtctatctagaaa

SEQ ID NO: 1831033 - DNA, 15 bp, Homo sapiens
cgtctatctagaaaa

SEQ ID NO: 1831034 - DNA, 15 bp, Homo sapiens
gtctatctagaaaat

SEQ ID NO: 1831035 - DNA, 15 bp, Homo sapiens
tctatctagaaaatt

SEQ ID NO: 1831036 - DNA, 15 bp, Homo sapiens
ctatctagaaaattt

SEQ ID NO: 1831037 - DNA, 15 bp, Homo sapiens
tatctagaaaatttt

SEQ ID NO: 1831038 - DNA, 15 bp, Homo sapiens
atctagaaaatttta

SEQ ID NO: 1831039 - DNA, 15 bp, Homo sapiens
tctagaaaattttaa

SEQ ID NO: 1831040 - DNA, 15 bp, Homo sapiens
ctagaaaattttaat

SEQ ID NO: 1831041 - DNA, 15 bp, Homo sapiens
tagaaaattttaatt

SEQ ID NO: 1831042 - DNA, 15 bp, Homo sapiens
agaaaattttaattg

SEQ ID NO: 1831043 - DNA, 15 bp, Homo sapiens
gaaaattttaattgt

SEQ ID NO: 1831044 - DNA, 15 bp, Homo sapiens
aaaattttaattgtc

SEQ ID NO: 1831045 - DNA, 15 bp, Homo sapiens
aaattttaattgtct

SEQ ID NO: 1831046 - DNA, 15 bp, Homo sapiens
aattttaattgtcta

SEQ ID NO: 1831047 - DNA, 15 bp, Homo sapiens
attttaattgtctaa

SEQ ID NO: 1831048 - DNA, 15 bp, Homo sapiens
ttttaattgtctaag

SEQ ID NO: 1831049 - DNA, 15 bp, Homo sapiens
tttaattgtctaagt

SEQ ID NO: 1831050 - DNA, 15 bp, Homo sapiens
ttaattgtctaagtt

SEQ ID NO: 1831051 - DNA, 15 bp, Homo sapiens
taattgtctaagttg

SEQ ID NO: 1831052 - DNA, 15 bp, Homo sapiens
aattgtctaagttgt

SEQ ID NO: 1831053 - DNA, 15 bp, Homo sapiens
attgtctaagttgtg

SEQ ID NO: 1831054 - DNA, 15 bp, Homo sapiens
ttgtctaagttgtgt

SEQ ID NO: 1831055 - DNA, 15 bp, Homo sapiens
tgtctaagttgtgtg

SEQ ID NO: 1831056 - DNA, 15 bp, Homo sapiens
gtctaagttgtgtga

SEQ ID NO: 1831057 - DNA, 15 bp, Homo sapiens
tctaagttgtgtgac

SEQ ID NO: 1831058 - DNA, 15 bp, Homo sapiens
ctaagttgtgtgact

SEQ ID NO: 1831059 - DNA, 15 bp, Homo sapiens
taagttgtgtgactc

SEQ ID NO: 1831060 - DNA, 15 bp, Homo sapiens
aagttgtgtgactca

SEQ ID NO: 1831061 - DNA, 15 bp, Homo sapiens
agttgtgtgactcag

SEQ ID NO: 1831062 - DNA, 15 bp, Homo sapiens
gttgtgtgactcaga

SEQ ID NO: 1831063 - DNA, 15 bp, Homo sapiens
ttgtgtgactcagat

SEQ ID NO: 1831064 - DNA, 15 bp, Homo sapiens
tgtgtgactcagata

SEQ ID NO: 1831065 - DNA, 15 bp, Homo sapiens
gtgtgactcagatat

SEQ ID NO: 1831066 - DNA, 15 bp, Homo sapiens
tgtgactcagatatc

SEQ ID NO: 1831067 - DNA, 15 bp, Homo sapiens
gtgactcagatatct

SEQ ID NO: 1831068 - DNA, 15 bp, Homo sapiens
tgactcagatatctt

SEQ ID NO: 1831069 - DNA, 15 bp, Homo sapiens
gactcagatatcttt

SEQ ID NO: 1831070 - DNA, 15 bp, Homo sapiens
actcagatatctttg

SEQ ID NO: 1831071 - DNA, 15 bp, Homo sapiens
ctcagatatctttgc

SEQ ID NO: 1831072 - DNA, 15 bp, Homo sapiens
tcagatatctttgca

SEQ ID NO: 1831073 - DNA, 15 bp, Homo sapiens
cagatatctttgcat

SEQ ID NO: 1831074 - DNA, 15 bp, Homo sapiens
agatatctttgcatt

SEQ ID NO: 1831075 - DNA, 15 bp, Homo sapiens
gatatctttgcattt

SEQ ID NO: 1831076 - DNA, 15 bp, Homo sapiens
atatctttgcatttc

SEQ ID NO: 1831077 - DNA, 15 bp, Homo sapiens
tatctttgcatttct

SEQ ID NO: 1831078 - DNA, 15 bp, Homo sapiens
atctttgcatttctg

SEQ ID NO: 1831079 - DNA, 15 bp, Homo sapiens
tctttgcatttctgc

SEQ ID NO: 1831080 - DNA, 15 bp, Homo sapiens
ctttgcatttctgca

SEQ ID NO: 1831081 - DNA, 15 bp, Homo sapiens
tttgcatttctgcaa

SEQ ID NO: 1831082 - DNA, 15 bp, Homo sapiens
ttgcatttctgcaaa

SEQ ID NO: 1831083 - DNA, 15 bp, Homo sapiens
tgcatttctgcaaaa

SEQ ID NO: 1831084 - DNA, 15 bp, Homo sapiens
gcatttctgcaaaag

SEQ ID NO: 1831085 - DNA, 15 bp, Homo sapiens
catttctgcaaaaga

SEQ ID NO: 1831086 - DNA, 15 bp, Homo sapiens
atttctgcaaaagat

SEQ ID NO: 1831087 - DNA, 15 bp, Homo sapiens
tttctgcaaaagatc

SEQ ID NO: 1831088 - DNA, 15 bp, Homo sapiens
ttctgcaaaagatca

SEQ ID NO: 1831089 - DNA, 15 bp, Homo sapiens
tctgcaaaagatcaa

SEQ ID NO: 1831090 - DNA, 15 bp, Homo sapiens
ctgcaaaagatcaag

SEQ ID NO: 1831091 - DNA, 15 bp, Homo sapiens
tgcaaaagatcaagg

SEQ ID NO: 1831092 - DNA, 15 bp, Homo sapiens
gcaaaagatcaaggt

SEQ ID NO: 1831093 - DNA, 15 bp, Homo sapiens
caaaagatcaaggtc

SEQ ID NO: 1831094 - DNA, 15 bp, Homo sapiens
aaaagatcaaggtct

SEQ ID NO: 1831095 - DNA, 15 bp, Homo sapiens
aaagatcaaggtcta

SEQ ID NO: 1831096 - DNA, 15 bp, Homo sapiens
aagatcaaggtctac

SEQ ID NO: 1831097 - DNA, 15 bp, Homo sapiens
agatcaaggtctact

SEQ ID NO: 1831098 - DNA, 15 bp, Homo sapiens
gatcaaggtctactc

SEQ ID NO: 1831099 - DNA, 15 bp, Homo sapiens
atcaaggtctactct

SEQ ID NO: 1831100 - DNA, 15 bp, Homo sapiens
tcaaggtctactcta

SEQ ID NO: 1831101 - DNA, 15 bp, Homo sapiens
caaggtctactctaa

SEQ ID NO: 1831102 - DNA, 15 bp, Homo sapiens
aaggtctactctaat

SEQ ID NO: 1831103 - DNA, 15 bp, Homo sapiens
aggtctactctaatt

SEQ ID NO: 1831104 - DNA, 15 bp, Homo sapiens
ggtctactctaattc

SEQ ID NO: 1831105 - DNA, 15 bp, Homo sapiens
gtctactctaattct

SEQ ID NO: 1831106 - DNA, 15 bp, Homo sapiens
tctactctaattctt

SEQ ID NO: 1831107 - DNA, 15 bp, Homo sapiens
ctactctaattctta

SEQ ID NO: 1831108 - DNA, 15 bp, Homo sapiens
tactctaattcttaa

SEQ ID NO: 1831109 - DNA, 15 bp, Homo sapiens
actctaattcttaat

SEQ ID NO: 1831110 - DNA, 15 bp, Homo sapiens
ctctaattcttaatt

SEQ ID NO: 1831111 - DNA, 15 bp, Homo sapiens
tctaattcttaatta

SEQ ID NO: 1831112 - DNA, 15 bp, Homo sapiens
ctaattcttaattaa

SEQ ID NO: 1831113 - DNA, 15 bp, Homo sapiens
taattcttaattaaa

SEQ ID NO: 1831114 - DNA, 15 bp, Homo sapiens
aattcttaattaaat

SEQ ID NO: 1831115 - DNA, 15 bp, Homo sapiens
attcttaattaaatt

SEQ ID NO: 1831116 - DNA, 15 bp, Homo sapiens
ttcttaattaaatta

SEQ ID NO: 1831117 - DNA, 15 bp, Homo sapiens
tcttaattaaattaa

SEQ ID NO: 1831118 - DNA, 15 bp, Homo sapiens
cttaattaaattaag

SEQ ID NO: 1831119 - DNA, 15 bp, Homo sapiens
ttaattaaattaaga

SEQ ID NO: 1831120 - DNA, 15 bp, Homo sapiens
taattaaattaagaa

SEQ ID NO: 1831121 - DNA, 15 bp, Homo sapiens
aattaaattaagaat

SEQ ID NO: 1831122 - DNA, 15 bp, Homo sapiens
attaaattaagaatt

SEQ ID NO: 1831123 - DNA, 15 bp, Homo sapiens
ttaaattaagaattc

SEQ ID NO: 1831124 - DNA, 15 bp, Homo sapiens
taaattaagaattcc

SEQ ID NO: 1831125 - DNA, 15 bp, Homo sapiens
aaattaagaattcct

SEQ ID NO: 1831126 - DNA, 15 bp, Homo sapiens
aattaagaattcctt

SEQ ID NO: 1831127 - DNA, 15 bp, Homo sapiens
attaagaattccttt

SEQ ID NO: 1831128 - DNA, 15 bp, Homo sapiens
ttaagaattcctttt

SEQ ID NO: 1831129 - DNA, 15 bp, Homo sapiens
taagaattccttttt

SEQ ID NO: 1831130 - DNA, 15 bp, Homo sapiens
aagaattccttttta

SEQ ID NO: 1831131 - DNA, 15 bp, Homo sapiens
agaattcctttttat

SEQ ID NO: 1831132 - DNA, 15 bp, Homo sapiens
gaattcctttttatt

SEQ ID NO: 1831133 - DNA, 15 bp, Homo sapiens
aattcctttttatta

SEQ ID NO: 1831134 - DNA, 15 bp, Homo sapiens
attcctttttattac

SEQ ID NO: 1831135 - DNA, 15 bp, Homo sapiens
ttcctttttattact

SEQ ID NO: 1831136 - DNA, 15 bp, Homo sapiens
tcctttttattactt

SEQ ID NO: 1831137 - DNA, 15 bp, Homo sapiens
cctttttattacttg

SEQ ID NO: 1831138 - DNA, 15 bp, Homo sapiens
ctttttattacttgt

SEQ ID NO: 1831139 - DNA, 15 bp, Homo sapiens
tttttattacttgtt

SEQ ID NO: 1831140 - DNA, 15 bp, Homo sapiens
ttttattacttgtta

SEQ ID NO: 1831141 - DNA, 15 bp, Homo sapiens
tttattacttgttag

SEQ ID NO: 1831142 - DNA, 15 bp, Homo sapiens
ttattacttgttagc

SEQ ID NO: 1831143 - DNA, 15 bp, Homo sapiens
tattacttgttagca

SEQ ID NO: 1831144 - DNA, 15 bp, Homo sapiens
attacttgttagcaa

SEQ ID NO: 1831145 - DNA, 15 bp, Homo sapiens
ttacttgttagcaaa

SEQ ID NO: 1831146 - DNA, 15 bp, Homo sapiens
tacttgttagcaaat

SEQ ID NO: 1831147 - DNA, 15 bp, Homo sapiens
acttgttagcaaata

SEQ ID NO: 1831148 - DNA, 15 bp, Homo sapiens
cttgttagcaaataa

SEQ ID NO: 1831149 - DNA, 15 bp, Homo sapiens
ttgttagcaaataaa

SEQ ID NO: 1831150 - DNA, 15 bp, Homo sapiens
tgttagcaaataaat

SEQ ID NO: 1831151 - DNA, 15 bp, Homo sapiens
gttagcaaataaatg

SEQ ID NO: 1831152 - DNA, 15 bp, Homo sapiens
ttagcaaataaatgg

SEQ ID NO: 1831153 - DNA, 15 bp, Homo sapiens
tagcaaataaatggc

SEQ ID NO: 1831154 - DNA, 15 bp, Homo sapiens
agcaaataaatggct

SEQ ID NO: 1831155 - DNA, 15 bp, Homo sapiens
gcaaataaatggctt

SEQ ID NO: 1831156 - DNA, 15 bp, Homo sapiens
caaataaatggcttg

SEQ ID NO: 1831157 - DNA, 15 bp, Homo sapiens
aaataaatggcttgt

SEQ ID NO: 1831158 - DNA, 15 bp, Homo sapiens
aataaatggcttgtc

SEQ ID NO: 1831159 - DNA, 15 bp, Homo sapiens
ataaatggcttgtct

SEQ ID NO: 1831160 - DNA, 15 bp, Homo sapiens
taaatggcttgtctc

SEQ ID NO: 1831161 - DNA, 15 bp, Homo sapiens
aaatggcttgtctct

SEQ ID NO: 1831162 - DNA, 15 bp, Homo sapiens
aatggcttgtctcta

SEQ ID NO: 1831163 - DNA, 15 bp, Homo sapiens
atggcttgtctctaa

SEQ ID NO: 1831164 - DNA, 15 bp, Homo sapiens
tggcttgtctctaac

SEQ ID NO: 1831165 - DNA, 15 bp, Homo sapiens
ggcttgtctctaaca

SEQ ID NO: 1831166 - DNA, 15 bp, Homo sapiens
gcttgtctctaacag

SEQ ID NO: 1831167 - DNA, 15 bp, Homo sapiens
cttgtctctaacaga

SEQ ID NO: 1831168 - DNA, 15 bp, Homo sapiens
ttgtctctaacagaa

SEQ ID NO: 1831169 - DNA, 15 bp, Homo sapiens
tgtctctaacagaaa

SEQ ID NO: 1831170 - DNA, 15 bp, Homo sapiens
gtctctaacagaaaa

SEQ ID NO: 1831171 - DNA, 15 bp, Homo sapiens
tctctaacagaaaaa

SEQ ID NO: 1831172 - DNA, 15 bp, Homo sapiens
ctctaacagaaaaaa

SEQ ID NO: 1831173 - DNA, 15 bp, Homo sapiens
tctaacagaaaaaat

SEQ ID NO: 1831174 - DNA, 15 bp, Homo sapiens
ctaacagaaaaaatt

SEQ ID NO: 1831175 - DNA, 15 bp, Homo sapiens
taacagaaaaaattt

SEQ ID NO: 1831176 - DNA, 15 bp, Homo sapiens
aacagaaaaaattta

SEQ ID NO: 1831177 - DNA, 15 bp, Homo sapiens
acagaaaaaatttag

SEQ ID NO: 1831178 - DNA, 15 bp, Homo sapiens
cagaaaaaatttaga

SEQ ID NO: 1831179 - DNA, 15 bp, Homo sapiens
agaaaaaatttagaa

SEQ ID NO: 1831180 - DNA, 15 bp, Homo sapiens
gaaaaaatttagaat

SEQ ID NO: 1831181 - DNA, 15 bp, Homo sapiens
aaaaaatttagaatt

SEQ ID NO: 1831182 - DNA, 15 bp, Homo sapiens
aaaaatttagaattt

SEQ ID NO: 1831183 - DNA, 15 bp, Homo sapiens
aaaatttagaatttt

SEQ ID NO: 1831184 - DNA, 15 bp, Homo sapiens
aaatttagaattttc

SEQ ID NO: 1831185 - DNA, 15 bp, Homo sapiens
aatttagaattttcg

SEQ ID NO: 1831186 - DNA, 15 bp, Homo sapiens
atttagaattttcgg

SEQ ID NO: 1831187 - DNA, 15 bp, Homo sapiens
tttagaattttcgga

SEQ ID NO: 1831188 - DNA, 15 bp, Homo sapiens
ttagaattttcggaa

SEQ ID NO: 1831189 - DNA, 15 bp, Homo sapiens
tagaattttcggaaa

SEQ ID NO: 1831190 - DNA, 15 bp, Homo sapiens
agaattttcggaaat

SEQ ID NO: 1831191 - DNA, 15 bp, Homo sapiens
gaattttcggaaata

SEQ ID NO: 1831192 - DNA, 15 bp, Homo sapiens
aattttcggaaatat

SEQ ID NO: 1831193 - DNA, 15 bp, Homo sapiens
attttcggaaatatt

SEQ ID NO: 1831194 - DNA, 15 bp, Homo sapiens
ttttcggaaatattt

SEQ ID NO: 1831195 - DNA, 15 bp, Homo sapiens
tttcggaaatatttt

SEQ ID NO: 1831196 - DNA, 15 bp, Homo sapiens
ttcggaaatattttc

SEQ ID NO: 1831197 - DNA, 15 bp, Homo sapiens
tcggaaatattttca

SEQ ID NO: 1831198 - DNA, 15 bp, Homo sapiens
cggaaatattttcaa

SEQ ID NO: 1831199 - DNA, 15 bp, Homo sapiens
ggaaatattttcaaa

SEQ ID NO: 1831200 - DNA, 15 bp, Homo sapiens
gaaatattttcaaat

SEQ ID NO: 1831201 - DNA, 15 bp, Homo sapiens
aaatattttcaaata

SEQ ID NO: 1831202 - DNA, 15 bp, Homo sapiens
aatattttcaaatac

SEQ ID NO: 1831203 - DNA, 15 bp, Homo sapiens
atattttcaaatact

SEQ ID NO: 1831204 - DNA, 15 bp, Homo sapiens
tattttcaaatactt

SEQ ID NO: 1831205 - DNA, 15 bp, Homo sapiens
attttcaaatacttc

SEQ ID NO: 1831206 - DNA, 15 bp, Homo sapiens
ttttcaaatacttct

SEQ ID NO: 1831207 - DNA, 15 bp, Homo sapiens
tttcaaatacttctt

SEQ ID NO: 1831208 - DNA, 15 bp, Homo sapiens
ttcaaatacttctta

SEQ ID NO: 1831209 - DNA, 15 bp, Homo sapiens
tcaaatacttcttat

SEQ ID NO: 1831210 - DNA, 15 bp, Homo sapiens
caaatacttcttata

SEQ ID NO: 1831211 - DNA, 15 bp, Homo sapiens
aaatacttcttatat

SEQ ID NO: 1831212 - DNA, 15 bp, Homo sapiens
aatacttcttatata

SEQ ID NO: 1831213 - DNA, 15 bp, Homo sapiens
atacttcttatatat

SEQ ID NO: 1831214 - DNA, 15 bp, Homo sapiens
tacttcttatatata

SEQ ID NO: 1831215 - DNA, 15 bp, Homo sapiens
acttcttatatatac

SEQ ID NO: 1831216 - DNA, 15 bp, Homo sapiens
cttcttatatataca

SEQ ID NO: 1831217 - DNA, 15 bp, Homo sapiens
ttcttatatatacat

SEQ ID NO: 1831218 - DNA, 15 bp, Homo sapiens
tcttatatatacata

SEQ ID NO: 1831219 - DNA, 15 bp, Homo sapiens
cttatatatacatat

SEQ ID NO: 1831220 - DNA, 15 bp, Homo sapiens
ttatatatacatata

SEQ ID NO: 1831221 - DNA, 15 bp, Homo sapiens
atatatacatatatt

SEQ ID NO: 1831222 - DNA, 15 bp, Homo sapiens
tatatacatatattt

SEQ ID NO: 1831223 - DNA, 15 bp, Homo sapiens
atatacatatatttt

SEQ ID NO: 1831224 - DNA, 15 bp, Homo sapiens
tatacatatattttt

SEQ ID NO: 1831225 - DNA, 15 bp, Homo sapiens
atacatatatttttt

SEQ ID NO: 1831226 - DNA, 15 bp, Homo sapiens
tacatatattttttt

SEQ ID NO: 1831227 - DNA, 15 bp, Homo sapiens
acatatatttttttc

SEQ ID NO: 1831228 - DNA, 15 bp, Homo sapiens
catatatttttttcc

SEQ ID NO: 1831229 - DNA, 15 bp, Homo sapiens
atatatttttttcca

SEQ ID NO: 1831230 - DNA, 15 bp, Homo sapiens
tatatttttttccac

SEQ ID NO: 1831231 - DNA, 15 bp, Homo sapiens
atatttttttccact

SEQ ID NO: 1831232 - DNA, 15 bp, Homo sapiens
tatttttttccactg

SEQ ID NO: 1831233 - DNA, 15 bp, Homo sapiens
atttttttccactgg

SEQ ID NO: 1831234 - DNA, 15 bp, Homo sapiens
tttttttccactggt

SEQ ID NO: 1831235 - DNA, 15 bp, Homo sapiens
ttttttccactggta

SEQ ID NO: 1831236 - DNA, 15 bp, Homo sapiens
tttttccactggtag

SEQ ID NO: 1831237 - DNA, 15 bp, Homo sapiens
ttttccactggtaga

SEQ ID NO: 1831238 - DNA, 15 bp, Homo sapiens
tttccactggtagaa

SEQ ID NO: 1831239 - DNA, 15 bp, Homo sapiens
ttccactggtagaat

SEQ ID NO: 1831240 - DNA, 15 bp, Homo sapiens
tccactggtagaatt

SEQ ID NO: 1831241 - DNA, 15 bp, Homo sapiens
ccactggtagaattt

SEQ ID NO: 1831242 - DNA, 15 bp, Homo sapiens
cactggtagaatttt

SEQ ID NO: 1831243 - DNA, 15 bp, Homo sapiens
actggtagaattttt

SEQ ID NO: 1831244 - DNA, 15 bp, Homo sapiens
ctggtagaatttttc

SEQ ID NO: 1831245 - DNA, 15 bp, Homo sapiens
tggtagaatttttct

SEQ ID NO: 1831246 - DNA, 15 bp, Homo sapiens
ggtagaatttttctt

SEQ ID NO: 1831247 - DNA, 15 bp, Homo sapiens
gtagaatttttcttt

SEQ ID NO: 1831248 - DNA, 15 bp, Homo sapiens
tagaatttttcttta

SEQ ID NO: 1831249 - DNA, 15 bp, Homo sapiens
agaatttttctttag

SEQ ID NO: 1831250 - DNA, 15 bp, Homo sapiens
gaatttttctttagt

SEQ ID NO: 1831251 - DNA, 15 bp, Homo sapiens
aatttttctttagta

SEQ ID NO: 1831252 - DNA, 15 bp, Homo sapiens
atttttctttagtaa

SEQ ID NO: 1831253 - DNA, 15 bp, Homo sapiens
tttttctttagtaaa

SEQ ID NO: 1831254 - DNA, 15 bp, Homo sapiens
ttttctttagtaaaa

SEQ ID NO: 1831255 - DNA, 15 bp, Homo sapiens
tttctttagtaaaag

SEQ ID NO: 1831256 - DNA, 15 bp, Homo sapiens
ttctttagtaaaagt

SEQ ID NO: 1831257 - DNA, 15 bp, Homo sapiens
tctttagtaaaagta

SEQ ID NO: 1831258 - DNA, 15 bp, Homo sapiens
ctttagtaaaagtaa

SEQ ID NO: 1831259 - DNA, 15 bp, Homo sapiens
tttagtaaaagtaaa

SEQ ID NO: 1831260 - DNA, 15 bp, Homo sapiens
ttagtaaaagtaaat

SEQ ID NO: 1831261 - DNA, 15 bp, Homo sapiens
tagtaaaagtaaata

SEQ ID NO: 1831262 - DNA, 15 bp, Homo sapiens
agtaaaagtaaataa

SEQ ID NO: 1831263 - DNA, 15 bp, Homo sapiens
gtaaaagtaaataat

SEQ ID NO: 1831264 - DNA, 15 bp, Homo sapiens
taaaagtaaataatg

SEQ ID NO: 1831265 - DNA, 15 bp, Homo sapiens
aaaagtaaataatgc

SEQ ID NO: 1831266 - DNA, 15 bp, Homo sapiens
aaagtaaataatgct

SEQ ID NO: 1831267 - DNA, 15 bp, Homo sapiens
aagtaaataatgctg

SEQ ID NO: 1831268 - DNA, 15 bp, Homo sapiens
agtaaataatgctga

SEQ ID NO: 1831269 - DNA, 15 bp, Homo sapiens
gtaaataatgctgat

SEQ ID NO: 1831270 - DNA, 15 bp, Homo sapiens
taaataatgctgatc

SEQ ID NO: 1831271 - DNA, 15 bp, Homo sapiens
aaataatgctgatcc

SEQ ID NO: 1831272 - DNA, 15 bp, Homo sapiens
aataatgctgatcca

SEQ ID NO: 1831273 - DNA, 15 bp, Homo sapiens
ataatgctgatccaa

SEQ ID NO: 1831274 - DNA, 15 bp, Homo sapiens
taatgctgatccaag

SEQ ID NO: 1831275 - DNA, 15 bp, Homo sapiens
aatgctgatccaagt

SEQ ID NO: 1831276 - DNA, 15 bp, Homo sapiens
atgctgatccaagtt

SEQ ID NO: 1831277 - DNA, 15 bp, Homo sapiens
tgctgatccaagttt

SEQ ID NO: 1831278 - DNA, 15 bp, Homo sapiens
gctgatccaagttta

SEQ ID NO: 1831279 - DNA, 15 bp, Homo sapiens
ctgatccaagtttat

SEQ ID NO: 1831280 - DNA, 15 bp, Homo sapiens
tgatccaagtttatg

SEQ ID NO: 1831281 - DNA, 15 bp, Homo sapiens
gatccaagtttatgt

SEQ ID NO: 1831282 - DNA, 15 bp, Homo sapiens
atccaagtttatgtt

SEQ ID NO: 1831283 - DNA, 15 bp, Homo sapiens
tccaagtttatgttt

SEQ ID NO: 1831284 - DNA, 15 bp, Homo sapiens
ccaagtttatgtttc

SEQ ID NO: 1831285 - DNA, 15 bp, Homo sapiens
caagtttatgtttca

SEQ ID NO: 1831286 - DNA, 15 bp, Homo sapiens
aagtttatgtttcac

SEQ ID NO: 1831287 - DNA, 15 bp, Homo sapiens
agtttatgtttcact

SEQ ID NO: 1831288 - DNA, 15 bp, Homo sapiens
gtttatgtttcactc

SEQ ID NO: 1831289 - DNA, 15 bp, Homo sapiens
tttatgtttcactca

SEQ ID NO: 1831290 - DNA, 15 bp, Homo sapiens
ttatgtttcactcag

SEQ ID NO: 1831291 - DNA, 15 bp, Homo sapiens
tatgtttcactcagc

SEQ ID NO: 1831292 - DNA, 15 bp, Homo sapiens
atgtttcactcagca

SEQ ID NO: 1831293 - DNA, 15 bp, Homo sapiens
tgtttcactcagcat

SEQ ID NO: 1831294 - DNA, 15 bp, Homo sapiens
gtttcactcagcatc

SEQ ID NO: 1831295 - DNA, 15 bp, Homo sapiens
tttcactcagcatcg

SEQ ID NO: 1831296 - DNA, 15 bp, Homo sapiens
ttcactcagcatcgt

SEQ ID NO: 1831297 - DNA, 15 bp, Homo sapiens
tcactcagcatcgtt

SEQ ID NO: 1831298 - DNA, 15 bp, Homo sapiens
cactcagcatcgttt

SEQ ID NO: 1831299 - DNA, 15 bp, Homo sapiens
actcagcatcgtttc

SEQ ID NO: 1831300 - DNA, 15 bp, Homo sapiens
ctcagcatcgtttct

SEQ ID NO: 1831301 - DNA, 15 bp, Homo sapiens
tcagcatcgtttctc

SEQ ID NO: 1831302 - DNA, 15 bp, Homo sapiens
cagcatcgtttctca

SEQ ID NO: 1831303 - DNA, 15 bp, Homo sapiens
agcatcgtttctcaa

SEQ ID NO: 1831304 - DNA, 15 bp, Homo sapiens
gcatcgtttctcaaa

SEQ ID NO: 1831305 - DNA, 15 bp, Homo sapiens
catcgtttctcaaac

SEQ ID NO: 1831306 - DNA, 15 bp, Homo sapiens
atcgtttctcaaaca

SEQ ID NO: 1831307 - DNA, 15 bp, Homo sapiens
tcgtttctcaaacac

SEQ ID NO: 1831308 - DNA, 15 bp, Homo sapiens
cgtttctcaaacact

SEQ ID NO: 1831309 - DNA, 15 bp, Homo sapiens
gtttctcaaacactc

SEQ ID NO: 1831310 - DNA, 15 bp, Homo sapiens
tttctcaaacactct

SEQ ID NO: 1831311 - DNA, 15 bp, Homo sapiens
ttctcaaacactctt

SEQ ID NO: 1831312 - DNA, 15 bp, Homo sapiens
tctcaaacactcttc

SEQ ID NO: 1831313 - DNA, 15 bp, Homo sapiens
ctcaaacactcttct

SEQ ID NO: 1831314 - DNA, 15 bp, Homo sapiens
tcaaacactcttctt

SEQ ID NO: 1831315 - DNA, 15 bp, Homo sapiens
caaacactcttcttt

SEQ ID NO: 1831316 - DNA, 15 bp, Homo sapiens
aaacactcttcttta

SEQ ID NO: 1831317 - DNA, 15 bp, Homo sapiens
aacactcttctttac

SEQ ID NO: 1831318 - DNA, 15 bp, Homo sapiens
acactcttctttact

SEQ ID NO: 1831319 - DNA, 15 bp, Homo sapiens
cactcttctttactt

SEQ ID NO: 1831320 - DNA, 15 bp, Homo sapiens
actcttctttactta

SEQ ID NO: 1831321 - DNA, 15 bp, Homo sapiens
ctcttctttacttat

SEQ ID NO: 1831322 - DNA, 15 bp, Homo sapiens
tcttctttacttata

SEQ ID NO: 1831323 - DNA, 15 bp, Homo sapiens
cttctttacttatat

SEQ ID NO: 1831324 - DNA, 15 bp, Homo sapiens
ttctttacttatata

SEQ ID NO: 1831325 - DNA, 15 bp, Homo sapiens
tctttacttatatat

SEQ ID NO: 1831326 - DNA, 15 bp, Homo sapiens
ctttacttatatata

SEQ ID NO: 1831327 - DNA, 15 bp, Homo sapiens
tttacttatatatag

SEQ ID NO: 1831328 - DNA, 15 bp, Homo sapiens
ttacttatatatagc

SEQ ID NO: 1831329 - DNA, 15 bp, Homo sapiens
tacttatatatagct

SEQ ID NO: 1831330 - DNA, 15 bp, Homo sapiens
acttatatatagcta

SEQ ID NO: 1831331 - DNA, 15 bp, Homo sapiens
cttatatatagctac

SEQ ID NO: 1831332 - DNA, 15 bp, Homo sapiens
ttatatatagctacc

SEQ ID NO: 1831333 - DNA, 15 bp, Homo sapiens
tatatatagctaccc

SEQ ID NO: 1831334 - DNA, 15 bp, Homo sapiens
atatatagctaccct

SEQ ID NO: 1831335 - DNA, 15 bp, Homo sapiens
tatatagctacccta

SEQ ID NO: 1831336 - DNA, 15 bp, Homo sapiens
atatagctaccctat

SEQ ID NO: 1831337 - DNA, 15 bp, Homo sapiens
tatagctaccctata

SEQ ID NO: 1831338 - DNA, 15 bp, Homo sapiens
atagctaccctatag

SEQ ID NO: 1831339 - DNA, 15 bp, Homo sapiens
tagctaccctatagc

SEQ ID NO: 1831340 - DNA, 15 bp, Homo sapiens
agctaccctatagct

SEQ ID NO: 1831341 - DNA, 15 bp, Homo sapiens
gctaccctatagcta

SEQ ID NO: 1831342 - DNA, 15 bp, Homo sapiens
ctaccctatagctaa

SEQ ID NO: 1831343 - DNA, 15 bp, Homo sapiens
taccctatagctaag

SEQ ID NO: 1831344 - DNA, 15 bp, Homo sapiens
accctatagctaagc

SEQ ID NO: 1831345 - DNA, 15 bp, Homo sapiens
ccctatagctaagct

SEQ ID NO: 1831346 - DNA, 15 bp, Homo sapiens
cctatagctaagcta

SEQ ID NO: 1831347 - DNA, 15 bp, Homo sapiens
ctatagctaagctat

SEQ ID NO: 1831348 - DNA, 15 bp, Homo sapiens
tatagctaagctata

SEQ ID NO: 1831349 - DNA, 15 bp, Homo sapiens
atagctaagctatat

SEQ ID NO: 1831350 - DNA, 15 bp, Homo sapiens
tagctaagctatatt

SEQ ID NO: 1831351 - DNA, 15 bp, Homo sapiens
agctaagctatattt

SEQ ID NO: 1831352 - DNA, 15 bp, Homo sapiens
gctaagctatatttt

SEQ ID NO: 1831353 - DNA, 15 bp, Homo sapiens
ctaagctatatttta

SEQ ID NO: 1831354 - DNA, 15 bp, Homo sapiens
taagctatattttat

SEQ ID NO: 1831355 - DNA, 15 bp, Homo sapiens
aagctatattttatt

SEQ ID NO: 1831356 - DNA, 15 bp, Homo sapiens
agctatattttattg

SEQ ID NO: 1831357 - DNA, 15 bp, Homo sapiens
gctatattttattgt

SEQ ID NO: 1831358 - DNA, 15 bp, Homo sapiens
ctatattttattgta

SEQ ID NO: 1831359 - DNA, 15 bp, Homo sapiens
tatattttattgtat

SEQ ID NO: 1831360 - DNA, 15 bp, Homo sapiens
atattttattgtatg

SEQ ID NO: 1831361 - DNA, 15 bp, Homo sapiens
tattttattgtatga

SEQ ID NO: 1831362 - DNA, 15 bp, Homo sapiens
attttattgtatgat

SEQ ID NO: 1831363 - DNA, 15 bp, Homo sapiens
ttttattgtatgatg

SEQ ID NO: 1831364 - DNA, 15 bp, Homo sapiens
tttattgtatgatgc

SEQ ID NO: 1831365 - DNA, 15 bp, Homo sapiens
ttattgtatgatgca

SEQ ID NO: 1831366 - DNA, 15 bp, Homo sapiens
tattgtatgatgcat

SEQ ID NO: 1831367 - DNA, 15 bp, Homo sapiens
attgtatgatgcatt

SEQ ID NO: 1831368 - DNA, 15 bp, Homo sapiens
ttgtatgatgcattt

SEQ ID NO: 1831369 - DNA, 15 bp, Homo sapiens
tgtatgatgcattta

SEQ ID NO: 1831370 - DNA, 15 bp, Homo sapiens
gtatgatgcatttac

SEQ ID NO: 1831371 - DNA, 15 bp, Homo sapiens
tatgatgcatttact

SEQ ID NO: 1831372 - DNA, 15 bp, Homo sapiens
atgatgcatttactc

SEQ ID NO: 1831373 - DNA, 15 bp, Homo sapiens
tgatgcatttactct

SEQ ID NO: 1831374 - DNA, 15 bp, Homo sapiens
gatgcatttactctt

SEQ ID NO: 1831375 - DNA, 15 bp, Homo sapiens
atgcatttactcttt

SEQ ID NO: 1831376 - DNA, 15 bp, Homo sapiens
tgcatttactctttt

SEQ ID NO: 1831377 - DNA, 15 bp, Homo sapiens
gcatttactcttttc

SEQ ID NO: 1831378 - DNA, 15 bp, Homo sapiens
catttactcttttca

SEQ ID NO: 1831379 - DNA, 15 bp, Homo sapiens
atttactcttttcag

SEQ ID NO: 1831380 - DNA, 15 bp, Homo sapiens
tttactcttttcaga

SEQ ID NO: 1831381 - DNA, 15 bp, Homo sapiens
ttactcttttcagag

SEQ ID NO: 1831382 - DNA, 15 bp, Homo sapiens
tactcttttcagagt

SEQ ID NO: 1831383 - DNA, 15 bp, Homo sapiens
actcttttcagagtt

SEQ ID NO: 1831384 - DNA, 15 bp, Homo sapiens
ctcttttcagagttt

SEQ ID NO: 1831385 - DNA, 15 bp, Homo sapiens
tcttttcagagtttg

SEQ ID NO: 1831386 - DNA, 15 bp, Homo sapiens
cttttcagagtttgg

SEQ ID NO: 1831387 - DNA, 15 bp, Homo sapiens
ttttcagagtttggc

SEQ ID NO: 1831388 - DNA, 15 bp, Homo sapiens
tttcagagtttggcc

SEQ ID NO: 1831389 - DNA, 15 bp, Homo sapiens
ttcagagtttggcca

SEQ ID NO: 1831390 - DNA, 15 bp, Homo sapiens
tcagagtttggccat

SEQ ID NO: 1831391 - DNA, 15 bp, Homo sapiens
cagagtttggccata

SEQ ID NO: 1831392 - DNA, 15 bp, Homo sapiens
agagtttggccatat

SEQ ID NO: 1831393 - DNA, 15 bp, Homo sapiens
gagtttggccatata

SEQ ID NO: 1831394 - DNA, 15 bp, Homo sapiens
agtttggccatataa

SEQ ID NO: 1831395 - DNA, 15 bp, Homo sapiens
gtttggccatataag

SEQ ID NO: 1831396 - DNA, 15 bp, Homo sapiens
tttggccatataagt

SEQ ID NO: 1831397 - DNA, 15 bp, Homo sapiens
ttggccatataagtt

SEQ ID NO: 1831398 - DNA, 15 bp, Homo sapiens
tggccatataagtta

SEQ ID NO: 1831399 - DNA, 15 bp, Homo sapiens
ggccatataagttat

SEQ ID NO: 1831400 - DNA, 15 bp, Homo sapiens
gccatataagttatt

SEQ ID NO: 1831401 - DNA, 15 bp, Homo sapiens
ccatataagttattt

SEQ ID NO: 1831402 - DNA, 15 bp, Homo sapiens
catataagttatttc

SEQ ID NO: 1831403 - DNA, 15 bp, Homo sapiens
atataagttatttct

SEQ ID NO: 1831404 - DNA, 15 bp, Homo sapiens
tataagttatttcta

SEQ ID NO: 1831405 - DNA, 15 bp, Homo sapiens
ataagttatttctaa

SEQ ID NO: 1831406 - DNA, 15 bp, Homo sapiens
taagttatttctaaa

SEQ ID NO: 1831407 - DNA, 15 bp, Homo sapiens
aagttatttctaaat

SEQ ID NO: 1831408 - DNA, 15 bp, Homo sapiens
agttatttctaaata

SEQ ID NO: 1831409 - DNA, 15 bp, Homo sapiens
gttatttctaaatat

SEQ ID NO: 1831410 - DNA, 15 bp, Homo sapiens
ttatttctaaatatt

SEQ ID NO: 1831411 - DNA, 15 bp, Homo sapiens
tatttctaaatattg

SEQ ID NO: 1831412 - DNA, 15 bp, Homo sapiens
atttctaaatattgc

SEQ ID NO: 1831413 - DNA, 15 bp, Homo sapiens
tttctaaatattgct

SEQ ID NO: 1831414 - DNA, 15 bp, Homo sapiens
ttctaaatattgcta

SEQ ID NO: 1831415 - DNA, 15 bp, Homo sapiens
tctaaatattgctat

SEQ ID NO: 1831416 - DNA, 15 bp, Homo sapiens
ctaaatattgctatt

SEQ ID NO: 1831417 - DNA, 15 bp, Homo sapiens
taaatattgctatta

SEQ ID NO: 1831418 - DNA, 15 bp, Homo sapiens
aaatattgctattag

SEQ ID NO: 1831419 - DNA, 15 bp, Homo sapiens
aatattgctattagg

SEQ ID NO: 1831420 - DNA, 15 bp, Homo sapiens
atattgctattagga

SEQ ID NO: 1831421 - DNA, 15 bp, Homo sapiens
tattgctattaggaa

SEQ ID NO: 1831422 - DNA, 15 bp, Homo sapiens
attgctattaggaaa

SEQ ID NO: 1831423 - DNA, 15 bp, Homo sapiens
ttgctattaggaaaa

SEQ ID NO: 1831424 - DNA, 15 bp, Homo sapiens
tgctattaggaaaac

SEQ ID NO: 1831425 - DNA, 15 bp, Homo sapiens
gctattaggaaaaca

SEQ ID NO: 1831426 - DNA, 15 bp, Homo sapiens
ctattaggaaaacac

SEQ ID NO: 1831427 - DNA, 15 bp, Homo sapiens
tattaggaaaacaca

SEQ ID NO: 1831428 - DNA, 15 bp, Homo sapiens
attaggaaaacacat

SEQ ID NO: 1831429 - DNA, 15 bp, Homo sapiens
ttaggaaaacacata

SEQ ID NO: 1831430 - DNA, 15 bp, Homo sapiens
taggaaaacacatat

SEQ ID NO: 1831431 - DNA, 15 bp, Homo sapiens
aggaaaacacatatg

SEQ ID NO: 1831432 - DNA, 15 bp, Homo sapiens
ggaaaacacatatgc

SEQ ID NO: 1831433 - DNA, 15 bp, Homo sapiens
gaaaacacatatgca

SEQ ID NO: 1831434 - DNA, 15 bp, Homo sapiens
aaaacacatatgcat

SEQ ID NO: 1831435 - DNA, 15 bp, Homo sapiens
aaacacatatgcatg

SEQ ID NO: 1831436 - DNA, 15 bp, Homo sapiens
aacacatatgcatgc

SEQ ID NO: 1831437 - DNA, 15 bp, Homo sapiens
acacatatgcatgca

SEQ ID NO: 1831438 - DNA, 15 bp, Homo sapiens
cacatatgcatgcat

SEQ ID NO: 1831439 - DNA, 15 bp, Homo sapiens
acatatgcatgcatt

SEQ ID NO: 1831440 - DNA, 15 bp, Homo sapiens
catatgcatgcattt

SEQ ID NO: 1831441 - DNA, 15 bp, Homo sapiens
atatgcatgcatttc

SEQ ID NO: 1831442 - DNA, 15 bp, Homo sapiens
tatgcatgcatttct

SEQ ID NO: 1831443 - DNA, 15 bp, Homo sapiens
atgcatgcatttctt

SEQ ID NO: 1831444 - DNA, 15 bp, Homo sapiens
tgcatgcatttcttc

SEQ ID NO: 1831445 - DNA, 15 bp, Homo sapiens
gcatgcatttcttct

SEQ ID NO: 1831446 - DNA, 15 bp, Homo sapiens
catgcatttcttcta

SEQ ID NO: 1831447 - DNA, 15 bp, Homo sapiens
atgcatttcttctag

SEQ ID NO: 1831448 - DNA, 15 bp, Homo sapiens
tgcatttcttctaga

SEQ ID NO: 1831449 - DNA, 15 bp, Homo sapiens
gcatttcttctagat

SEQ ID NO: 1831450 - DNA, 15 bp, Homo sapiens
catttcttctagatt

SEQ ID NO: 1831451 - DNA, 15 bp, Homo sapiens
atttcttctagatta

SEQ ID NO: 1831452 - DNA, 15 bp, Homo sapiens
tttcttctagattat

SEQ ID NO: 1831453 - DNA, 15 bp, Homo sapiens
ttcttctagattatc

SEQ ID NO: 1831454 - DNA, 15 bp, Homo sapiens
tcttctagattatca

SEQ ID NO: 1831455 - DNA, 15 bp, Homo sapiens
cttctagattatcat

SEQ ID NO: 1831456 - DNA, 15 bp, Homo sapiens
ttctagattatcatc

SEQ ID NO: 1831457 - DNA, 15 bp, Homo sapiens
tctagattatcatct

SEQ ID NO: 1831458 - DNA, 15 bp, Homo sapiens
ctagattatcatcta

SEQ ID NO: 1831459 - DNA, 15 bp, Homo sapiens
tagattatcatctaa

SEQ ID NO: 1831460 - DNA, 15 bp, Homo sapiens
agattatcatctaag

SEQ ID NO: 1831461 - DNA, 15 bp, Homo sapiens
gattatcatctaaga

SEQ ID NO: 1831462 - DNA, 15 bp, Homo sapiens
attatcatctaagag

SEQ ID NO: 1831463 - DNA, 15 bp, Homo sapiens
ttatcatctaagagt

SEQ ID NO: 1831464 - DNA, 15 bp, Homo sapiens
tatcatctaagagtg

SEQ ID NO: 1831465 - DNA, 15 bp, Homo sapiens
atcatctaagagtgg

SEQ ID NO: 1831466 - DNA, 15 bp, Homo sapiens
tcatctaagagtggc

SEQ ID NO: 1831467 - DNA, 15 bp, Homo sapiens
catctaagagtggct

SEQ ID NO: 1831468 - DNA, 15 bp, Homo sapiens
atctaagagtggctt

SEQ ID NO: 1831469 - DNA, 15 bp, Homo sapiens
tctaagagtggcttc

SEQ ID NO: 1831470 - DNA, 15 bp, Homo sapiens
ctaagagtggcttct

SEQ ID NO: 1831471 - DNA, 15 bp, Homo sapiens
taagagtggcttctc

SEQ ID NO: 1831472 - DNA, 15 bp, Homo sapiens
aagagtggcttctcc

SEQ ID NO: 1831473 - DNA, 15 bp, Homo sapiens
agagtggcttctcca

SEQ ID NO: 1831474 - DNA, 15 bp, Homo sapiens
gagtggcttctccag

SEQ ID NO: 1831475 - DNA, 15 bp, Homo sapiens
agtggcttctccaga

SEQ ID NO: 1831476 - DNA, 15 bp, Homo sapiens
gtggcttctccagag

SEQ ID NO: 1831477 - DNA, 15 bp, Homo sapiens
tggcttctccagaga

SEQ ID NO: 1831478 - DNA, 15 bp, Homo sapiens
ggcttctccagagag

SEQ ID NO: 1831479 - DNA, 15 bp, Homo sapiens
gcttctccagagaga

SEQ ID NO: 1831480 - DNA, 15 bp, Homo sapiens
cttctccagagagag

SEQ ID NO: 1831481 - DNA, 15 bp, Homo sapiens
ttctccagagagaga

SEQ ID NO: 1831482 - DNA, 15 bp, Homo sapiens
tctccagagagagac

SEQ ID NO: 1831483 - DNA, 15 bp, Homo sapiens
ctccagagagagacg

SEQ ID NO: 1831484 - DNA, 15 bp, Homo sapiens
tccagagagagacga

SEQ ID NO: 1831485 - DNA, 15 bp, Homo sapiens
ccagagagagacgac

SEQ ID NO: 1831486 - DNA, 15 bp, Homo sapiens
cagagagagacgact

SEQ ID NO: 1831487 - DNA, 15 bp, Homo sapiens
agagagagacgactg

SEQ ID NO: 1831488 - DNA, 15 bp, Homo sapiens
gagagagacgactga

SEQ ID NO: 1831489 - DNA, 15 bp, Homo sapiens
agagagacgactgaa

SEQ ID NO: 1831490 - DNA, 15 bp, Homo sapiens
gagagacgactgaat

SEQ ID NO: 1831491 - DNA, 15 bp, Homo sapiens
agagacgactgaatt

SEQ ID NO: 1831492 - DNA, 15 bp, Homo sapiens
gagacgactgaatta

SEQ ID NO: 1831493 - DNA, 15 bp, Homo sapiens
agacgactgaattaa

SEQ ID NO: 1831494 - DNA, 15 bp, Homo sapiens
gacgactgaattaaa

SEQ ID NO: 1831495 - DNA, 15 bp, Homo sapiens
acgactgaattaaag

SEQ ID NO: 1831496 - DNA, 15 bp, Homo sapiens
cgactgaattaaagg

SEQ ID NO: 1831497 - DNA, 15 bp, Homo sapiens
gactgaattaaaggt

SEQ ID NO: 1831498 - DNA, 15 bp, Homo sapiens
actgaattaaaggtt

SEQ ID NO: 1831499 - DNA, 15 bp, Homo sapiens
ctgaattaaaggtta

SEQ ID NO: 1831500 - DNA, 15 bp, Homo sapiens
tgaattaaaggttat

SEQ ID NO: 1831501 - DNA, 15 bp, Homo sapiens
gaattaaaggttatc

SEQ ID NO: 1831502 - DNA, 15 bp, Homo sapiens
aattaaaggttatca

SEQ ID NO: 1831503 - DNA, 15 bp, Homo sapiens
attaaaggttatcaa

SEQ ID NO: 1831504 - DNA, 15 bp, Homo sapiens
ttaaaggttatcaac

SEQ ID NO: 1831505 - DNA, 15 bp, Homo sapiens
taaaggttatcaaca

SEQ ID NO: 1831506 - DNA, 15 bp, Homo sapiens
aaaggttatcaacaa

SEQ ID NO: 1831507 - DNA, 15 bp, Homo sapiens
aaggttatcaacaag

SEQ ID NO: 1831508 - DNA, 15 bp, Homo sapiens
aggttatcaacaagt

SEQ ID NO: 1831509 - DNA, 15 bp, Homo sapiens
ggttatcaacaagtt

SEQ ID NO: 1831510 - DNA, 15 bp, Homo sapiens
gttatcaacaagttc

SEQ ID NO: 1831511 - DNA, 15 bp, Homo sapiens
ttatcaacaagttcc

SEQ ID NO: 1831512 - DNA, 15 bp, Homo sapiens
tatcaacaagttcca

SEQ ID NO: 1831513 - DNA, 15 bp, Homo sapiens
atcaacaagttccaa

SEQ ID NO: 1831514 - DNA, 15 bp, Homo sapiens
tcaacaagttccaat

SEQ ID NO: 1831515 - DNA, 15 bp, Homo sapiens
caacaagttccaatt

SEQ ID NO: 1831516 - DNA, 15 bp, Homo sapiens
aacaagttccaattc

SEQ ID NO: 1831517 - DNA, 15 bp, Homo sapiens
acaagttccaattcc

SEQ ID NO: 1831518 - DNA, 15 bp, Homo sapiens
caagttccaattcca

SEQ ID NO: 1831519 - DNA, 15 bp, Homo sapiens
aagttccaattccag

SEQ ID NO: 1831520 - DNA, 15 bp, Homo sapiens
agttccaattccaga

SEQ ID NO: 1831521 - DNA, 15 bp, Homo sapiens
gttccaattccagat

SEQ ID NO: 1831522 - DNA, 15 bp, Homo sapiens
ttccaattccagata

SEQ ID NO: 1831523 - DNA, 15 bp, Homo sapiens
tccaattccagataa

SEQ ID NO: 1831524 - DNA, 15 bp, Homo sapiens
ccaattccagataag

SEQ ID NO: 1831525 - DNA, 15 bp, Homo sapiens
caattccagataaga

SEQ ID NO: 1831526 - DNA, 15 bp, Homo sapiens
aattccagataagat

SEQ ID NO: 1831527 - DNA, 15 bp, Homo sapiens
attccagataagatg

SEQ ID NO: 1831528 - DNA, 15 bp, Homo sapiens
ttccagataagatga

SEQ ID NO: 1831529 - DNA, 15 bp, Homo sapiens
tccagataagatgaa

SEQ ID NO: 1831530 - DNA, 15 bp, Homo sapiens
ccagataagatgaag

SEQ ID NO: 1831531 - DNA, 15 bp, Homo sapiens
cagataagatgaaga

SEQ ID NO: 1831532 - DNA, 15 bp, Homo sapiens
agataagatgaagaa

SEQ ID NO: 1831533 - DNA, 15 bp, Homo sapiens
gataagatgaagaaa

SEQ ID NO: 1831534 - DNA, 15 bp, Homo sapiens
ataagatgaagaaat

SEQ ID NO: 1831535 - DNA, 15 bp, Homo sapiens
taagatgaagaaatc

SEQ ID NO: 1831536 - DNA, 15 bp, Homo sapiens
aagatgaagaaatca

SEQ ID NO: 1831537 - DNA, 15 bp, Homo sapiens
agatgaagaaatcac

SEQ ID NO: 1831538 - DNA, 15 bp, Homo sapiens
gatgaagaaatcaca

SEQ ID NO: 1831539 - DNA, 15 bp, Homo sapiens
atgaagaaatcacat

SEQ ID NO: 1831540 - DNA, 15 bp, Homo sapiens
tgaagaaatcacatt

SEQ ID NO: 1831541 - DNA, 15 bp, Homo sapiens
gaagaaatcacattc

SEQ ID NO: 1831542 - DNA, 15 bp, Homo sapiens
aagaaatcacattcc

SEQ ID NO: 1831543 - DNA, 15 bp, Homo sapiens
agaaatcacattcca

SEQ ID NO: 1831544 - DNA, 15 bp, Homo sapiens
gaaatcacattccac

SEQ ID NO: 1831545 - DNA, 15 bp, Homo sapiens
aaatcacattccaca

SEQ ID NO: 1831546 - DNA, 15 bp, Homo sapiens
aatcacattccacac

SEQ ID NO: 1831547 - DNA, 15 bp, Homo sapiens
atcacattccacact

SEQ ID NO: 1831548 - DNA, 15 bp, Homo sapiens
tcacattccacactg

SEQ ID NO: 1831549 - DNA, 15 bp, Homo sapiens
cacattccacactgc

SEQ ID NO: 1831550 - DNA, 15 bp, Homo sapiens
acattccacactgcc

SEQ ID NO: 1831551 - DNA, 15 bp, Homo sapiens
cattccacactgcct

SEQ ID NO: 1831552 - DNA, 15 bp, Homo sapiens
attccacactgcctc

SEQ ID NO: 1831553 - DNA, 15 bp, Homo sapiens
ttccacactgcctct

SEQ ID NO: 1831554 - DNA, 15 bp, Homo sapiens
tccacactgcctctc

SEQ ID NO: 1831555 - DNA, 15 bp, Homo sapiens
ccacactgcctctcc

SEQ ID NO: 1831556 - DNA, 15 bp, Homo sapiens
cacactgcctctccc

SEQ ID NO: 1831557 - DNA, 15 bp, Homo sapiens
acactgcctctccca

SEQ ID NO: 1831558 - DNA, 15 bp, Homo sapiens
cactgcctctcccac

SEQ ID NO: 1831559 - DNA, 15 bp, Homo sapiens
actgcctctcccact

SEQ ID NO: 1831560 - DNA, 15 bp, Homo sapiens
ctgcctctcccactg

SEQ ID NO: 1831561 - DNA, 15 bp, Homo sapiens
tgcctctcccactga

SEQ ID NO: 1831562 - DNA, 15 bp, Homo sapiens
gcctctcccactgag

SEQ ID NO: 1831563 - DNA, 15 bp, Homo sapiens
cctctcccactgagt

SEQ ID NO: 1831564 - DNA, 15 bp, Homo sapiens
ctctcccactgagtg

SEQ ID NO: 1831565 - DNA, 15 bp, Homo sapiens
tctcccactgagtgt

SEQ ID NO: 1831566 - DNA, 15 bp, Homo sapiens
ctcccactgagtgta

SEQ ID NO: 1831567 - DNA, 15 bp, Homo sapiens
tcccactgagtgtag

SEQ ID NO: 1831568 - DNA, 15 bp, Homo sapiens
cccactgagtgtagc

SEQ ID NO: 1831569 - DNA, 15 bp, Homo sapiens
ccactgagtgtagct

SEQ ID NO: 1831570 - DNA, 15 bp, Homo sapiens
cactgagtgtagctc

SEQ ID NO: 1831571 - DNA, 15 bp, Homo sapiens
actgagtgtagctcc

SEQ ID NO: 1831572 - DNA, 15 bp, Homo sapiens
ctgagtgtagctcca

SEQ ID NO: 1831573 - DNA, 15 bp, Homo sapiens
tgagtgtagctccaa

SEQ ID NO: 1831574 - DNA, 15 bp, Homo sapiens
gagtgtagctccaaa

SEQ ID NO: 1831575 - DNA, 15 bp, Homo sapiens
agtgtagctccaaaa

SEQ ID NO: 1831576 - DNA, 15 bp, Homo sapiens
gtgtagctccaaaac

SEQ ID NO: 1831577 - DNA, 15 bp, Homo sapiens
tgtagctccaaaaca

SEQ ID NO: 1831578 - DNA, 15 bp, Homo sapiens
gtagctccaaaacat

SEQ ID NO: 1831579 - DNA, 15 bp, Homo sapiens
tagctccaaaacatg

SEQ ID NO: 1831580 - DNA, 15 bp, Homo sapiens
agctccaaaacatgg

SEQ ID NO: 1831581 - DNA, 15 bp, Homo sapiens
gctccaaaacatgga

SEQ ID NO: 1831582 - DNA, 15 bp, Homo sapiens
ctccaaaacatggat

SEQ ID NO: 1831583 - DNA, 15 bp, Homo sapiens
tccaaaacatggata

SEQ ID NO: 1831584 - DNA, 15 bp, Homo sapiens
ccaaaacatggatag

SEQ ID NO: 1831585 - DNA, 15 bp, Homo sapiens
caaaacatggataga

SEQ ID NO: 1831586 - DNA, 15 bp, Homo sapiens
aaaacatggatagaa

SEQ ID NO: 1831587 - DNA, 15 bp, Homo sapiens
aaacatggatagaat

SEQ ID NO: 1831588 - DNA, 15 bp, Homo sapiens
aacatggatagaatg

SEQ ID NO: 1831589 - DNA, 15 bp, Homo sapiens
acatggatagaatgc

SEQ ID NO: 1831590 - DNA, 15 bp, Homo sapiens
catggatagaatgca

SEQ ID NO: 1831591 - DNA, 15 bp, Homo sapiens
atggatagaatgcat

SEQ ID NO: 1831592 - DNA, 15 bp, Homo sapiens
tggatagaatgcatg

SEQ ID NO: 1831593 - DNA, 15 bp, Homo sapiens
ggatagaatgcatgt

SEQ ID NO: 1831594 - DNA, 15 bp, Homo sapiens
gatagaatgcatgta

SEQ ID NO: 1831595 - DNA, 15 bp, Homo sapiens
atagaatgcatgtag

SEQ ID NO: 1831596 - DNA, 15 bp, Homo sapiens
tagaatgcatgtagc

SEQ ID NO: 1831597 - DNA, 15 bp, Homo sapiens
agaatgcatgtagca

SEQ ID NO: 1831598 - DNA, 15 bp, Homo sapiens
gaatgcatgtagcag

SEQ ID NO: 1831599 - DNA, 15 bp, Homo sapiens
aatgcatgtagcagc

SEQ ID NO: 1831600 - DNA, 15 bp, Homo sapiens
atgcatgtagcagct

SEQ ID NO: 1831601 - DNA, 15 bp, Homo sapiens
tgcatgtagcagcta

SEQ ID NO: 1831602 - DNA, 15 bp, Homo sapiens
gcatgtagcagctat

SEQ ID NO: 1831603 - DNA, 15 bp, Homo sapiens
catgtagcagctatt

SEQ ID NO: 1831604 - DNA, 15 bp, Homo sapiens
atgtagcagctattt

SEQ ID NO: 1831605 - DNA, 15 bp, Homo sapiens
tgtagcagctatttg

SEQ ID NO: 1831606 - DNA, 15 bp, Homo sapiens
gtagcagctatttga

SEQ ID NO: 1831607 - DNA, 15 bp, Homo sapiens
tagcagctatttgac

SEQ ID NO: 1831608 - DNA, 15 bp, Homo sapiens
agcagctatttgacg

SEQ ID NO: 1831609 - DNA, 15 bp, Homo sapiens
gcagctatttgacga

SEQ ID NO: 1831610 - DNA, 15 bp, Homo sapiens
cagctatttgacgac

SEQ ID NO: 1831611 - DNA, 15 bp, Homo sapiens
agctatttgacgacc

SEQ ID NO: 1831612 - DNA, 15 bp, Homo sapiens
gctatttgacgaccc

SEQ ID NO: 1831613 - DNA, 15 bp, Homo sapiens
ctatttgacgaccct

SEQ ID NO: 1831614 - DNA, 15 bp, Homo sapiens
tatttgacgacccta

SEQ ID NO: 1831615 - DNA, 15 bp, Homo sapiens
atttgacgaccctaa

SEQ ID NO: 1831616 - DNA, 15 bp, Homo sapiens
tttgacgaccctaaa

SEQ ID NO: 1831617 - DNA, 15 bp, Homo sapiens
ttgacgaccctaaaa

SEQ ID NO: 1831618 - DNA, 15 bp, Homo sapiens
tgacgaccctaaaaa

SEQ ID NO: 1831619 - DNA, 15 bp, Homo sapiens
gacgaccctaaaaag

SEQ ID NO: 1831620 - DNA, 15 bp, Homo sapiens
acgaccctaaaaagt

SEQ ID NO: 1831621 - DNA, 15 bp, Homo sapiens
cgaccctaaaaagta

SEQ ID NO: 1831622 - DNA, 15 bp, Homo sapiens
gaccctaaaaagtaa

SEQ ID NO: 1831623 - DNA, 15 bp, Homo sapiens
accctaaaaagtaaa

SEQ ID NO: 1831624 - DNA, 15 bp, Homo sapiens
ccctaaaaagtaaat

SEQ ID NO: 1831625 - DNA, 15 bp, Homo sapiens
cctaaaaagtaaatc

SEQ ID NO: 1831626 - DNA, 15 bp, Homo sapiens
ctaaaaagtaaatcg

SEQ ID NO: 1831627 - DNA, 15 bp, Homo sapiens
taaaaagtaaatcgc

SEQ ID NO: 1831628 - DNA, 15 bp, Homo sapiens
aaaaagtaaatcgca

SEQ ID NO: 1831629 - DNA, 15 bp, Homo sapiens
aaaagtaaatcgcag

SEQ ID NO: 1831630 - DNA, 15 bp, Homo sapiens
aaagtaaatcgcagt

SEQ ID NO: 1831631 - DNA, 15 bp, Homo sapiens
aagtaaatcgcagtg

SEQ ID NO: 1831632 - DNA, 15 bp, Homo sapiens
agtaaatcgcagtgt

SEQ ID NO: 1831633 - DNA, 15 bp, Homo sapiens
gtaaatcgcagtgta

SEQ ID NO: 1831634 - DNA, 15 bp, Homo sapiens
taaatcgcagtgtat

SEQ ID NO: 1831635 - DNA, 15 bp, Homo sapiens
aaatcgcagtgtatt

SEQ ID NO: 1831636 - DNA, 15 bp, Homo sapiens
aatcgcagtgtattg

SEQ ID NO: 1831637 - DNA, 15 bp, Homo sapiens
atcgcagtgtattgc

SEQ ID NO: 1831638 - DNA, 15 bp, Homo sapiens
tcgcagtgtattgca

SEQ ID NO: 1831639 - DNA, 15 bp, Homo sapiens
cgcagtgtattgcag

SEQ ID NO: 1831640 - DNA, 15 bp, Homo sapiens
gcagtgtattgcaga

SEQ ID NO: 1831641 - DNA, 15 bp, Homo sapiens
cagtgtattgcagaa

SEQ ID NO: 1831642 - DNA, 15 bp, Homo sapiens
agtgtattgcagaat

SEQ ID NO: 1831643 - DNA, 15 bp, Homo sapiens
gtgtattgcagaata

SEQ ID NO: 1831644 - DNA, 15 bp, Homo sapiens
tgtattgcagaataa

SEQ ID NO: 1831645 - DNA, 15 bp, Homo sapiens
gtattgcagaataag

SEQ ID NO: 1831646 - DNA, 15 bp, Homo sapiens
tattgcagaataaga

SEQ ID NO: 1831647 - DNA, 15 bp, Homo sapiens
attgcagaataagac

SEQ ID NO: 1831648 - DNA, 15 bp, Homo sapiens
ttgcagaataagact

SEQ ID NO: 1831649 - DNA, 15 bp, Homo sapiens
tgcagaataagacta

SEQ ID NO: 1831650 - DNA, 15 bp, Homo sapiens
gcagaataagactac

SEQ ID NO: 1831651 - DNA, 15 bp, Homo sapiens
cagaataagactaca

SEQ ID NO: 1831652 - DNA, 15 bp, Homo sapiens
agaataagactacaa

SEQ ID NO: 1831653 - DNA, 15 bp, Homo sapiens
gaataagactacaat

SEQ ID NO: 1831654 - DNA, 15 bp, Homo sapiens
aataagactacaatt

SEQ ID NO: 1831655 - DNA, 15 bp, Homo sapiens
ataagactacaatta

SEQ ID NO: 1831656 - DNA, 15 bp, Homo sapiens
aatatggcttccagg

SEQ ID NO: 1831657 - DNA, 15 bp, Homo sapiens
atatggcttccaggg

SEQ ID NO: 1831658 - DNA, 15 bp, Homo sapiens
tatggcttccagggt

SEQ ID NO: 1831659 - DNA, 15 bp, Homo sapiens
atggcttccagggtg

SEQ ID NO: 1831660 - DNA, 15 bp, Homo sapiens
tggcttccagggtga

SEQ ID NO: 1831661 - DNA, 15 bp, Homo sapiens
ggcttccagggtgag

SEQ ID NO: 1831662 - DNA, 15 bp, Homo sapiens
gcttccagggtgaga

SEQ ID NO: 1831663 - DNA, 15 bp, Homo sapiens
cttccagggtgagag

SEQ ID NO: 1831664 - DNA, 15 bp, Homo sapiens
ttccagggtgagaga

SEQ ID NO: 1831665 - DNA, 15 bp, Homo sapiens
tccagggtgagagat

SEQ ID NO: 1831666 - DNA, 15 bp, Homo sapiens
ccagggtgagagata

SEQ ID NO: 1831667 - DNA, 15 bp, Homo sapiens
cagggtgagagatat

SEQ ID NO: 1831668 - DNA, 15 bp, Homo sapiens
agggtgagagatata

SEQ ID NO: 1831669 - DNA, 15 bp, Homo sapiens
gggtgagagatatag

SEQ ID NO: 1831670 - DNA, 15 bp, Homo sapiens
ggtgagagatatagg

SEQ ID NO: 1831671 - DNA, 15 bp, Homo sapiens
gtgagagatataggg

SEQ ID NO: 1831672 - DNA, 15 bp, Homo sapiens
tgagagatataggga

SEQ ID NO: 1831673 - DNA, 15 bp, Homo sapiens
gagagatatagggaa

SEQ ID NO: 1831674 - DNA, 15 bp, Homo sapiens
agagatatagggaat

SEQ ID NO: 1831675 - DNA, 15 bp, Homo sapiens
gagatatagggaatc

SEQ ID NO: 1831676 - DNA, 15 bp, Homo sapiens
agatatagggaatcc

SEQ ID NO: 1831677 - DNA, 15 bp, Homo sapiens
gatatagggaatccc

SEQ ID NO: 1831678 - DNA, 15 bp, Homo sapiens
atatagggaatccca

SEQ ID NO: 1831679 - DNA, 15 bp, Homo sapiens
tatagggaatcccac

SEQ ID NO: 1831680 - DNA, 15 bp, Homo sapiens
atagggaatcccaca

SEQ ID NO: 1831681 - DNA, 15 bp, Homo sapiens
tagggaatcccacag

SEQ ID NO: 1831682 - DNA, 15 bp, Homo sapiens
agggaatcccacagt

SEQ ID NO: 1831683 - DNA, 15 bp, Homo sapiens
gggaatcccacagtg

SEQ ID NO: 1831684 - DNA, 15 bp, Homo sapiens
ggaatcccacagtgc

SEQ ID NO: 1831685 - DNA, 15 bp, Homo sapiens
gaatcccacagtgcc

SEQ ID NO: 1831686 - DNA, 15 bp, Homo sapiens
aatcccacagtgccc

SEQ ID NO: 1831687 - DNA, 15 bp, Homo sapiens
atcccacagtgccct

SEQ ID NO: 1831688 - DNA, 15 bp, Homo sapiens
tcccacagtgccctt

SEQ ID NO: 1831689 - DNA, 15 bp, Homo sapiens
cccacagtgcccttg

SEQ ID NO: 1831690 - DNA, 15 bp, Homo sapiens
ccacagtgcccttgg

SEQ ID NO: 1831691 - DNA, 15 bp, Homo sapiens
cacagtgcccttggg

SEQ ID NO: 1831692 - DNA, 15 bp, Homo sapiens
acagtgcccttgggg

SEQ ID NO: 1831693 - DNA, 15 bp, Homo sapiens
cagtgcccttggggg

SEQ ID NO: 1831694 - DNA, 15 bp, Homo sapiens
agtgcccttggggga

SEQ ID NO: 1831695 - DNA, 15 bp, Homo sapiens
gtgcccttgggggac

SEQ ID NO: 1831696 - DNA, 15 bp, Homo sapiens
tgcccttgggggaca

SEQ ID NO: 1831697 - DNA, 15 bp, Homo sapiens
gcccttgggggacac

SEQ ID NO: 1831698 - DNA, 15 bp, Homo sapiens
cccttgggggacaca

SEQ ID NO: 1831699 - DNA, 15 bp, Homo sapiens
ccttgggggacacag

SEQ ID NO: 1831700 - DNA, 15 bp, Homo sapiens
cttgggggacacagt

SEQ ID NO: 1831701 - DNA, 15 bp, Homo sapiens
ttgggggacacagta

SEQ ID NO: 1831702 - DNA, 15 bp, Homo sapiens
tgggggacacagtaa

SEQ ID NO: 1831703 - DNA, 15 bp, Homo sapiens
gggggacacagtaat

SEQ ID NO: 1831704 - DNA, 15 bp, Homo sapiens
ggggacacagtaatg

SEQ ID NO: 1831705 - DNA, 15 bp, Homo sapiens
gggacacagtaatgt

SEQ ID NO: 1831706 - DNA, 15 bp, Homo sapiens
ggacacagtaatgtg

SEQ ID NO: 1831707 - DNA, 15 bp, Homo sapiens
gacacagtaatgtgg

SEQ ID NO: 1831708 - DNA, 15 bp, Homo sapiens
acacagtaatgtggc

SEQ ID NO: 1831709 - DNA, 15 bp, Homo sapiens
cacagtaatgtggct

SEQ ID NO: 1831710 - DNA, 15 bp, Homo sapiens
acagtaatgtggctc

SEQ ID NO: 1831711 - DNA, 15 bp, Homo sapiens
cagtaatgtggctca

SEQ ID NO: 1831712 - DNA, 15 bp, Homo sapiens
agtaatgtggctcag

SEQ ID NO: 1831713 - DNA, 15 bp, Homo sapiens
gtaatgtggctcaga

SEQ ID NO: 1831714 - DNA, 15 bp, Homo sapiens
taatgtggctcagac

SEQ ID NO: 1831715 - DNA, 15 bp, Homo sapiens
aatgtggctcagaca

SEQ ID NO: 1831716 - DNA, 15 bp, Homo sapiens
atgtggctcagacat

SEQ ID NO: 1831717 - DNA, 15 bp, Homo sapiens
tgtggctcagacata

SEQ ID NO: 1831718 - DNA, 15 bp, Homo sapiens
gtggctcagacatag

SEQ ID NO: 1831719 - DNA, 15 bp, Homo sapiens
tggctcagacataga

SEQ ID NO: 1831720 - DNA, 15 bp, Homo sapiens
ggctcagacatagac

SEQ ID NO: 1831721 - DNA, 15 bp, Homo sapiens
gctcagacatagacc

SEQ ID NO: 1831722 - DNA, 15 bp, Homo sapiens
ctcagacatagacca

SEQ ID NO: 1831723 - DNA, 15 bp, Homo sapiens
tcagacatagaccac

SEQ ID NO: 1831724 - DNA, 15 bp, Homo sapiens
cagacatagaccact

SEQ ID NO: 1831725 - DNA, 15 bp, Homo sapiens
agacatagaccactg

SEQ ID NO: 1831726 - DNA, 15 bp, Homo sapiens
gacatagaccactgt

SEQ ID NO: 1831727 - DNA, 15 bp, Homo sapiens
acatagaccactgta

SEQ ID NO: 1831728 - DNA, 15 bp, Homo sapiens
catagaccactgtac

SEQ ID NO: 1831729 - DNA, 15 bp, Homo sapiens
atagaccactgtaca

SEQ ID NO: 1831730 - DNA, 15 bp, Homo sapiens
tagaccactgtacag

SEQ ID NO: 1831731 - DNA, 15 bp, Homo sapiens
agaccactgtacaga

SEQ ID NO: 1831732 - DNA, 15 bp, Homo sapiens
gaccactgtacagat

SEQ ID NO: 1831733 - DNA, 15 bp, Homo sapiens
accactgtacagatc

SEQ ID NO: 1831734 - DNA, 15 bp, Homo sapiens
ccactgtacagatcc

SEQ ID NO: 1831735 - DNA, 15 bp, Homo sapiens
cactgtacagatcca

SEQ ID NO: 1831736 - DNA, 15 bp, Homo sapiens
actgtacagatccag

SEQ ID NO: 1831737 - DNA, 15 bp, Homo sapiens
ctgtacagatccagc

SEQ ID NO: 1831738 - DNA, 15 bp, Homo sapiens
tgtacagatccagca

SEQ ID NO: 1831739 - DNA, 15 bp, Homo sapiens
gtacagatccagcag

SEQ ID NO: 1831740 - DNA, 15 bp, Homo sapiens
tacagatccagcagc

SEQ ID NO: 1831741 - DNA, 15 bp, Homo sapiens
acagatccagcagca

SEQ ID NO: 1831742 - DNA, 15 bp, Homo sapiens
cagatccagcagcac

SEQ ID NO: 1831743 - DNA, 15 bp, Homo sapiens
agatccagcagcaca

SEQ ID NO: 1831744 - DNA, 15 bp, Homo sapiens
gatccagcagcacag

SEQ ID NO: 1831745 - DNA, 15 bp, Homo sapiens
atccagcagcacagg

SEQ ID NO: 1831746 - DNA, 15 bp, Homo sapiens
tccagcagcacagga

SEQ ID NO: 1831747 - DNA, 15 bp, Homo sapiens
ccagcagcacaggaa

SEQ ID NO: 1831748 - DNA, 15 bp, Homo sapiens
cagcagcacaggaag

SEQ ID NO: 1831749 - DNA, 15 bp, Homo sapiens
agcagcacaggaagg

SEQ ID NO: 1831750 - DNA, 15 bp, Homo sapiens
gcagcacaggaaggg

SEQ ID NO: 1831751 - DNA, 15 bp, Homo sapiens
cagcacaggaagggc

SEQ ID NO: 1831752 - DNA, 15 bp, Homo sapiens
agcacaggaagggct

SEQ ID NO: 1831753 - DNA, 15 bp, Homo sapiens
gcacaggaagggctg

SEQ ID NO: 1831754 - DNA, 15 bp, Homo sapiens
cacaggaagggctgc

SEQ ID NO: 1831755 - DNA, 15 bp, Homo sapiens
acaggaagggctgca

SEQ ID NO: 1831756 - DNA, 15 bp, Homo sapiens
caggaagggctgcag

SEQ ID NO: 1831757 - DNA, 15 bp, Homo sapiens
aggaagggctgcagg

SEQ ID NO: 1831758 - DNA, 15 bp, Homo sapiens
ggaagggctgcaggc

SEQ ID NO: 1831759 - DNA, 15 bp, Homo sapiens
gaagggctgcaggcc

SEQ ID NO: 1831760 - DNA, 15 bp, Homo sapiens
aagggctgcaggcct

SEQ ID NO: 1831761 - DNA, 15 bp, Homo sapiens
agggctgcaggcctg

SEQ ID NO: 1831762 - DNA, 15 bp, Homo sapiens
gggctgcaggcctgg

SEQ ID NO: 1831763 - DNA, 15 bp, Homo sapiens
ggctgcaggcctggg

SEQ ID NO: 1831764 - DNA, 15 bp, Homo sapiens
gctgcaggcctggga

SEQ ID NO: 1831765 - DNA, 15 bp, Homo sapiens
ctgcaggcctgggag

SEQ ID NO: 1831766 - DNA, 15 bp, Homo sapiens
tgcaggcctgggaga

SEQ ID NO: 1831767 - DNA, 15 bp, Homo sapiens
gcaggcctgggagaa

SEQ ID NO: 1831768 - DNA, 15 bp, Homo sapiens
caggcctgggagaaa

SEQ ID NO: 1831769 - DNA, 15 bp, Homo sapiens
aggcctgggagaaaa

SEQ ID NO: 1831770 - DNA, 15 bp, Homo sapiens
ggcctgggagaaaag

SEQ ID NO: 1831771 - DNA, 15 bp, Homo sapiens
gcctgggagaaaagt

SEQ ID NO: 1831772 - DNA, 15 bp, Homo sapiens
cctgggagaaaagtg

SEQ ID NO: 1831773 - DNA, 15 bp, Homo sapiens
ctgggagaaaagtga

SEQ ID NO: 1831774 - DNA, 15 bp, Homo sapiens
tgggagaaaagtgac

SEQ ID NO: 1831775 - DNA, 15 bp, Homo sapiens
gggagaaaagtgaca

SEQ ID NO: 1831776 - DNA, 15 bp, Homo sapiens
ggagaaaagtgacag

SEQ ID NO: 1831777 - DNA, 15 bp, Homo sapiens
gagaaaagtgacagc

SEQ ID NO: 1831778 - DNA, 15 bp, Homo sapiens
agaaaagtgacagca

SEQ ID NO: 1831779 - DNA, 15 bp, Homo sapiens
gaaaagtgacagcag

SEQ ID NO: 1831780 - DNA, 15 bp, Homo sapiens
aaaagtgacagcaga

SEQ ID NO: 1831781 - DNA, 15 bp, Homo sapiens
aaagtgacagcagat

SEQ ID NO: 1831782 - DNA, 15 bp, Homo sapiens
aagtgacagcagatg

SEQ ID NO: 1831783 - DNA, 15 bp, Homo sapiens
agtgacagcagatgg

SEQ ID NO: 1831784 - DNA, 15 bp, Homo sapiens
gtgacagcagatggc

SEQ ID NO: 1831785 - DNA, 15 bp, Homo sapiens
tgacagcagatggcc

SEQ ID NO: 1831786 - DNA, 15 bp, Homo sapiens
gacagcagatggccg

SEQ ID NO: 1831787 - DNA, 15 bp, Homo sapiens
acagcagatggccgg

SEQ ID NO: 1831788 - DNA, 15 bp, Homo sapiens
cagcagatggccggt

SEQ ID NO: 1831789 - DNA, 15 bp, Homo sapiens
agcagatggccggtc

SEQ ID NO: 1831790 - DNA, 15 bp, Homo sapiens
gcagatggccggtcc

SEQ ID NO: 1831791 - DNA, 15 bp, Homo sapiens
cagatggccggtcca

SEQ ID NO: 1831792 - DNA, 15 bp, Homo sapiens
agatggccggtccag

SEQ ID NO: 1831793 - DNA, 15 bp, Homo sapiens
gatggccggtccagg

SEQ ID NO: 1831794 - DNA, 15 bp, Homo sapiens
atggccggtccaggc

SEQ ID NO: 1831795 - DNA, 15 bp, Homo sapiens
tggccggtccaggct

SEQ ID NO: 1831796 - DNA, 15 bp, Homo sapiens
ggccggtccaggctt

SEQ ID NO: 1831797 - DNA, 15 bp, Homo sapiens
gccggtccaggcttt

SEQ ID NO: 1831798 - DNA, 15 bp, Homo sapiens
ccggtccaggctttc

SEQ ID NO: 1831799 - DNA, 15 bp, Homo sapiens
cggtccaggctttct

SEQ ID NO: 1831800 - DNA, 15 bp, Homo sapiens
ggtccaggctttctg

SEQ ID NO: 1831801 - DNA, 15 bp, Homo sapiens
gtccaggctttctgg

SEQ ID NO: 1831802 - DNA, 15 bp, Homo sapiens
tccaggctttctggg

SEQ ID NO: 1831803 - DNA, 15 bp, Homo sapiens
ccaggctttctgggt

SEQ ID NO: 1831804 - DNA, 15 bp, Homo sapiens
caggctttctgggta

SEQ ID NO: 1831805 - DNA, 15 bp, Homo sapiens
aggctttctgggtac

SEQ ID NO: 1831806 - DNA, 15 bp, Homo sapiens
ggctttctgggtacc

SEQ ID NO: 1831807 - DNA, 15 bp, Homo sapiens
gctttctgggtaccc

SEQ ID NO: 1831808 - DNA, 15 bp, Homo sapiens
ctttctgggtaccca

SEQ ID NO: 1831809 - DNA, 15 bp, Homo sapiens
tttctgggtacccag

SEQ ID NO: 1831810 - DNA, 15 bp, Homo sapiens
ttctgggtacccagg

SEQ ID NO: 1831811 - DNA, 15 bp, Homo sapiens
tctgggtacccaggc

SEQ ID NO: 1831812 - DNA, 15 bp, Homo sapiens
ctgggtacccaggcc

SEQ ID NO: 1831813 - DNA, 15 bp, Homo sapiens
tgggtacccaggcct

SEQ ID NO: 1831814 - DNA, 15 bp, Homo sapiens
gggtacccaggcctg

SEQ ID NO: 1831815 - DNA, 15 bp, Homo sapiens
ggtacccaggcctgt

SEQ ID NO: 1831816 - DNA, 15 bp, Homo sapiens
gtacccaggcctgta

SEQ ID NO: 1831817 - DNA, 15 bp, Homo sapiens
tacccaggcctgtaa

SEQ ID NO: 1831818 - DNA, 15 bp, Homo sapiens
acccaggcctgtaag

SEQ ID NO: 1831819 - DNA, 15 bp, Homo sapiens
cccaggcctgtaagg

SEQ ID NO: 1831820 - DNA, 15 bp, Homo sapiens
ccaggcctgtaaggc

SEQ ID NO: 1831821 - DNA, 15 bp, Homo sapiens
caggcctgtaaggcc

SEQ ID NO: 1831822 - DNA, 15 bp, Homo sapiens
aggcctgtaaggcca

SEQ ID NO: 1831823 - DNA, 15 bp, Homo sapiens
ggcctgtaaggccac

SEQ ID NO: 1831824 - DNA, 15 bp, Homo sapiens
gcctgtaaggccaca

SEQ ID NO: 1831825 - DNA, 15 bp, Homo sapiens
cctgtaaggccacac

SEQ ID NO: 1831826 - DNA, 15 bp, Homo sapiens
ctgtaaggccacact

SEQ ID NO: 1831827 - DNA, 15 bp, Homo sapiens
tgtaaggccacactc

SEQ ID NO: 1831828 - DNA, 15 bp, Homo sapiens
gtaaggccacactca

SEQ ID NO: 1831829 - DNA, 15 bp, Homo sapiens
taaggccacactcat

SEQ ID NO: 1831830 - DNA, 15 bp, Homo sapiens
aaggccacactcata

SEQ ID NO: 1831831 - DNA, 15 bp, Homo sapiens
aggccacactcatat

SEQ ID NO: 1831832 - DNA, 15 bp, Homo sapiens
ggccacactcatatg

SEQ ID NO: 1831833 - DNA, 15 bp, Homo sapiens
gccacactcatatga

SEQ ID NO: 1831834 - DNA, 15 bp, Homo sapiens
ccacactcatatgag

SEQ ID NO: 1831835 - DNA, 15 bp, Homo sapiens
cacactcatatgagg

SEQ ID NO: 1831836 - DNA, 15 bp, Homo sapiens
acactcatatgaggc

SEQ ID NO: 1831837 - DNA, 15 bp, Homo sapiens
cactcatatgaggca

SEQ ID NO: 1831838 - DNA, 15 bp, Homo sapiens
actcatatgaggcag

SEQ ID NO: 1831839 - DNA, 15 bp, Homo sapiens
ctcatatgaggcagg

SEQ ID NO: 1831840 - DNA, 15 bp, Homo sapiens
tcatatgaggcaggc

SEQ ID NO: 1831841 - DNA, 15 bp, Homo sapiens
catatgaggcaggca

SEQ ID NO: 1831842 - DNA, 15 bp, Homo sapiens
atatgaggcaggcag

SEQ ID NO: 1831843 - DNA, 15 bp, Homo sapiens
tatgaggcaggcagc

SEQ ID NO: 1831844 - DNA, 15 bp, Homo sapiens
atgaggcaggcagca

SEQ ID NO: 1831845 - DNA, 15 bp, Homo sapiens
tgaggcaggcagcac

SEQ ID NO: 1831846 - DNA, 15 bp, Homo sapiens
gaggcaggcagcacc

SEQ ID NO: 1831847 - DNA, 15 bp, Homo sapiens
aggcaggcagcaccc

SEQ ID NO: 1831848 - DNA, 15 bp, Homo sapiens
ggcaggcagcacccc

SEQ ID NO: 1831849 - DNA, 15 bp, Homo sapiens
gcaggcagcacccct

SEQ ID NO: 1831850 - DNA, 15 bp, Homo sapiens
caggcagcacccctt

SEQ ID NO: 1831851 - DNA, 15 bp, Homo sapiens
aggcagcaccccttg

SEQ ID NO: 1831852 - DNA, 15 bp, Homo sapiens
ggcagcaccccttgg

SEQ ID NO: 1831853 - DNA, 15 bp, Homo sapiens
gcagcaccccttgga

SEQ ID NO: 1831854 - DNA, 15 bp, Homo sapiens
cagcaccccttggaa

SEQ ID NO: 1831855 - DNA, 15 bp, Homo sapiens
agcaccccttggaac

SEQ ID NO: 1831856 - DNA, 15 bp, Homo sapiens
gcaccccttggaaca

SEQ ID NO: 1831857 - DNA, 15 bp, Homo sapiens
caccccttggaacaa

SEQ ID NO: 1831858 - DNA, 15 bp, Homo sapiens
accccttggaacaat

SEQ ID NO: 1831859 - DNA, 15 bp, Homo sapiens
ccccttggaacaata

SEQ ID NO: 1831860 - DNA, 15 bp, Homo sapiens
cccttggaacaatat

SEQ ID NO: 1831861 - DNA, 15 bp, Homo sapiens
ccttggaacaatatc

SEQ ID NO: 1831862 - DNA, 15 bp, Homo sapiens
cttggaacaatatct

SEQ ID NO: 1831863 - DNA, 15 bp, Homo sapiens
ttggaacaatatcta

SEQ ID NO: 1831864 - DNA, 15 bp, Homo sapiens
tggaacaatatctat

SEQ ID NO: 1831865 - DNA, 15 bp, Homo sapiens
ggaacaatatctatg

SEQ ID NO: 1831866 - DNA, 15 bp, Homo sapiens
gaacaatatctatgg

SEQ ID NO: 1831867 - DNA, 15 bp, Homo sapiens
aacaatatctatggt

SEQ ID NO: 1831868 - DNA, 15 bp, Homo sapiens
acaatatctatggta

SEQ ID NO: 1831869 - DNA, 15 bp, Homo sapiens
caatatctatggtag

SEQ ID NO: 1831870 - DNA, 15 bp, Homo sapiens
aatatctatggtagg

SEQ ID NO: 1831871 - DNA, 15 bp, Homo sapiens
atatctatggtaggt

SEQ ID NO: 1831872 - DNA, 15 bp, Homo sapiens
tatctatggtaggtc

SEQ ID NO: 1831873 - DNA, 15 bp, Homo sapiens
atctatggtaggtct

SEQ ID NO: 1831874 - DNA, 15 bp, Homo sapiens
tctatggtaggtcta

SEQ ID NO: 1831875 - DNA, 15 bp, Homo sapiens
ctatggtaggtctat

SEQ ID NO: 1831876 - DNA, 15 bp, Homo sapiens
tatggtaggtctata

SEQ ID NO: 1831877 - DNA, 15 bp, Homo sapiens
atggtaggtctatag

SEQ ID NO: 1831878 - DNA, 15 bp, Homo sapiens
tggtaggtctataga

SEQ ID NO: 1831879 - DNA, 15 bp, Homo sapiens
ggtaggtctatagac

SEQ ID NO: 1831880 - DNA, 15 bp, Homo sapiens
gtaggtctatagacc

SEQ ID NO: 1831881 - DNA, 15 bp, Homo sapiens
taggtctatagacca

SEQ ID NO: 1831882 - DNA, 15 bp, Homo sapiens
aggtctatagaccaa

SEQ ID NO: 1831883 - DNA, 15 bp, Homo sapiens
ggtctatagaccaag

SEQ ID NO: 1831884 - DNA, 15 bp, Homo sapiens
gtctatagaccaagg

SEQ ID NO: 1831885 - DNA, 15 bp, Homo sapiens
tctatagaccaaggg

SEQ ID NO: 1831886 - DNA, 15 bp, Homo sapiens
ctatagaccaagggc

SEQ ID NO: 1831887 - DNA, 15 bp, Homo sapiens
tatagaccaagggct

SEQ ID NO: 1831888 - DNA, 15 bp, Homo sapiens
atagaccaagggctc

SEQ ID NO: 1831889 - DNA, 15 bp, Homo sapiens
tagaccaagggctct

SEQ ID NO: 1831890 - DNA, 15 bp, Homo sapiens
agaccaagggctctg

SEQ ID NO: 1831891 - DNA, 15 bp, Homo sapiens
gaccaagggctctgc

SEQ ID NO: 1831892 - DNA, 15 bp, Homo sapiens
accaagggctctgct

SEQ ID NO: 1831893 - DNA, 15 bp, Homo sapiens
ccaagggctctgctc

SEQ ID NO: 1831894 - DNA, 15 bp, Homo sapiens
caagggctctgctct

SEQ ID NO: 1831895 - DNA, 15 bp, Homo sapiens
aagggctctgctctg

SEQ ID NO: 1831896 - DNA, 15 bp, Homo sapiens
agggctctgctctgt

SEQ ID NO: 1831897 - DNA, 15 bp, Homo sapiens
gggctctgctctgtg

SEQ ID NO: 1831898 - DNA, 15 bp, Homo sapiens
ggctctgctctgtgc

SEQ ID NO: 1831899 - DNA, 15 bp, Homo sapiens
gctctgctctgtgcc

SEQ ID NO: 1831900 - DNA, 15 bp, Homo sapiens
ctctgctctgtgccg

SEQ ID NO: 1831901 - DNA, 15 bp, Homo sapiens
tctgctctgtgccgc

SEQ ID NO: 1831902 - DNA, 15 bp, Homo sapiens
ctgctctgtgccgca

SEQ ID NO: 1831903 - DNA, 15 bp, Homo sapiens
tgctctgtgccgcag

SEQ ID NO: 1831904 - DNA, 15 bp, Homo sapiens
gctctgtgccgcaga

SEQ ID NO: 1831905 - DNA, 15 bp, Homo sapiens
ctctgtgccgcagac

SEQ ID NO: 1831906 - DNA, 15 bp, Homo sapiens
tctgtgccgcagaca

SEQ ID NO: 1831907 - DNA, 15 bp, Homo sapiens
ctgtgccgcagacat

SEQ ID NO: 1831908 - DNA, 15 bp, Homo sapiens
tgtgccgcagacatc

SEQ ID NO: 1831909 - DNA, 15 bp, Homo sapiens
gtgccgcagacatcc

SEQ ID NO: 1831910 - DNA, 15 bp, Homo sapiens
tgccgcagacatcca

SEQ ID NO: 1831911 - DNA, 15 bp, Homo sapiens
gccgcagacatccac

SEQ ID NO: 1831912 - DNA, 15 bp, Homo sapiens
ccgcagacatccaca

SEQ ID NO: 1831913 - DNA, 15 bp, Homo sapiens
cgcagacatccacac

SEQ ID NO: 1831914 - DNA, 15 bp, Homo sapiens
gcagacatccacaca

SEQ ID NO: 1831915 - DNA, 15 bp, Homo sapiens
cagacatccacacac

SEQ ID NO: 1831916 - DNA, 15 bp, Homo sapiens
agacatccacacaca

SEQ ID NO: 1831917 - DNA, 15 bp, Homo sapiens
gacatccacacacat

SEQ ID NO: 1831918 - DNA, 15 bp, Homo sapiens
acatccacacacata

SEQ ID NO: 1831919 - DNA, 15 bp, Homo sapiens
catccacacacatac

SEQ ID NO: 1831920 - DNA, 15 bp, Homo sapiens
atccacacacataca

SEQ ID NO: 1831921 - DNA, 15 bp, Homo sapiens
tccacacacatacat

SEQ ID NO: 1831922 - DNA, 15 bp, Homo sapiens
ccacacacatacata

SEQ ID NO: 1831923 - DNA, 15 bp, Homo sapiens
cacacacatacatag

SEQ ID NO: 1831924 - DNA, 15 bp, Homo sapiens
acacacatacatagg

SEQ ID NO: 1831925 - DNA, 15 bp, Homo sapiens
cacacatacataggt

SEQ ID NO: 1831926 - DNA, 15 bp, Homo sapiens
acacatacataggta

SEQ ID NO: 1831927 - DNA, 15 bp, Homo sapiens
cacatacataggtac

SEQ ID NO: 1831928 - DNA, 15 bp, Homo sapiens
acatacataggtaca

SEQ ID NO: 1831929 - DNA, 15 bp, Homo sapiens
catacataggtacac

SEQ ID NO: 1831930 - DNA, 15 bp, Homo sapiens
atacataggtacaca

SEQ ID NO: 1831931 - DNA, 15 bp, Homo sapiens
tacataggtacacat

SEQ ID NO: 1831932 - DNA, 15 bp, Homo sapiens
acataggtacacatg

SEQ ID NO: 1831933 - DNA, 15 bp, Homo sapiens
cataggtacacatga

SEQ ID NO: 1831934 - DNA, 15 bp, Homo sapiens
ataggtacacatgac

SEQ ID NO: 1831935 - DNA, 15 bp, Homo sapiens
taggtacacatgaca

SEQ ID NO: 1831936 - DNA, 15 bp, Homo sapiens
aggtacacatgacat

SEQ ID NO: 1831937 - DNA, 15 bp, Homo sapiens
ggtacacatgacata

SEQ ID NO: 1831938 - DNA, 15 bp, Homo sapiens
gtacacatgacatag

SEQ ID NO: 1831939 - DNA, 15 bp, Homo sapiens
tacacatgacataga

SEQ ID NO: 1831940 - DNA, 15 bp, Homo sapiens
acacatgacatagaa

SEQ ID NO: 1831941 - DNA, 15 bp, Homo sapiens
cacatgacatagaat

SEQ ID NO: 1831942 - DNA, 15 bp, Homo sapiens
acatgacatagaatt

SEQ ID NO: 1831943 - DNA, 15 bp, Homo sapiens
catgacatagaattc

SEQ ID NO: 1831944 - DNA, 15 bp, Homo sapiens
atgacatagaattca

SEQ ID NO: 1831945 - DNA, 15 bp, Homo sapiens
tgacatagaattcaa

SEQ ID NO: 1831946 - DNA, 15 bp, Homo sapiens
gacatagaattcaat

SEQ ID NO: 1831947 - DNA, 15 bp, Homo sapiens
acatagaattcaata

SEQ ID NO: 1831948 - DNA, 15 bp, Homo sapiens
catagaattcaatag

SEQ ID NO: 1831949 - DNA, 15 bp, Homo sapiens
atagaattcaatagc

SEQ ID NO: 1831950 - DNA, 15 bp, Homo sapiens
tagaattcaatagct

SEQ ID NO: 1831951 - DNA, 15 bp, Homo sapiens
agaattcaatagctt

SEQ ID NO: 1831952 - DNA, 15 bp, Homo sapiens
gaattcaatagcttg

SEQ ID NO: 1831953 - DNA, 15 bp, Homo sapiens
aattcaatagcttga

SEQ ID NO: 1831954 - DNA, 15 bp, Homo sapiens
attcaatagcttgaa

SEQ ID NO: 1831955 - DNA, 15 bp, Homo sapiens
ttcaatagcttgaag

SEQ ID NO: 1831956 - DNA, 15 bp, Homo sapiens
tcaatagcttgaaga

SEQ ID NO: 1831957 - DNA, 15 bp, Homo sapiens
caatagcttgaagaa

SEQ ID NO: 1831958 - DNA, 15 bp, Homo sapiens
aatagcttgaagaaa

SEQ ID NO: 1831959 - DNA, 15 bp, Homo sapiens
atagcttgaagaaat

SEQ ID NO: 1831960 - DNA, 15 bp, Homo sapiens
tagcttgaagaaatt

SEQ ID NO: 1831961 - DNA, 15 bp, Homo sapiens
agcttgaagaaattg

SEQ ID NO: 1831962 - DNA, 15 bp, Homo sapiens
gcttgaagaaattgc

SEQ ID NO: 1831963 - DNA, 15 bp, Homo sapiens
cttgaagaaattgcc

SEQ ID NO: 1831964 - DNA, 15 bp, Homo sapiens
ttgaagaaattgcct

SEQ ID NO: 1831965 - DNA, 15 bp, Homo sapiens
tgaagaaattgccta

SEQ ID NO: 1831966 - DNA, 15 bp, Homo sapiens
gaagaaattgcctat

SEQ ID NO: 1831967 - DNA, 15 bp, Homo sapiens
aagaaattgcctatg

SEQ ID NO: 1831968 - DNA, 15 bp, Homo sapiens
agaaattgcctatga

SEQ ID NO: 1831969 - DNA, 15 bp, Homo sapiens
gaaattgcctatgat

SEQ ID NO: 1831970 - DNA, 15 bp, Homo sapiens
aaattgcctatgatt

SEQ ID NO: 1831971 - DNA, 15 bp, Homo sapiens
aattgcctatgattc

SEQ ID NO: 1831972 - DNA, 15 bp, Homo sapiens
attgcctatgattct

SEQ ID NO: 1831973 - DNA, 15 bp, Homo sapiens
ttgcctatgattctt

SEQ ID NO: 1831974 - DNA, 15 bp, Homo sapiens
tgcctatgattcttc

SEQ ID NO: 1831975 - DNA, 15 bp, Homo sapiens
gcctatgattcttca

SEQ ID NO: 1831976 - DNA, 15 bp, Homo sapiens
cctatgattcttcaa

SEQ ID NO: 1831977 - DNA, 15 bp, Homo sapiens
ctatgattcttcaac

SEQ ID NO: 1831978 - DNA, 15 bp, Homo sapiens
tatgattcttcaact

SEQ ID NO: 1831979 - DNA, 15 bp, Homo sapiens
atgattcttcaactt

SEQ ID NO: 1831980 - DNA, 15 bp, Homo sapiens
tgattcttcaacttg

SEQ ID NO: 1831981 - DNA, 15 bp, Homo sapiens
gattcttcaacttgc

SEQ ID NO: 1831982 - DNA, 15 bp, Homo sapiens
attcttcaacttgct

SEQ ID NO: 1831983 - DNA, 15 bp, Homo sapiens
ttcttcaacttgctt

SEQ ID NO: 1831984 - DNA, 15 bp, Homo sapiens
tcttcaacttgctta

SEQ ID NO: 1831985 - DNA, 15 bp, Homo sapiens
cttcaacttgcttac

SEQ ID NO: 1831986 - DNA, 15 bp, Homo sapiens
ttcaacttgcttacc

SEQ ID NO: 1831987 - DNA, 15 bp, Homo sapiens
tcaacttgcttacct

SEQ ID NO: 1831988 - DNA, 15 bp, Homo sapiens
caacttgcttacctg

SEQ ID NO: 1831989 - DNA, 15 bp, Homo sapiens
aacttgcttacctgg

SEQ ID NO: 1831990 - DNA, 15 bp, Homo sapiens
acttgcttacctgga

SEQ ID NO: 1831991 - DNA, 15 bp, Homo sapiens
cttgcttacctggat

SEQ ID NO: 1831992 - DNA, 15 bp, Homo sapiens
ttgcttacctggatc

SEQ ID NO: 1831993 - DNA, 15 bp, Homo sapiens
tgcttacctggatct

SEQ ID NO: 1831994 - DNA, 15 bp, Homo sapiens
gcttacctggatctg

SEQ ID NO: 1831995 - DNA, 15 bp, Homo sapiens
cttacctggatctga

SEQ ID NO: 1831996 - DNA, 15 bp, Homo sapiens
ttacctggatctgaa

SEQ ID NO: 1831997 - DNA, 15 bp, Homo sapiens
tacctggatctgaat

SEQ ID NO: 1831998 - DNA, 15 bp, Homo sapiens
acctggatctgaatt

SEQ ID NO: 1831999 - DNA, 15 bp, Homo sapiens
cctggatctgaattc

SEQ ID NO: 1832000 - DNA, 15 bp, Homo sapiens
ctggatctgaattct

SEQ ID NO: 1832001 - DNA, 15 bp, Homo sapiens
tggatctgaattctt

SEQ ID NO: 1832002 - DNA, 15 bp, Homo sapiens
ggatctgaattcttc

SEQ ID NO: 1832003 - DNA, 15 bp, Homo sapiens
gatctgaattcttcc

SEQ ID NO: 1832004 - DNA, 15 bp, Homo sapiens
atctgaattcttcca

SEQ ID NO: 1832005 - DNA, 15 bp, Homo sapiens
tctgaattcttccat

SEQ ID NO: 1832006 - DNA, 15 bp, Homo sapiens
ctgaattcttccata

SEQ ID NO: 1832007 - DNA, 15 bp, Homo sapiens
tgaattcttccataa

SEQ ID NO: 1832008 - DNA, 15 bp, Homo sapiens
gaattcttccataac

SEQ ID NO: 1832009 - DNA, 15 bp, Homo sapiens
aattcttccataaca

SEQ ID NO: 1832010 - DNA, 15 bp, Homo sapiens
attcttccataacat

SEQ ID NO: 1832011 - DNA, 15 bp, Homo sapiens
ttcttccataacatt

SEQ ID NO: 1832012 - DNA, 15 bp, Homo sapiens
tcttccataacattt

SEQ ID NO: 1832013 - DNA, 15 bp, Homo sapiens
cttccataacatttt

SEQ ID NO: 1832014 - DNA, 15 bp, Homo sapiens
ttccataacatttta

SEQ ID NO: 1832015 - DNA, 15 bp, Homo sapiens
tccataacattttaa

SEQ ID NO: 1832016 - DNA, 15 bp, Homo sapiens
ccataacattttaaa

SEQ ID NO: 1832017 - DNA, 15 bp, Homo sapiens
cataacattttaaat

SEQ ID NO: 1832018 - DNA, 15 bp, Homo sapiens
ataacattttaaatc

SEQ ID NO: 1832019 - DNA, 15 bp, Homo sapiens
taacattttaaatca

SEQ ID NO: 1832020 - DNA, 15 bp, Homo sapiens
aacattttaaatcaa

SEQ ID NO: 1832021 - DNA, 15 bp, Homo sapiens
acattttaaatcaat

SEQ ID NO: 1832022 - DNA, 15 bp, Homo sapiens
cattttaaatcaatc

SEQ ID NO: 1832023 - DNA, 15 bp, Homo sapiens
attttaaatcaatcc

SEQ ID NO: 1832024 - DNA, 15 bp, Homo sapiens
ttttaaatcaatcca

SEQ ID NO: 1832025 - DNA, 15 bp, Homo sapiens
tttaaatcaatccag

SEQ ID NO: 1832026 - DNA, 15 bp, Homo sapiens
ttaaatcaatccagg

SEQ ID NO: 1832027 - DNA, 15 bp, Homo sapiens
taaatcaatccaggt

SEQ ID NO: 1832028 - DNA, 15 bp, Homo sapiens
aaatcaatccaggtg

SEQ ID NO: 1832029 - DNA, 15 bp, Homo sapiens
aatcaatccaggtgt

SEQ ID NO: 1832030 - DNA, 15 bp, Homo sapiens
atcaatccaggtgta

SEQ ID NO: 1832031 - DNA, 15 bp, Homo sapiens
tcaatccaggtgtac

SEQ ID NO: 1832032 - DNA, 15 bp, Homo sapiens
caatccaggtgtacc

SEQ ID NO: 1832033 - DNA, 15 bp, Homo sapiens
aatccaggtgtaccc

SEQ ID NO: 1832034 - DNA, 15 bp, Homo sapiens
atccaggtgtaccca

SEQ ID NO: 1832035 - DNA, 15 bp, Homo sapiens
tccaggtgtacccat

SEQ ID NO: 1832036 - DNA, 15 bp, Homo sapiens
ccaggtgtacccatc

SEQ ID NO: 1832037 - DNA, 15 bp, Homo sapiens
caggtgtacccatct

SEQ ID NO: 1832038 - DNA, 15 bp, Homo sapiens
aggtgtacccatctt

SEQ ID NO: 1832039 - DNA, 15 bp, Homo sapiens
ggtgtacccatcttc

SEQ ID NO: 1832040 - DNA, 15 bp, Homo sapiens
gtgtacccatcttca

SEQ ID NO: 1832041 - DNA, 15 bp, Homo sapiens
tgtacccatcttcag

SEQ ID NO: 1832042 - DNA, 15 bp, Homo sapiens
gtacccatcttcaga

SEQ ID NO: 1832043 - DNA, 15 bp, Homo sapiens
tacccatcttcagaa

SEQ ID NO: 1832044 - DNA, 15 bp, Homo sapiens
acccatcttcagaaa

SEQ ID NO: 1832045 - DNA, 15 bp, Homo sapiens
cccatcttcagaaat

SEQ ID NO: 1832046 - DNA, 15 bp, Homo sapiens
ccatcttcagaaata

SEQ ID NO: 1832047 - DNA, 15 bp, Homo sapiens
catcttcagaaataa

SEQ ID NO: 1832048 - DNA, 15 bp, Homo sapiens
atcttcagaaataat

SEQ ID NO: 1832049 - DNA, 15 bp, Homo sapiens
tcttcagaaataatg

SEQ ID NO: 1832050 - DNA, 15 bp, Homo sapiens
cttcagaaataatgg

SEQ ID NO: 1832051 - DNA, 15 bp, Homo sapiens
ttcagaaataatgga

SEQ ID NO: 1832052 - DNA, 15 bp, Homo sapiens
tcagaaataatggac

SEQ ID NO: 1832053 - DNA, 15 bp, Homo sapiens
cagaaataatggacc

SEQ ID NO: 1832054 - DNA, 15 bp, Homo sapiens
agaaataatggaccc

SEQ ID NO: 1832055 - DNA, 15 bp, Homo sapiens
gaaataatggacccc

SEQ ID NO: 1832056 - DNA, 15 bp, Homo sapiens
aaataatggacccca

SEQ ID NO: 1832057 - DNA, 15 bp, Homo sapiens
aataatggaccccaa

SEQ ID NO: 1832058 - DNA, 15 bp, Homo sapiens
ataatggaccccaat

SEQ ID NO: 1832059 - DNA, 15 bp, Homo sapiens
taatggaccccaatg

SEQ ID NO: 1832060 - DNA, 15 bp, Homo sapiens
aatggaccccaatgt

SEQ ID NO: 1832061 - DNA, 15 bp, Homo sapiens
atggaccccaatgtc

SEQ ID NO: 1832062 - DNA, 15 bp, Homo sapiens
tggaccccaatgtct

SEQ ID NO: 1832063 - DNA, 15 bp, Homo sapiens
ggaccccaatgtctc

SEQ ID NO: 1832064 - DNA, 15 bp, Homo sapiens
gaccccaatgtctca

SEQ ID NO: 1832065 - DNA, 15 bp, Homo sapiens
accccaatgtctcag

SEQ ID NO: 1832066 - DNA, 15 bp, Homo sapiens
ccccaatgtctcaga

SEQ ID NO: 1832067 - DNA, 15 bp, Homo sapiens
cccaatgtctcagaa

SEQ ID NO: 1832068 - DNA, 15 bp, Homo sapiens
ccaatgtctcagaat

SEQ ID NO: 1832069 - DNA, 15 bp, Homo sapiens
caatgtctcagaatt

SEQ ID NO: 1832070 - DNA, 15 bp, Homo sapiens
aatgtctcagaatta

SEQ ID NO: 1832071 - DNA, 15 bp, Homo sapiens
atgtctcagaattac

SEQ ID NO: 1832072 - DNA, 15 bp, Homo sapiens
tgtctcagaattaca

SEQ ID NO: 1832073 - DNA, 15 bp, Homo sapiens
gtctcagaattacag

SEQ ID NO: 1832074 - DNA, 15 bp, Homo sapiens
tctcagaattacaga

SEQ ID NO: 1832075 - DNA, 15 bp, Homo sapiens
ctcagaattacagag

SEQ ID NO: 1832076 - DNA, 15 bp, Homo sapiens
tcagaattacagagt

SEQ ID NO: 1832077 - DNA, 15 bp, Homo sapiens
cagaattacagagtc

SEQ ID NO: 1832078 - DNA, 15 bp, Homo sapiens
agaattacagagtca

SEQ ID NO: 1832079 - DNA, 15 bp, Homo sapiens
gaattacagagtcag

SEQ ID NO: 1832080 - DNA, 15 bp, Homo sapiens
aattacagagtcaga

SEQ ID NO: 1832081 - DNA, 15 bp, Homo sapiens
attacagagtcagag

SEQ ID NO: 1832082 - DNA, 15 bp, Homo sapiens
ttacagagtcagagt

SEQ ID NO: 1832083 - DNA, 15 bp, Homo sapiens
tacagagtcagagtc

SEQ ID NO: 1832084 - DNA, 15 bp, Homo sapiens
acagagtcagagtcc

SEQ ID NO: 1832085 - DNA, 15 bp, Homo sapiens
cagagtcagagtcct

SEQ ID NO: 1832086 - DNA, 15 bp, Homo sapiens
agagtcagagtcctc

SEQ ID NO: 1832087 - DNA, 15 bp, Homo sapiens
gagtcagagtcctca

SEQ ID NO: 1832088 - DNA, 15 bp, Homo sapiens
agtcagagtcctcaa

SEQ ID NO: 1832089 - DNA, 15 bp, Homo sapiens
gtcagagtcctcaac

SEQ ID NO: 1832090 - DNA, 15 bp, Homo sapiens
tcagagtcctcaaca

SEQ ID NO: 1832091 - DNA, 15 bp, Homo sapiens
cagagtcctcaacat

SEQ ID NO: 1832092 - DNA, 15 bp, Homo sapiens
agagtcctcaacatg

SEQ ID NO: 1832093 - DNA, 15 bp, Homo sapiens
gagtcctcaacatgt

SEQ ID NO: 1832094 - DNA, 15 bp, Homo sapiens
agtcctcaacatgtc

SEQ ID NO: 1832095 - DNA, 15 bp, Homo sapiens
gtcctcaacatgtcc

SEQ ID NO: 1832096 - DNA, 15 bp, Homo sapiens
tcctcaacatgtcca

SEQ ID NO: 1832097 - DNA, 15 bp, Homo sapiens
cctcaacatgtccaa

SEQ ID NO: 1832098 - DNA, 15 bp, Homo sapiens
ctcaacatgtccaaa

SEQ ID NO: 1832099 - DNA, 15 bp, Homo sapiens
tcaacatgtccaaag

SEQ ID NO: 1832100 - DNA, 15 bp, Homo sapiens
caacatgtccaaagc

SEQ ID NO: 1832101 - DNA, 15 bp, Homo sapiens
aacatgtccaaagca

SEQ ID NO: 1832102 - DNA, 15 bp, Homo sapiens
acatgtccaaagcat

SEQ ID NO: 1832103 - DNA, 15 bp, Homo sapiens
catgtccaaagcatt

SEQ ID NO: 1832104 - DNA, 15 bp, Homo sapiens
atgtccaaagcattt

SEQ ID NO: 1832105 - DNA, 15 bp, Homo sapiens
tgtccaaagcatttc

SEQ ID NO: 1832106 - DNA, 15 bp, Homo sapiens
gtccaaagcatttcg

SEQ ID NO: 1832107 - DNA, 15 bp, Homo sapiens
tccaaagcatttcgt

SEQ ID NO: 1832108 - DNA, 15 bp, Homo sapiens
ccaaagcatttcgtg

SEQ ID NO: 1832109 - DNA, 15 bp, Homo sapiens
caaagcatttcgtgg

SEQ ID NO: 1832110 - DNA, 15 bp, Homo sapiens
aaagcatttcgtgga

SEQ ID NO: 1832111 - DNA, 15 bp, Homo sapiens
aagcatttcgtggaa

SEQ ID NO: 1832112 - DNA, 15 bp, Homo sapiens
agcatttcgtggaaa

SEQ ID NO: 1832113 - DNA, 15 bp, Homo sapiens
gcatttcgtggaaat

SEQ ID NO: 1832114 - DNA, 15 bp, Homo sapiens
catttcgtggaaatt

SEQ ID NO: 1832115 - DNA, 15 bp, Homo sapiens
atttcgtggaaatta

SEQ ID NO: 1832116 - DNA, 15 bp, Homo sapiens
tttcgtggaaattat

SEQ ID NO: 1832117 - DNA, 15 bp, Homo sapiens
ttcgtggaaattatt

SEQ ID NO: 1832118 - DNA, 15 bp, Homo sapiens
tcgtggaaattattc

SEQ ID NO: 1832119 - DNA, 15 bp, Homo sapiens
cgtggaaattattcc

SEQ ID NO: 1832120 - DNA, 15 bp, Homo sapiens
gtggaaattattcca

SEQ ID NO: 1832121 - DNA, 15 bp, Homo sapiens
tggaaattattccac

SEQ ID NO: 1832122 - DNA, 15 bp, Homo sapiens
ggaaattattccacc

SEQ ID NO: 1832123 - DNA, 15 bp, Homo sapiens
gaaattattccacca

SEQ ID NO: 1832124 - DNA, 15 bp, Homo sapiens
aaattattccaccat

SEQ ID NO: 1832125 - DNA, 15 bp, Homo sapiens
aattattccaccatg

SEQ ID NO: 1832126 - DNA, 15 bp, Homo sapiens
attattccaccatga

SEQ ID NO: 1832127 - DNA, 15 bp, Homo sapiens
ttattccaccatgaa

SEQ ID NO: 1832128 - DNA, 15 bp, Homo sapiens
tattccaccatgaag

SEQ ID NO: 1832129 - DNA, 15 bp, Homo sapiens
attccaccatgaaga

SEQ ID NO: 1832130 - DNA, 15 bp, Homo sapiens
ttccaccatgaagac

SEQ ID NO: 1832131 - DNA, 15 bp, Homo sapiens
tccaccatgaagact

SEQ ID NO: 1832132 - DNA, 15 bp, Homo sapiens
ccaccatgaagacta

SEQ ID NO: 1832133 - DNA, 15 bp, Homo sapiens
caccatgaagactag

SEQ ID NO: 1832134 - DNA, 15 bp, Homo sapiens
accatgaagactaga

SEQ ID NO: 1832135 - DNA, 15 bp, Homo sapiens
ccatgaagactagaa

SEQ ID NO: 1832136 - DNA, 15 bp, Homo sapiens
catgaagactagaat

SEQ ID NO: 1832137 - DNA, 15 bp, Homo sapiens
atgaagactagaatg

SEQ ID NO: 1832138 - DNA, 15 bp, Homo sapiens
tgaagactagaatgg

SEQ ID NO: 1832139 - DNA, 15 bp, Homo sapiens
gaagactagaatggc

SEQ ID NO: 1832140 - DNA, 15 bp, Homo sapiens
aagactagaatggcc

SEQ ID NO: 1832141 - DNA, 15 bp, Homo sapiens
agactagaatggcct

SEQ ID NO: 1832142 - DNA, 15 bp, Homo sapiens
gactagaatggcctc

SEQ ID NO: 1832143 - DNA, 15 bp, Homo sapiens
actagaatggcctct

SEQ ID NO: 1832144 - DNA, 15 bp, Homo sapiens
ctagaatggcctctc

SEQ ID NO: 1832145 - DNA, 15 bp, Homo sapiens
tagaatggcctctct

SEQ ID NO: 1832146 - DNA, 15 bp, Homo sapiens
agaatggcctctctt

SEQ ID NO: 1832147 - DNA, 15 bp, Homo sapiens
gaatggcctctcttc

SEQ ID NO: 1832148 - DNA, 15 bp, Homo sapiens
aatggcctctcttca

SEQ ID NO: 1832149 - DNA, 15 bp, Homo sapiens
atggcctctcttcat

SEQ ID NO: 1832150 - DNA, 15 bp, Homo sapiens
tggcctctcttcatg

SEQ ID NO: 1832151 - DNA, 15 bp, Homo sapiens
ggcctctcttcatgg

SEQ ID NO: 1832152 - DNA, 15 bp, Homo sapiens
gcctctcttcatgga

SEQ ID NO: 1832153 - DNA, 15 bp, Homo sapiens
cctctcttcatggat

SEQ ID NO: 1832154 - DNA, 15 bp, Homo sapiens
ctctcttcatggatt

SEQ ID NO: 1832155 - DNA, 15 bp, Homo sapiens
tctcttcatggattc

SEQ ID NO: 1832156 - DNA, 15 bp, Homo sapiens
ctcttcatggattca

SEQ ID NO: 1832157 - DNA, 15 bp, Homo sapiens
tcttcatggattcag

SEQ ID NO: 1832158 - DNA, 15 bp, Homo sapiens
cttcatggattcagc

SEQ ID NO: 1832159 - DNA, 15 bp, Homo sapiens
ttcatggattcagct

SEQ ID NO: 1832160 - DNA, 15 bp, Homo sapiens
tcatggattcagctt

SEQ ID NO: 1832161 - DNA, 15 bp, Homo sapiens
catggattcagcttg

SEQ ID NO: 1832162 - DNA, 15 bp, Homo sapiens
atggattcagcttgc

SEQ ID NO: 1832163 - DNA, 15 bp, Homo sapiens
tggattcagcttgct

SEQ ID NO: 1832164 - DNA, 15 bp, Homo sapiens
ggattcagcttgcta

SEQ ID NO: 1832165 - DNA, 15 bp, Homo sapiens
gattcagcttgctaa

SEQ ID NO: 1832166 - DNA, 15 bp, Homo sapiens
attcagcttgctaag

SEQ ID NO: 1832167 - DNA, 15 bp, Homo sapiens
ttcagcttgctaagg

SEQ ID NO: 1832168 - DNA, 15 bp, Homo sapiens
tcagcttgctaagga

SEQ ID NO: 1832169 - DNA, 15 bp, Homo sapiens
cagcttgctaaggag

SEQ ID NO: 1832170 - DNA, 15 bp, Homo sapiens
agcttgctaaggagg

SEQ ID NO: 1832171 - DNA, 15 bp, Homo sapiens
gcttgctaaggaggc

SEQ ID NO: 1832172 - DNA, 15 bp, Homo sapiens
cttgctaaggaggct

SEQ ID NO: 1832173 - DNA, 15 bp, Homo sapiens
ttgctaaggaggctt

SEQ ID NO: 1832174 - DNA, 15 bp, Homo sapiens
tgctaaggaggctta

SEQ ID NO: 1832175 - DNA, 15 bp, Homo sapiens
gctaaggaggcttag

SEQ ID NO: 1832176 - DNA, 15 bp, Homo sapiens
ctaaggaggcttagt

SEQ ID NO: 1832177 - DNA, 15 bp, Homo sapiens
taaggaggcttagtt

SEQ ID NO: 1832178 - DNA, 15 bp, Homo sapiens
aaggaggcttagttc

SEQ ID NO: 1832179 - DNA, 15 bp, Homo sapiens
aggaggcttagttca

SEQ ID NO: 1832180 - DNA, 15 bp, Homo sapiens
ggaggcttagttcag

SEQ ID NO: 1832181 - DNA, 15 bp, Homo sapiens
gaggcttagttcaga

SEQ ID NO: 1832182 - DNA, 15 bp, Homo sapiens
aggcttagttcagag

SEQ ID NO: 1832183 - DNA, 15 bp, Homo sapiens
ggcttagttcagagg

SEQ ID NO: 1832184 - DNA, 15 bp, Homo sapiens
gcttagttcagaggg

SEQ ID NO: 1832185 - DNA, 15 bp, Homo sapiens
cttagttcagaggga

SEQ ID NO: 1832186 - DNA, 15 bp, Homo sapiens
ttagttcagagggac

SEQ ID NO: 1832187 - DNA, 15 bp, Homo sapiens
tagttcagagggact

SEQ ID NO: 1832188 - DNA, 15 bp, Homo sapiens
agttcagagggacta

SEQ ID NO: 1832189 - DNA, 15 bp, Homo sapiens
gttcagagggactaa

SEQ ID NO: 1832190 - DNA, 15 bp, Homo sapiens
ttcagagggactaag

SEQ ID NO: 1832191 - DNA, 15 bp, Homo sapiens
tcagagggactaaga

SEQ ID NO: 1832192 - DNA, 15 bp, Homo sapiens
cagagggactaagac

SEQ ID NO: 1832193 - DNA, 15 bp, Homo sapiens
agagggactaagaca

SEQ ID NO: 1832194 - DNA, 15 bp, Homo sapiens
gagggactaagacac

SEQ ID NO: 1832195 - DNA, 15 bp, Homo sapiens
agggactaagacact

SEQ ID NO: 1832196 - DNA, 15 bp, Homo sapiens
gggactaagacactc

SEQ ID NO: 1832197 - DNA, 15 bp, Homo sapiens
ggactaagacactct

SEQ ID NO: 1832198 - DNA, 15 bp, Homo sapiens
gactaagacactctc

SEQ ID NO: 1832199 - DNA, 15 bp, Homo sapiens
actaagacactctcc

SEQ ID NO: 1832200 - DNA, 15 bp, Homo sapiens
ctaagacactctcct

SEQ ID NO: 1832201 - DNA, 15 bp, Homo sapiens
taagacactctcctt

SEQ ID NO: 1832202 - DNA, 15 bp, Homo sapiens
aagacactctccttt

SEQ ID NO: 1832203 - DNA, 15 bp, Homo sapiens
agacactctcctttt

SEQ ID NO: 1832204 - DNA, 15 bp, Homo sapiens
gacactctcctttta

SEQ ID NO: 1832205 - DNA, 15 bp, Homo sapiens
acactctccttttag

SEQ ID NO: 1832206 - DNA, 15 bp, Homo sapiens
cactctccttttagc

SEQ ID NO: 1832207 - DNA, 15 bp, Homo sapiens
actctccttttagca

SEQ ID NO: 1832208 - DNA, 15 bp, Homo sapiens
ctctccttttagcaa

SEQ ID NO: 1832209 - DNA, 15 bp, Homo sapiens
tctccttttagcaaa

SEQ ID NO: 1832210 - DNA, 15 bp, Homo sapiens
ctccttttagcaaat

SEQ ID NO: 1832211 - DNA, 15 bp, Homo sapiens
tccttttagcaaata

SEQ ID NO: 1832212 - DNA, 15 bp, Homo sapiens
ccttttagcaaataa

SEQ ID NO: 1832213 - DNA, 15 bp, Homo sapiens
cttttagcaaataac

SEQ ID NO: 1832214 - DNA, 15 bp, Homo sapiens
ttttagcaaataact

SEQ ID NO: 1832215 - DNA, 15 bp, Homo sapiens
tttagcaaataacta

SEQ ID NO: 1832216 - DNA, 15 bp, Homo sapiens
ttagcaaataactaa

SEQ ID NO: 1832217 - DNA, 15 bp, Homo sapiens
tagcaaataactaac

SEQ ID NO: 1832218 - DNA, 15 bp, Homo sapiens
agcaaataactaacc

SEQ ID NO: 1832219 - DNA, 15 bp, Homo sapiens
gcaaataactaacca

SEQ ID NO: 1832220 - DNA, 15 bp, Homo sapiens
caaataactaaccaa

SEQ ID NO: 1832221 - DNA, 15 bp, Homo sapiens
aaataactaaccaaa

SEQ ID NO: 1832222 - DNA, 15 bp, Homo sapiens
aataactaaccaaaa

SEQ ID NO: 1832223 - DNA, 15 bp, Homo sapiens
ataactaaccaaaag

SEQ ID NO: 1832224 - DNA, 15 bp, Homo sapiens
taactaaccaaaagg

SEQ ID NO: 1832225 - DNA, 15 bp, Homo sapiens
aactaaccaaaaggg

SEQ ID NO: 1832226 - DNA, 15 bp, Homo sapiens
actaaccaaaagggc

SEQ ID NO: 1832227 - DNA, 15 bp, Homo sapiens
ctaaccaaaagggca

SEQ ID NO: 1832228 - DNA, 15 bp, Homo sapiens
taaccaaaagggcaa

SEQ ID NO: 1832229 - DNA, 15 bp, Homo sapiens
aaccaaaagggcaag

SEQ ID NO: 1832230 - DNA, 15 bp, Homo sapiens
accaaaagggcaagg

SEQ ID NO: 1832231 - DNA, 15 bp, Homo sapiens
ccaaaagggcaagga

SEQ ID NO: 1832232 - DNA, 15 bp, Homo sapiens
caaaagggcaaggaa

SEQ ID NO: 1832233 - DNA, 15 bp, Homo sapiens
aaaagggcaaggaag

SEQ ID NO: 1832234 - DNA, 15 bp, Homo sapiens
aaagggcaaggaagg

SEQ ID NO: 1832235 - DNA, 15 bp, Homo sapiens
aagggcaaggaaggg

SEQ ID NO: 1832236 - DNA, 15 bp, Homo sapiens
agggcaaggaaggga

SEQ ID NO: 1832237 - DNA, 15 bp, Homo sapiens
gggcaaggaagggag

SEQ ID NO: 1832238 - DNA, 15 bp, Homo sapiens
ggcaaggaagggagg

SEQ ID NO: 1832239 - DNA, 15 bp, Homo sapiens
gcaaggaagggaggt

SEQ ID NO: 1832240 - DNA, 15 bp, Homo sapiens
caaggaagggaggta

SEQ ID NO: 1832241 - DNA, 15 bp, Homo sapiens
aaggaagggaggtaa

SEQ ID NO: 1832242 - DNA, 15 bp, Homo sapiens
aggaagggaggtaaa

SEQ ID NO: 1832243 - DNA, 15 bp, Homo sapiens
ggaagggaggtaaaa

SEQ ID NO: 1832244 - DNA, 15 bp, Homo sapiens
gaagggaggtaaaag

SEQ ID NO: 1832245 - DNA, 15 bp, Homo sapiens
aagggaggtaaaaga

SEQ ID NO: 1832246 - DNA, 15 bp, Homo sapiens
agggaggtaaaagac

SEQ ID NO: 1832247 - DNA, 15 bp, Homo sapiens
gggaggtaaaagacg

SEQ ID NO: 1832248 - DNA, 15 bp, Homo sapiens
ggaggtaaaagacgt

SEQ ID NO: 1832249 - DNA, 15 bp, Homo sapiens
gaggtaaaagacgtc

SEQ ID NO: 1832250 - DNA, 15 bp, Homo sapiens
aggtaaaagacgtca

SEQ ID NO: 1832251 - DNA, 15 bp, Homo sapiens
ggtaaaagacgtcat

SEQ ID NO: 1832252 - DNA, 15 bp, Homo sapiens
gtaaaagacgtcata

SEQ ID NO: 1832253 - DNA, 15 bp, Homo sapiens
taaaagacgtcataa

SEQ ID NO: 1832254 - DNA, 15 bp, Homo sapiens
aaaagacgtcataac

SEQ ID NO: 1832255 - DNA, 15 bp, Homo sapiens
aaagacgtcataacc

SEQ ID NO: 1832256 - DNA, 15 bp, Homo sapiens
aagacgtcataacca

SEQ ID NO: 1832257 - DNA, 15 bp, Homo sapiens
agacgtcataaccag

SEQ ID NO: 1832258 - DNA, 15 bp, Homo sapiens
gacgtcataaccagg

SEQ ID NO: 1832259 - DNA, 15 bp, Homo sapiens
acgtcataaccaggc

SEQ ID NO: 1832260 - DNA, 15 bp, Homo sapiens
cgtcataaccaggcc

SEQ ID NO: 1832261 - DNA, 15 bp, Homo sapiens
gtcataaccaggcca

SEQ ID NO: 1832262 - DNA, 15 bp, Homo sapiens
tcataaccaggccag

SEQ ID NO: 1832263 - DNA, 15 bp, Homo sapiens
cataaccaggccagt

SEQ ID NO: 1832264 - DNA, 15 bp, Homo sapiens
ataaccaggccagta

SEQ ID NO: 1832265 - DNA, 15 bp, Homo sapiens
taaccaggccagtag

SEQ ID NO: 1832266 - DNA, 15 bp, Homo sapiens
aaccaggccagtaga

SEQ ID NO: 1832267 - DNA, 15 bp, Homo sapiens
accaggccagtagaa

SEQ ID NO: 1832268 - DNA, 15 bp, Homo sapiens
ccaggccagtagaat

SEQ ID NO: 1832269 - DNA, 15 bp, Homo sapiens
caggccagtagaatc

SEQ ID NO: 1832270 - DNA, 15 bp, Homo sapiens
aggccagtagaatcc

SEQ ID NO: 1832271 - DNA, 15 bp, Homo sapiens
ggccagtagaatccc

SEQ ID NO: 1832272 - DNA, 15 bp, Homo sapiens
gccagtagaatcccc

SEQ ID NO: 1832273 - DNA, 15 bp, Homo sapiens
ccagtagaatcccct

SEQ ID NO: 1832274 - DNA, 15 bp, Homo sapiens
cagtagaatcccctg

SEQ ID NO: 1832275 - DNA, 15 bp, Homo sapiens
agtagaatcccctgg

SEQ ID NO: 1832276 - DNA, 15 bp, Homo sapiens
gtagaatcccctggt

SEQ ID NO: 1832277 - DNA, 15 bp, Homo sapiens
tagaatcccctggtc

SEQ ID NO: 1832278 - DNA, 15 bp, Homo sapiens
agaatcccctggtct

SEQ ID NO: 1832279 - DNA, 15 bp, Homo sapiens
gaatcccctggtctg

SEQ ID NO: 1832280 - DNA, 15 bp, Homo sapiens
aatcccctggtctgg

SEQ ID NO: 1832281 - DNA, 15 bp, Homo sapiens
atcccctggtctggc

SEQ ID NO: 1832282 - DNA, 15 bp, Homo sapiens
tcccctggtctggcc

SEQ ID NO: 1832283 - DNA, 15 bp, Homo sapiens
cccctggtctggcca

SEQ ID NO: 1832284 - DNA, 15 bp, Homo sapiens
ccctggtctggccat

SEQ ID NO: 1832285 - DNA, 15 bp, Homo sapiens
cctggtctggccatt

SEQ ID NO: 1832286 - DNA, 15 bp, Homo sapiens
ctggtctggccatta

SEQ ID NO: 1832287 - DNA, 15 bp, Homo sapiens
tggtctggccattac

SEQ ID NO: 1832288 - DNA, 15 bp, Homo sapiens
ggtctggccattaca

SEQ ID NO: 1832289 - DNA, 15 bp, Homo sapiens
gtctggccattacat

SEQ ID NO: 1832290 - DNA, 15 bp, Homo sapiens
tctggccattacatg

SEQ ID NO: 1832291 - DNA, 15 bp, Homo sapiens
ctggccattacatgt

SEQ ID NO: 1832292 - DNA, 15 bp, Homo sapiens
tggccattacatgtg

SEQ ID NO: 1832293 - DNA, 15 bp, Homo sapiens
ggccattacatgtga

SEQ ID NO: 1832294 - DNA, 15 bp, Homo sapiens
gccattacatgtgat

SEQ ID NO: 1832295 - DNA, 15 bp, Homo sapiens
ccattacatgtgatg

SEQ ID NO: 1832296 - DNA, 15 bp, Homo sapiens
cattacatgtgatga

SEQ ID NO: 1832297 - DNA, 15 bp, Homo sapiens
attacatgtgatgat

SEQ ID NO: 1832298 - DNA, 15 bp, Homo sapiens
ttacatgtgatgatt

SEQ ID NO: 1832299 - DNA, 15 bp, Homo sapiens
tacatgtgatgattt

SEQ ID NO: 1832300 - DNA, 15 bp, Homo sapiens
acatgtgatgatttc

SEQ ID NO: 1832301 - DNA, 15 bp, Homo sapiens
catgtgatgatttca

SEQ ID NO: 1832302 - DNA, 15 bp, Homo sapiens
atgtgatgatttcaa

SEQ ID NO: 1832303 - DNA, 15 bp, Homo sapiens
tgtgatgatttcaaa

SEQ ID NO: 1832304 - DNA, 15 bp, Homo sapiens
gtgatgatttcaaat

SEQ ID NO: 1832305 - DNA, 15 bp, Homo sapiens
tgatgatttcaaatg

SEQ ID NO: 1832306 - DNA, 15 bp, Homo sapiens
gatgatttcaaatgg

SEQ ID NO: 1832307 - DNA, 15 bp, Homo sapiens
atgatttcaaatggg

SEQ ID NO: 1832308 - DNA, 15 bp, Homo sapiens
tgatttcaaatgggt

SEQ ID NO: 1832309 - DNA, 15 bp, Homo sapiens
gatttcaaatgggtt

SEQ ID NO: 1832310 - DNA, 15 bp, Homo sapiens
atttcaaatgggttc

SEQ ID NO: 1832311 - DNA, 15 bp, Homo sapiens
tttcaaatgggttct

SEQ ID NO: 1832312 - DNA, 15 bp, Homo sapiens
ttcaaatgggttctt

SEQ ID NO: 1832313 - DNA, 15 bp, Homo sapiens
tcaaatgggttctta

SEQ ID NO: 1832314 - DNA, 15 bp, Homo sapiens
caaatgggttcttag

SEQ ID NO: 1832315 - DNA, 15 bp, Homo sapiens
aaatgggttcttagt

SEQ ID NO: 1832316 - DNA, 15 bp, Homo sapiens
aatgggttcttagta

SEQ ID NO: 1832317 - DNA, 15 bp, Homo sapiens
atgggttcttagtac

SEQ ID NO: 1832318 - DNA, 15 bp, Homo sapiens
tgggttcttagtacc

SEQ ID NO: 1832319 - DNA, 15 bp, Homo sapiens
gggttcttagtacct

SEQ ID NO: 1832320 - DNA, 15 bp, Homo sapiens
ggttcttagtacctt

SEQ ID NO: 1832321 - DNA, 15 bp, Homo sapiens
gttcttagtacctta

SEQ ID NO: 1832322 - DNA, 15 bp, Homo sapiens
ttcttagtaccttaa

SEQ ID NO: 1832323 - DNA, 15 bp, Homo sapiens
tcttagtaccttaat

SEQ ID NO: 1832324 - DNA, 15 bp, Homo sapiens
cttagtaccttaatt

SEQ ID NO: 1832325 - DNA, 15 bp, Homo sapiens
ttagtaccttaattt

SEQ ID NO: 1832326 - DNA, 15 bp, Homo sapiens
tagtaccttaatttt

SEQ ID NO: 1832327 - DNA, 15 bp, Homo sapiens
agtaccttaattttg

SEQ ID NO: 1832328 - DNA, 15 bp, Homo sapiens
gtaccttaattttga

SEQ ID NO: 1832329 - DNA, 15 bp, Homo sapiens
taccttaattttgag

SEQ ID NO: 1832330 - DNA, 15 bp, Homo sapiens
accttaattttgagg

SEQ ID NO: 1832331 - DNA, 15 bp, Homo sapiens
ccttaattttgaggg

SEQ ID NO: 1832332 - DNA, 15 bp, Homo sapiens
cttaattttgaggga

SEQ ID NO: 1832333 - DNA, 15 bp, Homo sapiens
ttaattttgagggaa

SEQ ID NO: 1832334 - DNA, 15 bp, Homo sapiens
taattttgagggaaa

SEQ ID NO: 1832335 - DNA, 15 bp, Homo sapiens
aattttgagggaaaa

SEQ ID NO: 1832336 - DNA, 15 bp, Homo sapiens
attttgagggaaaag

SEQ ID NO: 1832337 - DNA, 15 bp, Homo sapiens
ttttgagggaaaaga

SEQ ID NO: 1832338 - DNA, 15 bp, Homo sapiens
tttgagggaaaagag

SEQ ID NO: 1832339 - DNA, 15 bp, Homo sapiens
ttgagggaaaagagt

SEQ ID NO: 1832340 - DNA, 15 bp, Homo sapiens
tgagggaaaagagta

SEQ ID NO: 1832341 - DNA, 15 bp, Homo sapiens
gagggaaaagagtag

SEQ ID NO: 1832342 - DNA, 15 bp, Homo sapiens
agggaaaagagtaga

SEQ ID NO: 1832343 - DNA, 15 bp, Homo sapiens
gggaaaagagtagag

SEQ ID NO: 1832344 - DNA, 15 bp, Homo sapiens
ggaaaagagtagagg

SEQ ID NO: 1832345 - DNA, 15 bp, Homo sapiens
gaaaagagtagagga

SEQ ID NO: 1832346 - DNA, 15 bp, Homo sapiens
aaaagagtagaggaa

SEQ ID NO: 1832347 - DNA, 15 bp, Homo sapiens
aaagagtagaggaaa

SEQ ID NO: 1832348 - DNA, 15 bp, Homo sapiens
aagagtagaggaaac

SEQ ID NO: 1832349 - DNA, 15 bp, Homo sapiens
agagtagaggaaacc

SEQ ID NO: 1832350 - DNA, 15 bp, Homo sapiens
gagtagaggaaacca

SEQ ID NO: 1832351 - DNA, 15 bp, Homo sapiens
agtagaggaaaccag

SEQ ID NO: 1832352 - DNA, 15 bp, Homo sapiens
gtagaggaaaccagc

SEQ ID NO: 1832353 - DNA, 15 bp, Homo sapiens
tagaggaaaccagcc

SEQ ID NO: 1832354 - DNA, 15 bp, Homo sapiens
agaggaaaccagcca

SEQ ID NO: 1832355 - DNA, 15 bp, Homo sapiens
gaggaaaccagccaa

SEQ ID NO: 1832356 - DNA, 15 bp, Homo sapiens
aggaaaccagccaat

SEQ ID NO: 1832357 - DNA, 15 bp, Homo sapiens
ggaaaccagccaatg

SEQ ID NO: 1832358 - DNA, 15 bp, Homo sapiens
gaaaccagccaatgc

SEQ ID NO: 1832359 - DNA, 15 bp, Homo sapiens
aaaccagccaatgct

SEQ ID NO: 1832360 - DNA, 15 bp, Homo sapiens
aaccagccaatgctt

SEQ ID NO: 1832361 - DNA, 15 bp, Homo sapiens
accagccaatgcttt

SEQ ID NO: 1832362 - DNA, 15 bp, Homo sapiens
ccagccaatgctttg

SEQ ID NO: 1832363 - DNA, 15 bp, Homo sapiens
cagccaatgctttgc

SEQ ID NO: 1832364 - DNA, 15 bp, Homo sapiens
agccaatgctttgca

SEQ ID NO: 1832365 - DNA, 15 bp, Homo sapiens
gccaatgctttgcat

SEQ ID NO: 1832366 - DNA, 15 bp, Homo sapiens
ccaatgctttgcatg

SEQ ID NO: 1832367 - DNA, 15 bp, Homo sapiens
caatgctttgcatgc

SEQ ID NO: 1832368 - DNA, 15 bp, Homo sapiens
aatgctttgcatgct

SEQ ID NO: 1832369 - DNA, 15 bp, Homo sapiens
atgctttgcatgctt

SEQ ID NO: 1832370 - DNA, 15 bp, Homo sapiens
tgctttgcatgctta

SEQ ID NO: 1832371 - DNA, 15 bp, Homo sapiens
gctttgcatgcttag

SEQ ID NO: 1832372 - DNA, 15 bp, Homo sapiens
ctttgcatgcttagt

SEQ ID NO: 1832373 - DNA, 15 bp, Homo sapiens
tttgcatgcttagtt

SEQ ID NO: 1832374 - DNA, 15 bp, Homo sapiens
ttgcatgcttagttt

SEQ ID NO: 1832375 - DNA, 15 bp, Homo sapiens
tgcatgcttagtttc

SEQ ID NO: 1832376 - DNA, 15 bp, Homo sapiens
gcatgcttagtttct

SEQ ID NO: 1832377 - DNA, 15 bp, Homo sapiens
catgcttagtttctg

SEQ ID NO: 1832378 - DNA, 15 bp, Homo sapiens
atgcttagtttctgc

SEQ ID NO: 1832379 - DNA, 15 bp, Homo sapiens
tgcttagtttctgct

SEQ ID NO: 1832380 - DNA, 15 bp, Homo sapiens
gcttagtttctgctg

SEQ ID NO: 1832381 - DNA, 15 bp, Homo sapiens
cttagtttctgctga

SEQ ID NO: 1832382 - DNA, 15 bp, Homo sapiens
ttagtttctgctgat

SEQ ID NO: 1832383 - DNA, 15 bp, Homo sapiens
tagtttctgctgatg

SEQ ID NO: 1832384 - DNA, 15 bp, Homo sapiens
agtttctgctgatga

SEQ ID NO: 1832385 - DNA, 15 bp, Homo sapiens
gtttctgctgatgac

SEQ ID NO: 1832386 - DNA, 15 bp, Homo sapiens
tttctgctgatgaca

SEQ ID NO: 1832387 - DNA, 15 bp, Homo sapiens
ttctgctgatgacac

SEQ ID NO: 1832388 - DNA, 15 bp, Homo sapiens
tctgctgatgacact

SEQ ID NO: 1832389 - DNA, 15 bp, Homo sapiens
ctgctgatgacactg

SEQ ID NO: 1832390 - DNA, 15 bp, Homo sapiens
tgctgatgacactga

SEQ ID NO: 1832391 - DNA, 15 bp, Homo sapiens
gctgatgacactgaa

SEQ ID NO: 1832392 - DNA, 15 bp, Homo sapiens
ctgatgacactgaac

SEQ ID NO: 1832393 - DNA, 15 bp, Homo sapiens
tgatgacactgaact

SEQ ID NO: 1832394 - DNA, 15 bp, Homo sapiens
gatgacactgaactc

SEQ ID NO: 1832395 - DNA, 15 bp, Homo sapiens
atgacactgaactca

SEQ ID NO: 1832396 - DNA, 15 bp, Homo sapiens
tgacactgaactcag

SEQ ID NO: 1832397 - DNA, 15 bp, Homo sapiens
gacactgaactcaga

SEQ ID NO: 1832398 - DNA, 15 bp, Homo sapiens
acactgaactcagag

SEQ ID NO: 1832399 - DNA, 15 bp, Homo sapiens
cactgaactcagaga

SEQ ID NO: 1832400 - DNA, 15 bp, Homo sapiens
actgaactcagagaa

SEQ ID NO: 1832401 - DNA, 15 bp, Homo sapiens
ctgaactcagagaac

SEQ ID NO: 1832402 - DNA, 15 bp, Homo sapiens
tgaactcagagaact

SEQ ID NO: 1832403 - DNA, 15 bp, Homo sapiens
gaactcagagaactg

SEQ ID NO: 1832404 - DNA, 15 bp, Homo sapiens
aactcagagaactga

SEQ ID NO: 1832405 - DNA, 15 bp, Homo sapiens
actcagagaactgag

SEQ ID NO: 1832406 - DNA, 15 bp, Homo sapiens
ctcagagaactgaga

SEQ ID NO: 1832407 - DNA, 15 bp, Homo sapiens
tcagagaactgagat

SEQ ID NO: 1832408 - DNA, 15 bp, Homo sapiens
cagagaactgagatc

SEQ ID NO: 1832409 - DNA, 15 bp, Homo sapiens
agagaactgagatct

SEQ ID NO: 1832410 - DNA, 15 bp, Homo sapiens
gagaactgagatctt

SEQ ID NO: 1832411 - DNA, 15 bp, Homo sapiens
agaactgagatcttt

SEQ ID NO: 1832412 - DNA, 15 bp, Homo sapiens
gaactgagatctttg

SEQ ID NO: 1832413 - DNA, 15 bp, Homo sapiens
aactgagatctttgg

SEQ ID NO: 1832414 - DNA, 15 bp, Homo sapiens
actgagatctttgga

SEQ ID NO: 1832415 - DNA, 15 bp, Homo sapiens
ctgagatctttggag

SEQ ID NO: 1832416 - DNA, 15 bp, Homo sapiens
tgagatctttggaga

SEQ ID NO: 1832417 - DNA, 15 bp, Homo sapiens
gagatctttggagaa

SEQ ID NO: 1832418 - DNA, 15 bp, Homo sapiens
agatctttggagaaa

SEQ ID NO: 1832419 - DNA, 15 bp, Homo sapiens
gatctttggagaaac

SEQ ID NO: 1832420 - DNA, 15 bp, Homo sapiens
atctttggagaaacc

SEQ ID NO: 1832421 - DNA, 15 bp, Homo sapiens
tctttggagaaacca

SEQ ID NO: 1832422 - DNA, 15 bp, Homo sapiens
ctttggagaaaccaa

SEQ ID NO: 1832423 - DNA, 15 bp, Homo sapiens
tttggagaaaccaaa

SEQ ID NO: 1832424 - DNA, 15 bp, Homo sapiens
ttggagaaaccaaag

SEQ ID NO: 1832425 - DNA, 15 bp, Homo sapiens
tggagaaaccaaaga

SEQ ID NO: 1832426 - DNA, 15 bp, Homo sapiens
ggagaaaccaaagat

SEQ ID NO: 1832427 - DNA, 15 bp, Homo sapiens
gagaaaccaaagatg

SEQ ID NO: 1832428 - DNA, 15 bp, Homo sapiens
agaaaccaaagatgg

SEQ ID NO: 1832429 - DNA, 15 bp, Homo sapiens
gaaaccaaagatggc

SEQ ID NO: 1832430 - DNA, 15 bp, Homo sapiens
aaaccaaagatggct

SEQ ID NO: 1832431 - DNA, 15 bp, Homo sapiens
aaccaaagatggctc

SEQ ID NO: 1832432 - DNA, 15 bp, Homo sapiens
accaaagatggctca

SEQ ID NO: 1832433 - DNA, 15 bp, Homo sapiens
ccaaagatggctcaa

SEQ ID NO: 1832434 - DNA, 15 bp, Homo sapiens
caaagatggctcaaa

SEQ ID NO: 1832435 - DNA, 15 bp, Homo sapiens
aaagatggctcaaat

SEQ ID NO: 1832436 - DNA, 15 bp, Homo sapiens
aagatggctcaaatg

SEQ ID NO: 1832437 - DNA, 15 bp, Homo sapiens
agatggctcaaatga

SEQ ID NO: 1832438 - DNA, 15 bp, Homo sapiens
gatggctcaaatgac

SEQ ID NO: 1832439 - DNA, 15 bp, Homo sapiens
atggctcaaatgact

SEQ ID NO: 1832440 - DNA, 15 bp, Homo sapiens
tggctcaaatgactc

SEQ ID NO: 1832441 - DNA, 15 bp, Homo sapiens
ggctcaaatgactcg

SEQ ID NO: 1832442 - DNA, 15 bp, Homo sapiens
gctcaaatgactcgt

SEQ ID NO: 1832443 - DNA, 15 bp, Homo sapiens
ctcaaatgactcgtg

SEQ ID NO: 1832444 - DNA, 15 bp, Homo sapiens
tcaaatgactcgtga

SEQ ID NO: 1832445 - DNA, 15 bp, Homo sapiens
caaatgactcgtgat

SEQ ID NO: 1832446 - DNA, 15 bp, Homo sapiens
aaatgactcgtgata

SEQ ID NO: 1832447 - DNA, 15 bp, Homo sapiens
aatgactcgtgataa

SEQ ID NO: 1832448 - DNA, 15 bp, Homo sapiens
atgactcgtgataat

SEQ ID NO: 1832449 - DNA, 15 bp, Homo sapiens
tgactcgtgataata

SEQ ID NO: 1832450 - DNA, 15 bp, Homo sapiens
gactcgtgataataa

SEQ ID NO: 1832451 - DNA, 15 bp, Homo sapiens
actcgtgataataaa

SEQ ID NO: 1832452 - DNA, 15 bp, Homo sapiens
ctcgtgataataaat

SEQ ID NO: 1832453 - DNA, 15 bp, Homo sapiens
tcgtgataataaatg

SEQ ID NO: 1832454 - DNA, 15 bp, Homo sapiens
cgtgataataaatga

SEQ ID NO: 1832455 - DNA, 15 bp, Homo sapiens
gtgataataaatgaa

SEQ ID NO: 1832456 - DNA, 15 bp, Homo sapiens
tgataataaatgaac

SEQ ID NO: 1832457 - DNA, 15 bp, Homo sapiens
gataataaatgaacg

SEQ ID NO: 1832458 - DNA, 15 bp, Homo sapiens
ataataaatgaacgt

SEQ ID NO: 1832459 - DNA, 15 bp, Homo sapiens
taataaatgaacgta

SEQ ID NO: 1832460 - DNA, 15 bp, Homo sapiens
aataaatgaacgtat

SEQ ID NO: 1832461 - DNA, 15 bp, Homo sapiens
ataaatgaacgtatt

SEQ ID NO: 1832462 - DNA, 15 bp, Homo sapiens
taaatgaacgtatta

SEQ ID NO: 1832463 - DNA, 15 bp, Homo sapiens
aaatgaacgtattac

SEQ ID NO: 1832464 - DNA, 15 bp, Homo sapiens
aatgaacgtattact

SEQ ID NO: 1832465 - DNA, 15 bp, Homo sapiens
atgaacgtattactg

SEQ ID NO: 1832466 - DNA, 15 bp, Homo sapiens
tgaacgtattactgc

SEQ ID NO: 1832467 - DNA, 15 bp, Homo sapiens
gaacgtattactgct

SEQ ID NO: 1832468 - DNA, 15 bp, Homo sapiens
aacgtattactgctc

SEQ ID NO: 1832469 - DNA, 15 bp, Homo sapiens
acgtattactgctcg

SEQ ID NO: 1832470 - DNA, 15 bp, Homo sapiens
cgtattactgctcgc

SEQ ID NO: 1832471 - DNA, 15 bp, Homo sapiens
gtattactgctcgct

SEQ ID NO: 1832472 - DNA, 15 bp, Homo sapiens
tattactgctcgctg

SEQ ID NO: 1832473 - DNA, 15 bp, Homo sapiens
attactgctcgctga

SEQ ID NO: 1832474 - DNA, 15 bp, Homo sapiens
ttactgctcgctgac

SEQ ID NO: 1832475 - DNA, 15 bp, Homo sapiens
tactgctcgctgaca

SEQ ID NO: 1832476 - DNA, 15 bp, Homo sapiens
actgctcgctgacaa

SEQ ID NO: 1832477 - DNA, 15 bp, Homo sapiens
ctgctcgctgacaaa

SEQ ID NO: 1832478 - DNA, 15 bp, Homo sapiens
tgctcgctgacaaat

SEQ ID NO: 1832479 - DNA, 15 bp, Homo sapiens
gctcgctgacaaatt

SEQ ID NO: 1832480 - DNA, 15 bp, Homo sapiens
ctcgctgacaaattg

SEQ ID NO: 1832481 - DNA, 15 bp, Homo sapiens
tcgctgacaaattga

SEQ ID NO: 1832482 - DNA, 15 bp, Homo sapiens
cgctgacaaattgaa

SEQ ID NO: 1832483 - DNA, 15 bp, Homo sapiens
gctgacaaattgaag

SEQ ID NO: 1832484 - DNA, 15 bp, Homo sapiens
ctgacaaattgaagt

SEQ ID NO: 1832485 - DNA, 15 bp, Homo sapiens
tgacaaattgaagtt

SEQ ID NO: 1832486 - DNA, 15 bp, Homo sapiens
gacaaattgaagttt

SEQ ID NO: 1832487 - DNA, 15 bp, Homo sapiens
acaaattgaagtttc

SEQ ID NO: 1832488 - DNA, 15 bp, Homo sapiens
caaattgaagtttcc

SEQ ID NO: 1832489 - DNA, 15 bp, Homo sapiens
aaattgaagtttcct

SEQ ID NO: 1832490 - DNA, 15 bp, Homo sapiens
aattgaagtttccta

SEQ ID NO: 1832491 - DNA, 15 bp, Homo sapiens
attgaagtttcctaa

SEQ ID NO: 1832492 - DNA, 15 bp, Homo sapiens
ttgaagtttcctaat

SEQ ID NO: 1832493 - DNA, 15 bp, Homo sapiens
tgaagtttcctaatt

SEQ ID NO: 1832494 - DNA, 15 bp, Homo sapiens
gaagtttcctaatta

SEQ ID NO: 1832495 - DNA, 15 bp, Homo sapiens
aagtttcctaattat

SEQ ID NO: 1832496 - DNA, 15 bp, Homo sapiens
agtttcctaattata

SEQ ID NO: 1832497 - DNA, 15 bp, Homo sapiens
gtttcctaattataa

SEQ ID NO: 1832498 - DNA, 15 bp, Homo sapiens
tttcctaattataaa

SEQ ID NO: 1832499 - DNA, 15 bp, Homo sapiens
ttcctaattataaag

SEQ ID NO: 1832500 - DNA, 15 bp, Homo sapiens
tcctaattataaagc

SEQ ID NO: 1832501 - DNA, 15 bp, Homo sapiens
cctaattataaagca

SEQ ID NO: 1832502 - DNA, 15 bp, Homo sapiens
ctaattataaagcag

SEQ ID NO: 1832503 - DNA, 15 bp, Homo sapiens
taattataaagcaga

SEQ ID NO: 1832504 - DNA, 15 bp, Homo sapiens
aattataaagcagaa

SEQ ID NO: 1832505 - DNA, 15 bp, Homo sapiens
attataaagcagaac

SEQ ID NO: 1832506 - DNA, 15 bp, Homo sapiens
ttataaagcagaacc

SEQ ID NO: 1832507 - DNA, 15 bp, Homo sapiens
tataaagcagaacca

SEQ ID NO: 1832508 - DNA, 15 bp, Homo sapiens
ataaagcagaaccag

SEQ ID NO: 1832509 - DNA, 15 bp, Homo sapiens
taaagcagaaccagt

SEQ ID NO: 1832510 - DNA, 15 bp, Homo sapiens
aaagcagaaccagtg

SEQ ID NO: 1832511 - DNA, 15 bp, Homo sapiens
aagcagaaccagtgg

SEQ ID NO: 1832512 - DNA, 15 bp, Homo sapiens
agcagaaccagtggc

SEQ ID NO: 1832513 - DNA, 15 bp, Homo sapiens
gcagaaccagtggcc

SEQ ID NO: 1832514 - DNA, 15 bp, Homo sapiens
cagaaccagtggcca

SEQ ID NO: 1832515 - DNA, 15 bp, Homo sapiens
agaaccagtggccac

SEQ ID NO: 1832516 - DNA, 15 bp, Homo sapiens
gaaccagtggccacc

SEQ ID NO: 1832517 - DNA, 15 bp, Homo sapiens
aaccagtggccacca

SEQ ID NO: 1832518 - DNA, 15 bp, Homo sapiens
accagtggccaccac

SEQ ID NO: 1832519 - DNA, 15 bp, Homo sapiens
ccagtggccaccacc

SEQ ID NO: 1832520 - DNA, 15 bp, Homo sapiens
cagtggccaccacca

SEQ ID NO: 1832521 - DNA, 15 bp, Homo sapiens
agtggccaccaccat

SEQ ID NO: 1832522 - DNA, 15 bp, Homo sapiens
gtggccaccaccata

SEQ ID NO: 1832523 - DNA, 15 bp, Homo sapiens
tggccaccaccatag

SEQ ID NO: 1832524 - DNA, 15 bp, Homo sapiens
ggccaccaccataga

SEQ ID NO: 1832525 - DNA, 15 bp, Homo sapiens
gccaccaccatagaa

SEQ ID NO: 1832526 - DNA, 15 bp, Homo sapiens
ccaccaccatagaaa

SEQ ID NO: 1832527 - DNA, 15 bp, Homo sapiens
caccaccatagaaag

SEQ ID NO: 1832528 - DNA, 15 bp, Homo sapiens
accaccatagaaagc

SEQ ID NO: 1832529 - DNA, 15 bp, Homo sapiens
ccaccatagaaagcc

SEQ ID NO: 1832530 - DNA, 15 bp, Homo sapiens
caccatagaaagcct

SEQ ID NO: 1832531 - DNA, 15 bp, Homo sapiens
accatagaaagccta

SEQ ID NO: 1832532 - DNA, 15 bp, Homo sapiens
ccatagaaagcctac

SEQ ID NO: 1832533 - DNA, 15 bp, Homo sapiens
catagaaagcctacc

SEQ ID NO: 1832534 - DNA, 15 bp, Homo sapiens
atagaaagcctaccc

SEQ ID NO: 1832535 - DNA, 15 bp, Homo sapiens
tagaaagcctacccc

SEQ ID NO: 1832536 - DNA, 15 bp, Homo sapiens
agaaagcctacccca

SEQ ID NO: 1832537 - DNA, 15 bp, Homo sapiens
gaaagcctaccccac

SEQ ID NO: 1832538 - DNA, 15 bp, Homo sapiens
aaagcctaccccaca

SEQ ID NO: 1832539 - DNA, 15 bp, Homo sapiens
aagcctaccccacag

SEQ ID NO: 1832540 - DNA, 15 bp, Homo sapiens
agcctaccccacaga

SEQ ID NO: 1832541 - DNA, 15 bp, Homo sapiens
gcctaccccacagat

SEQ ID NO: 1832542 - DNA, 15 bp, Homo sapiens
cctaccccacagatg

SEQ ID NO: 1832543 - DNA, 15 bp, Homo sapiens
ctaccccacagatgg

SEQ ID NO: 1832544 - DNA, 15 bp, Homo sapiens
taccccacagatgga

SEQ ID NO: 1832545 - DNA, 15 bp, Homo sapiens
accccacagatggag

SEQ ID NO: 1832546 - DNA, 15 bp, Homo sapiens
ccccacagatggaga

SEQ ID NO: 1832547 - DNA, 15 bp, Homo sapiens
cccacagatggagaa

SEQ ID NO: 1832548 - DNA, 15 bp, Homo sapiens
ccacagatggagaag

SEQ ID NO: 1832549 - DNA, 15 bp, Homo sapiens
cacagatggagaaga

SEQ ID NO: 1832550 - DNA, 15 bp, Homo sapiens
acagatggagaagag

SEQ ID NO: 1832551 - DNA, 15 bp, Homo sapiens
cagatggagaagagg

SEQ ID NO: 1832552 - DNA, 15 bp, Homo sapiens
agatggagaagaggc

SEQ ID NO: 1832553 - DNA, 15 bp, Homo sapiens
gatggagaagaggca

SEQ ID NO: 1832554 - DNA, 15 bp, Homo sapiens
atggagaagaggcaa

SEQ ID NO: 1832555 - DNA, 15 bp, Homo sapiens
tggagaagaggcaaa

SEQ ID NO: 1832556 - DNA, 15 bp, Homo sapiens
ggagaagaggcaaag

SEQ ID NO: 1832557 - DNA, 15 bp, Homo sapiens
gagaagaggcaaagc

SEQ ID NO: 1832558 - DNA, 15 bp, Homo sapiens
agaagaggcaaagca

SEQ ID NO: 1832559 - DNA, 15 bp, Homo sapiens
gaagaggcaaagcac

SEQ ID NO: 1832560 - DNA, 15 bp, Homo sapiens
aagaggcaaagcact

SEQ ID NO: 1832561 - DNA, 15 bp, Homo sapiens
agaggcaaagcactg

SEQ ID NO: 1832562 - DNA, 15 bp, Homo sapiens
gaggcaaagcactga

SEQ ID NO: 1832563 - DNA, 15 bp, Homo sapiens
aggcaaagcactgaa

SEQ ID NO: 1832564 - DNA, 15 bp, Homo sapiens
ggcaaagcactgaaa

SEQ ID NO: 1832565 - DNA, 15 bp, Homo sapiens
gcaaagcactgaaac

SEQ ID NO: 1832566 - DNA, 15 bp, Homo sapiens
caaagcactgaaact

SEQ ID NO: 1832567 - DNA, 15 bp, Homo sapiens
aaagcactgaaactc

SEQ ID NO: 1832568 - DNA, 15 bp, Homo sapiens
aagcactgaaactca

SEQ ID NO: 1832569 - DNA, 15 bp, Homo sapiens
agcactgaaactcag

SEQ ID NO: 1832570 - DNA, 15 bp, Homo sapiens
gcactgaaactcagt

SEQ ID NO: 1832571 - DNA, 15 bp, Homo sapiens
cactgaaactcagtc

SEQ ID NO: 1832572 - DNA, 15 bp, Homo sapiens
actgaaactcagtcc

SEQ ID NO: 1832573 - DNA, 15 bp, Homo sapiens
ctgaaactcagtccg

SEQ ID NO: 1832574 - DNA, 15 bp, Homo sapiens
tgaaactcagtccga

SEQ ID NO: 1832575 - DNA, 15 bp, Homo sapiens
gaaactcagtccgag

SEQ ID NO: 1832576 - DNA, 15 bp, Homo sapiens
aaactcagtccgagg

SEQ ID NO: 1832577 - DNA, 15 bp, Homo sapiens
aactcagtccgaggg

SEQ ID NO: 1832578 - DNA, 15 bp, Homo sapiens
actcagtccgaggga

SEQ ID NO: 1832579 - DNA, 15 bp, Homo sapiens
ctcagtccgagggac

SEQ ID NO: 1832580 - DNA, 15 bp, Homo sapiens
tcagtccgagggacc

SEQ ID NO: 1832581 - DNA, 15 bp, Homo sapiens
cagtccgagggacct

SEQ ID NO: 1832582 - DNA, 15 bp, Homo sapiens
agtccgagggacctc

SEQ ID NO: 1832583 - DNA, 15 bp, Homo sapiens
gtccgagggacctcc

SEQ ID NO: 1832584 - DNA, 15 bp, Homo sapiens
tccgagggacctccc

SEQ ID NO: 1832585 - DNA, 15 bp, Homo sapiens
ccgagggacctcccc

SEQ ID NO: 1832586 - DNA, 15 bp, Homo sapiens
cgagggacctcccca

SEQ ID NO: 1832587 - DNA, 15 bp, Homo sapiens
gagggacctccccag

SEQ ID NO: 1832588 - DNA, 15 bp, Homo sapiens
agggacctccccagc

SEQ ID NO: 1832589 - DNA, 15 bp, Homo sapiens
gggacctccccagcc

SEQ ID NO: 1832590 - DNA, 15 bp, Homo sapiens
ggacctccccagcca

SEQ ID NO: 1832591 - DNA, 15 bp, Homo sapiens
gacctccccagccat

SEQ ID NO: 1832592 - DNA, 15 bp, Homo sapiens
acctccccagccatg

SEQ ID NO: 1832593 - DNA, 15 bp, Homo sapiens
cctccccagccatgg

SEQ ID NO: 1832594 - DNA, 15 bp, Homo sapiens
ctccccagccatggg

SEQ ID NO: 1832595 - DNA, 15 bp, Homo sapiens
tccccagccatgggg

SEQ ID NO: 1832596 - DNA, 15 bp, Homo sapiens
ccccagccatggggg

SEQ ID NO: 1832597 - DNA, 15 bp, Homo sapiens
cccagccatgggggc

SEQ ID NO: 1832598 - DNA, 15 bp, Homo sapiens
ccagccatgggggca

SEQ ID NO: 1832599 - DNA, 15 bp, Homo sapiens
cagccatgggggcag

SEQ ID NO: 1832600 - DNA, 15 bp, Homo sapiens
agccatgggggcagg

SEQ ID NO: 1832601 - DNA, 15 bp, Homo sapiens
gccatgggggcaggg

SEQ ID NO: 1832602 - DNA, 15 bp, Homo sapiens
ccatgggggcagggc

SEQ ID NO: 1832603 - DNA, 15 bp, Homo sapiens
catgggggcagggcc

SEQ ID NO: 1832604 - DNA, 15 bp, Homo sapiens
atgggggcagggcca

SEQ ID NO: 1832605 - DNA, 15 bp, Homo sapiens
tgggggcagggccaa

SEQ ID NO: 1832606 - DNA, 15 bp, Homo sapiens
gggggcagggccaaa

SEQ ID NO: 1832607 - DNA, 15 bp, Homo sapiens
ggggcagggccaaat

SEQ ID NO: 1832608 - DNA, 15 bp, Homo sapiens
gggcagggccaaatg

SEQ ID NO: 1832609 - DNA, 15 bp, Homo sapiens
ggcagggccaaatgg

SEQ ID NO: 1832610 - DNA, 15 bp, Homo sapiens
gcagggccaaatggg

SEQ ID NO: 1832611 - DNA, 15 bp, Homo sapiens
cagggccaaatgggg

SEQ ID NO: 1832612 - DNA, 15 bp, Homo sapiens
agggccaaatggggc

SEQ ID NO: 1832613 - DNA, 15 bp, Homo sapiens
gggccaaatggggct

SEQ ID NO: 1832614 - DNA, 15 bp, Homo sapiens
ggccaaatggggctt

SEQ ID NO: 1832615 - DNA, 15 bp, Homo sapiens
gccaaatggggcttc

SEQ ID NO: 1832616 - DNA, 15 bp, Homo sapiens
ccaaatggggcttct

SEQ ID NO: 1832617 - DNA, 15 bp, Homo sapiens
caaatggggcttctt

SEQ ID NO: 1832618 - DNA, 15 bp, Homo sapiens
aaatggggcttcttc

SEQ ID NO: 1832619 - DNA, 15 bp, Homo sapiens
aatggggcttcttca

SEQ ID NO: 1832620 - DNA, 15 bp, Homo sapiens
atggggcttcttcag

SEQ ID NO: 1832621 - DNA, 15 bp, Homo sapiens
tggggcttcttcagg

SEQ ID NO: 1832622 - DNA, 15 bp, Homo sapiens
ggggcttcttcagga

SEQ ID NO: 1832623 - DNA, 15 bp, Homo sapiens
gggcttcttcaggac

SEQ ID NO: 1832624 - DNA, 15 bp, Homo sapiens
ggcttcttcaggacc

SEQ ID NO: 1832625 - DNA, 15 bp, Homo sapiens
gcttcttcaggacca

SEQ ID NO: 1832626 - DNA, 15 bp, Homo sapiens
cttcttcaggaccag

SEQ ID NO: 1832627 - DNA, 15 bp, Homo sapiens
ttcttcaggaccagc

SEQ ID NO: 1832628 - DNA, 15 bp, Homo sapiens
tcttcaggaccagca

SEQ ID NO: 1832629 - DNA, 15 bp, Homo sapiens
cttcaggaccagcaa

SEQ ID NO: 1832630 - DNA, 15 bp, Homo sapiens
ttcaggaccagcaaa

SEQ ID NO: 1832631 - DNA, 15 bp, Homo sapiens
tcaggaccagcaaag

SEQ ID NO: 1832632 - DNA, 15 bp, Homo sapiens
caggaccagcaaagc

SEQ ID NO: 1832633 - DNA, 15 bp, Homo sapiens
aggaccagcaaagcc

SEQ ID NO: 1832634 - DNA, 15 bp, Homo sapiens
ggaccagcaaagcca

SEQ ID NO: 1832635 - DNA, 15 bp, Homo sapiens
gaccagcaaagccat

SEQ ID NO: 1832636 - DNA, 15 bp, Homo sapiens
accagcaaagccatt

SEQ ID NO: 1832637 - DNA, 15 bp, Homo sapiens
ccagcaaagccattt

SEQ ID NO: 1832638 - DNA, 15 bp, Homo sapiens
cagcaaagccatttt

SEQ ID NO: 1832639 - DNA, 15 bp, Homo sapiens
agcaaagccattttt

SEQ ID NO: 1832640 - DNA, 15 bp, Homo sapiens
gcaaagccatttttc

SEQ ID NO: 1832641 - DNA, 15 bp, Homo sapiens
caaagccatttttct

SEQ ID NO: 1832642 - DNA, 15 bp, Homo sapiens
aaagccatttttctc

SEQ ID NO: 1832643 - DNA, 15 bp, Homo sapiens
aagccatttttctca

SEQ ID NO: 1832644 - DNA, 15 bp, Homo sapiens
agccatttttctcat

SEQ ID NO: 1832645 - DNA, 15 bp, Homo sapiens
gccatttttctcatc

SEQ ID NO: 1832646 - DNA, 15 bp, Homo sapiens
ccatttttctcatca

SEQ ID NO: 1832647 - DNA, 15 bp, Homo sapiens
atttttctcatcagc

SEQ ID NO: 1832648 - DNA, 15 bp, Homo sapiens
tttttctcatcagca

SEQ ID NO: 1832649 - DNA, 15 bp, Homo sapiens
ttttctcatcagcaa

SEQ ID NO: 1832650 - DNA, 15 bp, Homo sapiens
tttctcatcagcaaa

SEQ ID NO: 1832651 - DNA, 15 bp, Homo sapiens
ttctcatcagcaaac

SEQ ID NO: 1832652 - DNA, 15 bp, Homo sapiens
tctcatcagcaaact

SEQ ID NO: 1832653 - DNA, 15 bp, Homo sapiens
ctcatcagcaaacta

SEQ ID NO: 1832654 - DNA, 15 bp, Homo sapiens
tcatcagcaaactag

SEQ ID NO: 1832655 - DNA, 15 bp, Homo sapiens
catcagcaaactagc

SEQ ID NO: 1832656 - DNA, 15 bp, Homo sapiens
atcagcaaactagct

SEQ ID NO: 1832657 - DNA, 15 bp, Homo sapiens
tcagcaaactagctt

SEQ ID NO: 1832658 - DNA, 15 bp, Homo sapiens
cagcaaactagcttc

SEQ ID NO: 1832659 - DNA, 15 bp, Homo sapiens
agcaaactagcttca

SEQ ID NO: 1832660 - DNA, 15 bp, Homo sapiens
gcaaactagcttcag

SEQ ID NO: 1832661 - DNA, 15 bp, Homo sapiens
caaactagcttcaga

SEQ ID NO: 1832662 - DNA, 15 bp, Homo sapiens
aaactagcttcagag

SEQ ID NO: 1832663 - DNA, 15 bp, Homo sapiens
aactagcttcagaga

SEQ ID NO: 1832664 - DNA, 15 bp, Homo sapiens
actagcttcagagaa

SEQ ID NO: 1832665 - DNA, 15 bp, Homo sapiens
ctagcttcagagaag

SEQ ID NO: 1832666 - DNA, 15 bp, Homo sapiens
tagcttcagagaagt

SEQ ID NO: 1832667 - DNA, 15 bp, Homo sapiens
agcttcagagaagtt

SEQ ID NO: 1832668 - DNA, 15 bp, Homo sapiens
gcttcagagaagttt

SEQ ID NO: 1832669 - DNA, 15 bp, Homo sapiens
cttcagagaagtttg

SEQ ID NO: 1832670 - DNA, 15 bp, Homo sapiens
ttcagagaagtttgc

SEQ ID NO: 1832671 - DNA, 15 bp, Homo sapiens
tcagagaagtttgca

SEQ ID NO: 1832672 - DNA, 15 bp, Homo sapiens
cagagaagtttgcaa

SEQ ID NO: 1832673 - DNA, 15 bp, Homo sapiens
agagaagtttgcaat

SEQ ID NO: 1832674 - DNA, 15 bp, Homo sapiens
gagaagtttgcaatc

SEQ ID NO: 1832675 - DNA, 15 bp, Homo sapiens
agaagtttgcaatca

SEQ ID NO: 1832676 - DNA, 15 bp, Homo sapiens
gaagtttgcaatcag

SEQ ID NO: 1832677 - DNA, 15 bp, Homo sapiens
aagtttgcaatcagg

SEQ ID NO: 1832678 - DNA, 15 bp, Homo sapiens
agtttgcaatcaggg

SEQ ID NO: 1832679 - DNA, 15 bp, Homo sapiens
gtttgcaatcagggc

SEQ ID NO: 1832680 - DNA, 15 bp, Homo sapiens
tttgcaatcagggca

SEQ ID NO: 1832681 - DNA, 15 bp, Homo sapiens
ttgcaatcagggcac

SEQ ID NO: 1832682 - DNA, 15 bp, Homo sapiens
tgcaatcagggcact

SEQ ID NO: 1832683 - DNA, 15 bp, Homo sapiens
gcaatcagggcactc

SEQ ID NO: 1832684 - DNA, 15 bp, Homo sapiens
caatcagggcactct

SEQ ID NO: 1832685 - DNA, 15 bp, Homo sapiens
aatcagggcactctc

SEQ ID NO: 1832686 - DNA, 15 bp, Homo sapiens
atcagggcactctct

SEQ ID NO: 1832687 - DNA, 15 bp, Homo sapiens
tcagggcactctctt

SEQ ID NO: 1832688 - DNA, 15 bp, Homo sapiens
cagggcactctcttc

SEQ ID NO: 1832689 - DNA, 15 bp, Homo sapiens
agggcactctcttcc

SEQ ID NO: 1832690 - DNA, 15 bp, Homo sapiens
gggcactctcttcca

SEQ ID NO: 1832691 - DNA, 15 bp, Homo sapiens
ggcactctcttccaa

SEQ ID NO: 1832692 - DNA, 15 bp, Homo sapiens
gcactctcttccaag

SEQ ID NO: 1832693 - DNA, 15 bp, Homo sapiens
cactctcttccaagc

SEQ ID NO: 1832694 - DNA, 15 bp, Homo sapiens
actctcttccaagcc

SEQ ID NO: 1832695 - DNA, 15 bp, Homo sapiens
ctctcttccaagcct

SEQ ID NO: 1832696 - DNA, 15 bp, Homo sapiens
tctcttccaagccta

SEQ ID NO: 1832697 - DNA, 15 bp, Homo sapiens
ctcttccaagcctag

SEQ ID NO: 1832698 - DNA, 15 bp, Homo sapiens
tcttccaagcctaga

SEQ ID NO: 1832699 - DNA, 15 bp, Homo sapiens
cttccaagcctagag

SEQ ID NO: 1832700 - DNA, 15 bp, Homo sapiens
ttccaagcctagaga

SEQ ID NO: 1832701 - DNA, 15 bp, Homo sapiens
tccaagcctagagac

SEQ ID NO: 1832702 - DNA, 15 bp, Homo sapiens
ccaagcctagagacc

SEQ ID NO: 1832703 - DNA, 15 bp, Homo sapiens
caagcctagagaccc

SEQ ID NO: 1832704 - DNA, 15 bp, Homo sapiens
aagcctagagaccca

SEQ ID NO: 1832705 - DNA, 15 bp, Homo sapiens
agcctagagacccag

SEQ ID NO: 1832706 - DNA, 15 bp, Homo sapiens
gcctagagacccagg

SEQ ID NO: 1832707 - DNA, 15 bp, Homo sapiens
cctagagacccaggg

SEQ ID NO: 1832708 - DNA, 15 bp, Homo sapiens
ctagagacccaggga

SEQ ID NO: 1832709 - DNA, 15 bp, Homo sapiens
tagagacccagggaa

SEQ ID NO: 1832710 - DNA, 15 bp, Homo sapiens
agagacccagggaaa

SEQ ID NO: 1832711 - DNA, 15 bp, Homo sapiens
gagacccagggaaag

SEQ ID NO: 1832712 - DNA, 15 bp, Homo sapiens
agacccagggaaagg

SEQ ID NO: 1832713 - DNA, 15 bp, Homo sapiens
gacccagggaaaggg

SEQ ID NO: 1832714 - DNA, 15 bp, Homo sapiens
acccagggaaagggg

SEQ ID NO: 1832715 - DNA, 15 bp, Homo sapiens
cccagggaaaggggt

SEQ ID NO: 1832716 - DNA, 15 bp, Homo sapiens
ccagggaaaggggta

SEQ ID NO: 1832717 - DNA, 15 bp, Homo sapiens
cagggaaaggggtac

SEQ ID NO: 1832718 - DNA, 15 bp, Homo sapiens
agggaaaggggtacg

SEQ ID NO: 1832719 - DNA, 15 bp, Homo sapiens
gggaaaggggtacgg

SEQ ID NO: 1832720 - DNA, 15 bp, Homo sapiens
ggaaaggggtacggg

SEQ ID NO: 1832721 - DNA, 15 bp, Homo sapiens
gaaaggggtacgggg

SEQ ID NO: 1832722 - DNA, 15 bp, Homo sapiens
aaaggggtacggggg

SEQ ID NO: 1832723 - DNA, 15 bp, Homo sapiens
aaggggtacgggggt

SEQ ID NO: 1832724 - DNA, 15 bp, Homo sapiens
aggggtacgggggtg

SEQ ID NO: 1832725 - DNA, 15 bp, Homo sapiens
ggggtacgggggtgt

SEQ ID NO: 1832726 - DNA, 15 bp, Homo sapiens
gggtacgggggtgtc

SEQ ID NO: 1832727 - DNA, 15 bp, Homo sapiens
ggtacgggggtgtcc

SEQ ID NO: 1832728 - DNA, 15 bp, Homo sapiens
gtacgggggtgtccc

SEQ ID NO: 1832729 - DNA, 15 bp, Homo sapiens
tacgggggtgtccca

SEQ ID NO: 1832730 - DNA, 15 bp, Homo sapiens
acgggggtgtcccaa

SEQ ID NO: 1832731 - DNA, 15 bp, Homo sapiens
cgggggtgtcccaag

SEQ ID NO: 1832732 - DNA, 15 bp, Homo sapiens
gggggtgtcccaagg

SEQ ID NO: 1832733 - DNA, 15 bp, Homo sapiens
ggggtgtcccaaggc

SEQ ID NO: 1832734 - DNA, 15 bp, Homo sapiens
gggtgtcccaaggca

SEQ ID NO: 1832735 - DNA, 15 bp, Homo sapiens
ggtgtcccaaggcaa

SEQ ID NO: 1832736 - DNA, 15 bp, Homo sapiens
gtgtcccaaggcaaa

SEQ ID NO: 1832737 - DNA, 15 bp, Homo sapiens
tgtcccaaggcaaag

SEQ ID NO: 1832738 - DNA, 15 bp, Homo sapiens
gtcccaaggcaaaga

SEQ ID NO: 1832739 - DNA, 15 bp, Homo sapiens
tcccaaggcaaagag

SEQ ID NO: 1832740 - DNA, 15 bp, Homo sapiens
cccaaggcaaagaga

SEQ ID NO: 1832741 - DNA, 15 bp, Homo sapiens
ccaaggcaaagagaa

SEQ ID NO: 1832742 - DNA, 15 bp, Homo sapiens
caaggcaaagagaat

SEQ ID NO: 1832743 - DNA, 15 bp, Homo sapiens
aaggcaaagagaatc

SEQ ID NO: 1832744 - DNA, 15 bp, Homo sapiens
aggcaaagagaatct

SEQ ID NO: 1832745 - DNA, 15 bp, Homo sapiens
ggcaaagagaatcta

SEQ ID NO: 1832746 - DNA, 15 bp, Homo sapiens
gcaaagagaatctac

SEQ ID NO: 1832747 - DNA, 15 bp, Homo sapiens
caaagagaatctaca

SEQ ID NO: 1832748 - DNA, 15 bp, Homo sapiens
aaagagaatctacac

SEQ ID NO: 1832749 - DNA, 15 bp, Homo sapiens
aagagaatctacact

SEQ ID NO: 1832750 - DNA, 15 bp, Homo sapiens
agagaatctacactt

SEQ ID NO: 1832751 - DNA, 15 bp, Homo sapiens
gagaatctacacttt

SEQ ID NO: 1832752 - DNA, 15 bp, Homo sapiens
agaatctacactttt

SEQ ID NO: 1832753 - DNA, 15 bp, Homo sapiens
gaatctacacttttt

SEQ ID NO: 1832754 - DNA, 15 bp, Homo sapiens
aatctacactttttg

SEQ ID NO: 1832755 - DNA, 15 bp, Homo sapiens
atctacactttttgc

SEQ ID NO: 1832756 - DNA, 15 bp, Homo sapiens
tctacactttttgcc

SEQ ID NO: 1832757 - DNA, 15 bp, Homo sapiens
ctacactttttgccc

SEQ ID NO: 1832758 - DNA, 15 bp, Homo sapiens
tacactttttgcccc

SEQ ID NO: 1832759 - DNA, 15 bp, Homo sapiens
acactttttgccccc

SEQ ID NO: 1832760 - DNA, 15 bp, Homo sapiens
cactttttgcccccg

SEQ ID NO: 1832761 - DNA, 15 bp, Homo sapiens
actttttgcccccgg

SEQ ID NO: 1832762 - DNA, 15 bp, Homo sapiens
ctttttgcccccgga

SEQ ID NO: 1832763 - DNA, 15 bp, Homo sapiens
tttttgcccccggag

SEQ ID NO: 1832764 - DNA, 15 bp, Homo sapiens
ttttgcccccggaga

SEQ ID NO: 1832765 - DNA, 15 bp, Homo sapiens
tttgcccccggagag

SEQ ID NO: 1832766 - DNA, 15 bp, Homo sapiens
ttgcccccggagagg

SEQ ID NO: 1832767 - DNA, 15 bp, Homo sapiens
tgcccccggagaggc

SEQ ID NO: 1832768 - DNA, 15 bp, Homo sapiens
gcccccggagaggct

SEQ ID NO: 1832769 - DNA, 15 bp, Homo sapiens
cccccggagaggcta

SEQ ID NO: 1832770 - DNA, 15 bp, Homo sapiens
ccccggagaggctac

SEQ ID NO: 1832771 - DNA, 15 bp, Homo sapiens
cccggagaggctact

SEQ ID NO: 1832772 - DNA, 15 bp, Homo sapiens
ccggagaggctactt

SEQ ID NO: 1832773 - DNA, 15 bp, Homo sapiens
cggagaggctacttc

SEQ ID NO: 1832774 - DNA, 15 bp, Homo sapiens
ggagaggctacttcc

SEQ ID NO: 1832775 - DNA, 15 bp, Homo sapiens
gagaggctacttccc

SEQ ID NO: 1832776 - DNA, 15 bp, Homo sapiens
agaggctacttccct

SEQ ID NO: 1832777 - DNA, 15 bp, Homo sapiens
gaggctacttccctc

SEQ ID NO: 1832778 - DNA, 15 bp, Homo sapiens
aggctacttccctcc

SEQ ID NO: 1832779 - DNA, 15 bp, Homo sapiens
ggctacttccctccc

SEQ ID NO: 1832780 - DNA, 15 bp, Homo sapiens
gctacttccctccca

SEQ ID NO: 1832781 - DNA, 15 bp, Homo sapiens
ctacttccctcccaa

SEQ ID NO: 1832782 - DNA, 15 bp, Homo sapiens
tacttccctcccaag

SEQ ID NO: 1832783 - DNA, 15 bp, Homo sapiens
acttccctcccaaga

SEQ ID NO: 1832784 - DNA, 15 bp, Homo sapiens
cttccctcccaagat

SEQ ID NO: 1832785 - DNA, 15 bp, Homo sapiens
ttccctcccaagatg

SEQ ID NO: 1832786 - DNA, 15 bp, Homo sapiens
tccctcccaagatgc

SEQ ID NO: 1832787 - DNA, 15 bp, Homo sapiens
ccctcccaagatgcc

SEQ ID NO: 1832788 - DNA, 15 bp, Homo sapiens
cctcccaagatgcct

SEQ ID NO: 1832789 - DNA, 15 bp, Homo sapiens
ctcccaagatgcctg

SEQ ID NO: 1832790 - DNA, 15 bp, Homo sapiens
tcccaagatgcctgg

SEQ ID NO: 1832791 - DNA, 15 bp, Homo sapiens
cccaagatgcctggg

SEQ ID NO: 1832792 - DNA, 15 bp, Homo sapiens
ccaagatgcctggga

SEQ ID NO: 1832793 - DNA, 15 bp, Homo sapiens
caagatgcctgggat

SEQ ID NO: 1832794 - DNA, 15 bp, Homo sapiens
aagatgcctgggatt

SEQ ID NO: 1832795 - DNA, 15 bp, Homo sapiens
agatgcctgggattt

SEQ ID NO: 1832796 - DNA, 15 bp, Homo sapiens
gatgcctgggatttt

SEQ ID NO: 1832797 - DNA, 15 bp, Homo sapiens
atgcctgggattttc

SEQ ID NO: 1832798 - DNA, 15 bp, Homo sapiens
tgcctgggattttcc

SEQ ID NO: 1832799 - DNA, 15 bp, Homo sapiens
gcctgggattttcca

SEQ ID NO: 1832800 - DNA, 15 bp, Homo sapiens
cctgggattttccac

SEQ ID NO: 1832801 - DNA, 15 bp, Homo sapiens
ctgggattttccact

SEQ ID NO: 1832802 - DNA, 15 bp, Homo sapiens
tgggattttccactt

SEQ ID NO: 1832803 - DNA, 15 bp, Homo sapiens
gggattttccacttc

SEQ ID NO: 1832804 - DNA, 15 bp, Homo sapiens
ggattttccacttca

SEQ ID NO: 1832805 - DNA, 15 bp, Homo sapiens
gattttccacttcag

SEQ ID NO: 1832806 - DNA, 15 bp, Homo sapiens
attttccacttcagc

SEQ ID NO: 1832807 - DNA, 15 bp, Homo sapiens
ttttccacttcagca

SEQ ID NO: 1832808 - DNA, 15 bp, Homo sapiens
tttccacttcagcag

SEQ ID NO: 1832809 - DNA, 15 bp, Homo sapiens
ttccacttcagcagg

SEQ ID NO: 1832810 - DNA, 15 bp, Homo sapiens
tccacttcagcaggg

SEQ ID NO: 1832811 - DNA, 15 bp, Homo sapiens
ccacttcagcagggg

SEQ ID NO: 1832812 - DNA, 15 bp, Homo sapiens
cacttcagcaggggg

SEQ ID NO: 1832813 - DNA, 15 bp, Homo sapiens
acttcagcaggggga

SEQ ID NO: 1832814 - DNA, 15 bp, Homo sapiens
cttcagcagggggaa

SEQ ID NO: 1832815 - DNA, 15 bp, Homo sapiens
ttcagcagggggaag

SEQ ID NO: 1832816 - DNA, 15 bp, Homo sapiens
tcagcagggggaagg

SEQ ID NO: 1832817 - DNA, 15 bp, Homo sapiens
cagcagggggaaggt

SEQ ID NO: 1832818 - DNA, 15 bp, Homo sapiens
agcagggggaaggta

SEQ ID NO: 1832819 - DNA, 15 bp, Homo sapiens
gcagggggaaggtaa

SEQ ID NO: 1832820 - DNA, 15 bp, Homo sapiens
cagggggaaggtaag

SEQ ID NO: 1832821 - DNA, 15 bp, Homo sapiens
agggggaaggtaagt

SEQ ID NO: 1832822 - DNA, 15 bp, Homo sapiens
gggggaaggtaagtc

SEQ ID NO: 1832823 - DNA, 15 bp, Homo sapiens
ggggaaggtaagtca

SEQ ID NO: 1832824 - DNA, 15 bp, Homo sapiens
gggaaggtaagtcac

SEQ ID NO: 1832825 - DNA, 15 bp, Homo sapiens
ggaaggtaagtcaca

SEQ ID NO: 1832826 - DNA, 15 bp, Homo sapiens
gaaggtaagtcacat

SEQ ID NO: 1832827 - DNA, 15 bp, Homo sapiens
aaggtaagtcacata

SEQ ID NO: 1832828 - DNA, 15 bp, Homo sapiens
aggtaagtcacatag

SEQ ID NO: 1832829 - DNA, 15 bp, Homo sapiens
ggtaagtcacatagc

SEQ ID NO: 1832830 - DNA, 15 bp, Homo sapiens
gtaagtcacatagca

SEQ ID NO: 1832831 - DNA, 15 bp, Homo sapiens
taagtcacatagcaa

SEQ ID NO: 1832832 - DNA, 15 bp, Homo sapiens
aagtcacatagcaaa

SEQ ID NO: 1832833 - DNA, 15 bp, Homo sapiens
agtcacatagcaaaa

SEQ ID NO: 1832834 - DNA, 15 bp, Homo sapiens
gtcacatagcaaaat

SEQ ID NO: 1832835 - DNA, 15 bp, Homo sapiens
tcacatagcaaaata

SEQ ID NO: 1832836 - DNA, 15 bp, Homo sapiens
cacatagcaaaataa

SEQ ID NO: 1832837 - DNA, 15 bp, Homo sapiens
acatagcaaaataat

SEQ ID NO: 1832838 - DNA, 15 bp, Homo sapiens
catagcaaaataatg

SEQ ID NO: 1832839 - DNA, 15 bp, Homo sapiens
atagcaaaataatga

SEQ ID NO: 1832840 - DNA, 15 bp, Homo sapiens
tagcaaaataatgag

SEQ ID NO: 1832841 - DNA, 15 bp, Homo sapiens
agcaaaataatgagg

SEQ ID NO: 1832842 - DNA, 15 bp, Homo sapiens
gcaaaataatgaggg

SEQ ID NO: 1832843 - DNA, 15 bp, Homo sapiens
caaaataatgagggc

SEQ ID NO: 1832844 - DNA, 15 bp, Homo sapiens
aaaataatgagggca

SEQ ID NO: 1832845 - DNA, 15 bp, Homo sapiens
aaataatgagggcac

SEQ ID NO: 1832846 - DNA, 15 bp, Homo sapiens
aataatgagggcaca

SEQ ID NO: 1832847 - DNA, 15 bp, Homo sapiens
ataatgagggcacag

SEQ ID NO: 1832848 - DNA, 15 bp, Homo sapiens
taatgagggcacaga

SEQ ID NO: 1832849 - DNA, 15 bp, Homo sapiens
aatgagggcacagaa

SEQ ID NO: 1832850 - DNA, 15 bp, Homo sapiens
atgagggcacagaac

SEQ ID NO: 1832851 - DNA, 15 bp, Homo sapiens
tgagggcacagaaca

SEQ ID NO: 1832852 - DNA, 15 bp, Homo sapiens
gagggcacagaacag

SEQ ID NO: 1832853 - DNA, 15 bp, Homo sapiens
agggcacagaacaga

SEQ ID NO: 1832854 - DNA, 15 bp, Homo sapiens
gggcacagaacagat

SEQ ID NO: 1832855 - DNA, 15 bp, Homo sapiens
ggcacagaacagatg

SEQ ID NO: 1832856 - DNA, 15 bp, Homo sapiens
gcacagaacagatga

SEQ ID NO: 1832857 - DNA, 15 bp, Homo sapiens
cacagaacagatgac

SEQ ID NO: 1832858 - DNA, 15 bp, Homo sapiens
acagaacagatgacc

SEQ ID NO: 1832859 - DNA, 15 bp, Homo sapiens
cagaacagatgacct

SEQ ID NO: 1832860 - DNA, 15 bp, Homo sapiens
agaacagatgacctc

SEQ ID NO: 1832861 - DNA, 15 bp, Homo sapiens
gaacagatgacctcc

SEQ ID NO: 1832862 - DNA, 15 bp, Homo sapiens
aacagatgacctccc

SEQ ID NO: 1832863 - DNA, 15 bp, Homo sapiens
acagatgacctccct

SEQ ID NO: 1832864 - DNA, 15 bp, Homo sapiens
cagatgacctcccta

SEQ ID NO: 1832865 - DNA, 15 bp, Homo sapiens
agatgacctccctat

SEQ ID NO: 1832866 - DNA, 15 bp, Homo sapiens
gatgacctccctata

SEQ ID NO: 1832867 - DNA, 15 bp, Homo sapiens
atgacctccctatag

SEQ ID NO: 1832868 - DNA, 15 bp, Homo sapiens
tgacctccctataga

SEQ ID NO: 1832869 - DNA, 15 bp, Homo sapiens
gacctccctatagag

SEQ ID NO: 1832870 - DNA, 15 bp, Homo sapiens
acctccctatagagt

SEQ ID NO: 1832871 - DNA, 15 bp, Homo sapiens
cctccctatagagtt

SEQ ID NO: 1832872 - DNA, 15 bp, Homo sapiens
ctccctatagagttt

SEQ ID NO: 1832873 - DNA, 15 bp, Homo sapiens
tccctatagagtttt

SEQ ID NO: 1832874 - DNA, 15 bp, Homo sapiens
ccctatagagttttg

SEQ ID NO: 1832875 - DNA, 15 bp, Homo sapiens
cctatagagttttga

SEQ ID NO: 1832876 - DNA, 15 bp, Homo sapiens
ctatagagttttgaa

SEQ ID NO: 1832877 - DNA, 15 bp, Homo sapiens
tatagagttttgaat

SEQ ID NO: 1832878 - DNA, 15 bp, Homo sapiens
atagagttttgaatg

SEQ ID NO: 1832879 - DNA, 15 bp, Homo sapiens
tagagttttgaatga

SEQ ID NO: 1832880 - DNA, 15 bp, Homo sapiens
agagttttgaatgag

SEQ ID NO: 1832881 - DNA, 15 bp, Homo sapiens
gagttttgaatgaga

SEQ ID NO: 1832882 - DNA, 15 bp, Homo sapiens
agttttgaatgagaa

SEQ ID NO: 1832883 - DNA, 15 bp, Homo sapiens
gttttgaatgagaaa

SEQ ID NO: 1832884 - DNA, 15 bp, Homo sapiens
ttttgaatgagaaac

SEQ ID NO: 1832885 - DNA, 15 bp, Homo sapiens
tttgaatgagaaaca

SEQ ID NO: 1832886 - DNA, 15 bp, Homo sapiens
ttgaatgagaaacac

SEQ ID NO: 1832887 - DNA, 15 bp, Homo sapiens
tgaatgagaaacaca

SEQ ID NO: 1832888 - DNA, 15 bp, Homo sapiens
gaatgagaaacacag

SEQ ID NO: 1832889 - DNA, 15 bp, Homo sapiens
aatgagaaacacagc

SEQ ID NO: 1832890 - DNA, 15 bp, Homo sapiens
atgagaaacacagca

SEQ ID NO: 1832891 - DNA, 15 bp, Homo sapiens
tgagaaacacagcag

SEQ ID NO: 1832892 - DNA, 15 bp, Homo sapiens
gagaaacacagcagg

SEQ ID NO: 1832893 - DNA, 15 bp, Homo sapiens
agaaacacagcaggg

SEQ ID NO: 1832894 - DNA, 15 bp, Homo sapiens
gaaacacagcagggc

SEQ ID NO: 1832895 - DNA, 15 bp, Homo sapiens
aaacacagcagggca

SEQ ID NO: 1832896 - DNA, 15 bp, Homo sapiens
aacacagcagggcag

SEQ ID NO: 1832897 - DNA, 15 bp, Homo sapiens
acacagcagggcaga

SEQ ID NO: 1832898 - DNA, 15 bp, Homo sapiens
cacagcagggcagat

SEQ ID NO: 1832899 - DNA, 15 bp, Homo sapiens
acagcagggcagatg

SEQ ID NO: 1832900 - DNA, 15 bp, Homo sapiens
agcagggcagatgtg

SEQ ID NO: 1832901 - DNA, 15 bp, Homo sapiens
gcagggcagatgtgc

SEQ ID NO: 1832902 - DNA, 15 bp, Homo sapiens
cagggcagatgtgcc

SEQ ID NO: 1832903 - DNA, 15 bp, Homo sapiens
agggcagatgtgccc

SEQ ID NO: 1832904 - DNA, 15 bp, Homo sapiens
gggcagatgtgcccc

SEQ ID NO: 1832905 - DNA, 15 bp, Homo sapiens
ggcagatgtgcccct

SEQ ID NO: 1832906 - DNA, 15 bp, Homo sapiens
gcagatgtgcccctt

SEQ ID NO: 1832907 - DNA, 15 bp, Homo sapiens
cagatgtgccccttc

SEQ ID NO: 1832908 - DNA, 15 bp, Homo sapiens
agatgtgccccttct

SEQ ID NO: 1832909 - DNA, 15 bp, Homo sapiens
gatgtgccccttctc

SEQ ID NO: 1832910 - DNA, 15 bp, Homo sapiens
atgtgccccttctct

SEQ ID NO: 1832911 - DNA, 15 bp, Homo sapiens
tgtgccccttctcta

SEQ ID NO: 1832912 - DNA, 15 bp, Homo sapiens
gtgccccttctctag

SEQ ID NO: 1832913 - DNA, 15 bp, Homo sapiens
tgccccttctctagt

SEQ ID NO: 1832914 - DNA, 15 bp, Homo sapiens
gccccttctctagtc

SEQ ID NO: 1832915 - DNA, 15 bp, Homo sapiens
ccccttctctagtct

SEQ ID NO: 1832916 - DNA, 15 bp, Homo sapiens
cccttctctagtcta

SEQ ID NO: 1832917 - DNA, 15 bp, Homo sapiens
ccttctctagtctag

SEQ ID NO: 1832918 - DNA, 15 bp, Homo sapiens
cttctctagtctagg

SEQ ID NO: 1832919 - DNA, 15 bp, Homo sapiens
ttctctagtctagga

SEQ ID NO: 1832920 - DNA, 15 bp, Homo sapiens
tctctagtctaggag

SEQ ID NO: 1832921 - DNA, 15 bp, Homo sapiens
ctctagtctaggagg

SEQ ID NO: 1832922 - DNA, 15 bp, Homo sapiens
tctagtctaggagga

SEQ ID NO: 1832923 - DNA, 15 bp, Homo sapiens
ctagtctaggaggag

SEQ ID NO: 1832924 - DNA, 15 bp, Homo sapiens
tagtctaggaggagc

SEQ ID NO: 1832925 - DNA, 15 bp, Homo sapiens
agtctaggaggagct

SEQ ID NO: 1832926 - DNA, 15 bp, Homo sapiens
gtctaggaggagcta

SEQ ID NO: 1832927 - DNA, 15 bp, Homo sapiens
tctaggaggagctag

SEQ ID NO: 1832928 - DNA, 15 bp, Homo sapiens
ctaggaggagctagg

SEQ ID NO: 1832929 - DNA, 15 bp, Homo sapiens
taggaggagctaggt

SEQ ID NO: 1832930 - DNA, 15 bp, Homo sapiens
aggaggagctaggtc

SEQ ID NO: 1832931 - DNA, 15 bp, Homo sapiens
ggaggagctaggtcc

SEQ ID NO: 1832932 - DNA, 15 bp, Homo sapiens
gaggagctaggtcca

SEQ ID NO: 1832933 - DNA, 15 bp, Homo sapiens
aggagctaggtccag

SEQ ID NO: 1832934 - DNA, 15 bp, Homo sapiens
ggagctaggtccagc

SEQ ID NO: 1832935 - DNA, 15 bp, Homo sapiens
gagctaggtccagcc

SEQ ID NO: 1832936 - DNA, 15 bp, Homo sapiens
agctaggtccagccc

SEQ ID NO: 1832937 - DNA, 15 bp, Homo sapiens
gctaggtccagcccc

SEQ ID NO: 1832938 - DNA, 15 bp, Homo sapiens
ctaggtccagcccct

SEQ ID NO: 1832939 - DNA, 15 bp, Homo sapiens
taggtccagcccctg

SEQ ID NO: 1832940 - DNA, 15 bp, Homo sapiens
aggtccagcccctga

SEQ ID NO: 1832941 - DNA, 15 bp, Homo sapiens
ggtccagcccctgaa

SEQ ID NO: 1832942 - DNA, 15 bp, Homo sapiens
gtccagcccctgaac

SEQ ID NO: 1832943 - DNA, 15 bp, Homo sapiens
tccagcccctgaaca

SEQ ID NO: 1832944 - DNA, 15 bp, Homo sapiens
ccagcccctgaacat

SEQ ID NO: 1832945 - DNA, 15 bp, Homo sapiens
cagcccctgaacatc

SEQ ID NO: 1832946 - DNA, 15 bp, Homo sapiens
agcccctgaacatcc

SEQ ID NO: 1832947 - DNA, 15 bp, Homo sapiens
gcccctgaacatcct

SEQ ID NO: 1832948 - DNA, 15 bp, Homo sapiens
cccctgaacatcctc

SEQ ID NO: 1832949 - DNA, 15 bp, Homo sapiens
ccctgaacatcctcc

SEQ ID NO: 1832950 - DNA, 15 bp, Homo sapiens
cctgaacatcctccc

SEQ ID NO: 1832951 - DNA, 15 bp, Homo sapiens
ctgaacatcctcccc

SEQ ID NO: 1832952 - DNA, 15 bp, Homo sapiens
tgaacatcctccccc

SEQ ID NO: 1832953 - DNA, 15 bp, Homo sapiens
gaacatcctccccct

SEQ ID NO: 1832954 - DNA, 15 bp, Homo sapiens
aacatcctccccctc

SEQ ID NO: 1832955 - DNA, 15 bp, Homo sapiens
acatcctccccctca

SEQ ID NO: 1832956 - DNA, 15 bp, Homo sapiens
catcctccccctcag

SEQ ID NO: 1832957 - DNA, 15 bp, Homo sapiens
atcctccccctcaga

SEQ ID NO: 1832958 - DNA, 15 bp, Homo sapiens
tcctccccctcagaa

SEQ ID NO: 1832959 - DNA, 15 bp, Homo sapiens
cctccccctcagaaa

SEQ ID NO: 1832960 - DNA, 15 bp, Homo sapiens
ctccccctcagaaaa

SEQ ID NO: 1832961 - DNA, 15 bp, Homo sapiens
tccccctcagaaaag

SEQ ID NO: 1832962 - DNA, 15 bp, Homo sapiens
ccccctcagaaaagc

SEQ ID NO: 1832963 - DNA, 15 bp, Homo sapiens
cccctcagaaaagct

SEQ ID NO: 1832964 - DNA, 15 bp, Homo sapiens
ccctcagaaaagctg

SEQ ID NO: 1832965 - DNA, 15 bp, Homo sapiens
cctcagaaaagctga

SEQ ID NO: 1832966 - DNA, 15 bp, Homo sapiens
ctcagaaaagctgag

SEQ ID NO: 1832967 - DNA, 15 bp, Homo sapiens
tcagaaaagctgagg

SEQ ID NO: 1832968 - DNA, 15 bp, Homo sapiens
cagaaaagctgaggc

SEQ ID NO: 1832969 - DNA, 15 bp, Homo sapiens
agaaaagctgaggcc

SEQ ID NO: 1832970 - DNA, 15 bp, Homo sapiens
gaaaagctgaggcca

SEQ ID NO: 1832971 - DNA, 15 bp, Homo sapiens
aaaagctgaggccag

SEQ ID NO: 1832972 - DNA, 15 bp, Homo sapiens
aaagctgaggccaga

SEQ ID NO: 1832973 - DNA, 15 bp, Homo sapiens
aagctgaggccagac

SEQ ID NO: 1832974 - DNA, 15 bp, Homo sapiens
agctgaggccagact

SEQ ID NO: 1832975 - DNA, 15 bp, Homo sapiens
gctgaggccagacta

SEQ ID NO: 1832976 - DNA, 15 bp, Homo sapiens
ctgaggccagactaa

SEQ ID NO: 1832977 - DNA, 15 bp, Homo sapiens
tgaggccagactaag

SEQ ID NO: 1832978 - DNA, 15 bp, Homo sapiens
gaggccagactaaga

SEQ ID NO: 1832979 - DNA, 15 bp, Homo sapiens
aggccagactaagaa

SEQ ID NO: 1832980 - DNA, 15 bp, Homo sapiens
ggccagactaagaat

SEQ ID NO: 1832981 - DNA, 15 bp, Homo sapiens
gccagactaagaatt

SEQ ID NO: 1832982 - DNA, 15 bp, Homo sapiens
ccagactaagaattc

SEQ ID NO: 1832983 - DNA, 15 bp, Homo sapiens
cagactaagaattca

SEQ ID NO: 1832984 - DNA, 15 bp, Homo sapiens
agactaagaattcac

SEQ ID NO: 1832985 - DNA, 15 bp, Homo sapiens
gactaagaattcacc

SEQ ID NO: 1832986 - DNA, 15 bp, Homo sapiens
actaagaattcacca

SEQ ID NO: 1832987 - DNA, 15 bp, Homo sapiens
ctaagaattcaccag

SEQ ID NO: 1832988 - DNA, 15 bp, Homo sapiens
taagaattcaccaga

SEQ ID NO: 1832989 - DNA, 15 bp, Homo sapiens
aagaattcaccagac

SEQ ID NO: 1832990 - DNA, 15 bp, Homo sapiens
agaattcaccagacc

SEQ ID NO: 1832991 - DNA, 15 bp, Homo sapiens
gaattcaccagacca

SEQ ID NO: 1832992 - DNA, 15 bp, Homo sapiens
aattcaccagaccaa

SEQ ID NO: 1832993 - DNA, 15 bp, Homo sapiens
attcaccagaccaag

SEQ ID NO: 1832994 - DNA, 15 bp, Homo sapiens
ttcaccagaccaagg

SEQ ID NO: 1832995 - DNA, 15 bp, Homo sapiens
tcaccagaccaagga

SEQ ID NO: 1832996 - DNA, 15 bp, Homo sapiens
caccagaccaaggag

SEQ ID NO: 1832997 - DNA, 15 bp, Homo sapiens
accagaccaaggagc

SEQ ID NO: 1832998 - DNA, 15 bp, Homo sapiens
ccagaccaaggagct

SEQ ID NO: 1832999 - DNA, 15 bp, Homo sapiens
cagaccaaggagcta

SEQ ID NO: 1833000 - DNA, 15 bp, Homo sapiens
agaccaaggagctac

SEQ ID NO: 1833001 - DNA, 15 bp, Homo sapiens
gaccaaggagctaca

SEQ ID NO: 1833002 - DNA, 15 bp, Homo sapiens
accaaggagctacaa

SEQ ID NO: 1833003 - DNA, 15 bp, Homo sapiens
ccaaggagctacaac

SEQ ID NO: 1833004 - DNA, 15 bp, Homo sapiens
caaggagctacaaca

SEQ ID NO: 1833005 - DNA, 15 bp, Homo sapiens
aaggagctacaacag

SEQ ID NO: 1833006 - DNA, 15 bp, Homo sapiens
aggagctacaacagg

SEQ ID NO: 1833007 - DNA, 15 bp, Homo sapiens
ggagctacaacagga

SEQ ID NO: 1833008 - DNA, 15 bp, Homo sapiens
gagctacaacaggac

SEQ ID NO: 1833009 - DNA, 15 bp, Homo sapiens
agctacaacaggaca

SEQ ID NO: 1833010 - DNA, 15 bp, Homo sapiens
gctacaacaggacat

SEQ ID NO: 1833011 - DNA, 15 bp, Homo sapiens
ctacaacaggacatc

SEQ ID NO: 1833012 - DNA, 15 bp, Homo sapiens
tacaacaggacatca

SEQ ID NO: 1833013 - DNA, 15 bp, Homo sapiens
acaacaggacatcag

SEQ ID NO: 1833014 - DNA, 15 bp, Homo sapiens
caacaggacatcaga

SEQ ID NO: 1833015 - DNA, 15 bp, Homo sapiens
aacaggacatcagag

SEQ ID NO: 1833016 - DNA, 15 bp, Homo sapiens
acaggacatcagagc

SEQ ID NO: 1833017 - DNA, 15 bp, Homo sapiens
caggacatcagagct

SEQ ID NO: 1833018 - DNA, 15 bp, Homo sapiens
aggacatcagagctg

SEQ ID NO: 1833019 - DNA, 15 bp, Homo sapiens
ggacatcagagctga

SEQ ID NO: 1833020 - DNA, 15 bp, Homo sapiens
gacatcagagctgag

SEQ ID NO: 1833021 - DNA, 15 bp, Homo sapiens
acatcagagctgagg

SEQ ID NO: 1833022 - DNA, 15 bp, Homo sapiens
catcagagctgaggc

SEQ ID NO: 1833023 - DNA, 15 bp, Homo sapiens
atcagagctgaggct

SEQ ID NO: 1833024 - DNA, 15 bp, Homo sapiens
tcagagctgaggctg

SEQ ID NO: 1833025 - DNA, 15 bp, Homo sapiens
cagagctgaggctgc

SEQ ID NO: 1833026 - DNA, 15 bp, Homo sapiens
agagctgaggctgca

SEQ ID NO: 1833027 - DNA, 15 bp, Homo sapiens
gagctgaggctgcaa

SEQ ID NO: 1833028 - DNA, 15 bp, Homo sapiens
agctgaggctgcaaa

SEQ ID NO: 1833029 - DNA, 15 bp, Homo sapiens
gctgaggctgcaaag

SEQ ID NO: 1833030 - DNA, 15 bp, Homo sapiens
ctgaggctgcaaagc

SEQ ID NO: 1833031 - DNA, 15 bp, Homo sapiens
tgaggctgcaaagcc

SEQ ID NO: 1833032 - DNA, 15 bp, Homo sapiens
gaggctgcaaagcca

SEQ ID NO: 1833033 - DNA, 15 bp, Homo sapiens
aggctgcaaagccag

SEQ ID NO: 1833034 - DNA, 15 bp, Homo sapiens
ggctgcaaagccagg

SEQ ID NO: 1833035 - DNA, 15 bp, Homo sapiens
gctgcaaagccagga

SEQ ID NO: 1833036 - DNA, 15 bp, Homo sapiens
ctgcaaagccaggac

SEQ ID NO: 1833037 - DNA, 15 bp, Homo sapiens
tgcaaagccaggact

SEQ ID NO: 1833038 - DNA, 15 bp, Homo sapiens
gcaaagccaggactg

SEQ ID NO: 1833039 - DNA, 15 bp, Homo sapiens
caaagccaggactga

SEQ ID NO: 1833040 - DNA, 15 bp, Homo sapiens
aaagccaggactgag

SEQ ID NO: 1833041 - DNA, 15 bp, Homo sapiens
aagccaggactgaga

SEQ ID NO: 1833042 - DNA, 15 bp, Homo sapiens
agccaggactgagac

SEQ ID NO: 1833043 - DNA, 15 bp, Homo sapiens
gccaggactgagacc

SEQ ID NO: 1833044 - DNA, 15 bp, Homo sapiens
ccaggactgagacca

SEQ ID NO: 1833045 - DNA, 15 bp, Homo sapiens
caggactgagaccag

SEQ ID NO: 1833046 - DNA, 15 bp, Homo sapiens
aggactgagaccaga

SEQ ID NO: 1833047 - DNA, 15 bp, Homo sapiens
ggactgagaccagac

SEQ ID NO: 1833048 - DNA, 15 bp, Homo sapiens
gactgagaccagacc

SEQ ID NO: 1833049 - DNA, 15 bp, Homo sapiens
actgagaccagacca

SEQ ID NO: 1833050 - DNA, 15 bp, Homo sapiens
ctgagaccagaccag

SEQ ID NO: 1833051 - DNA, 15 bp, Homo sapiens
tgagaccagaccagg

SEQ ID NO: 1833052 - DNA, 15 bp, Homo sapiens
gagaccagaccaggc

SEQ ID NO: 1833053 - DNA, 15 bp, Homo sapiens
agaccagaccaggca

SEQ ID NO: 1833054 - DNA, 15 bp, Homo sapiens
gaccagaccaggcag

SEQ ID NO: 1833055 - DNA, 15 bp, Homo sapiens
accagaccaggcagg

SEQ ID NO: 1833056 - DNA, 15 bp, Homo sapiens
ccagaccaggcagga

SEQ ID NO: 1833057 - DNA, 15 bp, Homo sapiens
cagaccaggcaggaa

SEQ ID NO: 1833058 - DNA, 15 bp, Homo sapiens
agaccaggcaggaaa

SEQ ID NO: 1833059 - DNA, 15 bp, Homo sapiens
gaccaggcaggaaac

SEQ ID NO: 1833060 - DNA, 15 bp, Homo sapiens
accaggcaggaaact

SEQ ID NO: 1833061 - DNA, 15 bp, Homo sapiens
ccaggcaggaaactg

SEQ ID NO: 1833062 - DNA, 15 bp, Homo sapiens
aggcaggaaactgtc

SEQ ID NO: 1833063 - DNA, 15 bp, Homo sapiens
ggcaggaaactgtca

SEQ ID NO: 1833064 - DNA, 15 bp, Homo sapiens
gcaggaaactgtcaa

SEQ ID NO: 1833065 - DNA, 15 bp, Homo sapiens
caggaaactgtcaag

SEQ ID NO: 1833066 - DNA, 15 bp, Homo sapiens
aggaaactgtcaaga

SEQ ID NO: 1833067 - DNA, 15 bp, Homo sapiens
ggaaactgtcaagag

SEQ ID NO: 1833068 - DNA, 15 bp, Homo sapiens
gaaactgtcaagagc

SEQ ID NO: 1833069 - DNA, 15 bp, Homo sapiens
aaactgtcaagagct

SEQ ID NO: 1833070 - DNA, 15 bp, Homo sapiens
aactgtcaagagctt

SEQ ID NO: 1833071 - DNA, 15 bp, Homo sapiens
actgtcaagagcttt

SEQ ID NO: 1833072 - DNA, 15 bp, Homo sapiens
ctgtcaagagctttg

SEQ ID NO: 1833073 - DNA, 15 bp, Homo sapiens
tgtcaagagctttgg

SEQ ID NO: 1833074 - DNA, 15 bp, Homo sapiens
gtcaagagctttggt

SEQ ID NO: 1833075 - DNA, 15 bp, Homo sapiens
tcaagagctttggtc

SEQ ID NO: 1833076 - DNA, 15 bp, Homo sapiens
caagagctttggtca

SEQ ID NO: 1833077 - DNA, 15 bp, Homo sapiens
aagagctttggtcac

SEQ ID NO: 1833078 - DNA, 15 bp, Homo sapiens
agagctttggtcacc

SEQ ID NO: 1833079 - DNA, 15 bp, Homo sapiens
gagctttggtcacca

SEQ ID NO: 1833080 - DNA, 15 bp, Homo sapiens
agctttggtcaccag

SEQ ID NO: 1833081 - DNA, 15 bp, Homo sapiens
gctttggtcaccagg

SEQ ID NO: 1833082 - DNA, 15 bp, Homo sapiens
ctttggtcaccaggc

SEQ ID NO: 1833083 - DNA, 15 bp, Homo sapiens
tttggtcaccaggcc

SEQ ID NO: 1833084 - DNA, 15 bp, Homo sapiens
ttggtcaccaggcct

SEQ ID NO: 1833085 - DNA, 15 bp, Homo sapiens
tggtcaccaggcctg

SEQ ID NO: 1833086 - DNA, 15 bp, Homo sapiens
ggtcaccaggcctgg

SEQ ID NO: 1833087 - DNA, 15 bp, Homo sapiens
gtcaccaggcctggc

SEQ ID NO: 1833088 - DNA, 15 bp, Homo sapiens
tcaccaggcctggct

SEQ ID NO: 1833089 - DNA, 15 bp, Homo sapiens
caccaggcctggctg

SEQ ID NO: 1833090 - DNA, 15 bp, Homo sapiens
accaggcctggctgc

SEQ ID NO: 1833091 - DNA, 15 bp, Homo sapiens
ccaggcctggctgcc

SEQ ID NO: 1833092 - DNA, 15 bp, Homo sapiens
caggcctggctgccc

SEQ ID NO: 1833093 - DNA, 15 bp, Homo sapiens
aggcctggctgccct

SEQ ID NO: 1833094 - DNA, 15 bp, Homo sapiens
ggcctggctgccctc

SEQ ID NO: 1833095 - DNA, 15 bp, Homo sapiens
gcctggctgccctcc

SEQ ID NO: 1833096 - DNA, 15 bp, Homo sapiens
cctggctgccctcca

SEQ ID NO: 1833097 - DNA, 15 bp, Homo sapiens
ctggctgccctccaa

SEQ ID NO: 1833098 - DNA, 15 bp, Homo sapiens
tggctgccctccaac

SEQ ID NO: 1833099 - DNA, 15 bp, Homo sapiens
ggctgccctccaaca

SEQ ID NO: 1833100 - DNA, 15 bp, Homo sapiens
gctgccctccaacat

SEQ ID NO: 1833101 - DNA, 15 bp, Homo sapiens
ctgccctccaacatc

SEQ ID NO: 1833102 - DNA, 15 bp, Homo sapiens
tgccctccaacatca

SEQ ID NO: 1833103 - DNA, 15 bp, Homo sapiens
gccctccaacatcag

SEQ ID NO: 1833104 - DNA, 15 bp, Homo sapiens
ccctccaacatcagc

SEQ ID NO: 1833105 - DNA, 15 bp, Homo sapiens
cctccaacatcagct

SEQ ID NO: 1833106 - DNA, 15 bp, Homo sapiens
ctccaacatcagctg

SEQ ID NO: 1833107 - DNA, 15 bp, Homo sapiens
tccaacatcagctgg

SEQ ID NO: 1833108 - DNA, 15 bp, Homo sapiens
ccaacatcagctggc

SEQ ID NO: 1833109 - DNA, 15 bp, Homo sapiens
caacatcagctggct

SEQ ID NO: 1833110 - DNA, 15 bp, Homo sapiens
aacatcagctggctc

SEQ ID NO: 1833111 - DNA, 15 bp, Homo sapiens
acatcagctggctct

SEQ ID NO: 1833112 - DNA, 15 bp, Homo sapiens
catcagctggctctt

SEQ ID NO: 1833113 - DNA, 15 bp, Homo sapiens
atcagctggctcttt

SEQ ID NO: 1833114 - DNA, 15 bp, Homo sapiens
tcagctggctctttc

SEQ ID NO: 1833115 - DNA, 15 bp, Homo sapiens
cagctggctctttct

SEQ ID NO: 1833116 - DNA, 15 bp, Homo sapiens
agctggctctttcta

SEQ ID NO: 1833117 - DNA, 15 bp, Homo sapiens
gctggctctttctaa

SEQ ID NO: 1833118 - DNA, 15 bp, Homo sapiens
ctggctctttctaaa

SEQ ID NO: 1833119 - DNA, 15 bp, Homo sapiens
tggctctttctaaat

SEQ ID NO: 1833120 - DNA, 15 bp, Homo sapiens
ggctctttctaaatt

SEQ ID NO: 1833121 - DNA, 15 bp, Homo sapiens
gctctttctaaattg

SEQ ID NO: 1833122 - DNA, 15 bp, Homo sapiens
ctctttctaaattga

SEQ ID NO: 1833123 - DNA, 15 bp, Homo sapiens
tctttctaaattgac

SEQ ID NO: 1833124 - DNA, 15 bp, Homo sapiens
ctttctaaattgaca

SEQ ID NO: 1833125 - DNA, 15 bp, Homo sapiens
tttctaaattgacac

SEQ ID NO: 1833126 - DNA, 15 bp, Homo sapiens
ttctaaattgacaca

SEQ ID NO: 1833127 - DNA, 15 bp, Homo sapiens
tctaaattgacacac

SEQ ID NO: 1833128 - DNA, 15 bp, Homo sapiens
ctaaattgacacacc

SEQ ID NO: 1833129 - DNA, 15 bp, Homo sapiens
taaattgacacacca

SEQ ID NO: 1833130 - DNA, 15 bp, Homo sapiens
aaattgacacaccac

SEQ ID NO: 1833131 - DNA, 15 bp, Homo sapiens
aattgacacaccaca

SEQ ID NO: 1833132 - DNA, 15 bp, Homo sapiens
attgacacaccacat

SEQ ID NO: 1833133 - DNA, 15 bp, Homo sapiens
ttgacacaccacatg

SEQ ID NO: 1833134 - DNA, 15 bp, Homo sapiens
tgacacaccacatgt

SEQ ID NO: 1833135 - DNA, 15 bp, Homo sapiens
gacacaccacatgtc

SEQ ID NO: 1833136 - DNA, 15 bp, Homo sapiens
acacaccacatgtcc

SEQ ID NO: 1833137 - DNA, 15 bp, Homo sapiens
cacaccacatgtccc

SEQ ID NO: 1833138 - DNA, 15 bp, Homo sapiens
acaccacatgtccct

SEQ ID NO: 1833139 - DNA, 15 bp, Homo sapiens
caccacatgtcccta

SEQ ID NO: 1833140 - DNA, 15 bp, Homo sapiens
accacatgtccctaa

SEQ ID NO: 1833141 - DNA, 15 bp, Homo sapiens
ccacatgtccctaaa

SEQ ID NO: 1833142 - DNA, 15 bp, Homo sapiens
cacatgtccctaaaa

SEQ ID NO: 1833143 - DNA, 15 bp, Homo sapiens
acatgtccctaaaat

SEQ ID NO: 1833144 - DNA, 15 bp, Homo sapiens
catgtccctaaaatt

SEQ ID NO: 1833145 - DNA, 15 bp, Homo sapiens
atgtccctaaaattc

SEQ ID NO: 1833146 - DNA, 15 bp, Homo sapiens
tgtccctaaaattct

SEQ ID NO: 1833147 - DNA, 15 bp, Homo sapiens
gtccctaaaattctc

SEQ ID NO: 1833148 - DNA, 15 bp, Homo sapiens
tccctaaaattctct

SEQ ID NO: 1833149 - DNA, 15 bp, Homo sapiens
ccctaaaattctctc

SEQ ID NO: 1833150 - DNA, 15 bp, Homo sapiens
cctaaaattctctct

SEQ ID NO: 1833151 - DNA, 15 bp, Homo sapiens
ctaaaattctctctt

SEQ ID NO: 1833152 - DNA, 15 bp, Homo sapiens
taaaattctctcttc

SEQ ID NO: 1833153 - DNA, 15 bp, Homo sapiens
aaaattctctcttca

SEQ ID NO: 1833154 - DNA, 15 bp, Homo sapiens
aaattctctcttcaa

SEQ ID NO: 1833155 - DNA, 15 bp, Homo sapiens
aattctctcttcaag

SEQ ID NO: 1833156 - DNA, 15 bp, Homo sapiens
attctctcttcaagt

SEQ ID NO: 1833157 - DNA, 15 bp, Homo sapiens
ctctcttcaagtaat

SEQ ID NO: 1833158 - DNA, 15 bp, Homo sapiens
tctcttcaagtaata

SEQ ID NO: 1833159 - DNA, 15 bp, Homo sapiens
ctcttcaagtaatac

SEQ ID NO: 1833160 - DNA, 15 bp, Homo sapiens
tcttcaagtaatacc

SEQ ID NO: 1833161 - DNA, 15 bp, Homo sapiens
cttcaagtaatacca

SEQ ID NO: 1833162 - DNA, 15 bp, Homo sapiens
ttcaagtaataccac

SEQ ID NO: 1833163 - DNA, 15 bp, Homo sapiens
tcaagtaataccacc

SEQ ID NO: 1833164 - DNA, 15 bp, Homo sapiens
caagtaataccacca

SEQ ID NO: 1833165 - DNA, 15 bp, Homo sapiens
aagtaataccaccat

SEQ ID NO: 1833166 - DNA, 15 bp, Homo sapiens
agtaataccaccatc

SEQ ID NO: 1833167 - DNA, 15 bp, Homo sapiens
gtaataccaccatca

SEQ ID NO: 1833168 - DNA, 15 bp, Homo sapiens
taataccaccatcaa

SEQ ID NO: 1833169 - DNA, 15 bp, Homo sapiens
aataccaccatcaaa

SEQ ID NO: 1833170 - DNA, 15 bp, Homo sapiens
ataccaccatcaaag

SEQ ID NO: 1833171 - DNA, 15 bp, Homo sapiens
taccaccatcaaagc

SEQ ID NO: 1833172 - DNA, 15 bp, Homo sapiens
accaccatcaaagca

SEQ ID NO: 1833173 - DNA, 15 bp, Homo sapiens
ccaccatcaaagcag

SEQ ID NO: 1833174 - DNA, 15 bp, Homo sapiens
caccatcaaagcagg

SEQ ID NO: 1833175 - DNA, 15 bp, Homo sapiens
accatcaaagcagga

SEQ ID NO: 1833176 - DNA, 15 bp, Homo sapiens
ccatcaaagcaggac

SEQ ID NO: 1833177 - DNA, 15 bp, Homo sapiens
catcaaagcaggaca

SEQ ID NO: 1833178 - DNA, 15 bp, Homo sapiens
atcaaagcaggacat

SEQ ID NO: 1833179 - DNA, 15 bp, Homo sapiens
tcaaagcaggacatt

SEQ ID NO: 1833180 - DNA, 15 bp, Homo sapiens
caaagcaggacattt

SEQ ID NO: 1833181 - DNA, 15 bp, Homo sapiens
aaagcaggacatttc

SEQ ID NO: 1833182 - DNA, 15 bp, Homo sapiens
aagcaggacatttcc

SEQ ID NO: 1833183 - DNA, 15 bp, Homo sapiens
agcaggacatttccc

SEQ ID NO: 1833184 - DNA, 15 bp, Homo sapiens
gcaggacatttccca

SEQ ID NO: 1833185 - DNA, 15 bp, Homo sapiens
caggacatttcccag

SEQ ID NO: 1833186 - DNA, 15 bp, Homo sapiens
aggacatttcccaga

SEQ ID NO: 1833187 - DNA, 15 bp, Homo sapiens
ggacatttcccagag

SEQ ID NO: 1833188 - DNA, 15 bp, Homo sapiens
gacatttcccagagc

SEQ ID NO: 1833189 - DNA, 15 bp, Homo sapiens
acatttcccagagcc

SEQ ID NO: 1833190 - DNA, 15 bp, Homo sapiens
catttcccagagcct

SEQ ID NO: 1833191 - DNA, 15 bp, Homo sapiens
atttcccagagcctt

SEQ ID NO: 1833192 - DNA, 15 bp, Homo sapiens
tttcccagagcctta

SEQ ID NO: 1833193 - DNA, 15 bp, Homo sapiens
ttcccagagccttag

SEQ ID NO: 1833194 - DNA, 15 bp, Homo sapiens
tcccagagccttaga

SEQ ID NO: 1833195 - DNA, 15 bp, Homo sapiens
cccagagccttagag

SEQ ID NO: 1833196 - DNA, 15 bp, Homo sapiens
ccagagccttagagc

SEQ ID NO: 1833197 - DNA, 15 bp, Homo sapiens
cagagccttagagcc

SEQ ID NO: 1833198 - DNA, 15 bp, Homo sapiens
agagccttagagcct

SEQ ID NO: 1833199 - DNA, 15 bp, Homo sapiens
gagccttagagcctg

SEQ ID NO: 1833200 - DNA, 15 bp, Homo sapiens
agccttagagcctgg

SEQ ID NO: 1833201 - DNA, 15 bp, Homo sapiens
gccttagagcctggt

SEQ ID NO: 1833202 - DNA, 15 bp, Homo sapiens
ccttagagcctggtg

SEQ ID NO: 1833203 - DNA, 15 bp, Homo sapiens
cttagagcctggtgt

SEQ ID NO: 1833204 - DNA, 15 bp, Homo sapiens
ttagagcctggtgtc

SEQ ID NO: 1833205 - DNA, 15 bp, Homo sapiens
tagagcctggtgtct

SEQ ID NO: 1833206 - DNA, 15 bp, Homo sapiens
agagcctggtgtctg

SEQ ID NO: 1833207 - DNA, 15 bp, Homo sapiens
gagcctggtgtctgc

SEQ ID NO: 1833208 - DNA, 15 bp, Homo sapiens
agcctggtgtctgct

SEQ ID NO: 1833209 - DNA, 15 bp, Homo sapiens
gcctggtgtctgctc

SEQ ID NO: 1833210 - DNA, 15 bp, Homo sapiens
cctggtgtctgctca

SEQ ID NO: 1833211 - DNA, 15 bp, Homo sapiens
ctggtgtctgctcag

SEQ ID NO: 1833212 - DNA, 15 bp, Homo sapiens
tggtgtctgctcagt

SEQ ID NO: 1833213 - DNA, 15 bp, Homo sapiens
ggtgtctgctcagtg

SEQ ID NO: 1833214 - DNA, 15 bp, Homo sapiens
gtgtctgctcagtgg

SEQ ID NO: 1833215 - DNA, 15 bp, Homo sapiens
tgtctgctcagtggg

SEQ ID NO: 1833216 - DNA, 15 bp, Homo sapiens
gtctgctcagtggga

SEQ ID NO: 1833217 - DNA, 15 bp, Homo sapiens
tctgctcagtgggac

SEQ ID NO: 1833218 - DNA, 15 bp, Homo sapiens
ctgctcagtgggact

SEQ ID NO: 1833219 - DNA, 15 bp, Homo sapiens
tgctcagtgggactc

SEQ ID NO: 1833220 - DNA, 15 bp, Homo sapiens
gctcagtgggactca

SEQ ID NO: 1833221 - DNA, 15 bp, Homo sapiens
ctcagtgggactcaa

SEQ ID NO: 1833222 - DNA, 15 bp, Homo sapiens
tcagtgggactcaac

SEQ ID NO: 1833223 - DNA, 15 bp, Homo sapiens
cagtgggactcaacc

SEQ ID NO: 1833224 - DNA, 15 bp, Homo sapiens
agtgggactcaaccc

SEQ ID NO: 1833225 - DNA, 15 bp, Homo sapiens
gtgggactcaacccc

SEQ ID NO: 1833226 - DNA, 15 bp, Homo sapiens
tgggactcaacccca

SEQ ID NO: 1833227 - DNA, 15 bp, Homo sapiens
gggactcaaccccag

SEQ ID NO: 1833228 - DNA, 15 bp, Homo sapiens
ggactcaaccccaga

SEQ ID NO: 1833229 - DNA, 15 bp, Homo sapiens
gactcaaccccagaa

SEQ ID NO: 1833230 - DNA, 15 bp, Homo sapiens
actcaaccccagaag

SEQ ID NO: 1833231 - DNA, 15 bp, Homo sapiens
ctcaaccccagaaga

SEQ ID NO: 1833232 - DNA, 15 bp, Homo sapiens
tcaaccccagaagaa

SEQ ID NO: 1833233 - DNA, 15 bp, Homo sapiens
caaccccagaagaag

SEQ ID NO: 1833234 - DNA, 15 bp, Homo sapiens
aaccccagaagaagc

SEQ ID NO: 1833235 - DNA, 15 bp, Homo sapiens
accccagaagaagct

SEQ ID NO: 1833236 - DNA, 15 bp, Homo sapiens
ccccagaagaagctg

SEQ ID NO: 1833237 - DNA, 15 bp, Homo sapiens
cccagaagaagctgt

SEQ ID NO: 1833238 - DNA, 15 bp, Homo sapiens
ccagaagaagctgtt

SEQ ID NO: 1833239 - DNA, 15 bp, Homo sapiens
cagaagaagctgtta

SEQ ID NO: 1833240 - DNA, 15 bp, Homo sapiens
agaagaagctgttaa

SEQ ID NO: 1833241 - DNA, 15 bp, Homo sapiens
gaagaagctgttaaa

SEQ ID NO: 1833242 - DNA, 15 bp, Homo sapiens
aagaagctgttaaat

SEQ ID NO: 1833243 - DNA, 15 bp, Homo sapiens
agaagctgttaaatc

SEQ ID NO: 1833244 - DNA, 15 bp, Homo sapiens
gaagctgttaaatca

SEQ ID NO: 1833245 - DNA, 15 bp, Homo sapiens
aagctgttaaatcac

SEQ ID NO: 1833246 - DNA, 15 bp, Homo sapiens
agctgttaaatcacc

SEQ ID NO: 1833247 - DNA, 15 bp, Homo sapiens
gctgttaaatcaccc

SEQ ID NO: 1833248 - DNA, 15 bp, Homo sapiens
ctgttaaatcaccca

SEQ ID NO: 1833249 - DNA, 15 bp, Homo sapiens
tgttaaatcacccac

SEQ ID NO: 1833250 - DNA, 15 bp, Homo sapiens
gttaaatcacccact

SEQ ID NO: 1833251 - DNA, 15 bp, Homo sapiens
ttaaatcacccactg

SEQ ID NO: 1833252 - DNA, 15 bp, Homo sapiens
taaatcacccactgt

SEQ ID NO: 1833253 - DNA, 15 bp, Homo sapiens
aaatcacccactgtt

SEQ ID NO: 1833254 - DNA, 15 bp, Homo sapiens
aatcacccactgttt

SEQ ID NO: 1833255 - DNA, 15 bp, Homo sapiens
atcacccactgtttc

SEQ ID NO: 1833256 - DNA, 15 bp, Homo sapiens
tcacccactgtttca

SEQ ID NO: 1833257 - DNA, 15 bp, Homo sapiens
cacccactgtttcag

SEQ ID NO: 1833258 - DNA, 15 bp, Homo sapiens
acccactgtttcagt

SEQ ID NO: 1833259 - DNA, 15 bp, Homo sapiens
cccactgtttcagtt

SEQ ID NO: 1833260 - DNA, 15 bp, Homo sapiens
ccactgtttcagttt

SEQ ID NO: 1833261 - DNA, 15 bp, Homo sapiens
cactgtttcagttta

SEQ ID NO: 1833262 - DNA, 15 bp, Homo sapiens
actgtttcagtttac

SEQ ID NO: 1833263 - DNA, 15 bp, Homo sapiens
ctgtttcagtttaca

SEQ ID NO: 1833264 - DNA, 15 bp, Homo sapiens
tgtttcagtttacaa

SEQ ID NO: 1833265 - DNA, 15 bp, Homo sapiens
gtttcagtttacaaa

SEQ ID NO: 1833266 - DNA, 15 bp, Homo sapiens
tttcagtttacaaac

SEQ ID NO: 1833267 - DNA, 15 bp, Homo sapiens
ttcagtttacaaact

SEQ ID NO: 1833268 - DNA, 15 bp, Homo sapiens
tcagtttacaaactt

SEQ ID NO: 1833269 - DNA, 15 bp, Homo sapiens
cagtttacaaacttc

SEQ ID NO: 1833270 - DNA, 15 bp, Homo sapiens
agtttacaaacttct

SEQ ID NO: 1833271 - DNA, 15 bp, Homo sapiens
gtttacaaacttctt

SEQ ID NO: 1833272 - DNA, 15 bp, Homo sapiens
tttacaaacttctta

SEQ ID NO: 1833273 - DNA, 15 bp, Homo sapiens
ttacaaacttcttac

SEQ ID NO: 1833274 - DNA, 15 bp, Homo sapiens
tacaaacttcttacg

SEQ ID NO: 1833275 - DNA, 15 bp, Homo sapiens
acaaacttcttacga

SEQ ID NO: 1833276 - DNA, 15 bp, Homo sapiens
caaacttcttacgac

SEQ ID NO: 1833277 - DNA, 15 bp, Homo sapiens
aaacttcttacgact

SEQ ID NO: 1833278 - DNA, 15 bp, Homo sapiens
aacttcttacgactt

SEQ ID NO: 1833279 - DNA, 15 bp, Homo sapiens
acttcttacgacttg

SEQ ID NO: 1833280 - DNA, 15 bp, Homo sapiens
cttcttacgacttgg

SEQ ID NO: 1833281 - DNA, 15 bp, Homo sapiens
ttcttacgacttggc

SEQ ID NO: 1833282 - DNA, 15 bp, Homo sapiens
tcttacgacttggca

SEQ ID NO: 1833283 - DNA, 15 bp, Homo sapiens
cttacgacttggcaa

SEQ ID NO: 1833284 - DNA, 15 bp, Homo sapiens
ttacgacttggcaac

SEQ ID NO: 1833285 - DNA, 15 bp, Homo sapiens
tacgacttggcaaca

SEQ ID NO: 1833286 - DNA, 15 bp, Homo sapiens
acgacttggcaacaa

SEQ ID NO: 1833287 - DNA, 15 bp, Homo sapiens
cgacttggcaacaag

SEQ ID NO: 1833288 - DNA, 15 bp, Homo sapiens
gacttggcaacaagt

SEQ ID NO: 1833289 - DNA, 15 bp, Homo sapiens
acttggcaacaagtg

SEQ ID NO: 1833290 - DNA, 15 bp, Homo sapiens
atatatactatatat

SEQ ID NO: 1833291 - DNA, 15 bp, Homo sapiens
tatatactatatata

SEQ ID NO: 1833292 - DNA, 15 bp, Homo sapiens
atatactatatataa

SEQ ID NO: 1833293 - DNA, 15 bp, Homo sapiens
tatactatatataat

SEQ ID NO: 1833294 - DNA, 15 bp, Homo sapiens
atactatatataata

SEQ ID NO: 1833295 - DNA, 15 bp, Homo sapiens
tactatatataataa

SEQ ID NO: 1833296 - DNA, 15 bp, Homo sapiens
actatatataataaa

SEQ ID NO: 1833297 - DNA, 15 bp, Homo sapiens
ctatatataataaat

SEQ ID NO: 1833298 - DNA, 15 bp, Homo sapiens
tatatataataaata

SEQ ID NO: 1833299 - DNA, 15 bp, Homo sapiens
atatataataaatat

SEQ ID NO: 1833300 - DNA, 15 bp, Homo sapiens
tatataataaatata

SEQ ID NO: 1833301 - DNA, 15 bp, Homo sapiens
atataataaatatat

SEQ ID NO: 1833302 - DNA, 15 bp, Homo sapiens
tataataaatatata

SEQ ID NO: 1833303 - DNA, 15 bp, Homo sapiens
ataataaatatatat

SEQ ID NO: 1833304 - DNA, 15 bp, Homo sapiens
taataaatatatata

SEQ ID NO: 1833305 - DNA, 15 bp, Homo sapiens
aataaatatatatac

SEQ ID NO: 1833306 - DNA, 15 bp, Homo sapiens
ataaatatatatact

SEQ ID NO: 1833307 - DNA, 15 bp, Homo sapiens
taaatatatatacta

SEQ ID NO: 1833308 - DNA, 15 bp, Homo sapiens
aaatatatatactat

SEQ ID NO: 1833309 - DNA, 15 bp, Homo sapiens
aatatatatactata

SEQ ID NO: 1833310 - DNA, 15 bp, Homo sapiens
tactatatataatac

SEQ ID NO: 1833311 - DNA, 15 bp, Homo sapiens
ataatacatatatac

SEQ ID NO: 1833312 - DNA, 15 bp, Homo sapiens
taatacatatataca

SEQ ID NO: 1833313 - DNA, 15 bp, Homo sapiens
aatacatatatacac

SEQ ID NO: 1833314 - DNA, 15 bp, Homo sapiens
atacatatatacact

SEQ ID NO: 1833315 - DNA, 15 bp, Homo sapiens
tacatatatacacta

SEQ ID NO: 1833316 - DNA, 15 bp, Homo sapiens
acatatatacactat

SEQ ID NO: 1833317 - DNA, 15 bp, Homo sapiens
catatatacactata

SEQ ID NO: 1833318 - DNA, 15 bp, Homo sapiens
atatatacactatat

SEQ ID NO: 1833319 - DNA, 15 bp, Homo sapiens
tatatacactatata

SEQ ID NO: 1833320 - DNA, 15 bp, Homo sapiens
atatacactatatat

SEQ ID NO: 1833321 - DNA, 15 bp, Homo sapiens
tatacactatatata

SEQ ID NO: 1833322 - DNA, 15 bp, Homo sapiens
atacactatatataa

SEQ ID NO: 1833323 - DNA, 15 bp, Homo sapiens
tacactatatataat

SEQ ID NO: 1833324 - DNA, 15 bp, Homo sapiens
acactatatataata

SEQ ID NO: 1833325 - DNA, 15 bp, Homo sapiens
taatacatatatact

SEQ ID NO: 1833326 - DNA, 15 bp, Homo sapiens
aatacatatatacta

SEQ ID NO: 1833327 - DNA, 15 bp, Homo sapiens
atacatatatactat

SEQ ID NO: 1833328 - DNA, 15 bp, Homo sapiens
tacatatatactata

SEQ ID NO: 1833329 - DNA, 15 bp, Homo sapiens
acatatatactatat

SEQ ID NO: 1833330 - DNA, 15 bp, Homo sapiens
catatatactatata

SEQ ID NO: 1833331 - DNA, 15 bp, Homo sapiens
tatactatatataca

SEQ ID NO: 1833332 - DNA, 15 bp, Homo sapiens
atactatatatacac

SEQ ID NO: 1833333 - DNA, 15 bp, Homo sapiens
tactatatatacaca

SEQ ID NO: 1833334 - DNA, 15 bp, Homo sapiens
actatatatacacat

SEQ ID NO: 1833335 - DNA, 15 bp, Homo sapiens
ctatatatacacata

SEQ ID NO: 1833336 - DNA, 15 bp, Homo sapiens
tatatatacacatat

SEQ ID NO: 1833337 - DNA, 15 bp, Homo sapiens
tatatacacatatat

SEQ ID NO: 1833338 - DNA, 15 bp, Homo sapiens
atatacacatatata

SEQ ID NO: 1833339 - DNA, 15 bp, Homo sapiens
atacacatatatact

SEQ ID NO: 1833340 - DNA, 15 bp, Homo sapiens
tacacatatatacta

SEQ ID NO: 1833341 - DNA, 15 bp, Homo sapiens
acacatatatactat

SEQ ID NO: 1833342 - DNA, 15 bp, Homo sapiens
cacatatatactata

SEQ ID NO: 1833343 - DNA, 15 bp, Homo sapiens
tatacacatatatat

SEQ ID NO: 1833344 - DNA, 15 bp, Homo sapiens
atacacatatatatt

SEQ ID NO: 1833345 - DNA, 15 bp, Homo sapiens
tacacatatatatta

SEQ ID NO: 1833346 - DNA, 15 bp, Homo sapiens
acacatatatattat

SEQ ID NO: 1833347 - DNA, 15 bp, Homo sapiens
cacatatatattatg

SEQ ID NO: 1833348 - DNA, 15 bp, Homo sapiens
acatatatattatga

SEQ ID NO: 1833349 - DNA, 15 bp, Homo sapiens
catatatattatgaa

SEQ ID NO: 1833350 - DNA, 15 bp, Homo sapiens
atatatattatgaat

SEQ ID NO: 1833351 - DNA, 15 bp, Homo sapiens
tatatattatgaatg

SEQ ID NO: 1833352 - DNA, 15 bp, Homo sapiens
atatattatgaatgt

SEQ ID NO: 1833353 - DNA, 15 bp, Homo sapiens
tatattatgaatgta

SEQ ID NO: 1833354 - DNA, 15 bp, Homo sapiens
atattatgaatgtat

SEQ ID NO: 1833355 - DNA, 15 bp, Homo sapiens
tattatgaatgtata

SEQ ID NO: 1833356 - DNA, 15 bp, Homo sapiens
attatgaatgtatat

SEQ ID NO: 1833357 - DNA, 15 bp, Homo sapiens
ttatgaatgtatata

SEQ ID NO: 1833358 - DNA, 15 bp, Homo sapiens
tatgaatgtatatat

SEQ ID NO: 1833359 - DNA, 15 bp, Homo sapiens
atgaatgtatatata

SEQ ID NO: 1833360 - DNA, 15 bp, Homo sapiens
tgaatgtatatatat

SEQ ID NO: 1833361 - DNA, 15 bp, Homo sapiens
gaatgtatatatata

SEQ ID NO: 1833362 - DNA, 15 bp, Homo sapiens
aatgtatatatatag

SEQ ID NO: 1833363 - DNA, 15 bp, Homo sapiens
atgtatatatatagt

SEQ ID NO: 1833364 - DNA, 15 bp, Homo sapiens
tgtatatatatagta

SEQ ID NO: 1833365 - DNA, 15 bp, Homo sapiens
gtatatatatagtat

SEQ ID NO: 1833366 - DNA, 15 bp, Homo sapiens
tatatatatagtata

SEQ ID NO: 1833367 - DNA, 15 bp, Homo sapiens
atatatatagtatat

SEQ ID NO: 1833368 - DNA, 15 bp, Homo sapiens
tatatatagtatata

SEQ ID NO: 1833369 - DNA, 15 bp, Homo sapiens
atatatagtatatat

SEQ ID NO: 1833370 - DNA, 15 bp, Homo sapiens
atatagtatatatag

SEQ ID NO: 1833371 - DNA, 15 bp, Homo sapiens
tatagtatatatagt

SEQ ID NO: 1833372 - DNA, 15 bp, Homo sapiens
atagtatatatagta

SEQ ID NO: 1833373 - DNA, 15 bp, Homo sapiens
tagtatatatagtat

SEQ ID NO: 1833374 - DNA, 15 bp, Homo sapiens
agtatatatagtata

SEQ ID NO: 1833375 - DNA, 15 bp, Homo sapiens
gtatatatagtatat

SEQ ID NO: 1833376 - DNA, 15 bp, Homo sapiens
atatagtatatatac

SEQ ID NO: 1833377 - DNA, 15 bp, Homo sapiens
tatagtatatatact

SEQ ID NO: 1833378 - DNA, 15 bp, Homo sapiens
atagtatatatacta

SEQ ID NO: 1833379 - DNA, 15 bp, Homo sapiens
tagtatatatactat

SEQ ID NO: 1833380 - DNA, 15 bp, Homo sapiens
agtatatatactatg

SEQ ID NO: 1833381 - DNA, 15 bp, Homo sapiens
gtatatatactatgt

SEQ ID NO: 1833382 - DNA, 15 bp, Homo sapiens
tatatatactatgta

SEQ ID NO: 1833383 - DNA, 15 bp, Homo sapiens
atatatactatgtat

SEQ ID NO: 1833384 - DNA, 15 bp, Homo sapiens
tatatactatgtatg

SEQ ID NO: 1833385 - DNA, 15 bp, Homo sapiens
atatactatgtatgt

SEQ ID NO: 1833386 - DNA, 15 bp, Homo sapiens
tatactatgtatgta

SEQ ID NO: 1833387 - DNA, 15 bp, Homo sapiens
atactatgtatgtat

SEQ ID NO: 1833388 - DNA, 15 bp, Homo sapiens
tactatgtatgtata

SEQ ID NO: 1833389 - DNA, 15 bp, Homo sapiens
actatgtatgtatat

SEQ ID NO: 1833390 - DNA, 15 bp, Homo sapiens
ctatgtatgtatata

SEQ ID NO: 1833391 - DNA, 15 bp, Homo sapiens
tgtatgtatatatat

SEQ ID NO: 1833392 - DNA, 15 bp, Homo sapiens
gtatgtatatatata

SEQ ID NO: 1833393 - DNA, 15 bp, Homo sapiens
tatgtatatatatag

SEQ ID NO: 1833394 - DNA, 15 bp, Homo sapiens
tatactatgtatgtg

SEQ ID NO: 1833395 - DNA, 15 bp, Homo sapiens
atactatgtatgtgt

SEQ ID NO: 1833396 - DNA, 15 bp, Homo sapiens
tactatgtatgtgta

SEQ ID NO: 1833397 - DNA, 15 bp, Homo sapiens
actatgtatgtgtat

SEQ ID NO: 1833398 - DNA, 15 bp, Homo sapiens
ctatgtatgtgtata

SEQ ID NO: 1833399 - DNA, 15 bp, Homo sapiens
tatgtatgtgtatat

SEQ ID NO: 1833400 - DNA, 15 bp, Homo sapiens
atgtatgtgtatata

SEQ ID NO: 1833401 - DNA, 15 bp, Homo sapiens
tgtatgtgtatatat

SEQ ID NO: 1833402 - DNA, 15 bp, Homo sapiens
gtatgtgtatatata

SEQ ID NO: 1833403 - DNA, 15 bp, Homo sapiens
tatgtgtatatatag

SEQ ID NO: 1833404 - DNA, 15 bp, Homo sapiens
atgtgtatatatagt

SEQ ID NO: 1833405 - DNA, 15 bp, Homo sapiens
tgtgtatatatagta

SEQ ID NO: 1833406 - DNA, 15 bp, Homo sapiens
gtgtatatatagtat

SEQ ID NO: 1833407 - DNA, 15 bp, Homo sapiens
tgtatatatagtata

SEQ ID NO: 1833408 - DNA, 15 bp, Homo sapiens
atagtatatatactg

SEQ ID NO: 1833409 - DNA, 15 bp, Homo sapiens
tagtatatatactgt

SEQ ID NO: 1833410 - DNA, 15 bp, Homo sapiens
agtatatatactgtg

SEQ ID NO: 1833411 - DNA, 15 bp, Homo sapiens
gtatatatactgtgt

SEQ ID NO: 1833412 - DNA, 15 bp, Homo sapiens
tatatatactgtgta

SEQ ID NO: 1833413 - DNA, 15 bp, Homo sapiens
atatatactgtgtat

SEQ ID NO: 1833414 - DNA, 15 bp, Homo sapiens
tatatactgtgtatg

SEQ ID NO: 1833415 - DNA, 15 bp, Homo sapiens
atatactgtgtatgt

SEQ ID NO: 1833416 - DNA, 15 bp, Homo sapiens
tatactgtgtatgta

SEQ ID NO: 1833417 - DNA, 15 bp, Homo sapiens
atactgtgtatgtat

SEQ ID NO: 1833418 - DNA, 15 bp, Homo sapiens
tactgtgtatgtata

SEQ ID NO: 1833419 - DNA, 15 bp, Homo sapiens
actgtgtatgtatat

SEQ ID NO: 1833420 - DNA, 15 bp, Homo sapiens
ctgtgtatgtatata

SEQ ID NO: 1833421 - DNA, 15 bp, Homo sapiens
tgtgtatgtatatat

SEQ ID NO: 1833422 - DNA, 15 bp, Homo sapiens
gtgtatgtatatata

SEQ ID NO: 1833423 - DNA, 15 bp, Homo sapiens
tatagtatatatata

SEQ ID NO: 1833424 - DNA, 15 bp, Homo sapiens
atagtatatatatac

SEQ ID NO: 1833425 - DNA, 15 bp, Homo sapiens
tagtatatatatact

SEQ ID NO: 1833426 - DNA, 15 bp, Homo sapiens
agtatatatatacta

SEQ ID NO: 1833427 - DNA, 15 bp, Homo sapiens
gtatatatatactat

SEQ ID NO: 1833428 - DNA, 15 bp, Homo sapiens
tatatatatactata

SEQ ID NO: 1833429 - DNA, 15 bp, Homo sapiens
tatatactatatatg

SEQ ID NO: 1833430 - DNA, 15 bp, Homo sapiens
atatactatatatgc

SEQ ID NO: 1833431 - DNA, 15 bp, Homo sapiens
tatactatatatgca

SEQ ID NO: 1833432 - DNA, 15 bp, Homo sapiens
atactatatatgcat

SEQ ID NO: 1833433 - DNA, 15 bp, Homo sapiens
tactatatatgcata

SEQ ID NO: 1833434 - DNA, 15 bp, Homo sapiens
actatatatgcatac

SEQ ID NO: 1833435 - DNA, 15 bp, Homo sapiens
ctatatatgcataca

SEQ ID NO: 1833436 - DNA, 15 bp, Homo sapiens
tatatatgcatacat

SEQ ID NO: 1833437 - DNA, 15 bp, Homo sapiens
atatatgcatacata

SEQ ID NO: 1833438 - DNA, 15 bp, Homo sapiens
tatatgcatacatag

SEQ ID NO: 1833439 - DNA, 15 bp, Homo sapiens
atatgcatacatagt

SEQ ID NO: 1833440 - DNA, 15 bp, Homo sapiens
tatgcatacatagta

SEQ ID NO: 1833441 - DNA, 15 bp, Homo sapiens
atgcatacatagtat

SEQ ID NO: 1833442 - DNA, 15 bp, Homo sapiens
tgcatacatagtata

SEQ ID NO: 1833443 - DNA, 15 bp, Homo sapiens
gcatacatagtatat

SEQ ID NO: 1833444 - DNA, 15 bp, Homo sapiens
catacatagtatata

SEQ ID NO: 1833445 - DNA, 15 bp, Homo sapiens
atacatagtatatat

SEQ ID NO: 1833446 - DNA, 15 bp, Homo sapiens
tacatagtatatatg

SEQ ID NO: 1833447 - DNA, 15 bp, Homo sapiens
acatagtatatatgc

SEQ ID NO: 1833448 - DNA, 15 bp, Homo sapiens
catagtatatatgca

SEQ ID NO: 1833449 - DNA, 15 bp, Homo sapiens
atagtatatatgcat

SEQ ID NO: 1833450 - DNA, 15 bp, Homo sapiens
tagtatatatgcata

SEQ ID NO: 1833451 - DNA, 15 bp, Homo sapiens
agtatatatgcatat

SEQ ID NO: 1833452 - DNA, 15 bp, Homo sapiens
gtatatatgcatata

SEQ ID NO: 1833453 - DNA, 15 bp, Homo sapiens
tatatatgcatatat

SEQ ID NO: 1833454 - DNA, 15 bp, Homo sapiens
atatatgcatatata

SEQ ID NO: 1833455 - DNA, 15 bp, Homo sapiens
tatatgcatatatac

SEQ ID NO: 1833456 - DNA, 15 bp, Homo sapiens
atatgcatatatact

SEQ ID NO: 1833457 - DNA, 15 bp, Homo sapiens
tatgcatatatacta

SEQ ID NO: 1833458 - DNA, 15 bp, Homo sapiens
atgcatatatactat

SEQ ID NO: 1833459 - DNA, 15 bp, Homo sapiens
tgcatatatactata

SEQ ID NO: 1833460 - DNA, 15 bp, Homo sapiens
gcatatatactatat

SEQ ID NO: 1833461 - DNA, 15 bp, Homo sapiens
atactatatatacta

SEQ ID NO: 1833462 - DNA, 15 bp, Homo sapiens
tactatatatactat

SEQ ID NO: 1833463 - DNA, 15 bp, Homo sapiens
actatatatactata

SEQ ID NO: 1833464 - DNA, 15 bp, Homo sapiens
ctatatatactatat

SEQ ID NO: 1833465 - DNA, 15 bp, Homo sapiens
tatatactatatatt

SEQ ID NO: 1833466 - DNA, 15 bp, Homo sapiens
atatactatatattt

SEQ ID NO: 1833467 - DNA, 15 bp, Homo sapiens
tatactatatattta

SEQ ID NO: 1833468 - DNA, 15 bp, Homo sapiens
atactatatatttat

SEQ ID NO: 1833469 - DNA, 15 bp, Homo sapiens
tactatatatttata

SEQ ID NO: 1833470 - DNA, 15 bp, Homo sapiens
actatatatttatat

SEQ ID NO: 1833471 - DNA, 15 bp, Homo sapiens
ctatatatttatata

SEQ ID NO: 1833472 - DNA, 15 bp, Homo sapiens
tatatatttatatat

SEQ ID NO: 1833473 - DNA, 15 bp, Homo sapiens
atatatttatatata

SEQ ID NO: 1833474 - DNA, 15 bp, Homo sapiens
tatatttatatatac

SEQ ID NO: 1833475 - DNA, 15 bp, Homo sapiens
atatttatatatact

SEQ ID NO: 1833476 - DNA, 15 bp, Homo sapiens
tatttatatatacta

SEQ ID NO: 1833477 - DNA, 15 bp, Homo sapiens
atttatatatactat

SEQ ID NO: 1833478 - DNA, 15 bp, Homo sapiens
tttatatatactata

SEQ ID NO: 1833479 - DNA, 15 bp, Homo sapiens
ttatatatactatat

SEQ ID NO: 1833480 - DNA, 15 bp, Homo sapiens
atatatactatatac

SEQ ID NO: 1833481 - DNA, 15 bp, Homo sapiens
tatatactatatact

SEQ ID NO: 1833482 - DNA, 15 bp, Homo sapiens
atatactatatacta

SEQ ID NO: 1833483 - DNA, 15 bp, Homo sapiens
tatactatatactat

SEQ ID NO: 1833484 - DNA, 15 bp, Homo sapiens
atactatatactata

SEQ ID NO: 1833485 - DNA, 15 bp, Homo sapiens
tactatatactatat

SEQ ID NO: 1833486 - DNA, 15 bp, Homo sapiens
actatatactatata

SEQ ID NO: 1833487 - DNA, 15 bp, Homo sapiens
ctatatactatatat

SEQ ID NO: 1833488 - DNA, 15 bp, Homo sapiens
atatactatatactg

SEQ ID NO: 1833489 - DNA, 15 bp, Homo sapiens
tatactatatactgt

SEQ ID NO: 1833490 - DNA, 15 bp, Homo sapiens
atactatatactgta

SEQ ID NO: 1833491 - DNA, 15 bp, Homo sapiens
tactatatactgtat

SEQ ID NO: 1833492 - DNA, 15 bp, Homo sapiens
actatatactgtata

SEQ ID NO: 1833493 - DNA, 15 bp, Homo sapiens
ctatatactgtatat

SEQ ID NO: 1833494 - DNA, 15 bp, Homo sapiens
tatatactgtatata

SEQ ID NO: 1833495 - DNA, 15 bp, Homo sapiens
atatactgtatatat

SEQ ID NO: 1833496 - DNA, 15 bp, Homo sapiens
tatactgtatatata

SEQ ID NO: 1833497 - DNA, 15 bp, Homo sapiens
atactgtatatatac

SEQ ID NO: 1833498 - DNA, 15 bp, Homo sapiens
tactgtatatatact

SEQ ID NO: 1833499 - DNA, 15 bp, Homo sapiens
actgtatatatacta

SEQ ID NO: 1833500 - DNA, 15 bp, Homo sapiens
ctgtatatatactat

SEQ ID NO: 1833501 - DNA, 15 bp, Homo sapiens
tgtatatatactata

SEQ ID NO: 1833502 - DNA, 15 bp, Homo sapiens
gtatatatactatat

SEQ ID NO: 1833503 - DNA, 15 bp, Homo sapiens
atatactatatatgt

SEQ ID NO: 1833504 - DNA, 15 bp, Homo sapiens
tatactatatatgta

SEQ ID NO: 1833505 - DNA, 15 bp, Homo sapiens
atactatatatgtat

SEQ ID NO: 1833506 - DNA, 15 bp, Homo sapiens
tactatatatgtatg

SEQ ID NO: 1833507 - DNA, 15 bp, Homo sapiens
actatatatgtatgt

SEQ ID NO: 1833508 - DNA, 15 bp, Homo sapiens
ctatatatgtatgta

SEQ ID NO: 1833509 - DNA, 15 bp, Homo sapiens
atatatgtatgtata

SEQ ID NO: 1833510 - DNA, 15 bp, Homo sapiens
tatatgtatgtatac

SEQ ID NO: 1833511 - DNA, 15 bp, Homo sapiens
atatgtatgtatacg

SEQ ID NO: 1833512 - DNA, 15 bp, Homo sapiens
tatgtatgtatacga

SEQ ID NO: 1833513 - DNA, 15 bp, Homo sapiens
atgtatgtatacgat

SEQ ID NO: 1833514 - DNA, 15 bp, Homo sapiens
tgtatgtatacgata

SEQ ID NO: 1833515 - DNA, 15 bp, Homo sapiens
gtatgtatacgatat

SEQ ID NO: 1833516 - DNA, 15 bp, Homo sapiens
tatgtatacgatata

SEQ ID NO: 1833517 - DNA, 15 bp, Homo sapiens
atgtatacgatatat

SEQ ID NO: 1833518 - DNA, 15 bp, Homo sapiens
tgtatacgatatata

SEQ ID NO: 1833519 - DNA, 15 bp, Homo sapiens
gtatacgatatatat

SEQ ID NO: 1833520 - DNA, 15 bp, Homo sapiens
tatacgatatatata

SEQ ID NO: 1833521 - DNA, 15 bp, Homo sapiens
atacgatatatatat

SEQ ID NO: 1833522 - DNA, 15 bp, Homo sapiens
tacgatatatatata

SEQ ID NO: 1833523 - DNA, 15 bp, Homo sapiens
acgatatatatatat

SEQ ID NO: 1833524 - DNA, 15 bp, Homo sapiens
cgatatatatatata

SEQ ID NO: 1833525 - DNA, 15 bp, Homo sapiens
gatatatatatatac

SEQ ID NO: 1833526 - DNA, 15 bp, Homo sapiens
atatatatatatact

SEQ ID NO: 1833527 - DNA, 15 bp, Homo sapiens
tatatatatatacta

SEQ ID NO: 1833528 - DNA, 15 bp, Homo sapiens
atatatatatactat

SEQ ID NO: 1833529 - DNA, 15 bp, Homo sapiens
atactatatatgtac

SEQ ID NO: 1833530 - DNA, 15 bp, Homo sapiens
tactatatatgtaca

SEQ ID NO: 1833531 - DNA, 15 bp, Homo sapiens
actatatatgtacac

SEQ ID NO: 1833532 - DNA, 15 bp, Homo sapiens
ctatatatgtacaca

SEQ ID NO: 1833533 - DNA, 15 bp, Homo sapiens
tatatatgtacacac

SEQ ID NO: 1833534 - DNA, 15 bp, Homo sapiens
atatatgtacacaca

SEQ ID NO: 1833535 - DNA, 15 bp, Homo sapiens
tatatgtacacacac

SEQ ID NO: 1833536 - DNA, 15 bp, Homo sapiens
atatgtacacacaca

SEQ ID NO: 1833537 - DNA, 15 bp, Homo sapiens
tgtacacacacacat

SEQ ID NO: 1833538 - DNA, 15 bp, Homo sapiens
gtacacacacacata

SEQ ID NO: 1833539 - DNA, 15 bp, Homo sapiens
tacacacacacatat

SEQ ID NO: 1833540 - DNA, 15 bp, Homo sapiens
catatatatatacat

SEQ ID NO: 1833541 - DNA, 15 bp, Homo sapiens
atatatatatacata

SEQ ID NO: 1833542 - DNA, 15 bp, Homo sapiens
tatatatacatataa

SEQ ID NO: 1833543 - DNA, 15 bp, Homo sapiens
atatatacatataag

SEQ ID NO: 1833544 - DNA, 15 bp, Homo sapiens
tatatacatataagc

SEQ ID NO: 1833545 - DNA, 15 bp, Homo sapiens
atatacatataagca

SEQ ID NO: 1833546 - DNA, 15 bp, Homo sapiens
tatacatataagcac

SEQ ID NO: 1833547 - DNA, 15 bp, Homo sapiens
atacatataagcacc

SEQ ID NO: 1833548 - DNA, 15 bp, Homo sapiens
tacatataagcacct

SEQ ID NO: 1833549 - DNA, 15 bp, Homo sapiens
acatataagcaccta

SEQ ID NO: 1833550 - DNA, 15 bp, Homo sapiens
catataagcacctac

SEQ ID NO: 1833551 - DNA, 15 bp, Homo sapiens
atataagcacctact

SEQ ID NO: 1833552 - DNA, 15 bp, Homo sapiens
tataagcacctacta

SEQ ID NO: 1833553 - DNA, 15 bp, Homo sapiens
ataagcacctactac

SEQ ID NO: 1833554 - DNA, 15 bp, Homo sapiens
taagcacctactaca

SEQ ID NO: 1833555 - DNA, 15 bp, Homo sapiens
aagcacctactacat

SEQ ID NO: 1833556 - DNA, 15 bp, Homo sapiens
agcacctactacatg

SEQ ID NO: 1833557 - DNA, 15 bp, Homo sapiens
gcacctactacatgc

SEQ ID NO: 1833558 - DNA, 15 bp, Homo sapiens
cacctactacatgcc

SEQ ID NO: 1833559 - DNA, 15 bp, Homo sapiens
acctactacatgcca

SEQ ID NO: 1833560 - DNA, 15 bp, Homo sapiens
cctactacatgccag

SEQ ID NO: 1833561 - DNA, 15 bp, Homo sapiens
ctactacatgccagg

SEQ ID NO: 1833562 - DNA, 15 bp, Homo sapiens
tactacatgccaggc

SEQ ID NO: 1833563 - DNA, 15 bp, Homo sapiens
actacatgccaggca

SEQ ID NO: 1833564 - DNA, 15 bp, Homo sapiens
ctacatgccaggcat

SEQ ID NO: 1833565 - DNA, 15 bp, Homo sapiens
tacatgccaggcatc

SEQ ID NO: 1833566 - DNA, 15 bp, Homo sapiens
acatgccaggcatca

SEQ ID NO: 1833567 - DNA, 15 bp, Homo sapiens
catgccaggcatcat

SEQ ID NO: 1833568 - DNA, 15 bp, Homo sapiens
atgccaggcatcatt

SEQ ID NO: 1833569 - DNA, 15 bp, Homo sapiens
tgccaggcatcatta

SEQ ID NO: 1833570 - DNA, 15 bp, Homo sapiens
gccaggcatcattaa

SEQ ID NO: 1833571 - DNA, 15 bp, Homo sapiens
ccaggcatcattaaa

SEQ ID NO: 1833572 - DNA, 15 bp, Homo sapiens
caggcatcattaaat

SEQ ID NO: 1833573 - DNA, 15 bp, Homo sapiens
aggcatcattaaatg

SEQ ID NO: 1833574 - DNA, 15 bp, Homo sapiens
ggcatcattaaatgt

SEQ ID NO: 1833575 - DNA, 15 bp, Homo sapiens
gcatcattaaatgtg

SEQ ID NO: 1833576 - DNA, 15 bp, Homo sapiens
catcattaaatgtgt

SEQ ID NO: 1833577 - DNA, 15 bp, Homo sapiens
atcattaaatgtgtt

SEQ ID NO: 1833578 - DNA, 15 bp, Homo sapiens
tcattaaatgtgttg

SEQ ID NO: 1833579 - DNA, 15 bp, Homo sapiens
cattaaatgtgttgc

SEQ ID NO: 1833580 - DNA, 15 bp, Homo sapiens
attaaatgtgttgca

SEQ ID NO: 1833581 - DNA, 15 bp, Homo sapiens
ttaaatgtgttgcat

SEQ ID NO: 1833582 - DNA, 15 bp, Homo sapiens
taaatgtgttgcatc

SEQ ID NO: 1833583 - DNA, 15 bp, Homo sapiens
aaatgtgttgcatcc

SEQ ID NO: 1833584 - DNA, 15 bp, Homo sapiens
aatgtgttgcatcca

SEQ ID NO: 1833585 - DNA, 15 bp, Homo sapiens
atgtgttgcatccat

SEQ ID NO: 1833586 - DNA, 15 bp, Homo sapiens
tgtgttgcatccatc

SEQ ID NO: 1833587 - DNA, 15 bp, Homo sapiens
gtgttgcatccatca

SEQ ID NO: 1833588 - DNA, 15 bp, Homo sapiens
tgttgcatccatcac

SEQ ID NO: 1833589 - DNA, 15 bp, Homo sapiens
gttgcatccatcacg

SEQ ID NO: 1833590 - DNA, 15 bp, Homo sapiens
ttgcatccatcacgt

SEQ ID NO: 1833591 - DNA, 15 bp, Homo sapiens
tgcatccatcacgtc

SEQ ID NO: 1833592 - DNA, 15 bp, Homo sapiens
gcatccatcacgtca

SEQ ID NO: 1833593 - DNA, 15 bp, Homo sapiens
catccatcacgtcat

SEQ ID NO: 1833594 - DNA, 15 bp, Homo sapiens
atccatcacgtcatt

SEQ ID NO: 1833595 - DNA, 15 bp, Homo sapiens
tccatcacgtcattt

SEQ ID NO: 1833596 - DNA, 15 bp, Homo sapiens
ccatcacgtcattta

SEQ ID NO: 1833597 - DNA, 15 bp, Homo sapiens
catcacgtcatttaa

SEQ ID NO: 1833598 - DNA, 15 bp, Homo sapiens
atcacgtcatttaac

SEQ ID NO: 1833599 - DNA, 15 bp, Homo sapiens
tcacgtcatttaacc

SEQ ID NO: 1833600 - DNA, 15 bp, Homo sapiens
cacgtcatttaaccc

SEQ ID NO: 1833601 - DNA, 15 bp, Homo sapiens
acgtcatttaacccc

SEQ ID NO: 1833602 - DNA, 15 bp, Homo sapiens
cgtcatttaacccca

SEQ ID NO: 1833603 - DNA, 15 bp, Homo sapiens
gtcatttaaccccag

SEQ ID NO: 1833604 - DNA, 15 bp, Homo sapiens
tcatttaaccccagc

SEQ ID NO: 1833605 - DNA, 15 bp, Homo sapiens
catttaaccccagca

SEQ ID NO: 1833606 - DNA, 15 bp, Homo sapiens
atttaaccccagcac

SEQ ID NO: 1833607 - DNA, 15 bp, Homo sapiens
tttaaccccagcact

SEQ ID NO: 1833608 - DNA, 15 bp, Homo sapiens
ttaaccccagcactt

SEQ ID NO: 1833609 - DNA, 15 bp, Homo sapiens
taaccccagcacttg

SEQ ID NO: 1833610 - DNA, 15 bp, Homo sapiens
aaccccagcacttgc

SEQ ID NO: 1833611 - DNA, 15 bp, Homo sapiens
accccagcacttgca

SEQ ID NO: 1833612 - DNA, 15 bp, Homo sapiens
ccccagcacttgcac

SEQ ID NO: 1833613 - DNA, 15 bp, Homo sapiens
cccagcacttgcaca

SEQ ID NO: 1833614 - DNA, 15 bp, Homo sapiens
ccagcacttgcacac

SEQ ID NO: 1833615 - DNA, 15 bp, Homo sapiens
cagcacttgcacact

SEQ ID NO: 1833616 - DNA, 15 bp, Homo sapiens
agcacttgcacactc

SEQ ID NO: 1833617 - DNA, 15 bp, Homo sapiens
gcacttgcacactcc

SEQ ID NO: 1833618 - DNA, 15 bp, Homo sapiens
cacttgcacactcct

SEQ ID NO: 1833619 - DNA, 15 bp, Homo sapiens
acttgcacactcctt

SEQ ID NO: 1833620 - DNA, 15 bp, Homo sapiens
cttgcacactccttt

SEQ ID NO: 1833621 - DNA, 15 bp, Homo sapiens
ttgcacactcctttc

SEQ ID NO: 1833622 - DNA, 15 bp, Homo sapiens
tgcacactcctttct

SEQ ID NO: 1833623 - DNA, 15 bp, Homo sapiens
gcacactcctttctg

SEQ ID NO: 1833624 - DNA, 15 bp, Homo sapiens
cacactcctttctgg

SEQ ID NO: 1833625 - DNA, 15 bp, Homo sapiens
acactcctttctggt

SEQ ID NO: 1833626 - DNA, 15 bp, Homo sapiens
cactcctttctggtt

SEQ ID NO: 1833627 - DNA, 15 bp, Homo sapiens
actcctttctggttg

SEQ ID NO: 1833628 - DNA, 15 bp, Homo sapiens
ctcctttctggttgt

SEQ ID NO: 1833629 - DNA, 15 bp, Homo sapiens
tcctttctggttgtg

SEQ ID NO: 1833630 - DNA, 15 bp, Homo sapiens
cctttctggttgtgg

SEQ ID NO: 1833631 - DNA, 15 bp, Homo sapiens
ctttctggttgtgga

SEQ ID NO: 1833632 - DNA, 15 bp, Homo sapiens
tttctggttgtggaa

SEQ ID NO: 1833633 - DNA, 15 bp, Homo sapiens
ttctggttgtggaag

SEQ ID NO: 1833634 - DNA, 15 bp, Homo sapiens
tctggttgtggaaga

SEQ ID NO: 1833635 - DNA, 15 bp, Homo sapiens
ctggttgtggaagac

SEQ ID NO: 1833636 - DNA, 15 bp, Homo sapiens
tggttgtggaagact

SEQ ID NO: 1833637 - DNA, 15 bp, Homo sapiens
ggttgtggaagacta

SEQ ID NO: 1833638 - DNA, 15 bp, Homo sapiens
gttgtggaagactaa

SEQ ID NO: 1833639 - DNA, 15 bp, Homo sapiens
ttgtggaagactaag

SEQ ID NO: 1833640 - DNA, 15 bp, Homo sapiens
tgtggaagactaagt

SEQ ID NO: 1833641 - DNA, 15 bp, Homo sapiens
gtggaagactaagta

SEQ ID NO: 1833642 - DNA, 15 bp, Homo sapiens
tggaagactaagtaa

SEQ ID NO: 1833643 - DNA, 15 bp, Homo sapiens
ggaagactaagtaat

SEQ ID NO: 1833644 - DNA, 15 bp, Homo sapiens
gaagactaagtaatt

SEQ ID NO: 1833645 - DNA, 15 bp, Homo sapiens
aagactaagtaattt

SEQ ID NO: 1833646 - DNA, 15 bp, Homo sapiens
agactaagtaattta

SEQ ID NO: 1833647 - DNA, 15 bp, Homo sapiens
gactaagtaatttat

SEQ ID NO: 1833648 - DNA, 15 bp, Homo sapiens
actaagtaatttatc

SEQ ID NO: 1833649 - DNA, 15 bp, Homo sapiens
ctaagtaatttatct

SEQ ID NO: 1833650 - DNA, 15 bp, Homo sapiens
taagtaatttatcta

SEQ ID NO: 1833651 - DNA, 15 bp, Homo sapiens
aagtaatttatctaa

SEQ ID NO: 1833652 - DNA, 15 bp, Homo sapiens
agtaatttatctaag

SEQ ID NO: 1833653 - DNA, 15 bp, Homo sapiens
gtaatttatctaagt

SEQ ID NO: 1833654 - DNA, 15 bp, Homo sapiens
taatttatctaagtc

SEQ ID NO: 1833655 - DNA, 15 bp, Homo sapiens
aatttatctaagtca

SEQ ID NO: 1833656 - DNA, 15 bp, Homo sapiens
atttatctaagtcac

SEQ ID NO: 1833657 - DNA, 15 bp, Homo sapiens
tttatctaagtcacc

SEQ ID NO: 1833658 - DNA, 15 bp, Homo sapiens
ttatctaagtcaccc

SEQ ID NO: 1833659 - DNA, 15 bp, Homo sapiens
tatctaagtcaccca

SEQ ID NO: 1833660 - DNA, 15 bp, Homo sapiens
atctaagtcacccag

SEQ ID NO: 1833661 - DNA, 15 bp, Homo sapiens
tctaagtcacccagc

SEQ ID NO: 1833662 - DNA, 15 bp, Homo sapiens
ctaagtcacccagct

SEQ ID NO: 1833663 - DNA, 15 bp, Homo sapiens
taagtcacccagctg

SEQ ID NO: 1833664 - DNA, 15 bp, Homo sapiens
aagtcacccagctgg

SEQ ID NO: 1833665 - DNA, 15 bp, Homo sapiens
agtcacccagctgga

SEQ ID NO: 1833666 - DNA, 15 bp, Homo sapiens
gtcacccagctggaa

SEQ ID NO: 1833667 - DNA, 15 bp, Homo sapiens
tcacccagctggaag

SEQ ID NO: 1833668 - DNA, 15 bp, Homo sapiens
cacccagctggaagg

SEQ ID NO: 1833669 - DNA, 15 bp, Homo sapiens
acccagctggaaggt

SEQ ID NO: 1833670 - DNA, 15 bp, Homo sapiens
cccagctggaaggtc

SEQ ID NO: 1833671 - DNA, 15 bp, Homo sapiens
ccagctggaaggtca

SEQ ID NO: 1833672 - DNA, 15 bp, Homo sapiens
cagctggaaggtcag

SEQ ID NO: 1833673 - DNA, 15 bp, Homo sapiens
agctggaaggtcagg

SEQ ID NO: 1833674 - DNA, 15 bp, Homo sapiens
gctggaaggtcaggc

SEQ ID NO: 1833675 - DNA, 15 bp, Homo sapiens
ctggaaggtcaggca

SEQ ID NO: 1833676 - DNA, 15 bp, Homo sapiens
tggaaggtcaggcag

SEQ ID NO: 1833677 - DNA, 15 bp, Homo sapiens
ggaaggtcaggcagg

SEQ ID NO: 1833678 - DNA, 15 bp, Homo sapiens
gaaggtcaggcaggg

SEQ ID NO: 1833679 - DNA, 15 bp, Homo sapiens
aaggtcaggcaggga

SEQ ID NO: 1833680 - DNA, 15 bp, Homo sapiens
aggtcaggcagggac

SEQ ID NO: 1833681 - DNA, 15 bp, Homo sapiens
ggtcaggcagggacc

SEQ ID NO: 1833682 - DNA, 15 bp, Homo sapiens
gtcaggcagggaccc

SEQ ID NO: 1833683 - DNA, 15 bp, Homo sapiens
tcaggcagggaccca

SEQ ID NO: 1833684 - DNA, 15 bp, Homo sapiens
caggcagggacccag

SEQ ID NO: 1833685 - DNA, 15 bp, Homo sapiens
aggcagggacccaga

SEQ ID NO: 1833686 - DNA, 15 bp, Homo sapiens
ggcagggacccagat

SEQ ID NO: 1833687 - DNA, 15 bp, Homo sapiens
gcagggacccagatt

SEQ ID NO: 1833688 - DNA, 15 bp, Homo sapiens
cagggacccagattt

SEQ ID NO: 1833689 - DNA, 15 bp, Homo sapiens
agggacccagatttg

SEQ ID NO: 1833690 - DNA, 15 bp, Homo sapiens
gggacccagatttga

SEQ ID NO: 1833691 - DNA, 15 bp, Homo sapiens
ggacccagatttgaa

SEQ ID NO: 1833692 - DNA, 15 bp, Homo sapiens
gacccagatttgaaa

SEQ ID NO: 1833693 - DNA, 15 bp, Homo sapiens
acccagatttgaaat

SEQ ID NO: 1833694 - DNA, 15 bp, Homo sapiens
cccagatttgaaatc

SEQ ID NO: 1833695 - DNA, 15 bp, Homo sapiens
ccagatttgaaatcc

SEQ ID NO: 1833696 - DNA, 15 bp, Homo sapiens
cagatttgaaatcca

SEQ ID NO: 1833697 - DNA, 15 bp, Homo sapiens
agatttgaaatccaa

SEQ ID NO: 1833698 - DNA, 15 bp, Homo sapiens
gatttgaaatccaag

SEQ ID NO: 1833699 - DNA, 15 bp, Homo sapiens
atttgaaatccaagt

SEQ ID NO: 1833700 - DNA, 15 bp, Homo sapiens
tttgaaatccaagtc

SEQ ID NO: 1833701 - DNA, 15 bp, Homo sapiens
ttgaaatccaagtct

SEQ ID NO: 1833702 - DNA, 15 bp, Homo sapiens
tgaaatccaagtcta

SEQ ID NO: 1833703 - DNA, 15 bp, Homo sapiens
gaaatccaagtctac

SEQ ID NO: 1833704 - DNA, 15 bp, Homo sapiens
aaatccaagtctacc

SEQ ID NO: 1833705 - DNA, 15 bp, Homo sapiens
aatccaagtctacct

SEQ ID NO: 1833706 - DNA, 15 bp, Homo sapiens
atccaagtctaccta

SEQ ID NO: 1833707 - DNA, 15 bp, Homo sapiens
tccaagtctacctac

SEQ ID NO: 1833708 - DNA, 15 bp, Homo sapiens
ccaagtctacctacc

SEQ ID NO: 1833709 - DNA, 15 bp, Homo sapiens
caagtctacctacct

SEQ ID NO: 1833710 - DNA, 15 bp, Homo sapiens
aagtctacctaccta

SEQ ID NO: 1833711 - DNA, 15 bp, Homo sapiens
agtctacctacctac

SEQ ID NO: 1833712 - DNA, 15 bp, Homo sapiens
gtctacctacctaca

SEQ ID NO: 1833713 - DNA, 15 bp, Homo sapiens
tctacctacctacag

SEQ ID NO: 1833714 - DNA, 15 bp, Homo sapiens
ctacctacctacagg

SEQ ID NO: 1833715 - DNA, 15 bp, Homo sapiens
tacctacctacaggt

SEQ ID NO: 1833716 - DNA, 15 bp, Homo sapiens
acctacctacaggtc

SEQ ID NO: 1833717 - DNA, 15 bp, Homo sapiens
cctacctacaggtcc

SEQ ID NO: 1833718 - DNA, 15 bp, Homo sapiens
ctacctacaggtccc

SEQ ID NO: 1833719 - DNA, 15 bp, Homo sapiens
tacctacaggtcccc

SEQ ID NO: 1833720 - DNA, 15 bp, Homo sapiens
acctacaggtcccct

SEQ ID NO: 1833721 - DNA, 15 bp, Homo sapiens
cctacaggtccccta

SEQ ID NO: 1833722 - DNA, 15 bp, Homo sapiens
ctacaggtcccctac

SEQ ID NO: 1833723 - DNA, 15 bp, Homo sapiens
tacaggtcccctact

SEQ ID NO: 1833724 - DNA, 15 bp, Homo sapiens
acaggtcccctactc

SEQ ID NO: 1833725 - DNA, 15 bp, Homo sapiens
caggtcccctactct

SEQ ID NO: 1833726 - DNA, 15 bp, Homo sapiens
aggtcccctactctt

SEQ ID NO: 1833727 - DNA, 15 bp, Homo sapiens
ggtcccctactctta

SEQ ID NO: 1833728 - DNA, 15 bp, Homo sapiens
gtcccctactcttaa

SEQ ID NO: 1833729 - DNA, 15 bp, Homo sapiens
tcccctactcttaac

SEQ ID NO: 1833730 - DNA, 15 bp, Homo sapiens
cccctactcttaacc

SEQ ID NO: 1833731 - DNA, 15 bp, Homo sapiens
ccctactcttaacct

SEQ ID NO: 1833732 - DNA, 15 bp, Homo sapiens
cctactcttaacctg

SEQ ID NO: 1833733 - DNA, 15 bp, Homo sapiens
ctactcttaacctgt

SEQ ID NO: 1833734 - DNA, 15 bp, Homo sapiens
tactcttaacctgta

SEQ ID NO: 1833735 - DNA, 15 bp, Homo sapiens
actcttaacctgtag

SEQ ID NO: 1833736 - DNA, 15 bp, Homo sapiens
ctcttaacctgtagg

SEQ ID NO: 1833737 - DNA, 15 bp, Homo sapiens
tcttaacctgtaggt

SEQ ID NO: 1833738 - DNA, 15 bp, Homo sapiens
cttaacctgtaggtc

SEQ ID NO: 1833739 - DNA, 15 bp, Homo sapiens
ttaacctgtaggtcc

SEQ ID NO: 1833740 - DNA, 15 bp, Homo sapiens
taacctgtaggtccc

SEQ ID NO: 1833741 - DNA, 15 bp, Homo sapiens
aacctgtaggtccca

SEQ ID NO: 1833742 - DNA, 15 bp, Homo sapiens
acctgtaggtcccac

SEQ ID NO: 1833743 - DNA, 15 bp, Homo sapiens
cctgtaggtcccact

SEQ ID NO: 1833744 - DNA, 15 bp, Homo sapiens
ctgtaggtcccactg

SEQ ID NO: 1833745 - DNA, 15 bp, Homo sapiens
tgtaggtcccactgc

SEQ ID NO: 1833746 - DNA, 15 bp, Homo sapiens
gtaggtcccactgcc

SEQ ID NO: 1833747 - DNA, 15 bp, Homo sapiens
taggtcccactgcct

SEQ ID NO: 1833748 - DNA, 15 bp, Homo sapiens
aggtcccactgccta

SEQ ID NO: 1833749 - DNA, 15 bp, Homo sapiens
ggtcccactgcctac

SEQ ID NO: 1833750 - DNA, 15 bp, Homo sapiens
gtcccactgcctacc

SEQ ID NO: 1833751 - DNA, 15 bp, Homo sapiens
tcccactgcctaccc

SEQ ID NO: 1833752 - DNA, 15 bp, Homo sapiens
cccactgcctaccca

SEQ ID NO: 1833753 - DNA, 15 bp, Homo sapiens
ccactgcctacccag

SEQ ID NO: 1833754 - DNA, 15 bp, Homo sapiens
cactgcctacccagg

SEQ ID NO: 1833755 - DNA, 15 bp, Homo sapiens
actgcctacccagga

SEQ ID NO: 1833756 - DNA, 15 bp, Homo sapiens
ctgcctacccaggaa

SEQ ID NO: 1833757 - DNA, 15 bp, Homo sapiens
tgcctacccaggaac

SEQ ID NO: 1833758 - DNA, 15 bp, Homo sapiens
gcctacccaggaact

SEQ ID NO: 1833759 - DNA, 15 bp, Homo sapiens
cctacccaggaactg

SEQ ID NO: 1833760 - DNA, 15 bp, Homo sapiens
ctacccaggaactga

SEQ ID NO: 1833761 - DNA, 15 bp, Homo sapiens
tacccaggaactgag

SEQ ID NO: 1833762 - DNA, 15 bp, Homo sapiens
cccaggaactgaggg

SEQ ID NO: 1833763 - DNA, 15 bp, Homo sapiens
ccaggaactgaggga

SEQ ID NO: 1833764 - DNA, 15 bp, Homo sapiens
caggaactgagggat

SEQ ID NO: 1833765 - DNA, 15 bp, Homo sapiens
aggaactgagggatg

SEQ ID NO: 1833766 - DNA, 15 bp, Homo sapiens
ggaactgagggatga

SEQ ID NO: 1833767 - DNA, 15 bp, Homo sapiens
gaactgagggatgat

SEQ ID NO: 1833768 - DNA, 15 bp, Homo sapiens
aactgagggatgatg

SEQ ID NO: 1833769 - DNA, 15 bp, Homo sapiens
actgagggatgatgt

SEQ ID NO: 1833770 - DNA, 15 bp, Homo sapiens
ctgagggatgatgta

SEQ ID NO: 1833771 - DNA, 15 bp, Homo sapiens
tgagggatgatgtag

SEQ ID NO: 1833772 - DNA, 15 bp, Homo sapiens
gagggatgatgtaga

SEQ ID NO: 1833773 - DNA, 15 bp, Homo sapiens
agggatgatgtagaa

SEQ ID NO: 1833774 - DNA, 15 bp, Homo sapiens
gggatgatgtagaaa

SEQ ID NO: 1833775 - DNA, 15 bp, Homo sapiens
ggatgatgtagaaaa

SEQ ID NO: 1833776 - DNA, 15 bp, Homo sapiens
gatgatgtagaaaat

SEQ ID NO: 1833777 - DNA, 15 bp, Homo sapiens
atgatgtagaaaatc

SEQ ID NO: 1833778 - DNA, 15 bp, Homo sapiens
tgatgtagaaaatcc

SEQ ID NO: 1833779 - DNA, 15 bp, Homo sapiens
gatgtagaaaatccc

SEQ ID NO: 1833780 - DNA, 15 bp, Homo sapiens
atgtagaaaatccca

SEQ ID NO: 1833781 - DNA, 15 bp, Homo sapiens
tgtagaaaatcccaa

SEQ ID NO: 1833782 - DNA, 15 bp, Homo sapiens
gtagaaaatcccaaa

SEQ ID NO: 1833783 - DNA, 15 bp, Homo sapiens
tagaaaatcccaaaa

SEQ ID NO: 1833784 - DNA, 15 bp, Homo sapiens
agaaaatcccaaaac

SEQ ID NO: 1833785 - DNA, 15 bp, Homo sapiens
gaaaatcccaaaaca

SEQ ID NO: 1833786 - DNA, 15 bp, Homo sapiens
aaaatcccaaaacat

SEQ ID NO: 1833787 - DNA, 15 bp, Homo sapiens
aaatcccaaaacatg

SEQ ID NO: 1833788 - DNA, 15 bp, Homo sapiens
aatcccaaaacatgt

SEQ ID NO: 1833789 - DNA, 15 bp, Homo sapiens
tcccaaaacatgtta

SEQ ID NO: 1833790 - DNA, 15 bp, Homo sapiens
cccaaaacatgttaa

SEQ ID NO: 1833791 - DNA, 15 bp, Homo sapiens
ccaaaacatgttaat

SEQ ID NO: 1833792 - DNA, 15 bp, Homo sapiens
caaaacatgttaata

SEQ ID NO: 1833793 - DNA, 15 bp, Homo sapiens
aaaacatgttaatat

SEQ ID NO: 1833794 - DNA, 15 bp, Homo sapiens
aaacatgttaatata

SEQ ID NO: 1833795 - DNA, 15 bp, Homo sapiens
aacatgttaatatag

SEQ ID NO: 1833796 - DNA, 15 bp, Homo sapiens
acatgttaatatagg

SEQ ID NO: 1833797 - DNA, 15 bp, Homo sapiens
catgttaatataggg

SEQ ID NO: 1833798 - DNA, 15 bp, Homo sapiens
atgttaatataggga

SEQ ID NO: 1833799 - DNA, 15 bp, Homo sapiens
tgttaatatagggaa

SEQ ID NO: 1833800 - DNA, 15 bp, Homo sapiens
gttaatatagggaat

SEQ ID NO: 1833801 - DNA, 15 bp, Homo sapiens
ttaatatagggaata

SEQ ID NO: 1833802 - DNA, 15 bp, Homo sapiens
taatatagggaatac

SEQ ID NO: 1833803 - DNA, 15 bp, Homo sapiens
aatatagggaatacc

SEQ ID NO: 1833804 - DNA, 15 bp, Homo sapiens
atatagggaatacct

SEQ ID NO: 1833805 - DNA, 15 bp, Homo sapiens
tatagggaataccta

SEQ ID NO: 1833806 - DNA, 15 bp, Homo sapiens
atagggaatacctat

SEQ ID NO: 1833807 - DNA, 15 bp, Homo sapiens
tagggaatacctata

SEQ ID NO: 1833808 - DNA, 15 bp, Homo sapiens
agggaatacctataa

SEQ ID NO: 1833809 - DNA, 15 bp, Homo sapiens
gggaatacctataaa

SEQ ID NO: 1833810 - DNA, 15 bp, Homo sapiens
ggaatacctataaac

SEQ ID NO: 1833811 - DNA, 15 bp, Homo sapiens
gaatacctataaaca

SEQ ID NO: 1833812 - DNA, 15 bp, Homo sapiens
aatacctataaacat

SEQ ID NO: 1833813 - DNA, 15 bp, Homo sapiens
atacctataaacatg

SEQ ID NO: 1833814 - DNA, 15 bp, Homo sapiens
tacctataaacatgc

SEQ ID NO: 1833815 - DNA, 15 bp, Homo sapiens
acctataaacatgca

SEQ ID NO: 1833816 - DNA, 15 bp, Homo sapiens
cctataaacatgcaa

SEQ ID NO: 1833817 - DNA, 15 bp, Homo sapiens
ctataaacatgcaat

SEQ ID NO: 1833818 - DNA, 15 bp, Homo sapiens
tataaacatgcaatc

SEQ ID NO: 1833819 - DNA, 15 bp, Homo sapiens
ataaacatgcaatca

SEQ ID NO: 1833820 - DNA, 15 bp, Homo sapiens
taaacatgcaatcaa

SEQ ID NO: 1833821 - DNA, 15 bp, Homo sapiens
aaacatgcaatcaaa

SEQ ID NO: 1833822 - DNA, 15 bp, Homo sapiens
aacatgcaatcaaag

SEQ ID NO: 1833823 - DNA, 15 bp, Homo sapiens
acatgcaatcaaagt

SEQ ID NO: 1833824 - DNA, 15 bp, Homo sapiens
catgcaatcaaagtc

SEQ ID NO: 1833825 - DNA, 15 bp, Homo sapiens
atgcaatcaaagtct

SEQ ID NO: 1833826 - DNA, 15 bp, Homo sapiens
tgcaatcaaagtctt

SEQ ID NO: 1833827 - DNA, 15 bp, Homo sapiens
gcaatcaaagtcttt

SEQ ID NO: 1833828 - DNA, 15 bp, Homo sapiens
caatcaaagtctttg

SEQ ID NO: 1833829 - DNA, 15 bp, Homo sapiens
aatcaaagtctttgg

SEQ ID NO: 1833830 - DNA, 15 bp, Homo sapiens
atcaaagtctttggg

SEQ ID NO: 1833831 - DNA, 15 bp, Homo sapiens
tcaaagtctttggga

SEQ ID NO: 1833832 - DNA, 15 bp, Homo sapiens
caaagtctttgggac

SEQ ID NO: 1833833 - DNA, 15 bp, Homo sapiens
aaagtctttgggact

SEQ ID NO: 1833834 - DNA, 15 bp, Homo sapiens
aagtctttgggacta

SEQ ID NO: 1833835 - DNA, 15 bp, Homo sapiens
agtctttgggactat

SEQ ID NO: 1833836 - DNA, 15 bp, Homo sapiens
gtctttgggactata

SEQ ID NO: 1833837 - DNA, 15 bp, Homo sapiens
tctttgggactatac

SEQ ID NO: 1833838 - DNA, 15 bp, Homo sapiens
ctttgggactataca

SEQ ID NO: 1833839 - DNA, 15 bp, Homo sapiens
tttgggactatacaa

SEQ ID NO: 1833840 - DNA, 15 bp, Homo sapiens
ttgggactatacaac

SEQ ID NO: 1833841 - DNA, 15 bp, Homo sapiens
tgggactatacaacc

SEQ ID NO: 1833842 - DNA, 15 bp, Homo sapiens
gggactatacaacca

SEQ ID NO: 1833843 - DNA, 15 bp, Homo sapiens
ggactatacaaccac

SEQ ID NO: 1833844 - DNA, 15 bp, Homo sapiens
gactatacaaccact

SEQ ID NO: 1833845 - DNA, 15 bp, Homo sapiens
actatacaaccactg

SEQ ID NO: 1833846 - DNA, 15 bp, Homo sapiens
ctatacaaccactgt

SEQ ID NO: 1833847 - DNA, 15 bp, Homo sapiens
tatacaaccactgta

SEQ ID NO: 1833848 - DNA, 15 bp, Homo sapiens
atacaaccactgtat

SEQ ID NO: 1833849 - DNA, 15 bp, Homo sapiens
tacaaccactgtata

SEQ ID NO: 1833850 - DNA, 15 bp, Homo sapiens
acaaccactgtataa

SEQ ID NO: 1833851 - DNA, 15 bp, Homo sapiens
caaccactgtataaa

SEQ ID NO: 1833852 - DNA, 15 bp, Homo sapiens
aaccactgtataaag

SEQ ID NO: 1833853 - DNA, 15 bp, Homo sapiens
accactgtataaagc

SEQ ID NO: 1833854 - DNA, 15 bp, Homo sapiens
ccactgtataaagca

SEQ ID NO: 1833855 - DNA, 15 bp, Homo sapiens
cactgtataaagcat

SEQ ID NO: 1833856 - DNA, 15 bp, Homo sapiens
actgtataaagcata

SEQ ID NO: 1833857 - DNA, 15 bp, Homo sapiens
ctgtataaagcataa

SEQ ID NO: 1833858 - DNA, 15 bp, Homo sapiens
tgtataaagcataac

SEQ ID NO: 1833859 - DNA, 15 bp, Homo sapiens
gtataaagcataaca

SEQ ID NO: 1833860 - DNA, 15 bp, Homo sapiens
tataaagcataacaa

SEQ ID NO: 1833861 - DNA, 15 bp, Homo sapiens
ataaagcataacaat

SEQ ID NO: 1833862 - DNA, 15 bp, Homo sapiens
taaagcataacaatg

SEQ ID NO: 1833863 - DNA, 15 bp, Homo sapiens
aaagcataacaatgt

SEQ ID NO: 1833864 - DNA, 15 bp, Homo sapiens
aagcataacaatgta

SEQ ID NO: 1833865 - DNA, 15 bp, Homo sapiens
agcataacaatgtac

SEQ ID NO: 1833866 - DNA, 15 bp, Homo sapiens
gcataacaatgtaca

SEQ ID NO: 1833867 - DNA, 15 bp, Homo sapiens
cataacaatgtacaa

SEQ ID NO: 1833868 - DNA, 15 bp, Homo sapiens
ataacaatgtacaag

SEQ ID NO: 1833869 - DNA, 15 bp, Homo sapiens
taacaatgtacaagc

SEQ ID NO: 1833870 - DNA, 15 bp, Homo sapiens
aacaatgtacaagct

SEQ ID NO: 1833871 - DNA, 15 bp, Homo sapiens
acaatgtacaagctt

SEQ ID NO: 1833872 - DNA, 15 bp, Homo sapiens
caatgtacaagcttc

SEQ ID NO: 1833873 - DNA, 15 bp, Homo sapiens
aatgtacaagcttcc

SEQ ID NO: 1833874 - DNA, 15 bp, Homo sapiens
atgtacaagcttcca

SEQ ID NO: 1833875 - DNA, 15 bp, Homo sapiens
tgtacaagcttccaa

SEQ ID NO: 1833876 - DNA, 15 bp, Homo sapiens
gtacaagcttccaaa

SEQ ID NO: 1833877 - DNA, 15 bp, Homo sapiens
tacaagcttccaaac

SEQ ID NO: 1833878 - DNA, 15 bp, Homo sapiens
acaagcttccaaaca

SEQ ID NO: 1833879 - DNA, 15 bp, Homo sapiens
caagcttccaaacaa

SEQ ID NO: 1833880 - DNA, 15 bp, Homo sapiens
aagcttccaaacaat

SEQ ID NO: 1833881 - DNA, 15 bp, Homo sapiens
agcttccaaacaata

SEQ ID NO: 1833882 - DNA, 15 bp, Homo sapiens
gcttccaaacaataa

SEQ ID NO: 1833883 - DNA, 15 bp, Homo sapiens
cttccaaacaataac

SEQ ID NO: 1833884 - DNA, 15 bp, Homo sapiens
ttccaaacaataact

SEQ ID NO: 1833885 - DNA, 15 bp, Homo sapiens
tccaaacaataacta

SEQ ID NO: 1833886 - DNA, 15 bp, Homo sapiens
ccaaacaataactag

SEQ ID NO: 1833887 - DNA, 15 bp, Homo sapiens
caaacaataactaga

SEQ ID NO: 1833888 - DNA, 15 bp, Homo sapiens
aaacaataactagaa

SEQ ID NO: 1833889 - DNA, 15 bp, Homo sapiens
aacaataactagaag

SEQ ID NO: 1833890 - DNA, 15 bp, Homo sapiens
acaataactagaagt

SEQ ID NO: 1833891 - DNA, 15 bp, Homo sapiens
caataactagaagtt

SEQ ID NO: 1833892 - DNA, 15 bp, Homo sapiens
aataactagaagttc

SEQ ID NO: 1833893 - DNA, 15 bp, Homo sapiens
ataactagaagttct

SEQ ID NO: 1833894 - DNA, 15 bp, Homo sapiens
taactagaagttctg

SEQ ID NO: 1833895 - DNA, 15 bp, Homo sapiens
aactagaagttctgc

SEQ ID NO: 1833896 - DNA, 15 bp, Homo sapiens
actagaagttctgcc

SEQ ID NO: 1833897 - DNA, 15 bp, Homo sapiens
ctagaagttctgcct

SEQ ID NO: 1833898 - DNA, 15 bp, Homo sapiens
tagaagttctgcctc

SEQ ID NO: 1833899 - DNA, 15 bp, Homo sapiens
agaagttctgcctcc

SEQ ID NO: 1833900 - DNA, 15 bp, Homo sapiens
gaagttctgcctccc

SEQ ID NO: 1833901 - DNA, 15 bp, Homo sapiens
aagttctgcctccct

SEQ ID NO: 1833902 - DNA, 15 bp, Homo sapiens
agttctgcctccctc

SEQ ID NO: 1833903 - DNA, 15 bp, Homo sapiens
gttctgcctccctct

SEQ ID NO: 1833904 - DNA, 15 bp, Homo sapiens
tgcctccctcttctg

SEQ ID NO: 1833905 - DNA, 15 bp, Homo sapiens
gcctccctcttctgg

SEQ ID NO: 1833906 - DNA, 15 bp, Homo sapiens
cctccctcttctggg

SEQ ID NO: 1833907 - DNA, 15 bp, Homo sapiens
ctccctcttctgggt

SEQ ID NO: 1833908 - DNA, 15 bp, Homo sapiens
tccctcttctgggtt

SEQ ID NO: 1833909 - DNA, 15 bp, Homo sapiens
ccctcttctgggttc

SEQ ID NO: 1833910 - DNA, 15 bp, Homo sapiens
cctcttctgggttcc

SEQ ID NO: 1833911 - DNA, 15 bp, Homo sapiens
ctcttctgggttcct

SEQ ID NO: 1833912 - DNA, 15 bp, Homo sapiens
tcttctgggttccta

SEQ ID NO: 1833913 - DNA, 15 bp, Homo sapiens
cttctgggttcctaa

SEQ ID NO: 1833914 - DNA, 15 bp, Homo sapiens
ttctgggttcctaaa

SEQ ID NO: 1833915 - DNA, 15 bp, Homo sapiens
tctgggttcctaaag

SEQ ID NO: 1833916 - DNA, 15 bp, Homo sapiens
ctgggttcctaaagc

SEQ ID NO: 1833917 - DNA, 15 bp, Homo sapiens
tgggttcctaaagca

SEQ ID NO: 1833918 - DNA, 15 bp, Homo sapiens
gggttcctaaagcac

SEQ ID NO: 1833919 - DNA, 15 bp, Homo sapiens
ggttcctaaagcact

SEQ ID NO: 1833920 - DNA, 15 bp, Homo sapiens
gttcctaaagcactg

SEQ ID NO: 1833921 - DNA, 15 bp, Homo sapiens
ttcctaaagcactgc

SEQ ID NO: 1833922 - DNA, 15 bp, Homo sapiens
tcctaaagcactgca

SEQ ID NO: 1833923 - DNA, 15 bp, Homo sapiens
cctaaagcactgcac

SEQ ID NO: 1833924 - DNA, 15 bp, Homo sapiens
ctaaagcactgcacc

SEQ ID NO: 1833925 - DNA, 15 bp, Homo sapiens
taaagcactgcacct

SEQ ID NO: 1833926 - DNA, 15 bp, Homo sapiens
aaagcactgcaccta

SEQ ID NO: 1833927 - DNA, 15 bp, Homo sapiens
aagcactgcacctat

SEQ ID NO: 1833928 - DNA, 15 bp, Homo sapiens
agcactgcacctatc

SEQ ID NO: 1833929 - DNA, 15 bp, Homo sapiens
gcactgcacctatct

SEQ ID NO: 1833930 - DNA, 15 bp, Homo sapiens
cactgcacctatcta

SEQ ID NO: 1833931 - DNA, 15 bp, Homo sapiens
actgcacctatctac

SEQ ID NO: 1833932 - DNA, 15 bp, Homo sapiens
ctgcacctatctacc

SEQ ID NO: 1833933 - DNA, 15 bp, Homo sapiens
tgcacctatctacct

SEQ ID NO: 1833934 - DNA, 15 bp, Homo sapiens
gcacctatctacctg

SEQ ID NO: 1833935 - DNA, 15 bp, Homo sapiens
cacctatctacctgt

SEQ ID NO: 1833936 - DNA, 15 bp, Homo sapiens
acctatctacctgtc

SEQ ID NO: 1833937 - DNA, 15 bp, Homo sapiens
cctatctacctgtca

SEQ ID NO: 1833938 - DNA, 15 bp, Homo sapiens
ctatctacctgtcaa

SEQ ID NO: 1833939 - DNA, 15 bp, Homo sapiens
tatctacctgtcaaa

SEQ ID NO: 1833940 - DNA, 15 bp, Homo sapiens
atctacctgtcaaag

SEQ ID NO: 1833941 - DNA, 15 bp, Homo sapiens
tctacctgtcaaagc

SEQ ID NO: 1833942 - DNA, 15 bp, Homo sapiens
ctacctgtcaaagca

SEQ ID NO: 1833943 - DNA, 15 bp, Homo sapiens
tacctgtcaaagcat

SEQ ID NO: 1833944 - DNA, 15 bp, Homo sapiens
acctgtcaaagcatc

SEQ ID NO: 1833945 - DNA, 15 bp, Homo sapiens
cctgtcaaagcatct

SEQ ID NO: 1833946 - DNA, 15 bp, Homo sapiens
ctgtcaaagcatcta

SEQ ID NO: 1833947 - DNA, 15 bp, Homo sapiens
tgtcaaagcatctac

SEQ ID NO: 1833948 - DNA, 15 bp, Homo sapiens
gtcaaagcatctacc

SEQ ID NO: 1833949 - DNA, 15 bp, Homo sapiens
tcaaagcatctacca

SEQ ID NO: 1833950 - DNA, 15 bp, Homo sapiens
caaagcatctaccac

SEQ ID NO: 1833951 - DNA, 15 bp, Homo sapiens
aaagcatctaccaca

SEQ ID NO: 1833952 - DNA, 15 bp, Homo sapiens
aagcatctaccacat

SEQ ID NO: 1833953 - DNA, 15 bp, Homo sapiens
agcatctaccacatt

SEQ ID NO: 1833954 - DNA, 15 bp, Homo sapiens
gcatctaccacattg

SEQ ID NO: 1833955 - DNA, 15 bp, Homo sapiens
catctaccacattgt

SEQ ID NO: 1833956 - DNA, 15 bp, Homo sapiens
atctaccacattgta

SEQ ID NO: 1833957 - DNA, 15 bp, Homo sapiens
tctaccacattgtac

SEQ ID NO: 1833958 - DNA, 15 bp, Homo sapiens
ctaccacattgtacc

SEQ ID NO: 1833959 - DNA, 15 bp, Homo sapiens
taccacattgtacca

SEQ ID NO: 1833960 - DNA, 15 bp, Homo sapiens
accacattgtaccac

SEQ ID NO: 1833961 - DNA, 15 bp, Homo sapiens
ccacattgtaccaca

SEQ ID NO: 1833962 - DNA, 15 bp, Homo sapiens
cacattgtaccacac

SEQ ID NO: 1833963 - DNA, 15 bp, Homo sapiens
acattgtaccacacc

SEQ ID NO: 1833964 - DNA, 15 bp, Homo sapiens
cattgtaccacacct

SEQ ID NO: 1833965 - DNA, 15 bp, Homo sapiens
attgtaccacacctt

SEQ ID NO: 1833966 - DNA, 15 bp, Homo sapiens
ttgtaccacacctta

SEQ ID NO: 1833967 - DNA, 15 bp, Homo sapiens
tgtaccacaccttaa

SEQ ID NO: 1833968 - DNA, 15 bp, Homo sapiens
gtaccacaccttaaa

SEQ ID NO: 1833969 - DNA, 15 bp, Homo sapiens
taccacaccttaaaa

SEQ ID NO: 1833970 - DNA, 15 bp, Homo sapiens
accacaccttaaaat

SEQ ID NO: 1833971 - DNA, 15 bp, Homo sapiens
ccacaccttaaaatc

SEQ ID NO: 1833972 - DNA, 15 bp, Homo sapiens
cacaccttaaaatca

SEQ ID NO: 1833973 - DNA, 15 bp, Homo sapiens
acaccttaaaatcaa

SEQ ID NO: 1833974 - DNA, 15 bp, Homo sapiens
caccttaaaatcaat

SEQ ID NO: 1833975 - DNA, 15 bp, Homo sapiens
accttaaaatcaatg

SEQ ID NO: 1833976 - DNA, 15 bp, Homo sapiens
ccttaaaatcaatgg

SEQ ID NO: 1833977 - DNA, 15 bp, Homo sapiens
cttaaaatcaatggt

SEQ ID NO: 1833978 - DNA, 15 bp, Homo sapiens
ttaaaatcaatggtt

SEQ ID NO: 1833979 - DNA, 15 bp, Homo sapiens
taaaatcaatggttt

SEQ ID NO: 1833980 - DNA, 15 bp, Homo sapiens
aaaatcaatggtttt

SEQ ID NO: 1833981 - DNA, 15 bp, Homo sapiens
aaatcaatggttttt

SEQ ID NO: 1833982 - DNA, 15 bp, Homo sapiens
aatcaatggtttttt

SEQ ID NO: 1833983 - DNA, 15 bp, Homo sapiens
atcaatggttttttt

SEQ ID NO: 1833984 - DNA, 15 bp, Homo sapiens
tcaatggtttttttc

SEQ ID NO: 1833985 - DNA, 15 bp, Homo sapiens
caatggtttttttct

SEQ ID NO: 1833986 - DNA, 15 bp, Homo sapiens
aatggtttttttctt

SEQ ID NO: 1833987 - DNA, 15 bp, Homo sapiens
atggtttttttcttc

SEQ ID NO: 1833988 - DNA, 15 bp, Homo sapiens
tggtttttttcttct

SEQ ID NO: 1833989 - DNA, 15 bp, Homo sapiens
ggtttttttcttctc

SEQ ID NO: 1833990 - DNA, 15 bp, Homo sapiens
gtttttttcttctca

SEQ ID NO: 1833991 - DNA, 15 bp, Homo sapiens
tttttttcttctcag

SEQ ID NO: 1833992 - DNA, 15 bp, Homo sapiens
ttttttcttctcagc

SEQ ID NO: 1833993 - DNA, 15 bp, Homo sapiens
tttttcttctcagcc

SEQ ID NO: 1833994 - DNA, 15 bp, Homo sapiens
ttttcttctcagcca

SEQ ID NO: 1833995 - DNA, 15 bp, Homo sapiens
tttcttctcagccag

SEQ ID NO: 1833996 - DNA, 15 bp, Homo sapiens
ttcttctcagccagc

SEQ ID NO: 1833997 - DNA, 15 bp, Homo sapiens
tcttctcagccagca

SEQ ID NO: 1833998 - DNA, 15 bp, Homo sapiens
cttctcagccagcat

SEQ ID NO: 1833999 - DNA, 15 bp, Homo sapiens
ttctcagccagcatg

SEQ ID NO: 1834000 - DNA, 15 bp, Homo sapiens
tctcagccagcatgt

SEQ ID NO: 1834001 - DNA, 15 bp, Homo sapiens
ctcagccagcatgtg

SEQ ID NO: 1834002 - DNA, 15 bp, Homo sapiens
tcagccagcatgtgg

SEQ ID NO: 1834003 - DNA, 15 bp, Homo sapiens
cagccagcatgtgga

SEQ ID NO: 1834004 - DNA, 15 bp, Homo sapiens
agccagcatgtggat

SEQ ID NO: 1834005 - DNA, 15 bp, Homo sapiens
gccagcatgtggatg

SEQ ID NO: 1834006 - DNA, 15 bp, Homo sapiens
ccagcatgtggatgc

SEQ ID NO: 1834007 - DNA, 15 bp, Homo sapiens
cagcatgtggatgcc

SEQ ID NO: 1834008 - DNA, 15 bp, Homo sapiens
agcatgtggatgcct

SEQ ID NO: 1834009 - DNA, 15 bp, Homo sapiens
gcatgtggatgcctc

SEQ ID NO: 1834010 - DNA, 15 bp, Homo sapiens
catgtggatgcctca

SEQ ID NO: 1834011 - DNA, 15 bp, Homo sapiens
atgtggatgcctcaa

SEQ ID NO: 1834012 - DNA, 15 bp, Homo sapiens
tgtggatgcctcaat

SEQ ID NO: 1834013 - DNA, 15 bp, Homo sapiens
gtggatgcctcaata

SEQ ID NO: 1834014 - DNA, 15 bp, Homo sapiens
tggatgcctcaataa

SEQ ID NO: 1834015 - DNA, 15 bp, Homo sapiens
ggatgcctcaataaa

SEQ ID NO: 1834016 - DNA, 15 bp, Homo sapiens
gatgcctcaataaag

SEQ ID NO: 1834017 - DNA, 15 bp, Homo sapiens
atgcctcaataaagc

SEQ ID NO: 1834018 - DNA, 15 bp, Homo sapiens
tgcctcaataaagca

SEQ ID NO: 1834019 - DNA, 15 bp, Homo sapiens
gcctcaataaagcag

SEQ ID NO: 1834020 - DNA, 15 bp, Homo sapiens
cctcaataaagcaga

SEQ ID NO: 1834021 - DNA, 15 bp, Homo sapiens
ctcaataaagcagac

SEQ ID NO: 1834022 - DNA, 15 bp, Homo sapiens
tcaataaagcagact

SEQ ID NO: 1834023 - DNA, 15 bp, Homo sapiens
caataaagcagactc

SEQ ID NO: 1834024 - DNA, 15 bp, Homo sapiens
aataaagcagactcc

SEQ ID NO: 1834025 - DNA, 15 bp, Homo sapiens
ataaagcagactcct

SEQ ID NO: 1834026 - DNA, 15 bp, Homo sapiens
taaagcagactcctt

SEQ ID NO: 1834027 - DNA, 15 bp, Homo sapiens
aaagcagactccttt

SEQ ID NO: 1834028 - DNA, 15 bp, Homo sapiens
aagcagactcctttc

SEQ ID NO: 1834029 - DNA, 15 bp, Homo sapiens
agcagactcctttca

SEQ ID NO: 1834030 - DNA, 15 bp, Homo sapiens
gcagactcctttcat

SEQ ID NO: 1834031 - DNA, 15 bp, Homo sapiens
cagactcctttcatg

SEQ ID NO: 1834032 - DNA, 15 bp, Homo sapiens
agactcctttcatga

SEQ ID NO: 1834033 - DNA, 15 bp, Homo sapiens
gactcctttcatgac

SEQ ID NO: 1834034 - DNA, 15 bp, Homo sapiens
actcctttcatgacc

SEQ ID NO: 1834035 - DNA, 15 bp, Homo sapiens
ctcctttcatgacct

SEQ ID NO: 1834036 - DNA, 15 bp, Homo sapiens
tcctttcatgaccta

SEQ ID NO: 1834037 - DNA, 15 bp, Homo sapiens
cctttcatgacctaa

SEQ ID NO: 1834038 - DNA, 15 bp, Homo sapiens
ctttcatgacctaaa

SEQ ID NO: 1834039 - DNA, 15 bp, Homo sapiens
tttcatgacctaaaa

SEQ ID NO: 1834040 - DNA, 15 bp, Homo sapiens
ttcatgacctaaaac

SEQ ID NO: 1834041 - DNA, 15 bp, Homo sapiens
tcatgacctaaaact

SEQ ID NO: 1834042 - DNA, 15 bp, Homo sapiens
catgacctaaaacta

SEQ ID NO: 1834043 - DNA, 15 bp, Homo sapiens
atgacctaaaactaa

SEQ ID NO: 1834044 - DNA, 15 bp, Homo sapiens
tgacctaaaactaat

SEQ ID NO: 1834045 - DNA, 15 bp, Homo sapiens
gacctaaaactaatt

SEQ ID NO: 1834046 - DNA, 15 bp, Homo sapiens
acctaaaactaattt

SEQ ID NO: 1834047 - DNA, 15 bp, Homo sapiens
cctaaaactaatttc

SEQ ID NO: 1834048 - DNA, 15 bp, Homo sapiens
ctaaaactaatttca

SEQ ID NO: 1834049 - DNA, 15 bp, Homo sapiens
taaaactaatttcag

SEQ ID NO: 1834050 - DNA, 15 bp, Homo sapiens
aaaactaatttcagg

SEQ ID NO: 1834051 - DNA, 15 bp, Homo sapiens
aaactaatttcaggg

SEQ ID NO: 1834052 - DNA, 15 bp, Homo sapiens
aactaatttcagggg

SEQ ID NO: 1834053 - DNA, 15 bp, Homo sapiens
actaatttcaggggg

SEQ ID NO: 1834054 - DNA, 15 bp, Homo sapiens
ctaatttcagggggg

SEQ ID NO: 1834055 - DNA, 15 bp, Homo sapiens
taatttcagggggga

SEQ ID NO: 1834056 - DNA, 15 bp, Homo sapiens
aatttcaggggggaa

SEQ ID NO: 1834057 - DNA, 15 bp, Homo sapiens
atttcaggggggaaa

SEQ ID NO: 1834058 - DNA, 15 bp, Homo sapiens
tttcaggggggaaaa

SEQ ID NO: 1834059 - DNA, 15 bp, Homo sapiens
ttcaggggggaaaaa

SEQ ID NO: 1834060 - DNA, 15 bp, Homo sapiens
tcaggggggaaaaaa

SEQ ID NO: 1834061 - DNA, 15 bp, Homo sapiens
caggggggaaaaaaa

SEQ ID NO: 1834062 - DNA, 15 bp, Homo sapiens
aggggggaaaaaaag

SEQ ID NO: 1834063 - DNA, 15 bp, Homo sapiens
gggggaaaaaaagac

SEQ ID NO: 1834064 - DNA, 15 bp, Homo sapiens
ggggaaaaaaagacg

SEQ ID NO: 1834065 - DNA, 15 bp, Homo sapiens
gggaaaaaaagacga

SEQ ID NO: 1834066 - DNA, 15 bp, Homo sapiens
ggaaaaaaagacgag

SEQ ID NO: 1834067 - DNA, 15 bp, Homo sapiens
gaaaaaaagacgagc

SEQ ID NO: 1834068 - DNA, 15 bp, Homo sapiens
aaaaaaagacgagct

SEQ ID NO: 1834069 - DNA, 15 bp, Homo sapiens
aaaaaagacgagctg

SEQ ID NO: 1834070 - DNA, 15 bp, Homo sapiens
aaaaagacgagctgg

SEQ ID NO: 1834071 - DNA, 15 bp, Homo sapiens
aaaagacgagctggg

SEQ ID NO: 1834072 - DNA, 15 bp, Homo sapiens
aaagacgagctgggc

SEQ ID NO: 1834073 - DNA, 15 bp, Homo sapiens
aagacgagctgggcg

SEQ ID NO: 1834074 - DNA, 15 bp, Homo sapiens
agacgagctgggcgc

SEQ ID NO: 1834075 - DNA, 15 bp, Homo sapiens
gacgagctgggcgca

SEQ ID NO: 1834076 - DNA, 15 bp, Homo sapiens
acgagctgggcgcag

SEQ ID NO: 1834077 - DNA, 15 bp, Homo sapiens
cgagctgggcgcagt

SEQ ID NO: 1834078 - DNA, 15 bp, Homo sapiens
gagctgggcgcagtg

SEQ ID NO: 1834079 - DNA, 15 bp, Homo sapiens
agctgggcgcagtgg

SEQ ID NO: 1834080 - DNA, 15 bp, Homo sapiens
gctgggcgcagtggc

SEQ ID NO: 1834081 - DNA, 15 bp, Homo sapiens
ctgggcgcagtggct

SEQ ID NO: 1834082 - DNA, 15 bp, Homo sapiens
tgggcgcagtggctc

SEQ ID NO: 1834083 - DNA, 15 bp, Homo sapiens
agtggctcacgccta

SEQ ID NO: 1834084 - DNA, 15 bp, Homo sapiens
gtggctcacgcctat

SEQ ID NO: 1834085 - DNA, 15 bp, Homo sapiens
aggatcacttgaggt

SEQ ID NO: 1834086 - DNA, 15 bp, Homo sapiens
tcacttgaggtcaga

SEQ ID NO: 1834087 - DNA, 15 bp, Homo sapiens
cacttgaggtcagaa

SEQ ID NO: 1834088 - DNA, 15 bp, Homo sapiens
acttgaggtcagaag

SEQ ID NO: 1834089 - DNA, 15 bp, Homo sapiens
cttgaggtcagaaga

SEQ ID NO: 1834090 - DNA, 15 bp, Homo sapiens
ttgaggtcagaagac

SEQ ID NO: 1834091 - DNA, 15 bp, Homo sapiens
tgaggtcagaagacc

SEQ ID NO: 1834092 - DNA, 15 bp, Homo sapiens
gaggtcagaagacca

SEQ ID NO: 1834093 - DNA, 15 bp, Homo sapiens
aggtcagaagaccag

SEQ ID NO: 1834094 - DNA, 15 bp, Homo sapiens
ggtcagaagaccagc

SEQ ID NO: 1834095 - DNA, 15 bp, Homo sapiens
gtcagaagaccagcc

SEQ ID NO: 1834096 - DNA, 15 bp, Homo sapiens
tcagaagaccagcct

SEQ ID NO: 1834097 - DNA, 15 bp, Homo sapiens
cagaagaccagcctg

SEQ ID NO: 1834098 - DNA, 15 bp, Homo sapiens
agaagaccagcctgg

SEQ ID NO: 1834099 - DNA, 15 bp, Homo sapiens
gaagaccagcctggc

SEQ ID NO: 1834100 - DNA, 15 bp, Homo sapiens
tggcaaaaccccgtc

SEQ ID NO: 1834101 - DNA, 15 bp, Homo sapiens
ggcaaaaccccgtct

SEQ ID NO: 1834102 - DNA, 15 bp, Homo sapiens
gcaaaaccccgtctc

SEQ ID NO: 1834103 - DNA, 15 bp, Homo sapiens
caaaaccccgtctct

SEQ ID NO: 1834104 - DNA, 15 bp, Homo sapiens
ctgggcgtggtggcg

SEQ ID NO: 1834105 - DNA, 15 bp, Homo sapiens
tgggcgtggtggcgc

SEQ ID NO: 1834106 - DNA, 15 bp, Homo sapiens
gggcgtggtggcgca

SEQ ID NO: 1834107 - DNA, 15 bp, Homo sapiens
gcgtggtggcgcacc

SEQ ID NO: 1834108 - DNA, 15 bp, Homo sapiens
cgtggtggcgcacct

SEQ ID NO: 1834109 - DNA, 15 bp, Homo sapiens
gtggtggcgcaccta

SEQ ID NO: 1834110 - DNA, 15 bp, Homo sapiens
tggtggcgcacctat

SEQ ID NO: 1834111 - DNA, 15 bp, Homo sapiens
ggtggcgcacctata

SEQ ID NO: 1834112 - DNA, 15 bp, Homo sapiens
gtggcgcacctataa

SEQ ID NO: 1834113 - DNA, 15 bp, Homo sapiens
tggcgcacctataat

SEQ ID NO: 1834114 - DNA, 15 bp, Homo sapiens
ggcgcacctataatc

SEQ ID NO: 1834115 - DNA, 15 bp, Homo sapiens
gcgcacctataatcc

SEQ ID NO: 1834116 - DNA, 15 bp, Homo sapiens
cgcacctataatccc

SEQ ID NO: 1834117 - DNA, 15 bp, Homo sapiens
gcacctataatccca

SEQ ID NO: 1834118 - DNA, 15 bp, Homo sapiens
ctcaggaagctgaga

SEQ ID NO: 1834119 - DNA, 15 bp, Homo sapiens
tcaggaagctgagac

SEQ ID NO: 1834120 - DNA, 15 bp, Homo sapiens
caggaagctgagaca

SEQ ID NO: 1834121 - DNA, 15 bp, Homo sapiens
aggaagctgagacat

SEQ ID NO: 1834122 - DNA, 15 bp, Homo sapiens
ggaagctgagacatg

SEQ ID NO: 1834123 - DNA, 15 bp, Homo sapiens
gaagctgagacatga

SEQ ID NO: 1834124 - DNA, 15 bp, Homo sapiens
aagctgagacatgat

SEQ ID NO: 1834125 - DNA, 15 bp, Homo sapiens
agctgagacatgata

SEQ ID NO: 1834126 - DNA, 15 bp, Homo sapiens
gctgagacatgataa

SEQ ID NO: 1834127 - DNA, 15 bp, Homo sapiens
ctgagacatgataat

SEQ ID NO: 1834128 - DNA, 15 bp, Homo sapiens
tgagacatgataatc

SEQ ID NO: 1834129 - DNA, 15 bp, Homo sapiens
gagacatgataatcg

SEQ ID NO: 1834130 - DNA, 15 bp, Homo sapiens
agacatgataatcgc

SEQ ID NO: 1834131 - DNA, 15 bp, Homo sapiens
gacatgataatcgct

SEQ ID NO: 1834132 - DNA, 15 bp, Homo sapiens
acatgataatcgctt

SEQ ID NO: 1834133 - DNA, 15 bp, Homo sapiens
catgataatcgcttg

SEQ ID NO: 1834134 - DNA, 15 bp, Homo sapiens
atgataatcgcttga

SEQ ID NO: 1834135 - DNA, 15 bp, Homo sapiens
tgataatcgcttgag

SEQ ID NO: 1834136 - DNA, 15 bp, Homo sapiens
gataatcgcttgagc

SEQ ID NO: 1834137 - DNA, 15 bp, Homo sapiens
ataatcgcttgagcc

SEQ ID NO: 1834138 - DNA, 15 bp, Homo sapiens
taatcgcttgagcct

SEQ ID NO: 1834139 - DNA, 15 bp, Homo sapiens
ttgagcctgggaggt

SEQ ID NO: 1834140 - DNA, 15 bp, Homo sapiens
tgagcctgggaggta

SEQ ID NO: 1834141 - DNA, 15 bp, Homo sapiens
gagcctgggaggtag

SEQ ID NO: 1834142 - DNA, 15 bp, Homo sapiens
agcctgggaggtaga

SEQ ID NO: 1834143 - DNA, 15 bp, Homo sapiens
gcctgggaggtagag

SEQ ID NO: 1834144 - DNA, 15 bp, Homo sapiens
cctgggaggtagagc

SEQ ID NO: 1834145 - DNA, 15 bp, Homo sapiens
ctgggaggtagagcc

SEQ ID NO: 1834146 - DNA, 15 bp, Homo sapiens
tgggaggtagagcct

SEQ ID NO: 1834147 - DNA, 15 bp, Homo sapiens
gggaggtagagcctg

SEQ ID NO: 1834148 - DNA, 15 bp, Homo sapiens
ggaggtagagcctgg

SEQ ID NO: 1834149 - DNA, 15 bp, Homo sapiens
gaggtagagcctggg

SEQ ID NO: 1834150 - DNA, 15 bp, Homo sapiens
aggtagagcctgggg

SEQ ID NO: 1834151 - DNA, 15 bp, Homo sapiens
ggtagagcctggggc

SEQ ID NO: 1834152 - DNA, 15 bp, Homo sapiens
gtagagcctggggct

SEQ ID NO: 1834153 - DNA, 15 bp, Homo sapiens
tagagcctggggctg

SEQ ID NO: 1834154 - DNA, 15 bp, Homo sapiens
agagcctggggctgc

SEQ ID NO: 1834155 - DNA, 15 bp, Homo sapiens
gagcctggggctgca

SEQ ID NO: 1834156 - DNA, 15 bp, Homo sapiens
agcctggggctgcac

SEQ ID NO: 1834157 - DNA, 15 bp, Homo sapiens
gcctggggctgcact

SEQ ID NO: 1834158 - DNA, 15 bp, Homo sapiens
cctggggctgcactc

SEQ ID NO: 1834159 - DNA, 15 bp, Homo sapiens
ctggggctgcactcc

SEQ ID NO: 1834160 - DNA, 15 bp, Homo sapiens
tggggctgcactcca

SEQ ID NO: 1834161 - DNA, 15 bp, Homo sapiens
ggggctgcactccat

SEQ ID NO: 1834162 - DNA, 15 bp, Homo sapiens
gggctgcactccatc

SEQ ID NO: 1834163 - DNA, 15 bp, Homo sapiens
ggctgcactccatcc

SEQ ID NO: 1834164 - DNA, 15 bp, Homo sapiens
gctgcactccatcct

SEQ ID NO: 1834165 - DNA, 15 bp, Homo sapiens
ctgcactccatcctg

SEQ ID NO: 1834166 - DNA, 15 bp, Homo sapiens
tgcactccatcctgg

SEQ ID NO: 1834167 - DNA, 15 bp, Homo sapiens
gcactccatcctggg

SEQ ID NO: 1834168 - DNA, 15 bp, Homo sapiens
cactccatcctgggc

SEQ ID NO: 1834169 - DNA, 15 bp, Homo sapiens
actccatcctgggca

SEQ ID NO: 1834170 - DNA, 15 bp, Homo sapiens
ctccatcctgggcaa

SEQ ID NO: 1834171 - DNA, 15 bp, Homo sapiens
tccatcctgggcaac

SEQ ID NO: 1834172 - DNA, 15 bp, Homo sapiens
ccatcctgggcaaca

SEQ ID NO: 1834173 - DNA, 15 bp, Homo sapiens
catcctgggcaacag

SEQ ID NO: 1834174 - DNA, 15 bp, Homo sapiens
atcctgggcaacaga

SEQ ID NO: 1834175 - DNA, 15 bp, Homo sapiens
tcctgggcaacagag

SEQ ID NO: 1834176 - DNA, 15 bp, Homo sapiens
cctgggcaacagagg

SEQ ID NO: 1834177 - DNA, 15 bp, Homo sapiens
ctgggcaacagaggg

SEQ ID NO: 1834178 - DNA, 15 bp, Homo sapiens
tgggcaacagaggga

SEQ ID NO: 1834179 - DNA, 15 bp, Homo sapiens
gggcaacagagggag

SEQ ID NO: 1834180 - DNA, 15 bp, Homo sapiens
ggcaacagagggaga

SEQ ID NO: 1834181 - DNA, 15 bp, Homo sapiens
gcaacagagggagat

SEQ ID NO: 1834182 - DNA, 15 bp, Homo sapiens
caacagagggagatt

SEQ ID NO: 1834183 - DNA, 15 bp, Homo sapiens
aacagagggagattc

SEQ ID NO: 1834184 - DNA, 15 bp, Homo sapiens
acagagggagattct

SEQ ID NO: 1834185 - DNA, 15 bp, Homo sapiens
cagagggagattctg

SEQ ID NO: 1834186 - DNA, 15 bp, Homo sapiens
agagggagattctgt

SEQ ID NO: 1834187 - DNA, 15 bp, Homo sapiens
gagggagattctgtc

SEQ ID NO: 1834188 - DNA, 15 bp, Homo sapiens
agggagattctgtct

SEQ ID NO: 1834189 - DNA, 15 bp, Homo sapiens
gggagattctgtctc

SEQ ID NO: 1834190 - DNA, 15 bp, Homo sapiens
ggagattctgtctca

SEQ ID NO: 1834191 - DNA, 15 bp, Homo sapiens
gagattctgtctcaa

SEQ ID NO: 1834192 - DNA, 15 bp, Homo sapiens
agattctgtctcaaa

SEQ ID NO: 1834193 - DNA, 15 bp, Homo sapiens
gattctgtctcaaaa

SEQ ID NO: 1834194 - DNA, 15 bp, Homo sapiens
attctgtctcaaaaa

SEQ ID NO: 1834195 - DNA, 15 bp, Homo sapiens
ttctgtctcaaaaaa

SEQ ID NO: 1834196 - DNA, 15 bp, Homo sapiens
tctgtctcaaaaaat

SEQ ID NO: 1834197 - DNA, 15 bp, Homo sapiens
ctgtctcaaaaaata

SEQ ID NO: 1834198 - DNA, 15 bp, Homo sapiens
tgtctcaaaaaataa

SEQ ID NO: 1834199 - DNA, 15 bp, Homo sapiens
gtctcaaaaaataat

SEQ ID NO: 1834200 - DNA, 15 bp, Homo sapiens
tctcaaaaaataata

SEQ ID NO: 1834201 - DNA, 15 bp, Homo sapiens
ctcaaaaaataataa

SEQ ID NO: 1834202 - DNA, 15 bp, Homo sapiens
tcaaaaaataataat

SEQ ID NO: 1834203 - DNA, 15 bp, Homo sapiens
caaaaaataataata

SEQ ID NO: 1834204 - DNA, 15 bp, Homo sapiens
aaaaataataataat

SEQ ID NO: 1834205 - DNA, 15 bp, Homo sapiens
aaaataataataata

SEQ ID NO: 1834206 - DNA, 15 bp, Homo sapiens
taataataataatat

SEQ ID NO: 1834207 - DNA, 15 bp, Homo sapiens
aataataataatata

SEQ ID NO: 1834208 - DNA, 15 bp, Homo sapiens
ataataataatataa

SEQ ID NO: 1834209 - DNA, 15 bp, Homo sapiens
taataataatataaa

SEQ ID NO: 1834210 - DNA, 15 bp, Homo sapiens
aataataatataaat

SEQ ID NO: 1834211 - DNA, 15 bp, Homo sapiens
ataataatataaata

SEQ ID NO: 1834212 - DNA, 15 bp, Homo sapiens
taataatataaataa

SEQ ID NO: 1834213 - DNA, 15 bp, Homo sapiens
aataatataaataaa

SEQ ID NO: 1834214 - DNA, 15 bp, Homo sapiens
ataatataaataaat

SEQ ID NO: 1834215 - DNA, 15 bp, Homo sapiens
taatataaataaata

SEQ ID NO: 1834216 - DNA, 15 bp, Homo sapiens
aataaataaataatt

SEQ ID NO: 1834217 - DNA, 15 bp, Homo sapiens
ataaataaataattt

SEQ ID NO: 1834218 - DNA, 15 bp, Homo sapiens
taaataaataatttt

SEQ ID NO: 1834219 - DNA, 15 bp, Homo sapiens
aaataaataattttt

SEQ ID NO: 1834220 - DNA, 15 bp, Homo sapiens
aataaataatttttt

SEQ ID NO: 1834221 - DNA, 15 bp, Homo sapiens
ataaataattttttt

SEQ ID NO: 1834222 - DNA, 15 bp, Homo sapiens
taaataattttttta

SEQ ID NO: 1834223 - DNA, 15 bp, Homo sapiens
aaataatttttttaa

SEQ ID NO: 1834224 - DNA, 15 bp, Homo sapiens
aataatttttttaaa

SEQ ID NO: 1834225 - DNA, 15 bp, Homo sapiens
ataatttttttaaaa

SEQ ID NO: 1834226 - DNA, 15 bp, Homo sapiens
taatttttttaaaaa

SEQ ID NO: 1834227 - DNA, 15 bp, Homo sapiens
tttttaaaaaaagac

SEQ ID NO: 1834228 - DNA, 15 bp, Homo sapiens
ttttaaaaaaagact

SEQ ID NO: 1834229 - DNA, 15 bp, Homo sapiens
tttaaaaaaagactc

SEQ ID NO: 1834230 - DNA, 15 bp, Homo sapiens
ttaaaaaaagactct

SEQ ID NO: 1834231 - DNA, 15 bp, Homo sapiens
taaaaaaagactctt

SEQ ID NO: 1834232 - DNA, 15 bp, Homo sapiens
aaaaaaagactcttt

SEQ ID NO: 1834233 - DNA, 15 bp, Homo sapiens
aaaaaagactctttc

SEQ ID NO: 1834234 - DNA, 15 bp, Homo sapiens
aaaaagactctttcc

SEQ ID NO: 1834235 - DNA, 15 bp, Homo sapiens
aaaagactctttcct

SEQ ID NO: 1834236 - DNA, 15 bp, Homo sapiens
aaagactctttccta

SEQ ID NO: 1834237 - DNA, 15 bp, Homo sapiens
aagactctttcctat

SEQ ID NO: 1834238 - DNA, 15 bp, Homo sapiens
agactctttcctata

SEQ ID NO: 1834239 - DNA, 15 bp, Homo sapiens
gactctttcctatat

SEQ ID NO: 1834240 - DNA, 15 bp, Homo sapiens
actctttcctatatt

SEQ ID NO: 1834241 - DNA, 15 bp, Homo sapiens
ctctttcctatatta

SEQ ID NO: 1834242 - DNA, 15 bp, Homo sapiens
tctttcctatattaa

SEQ ID NO: 1834243 - DNA, 15 bp, Homo sapiens
ctttcctatattaat

SEQ ID NO: 1834244 - DNA, 15 bp, Homo sapiens
tttcctatattaatc

SEQ ID NO: 1834245 - DNA, 15 bp, Homo sapiens
ttcctatattaatct

SEQ ID NO: 1834246 - DNA, 15 bp, Homo sapiens
tcctatattaatctt

SEQ ID NO: 1834247 - DNA, 15 bp, Homo sapiens
cctatattaatcttt

SEQ ID NO: 1834248 - DNA, 15 bp, Homo sapiens
ctatattaatctttg

SEQ ID NO: 1834249 - DNA, 15 bp, Homo sapiens
tatattaatctttgc

SEQ ID NO: 1834250 - DNA, 15 bp, Homo sapiens
atattaatctttgca

SEQ ID NO: 1834251 - DNA, 15 bp, Homo sapiens
tattaatctttgcat

SEQ ID NO: 1834252 - DNA, 15 bp, Homo sapiens
attaatctttgcatc

SEQ ID NO: 1834253 - DNA, 15 bp, Homo sapiens
ttaatctttgcatcc

SEQ ID NO: 1834254 - DNA, 15 bp, Homo sapiens
taatctttgcatcct

SEQ ID NO: 1834255 - DNA, 15 bp, Homo sapiens
aatctttgcatcctg

SEQ ID NO: 1834256 - DNA, 15 bp, Homo sapiens
atctttgcatcctgt

SEQ ID NO: 1834257 - DNA, 15 bp, Homo sapiens
tctttgcatcctgtg

SEQ ID NO: 1834258 - DNA, 15 bp, Homo sapiens
ctttgcatcctgtgc

SEQ ID NO: 1834259 - DNA, 15 bp, Homo sapiens
tttgcatcctgtgcc

SEQ ID NO: 1834260 - DNA, 15 bp, Homo sapiens
ttgcatcctgtgccc

SEQ ID NO: 1834261 - DNA, 15 bp, Homo sapiens
tgcatcctgtgccca

SEQ ID NO: 1834262 - DNA, 15 bp, Homo sapiens
gcatcctgtgcccat

SEQ ID NO: 1834263 - DNA, 15 bp, Homo sapiens
catcctgtgcccatg

SEQ ID NO: 1834264 - DNA, 15 bp, Homo sapiens
atcctgtgcccatgg

SEQ ID NO: 1834265 - DNA, 15 bp, Homo sapiens
tcctgtgcccatggc

SEQ ID NO: 1834266 - DNA, 15 bp, Homo sapiens
cctgtgcccatggcc

SEQ ID NO: 1834267 - DNA, 15 bp, Homo sapiens
ctgtgcccatggccc

SEQ ID NO: 1834268 - DNA, 15 bp, Homo sapiens
tgtgcccatggcccc

SEQ ID NO: 1834269 - DNA, 15 bp, Homo sapiens
gtgcccatggcccca

SEQ ID NO: 1834270 - DNA, 15 bp, Homo sapiens
tgcccatggccccaa

SEQ ID NO: 1834271 - DNA, 15 bp, Homo sapiens
gcccatggccccaaa

SEQ ID NO: 1834272 - DNA, 15 bp, Homo sapiens
cccatggccccaaac

SEQ ID NO: 1834273 - DNA, 15 bp, Homo sapiens
ccatggccccaaacc

SEQ ID NO: 1834274 - DNA, 15 bp, Homo sapiens
catggccccaaacct

SEQ ID NO: 1834275 - DNA, 15 bp, Homo sapiens
atggccccaaacctg

SEQ ID NO: 1834276 - DNA, 15 bp, Homo sapiens
tggccccaaacctga

SEQ ID NO: 1834277 - DNA, 15 bp, Homo sapiens
ggccccaaacctgac

SEQ ID NO: 1834278 - DNA, 15 bp, Homo sapiens
gccccaaacctgacc

SEQ ID NO: 1834279 - DNA, 15 bp, Homo sapiens
ccccaaacctgacca

SEQ ID NO: 1834280 - DNA, 15 bp, Homo sapiens
cccaaacctgaccaa

SEQ ID NO: 1834281 - DNA, 15 bp, Homo sapiens
ccaaacctgaccaat

SEQ ID NO: 1834282 - DNA, 15 bp, Homo sapiens
caaacctgaccaatg

SEQ ID NO: 1834283 - DNA, 15 bp, Homo sapiens
aaacctgaccaatga

SEQ ID NO: 1834284 - DNA, 15 bp, Homo sapiens
aacctgaccaatgaa

SEQ ID NO: 1834285 - DNA, 15 bp, Homo sapiens
acctgaccaatgaag

SEQ ID NO: 1834286 - DNA, 15 bp, Homo sapiens
cctgaccaatgaagg

SEQ ID NO: 1834287 - DNA, 15 bp, Homo sapiens
ctgaccaatgaaggc

SEQ ID NO: 1834288 - DNA, 15 bp, Homo sapiens
tgaccaatgaaggcc

SEQ ID NO: 1834289 - DNA, 15 bp, Homo sapiens
gaccaatgaaggccc

SEQ ID NO: 1834290 - DNA, 15 bp, Homo sapiens
accaatgaaggcccc

SEQ ID NO: 1834291 - DNA, 15 bp, Homo sapiens
ccaatgaaggcccca

SEQ ID NO: 1834292 - DNA, 15 bp, Homo sapiens
caatgaaggccccag

SEQ ID NO: 1834293 - DNA, 15 bp, Homo sapiens
aatgaaggccccagt

SEQ ID NO: 1834294 - DNA, 15 bp, Homo sapiens
atgaaggccccagta

SEQ ID NO: 1834295 - DNA, 15 bp, Homo sapiens
tgaaggccccagtaa

SEQ ID NO: 1834296 - DNA, 15 bp, Homo sapiens
gaaggccccagtaaa

SEQ ID NO: 1834297 - DNA, 15 bp, Homo sapiens
aaggccccagtaaat

SEQ ID NO: 1834298 - DNA, 15 bp, Homo sapiens
aggccccagtaaata

SEQ ID NO: 1834299 - DNA, 15 bp, Homo sapiens
ggccccagtaaatat

SEQ ID NO: 1834300 - DNA, 15 bp, Homo sapiens
gccccagtaaatatt

SEQ ID NO: 1834301 - DNA, 15 bp, Homo sapiens
ccccagtaaatattt

SEQ ID NO: 1834302 - DNA, 15 bp, Homo sapiens
cccagtaaatatttt

SEQ ID NO: 1834303 - DNA, 15 bp, Homo sapiens
ccagtaaatattttt

SEQ ID NO: 1834304 - DNA, 15 bp, Homo sapiens
cagtaaatatttttt

SEQ ID NO: 1834305 - DNA, 15 bp, Homo sapiens
agtaaatattttttg

SEQ ID NO: 1834306 - DNA, 15 bp, Homo sapiens
gtaaatattttttga

SEQ ID NO: 1834307 - DNA, 15 bp, Homo sapiens
taaatattttttgaa

SEQ ID NO: 1834308 - DNA, 15 bp, Homo sapiens
aaatattttttgaac

SEQ ID NO: 1834309 - DNA, 15 bp, Homo sapiens
aatattttttgaaca

SEQ ID NO: 1834310 - DNA, 15 bp, Homo sapiens
atattttttgaacaa

SEQ ID NO: 1834311 - DNA, 15 bp, Homo sapiens
tattttttgaacaaa

SEQ ID NO: 1834312 - DNA, 15 bp, Homo sapiens
attttttgaacaaaa

SEQ ID NO: 1834313 - DNA, 15 bp, Homo sapiens
ttttttgaacaaaag

SEQ ID NO: 1834314 - DNA, 15 bp, Homo sapiens
tttttgaacaaaaga

SEQ ID NO: 1834315 - DNA, 15 bp, Homo sapiens
ttttgaacaaaagaa

SEQ ID NO: 1834316 - DNA, 15 bp, Homo sapiens
tttgaacaaaagaaa

SEQ ID NO: 1834317 - DNA, 15 bp, Homo sapiens
ttgaacaaaagaaaa

SEQ ID NO: 1834318 - DNA, 15 bp, Homo sapiens
tgaacaaaagaaaat

SEQ ID NO: 1834319 - DNA, 15 bp, Homo sapiens
gaacaaaagaaaata

SEQ ID NO: 1834320 - DNA, 15 bp, Homo sapiens
aacaaaagaaaatat

SEQ ID NO: 1834321 - DNA, 15 bp, Homo sapiens
acaaaagaaaatata

SEQ ID NO: 1834322 - DNA, 15 bp, Homo sapiens
caaaagaaaatatag

SEQ ID NO: 1834323 - DNA, 15 bp, Homo sapiens
aaaagaaaatataga

SEQ ID NO: 1834324 - DNA, 15 bp, Homo sapiens
aaagaaaatatagat

SEQ ID NO: 1834325 - DNA, 15 bp, Homo sapiens
aagaaaatatagatg

SEQ ID NO: 1834326 - DNA, 15 bp, Homo sapiens
agaaaatatagatga

SEQ ID NO: 1834327 - DNA, 15 bp, Homo sapiens
gaaaatatagatgat

SEQ ID NO: 1834328 - DNA, 15 bp, Homo sapiens
aaaatatagatgatc

SEQ ID NO: 1834329 - DNA, 15 bp, Homo sapiens
aaatatagatgatca

SEQ ID NO: 1834330 - DNA, 15 bp, Homo sapiens
aatatagatgatcaa

SEQ ID NO: 1834331 - DNA, 15 bp, Homo sapiens
atatagatgatcaaa

SEQ ID NO: 1834332 - DNA, 15 bp, Homo sapiens
tatagatgatcaaag

SEQ ID NO: 1834333 - DNA, 15 bp, Homo sapiens
atagatgatcaaaga

SEQ ID NO: 1834334 - DNA, 15 bp, Homo sapiens
tagatgatcaaagat

SEQ ID NO: 1834335 - DNA, 15 bp, Homo sapiens
agatgatcaaagata

SEQ ID NO: 1834336 - DNA, 15 bp, Homo sapiens
gatgatcaaagataa

SEQ ID NO: 1834337 - DNA, 15 bp, Homo sapiens
atgatcaaagataag

SEQ ID NO: 1834338 - DNA, 15 bp, Homo sapiens
tgatcaaagataaga

SEQ ID NO: 1834339 - DNA, 15 bp, Homo sapiens
gatcaaagataagaa

SEQ ID NO: 1834340 - DNA, 15 bp, Homo sapiens
atcaaagataagaaa

SEQ ID NO: 1834341 - DNA, 15 bp, Homo sapiens
tcaaagataagaaag

SEQ ID NO: 1834342 - DNA, 15 bp, Homo sapiens
caaagataagaaaga

SEQ ID NO: 1834343 - DNA, 15 bp, Homo sapiens
aaagataagaaagat

SEQ ID NO: 1834344 - DNA, 15 bp, Homo sapiens
aagataagaaagata

SEQ ID NO: 1834345 - DNA, 15 bp, Homo sapiens
agataagaaagataa

SEQ ID NO: 1834346 - DNA, 15 bp, Homo sapiens
gataagaaagataag

SEQ ID NO: 1834347 - DNA, 15 bp, Homo sapiens
ataagaaagataaga

SEQ ID NO: 1834348 - DNA, 15 bp, Homo sapiens
taagaaagataagaa

SEQ ID NO: 1834349 - DNA, 15 bp, Homo sapiens
aagaaagataagaag

SEQ ID NO: 1834350 - DNA, 15 bp, Homo sapiens
agaaagataagaaga

SEQ ID NO: 1834351 - DNA, 15 bp, Homo sapiens
gaaagataagaagac

SEQ ID NO: 1834352 - DNA, 15 bp, Homo sapiens
aaagataagaagaca

SEQ ID NO: 1834353 - DNA, 15 bp, Homo sapiens
aagataagaagacac

SEQ ID NO: 1834354 - DNA, 15 bp, Homo sapiens
agataagaagacacc

SEQ ID NO: 1834355 - DNA, 15 bp, Homo sapiens
gataagaagacacct

SEQ ID NO: 1834356 - DNA, 15 bp, Homo sapiens
ataagaagacacctc

SEQ ID NO: 1834357 - DNA, 15 bp, Homo sapiens
taagaagacacctca

SEQ ID NO: 1834358 - DNA, 15 bp, Homo sapiens
aagaagacacctcaa

SEQ ID NO: 1834359 - DNA, 15 bp, Homo sapiens
agaagacacctcaat

SEQ ID NO: 1834360 - DNA, 15 bp, Homo sapiens
gaagacacctcaatt

SEQ ID NO: 1834361 - DNA, 15 bp, Homo sapiens
aagacacctcaattc

SEQ ID NO: 1834362 - DNA, 15 bp, Homo sapiens
agacacctcaattct

SEQ ID NO: 1834363 - DNA, 15 bp, Homo sapiens
gacacctcaattctt

SEQ ID NO: 1834364 - DNA, 15 bp, Homo sapiens
acacctcaattcttg

SEQ ID NO: 1834365 - DNA, 15 bp, Homo sapiens
cacctcaattcttgt

SEQ ID NO: 1834366 - DNA, 15 bp, Homo sapiens
acctcaattcttgta

SEQ ID NO: 1834367 - DNA, 15 bp, Homo sapiens
cctcaattcttgtag

SEQ ID NO: 1834368 - DNA, 15 bp, Homo sapiens
ctcaattcttgtagg

SEQ ID NO: 1834369 - DNA, 15 bp, Homo sapiens
tcaattcttgtaggc

SEQ ID NO: 1834370 - DNA, 15 bp, Homo sapiens
caattcttgtaggca

SEQ ID NO: 1834371 - DNA, 15 bp, Homo sapiens
aattcttgtaggcat

SEQ ID NO: 1834372 - DNA, 15 bp, Homo sapiens
attcttgtaggcata

SEQ ID NO: 1834373 - DNA, 15 bp, Homo sapiens
ttcttgtaggcatat

SEQ ID NO: 1834374 - DNA, 15 bp, Homo sapiens
tcttgtaggcatata

SEQ ID NO: 1834375 - DNA, 15 bp, Homo sapiens
cttgtaggcatatag

SEQ ID NO: 1834376 - DNA, 15 bp, Homo sapiens
ttgtaggcatatagt

SEQ ID NO: 1834377 - DNA, 15 bp, Homo sapiens
tgtaggcatatagtg

SEQ ID NO: 1834378 - DNA, 15 bp, Homo sapiens
gtaggcatatagtgg

SEQ ID NO: 1834379 - DNA, 15 bp, Homo sapiens
taggcatatagtggt

SEQ ID NO: 1834380 - DNA, 15 bp, Homo sapiens
aggcatatagtggta

SEQ ID NO: 1834381 - DNA, 15 bp, Homo sapiens
ggcatatagtggtag

SEQ ID NO: 1834382 - DNA, 15 bp, Homo sapiens
gcatatagtggtagg

SEQ ID NO: 1834383 - DNA, 15 bp, Homo sapiens
catatagtggtaggg

SEQ ID NO: 1834384 - DNA, 15 bp, Homo sapiens
atatagtggtagggg

SEQ ID NO: 1834385 - DNA, 15 bp, Homo sapiens
tatagtggtagggga

SEQ ID NO: 1834386 - DNA, 15 bp, Homo sapiens
atagtggtaggggaa

SEQ ID NO: 1834387 - DNA, 15 bp, Homo sapiens
tagtggtaggggaaa

SEQ ID NO: 1834388 - DNA, 15 bp, Homo sapiens
agtggtaggggaaat

SEQ ID NO: 1834389 - DNA, 15 bp, Homo sapiens
gtggtaggggaaatc

SEQ ID NO: 1834390 - DNA, 15 bp, Homo sapiens
tggtaggggaaatca

SEQ ID NO: 1834391 - DNA, 15 bp, Homo sapiens
ggtaggggaaatcac

SEQ ID NO: 1834392 - DNA, 15 bp, Homo sapiens
gtaggggaaatcact

SEQ ID NO: 1834393 - DNA, 15 bp, Homo sapiens
taggggaaatcacta

SEQ ID NO: 1834394 - DNA, 15 bp, Homo sapiens
aggggaaatcactaa

SEQ ID NO: 1834395 - DNA, 15 bp, Homo sapiens
ggggaaatcactaat

SEQ ID NO: 1834396 - DNA, 15 bp, Homo sapiens
gggaaatcactaatt

SEQ ID NO: 1834397 - DNA, 15 bp, Homo sapiens
ggaaatcactaattc

SEQ ID NO: 1834398 - DNA, 15 bp, Homo sapiens
gaaatcactaattct

SEQ ID NO: 1834399 - DNA, 15 bp, Homo sapiens
aaatcactaattctg

SEQ ID NO: 1834400 - DNA, 15 bp, Homo sapiens
aatcactaattctgt

SEQ ID NO: 1834401 - DNA, 15 bp, Homo sapiens
atcactaattctgtg

SEQ ID NO: 1834402 - DNA, 15 bp, Homo sapiens
tcactaattctgtgt

SEQ ID NO: 1834403 - DNA, 15 bp, Homo sapiens
cactaattctgtgtg

SEQ ID NO: 1834404 - DNA, 15 bp, Homo sapiens
actaattctgtgtgt

SEQ ID NO: 1834405 - DNA, 15 bp, Homo sapiens
ctaattctgtgtgtt

SEQ ID NO: 1834406 - DNA, 15 bp, Homo sapiens
taattctgtgtgttt

SEQ ID NO: 1834407 - DNA, 15 bp, Homo sapiens
aattctgtgtgttta

SEQ ID NO: 1834408 - DNA, 15 bp, Homo sapiens
attctgtgtgtttat

SEQ ID NO: 1834409 - DNA, 15 bp, Homo sapiens
ttctgtgtgtttatg

SEQ ID NO: 1834410 - DNA, 15 bp, Homo sapiens
tctgtgtgtttatgt

SEQ ID NO: 1834411 - DNA, 15 bp, Homo sapiens
ctgtgtgtttatgta

SEQ ID NO: 1834412 - DNA, 15 bp, Homo sapiens
tgtgtgtttatgtat

SEQ ID NO: 1834413 - DNA, 15 bp, Homo sapiens
gtgtgtttatgtatc

SEQ ID NO: 1834414 - DNA, 15 bp, Homo sapiens
tgtgtttatgtatct

SEQ ID NO: 1834415 - DNA, 15 bp, Homo sapiens
gtgtttatgtatctt

SEQ ID NO: 1834416 - DNA, 15 bp, Homo sapiens
tgtttatgtatcttc

SEQ ID NO: 1834417 - DNA, 15 bp, Homo sapiens
gtttatgtatcttca

SEQ ID NO: 1834418 - DNA, 15 bp, Homo sapiens
tttatgtatcttcat

SEQ ID NO: 1834419 - DNA, 15 bp, Homo sapiens
ttatgtatcttcatc

SEQ ID NO: 1834420 - DNA, 15 bp, Homo sapiens
tatgtatcttcatct

SEQ ID NO: 1834421 - DNA, 15 bp, Homo sapiens
atgtatcttcatctt

SEQ ID NO: 1834422 - DNA, 15 bp, Homo sapiens
tgtatcttcatcttc

SEQ ID NO: 1834423 - DNA, 15 bp, Homo sapiens
gtatcttcatcttca

SEQ ID NO: 1834424 - DNA, 15 bp, Homo sapiens
tatcttcatcttcag

SEQ ID NO: 1834425 - DNA, 15 bp, Homo sapiens
atcttcatcttcagg

SEQ ID NO: 1834426 - DNA, 15 bp, Homo sapiens
tcttcatcttcagga

SEQ ID NO: 1834427 - DNA, 15 bp, Homo sapiens
cttcatcttcaggaa

SEQ ID NO: 1834428 - DNA, 15 bp, Homo sapiens
ttcatcttcaggaaa

SEQ ID NO: 1834429 - DNA, 15 bp, Homo sapiens
tcatcttcaggaaaa

SEQ ID NO: 1834430 - DNA, 15 bp, Homo sapiens
catcttcaggaaaaa

SEQ ID NO: 1834431 - DNA, 15 bp, Homo sapiens
atcttcaggaaaaat

SEQ ID NO: 1834432 - DNA, 15 bp, Homo sapiens
tcttcaggaaaaata

SEQ ID NO: 1834433 - DNA, 15 bp, Homo sapiens
cttcaggaaaaatag

SEQ ID NO: 1834434 - DNA, 15 bp, Homo sapiens
ttcaggaaaaatagc

SEQ ID NO: 1834435 - DNA, 15 bp, Homo sapiens
tcaggaaaaatagca

SEQ ID NO: 1834436 - DNA, 15 bp, Homo sapiens
caggaaaaatagcaa

SEQ ID NO: 1834437 - DNA, 15 bp, Homo sapiens
aggaaaaatagcaag

SEQ ID NO: 1834438 - DNA, 15 bp, Homo sapiens
ggaaaaatagcaaga

SEQ ID NO: 1834439 - DNA, 15 bp, Homo sapiens
gaaaaatagcaagaa

SEQ ID NO: 1834440 - DNA, 15 bp, Homo sapiens
aaaaatagcaagaat

SEQ ID NO: 1834441 - DNA, 15 bp, Homo sapiens
aaaatagcaagaatt

SEQ ID NO: 1834442 - DNA, 15 bp, Homo sapiens
aaatagcaagaatta

SEQ ID NO: 1834443 - DNA, 15 bp, Homo sapiens
aatagcaagaattag

SEQ ID NO: 1834444 - DNA, 15 bp, Homo sapiens
atagcaagaattaga

SEQ ID NO: 1834445 - DNA, 15 bp, Homo sapiens
tagcaagaattagaa

SEQ ID NO: 1834446 - DNA, 15 bp, Homo sapiens
agcaagaattagaaa

SEQ ID NO: 1834447 - DNA, 15 bp, Homo sapiens
gcaagaattagaaag

SEQ ID NO: 1834448 - DNA, 15 bp, Homo sapiens
caagaattagaaaga

SEQ ID NO: 1834449 - DNA, 15 bp, Homo sapiens
aagaattagaaagaa

SEQ ID NO: 1834450 - DNA, 15 bp, Homo sapiens
agaattagaaagaaa

SEQ ID NO: 1834451 - DNA, 15 bp, Homo sapiens
gaattagaaagaaac

SEQ ID NO: 1834452 - DNA, 15 bp, Homo sapiens
aattagaaagaaaca

SEQ ID NO: 1834453 - DNA, 15 bp, Homo sapiens
attagaaagaaacac

SEQ ID NO: 1834454 - DNA, 15 bp, Homo sapiens
ttagaaagaaacact

SEQ ID NO: 1834455 - DNA, 15 bp, Homo sapiens
tagaaagaaacactc

SEQ ID NO: 1834456 - DNA, 15 bp, Homo sapiens
agaaagaaacactca

SEQ ID NO: 1834457 - DNA, 15 bp, Homo sapiens
gaaagaaacactcaa

SEQ ID NO: 1834458 - DNA, 15 bp, Homo sapiens
aaagaaacactcaaa

SEQ ID NO: 1834459 - DNA, 15 bp, Homo sapiens
aagaaacactcaaag

SEQ ID NO: 1834460 - DNA, 15 bp, Homo sapiens
agaaacactcaaagg

SEQ ID NO: 1834461 - DNA, 15 bp, Homo sapiens
gaaacactcaaagga

SEQ ID NO: 1834462 - DNA, 15 bp, Homo sapiens
aaacactcaaaggac

SEQ ID NO: 1834463 - DNA, 15 bp, Homo sapiens
aacactcaaaggact

SEQ ID NO: 1834464 - DNA, 15 bp, Homo sapiens
acactcaaaggactt

SEQ ID NO: 1834465 - DNA, 15 bp, Homo sapiens
cactcaaaggacttc

SEQ ID NO: 1834466 - DNA, 15 bp, Homo sapiens
actcaaaggacttcc

SEQ ID NO: 1834467 - DNA, 15 bp, Homo sapiens
ctcaaaggacttcca

SEQ ID NO: 1834468 - DNA, 15 bp, Homo sapiens
tcaaaggacttccag

SEQ ID NO: 1834469 - DNA, 15 bp, Homo sapiens
caaaggacttccaga

SEQ ID NO: 1834470 - DNA, 15 bp, Homo sapiens
aaaggacttccagag

SEQ ID NO: 1834471 - DNA, 15 bp, Homo sapiens
aaggacttccagaga

SEQ ID NO: 1834472 - DNA, 15 bp, Homo sapiens
aggacttccagagaa

SEQ ID NO: 1834473 - DNA, 15 bp, Homo sapiens
ggacttccagagaag

SEQ ID NO: 1834474 - DNA, 15 bp, Homo sapiens
gacttccagagaagg

SEQ ID NO: 1834475 - DNA, 15 bp, Homo sapiens
acttccagagaaggc

SEQ ID NO: 1834476 - DNA, 15 bp, Homo sapiens
cttccagagaaggca

SEQ ID NO: 1834477 - DNA, 15 bp, Homo sapiens
ttccagagaaggcaa

SEQ ID NO: 1834478 - DNA, 15 bp, Homo sapiens
tccagagaaggcaat

SEQ ID NO: 1834479 - DNA, 15 bp, Homo sapiens
ccagagaaggcaatg

SEQ ID NO: 1834480 - DNA, 15 bp, Homo sapiens
cagagaaggcaatga

SEQ ID NO: 1834481 - DNA, 15 bp, Homo sapiens
agagaaggcaatgaa

SEQ ID NO: 1834482 - DNA, 15 bp, Homo sapiens
gagaaggcaatgaat

SEQ ID NO: 1834483 - DNA, 15 bp, Homo sapiens
agaaggcaatgaata

SEQ ID NO: 1834484 - DNA, 15 bp, Homo sapiens
gaaggcaatgaatag

SEQ ID NO: 1834485 - DNA, 15 bp, Homo sapiens
aaggcaatgaatagc

SEQ ID NO: 1834486 - DNA, 15 bp, Homo sapiens
aggcaatgaatagcc

SEQ ID NO: 1834487 - DNA, 15 bp, Homo sapiens
ggcaatgaatagcca

SEQ ID NO: 1834488 - DNA, 15 bp, Homo sapiens
gcaatgaatagccag

SEQ ID NO: 1834489 - DNA, 15 bp, Homo sapiens
caatgaatagccagt

SEQ ID NO: 1834490 - DNA, 15 bp, Homo sapiens
aatgaatagccagtg

SEQ ID NO: 1834491 - DNA, 15 bp, Homo sapiens
atgaatagccagtgc

SEQ ID NO: 1834492 - DNA, 15 bp, Homo sapiens
tgaatagccagtgca

SEQ ID NO: 1834493 - DNA, 15 bp, Homo sapiens
gaatagccagtgcat

SEQ ID NO: 1834494 - DNA, 15 bp, Homo sapiens
aatagccagtgcatg

SEQ ID NO: 1834495 - DNA, 15 bp, Homo sapiens
atagccagtgcatgt

SEQ ID NO: 1834496 - DNA, 15 bp, Homo sapiens
tagccagtgcatgta

SEQ ID NO: 1834497 - DNA, 15 bp, Homo sapiens
agccagtgcatgtac

SEQ ID NO: 1834498 - DNA, 15 bp, Homo sapiens
gccagtgcatgtaca

SEQ ID NO: 1834499 - DNA, 15 bp, Homo sapiens
ccagtgcatgtacac

SEQ ID NO: 1834500 - DNA, 15 bp, Homo sapiens
cagtgcatgtacacc

SEQ ID NO: 1834501 - DNA, 15 bp, Homo sapiens
agtgcatgtacacct

SEQ ID NO: 1834502 - DNA, 15 bp, Homo sapiens
gtgcatgtacaccta

SEQ ID NO: 1834503 - DNA, 15 bp, Homo sapiens
tgcatgtacacctac

SEQ ID NO: 1834504 - DNA, 15 bp, Homo sapiens
gcatgtacacctacc

SEQ ID NO: 1834505 - DNA, 15 bp, Homo sapiens
catgtacacctacct

SEQ ID NO: 1834506 - DNA, 15 bp, Homo sapiens
atgtacacctacctc

SEQ ID NO: 1834507 - DNA, 15 bp, Homo sapiens
tgtacacctacctcc

SEQ ID NO: 1834508 - DNA, 15 bp, Homo sapiens
gtacacctacctcca

SEQ ID NO: 1834509 - DNA, 15 bp, Homo sapiens
acacctacctccatt

SEQ ID NO: 1834510 - DNA, 15 bp, Homo sapiens
cacctacctccattt

SEQ ID NO: 1834511 - DNA, 15 bp, Homo sapiens
acctacctccatttc

SEQ ID NO: 1834512 - DNA, 15 bp, Homo sapiens
cctacctccatttcc

SEQ ID NO: 1834513 - DNA, 15 bp, Homo sapiens
ctacctccatttcct

SEQ ID NO: 1834514 - DNA, 15 bp, Homo sapiens
tacctccatttcctt

SEQ ID NO: 1834515 - DNA, 15 bp, Homo sapiens
acctccatttccttt

SEQ ID NO: 1834516 - DNA, 15 bp, Homo sapiens
cctccatttcctttg

SEQ ID NO: 1834517 - DNA, 15 bp, Homo sapiens
ctccatttcctttgc

SEQ ID NO: 1834518 - DNA, 15 bp, Homo sapiens
tccatttcctttgcc

SEQ ID NO: 1834519 - DNA, 15 bp, Homo sapiens
ccatttcctttgcca

SEQ ID NO: 1834520 - DNA, 15 bp, Homo sapiens
catttcctttgccac

SEQ ID NO: 1834521 - DNA, 15 bp, Homo sapiens
atttcctttgccact

SEQ ID NO: 1834522 - DNA, 15 bp, Homo sapiens
tttcctttgccactg

SEQ ID NO: 1834523 - DNA, 15 bp, Homo sapiens
ttcctttgccactgg

SEQ ID NO: 1834524 - DNA, 15 bp, Homo sapiens
tcctttgccactggc

SEQ ID NO: 1834525 - DNA, 15 bp, Homo sapiens
cctttgccactggca

SEQ ID NO: 1834526 - DNA, 15 bp, Homo sapiens
ctttgccactggcaa

SEQ ID NO: 1834527 - DNA, 15 bp, Homo sapiens
tttgccactggcaat

SEQ ID NO: 1834528 - DNA, 15 bp, Homo sapiens
ttgccactggcaata

SEQ ID NO: 1834529 - DNA, 15 bp, Homo sapiens
gccactggcaataat

SEQ ID NO: 1834530 - DNA, 15 bp, Homo sapiens
ccactggcaataatc

SEQ ID NO: 1834531 - DNA, 15 bp, Homo sapiens
cactggcaataatct

SEQ ID NO: 1834532 - DNA, 15 bp, Homo sapiens
actggcaataatctt

SEQ ID NO: 1834533 - DNA, 15 bp, Homo sapiens
ctggcaataatcttc

SEQ ID NO: 1834534 - DNA, 15 bp, Homo sapiens
tggcaataatcttca

SEQ ID NO: 1834535 - DNA, 15 bp, Homo sapiens
ggcaataatcttcat

SEQ ID NO: 1834536 - DNA, 15 bp, Homo sapiens
gcaataatcttcatc

SEQ ID NO: 1834537 - DNA, 15 bp, Homo sapiens
caataatcttcatct

SEQ ID NO: 1834538 - DNA, 15 bp, Homo sapiens
aataatcttcatctg

SEQ ID NO: 1834539 - DNA, 15 bp, Homo sapiens
ataatcttcatctgc

SEQ ID NO: 1834540 - DNA, 15 bp, Homo sapiens
taatcttcatctgcc

SEQ ID NO: 1834541 - DNA, 15 bp, Homo sapiens
aatcttcatctgccc

SEQ ID NO: 1834542 - DNA, 15 bp, Homo sapiens
atcttcatctgccct

SEQ ID NO: 1834543 - DNA, 15 bp, Homo sapiens
tcttcatctgccctc

SEQ ID NO: 1834544 - DNA, 15 bp, Homo sapiens
cttcatctgccctct

SEQ ID NO: 1834545 - DNA, 15 bp, Homo sapiens
ttcatctgccctctc

SEQ ID NO: 1834546 - DNA, 15 bp, Homo sapiens
tcatctgccctctcc

SEQ ID NO: 1834547 - DNA, 15 bp, Homo sapiens
catctgccctctccc

SEQ ID NO: 1834548 - DNA, 15 bp, Homo sapiens
atctgccctctcccc

SEQ ID NO: 1834549 - DNA, 15 bp, Homo sapiens
tctgccctctcccct

SEQ ID NO: 1834550 - DNA, 15 bp, Homo sapiens
ctgccctctcccctc

SEQ ID NO: 1834551 - DNA, 15 bp, Homo sapiens
tgccctctcccctcc

SEQ ID NO: 1834552 - DNA, 15 bp, Homo sapiens
gccctctcccctccc

SEQ ID NO: 1834553 - DNA, 15 bp, Homo sapiens
ccctctcccctcccc

SEQ ID NO: 1834554 - DNA, 15 bp, Homo sapiens
cctctcccctccccg

SEQ ID NO: 1834555 - DNA, 15 bp, Homo sapiens
ctctcccctccccga

SEQ ID NO: 1834556 - DNA, 15 bp, Homo sapiens
tctcccctccccgac

SEQ ID NO: 1834557 - DNA, 15 bp, Homo sapiens
ctcccctccccgacc

SEQ ID NO: 1834558 - DNA, 15 bp, Homo sapiens
tcccctccccgacct

SEQ ID NO: 1834559 - DNA, 15 bp, Homo sapiens
cccctccccgaccta

SEQ ID NO: 1834560 - DNA, 15 bp, Homo sapiens
ccctccccgacctaa

SEQ ID NO: 1834561 - DNA, 15 bp, Homo sapiens
cctccccgacctaaa

SEQ ID NO: 1834562 - DNA, 15 bp, Homo sapiens
ctccccgacctaaag

SEQ ID NO: 1834563 - DNA, 15 bp, Homo sapiens
tccccgacctaaagt

SEQ ID NO: 1834564 - DNA, 15 bp, Homo sapiens
ccccgacctaaagtg

SEQ ID NO: 1834565 - DNA, 15 bp, Homo sapiens
cccgacctaaagtgg

SEQ ID NO: 1834566 - DNA, 15 bp, Homo sapiens
ccgacctaaagtggt

SEQ ID NO: 1834567 - DNA, 15 bp, Homo sapiens
cgacctaaagtggta

SEQ ID NO: 1834568 - DNA, 15 bp, Homo sapiens
gacctaaagtggtag

SEQ ID NO: 1834569 - DNA, 15 bp, Homo sapiens
acctaaagtggtagt

SEQ ID NO: 1834570 - DNA, 15 bp, Homo sapiens
cctaaagtggtagtg

SEQ ID NO: 1834571 - DNA, 15 bp, Homo sapiens
ctaaagtggtagtga

SEQ ID NO: 1834572 - DNA, 15 bp, Homo sapiens
taaagtggtagtgag

SEQ ID NO: 1834573 - DNA, 15 bp, Homo sapiens
aaagtggtagtgaga

SEQ ID NO: 1834574 - DNA, 15 bp, Homo sapiens
aagtggtagtgagag

SEQ ID NO: 1834575 - DNA, 15 bp, Homo sapiens
agtggtagtgagaga

SEQ ID NO: 1834576 - DNA, 15 bp, Homo sapiens
gtggtagtgagagag

SEQ ID NO: 1834577 - DNA, 15 bp, Homo sapiens
tggtagtgagagagg

SEQ ID NO: 1834578 - DNA, 15 bp, Homo sapiens
ggtagtgagagaggc

SEQ ID NO: 1834579 - DNA, 15 bp, Homo sapiens
gtagtgagagaggca

SEQ ID NO: 1834580 - DNA, 15 bp, Homo sapiens
tagtgagagaggcaa

SEQ ID NO: 1834581 - DNA, 15 bp, Homo sapiens
agtgagagaggcaat

SEQ ID NO: 1834582 - DNA, 15 bp, Homo sapiens
gtgagagaggcaatc

SEQ ID NO: 1834583 - DNA, 15 bp, Homo sapiens
tgagagaggcaatct

SEQ ID NO: 1834584 - DNA, 15 bp, Homo sapiens
gagagaggcaatctg

SEQ ID NO: 1834585 - DNA, 15 bp, Homo sapiens
agagaggcaatctgg

SEQ ID NO: 1834586 - DNA, 15 bp, Homo sapiens
gagaggcaatctgga

SEQ ID NO: 1834587 - DNA, 15 bp, Homo sapiens
agaggcaatctggac

SEQ ID NO: 1834588 - DNA, 15 bp, Homo sapiens
gaggcaatctggaca

SEQ ID NO: 1834589 - DNA, 15 bp, Homo sapiens
aggcaatctggacaa

SEQ ID NO: 1834590 - DNA, 15 bp, Homo sapiens
ggcaatctggacaac

SEQ ID NO: 1834591 - DNA, 15 bp, Homo sapiens
gcaatctggacaact

SEQ ID NO: 1834592 - DNA, 15 bp, Homo sapiens
caatctggacaactt

SEQ ID NO: 1834593 - DNA, 15 bp, Homo sapiens
aatctggacaactta

SEQ ID NO: 1834594 - DNA, 15 bp, Homo sapiens
atctggacaacttaa

SEQ ID NO: 1834595 - DNA, 15 bp, Homo sapiens
tctggacaacttaac

SEQ ID NO: 1834596 - DNA, 15 bp, Homo sapiens
ctggacaacttaaca

SEQ ID NO: 1834597 - DNA, 15 bp, Homo sapiens
tggacaacttaacat

SEQ ID NO: 1834598 - DNA, 15 bp, Homo sapiens
ggacaacttaacatg

SEQ ID NO: 1834599 - DNA, 15 bp, Homo sapiens
gacaacttaacatgg

SEQ ID NO: 1834600 - DNA, 15 bp, Homo sapiens
acaacttaacatggc

SEQ ID NO: 1834601 - DNA, 15 bp, Homo sapiens
caacttaacatggcc

SEQ ID NO: 1834602 - DNA, 15 bp, Homo sapiens
aacttaacatggcct

SEQ ID NO: 1834603 - DNA, 15 bp, Homo sapiens
acttaacatggcctc

SEQ ID NO: 1834604 - DNA, 15 bp, Homo sapiens
cttaacatggcctcg

SEQ ID NO: 1834605 - DNA, 15 bp, Homo sapiens
ttaacatggcctcgt

SEQ ID NO: 1834606 - DNA, 15 bp, Homo sapiens
taacatggcctcgtt

SEQ ID NO: 1834607 - DNA, 15 bp, Homo sapiens
aacatggcctcgttt

SEQ ID NO: 1834608 - DNA, 15 bp, Homo sapiens
acatggcctcgttta

SEQ ID NO: 1834609 - DNA, 15 bp, Homo sapiens
catggcctcgtttat

SEQ ID NO: 1834610 - DNA, 15 bp, Homo sapiens
atggcctcgtttatc

SEQ ID NO: 1834611 - DNA, 15 bp, Homo sapiens
tggcctcgtttatcc

SEQ ID NO: 1834612 - DNA, 15 bp, Homo sapiens
ggcctcgtttatcca

SEQ ID NO: 1834613 - DNA, 15 bp, Homo sapiens
gcctcgtttatccat

SEQ ID NO: 1834614 - DNA, 15 bp, Homo sapiens
cctcgtttatccatc

SEQ ID NO: 1834615 - DNA, 15 bp, Homo sapiens
ctcgtttatccatct

SEQ ID NO: 1834616 - DNA, 15 bp, Homo sapiens
tcgtttatccatctc

SEQ ID NO: 1834617 - DNA, 15 bp, Homo sapiens
cgtttatccatctca

SEQ ID NO: 1834618 - DNA, 15 bp, Homo sapiens
gtttatccatctcaa

SEQ ID NO: 1834619 - DNA, 15 bp, Homo sapiens
tttatccatctcaac

SEQ ID NO: 1834620 - DNA, 15 bp, Homo sapiens
ttatccatctcaaca

SEQ ID NO: 1834621 - DNA, 15 bp, Homo sapiens
tatccatctcaacac

SEQ ID NO: 1834622 - DNA, 15 bp, Homo sapiens
atccatctcaacacg

SEQ ID NO: 1834623 - DNA, 15 bp, Homo sapiens
tccatctcaacacga

SEQ ID NO: 1834624 - DNA, 15 bp, Homo sapiens
ccatctcaacacgac

SEQ ID NO: 1834625 - DNA, 15 bp, Homo sapiens
catctcaacacgaca

SEQ ID NO: 1834626 - DNA, 15 bp, Homo sapiens
atctcaacacgacac

SEQ ID NO: 1834627 - DNA, 15 bp, Homo sapiens
tctcaacacgacact

SEQ ID NO: 1834628 - DNA, 15 bp, Homo sapiens
ctcaacacgacactg

SEQ ID NO: 1834629 - DNA, 15 bp, Homo sapiens
tcaacacgacactgg

SEQ ID NO: 1834630 - DNA, 15 bp, Homo sapiens
caacacgacactggg

SEQ ID NO: 1834631 - DNA, 15 bp, Homo sapiens
aacacgacactggga

SEQ ID NO: 1834632 - DNA, 15 bp, Homo sapiens
acacgacactgggaa

SEQ ID NO: 1834633 - DNA, 15 bp, Homo sapiens
cacgacactgggaat

SEQ ID NO: 1834634 - DNA, 15 bp, Homo sapiens
acgacactgggaatt

SEQ ID NO: 1834635 - DNA, 15 bp, Homo sapiens
cgacactgggaattt

SEQ ID NO: 1834636 - DNA, 15 bp, Homo sapiens
gacactgggaatttg

SEQ ID NO: 1834637 - DNA, 15 bp, Homo sapiens
acactgggaatttgg

SEQ ID NO: 1834638 - DNA, 15 bp, Homo sapiens
cactgggaatttggt

SEQ ID NO: 1834639 - DNA, 15 bp, Homo sapiens
actgggaatttggtg

SEQ ID NO: 1834640 - DNA, 15 bp, Homo sapiens
ctgggaatttggtgc

SEQ ID NO: 1834641 - DNA, 15 bp, Homo sapiens
tgggaatttggtgca

SEQ ID NO: 1834642 - DNA, 15 bp, Homo sapiens
gggaatttggtgcag

SEQ ID NO: 1834643 - DNA, 15 bp, Homo sapiens
ggaatttggtgcaga

SEQ ID NO: 1834644 - DNA, 15 bp, Homo sapiens
gaatttggtgcagat

SEQ ID NO: 1834645 - DNA, 15 bp, Homo sapiens
aatttggtgcagatt

SEQ ID NO: 1834646 - DNA, 15 bp, Homo sapiens
atttggtgcagattt

SEQ ID NO: 1834647 - DNA, 15 bp, Homo sapiens
tttggtgcagatttc

SEQ ID NO: 1834648 - DNA, 15 bp, Homo sapiens
ttggtgcagatttcc

SEQ ID NO: 1834649 - DNA, 15 bp, Homo sapiens
tggtgcagatttccc

SEQ ID NO: 1834650 - DNA, 15 bp, Homo sapiens
ggtgcagatttcccc

SEQ ID NO: 1834651 - DNA, 15 bp, Homo sapiens
gtgcagatttcccct

SEQ ID NO: 1834652 - DNA, 15 bp, Homo sapiens
tgcagatttcccctt

SEQ ID NO: 1834653 - DNA, 15 bp, Homo sapiens
gcagatttccccttt

SEQ ID NO: 1834654 - DNA, 15 bp, Homo sapiens
cagatttcccctttc

SEQ ID NO: 1834655 - DNA, 15 bp, Homo sapiens
agatttcccctttct

SEQ ID NO: 1834656 - DNA, 15 bp, Homo sapiens
gatttcccctttcta

SEQ ID NO: 1834657 - DNA, 15 bp, Homo sapiens
atttcccctttctaa

SEQ ID NO: 1834658 - DNA, 15 bp, Homo sapiens
tttcccctttctaac

SEQ ID NO: 1834659 - DNA, 15 bp, Homo sapiens
ttcccctttctaacc

SEQ ID NO: 1834660 - DNA, 15 bp, Homo sapiens
tcccctttctaaccc

SEQ ID NO: 1834661 - DNA, 15 bp, Homo sapiens
cccctttctaacccc

SEQ ID NO: 1834662 - DNA, 15 bp, Homo sapiens
ccctttctaacccct

SEQ ID NO: 1834663 - DNA, 15 bp, Homo sapiens
cctttctaacccctg

SEQ ID NO: 1834664 - DNA, 15 bp, Homo sapiens
ctttctaacccctgc

SEQ ID NO: 1834665 - DNA, 15 bp, Homo sapiens
tttctaacccctgca

SEQ ID NO: 1834666 - DNA, 15 bp, Homo sapiens
ttctaacccctgcaa

SEQ ID NO: 1834667 - DNA, 15 bp, Homo sapiens
tctaacccctgcaat

SEQ ID NO: 1834668 - DNA, 15 bp, Homo sapiens
ctaacccctgcaata

SEQ ID NO: 1834669 - DNA, 15 bp, Homo sapiens
taacccctgcaatat

SEQ ID NO: 1834670 - DNA, 15 bp, Homo sapiens
aacccctgcaatata

SEQ ID NO: 1834671 - DNA, 15 bp, Homo sapiens
acccctgcaatataa

SEQ ID NO: 1834672 - DNA, 15 bp, Homo sapiens
cccctgcaatataaa

SEQ ID NO: 1834673 - DNA, 15 bp, Homo sapiens
ccctgcaatataaaa

SEQ ID NO: 1834674 - DNA, 15 bp, Homo sapiens
cctgcaatataaaag

SEQ ID NO: 1834675 - DNA, 15 bp, Homo sapiens
ctgcaatataaaagt

SEQ ID NO: 1834676 - DNA, 15 bp, Homo sapiens
tgcaatataaaagtt

SEQ ID NO: 1834677 - DNA, 15 bp, Homo sapiens
gcaatataaaagttc

SEQ ID NO: 1834678 - DNA, 15 bp, Homo sapiens
caatataaaagttct

SEQ ID NO: 1834679 - DNA, 15 bp, Homo sapiens
aatataaaagttctg

SEQ ID NO: 1834680 - DNA, 15 bp, Homo sapiens
atataaaagttctgt

SEQ ID NO: 1834681 - DNA, 15 bp, Homo sapiens
tataaaagttctgtc

SEQ ID NO: 1834682 - DNA, 15 bp, Homo sapiens
ataaaagttctgtct

SEQ ID NO: 1834683 - DNA, 15 bp, Homo sapiens
taaaagttctgtctc

SEQ ID NO: 1834684 - DNA, 15 bp, Homo sapiens
aaaagttctgtctcc

SEQ ID NO: 1834685 - DNA, 15 bp, Homo sapiens
aaagttctgtctcct

SEQ ID NO: 1834686 - DNA, 15 bp, Homo sapiens
aagttctgtctcctt

SEQ ID NO: 1834687 - DNA, 15 bp, Homo sapiens
agttctgtctcctta

SEQ ID NO: 1834688 - DNA, 15 bp, Homo sapiens
gttctgtctccttat

SEQ ID NO: 1834689 - DNA, 15 bp, Homo sapiens
ttctgtctccttata

SEQ ID NO: 1834690 - DNA, 15 bp, Homo sapiens
tctgtctccttataa

SEQ ID NO: 1834691 - DNA, 15 bp, Homo sapiens
ctgtctccttataaa

SEQ ID NO: 1834692 - DNA, 15 bp, Homo sapiens
tgtctccttataaag

SEQ ID NO: 1834693 - DNA, 15 bp, Homo sapiens
gtctccttataaagc

SEQ ID NO: 1834694 - DNA, 15 bp, Homo sapiens
tctccttataaagct

SEQ ID NO: 1834695 - DNA, 15 bp, Homo sapiens
ctccttataaagctt

SEQ ID NO: 1834696 - DNA, 15 bp, Homo sapiens
tccttataaagcttt

SEQ ID NO: 1834697 - DNA, 15 bp, Homo sapiens
ccttataaagctttt

SEQ ID NO: 1834698 - DNA, 15 bp, Homo sapiens
cttataaagcttttc

SEQ ID NO: 1834699 - DNA, 15 bp, Homo sapiens
ttataaagcttttcc

SEQ ID NO: 1834700 - DNA, 15 bp, Homo sapiens
tataaagcttttccc

SEQ ID NO: 1834701 - DNA, 15 bp, Homo sapiens
ataaagcttttcccc

SEQ ID NO: 1834702 - DNA, 15 bp, Homo sapiens
taaagcttttcccca

SEQ ID NO: 1834703 - DNA, 15 bp, Homo sapiens
aaagcttttccccat

SEQ ID NO: 1834704 - DNA, 15 bp, Homo sapiens
aagcttttccccatt

SEQ ID NO: 1834705 - DNA, 15 bp, Homo sapiens
agcttttccccattc

SEQ ID NO: 1834706 - DNA, 15 bp, Homo sapiens
gcttttccccattct

SEQ ID NO: 1834707 - DNA, 15 bp, Homo sapiens
cttttccccattcta

SEQ ID NO: 1834708 - DNA, 15 bp, Homo sapiens
ttttccccattctac

SEQ ID NO: 1834709 - DNA, 15 bp, Homo sapiens
tttccccattctacc

SEQ ID NO: 1834710 - DNA, 15 bp, Homo sapiens
ttccccattctaccc

SEQ ID NO: 1834711 - DNA, 15 bp, Homo sapiens
tccccattctacccg

SEQ ID NO: 1834712 - DNA, 15 bp, Homo sapiens
ccccattctacccgc

SEQ ID NO: 1834713 - DNA, 15 bp, Homo sapiens
cccattctacccgct

SEQ ID NO: 1834714 - DNA, 15 bp, Homo sapiens
ccattctacccgcta

SEQ ID NO: 1834715 - DNA, 15 bp, Homo sapiens
cattctacccgctac

SEQ ID NO: 1834716 - DNA, 15 bp, Homo sapiens
attctacccgctaca

SEQ ID NO: 1834717 - DNA, 15 bp, Homo sapiens
ttctacccgctacag

SEQ ID NO: 1834718 - DNA, 15 bp, Homo sapiens
tctacccgctacaga

SEQ ID NO: 1834719 - DNA, 15 bp, Homo sapiens
ctacccgctacagac

SEQ ID NO: 1834720 - DNA, 15 bp, Homo sapiens
tacccgctacagact

SEQ ID NO: 1834721 - DNA, 15 bp, Homo sapiens
acccgctacagactt

SEQ ID NO: 1834722 - DNA, 15 bp, Homo sapiens
cccgctacagacttc

SEQ ID NO: 1834723 - DNA, 15 bp, Homo sapiens
ccgctacagacttct

SEQ ID NO: 1834724 - DNA, 15 bp, Homo sapiens
cgctacagacttctt

SEQ ID NO: 1834725 - DNA, 15 bp, Homo sapiens
gctacagacttcttc

SEQ ID NO: 1834726 - DNA, 15 bp, Homo sapiens
ctacagacttcttcc

SEQ ID NO: 1834727 - DNA, 15 bp, Homo sapiens
tacagacttcttcct

SEQ ID NO: 1834728 - DNA, 15 bp, Homo sapiens
acagacttcttcctc

SEQ ID NO: 1834729 - DNA, 15 bp, Homo sapiens
cagacttcttcctcc

SEQ ID NO: 1834730 - DNA, 15 bp, Homo sapiens
agacttcttcctcca

SEQ ID NO: 1834731 - DNA, 15 bp, Homo sapiens
gacttcttcctccag

SEQ ID NO: 1834732 - DNA, 15 bp, Homo sapiens
acttcttcctccagg

SEQ ID NO: 1834733 - DNA, 15 bp, Homo sapiens
cttcttcctccaggg

SEQ ID NO: 1834734 - DNA, 15 bp, Homo sapiens
ttcttcctccagggg

SEQ ID NO: 1834735 - DNA, 15 bp, Homo sapiens
tcttcctccagggga

SEQ ID NO: 1834736 - DNA, 15 bp, Homo sapiens
cttcctccaggggag

SEQ ID NO: 1834737 - DNA, 15 bp, Homo sapiens
ttcctccaggggagg

SEQ ID NO: 1834738 - DNA, 15 bp, Homo sapiens
tcctccaggggagga

SEQ ID NO: 1834739 - DNA, 15 bp, Homo sapiens
cctccaggggaggag

SEQ ID NO: 1834740 - DNA, 15 bp, Homo sapiens
ctccaggggaggagt

SEQ ID NO: 1834741 - DNA, 15 bp, Homo sapiens
tccaggggaggagtt

SEQ ID NO: 1834742 - DNA, 15 bp, Homo sapiens
ccaggggaggagttc

SEQ ID NO: 1834743 - DNA, 15 bp, Homo sapiens
caggggaggagttct

SEQ ID NO: 1834744 - DNA, 15 bp, Homo sapiens
aggggaggagttctt

SEQ ID NO: 1834745 - DNA, 15 bp, Homo sapiens
ggggaggagttcttc

SEQ ID NO: 1834746 - DNA, 15 bp, Homo sapiens
gggaggagttcttct

SEQ ID NO: 1834747 - DNA, 15 bp, Homo sapiens
ggaggagttcttctg

SEQ ID NO: 1834748 - DNA, 15 bp, Homo sapiens
gaggagttcttctgg

SEQ ID NO: 1834749 - DNA, 15 bp, Homo sapiens
aggagttcttctggg

SEQ ID NO: 1834750 - DNA, 15 bp, Homo sapiens
ggagttcttctgggt

SEQ ID NO: 1834751 - DNA, 15 bp, Homo sapiens
gagttcttctgggta

SEQ ID NO: 1834752 - DNA, 15 bp, Homo sapiens
agttcttctgggtaa

SEQ ID NO: 1834753 - DNA, 15 bp, Homo sapiens
gttcttctgggtaag

SEQ ID NO: 1834754 - DNA, 15 bp, Homo sapiens
ttcttctgggtaagg

SEQ ID NO: 1834755 - DNA, 15 bp, Homo sapiens
tcttctgggtaaggg

SEQ ID NO: 1834756 - DNA, 15 bp, Homo sapiens
cttctgggtaaggga

SEQ ID NO: 1834757 - DNA, 15 bp, Homo sapiens
ttctgggtaagggaa

SEQ ID NO: 1834758 - DNA, 15 bp, Homo sapiens
tctgggtaagggaaa

SEQ ID NO: 1834759 - DNA, 15 bp, Homo sapiens
ctgggtaagggaaag

SEQ ID NO: 1834760 - DNA, 15 bp, Homo sapiens
tgggtaagggaaagt

SEQ ID NO: 1834761 - DNA, 15 bp, Homo sapiens
gggtaagggaaagtc

SEQ ID NO: 1834762 - DNA, 15 bp, Homo sapiens
ggtaagggaaagtcc

SEQ ID NO: 1834763 - DNA, 15 bp, Homo sapiens
gtaagggaaagtcca

SEQ ID NO: 1834764 - DNA, 15 bp, Homo sapiens
taagggaaagtccac

SEQ ID NO: 1834765 - DNA, 15 bp, Homo sapiens
aagggaaagtccaca

SEQ ID NO: 1834766 - DNA, 15 bp, Homo sapiens
agggaaagtccacag

SEQ ID NO: 1834767 - DNA, 15 bp, Homo sapiens
gggaaagtccacaga

SEQ ID NO: 1834768 - DNA, 15 bp, Homo sapiens
ggaaagtccacagag

SEQ ID NO: 1834769 - DNA, 15 bp, Homo sapiens
gaaagtccacagagg

SEQ ID NO: 1834770 - DNA, 15 bp, Homo sapiens
aaagtccacagaggt

SEQ ID NO: 1834771 - DNA, 15 bp, Homo sapiens
aagtccacagaggtc

SEQ ID NO: 1834772 - DNA, 15 bp, Homo sapiens
agtccacagaggtca

SEQ ID NO: 1834773 - DNA, 15 bp, Homo sapiens
gtccacagaggtcaa

SEQ ID NO: 1834774 - DNA, 15 bp, Homo sapiens
tccacagaggtcaaa

SEQ ID NO: 1834775 - DNA, 15 bp, Homo sapiens
ccacagaggtcaaaa

SEQ ID NO: 1834776 - DNA, 15 bp, Homo sapiens
cacagaggtcaaaaa

SEQ ID NO: 1834777 - DNA, 15 bp, Homo sapiens
acagaggtcaaaaac

SEQ ID NO: 1834778 - DNA, 15 bp, Homo sapiens
cagaggtcaaaaacc

SEQ ID NO: 1834779 - DNA, 15 bp, Homo sapiens
agaggtcaaaaaccg

SEQ ID NO: 1834780 - DNA, 15 bp, Homo sapiens
gaggtcaaaaaccga

SEQ ID NO: 1834781 - DNA, 15 bp, Homo sapiens
aggtcaaaaaccgag

SEQ ID NO: 1834782 - DNA, 15 bp, Homo sapiens
ggtcaaaaaccgaga

SEQ ID NO: 1834783 - DNA, 15 bp, Homo sapiens
gtcaaaaaccgagag

SEQ ID NO: 1834784 - DNA, 15 bp, Homo sapiens
tcaaaaaccgagagg

SEQ ID NO: 1834785 - DNA, 15 bp, Homo sapiens
caaaaaccgagagga

SEQ ID NO: 1834786 - DNA, 15 bp, Homo sapiens
aaaaaccgagaggag

SEQ ID NO: 1834787 - DNA, 15 bp, Homo sapiens
aaaaccgagaggagc

SEQ ID NO: 1834788 - DNA, 15 bp, Homo sapiens
aaaccgagaggagct

SEQ ID NO: 1834789 - DNA, 15 bp, Homo sapiens
aaccgagaggagctg

SEQ ID NO: 1834790 - DNA, 15 bp, Homo sapiens
accgagaggagctga

SEQ ID NO: 1834791 - DNA, 15 bp, Homo sapiens
ccgagaggagctgag

SEQ ID NO: 1834792 - DNA, 15 bp, Homo sapiens
cgagaggagctgagc

SEQ ID NO: 1834793 - DNA, 15 bp, Homo sapiens
gagaggagctgagcc

SEQ ID NO: 1834794 - DNA, 15 bp, Homo sapiens
agaggagctgagcca

SEQ ID NO: 1834795 - DNA, 15 bp, Homo sapiens
gaggagctgagccag

SEQ ID NO: 1834796 - DNA, 15 bp, Homo sapiens
aggagctgagccaga

SEQ ID NO: 1834797 - DNA, 15 bp, Homo sapiens
ggagctgagccagaa

SEQ ID NO: 1834798 - DNA, 15 bp, Homo sapiens
gagctgagccagaaa

SEQ ID NO: 1834799 - DNA, 15 bp, Homo sapiens
agctgagccagaaaa

SEQ ID NO: 1834800 - DNA, 15 bp, Homo sapiens
gctgagccagaaaag

SEQ ID NO: 1834801 - DNA, 15 bp, Homo sapiens
ctgagccagaaaaga

SEQ ID NO: 1834802 - DNA, 15 bp, Homo sapiens
tgagccagaaaagag

SEQ ID NO: 1834803 - DNA, 15 bp, Homo sapiens
gagccagaaaagagc

SEQ ID NO: 1834804 - DNA, 15 bp, Homo sapiens
agccagaaaagagcc

SEQ ID NO: 1834805 - DNA, 15 bp, Homo sapiens
gccagaaaagagcca

SEQ ID NO: 1834806 - DNA, 15 bp, Homo sapiens
ccagaaaagagccac

SEQ ID NO: 1834807 - DNA, 15 bp, Homo sapiens
cagaaaagagccaca

SEQ ID NO: 1834808 - DNA, 15 bp, Homo sapiens
agaaaagagccacat

SEQ ID NO: 1834809 - DNA, 15 bp, Homo sapiens
gaaaagagccacata

SEQ ID NO: 1834810 - DNA, 15 bp, Homo sapiens
aaaagagccacatac

SEQ ID NO: 1834811 - DNA, 15 bp, Homo sapiens
aaagagccacatact

SEQ ID NO: 1834812 - DNA, 15 bp, Homo sapiens
aagagccacatactc

SEQ ID NO: 1834813 - DNA, 15 bp, Homo sapiens
agagccacatactct

SEQ ID NO: 1834814 - DNA, 15 bp, Homo sapiens
gagccacatactctg

SEQ ID NO: 1834815 - DNA, 15 bp, Homo sapiens
agccacatactctga

SEQ ID NO: 1834816 - DNA, 15 bp, Homo sapiens
gccacatactctgat

SEQ ID NO: 1834817 - DNA, 15 bp, Homo sapiens
ccacatactctgatt

SEQ ID NO: 1834818 - DNA, 15 bp, Homo sapiens
cacatactctgattt

SEQ ID NO: 1834819 - DNA, 15 bp, Homo sapiens
acatactctgatttc

SEQ ID NO: 1834820 - DNA, 15 bp, Homo sapiens
catactctgatttct

SEQ ID NO: 1834821 - DNA, 15 bp, Homo sapiens
atactctgatttcta

SEQ ID NO: 1834822 - DNA, 15 bp, Homo sapiens
tactctgatttctag

SEQ ID NO: 1834823 - DNA, 15 bp, Homo sapiens
actctgatttctaga

SEQ ID NO: 1834824 - DNA, 15 bp, Homo sapiens
ctctgatttctagaa

SEQ ID NO: 1834825 - DNA, 15 bp, Homo sapiens
tctgatttctagaaa

SEQ ID NO: 1834826 - DNA, 15 bp, Homo sapiens
ctgatttctagaaac

SEQ ID NO: 1834827 - DNA, 15 bp, Homo sapiens
tgatttctagaaacc

SEQ ID NO: 1834828 - DNA, 15 bp, Homo sapiens
gatttctagaaacca

SEQ ID NO: 1834829 - DNA, 15 bp, Homo sapiens
atttctagaaaccac

SEQ ID NO: 1834830 - DNA, 15 bp, Homo sapiens
tttctagaaaccacg

SEQ ID NO: 1834831 - DNA, 15 bp, Homo sapiens
ttctagaaaccacgc

SEQ ID NO: 1834832 - DNA, 15 bp, Homo sapiens
tctagaaaccacgca

SEQ ID NO: 1834833 - DNA, 15 bp, Homo sapiens
ctagaaaccacgcat

SEQ ID NO: 1834834 - DNA, 15 bp, Homo sapiens
tagaaaccacgcatc

SEQ ID NO: 1834835 - DNA, 15 bp, Homo sapiens
agaaaccacgcatca

SEQ ID NO: 1834836 - DNA, 15 bp, Homo sapiens
gaaaccacgcatcac

SEQ ID NO: 1834837 - DNA, 15 bp, Homo sapiens
aaaccacgcatcaca

SEQ ID NO: 1834838 - DNA, 15 bp, Homo sapiens
aaccacgcatcacaa

SEQ ID NO: 1834839 - DNA, 15 bp, Homo sapiens
accacgcatcacaag

SEQ ID NO: 1834840 - DNA, 15 bp, Homo sapiens
ccacgcatcacaagt

SEQ ID NO: 1834841 - DNA, 15 bp, Homo sapiens
cacgcatcacaagtg

SEQ ID NO: 1834842 - DNA, 15 bp, Homo sapiens
acgcatcacaagtgg

SEQ ID NO: 1834843 - DNA, 15 bp, Homo sapiens
cgcatcacaagtggg

SEQ ID NO: 1834844 - DNA, 15 bp, Homo sapiens
gcatcacaagtgggc

SEQ ID NO: 1834845 - DNA, 15 bp, Homo sapiens
catcacaagtgggct

SEQ ID NO: 1834846 - DNA, 15 bp, Homo sapiens
atcacaagtgggctt

SEQ ID NO: 1834847 - DNA, 15 bp, Homo sapiens
tcacaagtgggcttc

SEQ ID NO: 1834848 - DNA, 15 bp, Homo sapiens
cacaagtgggcttcc

SEQ ID NO: 1834849 - DNA, 15 bp, Homo sapiens
acaagtgggcttccc

SEQ ID NO: 1834850 - DNA, 15 bp, Homo sapiens
caagtgggcttccca

SEQ ID NO: 1834851 - DNA, 15 bp, Homo sapiens
aagtgggcttcccaa

SEQ ID NO: 1834852 - DNA, 15 bp, Homo sapiens
agtgggcttcccaaa

SEQ ID NO: 1834853 - DNA, 15 bp, Homo sapiens
gtgggcttcccaaaa

SEQ ID NO: 1834854 - DNA, 15 bp, Homo sapiens
tgggcttcccaaaac

SEQ ID NO: 1834855 - DNA, 15 bp, Homo sapiens
gggcttcccaaaact

SEQ ID NO: 1834856 - DNA, 15 bp, Homo sapiens
ggcttcccaaaacta

SEQ ID NO: 1834857 - DNA, 15 bp, Homo sapiens
gcttcccaaaactag

SEQ ID NO: 1834858 - DNA, 15 bp, Homo sapiens
cttcccaaaactagg

SEQ ID NO: 1834859 - DNA, 15 bp, Homo sapiens
ttcccaaaactaggg

SEQ ID NO: 1834860 - DNA, 15 bp, Homo sapiens
tcccaaaactagggt

SEQ ID NO: 1834861 - DNA, 15 bp, Homo sapiens
cccaaaactagggtc

SEQ ID NO: 1834862 - DNA, 15 bp, Homo sapiens
ccaaaactagggtca

SEQ ID NO: 1834863 - DNA, 15 bp, Homo sapiens
caaaactagggtcaa

SEQ ID NO: 1834864 - DNA, 15 bp, Homo sapiens
aaaactagggtcaag

SEQ ID NO: 1834865 - DNA, 15 bp, Homo sapiens
aaactagggtcaagt

SEQ ID NO: 1834866 - DNA, 15 bp, Homo sapiens
aactagggtcaagtc

SEQ ID NO: 1834867 - DNA, 15 bp, Homo sapiens
actagggtcaagtca

SEQ ID NO: 1834868 - DNA, 15 bp, Homo sapiens
ctagggtcaagtcaa

SEQ ID NO: 1834869 - DNA, 15 bp, Homo sapiens
tagggtcaagtcaaa

SEQ ID NO: 1834870 - DNA, 15 bp, Homo sapiens
agggtcaagtcaaag

SEQ ID NO: 1834871 - DNA, 15 bp, Homo sapiens
gggtcaagtcaaaga

SEQ ID NO: 1834872 - DNA, 15 bp, Homo sapiens
ggtcaagtcaaagaa

SEQ ID NO: 1834873 - DNA, 15 bp, Homo sapiens
gtcaagtcaaagaac

SEQ ID NO: 1834874 - DNA, 15 bp, Homo sapiens
tcaagtcaaagaaca

SEQ ID NO: 1834875 - DNA, 15 bp, Homo sapiens
caagtcaaagaacaa

SEQ ID NO: 1834876 - DNA, 15 bp, Homo sapiens
aagtcaaagaacaaa

SEQ ID NO: 1834877 - DNA, 15 bp, Homo sapiens
agtcaaagaacaaag

SEQ ID NO: 1834878 - DNA, 15 bp, Homo sapiens
gtcaaagaacaaaga

SEQ ID NO: 1834879 - DNA, 15 bp, Homo sapiens
tcaaagaacaaagag

SEQ ID NO: 1834880 - DNA, 15 bp, Homo sapiens
caaagaacaaagaga

SEQ ID NO: 1834881 - DNA, 15 bp, Homo sapiens
aaagaacaaagagaa

SEQ ID NO: 1834882 - DNA, 15 bp, Homo sapiens
aagaacaaagagaaa

SEQ ID NO: 1834883 - DNA, 15 bp, Homo sapiens
agaacaaagagaaat

SEQ ID NO: 1834884 - DNA, 15 bp, Homo sapiens
gaacaaagagaaatt

SEQ ID NO: 1834885 - DNA, 15 bp, Homo sapiens
aacaaagagaaattg

SEQ ID NO: 1834886 - DNA, 15 bp, Homo sapiens
acaaagagaaattgc

SEQ ID NO: 1834887 - DNA, 15 bp, Homo sapiens
caaagagaaattgcg

SEQ ID NO: 1834888 - DNA, 15 bp, Homo sapiens
aaagagaaattgcga

SEQ ID NO: 1834889 - DNA, 15 bp, Homo sapiens
aagagaaattgcgat

SEQ ID NO: 1834890 - DNA, 15 bp, Homo sapiens
agagaaattgcgatc

SEQ ID NO: 1834891 - DNA, 15 bp, Homo sapiens
gagaaattgcgatca

SEQ ID NO: 1834892 - DNA, 15 bp, Homo sapiens
agaaattgcgatcaa

SEQ ID NO: 1834893 - DNA, 15 bp, Homo sapiens
gaaattgcgatcaac

SEQ ID NO: 1834894 - DNA, 15 bp, Homo sapiens
aaattgcgatcaact

SEQ ID NO: 1834895 - DNA, 15 bp, Homo sapiens
aattgcgatcaactg

SEQ ID NO: 1834896 - DNA, 15 bp, Homo sapiens
attgcgatcaactga

SEQ ID NO: 1834897 - DNA, 15 bp, Homo sapiens
ttgcgatcaactgat

SEQ ID NO: 1834898 - DNA, 15 bp, Homo sapiens
tgcgatcaactgatg

SEQ ID NO: 1834899 - DNA, 15 bp, Homo sapiens
gcgatcaactgatgc

SEQ ID NO: 1834900 - DNA, 15 bp, Homo sapiens
cgatcaactgatgct

SEQ ID NO: 1834901 - DNA, 15 bp, Homo sapiens
gatcaactgatgctt

SEQ ID NO: 1834902 - DNA, 15 bp, Homo sapiens
atcaactgatgcttt

SEQ ID NO: 1834903 - DNA, 15 bp, Homo sapiens
tcaactgatgctttc

SEQ ID NO: 1834904 - DNA, 15 bp, Homo sapiens
caactgatgctttca

SEQ ID NO: 1834905 - DNA, 15 bp, Homo sapiens
aactgatgctttcat

SEQ ID NO: 1834906 - DNA, 15 bp, Homo sapiens
actgatgctttcatt

SEQ ID NO: 1834907 - DNA, 15 bp, Homo sapiens
ctgatgctttcattc

SEQ ID NO: 1834908 - DNA, 15 bp, Homo sapiens
tgatgctttcattct

SEQ ID NO: 1834909 - DNA, 15 bp, Homo sapiens
gatgctttcattctt

SEQ ID NO: 1834910 - DNA, 15 bp, Homo sapiens
atgctttcattcttc

SEQ ID NO: 1834911 - DNA, 15 bp, Homo sapiens
tgctttcattcttca

SEQ ID NO: 1834912 - DNA, 15 bp, Homo sapiens
gctttcattcttcaa

SEQ ID NO: 1834913 - DNA, 15 bp, Homo sapiens
ctttcattcttcaaa

SEQ ID NO: 1834914 - DNA, 15 bp, Homo sapiens
tttcattcttcaaac

SEQ ID NO: 1834915 - DNA, 15 bp, Homo sapiens
ttcattcttcaaaca

SEQ ID NO: 1834916 - DNA, 15 bp, Homo sapiens
tcattcttcaaacaa

SEQ ID NO: 1834917 - DNA, 15 bp, Homo sapiens
cattcttcaaacaaa

SEQ ID NO: 1834918 - DNA, 15 bp, Homo sapiens
attcttcaaacaaaa

SEQ ID NO: 1834919 - DNA, 15 bp, Homo sapiens
ttcttcaaacaaaaa

SEQ ID NO: 1834920 - DNA, 15 bp, Homo sapiens
tcttcaaacaaaaat

SEQ ID NO: 1834921 - DNA, 15 bp, Homo sapiens
cttcaaacaaaaatg

SEQ ID NO: 1834922 - DNA, 15 bp, Homo sapiens
ttcaaacaaaaatgg

SEQ ID NO: 1834923 - DNA, 15 bp, Homo sapiens
tcaaacaaaaatggg

SEQ ID NO: 1834924 - DNA, 15 bp, Homo sapiens
caaacaaaaatgggt

SEQ ID NO: 1834925 - DNA, 15 bp, Homo sapiens
aaacaaaaatgggtt

SEQ ID NO: 1834926 - DNA, 15 bp, Homo sapiens
aacaaaaatgggttg

SEQ ID NO: 1834927 - DNA, 15 bp, Homo sapiens
acaaaaatgggttga

SEQ ID NO: 1834928 - DNA, 15 bp, Homo sapiens
caaaaatgggttgag

SEQ ID NO: 1834929 - DNA, 15 bp, Homo sapiens
aaaaatgggttgagt

SEQ ID NO: 1834930 - DNA, 15 bp, Homo sapiens
aaaatgggttgagtt

SEQ ID NO: 1834931 - DNA, 15 bp, Homo sapiens
aaatgggttgagttt

SEQ ID NO: 1834932 - DNA, 15 bp, Homo sapiens
aatgggttgagtttc

SEQ ID NO: 1834933 - DNA, 15 bp, Homo sapiens
atgggttgagtttca

SEQ ID NO: 1834934 - DNA, 15 bp, Homo sapiens
tgggttgagtttcat

SEQ ID NO: 1834935 - DNA, 15 bp, Homo sapiens
gggttgagtttcata

SEQ ID NO: 1834936 - DNA, 15 bp, Homo sapiens
ggttgagtttcatag

SEQ ID NO: 1834937 - DNA, 15 bp, Homo sapiens
ttgagtttcatagat

SEQ ID NO: 1834938 - DNA, 15 bp, Homo sapiens
tgagtttcatagata

SEQ ID NO: 1834939 - DNA, 15 bp, Homo sapiens
gagtttcatagataa

SEQ ID NO: 1834940 - DNA, 15 bp, Homo sapiens
agtttcatagataag

SEQ ID NO: 1834941 - DNA, 15 bp, Homo sapiens
gtttcatagataagt

SEQ ID NO: 1834942 - DNA, 15 bp, Homo sapiens
tcatagataagtcag

SEQ ID NO: 1834943 - DNA, 15 bp, Homo sapiens
catagataagtcagg

SEQ ID NO: 1834944 - DNA, 15 bp, Homo sapiens
atagataagtcaggg

SEQ ID NO: 1834945 - DNA, 15 bp, Homo sapiens
tagataagtcaggga

SEQ ID NO: 1834946 - DNA, 15 bp, Homo sapiens
agataagtcagggaa

SEQ ID NO: 1834947 - DNA, 15 bp, Homo sapiens
gataagtcagggaaa

SEQ ID NO: 1834948 - DNA, 15 bp, Homo sapiens
ataagtcagggaaag

SEQ ID NO: 1834949 - DNA, 15 bp, Homo sapiens
taagtcagggaaagc

SEQ ID NO: 1834950 - DNA, 15 bp, Homo sapiens
aagtcagggaaagct

SEQ ID NO: 1834951 - DNA, 15 bp, Homo sapiens
agtcagggaaagctc

SEQ ID NO: 1834952 - DNA, 15 bp, Homo sapiens
gtcagggaaagctcc

SEQ ID NO: 1834953 - DNA, 15 bp, Homo sapiens
tcagggaaagctcct

SEQ ID NO: 1834954 - DNA, 15 bp, Homo sapiens
cagggaaagctcctg

SEQ ID NO: 1834955 - DNA, 15 bp, Homo sapiens
agggaaagctcctga

SEQ ID NO: 1834956 - DNA, 15 bp, Homo sapiens
gggaaagctcctgag

SEQ ID NO: 1834957 - DNA, 15 bp, Homo sapiens
ggaaagctcctgaga

SEQ ID NO: 1834958 - DNA, 15 bp, Homo sapiens
gaaagctcctgagaa

SEQ ID NO: 1834959 - DNA, 15 bp, Homo sapiens
aaagctcctgagaaa

SEQ ID NO: 1834960 - DNA, 15 bp, Homo sapiens
aagctcctgagaaag

SEQ ID NO: 1834961 - DNA, 15 bp, Homo sapiens
agctcctgagaaaga

SEQ ID NO: 1834962 - DNA, 15 bp, Homo sapiens
gctcctgagaaagag

SEQ ID NO: 1834963 - DNA, 15 bp, Homo sapiens
ctcctgagaaagagg

SEQ ID NO: 1834964 - DNA, 15 bp, Homo sapiens
tcctgagaaagaggt

SEQ ID NO: 1834965 - DNA, 15 bp, Homo sapiens
cctgagaaagaggtg

SEQ ID NO: 1834966 - DNA, 15 bp, Homo sapiens
ctgagaaagaggtga

SEQ ID NO: 1834967 - DNA, 15 bp, Homo sapiens
tgagaaagaggtgaa

SEQ ID NO: 1834968 - DNA, 15 bp, Homo sapiens
gagaaagaggtgaaa

SEQ ID NO: 1834969 - DNA, 15 bp, Homo sapiens
agaaagaggtgaaag

SEQ ID NO: 1834970 - DNA, 15 bp, Homo sapiens
gaaagaggtgaaagg

SEQ ID NO: 1834971 - DNA, 15 bp, Homo sapiens
aaagaggtgaaaggg

SEQ ID NO: 1834972 - DNA, 15 bp, Homo sapiens
aagaggtgaaagggt

SEQ ID NO: 1834973 - DNA, 15 bp, Homo sapiens
agaggtgaaagggta

SEQ ID NO: 1834974 - DNA, 15 bp, Homo sapiens
gaggtgaaagggtag

SEQ ID NO: 1834975 - DNA, 15 bp, Homo sapiens
aggtgaaagggtaga

SEQ ID NO: 1834976 - DNA, 15 bp, Homo sapiens
ggtgaaagggtagac

SEQ ID NO: 1834977 - DNA, 15 bp, Homo sapiens
gtgaaagggtagaca

SEQ ID NO: 1834978 - DNA, 15 bp, Homo sapiens
tgaaagggtagacat

SEQ ID NO: 1834979 - DNA, 15 bp, Homo sapiens
gaaagggtagacatg

SEQ ID NO: 1834980 - DNA, 15 bp, Homo sapiens
aaagggtagacatga

SEQ ID NO: 1834981 - DNA, 15 bp, Homo sapiens
aagggtagacatgat

SEQ ID NO: 1834982 - DNA, 15 bp, Homo sapiens
agggtagacatgatc

SEQ ID NO: 1834983 - DNA, 15 bp, Homo sapiens
gggtagacatgatcc

SEQ ID NO: 1834984 - DNA, 15 bp, Homo sapiens
ggtagacatgatccc

SEQ ID NO: 1834985 - DNA, 15 bp, Homo sapiens
gtagacatgatccct

SEQ ID NO: 1834986 - DNA, 15 bp, Homo sapiens
tagacatgatccctg

SEQ ID NO: 1834987 - DNA, 15 bp, Homo sapiens
agacatgatccctgc

SEQ ID NO: 1834988 - DNA, 15 bp, Homo sapiens
gacatgatccctgcc

SEQ ID NO: 1834989 - DNA, 15 bp, Homo sapiens
acatgatccctgccc

SEQ ID NO: 1834990 - DNA, 15 bp, Homo sapiens
catgatccctgccct

SEQ ID NO: 1834991 - DNA, 15 bp, Homo sapiens
atgatccctgccctc

SEQ ID NO: 1834992 - DNA, 15 bp, Homo sapiens
tgatccctgccctct

SEQ ID NO: 1834993 - DNA, 15 bp, Homo sapiens
atccctgccctcttg

SEQ ID NO: 1834994 - DNA, 15 bp, Homo sapiens
tccctgccctcttgt

SEQ ID NO: 1834995 - DNA, 15 bp, Homo sapiens
ccctgccctcttgtg

SEQ ID NO: 1834996 - DNA, 15 bp, Homo sapiens
cctgccctcttgtgt

SEQ ID NO: 1834997 - DNA, 15 bp, Homo sapiens
ctgccctcttgtgta

SEQ ID NO: 1834998 - DNA, 15 bp, Homo sapiens
tgccctcttgtgtag

SEQ ID NO: 1834999 - DNA, 15 bp, Homo sapiens
gccctcttgtgtagc

SEQ ID NO: 1835000 - DNA, 15 bp, Homo sapiens
ccctcttgtgtagca

SEQ ID NO: 1835001 - DNA, 15 bp, Homo sapiens
cctcttgtgtagcac

SEQ ID NO: 1835002 - DNA, 15 bp, Homo sapiens
ctcttgtgtagcaca

SEQ ID NO: 1835003 - DNA, 15 bp, Homo sapiens
tcttgtgtagcacac

SEQ ID NO: 1835004 - DNA, 15 bp, Homo sapiens
cttgtgtagcacact

SEQ ID NO: 1835005 - DNA, 15 bp, Homo sapiens
ttgtgtagcacacta

SEQ ID NO: 1835006 - DNA, 15 bp, Homo sapiens
tgtgtagcacactat

SEQ ID NO: 1835007 - DNA, 15 bp, Homo sapiens
gtgtagcacactatg

SEQ ID NO: 1835008 - DNA, 15 bp, Homo sapiens
tgtagcacactatgg

SEQ ID NO: 1835009 - DNA, 15 bp, Homo sapiens
gtagcacactatgga

SEQ ID NO: 1835010 - DNA, 15 bp, Homo sapiens
tagcacactatggaa

SEQ ID NO: 1835011 - DNA, 15 bp, Homo sapiens
agcacactatggaag

SEQ ID NO: 1835012 - DNA, 15 bp, Homo sapiens
gcacactatggaagg

SEQ ID NO: 1835013 - DNA, 15 bp, Homo sapiens
cacactatggaaggg

SEQ ID NO: 1835014 - DNA, 15 bp, Homo sapiens
acactatggaaggga

SEQ ID NO: 1835015 - DNA, 15 bp, Homo sapiens
cactatggaagggaa

SEQ ID NO: 1835016 - DNA, 15 bp, Homo sapiens
actatggaagggaaa

SEQ ID NO: 1835017 - DNA, 15 bp, Homo sapiens
ctatggaagggaaaa

SEQ ID NO: 1835018 - DNA, 15 bp, Homo sapiens
tatggaagggaaaat

SEQ ID NO: 1835019 - DNA, 15 bp, Homo sapiens
atggaagggaaaata

SEQ ID NO: 1835020 - DNA, 15 bp, Homo sapiens
tggaagggaaaatag

SEQ ID NO: 1835021 - DNA, 15 bp, Homo sapiens
ggaagggaaaataga

SEQ ID NO: 1835022 - DNA, 15 bp, Homo sapiens
gaagggaaaatagac

SEQ ID NO: 1835023 - DNA, 15 bp, Homo sapiens
aagggaaaatagaca

SEQ ID NO: 1835024 - DNA, 15 bp, Homo sapiens
agggaaaatagacat

SEQ ID NO: 1835025 - DNA, 15 bp, Homo sapiens
gggaaaatagacatt

SEQ ID NO: 1835026 - DNA, 15 bp, Homo sapiens
ggaaaatagacatta

SEQ ID NO: 1835027 - DNA, 15 bp, Homo sapiens
gaaaatagacattaa

SEQ ID NO: 1835028 - DNA, 15 bp, Homo sapiens
aaaatagacattaaa

SEQ ID NO: 1835029 - DNA, 15 bp, Homo sapiens
aaatagacattaaat

SEQ ID NO: 1835030 - DNA, 15 bp, Homo sapiens
aatagacattaaata

SEQ ID NO: 1835031 - DNA, 15 bp, Homo sapiens
atagacattaaataa

SEQ ID NO: 1835032 - DNA, 15 bp, Homo sapiens
tagacattaaataaa

SEQ ID NO: 1835033 - DNA, 15 bp, Homo sapiens
agacattaaataaag

SEQ ID NO: 1835034 - DNA, 15 bp, Homo sapiens
gacattaaataaaga

SEQ ID NO: 1835035 - DNA, 15 bp, Homo sapiens
acattaaataaagac

SEQ ID NO: 1835036 - DNA, 15 bp, Homo sapiens
cattaaataaagact

SEQ ID NO: 1835037 - DNA, 15 bp, Homo sapiens
attaaataaagacta

SEQ ID NO: 1835038 - DNA, 15 bp, Homo sapiens
ttaaataaagactat

SEQ ID NO: 1835039 - DNA, 15 bp, Homo sapiens
taaataaagactata

SEQ ID NO: 1835040 - DNA, 15 bp, Homo sapiens
aaataaagactataa

SEQ ID NO: 1835041 - DNA, 15 bp, Homo sapiens
aataaagactataaa

SEQ ID NO: 1835042 - DNA, 15 bp, Homo sapiens
ataaagactataaat

SEQ ID NO: 1835043 - DNA, 15 bp, Homo sapiens
taaagactataaatg

SEQ ID NO: 1835044 - DNA, 15 bp, Homo sapiens
aaagactataaatgt

SEQ ID NO: 1835045 - DNA, 15 bp, Homo sapiens
aagactataaatgtg

SEQ ID NO: 1835046 - DNA, 15 bp, Homo sapiens
agactataaatgtga

SEQ ID NO: 1835047 - DNA, 15 bp, Homo sapiens
gactataaatgtgat

SEQ ID NO: 1835048 - DNA, 15 bp, Homo sapiens
actataaatgtgata

SEQ ID NO: 1835049 - DNA, 15 bp, Homo sapiens
ctataaatgtgataa

SEQ ID NO: 1835050 - DNA, 15 bp, Homo sapiens
tataaatgtgataag

SEQ ID NO: 1835051 - DNA, 15 bp, Homo sapiens
ataaatgtgataagg

SEQ ID NO: 1835052 - DNA, 15 bp, Homo sapiens
taaatgtgataaggt

SEQ ID NO: 1835053 - DNA, 15 bp, Homo sapiens
aaatgtgataaggtt

SEQ ID NO: 1835054 - DNA, 15 bp, Homo sapiens
aatgtgataaggttt

SEQ ID NO: 1835055 - DNA, 15 bp, Homo sapiens
atgtgataaggtttc

SEQ ID NO: 1835056 - DNA, 15 bp, Homo sapiens
tgtgataaggtttcc

SEQ ID NO: 1835057 - DNA, 15 bp, Homo sapiens
gtgataaggtttcca

SEQ ID NO: 1835058 - DNA, 15 bp, Homo sapiens
tgataaggtttccaa

SEQ ID NO: 1835059 - DNA, 15 bp, Homo sapiens
gataaggtttccaaa

SEQ ID NO: 1835060 - DNA, 15 bp, Homo sapiens
ataaggtttccaaaa

SEQ ID NO: 1835061 - DNA, 15 bp, Homo sapiens
taaggtttccaaaaa

SEQ ID NO: 1835062 - DNA, 15 bp, Homo sapiens
aaggtttccaaaaag

SEQ ID NO: 1835063 - DNA, 15 bp, Homo sapiens
aggtttccaaaaaga

SEQ ID NO: 1835064 - DNA, 15 bp, Homo sapiens
ggtttccaaaaagaa

SEQ ID NO: 1835065 - DNA, 15 bp, Homo sapiens
gtttccaaaaagaaa

SEQ ID NO: 1835066 - DNA, 15 bp, Homo sapiens
tttccaaaaagaaat

SEQ ID NO: 1835067 - DNA, 15 bp, Homo sapiens
ttccaaaaagaaatg

SEQ ID NO: 1835068 - DNA, 15 bp, Homo sapiens
tccaaaaagaaatgt

SEQ ID NO: 1835069 - DNA, 15 bp, Homo sapiens
ccaaaaagaaatgtg

SEQ ID NO: 1835070 - DNA, 15 bp, Homo sapiens
caaaaagaaatgtgg

SEQ ID NO: 1835071 - DNA, 15 bp, Homo sapiens
aaaaagaaatgtggg

SEQ ID NO: 1835072 - DNA, 15 bp, Homo sapiens
aaaagaaatgtgggc

SEQ ID NO: 1835073 - DNA, 15 bp, Homo sapiens
aaagaaatgtgggct

SEQ ID NO: 1835074 - DNA, 15 bp, Homo sapiens
aagaaatgtgggctg

SEQ ID NO: 1835075 - DNA, 15 bp, Homo sapiens
agaaatgtgggctgt

SEQ ID NO: 1835076 - DNA, 15 bp, Homo sapiens
gaaatgtgggctgtg

SEQ ID NO: 1835077 - DNA, 15 bp, Homo sapiens
aaatgtgggctgtgc

SEQ ID NO: 1835078 - DNA, 15 bp, Homo sapiens
aatgtgggctgtgct

SEQ ID NO: 1835079 - DNA, 15 bp, Homo sapiens
atgtgggctgtgctg

SEQ ID NO: 1835080 - DNA, 15 bp, Homo sapiens
tgtgggctgtgctga

SEQ ID NO: 1835081 - DNA, 15 bp, Homo sapiens
gtgggctgtgctgag

SEQ ID NO: 1835082 - DNA, 15 bp, Homo sapiens
tgggctgtgctgaga

SEQ ID NO: 1835083 - DNA, 15 bp, Homo sapiens
gggctgtgctgagaa

SEQ ID NO: 1835084 - DNA, 15 bp, Homo sapiens
ggctgtgctgagaac

SEQ ID NO: 1835085 - DNA, 15 bp, Homo sapiens
gctgtgctgagaacc

SEQ ID NO: 1835086 - DNA, 15 bp, Homo sapiens
ctgtgctgagaaccc

SEQ ID NO: 1835087 - DNA, 15 bp, Homo sapiens
tgtgctgagaaccca

SEQ ID NO: 1835088 - DNA, 15 bp, Homo sapiens
gtgctgagaacccat

SEQ ID NO: 1835089 - DNA, 15 bp, Homo sapiens
tgctgagaacccata

SEQ ID NO: 1835090 - DNA, 15 bp, Homo sapiens
gctgagaacccatac

SEQ ID NO: 1835091 - DNA, 15 bp, Homo sapiens
ctgagaacccatact

SEQ ID NO: 1835092 - DNA, 15 bp, Homo sapiens
tgagaacccatacta

SEQ ID NO: 1835093 - DNA, 15 bp, Homo sapiens
gagaacccatactag

SEQ ID NO: 1835094 - DNA, 15 bp, Homo sapiens
agaacccatactaga

SEQ ID NO: 1835095 - DNA, 15 bp, Homo sapiens
gaacccatactagag

SEQ ID NO: 1835096 - DNA, 15 bp, Homo sapiens
aacccatactagagg

SEQ ID NO: 1835097 - DNA, 15 bp, Homo sapiens
acccatactagaggc

SEQ ID NO: 1835098 - DNA, 15 bp, Homo sapiens
cccatactagaggca

SEQ ID NO: 1835099 - DNA, 15 bp, Homo sapiens
ccatactagaggcac

SEQ ID NO: 1835100 - DNA, 15 bp, Homo sapiens
catactagaggcacg

SEQ ID NO: 1835101 - DNA, 15 bp, Homo sapiens
atactagaggcacgg

SEQ ID NO: 1835102 - DNA, 15 bp, Homo sapiens
tactagaggcacgga

SEQ ID NO: 1835103 - DNA, 15 bp, Homo sapiens
actagaggcacggat

SEQ ID NO: 1835104 - DNA, 15 bp, Homo sapiens
ctagaggcacggata

SEQ ID NO: 1835105 - DNA, 15 bp, Homo sapiens
tagaggcacggataa

SEQ ID NO: 1835106 - DNA, 15 bp, Homo sapiens
agaggcacggataat

SEQ ID NO: 1835107 - DNA, 15 bp, Homo sapiens
gaggcacggataatc

SEQ ID NO: 1835108 - DNA, 15 bp, Homo sapiens
aggcacggataatct

SEQ ID NO: 1835109 - DNA, 15 bp, Homo sapiens
ggcacggataatcta

SEQ ID NO: 1835110 - DNA, 15 bp, Homo sapiens
gcacggataatctaa

SEQ ID NO: 1835111 - DNA, 15 bp, Homo sapiens
cacggataatctaag

SEQ ID NO: 1835112 - DNA, 15 bp, Homo sapiens
acggataatctaagt

SEQ ID NO: 1835113 - DNA, 15 bp, Homo sapiens
cggataatctaagtg

SEQ ID NO: 1835114 - DNA, 15 bp, Homo sapiens
ggataatctaagtga

SEQ ID NO: 1835115 - DNA, 15 bp, Homo sapiens
gataatctaagtgaa

SEQ ID NO: 1835116 - DNA, 15 bp, Homo sapiens
ataatctaagtgaac

SEQ ID NO: 1835117 - DNA, 15 bp, Homo sapiens
taatctaagtgaacc

SEQ ID NO: 1835118 - DNA, 15 bp, Homo sapiens
aatctaagtgaaccc

SEQ ID NO: 1835119 - DNA, 15 bp, Homo sapiens
atctaagtgaaccct

SEQ ID NO: 1835120 - DNA, 15 bp, Homo sapiens
tctaagtgaaccctg

SEQ ID NO: 1835121 - DNA, 15 bp, Homo sapiens
ctaagtgaaccctgg

SEQ ID NO: 1835122 - DNA, 15 bp, Homo sapiens
taagtgaaccctggt

SEQ ID NO: 1835123 - DNA, 15 bp, Homo sapiens
aagtgaaccctggtt

SEQ ID NO: 1835124 - DNA, 15 bp, Homo sapiens
agtgaaccctggttt

SEQ ID NO: 1835125 - DNA, 15 bp, Homo sapiens
gtgaaccctggtttg

SEQ ID NO: 1835126 - DNA, 15 bp, Homo sapiens
tgaaccctggtttgg

SEQ ID NO: 1835127 - DNA, 15 bp, Homo sapiens
gaaccctggtttggc

SEQ ID NO: 1835128 - DNA, 15 bp, Homo sapiens
aaccctggtttggct

SEQ ID NO: 1835129 - DNA, 15 bp, Homo sapiens
accctggtttggctg

SEQ ID NO: 1835130 - DNA, 15 bp, Homo sapiens
ccctggtttggctgc

SEQ ID NO: 1835131 - DNA, 15 bp, Homo sapiens
cctggtttggctgct

SEQ ID NO: 1835132 - DNA, 15 bp, Homo sapiens
ctggtttggctgctc

SEQ ID NO: 1835133 - DNA, 15 bp, Homo sapiens
tggtttggctgctca

SEQ ID NO: 1835134 - DNA, 15 bp, Homo sapiens
ggtttggctgctcac

SEQ ID NO: 1835135 - DNA, 15 bp, Homo sapiens
gtttggctgctcacc

SEQ ID NO: 1835136 - DNA, 15 bp, Homo sapiens
tttggctgctcacca

SEQ ID NO: 1835137 - DNA, 15 bp, Homo sapiens
ttggctgctcaccac

SEQ ID NO: 1835138 - DNA, 15 bp, Homo sapiens
tggctgctcaccact

SEQ ID NO: 1835139 - DNA, 15 bp, Homo sapiens
ggctgctcaccactc

SEQ ID NO: 1835140 - DNA, 15 bp, Homo sapiens
gctgctcaccactcg

SEQ ID NO: 1835141 - DNA, 15 bp, Homo sapiens
ctgctcaccactcga

SEQ ID NO: 1835142 - DNA, 15 bp, Homo sapiens
tgctcaccactcgaa

SEQ ID NO: 1835143 - DNA, 15 bp, Homo sapiens
gctcaccactcgaaa

SEQ ID NO: 1835144 - DNA, 15 bp, Homo sapiens
ctcaccactcgaaag

SEQ ID NO: 1835145 - DNA, 15 bp, Homo sapiens
tcaccactcgaaagc

SEQ ID NO: 1835146 - DNA, 15 bp, Homo sapiens
caccactcgaaagcc

SEQ ID NO: 1835147 - DNA, 15 bp, Homo sapiens
accactcgaaagcca

SEQ ID NO: 1835148 - DNA, 15 bp, Homo sapiens
ccactcgaaagccag

SEQ ID NO: 1835149 - DNA, 15 bp, Homo sapiens
cactcgaaagccaga

SEQ ID NO: 1835150 - DNA, 15 bp, Homo sapiens
actcgaaagccagac

SEQ ID NO: 1835151 - DNA, 15 bp, Homo sapiens
ctcgaaagccagaca

SEQ ID NO: 1835152 - DNA, 15 bp, Homo sapiens
tcgaaagccagacat

SEQ ID NO: 1835153 - DNA, 15 bp, Homo sapiens
cgaaagccagacatg

SEQ ID NO: 1835154 - DNA, 15 bp, Homo sapiens
gaaagccagacatga

SEQ ID NO: 1835155 - DNA, 15 bp, Homo sapiens
aaagccagacatgag

SEQ ID NO: 1835156 - DNA, 15 bp, Homo sapiens
aagccagacatgaga

SEQ ID NO: 1835157 - DNA, 15 bp, Homo sapiens
agccagacatgagag

SEQ ID NO: 1835158 - DNA, 15 bp, Homo sapiens
gccagacatgagaga

SEQ ID NO: 1835159 - DNA, 15 bp, Homo sapiens
ccagacatgagagac

SEQ ID NO: 1835160 - DNA, 15 bp, Homo sapiens
cagacatgagagaca

SEQ ID NO: 1835161 - DNA, 15 bp, Homo sapiens
agacatgagagacaa

SEQ ID NO: 1835162 - DNA, 15 bp, Homo sapiens
gacatgagagacaag

SEQ ID NO: 1835163 - DNA, 15 bp, Homo sapiens
acatgagagacaagg

SEQ ID NO: 1835164 - DNA, 15 bp, Homo sapiens
catgagagacaaggt

SEQ ID NO: 1835165 - DNA, 15 bp, Homo sapiens
atgagagacaaggtt

SEQ ID NO: 1835166 - DNA, 15 bp, Homo sapiens
tgagagacaaggttg

SEQ ID NO: 1835167 - DNA, 15 bp, Homo sapiens
gagagacaaggttgg

SEQ ID NO: 1835168 - DNA, 15 bp, Homo sapiens
agagacaaggttggt

SEQ ID NO: 1835169 - DNA, 15 bp, Homo sapiens
gagacaaggttggtg

SEQ ID NO: 1835170 - DNA, 15 bp, Homo sapiens
agacaaggttggtgg

SEQ ID NO: 1835171 - DNA, 15 bp, Homo sapiens
gacaaggttggtggg

SEQ ID NO: 1835172 - DNA, 15 bp, Homo sapiens
acaaggttggtggga

SEQ ID NO: 1835173 - DNA, 15 bp, Homo sapiens
caaggttggtgggag

SEQ ID NO: 1835174 - DNA, 15 bp, Homo sapiens
aaggttggtgggagg

SEQ ID NO: 1835175 - DNA, 15 bp, Homo sapiens
aggttggtgggagga

SEQ ID NO: 1835176 - DNA, 15 bp, Homo sapiens
gttggtgggaggaaa

SEQ ID NO: 1835177 - DNA, 15 bp, Homo sapiens
ttggtgggaggaaaa

SEQ ID NO: 1835178 - DNA, 15 bp, Homo sapiens
tggtgggaggaaaag

SEQ ID NO: 1835179 - DNA, 15 bp, Homo sapiens
ggtgggaggaaaagc

SEQ ID NO: 1835180 - DNA, 15 bp, Homo sapiens
gtgggaggaaaagcc

SEQ ID NO: 1835181 - DNA, 15 bp, Homo sapiens
tgggaggaaaagcca

SEQ ID NO: 1835182 - DNA, 15 bp, Homo sapiens
gggaggaaaagccag

SEQ ID NO: 1835183 - DNA, 15 bp, Homo sapiens
ggaggaaaagccagt

SEQ ID NO: 1835184 - DNA, 15 bp, Homo sapiens
gaggaaaagccagtt

SEQ ID NO: 1835185 - DNA, 15 bp, Homo sapiens
aggaaaagccagttc

SEQ ID NO: 1835186 - DNA, 15 bp, Homo sapiens
ggaaaagccagttca

SEQ ID NO: 1835187 - DNA, 15 bp, Homo sapiens
gaaaagccagttcat

SEQ ID NO: 1835188 - DNA, 15 bp, Homo sapiens
aaaagccagttcatc

SEQ ID NO: 1835189 - DNA, 15 bp, Homo sapiens
aaagccagttcatca

SEQ ID NO: 1835190 - DNA, 15 bp, Homo sapiens
aagccagttcatcag

SEQ ID NO: 1835191 - DNA, 15 bp, Homo sapiens
agccagttcatcaga

SEQ ID NO: 1835192 - DNA, 15 bp, Homo sapiens
gccagttcatcagaa

SEQ ID NO: 1835193 - DNA, 15 bp, Homo sapiens
ccagttcatcagaaa

SEQ ID NO: 1835194 - DNA, 15 bp, Homo sapiens
cagttcatcagaaag

SEQ ID NO: 1835195 - DNA, 15 bp, Homo sapiens
agttcatcagaaagc

SEQ ID NO: 1835196 - DNA, 15 bp, Homo sapiens
gttcatcagaaagcc

SEQ ID NO: 1835197 - DNA, 15 bp, Homo sapiens
ttcatcagaaagcca

SEQ ID NO: 1835198 - DNA, 15 bp, Homo sapiens
tcatcagaaagccag

SEQ ID NO: 1835199 - DNA, 15 bp, Homo sapiens
catcagaaagccagt

SEQ ID NO: 1835200 - DNA, 15 bp, Homo sapiens
atcagaaagccagta

SEQ ID NO: 1835201 - DNA, 15 bp, Homo sapiens
tcagaaagccagtaa

SEQ ID NO: 1835202 - DNA, 15 bp, Homo sapiens
cagaaagccagtaaa

SEQ ID NO: 1835203 - DNA, 15 bp, Homo sapiens
agaaagccagtaaac

SEQ ID NO: 1835204 - DNA, 15 bp, Homo sapiens
gaaagccagtaaacc

SEQ ID NO: 1835205 - DNA, 15 bp, Homo sapiens
aaagccagtaaacca

SEQ ID NO: 1835206 - DNA, 15 bp, Homo sapiens
aagccagtaaaccaa

SEQ ID NO: 1835207 - DNA, 15 bp, Homo sapiens
agccagtaaaccaag

SEQ ID NO: 1835208 - DNA, 15 bp, Homo sapiens
gccagtaaaccaaga

SEQ ID NO: 1835209 - DNA, 15 bp, Homo sapiens
ccagtaaaccaagaa

SEQ ID NO: 1835210 - DNA, 15 bp, Homo sapiens
cagtaaaccaagaag

SEQ ID NO: 1835211 - DNA, 15 bp, Homo sapiens
agtaaaccaagaaga

SEQ ID NO: 1835212 - DNA, 15 bp, Homo sapiens
gtaaaccaagaagat

SEQ ID NO: 1835213 - DNA, 15 bp, Homo sapiens
taaaccaagaagatg

SEQ ID NO: 1835214 - DNA, 15 bp, Homo sapiens
aaaccaagaagatgg

SEQ ID NO: 1835215 - DNA, 15 bp, Homo sapiens
aaccaagaagatggt

SEQ ID NO: 1835216 - DNA, 15 bp, Homo sapiens
accaagaagatggtg

SEQ ID NO: 1835217 - DNA, 15 bp, Homo sapiens
ccaagaagatggtga

SEQ ID NO: 1835218 - DNA, 15 bp, Homo sapiens
caagaagatggtgag

SEQ ID NO: 1835219 - DNA, 15 bp, Homo sapiens
aagaagatggtgagc

SEQ ID NO: 1835220 - DNA, 15 bp, Homo sapiens
agaagatggtgagct

SEQ ID NO: 1835221 - DNA, 15 bp, Homo sapiens
gaagatggtgagcta

SEQ ID NO: 1835222 - DNA, 15 bp, Homo sapiens
aagatggtgagctag

SEQ ID NO: 1835223 - DNA, 15 bp, Homo sapiens
agatggtgagctagt

SEQ ID NO: 1835224 - DNA, 15 bp, Homo sapiens
gatggtgagctagta

SEQ ID NO: 1835225 - DNA, 15 bp, Homo sapiens
atggtgagctagtat

SEQ ID NO: 1835226 - DNA, 15 bp, Homo sapiens
tggtgagctagtatt

SEQ ID NO: 1835227 - DNA, 15 bp, Homo sapiens
ggtgagctagtattt

SEQ ID NO: 1835228 - DNA, 15 bp, Homo sapiens
gtgagctagtatttt

SEQ ID NO: 1835229 - DNA, 15 bp, Homo sapiens
tgagctagtatttta

SEQ ID NO: 1835230 - DNA, 15 bp, Homo sapiens
gagctagtattttaa

SEQ ID NO: 1835231 - DNA, 15 bp, Homo sapiens
agctagtattttaaa

SEQ ID NO: 1835232 - DNA, 15 bp, Homo sapiens
gctagtattttaaag

SEQ ID NO: 1835233 - DNA, 15 bp, Homo sapiens
ctagtattttaaagt

SEQ ID NO: 1835234 - DNA, 15 bp, Homo sapiens
tagtattttaaagta

SEQ ID NO: 1835235 - DNA, 15 bp, Homo sapiens
agtattttaaagtac

SEQ ID NO: 1835236 - DNA, 15 bp, Homo sapiens
gtattttaaagtacc

SEQ ID NO: 1835237 - DNA, 15 bp, Homo sapiens
tattttaaagtacca

SEQ ID NO: 1835238 - DNA, 15 bp, Homo sapiens
attttaaagtaccat

SEQ ID NO: 1835239 - DNA, 15 bp, Homo sapiens
ttttaaagtaccatc

SEQ ID NO: 1835240 - DNA, 15 bp, Homo sapiens
tttaaagtaccatct

SEQ ID NO: 1835241 - DNA, 15 bp, Homo sapiens
ttaaagtaccatctt

SEQ ID NO: 1835242 - DNA, 15 bp, Homo sapiens
taaagtaccatcttg

SEQ ID NO: 1835243 - DNA, 15 bp, Homo sapiens
aaagtaccatcttga

SEQ ID NO: 1835244 - DNA, 15 bp, Homo sapiens
aagtaccatcttgaa

SEQ ID NO: 1835245 - DNA, 15 bp, Homo sapiens
agtaccatcttgaat

SEQ ID NO: 1835246 - DNA, 15 bp, Homo sapiens
gtaccatcttgaatt

SEQ ID NO: 1835247 - DNA, 15 bp, Homo sapiens
taccatcttgaattt

SEQ ID NO: 1835248 - DNA, 15 bp, Homo sapiens
accatcttgaatttt

SEQ ID NO: 1835249 - DNA, 15 bp, Homo sapiens
ccatcttgaatttta

SEQ ID NO: 1835250 - DNA, 15 bp, Homo sapiens
catcttgaattttaa

SEQ ID NO: 1835251 - DNA, 15 bp, Homo sapiens
atcttgaattttaaa

SEQ ID NO: 1835252 - DNA, 15 bp, Homo sapiens
tcttgaattttaaaa

SEQ ID NO: 1835253 - DNA, 15 bp, Homo sapiens
cttgaattttaaaat

SEQ ID NO: 1835254 - DNA, 15 bp, Homo sapiens
ttgaattttaaaatt

SEQ ID NO: 1835255 - DNA, 15 bp, Homo sapiens
tgaattttaaaattt

SEQ ID NO: 1835256 - DNA, 15 bp, Homo sapiens
gaattttaaaattta

SEQ ID NO: 1835257 - DNA, 15 bp, Homo sapiens
aattttaaaatttat

SEQ ID NO: 1835258 - DNA, 15 bp, Homo sapiens
attttaaaatttatc

SEQ ID NO: 1835259 - DNA, 15 bp, Homo sapiens
ttttaaaatttatca

SEQ ID NO: 1835260 - DNA, 15 bp, Homo sapiens
tttaaaatttatcac

SEQ ID NO: 1835261 - DNA, 15 bp, Homo sapiens
ttaaaatttatcaca

SEQ ID NO: 1835262 - DNA, 15 bp, Homo sapiens
taaaatttatcacag

SEQ ID NO: 1835263 - DNA, 15 bp, Homo sapiens
aaaatttatcacagt

SEQ ID NO: 1835264 - DNA, 15 bp, Homo sapiens
aaatttatcacagta

SEQ ID NO: 1835265 - DNA, 15 bp, Homo sapiens
aatttatcacagtag

SEQ ID NO: 1835266 - DNA, 15 bp, Homo sapiens
atttatcacagtagt

SEQ ID NO: 1835267 - DNA, 15 bp, Homo sapiens
tttatcacagtagtt

SEQ ID NO: 1835268 - DNA, 15 bp, Homo sapiens
ttatcacagtagttt

SEQ ID NO: 1835269 - DNA, 15 bp, Homo sapiens
tatcacagtagtttt

SEQ ID NO: 1835270 - DNA, 15 bp, Homo sapiens
atcacagtagttttt

SEQ ID NO: 1835271 - DNA, 15 bp, Homo sapiens
tcacagtagttttta

SEQ ID NO: 1835272 - DNA, 15 bp, Homo sapiens
cacagtagtttttaa

SEQ ID NO: 1835273 - DNA, 15 bp, Homo sapiens
acagtagtttttaaa

SEQ ID NO: 1835274 - DNA, 15 bp, Homo sapiens
cagtagtttttaaag

SEQ ID NO: 1835275 - DNA, 15 bp, Homo sapiens
agtagtttttaaaga

SEQ ID NO: 1835276 - DNA, 15 bp, Homo sapiens
gtagtttttaaagag

SEQ ID NO: 1835277 - DNA, 15 bp, Homo sapiens
tagtttttaaagaga

SEQ ID NO: 1835278 - DNA, 15 bp, Homo sapiens
agtttttaaagagaa

SEQ ID NO: 1835279 - DNA, 15 bp, Homo sapiens
gtttttaaagagaaa

SEQ ID NO: 1835280 - DNA, 15 bp, Homo sapiens
tttttaaagagaaac

SEQ ID NO: 1835281 - DNA, 15 bp, Homo sapiens
ttttaaagagaaact

SEQ ID NO: 1835282 - DNA, 15 bp, Homo sapiens
tttaaagagaaactt

SEQ ID NO: 1835283 - DNA, 15 bp, Homo sapiens
ttaaagagaaacttg

SEQ ID NO: 1835284 - DNA, 15 bp, Homo sapiens
taaagagaaacttgg

SEQ ID NO: 1835285 - DNA, 15 bp, Homo sapiens
aaagagaaacttggt

SEQ ID NO: 1835286 - DNA, 15 bp, Homo sapiens
aagagaaacttggta

SEQ ID NO: 1835287 - DNA, 15 bp, Homo sapiens
agagaaacttggtat

SEQ ID NO: 1835288 - DNA, 15 bp, Homo sapiens
gagaaacttggtatg

SEQ ID NO: 1835289 - DNA, 15 bp, Homo sapiens
agaaacttggtatgg

SEQ ID NO: 1835290 - DNA, 15 bp, Homo sapiens
gaaacttggtatggg

SEQ ID NO: 1835291 - DNA, 15 bp, Homo sapiens
aaacttggtatggga

SEQ ID NO: 1835292 - DNA, 15 bp, Homo sapiens
aacttggtatgggag

SEQ ID NO: 1835293 - DNA, 15 bp, Homo sapiens
acttggtatgggaga

SEQ ID NO: 1835294 - DNA, 15 bp, Homo sapiens
cttggtatgggagat

SEQ ID NO: 1835295 - DNA, 15 bp, Homo sapiens
ttggtatgggagata

SEQ ID NO: 1835296 - DNA, 15 bp, Homo sapiens
tggtatgggagatac

SEQ ID NO: 1835297 - DNA, 15 bp, Homo sapiens
ggtatgggagatacg

SEQ ID NO: 1835298 - DNA, 15 bp, Homo sapiens
gtatgggagatacgt

SEQ ID NO: 1835299 - DNA, 15 bp, Homo sapiens
tatgggagatacgtg

SEQ ID NO: 1835300 - DNA, 15 bp, Homo sapiens
atgggagatacgtgg

SEQ ID NO: 1835301 - DNA, 15 bp, Homo sapiens
tgggagatacgtggg

SEQ ID NO: 1835302 - DNA, 15 bp, Homo sapiens
gggagatacgtggga

SEQ ID NO: 1835303 - DNA, 15 bp, Homo sapiens
ggagatacgtgggag

SEQ ID NO: 1835304 - DNA, 15 bp, Homo sapiens
gagatacgtgggagt

SEQ ID NO: 1835305 - DNA, 15 bp, Homo sapiens
agatacgtgggagtg

SEQ ID NO: 1835306 - DNA, 15 bp, Homo sapiens
gatacgtgggagtgg

SEQ ID NO: 1835307 - DNA, 15 bp, Homo sapiens
atacgtgggagtggt

SEQ ID NO: 1835308 - DNA, 15 bp, Homo sapiens
tacgtgggagtggtg

SEQ ID NO: 1835309 - DNA, 15 bp, Homo sapiens
acgtgggagtggtgc

SEQ ID NO: 1835310 - DNA, 15 bp, Homo sapiens
cgtgggagtggtgcg

SEQ ID NO: 1835311 - DNA, 15 bp, Homo sapiens
gtgggagtggtgcgt

SEQ ID NO: 1835312 - DNA, 15 bp, Homo sapiens
tgggagtggtgcgtg

SEQ ID NO: 1835313 - DNA, 15 bp, Homo sapiens
gggagtggtgcgtgg

SEQ ID NO: 1835314 - DNA, 15 bp, Homo sapiens
ggagtggtgcgtggt

SEQ ID NO: 1835315 - DNA, 15 bp, Homo sapiens
gagtggtgcgtggtg

SEQ ID NO: 1835316 - DNA, 15 bp, Homo sapiens
agtggtgcgtggtgt

SEQ ID NO: 1835317 - DNA, 15 bp, Homo sapiens
gtggtgcgtggtgta

SEQ ID NO: 1835318 - DNA, 15 bp, Homo sapiens
tggtgcgtggtgtag

SEQ ID NO: 1835319 - DNA, 15 bp, Homo sapiens
ggtgcgtggtgtagg

SEQ ID NO: 1835320 - DNA, 15 bp, Homo sapiens
gtgcgtggtgtaggg

SEQ ID NO: 1835321 - DNA, 15 bp, Homo sapiens
tgcgtggtgtagggt

SEQ ID NO: 1835322 - DNA, 15 bp, Homo sapiens
gcgtggtgtagggtc

SEQ ID NO: 1835323 - DNA, 15 bp, Homo sapiens
cgtggtgtagggtct

SEQ ID NO: 1835324 - DNA, 15 bp, Homo sapiens
gtggtgtagggtctg

SEQ ID NO: 1835325 - DNA, 15 bp, Homo sapiens
tggtgtagggtctgt

SEQ ID NO: 1835326 - DNA, 15 bp, Homo sapiens
ggtgtagggtctgtg

SEQ ID NO: 1835327 - DNA, 15 bp, Homo sapiens
gtgtagggtctgtgt

SEQ ID NO: 1835328 - DNA, 15 bp, Homo sapiens
tgtagggtctgtgtg

SEQ ID NO: 1835329 - DNA, 15 bp, Homo sapiens
gtagggtctgtgtgt

SEQ ID NO: 1835330 - DNA, 15 bp, Homo sapiens
tagggtctgtgtgtc

SEQ ID NO: 1835331 - DNA, 15 bp, Homo sapiens
agggtctgtgtgtct

SEQ ID NO: 1835332 - DNA, 15 bp, Homo sapiens
gggtctgtgtgtctt

SEQ ID NO: 1835333 - DNA, 15 bp, Homo sapiens
ggtctgtgtgtcttg

SEQ ID NO: 1835334 - DNA, 15 bp, Homo sapiens
gtctgtgtgtcttgt

SEQ ID NO: 1835335 - DNA, 15 bp, Homo sapiens
tctgtgtgtcttgtt

SEQ ID NO: 1835336 - DNA, 15 bp, Homo sapiens
ctgtgtgtcttgttc

SEQ ID NO: 1835337 - DNA, 15 bp, Homo sapiens
tgtgtgtcttgttct

SEQ ID NO: 1835338 - DNA, 15 bp, Homo sapiens
gtgtgtcttgttctg

SEQ ID NO: 1835339 - DNA, 15 bp, Homo sapiens
tgtgtcttgttctga

SEQ ID NO: 1835340 - DNA, 15 bp, Homo sapiens
gtgtcttgttctgat

SEQ ID NO: 1835341 - DNA, 15 bp, Homo sapiens
tgtcttgttctgatg

SEQ ID NO: 1835342 - DNA, 15 bp, Homo sapiens
gtcttgttctgatgg

SEQ ID NO: 1835343 - DNA, 15 bp, Homo sapiens
tcttgttctgatggc

SEQ ID NO: 1835344 - DNA, 15 bp, Homo sapiens
cttgttctgatggct

SEQ ID NO: 1835345 - DNA, 15 bp, Homo sapiens
ttgttctgatggcta

SEQ ID NO: 1835346 - DNA, 15 bp, Homo sapiens
tgttctgatggctat

SEQ ID NO: 1835347 - DNA, 15 bp, Homo sapiens
gttctgatggctatc

SEQ ID NO: 1835348 - DNA, 15 bp, Homo sapiens
ttctgatggctatct

SEQ ID NO: 1835349 - DNA, 15 bp, Homo sapiens
tctgatggctatctc

SEQ ID NO: 1835350 - DNA, 15 bp, Homo sapiens
ctgatggctatctca

SEQ ID NO: 1835351 - DNA, 15 bp, Homo sapiens
tgatggctatctcag

SEQ ID NO: 1835352 - DNA, 15 bp, Homo sapiens
gatggctatctcagg

SEQ ID NO: 1835353 - DNA, 15 bp, Homo sapiens
atggctatctcaggt

SEQ ID NO: 1835354 - DNA, 15 bp, Homo sapiens
tggctatctcaggta

SEQ ID NO: 1835355 - DNA, 15 bp, Homo sapiens
ggctatctcaggtaa

SEQ ID NO: 1835356 - DNA, 15 bp, Homo sapiens
gctatctcaggtaac

SEQ ID NO: 1835357 - DNA, 15 bp, Homo sapiens
ctatctcaggtaacc

SEQ ID NO: 1835358 - DNA, 15 bp, Homo sapiens
tatctcaggtaaccg

SEQ ID NO: 1835359 - DNA, 15 bp, Homo sapiens
atctcaggtaaccgc

SEQ ID NO: 1835360 - DNA, 15 bp, Homo sapiens
tctcaggtaaccgcc

SEQ ID NO: 1835361 - DNA, 15 bp, Homo sapiens
ctcaggtaaccgcct

SEQ ID NO: 1835362 - DNA, 15 bp, Homo sapiens
tcaggtaaccgcctg

SEQ ID NO: 1835363 - DNA, 15 bp, Homo sapiens
caggtaaccgcctgt

SEQ ID NO: 1835364 - DNA, 15 bp, Homo sapiens
aggtaaccgcctgtc

SEQ ID NO: 1835365 - DNA, 15 bp, Homo sapiens
ggtaaccgcctgtcc

SEQ ID NO: 1835366 - DNA, 15 bp, Homo sapiens
gtaaccgcctgtccg

SEQ ID NO: 1835367 - DNA, 15 bp, Homo sapiens
taaccgcctgtccgg

SEQ ID NO: 1835368 - DNA, 15 bp, Homo sapiens
aaccgcctgtccgga

SEQ ID NO: 1835369 - DNA, 15 bp, Homo sapiens
accgcctgtccggag

SEQ ID NO: 1835370 - DNA, 15 bp, Homo sapiens
ccgcctgtccggagg

SEQ ID NO: 1835371 - DNA, 15 bp, Homo sapiens
cgcctgtccggaggt

SEQ ID NO: 1835372 - DNA, 15 bp, Homo sapiens
gcctgtccggaggtc

SEQ ID NO: 1835373 - DNA, 15 bp, Homo sapiens
cctgtccggaggtct

SEQ ID NO: 1835374 - DNA, 15 bp, Homo sapiens
ctgtccggaggtctg

SEQ ID NO: 1835375 - DNA, 15 bp, Homo sapiens
tgtccggaggtctgt

SEQ ID NO: 1835376 - DNA, 15 bp, Homo sapiens
gtccggaggtctgtt

SEQ ID NO: 1835377 - DNA, 15 bp, Homo sapiens
tccggaggtctgttt

SEQ ID NO: 1835378 - DNA, 15 bp, Homo sapiens
ccggaggtctgtttg

SEQ ID NO: 1835379 - DNA, 15 bp, Homo sapiens
cggaggtctgtttgg

SEQ ID NO: 1835380 - DNA, 15 bp, Homo sapiens
ggaggtctgtttggg

SEQ ID NO: 1835381 - DNA, 15 bp, Homo sapiens
gaggtctgtttggga

SEQ ID NO: 1835382 - DNA, 15 bp, Homo sapiens
aggtctgtttgggat

SEQ ID NO: 1835383 - DNA, 15 bp, Homo sapiens
ggtctgtttgggatc

SEQ ID NO: 1835384 - DNA, 15 bp, Homo sapiens
gtctgtttgggatca

SEQ ID NO: 1835385 - DNA, 15 bp, Homo sapiens
tctgtttgggatcat

SEQ ID NO: 1835386 - DNA, 15 bp, Homo sapiens
ctgtttgggatcatc

SEQ ID NO: 1835387 - DNA, 15 bp, Homo sapiens
tgtttgggatcatct

SEQ ID NO: 1835388 - DNA, 15 bp, Homo sapiens
gtttgggatcatctt

SEQ ID NO: 1835389 - DNA, 15 bp, Homo sapiens
tttgggatcatctta

SEQ ID NO: 1835390 - DNA, 15 bp, Homo sapiens
ttgggatcatcttaa

SEQ ID NO: 1835391 - DNA, 15 bp, Homo sapiens
tgggatcatcttaac

SEQ ID NO: 1835392 - DNA, 15 bp, Homo sapiens
gggatcatcttaact

SEQ ID NO: 1835393 - DNA, 15 bp, Homo sapiens
ggatcatcttaactt

SEQ ID NO: 1835394 - DNA, 15 bp, Homo sapiens
gatcatcttaacttc

SEQ ID NO: 1835395 - DNA, 15 bp, Homo sapiens
atcatcttaacttca

SEQ ID NO: 1835396 - DNA, 15 bp, Homo sapiens
tcatcttaacttcag

SEQ ID NO: 1835397 - DNA, 15 bp, Homo sapiens
catcttaacttcagc

SEQ ID NO: 1835398 - DNA, 15 bp, Homo sapiens
atcttaacttcagct

SEQ ID NO: 1835399 - DNA, 15 bp, Homo sapiens
tcttaacttcagcta

SEQ ID NO: 1835400 - DNA, 15 bp, Homo sapiens
cttaacttcagctag

SEQ ID NO: 1835401 - DNA, 15 bp, Homo sapiens
ttaacttcagctaga

SEQ ID NO: 1835402 - DNA, 15 bp, Homo sapiens
taacttcagctagat

SEQ ID NO: 1835403 - DNA, 15 bp, Homo sapiens
aacttcagctagatg

SEQ ID NO: 1835404 - DNA, 15 bp, Homo sapiens
acttcagctagatga

SEQ ID NO: 1835405 - DNA, 15 bp, Homo sapiens
cttcagctagatgat

SEQ ID NO: 1835406 - DNA, 15 bp, Homo sapiens
ttcagctagatgatg

SEQ ID NO: 1835407 - DNA, 15 bp, Homo sapiens
tcagctagatgatgg

SEQ ID NO: 1835408 - DNA, 15 bp, Homo sapiens
cagctagatgatgga

SEQ ID NO: 1835409 - DNA, 15 bp, Homo sapiens
agctagatgatggat

SEQ ID NO: 1835410 - DNA, 15 bp, Homo sapiens
gctagatgatggatt

SEQ ID NO: 1835411 - DNA, 15 bp, Homo sapiens
ctagatgatggattc

SEQ ID NO: 1835412 - DNA, 15 bp, Homo sapiens
tagatgatggattca

SEQ ID NO: 1835413 - DNA, 15 bp, Homo sapiens
agatgatggattcat

SEQ ID NO: 1835414 - DNA, 15 bp, Homo sapiens
gatgatggattcatt

SEQ ID NO: 1835415 - DNA, 15 bp, Homo sapiens
atgatggattcattg

SEQ ID NO: 1835416 - DNA, 15 bp, Homo sapiens
tgatggattcattgt

SEQ ID NO: 1835417 - DNA, 15 bp, Homo sapiens
gatggattcattgtt

SEQ ID NO: 1835418 - DNA, 15 bp, Homo sapiens
atggattcattgttc

SEQ ID NO: 1835419 - DNA, 15 bp, Homo sapiens
tggattcattgttca

SEQ ID NO: 1835420 - DNA, 15 bp, Homo sapiens
ggattcattgttcat

SEQ ID NO: 1835421 - DNA, 15 bp, Homo sapiens
gattcattgttcatg

SEQ ID NO: 1835422 - DNA, 15 bp, Homo sapiens
attcattgttcatga

SEQ ID NO: 1835423 - DNA, 15 bp, Homo sapiens
ttcattgttcatgat

SEQ ID NO: 1835424 - DNA, 15 bp, Homo sapiens
tcattgttcatgatt

SEQ ID NO: 1835425 - DNA, 15 bp, Homo sapiens
cattgttcatgattc

SEQ ID NO: 1835426 - DNA, 15 bp, Homo sapiens
attgttcatgattcc

SEQ ID NO: 1835427 - DNA, 15 bp, Homo sapiens
ttgttcatgattcct

SEQ ID NO: 1835428 - DNA, 15 bp, Homo sapiens
tgttcatgattcctt

SEQ ID NO: 1835429 - DNA, 15 bp, Homo sapiens
gttcatgattccttc

SEQ ID NO: 1835430 - DNA, 15 bp, Homo sapiens
ttcatgattccttct

SEQ ID NO: 1835431 - DNA, 15 bp, Homo sapiens
tcatgattccttcta

SEQ ID NO: 1835432 - DNA, 15 bp, Homo sapiens
catgattccttctaa

SEQ ID NO: 1835433 - DNA, 15 bp, Homo sapiens
atgattccttctaac

SEQ ID NO: 1835434 - DNA, 15 bp, Homo sapiens
tgattccttctaacc

SEQ ID NO: 1835435 - DNA, 15 bp, Homo sapiens
gattccttctaacca

SEQ ID NO: 1835436 - DNA, 15 bp, Homo sapiens
attccttctaaccag

SEQ ID NO: 1835437 - DNA, 15 bp, Homo sapiens
ttccttctaaccagg

SEQ ID NO: 1835438 - DNA, 15 bp, Homo sapiens
tccttctaaccagga

SEQ ID NO: 1835439 - DNA, 15 bp, Homo sapiens
ccttctaaccaggag

SEQ ID NO: 1835440 - DNA, 15 bp, Homo sapiens
cttctaaccaggagg

SEQ ID NO: 1835441 - DNA, 15 bp, Homo sapiens
ttctaaccaggagga

SEQ ID NO: 1835442 - DNA, 15 bp, Homo sapiens
tctaaccaggaggat

SEQ ID NO: 1835443 - DNA, 15 bp, Homo sapiens
ctaaccaggaggatt

SEQ ID NO: 1835444 - DNA, 15 bp, Homo sapiens
taaccaggaggattc

SEQ ID NO: 1835445 - DNA, 15 bp, Homo sapiens
aaccaggaggattct

SEQ ID NO: 1835446 - DNA, 15 bp, Homo sapiens
accaggaggattctg

SEQ ID NO: 1835447 - DNA, 15 bp, Homo sapiens
ccaggaggattctgc

SEQ ID NO: 1835448 - DNA, 15 bp, Homo sapiens
caggaggattctgca

SEQ ID NO: 1835449 - DNA, 15 bp, Homo sapiens
aggaggattctgcaa

SEQ ID NO: 1835450 - DNA, 15 bp, Homo sapiens
ggaggattctgcaat

SEQ ID NO: 1835451 - DNA, 15 bp, Homo sapiens
gaggattctgcaatg

SEQ ID NO: 1835452 - DNA, 15 bp, Homo sapiens
aggattctgcaatgg

SEQ ID NO: 1835453 - DNA, 15 bp, Homo sapiens
ggattctgcaatggg

SEQ ID NO: 1835454 - DNA, 15 bp, Homo sapiens
gattctgcaatgggg

SEQ ID NO: 1835455 - DNA, 15 bp, Homo sapiens
attctgcaatggggg

SEQ ID NO: 1835456 - DNA, 15 bp, Homo sapiens
ttctgcaatgggggc

SEQ ID NO: 1835457 - DNA, 15 bp, Homo sapiens
tctgcaatgggggct

SEQ ID NO: 1835458 - DNA, 15 bp, Homo sapiens
ctgcaatgggggctc

SEQ ID NO: 1835459 - DNA, 15 bp, Homo sapiens
tgcaatgggggctcc

SEQ ID NO: 1835460 - DNA, 15 bp, Homo sapiens
gcaatgggggctcct

SEQ ID NO: 1835461 - DNA, 15 bp, Homo sapiens
caatgggggctcctt

SEQ ID NO: 1835462 - DNA, 15 bp, Homo sapiens
aatgggggctccttg

SEQ ID NO: 1835463 - DNA, 15 bp, Homo sapiens
atgggggctccttgc

SEQ ID NO: 1835464 - DNA, 15 bp, Homo sapiens
tgggggctccttgcc

SEQ ID NO: 1835465 - DNA, 15 bp, Homo sapiens
gggggctccttgcct

SEQ ID NO: 1835466 - DNA, 15 bp, Homo sapiens
ggggctccttgcctc

SEQ ID NO: 1835467 - DNA, 15 bp, Homo sapiens
gggctccttgcctcg

SEQ ID NO: 1835468 - DNA, 15 bp, Homo sapiens
ggctccttgcctcgt

SEQ ID NO: 1835469 - DNA, 15 bp, Homo sapiens
gctccttgcctcgtt

SEQ ID NO: 1835470 - DNA, 15 bp, Homo sapiens
ctccttgcctcgttt

SEQ ID NO: 1835471 - DNA, 15 bp, Homo sapiens
tccttgcctcgtttg

SEQ ID NO: 1835472 - DNA, 15 bp, Homo sapiens
ccttgcctcgtttgt

SEQ ID NO: 1835473 - DNA, 15 bp, Homo sapiens
cttgcctcgtttgtt

SEQ ID NO: 1835474 - DNA, 15 bp, Homo sapiens
ttgcctcgtttgttt

SEQ ID NO: 1835475 - DNA, 15 bp, Homo sapiens
tgcctcgtttgttta

SEQ ID NO: 1835476 - DNA, 15 bp, Homo sapiens
gcctcgtttgtttaa

SEQ ID NO: 1835477 - DNA, 15 bp, Homo sapiens
cctcgtttgtttaaa

SEQ ID NO: 1835478 - DNA, 15 bp, Homo sapiens
ctcgtttgtttaaag

SEQ ID NO: 1835479 - DNA, 15 bp, Homo sapiens
tcgtttgtttaaaga

SEQ ID NO: 1835480 - DNA, 15 bp, Homo sapiens
cgtttgtttaaagat

SEQ ID NO: 1835481 - DNA, 15 bp, Homo sapiens
gtttgtttaaagatc

SEQ ID NO: 1835482 - DNA, 15 bp, Homo sapiens
tttgtttaaagatca

SEQ ID NO: 1835483 - DNA, 15 bp, Homo sapiens
ttgtttaaagatcag

SEQ ID NO: 1835484 - DNA, 15 bp, Homo sapiens
tgtttaaagatcagc

SEQ ID NO: 1835485 - DNA, 15 bp, Homo sapiens
gtttaaagatcagcc

SEQ ID NO: 1835486 - DNA, 15 bp, Homo sapiens
tttaaagatcagcct

SEQ ID NO: 1835487 - DNA, 15 bp, Homo sapiens
ttaaagatcagcctc

SEQ ID NO: 1835488 - DNA, 15 bp, Homo sapiens
taaagatcagcctct

SEQ ID NO: 1835489 - DNA, 15 bp, Homo sapiens
aaagatcagcctctg

SEQ ID NO: 1835490 - DNA, 15 bp, Homo sapiens
aagatcagcctctgg

SEQ ID NO: 1835491 - DNA, 15 bp, Homo sapiens
agatcagcctctggg

SEQ ID NO: 1835492 - DNA, 15 bp, Homo sapiens
gatcagcctctggga

SEQ ID NO: 1835493 - DNA, 15 bp, Homo sapiens
atcagcctctgggat

SEQ ID NO: 1835494 - DNA, 15 bp, Homo sapiens
tcagcctctgggatt

SEQ ID NO: 1835495 - DNA, 15 bp, Homo sapiens
cagcctctgggattt

SEQ ID NO: 1835496 - DNA, 15 bp, Homo sapiens
agcctctgggatttt

SEQ ID NO: 1835497 - DNA, 15 bp, Homo sapiens
gcctctgggattttt

SEQ ID NO: 1835498 - DNA, 15 bp, Homo sapiens
cctctgggattttta

SEQ ID NO: 1835499 - DNA, 15 bp, Homo sapiens
ctctgggatttttaa

SEQ ID NO: 1835500 - DNA, 15 bp, Homo sapiens
tctgggatttttaaa

SEQ ID NO: 1835501 - DNA, 15 bp, Homo sapiens
ctgggatttttaaag

SEQ ID NO: 1835502 - DNA, 15 bp, Homo sapiens
tgggatttttaaagc

SEQ ID NO: 1835503 - DNA, 15 bp, Homo sapiens
gggatttttaaagca

SEQ ID NO: 1835504 - DNA, 15 bp, Homo sapiens
ggatttttaaagcaa

SEQ ID NO: 1835505 - DNA, 15 bp, Homo sapiens
gatttttaaagcaag

SEQ ID NO: 1835506 - DNA, 15 bp, Homo sapiens
atttttaaagcaaga

SEQ ID NO: 1835507 - DNA, 15 bp, Homo sapiens
tttttaaagcaagag

SEQ ID NO: 1835508 - DNA, 15 bp, Homo sapiens
ttttaaagcaagagt

SEQ ID NO: 1835509 - DNA, 15 bp, Homo sapiens
tttaaagcaagagta

SEQ ID NO: 1835510 - DNA, 15 bp, Homo sapiens
ttaaagcaagagtat

SEQ ID NO: 1835511 - DNA, 15 bp, Homo sapiens
taaagcaagagtata

SEQ ID NO: 1835512 - DNA, 15 bp, Homo sapiens
aaagcaagagtataa

SEQ ID NO: 1835513 - DNA, 15 bp, Homo sapiens
aagcaagagtataat

SEQ ID NO: 1835514 - DNA, 15 bp, Homo sapiens
agcaagagtataatt

SEQ ID NO: 1835515 - DNA, 15 bp, Homo sapiens
gcaagagtataatta

SEQ ID NO: 1835516 - DNA, 15 bp, Homo sapiens
caagagtataattag

SEQ ID NO: 1835517 - DNA, 15 bp, Homo sapiens
aagagtataattaga

SEQ ID NO: 1835518 - DNA, 15 bp, Homo sapiens
agagtataattagat

SEQ ID NO: 1835519 - DNA, 15 bp, Homo sapiens
gagtataattagata

SEQ ID NO: 1835520 - DNA, 15 bp, Homo sapiens
agtataattagataa

SEQ ID NO: 1835521 - DNA, 15 bp, Homo sapiens
gtataattagataag

SEQ ID NO: 1835522 - DNA, 15 bp, Homo sapiens
tataattagataagc

SEQ ID NO: 1835523 - DNA, 15 bp, Homo sapiens
ataattagataagca

SEQ ID NO: 1835524 - DNA, 15 bp, Homo sapiens
taattagataagcat

SEQ ID NO: 1835525 - DNA, 15 bp, Homo sapiens
aattagataagcata

SEQ ID NO: 1835526 - DNA, 15 bp, Homo sapiens
attagataagcatac

SEQ ID NO: 1835527 - DNA, 15 bp, Homo sapiens
ttagataagcataca

SEQ ID NO: 1835528 - DNA, 15 bp, Homo sapiens
tagataagcatacat

SEQ ID NO: 1835529 - DNA, 15 bp, Homo sapiens
agataagcatacatt

SEQ ID NO: 1835530 - DNA, 15 bp, Homo sapiens
gataagcatacattg

SEQ ID NO: 1835531 - DNA, 15 bp, Homo sapiens
ataagcatacattgc

SEQ ID NO: 1835532 - DNA, 15 bp, Homo sapiens
taagcatacattgcc

SEQ ID NO: 1835533 - DNA, 15 bp, Homo sapiens
aagcatacattgcca

SEQ ID NO: 1835534 - DNA, 15 bp, Homo sapiens
agcatacattgccag

SEQ ID NO: 1835535 - DNA, 15 bp, Homo sapiens
gcatacattgccaga

SEQ ID NO: 1835536 - DNA, 15 bp, Homo sapiens
catacattgccagag

SEQ ID NO: 1835537 - DNA, 15 bp, Homo sapiens
atacattgccagagg

SEQ ID NO: 1835538 - DNA, 15 bp, Homo sapiens
tacattgccagaggg

SEQ ID NO: 1835539 - DNA, 15 bp, Homo sapiens
acattgccagagggg

SEQ ID NO: 1835540 - DNA, 15 bp, Homo sapiens
cattgccagagggga

SEQ ID NO: 1835541 - DNA, 15 bp, Homo sapiens
attgccagaggggag

SEQ ID NO: 1835542 - DNA, 15 bp, Homo sapiens
ttgccagaggggagt

SEQ ID NO: 1835543 - DNA, 15 bp, Homo sapiens
tgccagaggggagtg

SEQ ID NO: 1835544 - DNA, 15 bp, Homo sapiens
gccagaggggagtgt

SEQ ID NO: 1835545 - DNA, 15 bp, Homo sapiens
ccagaggggagtgtc

SEQ ID NO: 1835546 - DNA, 15 bp, Homo sapiens
cagaggggagtgtct

SEQ ID NO: 1835547 - DNA, 15 bp, Homo sapiens
agaggggagtgtcta

SEQ ID NO: 1835548 - DNA, 15 bp, Homo sapiens
gaggggagtgtctag

SEQ ID NO: 1835549 - DNA, 15 bp, Homo sapiens
aggggagtgtctaga

SEQ ID NO: 1835550 - DNA, 15 bp, Homo sapiens
ggggagtgtctagag

SEQ ID NO: 1835551 - DNA, 15 bp, Homo sapiens
gggagtgtctagaga

SEQ ID NO: 1835552 - DNA, 15 bp, Homo sapiens
ggagtgtctagagag

SEQ ID NO: 1835553 - DNA, 15 bp, Homo sapiens
gagtgtctagagagg

SEQ ID NO: 1835554 - DNA, 15 bp, Homo sapiens
agtgtctagagaggg

SEQ ID NO: 1835555 - DNA, 15 bp, Homo sapiens
gtgtctagagaggga

SEQ ID NO: 1835556 - DNA, 15 bp, Homo sapiens
tgtctagagagggaa

SEQ ID NO: 1835557 - DNA, 15 bp, Homo sapiens
gtctagagagggaag

SEQ ID NO: 1835558 - DNA, 15 bp, Homo sapiens
tctagagagggaagg

SEQ ID NO: 1835559 - DNA, 15 bp, Homo sapiens
ctagagagggaagga

SEQ ID NO: 1835560 - DNA, 15 bp, Homo sapiens
tagagagggaaggaa

SEQ ID NO: 1835561 - DNA, 15 bp, Homo sapiens
agagagggaaggaat

SEQ ID NO: 1835562 - DNA, 15 bp, Homo sapiens
gagagggaaggaatg

SEQ ID NO: 1835563 - DNA, 15 bp, Homo sapiens
agagggaaggaatga

SEQ ID NO: 1835564 - DNA, 15 bp, Homo sapiens
gagggaaggaatgaa

SEQ ID NO: 1835565 - DNA, 15 bp, Homo sapiens
agggaaggaatgaag

SEQ ID NO: 1835566 - DNA, 15 bp, Homo sapiens
gggaaggaatgaaga

SEQ ID NO: 1835567 - DNA, 15 bp, Homo sapiens
ggaaggaatgaagag

SEQ ID NO: 1835568 - DNA, 15 bp, Homo sapiens
gaaggaatgaagagg

SEQ ID NO: 1835569 - DNA, 15 bp, Homo sapiens
aaggaatgaagaggt

SEQ ID NO: 1835570 - DNA, 15 bp, Homo sapiens
aggaatgaagaggtg

SEQ ID NO: 1835571 - DNA, 15 bp, Homo sapiens
ggaatgaagaggtga

SEQ ID NO: 1835572 - DNA, 15 bp, Homo sapiens
gaatgaagaggtgag

SEQ ID NO: 1835573 - DNA, 15 bp, Homo sapiens
aatgaagaggtgaga

SEQ ID NO: 1835574 - DNA, 15 bp, Homo sapiens
atgaagaggtgagag

SEQ ID NO: 1835575 - DNA, 15 bp, Homo sapiens
tgaagaggtgagagg

SEQ ID NO: 1835576 - DNA, 15 bp, Homo sapiens
aagaggtgagaggaa

SEQ ID NO: 1835577 - DNA, 15 bp, Homo sapiens
agaggtgagaggaaa

SEQ ID NO: 1835578 - DNA, 15 bp, Homo sapiens
gaggtgagaggaaag

SEQ ID NO: 1835579 - DNA, 15 bp, Homo sapiens
aggtgagaggaaaga

SEQ ID NO: 1835580 - DNA, 15 bp, Homo sapiens
ggtgagaggaaagaa

SEQ ID NO: 1835581 - DNA, 15 bp, Homo sapiens
gtgagaggaaagaaa

SEQ ID NO: 1835582 - DNA, 15 bp, Homo sapiens
tgagaggaaagaaaa

SEQ ID NO: 1835583 - DNA, 15 bp, Homo sapiens
gagaggaaagaaaag

SEQ ID NO: 1835584 - DNA, 15 bp, Homo sapiens
agaggaaagaaaagg

SEQ ID NO: 1835585 - DNA, 15 bp, Homo sapiens
gaggaaagaaaagga

SEQ ID NO: 1835586 - DNA, 15 bp, Homo sapiens
ggaaagaaaaggaag

SEQ ID NO: 1835587 - DNA, 15 bp, Homo sapiens
gaaagaaaaggaaga

SEQ ID NO: 1835588 - DNA, 15 bp, Homo sapiens
aaagaaaaggaagaa

SEQ ID NO: 1835589 - DNA, 15 bp, Homo sapiens
aagaaaaggaagaaa

SEQ ID NO: 1835590 - DNA, 15 bp, Homo sapiens
agaaaaggaagaaaa

SEQ ID NO: 1835591 - DNA, 15 bp, Homo sapiens
gaaaaggaagaaaaa

SEQ ID NO: 1835592 - DNA, 15 bp, Homo sapiens
aaaaggaagaaaaag

SEQ ID NO: 1835593 - DNA, 15 bp, Homo sapiens
aggaagaaaaagaaa

SEQ ID NO: 1835594 - DNA, 15 bp, Homo sapiens
ggaagaaaaagaaag

SEQ ID NO: 1835595 - DNA, 15 bp, Homo sapiens
gaagaaaaagaaagt

SEQ ID NO: 1835596 - DNA, 15 bp, Homo sapiens
aagaaaaagaaagtg

SEQ ID NO: 1835597 - DNA, 15 bp, Homo sapiens
agaaaaagaaagtgg

SEQ ID NO: 1835598 - DNA, 15 bp, Homo sapiens
gaaaaagaaagtggg

SEQ ID NO: 1835599 - DNA, 15 bp, Homo sapiens
aaaaagaaagtgggt

SEQ ID NO: 1835600 - DNA, 15 bp, Homo sapiens
aaaagaaagtgggta

SEQ ID NO: 1835601 - DNA, 15 bp, Homo sapiens
aaagaaagtgggtaa

SEQ ID NO: 1835602 - DNA, 15 bp, Homo sapiens
aagaaagtgggtaag

SEQ ID NO: 1835603 - DNA, 15 bp, Homo sapiens
agaaagtgggtaaga

SEQ ID NO: 1835604 - DNA, 15 bp, Homo sapiens
gaaagtgggtaagag

SEQ ID NO: 1835605 - DNA, 15 bp, Homo sapiens
aaagtgggtaagagg

SEQ ID NO: 1835606 - DNA, 15 bp, Homo sapiens
aagtgggtaagaggc

SEQ ID NO: 1835607 - DNA, 15 bp, Homo sapiens
agtgggtaagaggca

SEQ ID NO: 1835608 - DNA, 15 bp, Homo sapiens
gtgggtaagaggcag

SEQ ID NO: 1835609 - DNA, 15 bp, Homo sapiens
tgggtaagaggcaga

SEQ ID NO: 1835610 - DNA, 15 bp, Homo sapiens
gggtaagaggcagag

SEQ ID NO: 1835611 - DNA, 15 bp, Homo sapiens
ggtaagaggcagagc

SEQ ID NO: 1835612 - DNA, 15 bp, Homo sapiens
gtaagaggcagagca

SEQ ID NO: 1835613 - DNA, 15 bp, Homo sapiens
taagaggcagagcaa

SEQ ID NO: 1835614 - DNA, 15 bp, Homo sapiens
aagaggcagagcaag

SEQ ID NO: 1835615 - DNA, 15 bp, Homo sapiens
agaggcagagcaaga

SEQ ID NO: 1835616 - DNA, 15 bp, Homo sapiens
gaggcagagcaagat

SEQ ID NO: 1835617 - DNA, 15 bp, Homo sapiens
aggcagagcaagatg

SEQ ID NO: 1835618 - DNA, 15 bp, Homo sapiens
ggcagagcaagatgg

SEQ ID NO: 1835619 - DNA, 15 bp, Homo sapiens
gcagagcaagatggc

SEQ ID NO: 1835620 - DNA, 15 bp, Homo sapiens
cagagcaagatggca

SEQ ID NO: 1835621 - DNA, 15 bp, Homo sapiens
agagcaagatggcag

SEQ ID NO: 1835622 - DNA, 15 bp, Homo sapiens
gagcaagatggcaga

SEQ ID NO: 1835623 - DNA, 15 bp, Homo sapiens
agcaagatggcagaa

SEQ ID NO: 1835624 - DNA, 15 bp, Homo sapiens
gcaagatggcagaat

SEQ ID NO: 1835625 - DNA, 15 bp, Homo sapiens
caagatggcagaata

SEQ ID NO: 1835626 - DNA, 15 bp, Homo sapiens
aagatggcagaatag

SEQ ID NO: 1835627 - DNA, 15 bp, Homo sapiens
agatggcagaataga

SEQ ID NO: 1835628 - DNA, 15 bp, Homo sapiens
gatggcagaatagaa

SEQ ID NO: 1835629 - DNA, 15 bp, Homo sapiens
atggcagaatagaaa

SEQ ID NO: 1835630 - DNA, 15 bp, Homo sapiens
tggcagaatagaaag

SEQ ID NO: 1835631 - DNA, 15 bp, Homo sapiens
ggcagaatagaaagc

SEQ ID NO: 1835632 - DNA, 15 bp, Homo sapiens
gcagaatagaaagct

SEQ ID NO: 1835633 - DNA, 15 bp, Homo sapiens
cagaatagaaagctc

SEQ ID NO: 1835634 - DNA, 15 bp, Homo sapiens
agaatagaaagctcc

SEQ ID NO: 1835635 - DNA, 15 bp, Homo sapiens
gaatagaaagctcca

SEQ ID NO: 1835636 - DNA, 15 bp, Homo sapiens
aatagaaagctccac

SEQ ID NO: 1835637 - DNA, 15 bp, Homo sapiens
atagaaagctccacc

SEQ ID NO: 1835638 - DNA, 15 bp, Homo sapiens
tagaaagctccacca

SEQ ID NO: 1835639 - DNA, 15 bp, Homo sapiens
agaaagctccaccaa

SEQ ID NO: 1835640 - DNA, 15 bp, Homo sapiens
gaaagctccaccaat

SEQ ID NO: 1835641 - DNA, 15 bp, Homo sapiens
aaagctccaccaatg

SEQ ID NO: 1835642 - DNA, 15 bp, Homo sapiens
aagctccaccaatgg

SEQ ID NO: 1835643 - DNA, 15 bp, Homo sapiens
agctccaccaatgga

SEQ ID NO: 1835644 - DNA, 15 bp, Homo sapiens
gctccaccaatggac

SEQ ID NO: 1835645 - DNA, 15 bp, Homo sapiens
ctccaccaatggacc

SEQ ID NO: 1835646 - DNA, 15 bp, Homo sapiens
tccaccaatggaccc

SEQ ID NO: 1835647 - DNA, 15 bp, Homo sapiens
ccaccaatggacccc

SEQ ID NO: 1835648 - DNA, 15 bp, Homo sapiens
caccaatggaccccc

SEQ ID NO: 1835649 - DNA, 15 bp, Homo sapiens
accaatggaccccct

SEQ ID NO: 1835650 - DNA, 15 bp, Homo sapiens
ccaatggaccccctg

SEQ ID NO: 1835651 - DNA, 15 bp, Homo sapiens
caatggaccccctgg

SEQ ID NO: 1835652 - DNA, 15 bp, Homo sapiens
aatggaccccctggc

SEQ ID NO: 1835653 - DNA, 15 bp, Homo sapiens
atggaccccctggca

SEQ ID NO: 1835654 - DNA, 15 bp, Homo sapiens
tggaccccctggcaa

SEQ ID NO: 1835655 - DNA, 15 bp, Homo sapiens
ggaccccctggcaag

SEQ ID NO: 1835656 - DNA, 15 bp, Homo sapiens
gaccccctggcaagg

SEQ ID NO: 1835657 - DNA, 15 bp, Homo sapiens
accccctggcaagga

SEQ ID NO: 1835658 - DNA, 15 bp, Homo sapiens
ccccctggcaaggat

SEQ ID NO: 1835659 - DNA, 15 bp, Homo sapiens
cccctggcaaggata

SEQ ID NO: 1835660 - DNA, 15 bp, Homo sapiens
ccctggcaaggatac

SEQ ID NO: 1835661 - DNA, 15 bp, Homo sapiens
cctggcaaggataca

SEQ ID NO: 1835662 - DNA, 15 bp, Homo sapiens
ctggcaaggatacaa

SEQ ID NO: 1835663 - DNA, 15 bp, Homo sapiens
tggcaaggatacaaa

SEQ ID NO: 1835664 - DNA, 15 bp, Homo sapiens
ggcaaggatacaaag

SEQ ID NO: 1835665 - DNA, 15 bp, Homo sapiens
gcaaggatacaaagt

SEQ ID NO: 1835666 - DNA, 15 bp, Homo sapiens
caaggatacaaagtt

SEQ ID NO: 1835667 - DNA, 15 bp, Homo sapiens
aaggatacaaagtta

SEQ ID NO: 1835668 - DNA, 15 bp, Homo sapiens
aggatacaaagttaa

SEQ ID NO: 1835669 - DNA, 15 bp, Homo sapiens
ggatacaaagttaac

SEQ ID NO: 1835670 - DNA, 15 bp, Homo sapiens
gatacaaagttaaca

SEQ ID NO: 1835671 - DNA, 15 bp, Homo sapiens
atacaaagttaacaa

SEQ ID NO: 1835672 - DNA, 15 bp, Homo sapiens
tacaaagttaacaac

SEQ ID NO: 1835673 - DNA, 15 bp, Homo sapiens
acaaagttaacaact

SEQ ID NO: 1835674 - DNA, 15 bp, Homo sapiens
caaagttaacaacta

SEQ ID NO: 1835675 - DNA, 15 bp, Homo sapiens
aaagttaacaactat

SEQ ID NO: 1835676 - DNA, 15 bp, Homo sapiens
aagttaacaactatc

SEQ ID NO: 1835677 - DNA, 15 bp, Homo sapiens
agttaacaactatct

SEQ ID NO: 1835678 - DNA, 15 bp, Homo sapiens
gttaacaactatctg

SEQ ID NO: 1835679 - DNA, 15 bp, Homo sapiens
ttaacaactatctgc

SEQ ID NO: 1835680 - DNA, 15 bp, Homo sapiens
taacaactatctgca

SEQ ID NO: 1835681 - DNA, 15 bp, Homo sapiens
aacaactatctgcac

SEQ ID NO: 1835682 - DNA, 15 bp, Homo sapiens
acaactatctgcaca

SEQ ID NO: 1835683 - DNA, 15 bp, Homo sapiens
caactatctgcacag

SEQ ID NO: 1835684 - DNA, 15 bp, Homo sapiens
aactatctgcacaga

SEQ ID NO: 1835685 - DNA, 15 bp, Homo sapiens
actatctgcacagaa

SEQ ID NO: 1835686 - DNA, 15 bp, Homo sapiens
ctatctgcacagaaa

SEQ ID NO: 1835687 - DNA, 15 bp, Homo sapiens
tatctgcacagaaaa

SEQ ID NO: 1835688 - DNA, 15 bp, Homo sapiens
atctgcacagaaaaa

SEQ ID NO: 1835689 - DNA, 15 bp, Homo sapiens
tctgcacagaaaaac

SEQ ID NO: 1835690 - DNA, 15 bp, Homo sapiens
ctgcacagaaaaaca

SEQ ID NO: 1835691 - DNA, 15 bp, Homo sapiens
tgcacagaaaaacaa

SEQ ID NO: 1835692 - DNA, 15 bp, Homo sapiens
gcacagaaaaacaaa

SEQ ID NO: 1835693 - DNA, 15 bp, Homo sapiens
cacagaaaaacaaac

SEQ ID NO: 1835694 - DNA, 15 bp, Homo sapiens
acagaaaaacaaaca

SEQ ID NO: 1835695 - DNA, 15 bp, Homo sapiens
cagaaaaacaaacaa

SEQ ID NO: 1835696 - DNA, 15 bp, Homo sapiens
agaaaaacaaacaaa

SEQ ID NO: 1835697 - DNA, 15 bp, Homo sapiens
gaaaaacaaacaaac

SEQ ID NO: 1835698 - DNA, 15 bp, Homo sapiens
aacaaacaaaaaaca

SEQ ID NO: 1835699 - DNA, 15 bp, Homo sapiens
acaaacaaaaaacac

SEQ ID NO: 1835700 - DNA, 15 bp, Homo sapiens
caaacaaaaaacacc

SEQ ID NO: 1835701 - DNA, 15 bp, Homo sapiens
aaacaaaaaacacct

SEQ ID NO: 1835702 - DNA, 15 bp, Homo sapiens
aacaaaaaacacctt

SEQ ID NO: 1835703 - DNA, 15 bp, Homo sapiens
acaaaaaacaccttc

SEQ ID NO: 1835704 - DNA, 15 bp, Homo sapiens
caaaaaacaccttca

SEQ ID NO: 1835705 - DNA, 15 bp, Homo sapiens
aaaaaacaccttcat

SEQ ID NO: 1835706 - DNA, 15 bp, Homo sapiens
aaaaacaccttcata

SEQ ID NO: 1835707 - DNA, 15 bp, Homo sapiens
aaaacaccttcataa

SEQ ID NO: 1835708 - DNA, 15 bp, Homo sapiens
aaacaccttcataag

SEQ ID NO: 1835709 - DNA, 15 bp, Homo sapiens
aacaccttcataaga

SEQ ID NO: 1835710 - DNA, 15 bp, Homo sapiens
acaccttcataagaa

SEQ ID NO: 1835711 - DNA, 15 bp, Homo sapiens
caccttcataagaat

SEQ ID NO: 1835712 - DNA, 15 bp, Homo sapiens
accttcataagaatc

SEQ ID NO: 1835713 - DNA, 15 bp, Homo sapiens
ccttcataagaatca

SEQ ID NO: 1835714 - DNA, 15 bp, Homo sapiens
cttcataagaatcag

SEQ ID NO: 1835715 - DNA, 15 bp, Homo sapiens
ttcataagaatcaga

SEQ ID NO: 1835716 - DNA, 15 bp, Homo sapiens
tcataagaatcagaa

SEQ ID NO: 1835717 - DNA, 15 bp, Homo sapiens
cataagaatcagaac

SEQ ID NO: 1835718 - DNA, 15 bp, Homo sapiens
ataagaatcagaact

SEQ ID NO: 1835719 - DNA, 15 bp, Homo sapiens
taagaatcagaactc

SEQ ID NO: 1835720 - DNA, 15 bp, Homo sapiens
aagaatcagaactca

SEQ ID NO: 1835721 - DNA, 15 bp, Homo sapiens
agaatcagaactcag

SEQ ID NO: 1835722 - DNA, 15 bp, Homo sapiens
gaatcagaactcagg

SEQ ID NO: 1835723 - DNA, 15 bp, Homo sapiens
aatcagaactcaggt

SEQ ID NO: 1835724 - DNA, 15 bp, Homo sapiens
atcagaactcaggtg

SEQ ID NO: 1835725 - DNA, 15 bp, Homo sapiens
tcagaactcaggtga

SEQ ID NO: 1835726 - DNA, 15 bp, Homo sapiens
cagaactcaggtgag

SEQ ID NO: 1835727 - DNA, 15 bp, Homo sapiens
agaactcaggtgagc

SEQ ID NO: 1835728 - DNA, 15 bp, Homo sapiens
gaactcaggtgagca

SEQ ID NO: 1835729 - DNA, 15 bp, Homo sapiens
aactcaggtgagcac

SEQ ID NO: 1835730 - DNA, 15 bp, Homo sapiens
actcaggtgagcaca

SEQ ID NO: 1835731 - DNA, 15 bp, Homo sapiens
ctcaggtgagcacac

SEQ ID NO: 1835732 - DNA, 15 bp, Homo sapiens
tcaggtgagcacaca

SEQ ID NO: 1835733 - DNA, 15 bp, Homo sapiens
caggtgagcacacat

SEQ ID NO: 1835734 - DNA, 15 bp, Homo sapiens
aggtgagcacacata

SEQ ID NO: 1835735 - DNA, 15 bp, Homo sapiens
ggtgagcacacatag

SEQ ID NO: 1835736 - DNA, 15 bp, Homo sapiens
gtgagcacacatagt

SEQ ID NO: 1835737 - DNA, 15 bp, Homo sapiens
tgagcacacatagta

SEQ ID NO: 1835738 - DNA, 15 bp, Homo sapiens
gagcacacatagtac

SEQ ID NO: 1835739 - DNA, 15 bp, Homo sapiens
agcacacatagtacc

SEQ ID NO: 1835740 - DNA, 15 bp, Homo sapiens
gcacacatagtacct

SEQ ID NO: 1835741 - DNA, 15 bp, Homo sapiens
cacacatagtacctg

SEQ ID NO: 1835742 - DNA, 15 bp, Homo sapiens
acacatagtacctgg

SEQ ID NO: 1835743 - DNA, 15 bp, Homo sapiens
cacatagtacctggt

SEQ ID NO: 1835744 - DNA, 15 bp, Homo sapiens
acatagtacctggtt

SEQ ID NO: 1835745 - DNA, 15 bp, Homo sapiens
catagtacctggttt

SEQ ID NO: 1835746 - DNA, 15 bp, Homo sapiens
atagtacctggtttt

SEQ ID NO: 1835747 - DNA, 15 bp, Homo sapiens
tagtacctggtttta

SEQ ID NO: 1835748 - DNA, 15 bp, Homo sapiens
agtacctggttttaa

SEQ ID NO: 1835749 - DNA, 15 bp, Homo sapiens
gtacctggttttaac

SEQ ID NO: 1835750 - DNA, 15 bp, Homo sapiens
tacctggttttaact

SEQ ID NO: 1835751 - DNA, 15 bp, Homo sapiens
acctggttttaactt

SEQ ID NO: 1835752 - DNA, 15 bp, Homo sapiens
cctggttttaacttc

SEQ ID NO: 1835753 - DNA, 15 bp, Homo sapiens
ctggttttaacttca

SEQ ID NO: 1835754 - DNA, 15 bp, Homo sapiens
tggttttaacttcat

SEQ ID NO: 1835755 - DNA, 15 bp, Homo sapiens
ggttttaacttcata

SEQ ID NO: 1835756 - DNA, 15 bp, Homo sapiens
gttttaacttcatat

SEQ ID NO: 1835757 - DNA, 15 bp, Homo sapiens
tttaacttcatatca

SEQ ID NO: 1835758 - DNA, 15 bp, Homo sapiens
ttaacttcatatcac

SEQ ID NO: 1835759 - DNA, 15 bp, Homo sapiens
taacttcatatcact

SEQ ID NO: 1835760 - DNA, 15 bp, Homo sapiens
aacttcatatcactg

SEQ ID NO: 1835761 - DNA, 15 bp, Homo sapiens
acttcatatcactga

SEQ ID NO: 1835762 - DNA, 15 bp, Homo sapiens
cttcatatcactgaa

SEQ ID NO: 1835763 - DNA, 15 bp, Homo sapiens
ttcatatcactgaaa

SEQ ID NO: 1835764 - DNA, 15 bp, Homo sapiens
tcatatcactgaaac

SEQ ID NO: 1835765 - DNA, 15 bp, Homo sapiens
catatcactgaaaca

SEQ ID NO: 1835766 - DNA, 15 bp, Homo sapiens
atatcactgaaacag

SEQ ID NO: 1835767 - DNA, 15 bp, Homo sapiens
tatcactgaaacagg

SEQ ID NO: 1835768 - DNA, 15 bp, Homo sapiens
atcactgaaacaggc

SEQ ID NO: 1835769 - DNA, 15 bp, Homo sapiens
tcactgaaacaggca

SEQ ID NO: 1835770 - DNA, 15 bp, Homo sapiens
cactgaaacaggcac

SEQ ID NO: 1835771 - DNA, 15 bp, Homo sapiens
actgaaacaggcact

SEQ ID NO: 1835772 - DNA, 15 bp, Homo sapiens
ctgaaacaggcactg

SEQ ID NO: 1835773 - DNA, 15 bp, Homo sapiens
tgaaacaggcactga

SEQ ID NO: 1835774 - DNA, 15 bp, Homo sapiens
gaaacaggcactgaa

SEQ ID NO: 1835775 - DNA, 15 bp, Homo sapiens
aaacaggcactgaag

SEQ ID NO: 1835776 - DNA, 15 bp, Homo sapiens
aacaggcactgaaga

SEQ ID NO: 1835777 - DNA, 15 bp, Homo sapiens
acaggcactgaagaa

SEQ ID NO: 1835778 - DNA, 15 bp, Homo sapiens
caggcactgaagaaa

SEQ ID NO: 1835779 - DNA, 15 bp, Homo sapiens
aggcactgaagaaat

SEQ ID NO: 1835780 - DNA, 15 bp, Homo sapiens
ggcactgaagaaatt

SEQ ID NO: 1835781 - DNA, 15 bp, Homo sapiens
gcactgaagaaatta

SEQ ID NO: 1835782 - DNA, 15 bp, Homo sapiens
cactgaagaaattaa

SEQ ID NO: 1835783 - DNA, 15 bp, Homo sapiens
actgaagaaattaaa

SEQ ID NO: 1835784 - DNA, 15 bp, Homo sapiens
ctgaagaaattaaaa

SEQ ID NO: 1835785 - DNA, 15 bp, Homo sapiens
tgaagaaattaaaaa

SEQ ID NO: 1835786 - DNA, 15 bp, Homo sapiens
gaagaaattaaaaaa

SEQ ID NO: 1835787 - DNA, 15 bp, Homo sapiens
aagaaattaaaaaac

SEQ ID NO: 1835788 - DNA, 15 bp, Homo sapiens
agaaattaaaaaaca

SEQ ID NO: 1835789 - DNA, 15 bp, Homo sapiens
gaaattaaaaaacag

SEQ ID NO: 1835790 - DNA, 15 bp, Homo sapiens
aaattaaaaaacagt

SEQ ID NO: 1835791 - DNA, 15 bp, Homo sapiens
aattaaaaaacagtc

SEQ ID NO: 1835792 - DNA, 15 bp, Homo sapiens
attaaaaaacagtcc

SEQ ID NO: 1835793 - DNA, 15 bp, Homo sapiens
ttaaaaaacagtcct

SEQ ID NO: 1835794 - DNA, 15 bp, Homo sapiens
taaaaaacagtcctg

SEQ ID NO: 1835795 - DNA, 15 bp, Homo sapiens
aaaaaacagtcctga

SEQ ID NO: 1835796 - DNA, 15 bp, Homo sapiens
aaaaacagtcctgaa

SEQ ID NO: 1835797 - DNA, 15 bp, Homo sapiens
aaaacagtcctgaat

SEQ ID NO: 1835798 - DNA, 15 bp, Homo sapiens
aaacagtcctgaatc

SEQ ID NO: 1835799 - DNA, 15 bp, Homo sapiens
aacagtcctgaatca

SEQ ID NO: 1835800 - DNA, 15 bp, Homo sapiens
acagtcctgaatcac

SEQ ID NO: 1835801 - DNA, 15 bp, Homo sapiens
cagtcctgaatcaca

SEQ ID NO: 1835802 - DNA, 15 bp, Homo sapiens
agtcctgaatcacaa

SEQ ID NO: 1835803 - DNA, 15 bp, Homo sapiens
gtcctgaatcacaat

SEQ ID NO: 1835804 - DNA, 15 bp, Homo sapiens
tcctgaatcacaatg

SEQ ID NO: 1835805 - DNA, 15 bp, Homo sapiens
cctgaatcacaatgc

SEQ ID NO: 1835806 - DNA, 15 bp, Homo sapiens
ctgaatcacaatgct

SEQ ID NO: 1835807 - DNA, 15 bp, Homo sapiens
tgaatcacaatgcta

SEQ ID NO: 1835808 - DNA, 15 bp, Homo sapiens
gaatcacaatgctac

SEQ ID NO: 1835809 - DNA, 15 bp, Homo sapiens
aatcacaatgctacc

SEQ ID NO: 1835810 - DNA, 15 bp, Homo sapiens
atcacaatgctaccc

SEQ ID NO: 1835811 - DNA, 15 bp, Homo sapiens
tcacaatgctacccc

SEQ ID NO: 1835812 - DNA, 15 bp, Homo sapiens
cacaatgctacccct

SEQ ID NO: 1835813 - DNA, 15 bp, Homo sapiens
acaatgctacccctc

SEQ ID NO: 1835814 - DNA, 15 bp, Homo sapiens
caatgctacccctcc

SEQ ID NO: 1835815 - DNA, 15 bp, Homo sapiens
aatgctacccctccc

SEQ ID NO: 1835816 - DNA, 15 bp, Homo sapiens
atgctacccctcccc

SEQ ID NO: 1835817 - DNA, 15 bp, Homo sapiens
tgctacccctcccct

SEQ ID NO: 1835818 - DNA, 15 bp, Homo sapiens
gctacccctccccta

SEQ ID NO: 1835819 - DNA, 15 bp, Homo sapiens
ctacccctcccctat

SEQ ID NO: 1835820 - DNA, 15 bp, Homo sapiens
tacccctcccctatc

SEQ ID NO: 1835821 - DNA, 15 bp, Homo sapiens
acccctcccctatcc

SEQ ID NO: 1835822 - DNA, 15 bp, Homo sapiens
cccctcccctatcca

SEQ ID NO: 1835823 - DNA, 15 bp, Homo sapiens
ccctcccctatccac

SEQ ID NO: 1835824 - DNA, 15 bp, Homo sapiens
cctcccctatccaca

SEQ ID NO: 1835825 - DNA, 15 bp, Homo sapiens
ctcccctatccacag

SEQ ID NO: 1835826 - DNA, 15 bp, Homo sapiens
tcccctatccacagc

SEQ ID NO: 1835827 - DNA, 15 bp, Homo sapiens
cccctatccacagca

SEQ ID NO: 1835828 - DNA, 15 bp, Homo sapiens
ccctatccacagcag

SEQ ID NO: 1835829 - DNA, 15 bp, Homo sapiens
cctatccacagcagc

SEQ ID NO: 1835830 - DNA, 15 bp, Homo sapiens
ctatccacagcagca

SEQ ID NO: 1835831 - DNA, 15 bp, Homo sapiens
tatccacagcagcag

SEQ ID NO: 1835832 - DNA, 15 bp, Homo sapiens
atccacagcagcagt

SEQ ID NO: 1835833 - DNA, 15 bp, Homo sapiens
tccacagcagcagtg

SEQ ID NO: 1835834 - DNA, 15 bp, Homo sapiens
ccacagcagcagtgg

SEQ ID NO: 1835835 - DNA, 15 bp, Homo sapiens
cacagcagcagtggt

SEQ ID NO: 1835836 - DNA, 15 bp, Homo sapiens
acagcagcagtggtg

SEQ ID NO: 1835837 - DNA, 15 bp, Homo sapiens
cagcagcagtggtgt

SEQ ID NO: 1835838 - DNA, 15 bp, Homo sapiens
agcagcagtggtgtg

SEQ ID NO: 1835839 - DNA, 15 bp, Homo sapiens
gcagcagtggtgtgg

SEQ ID NO: 1835840 - DNA, 15 bp, Homo sapiens
cagcagtggtgtggt

SEQ ID NO: 1835841 - DNA, 15 bp, Homo sapiens
agcagtggtgtggtg

SEQ ID NO: 1835842 - DNA, 15 bp, Homo sapiens
gcagtggtgtggtgc

SEQ ID NO: 1835843 - DNA, 15 bp, Homo sapiens
cagtggtgtggtgcg

SEQ ID NO: 1835844 - DNA, 15 bp, Homo sapiens
agtggtgtggtgcgg

SEQ ID NO: 1835845 - DNA, 15 bp, Homo sapiens
gtggtgtggtgcgga

SEQ ID NO: 1835846 - DNA, 15 bp, Homo sapiens
tggtgtggtgcggag

SEQ ID NO: 1835847 - DNA, 15 bp, Homo sapiens
ggtgtggtgcggaga

SEQ ID NO: 1835848 - DNA, 15 bp, Homo sapiens
gtgtggtgcggagaa

SEQ ID NO: 1835849 - DNA, 15 bp, Homo sapiens
tgtggtgcggagaat

SEQ ID NO: 1835850 - DNA, 15 bp, Homo sapiens
gtggtgcggagaatg

SEQ ID NO: 1835851 - DNA, 15 bp, Homo sapiens
tggtgcggagaatgt

SEQ ID NO: 1835852 - DNA, 15 bp, Homo sapiens
ggtgcggagaatgtc

SEQ ID NO: 1835853 - DNA, 15 bp, Homo sapiens
gtgcggagaatgtct

SEQ ID NO: 1835854 - DNA, 15 bp, Homo sapiens
tgcggagaatgtctc

SEQ ID NO: 1835855 - DNA, 15 bp, Homo sapiens
gcggagaatgtctct

SEQ ID NO: 1835856 - DNA, 15 bp, Homo sapiens
cggagaatgtctctg

SEQ ID NO: 1835857 - DNA, 15 bp, Homo sapiens
ggagaatgtctctgg

SEQ ID NO: 1835858 - DNA, 15 bp, Homo sapiens
gagaatgtctctggg

SEQ ID NO: 1835859 - DNA, 15 bp, Homo sapiens
agaatgtctctgggt

SEQ ID NO: 1835860 - DNA, 15 bp, Homo sapiens
gaatgtctctgggtg

SEQ ID NO: 1835861 - DNA, 15 bp, Homo sapiens
aatgtctctgggtgc

SEQ ID NO: 1835862 - DNA, 15 bp, Homo sapiens
atgtctctgggtgct

SEQ ID NO: 1835863 - DNA, 15 bp, Homo sapiens
tgtctctgggtgctg

SEQ ID NO: 1835864 - DNA, 15 bp, Homo sapiens
gtctctgggtgctgg

SEQ ID NO: 1835865 - DNA, 15 bp, Homo sapiens
tctctgggtgctggg

SEQ ID NO: 1835866 - DNA, 15 bp, Homo sapiens
ctctgggtgctggga

SEQ ID NO: 1835867 - DNA, 15 bp, Homo sapiens
tctgggtgctgggag

SEQ ID NO: 1835868 - DNA, 15 bp, Homo sapiens
ctgggtgctgggaga

SEQ ID NO: 1835869 - DNA, 15 bp, Homo sapiens
tgggtgctgggagaa

SEQ ID NO: 1835870 - DNA, 15 bp, Homo sapiens
gggtgctgggagaag

SEQ ID NO: 1835871 - DNA, 15 bp, Homo sapiens
ggtgctgggagaagg

SEQ ID NO: 1835872 - DNA, 15 bp, Homo sapiens
gtgctgggagaagga

SEQ ID NO: 1835873 - DNA, 15 bp, Homo sapiens
tgctgggagaaggag

SEQ ID NO: 1835874 - DNA, 15 bp, Homo sapiens
gctgggagaaggaga

SEQ ID NO: 1835875 - DNA, 15 bp, Homo sapiens
ctgggagaaggagaa

SEQ ID NO: 1835876 - DNA, 15 bp, Homo sapiens
tgggagaaggagaac

SEQ ID NO: 1835877 - DNA, 15 bp, Homo sapiens
gggagaaggagaaca

SEQ ID NO: 1835878 - DNA, 15 bp, Homo sapiens
ggagaaggagaacac

SEQ ID NO: 1835879 - DNA, 15 bp, Homo sapiens
gagaaggagaacaca

SEQ ID NO: 1835880 - DNA, 15 bp, Homo sapiens
agaaggagaacacat

SEQ ID NO: 1835881 - DNA, 15 bp, Homo sapiens
gaaggagaacacatc

SEQ ID NO: 1835882 - DNA, 15 bp, Homo sapiens
aaggagaacacatca

SEQ ID NO: 1835883 - DNA, 15 bp, Homo sapiens
aggagaacacatcaa

SEQ ID NO: 1835884 - DNA, 15 bp, Homo sapiens
ggagaacacatcaat

SEQ ID NO: 1835885 - DNA, 15 bp, Homo sapiens
gagaacacatcaatt

SEQ ID NO: 1835886 - DNA, 15 bp, Homo sapiens
agaacacatcaattg

SEQ ID NO: 1835887 - DNA, 15 bp, Homo sapiens
gaacacatcaattgt

SEQ ID NO: 1835888 - DNA, 15 bp, Homo sapiens
aacacatcaattgtg

SEQ ID NO: 1835889 - DNA, 15 bp, Homo sapiens
acacatcaattgtgg

SEQ ID NO: 1835890 - DNA, 15 bp, Homo sapiens
cacatcaattgtggg

SEQ ID NO: 1835891 - DNA, 15 bp, Homo sapiens
acatcaattgtgggg

SEQ ID NO: 1835892 - DNA, 15 bp, Homo sapiens
catcaattgtggggc

SEQ ID NO: 1835893 - DNA, 15 bp, Homo sapiens
atcaattgtggggca

SEQ ID NO: 1835894 - DNA, 15 bp, Homo sapiens
attgtggggcactga

SEQ ID NO: 1835895 - DNA, 15 bp, Homo sapiens
ttgtggggcactgaa

SEQ ID NO: 1835896 - DNA, 15 bp, Homo sapiens
tgtggggcactgaac

SEQ ID NO: 1835897 - DNA, 15 bp, Homo sapiens
gtggggcactgaact

SEQ ID NO: 1835898 - DNA, 15 bp, Homo sapiens
tggggcactgaactc

SEQ ID NO: 1835899 - DNA, 15 bp, Homo sapiens
ggggcactgaactca

SEQ ID NO: 1835900 - DNA, 15 bp, Homo sapiens
gggcactgaactcag

SEQ ID NO: 1835901 - DNA, 15 bp, Homo sapiens
ggcactgaactcagt

SEQ ID NO: 1835902 - DNA, 15 bp, Homo sapiens
gcactgaactcagta

SEQ ID NO: 1835903 - DNA, 15 bp, Homo sapiens
cactgaactcagtac

SEQ ID NO: 1835904 - DNA, 15 bp, Homo sapiens
actgaactcagtact

SEQ ID NO: 1835905 - DNA, 15 bp, Homo sapiens
ctgaactcagtactg

SEQ ID NO: 1835906 - DNA, 15 bp, Homo sapiens
tgaactcagtactgt

SEQ ID NO: 1835907 - DNA, 15 bp, Homo sapiens
gaactcagtactgtc

SEQ ID NO: 1835908 - DNA, 15 bp, Homo sapiens
aactcagtactgtcc

SEQ ID NO: 1835909 - DNA, 15 bp, Homo sapiens
actcagtactgtcct

SEQ ID NO: 1835910 - DNA, 15 bp, Homo sapiens
ctcagtactgtcctg

SEQ ID NO: 1835911 - DNA, 15 bp, Homo sapiens
tcagtactgtcctgt

SEQ ID NO: 1835912 - DNA, 15 bp, Homo sapiens
cagtactgtcctgtt

SEQ ID NO: 1835913 - DNA, 15 bp, Homo sapiens
agtactgtcctgtta

SEQ ID NO: 1835914 - DNA, 15 bp, Homo sapiens
gtactgtcctgttag

SEQ ID NO: 1835915 - DNA, 15 bp, Homo sapiens
tactgtcctgttaga

SEQ ID NO: 1835916 - DNA, 15 bp, Homo sapiens
actgtcctgttagag

SEQ ID NO: 1835917 - DNA, 15 bp, Homo sapiens
ctgtcctgttagagg

SEQ ID NO: 1835918 - DNA, 15 bp, Homo sapiens
tgtcctgttagagga

SEQ ID NO: 1835919 - DNA, 15 bp, Homo sapiens
gtcctgttagaggag

SEQ ID NO: 1835920 - DNA, 15 bp, Homo sapiens
tcctgttagaggaga

SEQ ID NO: 1835921 - DNA, 15 bp, Homo sapiens
cctgttagaggagaa

SEQ ID NO: 1835922 - DNA, 15 bp, Homo sapiens
ctgttagaggagaaa

SEQ ID NO: 1835923 - DNA, 15 bp, Homo sapiens
tgttagaggagaaag

SEQ ID NO: 1835924 - DNA, 15 bp, Homo sapiens
gttagaggagaaagg

SEQ ID NO: 1835925 - DNA, 15 bp, Homo sapiens
ttagaggagaaagga

SEQ ID NO: 1835926 - DNA, 15 bp, Homo sapiens
tagaggagaaaggaa

SEQ ID NO: 1835927 - DNA, 15 bp, Homo sapiens
agaggagaaaggaaa

SEQ ID NO: 1835928 - DNA, 15 bp, Homo sapiens
gaggagaaaggaaaa

SEQ ID NO: 1835929 - DNA, 15 bp, Homo sapiens
aggagaaaggaaaac

SEQ ID NO: 1835930 - DNA, 15 bp, Homo sapiens
ggagaaaggaaaacc

SEQ ID NO: 1835931 - DNA, 15 bp, Homo sapiens
gagaaaggaaaacca

SEQ ID NO: 1835932 - DNA, 15 bp, Homo sapiens
agaaaggaaaaccag

SEQ ID NO: 1835933 - DNA, 15 bp, Homo sapiens
gaaaggaaaaccaga

SEQ ID NO: 1835934 - DNA, 15 bp, Homo sapiens
aaaggaaaaccagac

SEQ ID NO: 1835935 - DNA, 15 bp, Homo sapiens
aaggaaaaccagact

SEQ ID NO: 1835936 - DNA, 15 bp, Homo sapiens
aggaaaaccagacta

SEQ ID NO: 1835937 - DNA, 15 bp, Homo sapiens
ggaaaaccagactaa

SEQ ID NO: 1835938 - DNA, 15 bp, Homo sapiens
gaaaaccagactaaa

SEQ ID NO: 1835939 - DNA, 15 bp, Homo sapiens
aaaaccagactaaac

SEQ ID NO: 1835940 - DNA, 15 bp, Homo sapiens
aaaccagactaaact

SEQ ID NO: 1835941 - DNA, 15 bp, Homo sapiens
aaccagactaaactt

SEQ ID NO: 1835942 - DNA, 15 bp, Homo sapiens
accagactaaactta

SEQ ID NO: 1835943 - DNA, 15 bp, Homo sapiens
ccagactaaacttag

SEQ ID NO: 1835944 - DNA, 15 bp, Homo sapiens
cagactaaacttagc

SEQ ID NO: 1835945 - DNA, 15 bp, Homo sapiens
agactaaacttagct

SEQ ID NO: 1835946 - DNA, 15 bp, Homo sapiens
gactaaacttagctg

SEQ ID NO: 1835947 - DNA, 15 bp, Homo sapiens
actaaacttagctga

SEQ ID NO: 1835948 - DNA, 15 bp, Homo sapiens
ctaaacttagctgat

SEQ ID NO: 1835949 - DNA, 15 bp, Homo sapiens
taaacttagctgatg

SEQ ID NO: 1835950 - DNA, 15 bp, Homo sapiens
aaacttagctgatgt

SEQ ID NO: 1835951 - DNA, 15 bp, Homo sapiens
aacttagctgatgtc

SEQ ID NO: 1835952 - DNA, 15 bp, Homo sapiens
acttagctgatgtcc

SEQ ID NO: 1835953 - DNA, 15 bp, Homo sapiens
cttagctgatgtcca

SEQ ID NO: 1835954 - DNA, 15 bp, Homo sapiens
ttagctgatgtccac

SEQ ID NO: 1835955 - DNA, 15 bp, Homo sapiens
tagctgatgtccact

SEQ ID NO: 1835956 - DNA, 15 bp, Homo sapiens
agctgatgtccactc

SEQ ID NO: 1835957 - DNA, 15 bp, Homo sapiens
gctgatgtccactca

SEQ ID NO: 1835958 - DNA, 15 bp, Homo sapiens
ctgatgtccactcac

SEQ ID NO: 1835959 - DNA, 15 bp, Homo sapiens
tgatgtccactcaca

SEQ ID NO: 1835960 - DNA, 15 bp, Homo sapiens
gatgtccactcacag

SEQ ID NO: 1835961 - DNA, 15 bp, Homo sapiens
atgtccactcacaga

SEQ ID NO: 1835962 - DNA, 15 bp, Homo sapiens
tgtccactcacagag

SEQ ID NO: 1835963 - DNA, 15 bp, Homo sapiens
gtccactcacagagg

SEQ ID NO: 1835964 - DNA, 15 bp, Homo sapiens
tccactcacagaggg

SEQ ID NO: 1835965 - DNA, 15 bp, Homo sapiens
ccactcacagaggga

SEQ ID NO: 1835966 - DNA, 15 bp, Homo sapiens
cactcacagagggag

SEQ ID NO: 1835967 - DNA, 15 bp, Homo sapiens
actcacagagggagc

SEQ ID NO: 1835968 - DNA, 15 bp, Homo sapiens
ctcacagagggagca

SEQ ID NO: 1835969 - DNA, 15 bp, Homo sapiens
tcacagagggagcat

SEQ ID NO: 1835970 - DNA, 15 bp, Homo sapiens
cacagagggagcatt

SEQ ID NO: 1835971 - DNA, 15 bp, Homo sapiens
acagagggagcattt

SEQ ID NO: 1835972 - DNA, 15 bp, Homo sapiens
cagagggagcattta

SEQ ID NO: 1835973 - DNA, 15 bp, Homo sapiens
agagggagcatttaa

SEQ ID NO: 1835974 - DNA, 15 bp, Homo sapiens
gagggagcatttaaa

SEQ ID NO: 1835975 - DNA, 15 bp, Homo sapiens
agggagcatttaaac

SEQ ID NO: 1835976 - DNA, 15 bp, Homo sapiens
gggagcatttaaacc

SEQ ID NO: 1835977 - DNA, 15 bp, Homo sapiens
ggagcatttaaacca

SEQ ID NO: 1835978 - DNA, 15 bp, Homo sapiens
gagcatttaaaccat

SEQ ID NO: 1835979 - DNA, 15 bp, Homo sapiens
agcatttaaaccatc

SEQ ID NO: 1835980 - DNA, 15 bp, Homo sapiens
gcatttaaaccatcc

SEQ ID NO: 1835981 - DNA, 15 bp, Homo sapiens
catttaaaccatccc

SEQ ID NO: 1835982 - DNA, 15 bp, Homo sapiens
atttaaaccatccct

SEQ ID NO: 1835983 - DNA, 15 bp, Homo sapiens
tttaaaccatcccta

SEQ ID NO: 1835984 - DNA, 15 bp, Homo sapiens
ttaaaccatccctag

SEQ ID NO: 1835985 - DNA, 15 bp, Homo sapiens
taaaccatccctagc

SEQ ID NO: 1835986 - DNA, 15 bp, Homo sapiens
aaaccatccctagcc

SEQ ID NO: 1835987 - DNA, 15 bp, Homo sapiens
aaccatccctagccc

SEQ ID NO: 1835988 - DNA, 15 bp, Homo sapiens
accatccctagccca

SEQ ID NO: 1835989 - DNA, 15 bp, Homo sapiens
ccatccctagcccaa

SEQ ID NO: 1835990 - DNA, 15 bp, Homo sapiens
catccctagcccaag

SEQ ID NO: 1835991 - DNA, 15 bp, Homo sapiens
atccctagcccaaga

SEQ ID NO: 1835992 - DNA, 15 bp, Homo sapiens
tccctagcccaagag

SEQ ID NO: 1835993 - DNA, 15 bp, Homo sapiens
ccctagcccaagagg

SEQ ID NO: 1835994 - DNA, 15 bp, Homo sapiens
cctagcccaagagga

SEQ ID NO: 1835995 - DNA, 15 bp, Homo sapiens
ctagcccaagaggaa

SEQ ID NO: 1835996 - DNA, 15 bp, Homo sapiens
tagcccaagaggaat

SEQ ID NO: 1835997 - DNA, 15 bp, Homo sapiens
agcccaagaggaatt

SEQ ID NO: 1835998 - DNA, 15 bp, Homo sapiens
gcccaagaggaattg

SEQ ID NO: 1835999 - DNA, 15 bp, Homo sapiens
cccaagaggaattgt

SEQ ID NO: 1836000 - DNA, 15 bp, Homo sapiens
ccaagaggaattgtc

SEQ ID NO: 1836001 - DNA, 15 bp, Homo sapiens
caagaggaattgtca

SEQ ID NO: 1836002 - DNA, 15 bp, Homo sapiens
aagaggaattgtcaa

SEQ ID NO: 1836003 - DNA, 15 bp, Homo sapiens
agaggaattgtcaat

SEQ ID NO: 1836004 - DNA, 15 bp, Homo sapiens
gaggaattgtcaatc

SEQ ID NO: 1836005 - DNA, 15 bp, Homo sapiens
aggaattgtcaatcc

SEQ ID NO: 1836006 - DNA, 15 bp, Homo sapiens
ggaattgtcaatccc

SEQ ID NO: 1836007 - DNA, 15 bp, Homo sapiens
gaattgtcaatcccc

SEQ ID NO: 1836008 - DNA, 15 bp, Homo sapiens
aattgtcaatcccca

SEQ ID NO: 1836009 - DNA, 15 bp, Homo sapiens
attgtcaatccccag

SEQ ID NO: 1836010 - DNA, 15 bp, Homo sapiens
ttgtcaatccccagc

SEQ ID NO: 1836011 - DNA, 15 bp, Homo sapiens
tgtcaatccccagca

SEQ ID NO: 1836012 - DNA, 15 bp, Homo sapiens
gtcaatccccagcag

SEQ ID NO: 1836013 - DNA, 15 bp, Homo sapiens
tcaatccccagcagt

SEQ ID NO: 1836014 - DNA, 15 bp, Homo sapiens
caatccccagcagtc

SEQ ID NO: 1836015 - DNA, 15 bp, Homo sapiens
aatccccagcagtcc

SEQ ID NO: 1836016 - DNA, 15 bp, Homo sapiens
atccccagcagtcca

SEQ ID NO: 1836017 - DNA, 15 bp, Homo sapiens
tccccagcagtccaa

SEQ ID NO: 1836018 - DNA, 15 bp, Homo sapiens
ccccagcagtccaaa

SEQ ID NO: 1836019 - DNA, 15 bp, Homo sapiens
cccagcagtccaaac

SEQ ID NO: 1836020 - DNA, 15 bp, Homo sapiens
ccagcagtccaaact

SEQ ID NO: 1836021 - DNA, 15 bp, Homo sapiens
cagcagtccaaactt

SEQ ID NO: 1836022 - DNA, 15 bp, Homo sapiens
agcagtccaaacttg

SEQ ID NO: 1836023 - DNA, 15 bp, Homo sapiens
gcagtccaaacttga

SEQ ID NO: 1836024 - DNA, 15 bp, Homo sapiens
cagtccaaacttgag

SEQ ID NO: 1836025 - DNA, 15 bp, Homo sapiens
agtccaaacttgagt

SEQ ID NO: 1836026 - DNA, 15 bp, Homo sapiens
gtccaaacttgagta

SEQ ID NO: 1836027 - DNA, 15 bp, Homo sapiens
tccaaacttgagtag

SEQ ID NO: 1836028 - DNA, 15 bp, Homo sapiens
ccaaacttgagtagc

SEQ ID NO: 1836029 - DNA, 15 bp, Homo sapiens
caaacttgagtagcc

SEQ ID NO: 1836030 - DNA, 15 bp, Homo sapiens
aaacttgagtagccg

SEQ ID NO: 1836031 - DNA, 15 bp, Homo sapiens
aacttgagtagccgc

SEQ ID NO: 1836032 - DNA, 15 bp, Homo sapiens
acttgagtagccgca

SEQ ID NO: 1836033 - DNA, 15 bp, Homo sapiens
cttgagtagccgcaa

SEQ ID NO: 1836034 - DNA, 15 bp, Homo sapiens
ttgagtagccgcaaa

SEQ ID NO: 1836035 - DNA, 15 bp, Homo sapiens
tgagtagccgcaaaa

SEQ ID NO: 1836036 - DNA, 15 bp, Homo sapiens
gagtagccgcaaaac

SEQ ID NO: 1836037 - DNA, 15 bp, Homo sapiens
agtagccgcaaaact

SEQ ID NO: 1836038 - DNA, 15 bp, Homo sapiens
gtagccgcaaaactc

SEQ ID NO: 1836039 - DNA, 15 bp, Homo sapiens
tagccgcaaaactct

SEQ ID NO: 1836040 - DNA, 15 bp, Homo sapiens
agccgcaaaactctc

SEQ ID NO: 1836041 - DNA, 15 bp, Homo sapiens
gccgcaaaactctcc

SEQ ID NO: 1836042 - DNA, 15 bp, Homo sapiens
ccgcaaaactctcca

SEQ ID NO: 1836043 - DNA, 15 bp, Homo sapiens
cgcaaaactctccac

SEQ ID NO: 1836044 - DNA, 15 bp, Homo sapiens
gcaaaactctccact

SEQ ID NO: 1836045 - DNA, 15 bp, Homo sapiens
caaaactctccactg

SEQ ID NO: 1836046 - DNA, 15 bp, Homo sapiens
aaaactctccactga

SEQ ID NO: 1836047 - DNA, 15 bp, Homo sapiens
aaactctccactgag

SEQ ID NO: 1836048 - DNA, 15 bp, Homo sapiens
aactctccactgagg

SEQ ID NO: 1836049 - DNA, 15 bp, Homo sapiens
actctccactgaggg

SEQ ID NO: 1836050 - DNA, 15 bp, Homo sapiens
ctctccactgagggc

SEQ ID NO: 1836051 - DNA, 15 bp, Homo sapiens
tctccactgagggcc

SEQ ID NO: 1836052 - DNA, 15 bp, Homo sapiens
ctccactgagggcca

SEQ ID NO: 1836053 - DNA, 15 bp, Homo sapiens
tccactgagggccaa

SEQ ID NO: 1836054 - DNA, 15 bp, Homo sapiens
ccactgagggccaaa

SEQ ID NO: 1836055 - DNA, 15 bp, Homo sapiens
cactgagggccaaac

SEQ ID NO: 1836056 - DNA, 15 bp, Homo sapiens
actgagggccaaact

SEQ ID NO: 1836057 - DNA, 15 bp, Homo sapiens
ctgagggccaaactt

SEQ ID NO: 1836058 - DNA, 15 bp, Homo sapiens
tgagggccaaacttg

SEQ ID NO: 1836059 - DNA, 15 bp, Homo sapiens
gagggccaaacttga

SEQ ID NO: 1836060 - DNA, 15 bp, Homo sapiens
agggccaaacttgaa

SEQ ID NO: 1836061 - DNA, 15 bp, Homo sapiens
gggccaaacttgaaa

SEQ ID NO: 1836062 - DNA, 15 bp, Homo sapiens
ggccaaacttgaaag

SEQ ID NO: 1836063 - DNA, 15 bp, Homo sapiens
gccaaacttgaaagg

SEQ ID NO: 1836064 - DNA, 15 bp, Homo sapiens
ccaaacttgaaaggc

SEQ ID NO: 1836065 - DNA, 15 bp, Homo sapiens
caaacttgaaaggca

SEQ ID NO: 1836066 - DNA, 15 bp, Homo sapiens
aaacttgaaaggcag

SEQ ID NO: 1836067 - DNA, 15 bp, Homo sapiens
aacttgaaaggcagt

SEQ ID NO: 1836068 - DNA, 15 bp, Homo sapiens
acttgaaaggcagtc

SEQ ID NO: 1836069 - DNA, 15 bp, Homo sapiens
cttgaaaggcagtct

SEQ ID NO: 1836070 - DNA, 15 bp, Homo sapiens
ttgaaaggcagtcta

SEQ ID NO: 1836071 - DNA, 15 bp, Homo sapiens
tgaaaggcagtctag

SEQ ID NO: 1836072 - DNA, 15 bp, Homo sapiens
gaaaggcagtctagg

SEQ ID NO: 1836073 - DNA, 15 bp, Homo sapiens
aaaggcagtctaggc

SEQ ID NO: 1836074 - DNA, 15 bp, Homo sapiens
aaggcagtctaggcc

SEQ ID NO: 1836075 - DNA, 15 bp, Homo sapiens
aggcagtctaggcca

SEQ ID NO: 1836076 - DNA, 15 bp, Homo sapiens
ggcagtctaggccat

SEQ ID NO: 1836077 - DNA, 15 bp, Homo sapiens
gcagtctaggccata

SEQ ID NO: 1836078 - DNA, 15 bp, Homo sapiens
cagtctaggccataa

SEQ ID NO: 1836079 - DNA, 15 bp, Homo sapiens
agtctaggccataag

SEQ ID NO: 1836080 - DNA, 15 bp, Homo sapiens
gtctaggccataagg

SEQ ID NO: 1836081 - DNA, 15 bp, Homo sapiens
tctaggccataagga

SEQ ID NO: 1836082 - DNA, 15 bp, Homo sapiens
ctaggccataaggac

SEQ ID NO: 1836083 - DNA, 15 bp, Homo sapiens
taggccataaggact

SEQ ID NO: 1836084 - DNA, 15 bp, Homo sapiens
aggccataaggactg

SEQ ID NO: 1836085 - DNA, 15 bp, Homo sapiens
ggccataaggactgc

SEQ ID NO: 1836086 - DNA, 15 bp, Homo sapiens
gccataaggactgca

SEQ ID NO: 1836087 - DNA, 15 bp, Homo sapiens
ccataaggactgcaa

SEQ ID NO: 1836088 - DNA, 15 bp, Homo sapiens
cataaggactgcaac

SEQ ID NO: 1836089 - DNA, 15 bp, Homo sapiens
ataaggactgcaact

SEQ ID NO: 1836090 - DNA, 15 bp, Homo sapiens
taaggactgcaactc

SEQ ID NO: 1836091 - DNA, 15 bp, Homo sapiens
aaggactgcaactct

SEQ ID NO: 1836092 - DNA, 15 bp, Homo sapiens
aggactgcaactctt

SEQ ID NO: 1836093 - DNA, 15 bp, Homo sapiens
ggactgcaactctta

SEQ ID NO: 1836094 - DNA, 15 bp, Homo sapiens
gactgcaactcttag

SEQ ID NO: 1836095 - DNA, 15 bp, Homo sapiens
actgcaactcttagg

SEQ ID NO: 1836096 - DNA, 15 bp, Homo sapiens
ctgcaactcttaggc

SEQ ID NO: 1836097 - DNA, 15 bp, Homo sapiens
tgcaactcttaggca

SEQ ID NO: 1836098 - DNA, 15 bp, Homo sapiens
gcaactcttaggcaa

SEQ ID NO: 1836099 - DNA, 15 bp, Homo sapiens
caactcttaggcaag

SEQ ID NO: 1836100 - DNA, 15 bp, Homo sapiens
aactcttaggcaagt

SEQ ID NO: 1836101 - DNA, 15 bp, Homo sapiens
actcttaggcaagta

SEQ ID NO: 1836102 - DNA, 15 bp, Homo sapiens
ctcttaggcaagtac

SEQ ID NO: 1836103 - DNA, 15 bp, Homo sapiens
tcttaggcaagtact

SEQ ID NO: 1836104 - DNA, 15 bp, Homo sapiens
cttaggcaagtacta

SEQ ID NO: 1836105 - DNA, 15 bp, Homo sapiens
ttaggcaagtactag

SEQ ID NO: 1836106 - DNA, 15 bp, Homo sapiens
taggcaagtactagg

SEQ ID NO: 1836107 - DNA, 15 bp, Homo sapiens
aggcaagtactaggg

SEQ ID NO: 1836108 - DNA, 15 bp, Homo sapiens
ggcaagtactagggc

SEQ ID NO: 1836109 - DNA, 15 bp, Homo sapiens
gcaagtactagggct

SEQ ID NO: 1836110 - DNA, 15 bp, Homo sapiens
caagtactagggctc

SEQ ID NO: 1836111 - DNA, 15 bp, Homo sapiens
aagtactagggctca

SEQ ID NO: 1836112 - DNA, 15 bp, Homo sapiens
agtactagggctcaa

SEQ ID NO: 1836113 - DNA, 15 bp, Homo sapiens
gtactagggctcaac

SEQ ID NO: 1836114 - DNA, 15 bp, Homo sapiens
tactagggctcaaca

SEQ ID NO: 1836115 - DNA, 15 bp, Homo sapiens
actagggctcaacaa

SEQ ID NO: 1836116 - DNA, 15 bp, Homo sapiens
ctagggctcaacaag

SEQ ID NO: 1836117 - DNA, 15 bp, Homo sapiens
tagggctcaacaagg

SEQ ID NO: 1836118 - DNA, 15 bp, Homo sapiens
agggctcaacaaggc

SEQ ID NO: 1836119 - DNA, 15 bp, Homo sapiens
gggctcaacaaggcc

SEQ ID NO: 1836120 - DNA, 15 bp, Homo sapiens
ggctcaacaaggccc

SEQ ID NO: 1836121 - DNA, 15 bp, Homo sapiens
gctcaacaaggcccg

SEQ ID NO: 1836122 - DNA, 15 bp, Homo sapiens
ctcaacaaggcccgg

SEQ ID NO: 1836123 - DNA, 15 bp, Homo sapiens
tcaacaaggcccgga

SEQ ID NO: 1836124 - DNA, 15 bp, Homo sapiens
caacaaggcccggag

SEQ ID NO: 1836125 - DNA, 15 bp, Homo sapiens
aacaaggcccggaga

SEQ ID NO: 1836126 - DNA, 15 bp, Homo sapiens
acaaggcccggagac

SEQ ID NO: 1836127 - DNA, 15 bp, Homo sapiens
caaggcccggagacc

SEQ ID NO: 1836128 - DNA, 15 bp, Homo sapiens
aaggcccggagacct

SEQ ID NO: 1836129 - DNA, 15 bp, Homo sapiens
aggcccggagaccta

SEQ ID NO: 1836130 - DNA, 15 bp, Homo sapiens
ggcccggagacctag

SEQ ID NO: 1836131 - DNA, 15 bp, Homo sapiens
gcccggagacctagt

SEQ ID NO: 1836132 - DNA, 15 bp, Homo sapiens
cccggagacctagtg

SEQ ID NO: 1836133 - DNA, 15 bp, Homo sapiens
ccggagacctagtgg

SEQ ID NO: 1836134 - DNA, 15 bp, Homo sapiens
cggagacctagtgga

SEQ ID NO: 1836135 - DNA, 15 bp, Homo sapiens
ggagacctagtggac

SEQ ID NO: 1836136 - DNA, 15 bp, Homo sapiens
gagacctagtggact

SEQ ID NO: 1836137 - DNA, 15 bp, Homo sapiens
agacctagtggactg

SEQ ID NO: 1836138 - DNA, 15 bp, Homo sapiens
gacctagtggactga

SEQ ID NO: 1836139 - DNA, 15 bp, Homo sapiens
acctagtggactgag

SEQ ID NO: 1836140 - DNA, 15 bp, Homo sapiens
cctagtggactgagg

SEQ ID NO: 1836141 - DNA, 15 bp, Homo sapiens
ctagtggactgaggg

SEQ ID NO: 1836142 - DNA, 15 bp, Homo sapiens
tagtggactgagggg

SEQ ID NO: 1836143 - DNA, 15 bp, Homo sapiens
agtggactgagggga

SEQ ID NO: 1836144 - DNA, 15 bp, Homo sapiens
gtggactgaggggac

SEQ ID NO: 1836145 - DNA, 15 bp, Homo sapiens
tggactgaggggaca

SEQ ID NO: 1836146 - DNA, 15 bp, Homo sapiens
ggactgaggggacat

SEQ ID NO: 1836147 - DNA, 15 bp, Homo sapiens
gactgaggggacatg

SEQ ID NO: 1836148 - DNA, 15 bp, Homo sapiens
actgaggggacatgt

SEQ ID NO: 1836149 - DNA, 15 bp, Homo sapiens
ctgaggggacatgtg

SEQ ID NO: 1836150 - DNA, 15 bp, Homo sapiens
tgaggggacatgtga

SEQ ID NO: 1836151 - DNA, 15 bp, Homo sapiens
gaggggacatgtgac

SEQ ID NO: 1836152 - DNA, 15 bp, Homo sapiens
aggggacatgtgaca

SEQ ID NO: 1836153 - DNA, 15 bp, Homo sapiens
ggggacatgtgacat

SEQ ID NO: 1836154 - DNA, 15 bp, Homo sapiens
gggacatgtgacata

SEQ ID NO: 1836155 - DNA, 15 bp, Homo sapiens
ggacatgtgacatac

SEQ ID NO: 1836156 - DNA, 15 bp, Homo sapiens
gacatgtgacatacc

SEQ ID NO: 1836157 - DNA, 15 bp, Homo sapiens
acatgtgacataccg

SEQ ID NO: 1836158 - DNA, 15 bp, Homo sapiens
catgtgacataccga

SEQ ID NO: 1836159 - DNA, 15 bp, Homo sapiens
atgtgacataccgag

SEQ ID NO: 1836160 - DNA, 15 bp, Homo sapiens
tgtgacataccgaga

SEQ ID NO: 1836161 - DNA, 15 bp, Homo sapiens
gtgacataccgagat

SEQ ID NO: 1836162 - DNA, 15 bp, Homo sapiens
tgacataccgagata

SEQ ID NO: 1836163 - DNA, 15 bp, Homo sapiens
gacataccgagatac

SEQ ID NO: 1836164 - DNA, 15 bp, Homo sapiens
acataccgagatacc

SEQ ID NO: 1836165 - DNA, 15 bp, Homo sapiens
cataccgagatacca

SEQ ID NO: 1836166 - DNA, 15 bp, Homo sapiens
ataccgagataccag

SEQ ID NO: 1836167 - DNA, 15 bp, Homo sapiens
taccgagataccagc

SEQ ID NO: 1836168 - DNA, 15 bp, Homo sapiens
accgagataccagct

SEQ ID NO: 1836169 - DNA, 15 bp, Homo sapiens
ccgagataccagctg

SEQ ID NO: 1836170 - DNA, 15 bp, Homo sapiens
cgagataccagctga

SEQ ID NO: 1836171 - DNA, 15 bp, Homo sapiens
gagataccagctgag

SEQ ID NO: 1836172 - DNA, 15 bp, Homo sapiens
agataccagctgagg

SEQ ID NO: 1836173 - DNA, 15 bp, Homo sapiens
gataccagctgaggc

SEQ ID NO: 1836174 - DNA, 15 bp, Homo sapiens
ataccagctgaggca

SEQ ID NO: 1836175 - DNA, 15 bp, Homo sapiens
taccagctgaggcag

SEQ ID NO: 1836176 - DNA, 15 bp, Homo sapiens
accagctgaggcagc

SEQ ID NO: 1836177 - DNA, 15 bp, Homo sapiens
ccagctgaggcagcc

SEQ ID NO: 1836178 - DNA, 15 bp, Homo sapiens
cagctgaggcagcca

SEQ ID NO: 1836179 - DNA, 15 bp, Homo sapiens
agctgaggcagccaa

SEQ ID NO: 1836180 - DNA, 15 bp, Homo sapiens
gctgaggcagccaag

SEQ ID NO: 1836181 - DNA, 15 bp, Homo sapiens
ctgaggcagccaagg

SEQ ID NO: 1836182 - DNA, 15 bp, Homo sapiens
tgaggcagccaaggg

SEQ ID NO: 1836183 - DNA, 15 bp, Homo sapiens
gaggcagccaaggga

SEQ ID NO: 1836184 - DNA, 15 bp, Homo sapiens
aggcagccaagggag

SEQ ID NO: 1836185 - DNA, 15 bp, Homo sapiens
ggcagccaagggagt

SEQ ID NO: 1836186 - DNA, 15 bp, Homo sapiens
gcagccaagggagta

SEQ ID NO: 1836187 - DNA, 15 bp, Homo sapiens
cagccaagggagtat

SEQ ID NO: 1836188 - DNA, 15 bp, Homo sapiens
agccaagggagtatt

SEQ ID NO: 1836189 - DNA, 15 bp, Homo sapiens
gccaagggagtattg

SEQ ID NO: 1836190 - DNA, 15 bp, Homo sapiens
ccaagggagtattgg

SEQ ID NO: 1836191 - DNA, 15 bp, Homo sapiens
caagggagtattggc

SEQ ID NO: 1836192 - DNA, 15 bp, Homo sapiens
aagggagtattggct

SEQ ID NO: 1836193 - DNA, 15 bp, Homo sapiens
agggagtattggctt

SEQ ID NO: 1836194 - DNA, 15 bp, Homo sapiens
gggagtattggcttc

SEQ ID NO: 1836195 - DNA, 15 bp, Homo sapiens
ggagtattggcttca

SEQ ID NO: 1836196 - DNA, 15 bp, Homo sapiens
gagtattggcttcac

SEQ ID NO: 1836197 - DNA, 15 bp, Homo sapiens
agtattggcttcacc

SEQ ID NO: 1836198 - DNA, 15 bp, Homo sapiens
gtattggcttcaccc

SEQ ID NO: 1836199 - DNA, 15 bp, Homo sapiens
tattggcttcacccc

SEQ ID NO: 1836200 - DNA, 15 bp, Homo sapiens
attggcttcacccct

SEQ ID NO: 1836201 - DNA, 15 bp, Homo sapiens
ttggcttcacccctc

SEQ ID NO: 1836202 - DNA, 15 bp, Homo sapiens
tggcttcacccctct

SEQ ID NO: 1836203 - DNA, 15 bp, Homo sapiens
ggcttcacccctctc

SEQ ID NO: 1836204 - DNA, 15 bp, Homo sapiens
gcttcacccctctcc

SEQ ID NO: 1836205 - DNA, 15 bp, Homo sapiens
cttcacccctctcct

SEQ ID NO: 1836206 - DNA, 15 bp, Homo sapiens
ttcacccctctccta

SEQ ID NO: 1836207 - DNA, 15 bp, Homo sapiens
tcacccctctcctaa

SEQ ID NO: 1836208 - DNA, 15 bp, Homo sapiens
cacccctctcctaat

SEQ ID NO: 1836209 - DNA, 15 bp, Homo sapiens
acccctctcctaatc

SEQ ID NO: 1836210 - DNA, 15 bp, Homo sapiens
cccctctcctaatcc

SEQ ID NO: 1836211 - DNA, 15 bp, Homo sapiens
ccctctcctaatcct

SEQ ID NO: 1836212 - DNA, 15 bp, Homo sapiens
cctctcctaatccta

SEQ ID NO: 1836213 - DNA, 15 bp, Homo sapiens
ctctcctaatcctag

SEQ ID NO: 1836214 - DNA, 15 bp, Homo sapiens
tctcctaatcctagg

SEQ ID NO: 1836215 - DNA, 15 bp, Homo sapiens
ctcctaatcctaggc

SEQ ID NO: 1836216 - DNA, 15 bp, Homo sapiens
tcctaatcctaggct

SEQ ID NO: 1836217 - DNA, 15 bp, Homo sapiens
cctaatcctaggctg

SEQ ID NO: 1836218 - DNA, 15 bp, Homo sapiens
ctaatcctaggctgc

SEQ ID NO: 1836219 - DNA, 15 bp, Homo sapiens
taatcctaggctgca

SEQ ID NO: 1836220 - DNA, 15 bp, Homo sapiens
aatcctaggctgcac

SEQ ID NO: 1836221 - DNA, 15 bp, Homo sapiens
atcctaggctgcaca

SEQ ID NO: 1836222 - DNA, 15 bp, Homo sapiens
tcctaggctgcacaa

SEQ ID NO: 1836223 - DNA, 15 bp, Homo sapiens
cctaggctgcacaag

SEQ ID NO: 1836224 - DNA, 15 bp, Homo sapiens
ctaggctgcacaagt

SEQ ID NO: 1836225 - DNA, 15 bp, Homo sapiens
taggctgcacaagtc

SEQ ID NO: 1836226 - DNA, 15 bp, Homo sapiens
aggctgcacaagtca

SEQ ID NO: 1836227 - DNA, 15 bp, Homo sapiens
ggctgcacaagtcat

SEQ ID NO: 1836228 - DNA, 15 bp, Homo sapiens
gctgcacaagtcata

SEQ ID NO: 1836229 - DNA, 15 bp, Homo sapiens
ctgcacaagtcatag

SEQ ID NO: 1836230 - DNA, 15 bp, Homo sapiens
tgcacaagtcatagc

SEQ ID NO: 1836231 - DNA, 15 bp, Homo sapiens
gcacaagtcatagct

SEQ ID NO: 1836232 - DNA, 15 bp, Homo sapiens
cacaagtcatagctt

SEQ ID NO: 1836233 - DNA, 15 bp, Homo sapiens
acaagtcatagcttc

SEQ ID NO: 1836234 - DNA, 15 bp, Homo sapiens
caagtcatagcttca

SEQ ID NO: 1836235 - DNA, 15 bp, Homo sapiens
aagtcatagcttcaa

SEQ ID NO: 1836236 - DNA, 15 bp, Homo sapiens
agtcatagcttcaaa

SEQ ID NO: 1836237 - DNA, 15 bp, Homo sapiens
gtcatagcttcaaaa

SEQ ID NO: 1836238 - DNA, 15 bp, Homo sapiens
tcatagcttcaaaag

SEQ ID NO: 1836239 - DNA, 15 bp, Homo sapiens
catagcttcaaaaga

SEQ ID NO: 1836240 - DNA, 15 bp, Homo sapiens
atagcttcaaaagag

SEQ ID NO: 1836241 - DNA, 15 bp, Homo sapiens
tagcttcaaaagaga

SEQ ID NO: 1836242 - DNA, 15 bp, Homo sapiens
agcttcaaaagagac

SEQ ID NO: 1836243 - DNA, 15 bp, Homo sapiens
gcttcaaaagagact

SEQ ID NO: 1836244 - DNA, 15 bp, Homo sapiens
cttcaaaagagactt

SEQ ID NO: 1836245 - DNA, 15 bp, Homo sapiens
ttcaaaagagacttt

SEQ ID NO: 1836246 - DNA, 15 bp, Homo sapiens
tcaaaagagactttt

SEQ ID NO: 1836247 - DNA, 15 bp, Homo sapiens
caaaagagacttttt

SEQ ID NO: 1836248 - DNA, 15 bp, Homo sapiens
aaaagagactttttc

SEQ ID NO: 1836249 - DNA, 15 bp, Homo sapiens
aaagagactttttct

SEQ ID NO: 1836250 - DNA, 15 bp, Homo sapiens
aagagactttttctt

SEQ ID NO: 1836251 - DNA, 15 bp, Homo sapiens
agagactttttcttt

SEQ ID NO: 1836252 - DNA, 15 bp, Homo sapiens
gagactttttctttc

SEQ ID NO: 1836253 - DNA, 15 bp, Homo sapiens
agactttttctttct

SEQ ID NO: 1836254 - DNA, 15 bp, Homo sapiens
gactttttctttctg

SEQ ID NO: 1836255 - DNA, 15 bp, Homo sapiens
actttttctttctgc

SEQ ID NO: 1836256 - DNA, 15 bp, Homo sapiens
ctttttctttctgct

SEQ ID NO: 1836257 - DNA, 15 bp, Homo sapiens
tttttctttctgctt

SEQ ID NO: 1836258 - DNA, 15 bp, Homo sapiens
ttttctttctgcttg

SEQ ID NO: 1836259 - DNA, 15 bp, Homo sapiens
tttctttctgcttga

SEQ ID NO: 1836260 - DNA, 15 bp, Homo sapiens
ttctttctgcttgag

SEQ ID NO: 1836261 - DNA, 15 bp, Homo sapiens
tctttctgcttgagg

SEQ ID NO: 1836262 - DNA, 15 bp, Homo sapiens
ctttctgcttgagga

SEQ ID NO: 1836263 - DNA, 15 bp, Homo sapiens
tttctgcttgaggag

SEQ ID NO: 1836264 - DNA, 15 bp, Homo sapiens
ttctgcttgaggaga

SEQ ID NO: 1836265 - DNA, 15 bp, Homo sapiens
tctgcttgaggagag

SEQ ID NO: 1836266 - DNA, 15 bp, Homo sapiens
ctgcttgaggagaga

SEQ ID NO: 1836267 - DNA, 15 bp, Homo sapiens
tgcttgaggagagaa

SEQ ID NO: 1836268 - DNA, 15 bp, Homo sapiens
gcttgaggagagaag

SEQ ID NO: 1836269 - DNA, 15 bp, Homo sapiens
cttgaggagagaaga

SEQ ID NO: 1836270 - DNA, 15 bp, Homo sapiens
ttgaggagagaagac

SEQ ID NO: 1836271 - DNA, 15 bp, Homo sapiens
tgaggagagaagaca

SEQ ID NO: 1836272 - DNA, 15 bp, Homo sapiens
gaggagagaagacag

SEQ ID NO: 1836273 - DNA, 15 bp, Homo sapiens
aggagagaagacaga

SEQ ID NO: 1836274 - DNA, 15 bp, Homo sapiens
ggagagaagacagaa

SEQ ID NO: 1836275 - DNA, 15 bp, Homo sapiens
gagagaagacagaag

SEQ ID NO: 1836276 - DNA, 15 bp, Homo sapiens
agagaagacagaaga

SEQ ID NO: 1836277 - DNA, 15 bp, Homo sapiens
gagaagacagaagag

SEQ ID NO: 1836278 - DNA, 15 bp, Homo sapiens
agaagacagaagagt

SEQ ID NO: 1836279 - DNA, 15 bp, Homo sapiens
gaagacagaagagtg

SEQ ID NO: 1836280 - DNA, 15 bp, Homo sapiens
aagacagaagagtgg

SEQ ID NO: 1836281 - DNA, 15 bp, Homo sapiens
agacagaagagtggg

SEQ ID NO: 1836282 - DNA, 15 bp, Homo sapiens
gacagaagagtgggg

SEQ ID NO: 1836283 - DNA, 15 bp, Homo sapiens
acagaagagtgggga

SEQ ID NO: 1836284 - DNA, 15 bp, Homo sapiens
cagaagagtggggag

SEQ ID NO: 1836285 - DNA, 15 bp, Homo sapiens
agaagagtggggagg

SEQ ID NO: 1836286 - DNA, 15 bp, Homo sapiens
aagagtggggaggac

SEQ ID NO: 1836287 - DNA, 15 bp, Homo sapiens
agagtggggaggact

SEQ ID NO: 1836288 - DNA, 15 bp, Homo sapiens
gagtggggaggactt

SEQ ID NO: 1836289 - DNA, 15 bp, Homo sapiens
agtggggaggacttg

SEQ ID NO: 1836290 - DNA, 15 bp, Homo sapiens
gtggggaggacttgg

SEQ ID NO: 1836291 - DNA, 15 bp, Homo sapiens
ggggaggacttggcc

SEQ ID NO: 1836292 - DNA, 15 bp, Homo sapiens
gggaggacttggcct

SEQ ID NO: 1836293 - DNA, 15 bp, Homo sapiens
ggaggacttggcctt

SEQ ID NO: 1836294 - DNA, 15 bp, Homo sapiens
gaggacttggcctta

SEQ ID NO: 1836295 - DNA, 15 bp, Homo sapiens
aggacttggccttac

SEQ ID NO: 1836296 - DNA, 15 bp, Homo sapiens
ggacttggccttacc

SEQ ID NO: 1836297 - DNA, 15 bp, Homo sapiens
gacttggccttacct

SEQ ID NO: 1836298 - DNA, 15 bp, Homo sapiens
acttggccttacctc

SEQ ID NO: 1836299 - DNA, 15 bp, Homo sapiens
cttggccttacctct

SEQ ID NO: 1836300 - DNA, 15 bp, Homo sapiens
ttggccttacctctt

SEQ ID NO: 1836301 - DNA, 15 bp, Homo sapiens
tggccttacctcttg

SEQ ID NO: 1836302 - DNA, 15 bp, Homo sapiens
ggccttacctcttgg

SEQ ID NO: 1836303 - DNA, 15 bp, Homo sapiens
gccttacctcttgga

SEQ ID NO: 1836304 - DNA, 15 bp, Homo sapiens
ccttacctcttggat

SEQ ID NO: 1836305 - DNA, 15 bp, Homo sapiens
cttacctcttggata

SEQ ID NO: 1836306 - DNA, 15 bp, Homo sapiens
ttacctcttggatac

SEQ ID NO: 1836307 - DNA, 15 bp, Homo sapiens
tacctcttggatacc

SEQ ID NO: 1836308 - DNA, 15 bp, Homo sapiens
acctcttggatacca

SEQ ID NO: 1836309 - DNA, 15 bp, Homo sapiens
cctcttggataccag

SEQ ID NO: 1836310 - DNA, 15 bp, Homo sapiens
ctcttggataccagc

SEQ ID NO: 1836311 - DNA, 15 bp, Homo sapiens
tcttggataccagct

SEQ ID NO: 1836312 - DNA, 15 bp, Homo sapiens
cttggataccagctc

SEQ ID NO: 1836313 - DNA, 15 bp, Homo sapiens
ttggataccagctca

SEQ ID NO: 1836314 - DNA, 15 bp, Homo sapiens
tggataccagctcag

SEQ ID NO: 1836315 - DNA, 15 bp, Homo sapiens
ggataccagctcagc

SEQ ID NO: 1836316 - DNA, 15 bp, Homo sapiens
gataccagctcagct

SEQ ID NO: 1836317 - DNA, 15 bp, Homo sapiens
ataccagctcagcta

SEQ ID NO: 1836318 - DNA, 15 bp, Homo sapiens
taccagctcagctac

SEQ ID NO: 1836319 - DNA, 15 bp, Homo sapiens
accagctcagctaca

SEQ ID NO: 1836320 - DNA, 15 bp, Homo sapiens
ccagctcagctacag

SEQ ID NO: 1836321 - DNA, 15 bp, Homo sapiens
cagctcagctacagc

SEQ ID NO: 1836322 - DNA, 15 bp, Homo sapiens
agctcagctacagca

SEQ ID NO: 1836323 - DNA, 15 bp, Homo sapiens
gctcagctacagcag

SEQ ID NO: 1836324 - DNA, 15 bp, Homo sapiens
ctcagctacagcagg

SEQ ID NO: 1836325 - DNA, 15 bp, Homo sapiens
tcagctacagcagga

SEQ ID NO: 1836326 - DNA, 15 bp, Homo sapiens
cagctacagcaggat

SEQ ID NO: 1836327 - DNA, 15 bp, Homo sapiens
agctacagcaggata

SEQ ID NO: 1836328 - DNA, 15 bp, Homo sapiens
gctacagcaggatag

SEQ ID NO: 1836329 - DNA, 15 bp, Homo sapiens
ctacagcaggatagg

SEQ ID NO: 1836330 - DNA, 15 bp, Homo sapiens
tacagcaggataggg

SEQ ID NO: 1836331 - DNA, 15 bp, Homo sapiens
acagcaggatagggc

SEQ ID NO: 1836332 - DNA, 15 bp, Homo sapiens
cagcaggatagggca

SEQ ID NO: 1836333 - DNA, 15 bp, Homo sapiens
agcaggatagggcac

SEQ ID NO: 1836334 - DNA, 15 bp, Homo sapiens
gcaggatagggcact

SEQ ID NO: 1836335 - DNA, 15 bp, Homo sapiens
caggatagggcacta

SEQ ID NO: 1836336 - DNA, 15 bp, Homo sapiens
aggatagggcactag

SEQ ID NO: 1836337 - DNA, 15 bp, Homo sapiens
ggatagggcactagt

SEQ ID NO: 1836338 - DNA, 15 bp, Homo sapiens
gatagggcactagtc

SEQ ID NO: 1836339 - DNA, 15 bp, Homo sapiens
atagggcactagtca

SEQ ID NO: 1836340 - DNA, 15 bp, Homo sapiens
tagggcactagtcag

SEQ ID NO: 1836341 - DNA, 15 bp, Homo sapiens
agggcactagtcaga

SEQ ID NO: 1836342 - DNA, 15 bp, Homo sapiens
gggcactagtcagag

SEQ ID NO: 1836343 - DNA, 15 bp, Homo sapiens
ggcactagtcagagt

SEQ ID NO: 1836344 - DNA, 15 bp, Homo sapiens
gcactagtcagagtc

SEQ ID NO: 1836345 - DNA, 15 bp, Homo sapiens
cactagtcagagtca

SEQ ID NO: 1836346 - DNA, 15 bp, Homo sapiens
actagtcagagtcat

SEQ ID NO: 1836347 - DNA, 15 bp, Homo sapiens
ctagtcagagtcata

SEQ ID NO: 1836348 - DNA, 15 bp, Homo sapiens
tagtcagagtcataa

SEQ ID NO: 1836349 - DNA, 15 bp, Homo sapiens
agtcagagtcataag

SEQ ID NO: 1836350 - DNA, 15 bp, Homo sapiens
gtcagagtcataagg

SEQ ID NO: 1836351 - DNA, 15 bp, Homo sapiens
tcagagtcataaggc

SEQ ID NO: 1836352 - DNA, 15 bp, Homo sapiens
cagagtcataaggcc

SEQ ID NO: 1836353 - DNA, 15 bp, Homo sapiens
agagtcataaggccc

SEQ ID NO: 1836354 - DNA, 15 bp, Homo sapiens
gagtcataaggcccg

SEQ ID NO: 1836355 - DNA, 15 bp, Homo sapiens
agtcataaggcccgt

SEQ ID NO: 1836356 - DNA, 15 bp, Homo sapiens
gtcataaggcccgta

SEQ ID NO: 1836357 - DNA, 15 bp, Homo sapiens
tcataaggcccgtat

SEQ ID NO: 1836358 - DNA, 15 bp, Homo sapiens
cataaggcccgtatt

SEQ ID NO: 1836359 - DNA, 15 bp, Homo sapiens
ataaggcccgtattc

SEQ ID NO: 1836360 - DNA, 15 bp, Homo sapiens
taaggcccgtattcc

SEQ ID NO: 1836361 - DNA, 15 bp, Homo sapiens
aaggcccgtattcca

SEQ ID NO: 1836362 - DNA, 15 bp, Homo sapiens
aggcccgtattccag

SEQ ID NO: 1836363 - DNA, 15 bp, Homo sapiens
ggcccgtattccaga

SEQ ID NO: 1836364 - DNA, 15 bp, Homo sapiens
gcccgtattccagac

SEQ ID NO: 1836365 - DNA, 15 bp, Homo sapiens
cccgtattccagacc

SEQ ID NO: 1836366 - DNA, 15 bp, Homo sapiens
ccgtattccagaccc

SEQ ID NO: 1836367 - DNA, 15 bp, Homo sapiens
cgtattccagaccca

SEQ ID NO: 1836368 - DNA, 15 bp, Homo sapiens
gtattccagacccaa

SEQ ID NO: 1836369 - DNA, 15 bp, Homo sapiens
tattccagacccaag

SEQ ID NO: 1836370 - DNA, 15 bp, Homo sapiens
attccagacccaagc

SEQ ID NO: 1836371 - DNA, 15 bp, Homo sapiens
ttccagacccaagct

SEQ ID NO: 1836372 - DNA, 15 bp, Homo sapiens
tccagacccaagctc

SEQ ID NO: 1836373 - DNA, 15 bp, Homo sapiens
ccagacccaagctcc

SEQ ID NO: 1836374 - DNA, 15 bp, Homo sapiens
cagacccaagctcca

SEQ ID NO: 1836375 - DNA, 15 bp, Homo sapiens
agacccaagctccaa

SEQ ID NO: 1836376 - DNA, 15 bp, Homo sapiens
gacccaagctccaag

SEQ ID NO: 1836377 - DNA, 15 bp, Homo sapiens
acccaagctccaaga

SEQ ID NO: 1836378 - DNA, 15 bp, Homo sapiens
cccaagctccaagac

SEQ ID NO: 1836379 - DNA, 15 bp, Homo sapiens
ccaagctccaagaca

SEQ ID NO: 1836380 - DNA, 15 bp, Homo sapiens
caagctccaagacaa

SEQ ID NO: 1836381 - DNA, 15 bp, Homo sapiens
aagctccaagacaac

SEQ ID NO: 1836382 - DNA, 15 bp, Homo sapiens
agctccaagacaaca

SEQ ID NO: 1836383 - DNA, 15 bp, Homo sapiens
gctccaagacaacat

SEQ ID NO: 1836384 - DNA, 15 bp, Homo sapiens
ctccaagacaacatt

SEQ ID NO: 1836385 - DNA, 15 bp, Homo sapiens
tccaagacaacattt

SEQ ID NO: 1836386 - DNA, 15 bp, Homo sapiens
ccaagacaacatttc

SEQ ID NO: 1836387 - DNA, 15 bp, Homo sapiens
caagacaacatttct

SEQ ID NO: 1836388 - DNA, 15 bp, Homo sapiens
aagacaacatttcta

SEQ ID NO: 1836389 - DNA, 15 bp, Homo sapiens
agacaacatttctag

SEQ ID NO: 1836390 - DNA, 15 bp, Homo sapiens
gacaacatttctaga

SEQ ID NO: 1836391 - DNA, 15 bp, Homo sapiens
acaacatttctagac

SEQ ID NO: 1836392 - DNA, 15 bp, Homo sapiens
caacatttctagaca

SEQ ID NO: 1836393 - DNA, 15 bp, Homo sapiens
aacatttctagacac

SEQ ID NO: 1836394 - DNA, 15 bp, Homo sapiens
acatttctagacaca

SEQ ID NO: 1836395 - DNA, 15 bp, Homo sapiens
catttctagacacat

SEQ ID NO: 1836396 - DNA, 15 bp, Homo sapiens
atttctagacacatc

SEQ ID NO: 1836397 - DNA, 15 bp, Homo sapiens
tttctagacacatcc

SEQ ID NO: 1836398 - DNA, 15 bp, Homo sapiens
ttctagacacatcct

SEQ ID NO: 1836399 - DNA, 15 bp, Homo sapiens
tctagacacatccta

SEQ ID NO: 1836400 - DNA, 15 bp, Homo sapiens
ctagacacatcctag

SEQ ID NO: 1836401 - DNA, 15 bp, Homo sapiens
tagacacatcctaga

SEQ ID NO: 1836402 - DNA, 15 bp, Homo sapiens
agacacatcctagac

SEQ ID NO: 1836403 - DNA, 15 bp, Homo sapiens
gacacatcctagact

SEQ ID NO: 1836404 - DNA, 15 bp, Homo sapiens
acacatcctagacta

SEQ ID NO: 1836405 - DNA, 15 bp, Homo sapiens
cacatcctagactag

SEQ ID NO: 1836406 - DNA, 15 bp, Homo sapiens
acatcctagactaga

SEQ ID NO: 1836407 - DNA, 15 bp, Homo sapiens
catcctagactagaa

SEQ ID NO: 1836408 - DNA, 15 bp, Homo sapiens
atcctagactagaag

SEQ ID NO: 1836409 - DNA, 15 bp, Homo sapiens
tcctagactagaagg

SEQ ID NO: 1836410 - DNA, 15 bp, Homo sapiens
cctagactagaaggg

SEQ ID NO: 1836411 - DNA, 15 bp, Homo sapiens
ctagactagaaggga

SEQ ID NO: 1836412 - DNA, 15 bp, Homo sapiens
tagactagaagggaa

SEQ ID NO: 1836413 - DNA, 15 bp, Homo sapiens
agactagaagggaac

SEQ ID NO: 1836414 - DNA, 15 bp, Homo sapiens
gactagaagggaacc

SEQ ID NO: 1836415 - DNA, 15 bp, Homo sapiens
actagaagggaaccc

SEQ ID NO: 1836416 - DNA, 15 bp, Homo sapiens
ctagaagggaaccca

SEQ ID NO: 1836417 - DNA, 15 bp, Homo sapiens
tagaagggaacccac

SEQ ID NO: 1836418 - DNA, 15 bp, Homo sapiens
agaagggaacccact

SEQ ID NO: 1836419 - DNA, 15 bp, Homo sapiens
gaagggaacccactg

SEQ ID NO: 1836420 - DNA, 15 bp, Homo sapiens
aagggaacccactgc

SEQ ID NO: 1836421 - DNA, 15 bp, Homo sapiens
agggaacccactgcc

SEQ ID NO: 1836422 - DNA, 15 bp, Homo sapiens
gggaacccactgcct

SEQ ID NO: 1836423 - DNA, 15 bp, Homo sapiens
ggaacccactgcctt

SEQ ID NO: 1836424 - DNA, 15 bp, Homo sapiens
gaacccactgccttg

SEQ ID NO: 1836425 - DNA, 15 bp, Homo sapiens
aacccactgccttga

SEQ ID NO: 1836426 - DNA, 15 bp, Homo sapiens
acccactgccttgaa

SEQ ID NO: 1836427 - DNA, 15 bp, Homo sapiens
cccactgccttgaat

SEQ ID NO: 1836428 - DNA, 15 bp, Homo sapiens
ccactgccttgaatg

SEQ ID NO: 1836429 - DNA, 15 bp, Homo sapiens
cactgccttgaatga

SEQ ID NO: 1836430 - DNA, 15 bp, Homo sapiens
actgccttgaatgaa

SEQ ID NO: 1836431 - DNA, 15 bp, Homo sapiens
ctgccttgaatgaaa

SEQ ID NO: 1836432 - DNA, 15 bp, Homo sapiens
tgccttgaatgaaag

SEQ ID NO: 1836433 - DNA, 15 bp, Homo sapiens
gccttgaatgaaagg

SEQ ID NO: 1836434 - DNA, 15 bp, Homo sapiens
ccttgaatgaaagga

SEQ ID NO: 1836435 - DNA, 15 bp, Homo sapiens
cttgaatgaaaggac

SEQ ID NO: 1836436 - DNA, 15 bp, Homo sapiens
ttgaatgaaaggacc

SEQ ID NO: 1836437 - DNA, 15 bp, Homo sapiens
tgaatgaaaggaccc

SEQ ID NO: 1836438 - DNA, 15 bp, Homo sapiens
gaatgaaaggaccca

SEQ ID NO: 1836439 - DNA, 15 bp, Homo sapiens
aatgaaaggacccag

SEQ ID NO: 1836440 - DNA, 15 bp, Homo sapiens
atgaaaggacccagt

SEQ ID NO: 1836441 - DNA, 15 bp, Homo sapiens
tgaaaggacccagtc

SEQ ID NO: 1836442 - DNA, 15 bp, Homo sapiens
gaaaggacccagtcc

SEQ ID NO: 1836443 - DNA, 15 bp, Homo sapiens
aaaggacccagtcct

SEQ ID NO: 1836444 - DNA, 15 bp, Homo sapiens
aaggacccagtcctg

SEQ ID NO: 1836445 - DNA, 15 bp, Homo sapiens
aggacccagtcctgg

SEQ ID NO: 1836446 - DNA, 15 bp, Homo sapiens
ggacccagtcctggc

SEQ ID NO: 1836447 - DNA, 15 bp, Homo sapiens
gacccagtcctggca

SEQ ID NO: 1836448 - DNA, 15 bp, Homo sapiens
acccagtcctggcag

SEQ ID NO: 1836449 - DNA, 15 bp, Homo sapiens
cccagtcctggcagc

SEQ ID NO: 1836450 - DNA, 15 bp, Homo sapiens
ccagtcctggcagca

SEQ ID NO: 1836451 - DNA, 15 bp, Homo sapiens
cagtcctggcagcat

SEQ ID NO: 1836452 - DNA, 15 bp, Homo sapiens
agtcctggcagcatt

SEQ ID NO: 1836453 - DNA, 15 bp, Homo sapiens
gtcctggcagcattc

SEQ ID NO: 1836454 - DNA, 15 bp, Homo sapiens
tcctggcagcattca

SEQ ID NO: 1836455 - DNA, 15 bp, Homo sapiens
cctggcagcattcat

SEQ ID NO: 1836456 - DNA, 15 bp, Homo sapiens
ctggcagcattcatc

SEQ ID NO: 1836457 - DNA, 15 bp, Homo sapiens
tggcagcattcatca

SEQ ID NO: 1836458 - DNA, 15 bp, Homo sapiens
ggcagcattcatcac

SEQ ID NO: 1836459 - DNA, 15 bp, Homo sapiens
gcagcattcatcaca

SEQ ID NO: 1836460 - DNA, 15 bp, Homo sapiens
cagcattcatcacat

SEQ ID NO: 1836461 - DNA, 15 bp, Homo sapiens
agcattcatcacatg

SEQ ID NO: 1836462 - DNA, 15 bp, Homo sapiens
gcattcatcacatgc

SEQ ID NO: 1836463 - DNA, 15 bp, Homo sapiens
cattcatcacatgct

SEQ ID NO: 1836464 - DNA, 15 bp, Homo sapiens
attcatcacatgcta

SEQ ID NO: 1836465 - DNA, 15 bp, Homo sapiens
ttcatcacatgctaa

SEQ ID NO: 1836466 - DNA, 15 bp, Homo sapiens
tcatcacatgctaac

SEQ ID NO: 1836467 - DNA, 15 bp, Homo sapiens
catcacatgctaact

SEQ ID NO: 1836468 - DNA, 15 bp, Homo sapiens
atcacatgctaactg

SEQ ID NO: 1836469 - DNA, 15 bp, Homo sapiens
tcacatgctaactga

SEQ ID NO: 1836470 - DNA, 15 bp, Homo sapiens
cacatgctaactgaa

SEQ ID NO: 1836471 - DNA, 15 bp, Homo sapiens
acatgctaactgaaa

SEQ ID NO: 1836472 - DNA, 15 bp, Homo sapiens
catgctaactgaaaa

SEQ ID NO: 1836473 - DNA, 15 bp, Homo sapiens
atgctaactgaaaag

SEQ ID NO: 1836474 - DNA, 15 bp, Homo sapiens
tgctaactgaaaagc

SEQ ID NO: 1836475 - DNA, 15 bp, Homo sapiens
gctaactgaaaagcc

SEQ ID NO: 1836476 - DNA, 15 bp, Homo sapiens
ctaactgaaaagccc

SEQ ID NO: 1836477 - DNA, 15 bp, Homo sapiens
taactgaaaagccct

SEQ ID NO: 1836478 - DNA, 15 bp, Homo sapiens
aactgaaaagccctt

SEQ ID NO: 1836479 - DNA, 15 bp, Homo sapiens
actgaaaagcccttg

SEQ ID NO: 1836480 - DNA, 15 bp, Homo sapiens
ctgaaaagcccttgg

SEQ ID NO: 1836481 - DNA, 15 bp, Homo sapiens
tgaaaagcccttggg

SEQ ID NO: 1836482 - DNA, 15 bp, Homo sapiens
gaaaagcccttgggc

SEQ ID NO: 1836483 - DNA, 15 bp, Homo sapiens
aaaagcccttgggcc

SEQ ID NO: 1836484 - DNA, 15 bp, Homo sapiens
aaagcccttgggccc

SEQ ID NO: 1836485 - DNA, 15 bp, Homo sapiens
aagcccttgggccct

SEQ ID NO: 1836486 - DNA, 15 bp, Homo sapiens
agcccttgggccctg

SEQ ID NO: 1836487 - DNA, 15 bp, Homo sapiens
gcccttgggccctga

SEQ ID NO: 1836488 - DNA, 15 bp, Homo sapiens
cccttgggccctgaa

SEQ ID NO: 1836489 - DNA, 15 bp, Homo sapiens
ccttgggccctgaat

SEQ ID NO: 1836490 - DNA, 15 bp, Homo sapiens
cttgggccctgaata

SEQ ID NO: 1836491 - DNA, 15 bp, Homo sapiens
ttgggccctgaataa

SEQ ID NO: 1836492 - DNA, 15 bp, Homo sapiens
tgggccctgaataac

SEQ ID NO: 1836493 - DNA, 15 bp, Homo sapiens
gggccctgaataacc

SEQ ID NO: 1836494 - DNA, 15 bp, Homo sapiens
ggccctgaataacca

SEQ ID NO: 1836495 - DNA, 15 bp, Homo sapiens
gccctgaataaccag

SEQ ID NO: 1836496 - DNA, 15 bp, Homo sapiens
ccctgaataaccagt

SEQ ID NO: 1836497 - DNA, 15 bp, Homo sapiens
cctgaataaccagta

SEQ ID NO: 1836498 - DNA, 15 bp, Homo sapiens
ctgaataaccagtag

SEQ ID NO: 1836499 - DNA, 15 bp, Homo sapiens
tgaataaccagtagc

SEQ ID NO: 1836500 - DNA, 15 bp, Homo sapiens
gaataaccagtagcg

SEQ ID NO: 1836501 - DNA, 15 bp, Homo sapiens
aataaccagtagcga

SEQ ID NO: 1836502 - DNA, 15 bp, Homo sapiens
ataaccagtagcgat

SEQ ID NO: 1836503 - DNA, 15 bp, Homo sapiens
taaccagtagcgatc

SEQ ID NO: 1836504 - DNA, 15 bp, Homo sapiens
aaccagtagcgatcc

SEQ ID NO: 1836505 - DNA, 15 bp, Homo sapiens
accagtagcgatccc

SEQ ID NO: 1836506 - DNA, 15 bp, Homo sapiens
ccagtagcgatcccc

SEQ ID NO: 1836507 - DNA, 15 bp, Homo sapiens
cagtagcgatcccca

SEQ ID NO: 1836508 - DNA, 15 bp, Homo sapiens
agtagcgatccccag

SEQ ID NO: 1836509 - DNA, 15 bp, Homo sapiens
gtagcgatccccagg

SEQ ID NO: 1836510 - DNA, 15 bp, Homo sapiens
tagcgatccccaggt

SEQ ID NO: 1836511 - DNA, 15 bp, Homo sapiens
agcgatccccaggta

SEQ ID NO: 1836512 - DNA, 15 bp, Homo sapiens
gcgatccccaggtac

SEQ ID NO: 1836513 - DNA, 15 bp, Homo sapiens
cgatccccaggtact

SEQ ID NO: 1836514 - DNA, 15 bp, Homo sapiens
gatccccaggtacta

SEQ ID NO: 1836515 - DNA, 15 bp, Homo sapiens
atccccaggtactac

SEQ ID NO: 1836516 - DNA, 15 bp, Homo sapiens
tccccaggtactaca

SEQ ID NO: 1836517 - DNA, 15 bp, Homo sapiens
ccccaggtactacat

SEQ ID NO: 1836518 - DNA, 15 bp, Homo sapiens
cccaggtactacatc

SEQ ID NO: 1836519 - DNA, 15 bp, Homo sapiens
ccaggtactacatcg

SEQ ID NO: 1836520 - DNA, 15 bp, Homo sapiens
caggtactacatcga

SEQ ID NO: 1836521 - DNA, 15 bp, Homo sapiens
aggtactacatcgag

SEQ ID NO: 1836522 - DNA, 15 bp, Homo sapiens
ggtactacatcgagg

SEQ ID NO: 1836523 - DNA, 15 bp, Homo sapiens
gtactacatcgaggg

SEQ ID NO: 1836524 - DNA, 15 bp, Homo sapiens
tactacatcgagggc

SEQ ID NO: 1836525 - DNA, 15 bp, Homo sapiens
actacatcgagggcc

SEQ ID NO: 1836526 - DNA, 15 bp, Homo sapiens
ctacatcgagggcct

SEQ ID NO: 1836527 - DNA, 15 bp, Homo sapiens
tacatcgagggcctt

SEQ ID NO: 1836528 - DNA, 15 bp, Homo sapiens
acatcgagggcctta

SEQ ID NO: 1836529 - DNA, 15 bp, Homo sapiens
catcgagggccttag

SEQ ID NO: 1836530 - DNA, 15 bp, Homo sapiens
atcgagggccttagg

SEQ ID NO: 1836531 - DNA, 15 bp, Homo sapiens
tcgagggccttaggt

SEQ ID NO: 1836532 - DNA, 15 bp, Homo sapiens
cgagggccttaggtg

SEQ ID NO: 1836533 - DNA, 15 bp, Homo sapiens
gagggccttaggtga

SEQ ID NO: 1836534 - DNA, 15 bp, Homo sapiens
agggccttaggtgag

SEQ ID NO: 1836535 - DNA, 15 bp, Homo sapiens
gggccttaggtgagc

SEQ ID NO: 1836536 - DNA, 15 bp, Homo sapiens
ggccttaggtgagcc

SEQ ID NO: 1836537 - DNA, 15 bp, Homo sapiens
gccttaggtgagcct

SEQ ID NO: 1836538 - DNA, 15 bp, Homo sapiens
ccttaggtgagcctc

SEQ ID NO: 1836539 - DNA, 15 bp, Homo sapiens
cttaggtgagcctct

SEQ ID NO: 1836540 - DNA, 15 bp, Homo sapiens
ttaggtgagcctctg

SEQ ID NO: 1836541 - DNA, 15 bp, Homo sapiens
taggtgagcctctga

SEQ ID NO: 1836542 - DNA, 15 bp, Homo sapiens
aggtgagcctctgag

SEQ ID NO: 1836543 - DNA, 15 bp, Homo sapiens
ggtgagcctctgaga

SEQ ID NO: 1836544 - DNA, 15 bp, Homo sapiens
gtgagcctctgagac

SEQ ID NO: 1836545 - DNA, 15 bp, Homo sapiens
tgagcctctgagact

SEQ ID NO: 1836546 - DNA, 15 bp, Homo sapiens
gagcctctgagactt

SEQ ID NO: 1836547 - DNA, 15 bp, Homo sapiens
agcctctgagacttg

SEQ ID NO: 1836548 - DNA, 15 bp, Homo sapiens
gcctctgagacttgc

SEQ ID NO: 1836549 - DNA, 15 bp, Homo sapiens
cctctgagacttgct

SEQ ID NO: 1836550 - DNA, 15 bp, Homo sapiens
ctctgagacttgctg

SEQ ID NO: 1836551 - DNA, 15 bp, Homo sapiens
tctgagacttgctgg

SEQ ID NO: 1836552 - DNA, 15 bp, Homo sapiens
ctgagacttgctggc

SEQ ID NO: 1836553 - DNA, 15 bp, Homo sapiens
tgagacttgctggct

SEQ ID NO: 1836554 - DNA, 15 bp, Homo sapiens
gagacttgctggctt

SEQ ID NO: 1836555 - DNA, 15 bp, Homo sapiens
agacttgctggcttc

SEQ ID NO: 1836556 - DNA, 15 bp, Homo sapiens
gacttgctggcttca

SEQ ID NO: 1836557 - DNA, 15 bp, Homo sapiens
acttgctggcttcag

SEQ ID NO: 1836558 - DNA, 15 bp, Homo sapiens
cttgctggcttcagg

SEQ ID NO: 1836559 - DNA, 15 bp, Homo sapiens
ttgctggcttcaggt

SEQ ID NO: 1836560 - DNA, 15 bp, Homo sapiens
tgctggcttcaggtg

SEQ ID NO: 1836561 - DNA, 15 bp, Homo sapiens
gctggcttcaggtga

SEQ ID NO: 1836562 - DNA, 15 bp, Homo sapiens
ctggcttcaggtgag

SEQ ID NO: 1836563 - DNA, 15 bp, Homo sapiens
tggcttcaggtgaga

SEQ ID NO: 1836564 - DNA, 15 bp, Homo sapiens
ggcttcaggtgagat

SEQ ID NO: 1836565 - DNA, 15 bp, Homo sapiens
gcttcaggtgagatt

SEQ ID NO: 1836566 - DNA, 15 bp, Homo sapiens
cttcaggtgagattc

SEQ ID NO: 1836567 - DNA, 15 bp, Homo sapiens
ttcaggtgagattca

SEQ ID NO: 1836568 - DNA, 15 bp, Homo sapiens
tcaggtgagattcag

SEQ ID NO: 1836569 - DNA, 15 bp, Homo sapiens
caggtgagattcagc

SEQ ID NO: 1836570 - DNA, 15 bp, Homo sapiens
aggtgagattcagca

SEQ ID NO: 1836571 - DNA, 15 bp, Homo sapiens
ggtgagattcagcac

SEQ ID NO: 1836572 - DNA, 15 bp, Homo sapiens
gtgagattcagcaca

SEQ ID NO: 1836573 - DNA, 15 bp, Homo sapiens
tgagattcagcacat

SEQ ID NO: 1836574 - DNA, 15 bp, Homo sapiens
gagattcagcacatt

SEQ ID NO: 1836575 - DNA, 15 bp, Homo sapiens
agattcagcacatta

SEQ ID NO: 1836576 - DNA, 15 bp, Homo sapiens
gattcagcacattac

SEQ ID NO: 1836577 - DNA, 15 bp, Homo sapiens
attcagcacattacc

SEQ ID NO: 1836578 - DNA, 15 bp, Homo sapiens
ttcagcacattacca

SEQ ID NO: 1836579 - DNA, 15 bp, Homo sapiens
tcagcacattaccac

SEQ ID NO: 1836580 - DNA, 15 bp, Homo sapiens
cagcacattaccacc

SEQ ID NO: 1836581 - DNA, 15 bp, Homo sapiens
agcacattaccacct

SEQ ID NO: 1836582 - DNA, 15 bp, Homo sapiens
gcacattaccaccta

SEQ ID NO: 1836583 - DNA, 15 bp, Homo sapiens
cacattaccacctat

SEQ ID NO: 1836584 - DNA, 15 bp, Homo sapiens
acattaccacctatg

SEQ ID NO: 1836585 - DNA, 15 bp, Homo sapiens
cattaccacctatgg

SEQ ID NO: 1836586 - DNA, 15 bp, Homo sapiens
attaccacctatggt

SEQ ID NO: 1836587 - DNA, 15 bp, Homo sapiens
ttaccacctatggtg

SEQ ID NO: 1836588 - DNA, 15 bp, Homo sapiens
taccacctatggtgg

SEQ ID NO: 1836589 - DNA, 15 bp, Homo sapiens
accacctatggtggc

SEQ ID NO: 1836590 - DNA, 15 bp, Homo sapiens
ccacctatggtggct

SEQ ID NO: 1836591 - DNA, 15 bp, Homo sapiens
cacctatggtggcta

SEQ ID NO: 1836592 - DNA, 15 bp, Homo sapiens
acctatggtggctat

SEQ ID NO: 1836593 - DNA, 15 bp, Homo sapiens
cctatggtggctatg

SEQ ID NO: 1836594 - DNA, 15 bp, Homo sapiens
ctatggtggctatgg

SEQ ID NO: 1836595 - DNA, 15 bp, Homo sapiens
tatggtggctatggg

SEQ ID NO: 1836596 - DNA, 15 bp, Homo sapiens
atggtggctatgggg

SEQ ID NO: 1836597 - DNA, 15 bp, Homo sapiens
tggtggctatggggc

SEQ ID NO: 1836598 - DNA, 15 bp, Homo sapiens
ggtggctatggggca

SEQ ID NO: 1836599 - DNA, 15 bp, Homo sapiens
gtggctatggggcaa

SEQ ID NO: 1836600 - DNA, 15 bp, Homo sapiens
tggctatggggcaaa

SEQ ID NO: 1836601 - DNA, 15 bp, Homo sapiens
ggctatggggcaaaa

SEQ ID NO: 1836602 - DNA, 15 bp, Homo sapiens
gctatggggcaaaac

SEQ ID NO: 1836603 - DNA, 15 bp, Homo sapiens
ctatggggcaaaact

SEQ ID NO: 1836604 - DNA, 15 bp, Homo sapiens
tatggggcaaaactc

SEQ ID NO: 1836605 - DNA, 15 bp, Homo sapiens
atggggcaaaactcc

SEQ ID NO: 1836606 - DNA, 15 bp, Homo sapiens
tggggcaaaactcct

SEQ ID NO: 1836607 - DNA, 15 bp, Homo sapiens
ggggcaaaactcctc

SEQ ID NO: 1836608 - DNA, 15 bp, Homo sapiens
gggcaaaactcctcc

SEQ ID NO: 1836609 - DNA, 15 bp, Homo sapiens
ggcaaaactcctcct

SEQ ID NO: 1836610 - DNA, 15 bp, Homo sapiens
gcaaaactcctcctg

SEQ ID NO: 1836611 - DNA, 15 bp, Homo sapiens
caaaactcctcctgc

SEQ ID NO: 1836612 - DNA, 15 bp, Homo sapiens
aaaactcctcctgct

SEQ ID NO: 1836613 - DNA, 15 bp, Homo sapiens
aaactcctcctgctt

SEQ ID NO: 1836614 - DNA, 15 bp, Homo sapiens
aactcctcctgcttg

SEQ ID NO: 1836615 - DNA, 15 bp, Homo sapiens
actcctcctgcttgg

SEQ ID NO: 1836616 - DNA, 15 bp, Homo sapiens
ctcctcctgcttggg

SEQ ID NO: 1836617 - DNA, 15 bp, Homo sapiens
tcctcctgcttggga

SEQ ID NO: 1836618 - DNA, 15 bp, Homo sapiens
cctcctgcttgggaa

SEQ ID NO: 1836619 - DNA, 15 bp, Homo sapiens
ctcctgcttgggaaa

SEQ ID NO: 1836620 - DNA, 15 bp, Homo sapiens
tcctgcttgggaaaa

SEQ ID NO: 1836621 - DNA, 15 bp, Homo sapiens
cctgcttgggaaaag

SEQ ID NO: 1836622 - DNA, 15 bp, Homo sapiens
ctgcttgggaaaagc

SEQ ID NO: 1836623 - DNA, 15 bp, Homo sapiens
tgcttgggaaaagca

SEQ ID NO: 1836624 - DNA, 15 bp, Homo sapiens
gcttgggaaaagcag

SEQ ID NO: 1836625 - DNA, 15 bp, Homo sapiens
cttgggaaaagcaga

SEQ ID NO: 1836626 - DNA, 15 bp, Homo sapiens
gggaaaagcagaggg

SEQ ID NO: 1836627 - DNA, 15 bp, Homo sapiens
ggaaaagcagaggga

SEQ ID NO: 1836628 - DNA, 15 bp, Homo sapiens
gaaaagcagagggaa

SEQ ID NO: 1836629 - DNA, 15 bp, Homo sapiens
aaaagcagagggaaa

SEQ ID NO: 1836630 - DNA, 15 bp, Homo sapiens
aaagcagagggaaaa

SEQ ID NO: 1836631 - DNA, 15 bp, Homo sapiens
aagcagagggaaaag

SEQ ID NO: 1836632 - DNA, 15 bp, Homo sapiens
agcagagggaaaagt

SEQ ID NO: 1836633 - DNA, 15 bp, Homo sapiens
gcagagggaaaagta

SEQ ID NO: 1836634 - DNA, 15 bp, Homo sapiens
cagagggaaaagtaa

SEQ ID NO: 1836635 - DNA, 15 bp, Homo sapiens
agagggaaaagtaaa

SEQ ID NO: 1836636 - DNA, 15 bp, Homo sapiens
gagggaaaagtaaac

SEQ ID NO: 1836637 - DNA, 15 bp, Homo sapiens
agggaaaagtaaacg

SEQ ID NO: 1836638 - DNA, 15 bp, Homo sapiens
gggaaaagtaaacgg

SEQ ID NO: 1836639 - DNA, 15 bp, Homo sapiens
ggaaaagtaaacggg

SEQ ID NO: 1836640 - DNA, 15 bp, Homo sapiens
gaaaagtaaacgggg

SEQ ID NO: 1836641 - DNA, 15 bp, Homo sapiens
aaaagtaaacggggc

SEQ ID NO: 1836642 - DNA, 15 bp, Homo sapiens
aaagtaaacggggct

SEQ ID NO: 1836643 - DNA, 15 bp, Homo sapiens
aagtaaacggggctg

SEQ ID NO: 1836644 - DNA, 15 bp, Homo sapiens
agtaaacggggctgt

SEQ ID NO: 1836645 - DNA, 15 bp, Homo sapiens
gtaaacggggctgta

SEQ ID NO: 1836646 - DNA, 15 bp, Homo sapiens
taaacggggctgtat

SEQ ID NO: 1836647 - DNA, 15 bp, Homo sapiens
aaacggggctgtatc

SEQ ID NO: 1836648 - DNA, 15 bp, Homo sapiens
aacggggctgtatct

SEQ ID NO: 1836649 - DNA, 15 bp, Homo sapiens
acggggctgtatctt

SEQ ID NO: 1836650 - DNA, 15 bp, Homo sapiens
cggggctgtatcttg

SEQ ID NO: 1836651 - DNA, 15 bp, Homo sapiens
ggggctgtatcttgt

SEQ ID NO: 1836652 - DNA, 15 bp, Homo sapiens
gggctgtatcttgtt

SEQ ID NO: 1836653 - DNA, 15 bp, Homo sapiens
ggctgtatcttgttg

SEQ ID NO: 1836654 - DNA, 15 bp, Homo sapiens
gctgtatcttgttgc

SEQ ID NO: 1836655 - DNA, 15 bp, Homo sapiens
ctgtatcttgttgca

SEQ ID NO: 1836656 - DNA, 15 bp, Homo sapiens
tgtatcttgttgcac

SEQ ID NO: 1836657 - DNA, 15 bp, Homo sapiens
gtatcttgttgcacc

SEQ ID NO: 1836658 - DNA, 15 bp, Homo sapiens
tatcttgttgcacct

SEQ ID NO: 1836659 - DNA, 15 bp, Homo sapiens
atcttgttgcacctt

SEQ ID NO: 1836660 - DNA, 15 bp, Homo sapiens
tcttgttgcacctta

SEQ ID NO: 1836661 - DNA, 15 bp, Homo sapiens
cttgttgcaccttag

SEQ ID NO: 1836662 - DNA, 15 bp, Homo sapiens
ttgttgcaccttagg

SEQ ID NO: 1836663 - DNA, 15 bp, Homo sapiens
tgttgcaccttaggt

SEQ ID NO: 1836664 - DNA, 15 bp, Homo sapiens
gttgcaccttaggta

SEQ ID NO: 1836665 - DNA, 15 bp, Homo sapiens
ttgcaccttaggtac

SEQ ID NO: 1836666 - DNA, 15 bp, Homo sapiens
tgcaccttaggtacc

SEQ ID NO: 1836667 - DNA, 15 bp, Homo sapiens
gcaccttaggtacca

SEQ ID NO: 1836668 - DNA, 15 bp, Homo sapiens
caccttaggtaccaa

SEQ ID NO: 1836669 - DNA, 15 bp, Homo sapiens
accttaggtaccaac

SEQ ID NO: 1836670 - DNA, 15 bp, Homo sapiens
ccttaggtaccaaca

SEQ ID NO: 1836671 - DNA, 15 bp, Homo sapiens
cttaggtaccaacac

SEQ ID NO: 1836672 - DNA, 15 bp, Homo sapiens
ttaggtaccaacacc

SEQ ID NO: 1836673 - DNA, 15 bp, Homo sapiens
taggtaccaacacca

SEQ ID NO: 1836674 - DNA, 15 bp, Homo sapiens
aggtaccaacaccac

SEQ ID NO: 1836675 - DNA, 15 bp, Homo sapiens
ggtaccaacaccacc

SEQ ID NO: 1836676 - DNA, 15 bp, Homo sapiens
gtaccaacaccacca

SEQ ID NO: 1836677 - DNA, 15 bp, Homo sapiens
taccaacaccaccac

SEQ ID NO: 1836678 - DNA, 15 bp, Homo sapiens
accaacaccaccaca

SEQ ID NO: 1836679 - DNA, 15 bp, Homo sapiens
ccaacaccaccacaa

SEQ ID NO: 1836680 - DNA, 15 bp, Homo sapiens
caacaccaccacaag

SEQ ID NO: 1836681 - DNA, 15 bp, Homo sapiens
aacaccaccacaagg

SEQ ID NO: 1836682 - DNA, 15 bp, Homo sapiens
acaccaccacaaggg

SEQ ID NO: 1836683 - DNA, 15 bp, Homo sapiens
caccaccacaagggg

SEQ ID NO: 1836684 - DNA, 15 bp, Homo sapiens
accaccacaaggggg

SEQ ID NO: 1836685 - DNA, 15 bp, Homo sapiens
ccaccacaagggggt

SEQ ID NO: 1836686 - DNA, 15 bp, Homo sapiens
caccacaagggggta

SEQ ID NO: 1836687 - DNA, 15 bp, Homo sapiens
accacaagggggtag

SEQ ID NO: 1836688 - DNA, 15 bp, Homo sapiens
ccacaagggggtaga

SEQ ID NO: 1836689 - DNA, 15 bp, Homo sapiens
cacaagggggtagag

SEQ ID NO: 1836690 - DNA, 15 bp, Homo sapiens
acaagggggtagagc

SEQ ID NO: 1836691 - DNA, 15 bp, Homo sapiens
caagggggtagagca

SEQ ID NO: 1836692 - DNA, 15 bp, Homo sapiens
aagggggtagagcac

SEQ ID NO: 1836693 - DNA, 15 bp, Homo sapiens
agggggtagagcacc

SEQ ID NO: 1836694 - DNA, 15 bp, Homo sapiens
gggggtagagcacca

SEQ ID NO: 1836695 - DNA, 15 bp, Homo sapiens
ggggtagagcaccag

SEQ ID NO: 1836696 - DNA, 15 bp, Homo sapiens
gggtagagcaccagg

SEQ ID NO: 1836697 - DNA, 15 bp, Homo sapiens
ggtagagcaccaggt

SEQ ID NO: 1836698 - DNA, 15 bp, Homo sapiens
gtagagcaccaggtg

SEQ ID NO: 1836699 - DNA, 15 bp, Homo sapiens
tagagcaccaggtgg

SEQ ID NO: 1836700 - DNA, 15 bp, Homo sapiens
agagcaccaggtggg

SEQ ID NO: 1836701 - DNA, 15 bp, Homo sapiens
gagcaccaggtggga

SEQ ID NO: 1836702 - DNA, 15 bp, Homo sapiens
agcaccaggtgggat

SEQ ID NO: 1836703 - DNA, 15 bp, Homo sapiens
gcaccaggtgggatc

SEQ ID NO: 1836704 - DNA, 15 bp, Homo sapiens
caccaggtgggatct

SEQ ID NO: 1836705 - DNA, 15 bp, Homo sapiens
accaggtgggatctt

SEQ ID NO: 1836706 - DNA, 15 bp, Homo sapiens
ccaggtgggatcttg

SEQ ID NO: 1836707 - DNA, 15 bp, Homo sapiens
caggtgggatcttgg

SEQ ID NO: 1836708 - DNA, 15 bp, Homo sapiens
aggtgggatcttggg

SEQ ID NO: 1836709 - DNA, 15 bp, Homo sapiens
ggtgggatcttgggg

SEQ ID NO: 1836710 - DNA, 15 bp, Homo sapiens
gtgggatcttggggt

SEQ ID NO: 1836711 - DNA, 15 bp, Homo sapiens
tgggatcttggggtc

SEQ ID NO: 1836712 - DNA, 15 bp, Homo sapiens
gggatcttggggtcc

SEQ ID NO: 1836713 - DNA, 15 bp, Homo sapiens
ggatcttggggtccc

SEQ ID NO: 1836714 - DNA, 15 bp, Homo sapiens
gatcttggggtccct

SEQ ID NO: 1836715 - DNA, 15 bp, Homo sapiens
atcttggggtccctg

SEQ ID NO: 1836716 - DNA, 15 bp, Homo sapiens
tcttggggtccctga

SEQ ID NO: 1836717 - DNA, 15 bp, Homo sapiens
cttggggtccctgat

SEQ ID NO: 1836718 - DNA, 15 bp, Homo sapiens
ttggggtccctgatt

SEQ ID NO: 1836719 - DNA, 15 bp, Homo sapiens
tggggtccctgattc

SEQ ID NO: 1836720 - DNA, 15 bp, Homo sapiens
ggggtccctgattcc

SEQ ID NO: 1836721 - DNA, 15 bp, Homo sapiens
gggtccctgattcca

SEQ ID NO: 1836722 - DNA, 15 bp, Homo sapiens
ggtccctgattccaa

SEQ ID NO: 1836723 - DNA, 15 bp, Homo sapiens
gtccctgattccaag

SEQ ID NO: 1836724 - DNA, 15 bp, Homo sapiens
tccctgattccaagc

SEQ ID NO: 1836725 - DNA, 15 bp, Homo sapiens
ccctgattccaagct

SEQ ID NO: 1836726 - DNA, 15 bp, Homo sapiens
cctgattccaagctt

SEQ ID NO: 1836727 - DNA, 15 bp, Homo sapiens
ctgattccaagcttt

SEQ ID NO: 1836728 - DNA, 15 bp, Homo sapiens
tgattccaagctttg

SEQ ID NO: 1836729 - DNA, 15 bp, Homo sapiens
gattccaagctttga

SEQ ID NO: 1836730 - DNA, 15 bp, Homo sapiens
attccaagctttgac

SEQ ID NO: 1836731 - DNA, 15 bp, Homo sapiens
ttccaagctttgact

SEQ ID NO: 1836732 - DNA, 15 bp, Homo sapiens
tccaagctttgactc

SEQ ID NO: 1836733 - DNA, 15 bp, Homo sapiens
ccaagctttgactca

SEQ ID NO: 1836734 - DNA, 15 bp, Homo sapiens
caagctttgactcat

SEQ ID NO: 1836735 - DNA, 15 bp, Homo sapiens
aagctttgactcatg

SEQ ID NO: 1836736 - DNA, 15 bp, Homo sapiens
agctttgactcatga

SEQ ID NO: 1836737 - DNA, 15 bp, Homo sapiens
gctttgactcatgag

SEQ ID NO: 1836738 - DNA, 15 bp, Homo sapiens
ctttgactcatgagt

SEQ ID NO: 1836739 - DNA, 15 bp, Homo sapiens
tttgactcatgagtg

SEQ ID NO: 1836740 - DNA, 15 bp, Homo sapiens
ttgactcatgagtgg

SEQ ID NO: 1836741 - DNA, 15 bp, Homo sapiens
tgactcatgagtggc

SEQ ID NO: 1836742 - DNA, 15 bp, Homo sapiens
gactcatgagtggca

SEQ ID NO: 1836743 - DNA, 15 bp, Homo sapiens
actcatgagtggcat

SEQ ID NO: 1836744 - DNA, 15 bp, Homo sapiens
ctcatgagtggcatt

SEQ ID NO: 1836745 - DNA, 15 bp, Homo sapiens
tcatgagtggcattt

SEQ ID NO: 1836746 - DNA, 15 bp, Homo sapiens
catgagtggcatttc

SEQ ID NO: 1836747 - DNA, 15 bp, Homo sapiens
atgagtggcatttct

SEQ ID NO: 1836748 - DNA, 15 bp, Homo sapiens
tgagtggcatttctg

SEQ ID NO: 1836749 - DNA, 15 bp, Homo sapiens
gagtggcatttctgg

SEQ ID NO: 1836750 - DNA, 15 bp, Homo sapiens
agtggcatttctgga

SEQ ID NO: 1836751 - DNA, 15 bp, Homo sapiens
gtggcatttctggac

SEQ ID NO: 1836752 - DNA, 15 bp, Homo sapiens
tggcatttctggacc

SEQ ID NO: 1836753 - DNA, 15 bp, Homo sapiens
ggcatttctggacct

SEQ ID NO: 1836754 - DNA, 15 bp, Homo sapiens
gcatttctggacctg

SEQ ID NO: 1836755 - DNA, 15 bp, Homo sapiens
catttctggacctgc

SEQ ID NO: 1836756 - DNA, 15 bp, Homo sapiens
atttctggacctgcc

SEQ ID NO: 1836757 - DNA, 15 bp, Homo sapiens
tttctggacctgccc

SEQ ID NO: 1836758 - DNA, 15 bp, Homo sapiens
ttctggacctgccct

SEQ ID NO: 1836759 - DNA, 15 bp, Homo sapiens
tctggacctgccctg

SEQ ID NO: 1836760 - DNA, 15 bp, Homo sapiens
ctggacctgccctgt

SEQ ID NO: 1836761 - DNA, 15 bp, Homo sapiens
tggacctgccctgtg

SEQ ID NO: 1836762 - DNA, 15 bp, Homo sapiens
ggacctgccctgtgc

SEQ ID NO: 1836763 - DNA, 15 bp, Homo sapiens
gacctgccctgtgcc

SEQ ID NO: 1836764 - DNA, 15 bp, Homo sapiens
acctgccctgtgcca

SEQ ID NO: 1836765 - DNA, 15 bp, Homo sapiens
cctgccctgtgccag

SEQ ID NO: 1836766 - DNA, 15 bp, Homo sapiens
ctgccctgtgccaga

SEQ ID NO: 1836767 - DNA, 15 bp, Homo sapiens
tgccctgtgccagag

SEQ ID NO: 1836768 - DNA, 15 bp, Homo sapiens
gccctgtgccagaga

SEQ ID NO: 1836769 - DNA, 15 bp, Homo sapiens
ccctgtgccagagag

SEQ ID NO: 1836770 - DNA, 15 bp, Homo sapiens
cctgtgccagagaga

SEQ ID NO: 1836771 - DNA, 15 bp, Homo sapiens
ctgtgccagagagag

SEQ ID NO: 1836772 - DNA, 15 bp, Homo sapiens
tgtgccagagagagg

SEQ ID NO: 1836773 - DNA, 15 bp, Homo sapiens
gtgccagagagaggc

SEQ ID NO: 1836774 - DNA, 15 bp, Homo sapiens
tgccagagagaggcc

SEQ ID NO: 1836775 - DNA, 15 bp, Homo sapiens
gccagagagaggcct

SEQ ID NO: 1836776 - DNA, 15 bp, Homo sapiens
ccagagagaggccta

SEQ ID NO: 1836777 - DNA, 15 bp, Homo sapiens
cagagagaggcctat

SEQ ID NO: 1836778 - DNA, 15 bp, Homo sapiens
agagagaggcctatt

SEQ ID NO: 1836779 - DNA, 15 bp, Homo sapiens
gagagaggcctattg

SEQ ID NO: 1836780 - DNA, 15 bp, Homo sapiens
agagaggcctattgc

SEQ ID NO: 1836781 - DNA, 15 bp, Homo sapiens
gagaggcctattgcc

SEQ ID NO: 1836782 - DNA, 15 bp, Homo sapiens
agaggcctattgccc

SEQ ID NO: 1836783 - DNA, 15 bp, Homo sapiens
gaggcctattgccct

SEQ ID NO: 1836784 - DNA, 15 bp, Homo sapiens
aggcctattgccctg

SEQ ID NO: 1836785 - DNA, 15 bp, Homo sapiens
ggcctattgccctga

SEQ ID NO: 1836786 - DNA, 15 bp, Homo sapiens
gcctattgccctgaa

SEQ ID NO: 1836787 - DNA, 15 bp, Homo sapiens
cctattgccctgaag

SEQ ID NO: 1836788 - DNA, 15 bp, Homo sapiens
ctattgccctgaagg

SEQ ID NO: 1836789 - DNA, 15 bp, Homo sapiens
tattgccctgaaggg

SEQ ID NO: 1836790 - DNA, 15 bp, Homo sapiens
attgccctgaagggt

SEQ ID NO: 1836791 - DNA, 15 bp, Homo sapiens
ttgccctgaagggtg

SEQ ID NO: 1836792 - DNA, 15 bp, Homo sapiens
tgccctgaagggtga

SEQ ID NO: 1836793 - DNA, 15 bp, Homo sapiens
gccctgaagggtgag

SEQ ID NO: 1836794 - DNA, 15 bp, Homo sapiens
ccctgaagggtgagt

SEQ ID NO: 1836795 - DNA, 15 bp, Homo sapiens
cctgaagggtgagtc

SEQ ID NO: 1836796 - DNA, 15 bp, Homo sapiens
ctgaagggtgagtct

SEQ ID NO: 1836797 - DNA, 15 bp, Homo sapiens
tgaagggtgagtctc

SEQ ID NO: 1836798 - DNA, 15 bp, Homo sapiens
gaagggtgagtctca

SEQ ID NO: 1836799 - DNA, 15 bp, Homo sapiens
aagggtgagtctcag

SEQ ID NO: 1836800 - DNA, 15 bp, Homo sapiens
agggtgagtctcagg

SEQ ID NO: 1836801 - DNA, 15 bp, Homo sapiens
gggtgagtctcaggc

SEQ ID NO: 1836802 - DNA, 15 bp, Homo sapiens
ggtgagtctcaggcc

SEQ ID NO: 1836803 - DNA, 15 bp, Homo sapiens
gtgagtctcaggcca

SEQ ID NO: 1836804 - DNA, 15 bp, Homo sapiens
tgagtctcaggccag

SEQ ID NO: 1836805 - DNA, 15 bp, Homo sapiens
gagtctcaggccagg

SEQ ID NO: 1836806 - DNA, 15 bp, Homo sapiens
agtctcaggccaggc

SEQ ID NO: 1836807 - DNA, 15 bp, Homo sapiens
gtctcaggccaggca

SEQ ID NO: 1836808 - DNA, 15 bp, Homo sapiens
tctcaggccaggcag

SEQ ID NO: 1836809 - DNA, 15 bp, Homo sapiens
ctcaggccaggcagc

SEQ ID NO: 1836810 - DNA, 15 bp, Homo sapiens
tcaggccaggcagca

SEQ ID NO: 1836811 - DNA, 15 bp, Homo sapiens
caggccaggcagcat

SEQ ID NO: 1836812 - DNA, 15 bp, Homo sapiens
aggccaggcagcatt

SEQ ID NO: 1836813 - DNA, 15 bp, Homo sapiens
ggccaggcagcattc

SEQ ID NO: 1836814 - DNA, 15 bp, Homo sapiens
gccaggcagcattca

SEQ ID NO: 1836815 - DNA, 15 bp, Homo sapiens
ccaggcagcattcac

SEQ ID NO: 1836816 - DNA, 15 bp, Homo sapiens
caggcagcattcacc

SEQ ID NO: 1836817 - DNA, 15 bp, Homo sapiens
aggcagcattcacca

SEQ ID NO: 1836818 - DNA, 15 bp, Homo sapiens
ggcagcattcaccac

SEQ ID NO: 1836819 - DNA, 15 bp, Homo sapiens
gcagcattcaccaca

SEQ ID NO: 1836820 - DNA, 15 bp, Homo sapiens
cagcattcaccacaa

SEQ ID NO: 1836821 - DNA, 15 bp, Homo sapiens
agcattcaccacaag

SEQ ID NO: 1836822 - DNA, 15 bp, Homo sapiens
gcattcaccacaagc

SEQ ID NO: 1836823 - DNA, 15 bp, Homo sapiens
cattcaccacaagct

SEQ ID NO: 1836824 - DNA, 15 bp, Homo sapiens
attcaccacaagctg

SEQ ID NO: 1836825 - DNA, 15 bp, Homo sapiens
ttcaccacaagctga

SEQ ID NO: 1836826 - DNA, 15 bp, Homo sapiens
tcaccacaagctgac

SEQ ID NO: 1836827 - DNA, 15 bp, Homo sapiens
caccacaagctgact

SEQ ID NO: 1836828 - DNA, 15 bp, Homo sapiens
accacaagctgactt

SEQ ID NO: 1836829 - DNA, 15 bp, Homo sapiens
ccacaagctgactta

SEQ ID NO: 1836830 - DNA, 15 bp, Homo sapiens
cacaagctgacttaa

SEQ ID NO: 1836831 - DNA, 15 bp, Homo sapiens
acaagctgacttaaa

SEQ ID NO: 1836832 - DNA, 15 bp, Homo sapiens
caagctgacttaaaa

SEQ ID NO: 1836833 - DNA, 15 bp, Homo sapiens
aagctgacttaaaag

SEQ ID NO: 1836834 - DNA, 15 bp, Homo sapiens
agctgacttaaaaga

SEQ ID NO: 1836835 - DNA, 15 bp, Homo sapiens
gctgacttaaaagac

SEQ ID NO: 1836836 - DNA, 15 bp, Homo sapiens
ctgacttaaaagacc

SEQ ID NO: 1836837 - DNA, 15 bp, Homo sapiens
tgacttaaaagacct

SEQ ID NO: 1836838 - DNA, 15 bp, Homo sapiens
gacttaaaagaccta

SEQ ID NO: 1836839 - DNA, 15 bp, Homo sapiens
acttaaaagacctaa

SEQ ID NO: 1836840 - DNA, 15 bp, Homo sapiens
cttaaaagacctaag

SEQ ID NO: 1836841 - DNA, 15 bp, Homo sapiens
ttaaaagacctaagg

SEQ ID NO: 1836842 - DNA, 15 bp, Homo sapiens
taaaagacctaaggc

SEQ ID NO: 1836843 - DNA, 15 bp, Homo sapiens
aaaagacctaaggcc

SEQ ID NO: 1836844 - DNA, 15 bp, Homo sapiens
aaagacctaaggcct

SEQ ID NO: 1836845 - DNA, 15 bp, Homo sapiens
aagacctaaggcctt

SEQ ID NO: 1836846 - DNA, 15 bp, Homo sapiens
agacctaaggcctta

SEQ ID NO: 1836847 - DNA, 15 bp, Homo sapiens
gacctaaggccttaa

SEQ ID NO: 1836848 - DNA, 15 bp, Homo sapiens
acctaaggccttaag

SEQ ID NO: 1836849 - DNA, 15 bp, Homo sapiens
cctaaggccttaagg

SEQ ID NO: 1836850 - DNA, 15 bp, Homo sapiens
ctaaggccttaaggg

SEQ ID NO: 1836851 - DNA, 15 bp, Homo sapiens
taaggccttaaggga

SEQ ID NO: 1836852 - DNA, 15 bp, Homo sapiens
aaggccttaagggaa

SEQ ID NO: 1836853 - DNA, 15 bp, Homo sapiens
aggccttaagggaac

SEQ ID NO: 1836854 - DNA, 15 bp, Homo sapiens
ggccttaagggaaca

SEQ ID NO: 1836855 - DNA, 15 bp, Homo sapiens
gccttaagggaacat

SEQ ID NO: 1836856 - DNA, 15 bp, Homo sapiens
ccttaagggaacatc

SEQ ID NO: 1836857 - DNA, 15 bp, Homo sapiens
cttaagggaacatcc

SEQ ID NO: 1836858 - DNA, 15 bp, Homo sapiens
ttaagggaacatcca

SEQ ID NO: 1836859 - DNA, 15 bp, Homo sapiens
taagggaacatccat

SEQ ID NO: 1836860 - DNA, 15 bp, Homo sapiens
aagggaacatccatg

SEQ ID NO: 1836861 - DNA, 15 bp, Homo sapiens
agggaacatccatgg

SEQ ID NO: 1836862 - DNA, 15 bp, Homo sapiens
gggaacatccatggt

SEQ ID NO: 1836863 - DNA, 15 bp, Homo sapiens
ggaacatccatggtg

SEQ ID NO: 1836864 - DNA, 15 bp, Homo sapiens
gaacatccatggtgg

SEQ ID NO: 1836865 - DNA, 15 bp, Homo sapiens
aacatccatggtggt

SEQ ID NO: 1836866 - DNA, 15 bp, Homo sapiens
acatccatggtggtc

SEQ ID NO: 1836867 - DNA, 15 bp, Homo sapiens
catccatggtggtct

SEQ ID NO: 1836868 - DNA, 15 bp, Homo sapiens
atccatggtggtctg

SEQ ID NO: 1836869 - DNA, 15 bp, Homo sapiens
tccatggtggtctgg

SEQ ID NO: 1836870 - DNA, 15 bp, Homo sapiens
ccatggtggtctggt

SEQ ID NO: 1836871 - DNA, 15 bp, Homo sapiens
catggtggtctggta

SEQ ID NO: 1836872 - DNA, 15 bp, Homo sapiens
atggtggtctggtag

SEQ ID NO: 1836873 - DNA, 15 bp, Homo sapiens
tggtggtctggtagc

SEQ ID NO: 1836874 - DNA, 15 bp, Homo sapiens
ggtggtctggtagca

SEQ ID NO: 1836875 - DNA, 15 bp, Homo sapiens
gtggtctggtagcac

SEQ ID NO: 1836876 - DNA, 15 bp, Homo sapiens
tggtctggtagcact

SEQ ID NO: 1836877 - DNA, 15 bp, Homo sapiens
ggtctggtagcactt

SEQ ID NO: 1836878 - DNA, 15 bp, Homo sapiens
gtctggtagcacttc

SEQ ID NO: 1836879 - DNA, 15 bp, Homo sapiens
tctggtagcacttct

SEQ ID NO: 1836880 - DNA, 15 bp, Homo sapiens
ctggtagcacttctt

SEQ ID NO: 1836881 - DNA, 15 bp, Homo sapiens
tggtagcacttctta

SEQ ID NO: 1836882 - DNA, 15 bp, Homo sapiens
ggtagcacttcttaa

SEQ ID NO: 1836883 - DNA, 15 bp, Homo sapiens
gtagcacttcttaag

SEQ ID NO: 1836884 - DNA, 15 bp, Homo sapiens
tagcacttcttaagg

SEQ ID NO: 1836885 - DNA, 15 bp, Homo sapiens
agcacttcttaaggc

SEQ ID NO: 1836886 - DNA, 15 bp, Homo sapiens
gcacttcttaaggcc

SEQ ID NO: 1836887 - DNA, 15 bp, Homo sapiens
cacttcttaaggcca

SEQ ID NO: 1836888 - DNA, 15 bp, Homo sapiens
acttcttaaggccac

SEQ ID NO: 1836889 - DNA, 15 bp, Homo sapiens
cttcttaaggccact

SEQ ID NO: 1836890 - DNA, 15 bp, Homo sapiens
ttcttaaggccactg

SEQ ID NO: 1836891 - DNA, 15 bp, Homo sapiens
tcttaaggccactgg

SEQ ID NO: 1836892 - DNA, 15 bp, Homo sapiens
cttaaggccactggg

SEQ ID NO: 1836893 - DNA, 15 bp, Homo sapiens
ttaaggccactgggg

SEQ ID NO: 1836894 - DNA, 15 bp, Homo sapiens
taaggccactgggga

SEQ ID NO: 1836895 - DNA, 15 bp, Homo sapiens
aaggccactggggag

SEQ ID NO: 1836896 - DNA, 15 bp, Homo sapiens
aggccactggggagc

SEQ ID NO: 1836897 - DNA, 15 bp, Homo sapiens
ggccactggggagca

SEQ ID NO: 1836898 - DNA, 15 bp, Homo sapiens
gccactggggagcag

SEQ ID NO: 1836899 - DNA, 15 bp, Homo sapiens
ccactggggagcagg

SEQ ID NO: 1836900 - DNA, 15 bp, Homo sapiens
cactggggagcaggg

SEQ ID NO: 1836901 - DNA, 15 bp, Homo sapiens
actggggagcagggt

SEQ ID NO: 1836902 - DNA, 15 bp, Homo sapiens
ctggggagcagggtg

SEQ ID NO: 1836903 - DNA, 15 bp, Homo sapiens
tggggagcagggtgg

SEQ ID NO: 1836904 - DNA, 15 bp, Homo sapiens
ggggagcagggtggg

SEQ ID NO: 1836905 - DNA, 15 bp, Homo sapiens
gggagcagggtgggc

SEQ ID NO: 1836906 - DNA, 15 bp, Homo sapiens
ggagcagggtgggca

SEQ ID NO: 1836907 - DNA, 15 bp, Homo sapiens
gagcagggtgggcag

SEQ ID NO: 1836908 - DNA, 15 bp, Homo sapiens
agcagggtgggcagt

SEQ ID NO: 1836909 - DNA, 15 bp, Homo sapiens
gcagggtgggcagta

SEQ ID NO: 1836910 - DNA, 15 bp, Homo sapiens
cagggtgggcagtag

SEQ ID NO: 1836911 - DNA, 15 bp, Homo sapiens
agggtgggcagtagc

SEQ ID NO: 1836912 - DNA, 15 bp, Homo sapiens
gggtgggcagtagct

SEQ ID NO: 1836913 - DNA, 15 bp, Homo sapiens
ggtgggcagtagcta

SEQ ID NO: 1836914 - DNA, 15 bp, Homo sapiens
gtgggcagtagctac

SEQ ID NO: 1836915 - DNA, 15 bp, Homo sapiens
tgggcagtagctaca

SEQ ID NO: 1836916 - DNA, 15 bp, Homo sapiens
gggcagtagctacag

SEQ ID NO: 1836917 - DNA, 15 bp, Homo sapiens
ggcagtagctacagg

SEQ ID NO: 1836918 - DNA, 15 bp, Homo sapiens
gcagtagctacaggg

SEQ ID NO: 1836919 - DNA, 15 bp, Homo sapiens
cagtagctacagggt

SEQ ID NO: 1836920 - DNA, 15 bp, Homo sapiens
agtagctacagggtg

SEQ ID NO: 1836921 - DNA, 15 bp, Homo sapiens
gtagctacagggtga

SEQ ID NO: 1836922 - DNA, 15 bp, Homo sapiens
tagctacagggtgag

SEQ ID NO: 1836923 - DNA, 15 bp, Homo sapiens
agctacagggtgagg

SEQ ID NO: 1836924 - DNA, 15 bp, Homo sapiens
gctacagggtgaggg

SEQ ID NO: 1836925 - DNA, 15 bp, Homo sapiens
ctacagggtgagggt

SEQ ID NO: 1836926 - DNA, 15 bp, Homo sapiens
tacagggtgagggtt

SEQ ID NO: 1836927 - DNA, 15 bp, Homo sapiens
acagggtgagggttc

SEQ ID NO: 1836928 - DNA, 15 bp, Homo sapiens
cagggtgagggttct

SEQ ID NO: 1836929 - DNA, 15 bp, Homo sapiens
agggtgagggttctc

SEQ ID NO: 1836930 - DNA, 15 bp, Homo sapiens
gggtgagggttctct

SEQ ID NO: 1836931 - DNA, 15 bp, Homo sapiens
ggtgagggttctctg

SEQ ID NO: 1836932 - DNA, 15 bp, Homo sapiens
gtgagggttctctgc

SEQ ID NO: 1836933 - DNA, 15 bp, Homo sapiens
tgagggttctctgct

SEQ ID NO: 1836934 - DNA, 15 bp, Homo sapiens
gagggttctctgctt

SEQ ID NO: 1836935 - DNA, 15 bp, Homo sapiens
agggttctctgcttc

SEQ ID NO: 1836936 - DNA, 15 bp, Homo sapiens
gggttctctgcttct

SEQ ID NO: 1836937 - DNA, 15 bp, Homo sapiens
ggttctctgcttctg

SEQ ID NO: 1836938 - DNA, 15 bp, Homo sapiens
gttctctgcttctga

SEQ ID NO: 1836939 - DNA, 15 bp, Homo sapiens
ttctctgcttctgaa

SEQ ID NO: 1836940 - DNA, 15 bp, Homo sapiens
tctctgcttctgaaa

SEQ ID NO: 1836941 - DNA, 15 bp, Homo sapiens
ctctgcttctgaaaa

SEQ ID NO: 1836942 - DNA, 15 bp, Homo sapiens
tctgcttctgaaaag

SEQ ID NO: 1836943 - DNA, 15 bp, Homo sapiens
ctgcttctgaaaagg

SEQ ID NO: 1836944 - DNA, 15 bp, Homo sapiens
tgcttctgaaaaggg

SEQ ID NO: 1836945 - DNA, 15 bp, Homo sapiens
gcttctgaaaagggg

SEQ ID NO: 1836946 - DNA, 15 bp, Homo sapiens
cttctgaaaagggga

SEQ ID NO: 1836947 - DNA, 15 bp, Homo sapiens
ttctgaaaaggggag

SEQ ID NO: 1836948 - DNA, 15 bp, Homo sapiens
tctgaaaaggggagg

SEQ ID NO: 1836949 - DNA, 15 bp, Homo sapiens
ctgaaaaggggaggg

SEQ ID NO: 1836950 - DNA, 15 bp, Homo sapiens
tgaaaaggggaggga

SEQ ID NO: 1836951 - DNA, 15 bp, Homo sapiens
gaaaaggggagggaa

SEQ ID NO: 1836952 - DNA, 15 bp, Homo sapiens
aaaaggggagggaag

SEQ ID NO: 1836953 - DNA, 15 bp, Homo sapiens
aaaggggagggaaga

SEQ ID NO: 1836954 - DNA, 15 bp, Homo sapiens
aaggggagggaagag

SEQ ID NO: 1836955 - DNA, 15 bp, Homo sapiens
aggggagggaagagt

SEQ ID NO: 1836956 - DNA, 15 bp, Homo sapiens
ggggagggaagagtg

SEQ ID NO: 1836957 - DNA, 15 bp, Homo sapiens
gggagggaagagtgg

SEQ ID NO: 1836958 - DNA, 15 bp, Homo sapiens
ggagggaagagtggg

SEQ ID NO: 1836959 - DNA, 15 bp, Homo sapiens
gagggaagagtggga

SEQ ID NO: 1836960 - DNA, 15 bp, Homo sapiens
agggaagagtgggaa

SEQ ID NO: 1836961 - DNA, 15 bp, Homo sapiens
gggaagagtgggaag

SEQ ID NO: 1836962 - DNA, 15 bp, Homo sapiens
ggaagagtgggaagg

SEQ ID NO: 1836963 - DNA, 15 bp, Homo sapiens
gaagagtgggaagga

SEQ ID NO: 1836964 - DNA, 15 bp, Homo sapiens
aagagtgggaaggac

SEQ ID NO: 1836965 - DNA, 15 bp, Homo sapiens
agagtgggaaggact

SEQ ID NO: 1836966 - DNA, 15 bp, Homo sapiens
gagtgggaaggactg

SEQ ID NO: 1836967 - DNA, 15 bp, Homo sapiens
agtgggaaggactgc

SEQ ID NO: 1836968 - DNA, 15 bp, Homo sapiens
gtgggaaggactgca

SEQ ID NO: 1836969 - DNA, 15 bp, Homo sapiens
tgggaaggactgcat

SEQ ID NO: 1836970 - DNA, 15 bp, Homo sapiens
gggaaggactgcatc

SEQ ID NO: 1836971 - DNA, 15 bp, Homo sapiens
ggaaggactgcatct

SEQ ID NO: 1836972 - DNA, 15 bp, Homo sapiens
gaaggactgcatctt

SEQ ID NO: 1836973 - DNA, 15 bp, Homo sapiens
aaggactgcatcttg

SEQ ID NO: 1836974 - DNA, 15 bp, Homo sapiens
aggactgcatcttgt

SEQ ID NO: 1836975 - DNA, 15 bp, Homo sapiens
ggactgcatcttgtg

SEQ ID NO: 1836976 - DNA, 15 bp, Homo sapiens
gactgcatcttgtgg

SEQ ID NO: 1836977 - DNA, 15 bp, Homo sapiens
actgcatcttgtggg

SEQ ID NO: 1836978 - DNA, 15 bp, Homo sapiens
ctgcatcttgtgggt

SEQ ID NO: 1836979 - DNA, 15 bp, Homo sapiens
tgcatcttgtgggtt

SEQ ID NO: 1836980 - DNA, 15 bp, Homo sapiens
gcatcttgtgggttg

SEQ ID NO: 1836981 - DNA, 15 bp, Homo sapiens
catcttgtgggttga

SEQ ID NO: 1836982 - DNA, 15 bp, Homo sapiens
atcttgtgggttgag

SEQ ID NO: 1836983 - DNA, 15 bp, Homo sapiens
tcttgtgggttgagt

SEQ ID NO: 1836984 - DNA, 15 bp, Homo sapiens
cttgtgggttgagtg

SEQ ID NO: 1836985 - DNA, 15 bp, Homo sapiens
ttgtgggttgagtgt

SEQ ID NO: 1836986 - DNA, 15 bp, Homo sapiens
tgtgggttgagtgtc

SEQ ID NO: 1836987 - DNA, 15 bp, Homo sapiens
gtgggttgagtgtct

SEQ ID NO: 1836988 - DNA, 15 bp, Homo sapiens
tgggttgagtgtctg

SEQ ID NO: 1836989 - DNA, 15 bp, Homo sapiens
gggttgagtgtctgc

SEQ ID NO: 1836990 - DNA, 15 bp, Homo sapiens
ggttgagtgtctgct

SEQ ID NO: 1836991 - DNA, 15 bp, Homo sapiens
gttgagtgtctgctc

SEQ ID NO: 1836992 - DNA, 15 bp, Homo sapiens
ttgagtgtctgctca

SEQ ID NO: 1836993 - DNA, 15 bp, Homo sapiens
tgagtgtctgctcag

SEQ ID NO: 1836994 - DNA, 15 bp, Homo sapiens
gagtgtctgctcagt

SEQ ID NO: 1836995 - DNA, 15 bp, Homo sapiens
agtgtctgctcagtc

SEQ ID NO: 1836996 - DNA, 15 bp, Homo sapiens
gtgtctgctcagtca

SEQ ID NO: 1836997 - DNA, 15 bp, Homo sapiens
tgtctgctcagtcac

SEQ ID NO: 1836998 - DNA, 15 bp, Homo sapiens
gtctgctcagtcaca

SEQ ID NO: 1836999 - DNA, 15 bp, Homo sapiens
tctgctcagtcacaa

SEQ ID NO: 1837000 - DNA, 15 bp, Homo sapiens
ctgctcagtcacaag

SEQ ID NO: 1837001 - DNA, 15 bp, Homo sapiens
tgctcagtcacaaga

SEQ ID NO: 1837002 - DNA, 15 bp, Homo sapiens
gctcagtcacaagac

SEQ ID NO: 1837003 - DNA, 15 bp, Homo sapiens
ctcagtcacaagaca

SEQ ID NO: 1837004 - DNA, 15 bp, Homo sapiens
tcagtcacaagacaa

SEQ ID NO: 1837005 - DNA, 15 bp, Homo sapiens
cagtcacaagacaat

SEQ ID NO: 1837006 - DNA, 15 bp, Homo sapiens
agtcacaagacaata

SEQ ID NO: 1837007 - DNA, 15 bp, Homo sapiens
gtcacaagacaatag

SEQ ID NO: 1837008 - DNA, 15 bp, Homo sapiens
tcacaagacaataga

SEQ ID NO: 1837009 - DNA, 15 bp, Homo sapiens
cacaagacaatagac

SEQ ID NO: 1837010 - DNA, 15 bp, Homo sapiens
acaagacaatagact

SEQ ID NO: 1837011 - DNA, 15 bp, Homo sapiens
caagacaatagacta

SEQ ID NO: 1837012 - DNA, 15 bp, Homo sapiens
aagacaatagactac

SEQ ID NO: 1837013 - DNA, 15 bp, Homo sapiens
agacaatagactaca

SEQ ID NO: 1837014 - DNA, 15 bp, Homo sapiens
gacaatagactacaa

SEQ ID NO: 1837015 - DNA, 15 bp, Homo sapiens
acaatagactacaag

SEQ ID NO: 1837016 - DNA, 15 bp, Homo sapiens
caatagactacaagg

SEQ ID NO: 1837017 - DNA, 15 bp, Homo sapiens
aatagactacaaggt

SEQ ID NO: 1837018 - DNA, 15 bp, Homo sapiens
atagactacaaggta

SEQ ID NO: 1837019 - DNA, 15 bp, Homo sapiens
tagactacaaggtag

SEQ ID NO: 1837020 - DNA, 15 bp, Homo sapiens
agactacaaggtaga

SEQ ID NO: 1837021 - DNA, 15 bp, Homo sapiens
gactacaaggtagac

SEQ ID NO: 1837022 - DNA, 15 bp, Homo sapiens
actacaaggtagact

SEQ ID NO: 1837023 - DNA, 15 bp, Homo sapiens
ctacaaggtagactt

SEQ ID NO: 1837024 - DNA, 15 bp, Homo sapiens
tacaaggtagacttc

SEQ ID NO: 1837025 - DNA, 15 bp, Homo sapiens
acaaggtagacttct

SEQ ID NO: 1837026 - DNA, 15 bp, Homo sapiens
caaggtagacttcta

SEQ ID NO: 1837027 - DNA, 15 bp, Homo sapiens
aaggtagacttctaa

SEQ ID NO: 1837028 - DNA, 15 bp, Homo sapiens
aggtagacttctaag

SEQ ID NO: 1837029 - DNA, 15 bp, Homo sapiens
ggtagacttctaagt

SEQ ID NO: 1837030 - DNA, 15 bp, Homo sapiens
gtagacttctaagtt

SEQ ID NO: 1837031 - DNA, 15 bp, Homo sapiens
tagacttctaagttt

SEQ ID NO: 1837032 - DNA, 15 bp, Homo sapiens
agacttctaagtttt

SEQ ID NO: 1837033 - DNA, 15 bp, Homo sapiens
gacttctaagttttt

SEQ ID NO: 1837034 - DNA, 15 bp, Homo sapiens
acttctaagtttttt

SEQ ID NO: 1837035 - DNA, 15 bp, Homo sapiens
cttctaagtttttta

SEQ ID NO: 1837036 - DNA, 15 bp, Homo sapiens
ttctaagttttttac

SEQ ID NO: 1837037 - DNA, 15 bp, Homo sapiens
tctaagttttttact

SEQ ID NO: 1837038 - DNA, 15 bp, Homo sapiens
ctaagttttttactc

SEQ ID NO: 1837039 - DNA, 15 bp, Homo sapiens
taagttttttactct

SEQ ID NO: 1837040 - DNA, 15 bp, Homo sapiens
aagttttttactctg

SEQ ID NO: 1837041 - DNA, 15 bp, Homo sapiens
agttttttactctgg

SEQ ID NO: 1837042 - DNA, 15 bp, Homo sapiens
gttttttactctggt

SEQ ID NO: 1837043 - DNA, 15 bp, Homo sapiens
ttttttactctggtc

SEQ ID NO: 1837044 - DNA, 15 bp, Homo sapiens
tttttactctggtcc

SEQ ID NO: 1837045 - DNA, 15 bp, Homo sapiens
ttttactctggtccc

SEQ ID NO: 1837046 - DNA, 15 bp, Homo sapiens
tttactctggtccct

SEQ ID NO: 1837047 - DNA, 15 bp, Homo sapiens
ttactctggtcccta

SEQ ID NO: 1837048 - DNA, 15 bp, Homo sapiens
tactctggtccctaa

SEQ ID NO: 1837049 - DNA, 15 bp, Homo sapiens
actctggtccctaac

SEQ ID NO: 1837050 - DNA, 15 bp, Homo sapiens
ctctggtccctaact

SEQ ID NO: 1837051 - DNA, 15 bp, Homo sapiens
tctggtccctaactc

SEQ ID NO: 1837052 - DNA, 15 bp, Homo sapiens
ctggtccctaactcc

SEQ ID NO: 1837053 - DNA, 15 bp, Homo sapiens
tggtccctaactccc

SEQ ID NO: 1837054 - DNA, 15 bp, Homo sapiens
ggtccctaactccca

SEQ ID NO: 1837055 - DNA, 15 bp, Homo sapiens
gtccctaactcccag

SEQ ID NO: 1837056 - DNA, 15 bp, Homo sapiens
tccctaactcccaga

SEQ ID NO: 1837057 - DNA, 15 bp, Homo sapiens
ccctaactcccagat

SEQ ID NO: 1837058 - DNA, 15 bp, Homo sapiens
cctaactcccagatg

SEQ ID NO: 1837059 - DNA, 15 bp, Homo sapiens
ctaactcccagatgg

SEQ ID NO: 1837060 - DNA, 15 bp, Homo sapiens
taactcccagatggc

SEQ ID NO: 1837061 - DNA, 15 bp, Homo sapiens
aactcccagatggca

SEQ ID NO: 1837062 - DNA, 15 bp, Homo sapiens
actcccagatggcac

SEQ ID NO: 1837063 - DNA, 15 bp, Homo sapiens
ctcccagatggcact

SEQ ID NO: 1837064 - DNA, 15 bp, Homo sapiens
tcccagatggcactt

SEQ ID NO: 1837065 - DNA, 15 bp, Homo sapiens
cccagatggcacttc

SEQ ID NO: 1837066 - DNA, 15 bp, Homo sapiens
ccagatggcacttct

SEQ ID NO: 1837067 - DNA, 15 bp, Homo sapiens
cagatggcacttctg

SEQ ID NO: 1837068 - DNA, 15 bp, Homo sapiens
agatggcacttctgg

SEQ ID NO: 1837069 - DNA, 15 bp, Homo sapiens
gatggcacttctgga

SEQ ID NO: 1837070 - DNA, 15 bp, Homo sapiens
atggcacttctggac

SEQ ID NO: 1837071 - DNA, 15 bp, Homo sapiens
tggcacttctggacc

SEQ ID NO: 1837072 - DNA, 15 bp, Homo sapiens
ggcacttctggacct

SEQ ID NO: 1837073 - DNA, 15 bp, Homo sapiens
gcacttctggaccta

SEQ ID NO: 1837074 - DNA, 15 bp, Homo sapiens
cacttctggacctac

SEQ ID NO: 1837075 - DNA, 15 bp, Homo sapiens
acttctggacctacc

SEQ ID NO: 1837076 - DNA, 15 bp, Homo sapiens
cttctggacctaccc

SEQ ID NO: 1837077 - DNA, 15 bp, Homo sapiens
ttctggacctaccct

SEQ ID NO: 1837078 - DNA, 15 bp, Homo sapiens
tctggacctaccctg

SEQ ID NO: 1837079 - DNA, 15 bp, Homo sapiens
ctggacctaccctgg

SEQ ID NO: 1837080 - DNA, 15 bp, Homo sapiens
tggacctaccctggg

SEQ ID NO: 1837081 - DNA, 15 bp, Homo sapiens
ggacctaccctgggg

SEQ ID NO: 1837082 - DNA, 15 bp, Homo sapiens
gacctaccctgggga

SEQ ID NO: 1837083 - DNA, 15 bp, Homo sapiens
acctaccctggggac

SEQ ID NO: 1837084 - DNA, 15 bp, Homo sapiens
cctaccctggggacc

SEQ ID NO: 1837085 - DNA, 15 bp, Homo sapiens
ctaccctggggacct

SEQ ID NO: 1837086 - DNA, 15 bp, Homo sapiens
taccctggggacctc

SEQ ID NO: 1837087 - DNA, 15 bp, Homo sapiens
accctggggacctca

SEQ ID NO: 1837088 - DNA, 15 bp, Homo sapiens
ccctggggacctcat

SEQ ID NO: 1837089 - DNA, 15 bp, Homo sapiens
cctggggacctcatc

SEQ ID NO: 1837090 - DNA, 15 bp, Homo sapiens
ctggggacctcatca

SEQ ID NO: 1837091 - DNA, 15 bp, Homo sapiens
tggggacctcatcac

SEQ ID NO: 1837092 - DNA, 15 bp, Homo sapiens
ggggacctcatcacc

SEQ ID NO: 1837093 - DNA, 15 bp, Homo sapiens
gggacctcatcaccc

SEQ ID NO: 1837094 - DNA, 15 bp, Homo sapiens
ggacctcatcaccct

SEQ ID NO: 1837095 - DNA, 15 bp, Homo sapiens
gacctcatcaccctg

SEQ ID NO: 1837096 - DNA, 15 bp, Homo sapiens
acctcatcaccctga

SEQ ID NO: 1837097 - DNA, 15 bp, Homo sapiens
cctcatcaccctgaa

SEQ ID NO: 1837098 - DNA, 15 bp, Homo sapiens
ctcatcaccctgaaa

SEQ ID NO: 1837099 - DNA, 15 bp, Homo sapiens
tcatcaccctgaaag

SEQ ID NO: 1837100 - DNA, 15 bp, Homo sapiens
catcaccctgaaaga

SEQ ID NO: 1837101 - DNA, 15 bp, Homo sapiens
atcaccctgaaagaa

SEQ ID NO: 1837102 - DNA, 15 bp, Homo sapiens
tcaccctgaaagaaa

SEQ ID NO: 1837103 - DNA, 15 bp, Homo sapiens
caccctgaaagaaag

SEQ ID NO: 1837104 - DNA, 15 bp, Homo sapiens
accctgaaagaaagg

SEQ ID NO: 1837105 - DNA, 15 bp, Homo sapiens
ccctgaaagaaagga

SEQ ID NO: 1837106 - DNA, 15 bp, Homo sapiens
cctgaaagaaaggac

SEQ ID NO: 1837107 - DNA, 15 bp, Homo sapiens
ctgaaagaaaggaca

SEQ ID NO: 1837108 - DNA, 15 bp, Homo sapiens
tgaaagaaaggacac

SEQ ID NO: 1837109 - DNA, 15 bp, Homo sapiens
gaaagaaaggacaca

SEQ ID NO: 1837110 - DNA, 15 bp, Homo sapiens
aaagaaaggacacag

SEQ ID NO: 1837111 - DNA, 15 bp, Homo sapiens
aagaaaggacacagg

SEQ ID NO: 1837112 - DNA, 15 bp, Homo sapiens
agaaaggacacaggc

SEQ ID NO: 1837113 - DNA, 15 bp, Homo sapiens
gaaaggacacaggcc

SEQ ID NO: 1837114 - DNA, 15 bp, Homo sapiens
aaaggacacaggcct

SEQ ID NO: 1837115 - DNA, 15 bp, Homo sapiens
aaggacacaggcctg

SEQ ID NO: 1837116 - DNA, 15 bp, Homo sapiens
aggacacaggcctgg

SEQ ID NO: 1837117 - DNA, 15 bp, Homo sapiens
ggacacaggcctggc

SEQ ID NO: 1837118 - DNA, 15 bp, Homo sapiens
gacacaggcctggct

SEQ ID NO: 1837119 - DNA, 15 bp, Homo sapiens
acacaggcctggctg

SEQ ID NO: 1837120 - DNA, 15 bp, Homo sapiens
cacaggcctggctgg

SEQ ID NO: 1837121 - DNA, 15 bp, Homo sapiens
acaggcctggctggc

SEQ ID NO: 1837122 - DNA, 15 bp, Homo sapiens
aggcctggctggctt

SEQ ID NO: 1837123 - DNA, 15 bp, Homo sapiens
ggcctggctggcttt

SEQ ID NO: 1837124 - DNA, 15 bp, Homo sapiens
gcctggctggctttg

SEQ ID NO: 1837125 - DNA, 15 bp, Homo sapiens
cctggctggctttgc

SEQ ID NO: 1837126 - DNA, 15 bp, Homo sapiens
ctggctggctttgcc

SEQ ID NO: 1837127 - DNA, 15 bp, Homo sapiens
tggctggctttgcca

SEQ ID NO: 1837128 - DNA, 15 bp, Homo sapiens
ggctggctttgccat

SEQ ID NO: 1837129 - DNA, 15 bp, Homo sapiens
gctggctttgccatc

SEQ ID NO: 1837130 - DNA, 15 bp, Homo sapiens
ctggctttgccatct

SEQ ID NO: 1837131 - DNA, 15 bp, Homo sapiens
ggtggctggtcatca

SEQ ID NO: 1837132 - DNA, 15 bp, Homo sapiens
gtggctggtcatcaa

SEQ ID NO: 1837133 - DNA, 15 bp, Homo sapiens
tggctggtcatcaaa

SEQ ID NO: 1837134 - DNA, 15 bp, Homo sapiens
ggctggtcatcaaag

SEQ ID NO: 1837135 - DNA, 15 bp, Homo sapiens
gctggtcatcaaagc

SEQ ID NO: 1837136 - DNA, 15 bp, Homo sapiens
ctggtcatcaaagca

SEQ ID NO: 1837137 - DNA, 15 bp, Homo sapiens
tggtcatcaaagcag

SEQ ID NO: 1837138 - DNA, 15 bp, Homo sapiens
ggtcatcaaagcagg

SEQ ID NO: 1837139 - DNA, 15 bp, Homo sapiens
gtcatcaaagcaggc

SEQ ID NO: 1837140 - DNA, 15 bp, Homo sapiens
tcatcaaagcaggcc

SEQ ID NO: 1837141 - DNA, 15 bp, Homo sapiens
catcaaagcaggccc

SEQ ID NO: 1837142 - DNA, 15 bp, Homo sapiens
atcaaagcaggccct

SEQ ID NO: 1837143 - DNA, 15 bp, Homo sapiens
tcaaagcaggccctc

SEQ ID NO: 1837144 - DNA, 15 bp, Homo sapiens
caaagcaggccctca

SEQ ID NO: 1837145 - DNA, 15 bp, Homo sapiens
aaagcaggccctcag

SEQ ID NO: 1837146 - DNA, 15 bp, Homo sapiens
aagcaggccctcagt

SEQ ID NO: 1837147 - DNA, 15 bp, Homo sapiens
agcaggccctcagtg

SEQ ID NO: 1837148 - DNA, 15 bp, Homo sapiens
gcaggccctcagtga

SEQ ID NO: 1837149 - DNA, 15 bp, Homo sapiens
caggccctcagtgaa

SEQ ID NO: 1837150 - DNA, 15 bp, Homo sapiens
aggccctcagtgaac

SEQ ID NO: 1837151 - DNA, 15 bp, Homo sapiens
ggccctcagtgaacc

SEQ ID NO: 1837152 - DNA, 15 bp, Homo sapiens
gccctcagtgaacca

SEQ ID NO: 1837153 - DNA, 15 bp, Homo sapiens
ccctcagtgaaccac

SEQ ID NO: 1837154 - DNA, 15 bp, Homo sapiens
cctcagtgaaccacg

SEQ ID NO: 1837155 - DNA, 15 bp, Homo sapiens
ctcagtgaaccacga

SEQ ID NO: 1837156 - DNA, 15 bp, Homo sapiens
tcagtgaaccacgac

SEQ ID NO: 1837157 - DNA, 15 bp, Homo sapiens
cagtgaaccacgact

SEQ ID NO: 1837158 - DNA, 15 bp, Homo sapiens
agtgaaccacgactc

SEQ ID NO: 1837159 - DNA, 15 bp, Homo sapiens
gtgaaccacgactcc

SEQ ID NO: 1837160 - DNA, 15 bp, Homo sapiens
tgaaccacgactcct

SEQ ID NO: 1837161 - DNA, 15 bp, Homo sapiens
gaaccacgactcctc

SEQ ID NO: 1837162 - DNA, 15 bp, Homo sapiens
aaccacgactcctca

SEQ ID NO: 1837163 - DNA, 15 bp, Homo sapiens
accacgactcctcac

SEQ ID NO: 1837164 - DNA, 15 bp, Homo sapiens
ccacgactcctcacg

SEQ ID NO: 1837165 - DNA, 15 bp, Homo sapiens
cacgactcctcacgt

SEQ ID NO: 1837166 - DNA, 15 bp, Homo sapiens
acgactcctcacgtt

SEQ ID NO: 1837167 - DNA, 15 bp, Homo sapiens
cgactcctcacgttc

SEQ ID NO: 1837168 - DNA, 15 bp, Homo sapiens
gactcctcacgttca

SEQ ID NO: 1837169 - DNA, 15 bp, Homo sapiens
actcctcacgttcat

SEQ ID NO: 1837170 - DNA, 15 bp, Homo sapiens
ctcctcacgttcatc

SEQ ID NO: 1837171 - DNA, 15 bp, Homo sapiens
tcctcacgttcatcc

SEQ ID NO: 1837172 - DNA, 15 bp, Homo sapiens
cctcacgttcatcct

SEQ ID NO: 1837173 - DNA, 15 bp, Homo sapiens
ctcacgttcatcctc

SEQ ID NO: 1837174 - DNA, 15 bp, Homo sapiens
tcacgttcatcctct

SEQ ID NO: 1837175 - DNA, 15 bp, Homo sapiens
cacgttcatcctctt

SEQ ID NO: 1837176 - DNA, 15 bp, Homo sapiens
acgttcatcctcttg

SEQ ID NO: 1837177 - DNA, 15 bp, Homo sapiens
cgttcatcctcttgg

SEQ ID NO: 1837178 - DNA, 15 bp, Homo sapiens
gttcatcctcttggg

SEQ ID NO: 1837179 - DNA, 15 bp, Homo sapiens
ttcatcctcttgggt

SEQ ID NO: 1837180 - DNA, 15 bp, Homo sapiens
tcatcctcttgggtt

SEQ ID NO: 1837181 - DNA, 15 bp, Homo sapiens
catcctcttgggttg

SEQ ID NO: 1837182 - DNA, 15 bp, Homo sapiens
atcctcttgggttgt

SEQ ID NO: 1837183 - DNA, 15 bp, Homo sapiens
tcctcttgggttgta

SEQ ID NO: 1837184 - DNA, 15 bp, Homo sapiens
cctcttgggttgtac

SEQ ID NO: 1837185 - DNA, 15 bp, Homo sapiens
ctcttgggttgtacc

SEQ ID NO: 1837186 - DNA, 15 bp, Homo sapiens
tcttgggttgtaccc

SEQ ID NO: 1837187 - DNA, 15 bp, Homo sapiens
cttgggttgtaccct

SEQ ID NO: 1837188 - DNA, 15 bp, Homo sapiens
ttgggttgtaccctt

SEQ ID NO: 1837189 - DNA, 15 bp, Homo sapiens
tgggttgtacccttt

SEQ ID NO: 1837190 - DNA, 15 bp, Homo sapiens
gggttgtaccctttg

SEQ ID NO: 1837191 - DNA, 15 bp, Homo sapiens
ggttgtaccctttgg

SEQ ID NO: 1837192 - DNA, 15 bp, Homo sapiens
gttgtaccctttggg

SEQ ID NO: 1837193 - DNA, 15 bp, Homo sapiens
ttgtaccctttgggg

SEQ ID NO: 1837194 - DNA, 15 bp, Homo sapiens
tgtaccctttggggc

SEQ ID NO: 1837195 - DNA, 15 bp, Homo sapiens
gtaccctttggggca

SEQ ID NO: 1837196 - DNA, 15 bp, Homo sapiens
taccctttggggcag

SEQ ID NO: 1837197 - DNA, 15 bp, Homo sapiens
accctttggggcaga

SEQ ID NO: 1837198 - DNA, 15 bp, Homo sapiens
ccctttggggcagag

SEQ ID NO: 1837199 - DNA, 15 bp, Homo sapiens
cctttggggcagagc

SEQ ID NO: 1837200 - DNA, 15 bp, Homo sapiens
ctttggggcagagct

SEQ ID NO: 1837201 - DNA, 15 bp, Homo sapiens
tttggggcagagcta

SEQ ID NO: 1837202 - DNA, 15 bp, Homo sapiens
ttggggcagagctag

SEQ ID NO: 1837203 - DNA, 15 bp, Homo sapiens
tggggcagagctagc

SEQ ID NO: 1837204 - DNA, 15 bp, Homo sapiens
ggggcagagctagcc

SEQ ID NO: 1837205 - DNA, 15 bp, Homo sapiens
gggcagagctagccc

SEQ ID NO: 1837206 - DNA, 15 bp, Homo sapiens
ggcagagctagcccc

SEQ ID NO: 1837207 - DNA, 15 bp, Homo sapiens
gcagagctagcccct

SEQ ID NO: 1837208 - DNA, 15 bp, Homo sapiens
cagagctagcccctg

SEQ ID NO: 1837209 - DNA, 15 bp, Homo sapiens
agagctagcccctgt

SEQ ID NO: 1837210 - DNA, 15 bp, Homo sapiens
gagctagcccctgta

SEQ ID NO: 1837211 - DNA, 15 bp, Homo sapiens
agctagcccctgtaa

SEQ ID NO: 1837212 - DNA, 15 bp, Homo sapiens
gctagcccctgtaat

SEQ ID NO: 1837213 - DNA, 15 bp, Homo sapiens
ctagcccctgtaatc

SEQ ID NO: 1837214 - DNA, 15 bp, Homo sapiens
tagcccctgtaatcc

SEQ ID NO: 1837215 - DNA, 15 bp, Homo sapiens
agcccctgtaatcca

SEQ ID NO: 1837216 - DNA, 15 bp, Homo sapiens
gcccctgtaatccat

SEQ ID NO: 1837217 - DNA, 15 bp, Homo sapiens
cccctgtaatccatg

SEQ ID NO: 1837218 - DNA, 15 bp, Homo sapiens
ccctgtaatccatgg

SEQ ID NO: 1837219 - DNA, 15 bp, Homo sapiens
cctgtaatccatggg

SEQ ID NO: 1837220 - DNA, 15 bp, Homo sapiens
ctgtaatccatgggt

SEQ ID NO: 1837221 - DNA, 15 bp, Homo sapiens
tgtaatccatgggtt

SEQ ID NO: 1837222 - DNA, 15 bp, Homo sapiens
gtaatccatgggttg

SEQ ID NO: 1837223 - DNA, 15 bp, Homo sapiens
taatccatgggttgc

SEQ ID NO: 1837224 - DNA, 15 bp, Homo sapiens
aatccatgggttgct

SEQ ID NO: 1837225 - DNA, 15 bp, Homo sapiens
atccatgggttgctt

SEQ ID NO: 1837226 - DNA, 15 bp, Homo sapiens
tccatgggttgcttg

SEQ ID NO: 1837227 - DNA, 15 bp, Homo sapiens
ccatgggttgcttgt

SEQ ID NO: 1837228 - DNA, 15 bp, Homo sapiens
catgggttgcttgta

SEQ ID NO: 1837229 - DNA, 15 bp, Homo sapiens
atgggttgcttgtaa

SEQ ID NO: 1837230 - DNA, 15 bp, Homo sapiens
tgggttgcttgtaac

SEQ ID NO: 1837231 - DNA, 15 bp, Homo sapiens
gggttgcttgtaacc

SEQ ID NO: 1837232 - DNA, 15 bp, Homo sapiens
ggttgcttgtaaccc

SEQ ID NO: 1837233 - DNA, 15 bp, Homo sapiens
gttgcttgtaaccca

SEQ ID NO: 1837234 - DNA, 15 bp, Homo sapiens
ttgcttgtaacccat

SEQ ID NO: 1837235 - DNA, 15 bp, Homo sapiens
tgcttgtaacccatg

SEQ ID NO: 1837236 - DNA, 15 bp, Homo sapiens
gcttgtaacccatgg

SEQ ID NO: 1837237 - DNA, 15 bp, Homo sapiens
cttgtaacccatgga

SEQ ID NO: 1837238 - DNA, 15 bp, Homo sapiens
ttgtaacccatggat

SEQ ID NO: 1837239 - DNA, 15 bp, Homo sapiens
tgtaacccatggatt

SEQ ID NO: 1837240 - DNA, 15 bp, Homo sapiens
gtaacccatggattg

SEQ ID NO: 1837241 - DNA, 15 bp, Homo sapiens
taacccatggattgt

SEQ ID NO: 1837242 - DNA, 15 bp, Homo sapiens
aacccatggattgtg

SEQ ID NO: 1837243 - DNA, 15 bp, Homo sapiens
acccatggattgtgg

SEQ ID NO: 1837244 - DNA, 15 bp, Homo sapiens
cccatggattgtggt

SEQ ID NO: 1837245 - DNA, 15 bp, Homo sapiens
ccatggattgtggtg

SEQ ID NO: 1837246 - DNA, 15 bp, Homo sapiens
catggattgtggtgg

SEQ ID NO: 1837247 - DNA, 15 bp, Homo sapiens
atggattgtggtgga

SEQ ID NO: 1837248 - DNA, 15 bp, Homo sapiens
tggattgtggtggaa

SEQ ID NO: 1837249 - DNA, 15 bp, Homo sapiens
ggattgtggtggaaa

SEQ ID NO: 1837250 - DNA, 15 bp, Homo sapiens
gattgtggtggaaat

SEQ ID NO: 1837251 - DNA, 15 bp, Homo sapiens
attgtggtggaaatg

SEQ ID NO: 1837252 - DNA, 15 bp, Homo sapiens
ttgtggtggaaatga

SEQ ID NO: 1837253 - DNA, 15 bp, Homo sapiens
tgtggtggaaatgat

SEQ ID NO: 1837254 - DNA, 15 bp, Homo sapiens
gtggtggaaatgatg

SEQ ID NO: 1837255 - DNA, 15 bp, Homo sapiens
tggtggaaatgatgc

SEQ ID NO: 1837256 - DNA, 15 bp, Homo sapiens
ggtggaaatgatgct

SEQ ID NO: 1837257 - DNA, 15 bp, Homo sapiens
gtggaaatgatgcta

SEQ ID NO: 1837258 - DNA, 15 bp, Homo sapiens
tggaaatgatgctat

SEQ ID NO: 1837259 - DNA, 15 bp, Homo sapiens
ggaaatgatgctatg

SEQ ID NO: 1837260 - DNA, 15 bp, Homo sapiens
gaaatgatgctatgt

SEQ ID NO: 1837261 - DNA, 15 bp, Homo sapiens
aaatgatgctatgtg

SEQ ID NO: 1837262 - DNA, 15 bp, Homo sapiens
aatgatgctatgtga

SEQ ID NO: 1837263 - DNA, 15 bp, Homo sapiens
atgatgctatgtgac

SEQ ID NO: 1837264 - DNA, 15 bp, Homo sapiens
tgatgctatgtgact

SEQ ID NO: 1837265 - DNA, 15 bp, Homo sapiens
gatgctatgtgactt

SEQ ID NO: 1837266 - DNA, 15 bp, Homo sapiens
atgctatgtgacttc

SEQ ID NO: 1837267 - DNA, 15 bp, Homo sapiens
tgctatgtgacttct

SEQ ID NO: 1837268 - DNA, 15 bp, Homo sapiens
gctatgtgacttctg

SEQ ID NO: 1837269 - DNA, 15 bp, Homo sapiens
ctatgtgacttctga

SEQ ID NO: 1837270 - DNA, 15 bp, Homo sapiens
tatgtgacttctgag

SEQ ID NO: 1837271 - DNA, 15 bp, Homo sapiens
atgtgacttctgagg

SEQ ID NO: 1837272 - DNA, 15 bp, Homo sapiens
tgtgacttctgaggc

SEQ ID NO: 1837273 - DNA, 15 bp, Homo sapiens
gtgacttctgaggct

SEQ ID NO: 1837274 - DNA, 15 bp, Homo sapiens
tgacttctgaggcta

SEQ ID NO: 1837275 - DNA, 15 bp, Homo sapiens
gacttctgaggctat

SEQ ID NO: 1837276 - DNA, 15 bp, Homo sapiens
acttctgaggctatg

SEQ ID NO: 1837277 - DNA, 15 bp, Homo sapiens
cttctgaggctatgt

SEQ ID NO: 1837278 - DNA, 15 bp, Homo sapiens
ttctgaggctatgtt

SEQ ID NO: 1837279 - DNA, 15 bp, Homo sapiens
tctgaggctatgttg

SEQ ID NO: 1837280 - DNA, 15 bp, Homo sapiens
ctgaggctatgttgg

SEQ ID NO: 1837281 - DNA, 15 bp, Homo sapiens
tgaggctatgttgga

SEQ ID NO: 1837282 - DNA, 15 bp, Homo sapiens
gaggctatgttggaa

SEQ ID NO: 1837283 - DNA, 15 bp, Homo sapiens
aggctatgttggaag

SEQ ID NO: 1837284 - DNA, 15 bp, Homo sapiens
ggctatgttggaaga

SEQ ID NO: 1837285 - DNA, 15 bp, Homo sapiens
gctatgttggaagaa

SEQ ID NO: 1837286 - DNA, 15 bp, Homo sapiens
ctatgttggaagaac

SEQ ID NO: 1837287 - DNA, 15 bp, Homo sapiens
tatgttggaagaacc

SEQ ID NO: 1837288 - DNA, 15 bp, Homo sapiens
atgttggaagaaccc

SEQ ID NO: 1837289 - DNA, 15 bp, Homo sapiens
tgttggaagaaccct

SEQ ID NO: 1837290 - DNA, 15 bp, Homo sapiens
gttggaagaaccctg

SEQ ID NO: 1837291 - DNA, 15 bp, Homo sapiens
ttggaagaaccctgg

SEQ ID NO: 1837292 - DNA, 15 bp, Homo sapiens
tggaagaaccctggc

SEQ ID NO: 1837293 - DNA, 15 bp, Homo sapiens
ggaagaaccctggca

SEQ ID NO: 1837294 - DNA, 15 bp, Homo sapiens
gaagaaccctggcag

SEQ ID NO: 1837295 - DNA, 15 bp, Homo sapiens
aagaaccctggcagt

SEQ ID NO: 1837296 - DNA, 15 bp, Homo sapiens
agaaccctggcagtt

SEQ ID NO: 1837297 - DNA, 15 bp, Homo sapiens
gaaccctggcagttc

SEQ ID NO: 1837298 - DNA, 15 bp, Homo sapiens
aaccctggcagttca

SEQ ID NO: 1837299 - DNA, 15 bp, Homo sapiens
accctggcagttcat

SEQ ID NO: 1837300 - DNA, 15 bp, Homo sapiens
ccctggcagttcatt

SEQ ID NO: 1837301 - DNA, 15 bp, Homo sapiens
cctggcagttcattt

SEQ ID NO: 1837302 - DNA, 15 bp, Homo sapiens
ctggcagttcatttg

SEQ ID NO: 1837303 - DNA, 15 bp, Homo sapiens
tggcagttcatttgt

SEQ ID NO: 1837304 - DNA, 15 bp, Homo sapiens
ggcagttcatttgtt

SEQ ID NO: 1837305 - DNA, 15 bp, Homo sapiens
gcagttcatttgtta

SEQ ID NO: 1837306 - DNA, 15 bp, Homo sapiens
cagttcatttgttat

SEQ ID NO: 1837307 - DNA, 15 bp, Homo sapiens
agttcatttgttatc

SEQ ID NO: 1837308 - DNA, 15 bp, Homo sapiens
gttcatttgttatct

SEQ ID NO: 1837309 - DNA, 15 bp, Homo sapiens
ttcatttgttatctg

SEQ ID NO: 1837310 - DNA, 15 bp, Homo sapiens
tcatttgttatctgg

SEQ ID NO: 1837311 - DNA, 15 bp, Homo sapiens
catttgttatctggg

SEQ ID NO: 1837312 - DNA, 15 bp, Homo sapiens
atttgttatctggga

SEQ ID NO: 1837313 - DNA, 15 bp, Homo sapiens
tttgttatctgggaa

SEQ ID NO: 1837314 - DNA, 15 bp, Homo sapiens
ttgttatctgggaat

SEQ ID NO: 1837315 - DNA, 15 bp, Homo sapiens
tgttatctgggaatg

SEQ ID NO: 1837316 - DNA, 15 bp, Homo sapiens
gttatctgggaatgc

SEQ ID NO: 1837317 - DNA, 15 bp, Homo sapiens
ttatctgggaatgct

SEQ ID NO: 1837318 - DNA, 15 bp, Homo sapiens
tatctgggaatgcta

SEQ ID NO: 1837319 - DNA, 15 bp, Homo sapiens
atctgggaatgctac

SEQ ID NO: 1837320 - DNA, 15 bp, Homo sapiens
tctgggaatgctact

SEQ ID NO: 1837321 - DNA, 15 bp, Homo sapiens
ctgggaatgctactt

SEQ ID NO: 1837322 - DNA, 15 bp, Homo sapiens
tgggaatgctacttc

SEQ ID NO: 1837323 - DNA, 15 bp, Homo sapiens
gggaatgctacttct

SEQ ID NO: 1837324 - DNA, 15 bp, Homo sapiens
ggaatgctacttctt

SEQ ID NO: 1837325 - DNA, 15 bp, Homo sapiens
gaatgctacttctta

SEQ ID NO: 1837326 - DNA, 15 bp, Homo sapiens
aatgctacttcttag

SEQ ID NO: 1837327 - DNA, 15 bp, Homo sapiens
atgctacttcttagg

SEQ ID NO: 1837328 - DNA, 15 bp, Homo sapiens
tgctacttcttaggg

SEQ ID NO: 1837329 - DNA, 15 bp, Homo sapiens
gctacttcttaggga

SEQ ID NO: 1837330 - DNA, 15 bp, Homo sapiens
ctacttcttagggaa

SEQ ID NO: 1837331 - DNA, 15 bp, Homo sapiens
tacttcttagggaag

SEQ ID NO: 1837332 - DNA, 15 bp, Homo sapiens
acttcttagggaagt

SEQ ID NO: 1837333 - DNA, 15 bp, Homo sapiens
cttcttagggaagtt

SEQ ID NO: 1837334 - DNA, 15 bp, Homo sapiens
ttcttagggaagttg

SEQ ID NO: 1837335 - DNA, 15 bp, Homo sapiens
tcttagggaagttgg

SEQ ID NO: 1837336 - DNA, 15 bp, Homo sapiens
cttagggaagttggc

SEQ ID NO: 1837337 - DNA, 15 bp, Homo sapiens
ttagggaagttggcc

SEQ ID NO: 1837338 - DNA, 15 bp, Homo sapiens
tagggaagttggcca

SEQ ID NO: 1837339 - DNA, 15 bp, Homo sapiens
agggaagttggccac

SEQ ID NO: 1837340 - DNA, 15 bp, Homo sapiens
gggaagttggccact

SEQ ID NO: 1837341 - DNA, 15 bp, Homo sapiens
ggaagttggccacta

SEQ ID NO: 1837342 - DNA, 15 bp, Homo sapiens
gaagttggccactac

SEQ ID NO: 1837343 - DNA, 15 bp, Homo sapiens
aagttggccactaca

SEQ ID NO: 1837344 - DNA, 15 bp, Homo sapiens
agttggccactacag

SEQ ID NO: 1837345 - DNA, 15 bp, Homo sapiens
gttggccactacagg

SEQ ID NO: 1837346 - DNA, 15 bp, Homo sapiens
ttggccactacaggg

SEQ ID NO: 1837347 - DNA, 15 bp, Homo sapiens
tggccactacagggg

SEQ ID NO: 1837348 - DNA, 15 bp, Homo sapiens
ggccactacaggggg

SEQ ID NO: 1837349 - DNA, 15 bp, Homo sapiens
gccactacaggggga

SEQ ID NO: 1837350 - DNA, 15 bp, Homo sapiens
ccactacagggggaa

SEQ ID NO: 1837351 - DNA, 15 bp, Homo sapiens
cactacagggggaag

SEQ ID NO: 1837352 - DNA, 15 bp, Homo sapiens
actacagggggaaga

SEQ ID NO: 1837353 - DNA, 15 bp, Homo sapiens
ctacagggggaagag

SEQ ID NO: 1837354 - DNA, 15 bp, Homo sapiens
tacagggggaagagc

SEQ ID NO: 1837355 - DNA, 15 bp, Homo sapiens
acagggggaagagcg

SEQ ID NO: 1837356 - DNA, 15 bp, Homo sapiens
cagggggaagagcga

SEQ ID NO: 1837357 - DNA, 15 bp, Homo sapiens
agggggaagagcgag

SEQ ID NO: 1837358 - DNA, 15 bp, Homo sapiens
gggggaagagcgaga

SEQ ID NO: 1837359 - DNA, 15 bp, Homo sapiens
ggggaagagcgagag

SEQ ID NO: 1837360 - DNA, 15 bp, Homo sapiens
gggaagagcgagagt

SEQ ID NO: 1837361 - DNA, 15 bp, Homo sapiens
ggaagagcgagagtg

SEQ ID NO: 1837362 - DNA, 15 bp, Homo sapiens
gaagagcgagagtga

SEQ ID NO: 1837363 - DNA, 15 bp, Homo sapiens
aagagcgagagtgag

SEQ ID NO: 1837364 - DNA, 15 bp, Homo sapiens
agagcgagagtgaga

SEQ ID NO: 1837365 - DNA, 15 bp, Homo sapiens
gagcgagagtgagag

SEQ ID NO: 1837366 - DNA, 15 bp, Homo sapiens
agcgagagtgagagg

SEQ ID NO: 1837367 - DNA, 15 bp, Homo sapiens
gcgagagtgagagga

SEQ ID NO: 1837368 - DNA, 15 bp, Homo sapiens
cgagagtgagaggaa

SEQ ID NO: 1837369 - DNA, 15 bp, Homo sapiens
gagagtgagaggaag

SEQ ID NO: 1837370 - DNA, 15 bp, Homo sapiens
agagtgagaggaagc

SEQ ID NO: 1837371 - DNA, 15 bp, Homo sapiens
gagtgagaggaagca

SEQ ID NO: 1837372 - DNA, 15 bp, Homo sapiens
agtgagaggaagcat

SEQ ID NO: 1837373 - DNA, 15 bp, Homo sapiens
gtgagaggaagcatg

SEQ ID NO: 1837374 - DNA, 15 bp, Homo sapiens
tgagaggaagcatgt

SEQ ID NO: 1837375 - DNA, 15 bp, Homo sapiens
gagaggaagcatgtg

SEQ ID NO: 1837376 - DNA, 15 bp, Homo sapiens
agaggaagcatgtgc

SEQ ID NO: 1837377 - DNA, 15 bp, Homo sapiens
gaggaagcatgtgcg

SEQ ID NO: 1837378 - DNA, 15 bp, Homo sapiens
aggaagcatgtgcgt

SEQ ID NO: 1837379 - DNA, 15 bp, Homo sapiens
ggaagcatgtgcgtg

SEQ ID NO: 1837380 - DNA, 15 bp, Homo sapiens
gaagcatgtgcgtgg

SEQ ID NO: 1837381 - DNA, 15 bp, Homo sapiens
aagcatgtgcgtggg

SEQ ID NO: 1837382 - DNA, 15 bp, Homo sapiens
agcatgtgcgtgggc

SEQ ID NO: 1837383 - DNA, 15 bp, Homo sapiens
gcatgtgcgtgggca

SEQ ID NO: 1837384 - DNA, 15 bp, Homo sapiens
catgtgcgtgggcat

SEQ ID NO: 1837385 - DNA, 15 bp, Homo sapiens
atgtgcgtgggcata

SEQ ID NO: 1837386 - DNA, 15 bp, Homo sapiens
tgtgcgtgggcatac

SEQ ID NO: 1837387 - DNA, 15 bp, Homo sapiens
gtgcgtgggcatacg

SEQ ID NO: 1837388 - DNA, 15 bp, Homo sapiens
tgcgtgggcatacga

SEQ ID NO: 1837389 - DNA, 15 bp, Homo sapiens
gcgtgggcatacgag

SEQ ID NO: 1837390 - DNA, 15 bp, Homo sapiens
cgtgggcatacgaga

SEQ ID NO: 1837391 - DNA, 15 bp, Homo sapiens
gtgggcatacgagag

SEQ ID NO: 1837392 - DNA, 15 bp, Homo sapiens
tgggcatacgagaga

SEQ ID NO: 1837393 - DNA, 15 bp, Homo sapiens
gggcatacgagagag

SEQ ID NO: 1837394 - DNA, 15 bp, Homo sapiens
ggcatacgagagaga

SEQ ID NO: 1837395 - DNA, 15 bp, Homo sapiens
gcatacgagagagag

SEQ ID NO: 1837396 - DNA, 15 bp, Homo sapiens
catacgagagagaga

SEQ ID NO: 1837397 - DNA, 15 bp, Homo sapiens
atacgagagagagag

SEQ ID NO: 1837398 - DNA, 15 bp, Homo sapiens
tacgagagagagaga

SEQ ID NO: 1837399 - DNA, 15 bp, Homo sapiens
acgagagagagagag

SEQ ID NO: 1837400 - DNA, 15 bp, Homo sapiens
cgagagagagagaga

SEQ ID NO: 1837401 - DNA, 15 bp, Homo sapiens
gagagagagagagac

SEQ ID NO: 1837402 - DNA, 15 bp, Homo sapiens
agagagagagagaca

SEQ ID NO: 1837403 - DNA, 15 bp, Homo sapiens
gagagagagagacag

SEQ ID NO: 1837404 - DNA, 15 bp, Homo sapiens
agagagagagacaga

SEQ ID NO: 1837405 - DNA, 15 bp, Homo sapiens
gagagagagacagac

SEQ ID NO: 1837406 - DNA, 15 bp, Homo sapiens
agagagagacagaca

SEQ ID NO: 1837407 - DNA, 15 bp, Homo sapiens
gagagagacagacag

SEQ ID NO: 1837408 - DNA, 15 bp, Homo sapiens
agagagacagacaga

SEQ ID NO: 1837409 - DNA, 15 bp, Homo sapiens
gagagacagacagac

SEQ ID NO: 1837410 - DNA, 15 bp, Homo sapiens
agagacagacagaca

SEQ ID NO: 1837411 - DNA, 15 bp, Homo sapiens
gagacagacagacag

SEQ ID NO: 1837412 - DNA, 15 bp, Homo sapiens
agacagacagacaga

SEQ ID NO: 1837413 - DNA, 15 bp, Homo sapiens
gacagacagacagag

SEQ ID NO: 1837414 - DNA, 15 bp, Homo sapiens
acagacagacagaga

SEQ ID NO: 1837415 - DNA, 15 bp, Homo sapiens
cagacagacagagag

SEQ ID NO: 1837416 - DNA, 15 bp, Homo sapiens
agacagacagagaga

SEQ ID NO: 1837417 - DNA, 15 bp, Homo sapiens
gacagacagagagac

SEQ ID NO: 1837418 - DNA, 15 bp, Homo sapiens
acagacagagagaca

SEQ ID NO: 1837419 - DNA, 15 bp, Homo sapiens
cagacagagagacac

SEQ ID NO: 1837420 - DNA, 15 bp, Homo sapiens
agacagagagacact

SEQ ID NO: 1837421 - DNA, 15 bp, Homo sapiens
gacagagagacacta

SEQ ID NO: 1837422 - DNA, 15 bp, Homo sapiens
acagagagacactac

SEQ ID NO: 1837423 - DNA, 15 bp, Homo sapiens
cagagagacactact

SEQ ID NO: 1837424 - DNA, 15 bp, Homo sapiens
agagagacactactg

SEQ ID NO: 1837425 - DNA, 15 bp, Homo sapiens
gagagacactactgg

SEQ ID NO: 1837426 - DNA, 15 bp, Homo sapiens
agagacactactggg

SEQ ID NO: 1837427 - DNA, 15 bp, Homo sapiens
gagacactactgggg

SEQ ID NO: 1837428 - DNA, 15 bp, Homo sapiens
agacactactggggc

SEQ ID NO: 1837429 - DNA, 15 bp, Homo sapiens
gacactactggggca

SEQ ID NO: 1837430 - DNA, 15 bp, Homo sapiens
acactactggggcac

SEQ ID NO: 1837431 - DNA, 15 bp, Homo sapiens
cactactggggcacc

SEQ ID NO: 1837432 - DNA, 15 bp, Homo sapiens
actactggggcacca

SEQ ID NO: 1837433 - DNA, 15 bp, Homo sapiens
ctactggggcaccac

SEQ ID NO: 1837434 - DNA, 15 bp, Homo sapiens
tactggggcaccacg

SEQ ID NO: 1837435 - DNA, 15 bp, Homo sapiens
actggggcaccacgc

SEQ ID NO: 1837436 - DNA, 15 bp, Homo sapiens
ctggggcaccacgca

SEQ ID NO: 1837437 - DNA, 15 bp, Homo sapiens
tggggcaccacgcat

SEQ ID NO: 1837438 - DNA, 15 bp, Homo sapiens
ggggcaccacgcata

SEQ ID NO: 1837439 - DNA, 15 bp, Homo sapiens
gggcaccacgcatat

SEQ ID NO: 1837440 - DNA, 15 bp, Homo sapiens
ggcaccacgcatatg

SEQ ID NO: 1837441 - DNA, 15 bp, Homo sapiens
gcaccacgcatatgt

SEQ ID NO: 1837442 - DNA, 15 bp, Homo sapiens
caccacgcatatgtg

SEQ ID NO: 1837443 - DNA, 15 bp, Homo sapiens
accacgcatatgtgt

SEQ ID NO: 1837444 - DNA, 15 bp, Homo sapiens
ccacgcatatgtgtg

SEQ ID NO: 1837445 - DNA, 15 bp, Homo sapiens
cacgcatatgtgtga

SEQ ID NO: 1837446 - DNA, 15 bp, Homo sapiens
acgcatatgtgtgaa

SEQ ID NO: 1837447 - DNA, 15 bp, Homo sapiens
cgcatatgtgtgaag

SEQ ID NO: 1837448 - DNA, 15 bp, Homo sapiens
gcatatgtgtgaaga

SEQ ID NO: 1837449 - DNA, 15 bp, Homo sapiens
catatgtgtgaagat

SEQ ID NO: 1837450 - DNA, 15 bp, Homo sapiens
atatgtgtgaagatg

SEQ ID NO: 1837451 - DNA, 15 bp, Homo sapiens
tatgtgtgaagatgc

SEQ ID NO: 1837452 - DNA, 15 bp, Homo sapiens
atgtgtgaagatgcc

SEQ ID NO: 1837453 - DNA, 15 bp, Homo sapiens
tgtgtgaagatgcca

SEQ ID NO: 1837454 - DNA, 15 bp, Homo sapiens
gtgtgaagatgccat

SEQ ID NO: 1837455 - DNA, 15 bp, Homo sapiens
tgtgaagatgccatc

SEQ ID NO: 1837456 - DNA, 15 bp, Homo sapiens
gtgaagatgccatca

SEQ ID NO: 1837457 - DNA, 15 bp, Homo sapiens
tgaagatgccatcat

SEQ ID NO: 1837458 - DNA, 15 bp, Homo sapiens
gaagatgccatcatg

SEQ ID NO: 1837459 - DNA, 15 bp, Homo sapiens
aagatgccatcatgg

SEQ ID NO: 1837460 - DNA, 15 bp, Homo sapiens
agatgccatcatgga

SEQ ID NO: 1837461 - DNA, 15 bp, Homo sapiens
gatgccatcatggaa

SEQ ID NO: 1837462 - DNA, 15 bp, Homo sapiens
atgccatcatggaag

SEQ ID NO: 1837463 - DNA, 15 bp, Homo sapiens
tgccatcatggaagt

SEQ ID NO: 1837464 - DNA, 15 bp, Homo sapiens
gccatcatggaagtg

SEQ ID NO: 1837465 - DNA, 15 bp, Homo sapiens
ccatcatggaagtgg

SEQ ID NO: 1837466 - DNA, 15 bp, Homo sapiens
catcatggaagtgga

SEQ ID NO: 1837467 - DNA, 15 bp, Homo sapiens
atcatggaagtggat

SEQ ID NO: 1837468 - DNA, 15 bp, Homo sapiens
tcatggaagtggatc

SEQ ID NO: 1837469 - DNA, 15 bp, Homo sapiens
catggaagtggatcc

SEQ ID NO: 1837470 - DNA, 15 bp, Homo sapiens
atggaagtggatcct

SEQ ID NO: 1837471 - DNA, 15 bp, Homo sapiens
tggaagtggatcctc

SEQ ID NO: 1837472 - DNA, 15 bp, Homo sapiens
ggaagtggatcctcc

SEQ ID NO: 1837473 - DNA, 15 bp, Homo sapiens
gaagtggatcctcca

SEQ ID NO: 1837474 - DNA, 15 bp, Homo sapiens
aagtggatcctccaa

SEQ ID NO: 1837475 - DNA, 15 bp, Homo sapiens
agtggatcctccaac

SEQ ID NO: 1837476 - DNA, 15 bp, Homo sapiens
gtggatcctccaacc

SEQ ID NO: 1837477 - DNA, 15 bp, Homo sapiens
tggatcctccaaccc

SEQ ID NO: 1837478 - DNA, 15 bp, Homo sapiens
ggatcctccaacccc

SEQ ID NO: 1837479 - DNA, 15 bp, Homo sapiens
gatcctccaacccca

SEQ ID NO: 1837480 - DNA, 15 bp, Homo sapiens
atcctccaaccccag

SEQ ID NO: 1837481 - DNA, 15 bp, Homo sapiens
tcctccaaccccagt

SEQ ID NO: 1837482 - DNA, 15 bp, Homo sapiens
cctccaaccccagtt

SEQ ID NO: 1837483 - DNA, 15 bp, Homo sapiens
ctccaaccccagttg

SEQ ID NO: 1837484 - DNA, 15 bp, Homo sapiens
tccaaccccagttga

SEQ ID NO: 1837485 - DNA, 15 bp, Homo sapiens
ccaaccccagttgac

SEQ ID NO: 1837486 - DNA, 15 bp, Homo sapiens
caaccccagttgaca

SEQ ID NO: 1837487 - DNA, 15 bp, Homo sapiens
aaccccagttgacat

SEQ ID NO: 1837488 - DNA, 15 bp, Homo sapiens
accccagttgacata

SEQ ID NO: 1837489 - DNA, 15 bp, Homo sapiens
ccccagttgacatag

SEQ ID NO: 1837490 - DNA, 15 bp, Homo sapiens
cccagttgacataga

SEQ ID NO: 1837491 - DNA, 15 bp, Homo sapiens
ccagttgacatagat

SEQ ID NO: 1837492 - DNA, 15 bp, Homo sapiens
cagttgacatagatt

SEQ ID NO: 1837493 - DNA, 15 bp, Homo sapiens
agttgacatagattg

SEQ ID NO: 1837494 - DNA, 15 bp, Homo sapiens
gttgacatagattgg

SEQ ID NO: 1837495 - DNA, 15 bp, Homo sapiens
ttgacatagattgga

SEQ ID NO: 1837496 - DNA, 15 bp, Homo sapiens
tgacatagattggag

SEQ ID NO: 1837497 - DNA, 15 bp, Homo sapiens
gacatagattggaga

SEQ ID NO: 1837498 - DNA, 15 bp, Homo sapiens
acatagattggagat

SEQ ID NO: 1837499 - DNA, 15 bp, Homo sapiens
catagattggagatg

SEQ ID NO: 1837500 - DNA, 15 bp, Homo sapiens
atagattggagatga

SEQ ID NO: 1837501 - DNA, 15 bp, Homo sapiens
tagattggagatgaa

SEQ ID NO: 1837502 - DNA, 15 bp, Homo sapiens
agattggagatgaac

SEQ ID NO: 1837503 - DNA, 15 bp, Homo sapiens
gattggagatgaacc

SEQ ID NO: 1837504 - DNA, 15 bp, Homo sapiens
attggagatgaaccc

SEQ ID NO: 1837505 - DNA, 15 bp, Homo sapiens
ttggagatgaaccca

SEQ ID NO: 1837506 - DNA, 15 bp, Homo sapiens
tggagatgaacccac

SEQ ID NO: 1837507 - DNA, 15 bp, Homo sapiens
ggagatgaacccacc

SEQ ID NO: 1837508 - DNA, 15 bp, Homo sapiens
gagatgaacccacca

SEQ ID NO: 1837509 - DNA, 15 bp, Homo sapiens
agatgaacccaccag

SEQ ID NO: 1837510 - DNA, 15 bp, Homo sapiens
gatgaacccaccagc

SEQ ID NO: 1837511 - DNA, 15 bp, Homo sapiens
atgaacccaccagct

SEQ ID NO: 1837512 - DNA, 15 bp, Homo sapiens
tgaacccaccagctg

SEQ ID NO: 1837513 - DNA, 15 bp, Homo sapiens
gaacccaccagctga

SEQ ID NO: 1837514 - DNA, 15 bp, Homo sapiens
aacccaccagctgat

SEQ ID NO: 1837515 - DNA, 15 bp, Homo sapiens
acccaccagctgatc

SEQ ID NO: 1837516 - DNA, 15 bp, Homo sapiens
cccaccagctgatcc

SEQ ID NO: 1837517 - DNA, 15 bp, Homo sapiens
ccaccagctgatccc

SEQ ID NO: 1837518 - DNA, 15 bp, Homo sapiens
caccagctgatccct

SEQ ID NO: 1837519 - DNA, 15 bp, Homo sapiens
accagctgatccctc

SEQ ID NO: 1837520 - DNA, 15 bp, Homo sapiens
ccagctgatccctct

SEQ ID NO: 1837521 - DNA, 15 bp, Homo sapiens
cagctgatccctcta

SEQ ID NO: 1837522 - DNA, 15 bp, Homo sapiens
agctgatccctctat

SEQ ID NO: 1837523 - DNA, 15 bp, Homo sapiens
gctgatccctctatg

SEQ ID NO: 1837524 - DNA, 15 bp, Homo sapiens
ctgatccctctatga

SEQ ID NO: 1837525 - DNA, 15 bp, Homo sapiens
tgatccctctatgaa

SEQ ID NO: 1837526 - DNA, 15 bp, Homo sapiens
gatccctctatgaat

SEQ ID NO: 1837527 - DNA, 15 bp, Homo sapiens
atccctctatgaatt

SEQ ID NO: 1837528 - DNA, 15 bp, Homo sapiens
tccctctatgaattc

SEQ ID NO: 1837529 - DNA, 15 bp, Homo sapiens
ccctctatgaattcc

SEQ ID NO: 1837530 - DNA, 15 bp, Homo sapiens
cctctatgaattcct

SEQ ID NO: 1837531 - DNA, 15 bp, Homo sapiens
ctctatgaattcctt

SEQ ID NO: 1837532 - DNA, 15 bp, Homo sapiens
tctatgaattcctta

SEQ ID NO: 1837533 - DNA, 15 bp, Homo sapiens
ctatgaattccttac

SEQ ID NO: 1837534 - DNA, 15 bp, Homo sapiens
tatgaattccttact

SEQ ID NO: 1837535 - DNA, 15 bp, Homo sapiens
atgaattccttactt

SEQ ID NO: 1837536 - DNA, 15 bp, Homo sapiens
tgaattccttactta

SEQ ID NO: 1837537 - DNA, 15 bp, Homo sapiens
gaattccttacttaa

SEQ ID NO: 1837538 - DNA, 15 bp, Homo sapiens
aattccttacttaaa

SEQ ID NO: 1837539 - DNA, 15 bp, Homo sapiens
attccttacttaaaa

SEQ ID NO: 1837540 - DNA, 15 bp, Homo sapiens
ttccttacttaaaag

SEQ ID NO: 1837541 - DNA, 15 bp, Homo sapiens
tccttacttaaaagt

SEQ ID NO: 1837542 - DNA, 15 bp, Homo sapiens
ccttacttaaaagtc

SEQ ID NO: 1837543 - DNA, 15 bp, Homo sapiens
cttacttaaaagtca

SEQ ID NO: 1837544 - DNA, 15 bp, Homo sapiens
ttacttaaaagtcat

SEQ ID NO: 1837545 - DNA, 15 bp, Homo sapiens
tacttaaaagtcata

SEQ ID NO: 1837546 - DNA, 15 bp, Homo sapiens
acttaaaagtcataa

SEQ ID NO: 1837547 - DNA, 15 bp, Homo sapiens
cttaaaagtcataaa

SEQ ID NO: 1837548 - DNA, 15 bp, Homo sapiens
ttaaaagtcataaac

SEQ ID NO: 1837549 - DNA, 15 bp, Homo sapiens
taaaagtcataaaca

SEQ ID NO: 1837550 - DNA, 15 bp, Homo sapiens
aaaagtcataaacaa

SEQ ID NO: 1837551 - DNA, 15 bp, Homo sapiens
aaagtcataaacaaa

SEQ ID NO: 1837552 - DNA, 15 bp, Homo sapiens
aagtcataaacaaaa

SEQ ID NO: 1837553 - DNA, 15 bp, Homo sapiens
agtcataaacaaaat

SEQ ID NO: 1837554 - DNA, 15 bp, Homo sapiens
gtcataaacaaaatg

SEQ ID NO: 1837555 - DNA, 15 bp, Homo sapiens
tcataaacaaaatga

SEQ ID NO: 1837556 - DNA, 15 bp, Homo sapiens
cataaacaaaatgaa

SEQ ID NO: 1837557 - DNA, 15 bp, Homo sapiens
ataaacaaaatgaaa

SEQ ID NO: 1837558 - DNA, 15 bp, Homo sapiens
aaacaaaatgaaatg

SEQ ID NO: 1837559 - DNA, 15 bp, Homo sapiens
aacaaaatgaaatga

SEQ ID NO: 1837560 - DNA, 15 bp, Homo sapiens
acaaaatgaaatgat

SEQ ID NO: 1837561 - DNA, 15 bp, Homo sapiens
caaaatgaaatgatt

SEQ ID NO: 1837562 - DNA, 15 bp, Homo sapiens
aaaatgaaatgattg

SEQ ID NO: 1837563 - DNA, 15 bp, Homo sapiens
aaatgaaatgattgt

SEQ ID NO: 1837564 - DNA, 15 bp, Homo sapiens
aatgaaatgattgtt

SEQ ID NO: 1837565 - DNA, 15 bp, Homo sapiens
atgaaatgattgttt

SEQ ID NO: 1837566 - DNA, 15 bp, Homo sapiens
tgaaatgattgtttt

SEQ ID NO: 1837567 - DNA, 15 bp, Homo sapiens
gaaatgattgtttta

SEQ ID NO: 1837568 - DNA, 15 bp, Homo sapiens
aaatgattgttttaa

SEQ ID NO: 1837569 - DNA, 15 bp, Homo sapiens
aatgattgttttaag

SEQ ID NO: 1837570 - DNA, 15 bp, Homo sapiens
atgattgttttaagc

SEQ ID NO: 1837571 - DNA, 15 bp, Homo sapiens
tgattgttttaagcc

SEQ ID NO: 1837572 - DNA, 15 bp, Homo sapiens
gattgttttaagcca

SEQ ID NO: 1837573 - DNA, 15 bp, Homo sapiens
attgttttaagccac

SEQ ID NO: 1837574 - DNA, 15 bp, Homo sapiens
ttgttttaagccact

SEQ ID NO: 1837575 - DNA, 15 bp, Homo sapiens
tgttttaagccacta

SEQ ID NO: 1837576 - DNA, 15 bp, Homo sapiens
gttttaagccactac

SEQ ID NO: 1837577 - DNA, 15 bp, Homo sapiens
ttttaagccactaca

SEQ ID NO: 1837578 - DNA, 15 bp, Homo sapiens
tttaagccactacat

SEQ ID NO: 1837579 - DNA, 15 bp, Homo sapiens
ttaagccactacatt

SEQ ID NO: 1837580 - DNA, 15 bp, Homo sapiens
taagccactacattt

SEQ ID NO: 1837581 - DNA, 15 bp, Homo sapiens
aagccactacatttt

SEQ ID NO: 1837582 - DNA, 15 bp, Homo sapiens
agccactacattttg

SEQ ID NO: 1837583 - DNA, 15 bp, Homo sapiens
gccactacattttgg

SEQ ID NO: 1837584 - DNA, 15 bp, Homo sapiens
ccactacattttggg

SEQ ID NO: 1837585 - DNA, 15 bp, Homo sapiens
cactacattttgggg

SEQ ID NO: 1837586 - DNA, 15 bp, Homo sapiens
actacattttggggt

SEQ ID NO: 1837587 - DNA, 15 bp, Homo sapiens
ctacattttggggta

SEQ ID NO: 1837588 - DNA, 15 bp, Homo sapiens
tacattttggggtaa

SEQ ID NO: 1837589 - DNA, 15 bp, Homo sapiens
acattttggggtaat

SEQ ID NO: 1837590 - DNA, 15 bp, Homo sapiens
cattttggggtaatt

SEQ ID NO: 1837591 - DNA, 15 bp, Homo sapiens
attttggggtaattt

SEQ ID NO: 1837592 - DNA, 15 bp, Homo sapiens
ttttggggtaatttg

SEQ ID NO: 1837593 - DNA, 15 bp, Homo sapiens
tttggggtaatttgt

SEQ ID NO: 1837594 - DNA, 15 bp, Homo sapiens
ttggggtaatttgtt

SEQ ID NO: 1837595 - DNA, 15 bp, Homo sapiens
tggggtaatttgtta

SEQ ID NO: 1837596 - DNA, 15 bp, Homo sapiens
ggggtaatttgttac

SEQ ID NO: 1837597 - DNA, 15 bp, Homo sapiens
gggtaatttgttaca

SEQ ID NO: 1837598 - DNA, 15 bp, Homo sapiens
ggtaatttgttacat

SEQ ID NO: 1837599 - DNA, 15 bp, Homo sapiens
gtaatttgttacata

SEQ ID NO: 1837600 - DNA, 15 bp, Homo sapiens
taatttgttacatag

SEQ ID NO: 1837601 - DNA, 15 bp, Homo sapiens
aatttgttacatagc

SEQ ID NO: 1837602 - DNA, 15 bp, Homo sapiens
atttgttacatagcc

SEQ ID NO: 1837603 - DNA, 15 bp, Homo sapiens
tttgttacatagcca

SEQ ID NO: 1837604 - DNA, 15 bp, Homo sapiens
ttgttacatagccat

SEQ ID NO: 1837605 - DNA, 15 bp, Homo sapiens
tgttacatagccatg

SEQ ID NO: 1837606 - DNA, 15 bp, Homo sapiens
gttacatagccatgg

SEQ ID NO: 1837607 - DNA, 15 bp, Homo sapiens
ttacatagccatgga

SEQ ID NO: 1837608 - DNA, 15 bp, Homo sapiens
tacatagccatggat

SEQ ID NO: 1837609 - DNA, 15 bp, Homo sapiens
acatagccatggatg

SEQ ID NO: 1837610 - DNA, 15 bp, Homo sapiens
catagccatggatga

SEQ ID NO: 1837611 - DNA, 15 bp, Homo sapiens
atagccatggatgac

SEQ ID NO: 1837612 - DNA, 15 bp, Homo sapiens
tagccatggatgact

SEQ ID NO: 1837613 - DNA, 15 bp, Homo sapiens
agccatggatgactg

SEQ ID NO: 1837614 - DNA, 15 bp, Homo sapiens
gccatggatgactgg

SEQ ID NO: 1837615 - DNA, 15 bp, Homo sapiens
ccatggatgactgga

SEQ ID NO: 1837616 - DNA, 15 bp, Homo sapiens
catggatgactggaa

SEQ ID NO: 1837617 - DNA, 15 bp, Homo sapiens
atggatgactggaac

SEQ ID NO: 1837618 - DNA, 15 bp, Homo sapiens
tggatgactggaaca

SEQ ID NO: 1837619 - DNA, 15 bp, Homo sapiens
ggatgactggaacaa

SEQ ID NO: 1837620 - DNA, 15 bp, Homo sapiens
gatgactggaacaaa

SEQ ID NO: 1837621 - DNA, 15 bp, Homo sapiens
atgactggaacaaat

SEQ ID NO: 1837622 - DNA, 15 bp, Homo sapiens
tgactggaacaaata

SEQ ID NO: 1837623 - DNA, 15 bp, Homo sapiens
gactggaacaaataa

SEQ ID NO: 1837624 - DNA, 15 bp, Homo sapiens
actggaacaaataat

SEQ ID NO: 1837625 - DNA, 15 bp, Homo sapiens
ctggaacaaataatt

SEQ ID NO: 1837626 - DNA, 15 bp, Homo sapiens
tggaacaaataatta

SEQ ID NO: 1837627 - DNA, 15 bp, Homo sapiens
ggaacaaataattac

SEQ ID NO: 1837628 - DNA, 15 bp, Homo sapiens
gaacaaataattact

SEQ ID NO: 1837629 - DNA, 15 bp, Homo sapiens
aacaaataattacta

SEQ ID NO: 1837630 - DNA, 15 bp, Homo sapiens
acaaataattactat

SEQ ID NO: 1837631 - DNA, 15 bp, Homo sapiens
caaataattactatt

SEQ ID NO: 1837632 - DNA, 15 bp, Homo sapiens
aaataattactattt

SEQ ID NO: 1837633 - DNA, 15 bp, Homo sapiens
aataattactattta

SEQ ID NO: 1837634 - DNA, 15 bp, Homo sapiens
ataattactatttag

SEQ ID NO: 1837635 - DNA, 15 bp, Homo sapiens
taattactatttagt

SEQ ID NO: 1837636 - DNA, 15 bp, Homo sapiens
aattactatttagtg

SEQ ID NO: 1837637 - DNA, 15 bp, Homo sapiens
attactatttagtga

SEQ ID NO: 1837638 - DNA, 15 bp, Homo sapiens
ttactatttagtgaa

SEQ ID NO: 1837639 - DNA, 15 bp, Homo sapiens
tactatttagtgaag

SEQ ID NO: 1837640 - DNA, 15 bp, Homo sapiens
actatttagtgaagt

SEQ ID NO: 1837641 - DNA, 15 bp, Homo sapiens
ctatttagtgaagtc

SEQ ID NO: 1837642 - DNA, 15 bp, Homo sapiens
tatttagtgaagtcc

SEQ ID NO: 1837643 - DNA, 15 bp, Homo sapiens
atttagtgaagtcct

SEQ ID NO: 1837644 - DNA, 15 bp, Homo sapiens
tttagtgaagtcctt

SEQ ID NO: 1837645 - DNA, 15 bp, Homo sapiens
ttagtgaagtccttt

SEQ ID NO: 1837646 - DNA, 15 bp, Homo sapiens
tagtgaagtcctttc

SEQ ID NO: 1837647 - DNA, 15 bp, Homo sapiens
agtgaagtcctttca

SEQ ID NO: 1837648 - DNA, 15 bp, Homo sapiens
gtgaagtcctttcac

SEQ ID NO: 1837649 - DNA, 15 bp, Homo sapiens
tgaagtcctttcaca

SEQ ID NO: 1837650 - DNA, 15 bp, Homo sapiens
gaagtcctttcacaa

SEQ ID NO: 1837651 - DNA, 15 bp, Homo sapiens
aagtcctttcacaag

SEQ ID NO: 1837652 - DNA, 15 bp, Homo sapiens
agtcctttcacaagg

SEQ ID NO: 1837653 - DNA, 15 bp, Homo sapiens
gtcctttcacaaggt

SEQ ID NO: 1837654 - DNA, 15 bp, Homo sapiens
tcctttcacaaggtc

SEQ ID NO: 1837655 - DNA, 15 bp, Homo sapiens
cctttcacaaggtcc

SEQ ID NO: 1837656 - DNA, 15 bp, Homo sapiens
ctttcacaaggtcca

SEQ ID NO: 1837657 - DNA, 15 bp, Homo sapiens
tttcacaaggtccag

SEQ ID NO: 1837658 - DNA, 15 bp, Homo sapiens
ttcacaaggtccagc

SEQ ID NO: 1837659 - DNA, 15 bp, Homo sapiens
tcacaaggtccagct

SEQ ID NO: 1837660 - DNA, 15 bp, Homo sapiens
cacaaggtccagctc

SEQ ID NO: 1837661 - DNA, 15 bp, Homo sapiens
acaaggtccagctcc

SEQ ID NO: 1837662 - DNA, 15 bp, Homo sapiens
caaggtccagctcct

SEQ ID NO: 1837663 - DNA, 15 bp, Homo sapiens
aaggtccagctcctg

SEQ ID NO: 1837664 - DNA, 15 bp, Homo sapiens
aggtccagctcctgc

SEQ ID NO: 1837665 - DNA, 15 bp, Homo sapiens
ggtccagctcctgcc

SEQ ID NO: 1837666 - DNA, 15 bp, Homo sapiens
gtccagctcctgccc

SEQ ID NO: 1837667 - DNA, 15 bp, Homo sapiens
tccagctcctgccct

SEQ ID NO: 1837668 - DNA, 15 bp, Homo sapiens
ccagctcctgccctc

SEQ ID NO: 1837669 - DNA, 15 bp, Homo sapiens
cagctcctgccctct

SEQ ID NO: 1837670 - DNA, 15 bp, Homo sapiens
agctcctgccctctt

SEQ ID NO: 1837671 - DNA, 15 bp, Homo sapiens
gctcctgccctcttt

SEQ ID NO: 1837672 - DNA, 15 bp, Homo sapiens
ctcctgccctctttc

SEQ ID NO: 1837673 - DNA, 15 bp, Homo sapiens
tcctgccctctttct

SEQ ID NO: 1837674 - DNA, 15 bp, Homo sapiens
cctgccctctttcta

SEQ ID NO: 1837675 - DNA, 15 bp, Homo sapiens
ctgccctctttctag

SEQ ID NO: 1837676 - DNA, 15 bp, Homo sapiens
tgccctctttctagg

SEQ ID NO: 1837677 - DNA, 15 bp, Homo sapiens
gccctctttctaggt

SEQ ID NO: 1837678 - DNA, 15 bp, Homo sapiens
ccctctttctaggtt

SEQ ID NO: 1837679 - DNA, 15 bp, Homo sapiens
cctctttctaggttc

SEQ ID NO: 1837680 - DNA, 15 bp, Homo sapiens
ctctttctaggttcc

SEQ ID NO: 1837681 - DNA, 15 bp, Homo sapiens
tctttctaggttcct

SEQ ID NO: 1837682 - DNA, 15 bp, Homo sapiens
ctttctaggttcctc

SEQ ID NO: 1837683 - DNA, 15 bp, Homo sapiens
tttctaggttcctct

SEQ ID NO: 1837684 - DNA, 15 bp, Homo sapiens
ttctaggttcctctt

SEQ ID NO: 1837685 - DNA, 15 bp, Homo sapiens
tctaggttcctctta

SEQ ID NO: 1837686 - DNA, 15 bp, Homo sapiens
ctaggttcctcttaa

SEQ ID NO: 1837687 - DNA, 15 bp, Homo sapiens
taggttcctcttaac

SEQ ID NO: 1837688 - DNA, 15 bp, Homo sapiens
aggttcctcttaaca

SEQ ID NO: 1837689 - DNA, 15 bp, Homo sapiens
ggttcctcttaacat

SEQ ID NO: 1837690 - DNA, 15 bp, Homo sapiens
gttcctcttaacatc

SEQ ID NO: 1837691 - DNA, 15 bp, Homo sapiens
ttcctcttaacatct

SEQ ID NO: 1837692 - DNA, 15 bp, Homo sapiens
tcctcttaacatctt

SEQ ID NO: 1837693 - DNA, 15 bp, Homo sapiens
cctcttaacatcttc

SEQ ID NO: 1837694 - DNA, 15 bp, Homo sapiens
ctcttaacatcttcc

SEQ ID NO: 1837695 - DNA, 15 bp, Homo sapiens
tcttaacatcttccc

SEQ ID NO: 1837696 - DNA, 15 bp, Homo sapiens
cttaacatcttccca

SEQ ID NO: 1837697 - DNA, 15 bp, Homo sapiens
ttaacatcttcccaa

SEQ ID NO: 1837698 - DNA, 15 bp, Homo sapiens
taacatcttcccaag

SEQ ID NO: 1837699 - DNA, 15 bp, Homo sapiens
aacatcttcccaagc

SEQ ID NO: 1837700 - DNA, 15 bp, Homo sapiens
acatcttcccaagct

SEQ ID NO: 1837701 - DNA, 15 bp, Homo sapiens
catcttcccaagctc

SEQ ID NO: 1837702 - DNA, 15 bp, Homo sapiens
atcttcccaagctct

SEQ ID NO: 1837703 - DNA, 15 bp, Homo sapiens
tcttcccaagctctc

SEQ ID NO: 1837704 - DNA, 15 bp, Homo sapiens
cttcccaagctctcc

SEQ ID NO: 1837705 - DNA, 15 bp, Homo sapiens
ttcccaagctctcca

SEQ ID NO: 1837706 - DNA, 15 bp, Homo sapiens
tcccaagctctccac

SEQ ID NO: 1837707 - DNA, 15 bp, Homo sapiens
cccaagctctccaca

SEQ ID NO: 1837708 - DNA, 15 bp, Homo sapiens
ccaagctctccacac

SEQ ID NO: 1837709 - DNA, 15 bp, Homo sapiens
caagctctccacacc

SEQ ID NO: 1837710 - DNA, 15 bp, Homo sapiens
aagctctccacaccc

SEQ ID NO: 1837711 - DNA, 15 bp, Homo sapiens
agctctccacaccca

SEQ ID NO: 1837712 - DNA, 15 bp, Homo sapiens
gctctccacacccag

SEQ ID NO: 1837713 - DNA, 15 bp, Homo sapiens
ctctccacacccagc

SEQ ID NO: 1837714 - DNA, 15 bp, Homo sapiens
tctccacacccagcc

SEQ ID NO: 1837715 - DNA, 15 bp, Homo sapiens
ctccacacccagcca

SEQ ID NO: 1837716 - DNA, 15 bp, Homo sapiens
tccacacccagccac

SEQ ID NO: 1837717 - DNA, 15 bp, Homo sapiens
ccacacccagccact

SEQ ID NO: 1837718 - DNA, 15 bp, Homo sapiens
cacacccagccactt

SEQ ID NO: 1837719 - DNA, 15 bp, Homo sapiens
acacccagccactta

SEQ ID NO: 1837720 - DNA, 15 bp, Homo sapiens
cacccagccacttag

SEQ ID NO: 1837721 - DNA, 15 bp, Homo sapiens
acccagccacttagg

SEQ ID NO: 1837722 - DNA, 15 bp, Homo sapiens
cccagccacttagga

SEQ ID NO: 1837723 - DNA, 15 bp, Homo sapiens
ccagccacttaggac

SEQ ID NO: 1837724 - DNA, 15 bp, Homo sapiens
cagccacttaggact

SEQ ID NO: 1837725 - DNA, 15 bp, Homo sapiens
agccacttaggactt

SEQ ID NO: 1837726 - DNA, 15 bp, Homo sapiens
gccacttaggacttc

SEQ ID NO: 1837727 - DNA, 15 bp, Homo sapiens
ccacttaggacttcc

SEQ ID NO: 1837728 - DNA, 15 bp, Homo sapiens
cacttaggacttcct

SEQ ID NO: 1837729 - DNA, 15 bp, Homo sapiens
acttaggacttcctt

SEQ ID NO: 1837730 - DNA, 15 bp, Homo sapiens
cttaggacttccttc

SEQ ID NO: 1837731 - DNA, 15 bp, Homo sapiens
ttaggacttccttca

SEQ ID NO: 1837732 - DNA, 15 bp, Homo sapiens
taggacttccttcat

SEQ ID NO: 1837733 - DNA, 15 bp, Homo sapiens
aggacttccttcatt

SEQ ID NO: 1837734 - DNA, 15 bp, Homo sapiens
ggacttccttcattt

SEQ ID NO: 1837735 - DNA, 15 bp, Homo sapiens
gacttccttcatttc

SEQ ID NO: 1837736 - DNA, 15 bp, Homo sapiens
acttccttcatttcg

SEQ ID NO: 1837737 - DNA, 15 bp, Homo sapiens
cttccttcatttcgt

SEQ ID NO: 1837738 - DNA, 15 bp, Homo sapiens
ttccttcatttcgtt

SEQ ID NO: 1837739 - DNA, 15 bp, Homo sapiens
tccttcatttcgtta

SEQ ID NO: 1837740 - DNA, 15 bp, Homo sapiens
ccttcatttcgttaa

SEQ ID NO: 1837741 - DNA, 15 bp, Homo sapiens
cttcatttcgttaaa

SEQ ID NO: 1837742 - DNA, 15 bp, Homo sapiens
ttcatttcgttaaac

SEQ ID NO: 1837743 - DNA, 15 bp, Homo sapiens
tcatttcgttaaacc

SEQ ID NO: 1837744 - DNA, 15 bp, Homo sapiens
catttcgttaaacct

SEQ ID NO: 1837745 - DNA, 15 bp, Homo sapiens
atttcgttaaacctt

SEQ ID NO: 1837746 - DNA, 15 bp, Homo sapiens
tttcgttaaaccttt

SEQ ID NO: 1837747 - DNA, 15 bp, Homo sapiens
ttcgttaaacctttt

SEQ ID NO: 1837748 - DNA, 15 bp, Homo sapiens
tcgttaaaccttttg

SEQ ID NO: 1837749 - DNA, 15 bp, Homo sapiens
cgttaaaccttttga

SEQ ID NO: 1837750 - DNA, 15 bp, Homo sapiens
gttaaaccttttgat

SEQ ID NO: 1837751 - DNA, 15 bp, Homo sapiens
ttaaaccttttgatt

SEQ ID NO: 1837752 - DNA, 15 bp, Homo sapiens
taaaccttttgattt

SEQ ID NO: 1837753 - DNA, 15 bp, Homo sapiens
aaaccttttgatttt

SEQ ID NO: 1837754 - DNA, 15 bp, Homo sapiens
aaccttttgattttt

SEQ ID NO: 1837755 - DNA, 15 bp, Homo sapiens
accttttgattttta

SEQ ID NO: 1837756 - DNA, 15 bp, Homo sapiens
ccttttgatttttac

SEQ ID NO: 1837757 - DNA, 15 bp, Homo sapiens
cttttgatttttacc

SEQ ID NO: 1837758 - DNA, 15 bp, Homo sapiens
ttttgatttttacct

SEQ ID NO: 1837759 - DNA, 15 bp, Homo sapiens
tttgatttttacctc

SEQ ID NO: 1837760 - DNA, 15 bp, Homo sapiens
ttgatttttacctct

SEQ ID NO: 1837761 - DNA, 15 bp, Homo sapiens
tgatttttacctctg

SEQ ID NO: 1837762 - DNA, 15 bp, Homo sapiens
gatttttacctctgg

SEQ ID NO: 1837763 - DNA, 15 bp, Homo sapiens
atttttacctctggg

SEQ ID NO: 1837764 - DNA, 15 bp, Homo sapiens
tttttacctctgggc

SEQ ID NO: 1837765 - DNA, 15 bp, Homo sapiens
ttttacctctgggcc

SEQ ID NO: 1837766 - DNA, 15 bp, Homo sapiens
tttacctctgggcct

SEQ ID NO: 1837767 - DNA, 15 bp, Homo sapiens
ttacctctgggcctt

SEQ ID NO: 1837768 - DNA, 15 bp, Homo sapiens
tacctctgggccttc

SEQ ID NO: 1837769 - DNA, 15 bp, Homo sapiens
acctctgggccttca

SEQ ID NO: 1837770 - DNA, 15 bp, Homo sapiens
cctctgggccttcac

SEQ ID NO: 1837771 - DNA, 15 bp, Homo sapiens
ctctgggccttcaca

SEQ ID NO: 1837772 - DNA, 15 bp, Homo sapiens
tctgggccttcacac

SEQ ID NO: 1837773 - DNA, 15 bp, Homo sapiens
ctgggccttcacaca

SEQ ID NO: 1837774 - DNA, 15 bp, Homo sapiens
tgggccttcacacat

SEQ ID NO: 1837775 - DNA, 15 bp, Homo sapiens
gggccttcacacatg

SEQ ID NO: 1837776 - DNA, 15 bp, Homo sapiens
ggccttcacacatgc

SEQ ID NO: 1837777 - DNA, 15 bp, Homo sapiens
gccttcacacatgct

SEQ ID NO: 1837778 - DNA, 15 bp, Homo sapiens
ccttcacacatgctg

SEQ ID NO: 1837779 - DNA, 15 bp, Homo sapiens
cttcacacatgctgt

SEQ ID NO: 1837780 - DNA, 15 bp, Homo sapiens
ttcacacatgctgtt

SEQ ID NO: 1837781 - DNA, 15 bp, Homo sapiens
tcacacatgctgttc

SEQ ID NO: 1837782 - DNA, 15 bp, Homo sapiens
cacacatgctgttca

SEQ ID NO: 1837783 - DNA, 15 bp, Homo sapiens
acacatgctgttcac

SEQ ID NO: 1837784 - DNA, 15 bp, Homo sapiens
cacatgctgttcaca

SEQ ID NO: 1837785 - DNA, 15 bp, Homo sapiens
acatgctgttcacac

SEQ ID NO: 1837786 - DNA, 15 bp, Homo sapiens
catgctgttcacact

SEQ ID NO: 1837787 - DNA, 15 bp, Homo sapiens
atgctgttcacactg

SEQ ID NO: 1837788 - DNA, 15 bp, Homo sapiens
tgctgttcacactgc

SEQ ID NO: 1837789 - DNA, 15 bp, Homo sapiens
gctgttcacactgcc

SEQ ID NO: 1837790 - DNA, 15 bp, Homo sapiens
ctgttcacactgccg

SEQ ID NO: 1837791 - DNA, 15 bp, Homo sapiens
tgttcacactgccgg

SEQ ID NO: 1837792 - DNA, 15 bp, Homo sapiens
gttcacactgccgga

SEQ ID NO: 1837793 - DNA, 15 bp, Homo sapiens
ttcacactgccggac

SEQ ID NO: 1837794 - DNA, 15 bp, Homo sapiens
tcacactgccggact

SEQ ID NO: 1837795 - DNA, 15 bp, Homo sapiens
cacactgccggactt

SEQ ID NO: 1837796 - DNA, 15 bp, Homo sapiens
acactgccggacttc

SEQ ID NO: 1837797 - DNA, 15 bp, Homo sapiens
cactgccggacttct

SEQ ID NO: 1837798 - DNA, 15 bp, Homo sapiens
actgccggacttctc

SEQ ID NO: 1837799 - DNA, 15 bp, Homo sapiens
ctgccggacttctct

SEQ ID NO: 1837800 - DNA, 15 bp, Homo sapiens
tgccggacttctctt

SEQ ID NO: 1837801 - DNA, 15 bp, Homo sapiens
gccggacttctcttt

SEQ ID NO: 1837802 - DNA, 15 bp, Homo sapiens
ccggacttctctttt

SEQ ID NO: 1837803 - DNA, 15 bp, Homo sapiens
cggacttctcttttc

SEQ ID NO: 1837804 - DNA, 15 bp, Homo sapiens
ggacttctcttttct

SEQ ID NO: 1837805 - DNA, 15 bp, Homo sapiens
gacttctcttttctt

SEQ ID NO: 1837806 - DNA, 15 bp, Homo sapiens
acttctcttttcttg

SEQ ID NO: 1837807 - DNA, 15 bp, Homo sapiens
cttctcttttcttgt

SEQ ID NO: 1837808 - DNA, 15 bp, Homo sapiens
ttctcttttcttgtc

SEQ ID NO: 1837809 - DNA, 15 bp, Homo sapiens
tctcttttcttgtcc

SEQ ID NO: 1837810 - DNA, 15 bp, Homo sapiens
ctcttttcttgtcct

SEQ ID NO: 1837811 - DNA, 15 bp, Homo sapiens
tcttttcttgtcctc

SEQ ID NO: 1837812 - DNA, 15 bp, Homo sapiens
cttttcttgtcctcc

SEQ ID NO: 1837813 - DNA, 15 bp, Homo sapiens
ttttcttgtcctcct

SEQ ID NO: 1837814 - DNA, 15 bp, Homo sapiens
tttcttgtcctcctt

SEQ ID NO: 1837815 - DNA, 15 bp, Homo sapiens
ttcttgtcctccttc

SEQ ID NO: 1837816 - DNA, 15 bp, Homo sapiens
tcttgtcctccttct

SEQ ID NO: 1837817 - DNA, 15 bp, Homo sapiens
cttgtcctccttctc

SEQ ID NO: 1837818 - DNA, 15 bp, Homo sapiens
ttgtcctccttctcc

SEQ ID NO: 1837819 - DNA, 15 bp, Homo sapiens
tgtcctccttctccc

SEQ ID NO: 1837820 - DNA, 15 bp, Homo sapiens
gtcctccttctcccc

SEQ ID NO: 1837821 - DNA, 15 bp, Homo sapiens
tcctccttctcccct

SEQ ID NO: 1837822 - DNA, 15 bp, Homo sapiens
cctccttctcccctt

SEQ ID NO: 1837823 - DNA, 15 bp, Homo sapiens
ctccttctccccttc

SEQ ID NO: 1837824 - DNA, 15 bp, Homo sapiens
tccttctccccttcc

SEQ ID NO: 1837825 - DNA, 15 bp, Homo sapiens
ccttctccccttcca

SEQ ID NO: 1837826 - DNA, 15 bp, Homo sapiens
cttctccccttccac

SEQ ID NO: 1837827 - DNA, 15 bp, Homo sapiens
ttctccccttccact

SEQ ID NO: 1837828 - DNA, 15 bp, Homo sapiens
tctccccttccactt

SEQ ID NO: 1837829 - DNA, 15 bp, Homo sapiens
ctccccttccactta

SEQ ID NO: 1837830 - DNA, 15 bp, Homo sapiens
tccccttccacttag

SEQ ID NO: 1837831 - DNA, 15 bp, Homo sapiens
ccccttccacttagc

SEQ ID NO: 1837832 - DNA, 15 bp, Homo sapiens
cccttccacttagct

SEQ ID NO: 1837833 - DNA, 15 bp, Homo sapiens
ccttccacttagctg

SEQ ID NO: 1837834 - DNA, 15 bp, Homo sapiens
cttccacttagctga

SEQ ID NO: 1837835 - DNA, 15 bp, Homo sapiens
ttccacttagctgac

SEQ ID NO: 1837836 - DNA, 15 bp, Homo sapiens
tccacttagctgact

SEQ ID NO: 1837837 - DNA, 15 bp, Homo sapiens
ccacttagctgactc

SEQ ID NO: 1837838 - DNA, 15 bp, Homo sapiens
cacttagctgactcc

SEQ ID NO: 1837839 - DNA, 15 bp, Homo sapiens
acttagctgactcct

SEQ ID NO: 1837840 - DNA, 15 bp, Homo sapiens
cttagctgactcctg

SEQ ID NO: 1837841 - DNA, 15 bp, Homo sapiens
ttagctgactcctgt

SEQ ID NO: 1837842 - DNA, 15 bp, Homo sapiens
tagctgactcctgtt

SEQ ID NO: 1837843 - DNA, 15 bp, Homo sapiens
agctgactcctgttt

SEQ ID NO: 1837844 - DNA, 15 bp, Homo sapiens
gctgactcctgttta

SEQ ID NO: 1837845 - DNA, 15 bp, Homo sapiens
ctgactcctgtttat

SEQ ID NO: 1837846 - DNA, 15 bp, Homo sapiens
tgactcctgtttatc

SEQ ID NO: 1837847 - DNA, 15 bp, Homo sapiens
gactcctgtttatcc

SEQ ID NO: 1837848 - DNA, 15 bp, Homo sapiens
actcctgtttatcca

SEQ ID NO: 1837849 - DNA, 15 bp, Homo sapiens
ctcctgtttatccag

SEQ ID NO: 1837850 - DNA, 15 bp, Homo sapiens
tcctgtttatccagg

SEQ ID NO: 1837851 - DNA, 15 bp, Homo sapiens
cctgtttatccaggg

SEQ ID NO: 1837852 - DNA, 15 bp, Homo sapiens
ctgtttatccaggga

SEQ ID NO: 1837853 - DNA, 15 bp, Homo sapiens
tgtttatccagggat

SEQ ID NO: 1837854 - DNA, 15 bp, Homo sapiens
gtttatccagggatg

SEQ ID NO: 1837855 - DNA, 15 bp, Homo sapiens
tttatccagggatgt

SEQ ID NO: 1837856 - DNA, 15 bp, Homo sapiens
ttatccagggatgtg

SEQ ID NO: 1837857 - DNA, 15 bp, Homo sapiens
tatccagggatgtgc

SEQ ID NO: 1837858 - DNA, 15 bp, Homo sapiens
atccagggatgtgct

SEQ ID NO: 1837859 - DNA, 15 bp, Homo sapiens
tccagggatgtgctg

SEQ ID NO: 1837860 - DNA, 15 bp, Homo sapiens
ccagggatgtgctgg

SEQ ID NO: 1837861 - DNA, 15 bp, Homo sapiens
cagggatgtgctggt

SEQ ID NO: 1837862 - DNA, 15 bp, Homo sapiens
agggatgtgctggta

SEQ ID NO: 1837863 - DNA, 15 bp, Homo sapiens
gggatgtgctggtaa

SEQ ID NO: 1837864 - DNA, 15 bp, Homo sapiens
ggatgtgctggtaag

SEQ ID NO: 1837865 - DNA, 15 bp, Homo sapiens
gatgtgctggtaagt

SEQ ID NO: 1837866 - DNA, 15 bp, Homo sapiens
atgtgctggtaagtg

SEQ ID NO: 1837867 - DNA, 15 bp, Homo sapiens
tgtgctggtaagtga

SEQ ID NO: 1837868 - DNA, 15 bp, Homo sapiens
gtgctggtaagtgat

SEQ ID NO: 1837869 - DNA, 15 bp, Homo sapiens
tgctggtaagtgatt

SEQ ID NO: 1837870 - DNA, 15 bp, Homo sapiens
gctggtaagtgatta

SEQ ID NO: 1837871 - DNA, 15 bp, Homo sapiens
ctggtaagtgattaa

SEQ ID NO: 1837872 - DNA, 15 bp, Homo sapiens
tggtaagtgattaac

SEQ ID NO: 1837873 - DNA, 15 bp, Homo sapiens
ggtaagtgattaaca

SEQ ID NO: 1837874 - DNA, 15 bp, Homo sapiens
gtaagtgattaacaa

SEQ ID NO: 1837875 - DNA, 15 bp, Homo sapiens
taagtgattaacaac

SEQ ID NO: 1837876 - DNA, 15 bp, Homo sapiens
aagtgattaacaacg

SEQ ID NO: 1837877 - DNA, 15 bp, Homo sapiens
agtgattaacaacgg

SEQ ID NO: 1837878 - DNA, 15 bp, Homo sapiens
gtgattaacaacggg

SEQ ID NO: 1837879 - DNA, 15 bp, Homo sapiens
tgattaacaacggga

SEQ ID NO: 1837880 - DNA, 15 bp, Homo sapiens
gattaacaacgggat

SEQ ID NO: 1837881 - DNA, 15 bp, Homo sapiens
attaacaacgggatt

SEQ ID NO: 1837882 - DNA, 15 bp, Homo sapiens
ttaacaacgggattt

SEQ ID NO: 1837883 - DNA, 15 bp, Homo sapiens
taacaacgggatttc

SEQ ID NO: 1837884 - DNA, 15 bp, Homo sapiens
aacaacgggatttct

SEQ ID NO: 1837885 - DNA, 15 bp, Homo sapiens
acaacgggatttcta

SEQ ID NO: 1837886 - DNA, 15 bp, Homo sapiens
caacgggatttctag

SEQ ID NO: 1837887 - DNA, 15 bp, Homo sapiens
aacgggatttctaga

SEQ ID NO: 1837888 - DNA, 15 bp, Homo sapiens
acgggatttctagag

SEQ ID NO: 1837889 - DNA, 15 bp, Homo sapiens
cgggatttctagaga

SEQ ID NO: 1837890 - DNA, 15 bp, Homo sapiens
gggatttctagagaa

SEQ ID NO: 1837891 - DNA, 15 bp, Homo sapiens
ggatttctagagaag

SEQ ID NO: 1837892 - DNA, 15 bp, Homo sapiens
gatttctagagaaga

SEQ ID NO: 1837893 - DNA, 15 bp, Homo sapiens
atttctagagaagaa

SEQ ID NO: 1837894 - DNA, 15 bp, Homo sapiens
tttctagagaagaaa

SEQ ID NO: 1837895 - DNA, 15 bp, Homo sapiens
ttctagagaagaaag

SEQ ID NO: 1837896 - DNA, 15 bp, Homo sapiens
tctagagaagaaagt

SEQ ID NO: 1837897 - DNA, 15 bp, Homo sapiens
ctagagaagaaagtc

SEQ ID NO: 1837898 - DNA, 15 bp, Homo sapiens
tagagaagaaagtcc

SEQ ID NO: 1837899 - DNA, 15 bp, Homo sapiens
agagaagaaagtccc

SEQ ID NO: 1837900 - DNA, 15 bp, Homo sapiens
gagaagaaagtccct

SEQ ID NO: 1837901 - DNA, 15 bp, Homo sapiens
agaagaaagtcccta

SEQ ID NO: 1837902 - DNA, 15 bp, Homo sapiens
gaagaaagtccctat

SEQ ID NO: 1837903 - DNA, 15 bp, Homo sapiens
aagaaagtccctatg

SEQ ID NO: 1837904 - DNA, 15 bp, Homo sapiens
agaaagtccctatgt

SEQ ID NO: 1837905 - DNA, 15 bp, Homo sapiens
gaaagtccctatgta

SEQ ID NO: 1837906 - DNA, 15 bp, Homo sapiens
aaagtccctatgtac

SEQ ID NO: 1837907 - DNA, 15 bp, Homo sapiens
aagtccctatgtacg

SEQ ID NO: 1837908 - DNA, 15 bp, Homo sapiens
agtccctatgtacgg

SEQ ID NO: 1837909 - DNA, 15 bp, Homo sapiens
gtccctatgtacggt

SEQ ID NO: 1837910 - DNA, 15 bp, Homo sapiens
tccctatgtacggtg

SEQ ID NO: 1837911 - DNA, 15 bp, Homo sapiens
ccctatgtacggtgt

SEQ ID NO: 1837912 - DNA, 15 bp, Homo sapiens
cctatgtacggtgtt

SEQ ID NO: 1837913 - DNA, 15 bp, Homo sapiens
ctatgtacggtgttc

SEQ ID NO: 1837914 - DNA, 15 bp, Homo sapiens
tatgtacggtgttcg

SEQ ID NO: 1837915 - DNA, 15 bp, Homo sapiens
atgtacggtgttcgt

SEQ ID NO: 1837916 - DNA, 15 bp, Homo sapiens
tgtacggtgttcgtc

SEQ ID NO: 1837917 - DNA, 15 bp, Homo sapiens
gtacggtgttcgtca

SEQ ID NO: 1837918 - DNA, 15 bp, Homo sapiens
tacggtgttcgtcaa

SEQ ID NO: 1837919 - DNA, 15 bp, Homo sapiens
acggtgttcgtcaat

SEQ ID NO: 1837920 - DNA, 15 bp, Homo sapiens
cggtgttcgtcaatt

SEQ ID NO: 1837921 - DNA, 15 bp, Homo sapiens
ggtgttcgtcaattc

SEQ ID NO: 1837922 - DNA, 15 bp, Homo sapiens
gtgttcgtcaattcc

SEQ ID NO: 1837923 - DNA, 15 bp, Homo sapiens
tgttcgtcaattcct

SEQ ID NO: 1837924 - DNA, 15 bp, Homo sapiens
gttcgtcaattccta

SEQ ID NO: 1837925 - DNA, 15 bp, Homo sapiens
ttcgtcaattcctat

SEQ ID NO: 1837926 - DNA, 15 bp, Homo sapiens
tcgtcaattcctatg

SEQ ID NO: 1837927 - DNA, 15 bp, Homo sapiens
cgtcaattcctatgg

SEQ ID NO: 1837928 - DNA, 15 bp, Homo sapiens
gtcaattcctatggt

SEQ ID NO: 1837929 - DNA, 15 bp, Homo sapiens
tcaattcctatggta

SEQ ID NO: 1837930 - DNA, 15 bp, Homo sapiens
caattcctatggtat

SEQ ID NO: 1837931 - DNA, 15 bp, Homo sapiens
aattcctatggtata

SEQ ID NO: 1837932 - DNA, 15 bp, Homo sapiens
attcctatggtataa

SEQ ID NO: 1837933 - DNA, 15 bp, Homo sapiens
ttcctatggtataaa

SEQ ID NO: 1837934 - DNA, 15 bp, Homo sapiens
tcctatggtataaat

SEQ ID NO: 1837935 - DNA, 15 bp, Homo sapiens
cctatggtataaata

SEQ ID NO: 1837936 - DNA, 15 bp, Homo sapiens
ctatggtataaatat

SEQ ID NO: 1837937 - DNA, 15 bp, Homo sapiens
tatggtataaatatt

SEQ ID NO: 1837938 - DNA, 15 bp, Homo sapiens
atggtataaatattc

SEQ ID NO: 1837939 - DNA, 15 bp, Homo sapiens
tggtataaatattcc

SEQ ID NO: 1837940 - DNA, 15 bp, Homo sapiens
ggtataaatattcct

SEQ ID NO: 1837941 - DNA, 15 bp, Homo sapiens
gtataaatattcctg

SEQ ID NO: 1837942 - DNA, 15 bp, Homo sapiens
tataaatattcctgc

SEQ ID NO: 1837943 - DNA, 15 bp, Homo sapiens
ataaatattcctgcc

SEQ ID NO: 1837944 - DNA, 15 bp, Homo sapiens
taaatattcctgccc

SEQ ID NO: 1837945 - DNA, 15 bp, Homo sapiens
aaatattcctgccct

SEQ ID NO: 1837946 - DNA, 15 bp, Homo sapiens
aatattcctgccctg

SEQ ID NO: 1837947 - DNA, 15 bp, Homo sapiens
atattcctgccctgg

SEQ ID NO: 1837948 - DNA, 15 bp, Homo sapiens
tattcctgccctggc

SEQ ID NO: 1837949 - DNA, 15 bp, Homo sapiens
attcctgccctggct

SEQ ID NO: 1837950 - DNA, 15 bp, Homo sapiens
ttcctgccctggctg

SEQ ID NO: 1837951 - DNA, 15 bp, Homo sapiens
tcctgccctggctgg

SEQ ID NO: 1837952 - DNA, 15 bp, Homo sapiens
cctgccctggctggt

SEQ ID NO: 1837953 - DNA, 15 bp, Homo sapiens
ctgccctggctggtt

SEQ ID NO: 1837954 - DNA, 15 bp, Homo sapiens
tgccctggctggttt

SEQ ID NO: 1837955 - DNA, 15 bp, Homo sapiens
gccctggctggtttg

SEQ ID NO: 1837956 - DNA, 15 bp, Homo sapiens
ccctggctggtttga

SEQ ID NO: 1837957 - DNA, 15 bp, Homo sapiens
cctggctggtttgaa

SEQ ID NO: 1837958 - DNA, 15 bp, Homo sapiens
ctggctggtttgaag

SEQ ID NO: 1837959 - DNA, 15 bp, Homo sapiens
tggctggtttgaaga

SEQ ID NO: 1837960 - DNA, 15 bp, Homo sapiens
ggctggtttgaagat

SEQ ID NO: 1837961 - DNA, 15 bp, Homo sapiens
gctggtttgaagata

SEQ ID NO: 1837962 - DNA, 15 bp, Homo sapiens
ctggtttgaagatac

SEQ ID NO: 1837963 - DNA, 15 bp, Homo sapiens
tggtttgaagatacc

SEQ ID NO: 1837964 - DNA, 15 bp, Homo sapiens
ggtttgaagatacca

SEQ ID NO: 1837965 - DNA, 15 bp, Homo sapiens
gtttgaagataccag

SEQ ID NO: 1837966 - DNA, 15 bp, Homo sapiens
tttgaagataccagt

SEQ ID NO: 1837967 - DNA, 15 bp, Homo sapiens
ttgaagataccagtg

SEQ ID NO: 1837968 - DNA, 15 bp, Homo sapiens
tgaagataccagtgt

SEQ ID NO: 1837969 - DNA, 15 bp, Homo sapiens
gaagataccagtgtg

SEQ ID NO: 1837970 - DNA, 15 bp, Homo sapiens
aagataccagtgtga

SEQ ID NO: 1837971 - DNA, 15 bp, Homo sapiens
agataccagtgtgat

SEQ ID NO: 1837972 - DNA, 15 bp, Homo sapiens
gataccagtgtgatg

SEQ ID NO: 1837973 - DNA, 15 bp, Homo sapiens
ataccagtgtgatgt

SEQ ID NO: 1837974 - DNA, 15 bp, Homo sapiens
taccagtgtgatgtc

SEQ ID NO: 1837975 - DNA, 15 bp, Homo sapiens
accagtgtgatgtca

SEQ ID NO: 1837976 - DNA, 15 bp, Homo sapiens
ccagtgtgatgtcac

SEQ ID NO: 1837977 - DNA, 15 bp, Homo sapiens
cagtgtgatgtcaca

SEQ ID NO: 1837978 - DNA, 15 bp, Homo sapiens
agtgtgatgtcacag

SEQ ID NO: 1837979 - DNA, 15 bp, Homo sapiens
gtgtgatgtcacaga

SEQ ID NO: 1837980 - DNA, 15 bp, Homo sapiens
tgtgatgtcacagaa

SEQ ID NO: 1837981 - DNA, 15 bp, Homo sapiens
gtgatgtcacagaac

SEQ ID NO: 1837982 - DNA, 15 bp, Homo sapiens
tgatgtcacagaaca

SEQ ID NO: 1837983 - DNA, 15 bp, Homo sapiens
gatgtcacagaacat

SEQ ID NO: 1837984 - DNA, 15 bp, Homo sapiens
atgtcacagaacata

SEQ ID NO: 1837985 - DNA, 15 bp, Homo sapiens
tgtcacagaacatag

SEQ ID NO: 1837986 - DNA, 15 bp, Homo sapiens
gtcacagaacatagg

SEQ ID NO: 1837987 - DNA, 15 bp, Homo sapiens
tcacagaacataggg

SEQ ID NO: 1837988 - DNA, 15 bp, Homo sapiens
cacagaacatagggt

SEQ ID NO: 1837989 - DNA, 15 bp, Homo sapiens
acagaacatagggta

SEQ ID NO: 1837990 - DNA, 15 bp, Homo sapiens
cagaacatagggtat

SEQ ID NO: 1837991 - DNA, 15 bp, Homo sapiens
agaacatagggtatt

SEQ ID NO: 1837992 - DNA, 15 bp, Homo sapiens
gaacatagggtattg

SEQ ID NO: 1837993 - DNA, 15 bp, Homo sapiens
aacatagggtattgt

SEQ ID NO: 1837994 - DNA, 15 bp, Homo sapiens
acatagggtattgtt

SEQ ID NO: 1837995 - DNA, 15 bp, Homo sapiens
catagggtattgtta

SEQ ID NO: 1837996 - DNA, 15 bp, Homo sapiens
atagggtattgttat

SEQ ID NO: 1837997 - DNA, 15 bp, Homo sapiens
tagggtattgttatc

SEQ ID NO: 1837998 - DNA, 15 bp, Homo sapiens
agggtattgttatcc

SEQ ID NO: 1837999 - DNA, 15 bp, Homo sapiens
gggtattgttatcca

SEQ ID NO: 1838000 - DNA, 15 bp, Homo sapiens
ggtattgttatccat

SEQ ID NO: 1838001 - DNA, 15 bp, Homo sapiens
gtattgttatccatg

SEQ ID NO: 1838002 - DNA, 15 bp, Homo sapiens
tattgttatccatga

SEQ ID NO: 1838003 - DNA, 15 bp, Homo sapiens
attgttatccatgat

SEQ ID NO: 1838004 - DNA, 15 bp, Homo sapiens
ttgttatccatgatt

SEQ ID NO: 1838005 - DNA, 15 bp, Homo sapiens
tgttatccatgattg

SEQ ID NO: 1838006 - DNA, 15 bp, Homo sapiens
gttatccatgattgg

SEQ ID NO: 1838007 - DNA, 15 bp, Homo sapiens
ttatccatgattggc

SEQ ID NO: 1838008 - DNA, 15 bp, Homo sapiens
tatccatgattggca

SEQ ID NO: 1838009 - DNA, 15 bp, Homo sapiens
atccatgattggcag

SEQ ID NO: 1838010 - DNA, 15 bp, Homo sapiens
tccatgattggcagt

SEQ ID NO: 1838011 - DNA, 15 bp, Homo sapiens
ccatgattggcagtt

SEQ ID NO: 1838012 - DNA, 15 bp, Homo sapiens
catgattggcagttg

SEQ ID NO: 1838013 - DNA, 15 bp, Homo sapiens
atgattggcagttgt

SEQ ID NO: 1838014 - DNA, 15 bp, Homo sapiens
tgattggcagttgtg

SEQ ID NO: 1838015 - DNA, 15 bp, Homo sapiens
gattggcagttgtgg

SEQ ID NO: 1838016 - DNA, 15 bp, Homo sapiens
attggcagttgtgga

SEQ ID NO: 1838017 - DNA, 15 bp, Homo sapiens
ttggcagttgtggaa

SEQ ID NO: 1838018 - DNA, 15 bp, Homo sapiens
tggcagttgtggaaa

SEQ ID NO: 1838019 - DNA, 15 bp, Homo sapiens
ggcagttgtggaaac

SEQ ID NO: 1838020 - DNA, 15 bp, Homo sapiens
gcagttgtggaaact

SEQ ID NO: 1838021 - DNA, 15 bp, Homo sapiens
cagttgtggaaactg

SEQ ID NO: 1838022 - DNA, 15 bp, Homo sapiens
agttgtggaaactga

SEQ ID NO: 1838023 - DNA, 15 bp, Homo sapiens
gttgtggaaactgaa

SEQ ID NO: 1838024 - DNA, 15 bp, Homo sapiens
ttgtggaaactgaag

SEQ ID NO: 1838025 - DNA, 15 bp, Homo sapiens
tgtggaaactgaagc

SEQ ID NO: 1838026 - DNA, 15 bp, Homo sapiens
gtggaaactgaagcc

SEQ ID NO: 1838027 - DNA, 15 bp, Homo sapiens
tggaaactgaagccc

SEQ ID NO: 1838028 - DNA, 15 bp, Homo sapiens
ggaaactgaagccca

SEQ ID NO: 1838029 - DNA, 15 bp, Homo sapiens
gaaactgaagcccag

SEQ ID NO: 1838030 - DNA, 15 bp, Homo sapiens
aaactgaagcccaga

SEQ ID NO: 1838031 - DNA, 15 bp, Homo sapiens
aactgaagcccagag

SEQ ID NO: 1838032 - DNA, 15 bp, Homo sapiens
actgaagcccagagc

SEQ ID NO: 1838033 - DNA, 15 bp, Homo sapiens
ctgaagcccagagca

SEQ ID NO: 1838034 - DNA, 15 bp, Homo sapiens
tgaagcccagagcag

SEQ ID NO: 1838035 - DNA, 15 bp, Homo sapiens
gaagcccagagcagt

SEQ ID NO: 1838036 - DNA, 15 bp, Homo sapiens
aagcccagagcagtt

SEQ ID NO: 1838037 - DNA, 15 bp, Homo sapiens
agcccagagcagttc

SEQ ID NO: 1838038 - DNA, 15 bp, Homo sapiens
gcccagagcagttca

SEQ ID NO: 1838039 - DNA, 15 bp, Homo sapiens
cccagagcagttcag

SEQ ID NO: 1838040 - DNA, 15 bp, Homo sapiens
ccagagcagttcagt

SEQ ID NO: 1838041 - DNA, 15 bp, Homo sapiens
cagagcagttcagtc

SEQ ID NO: 1838042 - DNA, 15 bp, Homo sapiens
agagcagttcagtca

SEQ ID NO: 1838043 - DNA, 15 bp, Homo sapiens
gagcagttcagtcac

SEQ ID NO: 1838044 - DNA, 15 bp, Homo sapiens
agcagttcagtcact

SEQ ID NO: 1838045 - DNA, 15 bp, Homo sapiens
gcagttcagtcactt

SEQ ID NO: 1838046 - DNA, 15 bp, Homo sapiens
cagttcagtcacttt

SEQ ID NO: 1838047 - DNA, 15 bp, Homo sapiens
agttcagtcactttt

SEQ ID NO: 1838048 - DNA, 15 bp, Homo sapiens
gttcagtcacttttc

SEQ ID NO: 1838049 - DNA, 15 bp, Homo sapiens
ttcagtcacttttct

SEQ ID NO: 1838050 - DNA, 15 bp, Homo sapiens
tcagtcacttttctg

SEQ ID NO: 1838051 - DNA, 15 bp, Homo sapiens
cagtcacttttctgg

SEQ ID NO: 1838052 - DNA, 15 bp, Homo sapiens
agtcacttttctggg

SEQ ID NO: 1838053 - DNA, 15 bp, Homo sapiens
gtcacttttctgggt

SEQ ID NO: 1838054 - DNA, 15 bp, Homo sapiens
tcacttttctgggta

SEQ ID NO: 1838055 - DNA, 15 bp, Homo sapiens
cacttttctgggtag

SEQ ID NO: 1838056 - DNA, 15 bp, Homo sapiens
acttttctgggtaga

SEQ ID NO: 1838057 - DNA, 15 bp, Homo sapiens
cttttctgggtagat

SEQ ID NO: 1838058 - DNA, 15 bp, Homo sapiens
ttttctgggtagatc

SEQ ID NO: 1838059 - DNA, 15 bp, Homo sapiens
tttctgggtagatcc

SEQ ID NO: 1838060 - DNA, 15 bp, Homo sapiens
ttctgggtagatccc

SEQ ID NO: 1838061 - DNA, 15 bp, Homo sapiens
tctgggtagatccca

SEQ ID NO: 1838062 - DNA, 15 bp, Homo sapiens
ctgggtagatcccag

SEQ ID NO: 1838063 - DNA, 15 bp, Homo sapiens
tgggtagatcccagg

SEQ ID NO: 1838064 - DNA, 15 bp, Homo sapiens
gggtagatcccaggc

SEQ ID NO: 1838065 - DNA, 15 bp, Homo sapiens
ggtagatcccaggca

SEQ ID NO: 1838066 - DNA, 15 bp, Homo sapiens
gtagatcccaggcag

SEQ ID NO: 1838067 - DNA, 15 bp, Homo sapiens
tagatcccaggcaga

SEQ ID NO: 1838068 - DNA, 15 bp, Homo sapiens
agatcccaggcagat

SEQ ID NO: 1838069 - DNA, 15 bp, Homo sapiens
gatcccaggcagata

SEQ ID NO: 1838070 - DNA, 15 bp, Homo sapiens
atcccaggcagatat

SEQ ID NO: 1838071 - DNA, 15 bp, Homo sapiens
tcccaggcagatatg

SEQ ID NO: 1838072 - DNA, 15 bp, Homo sapiens
cccaggcagatatgg

SEQ ID NO: 1838073 - DNA, 15 bp, Homo sapiens
ccaggcagatatggc

SEQ ID NO: 1838074 - DNA, 15 bp, Homo sapiens
caggcagatatggcc

SEQ ID NO: 1838075 - DNA, 15 bp, Homo sapiens
aggcagatatggcct

SEQ ID NO: 1838076 - DNA, 15 bp, Homo sapiens
ggcagatatggcctc

SEQ ID NO: 1838077 - DNA, 15 bp, Homo sapiens
gcagatatggcctct

SEQ ID NO: 1838078 - DNA, 15 bp, Homo sapiens
cagatatggcctctg

SEQ ID NO: 1838079 - DNA, 15 bp, Homo sapiens
agatatggcctctga

SEQ ID NO: 1838080 - DNA, 15 bp, Homo sapiens
gatatggcctctgat

SEQ ID NO: 1838081 - DNA, 15 bp, Homo sapiens
atatggcctctgata

SEQ ID NO: 1838082 - DNA, 15 bp, Homo sapiens
tatggcctctgatat

SEQ ID NO: 1838083 - DNA, 15 bp, Homo sapiens
atggcctctgatatg

SEQ ID NO: 1838084 - DNA, 15 bp, Homo sapiens
tggcctctgatatgc

SEQ ID NO: 1838085 - DNA, 15 bp, Homo sapiens
ggcctctgatatgct

SEQ ID NO: 1838086 - DNA, 15 bp, Homo sapiens
gcctctgatatgctt

SEQ ID NO: 1838087 - DNA, 15 bp, Homo sapiens
cctctgatatgcttg

SEQ ID NO: 1838088 - DNA, 15 bp, Homo sapiens
ctctgatatgcttgg

SEQ ID NO: 1838089 - DNA, 15 bp, Homo sapiens
tctgatatgcttggc

SEQ ID NO: 1838090 - DNA, 15 bp, Homo sapiens
ctgatatgcttggcc

SEQ ID NO: 1838091 - DNA, 15 bp, Homo sapiens
tgatatgcttggcct

SEQ ID NO: 1838092 - DNA, 15 bp, Homo sapiens
gatatgcttggcctt

SEQ ID NO: 1838093 - DNA, 15 bp, Homo sapiens
atatgcttggccttt

SEQ ID NO: 1838094 - DNA, 15 bp, Homo sapiens
tatgcttggcctttg

SEQ ID NO: 1838095 - DNA, 15 bp, Homo sapiens
atgcttggcctttga

SEQ ID NO: 1838096 - DNA, 15 bp, Homo sapiens
tgcttggcctttgag

SEQ ID NO: 1838097 - DNA, 15 bp, Homo sapiens
gcttggcctttgaga

SEQ ID NO: 1838098 - DNA, 15 bp, Homo sapiens
cttggcctttgagac

SEQ ID NO: 1838099 - DNA, 15 bp, Homo sapiens
ttggcctttgagacc

SEQ ID NO: 1838100 - DNA, 15 bp, Homo sapiens
tggcctttgagacca

SEQ ID NO: 1838101 - DNA, 15 bp, Homo sapiens
ggcctttgagaccat

SEQ ID NO: 1838102 - DNA, 15 bp, Homo sapiens
gcctttgagaccatg

SEQ ID NO: 1838103 - DNA, 15 bp, Homo sapiens
cctttgagaccatgc

SEQ ID NO: 1838104 - DNA, 15 bp, Homo sapiens
ctttgagaccatgct

SEQ ID NO: 1838105 - DNA, 15 bp, Homo sapiens
tttgagaccatgctc

SEQ ID NO: 1838106 - DNA, 15 bp, Homo sapiens
ttgagaccatgctct

SEQ ID NO: 1838107 - DNA, 15 bp, Homo sapiens
tgagaccatgctctt

SEQ ID NO: 1838108 - DNA, 15 bp, Homo sapiens
gagaccatgctcttt

SEQ ID NO: 1838109 - DNA, 15 bp, Homo sapiens
agaccatgctctttc

SEQ ID NO: 1838110 - DNA, 15 bp, Homo sapiens
gaccatgctctttcc

SEQ ID NO: 1838111 - DNA, 15 bp, Homo sapiens
accatgctctttcct

SEQ ID NO: 1838112 - DNA, 15 bp, Homo sapiens
ccatgctctttcctg

SEQ ID NO: 1838113 - DNA, 15 bp, Homo sapiens
catgctctttcctgt

SEQ ID NO: 1838114 - DNA, 15 bp, Homo sapiens
atgctctttcctgtt

SEQ ID NO: 1838115 - DNA, 15 bp, Homo sapiens
tgctctttcctgttc

SEQ ID NO: 1838116 - DNA, 15 bp, Homo sapiens
gctctttcctgttct

SEQ ID NO: 1838117 - DNA, 15 bp, Homo sapiens
ctctttcctgttctc

SEQ ID NO: 1838118 - DNA, 15 bp, Homo sapiens
tctttcctgttctcc

SEQ ID NO: 1838119 - DNA, 15 bp, Homo sapiens
ctttcctgttctcct

SEQ ID NO: 1838120 - DNA, 15 bp, Homo sapiens
tttcctgttctcctg

SEQ ID NO: 1838121 - DNA, 15 bp, Homo sapiens
ttcctgttctcctga

SEQ ID NO: 1838122 - DNA, 15 bp, Homo sapiens
tcctgttctcctgaa

SEQ ID NO: 1838123 - DNA, 15 bp, Homo sapiens
cctgttctcctgaag

SEQ ID NO: 1838124 - DNA, 15 bp, Homo sapiens
ctgttctcctgaaga

SEQ ID NO: 1838125 - DNA, 15 bp, Homo sapiens
tgttctcctgaagaa

SEQ ID NO: 1838126 - DNA, 15 bp, Homo sapiens
gttctcctgaagaac

SEQ ID NO: 1838127 - DNA, 15 bp, Homo sapiens
ttctcctgaagaacc

SEQ ID NO: 1838128 - DNA, 15 bp, Homo sapiens
tctcctgaagaacca

SEQ ID NO: 1838129 - DNA, 15 bp, Homo sapiens
ctcctgaagaaccag

SEQ ID NO: 1838130 - DNA, 15 bp, Homo sapiens
tcctgaagaaccagt

SEQ ID NO: 1838131 - DNA, 15 bp, Homo sapiens
cctgaagaaccagta

SEQ ID NO: 1838132 - DNA, 15 bp, Homo sapiens
ctgaagaaccagtag

SEQ ID NO: 1838133 - DNA, 15 bp, Homo sapiens
tgaagaaccagtagc

SEQ ID NO: 1838134 - DNA, 15 bp, Homo sapiens
gaagaaccagtagct

SEQ ID NO: 1838135 - DNA, 15 bp, Homo sapiens
aagaaccagtagcta

SEQ ID NO: 1838136 - DNA, 15 bp, Homo sapiens
agaaccagtagctat

SEQ ID NO: 1838137 - DNA, 15 bp, Homo sapiens
gaaccagtagctatg

SEQ ID NO: 1838138 - DNA, 15 bp, Homo sapiens
aaccagtagctatga

SEQ ID NO: 1838139 - DNA, 15 bp, Homo sapiens
accagtagctatgag

SEQ ID NO: 1838140 - DNA, 15 bp, Homo sapiens
ccagtagctatgagc

SEQ ID NO: 1838141 - DNA, 15 bp, Homo sapiens
cagtagctatgagca

SEQ ID NO: 1838142 - DNA, 15 bp, Homo sapiens
agtagctatgagcac

SEQ ID NO: 1838143 - DNA, 15 bp, Homo sapiens
gtagctatgagcaca

SEQ ID NO: 1838144 - DNA, 15 bp, Homo sapiens
tagctatgagcacag

SEQ ID NO: 1838145 - DNA, 15 bp, Homo sapiens
agctatgagcacagg

SEQ ID NO: 1838146 - DNA, 15 bp, Homo sapiens
gctatgagcacaggt

SEQ ID NO: 1838147 - DNA, 15 bp, Homo sapiens
ctatgagcacaggta

SEQ ID NO: 1838148 - DNA, 15 bp, Homo sapiens
tatgagcacaggtaa

SEQ ID NO: 1838149 - DNA, 15 bp, Homo sapiens
atgagcacaggtaat

SEQ ID NO: 1838150 - DNA, 15 bp, Homo sapiens
tgagcacaggtaata

SEQ ID NO: 1838151 - DNA, 15 bp, Homo sapiens
gagcacaggtaatat

SEQ ID NO: 1838152 - DNA, 15 bp, Homo sapiens
agcacaggtaatatt

SEQ ID NO: 1838153 - DNA, 15 bp, Homo sapiens
gcacaggtaatattg

SEQ ID NO: 1838154 - DNA, 15 bp, Homo sapiens
cacaggtaatattgc

SEQ ID NO: 1838155 - DNA, 15 bp, Homo sapiens
acaggtaatattgct

SEQ ID NO: 1838156 - DNA, 15 bp, Homo sapiens
caggtaatattgctg

SEQ ID NO: 1838157 - DNA, 15 bp, Homo sapiens
aggtaatattgctgc

SEQ ID NO: 1838158 - DNA, 15 bp, Homo sapiens
ggtaatattgctgct

SEQ ID NO: 1838159 - DNA, 15 bp, Homo sapiens
gtaatattgctgctg

SEQ ID NO: 1838160 - DNA, 15 bp, Homo sapiens
taatattgctgctgg

SEQ ID NO: 1838161 - DNA, 15 bp, Homo sapiens
aatattgctgctggg

SEQ ID NO: 1838162 - DNA, 15 bp, Homo sapiens
atattgctgctgggc

SEQ ID NO: 1838163 - DNA, 15 bp, Homo sapiens
tattgctgctgggcc

SEQ ID NO: 1838164 - DNA, 15 bp, Homo sapiens
attgctgctgggcca

SEQ ID NO: 1838165 - DNA, 15 bp, Homo sapiens
ttgctgctgggccat

SEQ ID NO: 1838166 - DNA, 15 bp, Homo sapiens
tgctgctgggccatc

SEQ ID NO: 1838167 - DNA, 15 bp, Homo sapiens
gctgctgggccatcc

SEQ ID NO: 1838168 - DNA, 15 bp, Homo sapiens
ctgctgggccatcct

SEQ ID NO: 1838169 - DNA, 15 bp, Homo sapiens
tgctgggccatcctg

SEQ ID NO: 1838170 - DNA, 15 bp, Homo sapiens
gctgggccatcctgt

SEQ ID NO: 1838171 - DNA, 15 bp, Homo sapiens
ctgggccatcctgtt

SEQ ID NO: 1838172 - DNA, 15 bp, Homo sapiens
tgggccatcctgttt

SEQ ID NO: 1838173 - DNA, 15 bp, Homo sapiens
gggccatcctgtttc

SEQ ID NO: 1838174 - DNA, 15 bp, Homo sapiens
ggccatcctgtttct

SEQ ID NO: 1838175 - DNA, 15 bp, Homo sapiens
gccatcctgtttctt

SEQ ID NO: 1838176 - DNA, 15 bp, Homo sapiens
ccatcctgtttcttc

SEQ ID NO: 1838177 - DNA, 15 bp, Homo sapiens
catcctgtttcttct

SEQ ID NO: 1838178 - DNA, 15 bp, Homo sapiens
atcctgtttcttcta

SEQ ID NO: 1838179 - DNA, 15 bp, Homo sapiens
tcctgtttcttctag

SEQ ID NO: 1838180 - DNA, 15 bp, Homo sapiens
cctgtttcttctaga

SEQ ID NO: 1838181 - DNA, 15 bp, Homo sapiens
ctgtttcttctagac

SEQ ID NO: 1838182 - DNA, 15 bp, Homo sapiens
tgtttcttctagacg

SEQ ID NO: 1838183 - DNA, 15 bp, Homo sapiens
gtttcttctagacga

SEQ ID NO: 1838184 - DNA, 15 bp, Homo sapiens
tttcttctagacgag

SEQ ID NO: 1838185 - DNA, 15 bp, Homo sapiens
ttcttctagacgagt

SEQ ID NO: 1838186 - DNA, 15 bp, Homo sapiens
tcttctagacgagta

SEQ ID NO: 1838187 - DNA, 15 bp, Homo sapiens
cttctagacgagtag

SEQ ID NO: 1838188 - DNA, 15 bp, Homo sapiens
ttctagacgagtagt

SEQ ID NO: 1838189 - DNA, 15 bp, Homo sapiens
tctagacgagtagtc

SEQ ID NO: 1838190 - DNA, 15 bp, Homo sapiens
ctagacgagtagtct

SEQ ID NO: 1838191 - DNA, 15 bp, Homo sapiens
tagacgagtagtctt

SEQ ID NO: 1838192 - DNA, 15 bp, Homo sapiens
agacgagtagtcttc

SEQ ID NO: 1838193 - DNA, 15 bp, Homo sapiens
gacgagtagtcttcc

SEQ ID NO: 1838194 - DNA, 15 bp, Homo sapiens
acgagtagtcttccc

SEQ ID NO: 1838195 - DNA, 15 bp, Homo sapiens
cgagtagtcttccct

SEQ ID NO: 1838196 - DNA, 15 bp, Homo sapiens
gagtagtcttccctc

SEQ ID NO: 1838197 - DNA, 15 bp, Homo sapiens
agtagtcttccctct

SEQ ID NO: 1838198 - DNA, 15 bp, Homo sapiens
gtagtcttccctctg

SEQ ID NO: 1838199 - DNA, 15 bp, Homo sapiens
tagtcttccctctgc

SEQ ID NO: 1838200 - DNA, 15 bp, Homo sapiens
agtcttccctctgca

SEQ ID NO: 1838201 - DNA, 15 bp, Homo sapiens
gtcttccctctgcat

SEQ ID NO: 1838202 - DNA, 15 bp, Homo sapiens
tcttccctctgcatt

SEQ ID NO: 1838203 - DNA, 15 bp, Homo sapiens
cttccctctgcattt

SEQ ID NO: 1838204 - DNA, 15 bp, Homo sapiens
ttccctctgcatttc

SEQ ID NO: 1838205 - DNA, 15 bp, Homo sapiens
tccctctgcatttct

SEQ ID NO: 1838206 - DNA, 15 bp, Homo sapiens
ccctctgcatttctt

SEQ ID NO: 1838207 - DNA, 15 bp, Homo sapiens
cctctgcatttcttg

SEQ ID NO: 1838208 - DNA, 15 bp, Homo sapiens
ctctgcatttcttga

SEQ ID NO: 1838209 - DNA, 15 bp, Homo sapiens
tctgcatttcttgag

SEQ ID NO: 1838210 - DNA, 15 bp, Homo sapiens
ctgcatttcttgagt

SEQ ID NO: 1838211 - DNA, 15 bp, Homo sapiens
tgcatttcttgagtt

SEQ ID NO: 1838212 - DNA, 15 bp, Homo sapiens
gcatttcttgagttg

SEQ ID NO: 1838213 - DNA, 15 bp, Homo sapiens
catttcttgagttgc

SEQ ID NO: 1838214 - DNA, 15 bp, Homo sapiens
atttcttgagttgct

SEQ ID NO: 1838215 - DNA, 15 bp, Homo sapiens
tttcttgagttgctg

SEQ ID NO: 1838216 - DNA, 15 bp, Homo sapiens
ttcttgagttgctgc

SEQ ID NO: 1838217 - DNA, 15 bp, Homo sapiens
tcttgagttgctgca

SEQ ID NO: 1838218 - DNA, 15 bp, Homo sapiens
cttgagttgctgcag

SEQ ID NO: 1838219 - DNA, 15 bp, Homo sapiens
ttgagttgctgcagg

SEQ ID NO: 1838220 - DNA, 15 bp, Homo sapiens
tgagttgctgcaggc

SEQ ID NO: 1838221 - DNA, 15 bp, Homo sapiens
gagttgctgcaggct

SEQ ID NO: 1838222 - DNA, 15 bp, Homo sapiens
agttgctgcaggctt

SEQ ID NO: 1838223 - DNA, 15 bp, Homo sapiens
gttgctgcaggcttt

SEQ ID NO: 1838224 - DNA, 15 bp, Homo sapiens
ttgctgcaggcttta

SEQ ID NO: 1838225 - DNA, 15 bp, Homo sapiens
tgctgcaggctttac

SEQ ID NO: 1838226 - DNA, 15 bp, Homo sapiens
gctgcaggctttacc

SEQ ID NO: 1838227 - DNA, 15 bp, Homo sapiens
ctgcaggctttacct

SEQ ID NO: 1838228 - DNA, 15 bp, Homo sapiens
tgcaggctttacctt

SEQ ID NO: 1838229 - DNA, 15 bp, Homo sapiens
gcaggctttacctta

SEQ ID NO: 1838230 - DNA, 15 bp, Homo sapiens
caggctttaccttat

SEQ ID NO: 1838231 - DNA, 15 bp, Homo sapiens
aggctttaccttatg

SEQ ID NO: 1838232 - DNA, 15 bp, Homo sapiens
ggctttaccttatgc

SEQ ID NO: 1838233 - DNA, 15 bp, Homo sapiens
gctttaccttatgct

SEQ ID NO: 1838234 - DNA, 15 bp, Homo sapiens
ctttaccttatgctt

SEQ ID NO: 1838235 - DNA, 15 bp, Homo sapiens
tttaccttatgctta

SEQ ID NO: 1838236 - DNA, 15 bp, Homo sapiens
ttaccttatgcttac

SEQ ID NO: 1838237 - DNA, 15 bp, Homo sapiens
taccttatgcttacc

SEQ ID NO: 1838238 - DNA, 15 bp, Homo sapiens
accttatgcttacca

SEQ ID NO: 1838239 - DNA, 15 bp, Homo sapiens
ccttatgcttaccat

SEQ ID NO: 1838240 - DNA, 15 bp, Homo sapiens
cttatgcttaccata

SEQ ID NO: 1838241 - DNA, 15 bp, Homo sapiens
ttatgcttaccatac

SEQ ID NO: 1838242 - DNA, 15 bp, Homo sapiens
tatgcttaccatacc

SEQ ID NO: 1838243 - DNA, 15 bp, Homo sapiens
atgcttaccatacct

SEQ ID NO: 1838244 - DNA, 15 bp, Homo sapiens
tgcttaccatacctg

SEQ ID NO: 1838245 - DNA, 15 bp, Homo sapiens
gcttaccatacctgg

SEQ ID NO: 1838246 - DNA, 15 bp, Homo sapiens
cttaccatacctggc

SEQ ID NO: 1838247 - DNA, 15 bp, Homo sapiens
ttaccatacctggcc

SEQ ID NO: 1838248 - DNA, 15 bp, Homo sapiens
taccatacctggcca

SEQ ID NO: 1838249 - DNA, 15 bp, Homo sapiens
accatacctggccag

SEQ ID NO: 1838250 - DNA, 15 bp, Homo sapiens
ccatacctggccagt

SEQ ID NO: 1838251 - DNA, 15 bp, Homo sapiens
catacctggccagtt

SEQ ID NO: 1838252 - DNA, 15 bp, Homo sapiens
atacctggccagttg

SEQ ID NO: 1838253 - DNA, 15 bp, Homo sapiens
tacctggccagttgc

SEQ ID NO: 1838254 - DNA, 15 bp, Homo sapiens
acctggccagttgcc

SEQ ID NO: 1838255 - DNA, 15 bp, Homo sapiens
cctggccagttgcca

SEQ ID NO: 1838256 - DNA, 15 bp, Homo sapiens
ctggccagttgccag

SEQ ID NO: 1838257 - DNA, 15 bp, Homo sapiens
tggccagttgccagt

SEQ ID NO: 1838258 - DNA, 15 bp, Homo sapiens
ggccagttgccagtt

SEQ ID NO: 1838259 - DNA, 15 bp, Homo sapiens
gccagttgccagtta

SEQ ID NO: 1838260 - DNA, 15 bp, Homo sapiens
ccagttgccagttac

SEQ ID NO: 1838261 - DNA, 15 bp, Homo sapiens
cagttgccagttacc

SEQ ID NO: 1838262 - DNA, 15 bp, Homo sapiens
agttgccagttacca

SEQ ID NO: 1838263 - DNA, 15 bp, Homo sapiens
gttgccagttaccac

SEQ ID NO: 1838264 - DNA, 15 bp, Homo sapiens
ttgccagttaccaca

SEQ ID NO: 1838265 - DNA, 15 bp, Homo sapiens
tgccagttaccacac

SEQ ID NO: 1838266 - DNA, 15 bp, Homo sapiens
gccagttaccacacc

SEQ ID NO: 1838267 - DNA, 15 bp, Homo sapiens
ccagttaccacacca

SEQ ID NO: 1838268 - DNA, 15 bp, Homo sapiens
cagttaccacaccac

SEQ ID NO: 1838269 - DNA, 15 bp, Homo sapiens
agttaccacaccacg

SEQ ID NO: 1838270 - DNA, 15 bp, Homo sapiens
gttaccacaccacgc

SEQ ID NO: 1838271 - DNA, 15 bp, Homo sapiens
ttaccacaccacgct

SEQ ID NO: 1838272 - DNA, 15 bp, Homo sapiens
taccacaccacgctg

SEQ ID NO: 1838273 - DNA, 15 bp, Homo sapiens
accacaccacgctgc

SEQ ID NO: 1838274 - DNA, 15 bp, Homo sapiens
ccacaccacgctgct

SEQ ID NO: 1838275 - DNA, 15 bp, Homo sapiens
cacaccacgctgctg

SEQ ID NO: 1838276 - DNA, 15 bp, Homo sapiens
acaccacgctgctgg

SEQ ID NO: 1838277 - DNA, 15 bp, Homo sapiens
caccacgctgctggt

SEQ ID NO: 1838278 - DNA, 15 bp, Homo sapiens
accacgctgctggtt

SEQ ID NO: 1838279 - DNA, 15 bp, Homo sapiens
ccacgctgctggttt

SEQ ID NO: 1838280 - DNA, 15 bp, Homo sapiens
cacgctgctggtttc

SEQ ID NO: 1838281 - DNA, 15 bp, Homo sapiens
acgctgctggtttct

SEQ ID NO: 1838282 - DNA, 15 bp, Homo sapiens
cgctgctggtttctc

SEQ ID NO: 1838283 - DNA, 15 bp, Homo sapiens
gctgctggtttctct

SEQ ID NO: 1838284 - DNA, 15 bp, Homo sapiens
ctgctggtttctctc

SEQ ID NO: 1838285 - DNA, 15 bp, Homo sapiens
tgctggtttctctcc

SEQ ID NO: 1838286 - DNA, 15 bp, Homo sapiens
gctggtttctctcct

SEQ ID NO: 1838287 - DNA, 15 bp, Homo sapiens
ctggtttctctcctg

SEQ ID NO: 1838288 - DNA, 15 bp, Homo sapiens
tggtttctctcctgg

SEQ ID NO: 1838289 - DNA, 15 bp, Homo sapiens
ggtttctctcctgga

SEQ ID NO: 1838290 - DNA, 15 bp, Homo sapiens
gtttctctcctggac

SEQ ID NO: 1838291 - DNA, 15 bp, Homo sapiens
tttctctcctggacc

SEQ ID NO: 1838292 - DNA, 15 bp, Homo sapiens
ttctctcctggacca

SEQ ID NO: 1838293 - DNA, 15 bp, Homo sapiens
tctctcctggaccat

SEQ ID NO: 1838294 - DNA, 15 bp, Homo sapiens
ctctcctggaccata

SEQ ID NO: 1838295 - DNA, 15 bp, Homo sapiens
tctcctggaccatat

SEQ ID NO: 1838296 - DNA, 15 bp, Homo sapiens
ctcctggaccatatt

SEQ ID NO: 1838297 - DNA, 15 bp, Homo sapiens
tcctggaccatattt

SEQ ID NO: 1838298 - DNA, 15 bp, Homo sapiens
cctggaccatattta

SEQ ID NO: 1838299 - DNA, 15 bp, Homo sapiens
ctggaccatatttat

SEQ ID NO: 1838300 - DNA, 15 bp, Homo sapiens
tggaccatatttatg

SEQ ID NO: 1838301 - DNA, 15 bp, Homo sapiens
ggaccatatttatgg

SEQ ID NO: 1838302 - DNA, 15 bp, Homo sapiens
gaccatatttatggt

SEQ ID NO: 1838303 - DNA, 15 bp, Homo sapiens
accatatttatggta

SEQ ID NO: 1838304 - DNA, 15 bp, Homo sapiens
ccatatttatggtat

SEQ ID NO: 1838305 - DNA, 15 bp, Homo sapiens
catatttatggtatc

SEQ ID NO: 1838306 - DNA, 15 bp, Homo sapiens
atatttatggtatct

SEQ ID NO: 1838307 - DNA, 15 bp, Homo sapiens
tatttatggtatcta

SEQ ID NO: 1838308 - DNA, 15 bp, Homo sapiens
atttatggtatctag

SEQ ID NO: 1838309 - DNA, 15 bp, Homo sapiens
tttatggtatctaga

SEQ ID NO: 1838310 - DNA, 15 bp, Homo sapiens
ttatggtatctagac

SEQ ID NO: 1838311 - DNA, 15 bp, Homo sapiens
tatggtatctagact

SEQ ID NO: 1838312 - DNA, 15 bp, Homo sapiens
atggtatctagactc

SEQ ID NO: 1838313 - DNA, 15 bp, Homo sapiens
tggtatctagactct

SEQ ID NO: 1838314 - DNA, 15 bp, Homo sapiens
ggtatctagactctg

SEQ ID NO: 1838315 - DNA, 15 bp, Homo sapiens
gtatctagactctgg

SEQ ID NO: 1838316 - DNA, 15 bp, Homo sapiens
tatctagactctggt

SEQ ID NO: 1838317 - DNA, 15 bp, Homo sapiens
atctagactctggtg

SEQ ID NO: 1838318 - DNA, 15 bp, Homo sapiens
tctagactctggtgt

SEQ ID NO: 1838319 - DNA, 15 bp, Homo sapiens
ctagactctggtgtg

SEQ ID NO: 1838320 - DNA, 15 bp, Homo sapiens
tagactctggtgtgt

SEQ ID NO: 1838321 - DNA, 15 bp, Homo sapiens
agactctggtgtgtg

SEQ ID NO: 1838322 - DNA, 15 bp, Homo sapiens
gactctggtgtgtgc

SEQ ID NO: 1838323 - DNA, 15 bp, Homo sapiens
actctggtgtgtgca

SEQ ID NO: 1838324 - DNA, 15 bp, Homo sapiens
ctctggtgtgtgcag

SEQ ID NO: 1838325 - DNA, 15 bp, Homo sapiens
tctggtgtgtgcagt

SEQ ID NO: 1838326 - DNA, 15 bp, Homo sapiens
ctggtgtgtgcagtg

SEQ ID NO: 1838327 - DNA, 15 bp, Homo sapiens
tggtgtgtgcagtgg

SEQ ID NO: 1838328 - DNA, 15 bp, Homo sapiens
ggtgtgtgcagtggc

SEQ ID NO: 1838329 - DNA, 15 bp, Homo sapiens
gtgtgtgcagtggcg

SEQ ID NO: 1838330 - DNA, 15 bp, Homo sapiens
tgtgtgcagtggcga

SEQ ID NO: 1838331 - DNA, 15 bp, Homo sapiens
gtgtgcagtggcgat

SEQ ID NO: 1838332 - DNA, 15 bp, Homo sapiens
tgtgcagtggcgatg

SEQ ID NO: 1838333 - DNA, 15 bp, Homo sapiens
gtgcagtggcgatgg

SEQ ID NO: 1838334 - DNA, 15 bp, Homo sapiens
tgcagtggcgatgga

SEQ ID NO: 1838335 - DNA, 15 bp, Homo sapiens
gcagtggcgatggaa

SEQ ID NO: 1838336 - DNA, 15 bp, Homo sapiens
cagtggcgatggaat

SEQ ID NO: 1838337 - DNA, 15 bp, Homo sapiens
agtggcgatggaatc

SEQ ID NO: 1838338 - DNA, 15 bp, Homo sapiens
gtggcgatggaatca

SEQ ID NO: 1838339 - DNA, 15 bp, Homo sapiens
tggcgatggaatcat

SEQ ID NO: 1838340 - DNA, 15 bp, Homo sapiens
ggcgatggaatcatt

SEQ ID NO: 1838341 - DNA, 15 bp, Homo sapiens
gcgatggaatcattg

SEQ ID NO: 1838342 - DNA, 15 bp, Homo sapiens
cgatggaatcattga

SEQ ID NO: 1838343 - DNA, 15 bp, Homo sapiens
gatggaatcattgag

SEQ ID NO: 1838344 - DNA, 15 bp, Homo sapiens
atggaatcattgagg

SEQ ID NO: 1838345 - DNA, 15 bp, Homo sapiens
tggaatcattgaggc

SEQ ID NO: 1838346 - DNA, 15 bp, Homo sapiens
ggaatcattgaggca

SEQ ID NO: 1838347 - DNA, 15 bp, Homo sapiens
gaatcattgaggcaa

SEQ ID NO: 1838348 - DNA, 15 bp, Homo sapiens
aatcattgaggcaac

SEQ ID NO: 1838349 - DNA, 15 bp, Homo sapiens
atcattgaggcaaca

SEQ ID NO: 1838350 - DNA, 15 bp, Homo sapiens
tcattgaggcaacag

SEQ ID NO: 1838351 - DNA, 15 bp, Homo sapiens
cattgaggcaacagg

SEQ ID NO: 1838352 - DNA, 15 bp, Homo sapiens
attgaggcaacaggg

SEQ ID NO: 1838353 - DNA, 15 bp, Homo sapiens
ttgaggcaacaggga

SEQ ID NO: 1838354 - DNA, 15 bp, Homo sapiens
tgaggcaacagggac

SEQ ID NO: 1838355 - DNA, 15 bp, Homo sapiens
gaggcaacagggacc

SEQ ID NO: 1838356 - DNA, 15 bp, Homo sapiens
aggcaacagggacct

SEQ ID NO: 1838357 - DNA, 15 bp, Homo sapiens
ggcaacagggacctg

SEQ ID NO: 1838358 - DNA, 15 bp, Homo sapiens
gcaacagggacctgt

SEQ ID NO: 1838359 - DNA, 15 bp, Homo sapiens
caacagggacctgtg

SEQ ID NO: 1838360 - DNA, 15 bp, Homo sapiens
aacagggacctgtga

SEQ ID NO: 1838361 - DNA, 15 bp, Homo sapiens
acagggacctgtgag

SEQ ID NO: 1838362 - DNA, 15 bp, Homo sapiens
cagggacctgtgagt

SEQ ID NO: 1838363 - DNA, 15 bp, Homo sapiens
agggacctgtgagtc

SEQ ID NO: 1838364 - DNA, 15 bp, Homo sapiens
gggacctgtgagtcc

SEQ ID NO: 1838365 - DNA, 15 bp, Homo sapiens
ggacctgtgagtcca

SEQ ID NO: 1838366 - DNA, 15 bp, Homo sapiens
gacctgtgagtccat

SEQ ID NO: 1838367 - DNA, 15 bp, Homo sapiens
acctgtgagtccatc

SEQ ID NO: 1838368 - DNA, 15 bp, Homo sapiens
cctgtgagtccatct

SEQ ID NO: 1838369 - DNA, 15 bp, Homo sapiens
ctgtgagtccatctt

SEQ ID NO: 1838370 - DNA, 15 bp, Homo sapiens
tgtgagtccatcttg

SEQ ID NO: 1838371 - DNA, 15 bp, Homo sapiens
gtgagtccatcttga

SEQ ID NO: 1838372 - DNA, 15 bp, Homo sapiens
tgagtccatcttgag

SEQ ID NO: 1838373 - DNA, 15 bp, Homo sapiens
gagtccatcttgagg

SEQ ID NO: 1838374 - DNA, 15 bp, Homo sapiens
agtccatcttgaggt

SEQ ID NO: 1838375 - DNA, 15 bp, Homo sapiens
gtccatcttgaggtt

SEQ ID NO: 1838376 - DNA, 15 bp, Homo sapiens
tccatcttgaggttt

SEQ ID NO: 1838377 - DNA, 15 bp, Homo sapiens
ccatcttgaggtttg

SEQ ID NO: 1838378 - DNA, 15 bp, Homo sapiens
catcttgaggtttga

SEQ ID NO: 1838379 - DNA, 15 bp, Homo sapiens
atcttgaggtttgat

SEQ ID NO: 1838380 - DNA, 15 bp, Homo sapiens
tcttgaggtttgata

SEQ ID NO: 1838381 - DNA, 15 bp, Homo sapiens
cttgaggtttgataa

SEQ ID NO: 1838382 - DNA, 15 bp, Homo sapiens
ttgaggtttgataaa

SEQ ID NO: 1838383 - DNA, 15 bp, Homo sapiens
tgaggtttgataaac

SEQ ID NO: 1838384 - DNA, 15 bp, Homo sapiens
gaggtttgataaact

SEQ ID NO: 1838385 - DNA, 15 bp, Homo sapiens
aggtttgataaactg

SEQ ID NO: 1838386 - DNA, 15 bp, Homo sapiens
ggtttgataaactgt

SEQ ID NO: 1838387 - DNA, 15 bp, Homo sapiens
gtttgataaactgtg

SEQ ID NO: 1838388 - DNA, 15 bp, Homo sapiens
tttgataaactgtgt

SEQ ID NO: 1838389 - DNA, 15 bp, Homo sapiens
ttgataaactgtgta

SEQ ID NO: 1838390 - DNA, 15 bp, Homo sapiens
tgataaactgtgtat

SEQ ID NO: 1838391 - DNA, 15 bp, Homo sapiens
gataaactgtgtatt

SEQ ID NO: 1838392 - DNA, 15 bp, Homo sapiens
ataaactgtgtatta

SEQ ID NO: 1838393 - DNA, 15 bp, Homo sapiens
taaactgtgtattag

SEQ ID NO: 1838394 - DNA, 15 bp, Homo sapiens
aaactgtgtattagt

SEQ ID NO: 1838395 - DNA, 15 bp, Homo sapiens
aactgtgtattagtc

SEQ ID NO: 1838396 - DNA, 15 bp, Homo sapiens
actgtgtattagtca

SEQ ID NO: 1838397 - DNA, 15 bp, Homo sapiens
ctgtgtattagtcag

SEQ ID NO: 1838398 - DNA, 15 bp, Homo sapiens
tgtgtattagtcagc

SEQ ID NO: 1838399 - DNA, 15 bp, Homo sapiens
gtgtattagtcagct

SEQ ID NO: 1838400 - DNA, 15 bp, Homo sapiens
tgtattagtcagcta

SEQ ID NO: 1838401 - DNA, 15 bp, Homo sapiens
gtattagtcagctag

SEQ ID NO: 1838402 - DNA, 15 bp, Homo sapiens
tattagtcagctagg

SEQ ID NO: 1838403 - DNA, 15 bp, Homo sapiens
attagtcagctaggc

SEQ ID NO: 1838404 - DNA, 15 bp, Homo sapiens
ttagtcagctaggcc

SEQ ID NO: 1838405 - DNA, 15 bp, Homo sapiens
tagtcagctaggcca

SEQ ID NO: 1838406 - DNA, 15 bp, Homo sapiens
agtcagctaggccac

SEQ ID NO: 1838407 - DNA, 15 bp, Homo sapiens
gtcagctaggccacc

SEQ ID NO: 1838408 - DNA, 15 bp, Homo sapiens
tcagctaggccacct

SEQ ID NO: 1838409 - DNA, 15 bp, Homo sapiens
cagctaggccacctc

SEQ ID NO: 1838410 - DNA, 15 bp, Homo sapiens
agctaggccacctct

SEQ ID NO: 1838411 - DNA, 15 bp, Homo sapiens
gctaggccacctctg

SEQ ID NO: 1838412 - DNA, 15 bp, Homo sapiens
ctaggccacctctgt

SEQ ID NO: 1838413 - DNA, 15 bp, Homo sapiens
taggccacctctgta

SEQ ID NO: 1838414 - DNA, 15 bp, Homo sapiens
aggccacctctgtaa

SEQ ID NO: 1838415 - DNA, 15 bp, Homo sapiens
ggccacctctgtaac

SEQ ID NO: 1838416 - DNA, 15 bp, Homo sapiens
gccacctctgtaaca

SEQ ID NO: 1838417 - DNA, 15 bp, Homo sapiens
ccacctctgtaacaa

SEQ ID NO: 1838418 - DNA, 15 bp, Homo sapiens
cacctctgtaacaag

SEQ ID NO: 1838419 - DNA, 15 bp, Homo sapiens
acctctgtaacaaga

SEQ ID NO: 1838420 - DNA, 15 bp, Homo sapiens
cctctgtaacaagag

SEQ ID NO: 1838421 - DNA, 15 bp, Homo sapiens
ctctgtaacaagagg

SEQ ID NO: 1838422 - DNA, 15 bp, Homo sapiens
tctgtaacaagaggt

SEQ ID NO: 1838423 - DNA, 15 bp, Homo sapiens
ctgtaacaagaggtc

SEQ ID NO: 1838424 - DNA, 15 bp, Homo sapiens
tgtaacaagaggtca

SEQ ID NO: 1838425 - DNA, 15 bp, Homo sapiens
gtaacaagaggtcaa

SEQ ID NO: 1838426 - DNA, 15 bp, Homo sapiens
taacaagaggtcaac

SEQ ID NO: 1838427 - DNA, 15 bp, Homo sapiens
aacaagaggtcaaca

SEQ ID NO: 1838428 - DNA, 15 bp, Homo sapiens
acaagaggtcaacat

SEQ ID NO: 1838429 - DNA, 15 bp, Homo sapiens
caagaggtcaacatg

SEQ ID NO: 1838430 - DNA, 15 bp, Homo sapiens
aagaggtcaacatgt

SEQ ID NO: 1838431 - DNA, 15 bp, Homo sapiens
agaggtcaacatgtc

SEQ ID NO: 1838432 - DNA, 15 bp, Homo sapiens
gaggtcaacatgtca

SEQ ID NO: 1838433 - DNA, 15 bp, Homo sapiens
aggtcaacatgtcaa

SEQ ID NO: 1838434 - DNA, 15 bp, Homo sapiens
ggtcaacatgtcaat

SEQ ID NO: 1838435 - DNA, 15 bp, Homo sapiens
gtcaacatgtcaatg

SEQ ID NO: 1838436 - DNA, 15 bp, Homo sapiens
tcaacatgtcaatga

SEQ ID NO: 1838437 - DNA, 15 bp, Homo sapiens
caacatgtcaatgac

SEQ ID NO: 1838438 - DNA, 15 bp, Homo sapiens
aacatgtcaatgact

SEQ ID NO: 1838439 - DNA, 15 bp, Homo sapiens
acatgtcaatgactt

SEQ ID NO: 1838440 - DNA, 15 bp, Homo sapiens
catgtcaatgactta

SEQ ID NO: 1838441 - DNA, 15 bp, Homo sapiens
atgtcaatgacttaa

SEQ ID NO: 1838442 - DNA, 15 bp, Homo sapiens
tgtcaatgacttaat

SEQ ID NO: 1838443 - DNA, 15 bp, Homo sapiens
gtcaatgacttaata

SEQ ID NO: 1838444 - DNA, 15 bp, Homo sapiens
tcaatgacttaatac

SEQ ID NO: 1838445 - DNA, 15 bp, Homo sapiens
caatgacttaataca

SEQ ID NO: 1838446 - DNA, 15 bp, Homo sapiens
aatgacttaatacag

SEQ ID NO: 1838447 - DNA, 15 bp, Homo sapiens
atgacttaatacagc

SEQ ID NO: 1838448 - DNA, 15 bp, Homo sapiens
tgacttaatacagca

SEQ ID NO: 1838449 - DNA, 15 bp, Homo sapiens
gacttaatacagcag

SEQ ID NO: 1838450 - DNA, 15 bp, Homo sapiens
acttaatacagcaga

SEQ ID NO: 1838451 - DNA, 15 bp, Homo sapiens
cttaatacagcagaa

SEQ ID NO: 1838452 - DNA, 15 bp, Homo sapiens
ttaatacagcagaag

SEQ ID NO: 1838453 - DNA, 15 bp, Homo sapiens
taatacagcagaagt

SEQ ID NO: 1838454 - DNA, 15 bp, Homo sapiens
aatacagcagaagtt

SEQ ID NO: 1838455 - DNA, 15 bp, Homo sapiens
atacagcagaagttt

SEQ ID NO: 1838456 - DNA, 15 bp, Homo sapiens
tacagcagaagttta

SEQ ID NO: 1838457 - DNA, 15 bp, Homo sapiens
acagcagaagtttac

SEQ ID NO: 1838458 - DNA, 15 bp, Homo sapiens
cagcagaagtttacg

SEQ ID NO: 1838459 - DNA, 15 bp, Homo sapiens
agcagaagtttacgt

SEQ ID NO: 1838460 - DNA, 15 bp, Homo sapiens
gcagaagtttacgta

SEQ ID NO: 1838461 - DNA, 15 bp, Homo sapiens
cagaagtttacgtat

SEQ ID NO: 1838462 - DNA, 15 bp, Homo sapiens
agaagtttacgtatt

SEQ ID NO: 1838463 - DNA, 15 bp, Homo sapiens
gaagtttacgtattg

SEQ ID NO: 1838464 - DNA, 15 bp, Homo sapiens
aagtttacgtattgc

SEQ ID NO: 1838465 - DNA, 15 bp, Homo sapiens
agtttacgtattgct

SEQ ID NO: 1838466 - DNA, 15 bp, Homo sapiens
gtttacgtattgctc

SEQ ID NO: 1838467 - DNA, 15 bp, Homo sapiens
tttacgtattgctca

SEQ ID NO: 1838468 - DNA, 15 bp, Homo sapiens
ttacgtattgctcat

SEQ ID NO: 1838469 - DNA, 15 bp, Homo sapiens
tacgtattgctcata

SEQ ID NO: 1838470 - DNA, 15 bp, Homo sapiens
acgtattgctcatac

SEQ ID NO: 1838471 - DNA, 15 bp, Homo sapiens
cgtattgctcataca

SEQ ID NO: 1838472 - DNA, 15 bp, Homo sapiens
gtattgctcatacaa

SEQ ID NO: 1838473 - DNA, 15 bp, Homo sapiens
tattgctcatacaaa

SEQ ID NO: 1838474 - DNA, 15 bp, Homo sapiens
attgctcatacaaag

SEQ ID NO: 1838475 - DNA, 15 bp, Homo sapiens
ttgctcatacaaagt

SEQ ID NO: 1838476 - DNA, 15 bp, Homo sapiens
tgctcatacaaagta

SEQ ID NO: 1838477 - DNA, 15 bp, Homo sapiens
gctcatacaaagtac

SEQ ID NO: 1838478 - DNA, 15 bp, Homo sapiens
ctcatacaaagtacc

SEQ ID NO: 1838479 - DNA, 15 bp, Homo sapiens
tcatacaaagtacca

SEQ ID NO: 1838480 - DNA, 15 bp, Homo sapiens
catacaaagtaccat

SEQ ID NO: 1838481 - DNA, 15 bp, Homo sapiens
atacaaagtaccatt

SEQ ID NO: 1838482 - DNA, 15 bp, Homo sapiens
tacaaagtaccattg

SEQ ID NO: 1838483 - DNA, 15 bp, Homo sapiens
acaaagtaccattga

SEQ ID NO: 1838484 - DNA, 15 bp, Homo sapiens
caaagtaccattgat

SEQ ID NO: 1838485 - DNA, 15 bp, Homo sapiens
aaagtaccattgatg

SEQ ID NO: 1838486 - DNA, 15 bp, Homo sapiens
aagtaccattgatgg

SEQ ID NO: 1838487 - DNA, 15 bp, Homo sapiens
agtaccattgatggt

SEQ ID NO: 1838488 - DNA, 15 bp, Homo sapiens
gtaccattgatggtg

SEQ ID NO: 1838489 - DNA, 15 bp, Homo sapiens
taccattgatggtgt

SEQ ID NO: 1838490 - DNA, 15 bp, Homo sapiens
accattgatggtgtg

SEQ ID NO: 1838491 - DNA, 15 bp, Homo sapiens
ccattgatggtgtgt

SEQ ID NO: 1838492 - DNA, 15 bp, Homo sapiens
cattgatggtgtgtg

SEQ ID NO: 1838493 - DNA, 15 bp, Homo sapiens
attgatggtgtgtgt

SEQ ID NO: 1838494 - DNA, 15 bp, Homo sapiens
ttgatggtgtgtgtg

SEQ ID NO: 1838495 - DNA, 15 bp, Homo sapiens
tgatggtgtgtgtgg

SEQ ID NO: 1838496 - DNA, 15 bp, Homo sapiens
gatggtgtgtgtgga

SEQ ID NO: 1838497 - DNA, 15 bp, Homo sapiens
atggtgtgtgtggag

SEQ ID NO: 1838498 - DNA, 15 bp, Homo sapiens
tggtgtgtgtggagg

SEQ ID NO: 1838499 - DNA, 15 bp, Homo sapiens
ggtgtgtgtggaggg

SEQ ID NO: 1838500 - DNA, 15 bp, Homo sapiens
gtgtgtgtggagggt

SEQ ID NO: 1838501 - DNA, 15 bp, Homo sapiens
tgtgtgtggagggtg

SEQ ID NO: 1838502 - DNA, 15 bp, Homo sapiens
gtgtgtggagggtgc

SEQ ID NO: 1838503 - DNA, 15 bp, Homo sapiens
tgtgtggagggtgca

SEQ ID NO: 1838504 - DNA, 15 bp, Homo sapiens
gtgtggagggtgcag

SEQ ID NO: 1838505 - DNA, 15 bp, Homo sapiens
tgtggagggtgcagt

SEQ ID NO: 1838506 - DNA, 15 bp, Homo sapiens
gtggagggtgcagtg

SEQ ID NO: 1838507 - DNA, 15 bp, Homo sapiens
tggagggtgcagtga

SEQ ID NO: 1838508 - DNA, 15 bp, Homo sapiens
ggagggtgcagtgaa

SEQ ID NO: 1838509 - DNA, 15 bp, Homo sapiens
gagggtgcagtgaag

SEQ ID NO: 1838510 - DNA, 15 bp, Homo sapiens
agggtgcagtgaaga

SEQ ID NO: 1838511 - DNA, 15 bp, Homo sapiens
gggtgcagtgaagac

SEQ ID NO: 1838512 - DNA, 15 bp, Homo sapiens
ggtgcagtgaagaca

SEQ ID NO: 1838513 - DNA, 15 bp, Homo sapiens
gtgcagtgaagacac

SEQ ID NO: 1838514 - DNA, 15 bp, Homo sapiens
tgcagtgaagacaca

SEQ ID NO: 1838515 - DNA, 15 bp, Homo sapiens
gcagtgaagacacac

SEQ ID NO: 1838516 - DNA, 15 bp, Homo sapiens
cagtgaagacacact

SEQ ID NO: 1838517 - DNA, 15 bp, Homo sapiens
agtgaagacacactt

SEQ ID NO: 1838518 - DNA, 15 bp, Homo sapiens
gtgaagacacacttc

SEQ ID NO: 1838519 - DNA, 15 bp, Homo sapiens
tgaagacacacttca

SEQ ID NO: 1838520 - DNA, 15 bp, Homo sapiens
gaagacacacttcag

SEQ ID NO: 1838521 - DNA, 15 bp, Homo sapiens
aagacacacttcaga

SEQ ID NO: 1838522 - DNA, 15 bp, Homo sapiens
agacacacttcagac

SEQ ID NO: 1838523 - DNA, 15 bp, Homo sapiens
gacacacttcagaca

SEQ ID NO: 1838524 - DNA, 15 bp, Homo sapiens
acacacttcagacag

SEQ ID NO: 1838525 - DNA, 15 bp, Homo sapiens
cacacttcagacagt

SEQ ID NO: 1838526 - DNA, 15 bp, Homo sapiens
acacttcagacagtc

SEQ ID NO: 1838527 - DNA, 15 bp, Homo sapiens
cacttcagacagtca

SEQ ID NO: 1838528 - DNA, 15 bp, Homo sapiens
acttcagacagtcat

SEQ ID NO: 1838529 - DNA, 15 bp, Homo sapiens
cttcagacagtcatt

SEQ ID NO: 1838530 - DNA, 15 bp, Homo sapiens
ttcagacagtcatta

SEQ ID NO: 1838531 - DNA, 15 bp, Homo sapiens
tcagacagtcattaa

SEQ ID NO: 1838532 - DNA, 15 bp, Homo sapiens
cagacagtcattaaa

SEQ ID NO: 1838533 - DNA, 15 bp, Homo sapiens
agacagtcattaaag

SEQ ID NO: 1838534 - DNA, 15 bp, Homo sapiens
gacagtcattaaaga

SEQ ID NO: 1838535 - DNA, 15 bp, Homo sapiens
acagtcattaaagac

SEQ ID NO: 1838536 - DNA, 15 bp, Homo sapiens
cagtcattaaagacc

SEQ ID NO: 1838537 - DNA, 15 bp, Homo sapiens
agtcattaaagaccc

SEQ ID NO: 1838538 - DNA, 15 bp, Homo sapiens
gtcattaaagacccc

SEQ ID NO: 1838539 - DNA, 15 bp, Homo sapiens
tcattaaagaccccg

SEQ ID NO: 1838540 - DNA, 15 bp, Homo sapiens
cattaaagaccccgg

SEQ ID NO: 1838541 - DNA, 15 bp, Homo sapiens
attaaagaccccggc

SEQ ID NO: 1838542 - DNA, 15 bp, Homo sapiens
ttaaagaccccggct

SEQ ID NO: 1838543 - DNA, 15 bp, Homo sapiens
taaagaccccggctc

SEQ ID NO: 1838544 - DNA, 15 bp, Homo sapiens
aaagaccccggctcc

SEQ ID NO: 1838545 - DNA, 15 bp, Homo sapiens
aagaccccggctcct

SEQ ID NO: 1838546 - DNA, 15 bp, Homo sapiens
agaccccggctcctt

SEQ ID NO: 1838547 - DNA, 15 bp, Homo sapiens
gaccccggctccttt

SEQ ID NO: 1838548 - DNA, 15 bp, Homo sapiens
accccggctcctttc

SEQ ID NO: 1838549 - DNA, 15 bp, Homo sapiens
ccccggctcctttca

SEQ ID NO: 1838550 - DNA, 15 bp, Homo sapiens
cccggctcctttcac

SEQ ID NO: 1838551 - DNA, 15 bp, Homo sapiens
ccggctcctttcact

SEQ ID NO: 1838552 - DNA, 15 bp, Homo sapiens
cggctcctttcactt

SEQ ID NO: 1838553 - DNA, 15 bp, Homo sapiens
ggctcctttcacttg

SEQ ID NO: 1838554 - DNA, 15 bp, Homo sapiens
gctcctttcacttgt

SEQ ID NO: 1838555 - DNA, 15 bp, Homo sapiens
ctcctttcacttgtg

SEQ ID NO: 1838556 - DNA, 15 bp, Homo sapiens
tcctttcacttgtgg

SEQ ID NO: 1838557 - DNA, 15 bp, Homo sapiens
cctttcacttgtgga

SEQ ID NO: 1838558 - DNA, 15 bp, Homo sapiens
ctttcacttgtggac

SEQ ID NO: 1838559 - DNA, 15 bp, Homo sapiens
tttcacttgtggacc

SEQ ID NO: 1838560 - DNA, 15 bp, Homo sapiens
ttcacttgtggacct

SEQ ID NO: 1838561 - DNA, 15 bp, Homo sapiens
tcacttgtggacctg

SEQ ID NO: 1838562 - DNA, 15 bp, Homo sapiens
cacttgtggacctga

SEQ ID NO: 1838563 - DNA, 15 bp, Homo sapiens
acttgtggacctgaa

SEQ ID NO: 1838564 - DNA, 15 bp, Homo sapiens
cttgtggacctgaaa

SEQ ID NO: 1838565 - DNA, 15 bp, Homo sapiens
ttgtggacctgaaat

SEQ ID NO: 1838566 - DNA, 15 bp, Homo sapiens
tgtggacctgaaatc

SEQ ID NO: 1838567 - DNA, 15 bp, Homo sapiens
gtggacctgaaatct

SEQ ID NO: 1838568 - DNA, 15 bp, Homo sapiens
tggacctgaaatctt

SEQ ID NO: 1838569 - DNA, 15 bp, Homo sapiens
ggacctgaaatcttc

SEQ ID NO: 1838570 - DNA, 15 bp, Homo sapiens
gacctgaaatcttct

SEQ ID NO: 1838571 - DNA, 15 bp, Homo sapiens
acctgaaatcttcta

SEQ ID NO: 1838572 - DNA, 15 bp, Homo sapiens
cctgaaatcttctag

SEQ ID NO: 1838573 - DNA, 15 bp, Homo sapiens
ctgaaatcttctagg

SEQ ID NO: 1838574 - DNA, 15 bp, Homo sapiens
tgaaatcttctaggg

SEQ ID NO: 1838575 - DNA, 15 bp, Homo sapiens
gaaatcttctagggg

SEQ ID NO: 1838576 - DNA, 15 bp, Homo sapiens
aaatcttctaggggc

SEQ ID NO: 1838577 - DNA, 15 bp, Homo sapiens
aatcttctaggggcc

SEQ ID NO: 1838578 - DNA, 15 bp, Homo sapiens
atcttctaggggccc

SEQ ID NO: 1838579 - DNA, 15 bp, Homo sapiens
tcttctaggggcccc

SEQ ID NO: 1838580 - DNA, 15 bp, Homo sapiens
cttctaggggcccct

SEQ ID NO: 1838581 - DNA, 15 bp, Homo sapiens
ttctaggggcccctg

SEQ ID NO: 1838582 - DNA, 15 bp, Homo sapiens
tctaggggcccctga

SEQ ID NO: 1838583 - DNA, 15 bp, Homo sapiens
ctaggggcccctgaa

SEQ ID NO: 1838584 - DNA, 15 bp, Homo sapiens
taggggcccctgaag

SEQ ID NO: 1838585 - DNA, 15 bp, Homo sapiens
aggggcccctgaagg

SEQ ID NO: 1838586 - DNA, 15 bp, Homo sapiens
ggggcccctgaaggt

SEQ ID NO: 1838587 - DNA, 15 bp, Homo sapiens
gggcccctgaaggtc

SEQ ID NO: 1838588 - DNA, 15 bp, Homo sapiens
ggcccctgaaggtct

SEQ ID NO: 1838589 - DNA, 15 bp, Homo sapiens
gcccctgaaggtctc

SEQ ID NO: 1838590 - DNA, 15 bp, Homo sapiens
cccctgaaggtctct

SEQ ID NO: 1838591 - DNA, 15 bp, Homo sapiens
ccctgaaggtctctg

SEQ ID NO: 1838592 - DNA, 15 bp, Homo sapiens
cctgaaggtctctgc

SEQ ID NO: 1838593 - DNA, 15 bp, Homo sapiens
ctgaaggtctctgct

SEQ ID NO: 1838594 - DNA, 15 bp, Homo sapiens
tgaaggtctctgctg

SEQ ID NO: 1838595 - DNA, 15 bp, Homo sapiens
gaaggtctctgctgg

SEQ ID NO: 1838596 - DNA, 15 bp, Homo sapiens
aaggtctctgctgga

SEQ ID NO: 1838597 - DNA, 15 bp, Homo sapiens
aggtctctgctggac

SEQ ID NO: 1838598 - DNA, 15 bp, Homo sapiens
ggtctctgctggacc

SEQ ID NO: 1838599 - DNA, 15 bp, Homo sapiens
gtctctgctggaccc

SEQ ID NO: 1838600 - DNA, 15 bp, Homo sapiens
tctctgctggaccct

SEQ ID NO: 1838601 - DNA, 15 bp, Homo sapiens
ctctgctggaccctc

SEQ ID NO: 1838602 - DNA, 15 bp, Homo sapiens
tctgctggaccctct

SEQ ID NO: 1838603 - DNA, 15 bp, Homo sapiens
ctgctggaccctctg

SEQ ID NO: 1838604 - DNA, 15 bp, Homo sapiens
tgctggaccctctgc

SEQ ID NO: 1838605 - DNA, 15 bp, Homo sapiens
gctggaccctctgca

SEQ ID NO: 1838606 - DNA, 15 bp, Homo sapiens
ctggaccctctgcat

SEQ ID NO: 1838607 - DNA, 15 bp, Homo sapiens
tggaccctctgcatc

SEQ ID NO: 1838608 - DNA, 15 bp, Homo sapiens
ggaccctctgcatct

SEQ ID NO: 1838609 - DNA, 15 bp, Homo sapiens
gaccctctgcatctg

SEQ ID NO: 1838610 - DNA, 15 bp, Homo sapiens
accctctgcatctgt

SEQ ID NO: 1838611 - DNA, 15 bp, Homo sapiens
ccctctgcatctgtc

SEQ ID NO: 1838612 - DNA, 15 bp, Homo sapiens
cctctgcatctgtcc

SEQ ID NO: 1838613 - DNA, 15 bp, Homo sapiens
ctctgcatctgtccg

SEQ ID NO: 1838614 - DNA, 15 bp, Homo sapiens
tctgcatctgtccgg

SEQ ID NO: 1838615 - DNA, 15 bp, Homo sapiens
ctgcatctgtccgga

SEQ ID NO: 1838616 - DNA, 15 bp, Homo sapiens
tgcatctgtccggat

SEQ ID NO: 1838617 - DNA, 15 bp, Homo sapiens
gcatctgtccggatg

SEQ ID NO: 1838618 - DNA, 15 bp, Homo sapiens
catctgtccggatga

SEQ ID NO: 1838619 - DNA, 15 bp, Homo sapiens
atctgtccggatgat

SEQ ID NO: 1838620 - DNA, 15 bp, Homo sapiens
tctgtccggatgata

SEQ ID NO: 1838621 - DNA, 15 bp, Homo sapiens
ctgtccggatgatag

SEQ ID NO: 1838622 - DNA, 15 bp, Homo sapiens
tgtccggatgatagg

SEQ ID NO: 1838623 - DNA, 15 bp, Homo sapiens
gtccggatgataggg

SEQ ID NO: 1838624 - DNA, 15 bp, Homo sapiens
tccggatgatagggg

SEQ ID NO: 1838625 - DNA, 15 bp, Homo sapiens
ccggatgatagggga

SEQ ID NO: 1838626 - DNA, 15 bp, Homo sapiens
cggatgataggggat

SEQ ID NO: 1838627 - DNA, 15 bp, Homo sapiens
ggatgataggggatg

SEQ ID NO: 1838628 - DNA, 15 bp, Homo sapiens
gatgataggggatga

SEQ ID NO: 1838629 - DNA, 15 bp, Homo sapiens
atgataggggatgag

SEQ ID NO: 1838630 - DNA, 15 bp, Homo sapiens
tgataggggatgaga

SEQ ID NO: 1838631 - DNA, 15 bp, Homo sapiens
gataggggatgagaa

SEQ ID NO: 1838632 - DNA, 15 bp, Homo sapiens
ataggggatgagaag

SEQ ID NO: 1838633 - DNA, 15 bp, Homo sapiens
taggggatgagaagt

SEQ ID NO: 1838634 - DNA, 15 bp, Homo sapiens
aggggatgagaagta

SEQ ID NO: 1838635 - DNA, 15 bp, Homo sapiens
ggggatgagaagtaa

SEQ ID NO: 1838636 - DNA, 15 bp, Homo sapiens
gggatgagaagtaag

SEQ ID NO: 1838637 - DNA, 15 bp, Homo sapiens
ggatgagaagtaagg

SEQ ID NO: 1838638 - DNA, 15 bp, Homo sapiens
gatgagaagtaagga

SEQ ID NO: 1838639 - DNA, 15 bp, Homo sapiens
atgagaagtaaggat

SEQ ID NO: 1838640 - DNA, 15 bp, Homo sapiens
tgagaagtaaggatc

SEQ ID NO: 1838641 - DNA, 15 bp, Homo sapiens
gagaagtaaggatca

SEQ ID NO: 1838642 - DNA, 15 bp, Homo sapiens
agaagtaaggatcat

SEQ ID NO: 1838643 - DNA, 15 bp, Homo sapiens
gaagtaaggatcatg

SEQ ID NO: 1838644 - DNA, 15 bp, Homo sapiens
aagtaaggatcatga

SEQ ID NO: 1838645 - DNA, 15 bp, Homo sapiens
agtaaggatcatgag

SEQ ID NO: 1838646 - DNA, 15 bp, Homo sapiens
gtaaggatcatgagg

SEQ ID NO: 1838647 - DNA, 15 bp, Homo sapiens
taaggatcatgaggg

SEQ ID NO: 1838648 - DNA, 15 bp, Homo sapiens
aaggatcatgagggg

SEQ ID NO: 1838649 - DNA, 15 bp, Homo sapiens
aggatcatgaggggt

SEQ ID NO: 1838650 - DNA, 15 bp, Homo sapiens
ggatcatgaggggta

SEQ ID NO: 1838651 - DNA, 15 bp, Homo sapiens
gatcatgaggggtag

SEQ ID NO: 1838652 - DNA, 15 bp, Homo sapiens
atcatgaggggtagt

SEQ ID NO: 1838653 - DNA, 15 bp, Homo sapiens
tcatgaggggtagtt

SEQ ID NO: 1838654 - DNA, 15 bp, Homo sapiens
catgaggggtagttt

SEQ ID NO: 1838655 - DNA, 15 bp, Homo sapiens
atgaggggtagtttt

SEQ ID NO: 1838656 - DNA, 15 bp, Homo sapiens
tgaggggtagttttg

SEQ ID NO: 1838657 - DNA, 15 bp, Homo sapiens
gaggggtagttttgt

SEQ ID NO: 1838658 - DNA, 15 bp, Homo sapiens
aggggtagttttgta

SEQ ID NO: 1838659 - DNA, 15 bp, Homo sapiens
ggggtagttttgtag

SEQ ID NO: 1838660 - DNA, 15 bp, Homo sapiens
gggtagttttgtagg

SEQ ID NO: 1838661 - DNA, 15 bp, Homo sapiens
ggtagttttgtaggg

SEQ ID NO: 1838662 - DNA, 15 bp, Homo sapiens
gtagttttgtagggg

SEQ ID NO: 1838663 - DNA, 15 bp, Homo sapiens
tagttttgtaggggt

SEQ ID NO: 1838664 - DNA, 15 bp, Homo sapiens
agttttgtaggggta

SEQ ID NO: 1838665 - DNA, 15 bp, Homo sapiens
gttttgtaggggtag

SEQ ID NO: 1838666 - DNA, 15 bp, Homo sapiens
ttttgtaggggtagt

SEQ ID NO: 1838667 - DNA, 15 bp, Homo sapiens
tttgtaggggtagtt

SEQ ID NO: 1838668 - DNA, 15 bp, Homo sapiens
ttgtaggggtagtta

SEQ ID NO: 1838669 - DNA, 15 bp, Homo sapiens
tgtaggggtagttat

SEQ ID NO: 1838670 - DNA, 15 bp, Homo sapiens
gtaggggtagttatg

SEQ ID NO: 1838671 - DNA, 15 bp, Homo sapiens
taggggtagttatgg

SEQ ID NO: 1838672 - DNA, 15 bp, Homo sapiens
aggggtagttatgga

SEQ ID NO: 1838673 - DNA, 15 bp, Homo sapiens
ggggtagttatggaa

SEQ ID NO: 1838674 - DNA, 15 bp, Homo sapiens
gggtagttatggaag

SEQ ID NO: 1838675 - DNA, 15 bp, Homo sapiens
ggtagttatggaagt

SEQ ID NO: 1838676 - DNA, 15 bp, Homo sapiens
gtagttatggaagtc

SEQ ID NO: 1838677 - DNA, 15 bp, Homo sapiens
tagttatggaagtca

SEQ ID NO: 1838678 - DNA, 15 bp, Homo sapiens
agttatggaagtcat

SEQ ID NO: 1838679 - DNA, 15 bp, Homo sapiens
gttatggaagtcatt

SEQ ID NO: 1838680 - DNA, 15 bp, Homo sapiens
ttatggaagtcattc

SEQ ID NO: 1838681 - DNA, 15 bp, Homo sapiens
tatggaagtcattca

SEQ ID NO: 1838682 - DNA, 15 bp, Homo sapiens
atggaagtcattcac

SEQ ID NO: 1838683 - DNA, 15 bp, Homo sapiens
tggaagtcattcaca

SEQ ID NO: 1838684 - DNA, 15 bp, Homo sapiens
ggaagtcattcacat

SEQ ID NO: 1838685 - DNA, 15 bp, Homo sapiens
gaagtcattcacatc

SEQ ID NO: 1838686 - DNA, 15 bp, Homo sapiens
aagtcattcacatca

SEQ ID NO: 1838687 - DNA, 15 bp, Homo sapiens
agtcattcacatcac

SEQ ID NO: 1838688 - DNA, 15 bp, Homo sapiens
gtcattcacatcacg

SEQ ID NO: 1838689 - DNA, 15 bp, Homo sapiens
tcattcacatcacgt

SEQ ID NO: 1838690 - DNA, 15 bp, Homo sapiens
cattcacatcacgtc

SEQ ID NO: 1838691 - DNA, 15 bp, Homo sapiens
attcacatcacgtct

SEQ ID NO: 1838692 - DNA, 15 bp, Homo sapiens
ttcacatcacgtcta

SEQ ID NO: 1838693 - DNA, 15 bp, Homo sapiens
tcacatcacgtctac

SEQ ID NO: 1838694 - DNA, 15 bp, Homo sapiens
cacatcacgtctacc

SEQ ID NO: 1838695 - DNA, 15 bp, Homo sapiens
acatcacgtctaccc

SEQ ID NO: 1838696 - DNA, 15 bp, Homo sapiens
catcacgtctaccca

SEQ ID NO: 1838697 - DNA, 15 bp, Homo sapiens
atcacgtctacccac

SEQ ID NO: 1838698 - DNA, 15 bp, Homo sapiens
tcacgtctacccaca

SEQ ID NO: 1838699 - DNA, 15 bp, Homo sapiens
cacgtctacccacac

SEQ ID NO: 1838700 - DNA, 15 bp, Homo sapiens
acgtctacccacaca

SEQ ID NO: 1838701 - DNA, 15 bp, Homo sapiens
cgtctacccacacag

SEQ ID NO: 1838702 - DNA, 15 bp, Homo sapiens
gtctacccacacagt

SEQ ID NO: 1838703 - DNA, 15 bp, Homo sapiens
tctacccacacagtt

SEQ ID NO: 1838704 - DNA, 15 bp, Homo sapiens
ctacccacacagttc

SEQ ID NO: 1838705 - DNA, 15 bp, Homo sapiens
tacccacacagttca

SEQ ID NO: 1838706 - DNA, 15 bp, Homo sapiens
acccacacagttcat

SEQ ID NO: 1838707 - DNA, 15 bp, Homo sapiens
cccacacagttcatt

SEQ ID NO: 1838708 - DNA, 15 bp, Homo sapiens
ccacacagttcattg

SEQ ID NO: 1838709 - DNA, 15 bp, Homo sapiens
cacacagttcattgg

SEQ ID NO: 1838710 - DNA, 15 bp, Homo sapiens
acacagttcattggc

SEQ ID NO: 1838711 - DNA, 15 bp, Homo sapiens
cacagttcattggcc

SEQ ID NO: 1838712 - DNA, 15 bp, Homo sapiens
acagttcattggcca

SEQ ID NO: 1838713 - DNA, 15 bp, Homo sapiens
cagttcattggccag

SEQ ID NO: 1838714 - DNA, 15 bp, Homo sapiens
agttcattggccaga

SEQ ID NO: 1838715 - DNA, 15 bp, Homo sapiens
gttcattggccagaa

SEQ ID NO: 1838716 - DNA, 15 bp, Homo sapiens
ttcattggccagaac

SEQ ID NO: 1838717 - DNA, 15 bp, Homo sapiens
tcattggccagaact

SEQ ID NO: 1838718 - DNA, 15 bp, Homo sapiens
cattggccagaactt

SEQ ID NO: 1838719 - DNA, 15 bp, Homo sapiens
attggccagaacttg

SEQ ID NO: 1838720 - DNA, 15 bp, Homo sapiens
ttggccagaacttga

SEQ ID NO: 1838721 - DNA, 15 bp, Homo sapiens
tggccagaacttgat

SEQ ID NO: 1838722 - DNA, 15 bp, Homo sapiens
ggccagaacttgatc

SEQ ID NO: 1838723 - DNA, 15 bp, Homo sapiens
gccagaacttgatca

SEQ ID NO: 1838724 - DNA, 15 bp, Homo sapiens
ccagaacttgatcac

SEQ ID NO: 1838725 - DNA, 15 bp, Homo sapiens
cagaacttgatcaca

SEQ ID NO: 1838726 - DNA, 15 bp, Homo sapiens
agaacttgatcacat

SEQ ID NO: 1838727 - DNA, 15 bp, Homo sapiens
gaacttgatcacatg

SEQ ID NO: 1838728 - DNA, 15 bp, Homo sapiens
aacttgatcacatgg

SEQ ID NO: 1838729 - DNA, 15 bp, Homo sapiens
acttgatcacatggt

SEQ ID NO: 1838730 - DNA, 15 bp, Homo sapiens
cttgatcacatggta

SEQ ID NO: 1838731 - DNA, 15 bp, Homo sapiens
ttgatcacatggtat

SEQ ID NO: 1838732 - DNA, 15 bp, Homo sapiens
tgatcacatggtatt

SEQ ID NO: 1838733 - DNA, 15 bp, Homo sapiens
gatcacatggtattt

SEQ ID NO: 1838734 - DNA, 15 bp, Homo sapiens
atcacatggtatttt

SEQ ID NO: 1838735 - DNA, 15 bp, Homo sapiens
tcacatggtatttta

SEQ ID NO: 1838736 - DNA, 15 bp, Homo sapiens
cacatggtattttaa

SEQ ID NO: 1838737 - DNA, 15 bp, Homo sapiens
acatggtattttaac

SEQ ID NO: 1838738 - DNA, 15 bp, Homo sapiens
catggtattttaact

SEQ ID NO: 1838739 - DNA, 15 bp, Homo sapiens
atggtattttaactg

SEQ ID NO: 1838740 - DNA, 15 bp, Homo sapiens
tggtattttaactgc

SEQ ID NO: 1838741 - DNA, 15 bp, Homo sapiens
ggtattttaactgca

SEQ ID NO: 1838742 - DNA, 15 bp, Homo sapiens
gtattttaactgcaa

SEQ ID NO: 1838743 - DNA, 15 bp, Homo sapiens
tattttaactgcaag

SEQ ID NO: 1838744 - DNA, 15 bp, Homo sapiens
attttaactgcaagg

SEQ ID NO: 1838745 - DNA, 15 bp, Homo sapiens
ttttaactgcaaggg

SEQ ID NO: 1838746 - DNA, 15 bp, Homo sapiens
tttaactgcaaggga

SEQ ID NO: 1838747 - DNA, 15 bp, Homo sapiens
ttaactgcaagggat

SEQ ID NO: 1838748 - DNA, 15 bp, Homo sapiens
taactgcaagggatc

SEQ ID NO: 1838749 - DNA, 15 bp, Homo sapiens
aactgcaagggatcc

SEQ ID NO: 1838750 - DNA, 15 bp, Homo sapiens
actgcaagggatcct

SEQ ID NO: 1838751 - DNA, 15 bp, Homo sapiens
ctgcaagggatcctg

SEQ ID NO: 1838752 - DNA, 15 bp, Homo sapiens
tgcaagggatcctgg

SEQ ID NO: 1838753 - DNA, 15 bp, Homo sapiens
gcaagggatcctggg

SEQ ID NO: 1838754 - DNA, 15 bp, Homo sapiens
caagggatcctggga

SEQ ID NO: 1838755 - DNA, 15 bp, Homo sapiens
aagggatcctgggaa

SEQ ID NO: 1838756 - DNA, 15 bp, Homo sapiens
agggatcctgggaaa

SEQ ID NO: 1838757 - DNA, 15 bp, Homo sapiens
gggatcctgggaaat

SEQ ID NO: 1838758 - DNA, 15 bp, Homo sapiens
ggatcctgggaaatg

SEQ ID NO: 1838759 - DNA, 15 bp, Homo sapiens
gatcctgggaaatgt

SEQ ID NO: 1838760 - DNA, 15 bp, Homo sapiens
atcctgggaaatgta

SEQ ID NO: 1838761 - DNA, 15 bp, Homo sapiens
tcctgggaaatgtag

SEQ ID NO: 1838762 - DNA, 15 bp, Homo sapiens
cctgggaaatgtagc

SEQ ID NO: 1838763 - DNA, 15 bp, Homo sapiens
ctgggaaatgtagca

SEQ ID NO: 1838764 - DNA, 15 bp, Homo sapiens
tgggaaatgtagcac

SEQ ID NO: 1838765 - DNA, 15 bp, Homo sapiens
gggaaatgtagcact

SEQ ID NO: 1838766 - DNA, 15 bp, Homo sapiens
ggaaatgtagcactg

SEQ ID NO: 1838767 - DNA, 15 bp, Homo sapiens
gaaatgtagcactgc

SEQ ID NO: 1838768 - DNA, 15 bp, Homo sapiens
aaatgtagcactgca

SEQ ID NO: 1838769 - DNA, 15 bp, Homo sapiens
aatgtagcactgcac

SEQ ID NO: 1838770 - DNA, 15 bp, Homo sapiens
atgtagcactgcacc

SEQ ID NO: 1838771 - DNA, 15 bp, Homo sapiens
tgtagcactgcaccc

SEQ ID NO: 1838772 - DNA, 15 bp, Homo sapiens
gtagcactgcaccca

SEQ ID NO: 1838773 - DNA, 15 bp, Homo sapiens
tagcactgcacccag

SEQ ID NO: 1838774 - DNA, 15 bp, Homo sapiens
agcactgcacccagg

SEQ ID NO: 1838775 - DNA, 15 bp, Homo sapiens
gcactgcacccagga

SEQ ID NO: 1838776 - DNA, 15 bp, Homo sapiens
cactgcacccaggag

SEQ ID NO: 1838777 - DNA, 15 bp, Homo sapiens
actgcacccaggaga

SEQ ID NO: 1838778 - DNA, 15 bp, Homo sapiens
ctgcacccaggagat

SEQ ID NO: 1838779 - DNA, 15 bp, Homo sapiens
tgcacccaggagatt

SEQ ID NO: 1838780 - DNA, 15 bp, Homo sapiens
gcacccaggagattg

SEQ ID NO: 1838781 - DNA, 15 bp, Homo sapiens
cacccaggagattga

SEQ ID NO: 1838782 - DNA, 15 bp, Homo sapiens
acccaggagattgaa

SEQ ID NO: 1838783 - DNA, 15 bp, Homo sapiens
cccaggagattgaaa

SEQ ID NO: 1838784 - DNA, 15 bp, Homo sapiens
ccaggagattgaaat

SEQ ID NO: 1838785 - DNA, 15 bp, Homo sapiens
caggagattgaaata

SEQ ID NO: 1838786 - DNA, 15 bp, Homo sapiens
aggagattgaaatag

SEQ ID NO: 1838787 - DNA, 15 bp, Homo sapiens
ggagattgaaataga

SEQ ID NO: 1838788 - DNA, 15 bp, Homo sapiens
gagattgaaatagat

SEQ ID NO: 1838789 - DNA, 15 bp, Homo sapiens
agattgaaatagatt

SEQ ID NO: 1838790 - DNA, 15 bp, Homo sapiens
gattgaaatagattt

SEQ ID NO: 1838791 - DNA, 15 bp, Homo sapiens
attgaaatagatttg

SEQ ID NO: 1838792 - DNA, 15 bp, Homo sapiens
ttgaaatagatttgg

SEQ ID NO: 1838793 - DNA, 15 bp, Homo sapiens
tgaaatagatttgga

SEQ ID NO: 1838794 - DNA, 15 bp, Homo sapiens
gaaatagatttggag

SEQ ID NO: 1838795 - DNA, 15 bp, Homo sapiens
aaatagatttggaga

SEQ ID NO: 1838796 - DNA, 15 bp, Homo sapiens
aatagatttggagaa

SEQ ID NO: 1838797 - DNA, 15 bp, Homo sapiens
atagatttggagaac

SEQ ID NO: 1838798 - DNA, 15 bp, Homo sapiens
tagatttggagaaca

SEQ ID NO: 1838799 - DNA, 15 bp, Homo sapiens
agatttggagaacac

SEQ ID NO: 1838800 - DNA, 15 bp, Homo sapiens
gatttggagaacacc

SEQ ID NO: 1838801 - DNA, 15 bp, Homo sapiens
atttggagaacacct

SEQ ID NO: 1838802 - DNA, 15 bp, Homo sapiens
tttggagaacacctg

SEQ ID NO: 1838803 - DNA, 15 bp, Homo sapiens
ttggagaacacctgg

SEQ ID NO: 1838804 - DNA, 15 bp, Homo sapiens
tggagaacacctgga

SEQ ID NO: 1838805 - DNA, 15 bp, Homo sapiens
ggagaacacctggac

SEQ ID NO: 1838806 - DNA, 15 bp, Homo sapiens
gagaacacctggact

SEQ ID NO: 1838807 - DNA, 15 bp, Homo sapiens
agaacacctggactg

SEQ ID NO: 1838808 - DNA, 15 bp, Homo sapiens
gaacacctggactgc

SEQ ID NO: 1838809 - DNA, 15 bp, Homo sapiens
aacacctggactgct

SEQ ID NO: 1838810 - DNA, 15 bp, Homo sapiens
acacctggactgctg

SEQ ID NO: 1838811 - DNA, 15 bp, Homo sapiens
cacctggactgctga

SEQ ID NO: 1838812 - DNA, 15 bp, Homo sapiens
acctggactgctgaa

SEQ ID NO: 1838813 - DNA, 15 bp, Homo sapiens
cctggactgctgaag

SEQ ID NO: 1838814 - DNA, 15 bp, Homo sapiens
ctggactgctgaagg

SEQ ID NO: 1838815 - DNA, 15 bp, Homo sapiens
tggactgctgaaggg

SEQ ID NO: 1838816 - DNA, 15 bp, Homo sapiens
ggactgctgaagggg

SEQ ID NO: 1838817 - DNA, 15 bp, Homo sapiens
gactgctgaaggggc

SEQ ID NO: 1838818 - DNA, 15 bp, Homo sapiens
actgctgaaggggct

SEQ ID NO: 1838819 - DNA, 15 bp, Homo sapiens
ctgctgaaggggctc

SEQ ID NO: 1838820 - DNA, 15 bp, Homo sapiens
tgctgaaggggctcc

SEQ ID NO: 1838821 - DNA, 15 bp, Homo sapiens
gctgaaggggctccc

SEQ ID NO: 1838822 - DNA, 15 bp, Homo sapiens
ctgaaggggctcccg

SEQ ID NO: 1838823 - DNA, 15 bp, Homo sapiens
tgaaggggctcccga

SEQ ID NO: 1838824 - DNA, 15 bp, Homo sapiens
gaaggggctcccgag

SEQ ID NO: 1838825 - DNA, 15 bp, Homo sapiens
aaggggctcccgagt

SEQ ID NO: 1838826 - DNA, 15 bp, Homo sapiens
aggggctcccgagtc

SEQ ID NO: 1838827 - DNA, 15 bp, Homo sapiens
ggggctcccgagtcc

SEQ ID NO: 1838828 - DNA, 15 bp, Homo sapiens
gggctcccgagtccc

SEQ ID NO: 1838829 - DNA, 15 bp, Homo sapiens
ggctcccgagtccca

SEQ ID NO: 1838830 - DNA, 15 bp, Homo sapiens
gctcccgagtcccac

SEQ ID NO: 1838831 - DNA, 15 bp, Homo sapiens
ctcccgagtcccaca

SEQ ID NO: 1838832 - DNA, 15 bp, Homo sapiens
tcccgagtcccacac

SEQ ID NO: 1838833 - DNA, 15 bp, Homo sapiens
cccgagtcccacact

SEQ ID NO: 1838834 - DNA, 15 bp, Homo sapiens
ccgagtcccacactg

SEQ ID NO: 1838835 - DNA, 15 bp, Homo sapiens
cgagtcccacactga

SEQ ID NO: 1838836 - DNA, 15 bp, Homo sapiens
gagtcccacactgag

SEQ ID NO: 1838837 - DNA, 15 bp, Homo sapiens
agtcccacactgagg

SEQ ID NO: 1838838 - DNA, 15 bp, Homo sapiens
gtcccacactgaggg

SEQ ID NO: 1838839 - DNA, 15 bp, Homo sapiens
tcccacactgagggc

SEQ ID NO: 1838840 - DNA, 15 bp, Homo sapiens
cccacactgagggct

SEQ ID NO: 1838841 - DNA, 15 bp, Homo sapiens
ccacactgagggctt

SEQ ID NO: 1838842 - DNA, 15 bp, Homo sapiens
cacactgagggcttc

SEQ ID NO: 1838843 - DNA, 15 bp, Homo sapiens
acactgagggcttct

SEQ ID NO: 1838844 - DNA, 15 bp, Homo sapiens
cactgagggcttctg

SEQ ID NO: 1838845 - DNA, 15 bp, Homo sapiens
actgagggcttctgc

SEQ ID NO: 1838846 - DNA, 15 bp, Homo sapiens
ctgagggcttctgct

SEQ ID NO: 1838847 - DNA, 15 bp, Homo sapiens
tgagggcttctgctg

SEQ ID NO: 1838848 - DNA, 15 bp, Homo sapiens
gagggcttctgctgt

SEQ ID NO: 1838849 - DNA, 15 bp, Homo sapiens
agggcttctgctgtc

SEQ ID NO: 1838850 - DNA, 15 bp, Homo sapiens
gggcttctgctgtcc

SEQ ID NO: 1838851 - DNA, 15 bp, Homo sapiens
ggcttctgctgtcca

SEQ ID NO: 1838852 - DNA, 15 bp, Homo sapiens
gcttctgctgtccat

SEQ ID NO: 1838853 - DNA, 15 bp, Homo sapiens
cttctgctgtccata

SEQ ID NO: 1838854 - DNA, 15 bp, Homo sapiens
ttctgctgtccatag

SEQ ID NO: 1838855 - DNA, 15 bp, Homo sapiens
tctgctgtccatagc

SEQ ID NO: 1838856 - DNA, 15 bp, Homo sapiens
ctgctgtccatagct

SEQ ID NO: 1838857 - DNA, 15 bp, Homo sapiens
tgctgtccatagctg

SEQ ID NO: 1838858 - DNA, 15 bp, Homo sapiens
gctgtccatagctgg

SEQ ID NO: 1838859 - DNA, 15 bp, Homo sapiens
ctgtccatagctggc

SEQ ID NO: 1838860 - DNA, 15 bp, Homo sapiens
tgtccatagctggct

SEQ ID NO: 1838861 - DNA, 15 bp, Homo sapiens
gtccatagctggctc

SEQ ID NO: 1838862 - DNA, 15 bp, Homo sapiens
tccatagctggctct

SEQ ID NO: 1838863 - DNA, 15 bp, Homo sapiens
ccatagctggctctg

SEQ ID NO: 1838864 - DNA, 15 bp, Homo sapiens
catagctggctctgc

SEQ ID NO: 1838865 - DNA, 15 bp, Homo sapiens
atagctggctctgcc

SEQ ID NO: 1838866 - DNA, 15 bp, Homo sapiens
tagctggctctgcca

SEQ ID NO: 1838867 - DNA, 15 bp, Homo sapiens
agctggctctgccag

SEQ ID NO: 1838868 - DNA, 15 bp, Homo sapiens
gctggctctgccaga

SEQ ID NO: 1838869 - DNA, 15 bp, Homo sapiens
tataatgcttggaga

SEQ ID NO: 1838870 - DNA, 15 bp, Homo sapiens
ataatgcttggagag

SEQ ID NO: 1838871 - DNA, 15 bp, Homo sapiens
taatgcttggagaga

SEQ ID NO: 1838872 - DNA, 15 bp, Homo sapiens
aatgcttggagagaa

SEQ ID NO: 1838873 - DNA, 15 bp, Homo sapiens
atgcttggagagaag

SEQ ID NO: 1838874 - DNA, 15 bp, Homo sapiens
tgcttggagagaagt

SEQ ID NO: 1838875 - DNA, 15 bp, Homo sapiens
gcttggagagaagtg

SEQ ID NO: 1838876 - DNA, 15 bp, Homo sapiens
cttggagagaagtgc

SEQ ID NO: 1838877 - DNA, 15 bp, Homo sapiens
ttggagagaagtgca

SEQ ID NO: 1838878 - DNA, 15 bp, Homo sapiens
tggagagaagtgcaa

SEQ ID NO: 1838879 - DNA, 15 bp, Homo sapiens
ggagagaagtgcaaa

SEQ ID NO: 1838880 - DNA, 15 bp, Homo sapiens
gagagaagtgcaaat

SEQ ID NO: 1838881 - DNA, 15 bp, Homo sapiens
agagaagtgcaaatg

SEQ ID NO: 1838882 - DNA, 15 bp, Homo sapiens
gagaagtgcaaatgt

SEQ ID NO: 1838883 - DNA, 15 bp, Homo sapiens
agaagtgcaaatgtt

SEQ ID NO: 1838884 - DNA, 15 bp, Homo sapiens
gaagtgcaaatgttt

SEQ ID NO: 1838885 - DNA, 15 bp, Homo sapiens
aagtgcaaatgtttc

SEQ ID NO: 1838886 - DNA, 15 bp, Homo sapiens
agtgcaaatgtttca

SEQ ID NO: 1838887 - DNA, 15 bp, Homo sapiens
gtgcaaatgtttcat

SEQ ID NO: 1838888 - DNA, 15 bp, Homo sapiens
tgcaaatgtttcatc

SEQ ID NO: 1838889 - DNA, 15 bp, Homo sapiens
gcaaatgtttcatct

SEQ ID NO: 1838890 - DNA, 15 bp, Homo sapiens
caaatgtttcatctc

SEQ ID NO: 1838891 - DNA, 15 bp, Homo sapiens
aaatgtttcatctcc

SEQ ID NO: 1838892 - DNA, 15 bp, Homo sapiens
aatgtttcatctccg

SEQ ID NO: 1838893 - DNA, 15 bp, Homo sapiens
atgtttcatctccgc

SEQ ID NO: 1838894 - DNA, 15 bp, Homo sapiens
tgtttcatctccgcc

SEQ ID NO: 1838895 - DNA, 15 bp, Homo sapiens
gtttcatctccgcct

SEQ ID NO: 1838896 - DNA, 15 bp, Homo sapiens
tttcatctccgccta

SEQ ID NO: 1838897 - DNA, 15 bp, Homo sapiens
ttcatctccgcctac

SEQ ID NO: 1838898 - DNA, 15 bp, Homo sapiens
tcatctccgcctact

SEQ ID NO: 1838899 - DNA, 15 bp, Homo sapiens
catctccgcctactg

SEQ ID NO: 1838900 - DNA, 15 bp, Homo sapiens
atctccgcctactga

SEQ ID NO: 1838901 - DNA, 15 bp, Homo sapiens
tctccgcctactgag

SEQ ID NO: 1838902 - DNA, 15 bp, Homo sapiens
ctccgcctactgagt

SEQ ID NO: 1838903 - DNA, 15 bp, Homo sapiens
tccgcctactgagtt

SEQ ID NO: 1838904 - DNA, 15 bp, Homo sapiens
ccgcctactgagtta

SEQ ID NO: 1838905 - DNA, 15 bp, Homo sapiens
cgcctactgagttat

SEQ ID NO: 1838906 - DNA, 15 bp, Homo sapiens
gcctactgagttata

SEQ ID NO: 1838907 - DNA, 15 bp, Homo sapiens
cctactgagttatac

SEQ ID NO: 1838908 - DNA, 15 bp, Homo sapiens
ctactgagttatact

SEQ ID NO: 1838909 - DNA, 15 bp, Homo sapiens
tactgagttatactg

SEQ ID NO: 1838910 - DNA, 15 bp, Homo sapiens
actgagttatactgc

SEQ ID NO: 1838911 - DNA, 15 bp, Homo sapiens
ctgagttatactgcc

SEQ ID NO: 1838912 - DNA, 15 bp, Homo sapiens
tgagttatactgcct

SEQ ID NO: 1838913 - DNA, 15 bp, Homo sapiens
gagttatactgcctg

SEQ ID NO: 1838914 - DNA, 15 bp, Homo sapiens
agttatactgcctgt

SEQ ID NO: 1838915 - DNA, 15 bp, Homo sapiens
gttatactgcctgtt

SEQ ID NO: 1838916 - DNA, 15 bp, Homo sapiens
ttatactgcctgttt

SEQ ID NO: 1838917 - DNA, 15 bp, Homo sapiens
tatactgcctgttta

SEQ ID NO: 1838918 - DNA, 15 bp, Homo sapiens
atactgcctgtttac

SEQ ID NO: 1838919 - DNA, 15 bp, Homo sapiens
tactgcctgtttaca

SEQ ID NO: 1838920 - DNA, 15 bp, Homo sapiens
actgcctgtttacat

SEQ ID NO: 1838921 - DNA, 15 bp, Homo sapiens
ctgcctgtttacata

SEQ ID NO: 1838922 - DNA, 15 bp, Homo sapiens
tgcctgtttacataa

SEQ ID NO: 1838923 - DNA, 15 bp, Homo sapiens
gcctgtttacataag

SEQ ID NO: 1838924 - DNA, 15 bp, Homo sapiens
cctgtttacataagc

SEQ ID NO: 1838925 - DNA, 15 bp, Homo sapiens
ctgtttacataagcc

SEQ ID NO: 1838926 - DNA, 15 bp, Homo sapiens
tgtttacataagcct

SEQ ID NO: 1838927 - DNA, 15 bp, Homo sapiens
gtttacataagccta

SEQ ID NO: 1838928 - DNA, 15 bp, Homo sapiens
tttacataagcctat

SEQ ID NO: 1838929 - DNA, 15 bp, Homo sapiens
ttacataagcctata

SEQ ID NO: 1838930 - DNA, 15 bp, Homo sapiens
tacataagcctatat

SEQ ID NO: 1838931 - DNA, 15 bp, Homo sapiens
acataagcctatatt

SEQ ID NO: 1838932 - DNA, 15 bp, Homo sapiens
cataagcctatattc

SEQ ID NO: 1838933 - DNA, 15 bp, Homo sapiens
ataagcctatattca

SEQ ID NO: 1838934 - DNA, 15 bp, Homo sapiens
taagcctatattcag

SEQ ID NO: 1838935 - DNA, 15 bp, Homo sapiens
aagcctatattcagt

SEQ ID NO: 1838936 - DNA, 15 bp, Homo sapiens
agcctatattcagtg

SEQ ID NO: 1838937 - DNA, 15 bp, Homo sapiens
gcctatattcagtgg

SEQ ID NO: 1838938 - DNA, 15 bp, Homo sapiens
cctatattcagtggc

SEQ ID NO: 1838939 - DNA, 15 bp, Homo sapiens
ctatattcagtggcc

SEQ ID NO: 1838940 - DNA, 15 bp, Homo sapiens
tatattcagtggcct

SEQ ID NO: 1838941 - DNA, 15 bp, Homo sapiens
atattcagtggcctg

SEQ ID NO: 1838942 - DNA, 15 bp, Homo sapiens
tattcagtggcctga

SEQ ID NO: 1838943 - DNA, 15 bp, Homo sapiens
attcagtggcctgag

SEQ ID NO: 1838944 - DNA, 15 bp, Homo sapiens
ttcagtggcctgaga

SEQ ID NO: 1838945 - DNA, 15 bp, Homo sapiens
tcagtggcctgagaa

SEQ ID NO: 1838946 - DNA, 15 bp, Homo sapiens
cagtggcctgagaaa

SEQ ID NO: 1838947 - DNA, 15 bp, Homo sapiens
agtggcctgagaaaa

SEQ ID NO: 1838948 - DNA, 15 bp, Homo sapiens
gtggcctgagaaaag

SEQ ID NO: 1838949 - DNA, 15 bp, Homo sapiens
tggcctgagaaaagg

SEQ ID NO: 1838950 - DNA, 15 bp, Homo sapiens
ggcctgagaaaaggc

SEQ ID NO: 1838951 - DNA, 15 bp, Homo sapiens
gcctgagaaaaggct

SEQ ID NO: 1838952 - DNA, 15 bp, Homo sapiens
cctgagaaaaggctt

SEQ ID NO: 1838953 - DNA, 15 bp, Homo sapiens
ctgagaaaaggcttc

SEQ ID NO: 1838954 - DNA, 15 bp, Homo sapiens
tgagaaaaggcttct

SEQ ID NO: 1838955 - DNA, 15 bp, Homo sapiens
gagaaaaggcttctt

SEQ ID NO: 1838956 - DNA, 15 bp, Homo sapiens
agaaaaggcttcttg

SEQ ID NO: 1838957 - DNA, 15 bp, Homo sapiens
gaaaaggcttcttgc

SEQ ID NO: 1838958 - DNA, 15 bp, Homo sapiens
aaaaggcttcttgcc

SEQ ID NO: 1838959 - DNA, 15 bp, Homo sapiens
aaaggcttcttgcct

SEQ ID NO: 1838960 - DNA, 15 bp, Homo sapiens
aaggcttcttgcctt

SEQ ID NO: 1838961 - DNA, 15 bp, Homo sapiens
aggcttcttgccttc

SEQ ID NO: 1838962 - DNA, 15 bp, Homo sapiens
ggcttcttgccttct

SEQ ID NO: 1838963 - DNA, 15 bp, Homo sapiens
gcttcttgccttctt

SEQ ID NO: 1838964 - DNA, 15 bp, Homo sapiens
cttcttgccttcttc

SEQ ID NO: 1838965 - DNA, 15 bp, Homo sapiens
ttcttgccttcttca

SEQ ID NO: 1838966 - DNA, 15 bp, Homo sapiens
tcttgccttcttcag

SEQ ID NO: 1838967 - DNA, 15 bp, Homo sapiens
cttgccttcttcagg

SEQ ID NO: 1838968 - DNA, 15 bp, Homo sapiens
ttgccttcttcaggg

SEQ ID NO: 1838969 - DNA, 15 bp, Homo sapiens
tgccttcttcagggc

SEQ ID NO: 1838970 - DNA, 15 bp, Homo sapiens
gccttcttcagggcg

SEQ ID NO: 1838971 - DNA, 15 bp, Homo sapiens
ccttcttcagggcgt

SEQ ID NO: 1838972 - DNA, 15 bp, Homo sapiens
cttcttcagggcgtg

SEQ ID NO: 1838973 - DNA, 15 bp, Homo sapiens
ttcttcagggcgtga

SEQ ID NO: 1838974 - DNA, 15 bp, Homo sapiens
tcttcagggcgtgat

SEQ ID NO: 1838975 - DNA, 15 bp, Homo sapiens
cttcagggcgtgatg

SEQ ID NO: 1838976 - DNA, 15 bp, Homo sapiens
ttcagggcgtgatgg

SEQ ID NO: 1838977 - DNA, 15 bp, Homo sapiens
tcagggcgtgatggt

SEQ ID NO: 1838978 - DNA, 15 bp, Homo sapiens
cagggcgtgatggtg

SEQ ID NO: 1838979 - DNA, 15 bp, Homo sapiens
agggcgtgatggtgc

SEQ ID NO: 1838980 - DNA, 15 bp, Homo sapiens
gggcgtgatggtgca

SEQ ID NO: 1838981 - DNA, 15 bp, Homo sapiens
ggcgtgatggtgcaa

SEQ ID NO: 1838982 - DNA, 15 bp, Homo sapiens
gcgtgatggtgcaat

SEQ ID NO: 1838983 - DNA, 15 bp, Homo sapiens
cgtgatggtgcaatc

SEQ ID NO: 1838984 - DNA, 15 bp, Homo sapiens
gtgatggtgcaatct

SEQ ID NO: 1838985 - DNA, 15 bp, Homo sapiens
tgatggtgcaatctt

SEQ ID NO: 1838986 - DNA, 15 bp, Homo sapiens
gatggtgcaatcttg

SEQ ID NO: 1838987 - DNA, 15 bp, Homo sapiens
tggtgcaatcttggt

SEQ ID NO: 1838988 - DNA, 15 bp, Homo sapiens
ggtgcaatcttggtg

SEQ ID NO: 1838989 - DNA, 15 bp, Homo sapiens
gtgcaatcttggtgt

SEQ ID NO: 1838990 - DNA, 15 bp, Homo sapiens
tgcaatcttggtgta

SEQ ID NO: 1838991 - DNA, 15 bp, Homo sapiens
gcaatcttggtgtag

SEQ ID NO: 1838992 - DNA, 15 bp, Homo sapiens
caatcttggtgtaga

SEQ ID NO: 1838993 - DNA, 15 bp, Homo sapiens
aatcttggtgtagag

SEQ ID NO: 1838994 - DNA, 15 bp, Homo sapiens
atcttggtgtagagt

SEQ ID NO: 1838995 - DNA, 15 bp, Homo sapiens
tcttggtgtagagtt

SEQ ID NO: 1838996 - DNA, 15 bp, Homo sapiens
cttggtgtagagttt

SEQ ID NO: 1838997 - DNA, 15 bp, Homo sapiens
ttggtgtagagtttc

SEQ ID NO: 1838998 - DNA, 15 bp, Homo sapiens
tggtgtagagtttcc

SEQ ID NO: 1838999 - DNA, 15 bp, Homo sapiens
ggtgtagagtttcca

SEQ ID NO: 1839000 - DNA, 15 bp, Homo sapiens
gtgtagagtttccaa

SEQ ID NO: 1839001 - DNA, 15 bp, Homo sapiens
tgtagagtttccaag

SEQ ID NO: 1839002 - DNA, 15 bp, Homo sapiens
gtagagtttccaagc

SEQ ID NO: 1839003 - DNA, 15 bp, Homo sapiens
tagagtttccaagca

SEQ ID NO: 1839004 - DNA, 15 bp, Homo sapiens
agagtttccaagcag

SEQ ID NO: 1839005 - DNA, 15 bp, Homo sapiens
gagtttccaagcaga

SEQ ID NO: 1839006 - DNA, 15 bp, Homo sapiens
agtttccaagcagag

SEQ ID NO: 1839007 - DNA, 15 bp, Homo sapiens
gtttccaagcagaga

SEQ ID NO: 1839008 - DNA, 15 bp, Homo sapiens
tttccaagcagagat

SEQ ID NO: 1839009 - DNA, 15 bp, Homo sapiens
ttccaagcagagatg

SEQ ID NO: 1839010 - DNA, 15 bp, Homo sapiens
tccaagcagagatga

SEQ ID NO: 1839011 - DNA, 15 bp, Homo sapiens
ccaagcagagatgat

SEQ ID NO: 1839012 - DNA, 15 bp, Homo sapiens
caagcagagatgatg

SEQ ID NO: 1839013 - DNA, 15 bp, Homo sapiens
aagcagagatgatgc

SEQ ID NO: 1839014 - DNA, 15 bp, Homo sapiens
agcagagatgatgct

SEQ ID NO: 1839015 - DNA, 15 bp, Homo sapiens
gcagagatgatgcta

SEQ ID NO: 1839016 - DNA, 15 bp, Homo sapiens
cagagatgatgctac

SEQ ID NO: 1839017 - DNA, 15 bp, Homo sapiens
agagatgatgctacg

SEQ ID NO: 1839018 - DNA, 15 bp, Homo sapiens
gagatgatgctacgg

SEQ ID NO: 1839019 - DNA, 15 bp, Homo sapiens
agatgatgctacggc

SEQ ID NO: 1839020 - DNA, 15 bp, Homo sapiens
gatgatgctacggcc

SEQ ID NO: 1839021 - DNA, 15 bp, Homo sapiens
atgatgctacggcct

SEQ ID NO: 1839022 - DNA, 15 bp, Homo sapiens
tgatgctacggcctc

SEQ ID NO: 1839023 - DNA, 15 bp, Homo sapiens
gatgctacggcctca

SEQ ID NO: 1839024 - DNA, 15 bp, Homo sapiens
atgctacggcctcac

SEQ ID NO: 1839025 - DNA, 15 bp, Homo sapiens
tgctacggcctcacg

SEQ ID NO: 1839026 - DNA, 15 bp, Homo sapiens
gctacggcctcacgt

SEQ ID NO: 1839027 - DNA, 15 bp, Homo sapiens
ctacggcctcacgtg

SEQ ID NO: 1839028 - DNA, 15 bp, Homo sapiens
tacggcctcacgtgg

SEQ ID NO: 1839029 - DNA, 15 bp, Homo sapiens
acggcctcacgtggt

SEQ ID NO: 1839030 - DNA, 15 bp, Homo sapiens
cggcctcacgtggtg

SEQ ID NO: 1839031 - DNA, 15 bp, Homo sapiens
ggcctcacgtggtgg

SEQ ID NO: 1839032 - DNA, 15 bp, Homo sapiens
gcctcacgtggtggg

SEQ ID NO: 1839033 - DNA, 15 bp, Homo sapiens
cctcacgtggtggga

SEQ ID NO: 1839034 - DNA, 15 bp, Homo sapiens
ctcacgtggtgggaa

SEQ ID NO: 1839035 - DNA, 15 bp, Homo sapiens
tcacgtggtgggaag

SEQ ID NO: 1839036 - DNA, 15 bp, Homo sapiens
cacgtggtgggaagg

SEQ ID NO: 1839037 - DNA, 15 bp, Homo sapiens
acgtggtgggaaggc

SEQ ID NO: 1839038 - DNA, 15 bp, Homo sapiens
cgtggtgggaaggct

SEQ ID NO: 1839039 - DNA, 15 bp, Homo sapiens
gtggtgggaaggctg

SEQ ID NO: 1839040 - DNA, 15 bp, Homo sapiens
tggtgggaaggctgt

SEQ ID NO: 1839041 - DNA, 15 bp, Homo sapiens
ggtgggaaggctgtg

SEQ ID NO: 1839042 - DNA, 15 bp, Homo sapiens
gtgggaaggctgtgt

SEQ ID NO: 1839043 - DNA, 15 bp, Homo sapiens
tgggaaggctgtgtg

SEQ ID NO: 1839044 - DNA, 15 bp, Homo sapiens
gggaaggctgtgtgg

SEQ ID NO: 1839045 - DNA, 15 bp, Homo sapiens
ggaaggctgtgtggc

SEQ ID NO: 1839046 - DNA, 15 bp, Homo sapiens
gaaggctgtgtggca

SEQ ID NO: 1839047 - DNA, 15 bp, Homo sapiens
aaggctgtgtggcag

SEQ ID NO: 1839048 - DNA, 15 bp, Homo sapiens
aggctgtgtggcagg

SEQ ID NO: 1839049 - DNA, 15 bp, Homo sapiens
ggctgtgtggcagga

SEQ ID NO: 1839050 - DNA, 15 bp, Homo sapiens
gctgtgtggcaggaa

SEQ ID NO: 1839051 - DNA, 15 bp, Homo sapiens
ctgtgtggcaggaag

SEQ ID NO: 1839052 - DNA, 15 bp, Homo sapiens
tgtgtggcaggaaga

SEQ ID NO: 1839053 - DNA, 15 bp, Homo sapiens
gtgtggcaggaagaa

SEQ ID NO: 1839054 - DNA, 15 bp, Homo sapiens
tgtggcaggaagaat

SEQ ID NO: 1839055 - DNA, 15 bp, Homo sapiens
gtggcaggaagaata

SEQ ID NO: 1839056 - DNA, 15 bp, Homo sapiens
tggcaggaagaataa

SEQ ID NO: 1839057 - DNA, 15 bp, Homo sapiens
ggcaggaagaataag

SEQ ID NO: 1839058 - DNA, 15 bp, Homo sapiens
gcaggaagaataagt

SEQ ID NO: 1839059 - DNA, 15 bp, Homo sapiens
caggaagaataagtt

SEQ ID NO: 1839060 - DNA, 15 bp, Homo sapiens
aggaagaataagttc

SEQ ID NO: 1839061 - DNA, 15 bp, Homo sapiens
ggaagaataagttca

SEQ ID NO: 1839062 - DNA, 15 bp, Homo sapiens
gaagaataagttcaa

SEQ ID NO: 1839063 - DNA, 15 bp, Homo sapiens
aagaataagttcaaa

SEQ ID NO: 1839064 - DNA, 15 bp, Homo sapiens
agaataagttcaaac

SEQ ID NO: 1839065 - DNA, 15 bp, Homo sapiens
gaataagttcaaact

SEQ ID NO: 1839066 - DNA, 15 bp, Homo sapiens
aataagttcaaactg

SEQ ID NO: 1839067 - DNA, 15 bp, Homo sapiens
ataagttcaaactgt

SEQ ID NO: 1839068 - DNA, 15 bp, Homo sapiens
taagttcaaactgtg

SEQ ID NO: 1839069 - DNA, 15 bp, Homo sapiens
aagttcaaactgtgc

SEQ ID NO: 1839070 - DNA, 15 bp, Homo sapiens
agttcaaactgtgct

SEQ ID NO: 1839071 - DNA, 15 bp, Homo sapiens
gttcaaactgtgctt

SEQ ID NO: 1839072 - DNA, 15 bp, Homo sapiens
ttcaaactgtgcttt

SEQ ID NO: 1839073 - DNA, 15 bp, Homo sapiens
tcaaactgtgctttg

SEQ ID NO: 1839074 - DNA, 15 bp, Homo sapiens
caaactgtgctttgt

SEQ ID NO: 1839075 - DNA, 15 bp, Homo sapiens
aaactgtgctttgtt

SEQ ID NO: 1839076 - DNA, 15 bp, Homo sapiens
aactgtgctttgttt

SEQ ID NO: 1839077 - DNA, 15 bp, Homo sapiens
actgtgctttgttta

SEQ ID NO: 1839078 - DNA, 15 bp, Homo sapiens
ctgtgctttgtttag

SEQ ID NO: 1839079 - DNA, 15 bp, Homo sapiens
tgtgctttgtttaga

SEQ ID NO: 1839080 - DNA, 15 bp, Homo sapiens
gtgctttgtttagaa

SEQ ID NO: 1839081 - DNA, 15 bp, Homo sapiens
tgctttgtttagaac

SEQ ID NO: 1839082 - DNA, 15 bp, Homo sapiens
gctttgtttagaact

SEQ ID NO: 1839083 - DNA, 15 bp, Homo sapiens
ctttgtttagaactg

SEQ ID NO: 1839084 - DNA, 15 bp, Homo sapiens
tttgtttagaactgt

SEQ ID NO: 1839085 - DNA, 15 bp, Homo sapiens
ttgtttagaactgtt

SEQ ID NO: 1839086 - DNA, 15 bp, Homo sapiens
tgtttagaactgttg

SEQ ID NO: 1839087 - DNA, 15 bp, Homo sapiens
gtttagaactgttgt

SEQ ID NO: 1839088 - DNA, 15 bp, Homo sapiens
tttagaactgttgtg

SEQ ID NO: 1839089 - DNA, 15 bp, Homo sapiens
ttagaactgttgtgc

SEQ ID NO: 1839090 - DNA, 15 bp, Homo sapiens
tagaactgttgtgca

SEQ ID NO: 1839091 - DNA, 15 bp, Homo sapiens
agaactgttgtgcaa

SEQ ID NO: 1839092 - DNA, 15 bp, Homo sapiens
gaactgttgtgcaaa

SEQ ID NO: 1839093 - DNA, 15 bp, Homo sapiens
aactgttgtgcaaag

SEQ ID NO: 1839094 - DNA, 15 bp, Homo sapiens
actgttgtgcaaagt

SEQ ID NO: 1839095 - DNA, 15 bp, Homo sapiens
ctgttgtgcaaagtt

SEQ ID NO: 1839096 - DNA, 15 bp, Homo sapiens
tgttgtgcaaagttg

SEQ ID NO: 1839097 - DNA, 15 bp, Homo sapiens
gttgtgcaaagttgt

SEQ ID NO: 1839098 - DNA, 15 bp, Homo sapiens
ttgtgcaaagttgtt

SEQ ID NO: 1839099 - DNA, 15 bp, Homo sapiens
tgtgcaaagttgttt

SEQ ID NO: 1839100 - DNA, 15 bp, Homo sapiens
gtgcaaagttgtttc

SEQ ID NO: 1839101 - DNA, 15 bp, Homo sapiens
tgcaaagttgtttct

SEQ ID NO: 1839102 - DNA, 15 bp, Homo sapiens
gcaaagttgtttctt

SEQ ID NO: 1839103 - DNA, 15 bp, Homo sapiens
caaagttgtttcttc

SEQ ID NO: 1839104 - DNA, 15 bp, Homo sapiens
aaagttgtttcttcc

SEQ ID NO: 1839105 - DNA, 15 bp, Homo sapiens
aagttgtttcttcca

SEQ ID NO: 1839106 - DNA, 15 bp, Homo sapiens
agttgtttcttccat

SEQ ID NO: 1839107 - DNA, 15 bp, Homo sapiens
gttgtttcttccatc

SEQ ID NO: 1839108 - DNA, 15 bp, Homo sapiens
ttgtttcttccatcc

SEQ ID NO: 1839109 - DNA, 15 bp, Homo sapiens
tgtttcttccatcca

SEQ ID NO: 1839110 - DNA, 15 bp, Homo sapiens
gtttcttccatccaa

SEQ ID NO: 1839111 - DNA, 15 bp, Homo sapiens
tttcttccatccaag

SEQ ID NO: 1839112 - DNA, 15 bp, Homo sapiens
ttcttccatccaagt

SEQ ID NO: 1839113 - DNA, 15 bp, Homo sapiens
tcttccatccaagta

SEQ ID NO: 1839114 - DNA, 15 bp, Homo sapiens
cttccatccaagtat

SEQ ID NO: 1839115 - DNA, 15 bp, Homo sapiens
ttccatccaagtatt

SEQ ID NO: 1839116 - DNA, 15 bp, Homo sapiens
tccatccaagtatta

SEQ ID NO: 1839117 - DNA, 15 bp, Homo sapiens
ccatccaagtattaa

SEQ ID NO: 1839118 - DNA, 15 bp, Homo sapiens
catccaagtattaac

SEQ ID NO: 1839119 - DNA, 15 bp, Homo sapiens
atccaagtattaact

SEQ ID NO: 1839120 - DNA, 15 bp, Homo sapiens
tccaagtattaactg

SEQ ID NO: 1839121 - DNA, 15 bp, Homo sapiens
ccaagtattaactgg

SEQ ID NO: 1839122 - DNA, 15 bp, Homo sapiens
caagtattaactggg

SEQ ID NO: 1839123 - DNA, 15 bp, Homo sapiens
aagtattaactgggc

SEQ ID NO: 1839124 - DNA, 15 bp, Homo sapiens
agtattaactgggcc

SEQ ID NO: 1839125 - DNA, 15 bp, Homo sapiens
gtattaactgggcca

SEQ ID NO: 1839126 - DNA, 15 bp, Homo sapiens
tattaactgggccag

SEQ ID NO: 1839127 - DNA, 15 bp, Homo sapiens
attaactgggccaga

SEQ ID NO: 1839128 - DNA, 15 bp, Homo sapiens
ttaactgggccagac

SEQ ID NO: 1839129 - DNA, 15 bp, Homo sapiens
taactgggccagacc

SEQ ID NO: 1839130 - DNA, 15 bp, Homo sapiens
aactgggccagaccc

SEQ ID NO: 1839131 - DNA, 15 bp, Homo sapiens
actgggccagaccct

SEQ ID NO: 1839132 - DNA, 15 bp, Homo sapiens
ctgggccagaccctg

SEQ ID NO: 1839133 - DNA, 15 bp, Homo sapiens
tgggccagaccctgc

SEQ ID NO: 1839134 - DNA, 15 bp, Homo sapiens
gggccagaccctgct

SEQ ID NO: 1839135 - DNA, 15 bp, Homo sapiens
ggccagaccctgctt

SEQ ID NO: 1839136 - DNA, 15 bp, Homo sapiens
gccagaccctgctta

SEQ ID NO: 1839137 - DNA, 15 bp, Homo sapiens
ccagaccctgcttag

SEQ ID NO: 1839138 - DNA, 15 bp, Homo sapiens
cagaccctgcttagc

SEQ ID NO: 1839139 - DNA, 15 bp, Homo sapiens
agaccctgcttagct

SEQ ID NO: 1839140 - DNA, 15 bp, Homo sapiens
gaccctgcttagctg

SEQ ID NO: 1839141 - DNA, 15 bp, Homo sapiens
accctgcttagctgc

SEQ ID NO: 1839142 - DNA, 15 bp, Homo sapiens
ccctgcttagctgcc

SEQ ID NO: 1839143 - DNA, 15 bp, Homo sapiens
cctgcttagctgcca

SEQ ID NO: 1839144 - DNA, 15 bp, Homo sapiens
ctgcttagctgccaa

SEQ ID NO: 1839145 - DNA, 15 bp, Homo sapiens
tgcttagctgccaag

SEQ ID NO: 1839146 - DNA, 15 bp, Homo sapiens
gcttagctgccaaga

SEQ ID NO: 1839147 - DNA, 15 bp, Homo sapiens
cttagctgccaagat

SEQ ID NO: 1839148 - DNA, 15 bp, Homo sapiens
ttagctgccaagatc

SEQ ID NO: 1839149 - DNA, 15 bp, Homo sapiens
tagctgccaagatca

SEQ ID NO: 1839150 - DNA, 15 bp, Homo sapiens
agctgccaagatcag

SEQ ID NO: 1839151 - DNA, 15 bp, Homo sapiens
gctgccaagatcaga

SEQ ID NO: 1839152 - DNA, 15 bp, Homo sapiens
ctgccaagatcagac

SEQ ID NO: 1839153 - DNA, 15 bp, Homo sapiens
tgccaagatcagaca

SEQ ID NO: 1839154 - DNA, 15 bp, Homo sapiens
gccaagatcagacaa

SEQ ID NO: 1839155 - DNA, 15 bp, Homo sapiens
ccaagatcagacaag

SEQ ID NO: 1839156 - DNA, 15 bp, Homo sapiens
caagatcagacaaga

SEQ ID NO: 1839157 - DNA, 15 bp, Homo sapiens
aagatcagacaagat

SEQ ID NO: 1839158 - DNA, 15 bp, Homo sapiens
agatcagacaagatc

SEQ ID NO: 1839159 - DNA, 15 bp, Homo sapiens
gatcagacaagatca

SEQ ID NO: 1839160 - DNA, 15 bp, Homo sapiens
atcagacaagatcag

SEQ ID NO: 1839161 - DNA, 15 bp, Homo sapiens
tcagacaagatcagg

SEQ ID NO: 1839162 - DNA, 15 bp, Homo sapiens
cagacaagatcaggt

SEQ ID NO: 1839163 - DNA, 15 bp, Homo sapiens
agacaagatcaggtg

SEQ ID NO: 1839164 - DNA, 15 bp, Homo sapiens
gacaagatcaggtgt

SEQ ID NO: 1839165 - DNA, 15 bp, Homo sapiens
acaagatcaggtgtg

SEQ ID NO: 1839166 - DNA, 15 bp, Homo sapiens
caagatcaggtgtgt

SEQ ID NO: 1839167 - DNA, 15 bp, Homo sapiens
aagatcaggtgtgtc

SEQ ID NO: 1839168 - DNA, 15 bp, Homo sapiens
agatcaggtgtgtcc

SEQ ID NO: 1839169 - DNA, 15 bp, Homo sapiens
gatcaggtgtgtcca

SEQ ID NO: 1839170 - DNA, 15 bp, Homo sapiens
atcaggtgtgtccag

SEQ ID NO: 1839171 - DNA, 15 bp, Homo sapiens
tcaggtgtgtccagg

SEQ ID NO: 1839172 - DNA, 15 bp, Homo sapiens
caggtgtgtccaggg

SEQ ID NO: 1839173 - DNA, 15 bp, Homo sapiens
aggtgtgtccagggt

SEQ ID NO: 1839174 - DNA, 15 bp, Homo sapiens
ggtgtgtccagggtg

SEQ ID NO: 1839175 - DNA, 15 bp, Homo sapiens
gtgtgtccagggtgg

SEQ ID NO: 1839176 - DNA, 15 bp, Homo sapiens
tgtgtccagggtggt

SEQ ID NO: 1839177 - DNA, 15 bp, Homo sapiens
gtgtccagggtggta

SEQ ID NO: 1839178 - DNA, 15 bp, Homo sapiens
tgtccagggtggtat

SEQ ID NO: 1839179 - DNA, 15 bp, Homo sapiens
gtccagggtggtatg

SEQ ID NO: 1839180 - DNA, 15 bp, Homo sapiens
tccagggtggtatgg

SEQ ID NO: 1839181 - DNA, 15 bp, Homo sapiens
ccagggtggtatggc

SEQ ID NO: 1839182 - DNA, 15 bp, Homo sapiens
cagggtggtatggcc

SEQ ID NO: 1839183 - DNA, 15 bp, Homo sapiens
agggtggtatggccg

SEQ ID NO: 1839184 - DNA, 15 bp, Homo sapiens
gggtggtatggccgc

SEQ ID NO: 1839185 - DNA, 15 bp, Homo sapiens
ggtggtatggccgca

SEQ ID NO: 1839186 - DNA, 15 bp, Homo sapiens
gtggtatggccgcag

SEQ ID NO: 1839187 - DNA, 15 bp, Homo sapiens
tggtatggccgcaga

SEQ ID NO: 1839188 - DNA, 15 bp, Homo sapiens
ggtatggccgcagat

SEQ ID NO: 1839189 - DNA, 15 bp, Homo sapiens
gtatggccgcagata

SEQ ID NO: 1839190 - DNA, 15 bp, Homo sapiens
tatggccgcagatac

SEQ ID NO: 1839191 - DNA, 15 bp, Homo sapiens
atggccgcagatacc

SEQ ID NO: 1839192 - DNA, 15 bp, Homo sapiens
tggccgcagatacca

SEQ ID NO: 1839193 - DNA, 15 bp, Homo sapiens
ggccgcagataccaa

SEQ ID NO: 1839194 - DNA, 15 bp, Homo sapiens
gccgcagataccaag

SEQ ID NO: 1839195 - DNA, 15 bp, Homo sapiens
ccgcagataccaagc

SEQ ID NO: 1839196 - DNA, 15 bp, Homo sapiens
cgcagataccaagct

SEQ ID NO: 1839197 - DNA, 15 bp, Homo sapiens
gcagataccaagcta

SEQ ID NO: 1839198 - DNA, 15 bp, Homo sapiens
cagataccaagctat

SEQ ID NO: 1839199 - DNA, 15 bp, Homo sapiens
agataccaagctatt

SEQ ID NO: 1839200 - DNA, 15 bp, Homo sapiens
gataccaagctattt

SEQ ID NO: 1839201 - DNA, 15 bp, Homo sapiens
ataccaagctatttc

SEQ ID NO: 1839202 - DNA, 15 bp, Homo sapiens
taccaagctatttct

SEQ ID NO: 1839203 - DNA, 15 bp, Homo sapiens
accaagctatttcta

SEQ ID NO: 1839204 - DNA, 15 bp, Homo sapiens
ccaagctatttctaa

SEQ ID NO: 1839205 - DNA, 15 bp, Homo sapiens
caagctatttctaac

SEQ ID NO: 1839206 - DNA, 15 bp, Homo sapiens
aagctatttctaaca

SEQ ID NO: 1839207 - DNA, 15 bp, Homo sapiens
agctatttctaacac

SEQ ID NO: 1839208 - DNA, 15 bp, Homo sapiens
gctatttctaacaca

SEQ ID NO: 1839209 - DNA, 15 bp, Homo sapiens
ctatttctaacacaa

SEQ ID NO: 1839210 - DNA, 15 bp, Homo sapiens
tatttctaacacaag

SEQ ID NO: 1839211 - DNA, 15 bp, Homo sapiens
atttctaacacaagg

SEQ ID NO: 1839212 - DNA, 15 bp, Homo sapiens
tttctaacacaagga

SEQ ID NO: 1839213 - DNA, 15 bp, Homo sapiens
ttctaacacaaggat

SEQ ID NO: 1839214 - DNA, 15 bp, Homo sapiens
tctaacacaaggatg

SEQ ID NO: 1839215 - DNA, 15 bp, Homo sapiens
ctaacacaaggatgc

SEQ ID NO: 1839216 - DNA, 15 bp, Homo sapiens
taacacaaggatgct

SEQ ID NO: 1839217 - DNA, 15 bp, Homo sapiens
aacacaaggatgctc

SEQ ID NO: 1839218 - DNA, 15 bp, Homo sapiens
acacaaggatgctct

SEQ ID NO: 1839219 - DNA, 15 bp, Homo sapiens
cacaaggatgctctc

SEQ ID NO: 1839220 - DNA, 15 bp, Homo sapiens
acaaggatgctctcc

SEQ ID NO: 1839221 - DNA, 15 bp, Homo sapiens
caaggatgctctcct

SEQ ID NO: 1839222 - DNA, 15 bp, Homo sapiens
aaggatgctctcctt

SEQ ID NO: 1839223 - DNA, 15 bp, Homo sapiens
aggatgctctccttt

SEQ ID NO: 1839224 - DNA, 15 bp, Homo sapiens
ggatgctctcctttt

SEQ ID NO: 1839225 - DNA, 15 bp, Homo sapiens
gatgctctcctttta

SEQ ID NO: 1839226 - DNA, 15 bp, Homo sapiens
atgctctccttttat

SEQ ID NO: 1839227 - DNA, 15 bp, Homo sapiens
tgctctccttttatt

SEQ ID NO: 1839228 - DNA, 15 bp, Homo sapiens
gctctccttttattg

SEQ ID NO: 1839229 - DNA, 15 bp, Homo sapiens
ctctccttttattga

SEQ ID NO: 1839230 - DNA, 15 bp, Homo sapiens
tctccttttattgag

SEQ ID NO: 1839231 - DNA, 15 bp, Homo sapiens
ctccttttattgagc

SEQ ID NO: 1839232 - DNA, 15 bp, Homo sapiens
tccttttattgagca

SEQ ID NO: 1839233 - DNA, 15 bp, Homo sapiens
ccttttattgagcag

SEQ ID NO: 1839234 - DNA, 15 bp, Homo sapiens
cttttattgagcagg

SEQ ID NO: 1839235 - DNA, 15 bp, Homo sapiens
ttttattgagcaggg

SEQ ID NO: 1839236 - DNA, 15 bp, Homo sapiens
tttattgagcaggga

SEQ ID NO: 1839237 - DNA, 15 bp, Homo sapiens
ttattgagcagggag

SEQ ID NO: 1839238 - DNA, 15 bp, Homo sapiens
tattgagcagggaga

SEQ ID NO: 1839239 - DNA, 15 bp, Homo sapiens
attgagcagggagaa

SEQ ID NO: 1839240 - DNA, 15 bp, Homo sapiens
ttgagcagggagaag

SEQ ID NO: 1839241 - DNA, 15 bp, Homo sapiens
tgagcagggagaaga

SEQ ID NO: 1839242 - DNA, 15 bp, Homo sapiens
gagcagggagaagac

SEQ ID NO: 1839243 - DNA, 15 bp, Homo sapiens
agcagggagaagaca

SEQ ID NO: 1839244 - DNA, 15 bp, Homo sapiens
gcagggagaagacag

SEQ ID NO: 1839245 - DNA, 15 bp, Homo sapiens
cagggagaagacagc

SEQ ID NO: 1839246 - DNA, 15 bp, Homo sapiens
agggagaagacagca

SEQ ID NO: 1839247 - DNA, 15 bp, Homo sapiens
gggagaagacagcac

SEQ ID NO: 1839248 - DNA, 15 bp, Homo sapiens
ggagaagacagcacg

SEQ ID NO: 1839249 - DNA, 15 bp, Homo sapiens
gagaagacagcacgt

SEQ ID NO: 1839250 - DNA, 15 bp, Homo sapiens
agaagacagcacgta

SEQ ID NO: 1839251 - DNA, 15 bp, Homo sapiens
gaagacagcacgtac

SEQ ID NO: 1839252 - DNA, 15 bp, Homo sapiens
aagacagcacgtaca

SEQ ID NO: 1839253 - DNA, 15 bp, Homo sapiens
agacagcacgtacag

SEQ ID NO: 1839254 - DNA, 15 bp, Homo sapiens
gacagcacgtacaga

SEQ ID NO: 1839255 - DNA, 15 bp, Homo sapiens
acagcacgtacagac

SEQ ID NO: 1839256 - DNA, 15 bp, Homo sapiens
cagcacgtacagacc

SEQ ID NO: 1839257 - DNA, 15 bp, Homo sapiens
agcacgtacagacca

SEQ ID NO: 1839258 - DNA, 15 bp, Homo sapiens
gcacgtacagaccaa

SEQ ID NO: 1839259 - DNA, 15 bp, Homo sapiens
cacgtacagaccaac

SEQ ID NO: 1839260 - DNA, 15 bp, Homo sapiens
acgtacagaccaacc

SEQ ID NO: 1839261 - DNA, 15 bp, Homo sapiens
cgtacagaccaacca

SEQ ID NO: 1839262 - DNA, 15 bp, Homo sapiens
gtacagaccaaccat

SEQ ID NO: 1839263 - DNA, 15 bp, Homo sapiens
tacagaccaaccatc

SEQ ID NO: 1839264 - DNA, 15 bp, Homo sapiens
acagaccaaccatcc

SEQ ID NO: 1839265 - DNA, 15 bp, Homo sapiens
cagaccaaccatcct

SEQ ID NO: 1839266 - DNA, 15 bp, Homo sapiens
agaccaaccatcctg

SEQ ID NO: 1839267 - DNA, 15 bp, Homo sapiens
gaccaaccatcctgg

SEQ ID NO: 1839268 - DNA, 15 bp, Homo sapiens
accaaccatcctggt

SEQ ID NO: 1839269 - DNA, 15 bp, Homo sapiens
ccaaccatcctggtt

SEQ ID NO: 1839270 - DNA, 15 bp, Homo sapiens
caaccatcctggttg

SEQ ID NO: 1839271 - DNA, 15 bp, Homo sapiens
aaccatcctggttgt

SEQ ID NO: 1839272 - DNA, 15 bp, Homo sapiens
accatcctggttgta

SEQ ID NO: 1839273 - DNA, 15 bp, Homo sapiens
ccatcctggttgtaa

SEQ ID NO: 1839274 - DNA, 15 bp, Homo sapiens
catcctggttgtaaa

SEQ ID NO: 1839275 - DNA, 15 bp, Homo sapiens
atcctggttgtaaac

SEQ ID NO: 1839276 - DNA, 15 bp, Homo sapiens
tcctggttgtaaact

SEQ ID NO: 1839277 - DNA, 15 bp, Homo sapiens
cctggttgtaaactt

SEQ ID NO: 1839278 - DNA, 15 bp, Homo sapiens
ctggttgtaaacttg

SEQ ID NO: 1839279 - DNA, 15 bp, Homo sapiens
tggttgtaaacttgt

SEQ ID NO: 1839280 - DNA, 15 bp, Homo sapiens
ggttgtaaacttgtg

SEQ ID NO: 1839281 - DNA, 15 bp, Homo sapiens
gttgtaaacttgtgt

SEQ ID NO: 1839282 - DNA, 15 bp, Homo sapiens
ttgtaaacttgtgtc

SEQ ID NO: 1839283 - DNA, 15 bp, Homo sapiens
tgtaaacttgtgtcc

SEQ ID NO: 1839284 - DNA, 15 bp, Homo sapiens
gtaaacttgtgtcct

SEQ ID NO: 1839285 - DNA, 15 bp, Homo sapiens
taaacttgtgtccta

SEQ ID NO: 1839286 - DNA, 15 bp, Homo sapiens
aaacttgtgtcctag

SEQ ID NO: 1839287 - DNA, 15 bp, Homo sapiens
aacttgtgtcctagt

SEQ ID NO: 1839288 - DNA, 15 bp, Homo sapiens
acttgtgtcctagtc

SEQ ID NO: 1839289 - DNA, 15 bp, Homo sapiens
cttgtgtcctagtca

SEQ ID NO: 1839290 - DNA, 15 bp, Homo sapiens
ttgtgtcctagtcag

SEQ ID NO: 1839291 - DNA, 15 bp, Homo sapiens
tgtgtcctagtcaga

SEQ ID NO: 1839292 - DNA, 15 bp, Homo sapiens
gtgtcctagtcagag

SEQ ID NO: 1839293 - DNA, 15 bp, Homo sapiens
tgtcctagtcagagc

SEQ ID NO: 1839294 - DNA, 15 bp, Homo sapiens
gtcctagtcagagct

SEQ ID NO: 1839295 - DNA, 15 bp, Homo sapiens
tcctagtcagagctc

SEQ ID NO: 1839296 - DNA, 15 bp, Homo sapiens
cctagtcagagctct

SEQ ID NO: 1839297 - DNA, 15 bp, Homo sapiens
ctagtcagagctctt

SEQ ID NO: 1839298 - DNA, 15 bp, Homo sapiens
tagtcagagctcttt

SEQ ID NO: 1839299 - DNA, 15 bp, Homo sapiens
agtcagagctctttc

SEQ ID NO: 1839300 - DNA, 15 bp, Homo sapiens
gtcagagctctttct

SEQ ID NO: 1839301 - DNA, 15 bp, Homo sapiens
tcagagctctttcta

SEQ ID NO: 1839302 - DNA, 15 bp, Homo sapiens
cagagctctttctag

SEQ ID NO: 1839303 - DNA, 15 bp, Homo sapiens
agagctctttctagc

SEQ ID NO: 1839304 - DNA, 15 bp, Homo sapiens
gagctctttctagct

SEQ ID NO: 1839305 - DNA, 15 bp, Homo sapiens
agctctttctagctg

SEQ ID NO: 1839306 - DNA, 15 bp, Homo sapiens
gctctttctagctgg

SEQ ID NO: 1839307 - DNA, 15 bp, Homo sapiens
ctctttctagctgga

SEQ ID NO: 1839308 - DNA, 15 bp, Homo sapiens
tctttctagctggag

SEQ ID NO: 1839309 - DNA, 15 bp, Homo sapiens
ctttctagctggagt

SEQ ID NO: 1839310 - DNA, 15 bp, Homo sapiens
tttctagctggagta

SEQ ID NO: 1839311 - DNA, 15 bp, Homo sapiens
ttctagctggagtag

SEQ ID NO: 1839312 - DNA, 15 bp, Homo sapiens
tctagctggagtaga

SEQ ID NO: 1839313 - DNA, 15 bp, Homo sapiens
ctagctggagtagaa

SEQ ID NO: 1839314 - DNA, 15 bp, Homo sapiens
tagctggagtagaaa

SEQ ID NO: 1839315 - DNA, 15 bp, Homo sapiens
agctggagtagaaaa

SEQ ID NO: 1839316 - DNA, 15 bp, Homo sapiens
gctggagtagaaaat

SEQ ID NO: 1839317 - DNA, 15 bp, Homo sapiens
ctggagtagaaaatt

SEQ ID NO: 1839318 - DNA, 15 bp, Homo sapiens
tggagtagaaaattc

SEQ ID NO: 1839319 - DNA, 15 bp, Homo sapiens
ggagtagaaaattct

SEQ ID NO: 1839320 - DNA, 15 bp, Homo sapiens
gagtagaaaattctt

SEQ ID NO: 1839321 - DNA, 15 bp, Homo sapiens
agtagaaaattctta

SEQ ID NO: 1839322 - DNA, 15 bp, Homo sapiens
gtagaaaattcttag

SEQ ID NO: 1839323 - DNA, 15 bp, Homo sapiens
tagaaaattcttagg

SEQ ID NO: 1839324 - DNA, 15 bp, Homo sapiens
agaaaattcttaggc

SEQ ID NO: 1839325 - DNA, 15 bp, Homo sapiens
gaaaattcttaggct

SEQ ID NO: 1839326 - DNA, 15 bp, Homo sapiens
aaaattcttaggctg

SEQ ID NO: 1839327 - DNA, 15 bp, Homo sapiens
aaattcttaggctgt

SEQ ID NO: 1839328 - DNA, 15 bp, Homo sapiens
aattcttaggctgta

SEQ ID NO: 1839329 - DNA, 15 bp, Homo sapiens
attcttaggctgtat

SEQ ID NO: 1839330 - DNA, 15 bp, Homo sapiens
ttcttaggctgtatg

SEQ ID NO: 1839331 - DNA, 15 bp, Homo sapiens
tcttaggctgtatgt

SEQ ID NO: 1839332 - DNA, 15 bp, Homo sapiens
cttaggctgtatgta

SEQ ID NO: 1839333 - DNA, 15 bp, Homo sapiens
ttaggctgtatgtaa

SEQ ID NO: 1839334 - DNA, 15 bp, Homo sapiens
taggctgtatgtaat

SEQ ID NO: 1839335 - DNA, 15 bp, Homo sapiens
aggctgtatgtaatg

SEQ ID NO: 1839336 - DNA, 15 bp, Homo sapiens
ggctgtatgtaatgg

SEQ ID NO: 1839337 - DNA, 15 bp, Homo sapiens
gctgtatgtaatgga

SEQ ID NO: 1839338 - DNA, 15 bp, Homo sapiens
ctgtatgtaatggaa

SEQ ID NO: 1839339 - DNA, 15 bp, Homo sapiens
tgtatgtaatggaaa

SEQ ID NO: 1839340 - DNA, 15 bp, Homo sapiens
gtatgtaatggaaag

SEQ ID NO: 1839341 - DNA, 15 bp, Homo sapiens
tatgtaatggaaaga

SEQ ID NO: 1839342 - DNA, 15 bp, Homo sapiens
atgtaatggaaagag

SEQ ID NO: 1839343 - DNA, 15 bp, Homo sapiens
tgtaatggaaagaga

SEQ ID NO: 1839344 - DNA, 15 bp, Homo sapiens
gtaatggaaagagag

SEQ ID NO: 1839345 - DNA, 15 bp, Homo sapiens
taatggaaagagagt

SEQ ID NO: 1839346 - DNA, 15 bp, Homo sapiens
aatggaaagagagtg

SEQ ID NO: 1839347 - DNA, 15 bp, Homo sapiens
atggaaagagagtgg

SEQ ID NO: 1839348 - DNA, 15 bp, Homo sapiens
tggaaagagagtgga

SEQ ID NO: 1839349 - DNA, 15 bp, Homo sapiens
ggaaagagagtggag

SEQ ID NO: 1839350 - DNA, 15 bp, Homo sapiens
gaaagagagtggagt

SEQ ID NO: 1839351 - DNA, 15 bp, Homo sapiens
aaagagagtggagtc

SEQ ID NO: 1839352 - DNA, 15 bp, Homo sapiens
aagagagtggagtcc

SEQ ID NO: 1839353 - DNA, 15 bp, Homo sapiens
agagagtggagtcca

SEQ ID NO: 1839354 - DNA, 15 bp, Homo sapiens
gagagtggagtccag

SEQ ID NO: 1839355 - DNA, 15 bp, Homo sapiens
agagtggagtccagc

SEQ ID NO: 1839356 - DNA, 15 bp, Homo sapiens
gagtggagtccagca

SEQ ID NO: 1839357 - DNA, 15 bp, Homo sapiens
agtggagtccagcaa

SEQ ID NO: 1839358 - DNA, 15 bp, Homo sapiens
gtggagtccagcaat

SEQ ID NO: 1839359 - DNA, 15 bp, Homo sapiens
tggagtccagcaata

SEQ ID NO: 1839360 - DNA, 15 bp, Homo sapiens
ggagtccagcaataa

SEQ ID NO: 1839361 - DNA, 15 bp, Homo sapiens
gagtccagcaataaa

SEQ ID NO: 1839362 - DNA, 15 bp, Homo sapiens
agtccagcaataaaa

SEQ ID NO: 1839363 - DNA, 15 bp, Homo sapiens
gtccagcaataaaaa

SEQ ID NO: 1839364 - DNA, 15 bp, Homo sapiens
tccagcaataaaaac

SEQ ID NO: 1839365 - DNA, 15 bp, Homo sapiens
ccagcaataaaaaca

SEQ ID NO: 1839366 - DNA, 15 bp, Homo sapiens
cagcaataaaaacag

SEQ ID NO: 1839367 - DNA, 15 bp, Homo sapiens
agcaataaaaacaga

SEQ ID NO: 1839368 - DNA, 15 bp, Homo sapiens
gcaataaaaacagat

SEQ ID NO: 1839369 - DNA, 15 bp, Homo sapiens
caataaaaacagatc

SEQ ID NO: 1839370 - DNA, 15 bp, Homo sapiens
aataaaaacagatca

SEQ ID NO: 1839371 - DNA, 15 bp, Homo sapiens
ataaaaacagatcag

SEQ ID NO: 1839372 - DNA, 15 bp, Homo sapiens
taaaaacagatcagg

SEQ ID NO: 1839373 - DNA, 15 bp, Homo sapiens
aaaaacagatcaggt

SEQ ID NO: 1839374 - DNA, 15 bp, Homo sapiens
aaaacagatcaggta

SEQ ID NO: 1839375 - DNA, 15 bp, Homo sapiens
aaacagatcaggtaa

SEQ ID NO: 1839376 - DNA, 15 bp, Homo sapiens
aacagatcaggtaaa

SEQ ID NO: 1839377 - DNA, 15 bp, Homo sapiens
acagatcaggtaaaa

SEQ ID NO: 1839378 - DNA, 15 bp, Homo sapiens
cagatcaggtaaaaa

SEQ ID NO: 1839379 - DNA, 15 bp, Homo sapiens
agatcaggtaaaaat

SEQ ID NO: 1839380 - DNA, 15 bp, Homo sapiens
gatcaggtaaaaata

SEQ ID NO: 1839381 - DNA, 15 bp, Homo sapiens
atcaggtaaaaatag

SEQ ID NO: 1839382 - DNA, 15 bp, Homo sapiens
tcaggtaaaaataga

SEQ ID NO: 1839383 - DNA, 15 bp, Homo sapiens
caggtaaaaatagag

SEQ ID NO: 1839384 - DNA, 15 bp, Homo sapiens
aggtaaaaatagagc

SEQ ID NO: 1839385 - DNA, 15 bp, Homo sapiens
ggtaaaaatagagct

SEQ ID NO: 1839386 - DNA, 15 bp, Homo sapiens
gtaaaaatagagcta

SEQ ID NO: 1839387 - DNA, 15 bp, Homo sapiens
taaaaatagagctag

SEQ ID NO: 1839388 - DNA, 15 bp, Homo sapiens
aaaaatagagctagg

SEQ ID NO: 1839389 - DNA, 15 bp, Homo sapiens
aaaatagagctagga

SEQ ID NO: 1839390 - DNA, 15 bp, Homo sapiens
aaatagagctaggag

SEQ ID NO: 1839391 - DNA, 15 bp, Homo sapiens
aatagagctaggagt

SEQ ID NO: 1839392 - DNA, 15 bp, Homo sapiens
atagagctaggagtc

SEQ ID NO: 1839393 - DNA, 15 bp, Homo sapiens
tagagctaggagtca

SEQ ID NO: 1839394 - DNA, 15 bp, Homo sapiens
agagctaggagtcaa

SEQ ID NO: 1839395 - DNA, 15 bp, Homo sapiens
gagctaggagtcaat

SEQ ID NO: 1839396 - DNA, 15 bp, Homo sapiens
agctaggagtcaata

SEQ ID NO: 1839397 - DNA, 15 bp, Homo sapiens
gctaggagtcaatag

SEQ ID NO: 1839398 - DNA, 15 bp, Homo sapiens
ctaggagtcaatagt

SEQ ID NO: 1839399 - DNA, 15 bp, Homo sapiens
taggagtcaatagtg

SEQ ID NO: 1839400 - DNA, 15 bp, Homo sapiens
aggagtcaatagtga

SEQ ID NO: 1839401 - DNA, 15 bp, Homo sapiens
ggagtcaatagtgag

SEQ ID NO: 1839402 - DNA, 15 bp, Homo sapiens
gagtcaatagtgagg

SEQ ID NO: 1839403 - DNA, 15 bp, Homo sapiens
agtcaatagtgaggg

SEQ ID NO: 1839404 - DNA, 15 bp, Homo sapiens
gtcaatagtgagggc

SEQ ID NO: 1839405 - DNA, 15 bp, Homo sapiens
tcaatagtgagggct

SEQ ID NO: 1839406 - DNA, 15 bp, Homo sapiens
caatagtgagggctg

SEQ ID NO: 1839407 - DNA, 15 bp, Homo sapiens
aatagtgagggctga

SEQ ID NO: 1839408 - DNA, 15 bp, Homo sapiens
atagtgagggctgag

SEQ ID NO: 1839409 - DNA, 15 bp, Homo sapiens
tagtgagggctgagt

SEQ ID NO: 1839410 - DNA, 15 bp, Homo sapiens
agtgagggctgagtt

SEQ ID NO: 1839411 - DNA, 15 bp, Homo sapiens
gtgagggctgagtta

SEQ ID NO: 1839412 - DNA, 15 bp, Homo sapiens
tgagggctgagttag

SEQ ID NO: 1839413 - DNA, 15 bp, Homo sapiens
gagggctgagttagg

SEQ ID NO: 1839414 - DNA, 15 bp, Homo sapiens
agggctgagttagga

SEQ ID NO: 1839415 - DNA, 15 bp, Homo sapiens
gggctgagttaggag

SEQ ID NO: 1839416 - DNA, 15 bp, Homo sapiens
ggctgagttaggaga

SEQ ID NO: 1839417 - DNA, 15 bp, Homo sapiens
gctgagttaggagag

SEQ ID NO: 1839418 - DNA, 15 bp, Homo sapiens
ctgagttaggagagt

SEQ ID NO: 1839419 - DNA, 15 bp, Homo sapiens
tgagttaggagagtt

SEQ ID NO: 1839420 - DNA, 15 bp, Homo sapiens
gagttaggagagttc

SEQ ID NO: 1839421 - DNA, 15 bp, Homo sapiens
agttaggagagttct

SEQ ID NO: 1839422 - DNA, 15 bp, Homo sapiens
gttaggagagttctc

SEQ ID NO: 1839423 - DNA, 15 bp, Homo sapiens
ttaggagagttctct

SEQ ID NO: 1839424 - DNA, 15 bp, Homo sapiens
taggagagttctctg

SEQ ID NO: 1839425 - DNA, 15 bp, Homo sapiens
aggagagttctctgt

SEQ ID NO: 1839426 - DNA, 15 bp, Homo sapiens
ggagagttctctgta

SEQ ID NO: 1839427 - DNA, 15 bp, Homo sapiens
gagagttctctgtac

SEQ ID NO: 1839428 - DNA, 15 bp, Homo sapiens
agagttctctgtact

SEQ ID NO: 1839429 - DNA, 15 bp, Homo sapiens
gagttctctgtactt

SEQ ID NO: 1839430 - DNA, 15 bp, Homo sapiens
agttctctgtacttc

SEQ ID NO: 1839431 - DNA, 15 bp, Homo sapiens
gttctctgtacttcc

SEQ ID NO: 1839432 - DNA, 15 bp, Homo sapiens
ttctctgtacttccc

SEQ ID NO: 1839433 - DNA, 15 bp, Homo sapiens
tctctgtacttccct

SEQ ID NO: 1839434 - DNA, 15 bp, Homo sapiens
ctctgtacttcccta

SEQ ID NO: 1839435 - DNA, 15 bp, Homo sapiens
tctgtacttccctag

SEQ ID NO: 1839436 - DNA, 15 bp, Homo sapiens
ctgtacttccctaga

SEQ ID NO: 1839437 - DNA, 15 bp, Homo sapiens
tgtacttccctagag

SEQ ID NO: 1839438 - DNA, 15 bp, Homo sapiens
gtacttccctagaga

SEQ ID NO: 1839439 - DNA, 15 bp, Homo sapiens
tacttccctagagat

SEQ ID NO: 1839440 - DNA, 15 bp, Homo sapiens
acttccctagagatt

SEQ ID NO: 1839441 - DNA, 15 bp, Homo sapiens
cttccctagagattt

SEQ ID NO: 1839442 - DNA, 15 bp, Homo sapiens
ttccctagagatttc

SEQ ID NO: 1839443 - DNA, 15 bp, Homo sapiens
tccctagagatttcc

SEQ ID NO: 1839444 - DNA, 15 bp, Homo sapiens
ccctagagatttcca

SEQ ID NO: 1839445 - DNA, 15 bp, Homo sapiens
cctagagatttccag

SEQ ID NO: 1839446 - DNA, 15 bp, Homo sapiens
ctagagatttccagc

SEQ ID NO: 1839447 - DNA, 15 bp, Homo sapiens
tagagatttccagcc

SEQ ID NO: 1839448 - DNA, 15 bp, Homo sapiens
agagatttccagcca

SEQ ID NO: 1839449 - DNA, 15 bp, Homo sapiens
gagatttccagccat

SEQ ID NO: 1839450 - DNA, 15 bp, Homo sapiens
agatttccagccatc

SEQ ID NO: 1839451 - DNA, 15 bp, Homo sapiens
gatttccagccatct

SEQ ID NO: 1839452 - DNA, 15 bp, Homo sapiens
atttccagccatcta

SEQ ID NO: 1839453 - DNA, 15 bp, Homo sapiens
tttccagccatctaa

SEQ ID NO: 1839454 - DNA, 15 bp, Homo sapiens
ttccagccatctaag

SEQ ID NO: 1839455 - DNA, 15 bp, Homo sapiens
tccagccatctaagc

SEQ ID NO: 1839456 - DNA, 15 bp, Homo sapiens
ccagccatctaagca

SEQ ID NO: 1839457 - DNA, 15 bp, Homo sapiens
cagccatctaagcat

SEQ ID NO: 1839458 - DNA, 15 bp, Homo sapiens
agccatctaagcata

SEQ ID NO: 1839459 - DNA, 15 bp, Homo sapiens
gccatctaagcatac

SEQ ID NO: 1839460 - DNA, 15 bp, Homo sapiens
ccatctaagcatacg

SEQ ID NO: 1839461 - DNA, 15 bp, Homo sapiens
catctaagcatacgt

SEQ ID NO: 1839462 - DNA, 15 bp, Homo sapiens
atctaagcatacgtg

SEQ ID NO: 1839463 - DNA, 15 bp, Homo sapiens
tctaagcatacgtgt

SEQ ID NO: 1839464 - DNA, 15 bp, Homo sapiens
ctaagcatacgtgtg

SEQ ID NO: 1839465 - DNA, 15 bp, Homo sapiens
taagcatacgtgtga

SEQ ID NO: 1839466 - DNA, 15 bp, Homo sapiens
aagcatacgtgtgag

SEQ ID NO: 1839467 - DNA, 15 bp, Homo sapiens
agcatacgtgtgagt

SEQ ID NO: 1839468 - DNA, 15 bp, Homo sapiens
gcatacgtgtgagtt

SEQ ID NO: 1839469 - DNA, 15 bp, Homo sapiens
catacgtgtgagttc

SEQ ID NO: 1839470 - DNA, 15 bp, Homo sapiens
atacgtgtgagttct

SEQ ID NO: 1839471 - DNA, 15 bp, Homo sapiens
tacgtgtgagttctt

SEQ ID NO: 1839472 - DNA, 15 bp, Homo sapiens
acgtgtgagttcttg

SEQ ID NO: 1839473 - DNA, 15 bp, Homo sapiens
cgtgtgagttcttgc

SEQ ID NO: 1839474 - DNA, 15 bp, Homo sapiens
gtgtgagttcttgct

SEQ ID NO: 1839475 - DNA, 15 bp, Homo sapiens
tgtgagttcttgctt

SEQ ID NO: 1839476 - DNA, 15 bp, Homo sapiens
gtgagttcttgcttt

SEQ ID NO: 1839477 - DNA, 15 bp, Homo sapiens
tgagttcttgctttg

SEQ ID NO: 1839478 - DNA, 15 bp, Homo sapiens
gagttcttgctttga

SEQ ID NO: 1839479 - DNA, 15 bp, Homo sapiens
agttcttgctttgac

SEQ ID NO: 1839480 - DNA, 15 bp, Homo sapiens
gttcttgctttgaca

SEQ ID NO: 1839481 - DNA, 15 bp, Homo sapiens
ttcttgctttgacaa

SEQ ID NO: 1839482 - DNA, 15 bp, Homo sapiens
tcttgctttgacaaa

SEQ ID NO: 1839483 - DNA, 15 bp, Homo sapiens
cttgctttgacaaat

SEQ ID NO: 1839484 - DNA, 15 bp, Homo sapiens
ttgctttgacaaata

SEQ ID NO: 1839485 - DNA, 15 bp, Homo sapiens
tgctttgacaaataa

SEQ ID NO: 1839486 - DNA, 15 bp, Homo sapiens
gctttgacaaataag

SEQ ID NO: 1839487 - DNA, 15 bp, Homo sapiens
ctttgacaaataagt

SEQ ID NO: 1839488 - DNA, 15 bp, Homo sapiens
tttgacaaataagta

SEQ ID NO: 1839489 - DNA, 15 bp, Homo sapiens
ttgacaaataagtac

SEQ ID NO: 1839490 - DNA, 15 bp, Homo sapiens
tgacaaataagtact

SEQ ID NO: 1839491 - DNA, 15 bp, Homo sapiens
gacaaataagtactc

SEQ ID NO: 1839492 - DNA, 15 bp, Homo sapiens
acaaataagtactcc

SEQ ID NO: 1839493 - DNA, 15 bp, Homo sapiens
caaataagtactcca

SEQ ID NO: 1839494 - DNA, 15 bp, Homo sapiens
aaataagtactccac

SEQ ID NO: 1839495 - DNA, 15 bp, Homo sapiens
aataagtactccact

SEQ ID NO: 1839496 - DNA, 15 bp, Homo sapiens
ataagtactccactg

SEQ ID NO: 1839497 - DNA, 15 bp, Homo sapiens
taagtactccactgg

SEQ ID NO: 1839498 - DNA, 15 bp, Homo sapiens
aagtactccactggt

SEQ ID NO: 1839499 - DNA, 15 bp, Homo sapiens
agtactccactggta

SEQ ID NO: 1839500 - DNA, 15 bp, Homo sapiens
gtactccactggtat

SEQ ID NO: 1839501 - DNA, 15 bp, Homo sapiens
tactccactggtatg

SEQ ID NO: 1839502 - DNA, 15 bp, Homo sapiens
actccactggtatgc

SEQ ID NO: 1839503 - DNA, 15 bp, Homo sapiens
ctccactggtatgca

SEQ ID NO: 1839504 - DNA, 15 bp, Homo sapiens
tccactggtatgcac

SEQ ID NO: 1839505 - DNA, 15 bp, Homo sapiens
ccactggtatgcaca

SEQ ID NO: 1839506 - DNA, 15 bp, Homo sapiens
cactggtatgcacat

SEQ ID NO: 1839507 - DNA, 15 bp, Homo sapiens
actggtatgcacata

SEQ ID NO: 1839508 - DNA, 15 bp, Homo sapiens
ctggtatgcacatag

SEQ ID NO: 1839509 - DNA, 15 bp, Homo sapiens
tggtatgcacataga

SEQ ID NO: 1839510 - DNA, 15 bp, Homo sapiens
ggtatgcacatagaa

SEQ ID NO: 1839511 - DNA, 15 bp, Homo sapiens
gtatgcacatagaaa

SEQ ID NO: 1839512 - DNA, 15 bp, Homo sapiens
tatgcacatagaaac

SEQ ID NO: 1839513 - DNA, 15 bp, Homo sapiens
atgcacatagaaact

SEQ ID NO: 1839514 - DNA, 15 bp, Homo sapiens
tgcacatagaaactt

SEQ ID NO: 1839515 - DNA, 15 bp, Homo sapiens
gcacatagaaacttc

SEQ ID NO: 1839516 - DNA, 15 bp, Homo sapiens
cacatagaaacttct

SEQ ID NO: 1839517 - DNA, 15 bp, Homo sapiens
acatagaaacttctt

SEQ ID NO: 1839518 - DNA, 15 bp, Homo sapiens
catagaaacttcttt

SEQ ID NO: 1839519 - DNA, 15 bp, Homo sapiens
atagaaacttctttc

SEQ ID NO: 1839520 - DNA, 15 bp, Homo sapiens
tagaaacttctttca

SEQ ID NO: 1839521 - DNA, 15 bp, Homo sapiens
agaaacttctttcac

SEQ ID NO: 1839522 - DNA, 15 bp, Homo sapiens
gaaacttctttcacc

SEQ ID NO: 1839523 - DNA, 15 bp, Homo sapiens
aaacttctttcacct

SEQ ID NO: 1839524 - DNA, 15 bp, Homo sapiens
aacttctttcacctg

SEQ ID NO: 1839525 - DNA, 15 bp, Homo sapiens
acttctttcacctgt

SEQ ID NO: 1839526 - DNA, 15 bp, Homo sapiens
cttctttcacctgtg

SEQ ID NO: 1839527 - DNA, 15 bp, Homo sapiens
ttctttcacctgtgg

SEQ ID NO: 1839528 - DNA, 15 bp, Homo sapiens
tctttcacctgtggg

SEQ ID NO: 1839529 - DNA, 15 bp, Homo sapiens
ctttcacctgtggga

SEQ ID NO: 1839530 - DNA, 15 bp, Homo sapiens
tttcacctgtgggat

SEQ ID NO: 1839531 - DNA, 15 bp, Homo sapiens
ttcacctgtgggatc

SEQ ID NO: 1839532 - DNA, 15 bp, Homo sapiens
tcacctgtgggatca

SEQ ID NO: 1839533 - DNA, 15 bp, Homo sapiens
cacctgtgggatcat

SEQ ID NO: 1839534 - DNA, 15 bp, Homo sapiens
acctgtgggatcatt

SEQ ID NO: 1839535 - DNA, 15 bp, Homo sapiens
cctgtgggatcatta

SEQ ID NO: 1839536 - DNA, 15 bp, Homo sapiens
ctgtgggatcattat

SEQ ID NO: 1839537 - DNA, 15 bp, Homo sapiens
tgtgggatcattatt

SEQ ID NO: 1839538 - DNA, 15 bp, Homo sapiens
gtgggatcattatta

SEQ ID NO: 1839539 - DNA, 15 bp, Homo sapiens
tgggatcattattaa

SEQ ID NO: 1839540 - DNA, 15 bp, Homo sapiens
gggatcattattaac

SEQ ID NO: 1839541 - DNA, 15 bp, Homo sapiens
ggatcattattaaca

SEQ ID NO: 1839542 - DNA, 15 bp, Homo sapiens
gatcattattaacat

SEQ ID NO: 1839543 - DNA, 15 bp, Homo sapiens
atcattattaacatg

SEQ ID NO: 1839544 - DNA, 15 bp, Homo sapiens
tcattattaacatgt

SEQ ID NO: 1839545 - DNA, 15 bp, Homo sapiens
cattattaacatgtt

SEQ ID NO: 1839546 - DNA, 15 bp, Homo sapiens
attattaacatgttt

SEQ ID NO: 1839547 - DNA, 15 bp, Homo sapiens
ttattaacatgtttt

SEQ ID NO: 1839548 - DNA, 15 bp, Homo sapiens
tattaacatgtttta

SEQ ID NO: 1839549 - DNA, 15 bp, Homo sapiens
attaacatgttttat

SEQ ID NO: 1839550 - DNA, 15 bp, Homo sapiens
ttaacatgttttatg

SEQ ID NO: 1839551 - DNA, 15 bp, Homo sapiens
taacatgttttatgt

SEQ ID NO: 1839552 - DNA, 15 bp, Homo sapiens
aacatgttttatgtg

SEQ ID NO: 1839553 - DNA, 15 bp, Homo sapiens
acatgttttatgtgg

SEQ ID NO: 1839554 - DNA, 15 bp, Homo sapiens
catgttttatgtgga

SEQ ID NO: 1839555 - DNA, 15 bp, Homo sapiens
atgttttatgtggag

SEQ ID NO: 1839556 - DNA, 15 bp, Homo sapiens
tgttttatgtggagg

SEQ ID NO: 1839557 - DNA, 15 bp, Homo sapiens
gttttatgtggaggg

SEQ ID NO: 1839558 - DNA, 15 bp, Homo sapiens
ttttatgtggaggga

SEQ ID NO: 1839559 - DNA, 15 bp, Homo sapiens
tttatgtggagggaa

SEQ ID NO: 1839560 - DNA, 15 bp, Homo sapiens
ttatgtggagggaaa

SEQ ID NO: 1839561 - DNA, 15 bp, Homo sapiens
tatgtggagggaaaa

SEQ ID NO: 1839562 - DNA, 15 bp, Homo sapiens
atgtggagggaaaaa

SEQ ID NO: 1839563 - DNA, 15 bp, Homo sapiens
tgtggagggaaaaat

SEQ ID NO: 1839564 - DNA, 15 bp, Homo sapiens
gtggagggaaaaata

SEQ ID NO: 1839565 - DNA, 15 bp, Homo sapiens
tggagggaaaaataa

SEQ ID NO: 1839566 - DNA, 15 bp, Homo sapiens
ggagggaaaaataaa

SEQ ID NO: 1839567 - DNA, 15 bp, Homo sapiens
gagggaaaaataaag

SEQ ID NO: 1839568 - DNA, 15 bp, Homo sapiens
agggaaaaataaaga

SEQ ID NO: 1839569 - DNA, 15 bp, Homo sapiens
gggaaaaataaagat

SEQ ID NO: 1839570 - DNA, 15 bp, Homo sapiens
ggaaaaataaagatt

SEQ ID NO: 1839571 - DNA, 15 bp, Homo sapiens
gaaaaataaagattt

SEQ ID NO: 1839572 - DNA, 15 bp, Homo sapiens
aaaaataaagatttt

SEQ ID NO: 1839573 - DNA, 15 bp, Homo sapiens
aaaataaagatttta

SEQ ID NO: 1839574 - DNA, 15 bp, Homo sapiens
aaataaagattttag

SEQ ID NO: 1839575 - DNA, 15 bp, Homo sapiens
aataaagattttaga

SEQ ID NO: 1839576 - DNA, 15 bp, Homo sapiens
ataaagattttagaa

SEQ ID NO: 1839577 - DNA, 15 bp, Homo sapiens
taaagattttagaac

SEQ ID NO: 1839578 - DNA, 15 bp, Homo sapiens
aaagattttagaact

SEQ ID NO: 1839579 - DNA, 15 bp, Homo sapiens
aagattttagaactt

SEQ ID NO: 1839580 - DNA, 15 bp, Homo sapiens
agattttagaacttc

SEQ ID NO: 1839581 - DNA, 15 bp, Homo sapiens
gattttagaacttct

SEQ ID NO: 1839582 - DNA, 15 bp, Homo sapiens
attttagaacttctt

SEQ ID NO: 1839583 - DNA, 15 bp, Homo sapiens
ttttagaacttcttt

SEQ ID NO: 1839584 - DNA, 15 bp, Homo sapiens
tttagaacttctttc

SEQ ID NO: 1839585 - DNA, 15 bp, Homo sapiens
ttagaacttctttct

SEQ ID NO: 1839586 - DNA, 15 bp, Homo sapiens
tagaacttctttctt

SEQ ID NO: 1839587 - DNA, 15 bp, Homo sapiens
agaacttctttcttc

SEQ ID NO: 1839588 - DNA, 15 bp, Homo sapiens
gaacttctttcttcc

SEQ ID NO: 1839589 - DNA, 15 bp, Homo sapiens
aacttctttcttccc

SEQ ID NO: 1839590 - DNA, 15 bp, Homo sapiens
acttctttcttccct

SEQ ID NO: 1839591 - DNA, 15 bp, Homo sapiens
cttctttcttccctc

SEQ ID NO: 1839592 - DNA, 15 bp, Homo sapiens
ttctttcttccctca

SEQ ID NO: 1839593 - DNA, 15 bp, Homo sapiens
tctttcttccctcat

SEQ ID NO: 1839594 - DNA, 15 bp, Homo sapiens
ctttcttccctcatg

SEQ ID NO: 1839595 - DNA, 15 bp, Homo sapiens
tttcttccctcatgt

SEQ ID NO: 1839596 - DNA, 15 bp, Homo sapiens
ttcttccctcatgtt

SEQ ID NO: 1839597 - DNA, 15 bp, Homo sapiens
tcttccctcatgttt

SEQ ID NO: 1839598 - DNA, 15 bp, Homo sapiens
cttccctcatgtttt

SEQ ID NO: 1839599 - DNA, 15 bp, Homo sapiens
ttccctcatgttttc

SEQ ID NO: 1839600 - DNA, 15 bp, Homo sapiens
tccctcatgttttca

SEQ ID NO: 1839601 - DNA, 15 bp, Homo sapiens
ccctcatgttttcac

SEQ ID NO: 1839602 - DNA, 15 bp, Homo sapiens
cctcatgttttcact

SEQ ID NO: 1839603 - DNA, 15 bp, Homo sapiens
ctcatgttttcactc

SEQ ID NO: 1839604 - DNA, 15 bp, Homo sapiens
tcatgttttcactcc

SEQ ID NO: 1839605 - DNA, 15 bp, Homo sapiens
catgttttcactcca

SEQ ID NO: 1839606 - DNA, 15 bp, Homo sapiens
atgttttcactccat

SEQ ID NO: 1839607 - DNA, 15 bp, Homo sapiens
tgttttcactccatt

SEQ ID NO: 1839608 - DNA, 15 bp, Homo sapiens
gttttcactccatta

SEQ ID NO: 1839609 - DNA, 15 bp, Homo sapiens
ttttcactccattaa

SEQ ID NO: 1839610 - DNA, 15 bp, Homo sapiens
tttcactccattaat

SEQ ID NO: 1839611 - DNA, 15 bp, Homo sapiens
ttcactccattaata

SEQ ID NO: 1839612 - DNA, 15 bp, Homo sapiens
tcactccattaatat

SEQ ID NO: 1839613 - DNA, 15 bp, Homo sapiens
cactccattaatatt

SEQ ID NO: 1839614 - DNA, 15 bp, Homo sapiens
actccattaatatta

SEQ ID NO: 1839615 - DNA, 15 bp, Homo sapiens
ctccattaatattag

SEQ ID NO: 1839616 - DNA, 15 bp, Homo sapiens
tccattaatattagg

SEQ ID NO: 1839617 - DNA, 15 bp, Homo sapiens
ccattaatattaggc

SEQ ID NO: 1839618 - DNA, 15 bp, Homo sapiens
cattaatattaggct

SEQ ID NO: 1839619 - DNA, 15 bp, Homo sapiens
attaatattaggctt

SEQ ID NO: 1839620 - DNA, 15 bp, Homo sapiens
ttaatattaggctta

SEQ ID NO: 1839621 - DNA, 15 bp, Homo sapiens
taatattaggcttaa

SEQ ID NO: 1839622 - DNA, 15 bp, Homo sapiens
aatattaggcttaat

SEQ ID NO: 1839623 - DNA, 15 bp, Homo sapiens
atattaggcttaatt

SEQ ID NO: 1839624 - DNA, 15 bp, Homo sapiens
tattaggcttaatta

SEQ ID NO: 1839625 - DNA, 15 bp, Homo sapiens
attaggcttaattat

SEQ ID NO: 1839626 - DNA, 15 bp, Homo sapiens
ttaggcttaattatt

SEQ ID NO: 1839627 - DNA, 15 bp, Homo sapiens
taggcttaattattc

SEQ ID NO: 1839628 - DNA, 15 bp, Homo sapiens
aggcttaattattca

SEQ ID NO: 1839629 - DNA, 15 bp, Homo sapiens
ggcttaattattcaa

SEQ ID NO: 1839630 - DNA, 15 bp, Homo sapiens
gcttaattattcaaa

SEQ ID NO: 1839631 - DNA, 15 bp, Homo sapiens
cttaattattcaaat

SEQ ID NO: 1839632 - DNA, 15 bp, Homo sapiens
ttaattattcaaatt

SEQ ID NO: 1839633 - DNA, 15 bp, Homo sapiens
taattattcaaattt

SEQ ID NO: 1839634 - DNA, 15 bp, Homo sapiens
aattattcaaattta

SEQ ID NO: 1839635 - DNA, 15 bp, Homo sapiens
attattcaaatttat

SEQ ID NO: 1839636 - DNA, 15 bp, Homo sapiens
ttattcaaatttatt

SEQ ID NO: 1839637 - DNA, 15 bp, Homo sapiens
tattcaaatttatta

SEQ ID NO: 1839638 - DNA, 15 bp, Homo sapiens
attcaaatttattat

SEQ ID NO: 1839639 - DNA, 15 bp, Homo sapiens
ttcaaatttattata

SEQ ID NO: 1839640 - DNA, 15 bp, Homo sapiens
tcaaatttattatat

SEQ ID NO: 1839641 - DNA, 15 bp, Homo sapiens
caaatttattatatt

SEQ ID NO: 1839642 - DNA, 15 bp, Homo sapiens
aaatttattatatta

SEQ ID NO: 1839643 - DNA, 15 bp, Homo sapiens
aatttattatattag

SEQ ID NO: 1839644 - DNA, 15 bp, Homo sapiens
atttattatattaga

SEQ ID NO: 1839645 - DNA, 15 bp, Homo sapiens
tttattatattagag

SEQ ID NO: 1839646 - DNA, 15 bp, Homo sapiens
ttattatattagagt

SEQ ID NO: 1839647 - DNA, 15 bp, Homo sapiens
tattatattagagtc

SEQ ID NO: 1839648 - DNA, 15 bp, Homo sapiens
attatattagagtct

SEQ ID NO: 1839649 - DNA, 15 bp, Homo sapiens
ttatattagagtctt

SEQ ID NO: 1839650 - DNA, 15 bp, Homo sapiens
tatattagagtctta

SEQ ID NO: 1839651 - DNA, 15 bp, Homo sapiens
atattagagtcttat

SEQ ID NO: 1839652 - DNA, 15 bp, Homo sapiens
tattagagtcttatt

SEQ ID NO: 1839653 - DNA, 15 bp, Homo sapiens
attagagtcttattg

SEQ ID NO: 1839654 - DNA, 15 bp, Homo sapiens
ttagagtcttattgc

SEQ ID NO: 1839655 - DNA, 15 bp, Homo sapiens
tagagtcttattgct

SEQ ID NO: 1839656 - DNA, 15 bp, Homo sapiens
agagtcttattgctt

SEQ ID NO: 1839657 - DNA, 15 bp, Homo sapiens
gagtcttattgctta

SEQ ID NO: 1839658 - DNA, 15 bp, Homo sapiens
agtcttattgcttaa

SEQ ID NO: 1839659 - DNA, 15 bp, Homo sapiens
gtcttattgcttaat

SEQ ID NO: 1839660 - DNA, 15 bp, Homo sapiens
tcttattgcttaatt

SEQ ID NO: 1839661 - DNA, 15 bp, Homo sapiens
cttattgcttaattt

SEQ ID NO: 1839662 - DNA, 15 bp, Homo sapiens
ttattgcttaattta

SEQ ID NO: 1839663 - DNA, 15 bp, Homo sapiens
tattgcttaatttaa

SEQ ID NO: 1839664 - DNA, 15 bp, Homo sapiens
attgcttaatttaaa

SEQ ID NO: 1839665 - DNA, 15 bp, Homo sapiens
ttgcttaatttaaaa

SEQ ID NO: 1839666 - DNA, 15 bp, Homo sapiens
tgcttaatttaaaaa

SEQ ID NO: 1839667 - DNA, 15 bp, Homo sapiens
gcttaatttaaaaaa

SEQ ID NO: 1839668 - DNA, 15 bp, Homo sapiens
cttaatttaaaaaat

SEQ ID NO: 1839669 - DNA, 15 bp, Homo sapiens
ttaatttaaaaaatt

SEQ ID NO: 1839670 - DNA, 15 bp, Homo sapiens
taatttaaaaaattg

SEQ ID NO: 1839671 - DNA, 15 bp, Homo sapiens
aatttaaaaaattga

SEQ ID NO: 1839672 - DNA, 15 bp, Homo sapiens
atttaaaaaattgaa

SEQ ID NO: 1839673 - DNA, 15 bp, Homo sapiens
tttaaaaaattgaat

SEQ ID NO: 1839674 - DNA, 15 bp, Homo sapiens
ttaaaaaattgaatg

SEQ ID NO: 1839675 - DNA, 15 bp, Homo sapiens
taaaaaattgaatgg

SEQ ID NO: 1839676 - DNA, 15 bp, Homo sapiens
aaaaaattgaatgga

SEQ ID NO: 1839677 - DNA, 15 bp, Homo sapiens
aaaaattgaatggat

SEQ ID NO: 1839678 - DNA, 15 bp, Homo sapiens
aaaattgaatggatt

SEQ ID NO: 1839679 - DNA, 15 bp, Homo sapiens
aaattgaatggatta

SEQ ID NO: 1839680 - DNA, 15 bp, Homo sapiens
aattgaatggattat

SEQ ID NO: 1839681 - DNA, 15 bp, Homo sapiens
attgaatggattatt

SEQ ID NO: 1839682 - DNA, 15 bp, Homo sapiens
ttgaatggattatta

SEQ ID NO: 1839683 - DNA, 15 bp, Homo sapiens
tgaatggattattag

SEQ ID NO: 1839684 - DNA, 15 bp, Homo sapiens
gaatggattattagc

SEQ ID NO: 1839685 - DNA, 15 bp, Homo sapiens
aatggattattagct

SEQ ID NO: 1839686 - DNA, 15 bp, Homo sapiens
atggattattagctt

SEQ ID NO: 1839687 - DNA, 15 bp, Homo sapiens
tggattattagcttt

SEQ ID NO: 1839688 - DNA, 15 bp, Homo sapiens
ggattattagctttt

SEQ ID NO: 1839689 - DNA, 15 bp, Homo sapiens
gattattagcttttt

SEQ ID NO: 1839690 - DNA, 15 bp, Homo sapiens
attattagcttttta

SEQ ID NO: 1839691 - DNA, 15 bp, Homo sapiens
ttattagctttttaa

SEQ ID NO: 1839692 - DNA, 15 bp, Homo sapiens
tattagctttttaat

SEQ ID NO: 1839693 - DNA, 15 bp, Homo sapiens
attagctttttaata

SEQ ID NO: 1839694 - DNA, 15 bp, Homo sapiens
ttagctttttaataa

SEQ ID NO: 1839695 - DNA, 15 bp, Homo sapiens
tagctttttaataaa

SEQ ID NO: 1839696 - DNA, 15 bp, Homo sapiens
agctttttaataaac

SEQ ID NO: 1839697 - DNA, 15 bp, Homo sapiens
gctttttaataaaca

SEQ ID NO: 1839698 - DNA, 15 bp, Homo sapiens
ctttttaataaacag

SEQ ID NO: 1839699 - DNA, 15 bp, Homo sapiens
tttttaataaacagt

SEQ ID NO: 1839700 - DNA, 15 bp, Homo sapiens
ttttaataaacagtg

SEQ ID NO: 1839701 - DNA, 15 bp, Homo sapiens
tttaataaacagtga

SEQ ID NO: 1839702 - DNA, 15 bp, Homo sapiens
ttaataaacagtgac

SEQ ID NO: 1839703 - DNA, 15 bp, Homo sapiens
taataaacagtgaca

SEQ ID NO: 1839704 - DNA, 15 bp, Homo sapiens
aataaacagtgacat

SEQ ID NO: 1839705 - DNA, 15 bp, Homo sapiens
ataaacagtgacatt

SEQ ID NO: 1839706 - DNA, 15 bp, Homo sapiens
taaacagtgacattt

SEQ ID NO: 1839707 - DNA, 15 bp, Homo sapiens
aaacagtgacattta

SEQ ID NO: 1839708 - DNA, 15 bp, Homo sapiens
aacagtgacatttac

SEQ ID NO: 1839709 - DNA, 15 bp, Homo sapiens
acagtgacatttact

SEQ ID NO: 1839710 - DNA, 15 bp, Homo sapiens
cagtgacatttactg

SEQ ID NO: 1839711 - DNA, 15 bp, Homo sapiens
agtgacatttactgt

SEQ ID NO: 1839712 - DNA, 15 bp, Homo sapiens
gtgacatttactgtc

SEQ ID NO: 1839713 - DNA, 15 bp, Homo sapiens
tgacatttactgtct

SEQ ID NO: 1839714 - DNA, 15 bp, Homo sapiens
gacatttactgtcta

SEQ ID NO: 1839715 - DNA, 15 bp, Homo sapiens
acatttactgtctac

SEQ ID NO: 1839716 - DNA, 15 bp, Homo sapiens
catttactgtctact

SEQ ID NO: 1839717 - DNA, 15 bp, Homo sapiens
atttactgtctacta

SEQ ID NO: 1839718 - DNA, 15 bp, Homo sapiens
tttactgtctactaa

SEQ ID NO: 1839719 - DNA, 15 bp, Homo sapiens
ttactgtctactaat

SEQ ID NO: 1839720 - DNA, 15 bp, Homo sapiens
tactgtctactaatg

SEQ ID NO: 1839721 - DNA, 15 bp, Homo sapiens
actgtctactaatga

SEQ ID NO: 1839722 - DNA, 15 bp, Homo sapiens
ctgtctactaatgag

SEQ ID NO: 1839723 - DNA, 15 bp, Homo sapiens
tgtctactaatgagg

SEQ ID NO: 1839724 - DNA, 15 bp, Homo sapiens
gtctactaatgaggg

SEQ ID NO: 1839725 - DNA, 15 bp, Homo sapiens
tctactaatgagggc

SEQ ID NO: 1839726 - DNA, 15 bp, Homo sapiens
ctactaatgagggct

SEQ ID NO: 1839727 - DNA, 15 bp, Homo sapiens
tactaatgagggctc

SEQ ID NO: 1839728 - DNA, 15 bp, Homo sapiens
actaatgagggctca

SEQ ID NO: 1839729 - DNA, 15 bp, Homo sapiens
ctaatgagggctcaa

SEQ ID NO: 1839730 - DNA, 15 bp, Homo sapiens
taatgagggctcaaa

SEQ ID NO: 1839731 - DNA, 15 bp, Homo sapiens
aatgagggctcaaat

SEQ ID NO: 1839732 - DNA, 15 bp, Homo sapiens
atgagggctcaaatc

SEQ ID NO: 1839733 - DNA, 15 bp, Homo sapiens
tgagggctcaaatca

SEQ ID NO: 1839734 - DNA, 15 bp, Homo sapiens
gagggctcaaatcat

SEQ ID NO: 1839735 - DNA, 15 bp, Homo sapiens
agggctcaaatcatg

SEQ ID NO: 1839736 - DNA, 15 bp, Homo sapiens
gggctcaaatcatgt

SEQ ID NO: 1839737 - DNA, 15 bp, Homo sapiens
ggctcaaatcatgta

SEQ ID NO: 1839738 - DNA, 15 bp, Homo sapiens
gctcaaatcatgtaa

SEQ ID NO: 1839739 - DNA, 15 bp, Homo sapiens
ctcaaatcatgtaat

SEQ ID NO: 1839740 - DNA, 15 bp, Homo sapiens
tcaaatcatgtaatt

SEQ ID NO: 1839741 - DNA, 15 bp, Homo sapiens
caaatcatgtaattt

SEQ ID NO: 1839742 - DNA, 15 bp, Homo sapiens
aaatcatgtaattta

SEQ ID NO: 1839743 - DNA, 15 bp, Homo sapiens
aatcatgtaatttat

SEQ ID NO: 1839744 - DNA, 15 bp, Homo sapiens
atcatgtaatttatt

SEQ ID NO: 1839745 - DNA, 15 bp, Homo sapiens
tcatgtaatttattg

SEQ ID NO: 1839746 - DNA, 15 bp, Homo sapiens
catgtaatttattgc

SEQ ID NO: 1839747 - DNA, 15 bp, Homo sapiens
atgtaatttattgct

SEQ ID NO: 1839748 - DNA, 15 bp, Homo sapiens
tgtaatttattgctg

SEQ ID NO: 1839749 - DNA, 15 bp, Homo sapiens
gtaatttattgctgc

SEQ ID NO: 1839750 - DNA, 15 bp, Homo sapiens
taatttattgctgca

SEQ ID NO: 1839751 - DNA, 15 bp, Homo sapiens
aatttattgctgcat

SEQ ID NO: 1839752 - DNA, 15 bp, Homo sapiens
atttattgctgcatc

SEQ ID NO: 1839753 - DNA, 15 bp, Homo sapiens
tttattgctgcatct

SEQ ID NO: 1839754 - DNA, 15 bp, Homo sapiens
ttattgctgcatctc

SEQ ID NO: 1839755 - DNA, 15 bp, Homo sapiens
tattgctgcatctct

SEQ ID NO: 1839756 - DNA, 15 bp, Homo sapiens
attgctgcatctcta

SEQ ID NO: 1839757 - DNA, 15 bp, Homo sapiens
ttgctgcatctctat

SEQ ID NO: 1839758 - DNA, 15 bp, Homo sapiens
tgctgcatctctatt

SEQ ID NO: 1839759 - DNA, 15 bp, Homo sapiens
gctgcatctctattt

SEQ ID NO: 1839760 - DNA, 15 bp, Homo sapiens
ctgcatctctatttt

SEQ ID NO: 1839761 - DNA, 15 bp, Homo sapiens
tgcatctctattttg

SEQ ID NO: 1839762 - DNA, 15 bp, Homo sapiens
gcatctctattttgt

SEQ ID NO: 1839763 - DNA, 15 bp, Homo sapiens
catctctattttgtt

SEQ ID NO: 1839764 - DNA, 15 bp, Homo sapiens
atctctattttgttc

SEQ ID NO: 1839765 - DNA, 15 bp, Homo sapiens
tctctattttgttca

SEQ ID NO: 1839766 - DNA, 15 bp, Homo sapiens
ctctattttgttcat

SEQ ID NO: 1839767 - DNA, 15 bp, Homo sapiens
tctattttgttcatg

SEQ ID NO: 1839768 - DNA, 15 bp, Homo sapiens
ctattttgttcatga

SEQ ID NO: 1839769 - DNA, 15 bp, Homo sapiens
tattttgttcatgaa

SEQ ID NO: 1839770 - DNA, 15 bp, Homo sapiens
attttgttcatgaaa

SEQ ID NO: 1839771 - DNA, 15 bp, Homo sapiens
ttttgttcatgaaat

SEQ ID NO: 1839772 - DNA, 15 bp, Homo sapiens
tttgttcatgaaatg

SEQ ID NO: 1839773 - DNA, 15 bp, Homo sapiens
ttgttcatgaaatga

SEQ ID NO: 1839774 - DNA, 15 bp, Homo sapiens
tgttcatgaaatgaa

SEQ ID NO: 1839775 - DNA, 15 bp, Homo sapiens
gttcatgaaatgaaa

SEQ ID NO: 1839776 - DNA, 15 bp, Homo sapiens
ttcatgaaatgaaac

SEQ ID NO: 1839777 - DNA, 15 bp, Homo sapiens
tcatgaaatgaaaca

SEQ ID NO: 1839778 - DNA, 15 bp, Homo sapiens
catgaaatgaaacag

SEQ ID NO: 1839779 - DNA, 15 bp, Homo sapiens
atgaaatgaaacaga

SEQ ID NO: 1839780 - DNA, 15 bp, Homo sapiens
tgaaatgaaacagaa

SEQ ID NO: 1839781 - DNA, 15 bp, Homo sapiens
gaaatgaaacagaaa

SEQ ID NO: 1839782 - DNA, 15 bp, Homo sapiens
aaatgaaacagaaat

SEQ ID NO: 1839783 - DNA, 15 bp, Homo sapiens
aatgaaacagaaatt

SEQ ID NO: 1839784 - DNA, 15 bp, Homo sapiens
atgaaacagaaatta

SEQ ID NO: 1839785 - DNA, 15 bp, Homo sapiens
tgaaacagaaattac

SEQ ID NO: 1839786 - DNA, 15 bp, Homo sapiens
gaaacagaaattact

SEQ ID NO: 1839787 - DNA, 15 bp, Homo sapiens
aaacagaaattacta

SEQ ID NO: 1839788 - DNA, 15 bp, Homo sapiens
aacagaaattactac

SEQ ID NO: 1839789 - DNA, 15 bp, Homo sapiens
acagaaattactacc

SEQ ID NO: 1839790 - DNA, 15 bp, Homo sapiens
cagaaattactacct

SEQ ID NO: 1839791 - DNA, 15 bp, Homo sapiens
agaaattactaccta

SEQ ID NO: 1839792 - DNA, 15 bp, Homo sapiens
gaaattactacctac

SEQ ID NO: 1839793 - DNA, 15 bp, Homo sapiens
aaattactacctact

SEQ ID NO: 1839794 - DNA, 15 bp, Homo sapiens
aattactacctactt

SEQ ID NO: 1839795 - DNA, 15 bp, Homo sapiens
attactacctacttg

SEQ ID NO: 1839796 - DNA, 15 bp, Homo sapiens
ttactacctacttga

SEQ ID NO: 1839797 - DNA, 15 bp, Homo sapiens
tactacctacttgaa

SEQ ID NO: 1839798 - DNA, 15 bp, Homo sapiens
actacctacttgaaa

SEQ ID NO: 1839799 - DNA, 15 bp, Homo sapiens
ctacctacttgaaac

SEQ ID NO: 1839800 - DNA, 15 bp, Homo sapiens
tacctacttgaaact

SEQ ID NO: 1839801 - DNA, 15 bp, Homo sapiens
acctacttgaaactg

SEQ ID NO: 1839802 - DNA, 15 bp, Homo sapiens
cctacttgaaactgg

SEQ ID NO: 1839803 - DNA, 15 bp, Homo sapiens
ctacttgaaactgga

SEQ ID NO: 1839804 - DNA, 15 bp, Homo sapiens
tacttgaaactggac

SEQ ID NO: 1839805 - DNA, 15 bp, Homo sapiens
acttgaaactggact

SEQ ID NO: 1839806 - DNA, 15 bp, Homo sapiens
cttgaaactggactt

SEQ ID NO: 1839807 - DNA, 15 bp, Homo sapiens
ttgaaactggacttg

SEQ ID NO: 1839808 - DNA, 15 bp, Homo sapiens
tgaaactggacttgt

SEQ ID NO: 1839809 - DNA, 15 bp, Homo sapiens
gaaactggacttgtt

SEQ ID NO: 1839810 - DNA, 15 bp, Homo sapiens
aaactggacttgttt

SEQ ID NO: 1839811 - DNA, 15 bp, Homo sapiens
aactggacttgtttt

SEQ ID NO: 1839812 - DNA, 15 bp, Homo sapiens
actggacttgttttc

SEQ ID NO: 1839813 - DNA, 15 bp, Homo sapiens
ctggacttgttttct

SEQ ID NO: 1839814 - DNA, 15 bp, Homo sapiens
tggacttgttttctg

SEQ ID NO: 1839815 - DNA, 15 bp, Homo sapiens
ggacttgttttctgc

SEQ ID NO: 1839816 - DNA, 15 bp, Homo sapiens
gacttgttttctgcg

SEQ ID NO: 1839817 - DNA, 15 bp, Homo sapiens
acttgttttctgcgc

SEQ ID NO: 1839818 - DNA, 15 bp, Homo sapiens
cttgttttctgcgct

SEQ ID NO: 1839819 - DNA, 15 bp, Homo sapiens
ttgttttctgcgctc

SEQ ID NO: 1839820 - DNA, 15 bp, Homo sapiens
tgttttctgcgctcc

SEQ ID NO: 1839821 - DNA, 15 bp, Homo sapiens
gttttctgcgctcct

SEQ ID NO: 1839822 - DNA, 15 bp, Homo sapiens
ttttctgcgctccta

SEQ ID NO: 1839823 - DNA, 15 bp, Homo sapiens
tttctgcgctcctat

SEQ ID NO: 1839824 - DNA, 15 bp, Homo sapiens
ttctgcgctcctatg

SEQ ID NO: 1839825 - DNA, 15 bp, Homo sapiens
tctgcgctcctatga

SEQ ID NO: 1839826 - DNA, 15 bp, Homo sapiens
ctgcgctcctatgaa

SEQ ID NO: 1839827 - DNA, 15 bp, Homo sapiens
tgcgctcctatgaaa

SEQ ID NO: 1839828 - DNA, 15 bp, Homo sapiens
gcgctcctatgaaac

SEQ ID NO: 1839829 - DNA, 15 bp, Homo sapiens
cgctcctatgaaact

SEQ ID NO: 1839830 - DNA, 15 bp, Homo sapiens
gctcctatgaaactg

SEQ ID NO: 1839831 - DNA, 15 bp, Homo sapiens
ctcctatgaaactga

SEQ ID NO: 1839832 - DNA, 15 bp, Homo sapiens
tcctatgaaactgaa

SEQ ID NO: 1839833 - DNA, 15 bp, Homo sapiens
cctatgaaactgaac

SEQ ID NO: 1839834 - DNA, 15 bp, Homo sapiens
ctatgaaactgaaca

SEQ ID NO: 1839835 - DNA, 15 bp, Homo sapiens
tatgaaactgaacag

SEQ ID NO: 1839836 - DNA, 15 bp, Homo sapiens
atgaaactgaacagt

SEQ ID NO: 1839837 - DNA, 15 bp, Homo sapiens
tgaaactgaacagtg

SEQ ID NO: 1839838 - DNA, 15 bp, Homo sapiens
gaaactgaacagtgg

SEQ ID NO: 1839839 - DNA, 15 bp, Homo sapiens
aaactgaacagtgga

SEQ ID NO: 1839840 - DNA, 15 bp, Homo sapiens
aactgaacagtggag

SEQ ID NO: 1839841 - DNA, 15 bp, Homo sapiens
actgaacagtggagg

SEQ ID NO: 1839842 - DNA, 15 bp, Homo sapiens
ctgaacagtggaggg

SEQ ID NO: 1839843 - DNA, 15 bp, Homo sapiens
tgaacagtggagggt

SEQ ID NO: 1839844 - DNA, 15 bp, Homo sapiens
gaacagtggagggtt

SEQ ID NO: 1839845 - DNA, 15 bp, Homo sapiens
aacagtggagggttg

SEQ ID NO: 1839846 - DNA, 15 bp, Homo sapiens
acagtggagggttgc

SEQ ID NO: 1839847 - DNA, 15 bp, Homo sapiens
cagtggagggttgct

SEQ ID NO: 1839848 - DNA, 15 bp, Homo sapiens
agtggagggttgctc

SEQ ID NO: 1839849 - DNA, 15 bp, Homo sapiens
gtggagggttgctcg

SEQ ID NO: 1839850 - DNA, 15 bp, Homo sapiens
tggagggttgctcgt

SEQ ID NO: 1839851 - DNA, 15 bp, Homo sapiens
ggagggttgctcgtg

SEQ ID NO: 1839852 - DNA, 15 bp, Homo sapiens
gagggttgctcgtga

SEQ ID NO: 1839853 - DNA, 15 bp, Homo sapiens
agggttgctcgtgaa

SEQ ID NO: 1839854 - DNA, 15 bp, Homo sapiens
gggttgctcgtgaag

SEQ ID NO: 1839855 - DNA, 15 bp, Homo sapiens
ggttgctcgtgaagg

SEQ ID NO: 1839856 - DNA, 15 bp, Homo sapiens
gttgctcgtgaagga

SEQ ID NO: 1839857 - DNA, 15 bp, Homo sapiens
ttgctcgtgaaggat

SEQ ID NO: 1839858 - DNA, 15 bp, Homo sapiens
tgctcgtgaaggatc

SEQ ID NO: 1839859 - DNA, 15 bp, Homo sapiens
gctcgtgaaggatct

SEQ ID NO: 1839860 - DNA, 15 bp, Homo sapiens
ctcgtgaaggatctg

SEQ ID NO: 1839861 - DNA, 15 bp, Homo sapiens
tcgtgaaggatctgg

SEQ ID NO: 1839862 - DNA, 15 bp, Homo sapiens
cgtgaaggatctggg

SEQ ID NO: 1839863 - DNA, 15 bp, Homo sapiens
gtgaaggatctggga

SEQ ID NO: 1839864 - DNA, 15 bp, Homo sapiens
tgaaggatctgggac

SEQ ID NO: 1839865 - DNA, 15 bp, Homo sapiens
gaaggatctgggaca

SEQ ID NO: 1839866 - DNA, 15 bp, Homo sapiens
aaggatctgggacat

SEQ ID NO: 1839867 - DNA, 15 bp, Homo sapiens
aggatctgggacatg

SEQ ID NO: 1839868 - DNA, 15 bp, Homo sapiens
ggatctgggacatgt

SEQ ID NO: 1839869 - DNA, 15 bp, Homo sapiens
gatctgggacatgtt

SEQ ID NO: 1839870 - DNA, 15 bp, Homo sapiens
atctgggacatgttt

SEQ ID NO: 1839871 - DNA, 15 bp, Homo sapiens
tctgggacatgtttc

SEQ ID NO: 1839872 - DNA, 15 bp, Homo sapiens
ctgggacatgtttca

SEQ ID NO: 1839873 - DNA, 15 bp, Homo sapiens
tgggacatgtttcat

SEQ ID NO: 1839874 - DNA, 15 bp, Homo sapiens
gggacatgtttcata

SEQ ID NO: 1839875 - DNA, 15 bp, Homo sapiens
ggacatgtttcatat

SEQ ID NO: 1839876 - DNA, 15 bp, Homo sapiens
gacatgtttcatatg

SEQ ID NO: 1839877 - DNA, 15 bp, Homo sapiens
acatgtttcatatgg

SEQ ID NO: 1839878 - DNA, 15 bp, Homo sapiens
catgtttcatatgga

SEQ ID NO: 1839879 - DNA, 15 bp, Homo sapiens
atgtttcatatggag

SEQ ID NO: 1839880 - DNA, 15 bp, Homo sapiens
tgtttcatatggagc

SEQ ID NO: 1839881 - DNA, 15 bp, Homo sapiens
gtttcatatggagca

SEQ ID NO: 1839882 - DNA, 15 bp, Homo sapiens
tttcatatggagcac

SEQ ID NO: 1839883 - DNA, 15 bp, Homo sapiens
ttcatatggagcaca

SEQ ID NO: 1839884 - DNA, 15 bp, Homo sapiens
tcatatggagcacaa

SEQ ID NO: 1839885 - DNA, 15 bp, Homo sapiens
catatggagcacaag

SEQ ID NO: 1839886 - DNA, 15 bp, Homo sapiens
atatggagcacaaga

SEQ ID NO: 1839887 - DNA, 15 bp, Homo sapiens
tatggagcacaagaa

SEQ ID NO: 1839888 - DNA, 15 bp, Homo sapiens
atggagcacaagaaa

SEQ ID NO: 1839889 - DNA, 15 bp, Homo sapiens
tggagcacaagaaaa

SEQ ID NO: 1839890 - DNA, 15 bp, Homo sapiens
ggagcacaagaaaag

SEQ ID NO: 1839891 - DNA, 15 bp, Homo sapiens
gagcacaagaaaagg

SEQ ID NO: 1839892 - DNA, 15 bp, Homo sapiens
agcacaagaaaagga

SEQ ID NO: 1839893 - DNA, 15 bp, Homo sapiens
gcacaagaaaaggac

SEQ ID NO: 1839894 - DNA, 15 bp, Homo sapiens
cacaagaaaaggacg

SEQ ID NO: 1839895 - DNA, 15 bp, Homo sapiens
acaagaaaaggacgt

SEQ ID NO: 1839896 - DNA, 15 bp, Homo sapiens
caagaaaaggacgtc

SEQ ID NO: 1839897 - DNA, 15 bp, Homo sapiens
aagaaaaggacgtcg

SEQ ID NO: 1839898 - DNA, 15 bp, Homo sapiens
agaaaaggacgtcga

SEQ ID NO: 1839899 - DNA, 15 bp, Homo sapiens
gaaaaggacgtcgaa

SEQ ID NO: 1839900 - DNA, 15 bp, Homo sapiens
aaaaggacgtcgaac

SEQ ID NO: 1839901 - DNA, 15 bp, Homo sapiens
aaaggacgtcgaaca

SEQ ID NO: 1839902 - DNA, 15 bp, Homo sapiens
aaggacgtcgaacat

SEQ ID NO: 1839903 - DNA, 15 bp, Homo sapiens
aggacgtcgaacatg

SEQ ID NO: 1839904 - DNA, 15 bp, Homo sapiens
ggacgtcgaacatgc

SEQ ID NO: 1839905 - DNA, 15 bp, Homo sapiens
gacgtcgaacatgca

SEQ ID NO: 1839906 - DNA, 15 bp, Homo sapiens
acgtcgaacatgcaa

SEQ ID NO: 1839907 - DNA, 15 bp, Homo sapiens
cgtcgaacatgcaac

SEQ ID NO: 1839908 - DNA, 15 bp, Homo sapiens
gtcgaacatgcaacg

SEQ ID NO: 1839909 - DNA, 15 bp, Homo sapiens
tcgaacatgcaacgg

SEQ ID NO: 1839910 - DNA, 15 bp, Homo sapiens
cgaacatgcaacggt

SEQ ID NO: 1839911 - DNA, 15 bp, Homo sapiens
gaacatgcaacggtc

SEQ ID NO: 1839912 - DNA, 15 bp, Homo sapiens
aacatgcaacggtct

SEQ ID NO: 1839913 - DNA, 15 bp, Homo sapiens
acatgcaacggtctg

SEQ ID NO: 1839914 - DNA, 15 bp, Homo sapiens
catgcaacggtctgc

SEQ ID NO: 1839915 - DNA, 15 bp, Homo sapiens
atgcaacggtctgca

SEQ ID NO: 1839916 - DNA, 15 bp, Homo sapiens
tgcaacggtctgcat

SEQ ID NO: 1839917 - DNA, 15 bp, Homo sapiens
gcaacggtctgcatc

SEQ ID NO: 1839918 - DNA, 15 bp, Homo sapiens
caacggtctgcatcc

SEQ ID NO: 1839919 - DNA, 15 bp, Homo sapiens
aacggtctgcatcca

SEQ ID NO: 1839920 - DNA, 15 bp, Homo sapiens
acggtctgcatccag

SEQ ID NO: 1839921 - DNA, 15 bp, Homo sapiens
cggtctgcatccagg

SEQ ID NO: 1839922 - DNA, 15 bp, Homo sapiens
ggtctgcatccaggt

SEQ ID NO: 1839923 - DNA, 15 bp, Homo sapiens
gtctgcatccaggtg

SEQ ID NO: 1839924 - DNA, 15 bp, Homo sapiens
tctgcatccaggtgc

SEQ ID NO: 1839925 - DNA, 15 bp, Homo sapiens
ctgcatccaggtgct

SEQ ID NO: 1839926 - DNA, 15 bp, Homo sapiens
tgcatccaggtgcta

SEQ ID NO: 1839927 - DNA, 15 bp, Homo sapiens
gcatccaggtgctag

SEQ ID NO: 1839928 - DNA, 15 bp, Homo sapiens
catccaggtgctaga

SEQ ID NO: 1839929 - DNA, 15 bp, Homo sapiens
atccaggtgctagaa

SEQ ID NO: 1839930 - DNA, 15 bp, Homo sapiens
tccaggtgctagaac

SEQ ID NO: 1839931 - DNA, 15 bp, Homo sapiens
ccaggtgctagaacc

SEQ ID NO: 1839932 - DNA, 15 bp, Homo sapiens
caggtgctagaacca

SEQ ID NO: 1839933 - DNA, 15 bp, Homo sapiens
aggtgctagaaccat

SEQ ID NO: 1839934 - DNA, 15 bp, Homo sapiens
ggtgctagaaccatt

SEQ ID NO: 1839935 - DNA, 15 bp, Homo sapiens
gtgctagaaccattt

SEQ ID NO: 1839936 - DNA, 15 bp, Homo sapiens
tgctagaaccatttt

SEQ ID NO: 1839937 - DNA, 15 bp, Homo sapiens
gctagaaccattttg

SEQ ID NO: 1839938 - DNA, 15 bp, Homo sapiens
ctagaaccattttgt

SEQ ID NO: 1839939 - DNA, 15 bp, Homo sapiens
tagaaccattttgtt

SEQ ID NO: 1839940 - DNA, 15 bp, Homo sapiens
agaaccattttgttt

SEQ ID NO: 1839941 - DNA, 15 bp, Homo sapiens
gaaccattttgtttt

SEQ ID NO: 1839942 - DNA, 15 bp, Homo sapiens
aaccattttgttttt

SEQ ID NO: 1839943 - DNA, 15 bp, Homo sapiens
accattttgtttttc

SEQ ID NO: 1839944 - DNA, 15 bp, Homo sapiens
ccattttgtttttcc

SEQ ID NO: 1839945 - DNA, 15 bp, Homo sapiens
cattttgtttttccc

SEQ ID NO: 1839946 - DNA, 15 bp, Homo sapiens
attttgtttttccct

SEQ ID NO: 1839947 - DNA, 15 bp, Homo sapiens
ttttgtttttccctt

SEQ ID NO: 1839948 - DNA, 15 bp, Homo sapiens
tttgtttttcccttc

SEQ ID NO: 1839949 - DNA, 15 bp, Homo sapiens
ttgtttttcccttca

SEQ ID NO: 1839950 - DNA, 15 bp, Homo sapiens
tgtttttcccttcat

SEQ ID NO: 1839951 - DNA, 15 bp, Homo sapiens
gtttttcccttcatc

SEQ ID NO: 1839952 - DNA, 15 bp, Homo sapiens
tttttcccttcatca

SEQ ID NO: 1839953 - DNA, 15 bp, Homo sapiens
ttttcccttcatcat

SEQ ID NO: 1839954 - DNA, 15 bp, Homo sapiens
tttcccttcatcatc

SEQ ID NO: 1839955 - DNA, 15 bp, Homo sapiens
ttcccttcatcatcc

SEQ ID NO: 1839956 - DNA, 15 bp, Homo sapiens
tcccttcatcatccc

SEQ ID NO: 1839957 - DNA, 15 bp, Homo sapiens
cccttcatcatccct

SEQ ID NO: 1839958 - DNA, 15 bp, Homo sapiens
ccttcatcatcccta

SEQ ID NO: 1839959 - DNA, 15 bp, Homo sapiens
cttcatcatccctag

SEQ ID NO: 1839960 - DNA, 15 bp, Homo sapiens
ttcatcatccctaga

SEQ ID NO: 1839961 - DNA, 15 bp, Homo sapiens
tcatcatccctagaa

SEQ ID NO: 1839962 - DNA, 15 bp, Homo sapiens
catcatccctagaac

SEQ ID NO: 1839963 - DNA, 15 bp, Homo sapiens
atcatccctagaacc

SEQ ID NO: 1839964 - DNA, 15 bp, Homo sapiens
tcatccctagaacca

SEQ ID NO: 1839965 - DNA, 15 bp, Homo sapiens
catccctagaaccaa

SEQ ID NO: 1839966 - DNA, 15 bp, Homo sapiens
atccctagaaccaag

SEQ ID NO: 1839967 - DNA, 15 bp, Homo sapiens
tccctagaaccaaga

SEQ ID NO: 1839968 - DNA, 15 bp, Homo sapiens
ccctagaaccaagag

SEQ ID NO: 1839969 - DNA, 15 bp, Homo sapiens
cctagaaccaagagt

SEQ ID NO: 1839970 - DNA, 15 bp, Homo sapiens
ctagaaccaagagtg

SEQ ID NO: 1839971 - DNA, 15 bp, Homo sapiens
tagaaccaagagtgt

SEQ ID NO: 1839972 - DNA, 15 bp, Homo sapiens
agaaccaagagtgtg

SEQ ID NO: 1839973 - DNA, 15 bp, Homo sapiens
gaaccaagagtgtgg

SEQ ID NO: 1839974 - DNA, 15 bp, Homo sapiens
aaccaagagtgtggg

SEQ ID NO: 1839975 - DNA, 15 bp, Homo sapiens
accaagagtgtgggt

SEQ ID NO: 1839976 - DNA, 15 bp, Homo sapiens
ccaagagtgtgggtg

SEQ ID NO: 1839977 - DNA, 15 bp, Homo sapiens
caagagtgtgggtgg

SEQ ID NO: 1839978 - DNA, 15 bp, Homo sapiens
aagagtgtgggtggg

SEQ ID NO: 1839979 - DNA, 15 bp, Homo sapiens
agagtgtgggtggga

SEQ ID NO: 1839980 - DNA, 15 bp, Homo sapiens
gagtgtgggtgggaa

SEQ ID NO: 1839981 - DNA, 15 bp, Homo sapiens
agtgtgggtgggaat

SEQ ID NO: 1839982 - DNA, 15 bp, Homo sapiens
gtgtgggtgggaata

SEQ ID NO: 1839983 - DNA, 15 bp, Homo sapiens
tgtgggtgggaatag

SEQ ID NO: 1839984 - DNA, 15 bp, Homo sapiens
gtgggtgggaatagc

SEQ ID NO: 1839985 - DNA, 15 bp, Homo sapiens
tgggtgggaatagct

SEQ ID NO: 1839986 - DNA, 15 bp, Homo sapiens
gggtgggaatagctc

SEQ ID NO: 1839987 - DNA, 15 bp, Homo sapiens
ggtgggaatagctca

SEQ ID NO: 1839988 - DNA, 15 bp, Homo sapiens
gtgggaatagctcag

SEQ ID NO: 1839989 - DNA, 15 bp, Homo sapiens
tgggaatagctcagt

SEQ ID NO: 1839990 - DNA, 15 bp, Homo sapiens
gggaatagctcagta

SEQ ID NO: 1839991 - DNA, 15 bp, Homo sapiens
ggaatagctcagtag

SEQ ID NO: 1839992 - DNA, 15 bp, Homo sapiens
gaatagctcagtaga

SEQ ID NO: 1839993 - DNA, 15 bp, Homo sapiens
aatagctcagtagag

SEQ ID NO: 1839994 - DNA, 15 bp, Homo sapiens
atagctcagtagagt

SEQ ID NO: 1839995 - DNA, 15 bp, Homo sapiens
tagctcagtagagtg

SEQ ID NO: 1839996 - DNA, 15 bp, Homo sapiens
agctcagtagagtga

SEQ ID NO: 1839997 - DNA, 15 bp, Homo sapiens
gctcagtagagtgac

SEQ ID NO: 1839998 - DNA, 15 bp, Homo sapiens
ctcagtagagtgacc

SEQ ID NO: 1839999 - DNA, 15 bp, Homo sapiens
tcagtagagtgacca

SEQ ID NO: 1840000 - DNA, 15 bp, Homo sapiens
cagtagagtgaccat

SEQ ID NO: 1840001 - DNA, 15 bp, Homo sapiens
agtagagtgaccatg

SEQ ID NO: 1840002 - DNA, 15 bp, Homo sapiens
gtagagtgaccatgt

SEQ ID NO: 1840003 - DNA, 15 bp, Homo sapiens
tagagtgaccatgtg

SEQ ID NO: 1840004 - DNA, 15 bp, Homo sapiens
agagtgaccatgtga

SEQ ID NO: 1840005 - DNA, 15 bp, Homo sapiens
gagtgaccatgtgat

SEQ ID NO: 1840006 - DNA, 15 bp, Homo sapiens
agtgaccatgtgatc

SEQ ID NO: 1840007 - DNA, 15 bp, Homo sapiens
gtgaccatgtgatcc

SEQ ID NO: 1840008 - DNA, 15 bp, Homo sapiens
tgaccatgtgatcct

SEQ ID NO: 1840009 - DNA, 15 bp, Homo sapiens
gaccatgtgatcctg

SEQ ID NO: 1840010 - DNA, 15 bp, Homo sapiens
accatgtgatcctgt

SEQ ID NO: 1840011 - DNA, 15 bp, Homo sapiens
ccatgtgatcctgtg

SEQ ID NO: 1840012 - DNA, 15 bp, Homo sapiens
catgtgatcctgtgt

SEQ ID NO: 1840013 - DNA, 15 bp, Homo sapiens
atgtgatcctgtgtt

SEQ ID NO: 1840014 - DNA, 15 bp, Homo sapiens
tgtgatcctgtgtta

SEQ ID NO: 1840015 - DNA, 15 bp, Homo sapiens
gtgatcctgtgttac

SEQ ID NO: 1840016 - DNA, 15 bp, Homo sapiens
tgatcctgtgttaca

SEQ ID NO: 1840017 - DNA, 15 bp, Homo sapiens
gatcctgtgttacaa

SEQ ID NO: 1840018 - DNA, 15 bp, Homo sapiens
atcctgtgttacaac

SEQ ID NO: 1840019 - DNA, 15 bp, Homo sapiens
tcctgtgttacaact

SEQ ID NO: 1840020 - DNA, 15 bp, Homo sapiens
cctgtgttacaactg

SEQ ID NO: 1840021 - DNA, 15 bp, Homo sapiens
ctgtgttacaactga

SEQ ID NO: 1840022 - DNA, 15 bp, Homo sapiens
tgtgttacaactgaa

SEQ ID NO: 1840023 - DNA, 15 bp, Homo sapiens
gtgttacaactgaag

SEQ ID NO: 1840024 - DNA, 15 bp, Homo sapiens
tgttacaactgaaga

SEQ ID NO: 1840025 - DNA, 15 bp, Homo sapiens
gttacaactgaagac

SEQ ID NO: 1840026 - DNA, 15 bp, Homo sapiens
ttacaactgaagaca

SEQ ID NO: 1840027 - DNA, 15 bp, Homo sapiens
tacaactgaagacaa

SEQ ID NO: 1840028 - DNA, 15 bp, Homo sapiens
acaactgaagacaaa

SEQ ID NO: 1840029 - DNA, 15 bp, Homo sapiens
caactgaagacaaaa

SEQ ID NO: 1840030 - DNA, 15 bp, Homo sapiens
aactgaagacaaaat

SEQ ID NO: 1840031 - DNA, 15 bp, Homo sapiens
actgaagacaaaatc

SEQ ID NO: 1840032 - DNA, 15 bp, Homo sapiens
ctgaagacaaaatct

SEQ ID NO: 1840033 - DNA, 15 bp, Homo sapiens
tgaagacaaaatctg

SEQ ID NO: 1840034 - DNA, 15 bp, Homo sapiens
gaagacaaaatctgg

SEQ ID NO: 1840035 - DNA, 15 bp, Homo sapiens
aagacaaaatctggc

SEQ ID NO: 1840036 - DNA, 15 bp, Homo sapiens
agacaaaatctggca

SEQ ID NO: 1840037 - DNA, 15 bp, Homo sapiens
gacaaaatctggcac

SEQ ID NO: 1840038 - DNA, 15 bp, Homo sapiens
acaaaatctggcaca

SEQ ID NO: 1840039 - DNA, 15 bp, Homo sapiens
caaaatctggcacag

SEQ ID NO: 1840040 - DNA, 15 bp, Homo sapiens
aaaatctggcacaga

SEQ ID NO: 1840041 - DNA, 15 bp, Homo sapiens
aaatctggcacagag

SEQ ID NO: 1840042 - DNA, 15 bp, Homo sapiens
aatctggcacagagt

SEQ ID NO: 1840043 - DNA, 15 bp, Homo sapiens
atctggcacagagtc

SEQ ID NO: 1840044 - DNA, 15 bp, Homo sapiens
tctggcacagagtct

SEQ ID NO: 1840045 - DNA, 15 bp, Homo sapiens
ctggcacagagtctc

SEQ ID NO: 1840046 - DNA, 15 bp, Homo sapiens
tggcacagagtctct

SEQ ID NO: 1840047 - DNA, 15 bp, Homo sapiens
ggcacagagtctctc

SEQ ID NO: 1840048 - DNA, 15 bp, Homo sapiens
gcacagagtctctcc

SEQ ID NO: 1840049 - DNA, 15 bp, Homo sapiens
cacagagtctctcca

SEQ ID NO: 1840050 - DNA, 15 bp, Homo sapiens
acagagtctctccag

SEQ ID NO: 1840051 - DNA, 15 bp, Homo sapiens
cagagtctctccagt

SEQ ID NO: 1840052 - DNA, 15 bp, Homo sapiens
agagtctctccagtg

SEQ ID NO: 1840053 - DNA, 15 bp, Homo sapiens
gagtctctccagtga

SEQ ID NO: 1840054 - DNA, 15 bp, Homo sapiens
agtctctccagtgat

SEQ ID NO: 1840055 - DNA, 15 bp, Homo sapiens
gtctctccagtgatg

SEQ ID NO: 1840056 - DNA, 15 bp, Homo sapiens
tctctccagtgatga

SEQ ID NO: 1840057 - DNA, 15 bp, Homo sapiens
ctctccagtgatgac

SEQ ID NO: 1840058 - DNA, 15 bp, Homo sapiens
tctccagtgatgact

SEQ ID NO: 1840059 - DNA, 15 bp, Homo sapiens
ctccagtgatgacta

SEQ ID NO: 1840060 - DNA, 15 bp, Homo sapiens
tccagtgatgactat

SEQ ID NO: 1840061 - DNA, 15 bp, Homo sapiens
ccagtgatgactatg

SEQ ID NO: 1840062 - DNA, 15 bp, Homo sapiens
cagtgatgactatga

SEQ ID NO: 1840063 - DNA, 15 bp, Homo sapiens
agtgatgactatgaa

SEQ ID NO: 1840064 - DNA, 15 bp, Homo sapiens
gtgatgactatgaaa

SEQ ID NO: 1840065 - DNA, 15 bp, Homo sapiens
tgatgactatgaaac

SEQ ID NO: 1840066 - DNA, 15 bp, Homo sapiens
gatgactatgaaact

SEQ ID NO: 1840067 - DNA, 15 bp, Homo sapiens
atgactatgaaactg

SEQ ID NO: 1840068 - DNA, 15 bp, Homo sapiens
tgactatgaaactga

SEQ ID NO: 1840069 - DNA, 15 bp, Homo sapiens
gactatgaaactgac

SEQ ID NO: 1840070 - DNA, 15 bp, Homo sapiens
actatgaaactgact

SEQ ID NO: 1840071 - DNA, 15 bp, Homo sapiens
ctatgaaactgactg

SEQ ID NO: 1840072 - DNA, 15 bp, Homo sapiens
tatgaaactgactgg

SEQ ID NO: 1840073 - DNA, 15 bp, Homo sapiens
atgaaactgactggt

SEQ ID NO: 1840074 - DNA, 15 bp, Homo sapiens
tgaaactgactggtg

SEQ ID NO: 1840075 - DNA, 15 bp, Homo sapiens
gaaactgactggtgc

SEQ ID NO: 1840076 - DNA, 15 bp, Homo sapiens
aaactgactggtgcc

SEQ ID NO: 1840077 - DNA, 15 bp, Homo sapiens
aactgactggtgccc

SEQ ID NO: 1840078 - DNA, 15 bp, Homo sapiens
actgactggtgcccc

SEQ ID NO: 1840079 - DNA, 15 bp, Homo sapiens
ctgactggtgcccca

SEQ ID NO: 1840080 - DNA, 15 bp, Homo sapiens
tgactggtgccccat

SEQ ID NO: 1840081 - DNA, 15 bp, Homo sapiens
gactggtgccccatc

SEQ ID NO: 1840082 - DNA, 15 bp, Homo sapiens
actggtgccccatca

SEQ ID NO: 1840083 - DNA, 15 bp, Homo sapiens
ctggtgccccatcag

SEQ ID NO: 1840084 - DNA, 15 bp, Homo sapiens
tggtgccccatcaga

SEQ ID NO: 1840085 - DNA, 15 bp, Homo sapiens
ggtgccccatcagat

SEQ ID NO: 1840086 - DNA, 15 bp, Homo sapiens
gtgccccatcagatt

SEQ ID NO: 1840087 - DNA, 15 bp, Homo sapiens
tgccccatcagattc

SEQ ID NO: 1840088 - DNA, 15 bp, Homo sapiens
gccccatcagattca

SEQ ID NO: 1840089 - DNA, 15 bp, Homo sapiens
ccccatcagattcag

SEQ ID NO: 1840090 - DNA, 15 bp, Homo sapiens
cccatcagattcaga

SEQ ID NO: 1840091 - DNA, 15 bp, Homo sapiens
ccatcagattcagaa

SEQ ID NO: 1840092 - DNA, 15 bp, Homo sapiens
catcagattcagaag

SEQ ID NO: 1840093 - DNA, 15 bp, Homo sapiens
atcagattcagaagt

SEQ ID NO: 1840094 - DNA, 15 bp, Homo sapiens
tcagattcagaagtg

SEQ ID NO: 1840095 - DNA, 15 bp, Homo sapiens
cagattcagaagtgg

SEQ ID NO: 1840096 - DNA, 15 bp, Homo sapiens
agattcagaagtgga

SEQ ID NO: 1840097 - DNA, 15 bp, Homo sapiens
gattcagaagtggag

SEQ ID NO: 1840098 - DNA, 15 bp, Homo sapiens
attcagaagtggaga

SEQ ID NO: 1840099 - DNA, 15 bp, Homo sapiens
ttcagaagtggagag

SEQ ID NO: 1840100 - DNA, 15 bp, Homo sapiens
tcagaagtggagagt

SEQ ID NO: 1840101 - DNA, 15 bp, Homo sapiens
cagaagtggagagtg

SEQ ID NO: 1840102 - DNA, 15 bp, Homo sapiens
agaagtggagagtgt

SEQ ID NO: 1840103 - DNA, 15 bp, Homo sapiens
gaagtggagagtgtt

SEQ ID NO: 1840104 - DNA, 15 bp, Homo sapiens
aagtggagagtgtta

SEQ ID NO: 1840105 - DNA, 15 bp, Homo sapiens
agtggagagtgttac

SEQ ID NO: 1840106 - DNA, 15 bp, Homo sapiens
gtggagagtgttaca

SEQ ID NO: 1840107 - DNA, 15 bp, Homo sapiens
tggagagtgttacat

SEQ ID NO: 1840108 - DNA, 15 bp, Homo sapiens
ggagagtgttacata

SEQ ID NO: 1840109 - DNA, 15 bp, Homo sapiens
gagagtgttacatac

SEQ ID NO: 1840110 - DNA, 15 bp, Homo sapiens
agagtgttacatact

SEQ ID NO: 1840111 - DNA, 15 bp, Homo sapiens
gagtgttacatactg

SEQ ID NO: 1840112 - DNA, 15 bp, Homo sapiens
agtgttacatactga

SEQ ID NO: 1840113 - DNA, 15 bp, Homo sapiens
gtgttacatactgat

SEQ ID NO: 1840114 - DNA, 15 bp, Homo sapiens
tgttacatactgatt

SEQ ID NO: 1840115 - DNA, 15 bp, Homo sapiens
gttacatactgattt

SEQ ID NO: 1840116 - DNA, 15 bp, Homo sapiens
ttacatactgatttc

SEQ ID NO: 1840117 - DNA, 15 bp, Homo sapiens
tacatactgatttca

SEQ ID NO: 1840118 - DNA, 15 bp, Homo sapiens
acatactgatttcag

SEQ ID NO: 1840119 - DNA, 15 bp, Homo sapiens
catactgatttcaga

SEQ ID NO: 1840120 - DNA, 15 bp, Homo sapiens
atactgatttcagaa

SEQ ID NO: 1840121 - DNA, 15 bp, Homo sapiens
tactgatttcagaaa

SEQ ID NO: 1840122 - DNA, 15 bp, Homo sapiens
actgatttcagaaaa

SEQ ID NO: 1840123 - DNA, 15 bp, Homo sapiens
ctgatttcagaaaaa

SEQ ID NO: 1840124 - DNA, 15 bp, Homo sapiens
tgatttcagaaaaat

SEQ ID NO: 1840125 - DNA, 15 bp, Homo sapiens
gatttcagaaaaatg

SEQ ID NO: 1840126 - DNA, 15 bp, Homo sapiens
atttcagaaaaatgt

SEQ ID NO: 1840127 - DNA, 15 bp, Homo sapiens
tttcagaaaaatgtt

SEQ ID NO: 1840128 - DNA, 15 bp, Homo sapiens
ttcagaaaaatgtta

SEQ ID NO: 1840129 - DNA, 15 bp, Homo sapiens
tcagaaaaatgttag

SEQ ID NO: 1840130 - DNA, 15 bp, Homo sapiens
cagaaaaatgttaga

SEQ ID NO: 1840131 - DNA, 15 bp, Homo sapiens
agaaaaatgttagat

SEQ ID NO: 1840132 - DNA, 15 bp, Homo sapiens
gaaaaatgttagata

SEQ ID NO: 1840133 - DNA, 15 bp, Homo sapiens
aaaaatgttagataa

SEQ ID NO: 1840134 - DNA, 15 bp, Homo sapiens
aaaatgttagataaa

SEQ ID NO: 1840135 - DNA, 15 bp, Homo sapiens
aaatgttagataaac

SEQ ID NO: 1840136 - DNA, 15 bp, Homo sapiens
aatgttagataaaca

SEQ ID NO: 1840137 - DNA, 15 bp, Homo sapiens
atgttagataaacat

SEQ ID NO: 1840138 - DNA, 15 bp, Homo sapiens
tgttagataaacatt

SEQ ID NO: 1840139 - DNA, 15 bp, Homo sapiens
gttagataaacattg

SEQ ID NO: 1840140 - DNA, 15 bp, Homo sapiens
ttagataaacattgg

SEQ ID NO: 1840141 - DNA, 15 bp, Homo sapiens
tagataaacattggg

SEQ ID NO: 1840142 - DNA, 15 bp, Homo sapiens
agataaacattggga

SEQ ID NO: 1840143 - DNA, 15 bp, Homo sapiens
gataaacattgggac

SEQ ID NO: 1840144 - DNA, 15 bp, Homo sapiens
ataaacattgggacc

SEQ ID NO: 1840145 - DNA, 15 bp, Homo sapiens
taaacattgggaccc

SEQ ID NO: 1840146 - DNA, 15 bp, Homo sapiens
aaacattgggaccct

SEQ ID NO: 1840147 - DNA, 15 bp, Homo sapiens
aacattgggaccctt

SEQ ID NO: 1840148 - DNA, 15 bp, Homo sapiens
acattgggacccttt

SEQ ID NO: 1840149 - DNA, 15 bp, Homo sapiens
cattgggacccttta

SEQ ID NO: 1840150 - DNA, 15 bp, Homo sapiens
attgggaccctttat

SEQ ID NO: 1840151 - DNA, 15 bp, Homo sapiens
ttgggaccctttatt

SEQ ID NO: 1840152 - DNA, 15 bp, Homo sapiens
tgggaccctttatta

SEQ ID NO: 1840153 - DNA, 15 bp, Homo sapiens
gggaccctttattat

SEQ ID NO: 1840154 - DNA, 15 bp, Homo sapiens
ggaccctttattata

SEQ ID NO: 1840155 - DNA, 15 bp, Homo sapiens
gaccctttattatat

SEQ ID NO: 1840156 - DNA, 15 bp, Homo sapiens
accctttattatata

SEQ ID NO: 1840157 - DNA, 15 bp, Homo sapiens
ccctttattatatac

SEQ ID NO: 1840158 - DNA, 15 bp, Homo sapiens
cctttattatatacc

SEQ ID NO: 1840159 - DNA, 15 bp, Homo sapiens
ctttattatataccg

SEQ ID NO: 1840160 - DNA, 15 bp, Homo sapiens
tttattatataccgg

SEQ ID NO: 1840161 - DNA, 15 bp, Homo sapiens
ttattatataccggg

SEQ ID NO: 1840162 - DNA, 15 bp, Homo sapiens
tattatataccggga

SEQ ID NO: 1840163 - DNA, 15 bp, Homo sapiens
attatataccgggaa

SEQ ID NO: 1840164 - DNA, 15 bp, Homo sapiens
ttatataccgggaac

SEQ ID NO: 1840165 - DNA, 15 bp, Homo sapiens
tatataccgggaaca

SEQ ID NO: 1840166 - DNA, 15 bp, Homo sapiens
atataccgggaacag

SEQ ID NO: 1840167 - DNA, 15 bp, Homo sapiens
tataccgggaacaga

SEQ ID NO: 1840168 - DNA, 15 bp, Homo sapiens
ataccgggaacagaa

SEQ ID NO: 1840169 - DNA, 15 bp, Homo sapiens
taccgggaacagaaa

SEQ ID NO: 1840170 - DNA, 15 bp, Homo sapiens
accgggaacagaaaa

SEQ ID NO: 1840171 - DNA, 15 bp, Homo sapiens
ccgggaacagaaaat

SEQ ID NO: 1840172 - DNA, 15 bp, Homo sapiens
cgggaacagaaaatg

SEQ ID NO: 1840173 - DNA, 15 bp, Homo sapiens
gggaacagaaaatgc

SEQ ID NO: 1840174 - DNA, 15 bp, Homo sapiens
ggaacagaaaatgca

SEQ ID NO: 1840175 - DNA, 15 bp, Homo sapiens
gaacagaaaatgcat

SEQ ID NO: 1840176 - DNA, 15 bp, Homo sapiens
aacagaaaatgcatg

SEQ ID NO: 1840177 - DNA, 15 bp, Homo sapiens
acagaaaatgcatgt

SEQ ID NO: 1840178 - DNA, 15 bp, Homo sapiens
cagaaaatgcatgtt

SEQ ID NO: 1840179 - DNA, 15 bp, Homo sapiens
agaaaatgcatgttg

SEQ ID NO: 1840180 - DNA, 15 bp, Homo sapiens
gaaaatgcatgttga

SEQ ID NO: 1840181 - DNA, 15 bp, Homo sapiens
aaaatgcatgttgat

SEQ ID NO: 1840182 - DNA, 15 bp, Homo sapiens
aaatgcatgttgata

SEQ ID NO: 1840183 - DNA, 15 bp, Homo sapiens
aatgcatgttgataa

SEQ ID NO: 1840184 - DNA, 15 bp, Homo sapiens
atgcatgttgataaa

SEQ ID NO: 1840185 - DNA, 15 bp, Homo sapiens
tgcatgttgataaaa

SEQ ID NO: 1840186 - DNA, 15 bp, Homo sapiens
gcatgttgataaaag

SEQ ID NO: 1840187 - DNA, 15 bp, Homo sapiens
catgttgataaaagt

SEQ ID NO: 1840188 - DNA, 15 bp, Homo sapiens
atgttgataaaagtt

SEQ ID NO: 1840189 - DNA, 15 bp, Homo sapiens
tgttgataaaagttt

SEQ ID NO: 1840190 - DNA, 15 bp, Homo sapiens
gttgataaaagtttg

SEQ ID NO: 1840191 - DNA, 15 bp, Homo sapiens
ttgataaaagtttgg

SEQ ID NO: 1840192 - DNA, 15 bp, Homo sapiens
tgataaaagtttggg

SEQ ID NO: 1840193 - DNA, 15 bp, Homo sapiens
gataaaagtttggga

SEQ ID NO: 1840194 - DNA, 15 bp, Homo sapiens
ataaaagtttgggat

SEQ ID NO: 1840195 - DNA, 15 bp, Homo sapiens
taaaagtttgggatg

SEQ ID NO: 1840196 - DNA, 15 bp, Homo sapiens
aaaagtttgggatgt

SEQ ID NO: 1840197 - DNA, 15 bp, Homo sapiens
aaagtttgggatgtt

SEQ ID NO: 1840198 - DNA, 15 bp, Homo sapiens
aagtttgggatgttc

SEQ ID NO: 1840199 - DNA, 15 bp, Homo sapiens
agtttgggatgttcc

SEQ ID NO: 1840200 - DNA, 15 bp, Homo sapiens
gtttgggatgttcca

SEQ ID NO: 1840201 - DNA, 15 bp, Homo sapiens
tttgggatgttccat

SEQ ID NO: 1840202 - DNA, 15 bp, Homo sapiens
ttgggatgttccatt

SEQ ID NO: 1840203 - DNA, 15 bp, Homo sapiens
tgggatgttccattt

SEQ ID NO: 1840204 - DNA, 15 bp, Homo sapiens
gggatgttccatttc

SEQ ID NO: 1840205 - DNA, 15 bp, Homo sapiens
ggatgttccatttca

SEQ ID NO: 1840206 - DNA, 15 bp, Homo sapiens
gatgttccatttcac

SEQ ID NO: 1840207 - DNA, 15 bp, Homo sapiens
atgttccatttcact

SEQ ID NO: 1840208 - DNA, 15 bp, Homo sapiens
tgttccatttcactc

SEQ ID NO: 1840209 - DNA, 15 bp, Homo sapiens
gttccatttcactct

SEQ ID NO: 1840210 - DNA, 15 bp, Homo sapiens
ttccatttcactctg

SEQ ID NO: 1840211 - DNA, 15 bp, Homo sapiens
tccatttcactctga

SEQ ID NO: 1840212 - DNA, 15 bp, Homo sapiens
ccatttcactctgat

SEQ ID NO: 1840213 - DNA, 15 bp, Homo sapiens
catttcactctgata

SEQ ID NO: 1840214 - DNA, 15 bp, Homo sapiens
atttcactctgatat

SEQ ID NO: 1840215 - DNA, 15 bp, Homo sapiens
tttcactctgatata

SEQ ID NO: 1840216 - DNA, 15 bp, Homo sapiens
ttcactctgatataa

SEQ ID NO: 1840217 - DNA, 15 bp, Homo sapiens
tcactctgatataaa

SEQ ID NO: 1840218 - DNA, 15 bp, Homo sapiens
cactctgatataaag

SEQ ID NO: 1840219 - DNA, 15 bp, Homo sapiens
actctgatataaagt

SEQ ID NO: 1840220 - DNA, 15 bp, Homo sapiens
ctctgatataaagtg

SEQ ID NO: 1840221 - DNA, 15 bp, Homo sapiens
tctgatataaagtgt

SEQ ID NO: 1840222 - DNA, 15 bp, Homo sapiens
ctgatataaagtgtg

SEQ ID NO: 1840223 - DNA, 15 bp, Homo sapiens
tgatataaagtgtgc

SEQ ID NO: 1840224 - DNA, 15 bp, Homo sapiens
gatataaagtgtgcg

SEQ ID NO: 1840225 - DNA, 15 bp, Homo sapiens
atataaagtgtgcgt

SEQ ID NO: 1840226 - DNA, 15 bp, Homo sapiens
tataaagtgtgcgtg

SEQ ID NO: 1840227 - DNA, 15 bp, Homo sapiens
ataaagtgtgcgtgg

SEQ ID NO: 1840228 - DNA, 15 bp, Homo sapiens
taaagtgtgcgtggt

SEQ ID NO: 1840229 - DNA, 15 bp, Homo sapiens
aaagtgtgcgtggtc

SEQ ID NO: 1840230 - DNA, 15 bp, Homo sapiens
aagtgtgcgtggtca

SEQ ID NO: 1840231 - DNA, 15 bp, Homo sapiens
agtgtgcgtggtcag

SEQ ID NO: 1840232 - DNA, 15 bp, Homo sapiens
gtgtgcgtggtcaga

SEQ ID NO: 1840233 - DNA, 15 bp, Homo sapiens
tgtgcgtggtcagat

SEQ ID NO: 1840234 - DNA, 15 bp, Homo sapiens
gtgcgtggtcagatt

SEQ ID NO: 1840235 - DNA, 15 bp, Homo sapiens
tgcgtggtcagattg

SEQ ID NO: 1840236 - DNA, 15 bp, Homo sapiens
gcgtggtcagattgg

SEQ ID NO: 1840237 - DNA, 15 bp, Homo sapiens
cgtggtcagattggt

SEQ ID NO: 1840238 - DNA, 15 bp, Homo sapiens
gtggtcagattggtt

SEQ ID NO: 1840239 - DNA, 15 bp, Homo sapiens
tggtcagattggttt

SEQ ID NO: 1840240 - DNA, 15 bp, Homo sapiens
ggtcagattggtttc

SEQ ID NO: 1840241 - DNA, 15 bp, Homo sapiens
gtcagattggtttct

SEQ ID NO: 1840242 - DNA, 15 bp, Homo sapiens
tcagattggtttcta

SEQ ID NO: 1840243 - DNA, 15 bp, Homo sapiens
cagattggtttctat

SEQ ID NO: 1840244 - DNA, 15 bp, Homo sapiens
agattggtttctatt

SEQ ID NO: 1840245 - DNA, 15 bp, Homo sapiens
gattggtttctattt

SEQ ID NO: 1840246 - DNA, 15 bp, Homo sapiens
attggtttctatttt

SEQ ID NO: 1840247 - DNA, 15 bp, Homo sapiens
ttggtttctattttt

SEQ ID NO: 1840248 - DNA, 15 bp, Homo sapiens
tggtttctatttttg

SEQ ID NO: 1840249 - DNA, 15 bp, Homo sapiens
ggtttctatttttga

SEQ ID NO: 1840250 - DNA, 15 bp, Homo sapiens
gtttctatttttgat

SEQ ID NO: 1840251 - DNA, 15 bp, Homo sapiens
tttctatttttgata

SEQ ID NO: 1840252 - DNA, 15 bp, Homo sapiens
ttctatttttgataa

SEQ ID NO: 1840253 - DNA, 15 bp, Homo sapiens
tctatttttgataaa

SEQ ID NO: 1840254 - DNA, 15 bp, Homo sapiens
ctatttttgataaaa

SEQ ID NO: 1840255 - DNA, 15 bp, Homo sapiens
tatttttgataaaaa

SEQ ID NO: 1840256 - DNA, 15 bp, Homo sapiens
atttttgataaaaat

SEQ ID NO: 1840257 - DNA, 15 bp, Homo sapiens
tttttgataaaaatg

SEQ ID NO: 1840258 - DNA, 15 bp, Homo sapiens
ttttgataaaaatga

SEQ ID NO: 1840259 - DNA, 15 bp, Homo sapiens
tttgataaaaatgag

SEQ ID NO: 1840260 - DNA, 15 bp, Homo sapiens
ttgataaaaatgagg

SEQ ID NO: 1840261 - DNA, 15 bp, Homo sapiens
tgataaaaatgaggt

SEQ ID NO: 1840262 - DNA, 15 bp, Homo sapiens
gataaaaatgaggtt

SEQ ID NO: 1840263 - DNA, 15 bp, Homo sapiens
ataaaaatgaggttc

SEQ ID NO: 1840264 - DNA, 15 bp, Homo sapiens
taaaaatgaggttct

SEQ ID NO: 1840265 - DNA, 15 bp, Homo sapiens
aaaaatgaggttctg

SEQ ID NO: 1840266 - DNA, 15 bp, Homo sapiens
aaaatgaggttctgg

SEQ ID NO: 1840267 - DNA, 15 bp, Homo sapiens
aaatgaggttctgga

SEQ ID NO: 1840268 - DNA, 15 bp, Homo sapiens
aatgaggttctggaa

SEQ ID NO: 1840269 - DNA, 15 bp, Homo sapiens
atgaggttctggaaa

SEQ ID NO: 1840270 - DNA, 15 bp, Homo sapiens
tgaggttctggaaag

SEQ ID NO: 1840271 - DNA, 15 bp, Homo sapiens
gaggttctggaaagc

SEQ ID NO: 1840272 - DNA, 15 bp, Homo sapiens
aggttctggaaagcc

SEQ ID NO: 1840273 - DNA, 15 bp, Homo sapiens
ggttctggaaagcca

SEQ ID NO: 1840274 - DNA, 15 bp, Homo sapiens
gttctggaaagccat

SEQ ID NO: 1840275 - DNA, 15 bp, Homo sapiens
ttctggaaagccatt

SEQ ID NO: 1840276 - DNA, 15 bp, Homo sapiens
tctggaaagccattc

SEQ ID NO: 1840277 - DNA, 15 bp, Homo sapiens
ctggaaagccattct

SEQ ID NO: 1840278 - DNA, 15 bp, Homo sapiens
tggaaagccattctg

SEQ ID NO: 1840279 - DNA, 15 bp, Homo sapiens
ggaaagccattctgg

SEQ ID NO: 1840280 - DNA, 15 bp, Homo sapiens
gaaagccattctggc

SEQ ID NO: 1840281 - DNA, 15 bp, Homo sapiens
aaagccattctggct

SEQ ID NO: 1840282 - DNA, 15 bp, Homo sapiens
aagccattctggctc

SEQ ID NO: 1840283 - DNA, 15 bp, Homo sapiens
agccattctggctca

SEQ ID NO: 1840284 - DNA, 15 bp, Homo sapiens
gccattctggctcat

SEQ ID NO: 1840285 - DNA, 15 bp, Homo sapiens
ccattctggctcatg

SEQ ID NO: 1840286 - DNA, 15 bp, Homo sapiens
cattctggctcatgg

SEQ ID NO: 1840287 - DNA, 15 bp, Homo sapiens
attctggctcatggg

SEQ ID NO: 1840288 - DNA, 15 bp, Homo sapiens
ttctggctcatgggc

SEQ ID NO: 1840289 - DNA, 15 bp, Homo sapiens
tctggctcatgggct

SEQ ID NO: 1840290 - DNA, 15 bp, Homo sapiens
ctggctcatgggctt

SEQ ID NO: 1840291 - DNA, 15 bp, Homo sapiens
tggctcatgggctta

SEQ ID NO: 1840292 - DNA, 15 bp, Homo sapiens
ggctcatgggcttat

SEQ ID NO: 1840293 - DNA, 15 bp, Homo sapiens
gctcatgggcttatg

SEQ ID NO: 1840294 - DNA, 15 bp, Homo sapiens
ctcatgggcttatga

SEQ ID NO: 1840295 - DNA, 15 bp, Homo sapiens
tcatgggcttatgag

SEQ ID NO: 1840296 - DNA, 15 bp, Homo sapiens
catgggcttatgaga

SEQ ID NO: 1840297 - DNA, 15 bp, Homo sapiens
atgggcttatgagaa

SEQ ID NO: 1840298 - DNA, 15 bp, Homo sapiens
tgggcttatgagaaa

SEQ ID NO: 1840299 - DNA, 15 bp, Homo sapiens
gggcttatgagaaaa

SEQ ID NO: 1840300 - DNA, 15 bp, Homo sapiens
ggcttatgagaaaaa

SEQ ID NO: 1840301 - DNA, 15 bp, Homo sapiens
gcttatgagaaaaag

SEQ ID NO: 1840302 - DNA, 15 bp, Homo sapiens
cttatgagaaaaagg

SEQ ID NO: 1840303 - DNA, 15 bp, Homo sapiens
ttatgagaaaaaggt

SEQ ID NO: 1840304 - DNA, 15 bp, Homo sapiens
tatgagaaaaaggtt

SEQ ID NO: 1840305 - DNA, 15 bp, Homo sapiens
atgagaaaaaggttt

SEQ ID NO: 1840306 - DNA, 15 bp, Homo sapiens
tgagaaaaaggtttt

SEQ ID NO: 1840307 - DNA, 15 bp, Homo sapiens
gagaaaaaggttttg

SEQ ID NO: 1840308 - DNA, 15 bp, Homo sapiens
agaaaaaggttttgg

SEQ ID NO: 1840309 - DNA, 15 bp, Homo sapiens
gaaaaaggttttgga

SEQ ID NO: 1840310 - DNA, 15 bp, Homo sapiens
aaaaaggttttggaa

SEQ ID NO: 1840311 - DNA, 15 bp, Homo sapiens
aaaaggttttggaaa

SEQ ID NO: 1840312 - DNA, 15 bp, Homo sapiens
aaaggttttggaaag

SEQ ID NO: 1840313 - DNA, 15 bp, Homo sapiens
aaggttttggaaagg

SEQ ID NO: 1840314 - DNA, 15 bp, Homo sapiens
aggttttggaaagga

SEQ ID NO: 1840315 - DNA, 15 bp, Homo sapiens
ggttttggaaaggag

SEQ ID NO: 1840316 - DNA, 15 bp, Homo sapiens
gttttggaaaggagt

SEQ ID NO: 1840317 - DNA, 15 bp, Homo sapiens
ttttggaaaggagtt

SEQ ID NO: 1840318 - DNA, 15 bp, Homo sapiens
tttggaaaggagttt

SEQ ID NO: 1840319 - DNA, 15 bp, Homo sapiens
ttggaaaggagtttt

SEQ ID NO: 1840320 - DNA, 15 bp, Homo sapiens
tggaaaggagttttg

SEQ ID NO: 1840321 - DNA, 15 bp, Homo sapiens
ggaaaggagttttgg

SEQ ID NO: 1840322 - DNA, 15 bp, Homo sapiens
gaaaggagttttgga

SEQ ID NO: 1840323 - DNA, 15 bp, Homo sapiens
aaaggagttttggag

SEQ ID NO: 1840324 - DNA, 15 bp, Homo sapiens
aaggagttttggagt

SEQ ID NO: 1840325 - DNA, 15 bp, Homo sapiens
aggagttttggagtg

SEQ ID NO: 1840326 - DNA, 15 bp, Homo sapiens
ggagttttggagtgc

SEQ ID NO: 1840327 - DNA, 15 bp, Homo sapiens
gagttttggagtgct

SEQ ID NO: 1840328 - DNA, 15 bp, Homo sapiens
agttttggagtgctc

SEQ ID NO: 1840329 - DNA, 15 bp, Homo sapiens
gttttggagtgctcc

SEQ ID NO: 1840330 - DNA, 15 bp, Homo sapiens
ttttggagtgctccc

SEQ ID NO: 1840331 - DNA, 15 bp, Homo sapiens
tttggagtgctcccc

SEQ ID NO: 1840332 - DNA, 15 bp, Homo sapiens
ttggagtgctcccct

SEQ ID NO: 1840333 - DNA, 15 bp, Homo sapiens
tggagtgctccccta

SEQ ID NO: 1840334 - DNA, 15 bp, Homo sapiens
ggagtgctcccctac

SEQ ID NO: 1840335 - DNA, 15 bp, Homo sapiens
gagtgctcccctaca

SEQ ID NO: 1840336 - DNA, 15 bp, Homo sapiens
agtgctcccctacag

SEQ ID NO: 1840337 - DNA, 15 bp, Homo sapiens
gtgctcccctacaga

SEQ ID NO: 1840338 - DNA, 15 bp, Homo sapiens
tgctcccctacagaa

SEQ ID NO: 1840339 - DNA, 15 bp, Homo sapiens
gctcccctacagaaa

SEQ ID NO: 1840340 - DNA, 15 bp, Homo sapiens
ctcccctacagaaat

SEQ ID NO: 1840341 - DNA, 15 bp, Homo sapiens
tcccctacagaaata

SEQ ID NO: 1840342 - DNA, 15 bp, Homo sapiens
cccctacagaaatag

SEQ ID NO: 1840343 - DNA, 15 bp, Homo sapiens
ccctacagaaatagc

SEQ ID NO: 1840344 - DNA, 15 bp, Homo sapiens
cctacagaaatagca

SEQ ID NO: 1840345 - DNA, 15 bp, Homo sapiens
ctacagaaatagcac

SEQ ID NO: 1840346 - DNA, 15 bp, Homo sapiens
tacagaaatagcact

SEQ ID NO: 1840347 - DNA, 15 bp, Homo sapiens
acagaaatagcactg

SEQ ID NO: 1840348 - DNA, 15 bp, Homo sapiens
cagaaatagcactgc

SEQ ID NO: 1840349 - DNA, 15 bp, Homo sapiens
agaaatagcactgct

SEQ ID NO: 1840350 - DNA, 15 bp, Homo sapiens
gaaatagcactgctt

SEQ ID NO: 1840351 - DNA, 15 bp, Homo sapiens
aaatagcactgcttt

SEQ ID NO: 1840352 - DNA, 15 bp, Homo sapiens
aatagcactgctttt

SEQ ID NO: 1840353 - DNA, 15 bp, Homo sapiens
atagcactgcttttt

SEQ ID NO: 1840354 - DNA, 15 bp, Homo sapiens
tagcactgcttttta

SEQ ID NO: 1840355 - DNA, 15 bp, Homo sapiens
agcactgctttttaa

SEQ ID NO: 1840356 - DNA, 15 bp, Homo sapiens
gcactgctttttaat

SEQ ID NO: 1840357 - DNA, 15 bp, Homo sapiens
cactgctttttaatt

SEQ ID NO: 1840358 - DNA, 15 bp, Homo sapiens
actgctttttaattg

SEQ ID NO: 1840359 - DNA, 15 bp, Homo sapiens
ctgctttttaattgt

SEQ ID NO: 1840360 - DNA, 15 bp, Homo sapiens
tgctttttaattgtt

SEQ ID NO: 1840361 - DNA, 15 bp, Homo sapiens
gctttttaattgttc

SEQ ID NO: 1840362 - DNA, 15 bp, Homo sapiens
ctttttaattgttct

SEQ ID NO: 1840363 - DNA, 15 bp, Homo sapiens
tttttaattgttctg

SEQ ID NO: 1840364 - DNA, 15 bp, Homo sapiens
ttttaattgttctgt

SEQ ID NO: 1840365 - DNA, 15 bp, Homo sapiens
tttaattgttctgtc

SEQ ID NO: 1840366 - DNA, 15 bp, Homo sapiens
ttaattgttctgtcg

SEQ ID NO: 1840367 - DNA, 15 bp, Homo sapiens
taattgttctgtcgc

SEQ ID NO: 1840368 - DNA, 15 bp, Homo sapiens
aattgttctgtcgct

SEQ ID NO: 1840369 - DNA, 15 bp, Homo sapiens
attgttctgtcgcta

SEQ ID NO: 1840370 - DNA, 15 bp, Homo sapiens
ttgttctgtcgctag

SEQ ID NO: 1840371 - DNA, 15 bp, Homo sapiens
tgttctgtcgctaga

SEQ ID NO: 1840372 - DNA, 15 bp, Homo sapiens
gttctgtcgctagag

SEQ ID NO: 1840373 - DNA, 15 bp, Homo sapiens
ttctgtcgctagagc

SEQ ID NO: 1840374 - DNA, 15 bp, Homo sapiens
tctgtcgctagagcc

SEQ ID NO: 1840375 - DNA, 15 bp, Homo sapiens
ctgtcgctagagcct

SEQ ID NO: 1840376 - DNA, 15 bp, Homo sapiens
tgtcgctagagcctt

SEQ ID NO: 1840377 - DNA, 15 bp, Homo sapiens
gtcgctagagccttg

SEQ ID NO: 1840378 - DNA, 15 bp, Homo sapiens
tcgctagagccttgg

SEQ ID NO: 1840379 - DNA, 15 bp, Homo sapiens
cgctagagccttggc

SEQ ID NO: 1840380 - DNA, 15 bp, Homo sapiens
gctagagccttggcc

SEQ ID NO: 1840381 - DNA, 15 bp, Homo sapiens
ctagagccttggccc

SEQ ID NO: 1840382 - DNA, 15 bp, Homo sapiens
tagagccttggcccc

SEQ ID NO: 1840383 - DNA, 15 bp, Homo sapiens
agagccttggcccca

SEQ ID NO: 1840384 - DNA, 15 bp, Homo sapiens
gagccttggccccaa

SEQ ID NO: 1840385 - DNA, 15 bp, Homo sapiens
agccttggccccaaa

SEQ ID NO: 1840386 - DNA, 15 bp, Homo sapiens
gccttggccccaaat

SEQ ID NO: 1840387 - DNA, 15 bp, Homo sapiens
ccttggccccaaata

SEQ ID NO: 1840388 - DNA, 15 bp, Homo sapiens
cttggccccaaataa

SEQ ID NO: 1840389 - DNA, 15 bp, Homo sapiens
ttggccccaaataac

SEQ ID NO: 1840390 - DNA, 15 bp, Homo sapiens
tggccccaaataaca

SEQ ID NO: 1840391 - DNA, 15 bp, Homo sapiens
ggccccaaataacaa

SEQ ID NO: 1840392 - DNA, 15 bp, Homo sapiens
gccccaaataacaat

SEQ ID NO: 1840393 - DNA, 15 bp, Homo sapiens
ccccaaataacaatg

SEQ ID NO: 1840394 - DNA, 15 bp, Homo sapiens
cccaaataacaatgc

SEQ ID NO: 1840395 - DNA, 15 bp, Homo sapiens
ccaaataacaatgca

SEQ ID NO: 1840396 - DNA, 15 bp, Homo sapiens
caaataacaatgcat

SEQ ID NO: 1840397 - DNA, 15 bp, Homo sapiens
aaataacaatgcatg

SEQ ID NO: 1840398 - DNA, 15 bp, Homo sapiens
aataacaatgcatga

SEQ ID NO: 1840399 - DNA, 15 bp, Homo sapiens
ataacaatgcatgaa

SEQ ID NO: 1840400 - DNA, 15 bp, Homo sapiens
taacaatgcatgaat

SEQ ID NO: 1840401 - DNA, 15 bp, Homo sapiens
aacaatgcatgaatc

SEQ ID NO: 1840402 - DNA, 15 bp, Homo sapiens
acaatgcatgaatct

SEQ ID NO: 1840403 - DNA, 15 bp, Homo sapiens
caatgcatgaatctc

SEQ ID NO: 1840404 - DNA, 15 bp, Homo sapiens
aatgcatgaatctca

SEQ ID NO: 1840405 - DNA, 15 bp, Homo sapiens
atgcatgaatctcag

SEQ ID NO: 1840406 - DNA, 15 bp, Homo sapiens
tgcatgaatctcagt

SEQ ID NO: 1840407 - DNA, 15 bp, Homo sapiens
gcatgaatctcagta

SEQ ID NO: 1840408 - DNA, 15 bp, Homo sapiens
catgaatctcagtat

SEQ ID NO: 1840409 - DNA, 15 bp, Homo sapiens
atgaatctcagtatt

SEQ ID NO: 1840410 - DNA, 15 bp, Homo sapiens
tgaatctcagtattt

SEQ ID NO: 1840411 - DNA, 15 bp, Homo sapiens
gaatctcagtatttg

SEQ ID NO: 1840412 - DNA, 15 bp, Homo sapiens
aatctcagtatttgt

SEQ ID NO: 1840413 - DNA, 15 bp, Homo sapiens
atctcagtatttgtc

SEQ ID NO: 1840414 - DNA, 15 bp, Homo sapiens
tctcagtatttgtct

SEQ ID NO: 1840415 - DNA, 15 bp, Homo sapiens
ctcagtatttgtctt

SEQ ID NO: 1840416 - DNA, 15 bp, Homo sapiens
tcagtatttgtcttc

SEQ ID NO: 1840417 - DNA, 15 bp, Homo sapiens
cagtatttgtcttca

SEQ ID NO: 1840418 - DNA, 15 bp, Homo sapiens
agtatttgtcttcaa

SEQ ID NO: 1840419 - DNA, 15 bp, Homo sapiens
gtatttgtcttcaag

SEQ ID NO: 1840420 - DNA, 15 bp, Homo sapiens
tatttgtcttcaagg

SEQ ID NO: 1840421 - DNA, 15 bp, Homo sapiens
atttgtcttcaagga

SEQ ID NO: 1840422 - DNA, 15 bp, Homo sapiens
tttgtcttcaaggag

SEQ ID NO: 1840423 - DNA, 15 bp, Homo sapiens
ttgtcttcaaggagc

SEQ ID NO: 1840424 - DNA, 15 bp, Homo sapiens
tgtcttcaaggagct

SEQ ID NO: 1840425 - DNA, 15 bp, Homo sapiens
gtcttcaaggagctg

SEQ ID NO: 1840426 - DNA, 15 bp, Homo sapiens
tcttcaaggagctgt

SEQ ID NO: 1840427 - DNA, 15 bp, Homo sapiens
cttcaaggagctgtg

SEQ ID NO: 1840428 - DNA, 15 bp, Homo sapiens
ttcaaggagctgtgg

SEQ ID NO: 1840429 - DNA, 15 bp, Homo sapiens
tcaaggagctgtggt

SEQ ID NO: 1840430 - DNA, 15 bp, Homo sapiens
caaggagctgtggtc

SEQ ID NO: 1840431 - DNA, 15 bp, Homo sapiens
aaggagctgtggtct

SEQ ID NO: 1840432 - DNA, 15 bp, Homo sapiens
aggagctgtggtctg

SEQ ID NO: 1840433 - DNA, 15 bp, Homo sapiens
ggagctgtggtctga

SEQ ID NO: 1840434 - DNA, 15 bp, Homo sapiens
gagctgtggtctgat

SEQ ID NO: 1840435 - DNA, 15 bp, Homo sapiens
agctgtggtctgata

SEQ ID NO: 1840436 - DNA, 15 bp, Homo sapiens
gctgtggtctgatag

SEQ ID NO: 1840437 - DNA, 15 bp, Homo sapiens
ctgtggtctgatagg

SEQ ID NO: 1840438 - DNA, 15 bp, Homo sapiens
tgtggtctgatagga

SEQ ID NO: 1840439 - DNA, 15 bp, Homo sapiens
gtggtctgataggag

SEQ ID NO: 1840440 - DNA, 15 bp, Homo sapiens
tggtctgataggagc

SEQ ID NO: 1840441 - DNA, 15 bp, Homo sapiens
ggtctgataggagca

SEQ ID NO: 1840442 - DNA, 15 bp, Homo sapiens
gtctgataggagcat

SEQ ID NO: 1840443 - DNA, 15 bp, Homo sapiens
tctgataggagcata

SEQ ID NO: 1840444 - DNA, 15 bp, Homo sapiens
ctgataggagcatat

SEQ ID NO: 1840445 - DNA, 15 bp, Homo sapiens
tgataggagcatata

SEQ ID NO: 1840446 - DNA, 15 bp, Homo sapiens
gataggagcatatag

SEQ ID NO: 1840447 - DNA, 15 bp, Homo sapiens
ataggagcatatagt

SEQ ID NO: 1840448 - DNA, 15 bp, Homo sapiens
taggagcatatagta

SEQ ID NO: 1840449 - DNA, 15 bp, Homo sapiens
aggagcatatagtat

SEQ ID NO: 1840450 - DNA, 15 bp, Homo sapiens
ggagcatatagtata

SEQ ID NO: 1840451 - DNA, 15 bp, Homo sapiens
gagcatatagtatac

SEQ ID NO: 1840452 - DNA, 15 bp, Homo sapiens
agcatatagtatacc

SEQ ID NO: 1840453 - DNA, 15 bp, Homo sapiens
gcatatagtatacct

SEQ ID NO: 1840454 - DNA, 15 bp, Homo sapiens
catatagtataccta

SEQ ID NO: 1840455 - DNA, 15 bp, Homo sapiens
atatagtatacctat

SEQ ID NO: 1840456 - DNA, 15 bp, Homo sapiens
tatagtatacctata

SEQ ID NO: 1840457 - DNA, 15 bp, Homo sapiens
atagtatacctatat

SEQ ID NO: 1840458 - DNA, 15 bp, Homo sapiens
tagtatacctatatg

SEQ ID NO: 1840459 - DNA, 15 bp, Homo sapiens
agtatacctatatgg

SEQ ID NO: 1840460 - DNA, 15 bp, Homo sapiens
gtatacctatatgga

SEQ ID NO: 1840461 - DNA, 15 bp, Homo sapiens
tatacctatatggat

SEQ ID NO: 1840462 - DNA, 15 bp, Homo sapiens
atacctatatggatg

SEQ ID NO: 1840463 - DNA, 15 bp, Homo sapiens
tacctatatggatgg

SEQ ID NO: 1840464 - DNA, 15 bp, Homo sapiens
acctatatggatggg

SEQ ID NO: 1840465 - DNA, 15 bp, Homo sapiens
cctatatggatgggt

SEQ ID NO: 1840466 - DNA, 15 bp, Homo sapiens
ctatatggatgggta

SEQ ID NO: 1840467 - DNA, 15 bp, Homo sapiens
tatatggatgggtat

SEQ ID NO: 1840468 - DNA, 15 bp, Homo sapiens
atatggatgggtata

SEQ ID NO: 1840469 - DNA, 15 bp, Homo sapiens
tatggatgggtataa

SEQ ID NO: 1840470 - DNA, 15 bp, Homo sapiens
atggatgggtataac

SEQ ID NO: 1840471 - DNA, 15 bp, Homo sapiens
tggatgggtataact

SEQ ID NO: 1840472 - DNA, 15 bp, Homo sapiens
ggatgggtataactg

SEQ ID NO: 1840473 - DNA, 15 bp, Homo sapiens
gatgggtataactga

SEQ ID NO: 1840474 - DNA, 15 bp, Homo sapiens
atgggtataactgaa

SEQ ID NO: 1840475 - DNA, 15 bp, Homo sapiens
tgggtataactgaag

SEQ ID NO: 1840476 - DNA, 15 bp, Homo sapiens
gggtataactgaagg

SEQ ID NO: 1840477 - DNA, 15 bp, Homo sapiens
ggtataactgaaggt

SEQ ID NO: 1840478 - DNA, 15 bp, Homo sapiens
gtataactgaaggtg

SEQ ID NO: 1840479 - DNA, 15 bp, Homo sapiens
tataactgaaggtgg

SEQ ID NO: 1840480 - DNA, 15 bp, Homo sapiens
ataactgaaggtggt

SEQ ID NO: 1840481 - DNA, 15 bp, Homo sapiens
taactgaaggtggtg

SEQ ID NO: 1840482 - DNA, 15 bp, Homo sapiens
aactgaaggtggtga

SEQ ID NO: 1840483 - DNA, 15 bp, Homo sapiens
actgaaggtggtgag

SEQ ID NO: 1840484 - DNA, 15 bp, Homo sapiens
ctgaaggtggtgagg

SEQ ID NO: 1840485 - DNA, 15 bp, Homo sapiens
tgaaggtggtgagga

SEQ ID NO: 1840486 - DNA, 15 bp, Homo sapiens
gaaggtggtgaggac

SEQ ID NO: 1840487 - DNA, 15 bp, Homo sapiens
aaggtggtgaggacc

SEQ ID NO: 1840488 - DNA, 15 bp, Homo sapiens
aggtggtgaggacct

SEQ ID NO: 1840489 - DNA, 15 bp, Homo sapiens
ggtggtgaggacctg

SEQ ID NO: 1840490 - DNA, 15 bp, Homo sapiens
gtggtgaggacctgt

SEQ ID NO: 1840491 - DNA, 15 bp, Homo sapiens
tggtgaggacctgtt

SEQ ID NO: 1840492 - DNA, 15 bp, Homo sapiens
ggtgaggacctgttt

SEQ ID NO: 1840493 - DNA, 15 bp, Homo sapiens
gtgaggacctgtttt

SEQ ID NO: 1840494 - DNA, 15 bp, Homo sapiens
tgaggacctgttttt

SEQ ID NO: 1840495 - DNA, 15 bp, Homo sapiens
gaggacctgttttta

SEQ ID NO: 1840496 - DNA, 15 bp, Homo sapiens
aggacctgtttttag

SEQ ID NO: 1840497 - DNA, 15 bp, Homo sapiens
ggacctgtttttaga

SEQ ID NO: 1840498 - DNA, 15 bp, Homo sapiens
gacctgtttttagat

SEQ ID NO: 1840499 - DNA, 15 bp, Homo sapiens
acctgtttttagatg

SEQ ID NO: 1840500 - DNA, 15 bp, Homo sapiens
cctgtttttagatgc

SEQ ID NO: 1840501 - DNA, 15 bp, Homo sapiens
ctgtttttagatgcc

SEQ ID NO: 1840502 - DNA, 15 bp, Homo sapiens
tgtttttagatgcct

SEQ ID NO: 1840503 - DNA, 15 bp, Homo sapiens
gtttttagatgcctg

SEQ ID NO: 1840504 - DNA, 15 bp, Homo sapiens
tttttagatgcctga

SEQ ID NO: 1840505 - DNA, 15 bp, Homo sapiens
ttttagatgcctgag

SEQ ID NO: 1840506 - DNA, 15 bp, Homo sapiens
tttagatgcctgaga

SEQ ID NO: 1840507 - DNA, 15 bp, Homo sapiens
ttagatgcctgagaa

SEQ ID NO: 1840508 - DNA, 15 bp, Homo sapiens
tagatgcctgagaaa

SEQ ID NO: 1840509 - DNA, 15 bp, Homo sapiens
agatgcctgagaaat

SEQ ID NO: 1840510 - DNA, 15 bp, Homo sapiens
gatgcctgagaaatc

SEQ ID NO: 1840511 - DNA, 15 bp, Homo sapiens
atgcctgagaaatcc

SEQ ID NO: 1840512 - DNA, 15 bp, Homo sapiens
tgcctgagaaatcca

SEQ ID NO: 1840513 - DNA, 15 bp, Homo sapiens
gcctgagaaatccaa

SEQ ID NO: 1840514 - DNA, 15 bp, Homo sapiens
cctgagaaatccaaa

SEQ ID NO: 1840515 - DNA, 15 bp, Homo sapiens
ctgagaaatccaaaa

SEQ ID NO: 1840516 - DNA, 15 bp, Homo sapiens
tgagaaatccaaaaa

SEQ ID NO: 1840517 - DNA, 15 bp, Homo sapiens
gagaaatccaaaaac

SEQ ID NO: 1840518 - DNA, 15 bp, Homo sapiens
agaaatccaaaaaca

SEQ ID NO: 1840519 - DNA, 15 bp, Homo sapiens
gaaatccaaaaacaa

SEQ ID NO: 1840520 - DNA, 15 bp, Homo sapiens
aaatccaaaaacaag

SEQ ID NO: 1840521 - DNA, 15 bp, Homo sapiens
aatccaaaaacaaga

SEQ ID NO: 1840522 - DNA, 15 bp, Homo sapiens
atccaaaaacaagac

SEQ ID NO: 1840523 - DNA, 15 bp, Homo sapiens
tccaaaaacaagaca

SEQ ID NO: 1840524 - DNA, 15 bp, Homo sapiens
ccaaaaacaagacag

SEQ ID NO: 1840525 - DNA, 15 bp, Homo sapiens
caaaaacaagacagg

SEQ ID NO: 1840526 - DNA, 15 bp, Homo sapiens
aaaaacaagacaggg

SEQ ID NO: 1840527 - DNA, 15 bp, Homo sapiens
aaaacaagacaggga

SEQ ID NO: 1840528 - DNA, 15 bp, Homo sapiens
aaacaagacagggaa

SEQ ID NO: 1840529 - DNA, 15 bp, Homo sapiens
aacaagacagggaag

SEQ ID NO: 1840530 - DNA, 15 bp, Homo sapiens
acaagacagggaagt

SEQ ID NO: 1840531 - DNA, 15 bp, Homo sapiens
caagacagggaagtt

SEQ ID NO: 1840532 - DNA, 15 bp, Homo sapiens
aagacagggaagttg

SEQ ID NO: 1840533 - DNA, 15 bp, Homo sapiens
agacagggaagttgt

SEQ ID NO: 1840534 - DNA, 15 bp, Homo sapiens
gacagggaagttgtt

SEQ ID NO: 1840535 - DNA, 15 bp, Homo sapiens
acagggaagttgttc

SEQ ID NO: 1840536 - DNA, 15 bp, Homo sapiens
cagggaagttgttcg

SEQ ID NO: 1840537 - DNA, 15 bp, Homo sapiens
agggaagttgttcgt

SEQ ID NO: 1840538 - DNA, 15 bp, Homo sapiens
gggaagttgttcgtc

SEQ ID NO: 1840539 - DNA, 15 bp, Homo sapiens
ggaagttgttcgtct

SEQ ID NO: 1840540 - DNA, 15 bp, Homo sapiens
gaagttgttcgtctg

SEQ ID NO: 1840541 - DNA, 15 bp, Homo sapiens
aagttgttcgtctgg

SEQ ID NO: 1840542 - DNA, 15 bp, Homo sapiens
agttgttcgtctggg

SEQ ID NO: 1840543 - DNA, 15 bp, Homo sapiens
gttgttcgtctggga

SEQ ID NO: 1840544 - DNA, 15 bp, Homo sapiens
ttgttcgtctgggaa

SEQ ID NO: 1840545 - DNA, 15 bp, Homo sapiens
tgttcgtctgggaat

SEQ ID NO: 1840546 - DNA, 15 bp, Homo sapiens
gttcgtctgggaatc

SEQ ID NO: 1840547 - DNA, 15 bp, Homo sapiens
ttcgtctgggaatca

SEQ ID NO: 1840548 - DNA, 15 bp, Homo sapiens
tcgtctgggaatcat

SEQ ID NO: 1840549 - DNA, 15 bp, Homo sapiens
cgtctgggaatcatg

SEQ ID NO: 1840550 - DNA, 15 bp, Homo sapiens
gtctgggaatcatga

SEQ ID NO: 1840551 - DNA, 15 bp, Homo sapiens
tctgggaatcatgaa

SEQ ID NO: 1840552 - DNA, 15 bp, Homo sapiens
ctgggaatcatgaag

SEQ ID NO: 1840553 - DNA, 15 bp, Homo sapiens
tgggaatcatgaagc

SEQ ID NO: 1840554 - DNA, 15 bp, Homo sapiens
gggaatcatgaagca

SEQ ID NO: 1840555 - DNA, 15 bp, Homo sapiens
ggaatcatgaagcat

SEQ ID NO: 1840556 - DNA, 15 bp, Homo sapiens
gaatcatgaagcatg

SEQ ID NO: 1840557 - DNA, 15 bp, Homo sapiens
aatcatgaagcatgt

SEQ ID NO: 1840558 - DNA, 15 bp, Homo sapiens
atcatgaagcatgta

SEQ ID NO: 1840559 - DNA, 15 bp, Homo sapiens
tcatgaagcatgtaa

SEQ ID NO: 1840560 - DNA, 15 bp, Homo sapiens
catgaagcatgtaaa

SEQ ID NO: 1840561 - DNA, 15 bp, Homo sapiens
atgaagcatgtaaac

SEQ ID NO: 1840562 - DNA, 15 bp, Homo sapiens
tgaagcatgtaaacc

SEQ ID NO: 1840563 - DNA, 15 bp, Homo sapiens
gaagcatgtaaacct

SEQ ID NO: 1840564 - DNA, 15 bp, Homo sapiens
aagcatgtaaaccta

SEQ ID NO: 1840565 - DNA, 15 bp, Homo sapiens
agcatgtaaacctaa

SEQ ID NO: 1840566 - DNA, 15 bp, Homo sapiens
gcatgtaaacctaat

SEQ ID NO: 1840567 - DNA, 15 bp, Homo sapiens
catgtaaacctaatt

SEQ ID NO: 1840568 - DNA, 15 bp, Homo sapiens
atgtaaacctaatta

SEQ ID NO: 1840569 - DNA, 15 bp, Homo sapiens
tgtaaacctaattag

SEQ ID NO: 1840570 - DNA, 15 bp, Homo sapiens
gtaaacctaattagg

SEQ ID NO: 1840571 - DNA, 15 bp, Homo sapiens
taaacctaattaggg

SEQ ID NO: 1840572 - DNA, 15 bp, Homo sapiens
aaacctaattagggg

SEQ ID NO: 1840573 - DNA, 15 bp, Homo sapiens
aacctaattagggga

SEQ ID NO: 1840574 - DNA, 15 bp, Homo sapiens
acctaattaggggag

SEQ ID NO: 1840575 - DNA, 15 bp, Homo sapiens
cctaattaggggagg

SEQ ID NO: 1840576 - DNA, 15 bp, Homo sapiens
ctaattaggggaggt

SEQ ID NO: 1840577 - DNA, 15 bp, Homo sapiens
taattaggggaggtg

SEQ ID NO: 1840578 - DNA, 15 bp, Homo sapiens
aattaggggaggtgg

SEQ ID NO: 1840579 - DNA, 15 bp, Homo sapiens
attaggggaggtggc

SEQ ID NO: 1840580 - DNA, 15 bp, Homo sapiens
ttaggggaggtggca

SEQ ID NO: 1840581 - DNA, 15 bp, Homo sapiens
taggggaggtggcat

SEQ ID NO: 1840582 - DNA, 15 bp, Homo sapiens
aggggaggtggcatc

SEQ ID NO: 1840583 - DNA, 15 bp, Homo sapiens
ggggaggtggcatct

SEQ ID NO: 1840584 - DNA, 15 bp, Homo sapiens
gggaggtggcatctg

SEQ ID NO: 1840585 - DNA, 15 bp, Homo sapiens
ggaggtggcatctga

SEQ ID NO: 1840586 - DNA, 15 bp, Homo sapiens
gaggtggcatctgat

SEQ ID NO: 1840587 - DNA, 15 bp, Homo sapiens
aggtggcatctgatc

SEQ ID NO: 1840588 - DNA, 15 bp, Homo sapiens
ggtggcatctgatct

SEQ ID NO: 1840589 - DNA, 15 bp, Homo sapiens
gtggcatctgatctc

SEQ ID NO: 1840590 - DNA, 15 bp, Homo sapiens
tggcatctgatctca

SEQ ID NO: 1840591 - DNA, 15 bp, Homo sapiens
ggcatctgatctcat

SEQ ID NO: 1840592 - DNA, 15 bp, Homo sapiens
gcatctgatctcatc

SEQ ID NO: 1840593 - DNA, 15 bp, Homo sapiens
catctgatctcatcc

SEQ ID NO: 1840594 - DNA, 15 bp, Homo sapiens
atctgatctcatcct

SEQ ID NO: 1840595 - DNA, 15 bp, Homo sapiens
tctgatctcatcctt

SEQ ID NO: 1840596 - DNA, 15 bp, Homo sapiens
ctgatctcatccttg

SEQ ID NO: 1840597 - DNA, 15 bp, Homo sapiens
tgatctcatccttgc

SEQ ID NO: 1840598 - DNA, 15 bp, Homo sapiens
gatctcatccttgca

SEQ ID NO: 1840599 - DNA, 15 bp, Homo sapiens
atctcatccttgcag

SEQ ID NO: 1840600 - DNA, 15 bp, Homo sapiens
tctcatccttgcaga

SEQ ID NO: 1840601 - DNA, 15 bp, Homo sapiens
ctcatccttgcagaa

SEQ ID NO: 1840602 - DNA, 15 bp, Homo sapiens
tcatccttgcagaat

SEQ ID NO: 1840603 - DNA, 15 bp, Homo sapiens
catccttgcagaata

SEQ ID NO: 1840604 - DNA, 15 bp, Homo sapiens
atccttgcagaatac

SEQ ID NO: 1840605 - DNA, 15 bp, Homo sapiens
tccttgcagaataca

SEQ ID NO: 1840606 - DNA, 15 bp, Homo sapiens
ccttgcagaatacat

SEQ ID NO: 1840607 - DNA, 15 bp, Homo sapiens
cttgcagaatacata

SEQ ID NO: 1840608 - DNA, 15 bp, Homo sapiens
ttgcagaatacataa

SEQ ID NO: 1840609 - DNA, 15 bp, Homo sapiens
tgcagaatacataat

SEQ ID NO: 1840610 - DNA, 15 bp, Homo sapiens
gcagaatacataatt

SEQ ID NO: 1840611 - DNA, 15 bp, Homo sapiens
cagaatacataattt

SEQ ID NO: 1840612 - DNA, 15 bp, Homo sapiens
agaatacataatttt

SEQ ID NO: 1840613 - DNA, 15 bp, Homo sapiens
gaatacataattttt

SEQ ID NO: 1840614 - DNA, 15 bp, Homo sapiens
aatacataattttta

SEQ ID NO: 1840615 - DNA, 15 bp, Homo sapiens
atacataatttttat

SEQ ID NO: 1840616 - DNA, 15 bp, Homo sapiens
tacataatttttata

SEQ ID NO: 1840617 - DNA, 15 bp, Homo sapiens
acataatttttatac

SEQ ID NO: 1840618 - DNA, 15 bp, Homo sapiens
cataatttttataca

SEQ ID NO: 1840619 - DNA, 15 bp, Homo sapiens
ataatttttatacaa

SEQ ID NO: 1840620 - DNA, 15 bp, Homo sapiens
taatttttatacaaa

SEQ ID NO: 1840621 - DNA, 15 bp, Homo sapiens
aatttttatacaaac

SEQ ID NO: 1840622 - DNA, 15 bp, Homo sapiens
atttttatacaaaca

SEQ ID NO: 1840623 - DNA, 15 bp, Homo sapiens
tttttatacaaacaa

SEQ ID NO: 1840624 - DNA, 15 bp, Homo sapiens
ttttatacaaacaat

SEQ ID NO: 1840625 - DNA, 15 bp, Homo sapiens
tttatacaaacaatg

SEQ ID NO: 1840626 - DNA, 15 bp, Homo sapiens
ttatacaaacaatgt

SEQ ID NO: 1840627 - DNA, 15 bp, Homo sapiens
tatacaaacaatgtt

SEQ ID NO: 1840628 - DNA, 15 bp, Homo sapiens
atacaaacaatgttg

SEQ ID NO: 1840629 - DNA, 15 bp, Homo sapiens
tacaaacaatgttga

SEQ ID NO: 1840630 - DNA, 15 bp, Homo sapiens
acaaacaatgttgaa

SEQ ID NO: 1840631 - DNA, 15 bp, Homo sapiens
caaacaatgttgaag

SEQ ID NO: 1840632 - DNA, 15 bp, Homo sapiens
aaacaatgttgaaga

SEQ ID NO: 1840633 - DNA, 15 bp, Homo sapiens
aacaatgttgaagag

SEQ ID NO: 1840634 - DNA, 15 bp, Homo sapiens
acaatgttgaagagg

SEQ ID NO: 1840635 - DNA, 15 bp, Homo sapiens
caatgttgaagaggt

SEQ ID NO: 1840636 - DNA, 15 bp, Homo sapiens
aatgttgaagaggtg

SEQ ID NO: 1840637 - DNA, 15 bp, Homo sapiens
atgttgaagaggtga

SEQ ID NO: 1840638 - DNA, 15 bp, Homo sapiens
tgttgaagaggtgat

SEQ ID NO: 1840639 - DNA, 15 bp, Homo sapiens
gttgaagaggtgatg

SEQ ID NO: 1840640 - DNA, 15 bp, Homo sapiens
ttgaagaggtgatga

SEQ ID NO: 1840641 - DNA, 15 bp, Homo sapiens
tgaagaggtgatgag

SEQ ID NO: 1840642 - DNA, 15 bp, Homo sapiens
gaagaggtgatgaga

SEQ ID NO: 1840643 - DNA, 15 bp, Homo sapiens
aagaggtgatgagaa

SEQ ID NO: 1840644 - DNA, 15 bp, Homo sapiens
agaggtgatgagaac

SEQ ID NO: 1840645 - DNA, 15 bp, Homo sapiens
gaggtgatgagaaca

SEQ ID NO: 1840646 - DNA, 15 bp, Homo sapiens
aggtgatgagaacag

SEQ ID NO: 1840647 - DNA, 15 bp, Homo sapiens
ggtgatgagaacaga

SEQ ID NO: 1840648 - DNA, 15 bp, Homo sapiens
gtgatgagaacagaa

SEQ ID NO: 1840649 - DNA, 15 bp, Homo sapiens
tgatgagaacagaaa

SEQ ID NO: 1840650 - DNA, 15 bp, Homo sapiens
gatgagaacagaaaa

SEQ ID NO: 1840651 - DNA, 15 bp, Homo sapiens
atgagaacagaaaag

SEQ ID NO: 1840652 - DNA, 15 bp, Homo sapiens
tgagaacagaaaagc

SEQ ID NO: 1840653 - DNA, 15 bp, Homo sapiens
gagaacagaaaagct

SEQ ID NO: 1840654 - DNA, 15 bp, Homo sapiens
agaacagaaaagctg

SEQ ID NO: 1840655 - DNA, 15 bp, Homo sapiens
gaacagaaaagctgg

SEQ ID NO: 1840656 - DNA, 15 bp, Homo sapiens
aacagaaaagctggg

SEQ ID NO: 1840657 - DNA, 15 bp, Homo sapiens
acagaaaagctgggt

SEQ ID NO: 1840658 - DNA, 15 bp, Homo sapiens
cagaaaagctgggta

SEQ ID NO: 1840659 - DNA, 15 bp, Homo sapiens
agaaaagctgggtaa

SEQ ID NO: 1840660 - DNA, 15 bp, Homo sapiens
gaaaagctgggtaaa

SEQ ID NO: 1840661 - DNA, 15 bp, Homo sapiens
aaaagctgggtaaag

SEQ ID NO: 1840662 - DNA, 15 bp, Homo sapiens
aaagctgggtaaagt

SEQ ID NO: 1840663 - DNA, 15 bp, Homo sapiens
aagctgggtaaagtg

SEQ ID NO: 1840664 - DNA, 15 bp, Homo sapiens
agctgggtaaagtgc

SEQ ID NO: 1840665 - DNA, 15 bp, Homo sapiens
gctgggtaaagtgca

SEQ ID NO: 1840666 - DNA, 15 bp, Homo sapiens
ctgggtaaagtgcag

SEQ ID NO: 1840667 - DNA, 15 bp, Homo sapiens
tgggtaaagtgcaga

SEQ ID NO: 1840668 - DNA, 15 bp, Homo sapiens
gggtaaagtgcagag

SEQ ID NO: 1840669 - DNA, 15 bp, Homo sapiens
ggtaaagtgcagagc

SEQ ID NO: 1840670 - DNA, 15 bp, Homo sapiens
gtaaagtgcagagca

SEQ ID NO: 1840671 - DNA, 15 bp, Homo sapiens
taaagtgcagagcat

SEQ ID NO: 1840672 - DNA, 15 bp, Homo sapiens
aaagtgcagagcatg

SEQ ID NO: 1840673 - DNA, 15 bp, Homo sapiens
aagtgcagagcatgt

SEQ ID NO: 1840674 - DNA, 15 bp, Homo sapiens
agtgcagagcatgtt

SEQ ID NO: 1840675 - DNA, 15 bp, Homo sapiens
gtgcagagcatgttc

SEQ ID NO: 1840676 - DNA, 15 bp, Homo sapiens
tgcagagcatgttca

SEQ ID NO: 1840677 - DNA, 15 bp, Homo sapiens
gcagagcatgttcaa

SEQ ID NO: 1840678 - DNA, 15 bp, Homo sapiens
cagagcatgttcaag

SEQ ID NO: 1840679 - DNA, 15 bp, Homo sapiens
agagcatgttcaagg

SEQ ID NO: 1840680 - DNA, 15 bp, Homo sapiens
gagcatgttcaagga

SEQ ID NO: 1840681 - DNA, 15 bp, Homo sapiens
agcatgttcaaggaa

SEQ ID NO: 1840682 - DNA, 15 bp, Homo sapiens
gcatgttcaaggaag

SEQ ID NO: 1840683 - DNA, 15 bp, Homo sapiens
catgttcaaggaagg

SEQ ID NO: 1840684 - DNA, 15 bp, Homo sapiens
atgttcaaggaaggg

SEQ ID NO: 1840685 - DNA, 15 bp, Homo sapiens
tgttcaaggaagggt

SEQ ID NO: 1840686 - DNA, 15 bp, Homo sapiens
gttcaaggaagggtt

SEQ ID NO: 1840687 - DNA, 15 bp, Homo sapiens
ttcaaggaagggtta

SEQ ID NO: 1840688 - DNA, 15 bp, Homo sapiens
tcaaggaagggttac

SEQ ID NO: 1840689 - DNA, 15 bp, Homo sapiens
caaggaagggttaca

SEQ ID NO: 1840690 - DNA, 15 bp, Homo sapiens
aaggaagggttacaa

SEQ ID NO: 1840691 - DNA, 15 bp, Homo sapiens
aggaagggttacaaa

SEQ ID NO: 1840692 - DNA, 15 bp, Homo sapiens
ggaagggttacaaac

SEQ ID NO: 1840693 - DNA, 15 bp, Homo sapiens
gaagggttacaaaca

SEQ ID NO: 1840694 - DNA, 15 bp, Homo sapiens
aagggttacaaacat

SEQ ID NO: 1840695 - DNA, 15 bp, Homo sapiens
agggttacaaacatt

SEQ ID NO: 1840696 - DNA, 15 bp, Homo sapiens
gggttacaaacattt

SEQ ID NO: 1840697 - DNA, 15 bp, Homo sapiens
ggttacaaacatttc

SEQ ID NO: 1840698 - DNA, 15 bp, Homo sapiens
gttacaaacatttct

SEQ ID NO: 1840699 - DNA, 15 bp, Homo sapiens
ttacaaacatttctt

SEQ ID NO: 1840700 - DNA, 15 bp, Homo sapiens
tacaaacatttcttg

SEQ ID NO: 1840701 - DNA, 15 bp, Homo sapiens
acaaacatttcttga

SEQ ID NO: 1840702 - DNA, 15 bp, Homo sapiens
caaacatttcttgag

SEQ ID NO: 1840703 - DNA, 15 bp, Homo sapiens
aaacatttcttgagg

SEQ ID NO: 1840704 - DNA, 15 bp, Homo sapiens
aacatttcttgaggg

SEQ ID NO: 1840705 - DNA, 15 bp, Homo sapiens
acatttcttgagggc

SEQ ID NO: 1840706 - DNA, 15 bp, Homo sapiens
catttcttgagggcc

SEQ ID NO: 1840707 - DNA, 15 bp, Homo sapiens
atttcttgagggcct

SEQ ID NO: 1840708 - DNA, 15 bp, Homo sapiens
tttcttgagggcctg

SEQ ID NO: 1840709 - DNA, 15 bp, Homo sapiens
ttcttgagggcctgc

SEQ ID NO: 1840710 - DNA, 15 bp, Homo sapiens
tcttgagggcctgcc

SEQ ID NO: 1840711 - DNA, 15 bp, Homo sapiens
cttgagggcctgcca

SEQ ID NO: 1840712 - DNA, 15 bp, Homo sapiens
ttgagggcctgccat

SEQ ID NO: 1840713 - DNA, 15 bp, Homo sapiens
tgagggcctgccatg

SEQ ID NO: 1840714 - DNA, 15 bp, Homo sapiens
gagggcctgccatgt

SEQ ID NO: 1840715 - DNA, 15 bp, Homo sapiens
agggcctgccatgtg

SEQ ID NO: 1840716 - DNA, 15 bp, Homo sapiens
gggcctgccatgtgc

SEQ ID NO: 1840717 - DNA, 15 bp, Homo sapiens
ggcctgccatgtgca

SEQ ID NO: 1840718 - DNA, 15 bp, Homo sapiens
gcctgccatgtgcac

SEQ ID NO: 1840719 - DNA, 15 bp, Homo sapiens
cctgccatgtgcaca

SEQ ID NO: 1840720 - DNA, 15 bp, Homo sapiens
ctgccatgtgcacag

SEQ ID NO: 1840721 - DNA, 15 bp, Homo sapiens
tgccatgtgcacagg

SEQ ID NO: 1840722 - DNA, 15 bp, Homo sapiens
gccatgtgcacaggg

SEQ ID NO: 1840723 - DNA, 15 bp, Homo sapiens
ccatgtgcacagggc

SEQ ID NO: 1840724 - DNA, 15 bp, Homo sapiens
catgtgcacagggca

SEQ ID NO: 1840725 - DNA, 15 bp, Homo sapiens
atgtgcacagggcac

SEQ ID NO: 1840726 - DNA, 15 bp, Homo sapiens
tgtgcacagggcacc

SEQ ID NO: 1840727 - DNA, 15 bp, Homo sapiens
gtgcacagggcacca

SEQ ID NO: 1840728 - DNA, 15 bp, Homo sapiens
tgcacagggcaccaa

SEQ ID NO: 1840729 - DNA, 15 bp, Homo sapiens
gcacagggcaccaat

SEQ ID NO: 1840730 - DNA, 15 bp, Homo sapiens
cacagggcaccaatc

SEQ ID NO: 1840731 - DNA, 15 bp, Homo sapiens
acagggcaccaatct

SEQ ID NO: 1840732 - DNA, 15 bp, Homo sapiens
cagggcaccaatcta

SEQ ID NO: 1840733 - DNA, 15 bp, Homo sapiens
agggcaccaatctag

SEQ ID NO: 1840734 - DNA, 15 bp, Homo sapiens
gggcaccaatctagt

SEQ ID NO: 1840735 - DNA, 15 bp, Homo sapiens
ggcaccaatctagtg

SEQ ID NO: 1840736 - DNA, 15 bp, Homo sapiens
gcaccaatctagtga

SEQ ID NO: 1840737 - DNA, 15 bp, Homo sapiens
caccaatctagtgaa

SEQ ID NO: 1840738 - DNA, 15 bp, Homo sapiens
accaatctagtgaaa

SEQ ID NO: 1840739 - DNA, 15 bp, Homo sapiens
ccaatctagtgaaag

SEQ ID NO: 1840740 - DNA, 15 bp, Homo sapiens
caatctagtgaaagc

SEQ ID NO: 1840741 - DNA, 15 bp, Homo sapiens
aatctagtgaaagca

SEQ ID NO: 1840742 - DNA, 15 bp, Homo sapiens
atctagtgaaagcaa

SEQ ID NO: 1840743 - DNA, 15 bp, Homo sapiens
tctagtgaaagcaat

SEQ ID NO: 1840744 - DNA, 15 bp, Homo sapiens
ctagtgaaagcaatc

SEQ ID NO: 1840745 - DNA, 15 bp, Homo sapiens
tagtgaaagcaatct

SEQ ID NO: 1840746 - DNA, 15 bp, Homo sapiens
agtgaaagcaatctg

SEQ ID NO: 1840747 - DNA, 15 bp, Homo sapiens
gtgaaagcaatctga

SEQ ID NO: 1840748 - DNA, 15 bp, Homo sapiens
tgaaagcaatctgat

SEQ ID NO: 1840749 - DNA, 15 bp, Homo sapiens
gaaagcaatctgata

SEQ ID NO: 1840750 - DNA, 15 bp, Homo sapiens
aaagcaatctgataa

SEQ ID NO: 1840751 - DNA, 15 bp, Homo sapiens
aagcaatctgataag

SEQ ID NO: 1840752 - DNA, 15 bp, Homo sapiens
agcaatctgataaga

SEQ ID NO: 1840753 - DNA, 15 bp, Homo sapiens
gcaatctgataagag

SEQ ID NO: 1840754 - DNA, 15 bp, Homo sapiens
caatctgataagagc

SEQ ID NO: 1840755 - DNA, 15 bp, Homo sapiens
aatctgataagagct

SEQ ID NO: 1840756 - DNA, 15 bp, Homo sapiens
atctgataagagctt

SEQ ID NO: 1840757 - DNA, 15 bp, Homo sapiens
tctgataagagcttg

SEQ ID NO: 1840758 - DNA, 15 bp, Homo sapiens
ctgataagagcttgg

SEQ ID NO: 1840759 - DNA, 15 bp, Homo sapiens
tgataagagcttggt

SEQ ID NO: 1840760 - DNA, 15 bp, Homo sapiens
gataagagcttggta

SEQ ID NO: 1840761 - DNA, 15 bp, Homo sapiens
ataagagcttggtac

SEQ ID NO: 1840762 - DNA, 15 bp, Homo sapiens
taagagcttggtaca

SEQ ID NO: 1840763 - DNA, 15 bp, Homo sapiens
aagagcttggtacaa

SEQ ID NO: 1840764 - DNA, 15 bp, Homo sapiens
agagcttggtacaaa

SEQ ID NO: 1840765 - DNA, 15 bp, Homo sapiens
gagcttggtacaaaa

SEQ ID NO: 1840766 - DNA, 15 bp, Homo sapiens
agcttggtacaaaac

SEQ ID NO: 1840767 - DNA, 15 bp, Homo sapiens
gcttggtacaaaacc

SEQ ID NO: 1840768 - DNA, 15 bp, Homo sapiens
cttggtacaaaacca

SEQ ID NO: 1840769 - DNA, 15 bp, Homo sapiens
ttggtacaaaaccaa

SEQ ID NO: 1840770 - DNA, 15 bp, Homo sapiens
tggtacaaaaccaag

SEQ ID NO: 1840771 - DNA, 15 bp, Homo sapiens
ggtacaaaaccaagt

SEQ ID NO: 1840772 - DNA, 15 bp, Homo sapiens
gtacaaaaccaagta

SEQ ID NO: 1840773 - DNA, 15 bp, Homo sapiens
tacaaaaccaagtaa

SEQ ID NO: 1840774 - DNA, 15 bp, Homo sapiens
acaaaaccaagtaat

SEQ ID NO: 1840775 - DNA, 15 bp, Homo sapiens
caaaaccaagtaata

SEQ ID NO: 1840776 - DNA, 15 bp, Homo sapiens
aaaaccaagtaatat

SEQ ID NO: 1840777 - DNA, 15 bp, Homo sapiens
aaaccaagtaatata

SEQ ID NO: 1840778 - DNA, 15 bp, Homo sapiens
aaccaagtaatatag

SEQ ID NO: 1840779 - DNA, 15 bp, Homo sapiens
accaagtaatatagc

SEQ ID NO: 1840780 - DNA, 15 bp, Homo sapiens
ccaagtaatatagct

SEQ ID NO: 1840781 - DNA, 15 bp, Homo sapiens
caagtaatatagctt

SEQ ID NO: 1840782 - DNA, 15 bp, Homo sapiens
aagtaatatagcttg

SEQ ID NO: 1840783 - DNA, 15 bp, Homo sapiens
agtaatatagcttgt

SEQ ID NO: 1840784 - DNA, 15 bp, Homo sapiens
gtaatatagcttgtg

SEQ ID NO: 1840785 - DNA, 15 bp, Homo sapiens
taatatagcttgtgc

SEQ ID NO: 1840786 - DNA, 15 bp, Homo sapiens
aatatagcttgtgca

SEQ ID NO: 1840787 - DNA, 15 bp, Homo sapiens
atatagcttgtgcat

SEQ ID NO: 1840788 - DNA, 15 bp, Homo sapiens
tatagcttgtgcatt

SEQ ID NO: 1840789 - DNA, 15 bp, Homo sapiens
atagcttgtgcatta

SEQ ID NO: 1840790 - DNA, 15 bp, Homo sapiens
tagcttgtgcattac

SEQ ID NO: 1840791 - DNA, 15 bp, Homo sapiens
agcttgtgcattacc

SEQ ID NO: 1840792 - DNA, 15 bp, Homo sapiens
gcttgtgcattacct

SEQ ID NO: 1840793 - DNA, 15 bp, Homo sapiens
cttgtgcattacctt

SEQ ID NO: 1840794 - DNA, 15 bp, Homo sapiens
ttgtgcattaccttc

SEQ ID NO: 1840795 - DNA, 15 bp, Homo sapiens
tgtgcattaccttca

SEQ ID NO: 1840796 - DNA, 15 bp, Homo sapiens
gtgcattaccttcac

SEQ ID NO: 1840797 - DNA, 15 bp, Homo sapiens
tgcattaccttcact

SEQ ID NO: 1840798 - DNA, 15 bp, Homo sapiens
cacatttgctcacac

SEQ ID NO: 1840799 - DNA, 15 bp, Homo sapiens
acatttgctcacaca

SEQ ID NO: 1840800 - DNA, 15 bp, Homo sapiens
catttgctcacacac

SEQ ID NO: 1840801 - DNA, 15 bp, Homo sapiens
atttgctcacacacc

SEQ ID NO: 1840802 - DNA, 15 bp, Homo sapiens
tttgctcacacacct

SEQ ID NO: 1840803 - DNA, 15 bp, Homo sapiens
ttgctcacacacctg

SEQ ID NO: 1840804 - DNA, 15 bp, Homo sapiens
tgctcacacacctgc

SEQ ID NO: 1840805 - DNA, 15 bp, Homo sapiens
gctcacacacctgca

SEQ ID NO: 1840806 - DNA, 15 bp, Homo sapiens
ctcacacacctgcag

SEQ ID NO: 1840807 - DNA, 15 bp, Homo sapiens
tcacacacctgcagc

SEQ ID NO: 1840808 - DNA, 15 bp, Homo sapiens
cacacacctgcagct

SEQ ID NO: 1840809 - DNA, 15 bp, Homo sapiens
acacacctgcagctg

SEQ ID NO: 1840810 - DNA, 15 bp, Homo sapiens
cacacctgcagctgc

SEQ ID NO: 1840811 - DNA, 15 bp, Homo sapiens
acacctgcagctgct

SEQ ID NO: 1840812 - DNA, 15 bp, Homo sapiens
cacctgcagctgctc

SEQ ID NO: 1840813 - DNA, 15 bp, Homo sapiens
acctgcagctgctca

SEQ ID NO: 1840814 - DNA, 15 bp, Homo sapiens
cctgcagctgctcac

SEQ ID NO: 1840815 - DNA, 15 bp, Homo sapiens
ctgcagctgctcaca

SEQ ID NO: 1840816 - DNA, 15 bp, Homo sapiens
tgcagctgctcacac

SEQ ID NO: 1840817 - DNA, 15 bp, Homo sapiens
gcagctgctcacaca

SEQ ID NO: 1840818 - DNA, 15 bp, Homo sapiens
cagctgctcacacat

SEQ ID NO: 1840819 - DNA, 15 bp, Homo sapiens
agctgctcacacatg

SEQ ID NO: 1840820 - DNA, 15 bp, Homo sapiens
gctgctcacacatgc

SEQ ID NO: 1840821 - DNA, 15 bp, Homo sapiens
ctgctcacacatgcc

SEQ ID NO: 1840822 - DNA, 15 bp, Homo sapiens
tgctcacacatgcct

SEQ ID NO: 1840823 - DNA, 15 bp, Homo sapiens
gctcacacatgcctg

SEQ ID NO: 1840824 - DNA, 15 bp, Homo sapiens
ctcacacatgcctgc

SEQ ID NO: 1840825 - DNA, 15 bp, Homo sapiens
tcacacatgcctgca

SEQ ID NO: 1840826 - DNA, 15 bp, Homo sapiens
cacacatgcctgcat

SEQ ID NO: 1840827 - DNA, 15 bp, Homo sapiens
acacatgcctgcatg

SEQ ID NO: 1840828 - DNA, 15 bp, Homo sapiens
cacatgcctgcatga

SEQ ID NO: 1840829 - DNA, 15 bp, Homo sapiens
acatgcctgcatgag

SEQ ID NO: 1840830 - DNA, 15 bp, Homo sapiens
catgcctgcatgaga

SEQ ID NO: 1840831 - DNA, 15 bp, Homo sapiens
atgcctgcatgagag

SEQ ID NO: 1840832 - DNA, 15 bp, Homo sapiens
tgcctgcatgagagg

SEQ ID NO: 1840833 - DNA, 15 bp, Homo sapiens
gcctgcatgagaggc

SEQ ID NO: 1840834 - DNA, 15 bp, Homo sapiens
cctgcatgagaggcc

SEQ ID NO: 1840835 - DNA, 15 bp, Homo sapiens
ctgcatgagaggccc

SEQ ID NO: 1840836 - DNA, 15 bp, Homo sapiens
tgcatgagaggccct

SEQ ID NO: 1840837 - DNA, 15 bp, Homo sapiens
gcatgagaggccctc

SEQ ID NO: 1840838 - DNA, 15 bp, Homo sapiens
catgagaggccctct

SEQ ID NO: 1840839 - DNA, 15 bp, Homo sapiens
atgagaggccctctc

SEQ ID NO: 1840840 - DNA, 15 bp, Homo sapiens
tgagaggccctctcc

SEQ ID NO: 1840841 - DNA, 15 bp, Homo sapiens
gagaggccctctcca

SEQ ID NO: 1840842 - DNA, 15 bp, Homo sapiens
agaggccctctccac

SEQ ID NO: 1840843 - DNA, 15 bp, Homo sapiens
gaggccctctccacc

SEQ ID NO: 1840844 - DNA, 15 bp, Homo sapiens
aggccctctccaccc

SEQ ID NO: 1840845 - DNA, 15 bp, Homo sapiens
ggccctctccaccct

SEQ ID NO: 1840846 - DNA, 15 bp, Homo sapiens
gccctctccaccctt

SEQ ID NO: 1840847 - DNA, 15 bp, Homo sapiens
ccctctccacccttc

SEQ ID NO: 1840848 - DNA, 15 bp, Homo sapiens
cctctccacccttca

SEQ ID NO: 1840849 - DNA, 15 bp, Homo sapiens
ctctccacccttcag

SEQ ID NO: 1840850 - DNA, 15 bp, Homo sapiens
tctccacccttcagt

SEQ ID NO: 1840851 - DNA, 15 bp, Homo sapiens
ctccacccttcagtc

SEQ ID NO: 1840852 - DNA, 15 bp, Homo sapiens
tccacccttcagtct

SEQ ID NO: 1840853 - DNA, 15 bp, Homo sapiens
ccacccttcagtctc

SEQ ID NO: 1840854 - DNA, 15 bp, Homo sapiens
cacccttcagtctcc

SEQ ID NO: 1840855 - DNA, 15 bp, Homo sapiens
acccttcagtctccc

SEQ ID NO: 1840856 - DNA, 15 bp, Homo sapiens
cccttcagtctcccg

SEQ ID NO: 1840857 - DNA, 15 bp, Homo sapiens
ccttcagtctcccgt

SEQ ID NO: 1840858 - DNA, 15 bp, Homo sapiens
cttcagtctcccgta

SEQ ID NO: 1840859 - DNA, 15 bp, Homo sapiens
ttcagtctcccgtac

SEQ ID NO: 1840860 - DNA, 15 bp, Homo sapiens
tcagtctcccgtaca

SEQ ID NO: 1840861 - DNA, 15 bp, Homo sapiens
cagtctcccgtacac

SEQ ID NO: 1840862 - DNA, 15 bp, Homo sapiens
agtctcccgtacacc

SEQ ID NO: 1840863 - DNA, 15 bp, Homo sapiens
gtctcccgtacaccg

SEQ ID NO: 1840864 - DNA, 15 bp, Homo sapiens
tctcccgtacaccgg

SEQ ID NO: 1840865 - DNA, 15 bp, Homo sapiens
ctcccgtacaccggc

SEQ ID NO: 1840866 - DNA, 15 bp, Homo sapiens
tcccgtacaccggca

SEQ ID NO: 1840867 - DNA, 15 bp, Homo sapiens
cccgtacaccggcag

SEQ ID NO: 1840868 - DNA, 15 bp, Homo sapiens
ccgtacaccggcagg

SEQ ID NO: 1840869 - DNA, 15 bp, Homo sapiens
cgtacaccggcaggt

SEQ ID NO: 1840870 - DNA, 15 bp, Homo sapiens
gtacaccggcaggtg

SEQ ID NO: 1840871 - DNA, 15 bp, Homo sapiens
tacaccggcaggtgc

SEQ ID NO: 1840872 - DNA, 15 bp, Homo sapiens
acaccggcaggtgcc

SEQ ID NO: 1840873 - DNA, 15 bp, Homo sapiens
caccggcaggtgccc

SEQ ID NO: 1840874 - DNA, 15 bp, Homo sapiens
accggcaggtgccca

SEQ ID NO: 1840875 - DNA, 15 bp, Homo sapiens
ccggcaggtgcccac

SEQ ID NO: 1840876 - DNA, 15 bp, Homo sapiens
cggcaggtgcccacc

SEQ ID NO: 1840877 - DNA, 15 bp, Homo sapiens
ggcaggtgcccaccc

SEQ ID NO: 1840878 - DNA, 15 bp, Homo sapiens
gcaggtgcccacccc

SEQ ID NO: 1840879 - DNA, 15 bp, Homo sapiens
aggtgcccaccccac

SEQ ID NO: 1840880 - DNA, 15 bp, Homo sapiens
ggtgcccaccccaca

SEQ ID NO: 1840881 - DNA, 15 bp, Homo sapiens
gtgcccaccccacac

SEQ ID NO: 1840882 - DNA, 15 bp, Homo sapiens
tgcccaccccacacc

SEQ ID NO: 1840883 - DNA, 15 bp, Homo sapiens
gcccaccccacacca

SEQ ID NO: 1840884 - DNA, 15 bp, Homo sapiens
cccaccccacaccag

SEQ ID NO: 1840885 - DNA, 15 bp, Homo sapiens
ccaccccacaccagc

SEQ ID NO: 1840886 - DNA, 15 bp, Homo sapiens
caccccacaccagcc

SEQ ID NO: 1840887 - DNA, 15 bp, Homo sapiens
accccacaccagccg

SEQ ID NO: 1840888 - DNA, 15 bp, Homo sapiens
ccccacaccagccgc

SEQ ID NO: 1840889 - DNA, 15 bp, Homo sapiens
cccacaccagccgct

SEQ ID NO: 1840890 - DNA, 15 bp, Homo sapiens
ccacaccagccgctc

SEQ ID NO: 1840891 - DNA, 15 bp, Homo sapiens
cacaccagccgctca

SEQ ID NO: 1840892 - DNA, 15 bp, Homo sapiens
acaccagccgctcac

SEQ ID NO: 1840893 - DNA, 15 bp, Homo sapiens
caccagccgctcaca

SEQ ID NO: 1840894 - DNA, 15 bp, Homo sapiens
accagccgctcacac

SEQ ID NO: 1840895 - DNA, 15 bp, Homo sapiens
ccagccgctcacaca

SEQ ID NO: 1840896 - DNA, 15 bp, Homo sapiens
cagccgctcacacag

SEQ ID NO: 1840897 - DNA, 15 bp, Homo sapiens
agccgctcacacagg

SEQ ID NO: 1840898 - DNA, 15 bp, Homo sapiens
gccgctcacacaggc

SEQ ID NO: 1840899 - DNA, 15 bp, Homo sapiens
ccgctcacacaggca

SEQ ID NO: 1840900 - DNA, 15 bp, Homo sapiens
cgctcacacaggcac

SEQ ID NO: 1840901 - DNA, 15 bp, Homo sapiens
gctcacacaggcacc

SEQ ID NO: 1840902 - DNA, 15 bp, Homo sapiens
ctcacacaggcaccc

SEQ ID NO: 1840903 - DNA, 15 bp, Homo sapiens
tcacacaggcacccc

SEQ ID NO: 1840904 - DNA, 15 bp, Homo sapiens
cacacaggcaccccc

SEQ ID NO: 1840905 - DNA, 15 bp, Homo sapiens
acacaggcacccccg

SEQ ID NO: 1840906 - DNA, 15 bp, Homo sapiens
cacaggcacccccgt

SEQ ID NO: 1840907 - DNA, 15 bp, Homo sapiens
acaggcacccccgtt

SEQ ID NO: 1840908 - DNA, 15 bp, Homo sapiens
caggcacccccgttt

SEQ ID NO: 1840909 - DNA, 15 bp, Homo sapiens
aggcacccccgtttt

SEQ ID NO: 1840910 - DNA, 15 bp, Homo sapiens
ggcacccccgtttta

SEQ ID NO: 1840911 - DNA, 15 bp, Homo sapiens
gcacccccgttttag

SEQ ID NO: 1840912 - DNA, 15 bp, Homo sapiens
cacccccgttttagc

SEQ ID NO: 1840913 - DNA, 15 bp, Homo sapiens
acccccgttttagcc

SEQ ID NO: 1840914 - DNA, 15 bp, Homo sapiens
cccccgttttagcct

SEQ ID NO: 1840915 - DNA, 15 bp, Homo sapiens
ccccgttttagcctc

SEQ ID NO: 1840916 - DNA, 15 bp, Homo sapiens
cccgttttagcctct

SEQ ID NO: 1840917 - DNA, 15 bp, Homo sapiens
ccgttttagcctctt

SEQ ID NO: 1840918 - DNA, 15 bp, Homo sapiens
cgttttagcctctta

SEQ ID NO: 1840919 - DNA, 15 bp, Homo sapiens
gttttagcctcttac

SEQ ID NO: 1840920 - DNA, 15 bp, Homo sapiens
ttttagcctcttaca

SEQ ID NO: 1840921 - DNA, 15 bp, Homo sapiens
tttagcctcttacac

SEQ ID NO: 1840922 - DNA, 15 bp, Homo sapiens
ttagcctcttacact

SEQ ID NO: 1840923 - DNA, 15 bp, Homo sapiens
tagcctcttacactt

SEQ ID NO: 1840924 - DNA, 15 bp, Homo sapiens
agcctcttacacttg

SEQ ID NO: 1840925 - DNA, 15 bp, Homo sapiens
gcctcttacacttgc

SEQ ID NO: 1840926 - DNA, 15 bp, Homo sapiens
cctcttacacttgca

SEQ ID NO: 1840927 - DNA, 15 bp, Homo sapiens
ctcttacacttgcac

SEQ ID NO: 1840928 - DNA, 15 bp, Homo sapiens
tcttacacttgcaca

SEQ ID NO: 1840929 - DNA, 15 bp, Homo sapiens
cttacacttgcacag

SEQ ID NO: 1840930 - DNA, 15 bp, Homo sapiens
ttacacttgcacagg

SEQ ID NO: 1840931 - DNA, 15 bp, Homo sapiens
tacacttgcacaggg

SEQ ID NO: 1840932 - DNA, 15 bp, Homo sapiens
acacttgcacagggg

SEQ ID NO: 1840933 - DNA, 15 bp, Homo sapiens
cacttgcacaggggg

SEQ ID NO: 1840934 - DNA, 15 bp, Homo sapiens
acttgcacagggggc

SEQ ID NO: 1840935 - DNA, 15 bp, Homo sapiens
cttgcacagggggcc

SEQ ID NO: 1840936 - DNA, 15 bp, Homo sapiens
ttgcacagggggccc

SEQ ID NO: 1840937 - DNA, 15 bp, Homo sapiens
tgcacagggggccct

SEQ ID NO: 1840938 - DNA, 15 bp, Homo sapiens
gcacagggggccctt

SEQ ID NO: 1840939 - DNA, 15 bp, Homo sapiens
cacagggggcccttc

SEQ ID NO: 1840940 - DNA, 15 bp, Homo sapiens
acagggggcccttca

SEQ ID NO: 1840941 - DNA, 15 bp, Homo sapiens
cagggggcccttcac

SEQ ID NO: 1840942 - DNA, 15 bp, Homo sapiens
agggggcccttcacc

SEQ ID NO: 1840943 - DNA, 15 bp, Homo sapiens
gggggcccttcacct

SEQ ID NO: 1840944 - DNA, 15 bp, Homo sapiens
ggggcccttcacctg

SEQ ID NO: 1840945 - DNA, 15 bp, Homo sapiens
gggcccttcacctgc

SEQ ID NO: 1840946 - DNA, 15 bp, Homo sapiens
ggcccttcacctgct

SEQ ID NO: 1840947 - DNA, 15 bp, Homo sapiens
gcccttcacctgctt

SEQ ID NO: 1840948 - DNA, 15 bp, Homo sapiens
cccttcacctgcttt

SEQ ID NO: 1840949 - DNA, 15 bp, Homo sapiens
ccttcacctgctttg

SEQ ID NO: 1840950 - DNA, 15 bp, Homo sapiens
cttcacctgctttgc

SEQ ID NO: 1840951 - DNA, 15 bp, Homo sapiens
ttcacctgctttgca

SEQ ID NO: 1840952 - DNA, 15 bp, Homo sapiens
tcacctgctttgcag

SEQ ID NO: 1840953 - DNA, 15 bp, Homo sapiens
cacctgctttgcagc

SEQ ID NO: 1840954 - DNA, 15 bp, Homo sapiens
acctgctttgcagca

SEQ ID NO: 1840955 - DNA, 15 bp, Homo sapiens
cctgctttgcagcac

SEQ ID NO: 1840956 - DNA, 15 bp, Homo sapiens
ctgctttgcagcacc

SEQ ID NO: 1840957 - DNA, 15 bp, Homo sapiens
tgctttgcagcaccg

SEQ ID NO: 1840958 - DNA, 15 bp, Homo sapiens
gctttgcagcaccgg

SEQ ID NO: 1840959 - DNA, 15 bp, Homo sapiens
ctttgcagcaccgga

SEQ ID NO: 1840960 - DNA, 15 bp, Homo sapiens
tttgcagcaccggag

SEQ ID NO: 1840961 - DNA, 15 bp, Homo sapiens
ttgcagcaccggagc

SEQ ID NO: 1840962 - DNA, 15 bp, Homo sapiens
tgcagcaccggagcc

SEQ ID NO: 1840963 - DNA, 15 bp, Homo sapiens
gcagcaccggagccg

SEQ ID NO: 1840964 - DNA, 15 bp, Homo sapiens
cagcaccggagccgg

SEQ ID NO: 1840965 - DNA, 15 bp, Homo sapiens
agcaccggagccgga

SEQ ID NO: 1840966 - DNA, 15 bp, Homo sapiens
gcaccggagccggag

SEQ ID NO: 1840967 - DNA, 15 bp, Homo sapiens
caccggagccggagc

SEQ ID NO: 1840968 - DNA, 15 bp, Homo sapiens
accggagccggagcc

SEQ ID NO: 1840969 - DNA, 15 bp, Homo sapiens
ccggagccggagccc

SEQ ID NO: 1840970 - DNA, 15 bp, Homo sapiens
cggagccggagccca

SEQ ID NO: 1840971 - DNA, 15 bp, Homo sapiens
ggagccggagcccag

SEQ ID NO: 1840972 - DNA, 15 bp, Homo sapiens
gagccggagcccaga

SEQ ID NO: 1840973 - DNA, 15 bp, Homo sapiens
agccggagcccagac

SEQ ID NO: 1840974 - DNA, 15 bp, Homo sapiens
gccggagcccagaca

SEQ ID NO: 1840975 - DNA, 15 bp, Homo sapiens
ccggagcccagacac

SEQ ID NO: 1840976 - DNA, 15 bp, Homo sapiens
cggagcccagacaca

SEQ ID NO: 1840977 - DNA, 15 bp, Homo sapiens
ggagcccagacacat

SEQ ID NO: 1840978 - DNA, 15 bp, Homo sapiens
gagcccagacacatg

SEQ ID NO: 1840979 - DNA, 15 bp, Homo sapiens
agcccagacacatga

SEQ ID NO: 1840980 - DNA, 15 bp, Homo sapiens
gcccagacacatgat

SEQ ID NO: 1840981 - DNA, 15 bp, Homo sapiens
cccagacacatgatg

SEQ ID NO: 1840982 - DNA, 15 bp, Homo sapiens
ccagacacatgatga

SEQ ID NO: 1840983 - DNA, 15 bp, Homo sapiens
cagacacatgatgag

SEQ ID NO: 1840984 - DNA, 15 bp, Homo sapiens
agacacatgatgagg

SEQ ID NO: 1840985 - DNA, 15 bp, Homo sapiens
gacacatgatgaggc

SEQ ID NO: 1840986 - DNA, 15 bp, Homo sapiens
acacatgatgaggca

SEQ ID NO: 1840987 - DNA, 15 bp, Homo sapiens
cacatgatgaggcat

SEQ ID NO: 1840988 - DNA, 15 bp, Homo sapiens
acatgatgaggcatg

SEQ ID NO: 1840989 - DNA, 15 bp, Homo sapiens
catgatgaggcatga

SEQ ID NO: 1840990 - DNA, 15 bp, Homo sapiens
atgatgaggcatgag

SEQ ID NO: 1840991 - DNA, 15 bp, Homo sapiens
tgatgaggcatgaga

SEQ ID NO: 1840992 - DNA, 15 bp, Homo sapiens
gatgaggcatgagaa

SEQ ID NO: 1840993 - DNA, 15 bp, Homo sapiens
atgaggcatgagaag

SEQ ID NO: 1840994 - DNA, 15 bp, Homo sapiens
tgaggcatgagaagt

SEQ ID NO: 1840995 - DNA, 15 bp, Homo sapiens
gaggcatgagaagtg

SEQ ID NO: 1840996 - DNA, 15 bp, Homo sapiens
aggcatgagaagtgg

SEQ ID NO: 1840997 - DNA, 15 bp, Homo sapiens
ggcatgagaagtgga

SEQ ID NO: 1840998 - DNA, 15 bp, Homo sapiens
gcatgagaagtggaa

SEQ ID NO: 1840999 - DNA, 15 bp, Homo sapiens
catgagaagtggaaa

SEQ ID NO: 1841000 - DNA, 15 bp, Homo sapiens
atgagaagtggaaag

SEQ ID NO: 1841001 - DNA, 15 bp, Homo sapiens
tgagaagtggaaagt

SEQ ID NO: 1841002 - DNA, 15 bp, Homo sapiens
gagaagtggaaagtt

SEQ ID NO: 1841003 - DNA, 15 bp, Homo sapiens
agaagtggaaagttc

SEQ ID NO: 1841004 - DNA, 15 bp, Homo sapiens
gaagtggaaagttct

SEQ ID NO: 1841005 - DNA, 15 bp, Homo sapiens
aagtggaaagttctg

SEQ ID NO: 1841006 - DNA, 15 bp, Homo sapiens
agtggaaagttctgc

SEQ ID NO: 1841007 - DNA, 15 bp, Homo sapiens
gtggaaagttctgca

SEQ ID NO: 1841008 - DNA, 15 bp, Homo sapiens
tggaaagttctgcag

SEQ ID NO: 1841009 - DNA, 15 bp, Homo sapiens
ggaaagttctgcagg

SEQ ID NO: 1841010 - DNA, 15 bp, Homo sapiens
gaaagttctgcaggt

SEQ ID NO: 1841011 - DNA, 15 bp, Homo sapiens
aaagttctgcaggtg

SEQ ID NO: 1841012 - DNA, 15 bp, Homo sapiens
aagttctgcaggtgc

SEQ ID NO: 1841013 - DNA, 15 bp, Homo sapiens
agttctgcaggtgct

SEQ ID NO: 1841014 - DNA, 15 bp, Homo sapiens
gttctgcaggtgctc

SEQ ID NO: 1841015 - DNA, 15 bp, Homo sapiens
ttctgcaggtgctct

SEQ ID NO: 1841016 - DNA, 15 bp, Homo sapiens
tctgcaggtgctctg

SEQ ID NO: 1841017 - DNA, 15 bp, Homo sapiens
tgcaggtgctctgcc

SEQ ID NO: 1841018 - DNA, 15 bp, Homo sapiens
gcaggtgctctgccc

SEQ ID NO: 1841019 - DNA, 15 bp, Homo sapiens
caggtgctctgccca

SEQ ID NO: 1841020 - DNA, 15 bp, Homo sapiens
aggtgctctgcccac

SEQ ID NO: 1841021 - DNA, 15 bp, Homo sapiens
ggtgctctgcccacc

SEQ ID NO: 1841022 - DNA, 15 bp, Homo sapiens
gtgctctgcccaccg

SEQ ID NO: 1841023 - DNA, 15 bp, Homo sapiens
tgctctgcccaccgt

SEQ ID NO: 1841024 - DNA, 15 bp, Homo sapiens
gctctgcccaccgtg

SEQ ID NO: 1841025 - DNA, 15 bp, Homo sapiens
ctctgcccaccgtgc

SEQ ID NO: 1841026 - DNA, 15 bp, Homo sapiens
tctgcccaccgtgca

SEQ ID NO: 1841027 - DNA, 15 bp, Homo sapiens
ctgcccaccgtgcaa

SEQ ID NO: 1841028 - DNA, 15 bp, Homo sapiens
tgcccaccgtgcaaa

SEQ ID NO: 1841029 - DNA, 15 bp, Homo sapiens
gcccaccgtgcaaag

SEQ ID NO: 1841030 - DNA, 15 bp, Homo sapiens
cccaccgtgcaaagg

SEQ ID NO: 1841031 - DNA, 15 bp, Homo sapiens
ccaccgtgcaaagga

SEQ ID NO: 1841032 - DNA, 15 bp, Homo sapiens
caccgtgcaaaggag

SEQ ID NO: 1841033 - DNA, 15 bp, Homo sapiens
accgtgcaaaggagg

SEQ ID NO: 1841034 - DNA, 15 bp, Homo sapiens
ccgtgcaaaggagga

SEQ ID NO: 1841035 - DNA, 15 bp, Homo sapiens
cgtgcaaaggaggag

SEQ ID NO: 1841036 - DNA, 15 bp, Homo sapiens
gtgcaaaggaggagg

SEQ ID NO: 1841037 - DNA, 15 bp, Homo sapiens
tgcaaaggaggaggc

SEQ ID NO: 1841038 - DNA, 15 bp, Homo sapiens
gcaaaggaggaggca

SEQ ID NO: 1841039 - DNA, 15 bp, Homo sapiens
caaaggaggaggcag

SEQ ID NO: 1841040 - DNA, 15 bp, Homo sapiens
aaaggaggaggcaga

SEQ ID NO: 1841041 - DNA, 15 bp, Homo sapiens
aaggaggaggcagag

SEQ ID NO: 1841042 - DNA, 15 bp, Homo sapiens
aggaggaggcagagg

SEQ ID NO: 1841043 - DNA, 15 bp, Homo sapiens
ggaggaggcagaggt

SEQ ID NO: 1841044 - DNA, 15 bp, Homo sapiens
gaggaggcagaggtc

SEQ ID NO: 1841045 - DNA, 15 bp, Homo sapiens
aggaggcagaggtcc

SEQ ID NO: 1841046 - DNA, 15 bp, Homo sapiens
ggaggcagaggtcca

SEQ ID NO: 1841047 - DNA, 15 bp, Homo sapiens
gaggcagaggtccag

SEQ ID NO: 1841048 - DNA, 15 bp, Homo sapiens
aggcagaggtccagc

SEQ ID NO: 1841049 - DNA, 15 bp, Homo sapiens
ggcagaggtccagct

SEQ ID NO: 1841050 - DNA, 15 bp, Homo sapiens
gcagaggtccagctg

SEQ ID NO: 1841051 - DNA, 15 bp, Homo sapiens
cagaggtccagctgc

SEQ ID NO: 1841052 - DNA, 15 bp, Homo sapiens
agaggtccagctgcc

SEQ ID NO: 1841053 - DNA, 15 bp, Homo sapiens
gaggtccagctgcct

SEQ ID NO: 1841054 - DNA, 15 bp, Homo sapiens
aggtccagctgcctc

SEQ ID NO: 1841055 - DNA, 15 bp, Homo sapiens
ggtccagctgcctct

SEQ ID NO: 1841056 - DNA, 15 bp, Homo sapiens
gtccagctgcctctc

SEQ ID NO: 1841057 - DNA, 15 bp, Homo sapiens
tccagctgcctctca

SEQ ID NO: 1841058 - DNA, 15 bp, Homo sapiens
ccagctgcctctcag

SEQ ID NO: 1841059 - DNA, 15 bp, Homo sapiens
cagctgcctctcagc

SEQ ID NO: 1841060 - DNA, 15 bp, Homo sapiens
agctgcctctcagca

SEQ ID NO: 1841061 - DNA, 15 bp, Homo sapiens
gctgcctctcagcat

SEQ ID NO: 1841062 - DNA, 15 bp, Homo sapiens
ctgcctctcagcata

SEQ ID NO: 1841063 - DNA, 15 bp, Homo sapiens
tgcctctcagcatat

SEQ ID NO: 1841064 - DNA, 15 bp, Homo sapiens
gcctctcagcatata

SEQ ID NO: 1841065 - DNA, 15 bp, Homo sapiens
cctctcagcatatag

SEQ ID NO: 1841066 - DNA, 15 bp, Homo sapiens
ctctcagcatataga

SEQ ID NO: 1841067 - DNA, 15 bp, Homo sapiens
tctcagcatatagag

SEQ ID NO: 1841068 - DNA, 15 bp, Homo sapiens
ctcagcatatagagg

SEQ ID NO: 1841069 - DNA, 15 bp, Homo sapiens
tcagcatatagaggc

SEQ ID NO: 1841070 - DNA, 15 bp, Homo sapiens
cagcatatagaggct

SEQ ID NO: 1841071 - DNA, 15 bp, Homo sapiens
agcatatagaggctc

SEQ ID NO: 1841072 - DNA, 15 bp, Homo sapiens
gcatatagaggctca

SEQ ID NO: 1841073 - DNA, 15 bp, Homo sapiens
catatagaggctcag

SEQ ID NO: 1841074 - DNA, 15 bp, Homo sapiens
atatagaggctcaga

SEQ ID NO: 1841075 - DNA, 15 bp, Homo sapiens
tatagaggctcagag

SEQ ID NO: 1841076 - DNA, 15 bp, Homo sapiens
atagaggctcagagg

SEQ ID NO: 1841077 - DNA, 15 bp, Homo sapiens
tagaggctcagaggc

SEQ ID NO: 1841078 - DNA, 15 bp, Homo sapiens
agaggctcagaggcc

SEQ ID NO: 1841079 - DNA, 15 bp, Homo sapiens
gaggctcagaggcct

SEQ ID NO: 1841080 - DNA, 15 bp, Homo sapiens
aggctcagaggcctt

SEQ ID NO: 1841081 - DNA, 15 bp, Homo sapiens
ggctcagaggccttt

SEQ ID NO: 1841082 - DNA, 15 bp, Homo sapiens
gctcagaggcctttg

SEQ ID NO: 1841083 - DNA, 15 bp, Homo sapiens
ctcagaggcctttgc

SEQ ID NO: 1841084 - DNA, 15 bp, Homo sapiens
tcagaggcctttgca

SEQ ID NO: 1841085 - DNA, 15 bp, Homo sapiens
cagaggcctttgcag

SEQ ID NO: 1841086 - DNA, 15 bp, Homo sapiens
agaggcctttgcagc

SEQ ID NO: 1841087 - DNA, 15 bp, Homo sapiens
gaggcctttgcagca

SEQ ID NO: 1841088 - DNA, 15 bp, Homo sapiens
aggcctttgcagcat

SEQ ID NO: 1841089 - DNA, 15 bp, Homo sapiens
ggcctttgcagcatg

SEQ ID NO: 1841090 - DNA, 15 bp, Homo sapiens
gcctttgcagcatgc

SEQ ID NO: 1841091 - DNA, 15 bp, Homo sapiens
cctttgcagcatgca

SEQ ID NO: 1841092 - DNA, 15 bp, Homo sapiens
ctttgcagcatgcag

SEQ ID NO: 1841093 - DNA, 15 bp, Homo sapiens
tttgcagcatgcaga

SEQ ID NO: 1841094 - DNA, 15 bp, Homo sapiens
ttgcagcatgcagag

SEQ ID NO: 1841095 - DNA, 15 bp, Homo sapiens
tgcagcatgcagagc

SEQ ID NO: 1841096 - DNA, 15 bp, Homo sapiens
gcagcatgcagagct

SEQ ID NO: 1841097 - DNA, 15 bp, Homo sapiens
cagcatgcagagctt

SEQ ID NO: 1841098 - DNA, 15 bp, Homo sapiens
agcatgcagagcttt

SEQ ID NO: 1841099 - DNA, 15 bp, Homo sapiens
gcatgcagagctttt

SEQ ID NO: 1841100 - DNA, 15 bp, Homo sapiens
catgcagagcttttg

SEQ ID NO: 1841101 - DNA, 15 bp, Homo sapiens
atgcagagcttttgg

SEQ ID NO: 1841102 - DNA, 15 bp, Homo sapiens
tgcagagcttttgga

SEQ ID NO: 1841103 - DNA, 15 bp, Homo sapiens
gcagagcttttggaa

SEQ ID NO: 1841104 - DNA, 15 bp, Homo sapiens
cagagcttttggaac

SEQ ID NO: 1841105 - DNA, 15 bp, Homo sapiens
agagcttttggaacg

SEQ ID NO: 1841106 - DNA, 15 bp, Homo sapiens
gagcttttggaacgt

SEQ ID NO: 1841107 - DNA, 15 bp, Homo sapiens
agcttttggaacgta

SEQ ID NO: 1841108 - DNA, 15 bp, Homo sapiens
gcttttggaacgtat

SEQ ID NO: 1841109 - DNA, 15 bp, Homo sapiens
cttttggaacgtatc

SEQ ID NO: 1841110 - DNA, 15 bp, Homo sapiens
ttttggaacgtatct

SEQ ID NO: 1841111 - DNA, 15 bp, Homo sapiens
tttggaacgtatctt

SEQ ID NO: 1841112 - DNA, 15 bp, Homo sapiens
ttggaacgtatctta

SEQ ID NO: 1841113 - DNA, 15 bp, Homo sapiens
tggaacgtatcttac

SEQ ID NO: 1841114 - DNA, 15 bp, Homo sapiens
ggaacgtatcttact

SEQ ID NO: 1841115 - DNA, 15 bp, Homo sapiens
gaacgtatcttactt

SEQ ID NO: 1841116 - DNA, 15 bp, Homo sapiens
aacgtatcttacttt

SEQ ID NO: 1841117 - DNA, 15 bp, Homo sapiens
acgtatcttactttc

SEQ ID NO: 1841118 - DNA, 15 bp, Homo sapiens
cgtatcttactttct

SEQ ID NO: 1841119 - DNA, 15 bp, Homo sapiens
gtatcttactttctc

SEQ ID NO: 1841120 - DNA, 15 bp, Homo sapiens
tatcttactttctca

SEQ ID NO: 1841121 - DNA, 15 bp, Homo sapiens
atcttactttctcat

SEQ ID NO: 1841122 - DNA, 15 bp, Homo sapiens
tcttactttctcatt

SEQ ID NO: 1841123 - DNA, 15 bp, Homo sapiens
cttactttctcattc

SEQ ID NO: 1841124 - DNA, 15 bp, Homo sapiens
ttactttctcattct

SEQ ID NO: 1841125 - DNA, 15 bp, Homo sapiens
tactttctcattctt

SEQ ID NO: 1841126 - DNA, 15 bp, Homo sapiens
actttctcattctta

SEQ ID NO: 1841127 - DNA, 15 bp, Homo sapiens
ctttctcattcttaa

SEQ ID NO: 1841128 - DNA, 15 bp, Homo sapiens
tttctcattcttaaa

SEQ ID NO: 1841129 - DNA, 15 bp, Homo sapiens
ttctcattcttaaat

SEQ ID NO: 1841130 - DNA, 15 bp, Homo sapiens
tctcattcttaaatt

SEQ ID NO: 1841131 - DNA, 15 bp, Homo sapiens
ctcattcttaaattc

SEQ ID NO: 1841132 - DNA, 15 bp, Homo sapiens
tcattcttaaattca

SEQ ID NO: 1841133 - DNA, 15 bp, Homo sapiens
cattcttaaattcat

SEQ ID NO: 1841134 - DNA, 15 bp, Homo sapiens
attcttaaattcatt

SEQ ID NO: 1841135 - DNA, 15 bp, Homo sapiens
ttcttaaattcattc

SEQ ID NO: 1841136 - DNA, 15 bp, Homo sapiens
tcttaaattcattcg

SEQ ID NO: 1841137 - DNA, 15 bp, Homo sapiens
cttaaattcattcgg

SEQ ID NO: 1841138 - DNA, 15 bp, Homo sapiens
ttaaattcattcggg

SEQ ID NO: 1841139 - DNA, 15 bp, Homo sapiens
taaattcattcgggt

SEQ ID NO: 1841140 - DNA, 15 bp, Homo sapiens
aaattcattcgggta

SEQ ID NO: 1841141 - DNA, 15 bp, Homo sapiens
aattcattcgggtaa

SEQ ID NO: 1841142 - DNA, 15 bp, Homo sapiens
attcattcgggtaac

SEQ ID NO: 1841143 - DNA, 15 bp, Homo sapiens
ttcattcgggtaacc

SEQ ID NO: 1841144 - DNA, 15 bp, Homo sapiens
tcattcgggtaacca

SEQ ID NO: 1841145 - DNA, 15 bp, Homo sapiens
cattcgggtaaccac

SEQ ID NO: 1841146 - DNA, 15 bp, Homo sapiens
attcgggtaaccact

SEQ ID NO: 1841147 - DNA, 15 bp, Homo sapiens
ttcgggtaaccactg

SEQ ID NO: 1841148 - DNA, 15 bp, Homo sapiens
tcgggtaaccactgt

SEQ ID NO: 1841149 - DNA, 15 bp, Homo sapiens
cgggtaaccactgtt

SEQ ID NO: 1841150 - DNA, 15 bp, Homo sapiens
gggtaaccactgttt

SEQ ID NO: 1841151 - DNA, 15 bp, Homo sapiens
ggtaaccactgttta

SEQ ID NO: 1841152 - DNA, 15 bp, Homo sapiens
gtaaccactgtttac

SEQ ID NO: 1841153 - DNA, 15 bp, Homo sapiens
taaccactgtttact

SEQ ID NO: 1841154 - DNA, 15 bp, Homo sapiens
aaccactgtttactg

SEQ ID NO: 1841155 - DNA, 15 bp, Homo sapiens
accactgtttactgt

SEQ ID NO: 1841156 - DNA, 15 bp, Homo sapiens
ccactgtttactgtg

SEQ ID NO: 1841157 - DNA, 15 bp, Homo sapiens
cactgtttactgtgc

SEQ ID NO: 1841158 - DNA, 15 bp, Homo sapiens
actgtttactgtgca

SEQ ID NO: 1841159 - DNA, 15 bp, Homo sapiens
ctgtttactgtgcac

SEQ ID NO: 1841160 - DNA, 15 bp, Homo sapiens
tgtttactgtgcacc

SEQ ID NO: 1841161 - DNA, 15 bp, Homo sapiens
gtttactgtgcacct

SEQ ID NO: 1841162 - DNA, 15 bp, Homo sapiens
tttactgtgcaccta

SEQ ID NO: 1841163 - DNA, 15 bp, Homo sapiens
ttactgtgcacctac

SEQ ID NO: 1841164 - DNA, 15 bp, Homo sapiens
tactgtgcacctacc

SEQ ID NO: 1841165 - DNA, 15 bp, Homo sapiens
actgtgcacctacca

SEQ ID NO: 1841166 - DNA, 15 bp, Homo sapiens
ctgtgcacctaccat

SEQ ID NO: 1841167 - DNA, 15 bp, Homo sapiens
tgtgcacctaccatg

SEQ ID NO: 1841168 - DNA, 15 bp, Homo sapiens
gtgcacctaccatgg

SEQ ID NO: 1841169 - DNA, 15 bp, Homo sapiens
tgcacctaccatggg

SEQ ID NO: 1841170 - DNA, 15 bp, Homo sapiens
gcacctaccatgggt

SEQ ID NO: 1841171 - DNA, 15 bp, Homo sapiens
cacctaccatgggtc

SEQ ID NO: 1841172 - DNA, 15 bp, Homo sapiens
acctaccatgggtca

SEQ ID NO: 1841173 - DNA, 15 bp, Homo sapiens
cctaccatgggtcag

SEQ ID NO: 1841174 - DNA, 15 bp, Homo sapiens
ctaccatgggtcagg

SEQ ID NO: 1841175 - DNA, 15 bp, Homo sapiens
taccatgggtcaggc

SEQ ID NO: 1841176 - DNA, 15 bp, Homo sapiens
accatgggtcaggcg

SEQ ID NO: 1841177 - DNA, 15 bp, Homo sapiens
ccatgggtcaggcgc

SEQ ID NO: 1841178 - DNA, 15 bp, Homo sapiens
catgggtcaggcgct

SEQ ID NO: 1841179 - DNA, 15 bp, Homo sapiens
atgggtcaggcgctg

SEQ ID NO: 1841180 - DNA, 15 bp, Homo sapiens
tgggtcaggcgctgt

SEQ ID NO: 1841181 - DNA, 15 bp, Homo sapiens
gggtcaggcgctgtc

SEQ ID NO: 1841182 - DNA, 15 bp, Homo sapiens
ggtcaggcgctgtcc

SEQ ID NO: 1841183 - DNA, 15 bp, Homo sapiens
gtcaggcgctgtcct

SEQ ID NO: 1841184 - DNA, 15 bp, Homo sapiens
tcaggcgctgtcctc

SEQ ID NO: 1841185 - DNA, 15 bp, Homo sapiens
caggcgctgtcctct

SEQ ID NO: 1841186 - DNA, 15 bp, Homo sapiens
aggcgctgtcctctg

SEQ ID NO: 1841187 - DNA, 15 bp, Homo sapiens
ggcgctgtcctctgc

SEQ ID NO: 1841188 - DNA, 15 bp, Homo sapiens
gcgctgtcctctgca

SEQ ID NO: 1841189 - DNA, 15 bp, Homo sapiens
cgctgtcctctgcac

SEQ ID NO: 1841190 - DNA, 15 bp, Homo sapiens
gctgtcctctgcacc

SEQ ID NO: 1841191 - DNA, 15 bp, Homo sapiens
ctgtcctctgcaccg

SEQ ID NO: 1841192 - DNA, 15 bp, Homo sapiens
tgtcctctgcaccgg

SEQ ID NO: 1841193 - DNA, 15 bp, Homo sapiens
gtcctctgcaccggg

SEQ ID NO: 1841194 - DNA, 15 bp, Homo sapiens
tcctctgcaccgggc

SEQ ID NO: 1841195 - DNA, 15 bp, Homo sapiens
cctctgcaccgggca

SEQ ID NO: 1841196 - DNA, 15 bp, Homo sapiens
ctctgcaccgggcat

SEQ ID NO: 1841197 - DNA, 15 bp, Homo sapiens
tctgcaccgggcata

SEQ ID NO: 1841198 - DNA, 15 bp, Homo sapiens
ctgcaccgggcatac

SEQ ID NO: 1841199 - DNA, 15 bp, Homo sapiens
tgcaccgggcatact

SEQ ID NO: 1841200 - DNA, 15 bp, Homo sapiens
gcaccgggcatactg

SEQ ID NO: 1841201 - DNA, 15 bp, Homo sapiens
caccgggcatactgc

SEQ ID NO: 1841202 - DNA, 15 bp, Homo sapiens
accgggcatactgca

SEQ ID NO: 1841203 - DNA, 15 bp, Homo sapiens
ccgggcatactgcag

SEQ ID NO: 1841204 - DNA, 15 bp, Homo sapiens
cgggcatactgcaga

SEQ ID NO: 1841205 - DNA, 15 bp, Homo sapiens
gggcatactgcagaa

SEQ ID NO: 1841206 - DNA, 15 bp, Homo sapiens
ggcatactgcagaaa

SEQ ID NO: 1841207 - DNA, 15 bp, Homo sapiens
gcatactgcagaaaa

SEQ ID NO: 1841208 - DNA, 15 bp, Homo sapiens
catactgcagaaaac

SEQ ID NO: 1841209 - DNA, 15 bp, Homo sapiens
atactgcagaaaacg

SEQ ID NO: 1841210 - DNA, 15 bp, Homo sapiens
tactgcagaaaacga

SEQ ID NO: 1841211 - DNA, 15 bp, Homo sapiens
actgcagaaaacgaa

SEQ ID NO: 1841212 - DNA, 15 bp, Homo sapiens
ctgcagaaaacgaag

SEQ ID NO: 1841213 - DNA, 15 bp, Homo sapiens
tgcagaaaacgaagc

SEQ ID NO: 1841214 - DNA, 15 bp, Homo sapiens
gcagaaaacgaagca

SEQ ID NO: 1841215 - DNA, 15 bp, Homo sapiens
cagaaaacgaagcag

SEQ ID NO: 1841216 - DNA, 15 bp, Homo sapiens
agaaaacgaagcaga

SEQ ID NO: 1841217 - DNA, 15 bp, Homo sapiens
gaaaacgaagcagat

SEQ ID NO: 1841218 - DNA, 15 bp, Homo sapiens
aaaacgaagcagatg

SEQ ID NO: 1841219 - DNA, 15 bp, Homo sapiens
aaacgaagcagatgc

SEQ ID NO: 1841220 - DNA, 15 bp, Homo sapiens
aacgaagcagatgca

SEQ ID NO: 1841221 - DNA, 15 bp, Homo sapiens
acgaagcagatgcag

SEQ ID NO: 1841222 - DNA, 15 bp, Homo sapiens
cgaagcagatgcagg

SEQ ID NO: 1841223 - DNA, 15 bp, Homo sapiens
gaagcagatgcaggc

SEQ ID NO: 1841224 - DNA, 15 bp, Homo sapiens
aagcagatgcaggcc

SEQ ID NO: 1841225 - DNA, 15 bp, Homo sapiens
agcagatgcaggccc

SEQ ID NO: 1841226 - DNA, 15 bp, Homo sapiens
gcagatgcaggccct

SEQ ID NO: 1841227 - DNA, 15 bp, Homo sapiens
atgcaggccctgccc

SEQ ID NO: 1841228 - DNA, 15 bp, Homo sapiens
tgcaggccctgccct

SEQ ID NO: 1841229 - DNA, 15 bp, Homo sapiens
gcaggccctgccctc

SEQ ID NO: 1841230 - DNA, 15 bp, Homo sapiens
caggccctgccctca

SEQ ID NO: 1841231 - DNA, 15 bp, Homo sapiens
aggccctgccctcat

SEQ ID NO: 1841232 - DNA, 15 bp, Homo sapiens
ggccctgccctcatt

SEQ ID NO: 1841233 - DNA, 15 bp, Homo sapiens
gccctgccctcattg

SEQ ID NO: 1841234 - DNA, 15 bp, Homo sapiens
ccctgccctcattgg

SEQ ID NO: 1841235 - DNA, 15 bp, Homo sapiens
cctgccctcattggg

SEQ ID NO: 1841236 - DNA, 15 bp, Homo sapiens
ctgccctcattgggt

SEQ ID NO: 1841237 - DNA, 15 bp, Homo sapiens
tgccctcattgggtt

SEQ ID NO: 1841238 - DNA, 15 bp, Homo sapiens
gccctcattgggtta

SEQ ID NO: 1841239 - DNA, 15 bp, Homo sapiens
ccctcattgggttag

SEQ ID NO: 1841240 - DNA, 15 bp, Homo sapiens
cctcattgggttagg

SEQ ID NO: 1841241 - DNA, 15 bp, Homo sapiens
ctcattgggttaggt

SEQ ID NO: 1841242 - DNA, 15 bp, Homo sapiens
tcattgggttaggtc

SEQ ID NO: 1841243 - DNA, 15 bp, Homo sapiens
cattgggttaggtct

SEQ ID NO: 1841244 - DNA, 15 bp, Homo sapiens
attgggttaggtcta

SEQ ID NO: 1841245 - DNA, 15 bp, Homo sapiens
ttgggttaggtctag

SEQ ID NO: 1841246 - DNA, 15 bp, Homo sapiens
tgggttaggtctagt

SEQ ID NO: 1841247 - DNA, 15 bp, Homo sapiens
gggttaggtctagta

SEQ ID NO: 1841248 - DNA, 15 bp, Homo sapiens
ggttaggtctagtag

SEQ ID NO: 1841249 - DNA, 15 bp, Homo sapiens
gttaggtctagtagt

SEQ ID NO: 1841250 - DNA, 15 bp, Homo sapiens
ttaggtctagtagtg

SEQ ID NO: 1841251 - DNA, 15 bp, Homo sapiens
taggtctagtagtgg

SEQ ID NO: 1841252 - DNA, 15 bp, Homo sapiens
aggtctagtagtgga

SEQ ID NO: 1841253 - DNA, 15 bp, Homo sapiens
ggtctagtagtggag

SEQ ID NO: 1841254 - DNA, 15 bp, Homo sapiens
gtctagtagtggaga

SEQ ID NO: 1841255 - DNA, 15 bp, Homo sapiens
tctagtagtggagac

SEQ ID NO: 1841256 - DNA, 15 bp, Homo sapiens
ctagtagtggagaca

SEQ ID NO: 1841257 - DNA, 15 bp, Homo sapiens
tagtagtggagacag

SEQ ID NO: 1841258 - DNA, 15 bp, Homo sapiens
agtagtggagacaga

SEQ ID NO: 1841259 - DNA, 15 bp, Homo sapiens
gtagtggagacagac

SEQ ID NO: 1841260 - DNA, 15 bp, Homo sapiens
tagtggagacagacc

SEQ ID NO: 1841261 - DNA, 15 bp, Homo sapiens
agtggagacagacca

SEQ ID NO: 1841262 - DNA, 15 bp, Homo sapiens
gtggagacagaccac

SEQ ID NO: 1841263 - DNA, 15 bp, Homo sapiens
tggagacagaccaca

SEQ ID NO: 1841264 - DNA, 15 bp, Homo sapiens
ggagacagaccacag

SEQ ID NO: 1841265 - DNA, 15 bp, Homo sapiens
gagacagaccacaga

SEQ ID NO: 1841266 - DNA, 15 bp, Homo sapiens
agacagaccacagac

SEQ ID NO: 1841267 - DNA, 15 bp, Homo sapiens
gacagaccacagaca

SEQ ID NO: 1841268 - DNA, 15 bp, Homo sapiens
acagaccacagacag

SEQ ID NO: 1841269 - DNA, 15 bp, Homo sapiens
cagaccacagacagg

SEQ ID NO: 1841270 - DNA, 15 bp, Homo sapiens
agaccacagacagga

SEQ ID NO: 1841271 - DNA, 15 bp, Homo sapiens
gaccacagacaggac

SEQ ID NO: 1841272 - DNA, 15 bp, Homo sapiens
accacagacaggaca

SEQ ID NO: 1841273 - DNA, 15 bp, Homo sapiens
ccacagacaggacaa

SEQ ID NO: 1841274 - DNA, 15 bp, Homo sapiens
cacagacaggacaaa

SEQ ID NO: 1841275 - DNA, 15 bp, Homo sapiens
acagacaggacaaat

SEQ ID NO: 1841276 - DNA, 15 bp, Homo sapiens
cagacaggacaaata

SEQ ID NO: 1841277 - DNA, 15 bp, Homo sapiens
agacaggacaaatag

SEQ ID NO: 1841278 - DNA, 15 bp, Homo sapiens
gacaggacaaatagg

SEQ ID NO: 1841279 - DNA, 15 bp, Homo sapiens
acaggacaaataggg

SEQ ID NO: 1841280 - DNA, 15 bp, Homo sapiens
caggacaaataggga

SEQ ID NO: 1841281 - DNA, 15 bp, Homo sapiens
aggacaaatagggaa

SEQ ID NO: 1841282 - DNA, 15 bp, Homo sapiens
ggacaaatagggaaa

SEQ ID NO: 1841283 - DNA, 15 bp, Homo sapiens
gacaaatagggaaac

SEQ ID NO: 1841284 - DNA, 15 bp, Homo sapiens
acaaatagggaaaca

SEQ ID NO: 1841285 - DNA, 15 bp, Homo sapiens
caaatagggaaacag

SEQ ID NO: 1841286 - DNA, 15 bp, Homo sapiens
aaatagggaaacagg

SEQ ID NO: 1841287 - DNA, 15 bp, Homo sapiens
aatagggaaacagga

SEQ ID NO: 1841288 - DNA, 15 bp, Homo sapiens
atagggaaacaggag

SEQ ID NO: 1841289 - DNA, 15 bp, Homo sapiens
tagggaaacaggaga

SEQ ID NO: 1841290 - DNA, 15 bp, Homo sapiens
agggaaacaggagaa

SEQ ID NO: 1841291 - DNA, 15 bp, Homo sapiens
gggaaacaggagaag

SEQ ID NO: 1841292 - DNA, 15 bp, Homo sapiens
ggaaacaggagaagc

SEQ ID NO: 1841293 - DNA, 15 bp, Homo sapiens
gaaacaggagaagcc

SEQ ID NO: 1841294 - DNA, 15 bp, Homo sapiens
aaacaggagaagcca

SEQ ID NO: 1841295 - DNA, 15 bp, Homo sapiens
aacaggagaagccag

SEQ ID NO: 1841296 - DNA, 15 bp, Homo sapiens
acaggagaagccagg

SEQ ID NO: 1841297 - DNA, 15 bp, Homo sapiens
caggagaagccaggt

SEQ ID NO: 1841298 - DNA, 15 bp, Homo sapiens
aggagaagccaggtg

SEQ ID NO: 1841299 - DNA, 15 bp, Homo sapiens
ggagaagccaggtgg

SEQ ID NO: 1841300 - DNA, 15 bp, Homo sapiens
gagaagccaggtggc

SEQ ID NO: 1841301 - DNA, 15 bp, Homo sapiens
agaagccaggtggcc

SEQ ID NO: 1841302 - DNA, 15 bp, Homo sapiens
gaagccaggtggcca

SEQ ID NO: 1841303 - DNA, 15 bp, Homo sapiens
aagccaggtggccat

SEQ ID NO: 1841304 - DNA, 15 bp, Homo sapiens
agccaggtggccata

SEQ ID NO: 1841305 - DNA, 15 bp, Homo sapiens
gccaggtggccataa

SEQ ID NO: 1841306 - DNA, 15 bp, Homo sapiens
ccaggtggccataag

SEQ ID NO: 1841307 - DNA, 15 bp, Homo sapiens
caggtggccataagt

SEQ ID NO: 1841308 - DNA, 15 bp, Homo sapiens
aggtggccataagtg

SEQ ID NO: 1841309 - DNA, 15 bp, Homo sapiens
ggtggccataagtgc

SEQ ID NO: 1841310 - DNA, 15 bp, Homo sapiens
gtggccataagtgca

SEQ ID NO: 1841311 - DNA, 15 bp, Homo sapiens
tggccataagtgcac

SEQ ID NO: 1841312 - DNA, 15 bp, Homo sapiens
ggccataagtgcaca

SEQ ID NO: 1841313 - DNA, 15 bp, Homo sapiens
gccataagtgcacaa

SEQ ID NO: 1841314 - DNA, 15 bp, Homo sapiens
ccataagtgcacaag

SEQ ID NO: 1841315 - DNA, 15 bp, Homo sapiens
cataagtgcacaagc

SEQ ID NO: 1841316 - DNA, 15 bp, Homo sapiens
ataagtgcacaagca

SEQ ID NO: 1841317 - DNA, 15 bp, Homo sapiens
taagtgcacaagcac

SEQ ID NO: 1841318 - DNA, 15 bp, Homo sapiens
aagtgcacaagcaca

SEQ ID NO: 1841319 - DNA, 15 bp, Homo sapiens
agtgcacaagcacaa

SEQ ID NO: 1841320 - DNA, 15 bp, Homo sapiens
gtgcacaagcacaaa

SEQ ID NO: 1841321 - DNA, 15 bp, Homo sapiens
tgcacaagcacaaat

SEQ ID NO: 1841322 - DNA, 15 bp, Homo sapiens
gcacaagcacaaatg

SEQ ID NO: 1841323 - DNA, 15 bp, Homo sapiens
cacaagcacaaatga

SEQ ID NO: 1841324 - DNA, 15 bp, Homo sapiens
acaagcacaaatgaa

SEQ ID NO: 1841325 - DNA, 15 bp, Homo sapiens
caagcacaaatgaaa

SEQ ID NO: 1841326 - DNA, 15 bp, Homo sapiens
aagcacaaatgaaac

SEQ ID NO: 1841327 - DNA, 15 bp, Homo sapiens
agcacaaatgaaaca

SEQ ID NO: 1841328 - DNA, 15 bp, Homo sapiens
gcacaaatgaaacag

SEQ ID NO: 1841329 - DNA, 15 bp, Homo sapiens
acaaatgaaacaggg

SEQ ID NO: 1841330 - DNA, 15 bp, Homo sapiens
caaatgaaacaggga

SEQ ID NO: 1841331 - DNA, 15 bp, Homo sapiens
aaatgaaacagggaa

SEQ ID NO: 1841332 - DNA, 15 bp, Homo sapiens
aatgaaacagggaat

SEQ ID NO: 1841333 - DNA, 15 bp, Homo sapiens
atgaaacagggaatg

SEQ ID NO: 1841334 - DNA, 15 bp, Homo sapiens
tgaaacagggaatgg

SEQ ID NO: 1841335 - DNA, 15 bp, Homo sapiens
gaaacagggaatggg

SEQ ID NO: 1841336 - DNA, 15 bp, Homo sapiens
aaacagggaatggga

SEQ ID NO: 1841337 - DNA, 15 bp, Homo sapiens
aacagggaatgggaa

SEQ ID NO: 1841338 - DNA, 15 bp, Homo sapiens
acagggaatgggaaa

SEQ ID NO: 1841339 - DNA, 15 bp, Homo sapiens
cagggaatgggaaaa

SEQ ID NO: 1841340 - DNA, 15 bp, Homo sapiens
agggaatgggaaaaa

SEQ ID NO: 1841341 - DNA, 15 bp, Homo sapiens
gggaatgggaaaaaa

SEQ ID NO: 1841342 - DNA, 15 bp, Homo sapiens
ggaatgggaaaaaat

SEQ ID NO: 1841343 - DNA, 15 bp, Homo sapiens
gaatgggaaaaaata

SEQ ID NO: 1841344 - DNA, 15 bp, Homo sapiens
aatgggaaaaaatag

SEQ ID NO: 1841345 - DNA, 15 bp, Homo sapiens
atgggaaaaaatagt

SEQ ID NO: 1841346 - DNA, 15 bp, Homo sapiens
tgggaaaaaatagtg

SEQ ID NO: 1841347 - DNA, 15 bp, Homo sapiens
gggaaaaaatagtgc

SEQ ID NO: 1841348 - DNA, 15 bp, Homo sapiens
ggaaaaaatagtgct

SEQ ID NO: 1841349 - DNA, 15 bp, Homo sapiens
gaaaaaatagtgcta

SEQ ID NO: 1841350 - DNA, 15 bp, Homo sapiens
aaaaaatagtgctat

SEQ ID NO: 1841351 - DNA, 15 bp, Homo sapiens
aaaaatagtgctatg

SEQ ID NO: 1841352 - DNA, 15 bp, Homo sapiens
aaaatagtgctatgg

SEQ ID NO: 1841353 - DNA, 15 bp, Homo sapiens
aaatagtgctatgga

SEQ ID NO: 1841354 - DNA, 15 bp, Homo sapiens
aatagtgctatggag

SEQ ID NO: 1841355 - DNA, 15 bp, Homo sapiens
atagtgctatggagg

SEQ ID NO: 1841356 - DNA, 15 bp, Homo sapiens
tagtgctatggaggg

SEQ ID NO: 1841357 - DNA, 15 bp, Homo sapiens
agtgctatggagggt

SEQ ID NO: 1841358 - DNA, 15 bp, Homo sapiens
gtgctatggagggtg

SEQ ID NO: 1841359 - DNA, 15 bp, Homo sapiens
tgctatggagggtgc

SEQ ID NO: 1841360 - DNA, 15 bp, Homo sapiens
gctatggagggtgca

SEQ ID NO: 1841361 - DNA, 15 bp, Homo sapiens
ctatggagggtgcat

SEQ ID NO: 1841362 - DNA, 15 bp, Homo sapiens
tatggagggtgcatg

SEQ ID NO: 1841363 - DNA, 15 bp, Homo sapiens
atggagggtgcatgg

SEQ ID NO: 1841364 - DNA, 15 bp, Homo sapiens
tggagggtgcatgga

SEQ ID NO: 1841365 - DNA, 15 bp, Homo sapiens
ggagggtgcatggag

SEQ ID NO: 1841366 - DNA, 15 bp, Homo sapiens
gagggtgcatggaga

SEQ ID NO: 1841367 - DNA, 15 bp, Homo sapiens
agggtgcatggagag

SEQ ID NO: 1841368 - DNA, 15 bp, Homo sapiens
gggtgcatggagaga

SEQ ID NO: 1841369 - DNA, 15 bp, Homo sapiens
ggtgcatggagagaa

SEQ ID NO: 1841370 - DNA, 15 bp, Homo sapiens
gtgcatggagagaaa

SEQ ID NO: 1841371 - DNA, 15 bp, Homo sapiens
tgcatggagagaaag

SEQ ID NO: 1841372 - DNA, 15 bp, Homo sapiens
catggagagaaagct

SEQ ID NO: 1841373 - DNA, 15 bp, Homo sapiens
atggagagaaagctc

SEQ ID NO: 1841374 - DNA, 15 bp, Homo sapiens
tggagagaaagctct

SEQ ID NO: 1841375 - DNA, 15 bp, Homo sapiens
ggagagaaagctctt

SEQ ID NO: 1841376 - DNA, 15 bp, Homo sapiens
gagagaaagctcttt

SEQ ID NO: 1841377 - DNA, 15 bp, Homo sapiens
agagaaagctctttg

SEQ ID NO: 1841378 - DNA, 15 bp, Homo sapiens
gagaaagctctttgt

SEQ ID NO: 1841379 - DNA, 15 bp, Homo sapiens
agaaagctctttgtt

SEQ ID NO: 1841380 - DNA, 15 bp, Homo sapiens
gaaagctctttgtta

SEQ ID NO: 1841381 - DNA, 15 bp, Homo sapiens
aaagctctttgttaa

SEQ ID NO: 1841382 - DNA, 15 bp, Homo sapiens
aagctctttgttaag

SEQ ID NO: 1841383 - DNA, 15 bp, Homo sapiens
agctctttgttaagg

SEQ ID NO: 1841384 - DNA, 15 bp, Homo sapiens
gctctttgttaaggg

SEQ ID NO: 1841385 - DNA, 15 bp, Homo sapiens
ctctttgttaagggg

SEQ ID NO: 1841386 - DNA, 15 bp, Homo sapiens
tctttgttaagggga

SEQ ID NO: 1841387 - DNA, 15 bp, Homo sapiens
ctttgttaaggggag

SEQ ID NO: 1841388 - DNA, 15 bp, Homo sapiens
tttgttaaggggagt

SEQ ID NO: 1841389 - DNA, 15 bp, Homo sapiens
ttgttaaggggagtt

SEQ ID NO: 1841390 - DNA, 15 bp, Homo sapiens
tgttaaggggagttt

SEQ ID NO: 1841391 - DNA, 15 bp, Homo sapiens
gttaaggggagtttg

SEQ ID NO: 1841392 - DNA, 15 bp, Homo sapiens
ttaaggggagtttgg

SEQ ID NO: 1841393 - DNA, 15 bp, Homo sapiens
taaggggagtttgga

SEQ ID NO: 1841394 - DNA, 15 bp, Homo sapiens
aaggggagtttggag

SEQ ID NO: 1841395 - DNA, 15 bp, Homo sapiens
aggggagtttggagc

SEQ ID NO: 1841396 - DNA, 15 bp, Homo sapiens
ggggagtttggagca

SEQ ID NO: 1841397 - DNA, 15 bp, Homo sapiens
gggagtttggagcag

SEQ ID NO: 1841398 - DNA, 15 bp, Homo sapiens
ggagtttggagcaga

SEQ ID NO: 1841399 - DNA, 15 bp, Homo sapiens
gagtttggagcagat

SEQ ID NO: 1841400 - DNA, 15 bp, Homo sapiens
agtttggagcagatt

SEQ ID NO: 1841401 - DNA, 15 bp, Homo sapiens
gtttggagcagattt

SEQ ID NO: 1841402 - DNA, 15 bp, Homo sapiens
tttggagcagatttc

SEQ ID NO: 1841403 - DNA, 15 bp, Homo sapiens
ttggagcagatttca

SEQ ID NO: 1841404 - DNA, 15 bp, Homo sapiens
tggagcagatttcag

SEQ ID NO: 1841405 - DNA, 15 bp, Homo sapiens
ggagcagatttcagg

SEQ ID NO: 1841406 - DNA, 15 bp, Homo sapiens
gagcagatttcagga

SEQ ID NO: 1841407 - DNA, 15 bp, Homo sapiens
agcagatttcaggaa

SEQ ID NO: 1841408 - DNA, 15 bp, Homo sapiens
gcagatttcaggaaa

SEQ ID NO: 1841409 - DNA, 15 bp, Homo sapiens
cagatttcaggaaag

SEQ ID NO: 1841410 - DNA, 15 bp, Homo sapiens
agatttcaggaaagg

SEQ ID NO: 1841411 - DNA, 15 bp, Homo sapiens
gatttcaggaaaggg

SEQ ID NO: 1841412 - DNA, 15 bp, Homo sapiens
atttcaggaaagggc

SEQ ID NO: 1841413 - DNA, 15 bp, Homo sapiens
tttcaggaaagggcc

SEQ ID NO: 1841414 - DNA, 15 bp, Homo sapiens
ttcaggaaagggcca

SEQ ID NO: 1841415 - DNA, 15 bp, Homo sapiens
tcaggaaagggccat

SEQ ID NO: 1841416 - DNA, 15 bp, Homo sapiens
caggaaagggccatg

SEQ ID NO: 1841417 - DNA, 15 bp, Homo sapiens
aggaaagggccatgt

SEQ ID NO: 1841418 - DNA, 15 bp, Homo sapiens
ggaaagggccatgtt

SEQ ID NO: 1841419 - DNA, 15 bp, Homo sapiens
gaaagggccatgttg

SEQ ID NO: 1841420 - DNA, 15 bp, Homo sapiens
aaagggccatgttgc

SEQ ID NO: 1841421 - DNA, 15 bp, Homo sapiens
aagggccatgttgca

SEQ ID NO: 1841422 - DNA, 15 bp, Homo sapiens
agggccatgttgcag

SEQ ID NO: 1841423 - DNA, 15 bp, Homo sapiens
gggccatgttgcagg

SEQ ID NO: 1841424 - DNA, 15 bp, Homo sapiens
ggccatgttgcaggc

SEQ ID NO: 1841425 - DNA, 15 bp, Homo sapiens
gccatgttgcaggca

SEQ ID NO: 1841426 - DNA, 15 bp, Homo sapiens
ccatgttgcaggcag

SEQ ID NO: 1841427 - DNA, 15 bp, Homo sapiens
catgttgcaggcaga

SEQ ID NO: 1841428 - DNA, 15 bp, Homo sapiens
atgttgcaggcagaa

SEQ ID NO: 1841429 - DNA, 15 bp, Homo sapiens
tgttgcaggcagaag

SEQ ID NO: 1841430 - DNA, 15 bp, Homo sapiens
gttgcaggcagaagg

SEQ ID NO: 1841431 - DNA, 15 bp, Homo sapiens
ttgcaggcagaagga

SEQ ID NO: 1841432 - DNA, 15 bp, Homo sapiens
tgcaggcagaaggaa

SEQ ID NO: 1841433 - DNA, 15 bp, Homo sapiens
gcaggcagaaggaag

SEQ ID NO: 1841434 - DNA, 15 bp, Homo sapiens
caggcagaaggaaga

SEQ ID NO: 1841435 - DNA, 15 bp, Homo sapiens
aggcagaaggaagag

SEQ ID NO: 1841436 - DNA, 15 bp, Homo sapiens
ggcagaaggaagagc

SEQ ID NO: 1841437 - DNA, 15 bp, Homo sapiens
gcagaaggaagagca

SEQ ID NO: 1841438 - DNA, 15 bp, Homo sapiens
cagaaggaagagcaa

SEQ ID NO: 1841439 - DNA, 15 bp, Homo sapiens
aaggaagagcaagtg

SEQ ID NO: 1841440 - DNA, 15 bp, Homo sapiens
aggaagagcaagtgt

SEQ ID NO: 1841441 - DNA, 15 bp, Homo sapiens
ggaagagcaagtgtg

SEQ ID NO: 1841442 - DNA, 15 bp, Homo sapiens
gaagagcaagtgtgg

SEQ ID NO: 1841443 - DNA, 15 bp, Homo sapiens
aagagcaagtgtggc

SEQ ID NO: 1841444 - DNA, 15 bp, Homo sapiens
agagcaagtgtggcc

SEQ ID NO: 1841445 - DNA, 15 bp, Homo sapiens
gagcaagtgtggcca

SEQ ID NO: 1841446 - DNA, 15 bp, Homo sapiens
agcaagtgtggccaa

SEQ ID NO: 1841447 - DNA, 15 bp, Homo sapiens
gcaagtgtggccaag

SEQ ID NO: 1841448 - DNA, 15 bp, Homo sapiens
caagtgtggccaaga

SEQ ID NO: 1841449 - DNA, 15 bp, Homo sapiens
aagtgtggccaagac

SEQ ID NO: 1841450 - DNA, 15 bp, Homo sapiens
agtgtggccaagacc

SEQ ID NO: 1841451 - DNA, 15 bp, Homo sapiens
gtgtggccaagaccc

SEQ ID NO: 1841452 - DNA, 15 bp, Homo sapiens
tgtggccaagaccca

SEQ ID NO: 1841453 - DNA, 15 bp, Homo sapiens
gtggccaagacccag

SEQ ID NO: 1841454 - DNA, 15 bp, Homo sapiens
tggccaagacccagg

SEQ ID NO: 1841455 - DNA, 15 bp, Homo sapiens
ggccaagacccagga

SEQ ID NO: 1841456 - DNA, 15 bp, Homo sapiens
gccaagacccaggaa

SEQ ID NO: 1841457 - DNA, 15 bp, Homo sapiens
ccaagacccaggaag

SEQ ID NO: 1841458 - DNA, 15 bp, Homo sapiens
caagacccaggaagg

SEQ ID NO: 1841459 - DNA, 15 bp, Homo sapiens
aagacccaggaagga

SEQ ID NO: 1841460 - DNA, 15 bp, Homo sapiens
agacccaggaaggat

SEQ ID NO: 1841461 - DNA, 15 bp, Homo sapiens
gacccaggaaggatg

SEQ ID NO: 1841462 - DNA, 15 bp, Homo sapiens
acccaggaaggatgg

SEQ ID NO: 1841463 - DNA, 15 bp, Homo sapiens
cccaggaaggatggg

SEQ ID NO: 1841464 - DNA, 15 bp, Homo sapiens
ccaggaaggatggga

SEQ ID NO: 1841465 - DNA, 15 bp, Homo sapiens
caggaaggatgggag

SEQ ID NO: 1841466 - DNA, 15 bp, Homo sapiens
aggaaggatgggagg

SEQ ID NO: 1841467 - DNA, 15 bp, Homo sapiens
ggaaggatgggagga

SEQ ID NO: 1841468 - DNA, 15 bp, Homo sapiens
gaaggatgggaggag

SEQ ID NO: 1841469 - DNA, 15 bp, Homo sapiens
aaggatgggaggagg

SEQ ID NO: 1841470 - DNA, 15 bp, Homo sapiens
aggatgggaggaggg

SEQ ID NO: 1841471 - DNA, 15 bp, Homo sapiens
ggatgggaggagggt

SEQ ID NO: 1841472 - DNA, 15 bp, Homo sapiens
gatgggaggagggtg

SEQ ID NO: 1841473 - DNA, 15 bp, Homo sapiens
atgggaggagggtgg

SEQ ID NO: 1841474 - DNA, 15 bp, Homo sapiens
tgggaggagggtggc

SEQ ID NO: 1841475 - DNA, 15 bp, Homo sapiens
gggaggagggtggct

SEQ ID NO: 1841476 - DNA, 15 bp, Homo sapiens
ggaggagggtggctg

SEQ ID NO: 1841477 - DNA, 15 bp, Homo sapiens
gaggagggtggctgt

SEQ ID NO: 1841478 - DNA, 15 bp, Homo sapiens
aggagggtggctgtg

SEQ ID NO: 1841479 - DNA, 15 bp, Homo sapiens
ggagggtggctgtgg

SEQ ID NO: 1841480 - DNA, 15 bp, Homo sapiens
gagggtggctgtggc

SEQ ID NO: 1841481 - DNA, 15 bp, Homo sapiens
agggtggctgtggcg

SEQ ID NO: 1841482 - DNA, 15 bp, Homo sapiens
gggtggctgtggcgg

SEQ ID NO: 1841483 - DNA, 15 bp, Homo sapiens
ggtggctgtggcggg

SEQ ID NO: 1841484 - DNA, 15 bp, Homo sapiens
gtggctgtggcgggg

SEQ ID NO: 1841485 - DNA, 15 bp, Homo sapiens
tggctgtggcggggc

SEQ ID NO: 1841486 - DNA, 15 bp, Homo sapiens
ggctgtggcggggcg

SEQ ID NO: 1841487 - DNA, 15 bp, Homo sapiens
gctgtggcggggcgg

SEQ ID NO: 1841488 - DNA, 15 bp, Homo sapiens
ctgtggcggggcgga

SEQ ID NO: 1841489 - DNA, 15 bp, Homo sapiens
tgtggcggggcggag

SEQ ID NO: 1841490 - DNA, 15 bp, Homo sapiens
gtggcggggcggagt

SEQ ID NO: 1841491 - DNA, 15 bp, Homo sapiens
tggcggggcggagta

SEQ ID NO: 1841492 - DNA, 15 bp, Homo sapiens
ggcggggcggagtag

SEQ ID NO: 1841493 - DNA, 15 bp, Homo sapiens
gcggggcggagtagg

SEQ ID NO: 1841494 - DNA, 15 bp, Homo sapiens
cggggcggagtaggg

SEQ ID NO: 1841495 - DNA, 15 bp, Homo sapiens
ggggcggagtagggg

SEQ ID NO: 1841496 - DNA, 15 bp, Homo sapiens
gggcggagtaggggg

SEQ ID NO: 1841497 - DNA, 15 bp, Homo sapiens
ggcggagtagggggg

SEQ ID NO: 1841498 - DNA, 15 bp, Homo sapiens
gcggagtaggggggt

SEQ ID NO: 1841499 - DNA, 15 bp, Homo sapiens
cggagtaggggggtg

SEQ ID NO: 1841500 - DNA, 15 bp, Homo sapiens
ggagtaggggggtgg

SEQ ID NO: 1841501 - DNA, 15 bp, Homo sapiens
gagtaggggggtggg

SEQ ID NO: 1841502 - DNA, 15 bp, Homo sapiens
agtaggggggtgggc

SEQ ID NO: 1841503 - DNA, 15 bp, Homo sapiens
gtaggggggtgggct

SEQ ID NO: 1841504 - DNA, 15 bp, Homo sapiens
taggggggtgggctg

SEQ ID NO: 1841505 - DNA, 15 bp, Homo sapiens
aggggggtgggctgt

SEQ ID NO: 1841506 - DNA, 15 bp, Homo sapiens
gggggtgggctgtgg

SEQ ID NO: 1841507 - DNA, 15 bp, Homo sapiens
ggggtgggctgtggg

SEQ ID NO: 1841508 - DNA, 15 bp, Homo sapiens
gggtgggctgtgggt

SEQ ID NO: 1841509 - DNA, 15 bp, Homo sapiens
ggtgggctgtgggta

SEQ ID NO: 1841510 - DNA, 15 bp, Homo sapiens
gtgggctgtgggtac

SEQ ID NO: 1841511 - DNA, 15 bp, Homo sapiens
tgggctgtgggtact

SEQ ID NO: 1841512 - DNA, 15 bp, Homo sapiens
gggctgtgggtactc

SEQ ID NO: 1841513 - DNA, 15 bp, Homo sapiens
ggctgtgggtactct

SEQ ID NO: 1841514 - DNA, 15 bp, Homo sapiens
gctgtgggtactcta

SEQ ID NO: 1841515 - DNA, 15 bp, Homo sapiens
ctgtgggtactctac

SEQ ID NO: 1841516 - DNA, 15 bp, Homo sapiens
tgtgggtactctaca

SEQ ID NO: 1841517 - DNA, 15 bp, Homo sapiens
gtgggtactctacat

SEQ ID NO: 1841518 - DNA, 15 bp, Homo sapiens
tgggtactctacatg

SEQ ID NO: 1841519 - DNA, 15 bp, Homo sapiens
gggtactctacatga

SEQ ID NO: 1841520 - DNA, 15 bp, Homo sapiens
ggtactctacatgat

SEQ ID NO: 1841521 - DNA, 15 bp, Homo sapiens
gtactctacatgatg

SEQ ID NO: 1841522 - DNA, 15 bp, Homo sapiens
tactctacatgatgg

SEQ ID NO: 1841523 - DNA, 15 bp, Homo sapiens
actctacatgatggg

SEQ ID NO: 1841524 - DNA, 15 bp, Homo sapiens
ctctacatgatgggg

SEQ ID NO: 1841525 - DNA, 15 bp, Homo sapiens
tctacatgatgggga

SEQ ID NO: 1841526 - DNA, 15 bp, Homo sapiens
ctacatgatggggat

SEQ ID NO: 1841527 - DNA, 15 bp, Homo sapiens
tacatgatggggatt

SEQ ID NO: 1841528 - DNA, 15 bp, Homo sapiens
acatgatggggattt

SEQ ID NO: 1841529 - DNA, 15 bp, Homo sapiens
catgatggggatttc

SEQ ID NO: 1841530 - DNA, 15 bp, Homo sapiens
atgatggggatttct

SEQ ID NO: 1841531 - DNA, 15 bp, Homo sapiens
tgatggggatttctt

SEQ ID NO: 1841532 - DNA, 15 bp, Homo sapiens
gatggggatttctta

SEQ ID NO: 1841533 - DNA, 15 bp, Homo sapiens
atggggatttcttaa

SEQ ID NO: 1841534 - DNA, 15 bp, Homo sapiens
tggggatttcttaaa

SEQ ID NO: 1841535 - DNA, 15 bp, Homo sapiens
ggggatttcttaaac

SEQ ID NO: 1841536 - DNA, 15 bp, Homo sapiens
gggatttcttaaaca

SEQ ID NO: 1841537 - DNA, 15 bp, Homo sapiens
ggatttcttaaacat

SEQ ID NO: 1841538 - DNA, 15 bp, Homo sapiens
gatttcttaaacatc

SEQ ID NO: 1841539 - DNA, 15 bp, Homo sapiens
atttcttaaacatct

SEQ ID NO: 1841540 - DNA, 15 bp, Homo sapiens
tttcttaaacatctg

SEQ ID NO: 1841541 - DNA, 15 bp, Homo sapiens
ttcttaaacatctgt

SEQ ID NO: 1841542 - DNA, 15 bp, Homo sapiens
tcttaaacatctgtc

SEQ ID NO: 1841543 - DNA, 15 bp, Homo sapiens
cttaaacatctgtca

SEQ ID NO: 1841544 - DNA, 15 bp, Homo sapiens
ttaaacatctgtcag

SEQ ID NO: 1841545 - DNA, 15 bp, Homo sapiens
taaacatctgtcaga

SEQ ID NO: 1841546 - DNA, 15 bp, Homo sapiens
aaacatctgtcagac

SEQ ID NO: 1841547 - DNA, 15 bp, Homo sapiens
aacatctgtcagacc

SEQ ID NO: 1841548 - DNA, 15 bp, Homo sapiens
acatctgtcagaccc

SEQ ID NO: 1841549 - DNA, 15 bp, Homo sapiens
catctgtcagaccca

SEQ ID NO: 1841550 - DNA, 15 bp, Homo sapiens
atctgtcagacccaa

SEQ ID NO: 1841551 - DNA, 15 bp, Homo sapiens
tctgtcagacccaag

SEQ ID NO: 1841552 - DNA, 15 bp, Homo sapiens
ctgtcagacccaaga

SEQ ID NO: 1841553 - DNA, 15 bp, Homo sapiens
tgtcagacccaagag

SEQ ID NO: 1841554 - DNA, 15 bp, Homo sapiens
gtcagacccaagaga

SEQ ID NO: 1841555 - DNA, 15 bp, Homo sapiens
tcagacccaagagac

SEQ ID NO: 1841556 - DNA, 15 bp, Homo sapiens
cagacccaagagact

SEQ ID NO: 1841557 - DNA, 15 bp, Homo sapiens
agacccaagagactg

SEQ ID NO: 1841558 - DNA, 15 bp, Homo sapiens
gacccaagagactgt

SEQ ID NO: 1841559 - DNA, 15 bp, Homo sapiens
acccaagagactgtg

SEQ ID NO: 1841560 - DNA, 15 bp, Homo sapiens
cccaagagactgtga

SEQ ID NO: 1841561 - DNA, 15 bp, Homo sapiens
ccaagagactgtgat

SEQ ID NO: 1841562 - DNA, 15 bp, Homo sapiens
caagagactgtgatc

SEQ ID NO: 1841563 - DNA, 15 bp, Homo sapiens
aggtgtgtttggttt

SEQ ID NO: 1841564 - DNA, 15 bp, Homo sapiens
ggtgtgtttggttta

SEQ ID NO: 1841565 - DNA, 15 bp, Homo sapiens
gtgtgtttggtttag

SEQ ID NO: 1841566 - DNA, 15 bp, Homo sapiens
tgtgtttggtttagc

SEQ ID NO: 1841567 - DNA, 15 bp, Homo sapiens
gtgtttggtttagcc

SEQ ID NO: 1841568 - DNA, 15 bp, Homo sapiens
tgtttggtttagccc

SEQ ID NO: 1841569 - DNA, 15 bp, Homo sapiens
gtttggtttagccca

SEQ ID NO: 1841570 - DNA, 15 bp, Homo sapiens
tttggtttagcccat

SEQ ID NO: 1841571 - DNA, 15 bp, Homo sapiens
ttggtttagcccatg

SEQ ID NO: 1841572 - DNA, 15 bp, Homo sapiens
tggtttagcccatgt

SEQ ID NO: 1841573 - DNA, 15 bp, Homo sapiens
ggtttagcccatgtg

SEQ ID NO: 1841574 - DNA, 15 bp, Homo sapiens
gtttagcccatgtgg

SEQ ID NO: 1841575 - DNA, 15 bp, Homo sapiens
tttagcccatgtggc

SEQ ID NO: 1841576 - DNA, 15 bp, Homo sapiens
ttagcccatgtggct

SEQ ID NO: 1841577 - DNA, 15 bp, Homo sapiens
tagcccatgtggctt

SEQ ID NO: 1841578 - DNA, 15 bp, Homo sapiens
agcccatgtggcttc

SEQ ID NO: 1841579 - DNA, 15 bp, Homo sapiens
gcccatgtggcttca

SEQ ID NO: 1841580 - DNA, 15 bp, Homo sapiens
cccatgtggcttcat

SEQ ID NO: 1841581 - DNA, 15 bp, Homo sapiens
ccatgtggcttcatt

SEQ ID NO: 1841582 - DNA, 15 bp, Homo sapiens
catgtggcttcattg

SEQ ID NO: 1841583 - DNA, 15 bp, Homo sapiens
atgtggcttcattgt

SEQ ID NO: 1841584 - DNA, 15 bp, Homo sapiens
tgtggcttcattgtt

SEQ ID NO: 1841585 - DNA, 15 bp, Homo sapiens
gtggcttcattgttt

SEQ ID NO: 1841586 - DNA, 15 bp, Homo sapiens
tggcttcattgtttt

SEQ ID NO: 1841587 - DNA, 15 bp, Homo sapiens
ggcttcattgttttt

SEQ ID NO: 1841588 - DNA, 15 bp, Homo sapiens
gcttcattgtttttt

SEQ ID NO: 1841589 - DNA, 15 bp, Homo sapiens
cttcattgtttttta

SEQ ID NO: 1841590 - DNA, 15 bp, Homo sapiens
ttcattgttttttaa

SEQ ID NO: 1841591 - DNA, 15 bp, Homo sapiens
tcattgttttttaat

SEQ ID NO: 1841592 - DNA, 15 bp, Homo sapiens
cattgttttttaatt

SEQ ID NO: 1841593 - DNA, 15 bp, Homo sapiens
attgttttttaattt

SEQ ID NO: 1841594 - DNA, 15 bp, Homo sapiens
ttgttttttaatttt

SEQ ID NO: 1841595 - DNA, 15 bp, Homo sapiens
tgttttttaattttt

SEQ ID NO: 1841596 - DNA, 15 bp, Homo sapiens
gttttttaatttttt

SEQ ID NO: 1841597 - DNA, 15 bp, Homo sapiens
ttttttaattttttt

SEQ ID NO: 1841598 - DNA, 15 bp, Homo sapiens
tttttaatttttttt

SEQ ID NO: 1841599 - DNA, 15 bp, Homo sapiens
tttaatttttttttt

SEQ ID NO: 1841600 - DNA, 15 bp, Homo sapiens
ttaattttttttttc

SEQ ID NO: 1841601 - DNA, 15 bp, Homo sapiens
taattttttttttca

SEQ ID NO: 1841602 - DNA, 15 bp, Homo sapiens
aattttttttttcat

SEQ ID NO: 1841603 - DNA, 15 bp, Homo sapiens
attttttttttcatc

SEQ ID NO: 1841604 - DNA, 15 bp, Homo sapiens
ttttttttttcatca

SEQ ID NO: 1841605 - DNA, 15 bp, Homo sapiens
tttttttttcatcaa

SEQ ID NO: 1841606 - DNA, 15 bp, Homo sapiens
ttttttttcatcaat

SEQ ID NO: 1841607 - DNA, 15 bp, Homo sapiens
tttttttcatcaatt

SEQ ID NO: 1841608 - DNA, 15 bp, Homo sapiens
ttttttcatcaattg

SEQ ID NO: 1841609 - DNA, 15 bp, Homo sapiens
tttttcatcaattgc

SEQ ID NO: 1841610 - DNA, 15 bp, Homo sapiens
ttttcatcaattgcc

SEQ ID NO: 1841611 - DNA, 15 bp, Homo sapiens
tttcatcaattgcct

SEQ ID NO: 1841612 - DNA, 15 bp, Homo sapiens
ttcatcaattgccta

SEQ ID NO: 1841613 - DNA, 15 bp, Homo sapiens
tcatcaattgcctat

SEQ ID NO: 1841614 - DNA, 15 bp, Homo sapiens
catcaattgcctata

SEQ ID NO: 1841615 - DNA, 15 bp, Homo sapiens
atcaattgcctatat

SEQ ID NO: 1841616 - DNA, 15 bp, Homo sapiens
tcaattgcctatatt

SEQ ID NO: 1841617 - DNA, 15 bp, Homo sapiens
caattgcctatattt

SEQ ID NO: 1841618 - DNA, 15 bp, Homo sapiens
aattgcctatattta

SEQ ID NO: 1841619 - DNA, 15 bp, Homo sapiens
attgcctatatttac

SEQ ID NO: 1841620 - DNA, 15 bp, Homo sapiens
ttgcctatatttaca

SEQ ID NO: 1841621 - DNA, 15 bp, Homo sapiens
tgcctatatttacaa

SEQ ID NO: 1841622 - DNA, 15 bp, Homo sapiens
gcctatatttacaaa

SEQ ID NO: 1841623 - DNA, 15 bp, Homo sapiens
cctatatttacaaag

SEQ ID NO: 1841624 - DNA, 15 bp, Homo sapiens
ctatatttacaaagg

SEQ ID NO: 1841625 - DNA, 15 bp, Homo sapiens
tatatttacaaagga

SEQ ID NO: 1841626 - DNA, 15 bp, Homo sapiens
atatttacaaaggag

SEQ ID NO: 1841627 - DNA, 15 bp, Homo sapiens
tatttacaaaggaga

SEQ ID NO: 1841628 - DNA, 15 bp, Homo sapiens
atttacaaaggagat

SEQ ID NO: 1841629 - DNA, 15 bp, Homo sapiens
tttacaaaggagatt

SEQ ID NO: 1841630 - DNA, 15 bp, Homo sapiens
ttacaaaggagattt

SEQ ID NO: 1841631 - DNA, 15 bp, Homo sapiens
tacaaaggagatttt

SEQ ID NO: 1841632 - DNA, 15 bp, Homo sapiens
acaaaggagattttg

SEQ ID NO: 1841633 - DNA, 15 bp, Homo sapiens
caaaggagattttgg

SEQ ID NO: 1841634 - DNA, 15 bp, Homo sapiens
aaaggagattttgga

SEQ ID NO: 1841635 - DNA, 15 bp, Homo sapiens
aaggagattttggat

SEQ ID NO: 1841636 - DNA, 15 bp, Homo sapiens
aggagattttggata

SEQ ID NO: 1841637 - DNA, 15 bp, Homo sapiens
ggagattttggataa

SEQ ID NO: 1841638 - DNA, 15 bp, Homo sapiens
gagattttggataaa

SEQ ID NO: 1841639 - DNA, 15 bp, Homo sapiens
agattttggataaaa

SEQ ID NO: 1841640 - DNA, 15 bp, Homo sapiens
gattttggataaaaa

SEQ ID NO: 1841641 - DNA, 15 bp, Homo sapiens
attttggataaaaat

SEQ ID NO: 1841642 - DNA, 15 bp, Homo sapiens
ttttggataaaaatc

SEQ ID NO: 1841643 - DNA, 15 bp, Homo sapiens
tttggataaaaatct

SEQ ID NO: 1841644 - DNA, 15 bp, Homo sapiens
ttggataaaaatctg

SEQ ID NO: 1841645 - DNA, 15 bp, Homo sapiens
tggataaaaatctgg

SEQ ID NO: 1841646 - DNA, 15 bp, Homo sapiens
ggataaaaatctgga

SEQ ID NO: 1841647 - DNA, 15 bp, Homo sapiens
gataaaaatctggat

SEQ ID NO: 1841648 - DNA, 15 bp, Homo sapiens
ataaaaatctggatt

SEQ ID NO: 1841649 - DNA, 15 bp, Homo sapiens
taaaaatctggattg

SEQ ID NO: 1841650 - DNA, 15 bp, Homo sapiens
aaaaatctggattgc

SEQ ID NO: 1841651 - DNA, 15 bp, Homo sapiens
aaaatctggattgct

SEQ ID NO: 1841652 - DNA, 15 bp, Homo sapiens
aaatctggattgcta

SEQ ID NO: 1841653 - DNA, 15 bp, Homo sapiens
aatctggattgctag

SEQ ID NO: 1841654 - DNA, 15 bp, Homo sapiens
atctggattgctagc

SEQ ID NO: 1841655 - DNA, 15 bp, Homo sapiens
tctggattgctagct

SEQ ID NO: 1841656 - DNA, 15 bp, Homo sapiens
ctggattgctagctg

SEQ ID NO: 1841657 - DNA, 15 bp, Homo sapiens
tggattgctagctgt

SEQ ID NO: 1841658 - DNA, 15 bp, Homo sapiens
ggattgctagctgtt

SEQ ID NO: 1841659 - DNA, 15 bp, Homo sapiens
gattgctagctgttt

SEQ ID NO: 1841660 - DNA, 15 bp, Homo sapiens
attgctagctgtttt

SEQ ID NO: 1841661 - DNA, 15 bp, Homo sapiens
ttgctagctgttttt

SEQ ID NO: 1841662 - DNA, 15 bp, Homo sapiens
tgctagctgtttttg

SEQ ID NO: 1841663 - DNA, 15 bp, Homo sapiens
gctagctgtttttga

SEQ ID NO: 1841664 - DNA, 15 bp, Homo sapiens
ctagctgtttttgaa

SEQ ID NO: 1841665 - DNA, 15 bp, Homo sapiens
tagctgtttttgaaa

SEQ ID NO: 1841666 - DNA, 15 bp, Homo sapiens
agctgtttttgaaaa

SEQ ID NO: 1841667 - DNA, 15 bp, Homo sapiens
gctgtttttgaaaaa

SEQ ID NO: 1841668 - DNA, 15 bp, Homo sapiens
ctgtttttgaaaaaa

SEQ ID NO: 1841669 - DNA, 15 bp, Homo sapiens
tgtttttgaaaaaat

SEQ ID NO: 1841670 - DNA, 15 bp, Homo sapiens
gtttttgaaaaaata

SEQ ID NO: 1841671 - DNA, 15 bp, Homo sapiens
tttttgaaaaaataa

SEQ ID NO: 1841672 - DNA, 15 bp, Homo sapiens
ttttgaaaaaataaa

SEQ ID NO: 1841673 - DNA, 15 bp, Homo sapiens
tttgaaaaaataaaa

SEQ ID NO: 1841674 - DNA, 15 bp, Homo sapiens
ttgaaaaaataaaag

SEQ ID NO: 1841675 - DNA, 15 bp, Homo sapiens
tgaaaaaataaaaga

SEQ ID NO: 1841676 - DNA, 15 bp, Homo sapiens
gaaaaaataaaagat

SEQ ID NO: 1841677 - DNA, 15 bp, Homo sapiens
aaaaaataaaagatt

SEQ ID NO: 1841678 - DNA, 15 bp, Homo sapiens
aaaaataaaagattg

SEQ ID NO: 1841679 - DNA, 15 bp, Homo sapiens
aaaataaaagattga

SEQ ID NO: 1841680 - DNA, 15 bp, Homo sapiens
aaataaaagattgaa

SEQ ID NO: 1841681 - DNA, 15 bp, Homo sapiens
aataaaagattgaaa

SEQ ID NO: 1841682 - DNA, 15 bp, Homo sapiens
ataaaagattgaaaa

SEQ ID NO: 1841683 - DNA, 15 bp, Homo sapiens
taaaagattgaaaat

SEQ ID NO: 1841684 - DNA, 15 bp, Homo sapiens
aaaagattgaaaatg

SEQ ID NO: 1841685 - DNA, 15 bp, Homo sapiens
aaagattgaaaatgt

SEQ ID NO: 1841686 - DNA, 15 bp, Homo sapiens
aagattgaaaatgta

SEQ ID NO: 1841687 - DNA, 15 bp, Homo sapiens
agattgaaaatgtac

SEQ ID NO: 1841688 - DNA, 15 bp, Homo sapiens
gattgaaaatgtacc

SEQ ID NO: 1841689 - DNA, 15 bp, Homo sapiens
attgaaaatgtacct

SEQ ID NO: 1841690 - DNA, 15 bp, Homo sapiens
ttgaaaatgtacctt

SEQ ID NO: 1841691 - DNA, 15 bp, Homo sapiens
tgaaaatgtaccttt

SEQ ID NO: 1841692 - DNA, 15 bp, Homo sapiens
gaaaatgtacctttg

SEQ ID NO: 1841693 - DNA, 15 bp, Homo sapiens
aaaatgtacctttgt

SEQ ID NO: 1841694 - DNA, 15 bp, Homo sapiens
aaatgtacctttgtg

SEQ ID NO: 1841695 - DNA, 15 bp, Homo sapiens
aatgtacctttgtgt

SEQ ID NO: 1841696 - DNA, 15 bp, Homo sapiens
atgtacctttgtgtg

SEQ ID NO: 1841697 - DNA, 15 bp, Homo sapiens
tgtacctttgtgtgc

SEQ ID NO: 1841698 - DNA, 15 bp, Homo sapiens
gtacctttgtgtgcc

SEQ ID NO: 1841699 - DNA, 15 bp, Homo sapiens
tacctttgtgtgcct

SEQ ID NO: 1841700 - DNA, 15 bp, Homo sapiens
acctttgtgtgcctg

SEQ ID NO: 1841701 - DNA, 15 bp, Homo sapiens
cctttgtgtgcctgt

SEQ ID NO: 1841702 - DNA, 15 bp, Homo sapiens
ctttgtgtgcctgtg

SEQ ID NO: 1841703 - DNA, 15 bp, Homo sapiens
tttgtgtgcctgtgt

SEQ ID NO: 1841704 - DNA, 15 bp, Homo sapiens
ttgtgtgcctgtgtc

SEQ ID NO: 1841705 - DNA, 15 bp, Homo sapiens
tgtgtgcctgtgtcc

SEQ ID NO: 1841706 - DNA, 15 bp, Homo sapiens
gtgtgcctgtgtccc

SEQ ID NO: 1841707 - DNA, 15 bp, Homo sapiens
tgtgcctgtgtcccc

SEQ ID NO: 1841708 - DNA, 15 bp, Homo sapiens
gtgcctgtgtcccct

SEQ ID NO: 1841709 - DNA, 15 bp, Homo sapiens
tgcctgtgtcccctc

SEQ ID NO: 1841710 - DNA, 15 bp, Homo sapiens
gcctgtgtcccctca

SEQ ID NO: 1841711 - DNA, 15 bp, Homo sapiens
cctgtgtcccctcat

SEQ ID NO: 1841712 - DNA, 15 bp, Homo sapiens
ctgtgtcccctcatg

SEQ ID NO: 1841713 - DNA, 15 bp, Homo sapiens
tgtgtcccctcatgg

SEQ ID NO: 1841714 - DNA, 15 bp, Homo sapiens
gtgtcccctcatggt

SEQ ID NO: 1841715 - DNA, 15 bp, Homo sapiens
tgtcccctcatggtg

SEQ ID NO: 1841716 - DNA, 15 bp, Homo sapiens
gtcccctcatggtga

SEQ ID NO: 1841717 - DNA, 15 bp, Homo sapiens
tcccctcatggtgat

SEQ ID NO: 1841718 - DNA, 15 bp, Homo sapiens
cccctcatggtgatg

SEQ ID NO: 1841719 - DNA, 15 bp, Homo sapiens
ccctcatggtgatga

SEQ ID NO: 1841720 - DNA, 15 bp, Homo sapiens
cctcatggtgatgat

SEQ ID NO: 1841721 - DNA, 15 bp, Homo sapiens
ctcatggtgatgatt

SEQ ID NO: 1841722 - DNA, 15 bp, Homo sapiens
tcatggtgatgattg

SEQ ID NO: 1841723 - DNA, 15 bp, Homo sapiens
catggtgatgattgg

SEQ ID NO: 1841724 - DNA, 15 bp, Homo sapiens
atggtgatgattggt

SEQ ID NO: 1841725 - DNA, 15 bp, Homo sapiens
tggtgatgattggtt

SEQ ID NO: 1841726 - DNA, 15 bp, Homo sapiens
ggtgatgattggttt

SEQ ID NO: 1841727 - DNA, 15 bp, Homo sapiens
gtgatgattggtttg

SEQ ID NO: 1841728 - DNA, 15 bp, Homo sapiens
tgatgattggtttgg

SEQ ID NO: 1841729 - DNA, 15 bp, Homo sapiens
gatgattggtttggg

SEQ ID NO: 1841730 - DNA, 15 bp, Homo sapiens
atgattggtttgggc

SEQ ID NO: 1841731 - DNA, 15 bp, Homo sapiens
tgattggtttgggca

SEQ ID NO: 1841732 - DNA, 15 bp, Homo sapiens
gattggtttgggcag

SEQ ID NO: 1841733 - DNA, 15 bp, Homo sapiens
attggtttgggcaga

SEQ ID NO: 1841734 - DNA, 15 bp, Homo sapiens
ttggtttgggcagag

SEQ ID NO: 1841735 - DNA, 15 bp, Homo sapiens
tggtttgggcagagc

SEQ ID NO: 1841736 - DNA, 15 bp, Homo sapiens
ggtttgggcagagcc

SEQ ID NO: 1841737 - DNA, 15 bp, Homo sapiens
gtttgggcagagcca

SEQ ID NO: 1841738 - DNA, 15 bp, Homo sapiens
tttgggcagagccat

SEQ ID NO: 1841739 - DNA, 15 bp, Homo sapiens
ttgggcagagccatt

SEQ ID NO: 1841740 - DNA, 15 bp, Homo sapiens
tgggcagagccattg

SEQ ID NO: 1841741 - DNA, 15 bp, Homo sapiens
gggcagagccattgc

SEQ ID NO: 1841742 - DNA, 15 bp, Homo sapiens
ggcagagccattgca

SEQ ID NO: 1841743 - DNA, 15 bp, Homo sapiens
gcagagccattgcac

SEQ ID NO: 1841744 - DNA, 15 bp, Homo sapiens
cagagccattgcacg

SEQ ID NO: 1841745 - DNA, 15 bp, Homo sapiens
agagccattgcacgc

SEQ ID NO: 1841746 - DNA, 15 bp, Homo sapiens
gagccattgcacgct

SEQ ID NO: 1841747 - DNA, 15 bp, Homo sapiens
agccattgcacgctc

SEQ ID NO: 1841748 - DNA, 15 bp, Homo sapiens
gccattgcacgctct

SEQ ID NO: 1841749 - DNA, 15 bp, Homo sapiens
ccattgcacgctctc

SEQ ID NO: 1841750 - DNA, 15 bp, Homo sapiens
cattgcacgctctcc

SEQ ID NO: 1841751 - DNA, 15 bp, Homo sapiens
attgcacgctctcct

SEQ ID NO: 1841752 - DNA, 15 bp, Homo sapiens
ttgcacgctctcctt

SEQ ID NO: 1841753 - DNA, 15 bp, Homo sapiens
tgcacgctctccttt

SEQ ID NO: 1841754 - DNA, 15 bp, Homo sapiens
gcacgctctcctttc

SEQ ID NO: 1841755 - DNA, 15 bp, Homo sapiens
cacgctctcctttcc

SEQ ID NO: 1841756 - DNA, 15 bp, Homo sapiens
acgctctcctttccc

SEQ ID NO: 1841757 - DNA, 15 bp, Homo sapiens
cgctctcctttcccc

SEQ ID NO: 1841758 - DNA, 15 bp, Homo sapiens
gctctcctttccccc

SEQ ID NO: 1841759 - DNA, 15 bp, Homo sapiens
ctctcctttcccccc

SEQ ID NO: 1841760 - DNA, 15 bp, Homo sapiens
tctcctttccccccc

SEQ ID NO: 1841761 - DNA, 15 bp, Homo sapiens
ctcctttccccccca

SEQ ID NO: 1841762 - DNA, 15 bp, Homo sapiens
tcctttcccccccat

SEQ ID NO: 1841763 - DNA, 15 bp, Homo sapiens
cctttcccccccatc

SEQ ID NO: 1841764 - DNA, 15 bp, Homo sapiens
ctttcccccccatcc

SEQ ID NO: 1841765 - DNA, 15 bp, Homo sapiens
tttcccccccatccc

SEQ ID NO: 1841766 - DNA, 15 bp, Homo sapiens
ttcccccccatcccc

SEQ ID NO: 1841767 - DNA, 15 bp, Homo sapiens
tcccccccatccccc

SEQ ID NO: 1841768 - DNA, 15 bp, Homo sapiens
cccccccatcccccg

SEQ ID NO: 1841769 - DNA, 15 bp, Homo sapiens
ccccccatcccccgg

SEQ ID NO: 1841770 - DNA, 15 bp, Homo sapiens
cccccatcccccggt

SEQ ID NO: 1841771 - DNA, 15 bp, Homo sapiens
ccccatcccccggtg

SEQ ID NO: 1841772 - DNA, 15 bp, Homo sapiens
cccatcccccggtgc

SEQ ID NO: 1841773 - DNA, 15 bp, Homo sapiens
ccatcccccggtgct

SEQ ID NO: 1841774 - DNA, 15 bp, Homo sapiens
catcccccggtgctg

SEQ ID NO: 1841775 - DNA, 15 bp, Homo sapiens
atcccccggtgctga

SEQ ID NO: 1841776 - DNA, 15 bp, Homo sapiens
tcccccggtgctgaa

SEQ ID NO: 1841777 - DNA, 15 bp, Homo sapiens
cccccggtgctgaat

SEQ ID NO: 1841778 - DNA, 15 bp, Homo sapiens
ccccggtgctgaatg

SEQ ID NO: 1841779 - DNA, 15 bp, Homo sapiens
cccggtgctgaatgc

SEQ ID NO: 1841780 - DNA, 15 bp, Homo sapiens
ccggtgctgaatgca

SEQ ID NO: 1841781 - DNA, 15 bp, Homo sapiens
cggtgctgaatgcag

SEQ ID NO: 1841782 - DNA, 15 bp, Homo sapiens
ggtgctgaatgcagc

SEQ ID NO: 1841783 - DNA, 15 bp, Homo sapiens
gtgctgaatgcagca

SEQ ID NO: 1841784 - DNA, 15 bp, Homo sapiens
tgctgaatgcagcac

SEQ ID NO: 1841785 - DNA, 15 bp, Homo sapiens
gctgaatgcagcacc

SEQ ID NO: 1841786 - DNA, 15 bp, Homo sapiens
ctgaatgcagcaccc

SEQ ID NO: 1841787 - DNA, 15 bp, Homo sapiens
tgaatgcagcacccc

SEQ ID NO: 1841788 - DNA, 15 bp, Homo sapiens
gaatgcagcacccct

SEQ ID NO: 1841789 - DNA, 15 bp, Homo sapiens
aatgcagcacccctc

SEQ ID NO: 1841790 - DNA, 15 bp, Homo sapiens
atgcagcacccctca

SEQ ID NO: 1841791 - DNA, 15 bp, Homo sapiens
tgcagcacccctcac

SEQ ID NO: 1841792 - DNA, 15 bp, Homo sapiens
gcagcacccctcact

SEQ ID NO: 1841793 - DNA, 15 bp, Homo sapiens
cagcacccctcactc

SEQ ID NO: 1841794 - DNA, 15 bp, Homo sapiens
agcacccctcactca

SEQ ID NO: 1841795 - DNA, 15 bp, Homo sapiens
gcacccctcactcac

SEQ ID NO: 1841796 - DNA, 15 bp, Homo sapiens
cacccctcactcacc

SEQ ID NO: 1841797 - DNA, 15 bp, Homo sapiens
acccctcactcaccg

SEQ ID NO: 1841798 - DNA, 15 bp, Homo sapiens
cccctcactcaccgt

SEQ ID NO: 1841799 - DNA, 15 bp, Homo sapiens
ccctcactcaccgta

SEQ ID NO: 1841800 - DNA, 15 bp, Homo sapiens
cctcactcaccgtaa

SEQ ID NO: 1841801 - DNA, 15 bp, Homo sapiens
ctcactcaccgtaac

SEQ ID NO: 1841802 - DNA, 15 bp, Homo sapiens
tcactcaccgtaaca

SEQ ID NO: 1841803 - DNA, 15 bp, Homo sapiens
cactcaccgtaacag

SEQ ID NO: 1841804 - DNA, 15 bp, Homo sapiens
actcaccgtaacagg

SEQ ID NO: 1841805 - DNA, 15 bp, Homo sapiens
ctcaccgtaacaggc

SEQ ID NO: 1841806 - DNA, 15 bp, Homo sapiens
tcaccgtaacaggct

SEQ ID NO: 1841807 - DNA, 15 bp, Homo sapiens
caccgtaacaggctg

SEQ ID NO: 1841808 - DNA, 15 bp, Homo sapiens
accgtaacaggctgg

SEQ ID NO: 1841809 - DNA, 15 bp, Homo sapiens
ccgtaacaggctggc

SEQ ID NO: 1841810 - DNA, 15 bp, Homo sapiens
cgtaacaggctggct

SEQ ID NO: 1841811 - DNA, 15 bp, Homo sapiens
gtaacaggctggctc

SEQ ID NO: 1841812 - DNA, 15 bp, Homo sapiens
taacaggctggctcc

SEQ ID NO: 1841813 - DNA, 15 bp, Homo sapiens
aacaggctggctcct

SEQ ID NO: 1841814 - DNA, 15 bp, Homo sapiens
acaggctggctcctg

SEQ ID NO: 1841815 - DNA, 15 bp, Homo sapiens
caggctggctcctgt

SEQ ID NO: 1841816 - DNA, 15 bp, Homo sapiens
aggctggctcctgta

SEQ ID NO: 1841817 - DNA, 15 bp, Homo sapiens
ggctggctcctgtag

SEQ ID NO: 1841818 - DNA, 15 bp, Homo sapiens
gctggctcctgtaga

SEQ ID NO: 1841819 - DNA, 15 bp, Homo sapiens
ctggctcctgtagac

SEQ ID NO: 1841820 - DNA, 15 bp, Homo sapiens
tggctcctgtagaca

SEQ ID NO: 1841821 - DNA, 15 bp, Homo sapiens
ggctcctgtagacac

SEQ ID NO: 1841822 - DNA, 15 bp, Homo sapiens
gctcctgtagacaca

SEQ ID NO: 1841823 - DNA, 15 bp, Homo sapiens
ctcctgtagacacat

SEQ ID NO: 1841824 - DNA, 15 bp, Homo sapiens
tcctgtagacacatg

SEQ ID NO: 1841825 - DNA, 15 bp, Homo sapiens
cctgtagacacatga

SEQ ID NO: 1841826 - DNA, 15 bp, Homo sapiens
ctgtagacacatgac

SEQ ID NO: 1841827 - DNA, 15 bp, Homo sapiens
tgtagacacatgacc

SEQ ID NO: 1841828 - DNA, 15 bp, Homo sapiens
gtagacacatgacct

SEQ ID NO: 1841829 - DNA, 15 bp, Homo sapiens
tagacacatgacctt

SEQ ID NO: 1841830 - DNA, 15 bp, Homo sapiens
agacacatgaccttg

SEQ ID NO: 1841831 - DNA, 15 bp, Homo sapiens
gacacatgaccttgg

SEQ ID NO: 1841832 - DNA, 15 bp, Homo sapiens
acacatgaccttgga

SEQ ID NO: 1841833 - DNA, 15 bp, Homo sapiens
cacatgaccttggat

SEQ ID NO: 1841834 - DNA, 15 bp, Homo sapiens
acatgaccttggatc

SEQ ID NO: 1841835 - DNA, 15 bp, Homo sapiens
catgaccttggatcc

SEQ ID NO: 1841836 - DNA, 15 bp, Homo sapiens
atgaccttggatcct

SEQ ID NO: 1841837 - DNA, 15 bp, Homo sapiens
tgaccttggatcctt

SEQ ID NO: 1841838 - DNA, 15 bp, Homo sapiens
gaccttggatccttt

SEQ ID NO: 1841839 - DNA, 15 bp, Homo sapiens
accttggatcctttt

SEQ ID NO: 1841840 - DNA, 15 bp, Homo sapiens
ccttggatccttttt

SEQ ID NO: 1841841 - DNA, 15 bp, Homo sapiens
cttggatcctttttt

SEQ ID NO: 1841842 - DNA, 15 bp, Homo sapiens
ttggatccttttttg

SEQ ID NO: 1841843 - DNA, 15 bp, Homo sapiens
tggatccttttttgg

SEQ ID NO: 1841844 - DNA, 15 bp, Homo sapiens
ggatccttttttgga

SEQ ID NO: 1841845 - DNA, 15 bp, Homo sapiens
gatccttttttggat

SEQ ID NO: 1841846 - DNA, 15 bp, Homo sapiens
atccttttttggatt

SEQ ID NO: 1841847 - DNA, 15 bp, Homo sapiens
tccttttttggatta

SEQ ID NO: 1841848 - DNA, 15 bp, Homo sapiens
ccttttttggattaa

SEQ ID NO: 1841849 - DNA, 15 bp, Homo sapiens
cttttttggattaag

SEQ ID NO: 1841850 - DNA, 15 bp, Homo sapiens
ttttttggattaagg

SEQ ID NO: 1841851 - DNA, 15 bp, Homo sapiens
tttttggattaagga

SEQ ID NO: 1841852 - DNA, 15 bp, Homo sapiens
ttttggattaaggaa

SEQ ID NO: 1841853 - DNA, 15 bp, Homo sapiens
tttggattaaggaag

SEQ ID NO: 1841854 - DNA, 15 bp, Homo sapiens
ttggattaaggaagc

SEQ ID NO: 1841855 - DNA, 15 bp, Homo sapiens
tggattaaggaagca

SEQ ID NO: 1841856 - DNA, 15 bp, Homo sapiens
ggattaaggaagcaa

SEQ ID NO: 1841857 - DNA, 15 bp, Homo sapiens
gattaaggaagcaaa

SEQ ID NO: 1841858 - DNA, 15 bp, Homo sapiens
attaaggaagcaaac

SEQ ID NO: 1841859 - DNA, 15 bp, Homo sapiens
ttaaggaagcaaaca

SEQ ID NO: 1841860 - DNA, 15 bp, Homo sapiens
taaggaagcaaacat

SEQ ID NO: 1841861 - DNA, 15 bp, Homo sapiens
aaggaagcaaacatg

SEQ ID NO: 1841862 - DNA, 15 bp, Homo sapiens
aggaagcaaacatgt

SEQ ID NO: 1841863 - DNA, 15 bp, Homo sapiens
ggaagcaaacatgta

SEQ ID NO: 1841864 - DNA, 15 bp, Homo sapiens
gaagcaaacatgtag

SEQ ID NO: 1841865 - DNA, 15 bp, Homo sapiens
aagcaaacatgtagg

SEQ ID NO: 1841866 - DNA, 15 bp, Homo sapiens
agcaaacatgtagga

SEQ ID NO: 1841867 - DNA, 15 bp, Homo sapiens
gcaaacatgtaggat

SEQ ID NO: 1841868 - DNA, 15 bp, Homo sapiens
caaacatgtaggatt

SEQ ID NO: 1841869 - DNA, 15 bp, Homo sapiens
aaacatgtaggattg

SEQ ID NO: 1841870 - DNA, 15 bp, Homo sapiens
aacatgtaggattgt

SEQ ID NO: 1841871 - DNA, 15 bp, Homo sapiens
acatgtaggattgtg

SEQ ID NO: 1841872 - DNA, 15 bp, Homo sapiens
catgtaggattgtgc

SEQ ID NO: 1841873 - DNA, 15 bp, Homo sapiens
atgtaggattgtgct

SEQ ID NO: 1841874 - DNA, 15 bp, Homo sapiens
tgtaggattgtgctt

SEQ ID NO: 1841875 - DNA, 15 bp, Homo sapiens
gtaggattgtgcttc

SEQ ID NO: 1841876 - DNA, 15 bp, Homo sapiens
taggattgtgcttct

SEQ ID NO: 1841877 - DNA, 15 bp, Homo sapiens
aggattgtgcttctg

SEQ ID NO: 1841878 - DNA, 15 bp, Homo sapiens
ggattgtgcttctgc

SEQ ID NO: 1841879 - DNA, 15 bp, Homo sapiens
gattgtgcttctgca

SEQ ID NO: 1841880 - DNA, 15 bp, Homo sapiens
attgtgcttctgcaa

SEQ ID NO: 1841881 - DNA, 15 bp, Homo sapiens
ttgtgcttctgcaaa

SEQ ID NO: 1841882 - DNA, 15 bp, Homo sapiens
tgtgcttctgcaaat

SEQ ID NO: 1841883 - DNA, 15 bp, Homo sapiens
gtgcttctgcaaatt

SEQ ID NO: 1841884 - DNA, 15 bp, Homo sapiens
tgcttctgcaaattc

SEQ ID NO: 1841885 - DNA, 15 bp, Homo sapiens
gcttctgcaaattct

SEQ ID NO: 1841886 - DNA, 15 bp, Homo sapiens
cttctgcaaattctc

SEQ ID NO: 1841887 - DNA, 15 bp, Homo sapiens
ttctgcaaattctca

SEQ ID NO: 1841888 - DNA, 15 bp, Homo sapiens
tctgcaaattctcag

SEQ ID NO: 1841889 - DNA, 15 bp, Homo sapiens
ctgcaaattctcaga

SEQ ID NO: 1841890 - DNA, 15 bp, Homo sapiens
tgcaaattctcagag

SEQ ID NO: 1841891 - DNA, 15 bp, Homo sapiens
gcaaattctcagaga

SEQ ID NO: 1841892 - DNA, 15 bp, Homo sapiens
caaattctcagagat

SEQ ID NO: 1841893 - DNA, 15 bp, Homo sapiens
aaattctcagagatg

SEQ ID NO: 1841894 - DNA, 15 bp, Homo sapiens
aattctcagagatgg

SEQ ID NO: 1841895 - DNA, 15 bp, Homo sapiens
attctcagagatggc

SEQ ID NO: 1841896 - DNA, 15 bp, Homo sapiens
ttctcagagatggct

SEQ ID NO: 1841897 - DNA, 15 bp, Homo sapiens
tctcagagatggctt

SEQ ID NO: 1841898 - DNA, 15 bp, Homo sapiens
ctcagagatggcttt

SEQ ID NO: 1841899 - DNA, 15 bp, Homo sapiens
tcagagatggctttt

SEQ ID NO: 1841900 - DNA, 15 bp, Homo sapiens
cagagatggcttttg

SEQ ID NO: 1841901 - DNA, 15 bp, Homo sapiens
agagatggcttttga

SEQ ID NO: 1841902 - DNA, 15 bp, Homo sapiens
gagatggcttttgag

SEQ ID NO: 1841903 - DNA, 15 bp, Homo sapiens
agatggcttttgagc

SEQ ID NO: 1841904 - DNA, 15 bp, Homo sapiens
gatggcttttgagcc

SEQ ID NO: 1841905 - DNA, 15 bp, Homo sapiens
atggcttttgagccc

SEQ ID NO: 1841906 - DNA, 15 bp, Homo sapiens
tggcttttgagccct

SEQ ID NO: 1841907 - DNA, 15 bp, Homo sapiens
ggcttttgagccctt

SEQ ID NO: 1841908 - DNA, 15 bp, Homo sapiens
gcttttgagccctta

SEQ ID NO: 1841909 - DNA, 15 bp, Homo sapiens
cttttgagcccttaa

SEQ ID NO: 1841910 - DNA, 15 bp, Homo sapiens
ttttgagcccttaag

SEQ ID NO: 1841911 - DNA, 15 bp, Homo sapiens
tttgagcccttaagc

SEQ ID NO: 1841912 - DNA, 15 bp, Homo sapiens
ttgagcccttaagct

SEQ ID NO: 1841913 - DNA, 15 bp, Homo sapiens
tgagcccttaagctc

SEQ ID NO: 1841914 - DNA, 15 bp, Homo sapiens
gagcccttaagctct

SEQ ID NO: 1841915 - DNA, 15 bp, Homo sapiens
agcccttaagctctt

SEQ ID NO: 1841916 - DNA, 15 bp, Homo sapiens
gcccttaagctcttc

SEQ ID NO: 1841917 - DNA, 15 bp, Homo sapiens
cccttaagctcttct

SEQ ID NO: 1841918 - DNA, 15 bp, Homo sapiens
ccttaagctcttctg

SEQ ID NO: 1841919 - DNA, 15 bp, Homo sapiens
cttaagctcttctgg

SEQ ID NO: 1841920 - DNA, 15 bp, Homo sapiens
ttaagctcttctggg

SEQ ID NO: 1841921 - DNA, 15 bp, Homo sapiens
taagctcttctgggg

SEQ ID NO: 1841922 - DNA, 15 bp, Homo sapiens
aagctcttctggggc

SEQ ID NO: 1841923 - DNA, 15 bp, Homo sapiens
agctcttctggggca

SEQ ID NO: 1841924 - DNA, 15 bp, Homo sapiens
gctcttctggggcat

SEQ ID NO: 1841925 - DNA, 15 bp, Homo sapiens
ctcttctggggcatt

SEQ ID NO: 1841926 - DNA, 15 bp, Homo sapiens
tcttctggggcattc

SEQ ID NO: 1841927 - DNA, 15 bp, Homo sapiens
cttctggggcattct

SEQ ID NO: 1841928 - DNA, 15 bp, Homo sapiens
ttctggggcattctc

SEQ ID NO: 1841929 - DNA, 15 bp, Homo sapiens
tctggggcattctca

SEQ ID NO: 1841930 - DNA, 15 bp, Homo sapiens
ctggggcattctcat

SEQ ID NO: 1841931 - DNA, 15 bp, Homo sapiens
tggggcattctcatt

SEQ ID NO: 1841932 - DNA, 15 bp, Homo sapiens
ggggcattctcattt

SEQ ID NO: 1841933 - DNA, 15 bp, Homo sapiens
gggcattctcatttc

SEQ ID NO: 1841934 - DNA, 15 bp, Homo sapiens
ggcattctcatttct

SEQ ID NO: 1841935 - DNA, 15 bp, Homo sapiens
gcattctcatttctc

SEQ ID NO: 1841936 - DNA, 15 bp, Homo sapiens
cattctcatttctca

SEQ ID NO: 1841937 - DNA, 15 bp, Homo sapiens
attctcatttctcaa

SEQ ID NO: 1841938 - DNA, 15 bp, Homo sapiens
ttctcatttctcaac

SEQ ID NO: 1841939 - DNA, 15 bp, Homo sapiens
tctcatttctcaact

SEQ ID NO: 1841940 - DNA, 15 bp, Homo sapiens
ctcatttctcaacta

SEQ ID NO: 1841941 - DNA, 15 bp, Homo sapiens
tcatttctcaactag

SEQ ID NO: 1841942 - DNA, 15 bp, Homo sapiens
catttctcaactaga

SEQ ID NO: 1841943 - DNA, 15 bp, Homo sapiens
atttctcaactagag

SEQ ID NO: 1841944 - DNA, 15 bp, Homo sapiens
tttctcaactagagc

SEQ ID NO: 1841945 - DNA, 15 bp, Homo sapiens
ttctcaactagagct

SEQ ID NO: 1841946 - DNA, 15 bp, Homo sapiens
tctcaactagagcta

SEQ ID NO: 1841947 - DNA, 15 bp, Homo sapiens
ctcaactagagctag

SEQ ID NO: 1841948 - DNA, 15 bp, Homo sapiens
tcaactagagctagc

SEQ ID NO: 1841949 - DNA, 15 bp, Homo sapiens
caactagagctagcg

SEQ ID NO: 1841950 - DNA, 15 bp, Homo sapiens
aactagagctagcgg

SEQ ID NO: 1841951 - DNA, 15 bp, Homo sapiens
actagagctagcggg

SEQ ID NO: 1841952 - DNA, 15 bp, Homo sapiens
ctagagctagcgggt

SEQ ID NO: 1841953 - DNA, 15 bp, Homo sapiens
tagagctagcgggtg

SEQ ID NO: 1841954 - DNA, 15 bp, Homo sapiens
agagctagcgggtga

SEQ ID NO: 1841955 - DNA, 15 bp, Homo sapiens
gagctagcgggtgag

SEQ ID NO: 1841956 - DNA, 15 bp, Homo sapiens
agctagcgggtgaga

SEQ ID NO: 1841957 - DNA, 15 bp, Homo sapiens
gctagcgggtgagag

SEQ ID NO: 1841958 - DNA, 15 bp, Homo sapiens
ctagcgggtgagagc

SEQ ID NO: 1841959 - DNA, 15 bp, Homo sapiens
tagcgggtgagagcc

SEQ ID NO: 1841960 - DNA, 15 bp, Homo sapiens
agcgggtgagagccc

SEQ ID NO: 1841961 - DNA, 15 bp, Homo sapiens
gcgggtgagagccct

SEQ ID NO: 1841962 - DNA, 15 bp, Homo sapiens
cgggtgagagccctc

SEQ ID NO: 1841963 - DNA, 15 bp, Homo sapiens
gggtgagagccctct

SEQ ID NO: 1841964 - DNA, 15 bp, Homo sapiens
ggtgagagccctctc

SEQ ID NO: 1841965 - DNA, 15 bp, Homo sapiens
gtgagagccctctct

SEQ ID NO: 1841966 - DNA, 15 bp, Homo sapiens
tgagagccctctctc

SEQ ID NO: 1841967 - DNA, 15 bp, Homo sapiens
gagagccctctctct

SEQ ID NO: 1841968 - DNA, 15 bp, Homo sapiens
agagccctctctctg

SEQ ID NO: 1841969 - DNA, 15 bp, Homo sapiens
gagccctctctctgt

SEQ ID NO: 1841970 - DNA, 15 bp, Homo sapiens
agccctctctctgtt

SEQ ID NO: 1841971 - DNA, 15 bp, Homo sapiens
gccctctctctgttt

SEQ ID NO: 1841972 - DNA, 15 bp, Homo sapiens
ccctctctctgtttt

SEQ ID NO: 1841973 - DNA, 15 bp, Homo sapiens
cctctctctgttttc

SEQ ID NO: 1841974 - DNA, 15 bp, Homo sapiens
ctctctctgttttca

SEQ ID NO: 1841975 - DNA, 15 bp, Homo sapiens
tctctctgttttcat

SEQ ID NO: 1841976 - DNA, 15 bp, Homo sapiens
ctctctgttttcatc

SEQ ID NO: 1841977 - DNA, 15 bp, Homo sapiens
tctctgttttcatct

SEQ ID NO: 1841978 - DNA, 15 bp, Homo sapiens
ctctgttttcatctg

SEQ ID NO: 1841979 - DNA, 15 bp, Homo sapiens
tctgttttcatctgc

SEQ ID NO: 1841980 - DNA, 15 bp, Homo sapiens
tgttttcatctgctg

SEQ ID NO: 1841981 - DNA, 15 bp, Homo sapiens
gttttcatctgctgc

SEQ ID NO: 1841982 - DNA, 15 bp, Homo sapiens
ttttcatctgctgca

SEQ ID NO: 1841983 - DNA, 15 bp, Homo sapiens
tttcatctgctgcag

SEQ ID NO: 1841984 - DNA, 15 bp, Homo sapiens
ttcatctgctgcagg

SEQ ID NO: 1841985 - DNA, 15 bp, Homo sapiens
tcatctgctgcagga

SEQ ID NO: 1841986 - DNA, 15 bp, Homo sapiens
catctgctgcaggac

SEQ ID NO: 1841987 - DNA, 15 bp, Homo sapiens
atctgctgcaggaca

SEQ ID NO: 1841988 - DNA, 15 bp, Homo sapiens
tctgctgcaggacag

SEQ ID NO: 1841989 - DNA, 15 bp, Homo sapiens
ctgctgcaggacagc

SEQ ID NO: 1841990 - DNA, 15 bp, Homo sapiens
tgctgcaggacagct

SEQ ID NO: 1841991 - DNA, 15 bp, Homo sapiens
gctgcaggacagctg

SEQ ID NO: 1841992 - DNA, 15 bp, Homo sapiens
ctgcaggacagctgg

SEQ ID NO: 1841993 - DNA, 15 bp, Homo sapiens
tgcaggacagctgga

SEQ ID NO: 1841994 - DNA, 15 bp, Homo sapiens
gcaggacagctggac

SEQ ID NO: 1841995 - DNA, 15 bp, Homo sapiens
caggacagctggact

SEQ ID NO: 1841996 - DNA, 15 bp, Homo sapiens
aggacagctggactt

SEQ ID NO: 1841997 - DNA, 15 bp, Homo sapiens
ggacagctggacttc

SEQ ID NO: 1841998 - DNA, 15 bp, Homo sapiens
gacagctggacttca

SEQ ID NO: 1841999 - DNA, 15 bp, Homo sapiens
acagctggacttcac

SEQ ID NO: 1842000 - DNA, 15 bp, Homo sapiens
cagctggacttcact

SEQ ID NO: 1842001 - DNA, 15 bp, Homo sapiens
agctggacttcactg

SEQ ID NO: 1842002 - DNA, 15 bp, Homo sapiens
gctggacttcactgt

SEQ ID NO: 1842003 - DNA, 15 bp, Homo sapiens
ctggacttcactgta

SEQ ID NO: 1842004 - DNA, 15 bp, Homo sapiens
tggacttcactgtat

SEQ ID NO: 1842005 - DNA, 15 bp, Homo sapiens
ggacttcactgtatc

SEQ ID NO: 1842006 - DNA, 15 bp, Homo sapiens
gacttcactgtatct

SEQ ID NO: 1842007 - DNA, 15 bp, Homo sapiens
acttcactgtatctc

SEQ ID NO: 1842008 - DNA, 15 bp, Homo sapiens
cttcactgtatctca

SEQ ID NO: 1842009 - DNA, 15 bp, Homo sapiens
ttcactgtatctcat

SEQ ID NO: 1842010 - DNA, 15 bp, Homo sapiens
tcactgtatctcata

SEQ ID NO: 1842011 - DNA, 15 bp, Homo sapiens
cactgtatctcataa

SEQ ID NO: 1842012 - DNA, 15 bp, Homo sapiens
actgtatctcataaa

SEQ ID NO: 1842013 - DNA, 15 bp, Homo sapiens
ctgtatctcataaag

SEQ ID NO: 1842014 - DNA, 15 bp, Homo sapiens
tgtatctcataaaga

SEQ ID NO: 1842015 - DNA, 15 bp, Homo sapiens
gtatctcataaagaa

SEQ ID NO: 1842016 - DNA, 15 bp, Homo sapiens
tatctcataaagaaa

SEQ ID NO: 1842017 - DNA, 15 bp, Homo sapiens
atctcataaagaaaa

SEQ ID NO: 1842018 - DNA, 15 bp, Homo sapiens
tctcataaagaaaag

SEQ ID NO: 1842019 - DNA, 15 bp, Homo sapiens
ctcataaagaaaagg

SEQ ID NO: 1842020 - DNA, 15 bp, Homo sapiens
tcataaagaaaagga

SEQ ID NO: 1842021 - DNA, 15 bp, Homo sapiens
cataaagaaaaggag

SEQ ID NO: 1842022 - DNA, 15 bp, Homo sapiens
ataaagaaaaggagg

SEQ ID NO: 1842023 - DNA, 15 bp, Homo sapiens
taaagaaaaggaggt

SEQ ID NO: 1842024 - DNA, 15 bp, Homo sapiens
aaagaaaaggaggtg

SEQ ID NO: 1842025 - DNA, 15 bp, Homo sapiens
aagaaaaggaggtgg

SEQ ID NO: 1842026 - DNA, 15 bp, Homo sapiens
agaaaaggaggtggg

SEQ ID NO: 1842027 - DNA, 15 bp, Homo sapiens
gaaaaggaggtgggg

SEQ ID NO: 1842028 - DNA, 15 bp, Homo sapiens
aaaaggaggtggggt

SEQ ID NO: 1842029 - DNA, 15 bp, Homo sapiens
aaaggaggtggggtg

SEQ ID NO: 1842030 - DNA, 15 bp, Homo sapiens
aaggaggtggggtgg

SEQ ID NO: 1842031 - DNA, 15 bp, Homo sapiens
aggaggtggggtggg

SEQ ID NO: 1842032 - DNA, 15 bp, Homo sapiens
ggaggtggggtgggc

SEQ ID NO: 1842033 - DNA, 15 bp, Homo sapiens
gaggtggggtgggca

SEQ ID NO: 1842034 - DNA, 15 bp, Homo sapiens
aggtggggtgggcag

SEQ ID NO: 1842035 - DNA, 15 bp, Homo sapiens
ggtggggtgggcagg

SEQ ID NO: 1842036 - DNA, 15 bp, Homo sapiens
gtggggtgggcaggg

SEQ ID NO: 1842037 - DNA, 15 bp, Homo sapiens
tggggtgggcagggc

SEQ ID NO: 1842038 - DNA, 15 bp, Homo sapiens
ggggtgggcagggcc

SEQ ID NO: 1842039 - DNA, 15 bp, Homo sapiens
gggtgggcagggccc

SEQ ID NO: 1842040 - DNA, 15 bp, Homo sapiens
ggtgggcagggccct

SEQ ID NO: 1842041 - DNA, 15 bp, Homo sapiens
gtgggcagggcccta

SEQ ID NO: 1842042 - DNA, 15 bp, Homo sapiens
tgggcagggccctag

SEQ ID NO: 1842043 - DNA, 15 bp, Homo sapiens
gggcagggccctagg

SEQ ID NO: 1842044 - DNA, 15 bp, Homo sapiens
ggcagggccctaggc

SEQ ID NO: 1842045 - DNA, 15 bp, Homo sapiens
gcagggccctaggct

SEQ ID NO: 1842046 - DNA, 15 bp, Homo sapiens
cagggccctaggctg

SEQ ID NO: 1842047 - DNA, 15 bp, Homo sapiens
agggccctaggctgt

SEQ ID NO: 1842048 - DNA, 15 bp, Homo sapiens
gggccctaggctgta

SEQ ID NO: 1842049 - DNA, 15 bp, Homo sapiens
ggccctaggctgtat

SEQ ID NO: 1842050 - DNA, 15 bp, Homo sapiens
gccctaggctgtatt

SEQ ID NO: 1842051 - DNA, 15 bp, Homo sapiens
ccctaggctgtatta

SEQ ID NO: 1842052 - DNA, 15 bp, Homo sapiens
cctaggctgtattac

SEQ ID NO: 1842053 - DNA, 15 bp, Homo sapiens
ctaggctgtattact

SEQ ID NO: 1842054 - DNA, 15 bp, Homo sapiens
taggctgtattactg

SEQ ID NO: 1842055 - DNA, 15 bp, Homo sapiens
aggctgtattactgg

SEQ ID NO: 1842056 - DNA, 15 bp, Homo sapiens
ggctgtattactgga

SEQ ID NO: 1842057 - DNA, 15 bp, Homo sapiens
gctgtattactggaa

SEQ ID NO: 1842058 - DNA, 15 bp, Homo sapiens
ctgtattactggaaa

SEQ ID NO: 1842059 - DNA, 15 bp, Homo sapiens
tgtattactggaaaa

SEQ ID NO: 1842060 - DNA, 15 bp, Homo sapiens
gtattactggaaaaa

SEQ ID NO: 1842061 - DNA, 15 bp, Homo sapiens
tattactggaaaaaa

SEQ ID NO: 1842062 - DNA, 15 bp, Homo sapiens
attactggaaaaaaa

SEQ ID NO: 1842063 - DNA, 15 bp, Homo sapiens
ttactggaaaaaaaa

SEQ ID NO: 1842064 - DNA, 15 bp, Homo sapiens
tactggaaaaaaaac

SEQ ID NO: 1842065 - DNA, 15 bp, Homo sapiens
actggaaaaaaaaca

SEQ ID NO: 1842066 - DNA, 15 bp, Homo sapiens
ctggaaaaaaaacaa

SEQ ID NO: 1842067 - DNA, 15 bp, Homo sapiens
tggaaaaaaaacaaa

SEQ ID NO: 1842068 - DNA, 15 bp, Homo sapiens
ggaaaaaaaacaaaa

SEQ ID NO: 1842069 - DNA, 15 bp, Homo sapiens
aaacaaaaaaaaaca

SEQ ID NO: 1842070 - DNA, 15 bp, Homo sapiens
aaaaacaaaacaggc

SEQ ID NO: 1842071 - DNA, 15 bp, Homo sapiens
aaaacaaaacaggca

SEQ ID NO: 1842072 - DNA, 15 bp, Homo sapiens
aaacaaaacaggcag

SEQ ID NO: 1842073 - DNA, 15 bp, Homo sapiens
aacaaaacaggcagt

SEQ ID NO: 1842074 - DNA, 15 bp, Homo sapiens
acaaaacaggcagta

SEQ ID NO: 1842075 - DNA, 15 bp, Homo sapiens
caaaacaggcagtag

SEQ ID NO: 1842076 - DNA, 15 bp, Homo sapiens
aaaacaggcagtagc

SEQ ID NO: 1842077 - DNA, 15 bp, Homo sapiens
aaacaggcagtagct

SEQ ID NO: 1842078 - DNA, 15 bp, Homo sapiens
aacaggcagtagctc

SEQ ID NO: 1842079 - DNA, 15 bp, Homo sapiens
acaggcagtagctcc

SEQ ID NO: 1842080 - DNA, 15 bp, Homo sapiens
caggcagtagctcct

SEQ ID NO: 1842081 - DNA, 15 bp, Homo sapiens
aggcagtagctcctg

SEQ ID NO: 1842082 - DNA, 15 bp, Homo sapiens
ggcagtagctcctgg

SEQ ID NO: 1842083 - DNA, 15 bp, Homo sapiens
gcagtagctcctggt

SEQ ID NO: 1842084 - DNA, 15 bp, Homo sapiens
cagtagctcctggtt

SEQ ID NO: 1842085 - DNA, 15 bp, Homo sapiens
agtagctcctggttt

SEQ ID NO: 1842086 - DNA, 15 bp, Homo sapiens
gtagctcctggtttc

SEQ ID NO: 1842087 - DNA, 15 bp, Homo sapiens
tagctcctggtttct

SEQ ID NO: 1842088 - DNA, 15 bp, Homo sapiens
agctcctggtttctg

SEQ ID NO: 1842089 - DNA, 15 bp, Homo sapiens
gctcctggtttctgt

SEQ ID NO: 1842090 - DNA, 15 bp, Homo sapiens
ctcctggtttctgta

SEQ ID NO: 1842091 - DNA, 15 bp, Homo sapiens
tcctggtttctgtaa

SEQ ID NO: 1842092 - DNA, 15 bp, Homo sapiens
cctggtttctgtaaa

SEQ ID NO: 1842093 - DNA, 15 bp, Homo sapiens
ctggtttctgtaaaa

SEQ ID NO: 1842094 - DNA, 15 bp, Homo sapiens
tggtttctgtaaaaa

SEQ ID NO: 1842095 - DNA, 15 bp, Homo sapiens
ggtttctgtaaaaat

SEQ ID NO: 1842096 - DNA, 15 bp, Homo sapiens
gtttctgtaaaaatg

SEQ ID NO: 1842097 - DNA, 15 bp, Homo sapiens
tttctgtaaaaatgg

SEQ ID NO: 1842098 - DNA, 15 bp, Homo sapiens
ttctgtaaaaatggt

SEQ ID NO: 1842099 - DNA, 15 bp, Homo sapiens
tctgtaaaaatggtg

SEQ ID NO: 1842100 - DNA, 15 bp, Homo sapiens
ctgtaaaaatggtgt

SEQ ID NO: 1842101 - DNA, 15 bp, Homo sapiens
tgtaaaaatggtgtc

SEQ ID NO: 1842102 - DNA, 15 bp, Homo sapiens
gtaaaaatggtgtct

SEQ ID NO: 1842103 - DNA, 15 bp, Homo sapiens
taaaaatggtgtcta

SEQ ID NO: 1842104 - DNA, 15 bp, Homo sapiens
aaaaatggtgtctag

SEQ ID NO: 1842105 - DNA, 15 bp, Homo sapiens
aaaatggtgtctaga

SEQ ID NO: 1842106 - DNA, 15 bp, Homo sapiens
aaatggtgtctagac

SEQ ID NO: 1842107 - DNA, 15 bp, Homo sapiens
aatggtgtctagacg

SEQ ID NO: 1842108 - DNA, 15 bp, Homo sapiens
atggtgtctagacgt

SEQ ID NO: 1842109 - DNA, 15 bp, Homo sapiens
tggtgtctagacgtg

SEQ ID NO: 1842110 - DNA, 15 bp, Homo sapiens
ggtgtctagacgtga

SEQ ID NO: 1842111 - DNA, 15 bp, Homo sapiens
gtgtctagacgtgag

SEQ ID NO: 1842112 - DNA, 15 bp, Homo sapiens
tgtctagacgtgagt

SEQ ID NO: 1842113 - DNA, 15 bp, Homo sapiens
gtctagacgtgagtg

SEQ ID NO: 1842114 - DNA, 15 bp, Homo sapiens
tctagacgtgagtga

SEQ ID NO: 1842115 - DNA, 15 bp, Homo sapiens
ctagacgtgagtgaa

SEQ ID NO: 1842116 - DNA, 15 bp, Homo sapiens
tagacgtgagtgaag

SEQ ID NO: 1842117 - DNA, 15 bp, Homo sapiens
agacgtgagtgaaga

SEQ ID NO: 1842118 - DNA, 15 bp, Homo sapiens
gacgtgagtgaagag

SEQ ID NO: 1842119 - DNA, 15 bp, Homo sapiens
acgtgagtgaagagg

SEQ ID NO: 1842120 - DNA, 15 bp, Homo sapiens
cgtgagtgaagaggc

SEQ ID NO: 1842121 - DNA, 15 bp, Homo sapiens
gtgagtgaagaggca

SEQ ID NO: 1842122 - DNA, 15 bp, Homo sapiens
tgagtgaagaggcag

SEQ ID NO: 1842123 - DNA, 15 bp, Homo sapiens
gagtgaagaggcaga

SEQ ID NO: 1842124 - DNA, 15 bp, Homo sapiens
agtgaagaggcagaa

SEQ ID NO: 1842125 - DNA, 15 bp, Homo sapiens
gtgaagaggcagaag

SEQ ID NO: 1842126 - DNA, 15 bp, Homo sapiens
tgaagaggcagaagg

SEQ ID NO: 1842127 - DNA, 15 bp, Homo sapiens
gaagaggcagaaggt

SEQ ID NO: 1842128 - DNA, 15 bp, Homo sapiens
aagaggcagaaggtc

SEQ ID NO: 1842129 - DNA, 15 bp, Homo sapiens
agaggcagaaggtca

SEQ ID NO: 1842130 - DNA, 15 bp, Homo sapiens
gaggcagaaggtcag

SEQ ID NO: 1842131 - DNA, 15 bp, Homo sapiens
aggcagaaggtcaga

SEQ ID NO: 1842132 - DNA, 15 bp, Homo sapiens
ggcagaaggtcagag

SEQ ID NO: 1842133 - DNA, 15 bp, Homo sapiens
gcagaaggtcagagg

SEQ ID NO: 1842134 - DNA, 15 bp, Homo sapiens
cagaaggtcagaggg

SEQ ID NO: 1842135 - DNA, 15 bp, Homo sapiens
agaaggtcagagggg

SEQ ID NO: 1842136 - DNA, 15 bp, Homo sapiens
gaaggtcagagggga

SEQ ID NO: 1842137 - DNA, 15 bp, Homo sapiens
aaggtcagaggggat

SEQ ID NO: 1842138 - DNA, 15 bp, Homo sapiens
aggtcagaggggatt

SEQ ID NO: 1842139 - DNA, 15 bp, Homo sapiens
ggtcagaggggattt

SEQ ID NO: 1842140 - DNA, 15 bp, Homo sapiens
gtcagaggggatttg

SEQ ID NO: 1842141 - DNA, 15 bp, Homo sapiens
tcagaggggatttgg

SEQ ID NO: 1842142 - DNA, 15 bp, Homo sapiens
cagaggggatttgga

SEQ ID NO: 1842143 - DNA, 15 bp, Homo sapiens
agaggggatttggaa

SEQ ID NO: 1842144 - DNA, 15 bp, Homo sapiens
gaggggatttggaaa

SEQ ID NO: 1842145 - DNA, 15 bp, Homo sapiens
aggggatttggaaat

SEQ ID NO: 1842146 - DNA, 15 bp, Homo sapiens
ggggatttggaaatc

SEQ ID NO: 1842147 - DNA, 15 bp, Homo sapiens
gggatttggaaatct

SEQ ID NO: 1842148 - DNA, 15 bp, Homo sapiens
ggatttggaaatctc

SEQ ID NO: 1842149 - DNA, 15 bp, Homo sapiens
gatttggaaatctca

SEQ ID NO: 1842150 - DNA, 15 bp, Homo sapiens
atttggaaatctcaa

SEQ ID NO: 1842151 - DNA, 15 bp, Homo sapiens
tttggaaatctcaaa

SEQ ID NO: 1842152 - DNA, 15 bp, Homo sapiens
ttggaaatctcaaag

SEQ ID NO: 1842153 - DNA, 15 bp, Homo sapiens
tggaaatctcaaagg

SEQ ID NO: 1842154 - DNA, 15 bp, Homo sapiens
ggaaatctcaaaggc

SEQ ID NO: 1842155 - DNA, 15 bp, Homo sapiens
gaaatctcaaaggct

SEQ ID NO: 1842156 - DNA, 15 bp, Homo sapiens
aaatctcaaaggctg

SEQ ID NO: 1842157 - DNA, 15 bp, Homo sapiens
aatctcaaaggctga

SEQ ID NO: 1842158 - DNA, 15 bp, Homo sapiens
atctcaaaggctgag

SEQ ID NO: 1842159 - DNA, 15 bp, Homo sapiens
tctcaaaggctgagc

SEQ ID NO: 1842160 - DNA, 15 bp, Homo sapiens
ctcaaaggctgagca

SEQ ID NO: 1842161 - DNA, 15 bp, Homo sapiens
tcaaaggctgagcac

SEQ ID NO: 1842162 - DNA, 15 bp, Homo sapiens
caaaggctgagcaca

SEQ ID NO: 1842163 - DNA, 15 bp, Homo sapiens
aaaggctgagcacag

SEQ ID NO: 1842164 - DNA, 15 bp, Homo sapiens
aaggctgagcacaga

SEQ ID NO: 1842165 - DNA, 15 bp, Homo sapiens
aggctgagcacagag

SEQ ID NO: 1842166 - DNA, 15 bp, Homo sapiens
ggctgagcacagagc

SEQ ID NO: 1842167 - DNA, 15 bp, Homo sapiens
gctgagcacagagcg

SEQ ID NO: 1842168 - DNA, 15 bp, Homo sapiens
ctgagcacagagcgc

SEQ ID NO: 1842169 - DNA, 15 bp, Homo sapiens
tgagcacagagcgcc

SEQ ID NO: 1842170 - DNA, 15 bp, Homo sapiens
gagcacagagcgccc

SEQ ID NO: 1842171 - DNA, 15 bp, Homo sapiens
agcacagagcgccca

SEQ ID NO: 1842172 - DNA, 15 bp, Homo sapiens
gcacagagcgcccac

SEQ ID NO: 1842173 - DNA, 15 bp, Homo sapiens
cacagagcgcccaca

SEQ ID NO: 1842174 - DNA, 15 bp, Homo sapiens
acagagcgcccacag

SEQ ID NO: 1842175 - DNA, 15 bp, Homo sapiens
cagagcgcccacagg

SEQ ID NO: 1842176 - DNA, 15 bp, Homo sapiens
agagcgcccacaggt

SEQ ID NO: 1842177 - DNA, 15 bp, Homo sapiens
gagcgcccacaggtg

SEQ ID NO: 1842178 - DNA, 15 bp, Homo sapiens
agcgcccacaggtgc

SEQ ID NO: 1842179 - DNA, 15 bp, Homo sapiens
gcgcccacaggtgca

SEQ ID NO: 1842180 - DNA, 15 bp, Homo sapiens
cgcccacaggtgcaa

SEQ ID NO: 1842181 - DNA, 15 bp, Homo sapiens
gcccacaggtgcaag

SEQ ID NO: 1842182 - DNA, 15 bp, Homo sapiens
cccacaggtgcaagg

SEQ ID NO: 1842183 - DNA, 15 bp, Homo sapiens
ccacaggtgcaagga

SEQ ID NO: 1842184 - DNA, 15 bp, Homo sapiens
cacaggtgcaaggag

SEQ ID NO: 1842185 - DNA, 15 bp, Homo sapiens
acaggtgcaaggaga

SEQ ID NO: 1842186 - DNA, 15 bp, Homo sapiens
caggtgcaaggagaa

SEQ ID NO: 1842187 - DNA, 15 bp, Homo sapiens
aggtgcaaggagaaa

SEQ ID NO: 1842188 - DNA, 15 bp, Homo sapiens
ggtgcaaggagaaag

SEQ ID NO: 1842189 - DNA, 15 bp, Homo sapiens
gtgcaaggagaaagt

SEQ ID NO: 1842190 - DNA, 15 bp, Homo sapiens
tgcaaggagaaagta

SEQ ID NO: 1842191 - DNA, 15 bp, Homo sapiens
gcaaggagaaagtac

SEQ ID NO: 1842192 - DNA, 15 bp, Homo sapiens
caaggagaaagtaca

SEQ ID NO: 1842193 - DNA, 15 bp, Homo sapiens
aaggagaaagtacag

SEQ ID NO: 1842194 - DNA, 15 bp, Homo sapiens
aggagaaagtacagg

SEQ ID NO: 1842195 - DNA, 15 bp, Homo sapiens
ggagaaagtacaggg

SEQ ID NO: 1842196 - DNA, 15 bp, Homo sapiens
gagaaagtacagggc

SEQ ID NO: 1842197 - DNA, 15 bp, Homo sapiens
agaaagtacagggcc

SEQ ID NO: 1842198 - DNA, 15 bp, Homo sapiens
gaaagtacagggcca

SEQ ID NO: 1842199 - DNA, 15 bp, Homo sapiens
aaagtacagggccag

SEQ ID NO: 1842200 - DNA, 15 bp, Homo sapiens
aagtacagggccagg

SEQ ID NO: 1842201 - DNA, 15 bp, Homo sapiens
agtacagggccaggg

SEQ ID NO: 1842202 - DNA, 15 bp, Homo sapiens
gtacagggccagggc

SEQ ID NO: 1842203 - DNA, 15 bp, Homo sapiens
tacagggccagggcc

SEQ ID NO: 1842204 - DNA, 15 bp, Homo sapiens
acagggccagggcca

SEQ ID NO: 1842205 - DNA, 15 bp, Homo sapiens
cagggccagggccag

SEQ ID NO: 1842206 - DNA, 15 bp, Homo sapiens
agggccagggccaga

SEQ ID NO: 1842207 - DNA, 15 bp, Homo sapiens
ggccagggccagaga

SEQ ID NO: 1842208 - DNA, 15 bp, Homo sapiens
gccagggccagagat

SEQ ID NO: 1842209 - DNA, 15 bp, Homo sapiens
ccagggccagagatt

SEQ ID NO: 1842210 - DNA, 15 bp, Homo sapiens
cagggccagagattt

SEQ ID NO: 1842211 - DNA, 15 bp, Homo sapiens
agggccagagatttc

SEQ ID NO: 1842212 - DNA, 15 bp, Homo sapiens
gggccagagatttcc

SEQ ID NO: 1842213 - DNA, 15 bp, Homo sapiens
ggccagagatttcct

SEQ ID NO: 1842214 - DNA, 15 bp, Homo sapiens
gccagagatttcctt

SEQ ID NO: 1842215 - DNA, 15 bp, Homo sapiens
ccagagatttccttt

SEQ ID NO: 1842216 - DNA, 15 bp, Homo sapiens
cagagatttcctttc

SEQ ID NO: 1842217 - DNA, 15 bp, Homo sapiens
agagatttcctttct

SEQ ID NO: 1842218 - DNA, 15 bp, Homo sapiens
gagatttcctttctc

SEQ ID NO: 1842219 - DNA, 15 bp, Homo sapiens
tttcctttctcttgt

SEQ ID NO: 1842220 - DNA, 15 bp, Homo sapiens
ttcctttctcttgtt

SEQ ID NO: 1842221 - DNA, 15 bp, Homo sapiens
tcctttctcttgttc

SEQ ID NO: 1842222 - DNA, 15 bp, Homo sapiens
cctttctcttgttcc

SEQ ID NO: 1842223 - DNA, 15 bp, Homo sapiens
ctttctcttgttcct

SEQ ID NO: 1842224 - DNA, 15 bp, Homo sapiens
tttctcttgttcctc

SEQ ID NO: 1842225 - DNA, 15 bp, Homo sapiens
ttctcttgttcctca

SEQ ID NO: 1842226 - DNA, 15 bp, Homo sapiens
tctcttgttcctcag

SEQ ID NO: 1842227 - DNA, 15 bp, Homo sapiens
ctcttgttcctcagc

SEQ ID NO: 1842228 - DNA, 15 bp, Homo sapiens
tcttgttcctcagct

SEQ ID NO: 1842229 - DNA, 15 bp, Homo sapiens
cttgttcctcagctt

SEQ ID NO: 1842230 - DNA, 15 bp, Homo sapiens
ttgttcctcagctta

SEQ ID NO: 1842231 - DNA, 15 bp, Homo sapiens
tgttcctcagcttat

SEQ ID NO: 1842232 - DNA, 15 bp, Homo sapiens
gttcctcagcttatt

SEQ ID NO: 1842233 - DNA, 15 bp, Homo sapiens
ttcctcagcttattc

SEQ ID NO: 1842234 - DNA, 15 bp, Homo sapiens
tcctcagcttattct

SEQ ID NO: 1842235 - DNA, 15 bp, Homo sapiens
cctcagcttattctt

SEQ ID NO: 1842236 - DNA, 15 bp, Homo sapiens
ctcagcttattctta

SEQ ID NO: 1842237 - DNA, 15 bp, Homo sapiens
tcagcttattcttac

SEQ ID NO: 1842238 - DNA, 15 bp, Homo sapiens
cagcttattcttacc

SEQ ID NO: 1842239 - DNA, 15 bp, Homo sapiens
agcttattcttaccc

SEQ ID NO: 1842240 - DNA, 15 bp, Homo sapiens
gcttattcttaccct

SEQ ID NO: 1842241 - DNA, 15 bp, Homo sapiens
cttattcttacccta

SEQ ID NO: 1842242 - DNA, 15 bp, Homo sapiens
ttattcttaccctat

SEQ ID NO: 1842243 - DNA, 15 bp, Homo sapiens
tattcttaccctatt

SEQ ID NO: 1842244 - DNA, 15 bp, Homo sapiens
attcttaccctattc

SEQ ID NO: 1842245 - DNA, 15 bp, Homo sapiens
ttcttaccctattcc

SEQ ID NO: 1842246 - DNA, 15 bp, Homo sapiens
tcttaccctattcca

SEQ ID NO: 1842247 - DNA, 15 bp, Homo sapiens
cttaccctattccac

SEQ ID NO: 1842248 - DNA, 15 bp, Homo sapiens
ttaccctattccacc

SEQ ID NO: 1842249 - DNA, 15 bp, Homo sapiens
taccctattccaccc

SEQ ID NO: 1842250 - DNA, 15 bp, Homo sapiens
accctattccaccca

SEQ ID NO: 1842251 - DNA, 15 bp, Homo sapiens
ccctattccacccac

SEQ ID NO: 1842252 - DNA, 15 bp, Homo sapiens
cctattccacccacc

SEQ ID NO: 1842253 - DNA, 15 bp, Homo sapiens
ctattccacccaccc

SEQ ID NO: 1842254 - DNA, 15 bp, Homo sapiens
tattccacccaccct

SEQ ID NO: 1842255 - DNA, 15 bp, Homo sapiens
attccacccaccctg

SEQ ID NO: 1842256 - DNA, 15 bp, Homo sapiens
ttccacccaccctgc

SEQ ID NO: 1842257 - DNA, 15 bp, Homo sapiens
tccacccaccctgcc

SEQ ID NO: 1842258 - DNA, 15 bp, Homo sapiens
ccacccaccctgcca

SEQ ID NO: 1842259 - DNA, 15 bp, Homo sapiens
cacccaccctgccac

SEQ ID NO: 1842260 - DNA, 15 bp, Homo sapiens
acccaccctgccact

SEQ ID NO: 1842261 - DNA, 15 bp, Homo sapiens
cccaccctgccactg

SEQ ID NO: 1842262 - DNA, 15 bp, Homo sapiens
ccaccctgccactgc

SEQ ID NO: 1842263 - DNA, 15 bp, Homo sapiens
caccctgccactgcc

SEQ ID NO: 1842264 - DNA, 15 bp, Homo sapiens
accctgccactgcca

SEQ ID NO: 1842265 - DNA, 15 bp, Homo sapiens
ccctgccactgccag

SEQ ID NO: 1842266 - DNA, 15 bp, Homo sapiens
cctgccactgccagg

SEQ ID NO: 1842267 - DNA, 15 bp, Homo sapiens
ctgccactgccaggt

SEQ ID NO: 1842268 - DNA, 15 bp, Homo sapiens
tgccactgccaggtg

SEQ ID NO: 1842269 - DNA, 15 bp, Homo sapiens
gccactgccaggtgc

SEQ ID NO: 1842270 - DNA, 15 bp, Homo sapiens
ccactgccaggtgct

SEQ ID NO: 1842271 - DNA, 15 bp, Homo sapiens
cactgccaggtgctc

SEQ ID NO: 1842272 - DNA, 15 bp, Homo sapiens
actgccaggtgctca

SEQ ID NO: 1842273 - DNA, 15 bp, Homo sapiens
ctgccaggtgctcag

SEQ ID NO: 1842274 - DNA, 15 bp, Homo sapiens
tgccaggtgctcagc

SEQ ID NO: 1842275 - DNA, 15 bp, Homo sapiens
gccaggtgctcagcg

SEQ ID NO: 1842276 - DNA, 15 bp, Homo sapiens
ccaggtgctcagcga

SEQ ID NO: 1842277 - DNA, 15 bp, Homo sapiens
caggtgctcagcgag

SEQ ID NO: 1842278 - DNA, 15 bp, Homo sapiens
aggtgctcagcgagt

SEQ ID NO: 1842279 - DNA, 15 bp, Homo sapiens
ggtgctcagcgagtc

SEQ ID NO: 1842280 - DNA, 15 bp, Homo sapiens
gtgctcagcgagtct

SEQ ID NO: 1842281 - DNA, 15 bp, Homo sapiens
tgctcagcgagtctt

SEQ ID NO: 1842282 - DNA, 15 bp, Homo sapiens
gctcagcgagtcttt

SEQ ID NO: 1842283 - DNA, 15 bp, Homo sapiens
ctcagcgagtcttta

SEQ ID NO: 1842284 - DNA, 15 bp, Homo sapiens
tcagcgagtctttat

SEQ ID NO: 1842285 - DNA, 15 bp, Homo sapiens
cagcgagtctttatt

SEQ ID NO: 1842286 - DNA, 15 bp, Homo sapiens
agcgagtctttattg

SEQ ID NO: 1842287 - DNA, 15 bp, Homo sapiens
gcgagtctttattga

SEQ ID NO: 1842288 - DNA, 15 bp, Homo sapiens
cgagtctttattgaa

SEQ ID NO: 1842289 - DNA, 15 bp, Homo sapiens
gagtctttattgaaa

SEQ ID NO: 1842290 - DNA, 15 bp, Homo sapiens
agtctttattgaaag

SEQ ID NO: 1842291 - DNA, 15 bp, Homo sapiens
gtctttattgaaaga

SEQ ID NO: 1842292 - DNA, 15 bp, Homo sapiens
tctttattgaaagag

SEQ ID NO: 1842293 - DNA, 15 bp, Homo sapiens
ctttattgaaagaga

SEQ ID NO: 1842294 - DNA, 15 bp, Homo sapiens
tttattgaaagagag

SEQ ID NO: 1842295 - DNA, 15 bp, Homo sapiens
ttattgaaagagaga

SEQ ID NO: 1842296 - DNA, 15 bp, Homo sapiens
tattgaaagagagat

SEQ ID NO: 1842297 - DNA, 15 bp, Homo sapiens
attgaaagagagatt

SEQ ID NO: 1842298 - DNA, 15 bp, Homo sapiens
ttgaaagagagatta

SEQ ID NO: 1842299 - DNA, 15 bp, Homo sapiens
tgaaagagagattat

SEQ ID NO: 1842300 - DNA, 15 bp, Homo sapiens
gaaagagagattatt

SEQ ID NO: 1842301 - DNA, 15 bp, Homo sapiens
aaagagagattatta

SEQ ID NO: 1842302 - DNA, 15 bp, Homo sapiens
aagagagattattaa

SEQ ID NO: 1842303 - DNA, 15 bp, Homo sapiens
agagagattattaat

SEQ ID NO: 1842304 - DNA, 15 bp, Homo sapiens
gagagattattaata

SEQ ID NO: 1842305 - DNA, 15 bp, Homo sapiens
agagattattaatat

SEQ ID NO: 1842306 - DNA, 15 bp, Homo sapiens
gagattattaatatg

SEQ ID NO: 1842307 - DNA, 15 bp, Homo sapiens
agattattaatatgg

SEQ ID NO: 1842308 - DNA, 15 bp, Homo sapiens
gattattaatatggt

SEQ ID NO: 1842309 - DNA, 15 bp, Homo sapiens
attattaatatggtg

SEQ ID NO: 1842310 - DNA, 15 bp, Homo sapiens
ttattaatatggtga

SEQ ID NO: 1842311 - DNA, 15 bp, Homo sapiens
tattaatatggtgaa

SEQ ID NO: 1842312 - DNA, 15 bp, Homo sapiens
attaatatggtgaaa

SEQ ID NO: 1842313 - DNA, 15 bp, Homo sapiens
ttaatatggtgaaat

SEQ ID NO: 1842314 - DNA, 15 bp, Homo sapiens
taatatggtgaaatg

SEQ ID NO: 1842315 - DNA, 15 bp, Homo sapiens
aatatggtgaaatgt

SEQ ID NO: 1842316 - DNA, 15 bp, Homo sapiens
atatggtgaaatgtc

SEQ ID NO: 1842317 - DNA, 15 bp, Homo sapiens
tatggtgaaatgtct

SEQ ID NO: 1842318 - DNA, 15 bp, Homo sapiens
atggtgaaatgtctg

SEQ ID NO: 1842319 - DNA, 15 bp, Homo sapiens
tggtgaaatgtctga

SEQ ID NO: 1842320 - DNA, 15 bp, Homo sapiens
ggtgaaatgtctgag

SEQ ID NO: 1842321 - DNA, 15 bp, Homo sapiens
gtgaaatgtctgaga

SEQ ID NO: 1842322 - DNA, 15 bp, Homo sapiens
tgaaatgtctgagat

SEQ ID NO: 1842323 - DNA, 15 bp, Homo sapiens
gaaatgtctgagatg

SEQ ID NO: 1842324 - DNA, 15 bp, Homo sapiens
aaatgtctgagatgg

SEQ ID NO: 1842325 - DNA, 15 bp, Homo sapiens
aatgtctgagatggt

SEQ ID NO: 1842326 - DNA, 15 bp, Homo sapiens
atgtctgagatggtt

SEQ ID NO: 1842327 - DNA, 15 bp, Homo sapiens
tgtctgagatggttc

SEQ ID NO: 1842328 - DNA, 15 bp, Homo sapiens
gtctgagatggttct

SEQ ID NO: 1842329 - DNA, 15 bp, Homo sapiens
tctgagatggttctc

SEQ ID NO: 1842330 - DNA, 15 bp, Homo sapiens
ctgagatggttctct

SEQ ID NO: 1842331 - DNA, 15 bp, Homo sapiens
tgagatggttctctc

SEQ ID NO: 1842332 - DNA, 15 bp, Homo sapiens
gagatggttctctct

SEQ ID NO: 1842333 - DNA, 15 bp, Homo sapiens
agatggttctctctc

SEQ ID NO: 1842334 - DNA, 15 bp, Homo sapiens
gatggttctctctcc

SEQ ID NO: 1842335 - DNA, 15 bp, Homo sapiens
atggttctctctccg

SEQ ID NO: 1842336 - DNA, 15 bp, Homo sapiens
tggttctctctccgc

SEQ ID NO: 1842337 - DNA, 15 bp, Homo sapiens
ggttctctctccgca

SEQ ID NO: 1842338 - DNA, 15 bp, Homo sapiens
gttctctctccgcat

SEQ ID NO: 1842339 - DNA, 15 bp, Homo sapiens
ttctctctccgcata

SEQ ID NO: 1842340 - DNA, 15 bp, Homo sapiens
tctctctccgcatac

SEQ ID NO: 1842341 - DNA, 15 bp, Homo sapiens
ctctctccgcatacc

SEQ ID NO: 1842342 - DNA, 15 bp, Homo sapiens
tctctccgcataccc

SEQ ID NO: 1842343 - DNA, 15 bp, Homo sapiens
ctctccgcataccca

SEQ ID NO: 1842344 - DNA, 15 bp, Homo sapiens
tctccgcatacccag

SEQ ID NO: 1842345 - DNA, 15 bp, Homo sapiens
ctccgcatacccagt

SEQ ID NO: 1842346 - DNA, 15 bp, Homo sapiens
tccgcatacccagta

SEQ ID NO: 1842347 - DNA, 15 bp, Homo sapiens
ccgcatacccagtaa

SEQ ID NO: 1842348 - DNA, 15 bp, Homo sapiens
cgcatacccagtaat

SEQ ID NO: 1842349 - DNA, 15 bp, Homo sapiens
gcatacccagtaata

SEQ ID NO: 1842350 - DNA, 15 bp, Homo sapiens
catacccagtaatac

SEQ ID NO: 1842351 - DNA, 15 bp, Homo sapiens
atacccagtaataca

SEQ ID NO: 1842352 - DNA, 15 bp, Homo sapiens
tacccagtaatacag

SEQ ID NO: 1842353 - DNA, 15 bp, Homo sapiens
acccagtaatacagg

SEQ ID NO: 1842354 - DNA, 15 bp, Homo sapiens
cccagtaatacaggg

SEQ ID NO: 1842355 - DNA, 15 bp, Homo sapiens
ccagtaatacagggt

SEQ ID NO: 1842356 - DNA, 15 bp, Homo sapiens
cagtaatacagggtc

SEQ ID NO: 1842357 - DNA, 15 bp, Homo sapiens
agtaatacagggtcc

SEQ ID NO: 1842358 - DNA, 15 bp, Homo sapiens
gtaatacagggtccc

SEQ ID NO: 1842359 - DNA, 15 bp, Homo sapiens
taatacagggtccct

SEQ ID NO: 1842360 - DNA, 15 bp, Homo sapiens
aatacagggtccctt

SEQ ID NO: 1842361 - DNA, 15 bp, Homo sapiens
atacagggtcccttt

SEQ ID NO: 1842362 - DNA, 15 bp, Homo sapiens
tacagggtccctttg

SEQ ID NO: 1842363 - DNA, 15 bp, Homo sapiens
acagggtccctttgg

SEQ ID NO: 1842364 - DNA, 15 bp, Homo sapiens
cagggtccctttggc

SEQ ID NO: 1842365 - DNA, 15 bp, Homo sapiens
agggtccctttggct

SEQ ID NO: 1842366 - DNA, 15 bp, Homo sapiens
gggtccctttggctt

SEQ ID NO: 1842367 - DNA, 15 bp, Homo sapiens
ggtccctttggcttg

SEQ ID NO: 1842368 - DNA, 15 bp, Homo sapiens
gtccctttggcttgt

SEQ ID NO: 1842369 - DNA, 15 bp, Homo sapiens
tccctttggcttgtg

SEQ ID NO: 1842370 - DNA, 15 bp, Homo sapiens
ccctttggcttgtgg

SEQ ID NO: 1842371 - DNA, 15 bp, Homo sapiens
cctttggcttgtggg

SEQ ID NO: 1842372 - DNA, 15 bp, Homo sapiens
ctttggcttgtggga

SEQ ID NO: 1842373 - DNA, 15 bp, Homo sapiens
tttggcttgtgggag

SEQ ID NO: 1842374 - DNA, 15 bp, Homo sapiens
ttggcttgtgggagt

SEQ ID NO: 1842375 - DNA, 15 bp, Homo sapiens
tggcttgtgggagtc

SEQ ID NO: 1842376 - DNA, 15 bp, Homo sapiens
ggcttgtgggagtca

SEQ ID NO: 1842377 - DNA, 15 bp, Homo sapiens
gcttgtgggagtcac

SEQ ID NO: 1842378 - DNA, 15 bp, Homo sapiens
cttgtgggagtcaca

SEQ ID NO: 1842379 - DNA, 15 bp, Homo sapiens
ttgtgggagtcacat

SEQ ID NO: 1842380 - DNA, 15 bp, Homo sapiens
tgtgggagtcacatg

SEQ ID NO: 1842381 - DNA, 15 bp, Homo sapiens
gtgggagtcacatgt

SEQ ID NO: 1842382 - DNA, 15 bp, Homo sapiens
tgggagtcacatgtg

SEQ ID NO: 1842383 - DNA, 15 bp, Homo sapiens
gggagtcacatgtgg

SEQ ID NO: 1842384 - DNA, 15 bp, Homo sapiens
ggagtcacatgtggc

SEQ ID NO: 1842385 - DNA, 15 bp, Homo sapiens
gagtcacatgtggcc

SEQ ID NO: 1842386 - DNA, 15 bp, Homo sapiens
agtcacatgtggcca

SEQ ID NO: 1842387 - DNA, 15 bp, Homo sapiens
gtcacatgtggccat

SEQ ID NO: 1842388 - DNA, 15 bp, Homo sapiens
tcacatgtggccatt

SEQ ID NO: 1842389 - DNA, 15 bp, Homo sapiens
cacatgtggccattt

SEQ ID NO: 1842390 - DNA, 15 bp, Homo sapiens
acatgtggccatttt

SEQ ID NO: 1842391 - DNA, 15 bp, Homo sapiens
catgtggccattttc

SEQ ID NO: 1842392 - DNA, 15 bp, Homo sapiens
atgtggccattttca

SEQ ID NO: 1842393 - DNA, 15 bp, Homo sapiens
tgtggccattttcag

SEQ ID NO: 1842394 - DNA, 15 bp, Homo sapiens
gtggccattttcagt

SEQ ID NO: 1842395 - DNA, 15 bp, Homo sapiens
tggccattttcagta

SEQ ID NO: 1842396 - DNA, 15 bp, Homo sapiens
ggccattttcagtag

SEQ ID NO: 1842397 - DNA, 15 bp, Homo sapiens
gccattttcagtagt

SEQ ID NO: 1842398 - DNA, 15 bp, Homo sapiens
ccattttcagtagtt

SEQ ID NO: 1842399 - DNA, 15 bp, Homo sapiens
cattttcagtagttg

SEQ ID NO: 1842400 - DNA, 15 bp, Homo sapiens
attttcagtagttgg

SEQ ID NO: 1842401 - DNA, 15 bp, Homo sapiens
ttttcagtagttggg

SEQ ID NO: 1842402 - DNA, 15 bp, Homo sapiens
tttcagtagttggga

SEQ ID NO: 1842403 - DNA, 15 bp, Homo sapiens
ttcagtagttgggaa

SEQ ID NO: 1842404 - DNA, 15 bp, Homo sapiens
tcagtagttgggaag

SEQ ID NO: 1842405 - DNA, 15 bp, Homo sapiens
cagtagttgggaagc

SEQ ID NO: 1842406 - DNA, 15 bp, Homo sapiens
agtagttgggaagcc

SEQ ID NO: 1842407 - DNA, 15 bp, Homo sapiens
gtagttgggaagcct

SEQ ID NO: 1842408 - DNA, 15 bp, Homo sapiens
tagttgggaagcctg

SEQ ID NO: 1842409 - DNA, 15 bp, Homo sapiens
agttgggaagcctgg

SEQ ID NO: 1842410 - DNA, 15 bp, Homo sapiens
gttgggaagcctggg

SEQ ID NO: 1842411 - DNA, 15 bp, Homo sapiens
ttgggaagcctgggg

SEQ ID NO: 1842412 - DNA, 15 bp, Homo sapiens
tgggaagcctggggg

SEQ ID NO: 1842413 - DNA, 15 bp, Homo sapiens
gggaagcctgggggc

SEQ ID NO: 1842414 - DNA, 15 bp, Homo sapiens
ggaagcctgggggcc

SEQ ID NO: 1842415 - DNA, 15 bp, Homo sapiens
gaagcctgggggcca

SEQ ID NO: 1842416 - DNA, 15 bp, Homo sapiens
aagcctgggggccag

SEQ ID NO: 1842417 - DNA, 15 bp, Homo sapiens
agcctgggggccagc

SEQ ID NO: 1842418 - DNA, 15 bp, Homo sapiens
gcctgggggccagct

SEQ ID NO: 1842419 - DNA, 15 bp, Homo sapiens
cctgggggccagctg

SEQ ID NO: 1842420 - DNA, 15 bp, Homo sapiens
ctgggggccagctgg

SEQ ID NO: 1842421 - DNA, 15 bp, Homo sapiens
tgggggccagctggg

SEQ ID NO: 1842422 - DNA, 15 bp, Homo sapiens
gggggccagctggga

SEQ ID NO: 1842423 - DNA, 15 bp, Homo sapiens
ggggccagctgggag

SEQ ID NO: 1842424 - DNA, 15 bp, Homo sapiens
gggccagctgggagt

SEQ ID NO: 1842425 - DNA, 15 bp, Homo sapiens
ggccagctgggagtt

SEQ ID NO: 1842426 - DNA, 15 bp, Homo sapiens
gccagctgggagttg

SEQ ID NO: 1842427 - DNA, 15 bp, Homo sapiens
ccagctgggagttgt

SEQ ID NO: 1842428 - DNA, 15 bp, Homo sapiens
cagctgggagttgtc

SEQ ID NO: 1842429 - DNA, 15 bp, Homo sapiens
agctgggagttgtca

SEQ ID NO: 1842430 - DNA, 15 bp, Homo sapiens
gctgggagttgtcac

SEQ ID NO: 1842431 - DNA, 15 bp, Homo sapiens
ctgggagttgtcact

SEQ ID NO: 1842432 - DNA, 15 bp, Homo sapiens
tgggagttgtcactg

SEQ ID NO: 1842433 - DNA, 15 bp, Homo sapiens
gggagttgtcactgc

SEQ ID NO: 1842434 - DNA, 15 bp, Homo sapiens
ggagttgtcactgcg

SEQ ID NO: 1842435 - DNA, 15 bp, Homo sapiens
gagttgtcactgcgt

SEQ ID NO: 1842436 - DNA, 15 bp, Homo sapiens
agttgtcactgcgtt

SEQ ID NO: 1842437 - DNA, 15 bp, Homo sapiens
gttgtcactgcgttg

SEQ ID NO: 1842438 - DNA, 15 bp, Homo sapiens
ttgtcactgcgttgg

SEQ ID NO: 1842439 - DNA, 15 bp, Homo sapiens
tgtcactgcgttggg

SEQ ID NO: 1842440 - DNA, 15 bp, Homo sapiens
gtcactgcgttggga

SEQ ID NO: 1842441 - DNA, 15 bp, Homo sapiens
tcactgcgttgggaa

SEQ ID NO: 1842442 - DNA, 15 bp, Homo sapiens
cactgcgttgggaat

SEQ ID NO: 1842443 - DNA, 15 bp, Homo sapiens
actgcgttgggaatc

SEQ ID NO: 1842444 - DNA, 15 bp, Homo sapiens
ctgcgttgggaatct

SEQ ID NO: 1842445 - DNA, 15 bp, Homo sapiens
tgcgttgggaatctg

SEQ ID NO: 1842446 - DNA, 15 bp, Homo sapiens
gcgttgggaatctgc

SEQ ID NO: 1842447 - DNA, 15 bp, Homo sapiens
cgttgggaatctgcc

SEQ ID NO: 1842448 - DNA, 15 bp, Homo sapiens
gttgggaatctgcct

SEQ ID NO: 1842449 - DNA, 15 bp, Homo sapiens
ttgggaatctgcctc

SEQ ID NO: 1842450 - DNA, 15 bp, Homo sapiens
tgggaatctgcctcc

SEQ ID NO: 1842451 - DNA, 15 bp, Homo sapiens
gggaatctgcctcct

SEQ ID NO: 1842452 - DNA, 15 bp, Homo sapiens
ggaatctgcctcctg

SEQ ID NO: 1842453 - DNA, 15 bp, Homo sapiens
gaatctgcctcctgg

SEQ ID NO: 1842454 - DNA, 15 bp, Homo sapiens
aatctgcctcctggg

SEQ ID NO: 1842455 - DNA, 15 bp, Homo sapiens
atctgcctcctgggc

SEQ ID NO: 1842456 - DNA, 15 bp, Homo sapiens
tctgcctcctgggcc

SEQ ID NO: 1842457 - DNA, 15 bp, Homo sapiens
ctgcctcctgggcct

SEQ ID NO: 1842458 - DNA, 15 bp, Homo sapiens
tgcctcctgggcctt

SEQ ID NO: 1842459 - DNA, 15 bp, Homo sapiens
gcctcctgggccttt

SEQ ID NO: 1842460 - DNA, 15 bp, Homo sapiens
cctcctgggcctttt

SEQ ID NO: 1842461 - DNA, 15 bp, Homo sapiens
ctcctgggccttttt

SEQ ID NO: 1842462 - DNA, 15 bp, Homo sapiens
tcctgggccttttta

SEQ ID NO: 1842463 - DNA, 15 bp, Homo sapiens
cctgggcctttttat

SEQ ID NO: 1842464 - DNA, 15 bp, Homo sapiens
ctgggcctttttatt

SEQ ID NO: 1842465 - DNA, 15 bp, Homo sapiens
tgggcctttttatta

SEQ ID NO: 1842466 - DNA, 15 bp, Homo sapiens
gggcctttttattaa

SEQ ID NO: 1842467 - DNA, 15 bp, Homo sapiens
ggcctttttattaag

SEQ ID NO: 1842468 - DNA, 15 bp, Homo sapiens
gcctttttattaagg

SEQ ID NO: 1842469 - DNA, 15 bp, Homo sapiens
cctttttattaaggc

SEQ ID NO: 1842470 - DNA, 15 bp, Homo sapiens
ctttttattaaggcg

SEQ ID NO: 1842471 - DNA, 15 bp, Homo sapiens
tttttattaaggcgt

SEQ ID NO: 1842472 - DNA, 15 bp, Homo sapiens
ttttattaaggcgtg

SEQ ID NO: 1842473 - DNA, 15 bp, Homo sapiens
tttattaaggcgtgg

SEQ ID NO: 1842474 - DNA, 15 bp, Homo sapiens
ttattaaggcgtgga

SEQ ID NO: 1842475 - DNA, 15 bp, Homo sapiens
tattaaggcgtggag

SEQ ID NO: 1842476 - DNA, 15 bp, Homo sapiens
attaaggcgtggagt

SEQ ID NO: 1842477 - DNA, 15 bp, Homo sapiens
ttaaggcgtggagtt

SEQ ID NO: 1842478 - DNA, 15 bp, Homo sapiens
taaggcgtggagttg

SEQ ID NO: 1842479 - DNA, 15 bp, Homo sapiens
aaggcgtggagttgt

SEQ ID NO: 1842480 - DNA, 15 bp, Homo sapiens
aggcgtggagttgtg

SEQ ID NO: 1842481 - DNA, 15 bp, Homo sapiens
ggcgtggagttgtgt

SEQ ID NO: 1842482 - DNA, 15 bp, Homo sapiens
gcgtggagttgtgtg

SEQ ID NO: 1842483 - DNA, 15 bp, Homo sapiens
cgtggagttgtgtgc

SEQ ID NO: 1842484 - DNA, 15 bp, Homo sapiens
gtggagttgtgtgct

SEQ ID NO: 1842485 - DNA, 15 bp, Homo sapiens
tggagttgtgtgctg

SEQ ID NO: 1842486 - DNA, 15 bp, Homo sapiens
ggagttgtgtgctgt

SEQ ID NO: 1842487 - DNA, 15 bp, Homo sapiens
gagttgtgtgctgtt

SEQ ID NO: 1842488 - DNA, 15 bp, Homo sapiens
agttgtgtgctgttc

SEQ ID NO: 1842489 - DNA, 15 bp, Homo sapiens
gttgtgtgctgttct

SEQ ID NO: 1842490 - DNA, 15 bp, Homo sapiens
ttgtgtgctgttctc

SEQ ID NO: 1842491 - DNA, 15 bp, Homo sapiens
tgtgtgctgttctct

SEQ ID NO: 1842492 - DNA, 15 bp, Homo sapiens
gtgtgctgttctctt

SEQ ID NO: 1842493 - DNA, 15 bp, Homo sapiens
tgtgctgttctctta

SEQ ID NO: 1842494 - DNA, 15 bp, Homo sapiens
gtgctgttctcttac

SEQ ID NO: 1842495 - DNA, 15 bp, Homo sapiens
tgctgttctcttacc

SEQ ID NO: 1842496 - DNA, 15 bp, Homo sapiens
gctgttctcttacct

SEQ ID NO: 1842497 - DNA, 15 bp, Homo sapiens
ctgttctcttacctc

SEQ ID NO: 1842498 - DNA, 15 bp, Homo sapiens
tgttctcttacctct

SEQ ID NO: 1842499 - DNA, 15 bp, Homo sapiens
gttctcttacctctg

SEQ ID NO: 1842500 - DNA, 15 bp, Homo sapiens
ttctcttacctctgg

SEQ ID NO: 1842501 - DNA, 15 bp, Homo sapiens
tctcttacctctggt

SEQ ID NO: 1842502 - DNA, 15 bp, Homo sapiens
ctcttacctctggtc

SEQ ID NO: 1842503 - DNA, 15 bp, Homo sapiens
tcttacctctggtcc

SEQ ID NO: 1842504 - DNA, 15 bp, Homo sapiens
cttacctctggtccc

SEQ ID NO: 1842505 - DNA, 15 bp, Homo sapiens
ttacctctggtccct

SEQ ID NO: 1842506 - DNA, 15 bp, Homo sapiens
tacctctggtccctg

SEQ ID NO: 1842507 - DNA, 15 bp, Homo sapiens
acctctggtccctgc

SEQ ID NO: 1842508 - DNA, 15 bp, Homo sapiens
cctctggtccctgct

SEQ ID NO: 1842509 - DNA, 15 bp, Homo sapiens
ctctggtccctgctt

SEQ ID NO: 1842510 - DNA, 15 bp, Homo sapiens
tctggtccctgcttg

SEQ ID NO: 1842511 - DNA, 15 bp, Homo sapiens
ctggtccctgcttgg

SEQ ID NO: 1842512 - DNA, 15 bp, Homo sapiens
tggtccctgcttgga

SEQ ID NO: 1842513 - DNA, 15 bp, Homo sapiens
ggtccctgcttggag

SEQ ID NO: 1842514 - DNA, 15 bp, Homo sapiens
gtccctgcttggagg

SEQ ID NO: 1842515 - DNA, 15 bp, Homo sapiens
tccctgcttggagga

SEQ ID NO: 1842516 - DNA, 15 bp, Homo sapiens
ccctgcttggaggaa

SEQ ID NO: 1842517 - DNA, 15 bp, Homo sapiens
cctgcttggaggaag

SEQ ID NO: 1842518 - DNA, 15 bp, Homo sapiens
ctgcttggaggaaga

SEQ ID NO: 1842519 - DNA, 15 bp, Homo sapiens
tgcttggaggaagag

SEQ ID NO: 1842520 - DNA, 15 bp, Homo sapiens
gcttggaggaagagg

SEQ ID NO: 1842521 - DNA, 15 bp, Homo sapiens
cttggaggaagaggc

SEQ ID NO: 1842522 - DNA, 15 bp, Homo sapiens
ttggaggaagaggct

SEQ ID NO: 1842523 - DNA, 15 bp, Homo sapiens
tggaggaagaggctg

SEQ ID NO: 1842524 - DNA, 15 bp, Homo sapiens
ggaggaagaggctga

SEQ ID NO: 1842525 - DNA, 15 bp, Homo sapiens
gaggaagaggctgaa

SEQ ID NO: 1842526 - DNA, 15 bp, Homo sapiens
aggaagaggctgaac

SEQ ID NO: 1842527 - DNA, 15 bp, Homo sapiens
ggaagaggctgaact

SEQ ID NO: 1842528 - DNA, 15 bp, Homo sapiens
gaagaggctgaactt

SEQ ID NO: 1842529 - DNA, 15 bp, Homo sapiens
aagaggctgaacttg

SEQ ID NO: 1842530 - DNA, 15 bp, Homo sapiens
agaggctgaacttgt

SEQ ID NO: 1842531 - DNA, 15 bp, Homo sapiens
gaggctgaacttgta

SEQ ID NO: 1842532 - DNA, 15 bp, Homo sapiens
aggctgaacttgtac

SEQ ID NO: 1842533 - DNA, 15 bp, Homo sapiens
ggctgaacttgtacc

SEQ ID NO: 1842534 - DNA, 15 bp, Homo sapiens
gctgaacttgtacca

SEQ ID NO: 1842535 - DNA, 15 bp, Homo sapiens
ctgaacttgtaccac

SEQ ID NO: 1842536 - DNA, 15 bp, Homo sapiens
tgaacttgtaccacc

SEQ ID NO: 1842537 - DNA, 15 bp, Homo sapiens
gaacttgtaccacct

SEQ ID NO: 1842538 - DNA, 15 bp, Homo sapiens
aacttgtaccacctg

SEQ ID NO: 1842539 - DNA, 15 bp, Homo sapiens
acttgtaccacctgg

SEQ ID NO: 1842540 - DNA, 15 bp, Homo sapiens
cttgtaccacctggg

SEQ ID NO: 1842541 - DNA, 15 bp, Homo sapiens
ttgtaccacctgggc

SEQ ID NO: 1842542 - DNA, 15 bp, Homo sapiens
tgtaccacctgggca

SEQ ID NO: 1842543 - DNA, 15 bp, Homo sapiens
gtaccacctgggcaa

SEQ ID NO: 1842544 - DNA, 15 bp, Homo sapiens
taccacctgggcaag

SEQ ID NO: 1842545 - DNA, 15 bp, Homo sapiens
accacctgggcaagc

SEQ ID NO: 1842546 - DNA, 15 bp, Homo sapiens
ccacctgggcaagcc

SEQ ID NO: 1842547 - DNA, 15 bp, Homo sapiens
cacctgggcaagcca

SEQ ID NO: 1842548 - DNA, 15 bp, Homo sapiens
acctgggcaagccag

SEQ ID NO: 1842549 - DNA, 15 bp, Homo sapiens
cctgggcaagccagt

SEQ ID NO: 1842550 - DNA, 15 bp, Homo sapiens
ctgggcaagccagtt

SEQ ID NO: 1842551 - DNA, 15 bp, Homo sapiens
tgggcaagccagttt

SEQ ID NO: 1842552 - DNA, 15 bp, Homo sapiens
gggcaagccagtttg

SEQ ID NO: 1842553 - DNA, 15 bp, Homo sapiens
ggcaagccagtttgc

SEQ ID NO: 1842554 - DNA, 15 bp, Homo sapiens
gcaagccagtttgct

SEQ ID NO: 1842555 - DNA, 15 bp, Homo sapiens
caagccagtttgctg

SEQ ID NO: 1842556 - DNA, 15 bp, Homo sapiens
aagccagtttgctgt

SEQ ID NO: 1842557 - DNA, 15 bp, Homo sapiens
agccagtttgctgtg

SEQ ID NO: 1842558 - DNA, 15 bp, Homo sapiens
gccagtttgctgtga

SEQ ID NO: 1842559 - DNA, 15 bp, Homo sapiens
ccagtttgctgtgac

SEQ ID NO: 1842560 - DNA, 15 bp, Homo sapiens
cagtttgctgtgacc

SEQ ID NO: 1842561 - DNA, 15 bp, Homo sapiens
agtttgctgtgacca

SEQ ID NO: 1842562 - DNA, 15 bp, Homo sapiens
gtttgctgtgaccac

SEQ ID NO: 1842563 - DNA, 15 bp, Homo sapiens
tttgctgtgaccaca

SEQ ID NO: 1842564 - DNA, 15 bp, Homo sapiens
ttgctgtgaccacac

SEQ ID NO: 1842565 - DNA, 15 bp, Homo sapiens
tgctgtgaccacaca

SEQ ID NO: 1842566 - DNA, 15 bp, Homo sapiens
gctgtgaccacacat

SEQ ID NO: 1842567 - DNA, 15 bp, Homo sapiens
ctgtgaccacacatg

SEQ ID NO: 1842568 - DNA, 15 bp, Homo sapiens
tgtgaccacacatgg

SEQ ID NO: 1842569 - DNA, 15 bp, Homo sapiens
gtgaccacacatgga

SEQ ID NO: 1842570 - DNA, 15 bp, Homo sapiens
tgaccacacatggat

SEQ ID NO: 1842571 - DNA, 15 bp, Homo sapiens
gaccacacatggatt

SEQ ID NO: 1842572 - DNA, 15 bp, Homo sapiens
accacacatggatta

SEQ ID NO: 1842573 - DNA, 15 bp, Homo sapiens
ccacacatggattag

SEQ ID NO: 1842574 - DNA, 15 bp, Homo sapiens
cacacatggattagg

SEQ ID NO: 1842575 - DNA, 15 bp, Homo sapiens
acacatggattaggt

SEQ ID NO: 1842576 - DNA, 15 bp, Homo sapiens
cacatggattaggtg

SEQ ID NO: 1842577 - DNA, 15 bp, Homo sapiens
acatggattaggtgc

SEQ ID NO: 1842578 - DNA, 15 bp, Homo sapiens
catggattaggtgcc

SEQ ID NO: 1842579 - DNA, 15 bp, Homo sapiens
atggattaggtgcca

SEQ ID NO: 1842580 - DNA, 15 bp, Homo sapiens
tggattaggtgccag

SEQ ID NO: 1842581 - DNA, 15 bp, Homo sapiens
ggattaggtgccaga

SEQ ID NO: 1842582 - DNA, 15 bp, Homo sapiens
gattaggtgccagat

SEQ ID NO: 1842583 - DNA, 15 bp, Homo sapiens
attaggtgccagatg

SEQ ID NO: 1842584 - DNA, 15 bp, Homo sapiens
ttaggtgccagatga

SEQ ID NO: 1842585 - DNA, 15 bp, Homo sapiens
taggtgccagatgac

SEQ ID NO: 1842586 - DNA, 15 bp, Homo sapiens
aggtgccagatgacc

SEQ ID NO: 1842587 - DNA, 15 bp, Homo sapiens
ggtgccagatgacca

SEQ ID NO: 1842588 - DNA, 15 bp, Homo sapiens
gtgccagatgaccac

SEQ ID NO: 1842589 - DNA, 15 bp, Homo sapiens
tgccagatgaccacc

SEQ ID NO: 1842590 - DNA, 15 bp, Homo sapiens
gccagatgaccacct

SEQ ID NO: 1842591 - DNA, 15 bp, Homo sapiens
ccagatgaccacctg

SEQ ID NO: 1842592 - DNA, 15 bp, Homo sapiens
cagatgaccacctgg

SEQ ID NO: 1842593 - DNA, 15 bp, Homo sapiens
agatgaccacctggg

SEQ ID NO: 1842594 - DNA, 15 bp, Homo sapiens
gatgaccacctgggg

SEQ ID NO: 1842595 - DNA, 15 bp, Homo sapiens
atgaccacctgggga

SEQ ID NO: 1842596 - DNA, 15 bp, Homo sapiens
tgaccacctggggaa

SEQ ID NO: 1842597 - DNA, 15 bp, Homo sapiens
gaccacctggggaat

SEQ ID NO: 1842598 - DNA, 15 bp, Homo sapiens
accacctggggaatg

SEQ ID NO: 1842599 - DNA, 15 bp, Homo sapiens
ccacctggggaatgt

SEQ ID NO: 1842600 - DNA, 15 bp, Homo sapiens
cacctggggaatgtg

SEQ ID NO: 1842601 - DNA, 15 bp, Homo sapiens
acctggggaatgtgc

SEQ ID NO: 1842602 - DNA, 15 bp, Homo sapiens
cctggggaatgtgcc

SEQ ID NO: 1842603 - DNA, 15 bp, Homo sapiens
ctggggaatgtgcca

SEQ ID NO: 1842604 - DNA, 15 bp, Homo sapiens
tggggaatgtgccag

SEQ ID NO: 1842605 - DNA, 15 bp, Homo sapiens
ggggaatgtgccagt

SEQ ID NO: 1842606 - DNA, 15 bp, Homo sapiens
gggaatgtgccagtc

SEQ ID NO: 1842607 - DNA, 15 bp, Homo sapiens
ggaatgtgccagtca

SEQ ID NO: 1842608 - DNA, 15 bp, Homo sapiens
gaatgtgccagtcag

SEQ ID NO: 1842609 - DNA, 15 bp, Homo sapiens
aatgtgccagtcagg

SEQ ID NO: 1842610 - DNA, 15 bp, Homo sapiens
atgtgccagtcaggc

SEQ ID NO: 1842611 - DNA, 15 bp, Homo sapiens
tgtgccagtcaggca

SEQ ID NO: 1842612 - DNA, 15 bp, Homo sapiens
gtgccagtcaggcag

SEQ ID NO: 1842613 - DNA, 15 bp, Homo sapiens
tgccagtcaggcagc

SEQ ID NO: 1842614 - DNA, 15 bp, Homo sapiens
gccagtcaggcagcc

SEQ ID NO: 1842615 - DNA, 15 bp, Homo sapiens
ccagtcaggcagcca

SEQ ID NO: 1842616 - DNA, 15 bp, Homo sapiens
cagtcaggcagccag

SEQ ID NO: 1842617 - DNA, 15 bp, Homo sapiens
agtcaggcagccagg

SEQ ID NO: 1842618 - DNA, 15 bp, Homo sapiens
gtcaggcagccagga

SEQ ID NO: 1842619 - DNA, 15 bp, Homo sapiens
tcaggcagccaggat

SEQ ID NO: 1842620 - DNA, 15 bp, Homo sapiens
caggcagccaggatg

SEQ ID NO: 1842621 - DNA, 15 bp, Homo sapiens
aggcagccaggatgc

SEQ ID NO: 1842622 - DNA, 15 bp, Homo sapiens
ggcagccaggatgca

SEQ ID NO: 1842623 - DNA, 15 bp, Homo sapiens
gcagccaggatgcaa

SEQ ID NO: 1842624 - DNA, 15 bp, Homo sapiens
cagccaggatgcaaa

SEQ ID NO: 1842625 - DNA, 15 bp, Homo sapiens
agccaggatgcaaag

SEQ ID NO: 1842626 - DNA, 15 bp, Homo sapiens
gccaggatgcaaagt

SEQ ID NO: 1842627 - DNA, 15 bp, Homo sapiens
ccaggatgcaaagtg

SEQ ID NO: 1842628 - DNA, 15 bp, Homo sapiens
caggatgcaaagtga

SEQ ID NO: 1842629 - DNA, 15 bp, Homo sapiens
aggatgcaaagtgat

SEQ ID NO: 1842630 - DNA, 15 bp, Homo sapiens
ggatgcaaagtgatt

SEQ ID NO: 1842631 - DNA, 15 bp, Homo sapiens
gatgcaaagtgattc

SEQ ID NO: 1842632 - DNA, 15 bp, Homo sapiens
atgcaaagtgattcg

SEQ ID NO: 1842633 - DNA, 15 bp, Homo sapiens
tgcaaagtgattcgc

SEQ ID NO: 1842634 - DNA, 15 bp, Homo sapiens
gcaaagtgattcgct

SEQ ID NO: 1842635 - DNA, 15 bp, Homo sapiens
caaagtgattcgctt

SEQ ID NO: 1842636 - DNA, 15 bp, Homo sapiens
aaagtgattcgcttc

SEQ ID NO: 1842637 - DNA, 15 bp, Homo sapiens
aagtgattcgcttcc

SEQ ID NO: 1842638 - DNA, 15 bp, Homo sapiens
agtgattcgcttccc

SEQ ID NO: 1842639 - DNA, 15 bp, Homo sapiens
gtgattcgcttcccc

SEQ ID NO: 1842640 - DNA, 15 bp, Homo sapiens
tgattcgcttccccc

SEQ ID NO: 1842641 - DNA, 15 bp, Homo sapiens
gattcgcttccccct

SEQ ID NO: 1842642 - DNA, 15 bp, Homo sapiens
attcgcttccccctt

SEQ ID NO: 1842643 - DNA, 15 bp, Homo sapiens
ttcgcttcccccttg

SEQ ID NO: 1842644 - DNA, 15 bp, Homo sapiens
tcgcttcccccttgc

SEQ ID NO: 1842645 - DNA, 15 bp, Homo sapiens
cgcttcccccttgcc

SEQ ID NO: 1842646 - DNA, 15 bp, Homo sapiens
gcttcccccttgcca

SEQ ID NO: 1842647 - DNA, 15 bp, Homo sapiens
ttcccccttgccagt

SEQ ID NO: 1842648 - DNA, 15 bp, Homo sapiens
tcccccttgccagta

SEQ ID NO: 1842649 - DNA, 15 bp, Homo sapiens
cccccttgccagtat

SEQ ID NO: 1842650 - DNA, 15 bp, Homo sapiens
ccccttgccagtatt

SEQ ID NO: 1842651 - DNA, 15 bp, Homo sapiens
cccttgccagtattt

SEQ ID NO: 1842652 - DNA, 15 bp, Homo sapiens
ccttgccagtatttt

SEQ ID NO: 1842653 - DNA, 15 bp, Homo sapiens
cttgccagtattttc

SEQ ID NO: 1842654 - DNA, 15 bp, Homo sapiens
ttgccagtattttct

SEQ ID NO: 1842655 - DNA, 15 bp, Homo sapiens
tgccagtattttcta

SEQ ID NO: 1842656 - DNA, 15 bp, Homo sapiens
gccagtattttctag

SEQ ID NO: 1842657 - DNA, 15 bp, Homo sapiens
ccagtattttctagg

SEQ ID NO: 1842658 - DNA, 15 bp, Homo sapiens
cagtattttctaggg

SEQ ID NO: 1842659 - DNA, 15 bp, Homo sapiens
agtattttctagggc

SEQ ID NO: 1842660 - DNA, 15 bp, Homo sapiens
gtattttctagggcg

SEQ ID NO: 1842661 - DNA, 15 bp, Homo sapiens
tattttctagggcgt

SEQ ID NO: 1842662 - DNA, 15 bp, Homo sapiens
attttctagggcgtg

SEQ ID NO: 1842663 - DNA, 15 bp, Homo sapiens
ttttctagggcgtgg

SEQ ID NO: 1842664 - DNA, 15 bp, Homo sapiens
tttctagggcgtggt

SEQ ID NO: 1842665 - DNA, 15 bp, Homo sapiens
ttctagggcgtggtg

SEQ ID NO: 1842666 - DNA, 15 bp, Homo sapiens
tctagggcgtggtgt

SEQ ID NO: 1842667 - DNA, 15 bp, Homo sapiens
ctagggcgtggtgtt

SEQ ID NO: 1842668 - DNA, 15 bp, Homo sapiens
tagggcgtggtgttt

SEQ ID NO: 1842669 - DNA, 15 bp, Homo sapiens
agggcgtggtgtttg

SEQ ID NO: 1842670 - DNA, 15 bp, Homo sapiens
gggcgtggtgtttgc

SEQ ID NO: 1842671 - DNA, 15 bp, Homo sapiens
ggcgtggtgtttgcc

SEQ ID NO: 1842672 - DNA, 15 bp, Homo sapiens
gcgtggtgtttgccc

SEQ ID NO: 1842673 - DNA, 15 bp, Homo sapiens
cgtggtgtttgcccg

SEQ ID NO: 1842674 - DNA, 15 bp, Homo sapiens
gtggtgtttgcccgc

SEQ ID NO: 1842675 - DNA, 15 bp, Homo sapiens
tggtgtttgcccgca

SEQ ID NO: 1842676 - DNA, 15 bp, Homo sapiens
ggtgtttgcccgcat

SEQ ID NO: 1842677 - DNA, 15 bp, Homo sapiens
gtgtttgcccgcatc

SEQ ID NO: 1842678 - DNA, 15 bp, Homo sapiens
tgtttgcccgcatct

SEQ ID NO: 1842679 - DNA, 15 bp, Homo sapiens
gtttgcccgcatctt

SEQ ID NO: 1842680 - DNA, 15 bp, Homo sapiens
tttgcccgcatcttc

SEQ ID NO: 1842681 - DNA, 15 bp, Homo sapiens
ttgcccgcatcttct

SEQ ID NO: 1842682 - DNA, 15 bp, Homo sapiens
tgcccgcatcttctg

SEQ ID NO: 1842683 - DNA, 15 bp, Homo sapiens
gcccgcatcttctgg

SEQ ID NO: 1842684 - DNA, 15 bp, Homo sapiens
cccgcatcttctggt

SEQ ID NO: 1842685 - DNA, 15 bp, Homo sapiens
ccgcatcttctggtg

SEQ ID NO: 1842686 - DNA, 15 bp, Homo sapiens
cgcatcttctggtga

SEQ ID NO: 1842687 - DNA, 15 bp, Homo sapiens
gcatcttctggtgag

SEQ ID NO: 1842688 - DNA, 15 bp, Homo sapiens
catcttctggtgagg

SEQ ID NO: 1842689 - DNA, 15 bp, Homo sapiens
atcttctggtgaggc

SEQ ID NO: 1842690 - DNA, 15 bp, Homo sapiens
tcttctggtgaggcc

SEQ ID NO: 1842691 - DNA, 15 bp, Homo sapiens
cttctggtgaggcct

SEQ ID NO: 1842692 - DNA, 15 bp, Homo sapiens
ttctggtgaggcctg

SEQ ID NO: 1842693 - DNA, 15 bp, Homo sapiens
tctggtgaggcctgg

SEQ ID NO: 1842694 - DNA, 15 bp, Homo sapiens
ctggtgaggcctggc

SEQ ID NO: 1842695 - DNA, 15 bp, Homo sapiens
tggtgaggcctggct

SEQ ID NO: 1842696 - DNA, 15 bp, Homo sapiens
ggtgaggcctggcta

SEQ ID NO: 1842697 - DNA, 15 bp, Homo sapiens
gtgaggcctggctat

SEQ ID NO: 1842698 - DNA, 15 bp, Homo sapiens
tgaggcctggctatc

SEQ ID NO: 1842699 - DNA, 15 bp, Homo sapiens
gaggcctggctatct

SEQ ID NO: 1842700 - DNA, 15 bp, Homo sapiens
aggcctggctatctc

SEQ ID NO: 1842701 - DNA, 15 bp, Homo sapiens
ggcctggctatctct

SEQ ID NO: 1842702 - DNA, 15 bp, Homo sapiens
gcctggctatctctg

SEQ ID NO: 1842703 - DNA, 15 bp, Homo sapiens
cctggctatctctga

SEQ ID NO: 1842704 - DNA, 15 bp, Homo sapiens
ctggctatctctgag

SEQ ID NO: 1842705 - DNA, 15 bp, Homo sapiens
tggctatctctgagg

SEQ ID NO: 1842706 - DNA, 15 bp, Homo sapiens
ggctatctctgaggg

SEQ ID NO: 1842707 - DNA, 15 bp, Homo sapiens
gctatctctgagggg

SEQ ID NO: 1842708 - DNA, 15 bp, Homo sapiens
ctatctctgaggggc

SEQ ID NO: 1842709 - DNA, 15 bp, Homo sapiens
tatctctgaggggca

SEQ ID NO: 1842710 - DNA, 15 bp, Homo sapiens
atctctgaggggcag

SEQ ID NO: 1842711 - DNA, 15 bp, Homo sapiens
tctctgaggggcaga

SEQ ID NO: 1842712 - DNA, 15 bp, Homo sapiens
ctctgaggggcagac

SEQ ID NO: 1842713 - DNA, 15 bp, Homo sapiens
tctgaggggcagacc

SEQ ID NO: 1842714 - DNA, 15 bp, Homo sapiens
ctgaggggcagacca

SEQ ID NO: 1842715 - DNA, 15 bp, Homo sapiens
tgaggggcagaccag

SEQ ID NO: 1842716 - DNA, 15 bp, Homo sapiens
gaggggcagaccagc

SEQ ID NO: 1842717 - DNA, 15 bp, Homo sapiens
aggggcagaccagca

SEQ ID NO: 1842718 - DNA, 15 bp, Homo sapiens
ggggcagaccagcac

SEQ ID NO: 1842719 - DNA, 15 bp, Homo sapiens
gggcagaccagcaca

SEQ ID NO: 1842720 - DNA, 15 bp, Homo sapiens
ggcagaccagcacac

SEQ ID NO: 1842721 - DNA, 15 bp, Homo sapiens
gcagaccagcacacc

SEQ ID NO: 1842722 - DNA, 15 bp, Homo sapiens
cagaccagcacacct

SEQ ID NO: 1842723 - DNA, 15 bp, Homo sapiens
agaccagcacacctg

SEQ ID NO: 1842724 - DNA, 15 bp, Homo sapiens
gaccagcacacctgt

SEQ ID NO: 1842725 - DNA, 15 bp, Homo sapiens
accagcacacctgtg

SEQ ID NO: 1842726 - DNA, 15 bp, Homo sapiens
ccagcacacctgtgg

SEQ ID NO: 1842727 - DNA, 15 bp, Homo sapiens
cagcacacctgtggg

SEQ ID NO: 1842728 - DNA, 15 bp, Homo sapiens
agcacacctgtgggt

SEQ ID NO: 1842729 - DNA, 15 bp, Homo sapiens
gcacacctgtgggtg

SEQ ID NO: 1842730 - DNA, 15 bp, Homo sapiens
cacacctgtgggtgc

SEQ ID NO: 1842731 - DNA, 15 bp, Homo sapiens
acacctgtgggtgca

SEQ ID NO: 1842732 - DNA, 15 bp, Homo sapiens
cacctgtgggtgcag

SEQ ID NO: 1842733 - DNA, 15 bp, Homo sapiens
acctgtgggtgcagc

SEQ ID NO: 1842734 - DNA, 15 bp, Homo sapiens
cctgtgggtgcagca

SEQ ID NO: 1842735 - DNA, 15 bp, Homo sapiens
ctgtgggtgcagcag

SEQ ID NO: 1842736 - DNA, 15 bp, Homo sapiens
tgtgggtgcagcagc

SEQ ID NO: 1842737 - DNA, 15 bp, Homo sapiens
gtgggtgcagcagct

SEQ ID NO: 1842738 - DNA, 15 bp, Homo sapiens
tgggtgcagcagctc

SEQ ID NO: 1842739 - DNA, 15 bp, Homo sapiens
gggtgcagcagctca

SEQ ID NO: 1842740 - DNA, 15 bp, Homo sapiens
ggtgcagcagctcac

SEQ ID NO: 1842741 - DNA, 15 bp, Homo sapiens
gtgcagcagctcaca

SEQ ID NO: 1842742 - DNA, 15 bp, Homo sapiens
tgcagcagctcacag

SEQ ID NO: 1842743 - DNA, 15 bp, Homo sapiens
gcagcagctcacagg

SEQ ID NO: 1842744 - DNA, 15 bp, Homo sapiens
cagcagctcacagga

SEQ ID NO: 1842745 - DNA, 15 bp, Homo sapiens
agcagctcacaggag

SEQ ID NO: 1842746 - DNA, 15 bp, Homo sapiens
gcagctcacaggagt

SEQ ID NO: 1842747 - DNA, 15 bp, Homo sapiens
cagctcacaggagtc

SEQ ID NO: 1842748 - DNA, 15 bp, Homo sapiens
agctcacaggagtct

SEQ ID NO: 1842749 - DNA, 15 bp, Homo sapiens
gctcacaggagtctg

SEQ ID NO: 1842750 - DNA, 15 bp, Homo sapiens
ctcacaggagtctgt

SEQ ID NO: 1842751 - DNA, 15 bp, Homo sapiens
tcacaggagtctgtt

SEQ ID NO: 1842752 - DNA, 15 bp, Homo sapiens
cacaggagtctgttg

SEQ ID NO: 1842753 - DNA, 15 bp, Homo sapiens
acaggagtctgttgg

SEQ ID NO: 1842754 - DNA, 15 bp, Homo sapiens
caggagtctgttggg

SEQ ID NO: 1842755 - DNA, 15 bp, Homo sapiens
aggagtctgttgggc

SEQ ID NO: 1842756 - DNA, 15 bp, Homo sapiens
ggagtctgttgggcg

SEQ ID NO: 1842757 - DNA, 15 bp, Homo sapiens
gagtctgttgggcgg

SEQ ID NO: 1842758 - DNA, 15 bp, Homo sapiens
agtctgttgggcggc

SEQ ID NO: 1842759 - DNA, 15 bp, Homo sapiens
gtctgttgggcggca

SEQ ID NO: 1842760 - DNA, 15 bp, Homo sapiens
tctgttgggcggcac

SEQ ID NO: 1842761 - DNA, 15 bp, Homo sapiens
ctgttgggcggcact

SEQ ID NO: 1842762 - DNA, 15 bp, Homo sapiens
tgttgggcggcactg

SEQ ID NO: 1842763 - DNA, 15 bp, Homo sapiens
gttgggcggcactgc

SEQ ID NO: 1842764 - DNA, 15 bp, Homo sapiens
ttgggcggcactgcc

SEQ ID NO: 1842765 - DNA, 15 bp, Homo sapiens
tgggcggcactgcca

SEQ ID NO: 1842766 - DNA, 15 bp, Homo sapiens
gggcggcactgccag

SEQ ID NO: 1842767 - DNA, 15 bp, Homo sapiens
ggcggcactgccagg

SEQ ID NO: 1842768 - DNA, 15 bp, Homo sapiens
gcggcactgccaggc

SEQ ID NO: 1842769 - DNA, 15 bp, Homo sapiens
cggcactgccaggcc

SEQ ID NO: 1842770 - DNA, 15 bp, Homo sapiens
ggcactgccaggccc

SEQ ID NO: 1842771 - DNA, 15 bp, Homo sapiens
gcactgccaggccct

SEQ ID NO: 1842772 - DNA, 15 bp, Homo sapiens
cactgccaggccctc

SEQ ID NO: 1842773 - DNA, 15 bp, Homo sapiens
actgccaggccctcg

SEQ ID NO: 1842774 - DNA, 15 bp, Homo sapiens
ctgccaggccctcgg

SEQ ID NO: 1842775 - DNA, 15 bp, Homo sapiens
tgccaggccctcggg

SEQ ID NO: 1842776 - DNA, 15 bp, Homo sapiens
gccaggccctcggga

SEQ ID NO: 1842777 - DNA, 15 bp, Homo sapiens
ccaggccctcgggac

SEQ ID NO: 1842778 - DNA, 15 bp, Homo sapiens
caggccctcgggacc

SEQ ID NO: 1842779 - DNA, 15 bp, Homo sapiens
aggccctcgggaccc

SEQ ID NO: 1842780 - DNA, 15 bp, Homo sapiens
ggccctcgggaccct

SEQ ID NO: 1842781 - DNA, 15 bp, Homo sapiens
gccctcgggaccctg

SEQ ID NO: 1842782 - DNA, 15 bp, Homo sapiens
ccctcgggaccctga

SEQ ID NO: 1842783 - DNA, 15 bp, Homo sapiens
cctcgggaccctgag

SEQ ID NO: 1842784 - DNA, 15 bp, Homo sapiens
ctcgggaccctgagt

SEQ ID NO: 1842785 - DNA, 15 bp, Homo sapiens
tcgggaccctgagta

SEQ ID NO: 1842786 - DNA, 15 bp, Homo sapiens
cgggaccctgagtaa

SEQ ID NO: 1842787 - DNA, 15 bp, Homo sapiens
gggaccctgagtaag

SEQ ID NO: 1842788 - DNA, 15 bp, Homo sapiens
ggaccctgagtaagg

SEQ ID NO: 1842789 - DNA, 15 bp, Homo sapiens
gaccctgagtaaggt

SEQ ID NO: 1842790 - DNA, 15 bp, Homo sapiens
accctgagtaaggtc

SEQ ID NO: 1842791 - DNA, 15 bp, Homo sapiens
ccctgagtaaggtct

SEQ ID NO: 1842792 - DNA, 15 bp, Homo sapiens
cctgagtaaggtctg

SEQ ID NO: 1842793 - DNA, 15 bp, Homo sapiens
ctgagtaaggtctga

SEQ ID NO: 1842794 - DNA, 15 bp, Homo sapiens
tgagtaaggtctgac

SEQ ID NO: 1842795 - DNA, 15 bp, Homo sapiens
gagtaaggtctgacg

SEQ ID NO: 1842796 - DNA, 15 bp, Homo sapiens
agtaaggtctgacgc

SEQ ID NO: 1842797 - DNA, 15 bp, Homo sapiens
gtaaggtctgacgca

SEQ ID NO: 1842798 - DNA, 15 bp, Homo sapiens
taaggtctgacgcat

SEQ ID NO: 1842799 - DNA, 15 bp, Homo sapiens
aaggtctgacgcatc

SEQ ID NO: 1842800 - DNA, 15 bp, Homo sapiens
aggtctgacgcatca

SEQ ID NO: 1842801 - DNA, 15 bp, Homo sapiens
ggtctgacgcatcag

SEQ ID NO: 1842802 - DNA, 15 bp, Homo sapiens
gtctgacgcatcagg

SEQ ID NO: 1842803 - DNA, 15 bp, Homo sapiens
tctgacgcatcaggg

SEQ ID NO: 1842804 - DNA, 15 bp, Homo sapiens
ctgacgcatcagggc

SEQ ID NO: 1842805 - DNA, 15 bp, Homo sapiens
tgacgcatcagggca

SEQ ID NO: 1842806 - DNA, 15 bp, Homo sapiens
gacgcatcagggcag

SEQ ID NO: 1842807 - DNA, 15 bp, Homo sapiens
acgcatcagggcagg

SEQ ID NO: 1842808 - DNA, 15 bp, Homo sapiens
cgcatcagggcaggc

SEQ ID NO: 1842809 - DNA, 15 bp, Homo sapiens
gcatcagggcaggca

SEQ ID NO: 1842810 - DNA, 15 bp, Homo sapiens
catcagggcaggcag

SEQ ID NO: 1842811 - DNA, 15 bp, Homo sapiens
atcagggcaggcaga

SEQ ID NO: 1842812 - DNA, 15 bp, Homo sapiens
tcagggcaggcagag

SEQ ID NO: 1842813 - DNA, 15 bp, Homo sapiens
cagggcaggcagagg

SEQ ID NO: 1842814 - DNA, 15 bp, Homo sapiens
agggcaggcagaggg

SEQ ID NO: 1842815 - DNA, 15 bp, Homo sapiens
ggcaggcagagggga

SEQ ID NO: 1842816 - DNA, 15 bp, Homo sapiens
gcaggcagaggggag

SEQ ID NO: 1842817 - DNA, 15 bp, Homo sapiens
caggcagaggggagg

SEQ ID NO: 1842818 - DNA, 15 bp, Homo sapiens
aggcagaggggaggc

SEQ ID NO: 1842819 - DNA, 15 bp, Homo sapiens
ggcagaggggaggcc

SEQ ID NO: 1842820 - DNA, 15 bp, Homo sapiens
gcagaggggaggcca

SEQ ID NO: 1842821 - DNA, 15 bp, Homo sapiens
cagaggggaggccac

SEQ ID NO: 1842822 - DNA, 15 bp, Homo sapiens
agaggggaggccaca

SEQ ID NO: 1842823 - DNA, 15 bp, Homo sapiens
gaggggaggccacat

SEQ ID NO: 1842824 - DNA, 15 bp, Homo sapiens
aggggaggccacatt

SEQ ID NO: 1842825 - DNA, 15 bp, Homo sapiens
ggggaggccacattt

SEQ ID NO: 1842826 - DNA, 15 bp, Homo sapiens
gggaggccacatttc

SEQ ID NO: 1842827 - DNA, 15 bp, Homo sapiens
ggaggccacatttcg

SEQ ID NO: 1842828 - DNA, 15 bp, Homo sapiens
gaggccacatttcgc

SEQ ID NO: 1842829 - DNA, 15 bp, Homo sapiens
aggccacatttcgcc

SEQ ID NO: 1842830 - DNA, 15 bp, Homo sapiens
ggccacatttcgcct

SEQ ID NO: 1842831 - DNA, 15 bp, Homo sapiens
gccacatttcgcctg

SEQ ID NO: 1842832 - DNA, 15 bp, Homo sapiens
ccacatttcgcctgc

SEQ ID NO: 1842833 - DNA, 15 bp, Homo sapiens
cacatttcgcctgcc

SEQ ID NO: 1842834 - DNA, 15 bp, Homo sapiens
acatttcgcctgcca

SEQ ID NO: 1842835 - DNA, 15 bp, Homo sapiens
catttcgcctgccac

SEQ ID NO: 1842836 - DNA, 15 bp, Homo sapiens
atttcgcctgccact

SEQ ID NO: 1842837 - DNA, 15 bp, Homo sapiens
tttcgcctgccactg

SEQ ID NO: 1842838 - DNA, 15 bp, Homo sapiens
ttcgcctgccactga

SEQ ID NO: 1842839 - DNA, 15 bp, Homo sapiens
tcgcctgccactgat

SEQ ID NO: 1842840 - DNA, 15 bp, Homo sapiens
cgcctgccactgatg

SEQ ID NO: 1842841 - DNA, 15 bp, Homo sapiens
gcctgccactgatgt

SEQ ID NO: 1842842 - DNA, 15 bp, Homo sapiens
cctgccactgatgtt

SEQ ID NO: 1842843 - DNA, 15 bp, Homo sapiens
ctgccactgatgtta

SEQ ID NO: 1842844 - DNA, 15 bp, Homo sapiens
tgccactgatgttag

SEQ ID NO: 1842845 - DNA, 15 bp, Homo sapiens
gccactgatgttagc

SEQ ID NO: 1842846 - DNA, 15 bp, Homo sapiens
ccactgatgttagcg

SEQ ID NO: 1842847 - DNA, 15 bp, Homo sapiens
cactgatgttagcgg

SEQ ID NO: 1842848 - DNA, 15 bp, Homo sapiens
actgatgttagcggg

SEQ ID NO: 1842849 - DNA, 15 bp, Homo sapiens
ctgatgttagcgggg

SEQ ID NO: 1842850 - DNA, 15 bp, Homo sapiens
tgatgttagcgggga

SEQ ID NO: 1842851 - DNA, 15 bp, Homo sapiens
gatgttagcggggag

SEQ ID NO: 1842852 - DNA, 15 bp, Homo sapiens
atgttagcggggagg

SEQ ID NO: 1842853 - DNA, 15 bp, Homo sapiens
tgttagcggggaggc

SEQ ID NO: 1842854 - DNA, 15 bp, Homo sapiens
gttagcggggaggcc

SEQ ID NO: 1842855 - DNA, 15 bp, Homo sapiens
ttagcggggaggccc

SEQ ID NO: 1842856 - DNA, 15 bp, Homo sapiens
tagcggggaggcccc

SEQ ID NO: 1842857 - DNA, 15 bp, Homo sapiens
cggggaggccccaga

SEQ ID NO: 1842858 - DNA, 15 bp, Homo sapiens
ggggaggccccagac

SEQ ID NO: 1842859 - DNA, 15 bp, Homo sapiens
gggaggccccagacc

SEQ ID NO: 1842860 - DNA, 15 bp, Homo sapiens
ggaggccccagaccc

SEQ ID NO: 1842861 - DNA, 15 bp, Homo sapiens
gaggccccagaccca

SEQ ID NO: 1842862 - DNA, 15 bp, Homo sapiens
aggccccagacccag

SEQ ID NO: 1842863 - DNA, 15 bp, Homo sapiens
ggccccagacccagg

SEQ ID NO: 1842864 - DNA, 15 bp, Homo sapiens
gccccagacccaggt

SEQ ID NO: 1842865 - DNA, 15 bp, Homo sapiens
ccccagacccaggtg

SEQ ID NO: 1842866 - DNA, 15 bp, Homo sapiens
cccagacccaggtgc

SEQ ID NO: 1842867 - DNA, 15 bp, Homo sapiens
ccagacccaggtgcc

SEQ ID NO: 1842868 - DNA, 15 bp, Homo sapiens
cagacccaggtgcca

SEQ ID NO: 1842869 - DNA, 15 bp, Homo sapiens
agacccaggtgccag

SEQ ID NO: 1842870 - DNA, 15 bp, Homo sapiens
gacccaggtgccagg

SEQ ID NO: 1842871 - DNA, 15 bp, Homo sapiens
acccaggtgccaggc

SEQ ID NO: 1842872 - DNA, 15 bp, Homo sapiens
cccaggtgccaggcg

SEQ ID NO: 1842873 - DNA, 15 bp, Homo sapiens
ccaggtgccaggcgg

SEQ ID NO: 1842874 - DNA, 15 bp, Homo sapiens
caggtgccaggcggg

SEQ ID NO: 1842875 - DNA, 15 bp, Homo sapiens
aggtgccaggcgggc

SEQ ID NO: 1842876 - DNA, 15 bp, Homo sapiens
ggtgccaggcgggca

SEQ ID NO: 1842877 - DNA, 15 bp, Homo sapiens
gtgccaggcgggcaa

SEQ ID NO: 1842878 - DNA, 15 bp, Homo sapiens
tgccaggcgggcaaa

SEQ ID NO: 1842879 - DNA, 15 bp, Homo sapiens
gccaggcgggcaaat

SEQ ID NO: 1842880 - DNA, 15 bp, Homo sapiens
ccaggcgggcaaatt

SEQ ID NO: 1842881 - DNA, 15 bp, Homo sapiens
caggcgggcaaattg

SEQ ID NO: 1842882 - DNA, 15 bp, Homo sapiens
aggcgggcaaattga

SEQ ID NO: 1842883 - DNA, 15 bp, Homo sapiens
ggcgggcaaattgat

SEQ ID NO: 1842884 - DNA, 15 bp, Homo sapiens
gcgggcaaattgatt

SEQ ID NO: 1842885 - DNA, 15 bp, Homo sapiens
cgggcaaattgattt

SEQ ID NO: 1842886 - DNA, 15 bp, Homo sapiens
gggcaaattgatttt

SEQ ID NO: 1842887 - DNA, 15 bp, Homo sapiens
ggcaaattgattttt

SEQ ID NO: 1842888 - DNA, 15 bp, Homo sapiens
gcaaattgatttttc

SEQ ID NO: 1842889 - DNA, 15 bp, Homo sapiens
caaattgatttttca

SEQ ID NO: 1842890 - DNA, 15 bp, Homo sapiens
aaattgatttttcag

SEQ ID NO: 1842891 - DNA, 15 bp, Homo sapiens
aattgatttttcagc

SEQ ID NO: 1842892 - DNA, 15 bp, Homo sapiens
attgatttttcagcc

SEQ ID NO: 1842893 - DNA, 15 bp, Homo sapiens
ttgatttttcagcct

SEQ ID NO: 1842894 - DNA, 15 bp, Homo sapiens
tgatttttcagcctg

SEQ ID NO: 1842895 - DNA, 15 bp, Homo sapiens
gatttttcagcctgc

SEQ ID NO: 1842896 - DNA, 15 bp, Homo sapiens
atttttcagcctgcg

SEQ ID NO: 1842897 - DNA, 15 bp, Homo sapiens
tttttcagcctgcga

SEQ ID NO: 1842898 - DNA, 15 bp, Homo sapiens
ttttcagcctgcgaa

SEQ ID NO: 1842899 - DNA, 15 bp, Homo sapiens
tttcagcctgcgaaa

SEQ ID NO: 1842900 - DNA, 15 bp, Homo sapiens
ttcagcctgcgaaac

SEQ ID NO: 1842901 - DNA, 15 bp, Homo sapiens
tcagcctgcgaaact

SEQ ID NO: 1842902 - DNA, 15 bp, Homo sapiens
cagcctgcgaaactt

SEQ ID NO: 1842903 - DNA, 15 bp, Homo sapiens
agcctgcgaaacttc

SEQ ID NO: 1842904 - DNA, 15 bp, Homo sapiens
gcctgcgaaacttct

SEQ ID NO: 1842905 - DNA, 15 bp, Homo sapiens
cctgcgaaacttcta

SEQ ID NO: 1842906 - DNA, 15 bp, Homo sapiens
ctgcgaaacttctaa

SEQ ID NO: 1842907 - DNA, 15 bp, Homo sapiens
tgcgaaacttctaaa

SEQ ID NO: 1842908 - DNA, 15 bp, Homo sapiens
gcgaaacttctaaag

SEQ ID NO: 1842909 - DNA, 15 bp, Homo sapiens
cgaaacttctaaaga

SEQ ID NO: 1842910 - DNA, 15 bp, Homo sapiens
gaaacttctaaagat

SEQ ID NO: 1842911 - DNA, 15 bp, Homo sapiens
aaacttctaaagata

SEQ ID NO: 1842912 - DNA, 15 bp, Homo sapiens
aacttctaaagatag

SEQ ID NO: 1842913 - DNA, 15 bp, Homo sapiens
acttctaaagatagg

SEQ ID NO: 1842914 - DNA, 15 bp, Homo sapiens
cttctaaagataggc

SEQ ID NO: 1842915 - DNA, 15 bp, Homo sapiens
ttctaaagataggca

SEQ ID NO: 1842916 - DNA, 15 bp, Homo sapiens
tctaaagataggcac

SEQ ID NO: 1842917 - DNA, 15 bp, Homo sapiens
ctaaagataggcacg

SEQ ID NO: 1842918 - DNA, 15 bp, Homo sapiens
taaagataggcacgg

SEQ ID NO: 1842919 - DNA, 15 bp, Homo sapiens
aaagataggcacggg

SEQ ID NO: 1842920 - DNA, 15 bp, Homo sapiens
aagataggcacgggt

SEQ ID NO: 1842921 - DNA, 15 bp, Homo sapiens
agataggcacgggtg

SEQ ID NO: 1842922 - DNA, 15 bp, Homo sapiens
gataggcacgggtgg

SEQ ID NO: 1842923 - DNA, 15 bp, Homo sapiens
ataggcacgggtggt

SEQ ID NO: 1842924 - DNA, 15 bp, Homo sapiens
taggcacgggtggtg

SEQ ID NO: 1842925 - DNA, 15 bp, Homo sapiens
aggcacgggtggtgc

SEQ ID NO: 1842926 - DNA, 15 bp, Homo sapiens
ggcacgggtggtgct

SEQ ID NO: 1842927 - DNA, 15 bp, Homo sapiens
gcacgggtggtgctc

SEQ ID NO: 1842928 - DNA, 15 bp, Homo sapiens
cacgggtggtgctct

SEQ ID NO: 1842929 - DNA, 15 bp, Homo sapiens
acgggtggtgctctg

SEQ ID NO: 1842930 - DNA, 15 bp, Homo sapiens
cgggtggtgctctgt

SEQ ID NO: 1842931 - DNA, 15 bp, Homo sapiens
gggtggtgctctgtg

SEQ ID NO: 1842932 - DNA, 15 bp, Homo sapiens
ggtggtgctctgtgc

SEQ ID NO: 1842933 - DNA, 15 bp, Homo sapiens
gtggtgctctgtgct

SEQ ID NO: 1842934 - DNA, 15 bp, Homo sapiens
tggtgctctgtgctg

SEQ ID NO: 1842935 - DNA, 15 bp, Homo sapiens
ggtgctctgtgctgg

SEQ ID NO: 1842936 - DNA, 15 bp, Homo sapiens
gtgctctgtgctggc

SEQ ID NO: 1842937 - DNA, 15 bp, Homo sapiens
tgctctgtgctggca

SEQ ID NO: 1842938 - DNA, 15 bp, Homo sapiens
gctctgtgctggcac

SEQ ID NO: 1842939 - DNA, 15 bp, Homo sapiens
ctctgtgctggcact

SEQ ID NO: 1842940 - DNA, 15 bp, Homo sapiens
tctgtgctggcactg

SEQ ID NO: 1842941 - DNA, 15 bp, Homo sapiens
ctgtgctggcactgg

SEQ ID NO: 1842942 - DNA, 15 bp, Homo sapiens
tgtgctggcactggg

SEQ ID NO: 1842943 - DNA, 15 bp, Homo sapiens
gtgctggcactggga

SEQ ID NO: 1842944 - DNA, 15 bp, Homo sapiens
tgctggcactgggag

SEQ ID NO: 1842945 - DNA, 15 bp, Homo sapiens
gctggcactgggagt

SEQ ID NO: 1842946 - DNA, 15 bp, Homo sapiens
ctggcactgggagtg

SEQ ID NO: 1842947 - DNA, 15 bp, Homo sapiens
tggcactgggagtga

SEQ ID NO: 1842948 - DNA, 15 bp, Homo sapiens
ggcactgggagtgac

SEQ ID NO: 1842949 - DNA, 15 bp, Homo sapiens
gcactgggagtgaca

SEQ ID NO: 1842950 - DNA, 15 bp, Homo sapiens
cactgggagtgacag

SEQ ID NO: 1842951 - DNA, 15 bp, Homo sapiens
actgggagtgacagg

SEQ ID NO: 1842952 - DNA, 15 bp, Homo sapiens
ctgggagtgacaggc

SEQ ID NO: 1842953 - DNA, 15 bp, Homo sapiens
tgggagtgacaggcc

SEQ ID NO: 1842954 - DNA, 15 bp, Homo sapiens
gggagtgacaggcca

SEQ ID NO: 1842955 - DNA, 15 bp, Homo sapiens
ggagtgacaggccat

SEQ ID NO: 1842956 - DNA, 15 bp, Homo sapiens
gagtgacaggccatc

SEQ ID NO: 1842957 - DNA, 15 bp, Homo sapiens
agtgacaggccatct

SEQ ID NO: 1842958 - DNA, 15 bp, Homo sapiens
gtgacaggccatctg

SEQ ID NO: 1842959 - DNA, 15 bp, Homo sapiens
tgacaggccatctgt

SEQ ID NO: 1842960 - DNA, 15 bp, Homo sapiens
gacaggccatctgtg

SEQ ID NO: 1842961 - DNA, 15 bp, Homo sapiens
acaggccatctgtga

SEQ ID NO: 1842962 - DNA, 15 bp, Homo sapiens
agcttctaccccatt

SEQ ID NO: 1842963 - DNA, 15 bp, Homo sapiens
gcttctaccccattt

SEQ ID NO: 1842964 - DNA, 15 bp, Homo sapiens
cttctaccccatttc

SEQ ID NO: 1842965 - DNA, 15 bp, Homo sapiens
ttctaccccatttcc

SEQ ID NO: 1842966 - DNA, 15 bp, Homo sapiens
tctaccccatttcct

SEQ ID NO: 1842967 - DNA, 15 bp, Homo sapiens
ctaccccatttcctc

SEQ ID NO: 1842968 - DNA, 15 bp, Homo sapiens
taccccatttcctct

SEQ ID NO: 1842969 - DNA, 15 bp, Homo sapiens
accccatttcctctc

SEQ ID NO: 1842970 - DNA, 15 bp, Homo sapiens
ccccatttcctctct

SEQ ID NO: 1842971 - DNA, 15 bp, Homo sapiens
cccatttcctctcta

SEQ ID NO: 1842972 - DNA, 15 bp, Homo sapiens
ccatttcctctctaa

SEQ ID NO: 1842973 - DNA, 15 bp, Homo sapiens
catttcctctctaat

SEQ ID NO: 1842974 - DNA, 15 bp, Homo sapiens
atttcctctctaatg

SEQ ID NO: 1842975 - DNA, 15 bp, Homo sapiens
tttcctctctaatgg

SEQ ID NO: 1842976 - DNA, 15 bp, Homo sapiens
ttcctctctaatggc

SEQ ID NO: 1842977 - DNA, 15 bp, Homo sapiens
tcctctctaatggca

SEQ ID NO: 1842978 - DNA, 15 bp, Homo sapiens
cctctctaatggcac

SEQ ID NO: 1842979 - DNA, 15 bp, Homo sapiens
ctctctaatggcact

SEQ ID NO: 1842980 - DNA, 15 bp, Homo sapiens
tctctaatggcacta

SEQ ID NO: 1842981 - DNA, 15 bp, Homo sapiens
ctctaatggcactaa

SEQ ID NO: 1842982 - DNA, 15 bp, Homo sapiens
tctaatggcactaat

SEQ ID NO: 1842983 - DNA, 15 bp, Homo sapiens
ctaatggcactaatc

SEQ ID NO: 1842984 - DNA, 15 bp, Homo sapiens
taatggcactaatct

SEQ ID NO: 1842985 - DNA, 15 bp, Homo sapiens
aatggcactaatctt

SEQ ID NO: 1842986 - DNA, 15 bp, Homo sapiens
atggcactaatcttt

SEQ ID NO: 1842987 - DNA, 15 bp, Homo sapiens
tggcactaatctttt

SEQ ID NO: 1842988 - DNA, 15 bp, Homo sapiens
ggcactaatcttttg

SEQ ID NO: 1842989 - DNA, 15 bp, Homo sapiens
gcactaatcttttgt

SEQ ID NO: 1842990 - DNA, 15 bp, Homo sapiens
cactaatcttttgta

SEQ ID NO: 1842991 - DNA, 15 bp, Homo sapiens
actaatcttttgtat

SEQ ID NO: 1842992 - DNA, 15 bp, Homo sapiens
ctaatcttttgtatc

SEQ ID NO: 1842993 - DNA, 15 bp, Homo sapiens
taatcttttgtatct

SEQ ID NO: 1842994 - DNA, 15 bp, Homo sapiens
aatcttttgtatctt

SEQ ID NO: 1842995 - DNA, 15 bp, Homo sapiens
atcttttgtatcttc

SEQ ID NO: 1842996 - DNA, 15 bp, Homo sapiens
tcttttgtatcttct

SEQ ID NO: 1842997 - DNA, 15 bp, Homo sapiens
cttttgtatcttctg

SEQ ID NO: 1842998 - DNA, 15 bp, Homo sapiens
ttttgtatcttctgt

SEQ ID NO: 1842999 - DNA, 15 bp, Homo sapiens
tttgtatcttctgtt

SEQ ID NO: 1843000 - DNA, 15 bp, Homo sapiens
ttgtatcttctgtta

SEQ ID NO: 1843001 - DNA, 15 bp, Homo sapiens
tgtatcttctgttag

SEQ ID NO: 1843002 - DNA, 15 bp, Homo sapiens
gtatcttctgttagg

SEQ ID NO: 1843003 - DNA, 15 bp, Homo sapiens
tatcttctgttaggg

SEQ ID NO: 1843004 - DNA, 15 bp, Homo sapiens
atcttctgttagggt

SEQ ID NO: 1843005 - DNA, 15 bp, Homo sapiens
tcttctgttagggtt

SEQ ID NO: 1843006 - DNA, 15 bp, Homo sapiens
cttctgttagggttt

SEQ ID NO: 1843007 - DNA, 15 bp, Homo sapiens
ttctgttagggtttt

SEQ ID NO: 1843008 - DNA, 15 bp, Homo sapiens
tctgttagggttttt

SEQ ID NO: 1843009 - DNA, 15 bp, Homo sapiens
ctgttagggtttttg

SEQ ID NO: 1843010 - DNA, 15 bp, Homo sapiens
tgttagggtttttgg

SEQ ID NO: 1843011 - DNA, 15 bp, Homo sapiens
gttagggtttttgga

SEQ ID NO: 1843012 - DNA, 15 bp, Homo sapiens
ttagggtttttggaa

SEQ ID NO: 1843013 - DNA, 15 bp, Homo sapiens
tagggtttttggaat

SEQ ID NO: 1843014 - DNA, 15 bp, Homo sapiens
agggtttttggaata

SEQ ID NO: 1843015 - DNA, 15 bp, Homo sapiens
gggtttttggaatac

SEQ ID NO: 1843016 - DNA, 15 bp, Homo sapiens
ggtttttggaatact

SEQ ID NO: 1843017 - DNA, 15 bp, Homo sapiens
gtttttggaatacta

SEQ ID NO: 1843018 - DNA, 15 bp, Homo sapiens
tttttggaatactag

SEQ ID NO: 1843019 - DNA, 15 bp, Homo sapiens
ttttggaatactagt

SEQ ID NO: 1843020 - DNA, 15 bp, Homo sapiens
tttggaatactagtg

SEQ ID NO: 1843021 - DNA, 15 bp, Homo sapiens
ttggaatactagtga

SEQ ID NO: 1843022 - DNA, 15 bp, Homo sapiens
tggaatactagtgac

SEQ ID NO: 1843023 - DNA, 15 bp, Homo sapiens
ggaatactagtgaca

SEQ ID NO: 1843024 - DNA, 15 bp, Homo sapiens
gaatactagtgacat

SEQ ID NO: 1843025 - DNA, 15 bp, Homo sapiens
aatactagtgacatc

SEQ ID NO: 1843026 - DNA, 15 bp, Homo sapiens
atactagtgacatct

SEQ ID NO: 1843027 - DNA, 15 bp, Homo sapiens
tactagtgacatctc

SEQ ID NO: 1843028 - DNA, 15 bp, Homo sapiens
actagtgacatctcc

SEQ ID NO: 1843029 - DNA, 15 bp, Homo sapiens
ctagtgacatctcct

SEQ ID NO: 1843030 - DNA, 15 bp, Homo sapiens
tagtgacatctccta

SEQ ID NO: 1843031 - DNA, 15 bp, Homo sapiens
agtgacatctcctag

SEQ ID NO: 1843032 - DNA, 15 bp, Homo sapiens
gtgacatctcctaga

SEQ ID NO: 1843033 - DNA, 15 bp, Homo sapiens
tgacatctcctagag

SEQ ID NO: 1843034 - DNA, 15 bp, Homo sapiens
gacatctcctagagc

SEQ ID NO: 1843035 - DNA, 15 bp, Homo sapiens
acatctcctagagcc

SEQ ID NO: 1843036 - DNA, 15 bp, Homo sapiens
catctcctagagcct

SEQ ID NO: 1843037 - DNA, 15 bp, Homo sapiens
atctcctagagcctt

SEQ ID NO: 1843038 - DNA, 15 bp, Homo sapiens
tctcctagagccttg

SEQ ID NO: 1843039 - DNA, 15 bp, Homo sapiens
ctcctagagccttgt

SEQ ID NO: 1843040 - DNA, 15 bp, Homo sapiens
tcctagagccttgta

SEQ ID NO: 1843041 - DNA, 15 bp, Homo sapiens
cctagagccttgtaa

SEQ ID NO: 1843042 - DNA, 15 bp, Homo sapiens
ctagagccttgtaaa

SEQ ID NO: 1843043 - DNA, 15 bp, Homo sapiens
tagagccttgtaaag

SEQ ID NO: 1843044 - DNA, 15 bp, Homo sapiens
agagccttgtaaagc

SEQ ID NO: 1843045 - DNA, 15 bp, Homo sapiens
gagccttgtaaagct

SEQ ID NO: 1843046 - DNA, 15 bp, Homo sapiens
agccttgtaaagctc

SEQ ID NO: 1843047 - DNA, 15 bp, Homo sapiens
gccttgtaaagctct

SEQ ID NO: 1843048 - DNA, 15 bp, Homo sapiens
ccttgtaaagctctt

SEQ ID NO: 1843049 - DNA, 15 bp, Homo sapiens
cttgtaaagctctta

SEQ ID NO: 1843050 - DNA, 15 bp, Homo sapiens
ttgtaaagctcttat

SEQ ID NO: 1843051 - DNA, 15 bp, Homo sapiens
tgtaaagctcttatt

SEQ ID NO: 1843052 - DNA, 15 bp, Homo sapiens
gtaaagctcttattt

SEQ ID NO: 1843053 - DNA, 15 bp, Homo sapiens
taaagctcttatttg

SEQ ID NO: 1843054 - DNA, 15 bp, Homo sapiens
aaagctcttatttgc

SEQ ID NO: 1843055 - DNA, 15 bp, Homo sapiens
aagctcttatttgcc

SEQ ID NO: 1843056 - DNA, 15 bp, Homo sapiens
agctcttatttgcct

SEQ ID NO: 1843057 - DNA, 15 bp, Homo sapiens
gctcttatttgcctt

SEQ ID NO: 1843058 - DNA, 15 bp, Homo sapiens
ctcttatttgccttc

SEQ ID NO: 1843059 - DNA, 15 bp, Homo sapiens
tcttatttgccttca

SEQ ID NO: 1843060 - DNA, 15 bp, Homo sapiens
cttatttgccttcaa

SEQ ID NO: 1843061 - DNA, 15 bp, Homo sapiens
ttatttgccttcaag

SEQ ID NO: 1843062 - DNA, 15 bp, Homo sapiens
tatttgccttcaagt

SEQ ID NO: 1843063 - DNA, 15 bp, Homo sapiens
atttgccttcaagtg

SEQ ID NO: 1843064 - DNA, 15 bp, Homo sapiens
tttgccttcaagtgc

SEQ ID NO: 1843065 - DNA, 15 bp, Homo sapiens
ttgccttcaagtgcc

SEQ ID NO: 1843066 - DNA, 15 bp, Homo sapiens
tgccttcaagtgccc

SEQ ID NO: 1843067 - DNA, 15 bp, Homo sapiens
gccttcaagtgcccc

SEQ ID NO: 1843068 - DNA, 15 bp, Homo sapiens
ccttcaagtgccccc

SEQ ID NO: 1843069 - DNA, 15 bp, Homo sapiens
cttcaagtgcccccc

SEQ ID NO: 1843070 - DNA, 15 bp, Homo sapiens
ttcaagtgcccccca

SEQ ID NO: 1843071 - DNA, 15 bp, Homo sapiens
tcaagtgccccccat

SEQ ID NO: 1843072 - DNA, 15 bp, Homo sapiens
caagtgccccccatt

SEQ ID NO: 1843073 - DNA, 15 bp, Homo sapiens
aagtgccccccattg

SEQ ID NO: 1843074 - DNA, 15 bp, Homo sapiens
agtgccccccattgc

SEQ ID NO: 1843075 - DNA, 15 bp, Homo sapiens
gtgccccccattgcc

SEQ ID NO: 1843076 - DNA, 15 bp, Homo sapiens
tgccccccattgcca

SEQ ID NO: 1843077 - DNA, 15 bp, Homo sapiens
gccccccattgccag

SEQ ID NO: 1843078 - DNA, 15 bp, Homo sapiens
ccccccattgccagg

SEQ ID NO: 1843079 - DNA, 15 bp, Homo sapiens
cccccattgccaggg

SEQ ID NO: 1843080 - DNA, 15 bp, Homo sapiens
ccccattgccagggc

SEQ ID NO: 1843081 - DNA, 15 bp, Homo sapiens
cccattgccagggca

SEQ ID NO: 1843082 - DNA, 15 bp, Homo sapiens
ccattgccagggcat

SEQ ID NO: 1843083 - DNA, 15 bp, Homo sapiens
cattgccagggcatg

SEQ ID NO: 1843084 - DNA, 15 bp, Homo sapiens
attgccagggcatgg

SEQ ID NO: 1843085 - DNA, 15 bp, Homo sapiens
ttgccagggcatgga

SEQ ID NO: 1843086 - DNA, 15 bp, Homo sapiens
tgccagggcatggag

SEQ ID NO: 1843087 - DNA, 15 bp, Homo sapiens
gccagggcatggagc

SEQ ID NO: 1843088 - DNA, 15 bp, Homo sapiens
ccagggcatggagcc

SEQ ID NO: 1843089 - DNA, 15 bp, Homo sapiens
cagggcatggagcct

SEQ ID NO: 1843090 - DNA, 15 bp, Homo sapiens
agggcatggagcctt

SEQ ID NO: 1843091 - DNA, 15 bp, Homo sapiens
gggcatggagccttg

SEQ ID NO: 1843092 - DNA, 15 bp, Homo sapiens
ggcatggagccttgc

SEQ ID NO: 1843093 - DNA, 15 bp, Homo sapiens
gcatggagccttgca

SEQ ID NO: 1843094 - DNA, 15 bp, Homo sapiens
catggagccttgcac

SEQ ID NO: 1843095 - DNA, 15 bp, Homo sapiens
atggagccttgcaca

SEQ ID NO: 1843096 - DNA, 15 bp, Homo sapiens
tggagccttgcacag

SEQ ID NO: 1843097 - DNA, 15 bp, Homo sapiens
ggagccttgcacagg

SEQ ID NO: 1843098 - DNA, 15 bp, Homo sapiens
gagccttgcacaggg

SEQ ID NO: 1843099 - DNA, 15 bp, Homo sapiens
agccttgcacagggc

SEQ ID NO: 1843100 - DNA, 15 bp, Homo sapiens
gccttgcacagggca

SEQ ID NO: 1843101 - DNA, 15 bp, Homo sapiens
ccttgcacagggcaa

SEQ ID NO: 1843102 - DNA, 15 bp, Homo sapiens
cttgcacagggcaaa

SEQ ID NO: 1843103 - DNA, 15 bp, Homo sapiens
ttgcacagggcaaat

SEQ ID NO: 1843104 - DNA, 15 bp, Homo sapiens
tgcacagggcaaata

SEQ ID NO: 1843105 - DNA, 15 bp, Homo sapiens
gcacagggcaaatat

SEQ ID NO: 1843106 - DNA, 15 bp, Homo sapiens
cacagggcaaatatt

SEQ ID NO: 1843107 - DNA, 15 bp, Homo sapiens
acagggcaaatattc

SEQ ID NO: 1843108 - DNA, 15 bp, Homo sapiens
cagggcaaatattca

SEQ ID NO: 1843109 - DNA, 15 bp, Homo sapiens
agggcaaatattcag

SEQ ID NO: 1843110 - DNA, 15 bp, Homo sapiens
gggcaaatattcagc

SEQ ID NO: 1843111 - DNA, 15 bp, Homo sapiens
ggcaaatattcagca

SEQ ID NO: 1843112 - DNA, 15 bp, Homo sapiens
gcaaatattcagcaa

SEQ ID NO: 1843113 - DNA, 15 bp, Homo sapiens
caaatattcagcaat

SEQ ID NO: 1843114 - DNA, 15 bp, Homo sapiens
aaatattcagcaatg

SEQ ID NO: 1843115 - DNA, 15 bp, Homo sapiens
aatattcagcaatgt

SEQ ID NO: 1843116 - DNA, 15 bp, Homo sapiens
atattcagcaatgtt

SEQ ID NO: 1843117 - DNA, 15 bp, Homo sapiens
tattcagcaatgttg

SEQ ID NO: 1843118 - DNA, 15 bp, Homo sapiens
attcagcaatgttgg

SEQ ID NO: 1843119 - DNA, 15 bp, Homo sapiens
ttcagcaatgttgga

SEQ ID NO: 1843120 - DNA, 15 bp, Homo sapiens
tcagcaatgttggat

SEQ ID NO: 1843121 - DNA, 15 bp, Homo sapiens
cagcaatgttggatg

SEQ ID NO: 1843122 - DNA, 15 bp, Homo sapiens
agcaatgttggatga

SEQ ID NO: 1843123 - DNA, 15 bp, Homo sapiens
gcaatgttggatgaa

SEQ ID NO: 1843124 - DNA, 15 bp, Homo sapiens
caatgttggatgaat

SEQ ID NO: 1843125 - DNA, 15 bp, Homo sapiens
aatgttggatgaata

SEQ ID NO: 1843126 - DNA, 15 bp, Homo sapiens
atgttggatgaataa

SEQ ID NO: 1843127 - DNA, 15 bp, Homo sapiens
tgttggatgaataaa

SEQ ID NO: 1843128 - DNA, 15 bp, Homo sapiens
gttggatgaataaat

SEQ ID NO: 1843129 - DNA, 15 bp, Homo sapiens
ttggatgaataaatg

SEQ ID NO: 1843130 - DNA, 15 bp, Homo sapiens
tggatgaataaatga

SEQ ID NO: 1843131 - DNA, 15 bp, Homo sapiens
ggatgaataaatgaa

SEQ ID NO: 1843132 - DNA, 15 bp, Homo sapiens
gatgaataaatgaag

SEQ ID NO: 1843133 - DNA, 15 bp, Homo sapiens
atgaataaatgaaga

SEQ ID NO: 1843134 - DNA, 15 bp, Homo sapiens
tgaataaatgaagag

SEQ ID NO: 1843135 - DNA, 15 bp, Homo sapiens
gaataaatgaagagt

SEQ ID NO: 1843136 - DNA, 15 bp, Homo sapiens
aataaatgaagagtg

SEQ ID NO: 1843137 - DNA, 15 bp, Homo sapiens
ataaatgaagagtga

SEQ ID NO: 1843138 - DNA, 15 bp, Homo sapiens
taaatgaagagtgac

SEQ ID NO: 1843139 - DNA, 15 bp, Homo sapiens
aaatgaagagtgacc

SEQ ID NO: 1843140 - DNA, 15 bp, Homo sapiens
aatgaagagtgacca

SEQ ID NO: 1843141 - DNA, 15 bp, Homo sapiens
atgaagagtgaccaa

SEQ ID NO: 1843142 - DNA, 15 bp, Homo sapiens
tgaagagtgaccaag

SEQ ID NO: 1843143 - DNA, 15 bp, Homo sapiens
gaagagtgaccaagg

SEQ ID NO: 1843144 - DNA, 15 bp, Homo sapiens
aagagtgaccaaggg

SEQ ID NO: 1843145 - DNA, 15 bp, Homo sapiens
agagtgaccaagggt

SEQ ID NO: 1843146 - DNA, 15 bp, Homo sapiens
gagtgaccaagggtt

SEQ ID NO: 1843147 - DNA, 15 bp, Homo sapiens
agtgaccaagggttg

SEQ ID NO: 1843148 - DNA, 15 bp, Homo sapiens
gtgaccaagggttgc

SEQ ID NO: 1843149 - DNA, 15 bp, Homo sapiens
tgaccaagggttgcc

SEQ ID NO: 1843150 - DNA, 15 bp, Homo sapiens
gaccaagggttgcca

SEQ ID NO: 1843151 - DNA, 15 bp, Homo sapiens
accaagggttgccag

SEQ ID NO: 1843152 - DNA, 15 bp, Homo sapiens
ccaagggttgccagt

SEQ ID NO: 1843153 - DNA, 15 bp, Homo sapiens
caagggttgccagtg

SEQ ID NO: 1843154 - DNA, 15 bp, Homo sapiens
aagggttgccagtgg

SEQ ID NO: 1843155 - DNA, 15 bp, Homo sapiens
agggttgccagtggt

SEQ ID NO: 1843156 - DNA, 15 bp, Homo sapiens
gggttgccagtggta

SEQ ID NO: 1843157 - DNA, 15 bp, Homo sapiens
ggttgccagtggtag

SEQ ID NO: 1843158 - DNA, 15 bp, Homo sapiens
gttgccagtggtagt

SEQ ID NO: 1843159 - DNA, 15 bp, Homo sapiens
ttgccagtggtagtc

SEQ ID NO: 1843160 - DNA, 15 bp, Homo sapiens
tgccagtggtagtca

SEQ ID NO: 1843161 - DNA, 15 bp, Homo sapiens
gccagtggtagtcag

SEQ ID NO: 1843162 - DNA, 15 bp, Homo sapiens
ccagtggtagtcagt

SEQ ID NO: 1843163 - DNA, 15 bp, Homo sapiens
cagtggtagtcagtc

SEQ ID NO: 1843164 - DNA, 15 bp, Homo sapiens
agtggtagtcagtct

SEQ ID NO: 1843165 - DNA, 15 bp, Homo sapiens
gtggtagtcagtctt

SEQ ID NO: 1843166 - DNA, 15 bp, Homo sapiens
tggtagtcagtcttt

SEQ ID NO: 1843167 - DNA, 15 bp, Homo sapiens
ggtagtcagtcttta

SEQ ID NO: 1843168 - DNA, 15 bp, Homo sapiens
gtagtcagtctttat

SEQ ID NO: 1843169 - DNA, 15 bp, Homo sapiens
tagtcagtctttatt

SEQ ID NO: 1843170 - DNA, 15 bp, Homo sapiens
agtcagtctttattt

SEQ ID NO: 1843171 - DNA, 15 bp, Homo sapiens
gtcagtctttatttt

SEQ ID NO: 1843172 - DNA, 15 bp, Homo sapiens
tcagtctttattttc

SEQ ID NO: 1843173 - DNA, 15 bp, Homo sapiens
cagtctttattttca

SEQ ID NO: 1843174 - DNA, 15 bp, Homo sapiens
agtctttattttcac

SEQ ID NO: 1843175 - DNA, 15 bp, Homo sapiens
gtctttattttcacc

SEQ ID NO: 1843176 - DNA, 15 bp, Homo sapiens
tctttattttcaccc

SEQ ID NO: 1843177 - DNA, 15 bp, Homo sapiens
ctttattttcacccc

SEQ ID NO: 1843178 - DNA, 15 bp, Homo sapiens
tttattttcaccccg

SEQ ID NO: 1843179 - DNA, 15 bp, Homo sapiens
ttattttcaccccgc

SEQ ID NO: 1843180 - DNA, 15 bp, Homo sapiens
tattttcaccccgca

SEQ ID NO: 1843181 - DNA, 15 bp, Homo sapiens
attttcaccccgcac

SEQ ID NO: 1843182 - DNA, 15 bp, Homo sapiens
ttttcaccccgcact

SEQ ID NO: 1843183 - DNA, 15 bp, Homo sapiens
tttcaccccgcactg

SEQ ID NO: 1843184 - DNA, 15 bp, Homo sapiens
ttcaccccgcactgc

SEQ ID NO: 1843185 - DNA, 15 bp, Homo sapiens
tcaccccgcactgct

SEQ ID NO: 1843186 - DNA, 15 bp, Homo sapiens
caccccgcactgcta

SEQ ID NO: 1843187 - DNA, 15 bp, Homo sapiens
accccgcactgctat

SEQ ID NO: 1843188 - DNA, 15 bp, Homo sapiens
ccccgcactgctatt

SEQ ID NO: 1843189 - DNA, 15 bp, Homo sapiens
cccgcactgctattt

SEQ ID NO: 1843190 - DNA, 15 bp, Homo sapiens
ccgcactgctatttg

SEQ ID NO: 1843191 - DNA, 15 bp, Homo sapiens
cgcactgctatttgc

SEQ ID NO: 1843192 - DNA, 15 bp, Homo sapiens
gcactgctatttgcc

SEQ ID NO: 1843193 - DNA, 15 bp, Homo sapiens
cactgctatttgccc

SEQ ID NO: 1843194 - DNA, 15 bp, Homo sapiens
actgctatttgccct

SEQ ID NO: 1843195 - DNA, 15 bp, Homo sapiens
ctgctatttgccctg

SEQ ID NO: 1843196 - DNA, 15 bp, Homo sapiens
tgctatttgccctgt

SEQ ID NO: 1843197 - DNA, 15 bp, Homo sapiens
gctatttgccctgta

SEQ ID NO: 1843198 - DNA, 15 bp, Homo sapiens
ctatttgccctgtac

SEQ ID NO: 1843199 - DNA, 15 bp, Homo sapiens
tatttgccctgtact

SEQ ID NO: 1843200 - DNA, 15 bp, Homo sapiens
atttgccctgtactc

SEQ ID NO: 1843201 - DNA, 15 bp, Homo sapiens
tttgccctgtactca

SEQ ID NO: 1843202 - DNA, 15 bp, Homo sapiens
ttgccctgtactcac

SEQ ID NO: 1843203 - DNA, 15 bp, Homo sapiens
tgccctgtactcact

SEQ ID NO: 1843204 - DNA, 15 bp, Homo sapiens
gccctgtactcactt

SEQ ID NO: 1843205 - DNA, 15 bp, Homo sapiens
ccctgtactcacttg

SEQ ID NO: 1843206 - DNA, 15 bp, Homo sapiens
cctgtactcacttgg

SEQ ID NO: 1843207 - DNA, 15 bp, Homo sapiens
ctgtactcacttgga

SEQ ID NO: 1843208 - DNA, 15 bp, Homo sapiens
tgtactcacttggac

SEQ ID NO: 1843209 - DNA, 15 bp, Homo sapiens
gtactcacttggact

SEQ ID NO: 1843210 - DNA, 15 bp, Homo sapiens
tactcacttggactg

SEQ ID NO: 1843211 - DNA, 15 bp, Homo sapiens
actcacttggactgg

SEQ ID NO: 1843212 - DNA, 15 bp, Homo sapiens
ctcacttggactggt

SEQ ID NO: 1843213 - DNA, 15 bp, Homo sapiens
tcacttggactggtt

SEQ ID NO: 1843214 - DNA, 15 bp, Homo sapiens
cacttggactggttc

SEQ ID NO: 1843215 - DNA, 15 bp, Homo sapiens
acttggactggttcc

SEQ ID NO: 1843216 - DNA, 15 bp, Homo sapiens
cttggactggttcct

SEQ ID NO: 1843217 - DNA, 15 bp, Homo sapiens
ttggactggttcctg

SEQ ID NO: 1843218 - DNA, 15 bp, Homo sapiens
tggactggttcctgc

SEQ ID NO: 1843219 - DNA, 15 bp, Homo sapiens
ggactggttcctgct

SEQ ID NO: 1843220 - DNA, 15 bp, Homo sapiens
gactggttcctgctg

SEQ ID NO: 1843221 - DNA, 15 bp, Homo sapiens
actggttcctgctgg

SEQ ID NO: 1843222 - DNA, 15 bp, Homo sapiens
ctggttcctgctggt

SEQ ID NO: 1843223 - DNA, 15 bp, Homo sapiens
tggttcctgctggtg

SEQ ID NO: 1843224 - DNA, 15 bp, Homo sapiens
ggttcctgctggtga

SEQ ID NO: 1843225 - DNA, 15 bp, Homo sapiens
gttcctgctggtgag

SEQ ID NO: 1843226 - DNA, 15 bp, Homo sapiens
ttcctgctggtgaga

SEQ ID NO: 1843227 - DNA, 15 bp, Homo sapiens
tcctgctggtgagaa

SEQ ID NO: 1843228 - DNA, 15 bp, Homo sapiens
cctgctggtgagaaa

SEQ ID NO: 1843229 - DNA, 15 bp, Homo sapiens
ctgctggtgagaaac

SEQ ID NO: 1843230 - DNA, 15 bp, Homo sapiens
tgctggtgagaaact

SEQ ID NO: 1843231 - DNA, 15 bp, Homo sapiens
gctggtgagaaactt

SEQ ID NO: 1843232 - DNA, 15 bp, Homo sapiens
ctggtgagaaacttg

SEQ ID NO: 1843233 - DNA, 15 bp, Homo sapiens
tggtgagaaacttgc

SEQ ID NO: 1843234 - DNA, 15 bp, Homo sapiens
ggtgagaaacttgct

SEQ ID NO: 1843235 - DNA, 15 bp, Homo sapiens
gtgagaaacttgcta

SEQ ID NO: 1843236 - DNA, 15 bp, Homo sapiens
tgagaaacttgctac

SEQ ID NO: 1843237 - DNA, 15 bp, Homo sapiens
gagaaacttgctacc

SEQ ID NO: 1843238 - DNA, 15 bp, Homo sapiens
agaaacttgctaccc

SEQ ID NO: 1843239 - DNA, 15 bp, Homo sapiens
gaaacttgctaccca

SEQ ID NO: 1843240 - DNA, 15 bp, Homo sapiens
aaacttgctacccag

SEQ ID NO: 1843241 - DNA, 15 bp, Homo sapiens
aacttgctacccagg

SEQ ID NO: 1843242 - DNA, 15 bp, Homo sapiens
acttgctacccaggt

SEQ ID NO: 1843243 - DNA, 15 bp, Homo sapiens
cttgctacccaggta

SEQ ID NO: 1843244 - DNA, 15 bp, Homo sapiens
ttgctacccaggtac

SEQ ID NO: 1843245 - DNA, 15 bp, Homo sapiens
tgctacccaggtacc

SEQ ID NO: 1843246 - DNA, 15 bp, Homo sapiens
gctacccaggtacca

SEQ ID NO: 1843247 - DNA, 15 bp, Homo sapiens
ctacccaggtaccac

SEQ ID NO: 1843248 - DNA, 15 bp, Homo sapiens
tacccaggtaccact

SEQ ID NO: 1843249 - DNA, 15 bp, Homo sapiens
acccaggtaccactt

SEQ ID NO: 1843250 - DNA, 15 bp, Homo sapiens
cccaggtaccactta

SEQ ID NO: 1843251 - DNA, 15 bp, Homo sapiens
ccaggtaccacttat

SEQ ID NO: 1843252 - DNA, 15 bp, Homo sapiens
caggtaccacttatt

SEQ ID NO: 1843253 - DNA, 15 bp, Homo sapiens
aggtaccacttattt

SEQ ID NO: 1843254 - DNA, 15 bp, Homo sapiens
ggtaccacttatttt

SEQ ID NO: 1843255 - DNA, 15 bp, Homo sapiens
gtaccacttatttta

SEQ ID NO: 1843256 - DNA, 15 bp, Homo sapiens
taccacttattttaa

SEQ ID NO: 1843257 - DNA, 15 bp, Homo sapiens
accacttattttaag

SEQ ID NO: 1843258 - DNA, 15 bp, Homo sapiens
ccacttattttaagc

SEQ ID NO: 1843259 - DNA, 15 bp, Homo sapiens
cacttattttaagca

SEQ ID NO: 1843260 - DNA, 15 bp, Homo sapiens
acttattttaagcac

SEQ ID NO: 1843261 - DNA, 15 bp, Homo sapiens
cttattttaagcaca

SEQ ID NO: 1843262 - DNA, 15 bp, Homo sapiens
ttattttaagcacat

SEQ ID NO: 1843263 - DNA, 15 bp, Homo sapiens
tattttaagcacatt

SEQ ID NO: 1843264 - DNA, 15 bp, Homo sapiens
attttaagcacattt

SEQ ID NO: 1843265 - DNA, 15 bp, Homo sapiens
ttttaagcacattta

SEQ ID NO: 1843266 - DNA, 15 bp, Homo sapiens
tttaagcacatttat

SEQ ID NO: 1843267 - DNA, 15 bp, Homo sapiens
ttaagcacatttatg

SEQ ID NO: 1843268 - DNA, 15 bp, Homo sapiens
taagcacatttatgc

SEQ ID NO: 1843269 - DNA, 15 bp, Homo sapiens
aagcacatttatgca

SEQ ID NO: 1843270 - DNA, 15 bp, Homo sapiens
agcacatttatgcat

SEQ ID NO: 1843271 - DNA, 15 bp, Homo sapiens
gcacatttatgcatt

SEQ ID NO: 1843272 - DNA, 15 bp, Homo sapiens
cacatttatgcattt

SEQ ID NO: 1843273 - DNA, 15 bp, Homo sapiens
acatttatgcatttc

SEQ ID NO: 1843274 - DNA, 15 bp, Homo sapiens
catttatgcatttcc

SEQ ID NO: 1843275 - DNA, 15 bp, Homo sapiens
atttatgcatttcca

SEQ ID NO: 1843276 - DNA, 15 bp, Homo sapiens
tttatgcatttccag

SEQ ID NO: 1843277 - DNA, 15 bp, Homo sapiens
ttatgcatttccagg

SEQ ID NO: 1843278 - DNA, 15 bp, Homo sapiens
tatgcatttccaggc

SEQ ID NO: 1843279 - DNA, 15 bp, Homo sapiens
atgcatttccaggca

SEQ ID NO: 1843280 - DNA, 15 bp, Homo sapiens
tgcatttccaggcac

SEQ ID NO: 1843281 - DNA, 15 bp, Homo sapiens
gcatttccaggcacg

SEQ ID NO: 1843282 - DNA, 15 bp, Homo sapiens
catttccaggcacgt

SEQ ID NO: 1843283 - DNA, 15 bp, Homo sapiens
atttccaggcacgta

SEQ ID NO: 1843284 - DNA, 15 bp, Homo sapiens
tttccaggcacgtag

SEQ ID NO: 1843285 - DNA, 15 bp, Homo sapiens
ttccaggcacgtagc

SEQ ID NO: 1843286 - DNA, 15 bp, Homo sapiens
tccaggcacgtagca

SEQ ID NO: 1843287 - DNA, 15 bp, Homo sapiens
ccaggcacgtagcaa

SEQ ID NO: 1843288 - DNA, 15 bp, Homo sapiens
caggcacgtagcaag

SEQ ID NO: 1843289 - DNA, 15 bp, Homo sapiens
aggcacgtagcaagg

SEQ ID NO: 1843290 - DNA, 15 bp, Homo sapiens
ggcacgtagcaaggg

SEQ ID NO: 1843291 - DNA, 15 bp, Homo sapiens
gcacgtagcaagggg

SEQ ID NO: 1843292 - DNA, 15 bp, Homo sapiens
cacgtagcaaggggg

SEQ ID NO: 1843293 - DNA, 15 bp, Homo sapiens
acgtagcaagggggc

SEQ ID NO: 1843294 - DNA, 15 bp, Homo sapiens
cgtagcaagggggca

SEQ ID NO: 1843295 - DNA, 15 bp, Homo sapiens
gtagcaagggggcag

SEQ ID NO: 1843296 - DNA, 15 bp, Homo sapiens
tagcaagggggcagc

SEQ ID NO: 1843297 - DNA, 15 bp, Homo sapiens
agcaagggggcagca

SEQ ID NO: 1843298 - DNA, 15 bp, Homo sapiens
gcaagggggcagcag

SEQ ID NO: 1843299 - DNA, 15 bp, Homo sapiens
caagggggcagcagg

SEQ ID NO: 1843300 - DNA, 15 bp, Homo sapiens
aagggggcagcaggt

SEQ ID NO: 1843301 - DNA, 15 bp, Homo sapiens
agggggcagcaggtt

SEQ ID NO: 1843302 - DNA, 15 bp, Homo sapiens
gggggcagcaggtta

SEQ ID NO: 1843303 - DNA, 15 bp, Homo sapiens
ggggcagcaggttag

SEQ ID NO: 1843304 - DNA, 15 bp, Homo sapiens
gggcagcaggttagt

SEQ ID NO: 1843305 - DNA, 15 bp, Homo sapiens
ggcagcaggttagtg

SEQ ID NO: 1843306 - DNA, 15 bp, Homo sapiens
gcagcaggttagtga

SEQ ID NO: 1843307 - DNA, 15 bp, Homo sapiens
cagcaggttagtgat

SEQ ID NO: 1843308 - DNA, 15 bp, Homo sapiens
agcaggttagtgatt

SEQ ID NO: 1843309 - DNA, 15 bp, Homo sapiens
gcaggttagtgattc

SEQ ID NO: 1843310 - DNA, 15 bp, Homo sapiens
caggttagtgattca

SEQ ID NO: 1843311 - DNA, 15 bp, Homo sapiens
aggttagtgattcat

SEQ ID NO: 1843312 - DNA, 15 bp, Homo sapiens
ggttagtgattcatg

SEQ ID NO: 1843313 - DNA, 15 bp, Homo sapiens
gttagtgattcatga

SEQ ID NO: 1843314 - DNA, 15 bp, Homo sapiens
ttagtgattcatgag

SEQ ID NO: 1843315 - DNA, 15 bp, Homo sapiens
tagtgattcatgagt

SEQ ID NO: 1843316 - DNA, 15 bp, Homo sapiens
agtgattcatgagta

SEQ ID NO: 1843317 - DNA, 15 bp, Homo sapiens
gtgattcatgagtag

SEQ ID NO: 1843318 - DNA, 15 bp, Homo sapiens
tgattcatgagtagg

SEQ ID NO: 1843319 - DNA, 15 bp, Homo sapiens
gattcatgagtaggt

SEQ ID NO: 1843320 - DNA, 15 bp, Homo sapiens
attcatgagtaggtg

SEQ ID NO: 1843321 - DNA, 15 bp, Homo sapiens
ttcatgagtaggtgg

SEQ ID NO: 1843322 - DNA, 15 bp, Homo sapiens
tcatgagtaggtgga

SEQ ID NO: 1843323 - DNA, 15 bp, Homo sapiens
catgagtaggtggaa

SEQ ID NO: 1843324 - DNA, 15 bp, Homo sapiens
atgagtaggtggaaa

SEQ ID NO: 1843325 - DNA, 15 bp, Homo sapiens
tgagtaggtggaaaa

SEQ ID NO: 1843326 - DNA, 15 bp, Homo sapiens
gagtaggtggaaaag

SEQ ID NO: 1843327 - DNA, 15 bp, Homo sapiens
agtaggtggaaaagg

SEQ ID NO: 1843328 - DNA, 15 bp, Homo sapiens
gtaggtggaaaaggt

SEQ ID NO: 1843329 - DNA, 15 bp, Homo sapiens
taggtggaaaaggtg

SEQ ID NO: 1843330 - DNA, 15 bp, Homo sapiens
aggtggaaaaggtga

SEQ ID NO: 1843331 - DNA, 15 bp, Homo sapiens
ggtggaaaaggtgat

SEQ ID NO: 1843332 - DNA, 15 bp, Homo sapiens
gtggaaaaggtgatt

SEQ ID NO: 1843333 - DNA, 15 bp, Homo sapiens
tggaaaaggtgattg

SEQ ID NO: 1843334 - DNA, 15 bp, Homo sapiens
ggaaaaggtgattgc

SEQ ID NO: 1843335 - DNA, 15 bp, Homo sapiens
gaaaaggtgattgcc

SEQ ID NO: 1843336 - DNA, 15 bp, Homo sapiens
aaaaggtgattgcct

SEQ ID NO: 1843337 - DNA, 15 bp, Homo sapiens
aaaggtgattgcctt

SEQ ID NO: 1843338 - DNA, 15 bp, Homo sapiens
aaggtgattgccttg

SEQ ID NO: 1843339 - DNA, 15 bp, Homo sapiens
aggtgattgccttga

SEQ ID NO: 1843340 - DNA, 15 bp, Homo sapiens
ggtgattgccttgag

SEQ ID NO: 1843341 - DNA, 15 bp, Homo sapiens
gtgattgccttgaga

SEQ ID NO: 1843342 - DNA, 15 bp, Homo sapiens
tgattgccttgagag

SEQ ID NO: 1843343 - DNA, 15 bp, Homo sapiens
gattgccttgagagc

SEQ ID NO: 1843344 - DNA, 15 bp, Homo sapiens
attgccttgagagct

SEQ ID NO: 1843345 - DNA, 15 bp, Homo sapiens
ttgccttgagagctg

SEQ ID NO: 1843346 - DNA, 15 bp, Homo sapiens
tgccttgagagctgc

SEQ ID NO: 1843347 - DNA, 15 bp, Homo sapiens
gccttgagagctgct

SEQ ID NO: 1843348 - DNA, 15 bp, Homo sapiens
ccttgagagctgctg

SEQ ID NO: 1843349 - DNA, 15 bp, Homo sapiens
cttgagagctgctga

SEQ ID NO: 1843350 - DNA, 15 bp, Homo sapiens
ttgagagctgctgac

SEQ ID NO: 1843351 - DNA, 15 bp, Homo sapiens
tgagagctgctgact

SEQ ID NO: 1843352 - DNA, 15 bp, Homo sapiens
gagagctgctgactc

SEQ ID NO: 1843353 - DNA, 15 bp, Homo sapiens
agagctgctgactca

SEQ ID NO: 1843354 - DNA, 15 bp, Homo sapiens
gagctgctgactcag

SEQ ID NO: 1843355 - DNA, 15 bp, Homo sapiens
agctgctgactcagc

SEQ ID NO: 1843356 - DNA, 15 bp, Homo sapiens
gctgctgactcagcc

SEQ ID NO: 1843357 - DNA, 15 bp, Homo sapiens
ctgctgactcagccg

SEQ ID NO: 1843358 - DNA, 15 bp, Homo sapiens
tgctgactcagccgc

SEQ ID NO: 1843359 - DNA, 15 bp, Homo sapiens
gctgactcagccgcc

SEQ ID NO: 1843360 - DNA, 15 bp, Homo sapiens
ctgactcagccgcca

SEQ ID NO: 1843361 - DNA, 15 bp, Homo sapiens
tgactcagccgccag

SEQ ID NO: 1843362 - DNA, 15 bp, Homo sapiens
gactcagccgccagc

SEQ ID NO: 1843363 - DNA, 15 bp, Homo sapiens
actcagccgccagcc

SEQ ID NO: 1843364 - DNA, 15 bp, Homo sapiens
ctcagccgccagccg

SEQ ID NO: 1843365 - DNA, 15 bp, Homo sapiens
tcagccgccagccgt

SEQ ID NO: 1843366 - DNA, 15 bp, Homo sapiens
cagccgccagccgtt

SEQ ID NO: 1843367 - DNA, 15 bp, Homo sapiens
agccgccagccgtta

SEQ ID NO: 1843368 - DNA, 15 bp, Homo sapiens
gccgccagccgttaa

SEQ ID NO: 1843369 - DNA, 15 bp, Homo sapiens
ccgccagccgttaac

SEQ ID NO: 1843370 - DNA, 15 bp, Homo sapiens
cgccagccgttaacc

SEQ ID NO: 1843371 - DNA, 15 bp, Homo sapiens
gccagccgttaaccc

SEQ ID NO: 1843372 - DNA, 15 bp, Homo sapiens
ccagccgttaaccct

SEQ ID NO: 1843373 - DNA, 15 bp, Homo sapiens
cagccgttaaccctg

SEQ ID NO: 1843374 - DNA, 15 bp, Homo sapiens
agccgttaaccctgg

SEQ ID NO: 1843375 - DNA, 15 bp, Homo sapiens
gccgttaaccctggt

SEQ ID NO: 1843376 - DNA, 15 bp, Homo sapiens
ccgttaaccctggtg

SEQ ID NO: 1843377 - DNA, 15 bp, Homo sapiens
cgttaaccctggtgc

SEQ ID NO: 1843378 - DNA, 15 bp, Homo sapiens
gttaaccctggtgct

SEQ ID NO: 1843379 - DNA, 15 bp, Homo sapiens
ttaaccctggtgctc

SEQ ID NO: 1843380 - DNA, 15 bp, Homo sapiens
taaccctggtgctcc

SEQ ID NO: 1843381 - DNA, 15 bp, Homo sapiens
aaccctggtgctcct

SEQ ID NO: 1843382 - DNA, 15 bp, Homo sapiens
accctggtgctcctc

SEQ ID NO: 1843383 - DNA, 15 bp, Homo sapiens
ccctggtgctcctct

SEQ ID NO: 1843384 - DNA, 15 bp, Homo sapiens
cctggtgctcctctg

SEQ ID NO: 1843385 - DNA, 15 bp, Homo sapiens
ctggtgctcctctgg

SEQ ID NO: 1843386 - DNA, 15 bp, Homo sapiens
tggtgctcctctggg

SEQ ID NO: 1843387 - DNA, 15 bp, Homo sapiens
ggtgctcctctgggc

SEQ ID NO: 1843388 - DNA, 15 bp, Homo sapiens
gtgctcctctgggcc

SEQ ID NO: 1843389 - DNA, 15 bp, Homo sapiens
tgctcctctgggccc

SEQ ID NO: 1843390 - DNA, 15 bp, Homo sapiens
gctcctctgggccct

SEQ ID NO: 1843391 - DNA, 15 bp, Homo sapiens
ctcctctgggccctg

SEQ ID NO: 1843392 - DNA, 15 bp, Homo sapiens
tcctctgggccctga

SEQ ID NO: 1843393 - DNA, 15 bp, Homo sapiens
cctctgggccctgaa

SEQ ID NO: 1843394 - DNA, 15 bp, Homo sapiens
ctctgggccctgaat

SEQ ID NO: 1843395 - DNA, 15 bp, Homo sapiens
tctgggccctgaatc

SEQ ID NO: 1843396 - DNA, 15 bp, Homo sapiens
ctgggccctgaatca

SEQ ID NO: 1843397 - DNA, 15 bp, Homo sapiens
tgggccctgaatcag

SEQ ID NO: 1843398 - DNA, 15 bp, Homo sapiens
gggccctgaatcagt

SEQ ID NO: 1843399 - DNA, 15 bp, Homo sapiens
ggccctgaatcagtg

SEQ ID NO: 1843400 - DNA, 15 bp, Homo sapiens
gccctgaatcagtga

SEQ ID NO: 1843401 - DNA, 15 bp, Homo sapiens
ccctgaatcagtgag

SEQ ID NO: 1843402 - DNA, 15 bp, Homo sapiens
cctgaatcagtgagt

SEQ ID NO: 1843403 - DNA, 15 bp, Homo sapiens
ctgaatcagtgagtg

SEQ ID NO: 1843404 - DNA, 15 bp, Homo sapiens
tgaatcagtgagtgg

SEQ ID NO: 1843405 - DNA, 15 bp, Homo sapiens
gaatcagtgagtgga

SEQ ID NO: 1843406 - DNA, 15 bp, Homo sapiens
aatcagtgagtggat

SEQ ID NO: 1843407 - DNA, 15 bp, Homo sapiens
atcagtgagtggatg

SEQ ID NO: 1843408 - DNA, 15 bp, Homo sapiens
tcagtgagtggatgg

SEQ ID NO: 1843409 - DNA, 15 bp, Homo sapiens
cagtgagtggatggc

SEQ ID NO: 1843410 - DNA, 15 bp, Homo sapiens
agtgagtggatggca

SEQ ID NO: 1843411 - DNA, 15 bp, Homo sapiens
gtgagtggatggcat

SEQ ID NO: 1843412 - DNA, 15 bp, Homo sapiens
tgagtggatggcatg

SEQ ID NO: 1843413 - DNA, 15 bp, Homo sapiens
gagtggatggcatga

SEQ ID NO: 1843414 - DNA, 15 bp, Homo sapiens
agtggatggcatgaa

SEQ ID NO: 1843415 - DNA, 15 bp, Homo sapiens
gtggatggcatgaat

SEQ ID NO: 1843416 - DNA, 15 bp, Homo sapiens
tggatggcatgaatg

SEQ ID NO: 1843417 - DNA, 15 bp, Homo sapiens
ggatggcatgaatga

SEQ ID NO: 1843418 - DNA, 15 bp, Homo sapiens
gatggcatgaatgaa

SEQ ID NO: 1843419 - DNA, 15 bp, Homo sapiens
atggcatgaatgaac

SEQ ID NO: 1843420 - DNA, 15 bp, Homo sapiens
tggcatgaatgaaca

SEQ ID NO: 1843421 - DNA, 15 bp, Homo sapiens
ggcatgaatgaacag

SEQ ID NO: 1843422 - DNA, 15 bp, Homo sapiens
gcatgaatgaacaga

SEQ ID NO: 1843423 - DNA, 15 bp, Homo sapiens
catgaatgaacagat

SEQ ID NO: 1843424 - DNA, 15 bp, Homo sapiens
atgaatgaacagatg

SEQ ID NO: 1843425 - DNA, 15 bp, Homo sapiens
tgaatgaacagatgg

SEQ ID NO: 1843426 - DNA, 15 bp, Homo sapiens
gaatgaacagatggc

SEQ ID NO: 1843427 - DNA, 15 bp, Homo sapiens
aatgaacagatggcc

SEQ ID NO: 1843428 - DNA, 15 bp, Homo sapiens
atgaacagatggcca

SEQ ID NO: 1843429 - DNA, 15 bp, Homo sapiens
tgaacagatggccaa

SEQ ID NO: 1843430 - DNA, 15 bp, Homo sapiens
gaacagatggccaag

SEQ ID NO: 1843431 - DNA, 15 bp, Homo sapiens
aacagatggccaagg

SEQ ID NO: 1843432 - DNA, 15 bp, Homo sapiens
acagatggccaagga

SEQ ID NO: 1843433 - DNA, 15 bp, Homo sapiens
cagatggccaaggaa

SEQ ID NO: 1843434 - DNA, 15 bp, Homo sapiens
agatggccaaggaat

SEQ ID NO: 1843435 - DNA, 15 bp, Homo sapiens
gatggccaaggaatc

SEQ ID NO: 1843436 - DNA, 15 bp, Homo sapiens
atggccaaggaatct

SEQ ID NO: 1843437 - DNA, 15 bp, Homo sapiens
tggccaaggaatctc

SEQ ID NO: 1843438 - DNA, 15 bp, Homo sapiens
ggccaaggaatctca

SEQ ID NO: 1843439 - DNA, 15 bp, Homo sapiens
gccaaggaatctcag

SEQ ID NO: 1843440 - DNA, 15 bp, Homo sapiens
ccaaggaatctcagg

SEQ ID NO: 1843441 - DNA, 15 bp, Homo sapiens
caaggaatctcagga

SEQ ID NO: 1843442 - DNA, 15 bp, Homo sapiens
aaggaatctcaggag

SEQ ID NO: 1843443 - DNA, 15 bp, Homo sapiens
aggaatctcaggaga

SEQ ID NO: 1843444 - DNA, 15 bp, Homo sapiens
ggaatctcaggagac

SEQ ID NO: 1843445 - DNA, 15 bp, Homo sapiens
gaatctcaggagacc

SEQ ID NO: 1843446 - DNA, 15 bp, Homo sapiens
aatctcaggagaccc

SEQ ID NO: 1843447 - DNA, 15 bp, Homo sapiens
atctcaggagacccg

SEQ ID NO: 1843448 - DNA, 15 bp, Homo sapiens
tctcaggagacccga

SEQ ID NO: 1843449 - DNA, 15 bp, Homo sapiens
ctcaggagacccgag

SEQ ID NO: 1843450 - DNA, 15 bp, Homo sapiens
tcaggagacccgagt

SEQ ID NO: 1843451 - DNA, 15 bp, Homo sapiens
caggagacccgagtc

SEQ ID NO: 1843452 - DNA, 15 bp, Homo sapiens
aggagacccgagtct

SEQ ID NO: 1843453 - DNA, 15 bp, Homo sapiens
ggagacccgagtctc

SEQ ID NO: 1843454 - DNA, 15 bp, Homo sapiens
gagacccgagtctcc

SEQ ID NO: 1843455 - DNA, 15 bp, Homo sapiens
agacccgagtctcct

SEQ ID NO: 1843456 - DNA, 15 bp, Homo sapiens
gacccgagtctcctg

SEQ ID NO: 1843457 - DNA, 15 bp, Homo sapiens
acccgagtctcctgg

SEQ ID NO: 1843458 - DNA, 15 bp, Homo sapiens
cccgagtctcctgga

SEQ ID NO: 1843459 - DNA, 15 bp, Homo sapiens
ccgagtctcctggat

SEQ ID NO: 1843460 - DNA, 15 bp, Homo sapiens
cgagtctcctggatt

SEQ ID NO: 1843461 - DNA, 15 bp, Homo sapiens
gagtctcctggattt

SEQ ID NO: 1843462 - DNA, 15 bp, Homo sapiens
agtctcctggatttg

SEQ ID NO: 1843463 - DNA, 15 bp, Homo sapiens
gtctcctggatttgg

SEQ ID NO: 1843464 - DNA, 15 bp, Homo sapiens
tctcctggatttgga

SEQ ID NO: 1843465 - DNA, 15 bp, Homo sapiens
ctcctggatttggac

SEQ ID NO: 1843466 - DNA, 15 bp, Homo sapiens
tcctggatttggact

SEQ ID NO: 1843467 - DNA, 15 bp, Homo sapiens
cctggatttggactt

SEQ ID NO: 1843468 - DNA, 15 bp, Homo sapiens
ctggatttggacttt

SEQ ID NO: 1843469 - DNA, 15 bp, Homo sapiens
tggatttggactttc

SEQ ID NO: 1843470 - DNA, 15 bp, Homo sapiens
ggatttggactttcc

SEQ ID NO: 1843471 - DNA, 15 bp, Homo sapiens
gatttggactttcca

SEQ ID NO: 1843472 - DNA, 15 bp, Homo sapiens
atttggactttccag

SEQ ID NO: 1843473 - DNA, 15 bp, Homo sapiens
tttggactttccagc

SEQ ID NO: 1843474 - DNA, 15 bp, Homo sapiens
ttggactttccagca

SEQ ID NO: 1843475 - DNA, 15 bp, Homo sapiens
tggactttccagcat

SEQ ID NO: 1843476 - DNA, 15 bp, Homo sapiens
ggactttccagcatt

SEQ ID NO: 1843477 - DNA, 15 bp, Homo sapiens
gactttccagcatta

SEQ ID NO: 1843478 - DNA, 15 bp, Homo sapiens
actttccagcattag

SEQ ID NO: 1843479 - DNA, 15 bp, Homo sapiens
ctttccagcattaga

SEQ ID NO: 1843480 - DNA, 15 bp, Homo sapiens
tttccagcattagag

SEQ ID NO: 1843481 - DNA, 15 bp, Homo sapiens
ttccagcattagagg

SEQ ID NO: 1843482 - DNA, 15 bp, Homo sapiens
tccagcattagaggt

SEQ ID NO: 1843483 - DNA, 15 bp, Homo sapiens
ccagcattagaggtg

SEQ ID NO: 1843484 - DNA, 15 bp, Homo sapiens
cagcattagaggtgc

SEQ ID NO: 1843485 - DNA, 15 bp, Homo sapiens
agcattagaggtgca

SEQ ID NO: 1843486 - DNA, 15 bp, Homo sapiens
gcattagaggtgcac

SEQ ID NO: 1843487 - DNA, 15 bp, Homo sapiens
cattagaggtgcaca

SEQ ID NO: 1843488 - DNA, 15 bp, Homo sapiens
attagaggtgcacag

SEQ ID NO: 1843489 - DNA, 15 bp, Homo sapiens
ttagaggtgcacagc

SEQ ID NO: 1843490 - DNA, 15 bp, Homo sapiens
tagaggtgcacagcc

SEQ ID NO: 1843491 - DNA, 15 bp, Homo sapiens
agaggtgcacagccc

SEQ ID NO: 1843492 - DNA, 15 bp, Homo sapiens
gaggtgcacagccca

SEQ ID NO: 1843493 - DNA, 15 bp, Homo sapiens
aggtgcacagcccag

SEQ ID NO: 1843494 - DNA, 15 bp, Homo sapiens
ggtgcacagcccaga

SEQ ID NO: 1843495 - DNA, 15 bp, Homo sapiens
gtgcacagcccagag

SEQ ID NO: 1843496 - DNA, 15 bp, Homo sapiens
tgcacagcccagagc

SEQ ID NO: 1843497 - DNA, 15 bp, Homo sapiens
gcacagcccagagcc

SEQ ID NO: 1843498 - DNA, 15 bp, Homo sapiens
cacagcccagagcct

SEQ ID NO: 1843499 - DNA, 15 bp, Homo sapiens
acagcccagagcctc

SEQ ID NO: 1843500 - DNA, 15 bp, Homo sapiens
cagcccagagcctca

SEQ ID NO: 1843501 - DNA, 15 bp, Homo sapiens
agcccagagcctcac

SEQ ID NO: 1843502 - DNA, 15 bp, Homo sapiens
gcccagagcctcaca

SEQ ID NO: 1843503 - DNA, 15 bp, Homo sapiens
cccagagcctcacag

SEQ ID NO: 1843504 - DNA, 15 bp, Homo sapiens
ccagagcctcacagg

SEQ ID NO: 1843505 - DNA, 15 bp, Homo sapiens
cagagcctcacaggg

SEQ ID NO: 1843506 - DNA, 15 bp, Homo sapiens
agagcctcacaggga

SEQ ID NO: 1843507 - DNA, 15 bp, Homo sapiens
gagcctcacagggaa

SEQ ID NO: 1843508 - DNA, 15 bp, Homo sapiens
agcctcacagggaat

SEQ ID NO: 1843509 - DNA, 15 bp, Homo sapiens
gcctcacagggaatg

SEQ ID NO: 1843510 - DNA, 15 bp, Homo sapiens
cctcacagggaatgc

SEQ ID NO: 1843511 - DNA, 15 bp, Homo sapiens
ctcacagggaatgct

SEQ ID NO: 1843512 - DNA, 15 bp, Homo sapiens
tcacagggaatgcta

SEQ ID NO: 1843513 - DNA, 15 bp, Homo sapiens
cacagggaatgctag

SEQ ID NO: 1843514 - DNA, 15 bp, Homo sapiens
acagggaatgctaga

SEQ ID NO: 1843515 - DNA, 15 bp, Homo sapiens
cagggaatgctagaa

SEQ ID NO: 1843516 - DNA, 15 bp, Homo sapiens
agggaatgctagaag

SEQ ID NO: 1843517 - DNA, 15 bp, Homo sapiens
gggaatgctagaagc

SEQ ID NO: 1843518 - DNA, 15 bp, Homo sapiens
ggaatgctagaagct

SEQ ID NO: 1843519 - DNA, 15 bp, Homo sapiens
gaatgctagaagctg

SEQ ID NO: 1843520 - DNA, 15 bp, Homo sapiens
aatgctagaagctgc

SEQ ID NO: 1843521 - DNA, 15 bp, Homo sapiens
atgctagaagctgca

SEQ ID NO: 1843522 - DNA, 15 bp, Homo sapiens
tgctagaagctgcag

SEQ ID NO: 1843523 - DNA, 15 bp, Homo sapiens
gctagaagctgcagt

SEQ ID NO: 1843524 - DNA, 15 bp, Homo sapiens
ctagaagctgcagta

SEQ ID NO: 1843525 - DNA, 15 bp, Homo sapiens
tagaagctgcagtat

SEQ ID NO: 1843526 - DNA, 15 bp, Homo sapiens
agaagctgcagtata

SEQ ID NO: 1843527 - DNA, 15 bp, Homo sapiens
gaagctgcagtataa

SEQ ID NO: 1843528 - DNA, 15 bp, Homo sapiens
aagctgcagtataat

SEQ ID NO: 1843529 - DNA, 15 bp, Homo sapiens
agctgcagtataatc

SEQ ID NO: 1843530 - DNA, 15 bp, Homo sapiens
gctgcagtataatca

SEQ ID NO: 1843531 - DNA, 15 bp, Homo sapiens
ctgcagtataatcat

SEQ ID NO: 1843532 - DNA, 15 bp, Homo sapiens
tgcagtataatcatg

SEQ ID NO: 1843533 - DNA, 15 bp, Homo sapiens
gcagtataatcatgg

SEQ ID NO: 1843534 - DNA, 15 bp, Homo sapiens
cagtataatcatggc

SEQ ID NO: 1843535 - DNA, 15 bp, Homo sapiens
agtataatcatggca

SEQ ID NO: 1843536 - DNA, 15 bp, Homo sapiens
gtataatcatggcac

SEQ ID NO: 1843537 - DNA, 15 bp, Homo sapiens
tataatcatggcaca

SEQ ID NO: 1843538 - DNA, 15 bp, Homo sapiens
ataatcatggcacat

SEQ ID NO: 1843539 - DNA, 15 bp, Homo sapiens
taatcatggcacatt

SEQ ID NO: 1843540 - DNA, 15 bp, Homo sapiens
aatcatggcacattt

SEQ ID NO: 1843541 - DNA, 15 bp, Homo sapiens
atcatggcacatttt

SEQ ID NO: 1843542 - DNA, 15 bp, Homo sapiens
tcatggcacattttc

SEQ ID NO: 1843543 - DNA, 15 bp, Homo sapiens
catggcacattttcc

SEQ ID NO: 1843544 - DNA, 15 bp, Homo sapiens
atggcacattttcct

SEQ ID NO: 1843545 - DNA, 15 bp, Homo sapiens
tggcacattttcctg

SEQ ID NO: 1843546 - DNA, 15 bp, Homo sapiens
ggcacattttcctgg

SEQ ID NO: 1843547 - DNA, 15 bp, Homo sapiens
gcacattttcctgga

SEQ ID NO: 1843548 - DNA, 15 bp, Homo sapiens
cacattttcctggag

SEQ ID NO: 1843549 - DNA, 15 bp, Homo sapiens
acattttcctggaga

SEQ ID NO: 1843550 - DNA, 15 bp, Homo sapiens
cattttcctggagaa

SEQ ID NO: 1843551 - DNA, 15 bp, Homo sapiens
attttcctggagaac

SEQ ID NO: 1843552 - DNA, 15 bp, Homo sapiens
ttttcctggagaacc

SEQ ID NO: 1843553 - DNA, 15 bp, Homo sapiens
tttcctggagaacca

SEQ ID NO: 1843554 - DNA, 15 bp, Homo sapiens
ttcctggagaaccag

SEQ ID NO: 1843555 - DNA, 15 bp, Homo sapiens
tcctggagaaccagt

SEQ ID NO: 1843556 - DNA, 15 bp, Homo sapiens
cctggagaaccagtt

SEQ ID NO: 1843557 - DNA, 15 bp, Homo sapiens
ctggagaaccagttc

SEQ ID NO: 1843558 - DNA, 15 bp, Homo sapiens
tggagaaccagttct

SEQ ID NO: 1843559 - DNA, 15 bp, Homo sapiens
ggagaaccagttctt

SEQ ID NO: 1843560 - DNA, 15 bp, Homo sapiens
gagaaccagttcttc

SEQ ID NO: 1843561 - DNA, 15 bp, Homo sapiens
agaaccagttcttct

SEQ ID NO: 1843562 - DNA, 15 bp, Homo sapiens
gaaccagttcttctt

SEQ ID NO: 1843563 - DNA, 15 bp, Homo sapiens
aaccagttcttcttg

SEQ ID NO: 1843564 - DNA, 15 bp, Homo sapiens
accagttcttcttga

SEQ ID NO: 1843565 - DNA, 15 bp, Homo sapiens
ccagttcttcttgaa

SEQ ID NO: 1843566 - DNA, 15 bp, Homo sapiens
cagttcttcttgaag

SEQ ID NO: 1843567 - DNA, 15 bp, Homo sapiens
agttcttcttgaagg

SEQ ID NO: 1843568 - DNA, 15 bp, Homo sapiens
gttcttcttgaaggt

SEQ ID NO: 1843569 - DNA, 15 bp, Homo sapiens
ttcttcttgaaggtt

SEQ ID NO: 1843570 - DNA, 15 bp, Homo sapiens
tcttcttgaaggttt

SEQ ID NO: 1843571 - DNA, 15 bp, Homo sapiens
cttcttgaaggtttg

SEQ ID NO: 1843572 - DNA, 15 bp, Homo sapiens
ttcttgaaggtttgg

SEQ ID NO: 1843573 - DNA, 15 bp, Homo sapiens
tcttgaaggtttggg

SEQ ID NO: 1843574 - DNA, 15 bp, Homo sapiens
cttgaaggtttggga

SEQ ID NO: 1843575 - DNA, 15 bp, Homo sapiens
ttgaaggtttgggaa

SEQ ID NO: 1843576 - DNA, 15 bp, Homo sapiens
tgaaggtttgggaat

SEQ ID NO: 1843577 - DNA, 15 bp, Homo sapiens
gaaggtttgggaatg

SEQ ID NO: 1843578 - DNA, 15 bp, Homo sapiens
aaggtttgggaatga

SEQ ID NO: 1843579 - DNA, 15 bp, Homo sapiens
aggtttgggaatgaa

SEQ ID NO: 1843580 - DNA, 15 bp, Homo sapiens
ggtttgggaatgaat

SEQ ID NO: 1843581 - DNA, 15 bp, Homo sapiens
gtttgggaatgaata

SEQ ID NO: 1843582 - DNA, 15 bp, Homo sapiens
tttgggaatgaatat

SEQ ID NO: 1843583 - DNA, 15 bp, Homo sapiens
ttgggaatgaatatt

SEQ ID NO: 1843584 - DNA, 15 bp, Homo sapiens
tgggaatgaatatta

SEQ ID NO: 1843585 - DNA, 15 bp, Homo sapiens
gggaatgaatattat

SEQ ID NO: 1843586 - DNA, 15 bp, Homo sapiens
ggaatgaatattatt

SEQ ID NO: 1843587 - DNA, 15 bp, Homo sapiens
gaatgaatattattt

SEQ ID NO: 1843588 - DNA, 15 bp, Homo sapiens
aatgaatattatttt

SEQ ID NO: 1843589 - DNA, 15 bp, Homo sapiens
atgaatattattttg

SEQ ID NO: 1843590 - DNA, 15 bp, Homo sapiens
tgaatattattttgt

SEQ ID NO: 1843591 - DNA, 15 bp, Homo sapiens
gaatattattttgta

SEQ ID NO: 1843592 - DNA, 15 bp, Homo sapiens
aatattattttgtat

SEQ ID NO: 1843593 - DNA, 15 bp, Homo sapiens
atattattttgtatt

SEQ ID NO: 1843594 - DNA, 15 bp, Homo sapiens
tattattttgtattc

SEQ ID NO: 1843595 - DNA, 15 bp, Homo sapiens
attattttgtattca

SEQ ID NO: 1843596 - DNA, 15 bp, Homo sapiens
ttattttgtattcaa

SEQ ID NO: 1843597 - DNA, 15 bp, Homo sapiens
tattttgtattcaat

SEQ ID NO: 1843598 - DNA, 15 bp, Homo sapiens
attttgtattcaatc

SEQ ID NO: 1843599 - DNA, 15 bp, Homo sapiens
ttttgtattcaatca

SEQ ID NO: 1843600 - DNA, 15 bp, Homo sapiens
tttgtattcaatcac

SEQ ID NO: 1843601 - DNA, 15 bp, Homo sapiens
ttgtattcaatcaca

SEQ ID NO: 1843602 - DNA, 15 bp, Homo sapiens
tgtattcaatcacat

SEQ ID NO: 1843603 - DNA, 15 bp, Homo sapiens
gtattcaatcacatt

SEQ ID NO: 1843604 - DNA, 15 bp, Homo sapiens
tattcaatcacattt

SEQ ID NO: 1843605 - DNA, 15 bp, Homo sapiens
attcaatcacatttg

SEQ ID NO: 1843606 - DNA, 15 bp, Homo sapiens
ttcaatcacatttgt

SEQ ID NO: 1843607 - DNA, 15 bp, Homo sapiens
tcaatcacatttgtc

SEQ ID NO: 1843608 - DNA, 15 bp, Homo sapiens
caatcacatttgtca

SEQ ID NO: 1843609 - DNA, 15 bp, Homo sapiens
aatcacatttgtcat

SEQ ID NO: 1843610 - DNA, 15 bp, Homo sapiens
atcacatttgtcatg

SEQ ID NO: 1843611 - DNA, 15 bp, Homo sapiens
tcacatttgtcatga

SEQ ID NO: 1843612 - DNA, 15 bp, Homo sapiens
cacatttgtcatgag

SEQ ID NO: 1843613 - DNA, 15 bp, Homo sapiens
acatttgtcatgagg

SEQ ID NO: 1843614 - DNA, 15 bp, Homo sapiens
catttgtcatgagga

SEQ ID NO: 1843615 - DNA, 15 bp, Homo sapiens
atttgtcatgaggag

SEQ ID NO: 1843616 - DNA, 15 bp, Homo sapiens
tttgtcatgaggagg

SEQ ID NO: 1843617 - DNA, 15 bp, Homo sapiens
ttgtcatgaggagga

SEQ ID NO: 1843618 - DNA, 15 bp, Homo sapiens
tgtcatgaggaggaa

SEQ ID NO: 1843619 - DNA, 15 bp, Homo sapiens
gtcatgaggaggaat

SEQ ID NO: 1843620 - DNA, 15 bp, Homo sapiens
tcatgaggaggaata

SEQ ID NO: 1843621 - DNA, 15 bp, Homo sapiens
catgaggaggaataa

SEQ ID NO: 1843622 - DNA, 15 bp, Homo sapiens
atgaggaggaataaa

SEQ ID NO: 1843623 - DNA, 15 bp, Homo sapiens
tgaggaggaataaaa

SEQ ID NO: 1843624 - DNA, 15 bp, Homo sapiens
gaggaggaataaaat

SEQ ID NO: 1843625 - DNA, 15 bp, Homo sapiens
aggaggaataaaata

SEQ ID NO: 1843626 - DNA, 15 bp, Homo sapiens
ggaggaataaaatat

SEQ ID NO: 1843627 - DNA, 15 bp, Homo sapiens
gaggaataaaatatg

SEQ ID NO: 1843628 - DNA, 15 bp, Homo sapiens
aggaataaaatatgc

SEQ ID NO: 1843629 - DNA, 15 bp, Homo sapiens
ggaataaaatatgca

SEQ ID NO: 1843630 - DNA, 15 bp, Homo sapiens
gaataaaatatgcat

SEQ ID NO: 1843631 - DNA, 15 bp, Homo sapiens
aataaaatatgcata

SEQ ID NO: 1843632 - DNA, 15 bp, Homo sapiens
taaaatatgcataca

SEQ ID NO: 1843633 - DNA, 15 bp, Homo sapiens
aaaatatgcatacat

SEQ ID NO: 1843634 - DNA, 15 bp, Homo sapiens
aaatatgcatacata

SEQ ID NO: 1843635 - DNA, 15 bp, Homo sapiens
aatatgcatacatat

SEQ ID NO: 1843636 - DNA, 15 bp, Homo sapiens
atatgcatacatatt

SEQ ID NO: 1843637 - DNA, 15 bp, Homo sapiens
tatgcatacatattt

SEQ ID NO: 1843638 - DNA, 15 bp, Homo sapiens
atgcatacatatttt

SEQ ID NO: 1843639 - DNA, 15 bp, Homo sapiens
tgcatacatatttta

SEQ ID NO: 1843640 - DNA, 15 bp, Homo sapiens
gcatacatattttaa

SEQ ID NO: 1843641 - DNA, 15 bp, Homo sapiens
catacatattttaaa

SEQ ID NO: 1843642 - DNA, 15 bp, Homo sapiens
atacatattttaaaa

SEQ ID NO: 1843643 - DNA, 15 bp, Homo sapiens
tacatattttaaaag

SEQ ID NO: 1843644 - DNA, 15 bp, Homo sapiens
acatattttaaaaga

SEQ ID NO: 1843645 - DNA, 15 bp, Homo sapiens
atattttaaaagata

SEQ ID NO: 1843646 - DNA, 15 bp, Homo sapiens
tattttaaaagataa

SEQ ID NO: 1843647 - DNA, 15 bp, Homo sapiens
attttaaaagataaa

SEQ ID NO: 1843648 - DNA, 15 bp, Homo sapiens
ttttaaaagataaaa

SEQ ID NO: 1843649 - DNA, 15 bp, Homo sapiens
tttaaaagataaaat

SEQ ID NO: 1843650 - DNA, 15 bp, Homo sapiens
ttaaaagataaaatg

SEQ ID NO: 1843651 - DNA, 15 bp, Homo sapiens
taaaagataaaatgc

SEQ ID NO: 1843652 - DNA, 15 bp, Homo sapiens
aaaagataaaatgca

SEQ ID NO: 1843653 - DNA, 15 bp, Homo sapiens
aaagataaaatgcaa

SEQ ID NO: 1843654 - DNA, 15 bp, Homo sapiens
aagataaaatgcaac

SEQ ID NO: 1843655 - DNA, 15 bp, Homo sapiens
agataaaatgcaaca

SEQ ID NO: 1843656 - DNA, 15 bp, Homo sapiens
gataaaatgcaacaa

SEQ ID NO: 1843657 - DNA, 15 bp, Homo sapiens
ataaaatgcaacaat

SEQ ID NO: 1843658 - DNA, 15 bp, Homo sapiens
taaaatgcaacaatt

SEQ ID NO: 1843659 - DNA, 15 bp, Homo sapiens
aaaatgcaacaattt

SEQ ID NO: 1843660 - DNA, 15 bp, Homo sapiens
aaatgcaacaattta

SEQ ID NO: 1843661 - DNA, 15 bp, Homo sapiens
aatgcaacaatttaa

SEQ ID NO: 1843662 - DNA, 15 bp, Homo sapiens
atgcaacaatttaaa

SEQ ID NO: 1843663 - DNA, 15 bp, Homo sapiens
tgcaacaatttaaag

SEQ ID NO: 1843664 - DNA, 15 bp, Homo sapiens
gcaacaatttaaaga

SEQ ID NO: 1843665 - DNA, 15 bp, Homo sapiens
caacaatttaaagaa

SEQ ID NO: 1843666 - DNA, 15 bp, Homo sapiens
aacaatttaaagaag

SEQ ID NO: 1843667 - DNA, 15 bp, Homo sapiens
acaatttaaagaagc

SEQ ID NO: 1843668 - DNA, 15 bp, Homo sapiens
caatttaaagaagct

SEQ ID NO: 1843669 - DNA, 15 bp, Homo sapiens
aatttaaagaagctt

SEQ ID NO: 1843670 - DNA, 15 bp, Homo sapiens
atttaaagaagcttc

SEQ ID NO: 1843671 - DNA, 15 bp, Homo sapiens
tttaaagaagcttcc

SEQ ID NO: 1843672 - DNA, 15 bp, Homo sapiens
ttaaagaagcttcct

SEQ ID NO: 1843673 - DNA, 15 bp, Homo sapiens
taaagaagcttcctg

SEQ ID NO: 1843674 - DNA, 15 bp, Homo sapiens
aaagaagcttcctgg

SEQ ID NO: 1843675 - DNA, 15 bp, Homo sapiens
aagaagcttcctggc

SEQ ID NO: 1843676 - DNA, 15 bp, Homo sapiens
agaagcttcctggct

SEQ ID NO: 1843677 - DNA, 15 bp, Homo sapiens
gaagcttcctggctg

SEQ ID NO: 1843678 - DNA, 15 bp, Homo sapiens
aagcttcctggctgg

SEQ ID NO: 1843679 - DNA, 15 bp, Homo sapiens
agcttcctggctgga

SEQ ID NO: 1843680 - DNA, 15 bp, Homo sapiens
gcttcctggctggac

SEQ ID NO: 1843681 - DNA, 15 bp, Homo sapiens
cttcctggctggaca

SEQ ID NO: 1843682 - DNA, 15 bp, Homo sapiens
ttcctggctggacat

SEQ ID NO: 1843683 - DNA, 15 bp, Homo sapiens
tcctggctggacatg

SEQ ID NO: 1843684 - DNA, 15 bp, Homo sapiens
cctggctggacatgg

SEQ ID NO: 1843685 - DNA, 15 bp, Homo sapiens
ctggctggacatggt

SEQ ID NO: 1843686 - DNA, 15 bp, Homo sapiens
tggctggacatggtg

SEQ ID NO: 1843687 - DNA, 15 bp, Homo sapiens
ggctggacatggtga

SEQ ID NO: 1843688 - DNA, 15 bp, Homo sapiens
gctggacatggtgac

SEQ ID NO: 1843689 - DNA, 15 bp, Homo sapiens
ctggacatggtgact

SEQ ID NO: 1843690 - DNA, 15 bp, Homo sapiens
tggacatggtgactc

SEQ ID NO: 1843691 - DNA, 15 bp, Homo sapiens
ggacatggtgactca

SEQ ID NO: 1843692 - DNA, 15 bp, Homo sapiens
gacatggtgactcat

SEQ ID NO: 1843693 - DNA, 15 bp, Homo sapiens
acatggtgactcatg

SEQ ID NO: 1843694 - DNA, 15 bp, Homo sapiens
catggtgactcatgc

SEQ ID NO: 1843695 - DNA, 15 bp, Homo sapiens
atggtgactcatgcc

SEQ ID NO: 1843696 - DNA, 15 bp, Homo sapiens
tggtgactcatgcct

SEQ ID NO: 1843697 - DNA, 15 bp, Homo sapiens
ggtgactcatgcctg

SEQ ID NO: 1843698 - DNA, 15 bp, Homo sapiens
ctcatgcctgtaata

SEQ ID NO: 1843699 - DNA, 15 bp, Homo sapiens
tcatgcctgtaatac

SEQ ID NO: 1843700 - DNA, 15 bp, Homo sapiens
catgcctgtaatacc

SEQ ID NO: 1843701 - DNA, 15 bp, Homo sapiens
atgcctgtaatacct

SEQ ID NO: 1843702 - DNA, 15 bp, Homo sapiens
tgcctgtaataccta

SEQ ID NO: 1843703 - DNA, 15 bp, Homo sapiens
gcctgtaatacctag

SEQ ID NO: 1843704 - DNA, 15 bp, Homo sapiens
cctgtaatacctagt

SEQ ID NO: 1843705 - DNA, 15 bp, Homo sapiens
ctgtaatacctagtg

SEQ ID NO: 1843706 - DNA, 15 bp, Homo sapiens
tgtaatacctagtga

SEQ ID NO: 1843707 - DNA, 15 bp, Homo sapiens
gtaatacctagtgat

SEQ ID NO: 1843708 - DNA, 15 bp, Homo sapiens
taatacctagtgatt

SEQ ID NO: 1843709 - DNA, 15 bp, Homo sapiens
aatacctagtgattt

SEQ ID NO: 1843710 - DNA, 15 bp, Homo sapiens
atacctagtgatttg

SEQ ID NO: 1843711 - DNA, 15 bp, Homo sapiens
tacctagtgatttgg

SEQ ID NO: 1843712 - DNA, 15 bp, Homo sapiens
acctagtgatttggg

SEQ ID NO: 1843713 - DNA, 15 bp, Homo sapiens
cctagtgatttggga

SEQ ID NO: 1843714 - DNA, 15 bp, Homo sapiens
ctagtgatttgggag

SEQ ID NO: 1843715 - DNA, 15 bp, Homo sapiens
tagtgatttgggagg

SEQ ID NO: 1843716 - DNA, 15 bp, Homo sapiens
agtgatttgggaggc

SEQ ID NO: 1843717 - DNA, 15 bp, Homo sapiens
gtgatttgggaggct

SEQ ID NO: 1843718 - DNA, 15 bp, Homo sapiens
tgatttgggaggctg

SEQ ID NO: 1843719 - DNA, 15 bp, Homo sapiens
gatttgggaggctga

SEQ ID NO: 1843720 - DNA, 15 bp, Homo sapiens
atttgggaggctgag

SEQ ID NO: 1843721 - DNA, 15 bp, Homo sapiens
aattgcttgagccca

SEQ ID NO: 1843722 - DNA, 15 bp, Homo sapiens
tgggggttcttcttt

SEQ ID NO: 1843723 - DNA, 15 bp, Homo sapiens
gggggttcttctttc

SEQ ID NO: 1843724 - DNA, 15 bp, Homo sapiens
ggggttcttctttct

SEQ ID NO: 1843725 - DNA, 15 bp, Homo sapiens
gggttcttctttctc

SEQ ID NO: 1843726 - DNA, 15 bp, Homo sapiens
ggttcttctttctcc

SEQ ID NO: 1843727 - DNA, 15 bp, Homo sapiens
gttcttctttctcct

SEQ ID NO: 1843728 - DNA, 15 bp, Homo sapiens
ttcttctttctcctt

SEQ ID NO: 1843729 - DNA, 15 bp, Homo sapiens
tcttctttctccttc

SEQ ID NO: 1843730 - DNA, 15 bp, Homo sapiens
cttctttctccttcc

SEQ ID NO: 1843731 - DNA, 15 bp, Homo sapiens
ttctttctccttcca

SEQ ID NO: 1843732 - DNA, 15 bp, Homo sapiens
tctttctccttccaa

SEQ ID NO: 1843733 - DNA, 15 bp, Homo sapiens
ctttctccttccaaa

SEQ ID NO: 1843734 - DNA, 15 bp, Homo sapiens
tttctccttccaaat

SEQ ID NO: 1843735 - DNA, 15 bp, Homo sapiens
ttctccttccaaatc

SEQ ID NO: 1843736 - DNA, 15 bp, Homo sapiens
tctccttccaaatca

SEQ ID NO: 1843737 - DNA, 15 bp, Homo sapiens
ctccttccaaatcag

SEQ ID NO: 1843738 - DNA, 15 bp, Homo sapiens
tccttccaaatcaga

SEQ ID NO: 1843739 - DNA, 15 bp, Homo sapiens
ccttccaaatcagac

SEQ ID NO: 1843740 - DNA, 15 bp, Homo sapiens
cttccaaatcagacg

SEQ ID NO: 1843741 - DNA, 15 bp, Homo sapiens
ttccaaatcagacgc

SEQ ID NO: 1843742 - DNA, 15 bp, Homo sapiens
tccaaatcagacgca

SEQ ID NO: 1843743 - DNA, 15 bp, Homo sapiens
ccaaatcagacgcaa

SEQ ID NO: 1843744 - DNA, 15 bp, Homo sapiens
caaatcagacgcaac

SEQ ID NO: 1843745 - DNA, 15 bp, Homo sapiens
aaatcagacgcaact

SEQ ID NO: 1843746 - DNA, 15 bp, Homo sapiens
aatcagacgcaactg

SEQ ID NO: 1843747 - DNA, 15 bp, Homo sapiens
atcagacgcaactga

SEQ ID NO: 1843748 - DNA, 15 bp, Homo sapiens
tcagacgcaactgaa

SEQ ID NO: 1843749 - DNA, 15 bp, Homo sapiens
cagacgcaactgaaa

SEQ ID NO: 1843750 - DNA, 15 bp, Homo sapiens
agacgcaactgaaag

SEQ ID NO: 1843751 - DNA, 15 bp, Homo sapiens
gacgcaactgaaagt

SEQ ID NO: 1843752 - DNA, 15 bp, Homo sapiens
acgcaactgaaagtc

SEQ ID NO: 1843753 - DNA, 15 bp, Homo sapiens
cgcaactgaaagtct

SEQ ID NO: 1843754 - DNA, 15 bp, Homo sapiens
gcaactgaaagtctg

SEQ ID NO: 1843755 - DNA, 15 bp, Homo sapiens
caactgaaagtctga

SEQ ID NO: 1843756 - DNA, 15 bp, Homo sapiens
aactgaaagtctgag

SEQ ID NO: 1843757 - DNA, 15 bp, Homo sapiens
actgaaagtctgagg

SEQ ID NO: 1843758 - DNA, 15 bp, Homo sapiens
ctgaaagtctgagga

SEQ ID NO: 1843759 - DNA, 15 bp, Homo sapiens
tgaaagtctgaggac

SEQ ID NO: 1843760 - DNA, 15 bp, Homo sapiens
gaaagtctgaggact

SEQ ID NO: 1843761 - DNA, 15 bp, Homo sapiens
aaagtctgaggactc

SEQ ID NO: 1843762 - DNA, 15 bp, Homo sapiens
aagtctgaggactca

SEQ ID NO: 1843763 - DNA, 15 bp, Homo sapiens
agtctgaggactcag

SEQ ID NO: 1843764 - DNA, 15 bp, Homo sapiens
gtctgaggactcagc

SEQ ID NO: 1843765 - DNA, 15 bp, Homo sapiens
tctgaggactcagct

SEQ ID NO: 1843766 - DNA, 15 bp, Homo sapiens
ctgaggactcagctt

SEQ ID NO: 1843767 - DNA, 15 bp, Homo sapiens
tgaggactcagcttc

SEQ ID NO: 1843768 - DNA, 15 bp, Homo sapiens
gaggactcagcttca

SEQ ID NO: 1843769 - DNA, 15 bp, Homo sapiens
aggactcagcttcaa

SEQ ID NO: 1843770 - DNA, 15 bp, Homo sapiens
ggactcagcttcaat

SEQ ID NO: 1843771 - DNA, 15 bp, Homo sapiens
gactcagcttcaatc

SEQ ID NO: 1843772 - DNA, 15 bp, Homo sapiens
actcagcttcaatct

SEQ ID NO: 1843773 - DNA, 15 bp, Homo sapiens
ctcagcttcaatctg

SEQ ID NO: 1843774 - DNA, 15 bp, Homo sapiens
tcagcttcaatctga

SEQ ID NO: 1843775 - DNA, 15 bp, Homo sapiens
cagcttcaatctgag

SEQ ID NO: 1843776 - DNA, 15 bp, Homo sapiens
agcttcaatctgagc

SEQ ID NO: 1843777 - DNA, 15 bp, Homo sapiens
gcttcaatctgagct

SEQ ID NO: 1843778 - DNA, 15 bp, Homo sapiens
cttcaatctgagctc

SEQ ID NO: 1843779 - DNA, 15 bp, Homo sapiens
ttcaatctgagctct

SEQ ID NO: 1843780 - DNA, 15 bp, Homo sapiens
tcaatctgagctctg

SEQ ID NO: 1843781 - DNA, 15 bp, Homo sapiens
caatctgagctctga

SEQ ID NO: 1843782 - DNA, 15 bp, Homo sapiens
aatctgagctctgat

SEQ ID NO: 1843783 - DNA, 15 bp, Homo sapiens
atctgagctctgatt

SEQ ID NO: 1843784 - DNA, 15 bp, Homo sapiens
tctgagctctgattt

SEQ ID NO: 1843785 - DNA, 15 bp, Homo sapiens
ctgagctctgatttc

SEQ ID NO: 1843786 - DNA, 15 bp, Homo sapiens
tgagctctgatttct

SEQ ID NO: 1843787 - DNA, 15 bp, Homo sapiens
gagctctgatttctc

SEQ ID NO: 1843788 - DNA, 15 bp, Homo sapiens
agctctgatttctct

SEQ ID NO: 1843789 - DNA, 15 bp, Homo sapiens
gctctgatttctcta

SEQ ID NO: 1843790 - DNA, 15 bp, Homo sapiens
ctctgatttctctag

SEQ ID NO: 1843791 - DNA, 15 bp, Homo sapiens
tctgatttctctaga

SEQ ID NO: 1843792 - DNA, 15 bp, Homo sapiens
ctgatttctctagag

SEQ ID NO: 1843793 - DNA, 15 bp, Homo sapiens
tgatttctctagagt

SEQ ID NO: 1843794 - DNA, 15 bp, Homo sapiens
gatttctctagagta

SEQ ID NO: 1843795 - DNA, 15 bp, Homo sapiens
atttctctagagtat

SEQ ID NO: 1843796 - DNA, 15 bp, Homo sapiens
tttctctagagtatc

SEQ ID NO: 1843797 - DNA, 15 bp, Homo sapiens
ttctctagagtatcc

SEQ ID NO: 1843798 - DNA, 15 bp, Homo sapiens
tctctagagtatcca

SEQ ID NO: 1843799 - DNA, 15 bp, Homo sapiens
ctctagagtatccag

SEQ ID NO: 1843800 - DNA, 15 bp, Homo sapiens
tctagagtatccagg

SEQ ID NO: 1843801 - DNA, 15 bp, Homo sapiens
ctagagtatccagga

SEQ ID NO: 1843802 - DNA, 15 bp, Homo sapiens
tagagtatccaggat

SEQ ID NO: 1843803 - DNA, 15 bp, Homo sapiens
agagtatccaggatg

SEQ ID NO: 1843804 - DNA, 15 bp, Homo sapiens
gagtatccaggatgg

SEQ ID NO: 1843805 - DNA, 15 bp, Homo sapiens
agtatccaggatgga

SEQ ID NO: 1843806 - DNA, 15 bp, Homo sapiens
gtatccaggatggaa

SEQ ID NO: 1843807 - DNA, 15 bp, Homo sapiens
tatccaggatggaaa

SEQ ID NO: 1843808 - DNA, 15 bp, Homo sapiens
atccaggatggaaaa

SEQ ID NO: 1843809 - DNA, 15 bp, Homo sapiens
tccaggatggaaaag

SEQ ID NO: 1843810 - DNA, 15 bp, Homo sapiens
ccaggatggaaaagg

SEQ ID NO: 1843811 - DNA, 15 bp, Homo sapiens
caggatggaaaaggg

SEQ ID NO: 1843812 - DNA, 15 bp, Homo sapiens
aggatggaaaagggg

SEQ ID NO: 1843813 - DNA, 15 bp, Homo sapiens
ggatggaaaagggga

SEQ ID NO: 1843814 - DNA, 15 bp, Homo sapiens
gatggaaaaggggat

SEQ ID NO: 1843815 - DNA, 15 bp, Homo sapiens
atggaaaaggggatg

SEQ ID NO: 1843816 - DNA, 15 bp, Homo sapiens
tggaaaaggggatgg

SEQ ID NO: 1843817 - DNA, 15 bp, Homo sapiens
ggaaaaggggatggt

SEQ ID NO: 1843818 - DNA, 15 bp, Homo sapiens
gaaaaggggatggta

SEQ ID NO: 1843819 - DNA, 15 bp, Homo sapiens
aaaaggggatggtaa

SEQ ID NO: 1843820 - DNA, 15 bp, Homo sapiens
aaaggggatggtaag

SEQ ID NO: 1843821 - DNA, 15 bp, Homo sapiens
aaggggatggtaaga

SEQ ID NO: 1843822 - DNA, 15 bp, Homo sapiens
aggggatggtaagat

SEQ ID NO: 1843823 - DNA, 15 bp, Homo sapiens
ggggatggtaagatg

SEQ ID NO: 1843824 - DNA, 15 bp, Homo sapiens
gggatggtaagatga

SEQ ID NO: 1843825 - DNA, 15 bp, Homo sapiens
ggatggtaagatgaa

SEQ ID NO: 1843826 - DNA, 15 bp, Homo sapiens
gatggtaagatgaag

SEQ ID NO: 1843827 - DNA, 15 bp, Homo sapiens
atggtaagatgaagt

SEQ ID NO: 1843828 - DNA, 15 bp, Homo sapiens
tggtaagatgaagtt

SEQ ID NO: 1843829 - DNA, 15 bp, Homo sapiens
ggtaagatgaagttt

SEQ ID NO: 1843830 - DNA, 15 bp, Homo sapiens
gtaagatgaagtttg

SEQ ID NO: 1843831 - DNA, 15 bp, Homo sapiens
taagatgaagtttgc

SEQ ID NO: 1843832 - DNA, 15 bp, Homo sapiens
aagatgaagtttgca

SEQ ID NO: 1843833 - DNA, 15 bp, Homo sapiens
agatgaagtttgcag

SEQ ID NO: 1843834 - DNA, 15 bp, Homo sapiens
gatgaagtttgcagg

SEQ ID NO: 1843835 - DNA, 15 bp, Homo sapiens
atgaagtttgcaggg

SEQ ID NO: 1843836 - DNA, 15 bp, Homo sapiens
tgaagtttgcaggga

SEQ ID NO: 1843837 - DNA, 15 bp, Homo sapiens
gaagtttgcagggag

SEQ ID NO: 1843838 - DNA, 15 bp, Homo sapiens
aagtttgcagggagg

SEQ ID NO: 1843839 - DNA, 15 bp, Homo sapiens
agtttgcagggaggg

SEQ ID NO: 1843840 - DNA, 15 bp, Homo sapiens
gtttgcagggagggc

SEQ ID NO: 1843841 - DNA, 15 bp, Homo sapiens
tttgcagggagggct

SEQ ID NO: 1843842 - DNA, 15 bp, Homo sapiens
ttgcagggagggctt

SEQ ID NO: 1843843 - DNA, 15 bp, Homo sapiens
tgcagggagggcttc

SEQ ID NO: 1843844 - DNA, 15 bp, Homo sapiens
gcagggagggcttcc

SEQ ID NO: 1843845 - DNA, 15 bp, Homo sapiens
cagggagggcttcct

SEQ ID NO: 1843846 - DNA, 15 bp, Homo sapiens
agggagggcttcctg

SEQ ID NO: 1843847 - DNA, 15 bp, Homo sapiens
gggagggcttcctgg

SEQ ID NO: 1843848 - DNA, 15 bp, Homo sapiens
gcttcctggaggaga

SEQ ID NO: 1843849 - DNA, 15 bp, Homo sapiens
cttcctggaggagag

SEQ ID NO: 1843850 - DNA, 15 bp, Homo sapiens
ttcctggaggagagg

SEQ ID NO: 1843851 - DNA, 15 bp, Homo sapiens
tcctggaggagaggg

SEQ ID NO: 1843852 - DNA, 15 bp, Homo sapiens
cctggaggagagggc

SEQ ID NO: 1843853 - DNA, 15 bp, Homo sapiens
ctggaggagagggct

SEQ ID NO: 1843854 - DNA, 15 bp, Homo sapiens
tggaggagagggctc

SEQ ID NO: 1843855 - DNA, 15 bp, Homo sapiens
ggaggagagggctct

SEQ ID NO: 1843856 - DNA, 15 bp, Homo sapiens
gaggagagggctctg

SEQ ID NO: 1843857 - DNA, 15 bp, Homo sapiens
aggagagggctctga

SEQ ID NO: 1843858 - DNA, 15 bp, Homo sapiens
ggagagggctctgaa

SEQ ID NO: 1843859 - DNA, 15 bp, Homo sapiens
gagagggctctgaaa

SEQ ID NO: 1843860 - DNA, 15 bp, Homo sapiens
agagggctctgaaac

SEQ ID NO: 1843861 - DNA, 15 bp, Homo sapiens
gagggctctgaaaca

SEQ ID NO: 1843862 - DNA, 15 bp, Homo sapiens
agggctctgaaacat

SEQ ID NO: 1843863 - DNA, 15 bp, Homo sapiens
gggctctgaaacatg

SEQ ID NO: 1843864 - DNA, 15 bp, Homo sapiens
ggctctgaaacatga

SEQ ID NO: 1843865 - DNA, 15 bp, Homo sapiens
gctctgaaacatgag

SEQ ID NO: 1843866 - DNA, 15 bp, Homo sapiens
ctctgaaacatgaga

SEQ ID NO: 1843867 - DNA, 15 bp, Homo sapiens
tctgaaacatgagag

SEQ ID NO: 1843868 - DNA, 15 bp, Homo sapiens
ctgaaacatgagagc

SEQ ID NO: 1843869 - DNA, 15 bp, Homo sapiens
tgaaacatgagagca

SEQ ID NO: 1843870 - DNA, 15 bp, Homo sapiens
gaaacatgagagcat

SEQ ID NO: 1843871 - DNA, 15 bp, Homo sapiens
aaacatgagagcatt

SEQ ID NO: 1843872 - DNA, 15 bp, Homo sapiens
aacatgagagcattc

SEQ ID NO: 1843873 - DNA, 15 bp, Homo sapiens
acatgagagcattcg

SEQ ID NO: 1843874 - DNA, 15 bp, Homo sapiens
catgagagcattcgg

SEQ ID NO: 1843875 - DNA, 15 bp, Homo sapiens
atgagagcattcggg

SEQ ID NO: 1843876 - DNA, 15 bp, Homo sapiens
tgagagcattcgggc

SEQ ID NO: 1843877 - DNA, 15 bp, Homo sapiens
gagagcattcgggca

SEQ ID NO: 1843878 - DNA, 15 bp, Homo sapiens
agagcattcgggcaa

SEQ ID NO: 1843879 - DNA, 15 bp, Homo sapiens
gagcattcgggcaaa

SEQ ID NO: 1843880 - DNA, 15 bp, Homo sapiens
agcattcgggcaaat

SEQ ID NO: 1843881 - DNA, 15 bp, Homo sapiens
gcattcgggcaaata

SEQ ID NO: 1843882 - DNA, 15 bp, Homo sapiens
cattcgggcaaatag

SEQ ID NO: 1843883 - DNA, 15 bp, Homo sapiens
attcgggcaaatagg

SEQ ID NO: 1843884 - DNA, 15 bp, Homo sapiens
ttcgggcaaatagga

SEQ ID NO: 1843885 - DNA, 15 bp, Homo sapiens
tcgggcaaataggaa

SEQ ID NO: 1843886 - DNA, 15 bp, Homo sapiens
cgggcaaataggaag

SEQ ID NO: 1843887 - DNA, 15 bp, Homo sapiens
gggcaaataggaagg

SEQ ID NO: 1843888 - DNA, 15 bp, Homo sapiens
ggcaaataggaaggg

SEQ ID NO: 1843889 - DNA, 15 bp, Homo sapiens
gcaaataggaagggc

SEQ ID NO: 1843890 - DNA, 15 bp, Homo sapiens
caaataggaagggca

SEQ ID NO: 1843891 - DNA, 15 bp, Homo sapiens
aaataggaagggcag

SEQ ID NO: 1843892 - DNA, 15 bp, Homo sapiens
aataggaagggcagg

SEQ ID NO: 1843893 - DNA, 15 bp, Homo sapiens
ataggaagggcaggt

SEQ ID NO: 1843894 - DNA, 15 bp, Homo sapiens
taggaagggcaggta

SEQ ID NO: 1843895 - DNA, 15 bp, Homo sapiens
aggaagggcaggtat

SEQ ID NO: 1843896 - DNA, 15 bp, Homo sapiens
ggaagggcaggtatt

SEQ ID NO: 1843897 - DNA, 15 bp, Homo sapiens
gaagggcaggtattt

SEQ ID NO: 1843898 - DNA, 15 bp, Homo sapiens
aagggcaggtatttt

SEQ ID NO: 1843899 - DNA, 15 bp, Homo sapiens
agggcaggtattttg

SEQ ID NO: 1843900 - DNA, 15 bp, Homo sapiens
gggcaggtattttgg

SEQ ID NO: 1843901 - DNA, 15 bp, Homo sapiens
ggcaggtattttggt

SEQ ID NO: 1843902 - DNA, 15 bp, Homo sapiens
gcaggtattttggtg

SEQ ID NO: 1843903 - DNA, 15 bp, Homo sapiens
caggtattttggtgg

SEQ ID NO: 1843904 - DNA, 15 bp, Homo sapiens
aggtattttggtgga

SEQ ID NO: 1843905 - DNA, 15 bp, Homo sapiens
ggtattttggtggat

SEQ ID NO: 1843906 - DNA, 15 bp, Homo sapiens
gtattttggtggatc

SEQ ID NO: 1843907 - DNA, 15 bp, Homo sapiens
tattttggtggatcc

SEQ ID NO: 1843908 - DNA, 15 bp, Homo sapiens
attttggtggatcca

SEQ ID NO: 1843909 - DNA, 15 bp, Homo sapiens
ttttggtggatccag

SEQ ID NO: 1843910 - DNA, 15 bp, Homo sapiens
tttggtggatccaga

SEQ ID NO: 1843911 - DNA, 15 bp, Homo sapiens
ttggtggatccagag

SEQ ID NO: 1843912 - DNA, 15 bp, Homo sapiens
tggtggatccagagg

SEQ ID NO: 1843913 - DNA, 15 bp, Homo sapiens
ggtggatccagaggc

SEQ ID NO: 1843914 - DNA, 15 bp, Homo sapiens
gtggatccagaggca

SEQ ID NO: 1843915 - DNA, 15 bp, Homo sapiens
tggatccagaggcag

SEQ ID NO: 1843916 - DNA, 15 bp, Homo sapiens
ggatccagaggcagg

SEQ ID NO: 1843917 - DNA, 15 bp, Homo sapiens
gatccagaggcaggt

SEQ ID NO: 1843918 - DNA, 15 bp, Homo sapiens
atccagaggcaggtg

SEQ ID NO: 1843919 - DNA, 15 bp, Homo sapiens
tccagaggcaggtgg

SEQ ID NO: 1843920 - DNA, 15 bp, Homo sapiens
ccagaggcaggtgga

SEQ ID NO: 1843921 - DNA, 15 bp, Homo sapiens
agaggcaggtggatt

SEQ ID NO: 1843922 - DNA, 15 bp, Homo sapiens
gaggcaggtggattc

SEQ ID NO: 1843923 - DNA, 15 bp, Homo sapiens
aggcaggtggattca

SEQ ID NO: 1843924 - DNA, 15 bp, Homo sapiens
ggcaggtggattcag

SEQ ID NO: 1843925 - DNA, 15 bp, Homo sapiens
gcaggtggattcaga

SEQ ID NO: 1843926 - DNA, 15 bp, Homo sapiens
caggtggattcagag

SEQ ID NO: 1843927 - DNA, 15 bp, Homo sapiens
aggtggattcagagg

SEQ ID NO: 1843928 - DNA, 15 bp, Homo sapiens
ggtggattcagaggt

SEQ ID NO: 1843929 - DNA, 15 bp, Homo sapiens
gtggattcagaggtg

SEQ ID NO: 1843930 - DNA, 15 bp, Homo sapiens
tggattcagaggtgg

SEQ ID NO: 1843931 - DNA, 15 bp, Homo sapiens
ggattcagaggtggg

SEQ ID NO: 1843932 - DNA, 15 bp, Homo sapiens
gattcagaggtgggt

SEQ ID NO: 1843933 - DNA, 15 bp, Homo sapiens
attcagaggtgggtg

SEQ ID NO: 1843934 - DNA, 15 bp, Homo sapiens
ttcagaggtgggtgg

SEQ ID NO: 1843935 - DNA, 15 bp, Homo sapiens
tcagaggtgggtggc

SEQ ID NO: 1843936 - DNA, 15 bp, Homo sapiens
cagaggtgggtggct

SEQ ID NO: 1843937 - DNA, 15 bp, Homo sapiens
agaggtgggtggctc

SEQ ID NO: 1843938 - DNA, 15 bp, Homo sapiens
gaggtgggtggctca

SEQ ID NO: 1843939 - DNA, 15 bp, Homo sapiens
aggtgggtggctcaa

SEQ ID NO: 1843940 - DNA, 15 bp, Homo sapiens
ggtgggtggctcaag

SEQ ID NO: 1843941 - DNA, 15 bp, Homo sapiens
gtgggtggctcaaga

SEQ ID NO: 1843942 - DNA, 15 bp, Homo sapiens
tgggtggctcaagag

SEQ ID NO: 1843943 - DNA, 15 bp, Homo sapiens
gggtggctcaagagt

SEQ ID NO: 1843944 - DNA, 15 bp, Homo sapiens
ggtggctcaagagta

SEQ ID NO: 1843945 - DNA, 15 bp, Homo sapiens
gtggctcaagagtac

SEQ ID NO: 1843946 - DNA, 15 bp, Homo sapiens
tggctcaagagtacg

SEQ ID NO: 1843947 - DNA, 15 bp, Homo sapiens
ggctcaagagtacgg

SEQ ID NO: 1843948 - DNA, 15 bp, Homo sapiens
gctcaagagtacggg

SEQ ID NO: 1843949 - DNA, 15 bp, Homo sapiens
ctcaagagtacgggc

SEQ ID NO: 1843950 - DNA, 15 bp, Homo sapiens
tcaagagtacgggcc

SEQ ID NO: 1843951 - DNA, 15 bp, Homo sapiens
caagagtacgggcct

SEQ ID NO: 1843952 - DNA, 15 bp, Homo sapiens
aagagtacgggcctc

SEQ ID NO: 1843953 - DNA, 15 bp, Homo sapiens
agagtacgggcctcc

SEQ ID NO: 1843954 - DNA, 15 bp, Homo sapiens
gagtacgggcctccg

SEQ ID NO: 1843955 - DNA, 15 bp, Homo sapiens
agtacgggcctccgt

SEQ ID NO: 1843956 - DNA, 15 bp, Homo sapiens
gtacgggcctccgtc

SEQ ID NO: 1843957 - DNA, 15 bp, Homo sapiens
tacgggcctccgtct

SEQ ID NO: 1843958 - DNA, 15 bp, Homo sapiens
acgggcctccgtctc

SEQ ID NO: 1843959 - DNA, 15 bp, Homo sapiens
cgggcctccgtctcc

SEQ ID NO: 1843960 - DNA, 15 bp, Homo sapiens
gggcctccgtctcct

SEQ ID NO: 1843961 - DNA, 15 bp, Homo sapiens
ggcctccgtctcctc

SEQ ID NO: 1843962 - DNA, 15 bp, Homo sapiens
gcctccgtctcctcg

SEQ ID NO: 1843963 - DNA, 15 bp, Homo sapiens
cctccgtctcctcgt

SEQ ID NO: 1843964 - DNA, 15 bp, Homo sapiens
ctccgtctcctcgtc

SEQ ID NO: 1843965 - DNA, 15 bp, Homo sapiens
tccgtctcctcgtct

SEQ ID NO: 1843966 - DNA, 15 bp, Homo sapiens
ccgtctcctcgtctt

SEQ ID NO: 1843967 - DNA, 15 bp, Homo sapiens
cgtctcctcgtcttc

SEQ ID NO: 1843968 - DNA, 15 bp, Homo sapiens
gtctcctcgtcttcc

SEQ ID NO: 1843969 - DNA, 15 bp, Homo sapiens
tctcctcgtcttcct

SEQ ID NO: 1843970 - DNA, 15 bp, Homo sapiens
ctcctcgtcttccta

SEQ ID NO: 1843971 - DNA, 15 bp, Homo sapiens
tcctcgtcttcctaa

SEQ ID NO: 1843972 - DNA, 15 bp, Homo sapiens
cctcgtcttcctaag

SEQ ID NO: 1843973 - DNA, 15 bp, Homo sapiens
ctcgtcttcctaagc

SEQ ID NO: 1843974 - DNA, 15 bp, Homo sapiens
tcgtcttcctaagca

SEQ ID NO: 1843975 - DNA, 15 bp, Homo sapiens
cgtcttcctaagcat

SEQ ID NO: 1843976 - DNA, 15 bp, Homo sapiens
gtcttcctaagcata

SEQ ID NO: 1843977 - DNA, 15 bp, Homo sapiens
tcttcctaagcatat

SEQ ID NO: 1843978 - DNA, 15 bp, Homo sapiens
cttcctaagcatatt

SEQ ID NO: 1843979 - DNA, 15 bp, Homo sapiens
ttcctaagcatattt

SEQ ID NO: 1843980 - DNA, 15 bp, Homo sapiens
tcctaagcatattta

SEQ ID NO: 1843981 - DNA, 15 bp, Homo sapiens
cctaagcatatttaa

SEQ ID NO: 1843982 - DNA, 15 bp, Homo sapiens
ctaagcatatttaac

SEQ ID NO: 1843983 - DNA, 15 bp, Homo sapiens
taagcatatttaact

SEQ ID NO: 1843984 - DNA, 15 bp, Homo sapiens
aagcatatttaactg

SEQ ID NO: 1843985 - DNA, 15 bp, Homo sapiens
agcatatttaactgt

SEQ ID NO: 1843986 - DNA, 15 bp, Homo sapiens
gcatatttaactgtg

SEQ ID NO: 1843987 - DNA, 15 bp, Homo sapiens
catatttaactgtga

SEQ ID NO: 1843988 - DNA, 15 bp, Homo sapiens
atatttaactgtgaa

SEQ ID NO: 1843989 - DNA, 15 bp, Homo sapiens
tatttaactgtgaat

SEQ ID NO: 1843990 - DNA, 15 bp, Homo sapiens
atttaactgtgaatg

SEQ ID NO: 1843991 - DNA, 15 bp, Homo sapiens
tttaactgtgaatga

SEQ ID NO: 1843992 - DNA, 15 bp, Homo sapiens
ttaactgtgaatgaa

SEQ ID NO: 1843993 - DNA, 15 bp, Homo sapiens
taactgtgaatgaag

SEQ ID NO: 1843994 - DNA, 15 bp, Homo sapiens
aactgtgaatgaagc

SEQ ID NO: 1843995 - DNA, 15 bp, Homo sapiens
actgtgaatgaagca

SEQ ID NO: 1843996 - DNA, 15 bp, Homo sapiens
ctgtgaatgaagcaa

SEQ ID NO: 1843997 - DNA, 15 bp, Homo sapiens
tgtgaatgaagcaag

SEQ ID NO: 1843998 - DNA, 15 bp, Homo sapiens
gtgaatgaagcaaga

SEQ ID NO: 1843999 - DNA, 15 bp, Homo sapiens
tgaatgaagcaagac

SEQ ID NO: 1844000 - DNA, 15 bp, Homo sapiens
gaatgaagcaagaca

SEQ ID NO: 1844001 - DNA, 15 bp, Homo sapiens
aatgaagcaagacaa

SEQ ID NO: 1844002 - DNA, 15 bp, Homo sapiens
atgaagcaagacaag

SEQ ID NO: 1844003 - DNA, 15 bp, Homo sapiens
tgaagcaagacaaga

SEQ ID NO: 1844004 - DNA, 15 bp, Homo sapiens
gaagcaagacaagag

SEQ ID NO: 1844005 - DNA, 15 bp, Homo sapiens
aagcaagacaagagg

SEQ ID NO: 1844006 - DNA, 15 bp, Homo sapiens
agcaagacaagaggt

SEQ ID NO: 1844007 - DNA, 15 bp, Homo sapiens
gcaagacaagaggtg

SEQ ID NO: 1844008 - DNA, 15 bp, Homo sapiens
caagacaagaggtgt

SEQ ID NO: 1844009 - DNA, 15 bp, Homo sapiens
aagacaagaggtgta

SEQ ID NO: 1844010 - DNA, 15 bp, Homo sapiens
agacaagaggtgtat

SEQ ID NO: 1844011 - DNA, 15 bp, Homo sapiens
gacaagaggtgtatt

SEQ ID NO: 1844012 - DNA, 15 bp, Homo sapiens
acaagaggtgtattt

SEQ ID NO: 1844013 - DNA, 15 bp, Homo sapiens
caagaggtgtatttc

SEQ ID NO: 1844014 - DNA, 15 bp, Homo sapiens
aagaggtgtatttct

SEQ ID NO: 1844015 - DNA, 15 bp, Homo sapiens
agaggtgtatttctc

SEQ ID NO: 1844016 - DNA, 15 bp, Homo sapiens
gaggtgtatttctcc

SEQ ID NO: 1844017 - DNA, 15 bp, Homo sapiens
aggtgtatttctcca

SEQ ID NO: 1844018 - DNA, 15 bp, Homo sapiens
ggtgtatttctccat

SEQ ID NO: 1844019 - DNA, 15 bp, Homo sapiens
gtgtatttctccatg

SEQ ID NO: 1844020 - DNA, 15 bp, Homo sapiens
tgtatttctccatgt

SEQ ID NO: 1844021 - DNA, 15 bp, Homo sapiens
gtatttctccatgta

SEQ ID NO: 1844022 - DNA, 15 bp, Homo sapiens
tatttctccatgtaa

SEQ ID NO: 1844023 - DNA, 15 bp, Homo sapiens
atttctccatgtaag

SEQ ID NO: 1844024 - DNA, 15 bp, Homo sapiens
tttctccatgtaagg

SEQ ID NO: 1844025 - DNA, 15 bp, Homo sapiens
ttctccatgtaaggg

SEQ ID NO: 1844026 - DNA, 15 bp, Homo sapiens
tctccatgtaaggga

SEQ ID NO: 1844027 - DNA, 15 bp, Homo sapiens
ctccatgtaagggaa

SEQ ID NO: 1844028 - DNA, 15 bp, Homo sapiens
tccatgtaagggaaa

SEQ ID NO: 1844029 - DNA, 15 bp, Homo sapiens
ccatgtaagggaaat

SEQ ID NO: 1844030 - DNA, 15 bp, Homo sapiens
catgtaagggaaatg

SEQ ID NO: 1844031 - DNA, 15 bp, Homo sapiens
atgtaagggaaatgc

SEQ ID NO: 1844032 - DNA, 15 bp, Homo sapiens
tgtaagggaaatgct

SEQ ID NO: 1844033 - DNA, 15 bp, Homo sapiens
gtaagggaaatgcta

SEQ ID NO: 1844034 - DNA, 15 bp, Homo sapiens
taagggaaatgctat

SEQ ID NO: 1844035 - DNA, 15 bp, Homo sapiens
aagggaaatgctatg

SEQ ID NO: 1844036 - DNA, 15 bp, Homo sapiens
agggaaatgctatga

SEQ ID NO: 1844037 - DNA, 15 bp, Homo sapiens
gggaaatgctatgaa

SEQ ID NO: 1844038 - DNA, 15 bp, Homo sapiens
ggaaatgctatgaag

SEQ ID NO: 1844039 - DNA, 15 bp, Homo sapiens
gaaatgctatgaaga

SEQ ID NO: 1844040 - DNA, 15 bp, Homo sapiens
aaatgctatgaagaa

SEQ ID NO: 1844041 - DNA, 15 bp, Homo sapiens
aatgctatgaagaaa

SEQ ID NO: 1844042 - DNA, 15 bp, Homo sapiens
atgctatgaagaaaa

SEQ ID NO: 1844043 - DNA, 15 bp, Homo sapiens
tgctatgaagaaaag

SEQ ID NO: 1844044 - DNA, 15 bp, Homo sapiens
gctatgaagaaaagg

SEQ ID NO: 1844045 - DNA, 15 bp, Homo sapiens
ctatgaagaaaaggc

SEQ ID NO: 1844046 - DNA, 15 bp, Homo sapiens
tatgaagaaaaggca

SEQ ID NO: 1844047 - DNA, 15 bp, Homo sapiens
atgaagaaaaggcat

SEQ ID NO: 1844048 - DNA, 15 bp, Homo sapiens
tgaagaaaaggcatt

SEQ ID NO: 1844049 - DNA, 15 bp, Homo sapiens
gaagaaaaggcattt

SEQ ID NO: 1844050 - DNA, 15 bp, Homo sapiens
aagaaaaggcatttc

SEQ ID NO: 1844051 - DNA, 15 bp, Homo sapiens
agaaaaggcatttct

SEQ ID NO: 1844052 - DNA, 15 bp, Homo sapiens
gaaaaggcatttctg

SEQ ID NO: 1844053 - DNA, 15 bp, Homo sapiens
aaaaggcatttctgg

SEQ ID NO: 1844054 - DNA, 15 bp, Homo sapiens
aaaggcatttctggt

SEQ ID NO: 1844055 - DNA, 15 bp, Homo sapiens
aaggcatttctggtg

SEQ ID NO: 1844056 - DNA, 15 bp, Homo sapiens
aggcatttctggtgt

SEQ ID NO: 1844057 - DNA, 15 bp, Homo sapiens
ggcatttctggtgtc

SEQ ID NO: 1844058 - DNA, 15 bp, Homo sapiens
gcatttctggtgtca

SEQ ID NO: 1844059 - DNA, 15 bp, Homo sapiens
catttctggtgtcag

SEQ ID NO: 1844060 - DNA, 15 bp, Homo sapiens
atttctggtgtcaga

SEQ ID NO: 1844061 - DNA, 15 bp, Homo sapiens
tttctggtgtcagaa

SEQ ID NO: 1844062 - DNA, 15 bp, Homo sapiens
ttctggtgtcagaat

SEQ ID NO: 1844063 - DNA, 15 bp, Homo sapiens
tctggtgtcagaatc

SEQ ID NO: 1844064 - DNA, 15 bp, Homo sapiens
ctggtgtcagaatca

SEQ ID NO: 1844065 - DNA, 15 bp, Homo sapiens
tggtgtcagaatcac

SEQ ID NO: 1844066 - DNA, 15 bp, Homo sapiens
ggtgtcagaatcacg

SEQ ID NO: 1844067 - DNA, 15 bp, Homo sapiens
gtgtcagaatcacga

SEQ ID NO: 1844068 - DNA, 15 bp, Homo sapiens
tgtcagaatcacgat

SEQ ID NO: 1844069 - DNA, 15 bp, Homo sapiens
gtcagaatcacgatt

SEQ ID NO: 1844070 - DNA, 15 bp, Homo sapiens
tcagaatcacgattg

SEQ ID NO: 1844071 - DNA, 15 bp, Homo sapiens
cagaatcacgattgt

SEQ ID NO: 1844072 - DNA, 15 bp, Homo sapiens
agaatcacgattgtc

SEQ ID NO: 1844073 - DNA, 15 bp, Homo sapiens
gaatcacgattgtca

SEQ ID NO: 1844074 - DNA, 15 bp, Homo sapiens
aatcacgattgtcag

SEQ ID NO: 1844075 - DNA, 15 bp, Homo sapiens
atcacgattgtcagt

SEQ ID NO: 1844076 - DNA, 15 bp, Homo sapiens
tcacgattgtcagtg

SEQ ID NO: 1844077 - DNA, 15 bp, Homo sapiens
cacgattgtcagtgg

SEQ ID NO: 1844078 - DNA, 15 bp, Homo sapiens
acgattgtcagtggg

SEQ ID NO: 1844079 - DNA, 15 bp, Homo sapiens
cgattgtcagtggga

SEQ ID NO: 1844080 - DNA, 15 bp, Homo sapiens
gattgtcagtgggag

SEQ ID NO: 1844081 - DNA, 15 bp, Homo sapiens
attgtcagtgggagt

SEQ ID NO: 1844082 - DNA, 15 bp, Homo sapiens
ttgtcagtgggagtg

SEQ ID NO: 1844083 - DNA, 15 bp, Homo sapiens
tgtcagtgggagtgt

SEQ ID NO: 1844084 - DNA, 15 bp, Homo sapiens
gtcagtgggagtgtc

SEQ ID NO: 1844085 - DNA, 15 bp, Homo sapiens
tcagtgggagtgtca

SEQ ID NO: 1844086 - DNA, 15 bp, Homo sapiens
cagtgggagtgtcag

SEQ ID NO: 1844087 - DNA, 15 bp, Homo sapiens
agtgggagtgtcagg

SEQ ID NO: 1844088 - DNA, 15 bp, Homo sapiens
gtgggagtgtcagga

SEQ ID NO: 1844089 - DNA, 15 bp, Homo sapiens
tgggagtgtcaggaa

SEQ ID NO: 1844090 - DNA, 15 bp, Homo sapiens
gggagtgtcaggaag

SEQ ID NO: 1844091 - DNA, 15 bp, Homo sapiens
ggagtgtcaggaaga

SEQ ID NO: 1844092 - DNA, 15 bp, Homo sapiens
gagtgtcaggaagaa

SEQ ID NO: 1844093 - DNA, 15 bp, Homo sapiens
agtgtcaggaagaaa

SEQ ID NO: 1844094 - DNA, 15 bp, Homo sapiens
gtgtcaggaagaaac

SEQ ID NO: 1844095 - DNA, 15 bp, Homo sapiens
tgtcaggaagaaact

SEQ ID NO: 1844096 - DNA, 15 bp, Homo sapiens
gtcaggaagaaactt

SEQ ID NO: 1844097 - DNA, 15 bp, Homo sapiens
tcaggaagaaacttc

SEQ ID NO: 1844098 - DNA, 15 bp, Homo sapiens
caggaagaaacttcg

SEQ ID NO: 1844099 - DNA, 15 bp, Homo sapiens
aggaagaaacttcgt

SEQ ID NO: 1844100 - DNA, 15 bp, Homo sapiens
ggaagaaacttcgtg

SEQ ID NO: 1844101 - DNA, 15 bp, Homo sapiens
gaagaaacttcgtga

SEQ ID NO: 1844102 - DNA, 15 bp, Homo sapiens
aagaaacttcgtgac

SEQ ID NO: 1844103 - DNA, 15 bp, Homo sapiens
agaaacttcgtgact

SEQ ID NO: 1844104 - DNA, 15 bp, Homo sapiens
gaaacttcgtgactt

SEQ ID NO: 1844105 - DNA, 15 bp, Homo sapiens
aaacttcgtgacttt

SEQ ID NO: 1844106 - DNA, 15 bp, Homo sapiens
aacttcgtgactttt

SEQ ID NO: 1844107 - DNA, 15 bp, Homo sapiens
acttcgtgacttttt

SEQ ID NO: 1844108 - DNA, 15 bp, Homo sapiens
cttcgtgactttttc

SEQ ID NO: 1844109 - DNA, 15 bp, Homo sapiens
ttcgtgactttttct

SEQ ID NO: 1844110 - DNA, 15 bp, Homo sapiens
tcgtgactttttctc

SEQ ID NO: 1844111 - DNA, 15 bp, Homo sapiens
cgtgactttttctct

SEQ ID NO: 1844112 - DNA, 15 bp, Homo sapiens
gtgactttttctctc

SEQ ID NO: 1844113 - DNA, 15 bp, Homo sapiens
tgactttttctctct

SEQ ID NO: 1844114 - DNA, 15 bp, Homo sapiens
gactttttctctctt

SEQ ID NO: 1844115 - DNA, 15 bp, Homo sapiens
actttttctctcttc

SEQ ID NO: 1844116 - DNA, 15 bp, Homo sapiens
ctttttctctcttcc

SEQ ID NO: 1844117 - DNA, 15 bp, Homo sapiens
tttttctctcttccc

SEQ ID NO: 1844118 - DNA, 15 bp, Homo sapiens
ttttctctcttccca

SEQ ID NO: 1844119 - DNA, 15 bp, Homo sapiens
tttctctcttcccag

SEQ ID NO: 1844120 - DNA, 15 bp, Homo sapiens
ttctctcttcccagg

SEQ ID NO: 1844121 - DNA, 15 bp, Homo sapiens
tctctcttcccaggc

SEQ ID NO: 1844122 - DNA, 15 bp, Homo sapiens
ctctcttcccaggcg

SEQ ID NO: 1844123 - DNA, 15 bp, Homo sapiens
tctcttcccaggcgc

SEQ ID NO: 1844124 - DNA, 15 bp, Homo sapiens
ctcttcccaggcgcc

SEQ ID NO: 1844125 - DNA, 15 bp, Homo sapiens
tcttcccaggcgccc

SEQ ID NO: 1844126 - DNA, 15 bp, Homo sapiens
cttcccaggcgcccc

SEQ ID NO: 1844127 - DNA, 15 bp, Homo sapiens
ttcccaggcgccccc

SEQ ID NO: 1844128 - DNA, 15 bp, Homo sapiens
tcccaggcgccccca

SEQ ID NO: 1844129 - DNA, 15 bp, Homo sapiens
cccaggcgcccccag

SEQ ID NO: 1844130 - DNA, 15 bp, Homo sapiens
ccaggcgcccccagc

SEQ ID NO: 1844131 - DNA, 15 bp, Homo sapiens
caggcgcccccagct

SEQ ID NO: 1844132 - DNA, 15 bp, Homo sapiens
aggcgcccccagctg

SEQ ID NO: 1844133 - DNA, 15 bp, Homo sapiens
ggcgcccccagctgt

SEQ ID NO: 1844134 - DNA, 15 bp, Homo sapiens
gcgcccccagctgtt

SEQ ID NO: 1844135 - DNA, 15 bp, Homo sapiens
cgcccccagctgtta

SEQ ID NO: 1844136 - DNA, 15 bp, Homo sapiens
gcccccagctgttag

SEQ ID NO: 1844137 - DNA, 15 bp, Homo sapiens
cccccagctgttagg

SEQ ID NO: 1844138 - DNA, 15 bp, Homo sapiens
ccccagctgttaggt

SEQ ID NO: 1844139 - DNA, 15 bp, Homo sapiens
cccagctgttaggtt

SEQ ID NO: 1844140 - DNA, 15 bp, Homo sapiens
ccagctgttaggttt

SEQ ID NO: 1844141 - DNA, 15 bp, Homo sapiens
cagctgttaggtttc

SEQ ID NO: 1844142 - DNA, 15 bp, Homo sapiens
agctgttaggtttca

SEQ ID NO: 1844143 - DNA, 15 bp, Homo sapiens
gctgttaggtttcat

SEQ ID NO: 1844144 - DNA, 15 bp, Homo sapiens
ctgttaggtttcatg

SEQ ID NO: 1844145 - DNA, 15 bp, Homo sapiens
tgttaggtttcatgg

SEQ ID NO: 1844146 - DNA, 15 bp, Homo sapiens
gttaggtttcatggc

SEQ ID NO: 1844147 - DNA, 15 bp, Homo sapiens
ttaggtttcatggca

SEQ ID NO: 1844148 - DNA, 15 bp, Homo sapiens
taggtttcatggcaa

SEQ ID NO: 1844149 - DNA, 15 bp, Homo sapiens
aggtttcatggcaac

SEQ ID NO: 1844150 - DNA, 15 bp, Homo sapiens
ggtttcatggcaacc

SEQ ID NO: 1844151 - DNA, 15 bp, Homo sapiens
gtttcatggcaaccc

SEQ ID NO: 1844152 - DNA, 15 bp, Homo sapiens
tttcatggcaaccca

SEQ ID NO: 1844153 - DNA, 15 bp, Homo sapiens
ttcatggcaacccaa

SEQ ID NO: 1844154 - DNA, 15 bp, Homo sapiens
tcatggcaacccaat

SEQ ID NO: 1844155 - DNA, 15 bp, Homo sapiens
catggcaacccaatg

SEQ ID NO: 1844156 - DNA, 15 bp, Homo sapiens
atggcaacccaatgt

SEQ ID NO: 1844157 - DNA, 15 bp, Homo sapiens
tggcaacccaatgtg

SEQ ID NO: 1844158 - DNA, 15 bp, Homo sapiens
ggcaacccaatgtgg

SEQ ID NO: 1844159 - DNA, 15 bp, Homo sapiens
gcaacccaatgtggt

SEQ ID NO: 1844160 - DNA, 15 bp, Homo sapiens
caacccaatgtggta

SEQ ID NO: 1844161 - DNA, 15 bp, Homo sapiens
aacccaatgtggtag

SEQ ID NO: 1844162 - DNA, 15 bp, Homo sapiens
acccaatgtggtaga

SEQ ID NO: 1844163 - DNA, 15 bp, Homo sapiens
cccaatgtggtagaa

SEQ ID NO: 1844164 - DNA, 15 bp, Homo sapiens
ccaatgtggtagaag

SEQ ID NO: 1844165 - DNA, 15 bp, Homo sapiens
caatgtggtagaagg

SEQ ID NO: 1844166 - DNA, 15 bp, Homo sapiens
aatgtggtagaaggc

SEQ ID NO: 1844167 - DNA, 15 bp, Homo sapiens
atgtggtagaaggca

SEQ ID NO: 1844168 - DNA, 15 bp, Homo sapiens
tgtggtagaaggcag

SEQ ID NO: 1844169 - DNA, 15 bp, Homo sapiens
gtggtagaaggcagt

SEQ ID NO: 1844170 - DNA, 15 bp, Homo sapiens
tggtagaaggcagtt

SEQ ID NO: 1844171 - DNA, 15 bp, Homo sapiens
ggtagaaggcagttt

SEQ ID NO: 1844172 - DNA, 15 bp, Homo sapiens
gtagaaggcagtttc

SEQ ID NO: 1844173 - DNA, 15 bp, Homo sapiens
tagaaggcagtttct

SEQ ID NO: 1844174 - DNA, 15 bp, Homo sapiens
agaaggcagtttctt

SEQ ID NO: 1844175 - DNA, 15 bp, Homo sapiens
gaaggcagtttcttt

SEQ ID NO: 1844176 - DNA, 15 bp, Homo sapiens
aaggcagtttctttt

SEQ ID NO: 1844177 - DNA, 15 bp, Homo sapiens
aggcagtttcttttc

SEQ ID NO: 1844178 - DNA, 15 bp, Homo sapiens
ggcagtttcttttcc

SEQ ID NO: 1844179 - DNA, 15 bp, Homo sapiens
gcagtttcttttcca

SEQ ID NO: 1844180 - DNA, 15 bp, Homo sapiens
cagtttcttttccat

SEQ ID NO: 1844181 - DNA, 15 bp, Homo sapiens
agtttcttttccatt

SEQ ID NO: 1844182 - DNA, 15 bp, Homo sapiens
gtttcttttccattc

SEQ ID NO: 1844183 - DNA, 15 bp, Homo sapiens
tttcttttccattct

SEQ ID NO: 1844184 - DNA, 15 bp, Homo sapiens
ttcttttccattctt

SEQ ID NO: 1844185 - DNA, 15 bp, Homo sapiens
tcttttccattcttg

SEQ ID NO: 1844186 - DNA, 15 bp, Homo sapiens
cttttccattcttgc

SEQ ID NO: 1844187 - DNA, 15 bp, Homo sapiens
ttttccattcttgct

SEQ ID NO: 1844188 - DNA, 15 bp, Homo sapiens
tttccattcttgctg

SEQ ID NO: 1844189 - DNA, 15 bp, Homo sapiens
ttccattcttgctgt

SEQ ID NO: 1844190 - DNA, 15 bp, Homo sapiens
tccattcttgctgtt

SEQ ID NO: 1844191 - DNA, 15 bp, Homo sapiens
ccattcttgctgtta

SEQ ID NO: 1844192 - DNA, 15 bp, Homo sapiens
cattcttgctgttag

SEQ ID NO: 1844193 - DNA, 15 bp, Homo sapiens
attcttgctgttaga

SEQ ID NO: 1844194 - DNA, 15 bp, Homo sapiens
ttcttgctgttagat

SEQ ID NO: 1844195 - DNA, 15 bp, Homo sapiens
tcttgctgttagatt

SEQ ID NO: 1844196 - DNA, 15 bp, Homo sapiens
cttgctgttagattt

SEQ ID NO: 1844197 - DNA, 15 bp, Homo sapiens
ttgctgttagatttt

SEQ ID NO: 1844198 - DNA, 15 bp, Homo sapiens
tgctgttagattttt

SEQ ID NO: 1844199 - DNA, 15 bp, Homo sapiens
gctgttagattttta

SEQ ID NO: 1844200 - DNA, 15 bp, Homo sapiens
ctgttagatttttat

SEQ ID NO: 1844201 - DNA, 15 bp, Homo sapiens
tgttagatttttatg

SEQ ID NO: 1844202 - DNA, 15 bp, Homo sapiens
gttagatttttatgt

SEQ ID NO: 1844203 - DNA, 15 bp, Homo sapiens
ttagatttttatgtt

SEQ ID NO: 1844204 - DNA, 15 bp, Homo sapiens
tagatttttatgttg

SEQ ID NO: 1844205 - DNA, 15 bp, Homo sapiens
agatttttatgttgt

SEQ ID NO: 1844206 - DNA, 15 bp, Homo sapiens
gatttttatgttgtg

SEQ ID NO: 1844207 - DNA, 15 bp, Homo sapiens
atttttatgttgtgt

SEQ ID NO: 1844208 - DNA, 15 bp, Homo sapiens
tttttatgttgtgtg

SEQ ID NO: 1844209 - DNA, 15 bp, Homo sapiens
ttttatgttgtgtga

SEQ ID NO: 1844210 - DNA, 15 bp, Homo sapiens
tttatgttgtgtgac

SEQ ID NO: 1844211 - DNA, 15 bp, Homo sapiens
ttatgttgtgtgacc

SEQ ID NO: 1844212 - DNA, 15 bp, Homo sapiens
tatgttgtgtgacct

SEQ ID NO: 1844213 - DNA, 15 bp, Homo sapiens
atgttgtgtgacctt

SEQ ID NO: 1844214 - DNA, 15 bp, Homo sapiens
tgttgtgtgaccttg

SEQ ID NO: 1844215 - DNA, 15 bp, Homo sapiens
gttgtgtgaccttgg

SEQ ID NO: 1844216 - DNA, 15 bp, Homo sapiens
ttgtgtgaccttggg

SEQ ID NO: 1844217 - DNA, 15 bp, Homo sapiens
tgtgtgaccttgggg

SEQ ID NO: 1844218 - DNA, 15 bp, Homo sapiens
gtgtgaccttggggc

SEQ ID NO: 1844219 - DNA, 15 bp, Homo sapiens
tgtgaccttggggct

SEQ ID NO: 1844220 - DNA, 15 bp, Homo sapiens
gtgaccttggggctg

SEQ ID NO: 1844221 - DNA, 15 bp, Homo sapiens
tgaccttggggctgc

SEQ ID NO: 1844222 - DNA, 15 bp, Homo sapiens
gaccttggggctgcc

SEQ ID NO: 1844223 - DNA, 15 bp, Homo sapiens
accttggggctgcct

SEQ ID NO: 1844224 - DNA, 15 bp, Homo sapiens
ccttggggctgcctt

SEQ ID NO: 1844225 - DNA, 15 bp, Homo sapiens
cttggggctgcctta

SEQ ID NO: 1844226 - DNA, 15 bp, Homo sapiens
ttggggctgccttag

SEQ ID NO: 1844227 - DNA, 15 bp, Homo sapiens
tggggctgccttagg

SEQ ID NO: 1844228 - DNA, 15 bp, Homo sapiens
ggggctgccttaggg

SEQ ID NO: 1844229 - DNA, 15 bp, Homo sapiens
gggctgccttagggc

SEQ ID NO: 1844230 - DNA, 15 bp, Homo sapiens
ggctgccttagggcc

SEQ ID NO: 1844231 - DNA, 15 bp, Homo sapiens
gctgccttagggcct

SEQ ID NO: 1844232 - DNA, 15 bp, Homo sapiens
ctgccttagggcctc

SEQ ID NO: 1844233 - DNA, 15 bp, Homo sapiens
tgccttagggcctct

SEQ ID NO: 1844234 - DNA, 15 bp, Homo sapiens
gccttagggcctctc

SEQ ID NO: 1844235 - DNA, 15 bp, Homo sapiens
ccttagggcctctct

SEQ ID NO: 1844236 - DNA, 15 bp, Homo sapiens
cttagggcctctctg

SEQ ID NO: 1844237 - DNA, 15 bp, Homo sapiens
ttagggcctctctgt

SEQ ID NO: 1844238 - DNA, 15 bp, Homo sapiens
tagggcctctctgtc

SEQ ID NO: 1844239 - DNA, 15 bp, Homo sapiens
agggcctctctgtcc

SEQ ID NO: 1844240 - DNA, 15 bp, Homo sapiens
gggcctctctgtcct

SEQ ID NO: 1844241 - DNA, 15 bp, Homo sapiens
ggcctctctgtcctt

SEQ ID NO: 1844242 - DNA, 15 bp, Homo sapiens
gcctctctgtccttc

SEQ ID NO: 1844243 - DNA, 15 bp, Homo sapiens
cctctctgtccttca

SEQ ID NO: 1844244 - DNA, 15 bp, Homo sapiens
ctctctgtccttcat

SEQ ID NO: 1844245 - DNA, 15 bp, Homo sapiens
tctctgtccttcatg

SEQ ID NO: 1844246 - DNA, 15 bp, Homo sapiens
ctctgtccttcatgg

SEQ ID NO: 1844247 - DNA, 15 bp, Homo sapiens
tctgtccttcatggg

SEQ ID NO: 1844248 - DNA, 15 bp, Homo sapiens
ctgtccttcatgggt

SEQ ID NO: 1844249 - DNA, 15 bp, Homo sapiens
tgtccttcatgggtc

SEQ ID NO: 1844250 - DNA, 15 bp, Homo sapiens
gtccttcatgggtct

SEQ ID NO: 1844251 - DNA, 15 bp, Homo sapiens
tccttcatgggtctc

SEQ ID NO: 1844252 - DNA, 15 bp, Homo sapiens
ccttcatgggtctca

SEQ ID NO: 1844253 - DNA, 15 bp, Homo sapiens
cttcatgggtctcac

SEQ ID NO: 1844254 - DNA, 15 bp, Homo sapiens
ttcatgggtctcacc

SEQ ID NO: 1844255 - DNA, 15 bp, Homo sapiens
tcatgggtctcacct

SEQ ID NO: 1844256 - DNA, 15 bp, Homo sapiens
catgggtctcacctg

SEQ ID NO: 1844257 - DNA, 15 bp, Homo sapiens
atgggtctcacctgg

SEQ ID NO: 1844258 - DNA, 15 bp, Homo sapiens
tgggtctcacctggc

SEQ ID NO: 1844259 - DNA, 15 bp, Homo sapiens
gggtctcacctggca

SEQ ID NO: 1844260 - DNA, 15 bp, Homo sapiens
ggtctcacctggcag

SEQ ID NO: 1844261 - DNA, 15 bp, Homo sapiens
gtctcacctggcaga

SEQ ID NO: 1844262 - DNA, 15 bp, Homo sapiens
tctcacctggcagag

SEQ ID NO: 1844263 - DNA, 15 bp, Homo sapiens
ctcacctggcagagg

SEQ ID NO: 1844264 - DNA, 15 bp, Homo sapiens
tcacctggcagagga

SEQ ID NO: 1844265 - DNA, 15 bp, Homo sapiens
cacctggcagaggag

SEQ ID NO: 1844266 - DNA, 15 bp, Homo sapiens
acctggcagaggagg

SEQ ID NO: 1844267 - DNA, 15 bp, Homo sapiens
cctggcagaggaggg

SEQ ID NO: 1844268 - DNA, 15 bp, Homo sapiens
ctggcagaggagggg

SEQ ID NO: 1844269 - DNA, 15 bp, Homo sapiens
tggcagaggaggggg

SEQ ID NO: 1844270 - DNA, 15 bp, Homo sapiens
ggcagaggaggggga

SEQ ID NO: 1844271 - DNA, 15 bp, Homo sapiens
gcagaggagggggat

SEQ ID NO: 1844272 - DNA, 15 bp, Homo sapiens
cagaggagggggata

SEQ ID NO: 1844273 - DNA, 15 bp, Homo sapiens
agaggagggggatac

SEQ ID NO: 1844274 - DNA, 15 bp, Homo sapiens
gaggagggggataca

SEQ ID NO: 1844275 - DNA, 15 bp, Homo sapiens
aggagggggatacac

SEQ ID NO: 1844276 - DNA, 15 bp, Homo sapiens
ggagggggatacaca

SEQ ID NO: 1844277 - DNA, 15 bp, Homo sapiens
gagggggatacacag

SEQ ID NO: 1844278 - DNA, 15 bp, Homo sapiens
agggggatacacagg

SEQ ID NO: 1844279 - DNA, 15 bp, Homo sapiens
gggggatacacaggg

SEQ ID NO: 1844280 - DNA, 15 bp, Homo sapiens
ggggatacacagggt

SEQ ID NO: 1844281 - DNA, 15 bp, Homo sapiens
gggatacacagggtg

SEQ ID NO: 1844282 - DNA, 15 bp, Homo sapiens
ggatacacagggtga

SEQ ID NO: 1844283 - DNA, 15 bp, Homo sapiens
gatacacagggtgat

SEQ ID NO: 1844284 - DNA, 15 bp, Homo sapiens
atacacagggtgatt

SEQ ID NO: 1844285 - DNA, 15 bp, Homo sapiens
tacacagggtgattt

SEQ ID NO: 1844286 - DNA, 15 bp, Homo sapiens
acacagggtgatttc

SEQ ID NO: 1844287 - DNA, 15 bp, Homo sapiens
cacagggtgatttcc

SEQ ID NO: 1844288 - DNA, 15 bp, Homo sapiens
acagggtgatttcca

SEQ ID NO: 1844289 - DNA, 15 bp, Homo sapiens
cagggtgatttccat

SEQ ID NO: 1844290 - DNA, 15 bp, Homo sapiens
agggtgatttccata

SEQ ID NO: 1844291 - DNA, 15 bp, Homo sapiens
gggtgatttccatag

SEQ ID NO: 1844292 - DNA, 15 bp, Homo sapiens
ggtgatttccatagg

SEQ ID NO: 1844293 - DNA, 15 bp, Homo sapiens
gtgatttccataggg

SEQ ID NO: 1844294 - DNA, 15 bp, Homo sapiens
tgatttccataggga

SEQ ID NO: 1844295 - DNA, 15 bp, Homo sapiens
gatttccatagggac

SEQ ID NO: 1844296 - DNA, 15 bp, Homo sapiens
atttccatagggact

SEQ ID NO: 1844297 - DNA, 15 bp, Homo sapiens
tttccatagggactt

SEQ ID NO: 1844298 - DNA, 15 bp, Homo sapiens
ttccatagggactta

SEQ ID NO: 1844299 - DNA, 15 bp, Homo sapiens
tccatagggacttac

SEQ ID NO: 1844300 - DNA, 15 bp, Homo sapiens
ccatagggacttaca

SEQ ID NO: 1844301 - DNA, 15 bp, Homo sapiens
catagggacttacag

SEQ ID NO: 1844302 - DNA, 15 bp, Homo sapiens
atagggacttacagc

SEQ ID NO: 1844303 - DNA, 15 bp, Homo sapiens
tagggacttacagct

SEQ ID NO: 1844304 - DNA, 15 bp, Homo sapiens
agggacttacagctc

SEQ ID NO: 1844305 - DNA, 15 bp, Homo sapiens
gggacttacagctct

SEQ ID NO: 1844306 - DNA, 15 bp, Homo sapiens
ggacttacagctcta

SEQ ID NO: 1844307 - DNA, 15 bp, Homo sapiens
gacttacagctctaa

SEQ ID NO: 1844308 - DNA, 15 bp, Homo sapiens
acttacagctctaaa

SEQ ID NO: 1844309 - DNA, 15 bp, Homo sapiens
cttacagctctaaaa

SEQ ID NO: 1844310 - DNA, 15 bp, Homo sapiens
ttacagctctaaaat

SEQ ID NO: 1844311 - DNA, 15 bp, Homo sapiens
tacagctctaaaatg

SEQ ID NO: 1844312 - DNA, 15 bp, Homo sapiens
acagctctaaaatgc

SEQ ID NO: 1844313 - DNA, 15 bp, Homo sapiens
cagctctaaaatgct

SEQ ID NO: 1844314 - DNA, 15 bp, Homo sapiens
agctctaaaatgctc

SEQ ID NO: 1844315 - DNA, 15 bp, Homo sapiens
gctctaaaatgctcg

SEQ ID NO: 1844316 - DNA, 15 bp, Homo sapiens
ctctaaaatgctcga

SEQ ID NO: 1844317 - DNA, 15 bp, Homo sapiens
tctaaaatgctcgag

SEQ ID NO: 1844318 - DNA, 15 bp, Homo sapiens
ctaaaatgctcgagt

SEQ ID NO: 1844319 - DNA, 15 bp, Homo sapiens
taaaatgctcgagtg

SEQ ID NO: 1844320 - DNA, 15 bp, Homo sapiens
aaaatgctcgagtgt

SEQ ID NO: 1844321 - DNA, 15 bp, Homo sapiens
aaatgctcgagtgta

SEQ ID NO: 1844322 - DNA, 15 bp, Homo sapiens
aatgctcgagtgtat

SEQ ID NO: 1844323 - DNA, 15 bp, Homo sapiens
atgctcgagtgtatg

SEQ ID NO: 1844324 - DNA, 15 bp, Homo sapiens
tgctcgagtgtatga

SEQ ID NO: 1844325 - DNA, 15 bp, Homo sapiens
gctcgagtgtatgat

SEQ ID NO: 1844326 - DNA, 15 bp, Homo sapiens
ctcgagtgtatgatc

SEQ ID NO: 1844327 - DNA, 15 bp, Homo sapiens
tcgagtgtatgatct

SEQ ID NO: 1844328 - DNA, 15 bp, Homo sapiens
cgagtgtatgatcta

SEQ ID NO: 1844329 - DNA, 15 bp, Homo sapiens
gagtgtatgatctaa

SEQ ID NO: 1844330 - DNA, 15 bp, Homo sapiens
agtgtatgatctaat

SEQ ID NO: 1844331 - DNA, 15 bp, Homo sapiens
gtgtatgatctaatc

SEQ ID NO: 1844332 - DNA, 15 bp, Homo sapiens
tgtatgatctaatca

SEQ ID NO: 1844333 - DNA, 15 bp, Homo sapiens
gtatgatctaatcat

SEQ ID NO: 1844334 - DNA, 15 bp, Homo sapiens
tatgatctaatcatg

SEQ ID NO: 1844335 - DNA, 15 bp, Homo sapiens
atgatctaatcatga

SEQ ID NO: 1844336 - DNA, 15 bp, Homo sapiens
tgatctaatcatgat

SEQ ID NO: 1844337 - DNA, 15 bp, Homo sapiens
gatctaatcatgatg

SEQ ID NO: 1844338 - DNA, 15 bp, Homo sapiens
atctaatcatgatga

SEQ ID NO: 1844339 - DNA, 15 bp, Homo sapiens
tctaatcatgatgac

SEQ ID NO: 1844340 - DNA, 15 bp, Homo sapiens
ctaatcatgatgaca

SEQ ID NO: 1844341 - DNA, 15 bp, Homo sapiens
taatcatgatgacac

SEQ ID NO: 1844342 - DNA, 15 bp, Homo sapiens
aatcatgatgacaca

SEQ ID NO: 1844343 - DNA, 15 bp, Homo sapiens
atcatgatgacacac

SEQ ID NO: 1844344 - DNA, 15 bp, Homo sapiens
tcatgatgacacaca

SEQ ID NO: 1844345 - DNA, 15 bp, Homo sapiens
catgatgacacacag

SEQ ID NO: 1844346 - DNA, 15 bp, Homo sapiens
atgatgacacacagt

SEQ ID NO: 1844347 - DNA, 15 bp, Homo sapiens
tgatgacacacagtc

SEQ ID NO: 1844348 - DNA, 15 bp, Homo sapiens
gatgacacacagtca

SEQ ID NO: 1844349 - DNA, 15 bp, Homo sapiens
atgacacacagtcag

SEQ ID NO: 1844350 - DNA, 15 bp, Homo sapiens
tgacacacagtcagc

SEQ ID NO: 1844351 - DNA, 15 bp, Homo sapiens
gacacacagtcagcc

SEQ ID NO: 1844352 - DNA, 15 bp, Homo sapiens
acacacagtcagcca

SEQ ID NO: 1844353 - DNA, 15 bp, Homo sapiens
cacacagtcagccac

SEQ ID NO: 1844354 - DNA, 15 bp, Homo sapiens
acacagtcagccaca

SEQ ID NO: 1844355 - DNA, 15 bp, Homo sapiens
cacagtcagccacag

SEQ ID NO: 1844356 - DNA, 15 bp, Homo sapiens
acagtcagccacagt

SEQ ID NO: 1844357 - DNA, 15 bp, Homo sapiens
cagtcagccacagtg

SEQ ID NO: 1844358 - DNA, 15 bp, Homo sapiens
agtcagccacagtga

SEQ ID NO: 1844359 - DNA, 15 bp, Homo sapiens
gtcagccacagtgaa

SEQ ID NO: 1844360 - DNA, 15 bp, Homo sapiens
tcagccacagtgaaa

SEQ ID NO: 1844361 - DNA, 15 bp, Homo sapiens
cagccacagtgaaat

SEQ ID NO: 1844362 - DNA, 15 bp, Homo sapiens
agccacagtgaaatc

SEQ ID NO: 1844363 - DNA, 15 bp, Homo sapiens
gccacagtgaaatcc

SEQ ID NO: 1844364 - DNA, 15 bp, Homo sapiens
ccacagtgaaatccc

SEQ ID NO: 1844365 - DNA, 15 bp, Homo sapiens
cacagtgaaatccct

SEQ ID NO: 1844366 - DNA, 15 bp, Homo sapiens
acagtgaaatccctg

SEQ ID NO: 1844367 - DNA, 15 bp, Homo sapiens
cagtgaaatccctga

SEQ ID NO: 1844368 - DNA, 15 bp, Homo sapiens
agtgaaatccctgac

SEQ ID NO: 1844369 - DNA, 15 bp, Homo sapiens
gtgaaatccctgaca

SEQ ID NO: 1844370 - DNA, 15 bp, Homo sapiens
tgaaatccctgacac

SEQ ID NO: 1844371 - DNA, 15 bp, Homo sapiens
gaaatccctgacaca

SEQ ID NO: 1844372 - DNA, 15 bp, Homo sapiens
aaatccctgacacat

SEQ ID NO: 1844373 - DNA, 15 bp, Homo sapiens
aatccctgacacatc

SEQ ID NO: 1844374 - DNA, 15 bp, Homo sapiens
atccctgacacatct

SEQ ID NO: 1844375 - DNA, 15 bp, Homo sapiens
tccctgacacatctc

SEQ ID NO: 1844376 - DNA, 15 bp, Homo sapiens
ccctgacacatctca

SEQ ID NO: 1844377 - DNA, 15 bp, Homo sapiens
cctgacacatctcaa

SEQ ID NO: 1844378 - DNA, 15 bp, Homo sapiens
ctgacacatctcaaa

SEQ ID NO: 1844379 - DNA, 15 bp, Homo sapiens
tgacacatctcaaat

SEQ ID NO: 1844380 - DNA, 15 bp, Homo sapiens
gacacatctcaaatt

SEQ ID NO: 1844381 - DNA, 15 bp, Homo sapiens
acacatctcaaattt

SEQ ID NO: 1844382 - DNA, 15 bp, Homo sapiens
cacatctcaaatttg

SEQ ID NO: 1844383 - DNA, 15 bp, Homo sapiens
acatctcaaatttga

SEQ ID NO: 1844384 - DNA, 15 bp, Homo sapiens
catctcaaatttgaa

SEQ ID NO: 1844385 - DNA, 15 bp, Homo sapiens
atctcaaatttgaac

SEQ ID NO: 1844386 - DNA, 15 bp, Homo sapiens
tctcaaatttgaact

SEQ ID NO: 1844387 - DNA, 15 bp, Homo sapiens
ctcaaatttgaactg

SEQ ID NO: 1844388 - DNA, 15 bp, Homo sapiens
tcaaatttgaactgc

SEQ ID NO: 1844389 - DNA, 15 bp, Homo sapiens
caaatttgaactgca

SEQ ID NO: 1844390 - DNA, 15 bp, Homo sapiens
aaatttgaactgcat

SEQ ID NO: 1844391 - DNA, 15 bp, Homo sapiens
aatttgaactgcatc

SEQ ID NO: 1844392 - DNA, 15 bp, Homo sapiens
atttgaactgcatct

SEQ ID NO: 1844393 - DNA, 15 bp, Homo sapiens
tttgaactgcatctt

SEQ ID NO: 1844394 - DNA, 15 bp, Homo sapiens
ttgaactgcatcttt

SEQ ID NO: 1844395 - DNA, 15 bp, Homo sapiens
tgaactgcatcttta

SEQ ID NO: 1844396 - DNA, 15 bp, Homo sapiens
gaactgcatctttat

SEQ ID NO: 1844397 - DNA, 15 bp, Homo sapiens
aactgcatctttatg

SEQ ID NO: 1844398 - DNA, 15 bp, Homo sapiens
actgcatctttatga

SEQ ID NO: 1844399 - DNA, 15 bp, Homo sapiens
ctgcatctttatgag

SEQ ID NO: 1844400 - DNA, 15 bp, Homo sapiens
tgcatctttatgagt

SEQ ID NO: 1844401 - DNA, 15 bp, Homo sapiens
gcatctttatgagtg

SEQ ID NO: 1844402 - DNA, 15 bp, Homo sapiens
catctttatgagtgg

SEQ ID NO: 1844403 - DNA, 15 bp, Homo sapiens
atctttatgagtgga

SEQ ID NO: 1844404 - DNA, 15 bp, Homo sapiens
tctttatgagtggaa

SEQ ID NO: 1844405 - DNA, 15 bp, Homo sapiens
ctttatgagtggaaa

SEQ ID NO: 1844406 - DNA, 15 bp, Homo sapiens
tttatgagtggaaaa

SEQ ID NO: 1844407 - DNA, 15 bp, Homo sapiens
ttatgagtggaaaaa

SEQ ID NO: 1844408 - DNA, 15 bp, Homo sapiens
tatgagtggaaaaac

SEQ ID NO: 1844409 - DNA, 15 bp, Homo sapiens
atgagtggaaaaact

SEQ ID NO: 1844410 - DNA, 15 bp, Homo sapiens
tgagtggaaaaactg

SEQ ID NO: 1844411 - DNA, 15 bp, Homo sapiens
gagtggaaaaactgt

SEQ ID NO: 1844412 - DNA, 15 bp, Homo sapiens
agtggaaaaactgtt

SEQ ID NO: 1844413 - DNA, 15 bp, Homo sapiens
gtggaaaaactgttt

SEQ ID NO: 1844414 - DNA, 15 bp, Homo sapiens
tggaaaaactgtttc

SEQ ID NO: 1844415 - DNA, 15 bp, Homo sapiens
ggaaaaactgtttcc

SEQ ID NO: 1844416 - DNA, 15 bp, Homo sapiens
gaaaaactgtttcct

SEQ ID NO: 1844417 - DNA, 15 bp, Homo sapiens
aaaaactgtttcctg

SEQ ID NO: 1844418 - DNA, 15 bp, Homo sapiens
aaaactgtttcctgc

SEQ ID NO: 1844419 - DNA, 15 bp, Homo sapiens
aaactgtttcctgcc

SEQ ID NO: 1844420 - DNA, 15 bp, Homo sapiens
aactgtttcctgccc

SEQ ID NO: 1844421 - DNA, 15 bp, Homo sapiens
actgtttcctgcccc

SEQ ID NO: 1844422 - DNA, 15 bp, Homo sapiens
ctgtttcctgcccca

SEQ ID NO: 1844423 - DNA, 15 bp, Homo sapiens
tgtttcctgccccac

SEQ ID NO: 1844424 - DNA, 15 bp, Homo sapiens
gtttcctgccccaca

SEQ ID NO: 1844425 - DNA, 15 bp, Homo sapiens
tttcctgccccacag

SEQ ID NO: 1844426 - DNA, 15 bp, Homo sapiens
ttcctgccccacagg

SEQ ID NO: 1844427 - DNA, 15 bp, Homo sapiens
tcctgccccacagga

SEQ ID NO: 1844428 - DNA, 15 bp, Homo sapiens
cctgccccacaggac

SEQ ID NO: 1844429 - DNA, 15 bp, Homo sapiens
ctgccccacaggaca

SEQ ID NO: 1844430 - DNA, 15 bp, Homo sapiens
tgccccacaggacat

SEQ ID NO: 1844431 - DNA, 15 bp, Homo sapiens
gccccacaggacatt

SEQ ID NO: 1844432 - DNA, 15 bp, Homo sapiens
ccccacaggacattt

SEQ ID NO: 1844433 - DNA, 15 bp, Homo sapiens
cccacaggacatttt

SEQ ID NO: 1844434 - DNA, 15 bp, Homo sapiens
ccacaggacattttg

SEQ ID NO: 1844435 - DNA, 15 bp, Homo sapiens
cacaggacattttga

SEQ ID NO: 1844436 - DNA, 15 bp, Homo sapiens
acaggacattttgat

SEQ ID NO: 1844437 - DNA, 15 bp, Homo sapiens
caggacattttgatt

SEQ ID NO: 1844438 - DNA, 15 bp, Homo sapiens
aggacattttgattt

SEQ ID NO: 1844439 - DNA, 15 bp, Homo sapiens
ggacattttgattta

SEQ ID NO: 1844440 - DNA, 15 bp, Homo sapiens
gacattttgatttaa

SEQ ID NO: 1844441 - DNA, 15 bp, Homo sapiens
acattttgatttaac

SEQ ID NO: 1844442 - DNA, 15 bp, Homo sapiens
cattttgatttaact

SEQ ID NO: 1844443 - DNA, 15 bp, Homo sapiens
attttgatttaacta

SEQ ID NO: 1844444 - DNA, 15 bp, Homo sapiens
ttttgatttaactag

SEQ ID NO: 1844445 - DNA, 15 bp, Homo sapiens
tttgatttaactagg

SEQ ID NO: 1844446 - DNA, 15 bp, Homo sapiens
ttgatttaactagga

SEQ ID NO: 1844447 - DNA, 15 bp, Homo sapiens
tgatttaactaggac

SEQ ID NO: 1844448 - DNA, 15 bp, Homo sapiens
gatttaactaggaca

SEQ ID NO: 1844449 - DNA, 15 bp, Homo sapiens
atttaactaggacac

SEQ ID NO: 1844450 - DNA, 15 bp, Homo sapiens
tttaactaggacaca

SEQ ID NO: 1844451 - DNA, 15 bp, Homo sapiens
ttaactaggacacac

SEQ ID NO: 1844452 - DNA, 15 bp, Homo sapiens
taactaggacacacc

SEQ ID NO: 1844453 - DNA, 15 bp, Homo sapiens
aactaggacacacct

SEQ ID NO: 1844454 - DNA, 15 bp, Homo sapiens
actaggacacacctg

SEQ ID NO: 1844455 - DNA, 15 bp, Homo sapiens
ctaggacacacctga

SEQ ID NO: 1844456 - DNA, 15 bp, Homo sapiens
taggacacacctgac

SEQ ID NO: 1844457 - DNA, 15 bp, Homo sapiens
aggacacacctgacc

SEQ ID NO: 1844458 - DNA, 15 bp, Homo sapiens
ggacacacctgaccc

SEQ ID NO: 1844459 - DNA, 15 bp, Homo sapiens
gacacacctgaccct

SEQ ID NO: 1844460 - DNA, 15 bp, Homo sapiens
acacacctgaccctg

SEQ ID NO: 1844461 - DNA, 15 bp, Homo sapiens
cacacctgaccctgg

SEQ ID NO: 1844462 - DNA, 15 bp, Homo sapiens
acacctgaccctggt

SEQ ID NO: 1844463 - DNA, 15 bp, Homo sapiens
cacctgaccctggtc

SEQ ID NO: 1844464 - DNA, 15 bp, Homo sapiens
acctgaccctggtct

SEQ ID NO: 1844465 - DNA, 15 bp, Homo sapiens
cctgaccctggtctg

SEQ ID NO: 1844466 - DNA, 15 bp, Homo sapiens
ctgaccctggtctgc

SEQ ID NO: 1844467 - DNA, 15 bp, Homo sapiens
tgaccctggtctgct

SEQ ID NO: 1844468 - DNA, 15 bp, Homo sapiens
gaccctggtctgctc

SEQ ID NO: 1844469 - DNA, 15 bp, Homo sapiens
accctggtctgctca

SEQ ID NO: 1844470 - DNA, 15 bp, Homo sapiens
ccctggtctgctcac

SEQ ID NO: 1844471 - DNA, 15 bp, Homo sapiens
cctggtctgctcaca

SEQ ID NO: 1844472 - DNA, 15 bp, Homo sapiens
ctggtctgctcacag

SEQ ID NO: 1844473 - DNA, 15 bp, Homo sapiens
tggtctgctcacaga

SEQ ID NO: 1844474 - DNA, 15 bp, Homo sapiens
ggtctgctcacagac

SEQ ID NO: 1844475 - DNA, 15 bp, Homo sapiens
gtctgctcacagaca

SEQ ID NO: 1844476 - DNA, 15 bp, Homo sapiens
tctgctcacagacag

SEQ ID NO: 1844477 - DNA, 15 bp, Homo sapiens
ctgctcacagacaga

SEQ ID NO: 1844478 - DNA, 15 bp, Homo sapiens
tgctcacagacagag

SEQ ID NO: 1844479 - DNA, 15 bp, Homo sapiens
gctcacagacagaga

SEQ ID NO: 1844480 - DNA, 15 bp, Homo sapiens
ctcacagacagagag

SEQ ID NO: 1844481 - DNA, 15 bp, Homo sapiens
tcacagacagagaga

SEQ ID NO: 1844482 - DNA, 15 bp, Homo sapiens
cacagacagagagaa

SEQ ID NO: 1844483 - DNA, 15 bp, Homo sapiens
acagacagagagaat

SEQ ID NO: 1844484 - DNA, 15 bp, Homo sapiens
cagacagagagaatt

SEQ ID NO: 1844485 - DNA, 15 bp, Homo sapiens
agacagagagaattt

SEQ ID NO: 1844486 - DNA, 15 bp, Homo sapiens
gacagagagaatttg

SEQ ID NO: 1844487 - DNA, 15 bp, Homo sapiens
acagagagaatttgt

SEQ ID NO: 1844488 - DNA, 15 bp, Homo sapiens
cagagagaatttgtt

SEQ ID NO: 1844489 - DNA, 15 bp, Homo sapiens
agagagaatttgttc

SEQ ID NO: 1844490 - DNA, 15 bp, Homo sapiens
gagagaatttgttct

SEQ ID NO: 1844491 - DNA, 15 bp, Homo sapiens
agagaatttgttctg

SEQ ID NO: 1844492 - DNA, 15 bp, Homo sapiens
gagaatttgttctgt

SEQ ID NO: 1844493 - DNA, 15 bp, Homo sapiens
agaatttgttctgtg

SEQ ID NO: 1844494 - DNA, 15 bp, Homo sapiens
gaatttgttctgtgg

SEQ ID NO: 1844495 - DNA, 15 bp, Homo sapiens
aatttgttctgtggc

SEQ ID NO: 1844496 - DNA, 15 bp, Homo sapiens
atttgttctgtggcc

SEQ ID NO: 1844497 - DNA, 15 bp, Homo sapiens
tttgttctgtggccc

SEQ ID NO: 1844498 - DNA, 15 bp, Homo sapiens
ttgttctgtggccca

SEQ ID NO: 1844499 - DNA, 15 bp, Homo sapiens
tgttctgtggcccaa

SEQ ID NO: 1844500 - DNA, 15 bp, Homo sapiens
gttctgtggcccaag

SEQ ID NO: 1844501 - DNA, 15 bp, Homo sapiens
ttctgtggcccaagg

SEQ ID NO: 1844502 - DNA, 15 bp, Homo sapiens
tctgtggcccaaggc

SEQ ID NO: 1844503 - DNA, 15 bp, Homo sapiens
ctgtggcccaaggcc

SEQ ID NO: 1844504 - DNA, 15 bp, Homo sapiens
tgtggcccaaggcct

SEQ ID NO: 1844505 - DNA, 15 bp, Homo sapiens
gtggcccaaggcctc

SEQ ID NO: 1844506 - DNA, 15 bp, Homo sapiens
tggcccaaggcctct

SEQ ID NO: 1844507 - DNA, 15 bp, Homo sapiens
ggcccaaggcctctg

SEQ ID NO: 1844508 - DNA, 15 bp, Homo sapiens
gcccaaggcctctgc

SEQ ID NO: 1844509 - DNA, 15 bp, Homo sapiens
cccaaggcctctgcc

SEQ ID NO: 1844510 - DNA, 15 bp, Homo sapiens
ccaaggcctctgcct

SEQ ID NO: 1844511 - DNA, 15 bp, Homo sapiens
caaggcctctgcctg

SEQ ID NO: 1844512 - DNA, 15 bp, Homo sapiens
aaggcctctgcctgc

SEQ ID NO: 1844513 - DNA, 15 bp, Homo sapiens
aggcctctgcctgcc

SEQ ID NO: 1844514 - DNA, 15 bp, Homo sapiens
ggcctctgcctgccc

SEQ ID NO: 1844515 - DNA, 15 bp, Homo sapiens
gcctctgcctgcccc

SEQ ID NO: 1844516 - DNA, 15 bp, Homo sapiens
cctctgcctgcccct

SEQ ID NO: 1844517 - DNA, 15 bp, Homo sapiens
ctctgcctgcccctg

SEQ ID NO: 1844518 - DNA, 15 bp, Homo sapiens
tctgcctgcccctgc

SEQ ID NO: 1844519 - DNA, 15 bp, Homo sapiens
ctgcctgcccctgct

SEQ ID NO: 1844520 - DNA, 15 bp, Homo sapiens
tgcctgcccctgctc

SEQ ID NO: 1844521 - DNA, 15 bp, Homo sapiens
gcctgcccctgctcc

SEQ ID NO: 1844522 - DNA, 15 bp, Homo sapiens
cctgcccctgctccc

SEQ ID NO: 1844523 - DNA, 15 bp, Homo sapiens
ctgcccctgctccca

SEQ ID NO: 1844524 - DNA, 15 bp, Homo sapiens
tgcccctgctcccac

SEQ ID NO: 1844525 - DNA, 15 bp, Homo sapiens
gcccctgctcccacc

SEQ ID NO: 1844526 - DNA, 15 bp, Homo sapiens
cccctgctcccaccc

SEQ ID NO: 1844527 - DNA, 15 bp, Homo sapiens
ccctgctcccacccc

SEQ ID NO: 1844528 - DNA, 15 bp, Homo sapiens
cctgctcccacccca

SEQ ID NO: 1844529 - DNA, 15 bp, Homo sapiens
ctgctcccaccccac

SEQ ID NO: 1844530 - DNA, 15 bp, Homo sapiens
tgctcccaccccacc

SEQ ID NO: 1844531 - DNA, 15 bp, Homo sapiens
gctcccaccccacca

SEQ ID NO: 1844532 - DNA, 15 bp, Homo sapiens
ctcccaccccaccat

SEQ ID NO: 1844533 - DNA, 15 bp, Homo sapiens
tcccaccccaccatg

SEQ ID NO: 1844534 - DNA, 15 bp, Homo sapiens
cccaccccaccatgg

SEQ ID NO: 1844535 - DNA, 15 bp, Homo sapiens
ccaccccaccatggg

SEQ ID NO: 1844536 - DNA, 15 bp, Homo sapiens
caccccaccatgggt

SEQ ID NO: 1844537 - DNA, 15 bp, Homo sapiens
accccaccatgggta

SEQ ID NO: 1844538 - DNA, 15 bp, Homo sapiens
ccccaccatgggtag

SEQ ID NO: 1844539 - DNA, 15 bp, Homo sapiens
cccaccatgggtagc

SEQ ID NO: 1844540 - DNA, 15 bp, Homo sapiens
ccaccatgggtagca

SEQ ID NO: 1844541 - DNA, 15 bp, Homo sapiens
caccatgggtagcag

SEQ ID NO: 1844542 - DNA, 15 bp, Homo sapiens
accatgggtagcagt

SEQ ID NO: 1844543 - DNA, 15 bp, Homo sapiens
ccatgggtagcagtg

SEQ ID NO: 1844544 - DNA, 15 bp, Homo sapiens
catgggtagcagtgg

SEQ ID NO: 1844545 - DNA, 15 bp, Homo sapiens
atgggtagcagtggc

SEQ ID NO: 1844546 - DNA, 15 bp, Homo sapiens
tgggtagcagtggcc

SEQ ID NO: 1844547 - DNA, 15 bp, Homo sapiens
gggtagcagtggcca

SEQ ID NO: 1844548 - DNA, 15 bp, Homo sapiens
ggtagcagtggccac

SEQ ID NO: 1844549 - DNA, 15 bp, Homo sapiens
gtagcagtggccacg

SEQ ID NO: 1844550 - DNA, 15 bp, Homo sapiens
tagcagtggccacgt

SEQ ID NO: 1844551 - DNA, 15 bp, Homo sapiens
agcagtggccacgtg

SEQ ID NO: 1844552 - DNA, 15 bp, Homo sapiens
gcagtggccacgtgg

SEQ ID NO: 1844553 - DNA, 15 bp, Homo sapiens
cagtggccacgtggt

SEQ ID NO: 1844554 - DNA, 15 bp, Homo sapiens
agtggccacgtggta

SEQ ID NO: 1844555 - DNA, 15 bp, Homo sapiens
gtggccacgtggtac

SEQ ID NO: 1844556 - DNA, 15 bp, Homo sapiens
tggccacgtggtact

SEQ ID NO: 1844557 - DNA, 15 bp, Homo sapiens
ggccacgtggtactt

SEQ ID NO: 1844558 - DNA, 15 bp, Homo sapiens
gccacgtggtacttg

SEQ ID NO: 1844559 - DNA, 15 bp, Homo sapiens
ccacgtggtacttga

SEQ ID NO: 1844560 - DNA, 15 bp, Homo sapiens
cacgtggtacttgag

SEQ ID NO: 1844561 - DNA, 15 bp, Homo sapiens
acgtggtacttgagg

SEQ ID NO: 1844562 - DNA, 15 bp, Homo sapiens
cgtggtacttgagga

SEQ ID NO: 1844563 - DNA, 15 bp, Homo sapiens
gtggtacttgaggac

SEQ ID NO: 1844564 - DNA, 15 bp, Homo sapiens
tggtacttgaggaca

SEQ ID NO: 1844565 - DNA, 15 bp, Homo sapiens
ggtacttgaggacag

SEQ ID NO: 1844566 - DNA, 15 bp, Homo sapiens
gtacttgaggacagc

SEQ ID NO: 1844567 - DNA, 15 bp, Homo sapiens
tacttgaggacagca

SEQ ID NO: 1844568 - DNA, 15 bp, Homo sapiens
acttgaggacagcat

SEQ ID NO: 1844569 - DNA, 15 bp, Homo sapiens
cttgaggacagcatc

SEQ ID NO: 1844570 - DNA, 15 bp, Homo sapiens
ttgaggacagcatcc

SEQ ID NO: 1844571 - DNA, 15 bp, Homo sapiens
tgaggacagcatcct

SEQ ID NO: 1844572 - DNA, 15 bp, Homo sapiens
gaggacagcatcctg

SEQ ID NO: 1844573 - DNA, 15 bp, Homo sapiens
aggacagcatcctgg

SEQ ID NO: 1844574 - DNA, 15 bp, Homo sapiens
ggacagcatcctgga

SEQ ID NO: 1844575 - DNA, 15 bp, Homo sapiens
gacagcatcctggaa

SEQ ID NO: 1844576 - DNA, 15 bp, Homo sapiens
acagcatcctggaac

SEQ ID NO: 1844577 - DNA, 15 bp, Homo sapiens
cagcatcctggaact

SEQ ID NO: 1844578 - DNA, 15 bp, Homo sapiens
agcatcctggaactt

SEQ ID NO: 1844579 - DNA, 15 bp, Homo sapiens
gcatcctggaacttg

SEQ ID NO: 1844580 - DNA, 15 bp, Homo sapiens
catcctggaacttgc

SEQ ID NO: 1844581 - DNA, 15 bp, Homo sapiens
atcctggaacttgcc

SEQ ID NO: 1844582 - DNA, 15 bp, Homo sapiens
tcctggaacttgccc

SEQ ID NO: 1844583 - DNA, 15 bp, Homo sapiens
cctggaacttgccca

SEQ ID NO: 1844584 - DNA, 15 bp, Homo sapiens
ctggaacttgcccag

SEQ ID NO: 1844585 - DNA, 15 bp, Homo sapiens
tggaacttgcccagg

SEQ ID NO: 1844586 - DNA, 15 bp, Homo sapiens
ggaacttgcccagga

SEQ ID NO: 1844587 - DNA, 15 bp, Homo sapiens
gaacttgcccaggag

SEQ ID NO: 1844588 - DNA, 15 bp, Homo sapiens
aacttgcccaggagt

SEQ ID NO: 1844589 - DNA, 15 bp, Homo sapiens
acttgcccaggagtc

SEQ ID NO: 1844590 - DNA, 15 bp, Homo sapiens
cttgcccaggagtcc

SEQ ID NO: 1844591 - DNA, 15 bp, Homo sapiens
ttgcccaggagtccg

SEQ ID NO: 1844592 - DNA, 15 bp, Homo sapiens
tgcccaggagtccgc

SEQ ID NO: 1844593 - DNA, 15 bp, Homo sapiens
gcccaggagtccgct

SEQ ID NO: 1844594 - DNA, 15 bp, Homo sapiens
cccaggagtccgctg

SEQ ID NO: 1844595 - DNA, 15 bp, Homo sapiens
ccaggagtccgctgc

SEQ ID NO: 1844596 - DNA, 15 bp, Homo sapiens
caggagtccgctgca

SEQ ID NO: 1844597 - DNA, 15 bp, Homo sapiens
aggagtccgctgcat

SEQ ID NO: 1844598 - DNA, 15 bp, Homo sapiens
ggagtccgctgcatg

SEQ ID NO: 1844599 - DNA, 15 bp, Homo sapiens
gagtccgctgcatgc

SEQ ID NO: 1844600 - DNA, 15 bp, Homo sapiens
agtccgctgcatgct

SEQ ID NO: 1844601 - DNA, 15 bp, Homo sapiens
gtccgctgcatgctg

SEQ ID NO: 1844602 - DNA, 15 bp, Homo sapiens
tccgctgcatgctgg

SEQ ID NO: 1844603 - DNA, 15 bp, Homo sapiens
ccgctgcatgctggc

SEQ ID NO: 1844604 - DNA, 15 bp, Homo sapiens
cgctgcatgctggct

SEQ ID NO: 1844605 - DNA, 15 bp, Homo sapiens
gctgcatgctggctt

SEQ ID NO: 1844606 - DNA, 15 bp, Homo sapiens
ctgcatgctggcttt

SEQ ID NO: 1844607 - DNA, 15 bp, Homo sapiens
tgcatgctggctttc

SEQ ID NO: 1844608 - DNA, 15 bp, Homo sapiens
gcatgctggctttct

SEQ ID NO: 1844609 - DNA, 15 bp, Homo sapiens
catgctggctttctc

SEQ ID NO: 1844610 - DNA, 15 bp, Homo sapiens
atgctggctttctct

SEQ ID NO: 1844611 - DNA, 15 bp, Homo sapiens
tgctggctttctctc

SEQ ID NO: 1844612 - DNA, 15 bp, Homo sapiens
gctggctttctctct

SEQ ID NO: 1844613 - DNA, 15 bp, Homo sapiens
ctggctttctctctt

SEQ ID NO: 1844614 - DNA, 15 bp, Homo sapiens
tggctttctctcttc

SEQ ID NO: 1844615 - DNA, 15 bp, Homo sapiens
ggctttctctcttct

SEQ ID NO: 1844616 - DNA, 15 bp, Homo sapiens
gctttctctcttctg

SEQ ID NO: 1844617 - DNA, 15 bp, Homo sapiens
ctttctctcttctgc

SEQ ID NO: 1844618 - DNA, 15 bp, Homo sapiens
tttctctcttctgca

SEQ ID NO: 1844619 - DNA, 15 bp, Homo sapiens
ttctctcttctgcag

SEQ ID NO: 1844620 - DNA, 15 bp, Homo sapiens
tctctcttctgcaga

SEQ ID NO: 1844621 - DNA, 15 bp, Homo sapiens
ctctcttctgcagag

SEQ ID NO: 1844622 - DNA, 15 bp, Homo sapiens
tctcttctgcagaga

SEQ ID NO: 1844623 - DNA, 15 bp, Homo sapiens
ctcttctgcagagac

SEQ ID NO: 1844624 - DNA, 15 bp, Homo sapiens
tcttctgcagagacg

SEQ ID NO: 1844625 - DNA, 15 bp, Homo sapiens
cttctgcagagacga

SEQ ID NO: 1844626 - DNA, 15 bp, Homo sapiens
ttctgcagagacgag

SEQ ID NO: 1844627 - DNA, 15 bp, Homo sapiens
tctgcagagacgagg

SEQ ID NO: 1844628 - DNA, 15 bp, Homo sapiens
ctgcagagacgaggg

SEQ ID NO: 1844629 - DNA, 15 bp, Homo sapiens
tgcagagacgagggg

SEQ ID NO: 1844630 - DNA, 15 bp, Homo sapiens
gcagagacgaggggc

SEQ ID NO: 1844631 - DNA, 15 bp, Homo sapiens
cagagacgaggggcc

SEQ ID NO: 1844632 - DNA, 15 bp, Homo sapiens
agagacgaggggccc

SEQ ID NO: 1844633 - DNA, 15 bp, Homo sapiens
gagacgaggggccca

SEQ ID NO: 1844634 - DNA, 15 bp, Homo sapiens
agacgaggggcccag

SEQ ID NO: 1844635 - DNA, 15 bp, Homo sapiens
gacgaggggcccaga

SEQ ID NO: 1844636 - DNA, 15 bp, Homo sapiens
acgaggggcccagat

SEQ ID NO: 1844637 - DNA, 15 bp, Homo sapiens
cgaggggcccagatc

SEQ ID NO: 1844638 - DNA, 15 bp, Homo sapiens
gaggggcccagatcg

SEQ ID NO: 1844639 - DNA, 15 bp, Homo sapiens
aggggcccagatcgg

SEQ ID NO: 1844640 - DNA, 15 bp, Homo sapiens
ggggcccagatcggg

SEQ ID NO: 1844641 - DNA, 15 bp, Homo sapiens
gggcccagatcgggt

SEQ ID NO: 1844642 - DNA, 15 bp, Homo sapiens
ggcccagatcgggtc

SEQ ID NO: 1844643 - DNA, 15 bp, Homo sapiens
gcccagatcgggtca

SEQ ID NO: 1844644 - DNA, 15 bp, Homo sapiens
cccagatcgggtcag

SEQ ID NO: 1844645 - DNA, 15 bp, Homo sapiens
ccagatcgggtcagc

SEQ ID NO: 1844646 - DNA, 15 bp, Homo sapiens
cagatcgggtcagcc

SEQ ID NO: 1844647 - DNA, 15 bp, Homo sapiens
agatcgggtcagcct

SEQ ID NO: 1844648 - DNA, 15 bp, Homo sapiens
gatcgggtcagcctc

SEQ ID NO: 1844649 - DNA, 15 bp, Homo sapiens
atcgggtcagcctct

SEQ ID NO: 1844650 - DNA, 15 bp, Homo sapiens
tcgggtcagcctctg

SEQ ID NO: 1844651 - DNA, 15 bp, Homo sapiens
cgggtcagcctctgc

SEQ ID NO: 1844652 - DNA, 15 bp, Homo sapiens
gggtcagcctctgct

SEQ ID NO: 1844653 - DNA, 15 bp, Homo sapiens
ggtcagcctctgctc

SEQ ID NO: 1844654 - DNA, 15 bp, Homo sapiens
gtcagcctctgctca

SEQ ID NO: 1844655 - DNA, 15 bp, Homo sapiens
tcagcctctgctcag

SEQ ID NO: 1844656 - DNA, 15 bp, Homo sapiens
cagcctctgctcagc

SEQ ID NO: 1844657 - DNA, 15 bp, Homo sapiens
agcctctgctcagct

SEQ ID NO: 1844658 - DNA, 15 bp, Homo sapiens
gcctctgctcagctc

SEQ ID NO: 1844659 - DNA, 15 bp, Homo sapiens
cctctgctcagctct

SEQ ID NO: 1844660 - DNA, 15 bp, Homo sapiens
ctctgctcagctctg

SEQ ID NO: 1844661 - DNA, 15 bp, Homo sapiens
tctgctcagctctgc

SEQ ID NO: 1844662 - DNA, 15 bp, Homo sapiens
ctgctcagctctgca

SEQ ID NO: 1844663 - DNA, 15 bp, Homo sapiens
tgctcagctctgcag

SEQ ID NO: 1844664 - DNA, 15 bp, Homo sapiens
gctcagctctgcagt

SEQ ID NO: 1844665 - DNA, 15 bp, Homo sapiens
ctcagctctgcagtc

SEQ ID NO: 1844666 - DNA, 15 bp, Homo sapiens
tcagctctgcagtct

SEQ ID NO: 1844667 - DNA, 15 bp, Homo sapiens
cagctctgcagtctt

SEQ ID NO: 1844668 - DNA, 15 bp, Homo sapiens
agctctgcagtcttg

SEQ ID NO: 1844669 - DNA, 15 bp, Homo sapiens
gctctgcagtcttgc

SEQ ID NO: 1844670 - DNA, 15 bp, Homo sapiens
ctctgcagtcttgcc

SEQ ID NO: 1844671 - DNA, 15 bp, Homo sapiens
tctgcagtcttgcca

SEQ ID NO: 1844672 - DNA, 15 bp, Homo sapiens
ctgcagtcttgccag

SEQ ID NO: 1844673 - DNA, 15 bp, Homo sapiens
tgcagtcttgccagg

SEQ ID NO: 1844674 - DNA, 15 bp, Homo sapiens
gcagtcttgccaggg

SEQ ID NO: 1844675 - DNA, 15 bp, Homo sapiens
cagtcttgccagggg

SEQ ID NO: 1844676 - DNA, 15 bp, Homo sapiens
agtcttgccaggggg

SEQ ID NO: 1844677 - DNA, 15 bp, Homo sapiens
gtcttgccaggggga

SEQ ID NO: 1844678 - DNA, 15 bp, Homo sapiens
tcttgccagggggag

SEQ ID NO: 1844679 - DNA, 15 bp, Homo sapiens
cttgccagggggagg

SEQ ID NO: 1844680 - DNA, 15 bp, Homo sapiens
ttgccagggggagga

SEQ ID NO: 1844681 - DNA, 15 bp, Homo sapiens
tgccagggggaggag

SEQ ID NO: 1844682 - DNA, 15 bp, Homo sapiens
gccagggggaggagg

SEQ ID NO: 1844683 - DNA, 15 bp, Homo sapiens
ccagggggaggagga

SEQ ID NO: 1844684 - DNA, 15 bp, Homo sapiens
cagggggaggaggaa

SEQ ID NO: 1844685 - DNA, 15 bp, Homo sapiens
gggggaggaggaatc

SEQ ID NO: 1844686 - DNA, 15 bp, Homo sapiens
ggggaggaggaatca

SEQ ID NO: 1844687 - DNA, 15 bp, Homo sapiens
gggaggaggaatcag

SEQ ID NO: 1844688 - DNA, 15 bp, Homo sapiens
ggaggaggaatcagg

SEQ ID NO: 1844689 - DNA, 15 bp, Homo sapiens
gaggaggaatcaggc

SEQ ID NO: 1844690 - DNA, 15 bp, Homo sapiens
aggaggaatcaggct

SEQ ID NO: 1844691 - DNA, 15 bp, Homo sapiens
ggaggaatcaggctg

SEQ ID NO: 1844692 - DNA, 15 bp, Homo sapiens
gaggaatcaggctgg

SEQ ID NO: 1844693 - DNA, 15 bp, Homo sapiens
aggaatcaggctggg

SEQ ID NO: 1844694 - DNA, 15 bp, Homo sapiens
ggaatcaggctgggg

SEQ ID NO: 1844695 - DNA, 15 bp, Homo sapiens
gaatcaggctggggg

SEQ ID NO: 1844696 - DNA, 15 bp, Homo sapiens
aatcaggctgggggg

SEQ ID NO: 1844697 - DNA, 15 bp, Homo sapiens
atcaggctggggggc

SEQ ID NO: 1844698 - DNA, 15 bp, Homo sapiens
tcaggctggggggca

SEQ ID NO: 1844699 - DNA, 15 bp, Homo sapiens
caggctggggggcag

SEQ ID NO: 1844700 - DNA, 15 bp, Homo sapiens
aggctggggggcagg

SEQ ID NO: 1844701 - DNA, 15 bp, Homo sapiens
ggctggggggcaggg

SEQ ID NO: 1844702 - DNA, 15 bp, Homo sapiens
gctggggggcaggga

SEQ ID NO: 1844703 - DNA, 15 bp, Homo sapiens
ctggggggcagggat

SEQ ID NO: 1844704 - DNA, 15 bp, Homo sapiens
tggggggcagggata

SEQ ID NO: 1844705 - DNA, 15 bp, Homo sapiens
ggggggcagggatag

SEQ ID NO: 1844706 - DNA, 15 bp, Homo sapiens
gggggcagggataga

SEQ ID NO: 1844707 - DNA, 15 bp, Homo sapiens
ggggcagggatagag

SEQ ID NO: 1844708 - DNA, 15 bp, Homo sapiens
gggcagggatagagg

SEQ ID NO: 1844709 - DNA, 15 bp, Homo sapiens
ggcagggatagaggg

SEQ ID NO: 1844710 - DNA, 15 bp, Homo sapiens
gcagggatagagggc

SEQ ID NO: 1844711 - DNA, 15 bp, Homo sapiens
cagggatagagggcc

SEQ ID NO: 1844712 - DNA, 15 bp, Homo sapiens
agggatagagggccg

SEQ ID NO: 1844713 - DNA, 15 bp, Homo sapiens
gggatagagggccgt

SEQ ID NO: 1844714 - DNA, 15 bp, Homo sapiens
ggatagagggccgtg

SEQ ID NO: 1844715 - DNA, 15 bp, Homo sapiens
gatagagggccgtgt

SEQ ID NO: 1844716 - DNA, 15 bp, Homo sapiens
atagagggccgtgtg

SEQ ID NO: 1844717 - DNA, 15 bp, Homo sapiens
tagagggccgtgtgc

SEQ ID NO: 1844718 - DNA, 15 bp, Homo sapiens
agagggccgtgtgca

SEQ ID NO: 1844719 - DNA, 15 bp, Homo sapiens
gagggccgtgtgcat

SEQ ID NO: 1844720 - DNA, 15 bp, Homo sapiens
agggccgtgtgcatc

SEQ ID NO: 1844721 - DNA, 15 bp, Homo sapiens
gggccgtgtgcatca

SEQ ID NO: 1844722 - DNA, 15 bp, Homo sapiens
ggccgtgtgcatcag

SEQ ID NO: 1844723 - DNA, 15 bp, Homo sapiens
gccgtgtgcatcagg

SEQ ID NO: 1844724 - DNA, 15 bp, Homo sapiens
ccgtgtgcatcaggg

SEQ ID NO: 1844725 - DNA, 15 bp, Homo sapiens
cgtgtgcatcaggga

SEQ ID NO: 1844726 - DNA, 15 bp, Homo sapiens
gtgtgcatcagggaa

SEQ ID NO: 1844727 - DNA, 15 bp, Homo sapiens
tgtgcatcagggaag

SEQ ID NO: 1844728 - DNA, 15 bp, Homo sapiens
gtgcatcagggaagg

SEQ ID NO: 1844729 - DNA, 15 bp, Homo sapiens
tgcatcagggaagga

SEQ ID NO: 1844730 - DNA, 15 bp, Homo sapiens
gcatcagggaaggag

SEQ ID NO: 1844731 - DNA, 15 bp, Homo sapiens
catcagggaaggagg

SEQ ID NO: 1844732 - DNA, 15 bp, Homo sapiens
atcagggaaggaggc

SEQ ID NO: 1844733 - DNA, 15 bp, Homo sapiens
tcagggaaggaggcc

SEQ ID NO: 1844734 - DNA, 15 bp, Homo sapiens
cagggaaggaggccc

SEQ ID NO: 1844735 - DNA, 15 bp, Homo sapiens
agggaaggaggccct

SEQ ID NO: 1844736 - DNA, 15 bp, Homo sapiens
gggaaggaggccctg

SEQ ID NO: 1844737 - DNA, 15 bp, Homo sapiens
ggaaggaggccctga

SEQ ID NO: 1844738 - DNA, 15 bp, Homo sapiens
gaaggaggccctgag

SEQ ID NO: 1844739 - DNA, 15 bp, Homo sapiens
aaggaggccctgaga

SEQ ID NO: 1844740 - DNA, 15 bp, Homo sapiens
aggaggccctgagat

SEQ ID NO: 1844741 - DNA, 15 bp, Homo sapiens
ggaggccctgagatg

SEQ ID NO: 1844742 - DNA, 15 bp, Homo sapiens
gaggccctgagatga

SEQ ID NO: 1844743 - DNA, 15 bp, Homo sapiens
aggccctgagatgac

SEQ ID NO: 1844744 - DNA, 15 bp, Homo sapiens
ggccctgagatgaca

SEQ ID NO: 1844745 - DNA, 15 bp, Homo sapiens
gccctgagatgacaa

SEQ ID NO: 1844746 - DNA, 15 bp, Homo sapiens
ccctgagatgacaag

SEQ ID NO: 1844747 - DNA, 15 bp, Homo sapiens
cctgagatgacaagc

SEQ ID NO: 1844748 - DNA, 15 bp, Homo sapiens
ctgagatgacaagct

SEQ ID NO: 1844749 - DNA, 15 bp, Homo sapiens
tgagatgacaagctc

SEQ ID NO: 1844750 - DNA, 15 bp, Homo sapiens
gagatgacaagctcc

SEQ ID NO: 1844751 - DNA, 15 bp, Homo sapiens
agatgacaagctcca

SEQ ID NO: 1844752 - DNA, 15 bp, Homo sapiens
gatgacaagctccat

SEQ ID NO: 1844753 - DNA, 15 bp, Homo sapiens
atgacaagctccatg

SEQ ID NO: 1844754 - DNA, 15 bp, Homo sapiens
tacaggtgtgagcct

SEQ ID NO: 1844755 - DNA, 15 bp, Homo sapiens
acaggtgtgagcctc

SEQ ID NO: 1844756 - DNA, 15 bp, Homo sapiens
caggtgtgagcctca

SEQ ID NO: 1844757 - DNA, 15 bp, Homo sapiens
aggtgtgagcctcac

SEQ ID NO: 1844758 - DNA, 15 bp, Homo sapiens
ggtgtgagcctcact

SEQ ID NO: 1844759 - DNA, 15 bp, Homo sapiens
gtgtgagcctcactt

SEQ ID NO: 1844760 - DNA, 15 bp, Homo sapiens
tgtgagcctcacttg

SEQ ID NO: 1844761 - DNA, 15 bp, Homo sapiens
gtgagcctcacttga

SEQ ID NO: 1844762 - DNA, 15 bp, Homo sapiens
tgagcctcacttgat

SEQ ID NO: 1844763 - DNA, 15 bp, Homo sapiens
gagcctcacttgatt

SEQ ID NO: 1844764 - DNA, 15 bp, Homo sapiens
agcctcacttgattt

SEQ ID NO: 1844765 - DNA, 15 bp, Homo sapiens
gcctcacttgatttt

SEQ ID NO: 1844766 - DNA, 15 bp, Homo sapiens
cctcacttgattttt

SEQ ID NO: 1844767 - DNA, 15 bp, Homo sapiens
ctcacttgatttttg

SEQ ID NO: 1844768 - DNA, 15 bp, Homo sapiens
tcacttgatttttgc

SEQ ID NO: 1844769 - DNA, 15 bp, Homo sapiens
cacttgatttttgcc

SEQ ID NO: 1844770 - DNA, 15 bp, Homo sapiens
acttgatttttgcct

SEQ ID NO: 1844771 - DNA, 15 bp, Homo sapiens
cttgatttttgcctg

SEQ ID NO: 1844772 - DNA, 15 bp, Homo sapiens
ttgatttttgcctgg

SEQ ID NO: 1844773 - DNA, 15 bp, Homo sapiens
tgatttttgcctggc

SEQ ID NO: 1844774 - DNA, 15 bp, Homo sapiens
gatttttgcctggca

SEQ ID NO: 1844775 - DNA, 15 bp, Homo sapiens
atttttgcctggcat

SEQ ID NO: 1844776 - DNA, 15 bp, Homo sapiens
tttttgcctggcata

SEQ ID NO: 1844777 - DNA, 15 bp, Homo sapiens
ttttgcctggcatat

SEQ ID NO: 1844778 - DNA, 15 bp, Homo sapiens
tttgcctggcatatt

SEQ ID NO: 1844779 - DNA, 15 bp, Homo sapiens
ttgcctggcatattc

SEQ ID NO: 1844780 - DNA, 15 bp, Homo sapiens
tgcctggcatattct

SEQ ID NO: 1844781 - DNA, 15 bp, Homo sapiens
gcctggcatattctg

SEQ ID NO: 1844782 - DNA, 15 bp, Homo sapiens
cctggcatattctgg

SEQ ID NO: 1844783 - DNA, 15 bp, Homo sapiens
ctggcatattctggt

SEQ ID NO: 1844784 - DNA, 15 bp, Homo sapiens
tggcatattctggtt

SEQ ID NO: 1844785 - DNA, 15 bp, Homo sapiens
ggcatattctggttt

SEQ ID NO: 1844786 - DNA, 15 bp, Homo sapiens
gcatattctggttta

SEQ ID NO: 1844787 - DNA, 15 bp, Homo sapiens
catattctggtttat

SEQ ID NO: 1844788 - DNA, 15 bp, Homo sapiens
atattctggtttatt

SEQ ID NO: 1844789 - DNA, 15 bp, Homo sapiens
tattctggtttattc

SEQ ID NO: 1844790 - DNA, 15 bp, Homo sapiens
attctggtttattct

SEQ ID NO: 1844791 - DNA, 15 bp, Homo sapiens
ttctggtttattctt

SEQ ID NO: 1844792 - DNA, 15 bp, Homo sapiens
tctggtttattcttt

SEQ ID NO: 1844793 - DNA, 15 bp, Homo sapiens
ctggtttattctttt

SEQ ID NO: 1844794 - DNA, 15 bp, Homo sapiens
tggtttattctttta

SEQ ID NO: 1844795 - DNA, 15 bp, Homo sapiens
ggtttattcttttac

SEQ ID NO: 1844796 - DNA, 15 bp, Homo sapiens
gtttattcttttact

SEQ ID NO: 1844797 - DNA, 15 bp, Homo sapiens
tttattcttttactt

SEQ ID NO: 1844798 - DNA, 15 bp, Homo sapiens
ttattcttttacttt

SEQ ID NO: 1844799 - DNA, 15 bp, Homo sapiens
tattcttttactttt

SEQ ID NO: 1844800 - DNA, 15 bp, Homo sapiens
attcttttactttta

SEQ ID NO: 1844801 - DNA, 15 bp, Homo sapiens
ttcttttacttttaa

SEQ ID NO: 1844802 - DNA, 15 bp, Homo sapiens
tcttttacttttaac

SEQ ID NO: 1844803 - DNA, 15 bp, Homo sapiens
cttttacttttaacc

SEQ ID NO: 1844804 - DNA, 15 bp, Homo sapiens
ttttacttttaacct

SEQ ID NO: 1844805 - DNA, 15 bp, Homo sapiens
tttacttttaacctt

SEQ ID NO: 1844806 - DNA, 15 bp, Homo sapiens
ttacttttaacctta

SEQ ID NO: 1844807 - DNA, 15 bp, Homo sapiens
tacttttaaccttat

SEQ ID NO: 1844808 - DNA, 15 bp, Homo sapiens
acttttaaccttatt

SEQ ID NO: 1844809 - DNA, 15 bp, Homo sapiens
cttttaaccttattt

SEQ ID NO: 1844810 - DNA, 15 bp, Homo sapiens
ttttaaccttatttt

SEQ ID NO: 1844811 - DNA, 15 bp, Homo sapiens
tttaaccttattttg

SEQ ID NO: 1844812 - DNA, 15 bp, Homo sapiens
ttaaccttattttgt

SEQ ID NO: 1844813 - DNA, 15 bp, Homo sapiens
taaccttattttgtc

SEQ ID NO: 1844814 - DNA, 15 bp, Homo sapiens
aaccttattttgtca

SEQ ID NO: 1844815 - DNA, 15 bp, Homo sapiens
accttattttgtcac

SEQ ID NO: 1844816 - DNA, 15 bp, Homo sapiens
ccttattttgtcact

SEQ ID NO: 1844817 - DNA, 15 bp, Homo sapiens
cttattttgtcactt

SEQ ID NO: 1844818 - DNA, 15 bp, Homo sapiens
ttattttgtcacttg

SEQ ID NO: 1844819 - DNA, 15 bp, Homo sapiens
tattttgtcacttgg

SEQ ID NO: 1844820 - DNA, 15 bp, Homo sapiens
attttgtcacttggt

SEQ ID NO: 1844821 - DNA, 15 bp, Homo sapiens
ttttgtcacttggtt

SEQ ID NO: 1844822 - DNA, 15 bp, Homo sapiens
tttgtcacttggttt

SEQ ID NO: 1844823 - DNA, 15 bp, Homo sapiens
ttgtcacttggttta

SEQ ID NO: 1844824 - DNA, 15 bp, Homo sapiens
tgtcacttggtttag

SEQ ID NO: 1844825 - DNA, 15 bp, Homo sapiens
gtcacttggtttagg

SEQ ID NO: 1844826 - DNA, 15 bp, Homo sapiens
tcacttggtttaggg

SEQ ID NO: 1844827 - DNA, 15 bp, Homo sapiens
cacttggtttagggt

SEQ ID NO: 1844828 - DNA, 15 bp, Homo sapiens
acttggtttagggta

SEQ ID NO: 1844829 - DNA, 15 bp, Homo sapiens
cttggtttagggtat

SEQ ID NO: 1844830 - DNA, 15 bp, Homo sapiens
ttggtttagggtata

SEQ ID NO: 1844831 - DNA, 15 bp, Homo sapiens
tggtttagggtatat

SEQ ID NO: 1844832 - DNA, 15 bp, Homo sapiens
ggtttagggtatatt

SEQ ID NO: 1844833 - DNA, 15 bp, Homo sapiens
gtttagggtatattt

SEQ ID NO: 1844834 - DNA, 15 bp, Homo sapiens
tttagggtatatttc

SEQ ID NO: 1844835 - DNA, 15 bp, Homo sapiens
ttagggtatatttct

SEQ ID NO: 1844836 - DNA, 15 bp, Homo sapiens
tagggtatatttctt

SEQ ID NO: 1844837 - DNA, 15 bp, Homo sapiens
agggtatatttctta

SEQ ID NO: 1844838 - DNA, 15 bp, Homo sapiens
gggtatatttcttat

SEQ ID NO: 1844839 - DNA, 15 bp, Homo sapiens
ggtatatttcttata

SEQ ID NO: 1844840 - DNA, 15 bp, Homo sapiens
gtatatttcttataa

SEQ ID NO: 1844841 - DNA, 15 bp, Homo sapiens
tatatttcttataaa

SEQ ID NO: 1844842 - DNA, 15 bp, Homo sapiens
atatttcttataaac

SEQ ID NO: 1844843 - DNA, 15 bp, Homo sapiens
tatttcttataaaca

SEQ ID NO: 1844844 - DNA, 15 bp, Homo sapiens
atttcttataaacag

SEQ ID NO: 1844845 - DNA, 15 bp, Homo sapiens
tttcttataaacagt

SEQ ID NO: 1844846 - DNA, 15 bp, Homo sapiens
ttcttataaacagtg

SEQ ID NO: 1844847 - DNA, 15 bp, Homo sapiens
tcttataaacagtgt

SEQ ID NO: 1844848 - DNA, 15 bp, Homo sapiens
cttataaacagtgta

SEQ ID NO: 1844849 - DNA, 15 bp, Homo sapiens
ttataaacagtgtat

SEQ ID NO: 1844850 - DNA, 15 bp, Homo sapiens
tataaacagtgtata

SEQ ID NO: 1844851 - DNA, 15 bp, Homo sapiens
ataaacagtgtataa

SEQ ID NO: 1844852 - DNA, 15 bp, Homo sapiens
taaacagtgtataat

SEQ ID NO: 1844853 - DNA, 15 bp, Homo sapiens
aaacagtgtataatt

SEQ ID NO: 1844854 - DNA, 15 bp, Homo sapiens
aacagtgtataattt

SEQ ID NO: 1844855 - DNA, 15 bp, Homo sapiens
acagtgtataatttt

SEQ ID NO: 1844856 - DNA, 15 bp, Homo sapiens
cagtgtataatttta

SEQ ID NO: 1844857 - DNA, 15 bp, Homo sapiens
agtgtataattttat

SEQ ID NO: 1844858 - DNA, 15 bp, Homo sapiens
gtgtataattttata

SEQ ID NO: 1844859 - DNA, 15 bp, Homo sapiens
tgtataattttatat

SEQ ID NO: 1844860 - DNA, 15 bp, Homo sapiens
gtataattttatata

SEQ ID NO: 1844861 - DNA, 15 bp, Homo sapiens
tataattttatatat

SEQ ID NO: 1844862 - DNA, 15 bp, Homo sapiens
ataattttatatatt

SEQ ID NO: 1844863 - DNA, 15 bp, Homo sapiens
taattttatatattt

SEQ ID NO: 1844864 - DNA, 15 bp, Homo sapiens
aattttatatattta

SEQ ID NO: 1844865 - DNA, 15 bp, Homo sapiens
attttatatatttat

SEQ ID NO: 1844866 - DNA, 15 bp, Homo sapiens
ttttatatatttatt

SEQ ID NO: 1844867 - DNA, 15 bp, Homo sapiens
tttatatatttattt

SEQ ID NO: 1844868 - DNA, 15 bp, Homo sapiens
ttatatatttattta

SEQ ID NO: 1844869 - DNA, 15 bp, Homo sapiens
tatatatttatttat

SEQ ID NO: 1844870 - DNA, 15 bp, Homo sapiens
atatatttatttatt

SEQ ID NO: 1844871 - DNA, 15 bp, Homo sapiens
tatatttatttatta

SEQ ID NO: 1844872 - DNA, 15 bp, Homo sapiens
atatttatttattat

SEQ ID NO: 1844873 - DNA, 15 bp, Homo sapiens
tatttatttattata

SEQ ID NO: 1844874 - DNA, 15 bp, Homo sapiens
atttatttattatat

SEQ ID NO: 1844875 - DNA, 15 bp, Homo sapiens
tttatttattatata

SEQ ID NO: 1844876 - DNA, 15 bp, Homo sapiens
ttatttattatatat

SEQ ID NO: 1844877 - DNA, 15 bp, Homo sapiens
ttattatatattatt

SEQ ID NO: 1844878 - DNA, 15 bp, Homo sapiens
tattatatattattg

SEQ ID NO: 1844879 - DNA, 15 bp, Homo sapiens
attatatattattgc

SEQ ID NO: 1844880 - DNA, 15 bp, Homo sapiens
ttatatattattgca

SEQ ID NO: 1844881 - DNA, 15 bp, Homo sapiens
tatatattattgcat

SEQ ID NO: 1844882 - DNA, 15 bp, Homo sapiens
atatattattgcata

SEQ ID NO: 1844883 - DNA, 15 bp, Homo sapiens
tatattattgcatat

SEQ ID NO: 1844884 - DNA, 15 bp, Homo sapiens
atattattgcatata

SEQ ID NO: 1844885 - DNA, 15 bp, Homo sapiens
tattattgcatatag

SEQ ID NO: 1844886 - DNA, 15 bp, Homo sapiens
attattgcatatagt

SEQ ID NO: 1844887 - DNA, 15 bp, Homo sapiens
ttattgcatatagtt

SEQ ID NO: 1844888 - DNA, 15 bp, Homo sapiens
tattgcatatagtta

SEQ ID NO: 1844889 - DNA, 15 bp, Homo sapiens
attgcatatagttaa

SEQ ID NO: 1844890 - DNA, 15 bp, Homo sapiens
ttgcatatagttaat

SEQ ID NO: 1844891 - DNA, 15 bp, Homo sapiens
tgcatatagttaata

SEQ ID NO: 1844892 - DNA, 15 bp, Homo sapiens
gcatatagttaatac

SEQ ID NO: 1844893 - DNA, 15 bp, Homo sapiens
catatagttaatact

SEQ ID NO: 1844894 - DNA, 15 bp, Homo sapiens
atatagttaatacta

SEQ ID NO: 1844895 - DNA, 15 bp, Homo sapiens
tatagttaatactat

SEQ ID NO: 1844896 - DNA, 15 bp, Homo sapiens
atagttaatactata

SEQ ID NO: 1844897 - DNA, 15 bp, Homo sapiens
tagttaatactatat

SEQ ID NO: 1844898 - DNA, 15 bp, Homo sapiens
agttaatactatata

SEQ ID NO: 1844899 - DNA, 15 bp, Homo sapiens
gttaatactatatat

SEQ ID NO: 1844900 - DNA, 15 bp, Homo sapiens
ttaatactatatata

SEQ ID NO: 1844901 - DNA, 15 bp, Homo sapiens
taatactatatataa

SEQ ID NO: 1844902 - DNA, 15 bp, Homo sapiens
aatactatatataat

SEQ ID NO: 1844903 - DNA, 15 bp, Homo sapiens
atactatatataatg

SEQ ID NO: 1844904 - DNA, 15 bp, Homo sapiens
tactatatataatgt

SEQ ID NO: 1844905 - DNA, 15 bp, Homo sapiens
actatatataatgtg

SEQ ID NO: 1844906 - DNA, 15 bp, Homo sapiens
ctatatataatgtgt

SEQ ID NO: 1844907 - DNA, 15 bp, Homo sapiens
tatatataatgtgta

SEQ ID NO: 1844908 - DNA, 15 bp, Homo sapiens
atatataatgtgtac

SEQ ID NO: 1844909 - DNA, 15 bp, Homo sapiens
tatataatgtgtacc

SEQ ID NO: 1844910 - DNA, 15 bp, Homo sapiens
atataatgtgtacca

SEQ ID NO: 1844911 - DNA, 15 bp, Homo sapiens
tataatgtgtaccac

SEQ ID NO: 1844912 - DNA, 15 bp, Homo sapiens
ataatgtgtaccaca

SEQ ID NO: 1844913 - DNA, 15 bp, Homo sapiens
taatgtgtaccacac

SEQ ID NO: 1844914 - DNA, 15 bp, Homo sapiens
aatgtgtaccacaca

SEQ ID NO: 1844915 - DNA, 15 bp, Homo sapiens
atgtgtaccacacat

SEQ ID NO: 1844916 - DNA, 15 bp, Homo sapiens
tgtgtaccacacatt

SEQ ID NO: 1844917 - DNA, 15 bp, Homo sapiens
gtgtaccacacattt

SEQ ID NO: 1844918 - DNA, 15 bp, Homo sapiens
tgtaccacacatttt

SEQ ID NO: 1844919 - DNA, 15 bp, Homo sapiens
gtaccacacattttg

SEQ ID NO: 1844920 - DNA, 15 bp, Homo sapiens
taccacacattttga

SEQ ID NO: 1844921 - DNA, 15 bp, Homo sapiens
accacacattttgat

SEQ ID NO: 1844922 - DNA, 15 bp, Homo sapiens
ccacacattttgatt

SEQ ID NO: 1844923 - DNA, 15 bp, Homo sapiens
cacacattttgattg

SEQ ID NO: 1844924 - DNA, 15 bp, Homo sapiens
acacattttgattgt

SEQ ID NO: 1844925 - DNA, 15 bp, Homo sapiens
cacattttgattgta

SEQ ID NO: 1844926 - DNA, 15 bp, Homo sapiens
acattttgattgtaa

SEQ ID NO: 1844927 - DNA, 15 bp, Homo sapiens
cattttgattgtaat

SEQ ID NO: 1844928 - DNA, 15 bp, Homo sapiens
attttgattgtaata

SEQ ID NO: 1844929 - DNA, 15 bp, Homo sapiens
ttttgattgtaataa

SEQ ID NO: 1844930 - DNA, 15 bp, Homo sapiens
tttgattgtaataac

SEQ ID NO: 1844931 - DNA, 15 bp, Homo sapiens
ttgattgtaataact

SEQ ID NO: 1844932 - DNA, 15 bp, Homo sapiens
tgattgtaataacta

SEQ ID NO: 1844933 - DNA, 15 bp, Homo sapiens
gattgtaataactaa

SEQ ID NO: 1844934 - DNA, 15 bp, Homo sapiens
attgtaataactaat

SEQ ID NO: 1844935 - DNA, 15 bp, Homo sapiens
ttgtaataactaata

SEQ ID NO: 1844936 - DNA, 15 bp, Homo sapiens
tgtaataactaatat

SEQ ID NO: 1844937 - DNA, 15 bp, Homo sapiens
gtaataactaatatg

SEQ ID NO: 1844938 - DNA, 15 bp, Homo sapiens
taataactaatatgt

SEQ ID NO: 1844939 - DNA, 15 bp, Homo sapiens
aataactaatatgtt

SEQ ID NO: 1844940 - DNA, 15 bp, Homo sapiens
ataactaatatgttt

SEQ ID NO: 1844941 - DNA, 15 bp, Homo sapiens
taactaatatgtttt

SEQ ID NO: 1844942 - DNA, 15 bp, Homo sapiens
aactaatatgttttg

SEQ ID NO: 1844943 - DNA, 15 bp, Homo sapiens
actaatatgttttgg

SEQ ID NO: 1844944 - DNA, 15 bp, Homo sapiens
ctaatatgttttggc

SEQ ID NO: 1844945 - DNA, 15 bp, Homo sapiens
taatatgttttggcc

SEQ ID NO: 1844946 - DNA, 15 bp, Homo sapiens
aatatgttttggcct

SEQ ID NO: 1844947 - DNA, 15 bp, Homo sapiens
atatgttttggcctt

SEQ ID NO: 1844948 - DNA, 15 bp, Homo sapiens
tatgttttggccttt

SEQ ID NO: 1844949 - DNA, 15 bp, Homo sapiens
atgttttggcctttc

SEQ ID NO: 1844950 - DNA, 15 bp, Homo sapiens
tgttttggcctttct

SEQ ID NO: 1844951 - DNA, 15 bp, Homo sapiens
gttttggcctttctg

SEQ ID NO: 1844952 - DNA, 15 bp, Homo sapiens
ttttggcctttctgt

SEQ ID NO: 1844953 - DNA, 15 bp, Homo sapiens
tttggcctttctgtt

SEQ ID NO: 1844954 - DNA, 15 bp, Homo sapiens
ttggcctttctgttt

SEQ ID NO: 1844955 - DNA, 15 bp, Homo sapiens
tggcctttctgtttt

SEQ ID NO: 1844956 - DNA, 15 bp, Homo sapiens
ggcctttctgttttt

SEQ ID NO: 1844957 - DNA, 15 bp, Homo sapiens
gcctttctgtttttt

SEQ ID NO: 1844958 - DNA, 15 bp, Homo sapiens
cctttctgtttttta

SEQ ID NO: 1844959 - DNA, 15 bp, Homo sapiens
ctttctgttttttaa

SEQ ID NO: 1844960 - DNA, 15 bp, Homo sapiens
tttctgttttttaaa

SEQ ID NO: 1844961 - DNA, 15 bp, Homo sapiens
ttctgttttttaaaa

SEQ ID NO: 1844962 - DNA, 15 bp, Homo sapiens
tctgttttttaaaaa

SEQ ID NO: 1844963 - DNA, 15 bp, Homo sapiens
ctgttttttaaaaaa

SEQ ID NO: 1844964 - DNA, 15 bp, Homo sapiens
tgttttttaaaaaat

SEQ ID NO: 1844965 - DNA, 15 bp, Homo sapiens
gttttttaaaaaatg

SEQ ID NO: 1844966 - DNA, 15 bp, Homo sapiens
ttttttaaaaaatgc

SEQ ID NO: 1844967 - DNA, 15 bp, Homo sapiens
tttttaaaaaatgct

SEQ ID NO: 1844968 - DNA, 15 bp, Homo sapiens
ttttaaaaaatgctt

SEQ ID NO: 1844969 - DNA, 15 bp, Homo sapiens
tttaaaaaatgcttt

SEQ ID NO: 1844970 - DNA, 15 bp, Homo sapiens
ttaaaaaatgctttt

SEQ ID NO: 1844971 - DNA, 15 bp, Homo sapiens
taaaaaatgcttttt

SEQ ID NO: 1844972 - DNA, 15 bp, Homo sapiens
aaaaaatgctttttg

SEQ ID NO: 1844973 - DNA, 15 bp, Homo sapiens
aaaaatgctttttgc

SEQ ID NO: 1844974 - DNA, 15 bp, Homo sapiens
aaaatgctttttgca

SEQ ID NO: 1844975 - DNA, 15 bp, Homo sapiens
aaatgctttttgcag

SEQ ID NO: 1844976 - DNA, 15 bp, Homo sapiens
aatgctttttgcagt

SEQ ID NO: 1844977 - DNA, 15 bp, Homo sapiens
atgctttttgcagtc

SEQ ID NO: 1844978 - DNA, 15 bp, Homo sapiens
tgctttttgcagtct

SEQ ID NO: 1844979 - DNA, 15 bp, Homo sapiens
gctttttgcagtctt

SEQ ID NO: 1844980 - DNA, 15 bp, Homo sapiens
ctttttgcagtcttt

SEQ ID NO: 1844981 - DNA, 15 bp, Homo sapiens
tttttgcagtctttt

SEQ ID NO: 1844982 - DNA, 15 bp, Homo sapiens
ttttgcagtcttttt

SEQ ID NO: 1844983 - DNA, 15 bp, Homo sapiens
tttgcagtctttttt

SEQ ID NO: 1844984 - DNA, 15 bp, Homo sapiens
ttgcagtcttttttg

SEQ ID NO: 1844985 - DNA, 15 bp, Homo sapiens
tgcagtcttttttgt

SEQ ID NO: 1844986 - DNA, 15 bp, Homo sapiens
gcagtcttttttgtc

SEQ ID NO: 1844987 - DNA, 15 bp, Homo sapiens
cagtcttttttgtct

SEQ ID NO: 1844988 - DNA, 15 bp, Homo sapiens
agtcttttttgtcta

SEQ ID NO: 1844989 - DNA, 15 bp, Homo sapiens
gtcttttttgtctat

SEQ ID NO: 1844990 - DNA, 15 bp, Homo sapiens
tcttttttgtctatc

SEQ ID NO: 1844991 - DNA, 15 bp, Homo sapiens
cttttttgtctatct

SEQ ID NO: 1844992 - DNA, 15 bp, Homo sapiens
ttttttgtctatctg

SEQ ID NO: 1844993 - DNA, 15 bp, Homo sapiens
tttttgtctatctgt

SEQ ID NO: 1844994 - DNA, 15 bp, Homo sapiens
ttttgtctatctgta

SEQ ID NO: 1844995 - DNA, 15 bp, Homo sapiens
tttgtctatctgtaa

SEQ ID NO: 1844996 - DNA, 15 bp, Homo sapiens
ttgtctatctgtaat

SEQ ID NO: 1844997 - DNA, 15 bp, Homo sapiens
tgtctatctgtaata

SEQ ID NO: 1844998 - DNA, 15 bp, Homo sapiens
gtctatctgtaatag

SEQ ID NO: 1844999 - DNA, 15 bp, Homo sapiens
tctatctgtaataga

SEQ ID NO: 1845000 - DNA, 15 bp, Homo sapiens
ctatctgtaatagat

SEQ ID NO: 1845001 - DNA, 15 bp, Homo sapiens
tatctgtaatagata

SEQ ID NO: 1845002 - DNA, 15 bp, Homo sapiens
atctgtaatagatat

SEQ ID NO: 1845003 - DNA, 15 bp, Homo sapiens
tctgtaatagatatt

SEQ ID NO: 1845004 - DNA, 15 bp, Homo sapiens
ctgtaatagatattt

SEQ ID NO: 1845005 - DNA, 15 bp, Homo sapiens
tgtaatagatattta

SEQ ID NO: 1845006 - DNA, 15 bp, Homo sapiens
gtaatagatatttaa

SEQ ID NO: 1845007 - DNA, 15 bp, Homo sapiens
taatagatatttaaa

SEQ ID NO: 1845008 - DNA, 15 bp, Homo sapiens
aatagatatttaaat

SEQ ID NO: 1845009 - DNA, 15 bp, Homo sapiens
atagatatttaaatt

SEQ ID NO: 1845010 - DNA, 15 bp, Homo sapiens
tagatatttaaattt

SEQ ID NO: 1845011 - DNA, 15 bp, Homo sapiens
agatatttaaatttt

SEQ ID NO: 1845012 - DNA, 15 bp, Homo sapiens
gatatttaaattttt

SEQ ID NO: 1845013 - DNA, 15 bp, Homo sapiens
atatttaaatttttt

SEQ ID NO: 1845014 - DNA, 15 bp, Homo sapiens
tatttaaatttttta

SEQ ID NO: 1845015 - DNA, 15 bp, Homo sapiens
atttaaattttttat

SEQ ID NO: 1845016 - DNA, 15 bp, Homo sapiens
tttaaattttttatt

SEQ ID NO: 1845017 - DNA, 15 bp, Homo sapiens
ttaaattttttattt

SEQ ID NO: 1845018 - DNA, 15 bp, Homo sapiens
taaattttttatttt

SEQ ID NO: 1845019 - DNA, 15 bp, Homo sapiens
aaattttttatttta

SEQ ID NO: 1845020 - DNA, 15 bp, Homo sapiens
aattttttattttat

SEQ ID NO: 1845021 - DNA, 15 bp, Homo sapiens
attttttattttata

SEQ ID NO: 1845022 - DNA, 15 bp, Homo sapiens
ttttttattttatac

SEQ ID NO: 1845023 - DNA, 15 bp, Homo sapiens
tttttattttatact

SEQ ID NO: 1845024 - DNA, 15 bp, Homo sapiens
ttttattttatactt

SEQ ID NO: 1845025 - DNA, 15 bp, Homo sapiens
tttattttatacttt

SEQ ID NO: 1845026 - DNA, 15 bp, Homo sapiens
ttattttatactttt

SEQ ID NO: 1845027 - DNA, 15 bp, Homo sapiens
tattttatacttttc

SEQ ID NO: 1845028 - DNA, 15 bp, Homo sapiens
attttatacttttct

SEQ ID NO: 1845029 - DNA, 15 bp, Homo sapiens
ttttatacttttctt

SEQ ID NO: 1845030 - DNA, 15 bp, Homo sapiens
tttatacttttcttt

SEQ ID NO: 1845031 - DNA, 15 bp, Homo sapiens
ttatacttttcttta

SEQ ID NO: 1845032 - DNA, 15 bp, Homo sapiens
tatacttttctttat

SEQ ID NO: 1845033 - DNA, 15 bp, Homo sapiens
atacttttctttatt

SEQ ID NO: 1845034 - DNA, 15 bp, Homo sapiens
tacttttctttatta

SEQ ID NO: 1845035 - DNA, 15 bp, Homo sapiens
acttttctttattaa

SEQ ID NO: 1845036 - DNA, 15 bp, Homo sapiens
cttttctttattaaa

SEQ ID NO: 1845037 - DNA, 15 bp, Homo sapiens
ttttctttattaaat

SEQ ID NO: 1845038 - DNA, 15 bp, Homo sapiens
tttctttattaaatt

SEQ ID NO: 1845039 - DNA, 15 bp, Homo sapiens
ttctttattaaattg

SEQ ID NO: 1845040 - DNA, 15 bp, Homo sapiens
tctttattaaattgg

SEQ ID NO: 1845041 - DNA, 15 bp, Homo sapiens
ctttattaaattgga

SEQ ID NO: 1845042 - DNA, 15 bp, Homo sapiens
tttattaaattggaa

SEQ ID NO: 1845043 - DNA, 15 bp, Homo sapiens
ttattaaattggaat

SEQ ID NO: 1845044 - DNA, 15 bp, Homo sapiens
tattaaattggaatg

SEQ ID NO: 1845045 - DNA, 15 bp, Homo sapiens
attaaattggaatgt

SEQ ID NO: 1845046 - DNA, 15 bp, Homo sapiens
ttaaattggaatgtc

SEQ ID NO: 1845047 - DNA, 15 bp, Homo sapiens
taaattggaatgtct

SEQ ID NO: 1845048 - DNA, 15 bp, Homo sapiens
aaattggaatgtcta

SEQ ID NO: 1845049 - DNA, 15 bp, Homo sapiens
aattggaatgtctac

SEQ ID NO: 1845050 - DNA, 15 bp, Homo sapiens
attggaatgtctacc

SEQ ID NO: 1845051 - DNA, 15 bp, Homo sapiens
ttggaatgtctaccc

SEQ ID NO: 1845052 - DNA, 15 bp, Homo sapiens
tggaatgtctaccca

SEQ ID NO: 1845053 - DNA, 15 bp, Homo sapiens
ggaatgtctacccat

SEQ ID NO: 1845054 - DNA, 15 bp, Homo sapiens
gaatgtctacccatg

SEQ ID NO: 1845055 - DNA, 15 bp, Homo sapiens
aatgtctacccatgc

SEQ ID NO: 1845056 - DNA, 15 bp, Homo sapiens
atgtctacccatgct

SEQ ID NO: 1845057 - DNA, 15 bp, Homo sapiens
tgtctacccatgctg

SEQ ID NO: 1845058 - DNA, 15 bp, Homo sapiens
gtctacccatgctgc

SEQ ID NO: 1845059 - DNA, 15 bp, Homo sapiens
tctacccatgctgcc

SEQ ID NO: 1845060 - DNA, 15 bp, Homo sapiens
ctacccatgctgcct

SEQ ID NO: 1845061 - DNA, 15 bp, Homo sapiens
tacccatgctgcctc

SEQ ID NO: 1845062 - DNA, 15 bp, Homo sapiens
acccatgctgcctct

SEQ ID NO: 1845063 - DNA, 15 bp, Homo sapiens
cccatgctgcctctc

SEQ ID NO: 1845064 - DNA, 15 bp, Homo sapiens
ccatgctgcctctca

SEQ ID NO: 1845065 - DNA, 15 bp, Homo sapiens
catgctgcctctcaa

SEQ ID NO: 1845066 - DNA, 15 bp, Homo sapiens
atgctgcctctcaag

SEQ ID NO: 1845067 - DNA, 15 bp, Homo sapiens
tgctgcctctcaagt

SEQ ID NO: 1845068 - DNA, 15 bp, Homo sapiens
gctgcctctcaagta

SEQ ID NO: 1845069 - DNA, 15 bp, Homo sapiens
ctgcctctcaagtat

SEQ ID NO: 1845070 - DNA, 15 bp, Homo sapiens
tgcctctcaagtatt

SEQ ID NO: 1845071 - DNA, 15 bp, Homo sapiens
gcctctcaagtattt

SEQ ID NO: 1845072 - DNA, 15 bp, Homo sapiens
cctctcaagtattta

SEQ ID NO: 1845073 - DNA, 15 bp, Homo sapiens
ctctcaagtatttaa

SEQ ID NO: 1845074 - DNA, 15 bp, Homo sapiens
tctcaagtatttaaa

SEQ ID NO: 1845075 - DNA, 15 bp, Homo sapiens
ctcaagtatttaaaa

SEQ ID NO: 1845076 - DNA, 15 bp, Homo sapiens
tcaagtatttaaaac

SEQ ID NO: 1845077 - DNA, 15 bp, Homo sapiens
caagtatttaaaact

SEQ ID NO: 1845078 - DNA, 15 bp, Homo sapiens
aagtatttaaaacta

SEQ ID NO: 1845079 - DNA, 15 bp, Homo sapiens
agtatttaaaactat

SEQ ID NO: 1845080 - DNA, 15 bp, Homo sapiens
gtatttaaaactatt

SEQ ID NO: 1845081 - DNA, 15 bp, Homo sapiens
tatttaaaactattg

SEQ ID NO: 1845082 - DNA, 15 bp, Homo sapiens
atttaaaactattgt

SEQ ID NO: 1845083 - DNA, 15 bp, Homo sapiens
tttaaaactattgtt

SEQ ID NO: 1845084 - DNA, 15 bp, Homo sapiens
ttaaaactattgttc

SEQ ID NO: 1845085 - DNA, 15 bp, Homo sapiens
taaaactattgttca

SEQ ID NO: 1845086 - DNA, 15 bp, Homo sapiens
aaaactattgttcaa

SEQ ID NO: 1845087 - DNA, 15 bp, Homo sapiens
aaactattgttcaac

SEQ ID NO: 1845088 - DNA, 15 bp, Homo sapiens
aactattgttcaacc

SEQ ID NO: 1845089 - DNA, 15 bp, Homo sapiens
actattgttcaacca

SEQ ID NO: 1845090 - DNA, 15 bp, Homo sapiens
ctattgttcaaccat

SEQ ID NO: 1845091 - DNA, 15 bp, Homo sapiens
tattgttcaaccata

SEQ ID NO: 1845092 - DNA, 15 bp, Homo sapiens
attgttcaaccatat

SEQ ID NO: 1845093 - DNA, 15 bp, Homo sapiens
ttgttcaaccatatt

SEQ ID NO: 1845094 - DNA, 15 bp, Homo sapiens
tgttcaaccatattt

SEQ ID NO: 1845095 - DNA, 15 bp, Homo sapiens
gttcaaccatatttt

SEQ ID NO: 1845096 - DNA, 15 bp, Homo sapiens
ttcaaccatattttg

SEQ ID NO: 1845097 - DNA, 15 bp, Homo sapiens
tcaaccatattttgc

SEQ ID NO: 1845098 - DNA, 15 bp, Homo sapiens
caaccatattttgcc

SEQ ID NO: 1845099 - DNA, 15 bp, Homo sapiens
aaccatattttgcca

SEQ ID NO: 1845100 - DNA, 15 bp, Homo sapiens
accatattttgccaa

SEQ ID NO: 1845101 - DNA, 15 bp, Homo sapiens
ccatattttgccaat

SEQ ID NO: 1845102 - DNA, 15 bp, Homo sapiens
catattttgccaatg

SEQ ID NO: 1845103 - DNA, 15 bp, Homo sapiens
atattttgccaatgg

SEQ ID NO: 1845104 - DNA, 15 bp, Homo sapiens
tattttgccaatggt

SEQ ID NO: 1845105 - DNA, 15 bp, Homo sapiens
attttgccaatggtt

SEQ ID NO: 1845106 - DNA, 15 bp, Homo sapiens
ttttgccaatggtta

SEQ ID NO: 1845107 - DNA, 15 bp, Homo sapiens
tttgccaatggttaa

SEQ ID NO: 1845108 - DNA, 15 bp, Homo sapiens
ttgccaatggttaat

SEQ ID NO: 1845109 - DNA, 15 bp, Homo sapiens
tgccaatggttaatg

SEQ ID NO: 1845110 - DNA, 15 bp, Homo sapiens
gccaatggttaatgt

SEQ ID NO: 1845111 - DNA, 15 bp, Homo sapiens
ccaatggttaatgta

SEQ ID NO: 1845112 - DNA, 15 bp, Homo sapiens
caatggttaatgtat

SEQ ID NO: 1845113 - DNA, 15 bp, Homo sapiens
aatggttaatgtata

SEQ ID NO: 1845114 - DNA, 15 bp, Homo sapiens
atggttaatgtatag

SEQ ID NO: 1845115 - DNA, 15 bp, Homo sapiens
tggttaatgtataga

SEQ ID NO: 1845116 - DNA, 15 bp, Homo sapiens
ggttaatgtatagag

SEQ ID NO: 1845117 - DNA, 15 bp, Homo sapiens
gttaatgtatagagt

SEQ ID NO: 1845118 - DNA, 15 bp, Homo sapiens
ttaatgtatagagtg

SEQ ID NO: 1845119 - DNA, 15 bp, Homo sapiens
taatgtatagagtga

SEQ ID NO: 1845120 - DNA, 15 bp, Homo sapiens
aatgtatagagtgaa

SEQ ID NO: 1845121 - DNA, 15 bp, Homo sapiens
atgtatagagtgaaa

SEQ ID NO: 1845122 - DNA, 15 bp, Homo sapiens
tgtatagagtgaaat

SEQ ID NO: 1845123 - DNA, 15 bp, Homo sapiens
gtatagagtgaaata

SEQ ID NO: 1845124 - DNA, 15 bp, Homo sapiens
tatagagtgaaatag

SEQ ID NO: 1845125 - DNA, 15 bp, Homo sapiens
atagagtgaaatagc

SEQ ID NO: 1845126 - DNA, 15 bp, Homo sapiens
tagagtgaaatagcc

SEQ ID NO: 1845127 - DNA, 15 bp, Homo sapiens
agagtgaaatagcct

SEQ ID NO: 1845128 - DNA, 15 bp, Homo sapiens
gagtgaaatagcctc

SEQ ID NO: 1845129 - DNA, 15 bp, Homo sapiens
agtgaaatagcctct

SEQ ID NO: 1845130 - DNA, 15 bp, Homo sapiens
gtgaaatagcctctt

SEQ ID NO: 1845131 - DNA, 15 bp, Homo sapiens
tgaaatagcctctta

SEQ ID NO: 1845132 - DNA, 15 bp, Homo sapiens
gaaatagcctcttac

SEQ ID NO: 1845133 - DNA, 15 bp, Homo sapiens
aaatagcctcttact

SEQ ID NO: 1845134 - DNA, 15 bp, Homo sapiens
aatagcctcttactc

SEQ ID NO: 1845135 - DNA, 15 bp, Homo sapiens
atagcctcttactcc

SEQ ID NO: 1845136 - DNA, 15 bp, Homo sapiens
tagcctcttactcct

SEQ ID NO: 1845137 - DNA, 15 bp, Homo sapiens
agcctcttactcctt

SEQ ID NO: 1845138 - DNA, 15 bp, Homo sapiens
gcctcttactccttg

SEQ ID NO: 1845139 - DNA, 15 bp, Homo sapiens
cctcttactccttgc

SEQ ID NO: 1845140 - DNA, 15 bp, Homo sapiens
ctcttactccttgcc

SEQ ID NO: 1845141 - DNA, 15 bp, Homo sapiens
tcttactccttgcca

SEQ ID NO: 1845142 - DNA, 15 bp, Homo sapiens
cttactccttgccac

SEQ ID NO: 1845143 - DNA, 15 bp, Homo sapiens
ttactccttgccacg

SEQ ID NO: 1845144 - DNA, 15 bp, Homo sapiens
tactccttgccacgt

SEQ ID NO: 1845145 - DNA, 15 bp, Homo sapiens
actccttgccacgta

SEQ ID NO: 1845146 - DNA, 15 bp, Homo sapiens
ctccttgccacgtaa

SEQ ID NO: 1845147 - DNA, 15 bp, Homo sapiens
tccttgccacgtaag

SEQ ID NO: 1845148 - DNA, 15 bp, Homo sapiens
ccttgccacgtaaga

SEQ ID NO: 1845149 - DNA, 15 bp, Homo sapiens
cttgccacgtaagat

SEQ ID NO: 1845150 - DNA, 15 bp, Homo sapiens
ttgccacgtaagata

SEQ ID NO: 1845151 - DNA, 15 bp, Homo sapiens
tgccacgtaagataa

SEQ ID NO: 1845152 - DNA, 15 bp, Homo sapiens
gccacgtaagataaa

SEQ ID NO: 1845153 - DNA, 15 bp, Homo sapiens
ccacgtaagataaat

SEQ ID NO: 1845154 - DNA, 15 bp, Homo sapiens
cacgtaagataaata

SEQ ID NO: 1845155 - DNA, 15 bp, Homo sapiens
acgtaagataaataa

SEQ ID NO: 1845156 - DNA, 15 bp, Homo sapiens
cgtaagataaataat

SEQ ID NO: 1845157 - DNA, 15 bp, Homo sapiens
gtaagataaataatt

SEQ ID NO: 1845158 - DNA, 15 bp, Homo sapiens
taagataaataattt

SEQ ID NO: 1845159 - DNA, 15 bp, Homo sapiens
aagataaataatttt

SEQ ID NO: 1845160 - DNA, 15 bp, Homo sapiens
agataaataattttt

SEQ ID NO: 1845161 - DNA, 15 bp, Homo sapiens
gataaataatttttc

SEQ ID NO: 1845162 - DNA, 15 bp, Homo sapiens
ataaataatttttct

SEQ ID NO: 1845163 - DNA, 15 bp, Homo sapiens
taaataatttttctt

SEQ ID NO: 1845164 - DNA, 15 bp, Homo sapiens
aaataatttttcttc

SEQ ID NO: 1845165 - DNA, 15 bp, Homo sapiens
aataatttttcttct

SEQ ID NO: 1845166 - DNA, 15 bp, Homo sapiens
ataatttttcttctt

SEQ ID NO: 1845167 - DNA, 15 bp, Homo sapiens
taatttttcttcttt

SEQ ID NO: 1845168 - DNA, 15 bp, Homo sapiens
aatttttcttctttt

SEQ ID NO: 1845169 - DNA, 15 bp, Homo sapiens
atttttcttcttttc

SEQ ID NO: 1845170 - DNA, 15 bp, Homo sapiens
tttttcttcttttca

SEQ ID NO: 1845171 - DNA, 15 bp, Homo sapiens
ttttcttcttttcat

SEQ ID NO: 1845172 - DNA, 15 bp, Homo sapiens
tttcttcttttcatt

SEQ ID NO: 1845173 - DNA, 15 bp, Homo sapiens
ttcttcttttcattc

SEQ ID NO: 1845174 - DNA, 15 bp, Homo sapiens
tcttcttttcattcc

SEQ ID NO: 1845175 - DNA, 15 bp, Homo sapiens
cttcttttcattccc

SEQ ID NO: 1845176 - DNA, 15 bp, Homo sapiens
ttcttttcattcccc

SEQ ID NO: 1845177 - DNA, 15 bp, Homo sapiens
tcttttcattccccc

SEQ ID NO: 1845178 - DNA, 15 bp, Homo sapiens
cttttcattccccca

SEQ ID NO: 1845179 - DNA, 15 bp, Homo sapiens
ttttcattcccccat

SEQ ID NO: 1845180 - DNA, 15 bp, Homo sapiens
tttcattcccccatt

SEQ ID NO: 1845181 - DNA, 15 bp, Homo sapiens
ttcattcccccattc

SEQ ID NO: 1845182 - DNA, 15 bp, Homo sapiens
tcattcccccattcc

SEQ ID NO: 1845183 - DNA, 15 bp, Homo sapiens
cattcccccattcca

SEQ ID NO: 1845184 - DNA, 15 bp, Homo sapiens
attcccccattccat

SEQ ID NO: 1845185 - DNA, 15 bp, Homo sapiens
ttcccccattccata

SEQ ID NO: 1845186 - DNA, 15 bp, Homo sapiens
tcccccattccataa

SEQ ID NO: 1845187 - DNA, 15 bp, Homo sapiens
cccccattccataat

SEQ ID NO: 1845188 - DNA, 15 bp, Homo sapiens
ccccattccataata

SEQ ID NO: 1845189 - DNA, 15 bp, Homo sapiens
cccattccataatat

SEQ ID NO: 1845190 - DNA, 15 bp, Homo sapiens
ccattccataatatt

SEQ ID NO: 1845191 - DNA, 15 bp, Homo sapiens
cattccataatatta

SEQ ID NO: 1845192 - DNA, 15 bp, Homo sapiens
attccataatattac

SEQ ID NO: 1845193 - DNA, 15 bp, Homo sapiens
ttccataatattaca

SEQ ID NO: 1845194 - DNA, 15 bp, Homo sapiens
tccataatattacac

SEQ ID NO: 1845195 - DNA, 15 bp, Homo sapiens
ccataatattacact

SEQ ID NO: 1845196 - DNA, 15 bp, Homo sapiens
cataatattacactc

SEQ ID NO: 1845197 - DNA, 15 bp, Homo sapiens
ataatattacactca

SEQ ID NO: 1845198 - DNA, 15 bp, Homo sapiens
taatattacactcat

SEQ ID NO: 1845199 - DNA, 15 bp, Homo sapiens
aatattacactcatg

SEQ ID NO: 1845200 - DNA, 15 bp, Homo sapiens
atattacactcatgc

SEQ ID NO: 1845201 - DNA, 15 bp, Homo sapiens
tattacactcatgct

SEQ ID NO: 1845202 - DNA, 15 bp, Homo sapiens
attacactcatgctt

SEQ ID NO: 1845203 - DNA, 15 bp, Homo sapiens
ttacactcatgcttt

SEQ ID NO: 1845204 - DNA, 15 bp, Homo sapiens
tacactcatgctttt

SEQ ID NO: 1845205 - DNA, 15 bp, Homo sapiens
acactcatgctttta

SEQ ID NO: 1845206 - DNA, 15 bp, Homo sapiens
cactcatgcttttat

SEQ ID NO: 1845207 - DNA, 15 bp, Homo sapiens
actcatgcttttatg

SEQ ID NO: 1845208 - DNA, 15 bp, Homo sapiens
ctcatgcttttatgg

SEQ ID NO: 1845209 - DNA, 15 bp, Homo sapiens
tcatgcttttatggt

SEQ ID NO: 1845210 - DNA, 15 bp, Homo sapiens
catgcttttatggta

SEQ ID NO: 1845211 - DNA, 15 bp, Homo sapiens
atgcttttatggtat

SEQ ID NO: 1845212 - DNA, 15 bp, Homo sapiens
tgcttttatggtata

SEQ ID NO: 1845213 - DNA, 15 bp, Homo sapiens
gcttttatggtataa

SEQ ID NO: 1845214 - DNA, 15 bp, Homo sapiens
cttttatggtataat

SEQ ID NO: 1845215 - DNA, 15 bp, Homo sapiens
ttttatggtataatc

SEQ ID NO: 1845216 - DNA, 15 bp, Homo sapiens
tttatggtataatct

SEQ ID NO: 1845217 - DNA, 15 bp, Homo sapiens
ttatggtataatctg

SEQ ID NO: 1845218 - DNA, 15 bp, Homo sapiens
tatggtataatctga

SEQ ID NO: 1845219 - DNA, 15 bp, Homo sapiens
atggtataatctgat

SEQ ID NO: 1845220 - DNA, 15 bp, Homo sapiens
tggtataatctgata

SEQ ID NO: 1845221 - DNA, 15 bp, Homo sapiens
ggtataatctgatat

SEQ ID NO: 1845222 - DNA, 15 bp, Homo sapiens
gtataatctgatatt

SEQ ID NO: 1845223 - DNA, 15 bp, Homo sapiens
tataatctgatattt

SEQ ID NO: 1845224 - DNA, 15 bp, Homo sapiens
ataatctgatattta

SEQ ID NO: 1845225 - DNA, 15 bp, Homo sapiens
taatctgatatttaa

SEQ ID NO: 1845226 - DNA, 15 bp, Homo sapiens
aatctgatatttaaa

SEQ ID NO: 1845227 - DNA, 15 bp, Homo sapiens
atctgatatttaaaa

SEQ ID NO: 1845228 - DNA, 15 bp, Homo sapiens
tctgatatttaaaac

SEQ ID NO: 1845229 - DNA, 15 bp, Homo sapiens
ctgatatttaaaact

SEQ ID NO: 1845230 - DNA, 15 bp, Homo sapiens
tgatatttaaaactt

SEQ ID NO: 1845231 - DNA, 15 bp, Homo sapiens
gatatttaaaacttc

SEQ ID NO: 1845232 - DNA, 15 bp, Homo sapiens
atatttaaaacttct

SEQ ID NO: 1845233 - DNA, 15 bp, Homo sapiens
tatttaaaacttcta

SEQ ID NO: 1845234 - DNA, 15 bp, Homo sapiens
atttaaaacttctac

SEQ ID NO: 1845235 - DNA, 15 bp, Homo sapiens
tttaaaacttctact

SEQ ID NO: 1845236 - DNA, 15 bp, Homo sapiens
ttaaaacttctactt

SEQ ID NO: 1845237 - DNA, 15 bp, Homo sapiens
taaaacttctactta

SEQ ID NO: 1845238 - DNA, 15 bp, Homo sapiens
aaaacttctacttat

SEQ ID NO: 1845239 - DNA, 15 bp, Homo sapiens
aaacttctacttatt

SEQ ID NO: 1845240 - DNA, 15 bp, Homo sapiens
aacttctacttatta

SEQ ID NO: 1845241 - DNA, 15 bp, Homo sapiens
acttctacttattat

SEQ ID NO: 1845242 - DNA, 15 bp, Homo sapiens
cttctacttattatt

SEQ ID NO: 1845243 - DNA, 15 bp, Homo sapiens
ttctacttattatta

SEQ ID NO: 1845244 - DNA, 15 bp, Homo sapiens
tctacttattattat

SEQ ID NO: 1845245 - DNA, 15 bp, Homo sapiens
ctacttattattatt

SEQ ID NO: 1845246 - DNA, 15 bp, Homo sapiens
tacttattattatta

SEQ ID NO: 1845247 - DNA, 15 bp, Homo sapiens
acttattattattat

SEQ ID NO: 1845248 - DNA, 15 bp, Homo sapiens
cttattattattata

SEQ ID NO: 1845249 - DNA, 15 bp, Homo sapiens
ttattattattatat

SEQ ID NO: 1845250 - DNA, 15 bp, Homo sapiens
tattattatattttt

SEQ ID NO: 1845251 - DNA, 15 bp, Homo sapiens
attattatatttttc

SEQ ID NO: 1845252 - DNA, 15 bp, Homo sapiens
ttattatatttttca

SEQ ID NO: 1845253 - DNA, 15 bp, Homo sapiens
tattatatttttcac

SEQ ID NO: 1845254 - DNA, 15 bp, Homo sapiens
attatatttttcaca

SEQ ID NO: 1845255 - DNA, 15 bp, Homo sapiens
ttatatttttcacat

SEQ ID NO: 1845256 - DNA, 15 bp, Homo sapiens
tatatttttcacatt

SEQ ID NO: 1845257 - DNA, 15 bp, Homo sapiens
atatttttcacattt

SEQ ID NO: 1845258 - DNA, 15 bp, Homo sapiens
tatttttcacatttt

SEQ ID NO: 1845259 - DNA, 15 bp, Homo sapiens
atttttcacatttta

SEQ ID NO: 1845260 - DNA, 15 bp, Homo sapiens
tttttcacattttat

SEQ ID NO: 1845261 - DNA, 15 bp, Homo sapiens
ttttcacattttatc

SEQ ID NO: 1845262 - DNA, 15 bp, Homo sapiens
tttcacattttatct

SEQ ID NO: 1845263 - DNA, 15 bp, Homo sapiens
ttcacattttatctt

SEQ ID NO: 1845264 - DNA, 15 bp, Homo sapiens
tcacattttatcttc

SEQ ID NO: 1845265 - DNA, 15 bp, Homo sapiens
cacattttatcttct

SEQ ID NO: 1845266 - DNA, 15 bp, Homo sapiens
acattttatcttctc

SEQ ID NO: 1845267 - DNA, 15 bp, Homo sapiens
cattttatcttctct

SEQ ID NO: 1845268 - DNA, 15 bp, Homo sapiens
attttatcttctctt

SEQ ID NO: 1845269 - DNA, 15 bp, Homo sapiens
ttttatcttctcttc

SEQ ID NO: 1845270 - DNA, 15 bp, Homo sapiens
tttatcttctcttcc

SEQ ID NO: 1845271 - DNA, 15 bp, Homo sapiens
ttatcttctcttcca

SEQ ID NO: 1845272 - DNA, 15 bp, Homo sapiens
tatcttctcttccaa

SEQ ID NO: 1845273 - DNA, 15 bp, Homo sapiens
atcttctcttccaat

SEQ ID NO: 1845274 - DNA, 15 bp, Homo sapiens
tcttctcttccaata

SEQ ID NO: 1845275 - DNA, 15 bp, Homo sapiens
cttctcttccaataa

SEQ ID NO: 1845276 - DNA, 15 bp, Homo sapiens
ttctcttccaataaa

SEQ ID NO: 1845277 - DNA, 15 bp, Homo sapiens
tctcttccaataaat

SEQ ID NO: 1845278 - DNA, 15 bp, Homo sapiens
ctcttccaataaatt

SEQ ID NO: 1845279 - DNA, 15 bp, Homo sapiens
tcttccaataaattt

SEQ ID NO: 1845280 - DNA, 15 bp, Homo sapiens
cttccaataaatttt

SEQ ID NO: 1845281 - DNA, 15 bp, Homo sapiens
ttccaataaatttta

SEQ ID NO: 1845282 - DNA, 15 bp, Homo sapiens
tccaataaattttag

SEQ ID NO: 1845283 - DNA, 15 bp, Homo sapiens
ccaataaattttagt

SEQ ID NO: 1845284 - DNA, 15 bp, Homo sapiens
caataaattttagtt

SEQ ID NO: 1845285 - DNA, 15 bp, Homo sapiens
aataaattttagttt

SEQ ID NO: 1845286 - DNA, 15 bp, Homo sapiens
ataaattttagtttt

SEQ ID NO: 1845287 - DNA, 15 bp, Homo sapiens
taaattttagttttc

SEQ ID NO: 1845288 - DNA, 15 bp, Homo sapiens
aaattttagttttca

SEQ ID NO: 1845289 - DNA, 15 bp, Homo sapiens
aattttagttttcat

SEQ ID NO: 1845290 - DNA, 15 bp, Homo sapiens
attttagttttcatt

SEQ ID NO: 1845291 - DNA, 15 bp, Homo sapiens
ttttagttttcattt

SEQ ID NO: 1845292 - DNA, 15 bp, Homo sapiens
tttagttttcatttt

SEQ ID NO: 1845293 - DNA, 15 bp, Homo sapiens
ttagttttcattttc

SEQ ID NO: 1845294 - DNA, 15 bp, Homo sapiens
tagttttcattttca

SEQ ID NO: 1845295 - DNA, 15 bp, Homo sapiens
agttttcattttcat

SEQ ID NO: 1845296 - DNA, 15 bp, Homo sapiens
gttttcattttcatt

SEQ ID NO: 1845297 - DNA, 15 bp, Homo sapiens
ttttcattttcattt

SEQ ID NO: 1845298 - DNA, 15 bp, Homo sapiens
tttcattttcatttt

SEQ ID NO: 1845299 - DNA, 15 bp, Homo sapiens
ttcattttcattttg

SEQ ID NO: 1845300 - DNA, 15 bp, Homo sapiens
tcattttcattttga

SEQ ID NO: 1845301 - DNA, 15 bp, Homo sapiens
cattttcattttgat

SEQ ID NO: 1845302 - DNA, 15 bp, Homo sapiens
attttcattttgatt

SEQ ID NO: 1845303 - DNA, 15 bp, Homo sapiens
ttttcattttgattt

SEQ ID NO: 1845304 - DNA, 15 bp, Homo sapiens
tttcattttgatttg

SEQ ID NO: 1845305 - DNA, 15 bp, Homo sapiens
ttcattttgatttgt

SEQ ID NO: 1845306 - DNA, 15 bp, Homo sapiens
tcattttgatttgta

SEQ ID NO: 1845307 - DNA, 15 bp, Homo sapiens
cattttgatttgtaa

SEQ ID NO: 1845308 - DNA, 15 bp, Homo sapiens
attttgatttgtaat

SEQ ID NO: 1845309 - DNA, 15 bp, Homo sapiens
ttttgatttgtaatc

SEQ ID NO: 1845310 - DNA, 15 bp, Homo sapiens
tttgatttgtaatca

SEQ ID NO: 1845311 - DNA, 15 bp, Homo sapiens
ttgatttgtaatcac

SEQ ID NO: 1845312 - DNA, 15 bp, Homo sapiens
tgatttgtaatcaca

SEQ ID NO: 1845313 - DNA, 15 bp, Homo sapiens
gatttgtaatcacag

SEQ ID NO: 1845314 - DNA, 15 bp, Homo sapiens
atttgtaatcacagt

SEQ ID NO: 1845315 - DNA, 15 bp, Homo sapiens
tttgtaatcacagtt

SEQ ID NO: 1845316 - DNA, 15 bp, Homo sapiens
ttgtaatcacagttg

SEQ ID NO: 1845317 - DNA, 15 bp, Homo sapiens
tgtaatcacagttgt

SEQ ID NO: 1845318 - DNA, 15 bp, Homo sapiens
gtaatcacagttgta

SEQ ID NO: 1845319 - DNA, 15 bp, Homo sapiens
taatcacagttgtaa

SEQ ID NO: 1845320 - DNA, 15 bp, Homo sapiens
aatcacagttgtaac

SEQ ID NO: 1845321 - DNA, 15 bp, Homo sapiens
atcacagttgtaaca

SEQ ID NO: 1845322 - DNA, 15 bp, Homo sapiens
tcacagttgtaacaa

SEQ ID NO: 1845323 - DNA, 15 bp, Homo sapiens
cacagttgtaacaat

SEQ ID NO: 1845324 - DNA, 15 bp, Homo sapiens
acagttgtaacaatt

SEQ ID NO: 1845325 - DNA, 15 bp, Homo sapiens
cagttgtaacaatta

SEQ ID NO: 1845326 - DNA, 15 bp, Homo sapiens
agttgtaacaattat

SEQ ID NO: 1845327 - DNA, 15 bp, Homo sapiens
gttgtaacaattatt

SEQ ID NO: 1845328 - DNA, 15 bp, Homo sapiens
ttgtaacaattattt

SEQ ID NO: 1845329 - DNA, 15 bp, Homo sapiens
gtaacaattatttaa

SEQ ID NO: 1845330 - DNA, 15 bp, Homo sapiens
taacaattatttaaa

SEQ ID NO: 1845331 - DNA, 15 bp, Homo sapiens
aacaattatttaaac

SEQ ID NO: 1845332 - DNA, 15 bp, Homo sapiens
acaattatttaaacc

SEQ ID NO: 1845333 - DNA, 15 bp, Homo sapiens
caattatttaaacct

SEQ ID NO: 1845334 - DNA, 15 bp, Homo sapiens
aattatttaaaccta

SEQ ID NO: 1845335 - DNA, 15 bp, Homo sapiens
attatttaaacctaa

SEQ ID NO: 1845336 - DNA, 15 bp, Homo sapiens
ttatttaaacctaat

SEQ ID NO: 1845337 - DNA, 15 bp, Homo sapiens
tatttaaacctaata

SEQ ID NO: 1845338 - DNA, 15 bp, Homo sapiens
atttaaacctaatag

SEQ ID NO: 1845339 - DNA, 15 bp, Homo sapiens
tttaaacctaataga

SEQ ID NO: 1845340 - DNA, 15 bp, Homo sapiens
ttaaacctaatagat

SEQ ID NO: 1845341 - DNA, 15 bp, Homo sapiens
taaacctaatagatc

SEQ ID NO: 1845342 - DNA, 15 bp, Homo sapiens
aaacctaatagatct

SEQ ID NO: 1845343 - DNA, 15 bp, Homo sapiens
aacctaatagatctt

SEQ ID NO: 1845344 - DNA, 15 bp, Homo sapiens
acctaatagatctta

SEQ ID NO: 1845345 - DNA, 15 bp, Homo sapiens
cctaatagatcttag

SEQ ID NO: 1845346 - DNA, 15 bp, Homo sapiens
ctaatagatcttagg

SEQ ID NO: 1845347 - DNA, 15 bp, Homo sapiens
taatagatcttaggg

SEQ ID NO: 1845348 - DNA, 15 bp, Homo sapiens
aatagatcttagggt

SEQ ID NO: 1845349 - DNA, 15 bp, Homo sapiens
atagatcttagggtt

SEQ ID NO: 1845350 - DNA, 15 bp, Homo sapiens
tagatcttagggttc

SEQ ID NO: 1845351 - DNA, 15 bp, Homo sapiens
agatcttagggttca

SEQ ID NO: 1845352 - DNA, 15 bp, Homo sapiens
gatcttagggttcat

SEQ ID NO: 1845353 - DNA, 15 bp, Homo sapiens
atcttagggttcatt

SEQ ID NO: 1845354 - DNA, 15 bp, Homo sapiens
tcttagggttcattg

SEQ ID NO: 1845355 - DNA, 15 bp, Homo sapiens
cttagggttcattgc

SEQ ID NO: 1845356 - DNA, 15 bp, Homo sapiens
ttagggttcattgcc

SEQ ID NO: 1845357 - DNA, 15 bp, Homo sapiens
tagggttcattgcca

SEQ ID NO: 1845358 - DNA, 15 bp, Homo sapiens
agggttcattgccag

SEQ ID NO: 1845359 - DNA, 15 bp, Homo sapiens
gggttcattgccaga

SEQ ID NO: 1845360 - DNA, 15 bp, Homo sapiens
ggttcattgccagat

SEQ ID NO: 1845361 - DNA, 15 bp, Homo sapiens
gttcattgccagatc

SEQ ID NO: 1845362 - DNA, 15 bp, Homo sapiens
ttcattgccagatct

SEQ ID NO: 1845363 - DNA, 15 bp, Homo sapiens
tcattgccagatctt

SEQ ID NO: 1845364 - DNA, 15 bp, Homo sapiens
cattgccagatcttt

SEQ ID NO: 1845365 - DNA, 15 bp, Homo sapiens
attgccagatcttta

SEQ ID NO: 1845366 - DNA, 15 bp, Homo sapiens
ttgccagatctttat

SEQ ID NO: 1845367 - DNA, 15 bp, Homo sapiens
tgccagatctttatt

SEQ ID NO: 1845368 - DNA, 15 bp, Homo sapiens
gccagatctttatta

SEQ ID NO: 1845369 - DNA, 15 bp, Homo sapiens
ccagatctttattac

SEQ ID NO: 1845370 - DNA, 15 bp, Homo sapiens
cagatctttattacc

SEQ ID NO: 1845371 - DNA, 15 bp, Homo sapiens
agatctttattacca

SEQ ID NO: 1845372 - DNA, 15 bp, Homo sapiens
gatctttattaccat

SEQ ID NO: 1845373 - DNA, 15 bp, Homo sapiens
atctttattaccatg

SEQ ID NO: 1845374 - DNA, 15 bp, Homo sapiens
tctttattaccatgg

SEQ ID NO: 1845375 - DNA, 15 bp, Homo sapiens
ctttattaccatgga

SEQ ID NO: 1845376 - DNA, 15 bp, Homo sapiens
tttattaccatggac

SEQ ID NO: 1845377 - DNA, 15 bp, Homo sapiens
ttattaccatggaca

SEQ ID NO: 1845378 - DNA, 15 bp, Homo sapiens
tattaccatggacat

SEQ ID NO: 1845379 - DNA, 15 bp, Homo sapiens
attaccatggacatc

SEQ ID NO: 1845380 - DNA, 15 bp, Homo sapiens
ttaccatggacatct

SEQ ID NO: 1845381 - DNA, 15 bp, Homo sapiens
taccatggacatctc

SEQ ID NO: 1845382 - DNA, 15 bp, Homo sapiens
accatggacatctcc

SEQ ID NO: 1845383 - DNA, 15 bp, Homo sapiens
ccatggacatctcct

SEQ ID NO: 1845384 - DNA, 15 bp, Homo sapiens
catggacatctcctg

SEQ ID NO: 1845385 - DNA, 15 bp, Homo sapiens
atggacatctcctgt

SEQ ID NO: 1845386 - DNA, 15 bp, Homo sapiens
tggacatctcctgtt

SEQ ID NO: 1845387 - DNA, 15 bp, Homo sapiens
ggacatctcctgttg

SEQ ID NO: 1845388 - DNA, 15 bp, Homo sapiens
gacatctcctgttgt

SEQ ID NO: 1845389 - DNA, 15 bp, Homo sapiens
acatctcctgttgtt

SEQ ID NO: 1845390 - DNA, 15 bp, Homo sapiens
catctcctgttgttg

SEQ ID NO: 1845391 - DNA, 15 bp, Homo sapiens
atctcctgttgttga

SEQ ID NO: 1845392 - DNA, 15 bp, Homo sapiens
tctcctgttgttgaa

SEQ ID NO: 1845393 - DNA, 15 bp, Homo sapiens
ctcctgttgttgaat

SEQ ID NO: 1845394 - DNA, 15 bp, Homo sapiens
tcctgttgttgaatt

SEQ ID NO: 1845395 - DNA, 15 bp, Homo sapiens
cctgttgttgaattc

SEQ ID NO: 1845396 - DNA, 15 bp, Homo sapiens
ctgttgttgaattcc

SEQ ID NO: 1845397 - DNA, 15 bp, Homo sapiens
tgttgttgaattcct

SEQ ID NO: 1845398 - DNA, 15 bp, Homo sapiens
gttgttgaattcctt

SEQ ID NO: 1845399 - DNA, 15 bp, Homo sapiens
ttgttgaattccttg

SEQ ID NO: 1845400 - DNA, 15 bp, Homo sapiens
tgttgaattccttgt

SEQ ID NO: 1845401 - DNA, 15 bp, Homo sapiens
gttgaattccttgtt

SEQ ID NO: 1845402 - DNA, 15 bp, Homo sapiens
ttgaattccttgttt

SEQ ID NO: 1845403 - DNA, 15 bp, Homo sapiens
tgaattccttgtttt

SEQ ID NO: 1845404 - DNA, 15 bp, Homo sapiens
gaattccttgttttg

SEQ ID NO: 1845405 - DNA, 15 bp, Homo sapiens
aattccttgttttga

SEQ ID NO: 1845406 - DNA, 15 bp, Homo sapiens
attccttgttttgat

SEQ ID NO: 1845407 - DNA, 15 bp, Homo sapiens
ttccttgttttgatt

SEQ ID NO: 1845408 - DNA, 15 bp, Homo sapiens
tccttgttttgatta

SEQ ID NO: 1845409 - DNA, 15 bp, Homo sapiens
ccttgttttgattaa

SEQ ID NO: 1845410 - DNA, 15 bp, Homo sapiens
cttgttttgattaat

SEQ ID NO: 1845411 - DNA, 15 bp, Homo sapiens
ttgttttgattaatg

SEQ ID NO: 1845412 - DNA, 15 bp, Homo sapiens
tgttttgattaatgt

SEQ ID NO: 1845413 - DNA, 15 bp, Homo sapiens
gttttgattaatgtc

SEQ ID NO: 1845414 - DNA, 15 bp, Homo sapiens
ttttgattaatgtct

SEQ ID NO: 1845415 - DNA, 15 bp, Homo sapiens
tttgattaatgtctt

SEQ ID NO: 1845416 - DNA, 15 bp, Homo sapiens
ttgattaatgtctta

SEQ ID NO: 1845417 - DNA, 15 bp, Homo sapiens
tgattaatgtcttaa

SEQ ID NO: 1845418 - DNA, 15 bp, Homo sapiens
gattaatgtcttaat

SEQ ID NO: 1845419 - DNA, 15 bp, Homo sapiens
attaatgtcttaatt

SEQ ID NO: 1845420 - DNA, 15 bp, Homo sapiens
ttaatgtcttaatta

SEQ ID NO: 1845421 - DNA, 15 bp, Homo sapiens
taatgtcttaattac

SEQ ID NO: 1845422 - DNA, 15 bp, Homo sapiens
aatgtcttaattaca

SEQ ID NO: 1845423 - DNA, 15 bp, Homo sapiens
atgtcttaattacaa

SEQ ID NO: 1845424 - DNA, 15 bp, Homo sapiens
tgtcttaattacaaa

SEQ ID NO: 1845425 - DNA, 15 bp, Homo sapiens
gtcttaattacaaat

SEQ ID NO: 1845426 - DNA, 15 bp, Homo sapiens
tcttaattacaaata

SEQ ID NO: 1845427 - DNA, 15 bp, Homo sapiens
cttaattacaaatat

SEQ ID NO: 1845428 - DNA, 15 bp, Homo sapiens
ttaattacaaatatg

SEQ ID NO: 1845429 - DNA, 15 bp, Homo sapiens
taattacaaatatga

SEQ ID NO: 1845430 - DNA, 15 bp, Homo sapiens
aattacaaatatgaa

SEQ ID NO: 1845431 - DNA, 15 bp, Homo sapiens
attacaaatatgaaa

SEQ ID NO: 1845432 - DNA, 15 bp, Homo sapiens
ttacaaatatgaaaa

SEQ ID NO: 1845433 - DNA, 15 bp, Homo sapiens
tacaaatatgaaaaa

SEQ ID NO: 1845434 - DNA, 15 bp, Homo sapiens
acaaatatgaaaaat

SEQ ID NO: 1845435 - DNA, 15 bp, Homo sapiens
caaatatgaaaaatt

SEQ ID NO: 1845436 - DNA, 15 bp, Homo sapiens
aaatatgaaaaattt

SEQ ID NO: 1845437 - DNA, 15 bp, Homo sapiens
aatatgaaaaattta

SEQ ID NO: 1845438 - DNA, 15 bp, Homo sapiens
atatgaaaaatttaa

SEQ ID NO: 1845439 - DNA, 15 bp, Homo sapiens
tatgaaaaatttaac

SEQ ID NO: 1845440 - DNA, 15 bp, Homo sapiens
atgaaaaatttaaca

SEQ ID NO: 1845441 - DNA, 15 bp, Homo sapiens
tgaaaaatttaacac

SEQ ID NO: 1845442 - DNA, 15 bp, Homo sapiens
gaaaaatttaacacc

SEQ ID NO: 1845443 - DNA, 15 bp, Homo sapiens
aaaaatttaacacct

SEQ ID NO: 1845444 - DNA, 15 bp, Homo sapiens
aaaatttaacacctg

SEQ ID NO: 1845445 - DNA, 15 bp, Homo sapiens
aaatttaacacctgt

SEQ ID NO: 1845446 - DNA, 15 bp, Homo sapiens
aatttaacacctgtt

SEQ ID NO: 1845447 - DNA, 15 bp, Homo sapiens
atttaacacctgttt

SEQ ID NO: 1845448 - DNA, 15 bp, Homo sapiens
tttaacacctgttta

SEQ ID NO: 1845449 - DNA, 15 bp, Homo sapiens
ttaacacctgtttaa

SEQ ID NO: 1845450 - DNA, 15 bp, Homo sapiens
taacacctgtttaat

SEQ ID NO: 1845451 - DNA, 15 bp, Homo sapiens
aacacctgtttaatc

SEQ ID NO: 1845452 - DNA, 15 bp, Homo sapiens
acacctgtttaatct

SEQ ID NO: 1845453 - DNA, 15 bp, Homo sapiens
cacctgtttaatctt

SEQ ID NO: 1845454 - DNA, 15 bp, Homo sapiens
acctgtttaatcttc

SEQ ID NO: 1845455 - DNA, 15 bp, Homo sapiens
cctgtttaatcttct

SEQ ID NO: 1845456 - DNA, 15 bp, Homo sapiens
ctgtttaatcttctt

SEQ ID NO: 1845457 - DNA, 15 bp, Homo sapiens
tgtttaatcttcttg

SEQ ID NO: 1845458 - DNA, 15 bp, Homo sapiens
gtttaatcttcttga

SEQ ID NO: 1845459 - DNA, 15 bp, Homo sapiens
tttaatcttcttgaa

SEQ ID NO: 1845460 - DNA, 15 bp, Homo sapiens
ttaatcttcttgaac

SEQ ID NO: 1845461 - DNA, 15 bp, Homo sapiens
taatcttcttgaaca

SEQ ID NO: 1845462 - DNA, 15 bp, Homo sapiens
aatcttcttgaacaa

SEQ ID NO: 1845463 - DNA, 15 bp, Homo sapiens
atcttcttgaacaac

SEQ ID NO: 1845464 - DNA, 15 bp, Homo sapiens
tcttcttgaacaacg

SEQ ID NO: 1845465 - DNA, 15 bp, Homo sapiens
cttcttgaacaacgt

SEQ ID NO: 1845466 - DNA, 15 bp, Homo sapiens
ttcttgaacaacgta

SEQ ID NO: 1845467 - DNA, 15 bp, Homo sapiens
tcttgaacaacgtat

SEQ ID NO: 1845468 - DNA, 15 bp, Homo sapiens
cttgaacaacgtatt

SEQ ID NO: 1845469 - DNA, 15 bp, Homo sapiens
ttgaacaacgtattc

SEQ ID NO: 1845470 - DNA, 15 bp, Homo sapiens
tgaacaacgtattct

SEQ ID NO: 1845471 - DNA, 15 bp, Homo sapiens
gaacaacgtattctg

SEQ ID NO: 1845472 - DNA, 15 bp, Homo sapiens
aacaacgtattctgc

SEQ ID NO: 1845473 - DNA, 15 bp, Homo sapiens
acaacgtattctgct

SEQ ID NO: 1845474 - DNA, 15 bp, Homo sapiens
caacgtattctgctt

SEQ ID NO: 1845475 - DNA, 15 bp, Homo sapiens
aacgtattctgcttt

SEQ ID NO: 1845476 - DNA, 15 bp, Homo sapiens
acgtattctgcttta

SEQ ID NO: 1845477 - DNA, 15 bp, Homo sapiens
cgtattctgctttat

SEQ ID NO: 1845478 - DNA, 15 bp, Homo sapiens
gtattctgctttatc

SEQ ID NO: 1845479 - DNA, 15 bp, Homo sapiens
tattctgctttatcg

SEQ ID NO: 1845480 - DNA, 15 bp, Homo sapiens
attctgctttatcgc

SEQ ID NO: 1845481 - DNA, 15 bp, Homo sapiens
ttctgctttatcgca

SEQ ID NO: 1845482 - DNA, 15 bp, Homo sapiens
tctgctttatcgcac

SEQ ID NO: 1845483 - DNA, 15 bp, Homo sapiens
ctgctttatcgcact

SEQ ID NO: 1845484 - DNA, 15 bp, Homo sapiens
tgctttatcgcactt

SEQ ID NO: 1845485 - DNA, 15 bp, Homo sapiens
gctttatcgcacttt

SEQ ID NO: 1845486 - DNA, 15 bp, Homo sapiens
ctttatcgcactttg

SEQ ID NO: 1845487 - DNA, 15 bp, Homo sapiens
tttatcgcactttgc

SEQ ID NO: 1845488 - DNA, 15 bp, Homo sapiens
ttatcgcactttgca

SEQ ID NO: 1845489 - DNA, 15 bp, Homo sapiens
tatcgcactttgcac

SEQ ID NO: 1845490 - DNA, 15 bp, Homo sapiens
atcgcactttgcact

SEQ ID NO: 1845491 - DNA, 15 bp, Homo sapiens
tcgcactttgcactt

SEQ ID NO: 1845492 - DNA, 15 bp, Homo sapiens
cgcactttgcacttt

SEQ ID NO: 1845493 - DNA, 15 bp, Homo sapiens
gcactttgcactttg

SEQ ID NO: 1845494 - DNA, 15 bp, Homo sapiens
cactttgcactttgt

SEQ ID NO: 1845495 - DNA, 15 bp, Homo sapiens
actttgcactttgtt

SEQ ID NO: 1845496 - DNA, 15 bp, Homo sapiens
ctttgcactttgttt

SEQ ID NO: 1845497 - DNA, 15 bp, Homo sapiens
tttgcactttgtttc

SEQ ID NO: 1845498 - DNA, 15 bp, Homo sapiens
ttgcactttgtttct

SEQ ID NO: 1845499 - DNA, 15 bp, Homo sapiens
tgcactttgtttctt

SEQ ID NO: 1845500 - DNA, 15 bp, Homo sapiens
gcactttgtttcttt

SEQ ID NO: 1845501 - DNA, 15 bp, Homo sapiens
cactttgtttctttt

SEQ ID NO: 1845502 - DNA, 15 bp, Homo sapiens
actttgtttctttta

SEQ ID NO: 1845503 - DNA, 15 bp, Homo sapiens
ctttgtttcttttaa

SEQ ID NO: 1845504 - DNA, 15 bp, Homo sapiens
tttgtttcttttaat

SEQ ID NO: 1845505 - DNA, 15 bp, Homo sapiens
ttgtttcttttaata

SEQ ID NO: 1845506 - DNA, 15 bp, Homo sapiens
tgtttcttttaatat

SEQ ID NO: 1845507 - DNA, 15 bp, Homo sapiens
gtttcttttaatatg

SEQ ID NO: 1845508 - DNA, 15 bp, Homo sapiens
tttcttttaatatga

SEQ ID NO: 1845509 - DNA, 15 bp, Homo sapiens
ttcttttaatatgaa

SEQ ID NO: 1845510 - DNA, 15 bp, Homo sapiens
tcttttaatatgaat

SEQ ID NO: 1845511 - DNA, 15 bp, Homo sapiens
cttttaatatgaatg

SEQ ID NO: 1845512 - DNA, 15 bp, Homo sapiens
ttttaatatgaatga

SEQ ID NO: 1845513 - DNA, 15 bp, Homo sapiens
tttaatatgaatgac

SEQ ID NO: 1845514 - DNA, 15 bp, Homo sapiens
ttaatatgaatgaca

SEQ ID NO: 1845515 - DNA, 15 bp, Homo sapiens
taatatgaatgacaa

SEQ ID NO: 1845516 - DNA, 15 bp, Homo sapiens
aatatgaatgacaac

SEQ ID NO: 1845517 - DNA, 15 bp, Homo sapiens
atatgaatgacaact

SEQ ID NO: 1845518 - DNA, 15 bp, Homo sapiens
tatgaatgacaactt

SEQ ID NO: 1845519 - DNA, 15 bp, Homo sapiens
atgaatgacaacttg

SEQ ID NO: 1845520 - DNA, 15 bp, Homo sapiens
tgaatgacaacttgg

SEQ ID NO: 1845521 - DNA, 15 bp, Homo sapiens
gaatgacaacttggc

SEQ ID NO: 1845522 - DNA, 15 bp, Homo sapiens
aatgacaacttggcc

SEQ ID NO: 1845523 - DNA, 15 bp, Homo sapiens
atgacaacttggccc

SEQ ID NO: 1845524 - DNA, 15 bp, Homo sapiens
tgacaacttggccct

SEQ ID NO: 1845525 - DNA, 15 bp, Homo sapiens
gacaacttggccctg

SEQ ID NO: 1845526 - DNA, 15 bp, Homo sapiens
acaacttggccctgc

SEQ ID NO: 1845527 - DNA, 15 bp, Homo sapiens
caacttggccctgct

SEQ ID NO: 1845528 - DNA, 15 bp, Homo sapiens
aacttggccctgctg

SEQ ID NO: 1845529 - DNA, 15 bp, Homo sapiens
acttggccctgctgt

SEQ ID NO: 1845530 - DNA, 15 bp, Homo sapiens
cttggccctgctgtt

SEQ ID NO: 1845531 - DNA, 15 bp, Homo sapiens
ttggccctgctgttg

SEQ ID NO: 1845532 - DNA, 15 bp, Homo sapiens
tggccctgctgttgg

SEQ ID NO: 1845533 - DNA, 15 bp, Homo sapiens
ggccctgctgttggg

SEQ ID NO: 1845534 - DNA, 15 bp, Homo sapiens
gccctgctgttgggt

SEQ ID NO: 1845535 - DNA, 15 bp, Homo sapiens
ccctgctgttgggtt

SEQ ID NO: 1845536 - DNA, 15 bp, Homo sapiens
cctgctgttgggttt

SEQ ID NO: 1845537 - DNA, 15 bp, Homo sapiens
ctgctgttgggtttt

SEQ ID NO: 1845538 - DNA, 15 bp, Homo sapiens
tgctgttgggttttg

SEQ ID NO: 1845539 - DNA, 15 bp, Homo sapiens
gctgttgggttttgc

SEQ ID NO: 1845540 - DNA, 15 bp, Homo sapiens
ctgttgggttttgca

SEQ ID NO: 1845541 - DNA, 15 bp, Homo sapiens
tgttgggttttgcag

SEQ ID NO: 1845542 - DNA, 15 bp, Homo sapiens
gttgggttttgcaga

SEQ ID NO: 1845543 - DNA, 15 bp, Homo sapiens
ttgggttttgcagag

SEQ ID NO: 1845544 - DNA, 15 bp, Homo sapiens
tgggttttgcagagg

SEQ ID NO: 1845545 - DNA, 15 bp, Homo sapiens
gggttttgcagagga

SEQ ID NO: 1845546 - DNA, 15 bp, Homo sapiens
ggttttgcagaggag

SEQ ID NO: 1845547 - DNA, 15 bp, Homo sapiens
gttttgcagaggaga

SEQ ID NO: 1845548 - DNA, 15 bp, Homo sapiens
ttttgcagaggagac

SEQ ID NO: 1845549 - DNA, 15 bp, Homo sapiens
tttgcagaggagaca

SEQ ID NO: 1845550 - DNA, 15 bp, Homo sapiens
ttgcagaggagacat

SEQ ID NO: 1845551 - DNA, 15 bp, Homo sapiens
tgcagaggagacatc

SEQ ID NO: 1845552 - DNA, 15 bp, Homo sapiens
gcagaggagacatca

SEQ ID NO: 1845553 - DNA, 15 bp, Homo sapiens
cagaggagacatcag

SEQ ID NO: 1845554 - DNA, 15 bp, Homo sapiens
agaggagacatcaga

SEQ ID NO: 1845555 - DNA, 15 bp, Homo sapiens
gaggagacatcagat

SEQ ID NO: 1845556 - DNA, 15 bp, Homo sapiens
aggagacatcagata

SEQ ID NO: 1845557 - DNA, 15 bp, Homo sapiens
ggagacatcagatat

SEQ ID NO: 1845558 - DNA, 15 bp, Homo sapiens
gagacatcagatatc

SEQ ID NO: 1845559 - DNA, 15 bp, Homo sapiens
agacatcagatatca

SEQ ID NO: 1845560 - DNA, 15 bp, Homo sapiens
gacatcagatatcag

SEQ ID NO: 1845561 - DNA, 15 bp, Homo sapiens
acatcagatatcagc

SEQ ID NO: 1845562 - DNA, 15 bp, Homo sapiens
catcagatatcagct

SEQ ID NO: 1845563 - DNA, 15 bp, Homo sapiens
atcagatatcagctt

SEQ ID NO: 1845564 - DNA, 15 bp, Homo sapiens
tcagatatcagcttg

SEQ ID NO: 1845565 - DNA, 15 bp, Homo sapiens
cagatatcagcttga

SEQ ID NO: 1845566 - DNA, 15 bp, Homo sapiens
agatatcagcttgat

SEQ ID NO: 1845567 - DNA, 15 bp, Homo sapiens
gatatcagcttgatt

SEQ ID NO: 1845568 - DNA, 15 bp, Homo sapiens
atatcagcttgattt

SEQ ID NO: 1845569 - DNA, 15 bp, Homo sapiens
tatcagcttgatttt

SEQ ID NO: 1845570 - DNA, 15 bp, Homo sapiens
atcagcttgattttt

SEQ ID NO: 1845571 - DNA, 15 bp, Homo sapiens
tcagcttgatttttc

SEQ ID NO: 1845572 - DNA, 15 bp, Homo sapiens
cagcttgatttttct

SEQ ID NO: 1845573 - DNA, 15 bp, Homo sapiens
agcttgatttttctc

SEQ ID NO: 1845574 - DNA, 15 bp, Homo sapiens
gcttgatttttctct

SEQ ID NO: 1845575 - DNA, 15 bp, Homo sapiens
cttgatttttctctt

SEQ ID NO: 1845576 - DNA, 15 bp, Homo sapiens
ttgatttttctcttt

SEQ ID NO: 1845577 - DNA, 15 bp, Homo sapiens
tgatttttctctttt

SEQ ID NO: 1845578 - DNA, 15 bp, Homo sapiens
gatttttctcttttt

SEQ ID NO: 1845579 - DNA, 15 bp, Homo sapiens
ttttctctttttttt

SEQ ID NO: 1845580 - DNA, 15 bp, Homo sapiens
tttctcttttttttt

SEQ ID NO: 1845581 - DNA, 15 bp, Homo sapiens
ttctctttttttttc

SEQ ID NO: 1845582 - DNA, 15 bp, Homo sapiens
tctctttttttttca

SEQ ID NO: 1845583 - DNA, 15 bp, Homo sapiens
ctctttttttttcat

SEQ ID NO: 1845584 - DNA, 15 bp, Homo sapiens
tctttttttttcata

SEQ ID NO: 1845585 - DNA, 15 bp, Homo sapiens
ctttttttttcatag

SEQ ID NO: 1845586 - DNA, 15 bp, Homo sapiens
tttttttttcataga

SEQ ID NO: 1845587 - DNA, 15 bp, Homo sapiens
ttttttttcatagat

SEQ ID NO: 1845588 - DNA, 15 bp, Homo sapiens
tttttttcatagata

SEQ ID NO: 1845589 - DNA, 15 bp, Homo sapiens
ttttttcatagataa

SEQ ID NO: 1845590 - DNA, 15 bp, Homo sapiens
tttttcatagataat

SEQ ID NO: 1845591 - DNA, 15 bp, Homo sapiens
ttttcatagataatc

SEQ ID NO: 1845592 - DNA, 15 bp, Homo sapiens
tttcatagataatct

SEQ ID NO: 1845593 - DNA, 15 bp, Homo sapiens
ttcatagataatctg

SEQ ID NO: 1845594 - DNA, 15 bp, Homo sapiens
tcatagataatctga

SEQ ID NO: 1845595 - DNA, 15 bp, Homo sapiens
catagataatctgat

SEQ ID NO: 1845596 - DNA, 15 bp, Homo sapiens
atagataatctgata

SEQ ID NO: 1845597 - DNA, 15 bp, Homo sapiens
tagataatctgatat

SEQ ID NO: 1845598 - DNA, 15 bp, Homo sapiens
agataatctgatatc

SEQ ID NO: 1845599 - DNA, 15 bp, Homo sapiens
gataatctgatatct

SEQ ID NO: 1845600 - DNA, 15 bp, Homo sapiens
ataatctgatatctt

SEQ ID NO: 1845601 - DNA, 15 bp, Homo sapiens
taatctgatatcttc

SEQ ID NO: 1845602 - DNA, 15 bp, Homo sapiens
aatctgatatcttct

SEQ ID NO: 1845603 - DNA, 15 bp, Homo sapiens
atctgatatcttctg

SEQ ID NO: 1845604 - DNA, 15 bp, Homo sapiens
tctgatatcttctgt

SEQ ID NO: 1845605 - DNA, 15 bp, Homo sapiens
ctgatatcttctgtt

SEQ ID NO: 1845606 - DNA, 15 bp, Homo sapiens
tgatatcttctgttt

SEQ ID NO: 1845607 - DNA, 15 bp, Homo sapiens
gatatcttctgtttg

SEQ ID NO: 1845608 - DNA, 15 bp, Homo sapiens
atatcttctgtttgg

SEQ ID NO: 1845609 - DNA, 15 bp, Homo sapiens
tatcttctgtttgga

SEQ ID NO: 1845610 - DNA, 15 bp, Homo sapiens
atcttctgtttggat

SEQ ID NO: 1845611 - DNA, 15 bp, Homo sapiens
tcttctgtttggatg

SEQ ID NO: 1845612 - DNA, 15 bp, Homo sapiens
cttctgtttggatgc

SEQ ID NO: 1845613 - DNA, 15 bp, Homo sapiens
ttctgtttggatgct

SEQ ID NO: 1845614 - DNA, 15 bp, Homo sapiens
tctgtttggatgctg

SEQ ID NO: 1845615 - DNA, 15 bp, Homo sapiens
ctgtttggatgctga

SEQ ID NO: 1845616 - DNA, 15 bp, Homo sapiens
tgtttggatgctgat

SEQ ID NO: 1845617 - DNA, 15 bp, Homo sapiens
gtttggatgctgata

SEQ ID NO: 1845618 - DNA, 15 bp, Homo sapiens
tttggatgctgataa

SEQ ID NO: 1845619 - DNA, 15 bp, Homo sapiens
ttggatgctgataat

SEQ ID NO: 1845620 - DNA, 15 bp, Homo sapiens
tggatgctgataatt

SEQ ID NO: 1845621 - DNA, 15 bp, Homo sapiens
ggatgctgataattc

SEQ ID NO: 1845622 - DNA, 15 bp, Homo sapiens
gatgctgataattct

SEQ ID NO: 1845623 - DNA, 15 bp, Homo sapiens
atgctgataattctt

SEQ ID NO: 1845624 - DNA, 15 bp, Homo sapiens
tgctgataattcttc

SEQ ID NO: 1845625 - DNA, 15 bp, Homo sapiens
gctgataattcttca

SEQ ID NO: 1845626 - DNA, 15 bp, Homo sapiens
ctgataattcttcac

SEQ ID NO: 1845627 - DNA, 15 bp, Homo sapiens
tgataattcttcacc

SEQ ID NO: 1845628 - DNA, 15 bp, Homo sapiens
gataattcttcacca

SEQ ID NO: 1845629 - DNA, 15 bp, Homo sapiens
ataattcttcaccat

SEQ ID NO: 1845630 - DNA, 15 bp, Homo sapiens
taattcttcaccatg

SEQ ID NO: 1845631 - DNA, 15 bp, Homo sapiens
aattcttcaccatga

SEQ ID NO: 1845632 - DNA, 15 bp, Homo sapiens
attcttcaccatgaa

SEQ ID NO: 1845633 - DNA, 15 bp, Homo sapiens
ttcttcaccatgaaa

SEQ ID NO: 1845634 - DNA, 15 bp, Homo sapiens
tcttcaccatgaaat

SEQ ID NO: 1845635 - DNA, 15 bp, Homo sapiens
cttcaccatgaaatt

SEQ ID NO: 1845636 - DNA, 15 bp, Homo sapiens
ttcaccatgaaatta

SEQ ID NO: 1845637 - DNA, 15 bp, Homo sapiens
tcaccatgaaattaa

SEQ ID NO: 1845638 - DNA, 15 bp, Homo sapiens
caccatgaaattaaa

SEQ ID NO: 1845639 - DNA, 15 bp, Homo sapiens
accatgaaattaaaa

SEQ ID NO: 1845640 - DNA, 15 bp, Homo sapiens
ccatgaaattaaaat

SEQ ID NO: 1845641 - DNA, 15 bp, Homo sapiens
catgaaattaaaata

SEQ ID NO: 1845642 - DNA, 15 bp, Homo sapiens
atgaaattaaaatat

SEQ ID NO: 1845643 - DNA, 15 bp, Homo sapiens
tgaaattaaaatata

SEQ ID NO: 1845644 - DNA, 15 bp, Homo sapiens
gaaattaaaatatat

SEQ ID NO: 1845645 - DNA, 15 bp, Homo sapiens
aaattaaaatatatg

SEQ ID NO: 1845646 - DNA, 15 bp, Homo sapiens
aattaaaatatatgt

SEQ ID NO: 1845647 - DNA, 15 bp, Homo sapiens
attaaaatatatgta

SEQ ID NO: 1845648 - DNA, 15 bp, Homo sapiens
ttaaaatatatgtat

SEQ ID NO: 1845649 - DNA, 15 bp, Homo sapiens
taaaatatatgtatg

SEQ ID NO: 1845650 - DNA, 15 bp, Homo sapiens
aaaatatatgtatgt

SEQ ID NO: 1845651 - DNA, 15 bp, Homo sapiens
aaatatatgtatgta

SEQ ID NO: 1845652 - DNA, 15 bp, Homo sapiens
aatatatgtatgtat

SEQ ID NO: 1845653 - DNA, 15 bp, Homo sapiens
atatatgtatgtatg

SEQ ID NO: 1845654 - DNA, 15 bp, Homo sapiens
tatatgtatgtatgt

SEQ ID NO: 1845655 - DNA, 15 bp, Homo sapiens
atatgtatgtatgtg

SEQ ID NO: 1845656 - DNA, 15 bp, Homo sapiens
atgtatgtatgtgta

SEQ ID NO: 1845657 - DNA, 15 bp, Homo sapiens
tgtatgtatgtgtat

SEQ ID NO: 1845658 - DNA, 15 bp, Homo sapiens
gtatgtatgtgtata

SEQ ID NO: 1845659 - DNA, 15 bp, Homo sapiens
tatgtatgtgtatat

SEQ ID NO: 1845660 - DNA, 15 bp, Homo sapiens
atgtatgtgtatata

SEQ ID NO: 1845661 - DNA, 15 bp, Homo sapiens
tgtatgtgtatatat

SEQ ID NO: 1845662 - DNA, 15 bp, Homo sapiens
gtatgtgtatatata

SEQ ID NO: 1845663 - DNA, 15 bp, Homo sapiens
tatgtgtatatatat

SEQ ID NO: 1845664 - DNA, 15 bp, Homo sapiens
atgtgtatatatata

SEQ ID NO: 1845665 - DNA, 15 bp, Homo sapiens
tgtgtatatatatat

SEQ ID NO: 1845666 - DNA, 15 bp, Homo sapiens
gtgtatatatatatg

SEQ ID NO: 1845667 - DNA, 15 bp, Homo sapiens
tgtatatatatatgt

SEQ ID NO: 1845668 - DNA, 15 bp, Homo sapiens
gtatatatatatgtg

SEQ ID NO: 1845669 - DNA, 15 bp, Homo sapiens
tatatatatatgtgt

SEQ ID NO: 1845670 - DNA, 15 bp, Homo sapiens
atatatatatgtgtg

SEQ ID NO: 1845671 - DNA, 15 bp, Homo sapiens
tatatatatgtgtgt

SEQ ID NO: 1845672 - DNA, 15 bp, Homo sapiens
atatatatgtgtgtg

SEQ ID NO: 1845673 - DNA, 15 bp, Homo sapiens
tatatatgtgtgtgt

SEQ ID NO: 1845674 - DNA, 15 bp, Homo sapiens
atatatgtgtgtgtg

SEQ ID NO: 1845675 - DNA, 15 bp, Homo sapiens
gtgtgtgtgtgtatg

SEQ ID NO: 1845676 - DNA, 15 bp, Homo sapiens
tgtgtgtatgtgtgt

SEQ ID NO: 1845677 - DNA, 15 bp, Homo sapiens
gtgtgtatgtgtgtg

SEQ ID NO: 1845678 - DNA, 15 bp, Homo sapiens
atgtgtgtgtgtgta

SEQ ID NO: 1845679 - DNA, 15 bp, Homo sapiens
tgtgtgtgtatatat

SEQ ID NO: 1845680 - DNA, 15 bp, Homo sapiens
gtgtgtatatatata

SEQ ID NO: 1845681 - DNA, 15 bp, Homo sapiens
gtgtatatatatata

SEQ ID NO: 1845682 - DNA, 15 bp, Homo sapiens
tgtatatatatatat

SEQ ID NO: 1845683 - DNA, 15 bp, Homo sapiens
gtatatatatatata

SEQ ID NO: 1845684 - DNA, 15 bp, Homo sapiens
tatatatatatacat

SEQ ID NO: 1845685 - DNA, 15 bp, Homo sapiens
atatatatatacatg

SEQ ID NO: 1845686 - DNA, 15 bp, Homo sapiens
tatatatatacatgc

SEQ ID NO: 1845687 - DNA, 15 bp, Homo sapiens
atatatatacatgcc

SEQ ID NO: 1845688 - DNA, 15 bp, Homo sapiens
tatatacatgcctac

SEQ ID NO: 1845689 - DNA, 15 bp, Homo sapiens
atatacatgcctact

SEQ ID NO: 1845690 - DNA, 15 bp, Homo sapiens
tatacatgcctactg

SEQ ID NO: 1845691 - DNA, 15 bp, Homo sapiens
atacatgcctactga

SEQ ID NO: 1845692 - DNA, 15 bp, Homo sapiens
tacatgcctactgag

SEQ ID NO: 1845693 - DNA, 15 bp, Homo sapiens
acatgcctactgagc

SEQ ID NO: 1845694 - DNA, 15 bp, Homo sapiens
catgcctactgagca

SEQ ID NO: 1845695 - DNA, 15 bp, Homo sapiens
atgcctactgagcat

SEQ ID NO: 1845696 - DNA, 15 bp, Homo sapiens
tgcctactgagcatt

SEQ ID NO: 1845697 - DNA, 15 bp, Homo sapiens
gcctactgagcattt

SEQ ID NO: 1845698 - DNA, 15 bp, Homo sapiens
cctactgagcatttt

SEQ ID NO: 1845699 - DNA, 15 bp, Homo sapiens
ctactgagcattttg

SEQ ID NO: 1845700 - DNA, 15 bp, Homo sapiens
tactgagcattttga

SEQ ID NO: 1845701 - DNA, 15 bp, Homo sapiens
actgagcattttgac

SEQ ID NO: 1845702 - DNA, 15 bp, Homo sapiens
ctgagcattttgact

SEQ ID NO: 1845703 - DNA, 15 bp, Homo sapiens
tgagcattttgactt

SEQ ID NO: 1845704 - DNA, 15 bp, Homo sapiens
gagcattttgacttt

SEQ ID NO: 1845705 - DNA, 15 bp, Homo sapiens
agcattttgactttc

SEQ ID NO: 1845706 - DNA, 15 bp, Homo sapiens
gcattttgactttca

SEQ ID NO: 1845707 - DNA, 15 bp, Homo sapiens
cattttgactttcag

SEQ ID NO: 1845708 - DNA, 15 bp, Homo sapiens
attttgactttcaga

SEQ ID NO: 1845709 - DNA, 15 bp, Homo sapiens
ttttgactttcagac

SEQ ID NO: 1845710 - DNA, 15 bp, Homo sapiens
tttgactttcagact

SEQ ID NO: 1845711 - DNA, 15 bp, Homo sapiens
ttgactttcagactt

SEQ ID NO: 1845712 - DNA, 15 bp, Homo sapiens
tgactttcagacttg

SEQ ID NO: 1845713 - DNA, 15 bp, Homo sapiens
gactttcagacttgg

SEQ ID NO: 1845714 - DNA, 15 bp, Homo sapiens
actttcagacttggg

SEQ ID NO: 1845715 - DNA, 15 bp, Homo sapiens
ctttcagacttgggt

SEQ ID NO: 1845716 - DNA, 15 bp, Homo sapiens
tttcagacttgggtc

SEQ ID NO: 1845717 - DNA, 15 bp, Homo sapiens
ttcagacttgggtct

SEQ ID NO: 1845718 - DNA, 15 bp, Homo sapiens
tcagacttgggtctg

SEQ ID NO: 1845719 - DNA, 15 bp, Homo sapiens
cagacttgggtctgt

SEQ ID NO: 1845720 - DNA, 15 bp, Homo sapiens
agacttgggtctgtc

SEQ ID NO: 1845721 - DNA, 15 bp, Homo sapiens
gacttgggtctgtct

SEQ ID NO: 1845722 - DNA, 15 bp, Homo sapiens
acttgggtctgtctt

SEQ ID NO: 1845723 - DNA, 15 bp, Homo sapiens
cttgggtctgtcttc

SEQ ID NO: 1845724 - DNA, 15 bp, Homo sapiens
ttgggtctgtcttct

SEQ ID NO: 1845725 - DNA, 15 bp, Homo sapiens
tgggtctgtcttctg

SEQ ID NO: 1845726 - DNA, 15 bp, Homo sapiens
gggtctgtcttctgt

SEQ ID NO: 1845727 - DNA, 15 bp, Homo sapiens
ggtctgtcttctgtg

SEQ ID NO: 1845728 - DNA, 15 bp, Homo sapiens
gtctgtcttctgtgt

SEQ ID NO: 1845729 - DNA, 15 bp, Homo sapiens
tctgtcttctgtgtt

SEQ ID NO: 1845730 - DNA, 15 bp, Homo sapiens
ctgtcttctgtgtta

SEQ ID NO: 1845731 - DNA, 15 bp, Homo sapiens
tgtcttctgtgttaa

SEQ ID NO: 1845732 - DNA, 15 bp, Homo sapiens
gtcttctgtgttaag

SEQ ID NO: 1845733 - DNA, 15 bp, Homo sapiens
tcttctgtgttaaga

SEQ ID NO: 1845734 - DNA, 15 bp, Homo sapiens
cttctgtgttaagaa

SEQ ID NO: 1845735 - DNA, 15 bp, Homo sapiens
ttctgtgttaagaaa

SEQ ID NO: 1845736 - DNA, 15 bp, Homo sapiens
tctgtgttaagaaac

SEQ ID NO: 1845737 - DNA, 15 bp, Homo sapiens
ctgtgttaagaaact

SEQ ID NO: 1845738 - DNA, 15 bp, Homo sapiens
tgtgttaagaaactt

SEQ ID NO: 1845739 - DNA, 15 bp, Homo sapiens
gtgttaagaaacttt

SEQ ID NO: 1845740 - DNA, 15 bp, Homo sapiens
tgttaagaaactttt

SEQ ID NO: 1845741 - DNA, 15 bp, Homo sapiens
gttaagaaacttttt

SEQ ID NO: 1845742 - DNA, 15 bp, Homo sapiens
ttaagaaactttttt

SEQ ID NO: 1845743 - DNA, 15 bp, Homo sapiens
taagaaacttttttt

SEQ ID NO: 1845744 - DNA, 15 bp, Homo sapiens
aagaaactttttttt

SEQ ID NO: 1845745 - DNA, 15 bp, Homo sapiens
agaaacttttttttg

SEQ ID NO: 1845746 - DNA, 15 bp, Homo sapiens
gaaacttttttttgt

SEQ ID NO: 1845747 - DNA, 15 bp, Homo sapiens
aaacttttttttgtt

SEQ ID NO: 1845748 - DNA, 15 bp, Homo sapiens
aacttttttttgttt

SEQ ID NO: 1845749 - DNA, 15 bp, Homo sapiens
acttttttttgtttt

SEQ ID NO: 1845750 - DNA, 15 bp, Homo sapiens
cttttttttgttttc

SEQ ID NO: 1845751 - DNA, 15 bp, Homo sapiens
ttttttttgttttcg

SEQ ID NO: 1845752 - DNA, 15 bp, Homo sapiens
tttttttgttttcgt

SEQ ID NO: 1845753 - DNA, 15 bp, Homo sapiens
ttttttgttttcgtc

SEQ ID NO: 1845754 - DNA, 15 bp, Homo sapiens
tttttgttttcgtct

SEQ ID NO: 1845755 - DNA, 15 bp, Homo sapiens
ttttgttttcgtctt

SEQ ID NO: 1845756 - DNA, 15 bp, Homo sapiens
tttgttttcgtcttt

SEQ ID NO: 1845757 - DNA, 15 bp, Homo sapiens
ttgttttcgtctttt

SEQ ID NO: 1845758 - DNA, 15 bp, Homo sapiens
tgttttcgtcttttc

SEQ ID NO: 1845759 - DNA, 15 bp, Homo sapiens
gttttcgtcttttca

SEQ ID NO: 1845760 - DNA, 15 bp, Homo sapiens
ttttcgtcttttcag

SEQ ID NO: 1845761 - DNA, 15 bp, Homo sapiens
tttcgtcttttcagt

SEQ ID NO: 1845762 - DNA, 15 bp, Homo sapiens
ttcgtcttttcagtt

SEQ ID NO: 1845763 - DNA, 15 bp, Homo sapiens
tcgtcttttcagtta

SEQ ID NO: 1845764 - DNA, 15 bp, Homo sapiens
cgtcttttcagttag

SEQ ID NO: 1845765 - DNA, 15 bp, Homo sapiens
gtcttttcagttagg

SEQ ID NO: 1845766 - DNA, 15 bp, Homo sapiens
tcttttcagttaggt

SEQ ID NO: 1845767 - DNA, 15 bp, Homo sapiens
cttttcagttaggtt

SEQ ID NO: 1845768 - DNA, 15 bp, Homo sapiens
ttttcagttaggttt

SEQ ID NO: 1845769 - DNA, 15 bp, Homo sapiens
tttcagttaggttta

SEQ ID NO: 1845770 - DNA, 15 bp, Homo sapiens
ttcagttaggtttat

SEQ ID NO: 1845771 - DNA, 15 bp, Homo sapiens
tcagttaggtttatt

SEQ ID NO: 1845772 - DNA, 15 bp, Homo sapiens
cagttaggtttattc

SEQ ID NO: 1845773 - DNA, 15 bp, Homo sapiens
agttaggtttattct

SEQ ID NO: 1845774 - DNA, 15 bp, Homo sapiens
gttaggtttattctg

SEQ ID NO: 1845775 - DNA, 15 bp, Homo sapiens
ttaggtttattctga

SEQ ID NO: 1845776 - DNA, 15 bp, Homo sapiens
taggtttattctgaa

SEQ ID NO: 1845777 - DNA, 15 bp, Homo sapiens
aggtttattctgaat

SEQ ID NO: 1845778 - DNA, 15 bp, Homo sapiens
ggtttattctgaatt

SEQ ID NO: 1845779 - DNA, 15 bp, Homo sapiens
gtttattctgaattg

SEQ ID NO: 1845780 - DNA, 15 bp, Homo sapiens
tttattctgaattgg

SEQ ID NO: 1845781 - DNA, 15 bp, Homo sapiens
ttattctgaattggc

SEQ ID NO: 1845782 - DNA, 15 bp, Homo sapiens
tattctgaattggct

SEQ ID NO: 1845783 - DNA, 15 bp, Homo sapiens
attctgaattggctg

SEQ ID NO: 1845784 - DNA, 15 bp, Homo sapiens
ttctgaattggctgc

SEQ ID NO: 1845785 - DNA, 15 bp, Homo sapiens
tctgaattggctgcc

SEQ ID NO: 1845786 - DNA, 15 bp, Homo sapiens
ctgaattggctgcct

SEQ ID NO: 1845787 - DNA, 15 bp, Homo sapiens
tgaattggctgcctg

SEQ ID NO: 1845788 - DNA, 15 bp, Homo sapiens
gaattggctgcctgt

SEQ ID NO: 1845789 - DNA, 15 bp, Homo sapiens
aattggctgcctgtc

SEQ ID NO: 1845790 - DNA, 15 bp, Homo sapiens
attggctgcctgtcc

SEQ ID NO: 1845791 - DNA, 15 bp, Homo sapiens
ttggctgcctgtcct

SEQ ID NO: 1845792 - DNA, 15 bp, Homo sapiens
tggctgcctgtcctc

SEQ ID NO: 1845793 - DNA, 15 bp, Homo sapiens
ggctgcctgtcctct

SEQ ID NO: 1845794 - DNA, 15 bp, Homo sapiens
gctgcctgtcctcta

SEQ ID NO: 1845795 - DNA, 15 bp, Homo sapiens
ctgcctgtcctctat

SEQ ID NO: 1845796 - DNA, 15 bp, Homo sapiens
tgcctgtcctctata

SEQ ID NO: 1845797 - DNA, 15 bp, Homo sapiens
gcctgtcctctatat

SEQ ID NO: 1845798 - DNA, 15 bp, Homo sapiens
cctgtcctctatatc

SEQ ID NO: 1845799 - DNA, 15 bp, Homo sapiens
ctgtcctctatatct

SEQ ID NO: 1845800 - DNA, 15 bp, Homo sapiens
tgtcctctatatctg

SEQ ID NO: 1845801 - DNA, 15 bp, Homo sapiens
gtcctctatatctgt

SEQ ID NO: 1845802 - DNA, 15 bp, Homo sapiens
tcctctatatctgtc

SEQ ID NO: 1845803 - DNA, 15 bp, Homo sapiens
cctctatatctgtca

SEQ ID NO: 1845804 - DNA, 15 bp, Homo sapiens
ctctatatctgtcat

SEQ ID NO: 1845805 - DNA, 15 bp, Homo sapiens
tctatatctgtcatc

SEQ ID NO: 1845806 - DNA, 15 bp, Homo sapiens
ctatatctgtcatct

SEQ ID NO: 1845807 - DNA, 15 bp, Homo sapiens
tatatctgtcatctt

SEQ ID NO: 1845808 - DNA, 15 bp, Homo sapiens
atatctgtcatcttt

SEQ ID NO: 1845809 - DNA, 15 bp, Homo sapiens
tatctgtcatctttt

SEQ ID NO: 1845810 - DNA, 15 bp, Homo sapiens
atctgtcatcttttt

SEQ ID NO: 1845811 - DNA, 15 bp, Homo sapiens
tctgtcatctttttg

SEQ ID NO: 1845812 - DNA, 15 bp, Homo sapiens
ctgtcatctttttgt

SEQ ID NO: 1845813 - DNA, 15 bp, Homo sapiens
tgtcatctttttgta

SEQ ID NO: 1845814 - DNA, 15 bp, Homo sapiens
gtcatctttttgtat

SEQ ID NO: 1845815 - DNA, 15 bp, Homo sapiens
tcatctttttgtata

SEQ ID NO: 1845816 - DNA, 15 bp, Homo sapiens
catctttttgtataa

SEQ ID NO: 1845817 - DNA, 15 bp, Homo sapiens
atctttttgtataat

SEQ ID NO: 1845818 - DNA, 15 bp, Homo sapiens
tctttttgtataatc

SEQ ID NO: 1845819 - DNA, 15 bp, Homo sapiens
ctttttgtataatct

SEQ ID NO: 1845820 - DNA, 15 bp, Homo sapiens
tttttgtataatctg

SEQ ID NO: 1845821 - DNA, 15 bp, Homo sapiens
ttttgtataatctgt

SEQ ID NO: 1845822 - DNA, 15 bp, Homo sapiens
tttgtataatctgtc

SEQ ID NO: 1845823 - DNA, 15 bp, Homo sapiens
ttgtataatctgtct

SEQ ID NO: 1845824 - DNA, 15 bp, Homo sapiens
tgtataatctgtctt

SEQ ID NO: 1845825 - DNA, 15 bp, Homo sapiens
gtataatctgtctta

SEQ ID NO: 1845826 - DNA, 15 bp, Homo sapiens
tataatctgtcttag

SEQ ID NO: 1845827 - DNA, 15 bp, Homo sapiens
ataatctgtcttaga

SEQ ID NO: 1845828 - DNA, 15 bp, Homo sapiens
taatctgtcttagac

SEQ ID NO: 1845829 - DNA, 15 bp, Homo sapiens
aatctgtcttagacc

SEQ ID NO: 1845830 - DNA, 15 bp, Homo sapiens
atctgtcttagacct

SEQ ID NO: 1845831 - DNA, 15 bp, Homo sapiens
tctgtcttagacctc

SEQ ID NO: 1845832 - DNA, 15 bp, Homo sapiens
ctgtcttagacctca

SEQ ID NO: 1845833 - DNA, 15 bp, Homo sapiens
tgtcttagacctcac

SEQ ID NO: 1845834 - DNA, 15 bp, Homo sapiens
gtcttagacctcaca

SEQ ID NO: 1845835 - DNA, 15 bp, Homo sapiens
tcttagacctcacag

SEQ ID NO: 1845836 - DNA, 15 bp, Homo sapiens
cttagacctcacagt

SEQ ID NO: 1845837 - DNA, 15 bp, Homo sapiens
ttagacctcacagta

SEQ ID NO: 1845838 - DNA, 15 bp, Homo sapiens
tagacctcacagtat

SEQ ID NO: 1845839 - DNA, 15 bp, Homo sapiens
agacctcacagtatt

SEQ ID NO: 1845840 - DNA, 15 bp, Homo sapiens
gacctcacagtattt

SEQ ID NO: 1845841 - DNA, 15 bp, Homo sapiens
acctcacagtatttc

SEQ ID NO: 1845842 - DNA, 15 bp, Homo sapiens
cctcacagtatttct

SEQ ID NO: 1845843 - DNA, 15 bp, Homo sapiens
ctcacagtatttctg

SEQ ID NO: 1845844 - DNA, 15 bp, Homo sapiens
tcacagtatttctgc

SEQ ID NO: 1845845 - DNA, 15 bp, Homo sapiens
cacagtatttctgct

SEQ ID NO: 1845846 - DNA, 15 bp, Homo sapiens
acagtatttctgctt

SEQ ID NO: 1845847 - DNA, 15 bp, Homo sapiens
cagtatttctgcttc

SEQ ID NO: 1845848 - DNA, 15 bp, Homo sapiens
agtatttctgcttct

SEQ ID NO: 1845849 - DNA, 15 bp, Homo sapiens
gtatttctgcttctg

SEQ ID NO: 1845850 - DNA, 15 bp, Homo sapiens
tatttctgcttctgt

SEQ ID NO: 1845851 - DNA, 15 bp, Homo sapiens
atttctgcttctgta

SEQ ID NO: 1845852 - DNA, 15 bp, Homo sapiens
tttctgcttctgtat

SEQ ID NO: 1845853 - DNA, 15 bp, Homo sapiens
ttctgcttctgtatt

SEQ ID NO: 1845854 - DNA, 15 bp, Homo sapiens
tctgcttctgtattt

SEQ ID NO: 1845855 - DNA, 15 bp, Homo sapiens
ctgcttctgtatttt

SEQ ID NO: 1845856 - DNA, 15 bp, Homo sapiens
tgcttctgtattttt

SEQ ID NO: 1845857 - DNA, 15 bp, Homo sapiens
gcttctgtatttttt

SEQ ID NO: 1845858 - DNA, 15 bp, Homo sapiens
cttctgtattttttt

SEQ ID NO: 1845859 - DNA, 15 bp, Homo sapiens
ttctgtatttttttc

SEQ ID NO: 1845860 - DNA, 15 bp, Homo sapiens
tctgtatttttttcc

SEQ ID NO: 1845861 - DNA, 15 bp, Homo sapiens
ctgtatttttttcct

SEQ ID NO: 1845862 - DNA, 15 bp, Homo sapiens
tgtatttttttcctc

SEQ ID NO: 1845863 - DNA, 15 bp, Homo sapiens
gtatttttttcctct

SEQ ID NO: 1845864 - DNA, 15 bp, Homo sapiens
atttttttcctcttc

SEQ ID NO: 1845865 - DNA, 15 bp, Homo sapiens
tttttttcctcttca

SEQ ID NO: 1845866 - DNA, 15 bp, Homo sapiens
ttttttcctcttcat

SEQ ID NO: 1845867 - DNA, 15 bp, Homo sapiens
tttttcctcttcatt

SEQ ID NO: 1845868 - DNA, 15 bp, Homo sapiens
ttcctcttcattttg

SEQ ID NO: 1845869 - DNA, 15 bp, Homo sapiens
tcctcttcattttga

SEQ ID NO: 1845870 - DNA, 15 bp, Homo sapiens
cctcttcattttgag

SEQ ID NO: 1845871 - DNA, 15 bp, Homo sapiens
ctcttcattttgaga

SEQ ID NO: 1845872 - DNA, 15 bp, Homo sapiens
tcttcattttgagag

SEQ ID NO: 1845873 - DNA, 15 bp, Homo sapiens
cttcattttgagagt

SEQ ID NO: 1845874 - DNA, 15 bp, Homo sapiens
ttcattttgagagtg

SEQ ID NO: 1845875 - DNA, 15 bp, Homo sapiens
tcattttgagagtgc

SEQ ID NO: 1845876 - DNA, 15 bp, Homo sapiens
cattttgagagtgct

SEQ ID NO: 1845877 - DNA, 15 bp, Homo sapiens
attttgagagtgctt

SEQ ID NO: 1845878 - DNA, 15 bp, Homo sapiens
ttttgagagtgcttt

SEQ ID NO: 1845879 - DNA, 15 bp, Homo sapiens
tttgagagtgctttc

SEQ ID NO: 1845880 - DNA, 15 bp, Homo sapiens
ttgagagtgctttct

SEQ ID NO: 1845881 - DNA, 15 bp, Homo sapiens
tgagagtgctttcta

SEQ ID NO: 1845882 - DNA, 15 bp, Homo sapiens
gagagtgctttctaa

SEQ ID NO: 1845883 - DNA, 15 bp, Homo sapiens
agagtgctttctaaa

SEQ ID NO: 1845884 - DNA, 15 bp, Homo sapiens
gagtgctttctaaat

SEQ ID NO: 1845885 - DNA, 15 bp, Homo sapiens
agtgctttctaaatg

SEQ ID NO: 1845886 - DNA, 15 bp, Homo sapiens
gtgctttctaaatgt

SEQ ID NO: 1845887 - DNA, 15 bp, Homo sapiens
tgctttctaaatgtg

SEQ ID NO: 1845888 - DNA, 15 bp, Homo sapiens
gctttctaaatgtgc

SEQ ID NO: 1845889 - DNA, 15 bp, Homo sapiens
ctttctaaatgtgcc

SEQ ID NO: 1845890 - DNA, 15 bp, Homo sapiens
tttctaaatgtgccc

SEQ ID NO: 1845891 - DNA, 15 bp, Homo sapiens
ttctaaatgtgccct

SEQ ID NO: 1845892 - DNA, 15 bp, Homo sapiens
tctaaatgtgccctt

SEQ ID NO: 1845893 - DNA, 15 bp, Homo sapiens
taaatgtgcccttca

SEQ ID NO: 1845894 - DNA, 15 bp, Homo sapiens
aaatgtgcccttcat

SEQ ID NO: 1845895 - DNA, 15 bp, Homo sapiens
aatgtgcccttcata

SEQ ID NO: 1845896 - DNA, 15 bp, Homo sapiens
atgtgcccttcataa

SEQ ID NO: 1845897 - DNA, 15 bp, Homo sapiens
tgtgcccttcataac

SEQ ID NO: 1845898 - DNA, 15 bp, Homo sapiens
gtgcccttcataaca

SEQ ID NO: 1845899 - DNA, 15 bp, Homo sapiens
tgcccttcataacac

SEQ ID NO: 1845900 - DNA, 15 bp, Homo sapiens
gcccttcataacaca

SEQ ID NO: 1845901 - DNA, 15 bp, Homo sapiens
cccttcataacacat

SEQ ID NO: 1845902 - DNA, 15 bp, Homo sapiens
ccttcataacacatc

SEQ ID NO: 1845903 - DNA, 15 bp, Homo sapiens
cttcataacacatct

SEQ ID NO: 1845904 - DNA, 15 bp, Homo sapiens
ttcataacacatctt

SEQ ID NO: 1845905 - DNA, 15 bp, Homo sapiens
tcataacacatcttg

SEQ ID NO: 1845906 - DNA, 15 bp, Homo sapiens
cataacacatcttgt

SEQ ID NO: 1845907 - DNA, 15 bp, Homo sapiens
ataacacatcttgtt

SEQ ID NO: 1845908 - DNA, 15 bp, Homo sapiens
taacacatcttgttt

SEQ ID NO: 1845909 - DNA, 15 bp, Homo sapiens
aacacatcttgtttc

SEQ ID NO: 1845910 - DNA, 15 bp, Homo sapiens
acacatcttgtttca

SEQ ID NO: 1845911 - DNA, 15 bp, Homo sapiens
cacatcttgtttcag

SEQ ID NO: 1845912 - DNA, 15 bp, Homo sapiens
acatcttgtttcaga

SEQ ID NO: 1845913 - DNA, 15 bp, Homo sapiens
catcttgtttcagaa

SEQ ID NO: 1845914 - DNA, 15 bp, Homo sapiens
atcttgtttcagaaa

SEQ ID NO: 1845915 - DNA, 15 bp, Homo sapiens
tcttgtttcagaaat

SEQ ID NO: 1845916 - DNA, 15 bp, Homo sapiens
cttgtttcagaaata

SEQ ID NO: 1845917 - DNA, 15 bp, Homo sapiens
ttgtttcagaaataa

SEQ ID NO: 1845918 - DNA, 15 bp, Homo sapiens
tgtttcagaaataag

SEQ ID NO: 1845919 - DNA, 15 bp, Homo sapiens
gtttcagaaataagt

SEQ ID NO: 1845920 - DNA, 15 bp, Homo sapiens
tttcagaaataagtt

SEQ ID NO: 1845921 - DNA, 15 bp, Homo sapiens
ttcagaaataagttc

SEQ ID NO: 1845922 - DNA, 15 bp, Homo sapiens
tcagaaataagttct

SEQ ID NO: 1845923 - DNA, 15 bp, Homo sapiens
cagaaataagttctc

SEQ ID NO: 1845924 - DNA, 15 bp, Homo sapiens
agaaataagttctct

SEQ ID NO: 1845925 - DNA, 15 bp, Homo sapiens
gaaataagttctctt

SEQ ID NO: 1845926 - DNA, 15 bp, Homo sapiens
aaataagttctcttg

SEQ ID NO: 1845927 - DNA, 15 bp, Homo sapiens
aataagttctcttga

SEQ ID NO: 1845928 - DNA, 15 bp, Homo sapiens
ataagttctcttgac

SEQ ID NO: 1845929 - DNA, 15 bp, Homo sapiens
taagttctcttgact

SEQ ID NO: 1845930 - DNA, 15 bp, Homo sapiens
aagttctcttgactt

SEQ ID NO: 1845931 - DNA, 15 bp, Homo sapiens
agttctcttgacttt

SEQ ID NO: 1845932 - DNA, 15 bp, Homo sapiens
gttctcttgactttt

SEQ ID NO: 1845933 - DNA, 15 bp, Homo sapiens
ttctcttgactttta

SEQ ID NO: 1845934 - DNA, 15 bp, Homo sapiens
tctcttgacttttac

SEQ ID NO: 1845935 - DNA, 15 bp, Homo sapiens
ctcttgacttttact

SEQ ID NO: 1845936 - DNA, 15 bp, Homo sapiens
tcttgacttttactg

SEQ ID NO: 1845937 - DNA, 15 bp, Homo sapiens
cttgacttttactgc

SEQ ID NO: 1845938 - DNA, 15 bp, Homo sapiens
ttgacttttactgca

SEQ ID NO: 1845939 - DNA, 15 bp, Homo sapiens
tgacttttactgcag

SEQ ID NO: 1845940 - DNA, 15 bp, Homo sapiens
gacttttactgcaga

SEQ ID NO: 1845941 - DNA, 15 bp, Homo sapiens
acttttactgcagac

SEQ ID NO: 1845942 - DNA, 15 bp, Homo sapiens
cttttactgcagaca

SEQ ID NO: 1845943 - DNA, 15 bp, Homo sapiens
ttttactgcagacat

SEQ ID NO: 1845944 - DNA, 15 bp, Homo sapiens
tttactgcagacata

SEQ ID NO: 1845945 - DNA, 15 bp, Homo sapiens
ttactgcagacatag

SEQ ID NO: 1845946 - DNA, 15 bp, Homo sapiens
tactgcagacataga

SEQ ID NO: 1845947 - DNA, 15 bp, Homo sapiens
actgcagacatagaa

SEQ ID NO: 1845948 - DNA, 15 bp, Homo sapiens
ctgcagacatagaat

SEQ ID NO: 1845949 - DNA, 15 bp, Homo sapiens
tgcagacatagaata

SEQ ID NO: 1845950 - DNA, 15 bp, Homo sapiens
gcagacatagaatag

SEQ ID NO: 1845951 - DNA, 15 bp, Homo sapiens
cagacatagaataga

SEQ ID NO: 1845952 - DNA, 15 bp, Homo sapiens
agacatagaatagat

SEQ ID NO: 1845953 - DNA, 15 bp, Homo sapiens
gacatagaatagatg

SEQ ID NO: 1845954 - DNA, 15 bp, Homo sapiens
acatagaatagatgg

SEQ ID NO: 1845955 - DNA, 15 bp, Homo sapiens
catagaatagatggt

SEQ ID NO: 1845956 - DNA, 15 bp, Homo sapiens
atagaatagatggtt

SEQ ID NO: 1845957 - DNA, 15 bp, Homo sapiens
tagaatagatggttt

SEQ ID NO: 1845958 - DNA, 15 bp, Homo sapiens
agaatagatggtttc

SEQ ID NO: 1845959 - DNA, 15 bp, Homo sapiens
gaatagatggtttct

SEQ ID NO: 1845960 - DNA, 15 bp, Homo sapiens
aatagatggtttctc

SEQ ID NO: 1845961 - DNA, 15 bp, Homo sapiens
atagatggtttctcc

SEQ ID NO: 1845962 - DNA, 15 bp, Homo sapiens
tagatggtttctcca

SEQ ID NO: 1845963 - DNA, 15 bp, Homo sapiens
agatggtttctccaa

SEQ ID NO: 1845964 - DNA, 15 bp, Homo sapiens
gatggtttctccaag

SEQ ID NO: 1845965 - DNA, 15 bp, Homo sapiens
atggtttctccaagt

SEQ ID NO: 1845966 - DNA, 15 bp, Homo sapiens
tggtttctccaagtt

SEQ ID NO: 1845967 - DNA, 15 bp, Homo sapiens
ggtttctccaagttc

SEQ ID NO: 1845968 - DNA, 15 bp, Homo sapiens
gtttctccaagttca

SEQ ID NO: 1845969 - DNA, 15 bp, Homo sapiens
tttctccaagttcaa

SEQ ID NO: 1845970 - DNA, 15 bp, Homo sapiens
ttctccaagttcaat

SEQ ID NO: 1845971 - DNA, 15 bp, Homo sapiens
tctccaagttcaatt

SEQ ID NO: 1845972 - DNA, 15 bp, Homo sapiens
ctccaagttcaatta

SEQ ID NO: 1845973 - DNA, 15 bp, Homo sapiens
tccaagttcaattat

SEQ ID NO: 1845974 - DNA, 15 bp, Homo sapiens
ccaagttcaattatc

SEQ ID NO: 1845975 - DNA, 15 bp, Homo sapiens
caagttcaattatca

SEQ ID NO: 1845976 - DNA, 15 bp, Homo sapiens
aagttcaattatcac

SEQ ID NO: 1845977 - DNA, 15 bp, Homo sapiens
agttcaattatcaca

SEQ ID NO: 1845978 - DNA, 15 bp, Homo sapiens
gttcaattatcacaa

SEQ ID NO: 1845979 - DNA, 15 bp, Homo sapiens
ttcaattatcacaat

SEQ ID NO: 1845980 - DNA, 15 bp, Homo sapiens
tcaattatcacaata

SEQ ID NO: 1845981 - DNA, 15 bp, Homo sapiens
caattatcacaatat

SEQ ID NO: 1845982 - DNA, 15 bp, Homo sapiens
aattatcacaatatc

SEQ ID NO: 1845983 - DNA, 15 bp, Homo sapiens
attatcacaatatca

SEQ ID NO: 1845984 - DNA, 15 bp, Homo sapiens
ttatcacaatatcac

SEQ ID NO: 1845985 - DNA, 15 bp, Homo sapiens
tatcacaatatcaca

SEQ ID NO: 1845986 - DNA, 15 bp, Homo sapiens
atcacaatatcacac

SEQ ID NO: 1845987 - DNA, 15 bp, Homo sapiens
tcacaatatcacacg

SEQ ID NO: 1845988 - DNA, 15 bp, Homo sapiens
cacaatatcacacga

SEQ ID NO: 1845989 - DNA, 15 bp, Homo sapiens
acaatatcacacgag

SEQ ID NO: 1845990 - DNA, 15 bp, Homo sapiens
caatatcacacgagt

SEQ ID NO: 1845991 - DNA, 15 bp, Homo sapiens
aatatcacacgagtt

SEQ ID NO: 1845992 - DNA, 15 bp, Homo sapiens
atatcacacgagttg

SEQ ID NO: 1845993 - DNA, 15 bp, Homo sapiens
tatcacacgagttgt

SEQ ID NO: 1845994 - DNA, 15 bp, Homo sapiens
atcacacgagttgtt

SEQ ID NO: 1845995 - DNA, 15 bp, Homo sapiens
tcacacgagttgttt

SEQ ID NO: 1845996 - DNA, 15 bp, Homo sapiens
cacacgagttgttta

SEQ ID NO: 1845997 - DNA, 15 bp, Homo sapiens
acacgagttgtttac

SEQ ID NO: 1845998 - DNA, 15 bp, Homo sapiens
cacgagttgtttact

SEQ ID NO: 1845999 - DNA, 15 bp, Homo sapiens
acgagttgtttactg

SEQ ID NO: 1846000 - DNA, 15 bp, Homo sapiens
cgagttgtttactga

SEQ ID NO: 1846001 - DNA, 15 bp, Homo sapiens
gagttgtttactgag

SEQ ID NO: 1846002 - DNA, 15 bp, Homo sapiens
agttgtttactgagc

SEQ ID NO: 1846003 - DNA, 15 bp, Homo sapiens
gttgtttactgagca

SEQ ID NO: 1846004 - DNA, 15 bp, Homo sapiens
ttgtttactgagcac

SEQ ID NO: 1846005 - DNA, 15 bp, Homo sapiens
tgtttactgagcaca

SEQ ID NO: 1846006 - DNA, 15 bp, Homo sapiens
gtttactgagcacag

SEQ ID NO: 1846007 - DNA, 15 bp, Homo sapiens
tttactgagcacaga

SEQ ID NO: 1846008 - DNA, 15 bp, Homo sapiens
ttactgagcacagac

SEQ ID NO: 1846009 - DNA, 15 bp, Homo sapiens
tactgagcacagact

SEQ ID NO: 1846010 - DNA, 15 bp, Homo sapiens
actgagcacagactg

SEQ ID NO: 1846011 - DNA, 15 bp, Homo sapiens
ctgagcacagactgt

SEQ ID NO: 1846012 - DNA, 15 bp, Homo sapiens
tgagcacagactgtc

SEQ ID NO: 1846013 - DNA, 15 bp, Homo sapiens
gagcacagactgtcc

SEQ ID NO: 1846014 - DNA, 15 bp, Homo sapiens
agcacagactgtcct

SEQ ID NO: 1846015 - DNA, 15 bp, Homo sapiens
gcacagactgtcctc

SEQ ID NO: 1846016 - DNA, 15 bp, Homo sapiens
cacagactgtcctct

SEQ ID NO: 1846017 - DNA, 15 bp, Homo sapiens
acagactgtcctctg

SEQ ID NO: 1846018 - DNA, 15 bp, Homo sapiens
cagactgtcctctgt

SEQ ID NO: 1846019 - DNA, 15 bp, Homo sapiens
agactgtcctctgtg

SEQ ID NO: 1846020 - DNA, 15 bp, Homo sapiens
gactgtcctctgtgc

SEQ ID NO: 1846021 - DNA, 15 bp, Homo sapiens
actgtcctctgtgca

SEQ ID NO: 1846022 - DNA, 15 bp, Homo sapiens
ctgtcctctgtgcac

SEQ ID NO: 1846023 - DNA, 15 bp, Homo sapiens
tgtcctctgtgcact

SEQ ID NO: 1846024 - DNA, 15 bp, Homo sapiens
gtcctctgtgcactg

SEQ ID NO: 1846025 - DNA, 15 bp, Homo sapiens
tcctctgtgcactgt

SEQ ID NO: 1846026 - DNA, 15 bp, Homo sapiens
cctctgtgcactgtg

SEQ ID NO: 1846027 - DNA, 15 bp, Homo sapiens
ctctgtgcactgtgc

SEQ ID NO: 1846028 - DNA, 15 bp, Homo sapiens
tctgtgcactgtgct

SEQ ID NO: 1846029 - DNA, 15 bp, Homo sapiens
ctgtgcactgtgcta

SEQ ID NO: 1846030 - DNA, 15 bp, Homo sapiens
tgtgcactgtgctaa

SEQ ID NO: 1846031 - DNA, 15 bp, Homo sapiens
gtgcactgtgctaag

SEQ ID NO: 1846032 - DNA, 15 bp, Homo sapiens
tgcactgtgctaagc

SEQ ID NO: 1846033 - DNA, 15 bp, Homo sapiens
gcactgtgctaagca

SEQ ID NO: 1846034 - DNA, 15 bp, Homo sapiens
cactgtgctaagcac

SEQ ID NO: 1846035 - DNA, 15 bp, Homo sapiens
actgtgctaagcact

SEQ ID NO: 1846036 - DNA, 15 bp, Homo sapiens
ctgtgctaagcactt

SEQ ID NO: 1846037 - DNA, 15 bp, Homo sapiens
tgtgctaagcacttt

SEQ ID NO: 1846038 - DNA, 15 bp, Homo sapiens
gtgctaagcactttg

SEQ ID NO: 1846039 - DNA, 15 bp, Homo sapiens
tgctaagcactttgt

SEQ ID NO: 1846040 - DNA, 15 bp, Homo sapiens
gctaagcactttgtg

SEQ ID NO: 1846041 - DNA, 15 bp, Homo sapiens
ctaagcactttgtgt

SEQ ID NO: 1846042 - DNA, 15 bp, Homo sapiens
taagcactttgtgtg

SEQ ID NO: 1846043 - DNA, 15 bp, Homo sapiens
aagcactttgtgtgc

SEQ ID NO: 1846044 - DNA, 15 bp, Homo sapiens
agcactttgtgtgca

SEQ ID NO: 1846045 - DNA, 15 bp, Homo sapiens
gcactttgtgtgcat

SEQ ID NO: 1846046 - DNA, 15 bp, Homo sapiens
cactttgtgtgcatt

SEQ ID NO: 1846047 - DNA, 15 bp, Homo sapiens
actttgtgtgcatta

SEQ ID NO: 1846048 - DNA, 15 bp, Homo sapiens
ctttgtgtgcattac

SEQ ID NO: 1846049 - DNA, 15 bp, Homo sapiens
tttgtgtgcattacc

SEQ ID NO: 1846050 - DNA, 15 bp, Homo sapiens
ttgtgtgcattacct

SEQ ID NO: 1846051 - DNA, 15 bp, Homo sapiens
tgtgtgcattacctc

SEQ ID NO: 1846052 - DNA, 15 bp, Homo sapiens
gtgtgcattacctca

SEQ ID NO: 1846053 - DNA, 15 bp, Homo sapiens
tgtgcattacctcag

SEQ ID NO: 1846054 - DNA, 15 bp, Homo sapiens
gtgcattacctcaga

SEQ ID NO: 1846055 - DNA, 15 bp, Homo sapiens
tgcattacctcagaa

SEQ ID NO: 1846056 - DNA, 15 bp, Homo sapiens
gcattacctcagaac

SEQ ID NO: 1846057 - DNA, 15 bp, Homo sapiens
cattacctcagaaca

SEQ ID NO: 1846058 - DNA, 15 bp, Homo sapiens
attacctcagaacaa

SEQ ID NO: 1846059 - DNA, 15 bp, Homo sapiens
ttacctcagaacaac

SEQ ID NO: 1846060 - DNA, 15 bp, Homo sapiens
tacctcagaacaact

SEQ ID NO: 1846061 - DNA, 15 bp, Homo sapiens
acctcagaacaactc

SEQ ID NO: 1846062 - DNA, 15 bp, Homo sapiens
cctcagaacaactcc

SEQ ID NO: 1846063 - DNA, 15 bp, Homo sapiens
ctcagaacaactcca

SEQ ID NO: 1846064 - DNA, 15 bp, Homo sapiens
tcagaacaactccaa

SEQ ID NO: 1846065 - DNA, 15 bp, Homo sapiens
cagaacaactccaag

SEQ ID NO: 1846066 - DNA, 15 bp, Homo sapiens
agaacaactccaagg

SEQ ID NO: 1846067 - DNA, 15 bp, Homo sapiens
gaacaactccaaggg

SEQ ID NO: 1846068 - DNA, 15 bp, Homo sapiens
aacaactccaagggg

SEQ ID NO: 1846069 - DNA, 15 bp, Homo sapiens
acaactccaaggggc

SEQ ID NO: 1846070 - DNA, 15 bp, Homo sapiens
caactccaaggggca

SEQ ID NO: 1846071 - DNA, 15 bp, Homo sapiens
aactccaaggggcat

SEQ ID NO: 1846072 - DNA, 15 bp, Homo sapiens
actccaaggggcatg

SEQ ID NO: 1846073 - DNA, 15 bp, Homo sapiens
ctccaaggggcatgt

SEQ ID NO: 1846074 - DNA, 15 bp, Homo sapiens
tccaaggggcatgtg

SEQ ID NO: 1846075 - DNA, 15 bp, Homo sapiens
ccaaggggcatgtgc

SEQ ID NO: 1846076 - DNA, 15 bp, Homo sapiens
caaggggcatgtgct

SEQ ID NO: 1846077 - DNA, 15 bp, Homo sapiens
aaggggcatgtgctt

SEQ ID NO: 1846078 - DNA, 15 bp, Homo sapiens
aggggcatgtgcttt

SEQ ID NO: 1846079 - DNA, 15 bp, Homo sapiens
ggggcatgtgctttg

SEQ ID NO: 1846080 - DNA, 15 bp, Homo sapiens
gggcatgtgctttgt

SEQ ID NO: 1846081 - DNA, 15 bp, Homo sapiens
ggcatgtgctttgtt

SEQ ID NO: 1846082 - DNA, 15 bp, Homo sapiens
gcatgtgctttgttt

SEQ ID NO: 1846083 - DNA, 15 bp, Homo sapiens
catgtgctttgtttg

SEQ ID NO: 1846084 - DNA, 15 bp, Homo sapiens
atgtgctttgtttgt

SEQ ID NO: 1846085 - DNA, 15 bp, Homo sapiens
tgtgctttgtttgtc

SEQ ID NO: 1846086 - DNA, 15 bp, Homo sapiens
gtgctttgtttgtcc

SEQ ID NO: 1846087 - DNA, 15 bp, Homo sapiens
tgctttgtttgtcct

SEQ ID NO: 1846088 - DNA, 15 bp, Homo sapiens
gctttgtttgtcctc

SEQ ID NO: 1846089 - DNA, 15 bp, Homo sapiens
ctttgtttgtcctca

SEQ ID NO: 1846090 - DNA, 15 bp, Homo sapiens
tttgtttgtcctcat

SEQ ID NO: 1846091 - DNA, 15 bp, Homo sapiens
ttgtttgtcctcatt

SEQ ID NO: 1846092 - DNA, 15 bp, Homo sapiens
tgtttgtcctcatta

SEQ ID NO: 1846093 - DNA, 15 bp, Homo sapiens
gtttgtcctcattat

SEQ ID NO: 1846094 - DNA, 15 bp, Homo sapiens
tttgtcctcattata

SEQ ID NO: 1846095 - DNA, 15 bp, Homo sapiens
ttgtcctcattatat

SEQ ID NO: 1846096 - DNA, 15 bp, Homo sapiens
tgtcctcattatata

SEQ ID NO: 1846097 - DNA, 15 bp, Homo sapiens
gtcctcattatatag

SEQ ID NO: 1846098 - DNA, 15 bp, Homo sapiens
tcctcattatataga

SEQ ID NO: 1846099 - DNA, 15 bp, Homo sapiens
cctcattatatagat

SEQ ID NO: 1846100 - DNA, 15 bp, Homo sapiens
ctcattatatagatt

SEQ ID NO: 1846101 - DNA, 15 bp, Homo sapiens
tcattatatagattg

SEQ ID NO: 1846102 - DNA, 15 bp, Homo sapiens
cattatatagattgg

SEQ ID NO: 1846103 - DNA, 15 bp, Homo sapiens
attatatagattggg

SEQ ID NO: 1846104 - DNA, 15 bp, Homo sapiens
ttatatagattgggg

SEQ ID NO: 1846105 - DNA, 15 bp, Homo sapiens
tatatagattgggga

SEQ ID NO: 1846106 - DNA, 15 bp, Homo sapiens
atatagattggggaa

SEQ ID NO: 1846107 - DNA, 15 bp, Homo sapiens
tagattggggaaacg

SEQ ID NO: 1846108 - DNA, 15 bp, Homo sapiens
agattggggaaacgc

SEQ ID NO: 1846109 - DNA, 15 bp, Homo sapiens
gattggggaaacgca

SEQ ID NO: 1846110 - DNA, 15 bp, Homo sapiens
attggggaaacgcat

SEQ ID NO: 1846111 - DNA, 15 bp, Homo sapiens
ttggggaaacgcatg

SEQ ID NO: 1846112 - DNA, 15 bp, Homo sapiens
tggggaaacgcatgt

SEQ ID NO: 1846113 - DNA, 15 bp, Homo sapiens
ggggaaacgcatgtc

SEQ ID NO: 1846114 - DNA, 15 bp, Homo sapiens
gggaaacgcatgtcc

SEQ ID NO: 1846115 - DNA, 15 bp, Homo sapiens
ggaaacgcatgtcca

SEQ ID NO: 1846116 - DNA, 15 bp, Homo sapiens
gaaacgcatgtccag

SEQ ID NO: 1846117 - DNA, 15 bp, Homo sapiens
aaacgcatgtccaga

SEQ ID NO: 1846118 - DNA, 15 bp, Homo sapiens
aacgcatgtccagag

SEQ ID NO: 1846119 - DNA, 15 bp, Homo sapiens
acgcatgtccagagg

SEQ ID NO: 1846120 - DNA, 15 bp, Homo sapiens
cgcatgtccagaggg

SEQ ID NO: 1846121 - DNA, 15 bp, Homo sapiens
gcatgtccagagggt

SEQ ID NO: 1846122 - DNA, 15 bp, Homo sapiens
catgtccagagggtt

SEQ ID NO: 1846123 - DNA, 15 bp, Homo sapiens
atgtccagagggttg

SEQ ID NO: 1846124 - DNA, 15 bp, Homo sapiens
tgtccagagggttga

SEQ ID NO: 1846125 - DNA, 15 bp, Homo sapiens
gtccagagggttgag

SEQ ID NO: 1846126 - DNA, 15 bp, Homo sapiens
tccagagggttgagc

SEQ ID NO: 1846127 - DNA, 15 bp, Homo sapiens
ccagagggttgagcc

SEQ ID NO: 1846128 - DNA, 15 bp, Homo sapiens
cagagggttgagccc

SEQ ID NO: 1846129 - DNA, 15 bp, Homo sapiens
agagggttgagccct

SEQ ID NO: 1846130 - DNA, 15 bp, Homo sapiens
gagggttgagcccta

SEQ ID NO: 1846131 - DNA, 15 bp, Homo sapiens
agggttgagccctac

SEQ ID NO: 1846132 - DNA, 15 bp, Homo sapiens
gggttgagccctact

SEQ ID NO: 1846133 - DNA, 15 bp, Homo sapiens
ggttgagccctactc

SEQ ID NO: 1846134 - DNA, 15 bp, Homo sapiens
gttgagccctactca

SEQ ID NO: 1846135 - DNA, 15 bp, Homo sapiens
ttgagccctactcag

SEQ ID NO: 1846136 - DNA, 15 bp, Homo sapiens
tgagccctactcagc

SEQ ID NO: 1846137 - DNA, 15 bp, Homo sapiens
gagccctactcagcc

SEQ ID NO: 1846138 - DNA, 15 bp, Homo sapiens
agccctactcagcct

SEQ ID NO: 1846139 - DNA, 15 bp, Homo sapiens
gccctactcagcctc

SEQ ID NO: 1846140 - DNA, 15 bp, Homo sapiens
ccctactcagcctca

SEQ ID NO: 1846141 - DNA, 15 bp, Homo sapiens
cctactcagcctcat

SEQ ID NO: 1846142 - DNA, 15 bp, Homo sapiens
ctactcagcctcatc

SEQ ID NO: 1846143 - DNA, 15 bp, Homo sapiens
tactcagcctcatct

SEQ ID NO: 1846144 - DNA, 15 bp, Homo sapiens
actcagcctcatctg

SEQ ID NO: 1846145 - DNA, 15 bp, Homo sapiens
ctcagcctcatctgg

SEQ ID NO: 1846146 - DNA, 15 bp, Homo sapiens
tcagcctcatctggg

SEQ ID NO: 1846147 - DNA, 15 bp, Homo sapiens
cagcctcatctgggt

SEQ ID NO: 1846148 - DNA, 15 bp, Homo sapiens
agcctcatctgggta

SEQ ID NO: 1846149 - DNA, 15 bp, Homo sapiens
gcctcatctgggtac

SEQ ID NO: 1846150 - DNA, 15 bp, Homo sapiens
cctcatctgggtact

SEQ ID NO: 1846151 - DNA, 15 bp, Homo sapiens
ctcatctgggtactg

SEQ ID NO: 1846152 - DNA, 15 bp, Homo sapiens
tcatctgggtactga

SEQ ID NO: 1846153 - DNA, 15 bp, Homo sapiens
catctgggtactgac

SEQ ID NO: 1846154 - DNA, 15 bp, Homo sapiens
atctgggtactgact

SEQ ID NO: 1846155 - DNA, 15 bp, Homo sapiens
tctgggtactgactg

SEQ ID NO: 1846156 - DNA, 15 bp, Homo sapiens
ctgggtactgactgg

SEQ ID NO: 1846157 - DNA, 15 bp, Homo sapiens
tgggtactgactggg

SEQ ID NO: 1846158 - DNA, 15 bp, Homo sapiens
gggtactgactgggg

SEQ ID NO: 1846159 - DNA, 15 bp, Homo sapiens
ggtactgactggggg

SEQ ID NO: 1846160 - DNA, 15 bp, Homo sapiens
gtactgactgggggc

SEQ ID NO: 1846161 - DNA, 15 bp, Homo sapiens
tactgactgggggcc

SEQ ID NO: 1846162 - DNA, 15 bp, Homo sapiens
actgactgggggcca

SEQ ID NO: 1846163 - DNA, 15 bp, Homo sapiens
ctgactgggggccag

SEQ ID NO: 1846164 - DNA, 15 bp, Homo sapiens
tgactgggggccagg

SEQ ID NO: 1846165 - DNA, 15 bp, Homo sapiens
gactgggggccagga

SEQ ID NO: 1846166 - DNA, 15 bp, Homo sapiens
actgggggccaggac

SEQ ID NO: 1846167 - DNA, 15 bp, Homo sapiens
ctgggggccaggact

SEQ ID NO: 1846168 - DNA, 15 bp, Homo sapiens
tgggggccaggactc

SEQ ID NO: 1846169 - DNA, 15 bp, Homo sapiens
gggggccaggactca

SEQ ID NO: 1846170 - DNA, 15 bp, Homo sapiens
ggggccaggactcag

SEQ ID NO: 1846171 - DNA, 15 bp, Homo sapiens
gggccaggactcagg

SEQ ID NO: 1846172 - DNA, 15 bp, Homo sapiens
ggccaggactcaggt

SEQ ID NO: 1846173 - DNA, 15 bp, Homo sapiens
gccaggactcaggtc

SEQ ID NO: 1846174 - DNA, 15 bp, Homo sapiens
ccaggactcaggtcc

SEQ ID NO: 1846175 - DNA, 15 bp, Homo sapiens
caggactcaggtcca

SEQ ID NO: 1846176 - DNA, 15 bp, Homo sapiens
aggactcaggtccag

SEQ ID NO: 1846177 - DNA, 15 bp, Homo sapiens
ggactcaggtccagc

SEQ ID NO: 1846178 - DNA, 15 bp, Homo sapiens
gactcaggtccagcc

SEQ ID NO: 1846179 - DNA, 15 bp, Homo sapiens
actcaggtccagcca

SEQ ID NO: 1846180 - DNA, 15 bp, Homo sapiens
ctcaggtccagccag

SEQ ID NO: 1846181 - DNA, 15 bp, Homo sapiens
tcaggtccagccagt

SEQ ID NO: 1846182 - DNA, 15 bp, Homo sapiens
caggtccagccagtt

SEQ ID NO: 1846183 - DNA, 15 bp, Homo sapiens
aggtccagccagttt

SEQ ID NO: 1846184 - DNA, 15 bp, Homo sapiens
ggtccagccagtttc

SEQ ID NO: 1846185 - DNA, 15 bp, Homo sapiens
gtccagccagtttca

SEQ ID NO: 1846186 - DNA, 15 bp, Homo sapiens
tccagccagtttcac

SEQ ID NO: 1846187 - DNA, 15 bp, Homo sapiens
ccagccagtttcaca

SEQ ID NO: 1846188 - DNA, 15 bp, Homo sapiens
cagccagtttcacag

SEQ ID NO: 1846189 - DNA, 15 bp, Homo sapiens
agccagtttcacagc

SEQ ID NO: 1846190 - DNA, 15 bp, Homo sapiens
gccagtttcacagca

SEQ ID NO: 1846191 - DNA, 15 bp, Homo sapiens
ccagtttcacagcag

SEQ ID NO: 1846192 - DNA, 15 bp, Homo sapiens
cagtttcacagcaga

SEQ ID NO: 1846193 - DNA, 15 bp, Homo sapiens
agtttcacagcagag

SEQ ID NO: 1846194 - DNA, 15 bp, Homo sapiens
gtttcacagcagagc

SEQ ID NO: 1846195 - DNA, 15 bp, Homo sapiens
tttcacagcagagcc

SEQ ID NO: 1846196 - DNA, 15 bp, Homo sapiens
ttcacagcagagcct

SEQ ID NO: 1846197 - DNA, 15 bp, Homo sapiens
tcacagcagagcctg

SEQ ID NO: 1846198 - DNA, 15 bp, Homo sapiens
cacagcagagcctgt

SEQ ID NO: 1846199 - DNA, 15 bp, Homo sapiens
acagcagagcctgtg

SEQ ID NO: 1846200 - DNA, 15 bp, Homo sapiens
cagcagagcctgtgc

SEQ ID NO: 1846201 - DNA, 15 bp, Homo sapiens
agcagagcctgtgct

SEQ ID NO: 1846202 - DNA, 15 bp, Homo sapiens
gcagagcctgtgctc

SEQ ID NO: 1846203 - DNA, 15 bp, Homo sapiens
cagagcctgtgctct

SEQ ID NO: 1846204 - DNA, 15 bp, Homo sapiens
agagcctgtgctctt

SEQ ID NO: 1846205 - DNA, 15 bp, Homo sapiens
gagcctgtgctcttg

SEQ ID NO: 1846206 - DNA, 15 bp, Homo sapiens
agcctgtgctcttgg

SEQ ID NO: 1846207 - DNA, 15 bp, Homo sapiens
gcctgtgctcttggc

SEQ ID NO: 1846208 - DNA, 15 bp, Homo sapiens
cctgtgctcttggcc

SEQ ID NO: 1846209 - DNA, 15 bp, Homo sapiens
ctgtgctcttggcca

SEQ ID NO: 1846210 - DNA, 15 bp, Homo sapiens
tgtgctcttggccat

SEQ ID NO: 1846211 - DNA, 15 bp, Homo sapiens
gtgctcttggccatg

SEQ ID NO: 1846212 - DNA, 15 bp, Homo sapiens
tgctcttggccatga

SEQ ID NO: 1846213 - DNA, 15 bp, Homo sapiens
gctcttggccatgat

SEQ ID NO: 1846214 - DNA, 15 bp, Homo sapiens
ctcttggccatgatg

SEQ ID NO: 1846215 - DNA, 15 bp, Homo sapiens
tcttggccatgatga

SEQ ID NO: 1846216 - DNA, 15 bp, Homo sapiens
cttggccatgatgat

SEQ ID NO: 1846217 - DNA, 15 bp, Homo sapiens
ttggccatgatgata

SEQ ID NO: 1846218 - DNA, 15 bp, Homo sapiens
tggccatgatgataa

SEQ ID NO: 1846219 - DNA, 15 bp, Homo sapiens
ggccatgatgataat

SEQ ID NO: 1846220 - DNA, 15 bp, Homo sapiens
gccatgatgataatg

SEQ ID NO: 1846221 - DNA, 15 bp, Homo sapiens
ccatgatgataatgg

SEQ ID NO: 1846222 - DNA, 15 bp, Homo sapiens
catgatgataatggc

SEQ ID NO: 1846223 - DNA, 15 bp, Homo sapiens
atgatgataatggca

SEQ ID NO: 1846224 - DNA, 15 bp, Homo sapiens
tgatgataatggcac

SEQ ID NO: 1846225 - DNA, 15 bp, Homo sapiens
gatgataatggcact

SEQ ID NO: 1846226 - DNA, 15 bp, Homo sapiens
atgataatggcactt

SEQ ID NO: 1846227 - DNA, 15 bp, Homo sapiens
tgataatggcacttt

SEQ ID NO: 1846228 - DNA, 15 bp, Homo sapiens
gataatggcactttc

SEQ ID NO: 1846229 - DNA, 15 bp, Homo sapiens
ataatggcactttcc

SEQ ID NO: 1846230 - DNA, 15 bp, Homo sapiens
taatggcactttccc

SEQ ID NO: 1846231 - DNA, 15 bp, Homo sapiens
aatggcactttccca

SEQ ID NO: 1846232 - DNA, 15 bp, Homo sapiens
atggcactttcccac

SEQ ID NO: 1846233 - DNA, 15 bp, Homo sapiens
tggcactttcccacc

SEQ ID NO: 1846234 - DNA, 15 bp, Homo sapiens
ggcactttcccaccc

SEQ ID NO: 1846235 - DNA, 15 bp, Homo sapiens
gcactttcccaccca

SEQ ID NO: 1846236 - DNA, 15 bp, Homo sapiens
cactttcccacccag

SEQ ID NO: 1846237 - DNA, 15 bp, Homo sapiens
actttcccacccagt

SEQ ID NO: 1846238 - DNA, 15 bp, Homo sapiens
ctttcccacccagtc

SEQ ID NO: 1846239 - DNA, 15 bp, Homo sapiens
tttcccacccagtcc

SEQ ID NO: 1846240 - DNA, 15 bp, Homo sapiens
ttcccacccagtcct

SEQ ID NO: 1846241 - DNA, 15 bp, Homo sapiens
tcccacccagtcctt

SEQ ID NO: 1846242 - DNA, 15 bp, Homo sapiens
cccacccagtccttt

SEQ ID NO: 1846243 - DNA, 15 bp, Homo sapiens
ccacccagtcctttt

SEQ ID NO: 1846244 - DNA, 15 bp, Homo sapiens
cacccagtccttttt

SEQ ID NO: 1846245 - DNA, 15 bp, Homo sapiens
acccagtcctttttt

SEQ ID NO: 1846246 - DNA, 15 bp, Homo sapiens
cccagtccttttttt

SEQ ID NO: 1846247 - DNA, 15 bp, Homo sapiens
ccagtcctttttttt

SEQ ID NO: 1846248 - DNA, 15 bp, Homo sapiens
cagtccttttttttt

SEQ ID NO: 1846249 - DNA, 15 bp, Homo sapiens
agtcctttttttttt

SEQ ID NO: 1846250 - DNA, 15 bp, Homo sapiens
gtccttttttttttc

SEQ ID NO: 1846251 - DNA, 15 bp, Homo sapiens
tccttttttttttca

SEQ ID NO: 1846252 - DNA, 15 bp, Homo sapiens
ccttttttttttcaa

SEQ ID NO: 1846253 - DNA, 15 bp, Homo sapiens
cttttttttttcaaa

SEQ ID NO: 1846254 - DNA, 15 bp, Homo sapiens
ttttttttcaaattt

SEQ ID NO: 1846255 - DNA, 15 bp, Homo sapiens
tttttttcaaattta

SEQ ID NO: 1846256 - DNA, 15 bp, Homo sapiens
ttttttcaaatttat

SEQ ID NO: 1846257 - DNA, 15 bp, Homo sapiens
tttttcaaatttatt

SEQ ID NO: 1846258 - DNA, 15 bp, Homo sapiens
ttttcaaatttattt

SEQ ID NO: 1846259 - DNA, 15 bp, Homo sapiens
tttcaaatttattta

SEQ ID NO: 1846260 - DNA, 15 bp, Homo sapiens
ttcaaatttatttat

SEQ ID NO: 1846261 - DNA, 15 bp, Homo sapiens
tcaaatttatttatt

SEQ ID NO: 1846262 - DNA, 15 bp, Homo sapiens
caaatttatttattt

SEQ ID NO: 1846263 - DNA, 15 bp, Homo sapiens
aaatttatttatttt

SEQ ID NO: 1846264 - DNA, 15 bp, Homo sapiens
ttatttattttgagt

SEQ ID NO: 1846265 - DNA, 15 bp, Homo sapiens
tatttattttgagtg

SEQ ID NO: 1846266 - DNA, 15 bp, Homo sapiens
atttattttgagtgc

SEQ ID NO: 1846267 - DNA, 15 bp, Homo sapiens
tttattttgagtgct

SEQ ID NO: 1846268 - DNA, 15 bp, Homo sapiens
ttattttgagtgctg

SEQ ID NO: 1846269 - DNA, 15 bp, Homo sapiens
tattttgagtgctgc

SEQ ID NO: 1846270 - DNA, 15 bp, Homo sapiens
attttgagtgctgca

SEQ ID NO: 1846271 - DNA, 15 bp, Homo sapiens
ttttgagtgctgcat

SEQ ID NO: 1846272 - DNA, 15 bp, Homo sapiens
tttgagtgctgcatt

SEQ ID NO: 1846273 - DNA, 15 bp, Homo sapiens
ttgagtgctgcattc

SEQ ID NO: 1846274 - DNA, 15 bp, Homo sapiens
tgagtgctgcattct

SEQ ID NO: 1846275 - DNA, 15 bp, Homo sapiens
gagtgctgcattctc

SEQ ID NO: 1846276 - DNA, 15 bp, Homo sapiens
agtgctgcattctct

SEQ ID NO: 1846277 - DNA, 15 bp, Homo sapiens
gtgctgcattctcta

SEQ ID NO: 1846278 - DNA, 15 bp, Homo sapiens
tgctgcattctctac

SEQ ID NO: 1846279 - DNA, 15 bp, Homo sapiens
gctgcattctctacc

SEQ ID NO: 1846280 - DNA, 15 bp, Homo sapiens
ctgcattctctacct

SEQ ID NO: 1846281 - DNA, 15 bp, Homo sapiens
tgcattctctacctt

SEQ ID NO: 1846282 - DNA, 15 bp, Homo sapiens
gcattctctaccttt

SEQ ID NO: 1846283 - DNA, 15 bp, Homo sapiens
cattctctacctttt

SEQ ID NO: 1846284 - DNA, 15 bp, Homo sapiens
attctctacctttta

SEQ ID NO: 1846285 - DNA, 15 bp, Homo sapiens
ttctctaccttttat

SEQ ID NO: 1846286 - DNA, 15 bp, Homo sapiens
tctctaccttttata

SEQ ID NO: 1846287 - DNA, 15 bp, Homo sapiens
ctctaccttttatag

SEQ ID NO: 1846288 - DNA, 15 bp, Homo sapiens
tctaccttttatagt

SEQ ID NO: 1846289 - DNA, 15 bp, Homo sapiens
ctaccttttatagtt

SEQ ID NO: 1846290 - DNA, 15 bp, Homo sapiens
taccttttatagtta

SEQ ID NO: 1846291 - DNA, 15 bp, Homo sapiens
accttttatagttaa

SEQ ID NO: 1846292 - DNA, 15 bp, Homo sapiens
ccttttatagttaag

SEQ ID NO: 1846293 - DNA, 15 bp, Homo sapiens
cttttatagttaaga

SEQ ID NO: 1846294 - DNA, 15 bp, Homo sapiens
tttatagttaagaat

SEQ ID NO: 1846295 - DNA, 15 bp, Homo sapiens
ttatagttaagaatg

SEQ ID NO: 1846296 - DNA, 15 bp, Homo sapiens
tatagttaagaatgt

SEQ ID NO: 1846297 - DNA, 15 bp, Homo sapiens
atagttaagaatgtt

SEQ ID NO: 1846298 - DNA, 15 bp, Homo sapiens
tagttaagaatgttt

SEQ ID NO: 1846299 - DNA, 15 bp, Homo sapiens
agttaagaatgtttt

SEQ ID NO: 1846300 - DNA, 15 bp, Homo sapiens
gttaagaatgttttc

SEQ ID NO: 1846301 - DNA, 15 bp, Homo sapiens
ttaagaatgttttca

SEQ ID NO: 1846302 - DNA, 15 bp, Homo sapiens
taagaatgttttcaa

SEQ ID NO: 1846303 - DNA, 15 bp, Homo sapiens
aagaatgttttcaag

SEQ ID NO: 1846304 - DNA, 15 bp, Homo sapiens
agaatgttttcaagg

SEQ ID NO: 1846305 - DNA, 15 bp, Homo sapiens
gaatgttttcaaggt

SEQ ID NO: 1846306 - DNA, 15 bp, Homo sapiens
aatgttttcaaggtc

SEQ ID NO: 1846307 - DNA, 15 bp, Homo sapiens
atgttttcaaggtct

SEQ ID NO: 1846308 - DNA, 15 bp, Homo sapiens
tgttttcaaggtctg

SEQ ID NO: 1846309 - DNA, 15 bp, Homo sapiens
gttttcaaggtctgg

SEQ ID NO: 1846310 - DNA, 15 bp, Homo sapiens
ttttcaaggtctggt

SEQ ID NO: 1846311 - DNA, 15 bp, Homo sapiens
tttcaaggtctggtg

SEQ ID NO: 1846312 - DNA, 15 bp, Homo sapiens
ttcaaggtctggtgg

SEQ ID NO: 1846313 - DNA, 15 bp, Homo sapiens
tcaaggtctggtggg

SEQ ID NO: 1846314 - DNA, 15 bp, Homo sapiens
caaggtctggtggga

SEQ ID NO: 1846315 - DNA, 15 bp, Homo sapiens
aaggtctggtgggag

SEQ ID NO: 1846316 - DNA, 15 bp, Homo sapiens
aggtctggtgggagg

SEQ ID NO: 1846317 - DNA, 15 bp, Homo sapiens
ggtctggtgggaggt

SEQ ID NO: 1846318 - DNA, 15 bp, Homo sapiens
gtctggtgggaggtt

SEQ ID NO: 1846319 - DNA, 15 bp, Homo sapiens
tctggtgggaggttt

SEQ ID NO: 1846320 - DNA, 15 bp, Homo sapiens
ctggtgggaggtttt

SEQ ID NO: 1846321 - DNA, 15 bp, Homo sapiens
tggtgggaggttttc

SEQ ID NO: 1846322 - DNA, 15 bp, Homo sapiens
ggtgggaggttttcg

SEQ ID NO: 1846323 - DNA, 15 bp, Homo sapiens
gtgggaggttttcgt

SEQ ID NO: 1846324 - DNA, 15 bp, Homo sapiens
tgggaggttttcgtg

SEQ ID NO: 1846325 - DNA, 15 bp, Homo sapiens
gggaggttttcgtgt

SEQ ID NO: 1846326 - DNA, 15 bp, Homo sapiens
ggaggttttcgtgtt

SEQ ID NO: 1846327 - DNA, 15 bp, Homo sapiens
gaggttttcgtgttt

SEQ ID NO: 1846328 - DNA, 15 bp, Homo sapiens
aggttttcgtgtttt

SEQ ID NO: 1846329 - DNA, 15 bp, Homo sapiens
ggttttcgtgttttg

SEQ ID NO: 1846330 - DNA, 15 bp, Homo sapiens
gttttcgtgttttgc

SEQ ID NO: 1846331 - DNA, 15 bp, Homo sapiens
ttttcgtgttttgca

SEQ ID NO: 1846332 - DNA, 15 bp, Homo sapiens
tttcgtgttttgcat

SEQ ID NO: 1846333 - DNA, 15 bp, Homo sapiens
ttcgtgttttgcatc

SEQ ID NO: 1846334 - DNA, 15 bp, Homo sapiens
tcgtgttttgcatcc

SEQ ID NO: 1846335 - DNA, 15 bp, Homo sapiens
cgtgttttgcatcca

SEQ ID NO: 1846336 - DNA, 15 bp, Homo sapiens
gtgttttgcatccat

SEQ ID NO: 1846337 - DNA, 15 bp, Homo sapiens
tgttttgcatccatg

SEQ ID NO: 1846338 - DNA, 15 bp, Homo sapiens
gttttgcatccatga

SEQ ID NO: 1846339 - DNA, 15 bp, Homo sapiens
ttttgcatccatgaa

SEQ ID NO: 1846340 - DNA, 15 bp, Homo sapiens
tttgcatccatgaat

SEQ ID NO: 1846341 - DNA, 15 bp, Homo sapiens
ttgcatccatgaatg

SEQ ID NO: 1846342 - DNA, 15 bp, Homo sapiens
tgcatccatgaatgc

SEQ ID NO: 1846343 - DNA, 15 bp, Homo sapiens
gcatccatgaatgca

SEQ ID NO: 1846344 - DNA, 15 bp, Homo sapiens
catccatgaatgcag

SEQ ID NO: 1846345 - DNA, 15 bp, Homo sapiens
atccatgaatgcagt

SEQ ID NO: 1846346 - DNA, 15 bp, Homo sapiens
tccatgaatgcagtc

SEQ ID NO: 1846347 - DNA, 15 bp, Homo sapiens
ccatgaatgcagtca

SEQ ID NO: 1846348 - DNA, 15 bp, Homo sapiens
catgaatgcagtcag

SEQ ID NO: 1846349 - DNA, 15 bp, Homo sapiens
atgaatgcagtcagt

SEQ ID NO: 1846350 - DNA, 15 bp, Homo sapiens
tgaatgcagtcagtg

SEQ ID NO: 1846351 - DNA, 15 bp, Homo sapiens
gaatgcagtcagtgt

SEQ ID NO: 1846352 - DNA, 15 bp, Homo sapiens
aatgcagtcagtgtt

SEQ ID NO: 1846353 - DNA, 15 bp, Homo sapiens
atgcagtcagtgttt

SEQ ID NO: 1846354 - DNA, 15 bp, Homo sapiens
tgcagtcagtgtttg

SEQ ID NO: 1846355 - DNA, 15 bp, Homo sapiens
gcagtcagtgtttgc

SEQ ID NO: 1846356 - DNA, 15 bp, Homo sapiens
cagtcagtgtttgcc

SEQ ID NO: 1846357 - DNA, 15 bp, Homo sapiens
agtcagtgtttgcct

SEQ ID NO: 1846358 - DNA, 15 bp, Homo sapiens
gtcagtgtttgcctg

SEQ ID NO: 1846359 - DNA, 15 bp, Homo sapiens
tcagtgtttgcctgt

SEQ ID NO: 1846360 - DNA, 15 bp, Homo sapiens
cagtgtttgcctgta

SEQ ID NO: 1846361 - DNA, 15 bp, Homo sapiens
agtgtttgcctgtaa

SEQ ID NO: 1846362 - DNA, 15 bp, Homo sapiens
gtgtttgcctgtaaa

SEQ ID NO: 1846363 - DNA, 15 bp, Homo sapiens
tgtttgcctgtaaat

SEQ ID NO: 1846364 - DNA, 15 bp, Homo sapiens
gtttgcctgtaaata

SEQ ID NO: 1846365 - DNA, 15 bp, Homo sapiens
tttgcctgtaaatag

SEQ ID NO: 1846366 - DNA, 15 bp, Homo sapiens
ttgcctgtaaatagg

SEQ ID NO: 1846367 - DNA, 15 bp, Homo sapiens
tgcctgtaaataggg

SEQ ID NO: 1846368 - DNA, 15 bp, Homo sapiens
gcctgtaaataggga

SEQ ID NO: 1846369 - DNA, 15 bp, Homo sapiens
cctgtaaatagggag

SEQ ID NO: 1846370 - DNA, 15 bp, Homo sapiens
ctgtaaatagggagg

SEQ ID NO: 1846371 - DNA, 15 bp, Homo sapiens
tgtaaatagggaggg

SEQ ID NO: 1846372 - DNA, 15 bp, Homo sapiens
gtaaatagggagggt

SEQ ID NO: 1846373 - DNA, 15 bp, Homo sapiens
taaatagggagggtc

SEQ ID NO: 1846374 - DNA, 15 bp, Homo sapiens
aaatagggagggtca

SEQ ID NO: 1846375 - DNA, 15 bp, Homo sapiens
aatagggagggtcaa

SEQ ID NO: 1846376 - DNA, 15 bp, Homo sapiens
atagggagggtcaat

SEQ ID NO: 1846377 - DNA, 15 bp, Homo sapiens
tagggagggtcaatt

SEQ ID NO: 1846378 - DNA, 15 bp, Homo sapiens
agggagggtcaattc

SEQ ID NO: 1846379 - DNA, 15 bp, Homo sapiens
gggagggtcaattct

SEQ ID NO: 1846380 - DNA, 15 bp, Homo sapiens
ggagggtcaattctc

SEQ ID NO: 1846381 - DNA, 15 bp, Homo sapiens
gagggtcaattctct

SEQ ID NO: 1846382 - DNA, 15 bp, Homo sapiens
agggtcaattctctt

SEQ ID NO: 1846383 - DNA, 15 bp, Homo sapiens
gggtcaattctcttg

SEQ ID NO: 1846384 - DNA, 15 bp, Homo sapiens
ggtcaattctcttgg

SEQ ID NO: 1846385 - DNA, 15 bp, Homo sapiens
gtcaattctcttggg

SEQ ID NO: 1846386 - DNA, 15 bp, Homo sapiens
tcaattctcttgggc

SEQ ID NO: 1846387 - DNA, 15 bp, Homo sapiens
caattctcttgggct

SEQ ID NO: 1846388 - DNA, 15 bp, Homo sapiens
aattctcttgggctc

SEQ ID NO: 1846389 - DNA, 15 bp, Homo sapiens
attctcttgggctcc

SEQ ID NO: 1846390 - DNA, 15 bp, Homo sapiens
ttctcttgggctcct

SEQ ID NO: 1846391 - DNA, 15 bp, Homo sapiens
tctcttgggctcctc

SEQ ID NO: 1846392 - DNA, 15 bp, Homo sapiens
ctcttgggctcctct

SEQ ID NO: 1846393 - DNA, 15 bp, Homo sapiens
tcttgggctcctctg

SEQ ID NO: 1846394 - DNA, 15 bp, Homo sapiens
cttgggctcctctgc

SEQ ID NO: 1846395 - DNA, 15 bp, Homo sapiens
ttgggctcctctgct

SEQ ID NO: 1846396 - DNA, 15 bp, Homo sapiens
tgggctcctctgctg

SEQ ID NO: 1846397 - DNA, 15 bp, Homo sapiens
gggctcctctgctgt

SEQ ID NO: 1846398 - DNA, 15 bp, Homo sapiens
ggctcctctgctgtg

SEQ ID NO: 1846399 - DNA, 15 bp, Homo sapiens
ctcctctgctgtgca

SEQ ID NO: 1846400 - DNA, 15 bp, Homo sapiens
tcctctgctgtgcac

SEQ ID NO: 1846401 - DNA, 15 bp, Homo sapiens
cctctgctgtgcacc

SEQ ID NO: 1846402 - DNA, 15 bp, Homo sapiens
ctctgctgtgcacct

SEQ ID NO: 1846403 - DNA, 15 bp, Homo sapiens
tctgctgtgcacctc

SEQ ID NO: 1846404 - DNA, 15 bp, Homo sapiens
ctgctgtgcacctca

SEQ ID NO: 1846405 - DNA, 15 bp, Homo sapiens
tgctgtgcacctcat

SEQ ID NO: 1846406 - DNA, 15 bp, Homo sapiens
gctgtgcacctcatt

SEQ ID NO: 1846407 - DNA, 15 bp, Homo sapiens
ctgtgcacctcattg

SEQ ID NO: 1846408 - DNA, 15 bp, Homo sapiens
tgtgcacctcattgc

SEQ ID NO: 1846409 - DNA, 15 bp, Homo sapiens
gtgcacctcattgcc

SEQ ID NO: 1846410 - DNA, 15 bp, Homo sapiens
tgcacctcattgccc

SEQ ID NO: 1846411 - DNA, 15 bp, Homo sapiens
gcacctcattgccca

SEQ ID NO: 1846412 - DNA, 15 bp, Homo sapiens
cacctcattgcccat

SEQ ID NO: 1846413 - DNA, 15 bp, Homo sapiens
acctcattgcccata

SEQ ID NO: 1846414 - DNA, 15 bp, Homo sapiens
cctcattgcccatag

SEQ ID NO: 1846415 - DNA, 15 bp, Homo sapiens
ctcattgcccataga

SEQ ID NO: 1846416 - DNA, 15 bp, Homo sapiens
tcattgcccatagaa

SEQ ID NO: 1846417 - DNA, 15 bp, Homo sapiens
cattgcccatagaat

SEQ ID NO: 1846418 - DNA, 15 bp, Homo sapiens
attgcccatagaatg

SEQ ID NO: 1846419 - DNA, 15 bp, Homo sapiens
ttgcccatagaatgc

SEQ ID NO: 1846420 - DNA, 15 bp, Homo sapiens
tgcccatagaatgct

SEQ ID NO: 1846421 - DNA, 15 bp, Homo sapiens
gcccatagaatgcta

SEQ ID NO: 1846422 - DNA, 15 bp, Homo sapiens
cccatagaatgctac

SEQ ID NO: 1846423 - DNA, 15 bp, Homo sapiens
ccatagaatgctact

SEQ ID NO: 1846424 - DNA, 15 bp, Homo sapiens
catagaatgctactc

SEQ ID NO: 1846425 - DNA, 15 bp, Homo sapiens
atagaatgctactct

SEQ ID NO: 1846426 - DNA, 15 bp, Homo sapiens
tagaatgctactctc

SEQ ID NO: 1846427 - DNA, 15 bp, Homo sapiens
agaatgctactctcg

SEQ ID NO: 1846428 - DNA, 15 bp, Homo sapiens
gaatgctactctcgg

SEQ ID NO: 1846429 - DNA, 15 bp, Homo sapiens
aatgctactctcgga

SEQ ID NO: 1846430 - DNA, 15 bp, Homo sapiens
atgctactctcggat

SEQ ID NO: 1846431 - DNA, 15 bp, Homo sapiens
tgctactctcggatc

SEQ ID NO: 1846432 - DNA, 15 bp, Homo sapiens
gctactctcggatct

SEQ ID NO: 1846433 - DNA, 15 bp, Homo sapiens
ctactctcggatctt

SEQ ID NO: 1846434 - DNA, 15 bp, Homo sapiens
tactctcggatcttg

SEQ ID NO: 1846435 - DNA, 15 bp, Homo sapiens
actctcggatcttgc

SEQ ID NO: 1846436 - DNA, 15 bp, Homo sapiens
ctctcggatcttgca

SEQ ID NO: 1846437 - DNA, 15 bp, Homo sapiens
tctcggatcttgcac

SEQ ID NO: 1846438 - DNA, 15 bp, Homo sapiens
ctcggatcttgcact

SEQ ID NO: 1846439 - DNA, 15 bp, Homo sapiens
tcggatcttgcacta

SEQ ID NO: 1846440 - DNA, 15 bp, Homo sapiens
cggatcttgcactag

SEQ ID NO: 1846441 - DNA, 15 bp, Homo sapiens
ggatcttgcactaga

SEQ ID NO: 1846442 - DNA, 15 bp, Homo sapiens
gatcttgcactagag

SEQ ID NO: 1846443 - DNA, 15 bp, Homo sapiens
atcttgcactagagc

SEQ ID NO: 1846444 - DNA, 15 bp, Homo sapiens
tcttgcactagagca

SEQ ID NO: 1846445 - DNA, 15 bp, Homo sapiens
cttgcactagagcac

SEQ ID NO: 1846446 - DNA, 15 bp, Homo sapiens
ttgcactagagcact

SEQ ID NO: 1846447 - DNA, 15 bp, Homo sapiens
tgcactagagcactg

SEQ ID NO: 1846448 - DNA, 15 bp, Homo sapiens
gcactagagcactgg

SEQ ID NO: 1846449 - DNA, 15 bp, Homo sapiens
cactagagcactgga

SEQ ID NO: 1846450 - DNA, 15 bp, Homo sapiens
actagagcactggat

SEQ ID NO: 1846451 - DNA, 15 bp, Homo sapiens
ctagagcactggatg

SEQ ID NO: 1846452 - DNA, 15 bp, Homo sapiens
tagagcactggatga

SEQ ID NO: 1846453 - DNA, 15 bp, Homo sapiens
agagcactggatgat

SEQ ID NO: 1846454 - DNA, 15 bp, Homo sapiens
gagcactggatgatg

SEQ ID NO: 1846455 - DNA, 15 bp, Homo sapiens
agcactggatgatga

SEQ ID NO: 1846456 - DNA, 15 bp, Homo sapiens
gcactggatgatgaa

SEQ ID NO: 1846457 - DNA, 15 bp, Homo sapiens
cactggatgatgaag

SEQ ID NO: 1846458 - DNA, 15 bp, Homo sapiens
actggatgatgaagt

SEQ ID NO: 1846459 - DNA, 15 bp, Homo sapiens
ctggatgatgaagtg

SEQ ID NO: 1846460 - DNA, 15 bp, Homo sapiens
tggatgatgaagtga

SEQ ID NO: 1846461 - DNA, 15 bp, Homo sapiens
ggatgatgaagtgaa

SEQ ID NO: 1846462 - DNA, 15 bp, Homo sapiens
gatgatgaagtgaag

SEQ ID NO: 1846463 - DNA, 15 bp, Homo sapiens
atgatgaagtgaagc

SEQ ID NO: 1846464 - DNA, 15 bp, Homo sapiens
tgatgaagtgaagcc

SEQ ID NO: 1846465 - DNA, 15 bp, Homo sapiens
gatgaagtgaagcct

SEQ ID NO: 1846466 - DNA, 15 bp, Homo sapiens
atgaagtgaagcctt

SEQ ID NO: 1846467 - DNA, 15 bp, Homo sapiens
tgaagtgaagccttg

SEQ ID NO: 1846468 - DNA, 15 bp, Homo sapiens
gaagtgaagccttgc

SEQ ID NO: 1846469 - DNA, 15 bp, Homo sapiens
aagtgaagccttgca

SEQ ID NO: 1846470 - DNA, 15 bp, Homo sapiens
agtgaagccttgcag

SEQ ID NO: 1846471 - DNA, 15 bp, Homo sapiens
gtgaagccttgcaga

SEQ ID NO: 1846472 - DNA, 15 bp, Homo sapiens
tgaagccttgcagag

SEQ ID NO: 1846473 - DNA, 15 bp, Homo sapiens
gaagccttgcagaga

SEQ ID NO: 1846474 - DNA, 15 bp, Homo sapiens
aagccttgcagagac

SEQ ID NO: 1846475 - DNA, 15 bp, Homo sapiens
agccttgcagagacc

SEQ ID NO: 1846476 - DNA, 15 bp, Homo sapiens
gccttgcagagacct

SEQ ID NO: 1846477 - DNA, 15 bp, Homo sapiens
ccttgcagagacctg

SEQ ID NO: 1846478 - DNA, 15 bp, Homo sapiens
cttgcagagacctgt

SEQ ID NO: 1846479 - DNA, 15 bp, Homo sapiens
ttgcagagacctgtg

SEQ ID NO: 1846480 - DNA, 15 bp, Homo sapiens
tgcagagacctgtga

SEQ ID NO: 1846481 - DNA, 15 bp, Homo sapiens
gcagagacctgtgag

SEQ ID NO: 1846482 - DNA, 15 bp, Homo sapiens
cagagacctgtgagt

SEQ ID NO: 1846483 - DNA, 15 bp, Homo sapiens
agagacctgtgagtc

SEQ ID NO: 1846484 - DNA, 15 bp, Homo sapiens
gagacctgtgagtct

SEQ ID NO: 1846485 - DNA, 15 bp, Homo sapiens
agacctgtgagtctg

SEQ ID NO: 1846486 - DNA, 15 bp, Homo sapiens
gacctgtgagtctgg

SEQ ID NO: 1846487 - DNA, 15 bp, Homo sapiens
acctgtgagtctggg

SEQ ID NO: 1846488 - DNA, 15 bp, Homo sapiens
cctgtgagtctgggt

SEQ ID NO: 1846489 - DNA, 15 bp, Homo sapiens
ctgtgagtctgggtg

SEQ ID NO: 1846490 - DNA, 15 bp, Homo sapiens
tgtgagtctgggtga

SEQ ID NO: 1846491 - DNA, 15 bp, Homo sapiens
gtgagtctgggtgag

SEQ ID NO: 1846492 - DNA, 15 bp, Homo sapiens
tgagtctgggtgagt

SEQ ID NO: 1846493 - DNA, 15 bp, Homo sapiens
gagtctgggtgagtg

SEQ ID NO: 1846494 - DNA, 15 bp, Homo sapiens
agtctgggtgagtga

SEQ ID NO: 1846495 - DNA, 15 bp, Homo sapiens
gtctgggtgagtgag

SEQ ID NO: 1846496 - DNA, 15 bp, Homo sapiens
tctgggtgagtgagc

SEQ ID NO: 1846497 - DNA, 15 bp, Homo sapiens
ctgggtgagtgagct

SEQ ID NO: 1846498 - DNA, 15 bp, Homo sapiens
tgggtgagtgagctg

SEQ ID NO: 1846499 - DNA, 15 bp, Homo sapiens
gggtgagtgagctgg

SEQ ID NO: 1846500 - DNA, 15 bp, Homo sapiens
ggtgagtgagctgga

SEQ ID NO: 1846501 - DNA, 15 bp, Homo sapiens
gtgagtgagctggaa

SEQ ID NO: 1846502 - DNA, 15 bp, Homo sapiens
tgagtgagctggaac

SEQ ID NO: 1846503 - DNA, 15 bp, Homo sapiens
gagtgagctggaacc

SEQ ID NO: 1846504 - DNA, 15 bp, Homo sapiens
agtgagctggaacca

SEQ ID NO: 1846505 - DNA, 15 bp, Homo sapiens
gtgagctggaaccat

SEQ ID NO: 1846506 - DNA, 15 bp, Homo sapiens
tgagctggaaccatg

SEQ ID NO: 1846507 - DNA, 15 bp, Homo sapiens
gagctggaaccatga

SEQ ID NO: 1846508 - DNA, 15 bp, Homo sapiens
agctggaaccatgaa

SEQ ID NO: 1846509 - DNA, 15 bp, Homo sapiens
gctggaaccatgaat

SEQ ID NO: 1846510 - DNA, 15 bp, Homo sapiens
ctggaaccatgaata

SEQ ID NO: 1846511 - DNA, 15 bp, Homo sapiens
tggaaccatgaatag

SEQ ID NO: 1846512 - DNA, 15 bp, Homo sapiens
ggaaccatgaatagt

SEQ ID NO: 1846513 - DNA, 15 bp, Homo sapiens
gaaccatgaatagtt

SEQ ID NO: 1846514 - DNA, 15 bp, Homo sapiens
aaccatgaatagttc

SEQ ID NO: 1846515 - DNA, 15 bp, Homo sapiens
accatgaatagttcc

SEQ ID NO: 1846516 - DNA, 15 bp, Homo sapiens
ccatgaatagttcca

SEQ ID NO: 1846517 - DNA, 15 bp, Homo sapiens
catgaatagttccag

SEQ ID NO: 1846518 - DNA, 15 bp, Homo sapiens
atgaatagttccaga

SEQ ID NO: 1846519 - DNA, 15 bp, Homo sapiens
tgaatagttccagaa

SEQ ID NO: 1846520 - DNA, 15 bp, Homo sapiens
gaatagttccagaag

SEQ ID NO: 1846521 - DNA, 15 bp, Homo sapiens
aatagttccagaagg

SEQ ID NO: 1846522 - DNA, 15 bp, Homo sapiens
atagttccagaaggg

SEQ ID NO: 1846523 - DNA, 15 bp, Homo sapiens
tagttccagaagggg

SEQ ID NO: 1846524 - DNA, 15 bp, Homo sapiens
agttccagaagggga

SEQ ID NO: 1846525 - DNA, 15 bp, Homo sapiens
gttccagaaggggaa

SEQ ID NO: 1846526 - DNA, 15 bp, Homo sapiens
ttccagaaggggaac

SEQ ID NO: 1846527 - DNA, 15 bp, Homo sapiens
tccagaaggggaact

SEQ ID NO: 1846528 - DNA, 15 bp, Homo sapiens
ccagaaggggaactt

SEQ ID NO: 1846529 - DNA, 15 bp, Homo sapiens
cagaaggggaactta

SEQ ID NO: 1846530 - DNA, 15 bp, Homo sapiens
agaaggggaacttaa

SEQ ID NO: 1846531 - DNA, 15 bp, Homo sapiens
gaaggggaacttaat

SEQ ID NO: 1846532 - DNA, 15 bp, Homo sapiens
aaggggaacttaatc

SEQ ID NO: 1846533 - DNA, 15 bp, Homo sapiens
aggggaacttaatcc

SEQ ID NO: 1846534 - DNA, 15 bp, Homo sapiens
ggggaacttaatcct

SEQ ID NO: 1846535 - DNA, 15 bp, Homo sapiens
gggaacttaatcctg

SEQ ID NO: 1846536 - DNA, 15 bp, Homo sapiens
ggaacttaatcctgt

SEQ ID NO: 1846537 - DNA, 15 bp, Homo sapiens
gaacttaatcctgtg

SEQ ID NO: 1846538 - DNA, 15 bp, Homo sapiens
aacttaatcctgtga

SEQ ID NO: 1846539 - DNA, 15 bp, Homo sapiens
acttaatcctgtgat

SEQ ID NO: 1846540 - DNA, 15 bp, Homo sapiens
cttaatcctgtgata

SEQ ID NO: 1846541 - DNA, 15 bp, Homo sapiens
ttaatcctgtgatat

SEQ ID NO: 1846542 - DNA, 15 bp, Homo sapiens
taatcctgtgatatt

SEQ ID NO: 1846543 - DNA, 15 bp, Homo sapiens
aatcctgtgatattt

SEQ ID NO: 1846544 - DNA, 15 bp, Homo sapiens
atcctgtgatatttc

SEQ ID NO: 1846545 - DNA, 15 bp, Homo sapiens
tcctgtgatatttct

SEQ ID NO: 1846546 - DNA, 15 bp, Homo sapiens
cctgtgatatttctt

SEQ ID NO: 1846547 - DNA, 15 bp, Homo sapiens
ctgtgatatttcttc

SEQ ID NO: 1846548 - DNA, 15 bp, Homo sapiens
tgtgatatttcttct

SEQ ID NO: 1846549 - DNA, 15 bp, Homo sapiens
gtgatatttcttctc

SEQ ID NO: 1846550 - DNA, 15 bp, Homo sapiens
tgatatttcttctct

SEQ ID NO: 1846551 - DNA, 15 bp, Homo sapiens
cacaatctggaactg

SEQ ID NO: 1846552 - DNA, 15 bp, Homo sapiens
acaatctggaactgg

SEQ ID NO: 1846553 - DNA, 15 bp, Homo sapiens
caatctggaactgga

SEQ ID NO: 1846554 - DNA, 15 bp, Homo sapiens
aatctggaactggat

SEQ ID NO: 1846555 - DNA, 15 bp, Homo sapiens
atctggaactggatc

SEQ ID NO: 1846556 - DNA, 15 bp, Homo sapiens
tctggaactggatcc

SEQ ID NO: 1846557 - DNA, 15 bp, Homo sapiens
ctggaactggatcct

SEQ ID NO: 1846558 - DNA, 15 bp, Homo sapiens
tggaactggatcctt

SEQ ID NO: 1846559 - DNA, 15 bp, Homo sapiens
ggaactggatccttg

SEQ ID NO: 1846560 - DNA, 15 bp, Homo sapiens
gaactggatccttgc

SEQ ID NO: 1846561 - DNA, 15 bp, Homo sapiens
aactggatccttgct

SEQ ID NO: 1846562 - DNA, 15 bp, Homo sapiens
actggatccttgctg

SEQ ID NO: 1846563 - DNA, 15 bp, Homo sapiens
ctggatccttgctgc

SEQ ID NO: 1846564 - DNA, 15 bp, Homo sapiens
tggatccttgctgcc

SEQ ID NO: 1846565 - DNA, 15 bp, Homo sapiens
ggatccttgctgcca

SEQ ID NO: 1846566 - DNA, 15 bp, Homo sapiens
gatccttgctgccag

SEQ ID NO: 1846567 - DNA, 15 bp, Homo sapiens
atccttgctgccaga

SEQ ID NO: 1846568 - DNA, 15 bp, Homo sapiens
tccttgctgccagat

SEQ ID NO: 1846569 - DNA, 15 bp, Homo sapiens
ccttgctgccagatg

SEQ ID NO: 1846570 - DNA, 15 bp, Homo sapiens
cttgctgccagatgg

SEQ ID NO: 1846571 - DNA, 15 bp, Homo sapiens
ttgctgccagatggg

SEQ ID NO: 1846572 - DNA, 15 bp, Homo sapiens
tgctgccagatggga

SEQ ID NO: 1846573 - DNA, 15 bp, Homo sapiens
gctgccagatgggag

SEQ ID NO: 1846574 - DNA, 15 bp, Homo sapiens
ctgccagatgggagg

SEQ ID NO: 1846575 - DNA, 15 bp, Homo sapiens
tgccagatgggaggc

SEQ ID NO: 1846576 - DNA, 15 bp, Homo sapiens
gccagatgggaggcg

SEQ ID NO: 1846577 - DNA, 15 bp, Homo sapiens
ccagatgggaggcgg

SEQ ID NO: 1846578 - DNA, 15 bp, Homo sapiens
cagatgggaggcggg

SEQ ID NO: 1846579 - DNA, 15 bp, Homo sapiens
agatgggaggcgggc

SEQ ID NO: 1846580 - DNA, 15 bp, Homo sapiens
gatgggaggcgggca

SEQ ID NO: 1846581 - DNA, 15 bp, Homo sapiens
atgggaggcgggcag

SEQ ID NO: 1846582 - DNA, 15 bp, Homo sapiens
tgggaggcgggcagg

SEQ ID NO: 1846583 - DNA, 15 bp, Homo sapiens
gggaggcgggcaggg

SEQ ID NO: 1846584 - DNA, 15 bp, Homo sapiens
ggaggcgggcagggc

SEQ ID NO: 1846585 - DNA, 15 bp, Homo sapiens
gaggcgggcagggcc

SEQ ID NO: 1846586 - DNA, 15 bp, Homo sapiens
aggcgggcagggcca

SEQ ID NO: 1846587 - DNA, 15 bp, Homo sapiens
ggcgggcagggccag

SEQ ID NO: 1846588 - DNA, 15 bp, Homo sapiens
gcgggcagggccagc

SEQ ID NO: 1846589 - DNA, 15 bp, Homo sapiens
cgggcagggccagcc

SEQ ID NO: 1846590 - DNA, 15 bp, Homo sapiens
gggcagggccagccc

SEQ ID NO: 1846591 - DNA, 15 bp, Homo sapiens
ggcagggccagccct

SEQ ID NO: 1846592 - DNA, 15 bp, Homo sapiens
gcagggccagcccta

SEQ ID NO: 1846593 - DNA, 15 bp, Homo sapiens
cagggccagccctat

SEQ ID NO: 1846594 - DNA, 15 bp, Homo sapiens
agggccagccctatg

SEQ ID NO: 1846595 - DNA, 15 bp, Homo sapiens
gggccagccctatgc

SEQ ID NO: 1846596 - DNA, 15 bp, Homo sapiens
ggccagccctatgct

SEQ ID NO: 1846597 - DNA, 15 bp, Homo sapiens
gccagccctatgctg

SEQ ID NO: 1846598 - DNA, 15 bp, Homo sapiens
ccagccctatgctgt

SEQ ID NO: 1846599 - DNA, 15 bp, Homo sapiens
cagccctatgctgtc

SEQ ID NO: 1846600 - DNA, 15 bp, Homo sapiens
agccctatgctgtca

SEQ ID NO: 1846601 - DNA, 15 bp, Homo sapiens
gccctatgctgtcat

SEQ ID NO: 1846602 - DNA, 15 bp, Homo sapiens
ccctatgctgtcatt

SEQ ID NO: 1846603 - DNA, 15 bp, Homo sapiens
cctatgctgtcattg

SEQ ID NO: 1846604 - DNA, 15 bp, Homo sapiens
ctatgctgtcattgg

SEQ ID NO: 1846605 - DNA, 15 bp, Homo sapiens
tatgctgtcattggc

SEQ ID NO: 1846606 - DNA, 15 bp, Homo sapiens
atgctgtcattggcc

SEQ ID NO: 1846607 - DNA, 15 bp, Homo sapiens
tgctgtcattggcct

SEQ ID NO: 1846608 - DNA, 15 bp, Homo sapiens
gctgtcattggcctg

SEQ ID NO: 1846609 - DNA, 15 bp, Homo sapiens
ctgtcattggcctgt

SEQ ID NO: 1846610 - DNA, 15 bp, Homo sapiens
tgtcattggcctgta

SEQ ID NO: 1846611 - DNA, 15 bp, Homo sapiens
gtcattggcctgtag

SEQ ID NO: 1846612 - DNA, 15 bp, Homo sapiens
tcattggcctgtagc

SEQ ID NO: 1846613 - DNA, 15 bp, Homo sapiens
cattggcctgtagcc

SEQ ID NO: 1846614 - DNA, 15 bp, Homo sapiens
attggcctgtagcca

SEQ ID NO: 1846615 - DNA, 15 bp, Homo sapiens
ttggcctgtagccag

SEQ ID NO: 1846616 - DNA, 15 bp, Homo sapiens
tggcctgtagccagc

SEQ ID NO: 1846617 - DNA, 15 bp, Homo sapiens
ggcctgtagccagct

SEQ ID NO: 1846618 - DNA, 15 bp, Homo sapiens
gcctgtagccagctc

SEQ ID NO: 1846619 - DNA, 15 bp, Homo sapiens
cctgtagccagctca

SEQ ID NO: 1846620 - DNA, 15 bp, Homo sapiens
ctgtagccagctcag

SEQ ID NO: 1846621 - DNA, 15 bp, Homo sapiens
tgtagccagctcagg

SEQ ID NO: 1846622 - DNA, 15 bp, Homo sapiens
gtagccagctcaggt

SEQ ID NO: 1846623 - DNA, 15 bp, Homo sapiens
tagccagctcaggtc

SEQ ID NO: 1846624 - DNA, 15 bp, Homo sapiens
agccagctcaggtct

SEQ ID NO: 1846625 - DNA, 15 bp, Homo sapiens
gccagctcaggtctg

SEQ ID NO: 1846626 - DNA, 15 bp, Homo sapiens
ccagctcaggtctgg

SEQ ID NO: 1846627 - DNA, 15 bp, Homo sapiens
cagctcaggtctggt

SEQ ID NO: 1846628 - DNA, 15 bp, Homo sapiens
agctcaggtctggtg

SEQ ID NO: 1846629 - DNA, 15 bp, Homo sapiens
gctcaggtctggtgg

SEQ ID NO: 1846630 - DNA, 15 bp, Homo sapiens
ctcaggtctggtggc

SEQ ID NO: 1846631 - DNA, 15 bp, Homo sapiens
tcaggtctggtggca

SEQ ID NO: 1846632 - DNA, 15 bp, Homo sapiens
caggtctggtggcaa

SEQ ID NO: 1846633 - DNA, 15 bp, Homo sapiens
aggtctggtggcaag

SEQ ID NO: 1846634 - DNA, 15 bp, Homo sapiens
ggtctggtggcaagt

SEQ ID NO: 1846635 - DNA, 15 bp, Homo sapiens
gtctggtggcaagtg

SEQ ID NO: 1846636 - DNA, 15 bp, Homo sapiens
tctggtggcaagtga

SEQ ID NO: 1846637 - DNA, 15 bp, Homo sapiens
ctggtggcaagtgaa

SEQ ID NO: 1846638 - DNA, 15 bp, Homo sapiens
tggtggcaagtgaag

SEQ ID NO: 1846639 - DNA, 15 bp, Homo sapiens
ggtggcaagtgaagg

SEQ ID NO: 1846640 - DNA, 15 bp, Homo sapiens
gtggcaagtgaagga

SEQ ID NO: 1846641 - DNA, 15 bp, Homo sapiens
tggcaagtgaaggac

SEQ ID NO: 1846642 - DNA, 15 bp, Homo sapiens
ggcaagtgaaggaca

SEQ ID NO: 1846643 - DNA, 15 bp, Homo sapiens
gcaagtgaaggacac

SEQ ID NO: 1846644 - DNA, 15 bp, Homo sapiens
caagtgaaggacaca

SEQ ID NO: 1846645 - DNA, 15 bp, Homo sapiens
aagtgaaggacacat

SEQ ID NO: 1846646 - DNA, 15 bp, Homo sapiens
agtgaaggacacatc

SEQ ID NO: 1846647 - DNA, 15 bp, Homo sapiens
gtgaaggacacatcc

SEQ ID NO: 1846648 - DNA, 15 bp, Homo sapiens
tgaaggacacatcct

SEQ ID NO: 1846649 - DNA, 15 bp, Homo sapiens
gaaggacacatcctg

SEQ ID NO: 1846650 - DNA, 15 bp, Homo sapiens
aaggacacatcctga

SEQ ID NO: 1846651 - DNA, 15 bp, Homo sapiens
aggacacatcctgat

SEQ ID NO: 1846652 - DNA, 15 bp, Homo sapiens
ggacacatcctgatg

SEQ ID NO: 1846653 - DNA, 15 bp, Homo sapiens
gacacatcctgatgt

SEQ ID NO: 1846654 - DNA, 15 bp, Homo sapiens
acacatcctgatgtc

SEQ ID NO: 1846655 - DNA, 15 bp, Homo sapiens
cacatcctgatgtct

SEQ ID NO: 1846656 - DNA, 15 bp, Homo sapiens
acatcctgatgtctg

SEQ ID NO: 1846657 - DNA, 15 bp, Homo sapiens
catcctgatgtctga

SEQ ID NO: 1846658 - DNA, 15 bp, Homo sapiens
atcctgatgtctgag

SEQ ID NO: 1846659 - DNA, 15 bp, Homo sapiens
tcctgatgtctgagt

SEQ ID NO: 1846660 - DNA, 15 bp, Homo sapiens
cctgatgtctgagtg

SEQ ID NO: 1846661 - DNA, 15 bp, Homo sapiens
ctgatgtctgagtgc

SEQ ID NO: 1846662 - DNA, 15 bp, Homo sapiens
tgatgtctgagtgcc

SEQ ID NO: 1846663 - DNA, 15 bp, Homo sapiens
gatgtctgagtgccc

SEQ ID NO: 1846664 - DNA, 15 bp, Homo sapiens
atgtctgagtgccct

SEQ ID NO: 1846665 - DNA, 15 bp, Homo sapiens
tgtctgagtgccctg

SEQ ID NO: 1846666 - DNA, 15 bp, Homo sapiens
gtctgagtgccctgc

SEQ ID NO: 1846667 - DNA, 15 bp, Homo sapiens
tctgagtgccctgca

SEQ ID NO: 1846668 - DNA, 15 bp, Homo sapiens
ctgagtgccctgcaa

SEQ ID NO: 1846669 - DNA, 15 bp, Homo sapiens
tgagtgccctgcaat

SEQ ID NO: 1846670 - DNA, 15 bp, Homo sapiens
gagtgccctgcaatt

SEQ ID NO: 1846671 - DNA, 15 bp, Homo sapiens
agtgccctgcaattt

SEQ ID NO: 1846672 - DNA, 15 bp, Homo sapiens
gtgccctgcaattta

SEQ ID NO: 1846673 - DNA, 15 bp, Homo sapiens
tgccctgcaatttat

SEQ ID NO: 1846674 - DNA, 15 bp, Homo sapiens
gccctgcaatttatt

SEQ ID NO: 1846675 - DNA, 15 bp, Homo sapiens
ccctgcaatttattg

SEQ ID NO: 1846676 - DNA, 15 bp, Homo sapiens
cctgcaatttattgg

SEQ ID NO: 1846677 - DNA, 15 bp, Homo sapiens
ctgcaatttattggc

SEQ ID NO: 1846678 - DNA, 15 bp, Homo sapiens
tgcaatttattggct

SEQ ID NO: 1846679 - DNA, 15 bp, Homo sapiens
gcaatttattggctt

SEQ ID NO: 1846680 - DNA, 15 bp, Homo sapiens
caatttattggcttg

SEQ ID NO: 1846681 - DNA, 15 bp, Homo sapiens
aatttattggcttgt

SEQ ID NO: 1846682 - DNA, 15 bp, Homo sapiens
atttattggcttgtg

SEQ ID NO: 1846683 - DNA, 15 bp, Homo sapiens
tttattggcttgtgg

SEQ ID NO: 1846684 - DNA, 15 bp, Homo sapiens
ttattggcttgtggt

SEQ ID NO: 1846685 - DNA, 15 bp, Homo sapiens
tattggcttgtggtt

SEQ ID NO: 1846686 - DNA, 15 bp, Homo sapiens
attggcttgtggttt

SEQ ID NO: 1846687 - DNA, 15 bp, Homo sapiens
ttggcttgtggttta

SEQ ID NO: 1846688 - DNA, 15 bp, Homo sapiens
tggcttgtggtttag

SEQ ID NO: 1846689 - DNA, 15 bp, Homo sapiens
ggcttgtggtttagg

SEQ ID NO: 1846690 - DNA, 15 bp, Homo sapiens
gcttgtggtttaggg

SEQ ID NO: 1846691 - DNA, 15 bp, Homo sapiens
cttgtggtttagggg

SEQ ID NO: 1846692 - DNA, 15 bp, Homo sapiens
ttgtggtttaggggt

SEQ ID NO: 1846693 - DNA, 15 bp, Homo sapiens
tgtggtttaggggtg

SEQ ID NO: 1846694 - DNA, 15 bp, Homo sapiens
gtggtttaggggtgt

SEQ ID NO: 1846695 - DNA, 15 bp, Homo sapiens
tggtttaggggtgtg

SEQ ID NO: 1846696 - DNA, 15 bp, Homo sapiens
ggtttaggggtgtgg

SEQ ID NO: 1846697 - DNA, 15 bp, Homo sapiens
gtttaggggtgtggg

SEQ ID NO: 1846698 - DNA, 15 bp, Homo sapiens
tttaggggtgtgggg

SEQ ID NO: 1846699 - DNA, 15 bp, Homo sapiens
ttaggggtgtggggg

SEQ ID NO: 1846700 - DNA, 15 bp, Homo sapiens
taggggtgtggggga

SEQ ID NO: 1846701 - DNA, 15 bp, Homo sapiens
aggggtgtgggggac

SEQ ID NO: 1846702 - DNA, 15 bp, Homo sapiens
ggggtgtgggggaca

SEQ ID NO: 1846703 - DNA, 15 bp, Homo sapiens
gggtgtgggggacaa

SEQ ID NO: 1846704 - DNA, 15 bp, Homo sapiens
ggtgtgggggacaaa

SEQ ID NO: 1846705 - DNA, 15 bp, Homo sapiens
gtgtgggggacaaac

SEQ ID NO: 1846706 - DNA, 15 bp, Homo sapiens
tgtgggggacaaaca

SEQ ID NO: 1846707 - DNA, 15 bp, Homo sapiens
gtgggggacaaacac

SEQ ID NO: 1846708 - DNA, 15 bp, Homo sapiens
tgggggacaaacacc

SEQ ID NO: 1846709 - DNA, 15 bp, Homo sapiens
gggggacaaacacca

SEQ ID NO: 1846710 - DNA, 15 bp, Homo sapiens
ggggacaaacaccaa

SEQ ID NO: 1846711 - DNA, 15 bp, Homo sapiens
gggacaaacaccaat

SEQ ID NO: 1846712 - DNA, 15 bp, Homo sapiens
ggacaaacaccaatg

SEQ ID NO: 1846713 - DNA, 15 bp, Homo sapiens
gacaaacaccaatgc

SEQ ID NO: 1846714 - DNA, 15 bp, Homo sapiens
acaaacaccaatgcc

SEQ ID NO: 1846715 - DNA, 15 bp, Homo sapiens
caaacaccaatgcca

SEQ ID NO: 1846716 - DNA, 15 bp, Homo sapiens
aaacaccaatgccac

SEQ ID NO: 1846717 - DNA, 15 bp, Homo sapiens
aacaccaatgccaca

SEQ ID NO: 1846718 - DNA, 15 bp, Homo sapiens
acaccaatgccacag

SEQ ID NO: 1846719 - DNA, 15 bp, Homo sapiens
caccaatgccacagt

SEQ ID NO: 1846720 - DNA, 15 bp, Homo sapiens
accaatgccacagtt

SEQ ID NO: 1846721 - DNA, 15 bp, Homo sapiens
ccaatgccacagttg

SEQ ID NO: 1846722 - DNA, 15 bp, Homo sapiens
caatgccacagttga

SEQ ID NO: 1846723 - DNA, 15 bp, Homo sapiens
aatgccacagttgac

SEQ ID NO: 1846724 - DNA, 15 bp, Homo sapiens
atgccacagttgaca

SEQ ID NO: 1846725 - DNA, 15 bp, Homo sapiens
tgccacagttgacat

SEQ ID NO: 1846726 - DNA, 15 bp, Homo sapiens
gccacagttgacata

SEQ ID NO: 1846727 - DNA, 15 bp, Homo sapiens
ccacagttgacatat

SEQ ID NO: 1846728 - DNA, 15 bp, Homo sapiens
cacagttgacatata

SEQ ID NO: 1846729 - DNA, 15 bp, Homo sapiens
acagttgacatatat

SEQ ID NO: 1846730 - DNA, 15 bp, Homo sapiens
cagttgacatatatg

SEQ ID NO: 1846731 - DNA, 15 bp, Homo sapiens
agttgacatatatgg

SEQ ID NO: 1846732 - DNA, 15 bp, Homo sapiens
gttgacatatatggg

SEQ ID NO: 1846733 - DNA, 15 bp, Homo sapiens
ttgacatatatgggc

SEQ ID NO: 1846734 - DNA, 15 bp, Homo sapiens
tgacatatatgggcg

SEQ ID NO: 1846735 - DNA, 15 bp, Homo sapiens
gacatatatgggcgt

SEQ ID NO: 1846736 - DNA, 15 bp, Homo sapiens
acatatatgggcgtc

SEQ ID NO: 1846737 - DNA, 15 bp, Homo sapiens
catatatgggcgtcg

SEQ ID NO: 1846738 - DNA, 15 bp, Homo sapiens
atatatgggcgtcgt

SEQ ID NO: 1846739 - DNA, 15 bp, Homo sapiens
tatatgggcgtcgta

SEQ ID NO: 1846740 - DNA, 15 bp, Homo sapiens
atatgggcgtcgtat

SEQ ID NO: 1846741 - DNA, 15 bp, Homo sapiens
tatgggcgtcgtatt

SEQ ID NO: 1846742 - DNA, 15 bp, Homo sapiens
atgggcgtcgtattt

SEQ ID NO: 1846743 - DNA, 15 bp, Homo sapiens
tgggcgtcgtatttg

SEQ ID NO: 1846744 - DNA, 15 bp, Homo sapiens
gggcgtcgtatttgg

SEQ ID NO: 1846745 - DNA, 15 bp, Homo sapiens
ggcgtcgtatttggt

SEQ ID NO: 1846746 - DNA, 15 bp, Homo sapiens
gcgtcgtatttggtg

SEQ ID NO: 1846747 - DNA, 15 bp, Homo sapiens
cgtcgtatttggtgg

SEQ ID NO: 1846748 - DNA, 15 bp, Homo sapiens
gtcgtatttggtggg

SEQ ID NO: 1846749 - DNA, 15 bp, Homo sapiens
tcgtatttggtgggg

SEQ ID NO: 1846750 - DNA, 15 bp, Homo sapiens
cgtatttggtggggt

SEQ ID NO: 1846751 - DNA, 15 bp, Homo sapiens
gtatttggtggggtc

SEQ ID NO: 1846752 - DNA, 15 bp, Homo sapiens
tatttggtggggtca

SEQ ID NO: 1846753 - DNA, 15 bp, Homo sapiens
atttggtggggtcaa

SEQ ID NO: 1846754 - DNA, 15 bp, Homo sapiens
tttggtggggtcaag

SEQ ID NO: 1846755 - DNA, 15 bp, Homo sapiens
ttggtggggtcaaga

SEQ ID NO: 1846756 - DNA, 15 bp, Homo sapiens
tggtggggtcaagag

SEQ ID NO: 1846757 - DNA, 15 bp, Homo sapiens
ggtggggtcaagagt

SEQ ID NO: 1846758 - DNA, 15 bp, Homo sapiens
gtggggtcaagagtc

SEQ ID NO: 1846759 - DNA, 15 bp, Homo sapiens
tggggtcaagagtcc

SEQ ID NO: 1846760 - DNA, 15 bp, Homo sapiens
ggggtcaagagtccg

SEQ ID NO: 1846761 - DNA, 15 bp, Homo sapiens
gggtcaagagtccgg

SEQ ID NO: 1846762 - DNA, 15 bp, Homo sapiens
ggtcaagagtccgga

SEQ ID NO: 1846763 - DNA, 15 bp, Homo sapiens
gtcaagagtccggag

SEQ ID NO: 1846764 - DNA, 15 bp, Homo sapiens
tcaagagtccggagg

SEQ ID NO: 1846765 - DNA, 15 bp, Homo sapiens
caagagtccggaggg

SEQ ID NO: 1846766 - DNA, 15 bp, Homo sapiens
aagagtccggaggga

SEQ ID NO: 1846767 - DNA, 15 bp, Homo sapiens
agagtccggagggag

SEQ ID NO: 1846768 - DNA, 15 bp, Homo sapiens
gagtccggagggagg

SEQ ID NO: 1846769 - DNA, 15 bp, Homo sapiens
agtccggagggaggc

SEQ ID NO: 1846770 - DNA, 15 bp, Homo sapiens
gtccggagggaggcg

SEQ ID NO: 1846771 - DNA, 15 bp, Homo sapiens
tccggagggaggcgc

SEQ ID NO: 1846772 - DNA, 15 bp, Homo sapiens
ccggagggaggcgca

SEQ ID NO: 1846773 - DNA, 15 bp, Homo sapiens
cggagggaggcgcat

SEQ ID NO: 1846774 - DNA, 15 bp, Homo sapiens
ggagggaggcgcatc

SEQ ID NO: 1846775 - DNA, 15 bp, Homo sapiens
gagggaggcgcatcc

SEQ ID NO: 1846776 - DNA, 15 bp, Homo sapiens
agggaggcgcatcca

SEQ ID NO: 1846777 - DNA, 15 bp, Homo sapiens
gggaggcgcatccag

SEQ ID NO: 1846778 - DNA, 15 bp, Homo sapiens
ggaggcgcatccagc

SEQ ID NO: 1846779 - DNA, 15 bp, Homo sapiens
gaggcgcatccagct

SEQ ID NO: 1846780 - DNA, 15 bp, Homo sapiens
aggcgcatccagctt

SEQ ID NO: 1846781 - DNA, 15 bp, Homo sapiens
ggcgcatccagcttc

SEQ ID NO: 1846782 - DNA, 15 bp, Homo sapiens
gcgcatccagcttct

SEQ ID NO: 1846783 - DNA, 15 bp, Homo sapiens
cgcatccagcttctg

SEQ ID NO: 1846784 - DNA, 15 bp, Homo sapiens
gcatccagcttctgt

SEQ ID NO: 1846785 - DNA, 15 bp, Homo sapiens
catccagcttctgtc

SEQ ID NO: 1846786 - DNA, 15 bp, Homo sapiens
atccagcttctgtct

SEQ ID NO: 1846787 - DNA, 15 bp, Homo sapiens
tccagcttctgtctt

SEQ ID NO: 1846788 - DNA, 15 bp, Homo sapiens
ccagcttctgtcttg

SEQ ID NO: 1846789 - DNA, 15 bp, Homo sapiens
cagcttctgtcttgg

SEQ ID NO: 1846790 - DNA, 15 bp, Homo sapiens
agcttctgtcttggc

SEQ ID NO: 1846791 - DNA, 15 bp, Homo sapiens
gcttctgtcttggct

SEQ ID NO: 1846792 - DNA, 15 bp, Homo sapiens
cttctgtcttggctg

SEQ ID NO: 1846793 - DNA, 15 bp, Homo sapiens
ttctgtcttggctgc

SEQ ID NO: 1846794 - DNA, 15 bp, Homo sapiens
tctgtcttggctgca

SEQ ID NO: 1846795 - DNA, 15 bp, Homo sapiens
ctgtcttggctgcag

SEQ ID NO: 1846796 - DNA, 15 bp, Homo sapiens
tgtcttggctgcagg

SEQ ID NO: 1846797 - DNA, 15 bp, Homo sapiens
gtcttggctgcaggc

SEQ ID NO: 1846798 - DNA, 15 bp, Homo sapiens
tcttggctgcaggcc

SEQ ID NO: 1846799 - DNA, 15 bp, Homo sapiens
cttggctgcaggcca

SEQ ID NO: 1846800 - DNA, 15 bp, Homo sapiens
ttggctgcaggccag

SEQ ID NO: 1846801 - DNA, 15 bp, Homo sapiens
tggctgcaggccagg

SEQ ID NO: 1846802 - DNA, 15 bp, Homo sapiens
ggctgcaggccaggt

SEQ ID NO: 1846803 - DNA, 15 bp, Homo sapiens
gctgcaggccaggtc

SEQ ID NO: 1846804 - DNA, 15 bp, Homo sapiens
ctgcaggccaggtct

SEQ ID NO: 1846805 - DNA, 15 bp, Homo sapiens
tgcaggccaggtctg

SEQ ID NO: 1846806 - DNA, 15 bp, Homo sapiens
gcaggccaggtctgc

SEQ ID NO: 1846807 - DNA, 15 bp, Homo sapiens
caggccaggtctgcc

SEQ ID NO: 1846808 - DNA, 15 bp, Homo sapiens
aggccaggtctgccc

SEQ ID NO: 1846809 - DNA, 15 bp, Homo sapiens
ggccaggtctgccca

SEQ ID NO: 1846810 - DNA, 15 bp, Homo sapiens
gccaggtctgcccat

SEQ ID NO: 1846811 - DNA, 15 bp, Homo sapiens
ccaggtctgcccatg

SEQ ID NO: 1846812 - DNA, 15 bp, Homo sapiens
caggtctgcccatga

SEQ ID NO: 1846813 - DNA, 15 bp, Homo sapiens
aggtctgcccatgag

SEQ ID NO: 1846814 - DNA, 15 bp, Homo sapiens
ggtctgcccatgaga

SEQ ID NO: 1846815 - DNA, 15 bp, Homo sapiens
gtctgcccatgagac

SEQ ID NO: 1846816 - DNA, 15 bp, Homo sapiens
tctgcccatgagacg

SEQ ID NO: 1846817 - DNA, 15 bp, Homo sapiens
ctgcccatgagacgg

SEQ ID NO: 1846818 - DNA, 15 bp, Homo sapiens
tgcccatgagacggt

SEQ ID NO: 1846819 - DNA, 15 bp, Homo sapiens
gcccatgagacggtt

SEQ ID NO: 1846820 - DNA, 15 bp, Homo sapiens
cccatgagacggttc

SEQ ID NO: 1846821 - DNA, 15 bp, Homo sapiens
ccatgagacggttct

SEQ ID NO: 1846822 - DNA, 15 bp, Homo sapiens
catgagacggttctc

SEQ ID NO: 1846823 - DNA, 15 bp, Homo sapiens
atgagacggttctcc

SEQ ID NO: 1846824 - DNA, 15 bp, Homo sapiens
tgagacggttctcct

SEQ ID NO: 1846825 - DNA, 15 bp, Homo sapiens
gagacggttctcctc

SEQ ID NO: 1846826 - DNA, 15 bp, Homo sapiens
agacggttctcctcc

SEQ ID NO: 1846827 - DNA, 15 bp, Homo sapiens
gacggttctcctcct

SEQ ID NO: 1846828 - DNA, 15 bp, Homo sapiens
acggttctcctcctt

SEQ ID NO: 1846829 - DNA, 15 bp, Homo sapiens
cggttctcctcctta

SEQ ID NO: 1846830 - DNA, 15 bp, Homo sapiens
ggttctcctccttaa

SEQ ID NO: 1846831 - DNA, 15 bp, Homo sapiens
gttctcctccttaac

SEQ ID NO: 1846832 - DNA, 15 bp, Homo sapiens
ttctcctccttaacc

SEQ ID NO: 1846833 - DNA, 15 bp, Homo sapiens
tctcctccttaacct

SEQ ID NO: 1846834 - DNA, 15 bp, Homo sapiens
ctcctccttaaccta

SEQ ID NO: 1846835 - DNA, 15 bp, Homo sapiens
tcctccttaacctat

SEQ ID NO: 1846836 - DNA, 15 bp, Homo sapiens
cctccttaacctatt

SEQ ID NO: 1846837 - DNA, 15 bp, Homo sapiens
ctccttaacctattc

SEQ ID NO: 1846838 - DNA, 15 bp, Homo sapiens
tccttaacctattca

SEQ ID NO: 1846839 - DNA, 15 bp, Homo sapiens
ccttaacctattcaa

SEQ ID NO: 1846840 - DNA, 15 bp, Homo sapiens
cttaacctattcaat

SEQ ID NO: 1846841 - DNA, 15 bp, Homo sapiens
ttaacctattcaatc

SEQ ID NO: 1846842 - DNA, 15 bp, Homo sapiens
taacctattcaatcc

SEQ ID NO: 1846843 - DNA, 15 bp, Homo sapiens
aacctattcaatcca

SEQ ID NO: 1846844 - DNA, 15 bp, Homo sapiens
acctattcaatccaa

SEQ ID NO: 1846845 - DNA, 15 bp, Homo sapiens
cctattcaatccaat

SEQ ID NO: 1846846 - DNA, 15 bp, Homo sapiens
ctattcaatccaata

SEQ ID NO: 1846847 - DNA, 15 bp, Homo sapiens
tattcaatccaataa

SEQ ID NO: 1846848 - DNA, 15 bp, Homo sapiens
attcaatccaataat

SEQ ID NO: 1846849 - DNA, 15 bp, Homo sapiens
ttcaatccaataatc

SEQ ID NO: 1846850 - DNA, 15 bp, Homo sapiens
tcaatccaataatcg

SEQ ID NO: 1846851 - DNA, 15 bp, Homo sapiens
caatccaataatcga

SEQ ID NO: 1846852 - DNA, 15 bp, Homo sapiens
aatccaataatcgat

SEQ ID NO: 1846853 - DNA, 15 bp, Homo sapiens
atccaataatcgatg

SEQ ID NO: 1846854 - DNA, 15 bp, Homo sapiens
tccaataatcgatga

SEQ ID NO: 1846855 - DNA, 15 bp, Homo sapiens
ccaataatcgatgag

SEQ ID NO: 1846856 - DNA, 15 bp, Homo sapiens
caataatcgatgagc

SEQ ID NO: 1846857 - DNA, 15 bp, Homo sapiens
aataatcgatgagca

SEQ ID NO: 1846858 - DNA, 15 bp, Homo sapiens
ataatcgatgagcag

SEQ ID NO: 1846859 - DNA, 15 bp, Homo sapiens
taatcgatgagcagg

SEQ ID NO: 1846860 - DNA, 15 bp, Homo sapiens
aatcgatgagcaggt

SEQ ID NO: 1846861 - DNA, 15 bp, Homo sapiens
atcgatgagcaggta

SEQ ID NO: 1846862 - DNA, 15 bp, Homo sapiens
tcgatgagcaggtat

SEQ ID NO: 1846863 - DNA, 15 bp, Homo sapiens
cgatgagcaggtatt

SEQ ID NO: 1846864 - DNA, 15 bp, Homo sapiens
gatgagcaggtattt

SEQ ID NO: 1846865 - DNA, 15 bp, Homo sapiens
atgagcaggtatttt

SEQ ID NO: 1846866 - DNA, 15 bp, Homo sapiens
tgagcaggtattttc

SEQ ID NO: 1846867 - DNA, 15 bp, Homo sapiens
gagcaggtattttct

SEQ ID NO: 1846868 - DNA, 15 bp, Homo sapiens
agcaggtattttctg

SEQ ID NO: 1846869 - DNA, 15 bp, Homo sapiens
gcaggtattttctga

SEQ ID NO: 1846870 - DNA, 15 bp, Homo sapiens
caggtattttctgag

SEQ ID NO: 1846871 - DNA, 15 bp, Homo sapiens
aggtattttctgaga

SEQ ID NO: 1846872 - DNA, 15 bp, Homo sapiens
ggtattttctgagat

SEQ ID NO: 1846873 - DNA, 15 bp, Homo sapiens
gtattttctgagatc

SEQ ID NO: 1846874 - DNA, 15 bp, Homo sapiens
tattttctgagatct

SEQ ID NO: 1846875 - DNA, 15 bp, Homo sapiens
attttctgagatctg

SEQ ID NO: 1846876 - DNA, 15 bp, Homo sapiens
ttttctgagatctga

SEQ ID NO: 1846877 - DNA, 15 bp, Homo sapiens
tttctgagatctgaa

SEQ ID NO: 1846878 - DNA, 15 bp, Homo sapiens
ttctgagatctgaag

SEQ ID NO: 1846879 - DNA, 15 bp, Homo sapiens
tctgagatctgaagt

SEQ ID NO: 1846880 - DNA, 15 bp, Homo sapiens
ctgagatctgaagtg

SEQ ID NO: 1846881 - DNA, 15 bp, Homo sapiens
tgagatctgaagtgt

SEQ ID NO: 1846882 - DNA, 15 bp, Homo sapiens
gagatctgaagtgtc

SEQ ID NO: 1846883 - DNA, 15 bp, Homo sapiens
agatctgaagtgtca

SEQ ID NO: 1846884 - DNA, 15 bp, Homo sapiens
gatctgaagtgtcaa

SEQ ID NO: 1846885 - DNA, 15 bp, Homo sapiens
atctgaagtgtcaag

SEQ ID NO: 1846886 - DNA, 15 bp, Homo sapiens
tctgaagtgtcaagt

SEQ ID NO: 1846887 - DNA, 15 bp, Homo sapiens
ctgaagtgtcaagta

SEQ ID NO: 1846888 - DNA, 15 bp, Homo sapiens
tgaagtgtcaagtac

SEQ ID NO: 1846889 - DNA, 15 bp, Homo sapiens
gaagtgtcaagtact

SEQ ID NO: 1846890 - DNA, 15 bp, Homo sapiens
aagtgtcaagtactg

SEQ ID NO: 1846891 - DNA, 15 bp, Homo sapiens
agtgtcaagtactga

SEQ ID NO: 1846892 - DNA, 15 bp, Homo sapiens
gtgtcaagtactgaa

SEQ ID NO: 1846893 - DNA, 15 bp, Homo sapiens
tgtcaagtactgaag

SEQ ID NO: 1846894 - DNA, 15 bp, Homo sapiens
gtcaagtactgaaga

SEQ ID NO: 1846895 - DNA, 15 bp, Homo sapiens
tcaagtactgaagac

SEQ ID NO: 1846896 - DNA, 15 bp, Homo sapiens
caagtactgaagaca

SEQ ID NO: 1846897 - DNA, 15 bp, Homo sapiens
aagtactgaagacat

SEQ ID NO: 1846898 - DNA, 15 bp, Homo sapiens
agtactgaagacatc

SEQ ID NO: 1846899 - DNA, 15 bp, Homo sapiens
gtactgaagacatca

SEQ ID NO: 1846900 - DNA, 15 bp, Homo sapiens
tactgaagacatcac

SEQ ID NO: 1846901 - DNA, 15 bp, Homo sapiens
actgaagacatcacc

SEQ ID NO: 1846902 - DNA, 15 bp, Homo sapiens
ctgaagacatcacca

SEQ ID NO: 1846903 - DNA, 15 bp, Homo sapiens
tgaagacatcaccag

SEQ ID NO: 1846904 - DNA, 15 bp, Homo sapiens
gaagacatcaccagg

SEQ ID NO: 1846905 - DNA, 15 bp, Homo sapiens
aagacatcaccaggc

SEQ ID NO: 1846906 - DNA, 15 bp, Homo sapiens
agacatcaccaggct

SEQ ID NO: 1846907 - DNA, 15 bp, Homo sapiens
gacatcaccaggctt

SEQ ID NO: 1846908 - DNA, 15 bp, Homo sapiens
acatcaccaggcttg

SEQ ID NO: 1846909 - DNA, 15 bp, Homo sapiens
catcaccaggcttgg

SEQ ID NO: 1846910 - DNA, 15 bp, Homo sapiens
atcaccaggcttggc

SEQ ID NO: 1846911 - DNA, 15 bp, Homo sapiens
tcaccaggcttggct

SEQ ID NO: 1846912 - DNA, 15 bp, Homo sapiens
caccaggcttggctc

SEQ ID NO: 1846913 - DNA, 15 bp, Homo sapiens
accaggcttggctcc

SEQ ID NO: 1846914 - DNA, 15 bp, Homo sapiens
ccaggcttggctccg

SEQ ID NO: 1846915 - DNA, 15 bp, Homo sapiens
caggcttggctccgt

SEQ ID NO: 1846916 - DNA, 15 bp, Homo sapiens
aggcttggctccgtg

SEQ ID NO: 1846917 - DNA, 15 bp, Homo sapiens
ggcttggctccgtgg

SEQ ID NO: 1846918 - DNA, 15 bp, Homo sapiens
gcttggctccgtggg

SEQ ID NO: 1846919 - DNA, 15 bp, Homo sapiens
cttggctccgtggga

SEQ ID NO: 1846920 - DNA, 15 bp, Homo sapiens
ttggctccgtgggac

SEQ ID NO: 1846921 - DNA, 15 bp, Homo sapiens
tggctccgtgggaca

SEQ ID NO: 1846922 - DNA, 15 bp, Homo sapiens
ggctccgtgggacac

SEQ ID NO: 1846923 - DNA, 15 bp, Homo sapiens
gctccgtgggacaca

SEQ ID NO: 1846924 - DNA, 15 bp, Homo sapiens
ctccgtgggacacac

SEQ ID NO: 1846925 - DNA, 15 bp, Homo sapiens
tccgtgggacacaca

SEQ ID NO: 1846926 - DNA, 15 bp, Homo sapiens
ccgtgggacacacaa

SEQ ID NO: 1846927 - DNA, 15 bp, Homo sapiens
cgtgggacacacaag

SEQ ID NO: 1846928 - DNA, 15 bp, Homo sapiens
gtgggacacacaagg

SEQ ID NO: 1846929 - DNA, 15 bp, Homo sapiens
tgggacacacaagga

SEQ ID NO: 1846930 - DNA, 15 bp, Homo sapiens
gggacacacaaggaa

SEQ ID NO: 1846931 - DNA, 15 bp, Homo sapiens
ggacacacaaggaat

SEQ ID NO: 1846932 - DNA, 15 bp, Homo sapiens
gacacacaaggaatt

SEQ ID NO: 1846933 - DNA, 15 bp, Homo sapiens
acacacaaggaatta

SEQ ID NO: 1846934 - DNA, 15 bp, Homo sapiens
cacacaaggaattat

SEQ ID NO: 1846935 - DNA, 15 bp, Homo sapiens
acacaaggaattata

SEQ ID NO: 1846936 - DNA, 15 bp, Homo sapiens
cacaaggaattataa

SEQ ID NO: 1846937 - DNA, 15 bp, Homo sapiens
acaaggaattataaa

SEQ ID NO: 1846938 - DNA, 15 bp, Homo sapiens
caaggaattataaag

SEQ ID NO: 1846939 - DNA, 15 bp, Homo sapiens
aaggaattataaagc

SEQ ID NO: 1846940 - DNA, 15 bp, Homo sapiens
aggaattataaagca

SEQ ID NO: 1846941 - DNA, 15 bp, Homo sapiens
ggaattataaagcag

SEQ ID NO: 1846942 - DNA, 15 bp, Homo sapiens
gaattataaagcagg

SEQ ID NO: 1846943 - DNA, 15 bp, Homo sapiens
aattataaagcagga

SEQ ID NO: 1846944 - DNA, 15 bp, Homo sapiens
attataaagcaggac

SEQ ID NO: 1846945 - DNA, 15 bp, Homo sapiens
ttataaagcaggacc

SEQ ID NO: 1846946 - DNA, 15 bp, Homo sapiens
tataaagcaggaccc

SEQ ID NO: 1846947 - DNA, 15 bp, Homo sapiens
ataaagcaggacccc

SEQ ID NO: 1846948 - DNA, 15 bp, Homo sapiens
taaagcaggaccccc

SEQ ID NO: 1846949 - DNA, 15 bp, Homo sapiens
aaagcaggaccccct

SEQ ID NO: 1846950 - DNA, 15 bp, Homo sapiens
aagcaggaccccctc

SEQ ID NO: 1846951 - DNA, 15 bp, Homo sapiens
agcaggaccccctca

SEQ ID NO: 1846952 - DNA, 15 bp, Homo sapiens
gcaggaccccctcat

SEQ ID NO: 1846953 - DNA, 15 bp, Homo sapiens
caggaccccctcatc

SEQ ID NO: 1846954 - DNA, 15 bp, Homo sapiens
aggaccccctcatcc

SEQ ID NO: 1846955 - DNA, 15 bp, Homo sapiens
ggaccccctcatccc

SEQ ID NO: 1846956 - DNA, 15 bp, Homo sapiens
gaccccctcatcccc

SEQ ID NO: 1846957 - DNA, 15 bp, Homo sapiens
accccctcatccccc

SEQ ID NO: 1846958 - DNA, 15 bp, Homo sapiens
ccccctcatccccct

SEQ ID NO: 1846959 - DNA, 15 bp, Homo sapiens
cccctcatccccctc

SEQ ID NO: 1846960 - DNA, 15 bp, Homo sapiens
ccctcatccccctca

SEQ ID NO: 1846961 - DNA, 15 bp, Homo sapiens
cctcatccccctcag

SEQ ID NO: 1846962 - DNA, 15 bp, Homo sapiens
ctcatccccctcagg

SEQ ID NO: 1846963 - DNA, 15 bp, Homo sapiens
tcatccccctcagga

SEQ ID NO: 1846964 - DNA, 15 bp, Homo sapiens
catccccctcaggag

SEQ ID NO: 1846965 - DNA, 15 bp, Homo sapiens
atccccctcaggagc

SEQ ID NO: 1846966 - DNA, 15 bp, Homo sapiens
tccccctcaggagct

SEQ ID NO: 1846967 - DNA, 15 bp, Homo sapiens
ccccctcaggagcta

SEQ ID NO: 1846968 - DNA, 15 bp, Homo sapiens
cccctcaggagctaa

SEQ ID NO: 1846969 - DNA, 15 bp, Homo sapiens
ccctcaggagctaac

SEQ ID NO: 1846970 - DNA, 15 bp, Homo sapiens
cctcaggagctaaca

SEQ ID NO: 1846971 - DNA, 15 bp, Homo sapiens
ctcaggagctaacag

SEQ ID NO: 1846972 - DNA, 15 bp, Homo sapiens
tcaggagctaacagt

SEQ ID NO: 1846973 - DNA, 15 bp, Homo sapiens
caggagctaacagtc

SEQ ID NO: 1846974 - DNA, 15 bp, Homo sapiens
aggagctaacagtcc

SEQ ID NO: 1846975 - DNA, 15 bp, Homo sapiens
ggagctaacagtcca

SEQ ID NO: 1846976 - DNA, 15 bp, Homo sapiens
gagctaacagtccaa

SEQ ID NO: 1846977 - DNA, 15 bp, Homo sapiens
agctaacagtccaat

SEQ ID NO: 1846978 - DNA, 15 bp, Homo sapiens
gctaacagtccaatt

SEQ ID NO: 1846979 - DNA, 15 bp, Homo sapiens
ctaacagtccaattg

SEQ ID NO: 1846980 - DNA, 15 bp, Homo sapiens
taacagtccaattga

SEQ ID NO: 1846981 - DNA, 15 bp, Homo sapiens
aacagtccaattgag

SEQ ID NO: 1846982 - DNA, 15 bp, Homo sapiens
acagtccaattgagg

SEQ ID NO: 1846983 - DNA, 15 bp, Homo sapiens
cagtccaattgaggg

SEQ ID NO: 1846984 - DNA, 15 bp, Homo sapiens
agtccaattgaggga

SEQ ID NO: 1846985 - DNA, 15 bp, Homo sapiens
gtccaattgagggaa

SEQ ID NO: 1846986 - DNA, 15 bp, Homo sapiens
tccaattgagggaag

SEQ ID NO: 1846987 - DNA, 15 bp, Homo sapiens
ccaattgagggaagc

SEQ ID NO: 1846988 - DNA, 15 bp, Homo sapiens
caattgagggaagca

SEQ ID NO: 1846989 - DNA, 15 bp, Homo sapiens
aattgagggaagcaa

SEQ ID NO: 1846990 - DNA, 15 bp, Homo sapiens
attgagggaagcaag

SEQ ID NO: 1846991 - DNA, 15 bp, Homo sapiens
ttgagggaagcaaga

SEQ ID NO: 1846992 - DNA, 15 bp, Homo sapiens
tgagggaagcaagag

SEQ ID NO: 1846993 - DNA, 15 bp, Homo sapiens
gagggaagcaagaga

SEQ ID NO: 1846994 - DNA, 15 bp, Homo sapiens
agggaagcaagagag

SEQ ID NO: 1846995 - DNA, 15 bp, Homo sapiens
gggaagcaagagaga

SEQ ID NO: 1846996 - DNA, 15 bp, Homo sapiens
ggaagcaagagagac

SEQ ID NO: 1846997 - DNA, 15 bp, Homo sapiens
gaagcaagagagaca

SEQ ID NO: 1846998 - DNA, 15 bp, Homo sapiens
aagcaagagagacag

SEQ ID NO: 1846999 - DNA, 15 bp, Homo sapiens
agcaagagagacaga

SEQ ID NO: 1847000 - DNA, 15 bp, Homo sapiens
gcaagagagacagac

SEQ ID NO: 1847001 - DNA, 15 bp, Homo sapiens
caagagagacagacg

SEQ ID NO: 1847002 - DNA, 15 bp, Homo sapiens
aagagagacagacgc

SEQ ID NO: 1847003 - DNA, 15 bp, Homo sapiens
agagagacagacgca

SEQ ID NO: 1847004 - DNA, 15 bp, Homo sapiens
gagagacagacgcac

SEQ ID NO: 1847005 - DNA, 15 bp, Homo sapiens
agagacagacgcacg

SEQ ID NO: 1847006 - DNA, 15 bp, Homo sapiens
gagacagacgcacgt

SEQ ID NO: 1847007 - DNA, 15 bp, Homo sapiens
agacagacgcacgtg

SEQ ID NO: 1847008 - DNA, 15 bp, Homo sapiens
gacagacgcacgtga

SEQ ID NO: 1847009 - DNA, 15 bp, Homo sapiens
acagacgcacgtgaa

SEQ ID NO: 1847010 - DNA, 15 bp, Homo sapiens
cagacgcacgtgaaa

SEQ ID NO: 1847011 - DNA, 15 bp, Homo sapiens
agacgcacgtgaaag

SEQ ID NO: 1847012 - DNA, 15 bp, Homo sapiens
gacgcacgtgaaagg

SEQ ID NO: 1847013 - DNA, 15 bp, Homo sapiens
acgcacgtgaaaggt

SEQ ID NO: 1847014 - DNA, 15 bp, Homo sapiens
cgcacgtgaaaggtt

SEQ ID NO: 1847015 - DNA, 15 bp, Homo sapiens
gcacgtgaaaggtta

SEQ ID NO: 1847016 - DNA, 15 bp, Homo sapiens
cacgtgaaaggttaa

SEQ ID NO: 1847017 - DNA, 15 bp, Homo sapiens
acgtgaaaggttaaa

SEQ ID NO: 1847018 - DNA, 15 bp, Homo sapiens
cgtgaaaggttaaac

SEQ ID NO: 1847019 - DNA, 15 bp, Homo sapiens
gtgaaaggttaaaca

SEQ ID NO: 1847020 - DNA, 15 bp, Homo sapiens
tgaaaggttaaacaa

SEQ ID NO: 1847021 - DNA, 15 bp, Homo sapiens
gaaaggttaaacaac

SEQ ID NO: 1847022 - DNA, 15 bp, Homo sapiens
aaaggttaaacaact

SEQ ID NO: 1847023 - DNA, 15 bp, Homo sapiens
aaggttaaacaactt

SEQ ID NO: 1847024 - DNA, 15 bp, Homo sapiens
aggttaaacaacttg

SEQ ID NO: 1847025 - DNA, 15 bp, Homo sapiens
ggttaaacaacttgt

SEQ ID NO: 1847026 - DNA, 15 bp, Homo sapiens
gttaaacaacttgtc

SEQ ID NO: 1847027 - DNA, 15 bp, Homo sapiens
ttaaacaacttgtcc

SEQ ID NO: 1847028 - DNA, 15 bp, Homo sapiens
taaacaacttgtcct

SEQ ID NO: 1847029 - DNA, 15 bp, Homo sapiens
aaacaacttgtccta

SEQ ID NO: 1847030 - DNA, 15 bp, Homo sapiens
aacaacttgtcctag

SEQ ID NO: 1847031 - DNA, 15 bp, Homo sapiens
acaacttgtcctagc

SEQ ID NO: 1847032 - DNA, 15 bp, Homo sapiens
caacttgtcctagcc

SEQ ID NO: 1847033 - DNA, 15 bp, Homo sapiens
aacttgtcctagcct

SEQ ID NO: 1847034 - DNA, 15 bp, Homo sapiens
acttgtcctagcctg

SEQ ID NO: 1847035 - DNA, 15 bp, Homo sapiens
cttgtcctagcctga

SEQ ID NO: 1847036 - DNA, 15 bp, Homo sapiens
ttgtcctagcctgaa

SEQ ID NO: 1847037 - DNA, 15 bp, Homo sapiens
tgtcctagcctgaaa

SEQ ID NO: 1847038 - DNA, 15 bp, Homo sapiens
gtcctagcctgaaag

SEQ ID NO: 1847039 - DNA, 15 bp, Homo sapiens
tcctagcctgaaaga

SEQ ID NO: 1847040 - DNA, 15 bp, Homo sapiens
cctagcctgaaagac

SEQ ID NO: 1847041 - DNA, 15 bp, Homo sapiens
ctagcctgaaagaca

SEQ ID NO: 1847042 - DNA, 15 bp, Homo sapiens
tagcctgaaagacaa

SEQ ID NO: 1847043 - DNA, 15 bp, Homo sapiens
agcctgaaagacaag

SEQ ID NO: 1847044 - DNA, 15 bp, Homo sapiens
gcctgaaagacaaga

SEQ ID NO: 1847045 - DNA, 15 bp, Homo sapiens
cctgaaagacaagac

SEQ ID NO: 1847046 - DNA, 15 bp, Homo sapiens
ctgaaagacaagacc

SEQ ID NO: 1847047 - DNA, 15 bp, Homo sapiens
tgaaagacaagaccc

SEQ ID NO: 1847048 - DNA, 15 bp, Homo sapiens
gaaagacaagacccg

SEQ ID NO: 1847049 - DNA, 15 bp, Homo sapiens
aaagacaagacccgt

SEQ ID NO: 1847050 - DNA, 15 bp, Homo sapiens
aagacaagacccgtg

SEQ ID NO: 1847051 - DNA, 15 bp, Homo sapiens
agacaagacccgtgg

SEQ ID NO: 1847052 - DNA, 15 bp, Homo sapiens
gacaagacccgtggg

SEQ ID NO: 1847053 - DNA, 15 bp, Homo sapiens
acaagacccgtggga

SEQ ID NO: 1847054 - DNA, 15 bp, Homo sapiens
caagacccgtgggaa

SEQ ID NO: 1847055 - DNA, 15 bp, Homo sapiens
aagacccgtgggaaa

SEQ ID NO: 1847056 - DNA, 15 bp, Homo sapiens
agacccgtgggaaac

SEQ ID NO: 1847057 - DNA, 15 bp, Homo sapiens
gacccgtgggaaaca

SEQ ID NO: 1847058 - DNA, 15 bp, Homo sapiens
acccgtgggaaacaa

SEQ ID NO: 1847059 - DNA, 15 bp, Homo sapiens
cccgtgggaaacaat

SEQ ID NO: 1847060 - DNA, 15 bp, Homo sapiens
ccgtgggaaacaatt

SEQ ID NO: 1847061 - DNA, 15 bp, Homo sapiens
cgtgggaaacaattc

SEQ ID NO: 1847062 - DNA, 15 bp, Homo sapiens
gtgggaaacaattca

SEQ ID NO: 1847063 - DNA, 15 bp, Homo sapiens
tgggaaacaattcag

SEQ ID NO: 1847064 - DNA, 15 bp, Homo sapiens
gggaaacaattcagg

SEQ ID NO: 1847065 - DNA, 15 bp, Homo sapiens
ggaaacaattcagga

SEQ ID NO: 1847066 - DNA, 15 bp, Homo sapiens
gaaacaattcaggaa

SEQ ID NO: 1847067 - DNA, 15 bp, Homo sapiens
aaacaattcaggaaa

SEQ ID NO: 1847068 - DNA, 15 bp, Homo sapiens
aacaattcaggaaat

SEQ ID NO: 1847069 - DNA, 15 bp, Homo sapiens
acaattcaggaaatg

SEQ ID NO: 1847070 - DNA, 15 bp, Homo sapiens
caattcaggaaatgt

SEQ ID NO: 1847071 - DNA, 15 bp, Homo sapiens
aattcaggaaatgtc

SEQ ID NO: 1847072 - DNA, 15 bp, Homo sapiens
attcaggaaatgtca

SEQ ID NO: 1847073 - DNA, 15 bp, Homo sapiens
ttcaggaaatgtcac

SEQ ID NO: 1847074 - DNA, 15 bp, Homo sapiens
tcaggaaatgtcacc

SEQ ID NO: 1847075 - DNA, 15 bp, Homo sapiens
caggaaatgtcacca

SEQ ID NO: 1847076 - DNA, 15 bp, Homo sapiens
aggaaatgtcaccag

SEQ ID NO: 1847077 - DNA, 15 bp, Homo sapiens
ggaaatgtcaccagg

SEQ ID NO: 1847078 - DNA, 15 bp, Homo sapiens
gaaatgtcaccaggc

SEQ ID NO: 1847079 - DNA, 15 bp, Homo sapiens
aaatgtcaccaggca

SEQ ID NO: 1847080 - DNA, 15 bp, Homo sapiens
aatgtcaccaggcag

SEQ ID NO: 1847081 - DNA, 15 bp, Homo sapiens
atgtcaccaggcagc

SEQ ID NO: 1847082 - DNA, 15 bp, Homo sapiens
tgtcaccaggcagca

SEQ ID NO: 1847083 - DNA, 15 bp, Homo sapiens
gtcaccaggcagcat

SEQ ID NO: 1847084 - DNA, 15 bp, Homo sapiens
tcaccaggcagcatc

SEQ ID NO: 1847085 - DNA, 15 bp, Homo sapiens
caccaggcagcatct

SEQ ID NO: 1847086 - DNA, 15 bp, Homo sapiens
accaggcagcatctt

SEQ ID NO: 1847087 - DNA, 15 bp, Homo sapiens
ccaggcagcatcttc

SEQ ID NO: 1847088 - DNA, 15 bp, Homo sapiens
caggcagcatcttct

SEQ ID NO: 1847089 - DNA, 15 bp, Homo sapiens
aggcagcatcttctt

SEQ ID NO: 1847090 - DNA, 15 bp, Homo sapiens
ggcagcatcttctta

SEQ ID NO: 1847091 - DNA, 15 bp, Homo sapiens
gcagcatcttcttag

SEQ ID NO: 1847092 - DNA, 15 bp, Homo sapiens
cagcatcttcttagt

SEQ ID NO: 1847093 - DNA, 15 bp, Homo sapiens
agcatcttcttagtg

SEQ ID NO: 1847094 - DNA, 15 bp, Homo sapiens
gcatcttcttagtgc

SEQ ID NO: 1847095 - DNA, 15 bp, Homo sapiens
catcttcttagtgct

SEQ ID NO: 1847096 - DNA, 15 bp, Homo sapiens
atcttcttagtgctg

SEQ ID NO: 1847097 - DNA, 15 bp, Homo sapiens
tcttcttagtgctgc

SEQ ID NO: 1847098 - DNA, 15 bp, Homo sapiens
cttcttagtgctgca

SEQ ID NO: 1847099 - DNA, 15 bp, Homo sapiens
ttcttagtgctgcaa

SEQ ID NO: 1847100 - DNA, 15 bp, Homo sapiens
tcttagtgctgcaaa

SEQ ID NO: 1847101 - DNA, 15 bp, Homo sapiens
cttagtgctgcaaag

SEQ ID NO: 1847102 - DNA, 15 bp, Homo sapiens
ttagtgctgcaaaga

SEQ ID NO: 1847103 - DNA, 15 bp, Homo sapiens
tagtgctgcaaagat

SEQ ID NO: 1847104 - DNA, 15 bp, Homo sapiens
agtgctgcaaagatc

SEQ ID NO: 1847105 - DNA, 15 bp, Homo sapiens
gtgctgcaaagatct

SEQ ID NO: 1847106 - DNA, 15 bp, Homo sapiens
tgctgcaaagatctg

SEQ ID NO: 1847107 - DNA, 15 bp, Homo sapiens
gctgcaaagatctgg

SEQ ID NO: 1847108 - DNA, 15 bp, Homo sapiens
ctgcaaagatctgga

SEQ ID NO: 1847109 - DNA, 15 bp, Homo sapiens
tgcaaagatctggag

SEQ ID NO: 1847110 - DNA, 15 bp, Homo sapiens
gcaaagatctggagg

SEQ ID NO: 1847111 - DNA, 15 bp, Homo sapiens
caaagatctggagga

SEQ ID NO: 1847112 - DNA, 15 bp, Homo sapiens
aaagatctggaggaa

SEQ ID NO: 1847113 - DNA, 15 bp, Homo sapiens
aagatctggaggaac

SEQ ID NO: 1847114 - DNA, 15 bp, Homo sapiens
agatctggaggaacg

SEQ ID NO: 1847115 - DNA, 15 bp, Homo sapiens
gatctggaggaacga

SEQ ID NO: 1847116 - DNA, 15 bp, Homo sapiens
atctggaggaacgaa

SEQ ID NO: 1847117 - DNA, 15 bp, Homo sapiens
tctggaggaacgaat

SEQ ID NO: 1847118 - DNA, 15 bp, Homo sapiens
ctggaggaacgaatg

SEQ ID NO: 1847119 - DNA, 15 bp, Homo sapiens
tggaggaacgaatga

SEQ ID NO: 1847120 - DNA, 15 bp, Homo sapiens
ggaggaacgaatgac

SEQ ID NO: 1847121 - DNA, 15 bp, Homo sapiens
gaggaacgaatgacc

SEQ ID NO: 1847122 - DNA, 15 bp, Homo sapiens
aggaacgaatgacca

SEQ ID NO: 1847123 - DNA, 15 bp, Homo sapiens
ggaacgaatgaccag

SEQ ID NO: 1847124 - DNA, 15 bp, Homo sapiens
gaacgaatgaccagc

SEQ ID NO: 1847125 - DNA, 15 bp, Homo sapiens
aacgaatgaccagcc

SEQ ID NO: 1847126 - DNA, 15 bp, Homo sapiens
acgaatgaccagccg

SEQ ID NO: 1847127 - DNA, 15 bp, Homo sapiens
cgaatgaccagccgg

SEQ ID NO: 1847128 - DNA, 15 bp, Homo sapiens
gaatgaccagccggg

SEQ ID NO: 1847129 - DNA, 15 bp, Homo sapiens
aatgaccagccgggg

SEQ ID NO: 1847130 - DNA, 15 bp, Homo sapiens
atgaccagccggggc

SEQ ID NO: 1847131 - DNA, 15 bp, Homo sapiens
tgaccagccggggca

SEQ ID NO: 1847132 - DNA, 15 bp, Homo sapiens
gaccagccggggcac

SEQ ID NO: 1847133 - DNA, 15 bp, Homo sapiens
accagccggggcaca

SEQ ID NO: 1847134 - DNA, 15 bp, Homo sapiens
ccagccggggcacag

SEQ ID NO: 1847135 - DNA, 15 bp, Homo sapiens
cagccggggcacagg

SEQ ID NO: 1847136 - DNA, 15 bp, Homo sapiens
agccggggcacaggg

SEQ ID NO: 1847137 - DNA, 15 bp, Homo sapiens
gccggggcacagggg

SEQ ID NO: 1847138 - DNA, 15 bp, Homo sapiens
ccggggcacaggggc

SEQ ID NO: 1847139 - DNA, 15 bp, Homo sapiens
cggggcacaggggcg

SEQ ID NO: 1847140 - DNA, 15 bp, Homo sapiens
ggggcacaggggcga

SEQ ID NO: 1847141 - DNA, 15 bp, Homo sapiens
gggcacaggggcgag

SEQ ID NO: 1847142 - DNA, 15 bp, Homo sapiens
ggcacaggggcgagg

SEQ ID NO: 1847143 - DNA, 15 bp, Homo sapiens
gcacaggggcgaggg

SEQ ID NO: 1847144 - DNA, 15 bp, Homo sapiens
cacaggggcgagggc

SEQ ID NO: 1847145 - DNA, 15 bp, Homo sapiens
acaggggcgagggct

SEQ ID NO: 1847146 - DNA, 15 bp, Homo sapiens
caggggcgagggctt

SEQ ID NO: 1847147 - DNA, 15 bp, Homo sapiens
aggggcgagggctta

SEQ ID NO: 1847148 - DNA, 15 bp, Homo sapiens
ggggcgagggcttag

SEQ ID NO: 1847149 - DNA, 15 bp, Homo sapiens
gggcgagggcttagg

SEQ ID NO: 1847150 - DNA, 15 bp, Homo sapiens
ggcgagggcttaggc

SEQ ID NO: 1847151 - DNA, 15 bp, Homo sapiens
gcgagggcttaggct

SEQ ID NO: 1847152 - DNA, 15 bp, Homo sapiens
cgagggcttaggctt

SEQ ID NO: 1847153 - DNA, 15 bp, Homo sapiens
gagggcttaggcttc

SEQ ID NO: 1847154 - DNA, 15 bp, Homo sapiens
agggcttaggcttct

SEQ ID NO: 1847155 - DNA, 15 bp, Homo sapiens
gggcttaggcttctg

SEQ ID NO: 1847156 - DNA, 15 bp, Homo sapiens
ggcttaggcttctgg

SEQ ID NO: 1847157 - DNA, 15 bp, Homo sapiens
gcttaggcttctggg

SEQ ID NO: 1847158 - DNA, 15 bp, Homo sapiens
cttaggcttctgggg

SEQ ID NO: 1847159 - DNA, 15 bp, Homo sapiens
ttaggcttctggggt

SEQ ID NO: 1847160 - DNA, 15 bp, Homo sapiens
taggcttctggggtc

SEQ ID NO: 1847161 - DNA, 15 bp, Homo sapiens
aggcttctggggtcc

SEQ ID NO: 1847162 - DNA, 15 bp, Homo sapiens
ggcttctggggtccg

SEQ ID NO: 1847163 - DNA, 15 bp, Homo sapiens
gcttctggggtccgg

SEQ ID NO: 1847164 - DNA, 15 bp, Homo sapiens
cttctggggtccggt

SEQ ID NO: 1847165 - DNA, 15 bp, Homo sapiens
ttctggggtccggtt

SEQ ID NO: 1847166 - DNA, 15 bp, Homo sapiens
tctggggtccggtta

SEQ ID NO: 1847167 - DNA, 15 bp, Homo sapiens
ctggggtccggttac

SEQ ID NO: 1847168 - DNA, 15 bp, Homo sapiens
tggggtccggttaca

SEQ ID NO: 1847169 - DNA, 15 bp, Homo sapiens
ggggtccggttacaa

SEQ ID NO: 1847170 - DNA, 15 bp, Homo sapiens
gggtccggttacaaa

SEQ ID NO: 1847171 - DNA, 15 bp, Homo sapiens
ggtccggttacaaac

SEQ ID NO: 1847172 - DNA, 15 bp, Homo sapiens
gtccggttacaaact

SEQ ID NO: 1847173 - DNA, 15 bp, Homo sapiens
tccggttacaaactg

SEQ ID NO: 1847174 - DNA, 15 bp, Homo sapiens
ccggttacaaactgt

SEQ ID NO: 1847175 - DNA, 15 bp, Homo sapiens
cggttacaaactgtg

SEQ ID NO: 1847176 - DNA, 15 bp, Homo sapiens
ggttacaaactgtga

SEQ ID NO: 1847177 - DNA, 15 bp, Homo sapiens
gttacaaactgtgac

SEQ ID NO: 1847178 - DNA, 15 bp, Homo sapiens
ttacaaactgtgaca

SEQ ID NO: 1847179 - DNA, 15 bp, Homo sapiens
tacaaactgtgacac

SEQ ID NO: 1847180 - DNA, 15 bp, Homo sapiens
acaaactgtgacacc

SEQ ID NO: 1847181 - DNA, 15 bp, Homo sapiens
caaactgtgacacct

SEQ ID NO: 1847182 - DNA, 15 bp, Homo sapiens
aaactgtgacacctt

SEQ ID NO: 1847183 - DNA, 15 bp, Homo sapiens
aactgtgacaccttg

SEQ ID NO: 1847184 - DNA, 15 bp, Homo sapiens
actgtgacaccttgg

SEQ ID NO: 1847185 - DNA, 15 bp, Homo sapiens
ctgtgacaccttggc

SEQ ID NO: 1847186 - DNA, 15 bp, Homo sapiens
tgtgacaccttggcc

SEQ ID NO: 1847187 - DNA, 15 bp, Homo sapiens
gtgacaccttggcca

SEQ ID NO: 1847188 - DNA, 15 bp, Homo sapiens
tgacaccttggccac

SEQ ID NO: 1847189 - DNA, 15 bp, Homo sapiens
gacaccttggccacc

SEQ ID NO: 1847190 - DNA, 15 bp, Homo sapiens
acaccttggccacct

SEQ ID NO: 1847191 - DNA, 15 bp, Homo sapiens
caccttggccacctg

SEQ ID NO: 1847192 - DNA, 15 bp, Homo sapiens
accttggccacctgg

SEQ ID NO: 1847193 - DNA, 15 bp, Homo sapiens
ccttggccacctggg

SEQ ID NO: 1847194 - DNA, 15 bp, Homo sapiens
cttggccacctgggt

SEQ ID NO: 1847195 - DNA, 15 bp, Homo sapiens
ttggccacctgggtt

SEQ ID NO: 1847196 - DNA, 15 bp, Homo sapiens
tggccacctgggttt

SEQ ID NO: 1847197 - DNA, 15 bp, Homo sapiens
ggccacctgggttta

SEQ ID NO: 1847198 - DNA, 15 bp, Homo sapiens
gccacctgggtttac

SEQ ID NO: 1847199 - DNA, 15 bp, Homo sapiens
ccacctgggtttacc

SEQ ID NO: 1847200 - DNA, 15 bp, Homo sapiens
cacctgggtttacct

SEQ ID NO: 1847201 - DNA, 15 bp, Homo sapiens
acctgggtttacctg

SEQ ID NO: 1847202 - DNA, 15 bp, Homo sapiens
cctgggtttacctgt

SEQ ID NO: 1847203 - DNA, 15 bp, Homo sapiens
ctgggtttacctgtg

SEQ ID NO: 1847204 - DNA, 15 bp, Homo sapiens
tgggtttacctgtgt

SEQ ID NO: 1847205 - DNA, 15 bp, Homo sapiens
gggtttacctgtgtg

SEQ ID NO: 1847206 - DNA, 15 bp, Homo sapiens
ggtttacctgtgtga

SEQ ID NO: 1847207 - DNA, 15 bp, Homo sapiens
gtttacctgtgtgag

SEQ ID NO: 1847208 - DNA, 15 bp, Homo sapiens
tttacctgtgtgagt

SEQ ID NO: 1847209 - DNA, 15 bp, Homo sapiens
ttacctgtgtgagtc

SEQ ID NO: 1847210 - DNA, 15 bp, Homo sapiens
tacctgtgtgagtcc

SEQ ID NO: 1847211 - DNA, 15 bp, Homo sapiens
acctgtgtgagtcct

SEQ ID NO: 1847212 - DNA, 15 bp, Homo sapiens
cctgtgtgagtcctg

SEQ ID NO: 1847213 - DNA, 15 bp, Homo sapiens
ctgtgtgagtcctgg

SEQ ID NO: 1847214 - DNA, 15 bp, Homo sapiens
tgtgtgagtcctggt

SEQ ID NO: 1847215 - DNA, 15 bp, Homo sapiens
gtgtgagtcctggtc

SEQ ID NO: 1847216 - DNA, 15 bp, Homo sapiens
tgtgagtcctggtct

SEQ ID NO: 1847217 - DNA, 15 bp, Homo sapiens
gtgagtcctggtctc

SEQ ID NO: 1847218 - DNA, 15 bp, Homo sapiens
tgagtcctggtctct

SEQ ID NO: 1847219 - DNA, 15 bp, Homo sapiens
gagtcctggtctcta

SEQ ID NO: 1847220 - DNA, 15 bp, Homo sapiens
agtcctggtctctat

SEQ ID NO: 1847221 - DNA, 15 bp, Homo sapiens
gtcctggtctctata

SEQ ID NO: 1847222 - DNA, 15 bp, Homo sapiens
tcctggtctctatat

SEQ ID NO: 1847223 - DNA, 15 bp, Homo sapiens
cctggtctctatatc

SEQ ID NO: 1847224 - DNA, 15 bp, Homo sapiens
ctggtctctatatcc

SEQ ID NO: 1847225 - DNA, 15 bp, Homo sapiens
tggtctctatatccc

SEQ ID NO: 1847226 - DNA, 15 bp, Homo sapiens
ggtctctatatccct

SEQ ID NO: 1847227 - DNA, 15 bp, Homo sapiens
gtctctatatccctc

SEQ ID NO: 1847228 - DNA, 15 bp, Homo sapiens
tctctatatccctca

SEQ ID NO: 1847229 - DNA, 15 bp, Homo sapiens
ctctatatccctcag

SEQ ID NO: 1847230 - DNA, 15 bp, Homo sapiens
tctatatccctcaga

SEQ ID NO: 1847231 - DNA, 15 bp, Homo sapiens
ctatatccctcagat

SEQ ID NO: 1847232 - DNA, 15 bp, Homo sapiens
tatatccctcagatg

SEQ ID NO: 1847233 - DNA, 15 bp, Homo sapiens
atatccctcagatgg

SEQ ID NO: 1847234 - DNA, 15 bp, Homo sapiens
tatccctcagatggg

SEQ ID NO: 1847235 - DNA, 15 bp, Homo sapiens
atccctcagatgggc

SEQ ID NO: 1847236 - DNA, 15 bp, Homo sapiens
tccctcagatgggca

SEQ ID NO: 1847237 - DNA, 15 bp, Homo sapiens
ccctcagatgggcac

SEQ ID NO: 1847238 - DNA, 15 bp, Homo sapiens
cctcagatgggcaca

SEQ ID NO: 1847239 - DNA, 15 bp, Homo sapiens
ctcagatgggcacag

SEQ ID NO: 1847240 - DNA, 15 bp, Homo sapiens
tcagatgggcacagt

SEQ ID NO: 1847241 - DNA, 15 bp, Homo sapiens
cagatgggcacagta

SEQ ID NO: 1847242 - DNA, 15 bp, Homo sapiens
agatgggcacagtaa

SEQ ID NO: 1847243 - DNA, 15 bp, Homo sapiens
gatgggcacagtaag

SEQ ID NO: 1847244 - DNA, 15 bp, Homo sapiens
atgggcacagtaaga

SEQ ID NO: 1847245 - DNA, 15 bp, Homo sapiens
tgggcacagtaagac

SEQ ID NO: 1847246 - DNA, 15 bp, Homo sapiens
gggcacagtaagacc

SEQ ID NO: 1847247 - DNA, 15 bp, Homo sapiens
ggcacagtaagacct

SEQ ID NO: 1847248 - DNA, 15 bp, Homo sapiens
gcacagtaagacctg

SEQ ID NO: 1847249 - DNA, 15 bp, Homo sapiens
cacagtaagacctgc

SEQ ID NO: 1847250 - DNA, 15 bp, Homo sapiens
acagtaagacctgcc

SEQ ID NO: 1847251 - DNA, 15 bp, Homo sapiens
cagtaagacctgcct

SEQ ID NO: 1847252 - DNA, 15 bp, Homo sapiens
agtaagacctgcctc

SEQ ID NO: 1847253 - DNA, 15 bp, Homo sapiens
gtaagacctgcctca

SEQ ID NO: 1847254 - DNA, 15 bp, Homo sapiens
taagacctgcctcag

SEQ ID NO: 1847255 - DNA, 15 bp, Homo sapiens
aagacctgcctcaga

SEQ ID NO: 1847256 - DNA, 15 bp, Homo sapiens
agacctgcctcagag

SEQ ID NO: 1847257 - DNA, 15 bp, Homo sapiens
gacctgcctcagaga

SEQ ID NO: 1847258 - DNA, 15 bp, Homo sapiens
acctgcctcagagac

SEQ ID NO: 1847259 - DNA, 15 bp, Homo sapiens
cctgcctcagagaca

SEQ ID NO: 1847260 - DNA, 15 bp, Homo sapiens
ctgcctcagagacat

SEQ ID NO: 1847261 - DNA, 15 bp, Homo sapiens
tgcctcagagacatg

SEQ ID NO: 1847262 - DNA, 15 bp, Homo sapiens
gcctcagagacatgg

SEQ ID NO: 1847263 - DNA, 15 bp, Homo sapiens
cctcagagacatggg

SEQ ID NO: 1847264 - DNA, 15 bp, Homo sapiens
ctcagagacatgggg

SEQ ID NO: 1847265 - DNA, 15 bp, Homo sapiens
tcagagacatgggga

SEQ ID NO: 1847266 - DNA, 15 bp, Homo sapiens
cagagacatggggag

SEQ ID NO: 1847267 - DNA, 15 bp, Homo sapiens
agagacatggggagg

SEQ ID NO: 1847268 - DNA, 15 bp, Homo sapiens
gagacatggggagga

SEQ ID NO: 1847269 - DNA, 15 bp, Homo sapiens
agacatggggaggat

SEQ ID NO: 1847270 - DNA, 15 bp, Homo sapiens
gacatggggaggatt

SEQ ID NO: 1847271 - DNA, 15 bp, Homo sapiens
acatggggaggattt

SEQ ID NO: 1847272 - DNA, 15 bp, Homo sapiens
catggggaggattta

SEQ ID NO: 1847273 - DNA, 15 bp, Homo sapiens
atggggaggatttaa

SEQ ID NO: 1847274 - DNA, 15 bp, Homo sapiens
tggggaggatttaat

SEQ ID NO: 1847275 - DNA, 15 bp, Homo sapiens
ggggaggatttaatg

SEQ ID NO: 1847276 - DNA, 15 bp, Homo sapiens
gggaggatttaatga

SEQ ID NO: 1847277 - DNA, 15 bp, Homo sapiens
ggaggatttaatgag

SEQ ID NO: 1847278 - DNA, 15 bp, Homo sapiens
gaggatttaatgaga

SEQ ID NO: 1847279 - DNA, 15 bp, Homo sapiens
aggatttaatgagac

SEQ ID NO: 1847280 - DNA, 15 bp, Homo sapiens
ggatttaatgagaca

SEQ ID NO: 1847281 - DNA, 15 bp, Homo sapiens
gatttaatgagacaa

SEQ ID NO: 1847282 - DNA, 15 bp, Homo sapiens
atttaatgagacaat

SEQ ID NO: 1847283 - DNA, 15 bp, Homo sapiens
tttaatgagacaatg

SEQ ID NO: 1847284 - DNA, 15 bp, Homo sapiens
ttaatgagacaatgt

SEQ ID NO: 1847285 - DNA, 15 bp, Homo sapiens
taatgagacaatgtg

SEQ ID NO: 1847286 - DNA, 15 bp, Homo sapiens
aatgagacaatgtgt

SEQ ID NO: 1847287 - DNA, 15 bp, Homo sapiens
atgagacaatgtgta

SEQ ID NO: 1847288 - DNA, 15 bp, Homo sapiens
tgagacaatgtgtat

SEQ ID NO: 1847289 - DNA, 15 bp, Homo sapiens
gagacaatgtgtata

SEQ ID NO: 1847290 - DNA, 15 bp, Homo sapiens
agacaatgtgtatag

SEQ ID NO: 1847291 - DNA, 15 bp, Homo sapiens
gacaatgtgtatagc

SEQ ID NO: 1847292 - DNA, 15 bp, Homo sapiens
acaatgtgtatagca

SEQ ID NO: 1847293 - DNA, 15 bp, Homo sapiens
caatgtgtatagcac

SEQ ID NO: 1847294 - DNA, 15 bp, Homo sapiens
aatgtgtatagcaca

SEQ ID NO: 1847295 - DNA, 15 bp, Homo sapiens
atgtgtatagcacat

SEQ ID NO: 1847296 - DNA, 15 bp, Homo sapiens
tgtgtatagcacatt

SEQ ID NO: 1847297 - DNA, 15 bp, Homo sapiens
gtgtatagcacattg

SEQ ID NO: 1847298 - DNA, 15 bp, Homo sapiens
tgtatagcacattgc

SEQ ID NO: 1847299 - DNA, 15 bp, Homo sapiens
gtatagcacattgcc

SEQ ID NO: 1847300 - DNA, 15 bp, Homo sapiens
tatagcacattgcct

SEQ ID NO: 1847301 - DNA, 15 bp, Homo sapiens
atagcacattgcctg

SEQ ID NO: 1847302 - DNA, 15 bp, Homo sapiens
tagcacattgcctga

SEQ ID NO: 1847303 - DNA, 15 bp, Homo sapiens
agcacattgcctgac

SEQ ID NO: 1847304 - DNA, 15 bp, Homo sapiens
gcacattgcctgacg

SEQ ID NO: 1847305 - DNA, 15 bp, Homo sapiens
cacattgcctgacga

SEQ ID NO: 1847306 - DNA, 15 bp, Homo sapiens
acattgcctgacgaa

SEQ ID NO: 1847307 - DNA, 15 bp, Homo sapiens
cattgcctgacgaag

SEQ ID NO: 1847308 - DNA, 15 bp, Homo sapiens
attgcctgacgaagg

SEQ ID NO: 1847309 - DNA, 15 bp, Homo sapiens
ttgcctgacgaaggg

SEQ ID NO: 1847310 - DNA, 15 bp, Homo sapiens
tgcctgacgaagggg

SEQ ID NO: 1847311 - DNA, 15 bp, Homo sapiens
gcctgacgaagggga

SEQ ID NO: 1847312 - DNA, 15 bp, Homo sapiens
cctgacgaaggggaa

SEQ ID NO: 1847313 - DNA, 15 bp, Homo sapiens
ctgacgaaggggaaa

SEQ ID NO: 1847314 - DNA, 15 bp, Homo sapiens
tgacgaaggggaaaa

SEQ ID NO: 1847315 - DNA, 15 bp, Homo sapiens
gacgaaggggaaaaa

SEQ ID NO: 1847316 - DNA, 15 bp, Homo sapiens
acgaaggggaaaaac

SEQ ID NO: 1847317 - DNA, 15 bp, Homo sapiens
cgaaggggaaaaacc

SEQ ID NO: 1847318 - DNA, 15 bp, Homo sapiens
gaaggggaaaaacct

SEQ ID NO: 1847319 - DNA, 15 bp, Homo sapiens
aaggggaaaaacctc

SEQ ID NO: 1847320 - DNA, 15 bp, Homo sapiens
aggggaaaaacctca

SEQ ID NO: 1847321 - DNA, 15 bp, Homo sapiens
ggggaaaaacctcac

SEQ ID NO: 1847322 - DNA, 15 bp, Homo sapiens
gggaaaaacctcact

SEQ ID NO: 1847323 - DNA, 15 bp, Homo sapiens
ggaaaaacctcactg

SEQ ID NO: 1847324 - DNA, 15 bp, Homo sapiens
gaaaaacctcactgt

SEQ ID NO: 1847325 - DNA, 15 bp, Homo sapiens
aaaaacctcactgtg

SEQ ID NO: 1847326 - DNA, 15 bp, Homo sapiens
aaaacctcactgtga

SEQ ID NO: 1847327 - DNA, 15 bp, Homo sapiens
aaacctcactgtgat

SEQ ID NO: 1847328 - DNA, 15 bp, Homo sapiens
aacctcactgtgata

SEQ ID NO: 1847329 - DNA, 15 bp, Homo sapiens
acctcactgtgatag

SEQ ID NO: 1847330 - DNA, 15 bp, Homo sapiens
cctcactgtgatagt

SEQ ID NO: 1847331 - DNA, 15 bp, Homo sapiens
ctcactgtgatagtt

SEQ ID NO: 1847332 - DNA, 15 bp, Homo sapiens
tcactgtgatagtta

SEQ ID NO: 1847333 - DNA, 15 bp, Homo sapiens
cactgtgatagttaa

SEQ ID NO: 1847334 - DNA, 15 bp, Homo sapiens
actgtgatagttaat

SEQ ID NO: 1847335 - DNA, 15 bp, Homo sapiens
ctgtgatagttaatt

SEQ ID NO: 1847336 - DNA, 15 bp, Homo sapiens
tgtgatagttaattt

SEQ ID NO: 1847337 - DNA, 15 bp, Homo sapiens
gtgatagttaattta

SEQ ID NO: 1847338 - DNA, 15 bp, Homo sapiens
tgatagttaatttat

SEQ ID NO: 1847339 - DNA, 15 bp, Homo sapiens
gatagttaatttatt

SEQ ID NO: 1847340 - DNA, 15 bp, Homo sapiens
atagttaatttattg

SEQ ID NO: 1847341 - DNA, 15 bp, Homo sapiens
tagttaatttattgt

SEQ ID NO: 1847342 - DNA, 15 bp, Homo sapiens
agttaatttattgtc

SEQ ID NO: 1847343 - DNA, 15 bp, Homo sapiens
gttaatttattgtca

SEQ ID NO: 1847344 - DNA, 15 bp, Homo sapiens
ttaatttattgtcat

SEQ ID NO: 1847345 - DNA, 15 bp, Homo sapiens
taatttattgtcatt

SEQ ID NO: 1847346 - DNA, 15 bp, Homo sapiens
aatttattgtcattg

SEQ ID NO: 1847347 - DNA, 15 bp, Homo sapiens
atttattgtcattgg

SEQ ID NO: 1847348 - DNA, 15 bp, Homo sapiens
tttattgtcattggc

SEQ ID NO: 1847349 - DNA, 15 bp, Homo sapiens
ttattgtcattggct

SEQ ID NO: 1847350 - DNA, 15 bp, Homo sapiens
tattgtcattggctg

SEQ ID NO: 1847351 - DNA, 15 bp, Homo sapiens
attgtcattggctgc

SEQ ID NO: 1847352 - DNA, 15 bp, Homo sapiens
ttgtcattggctgca

SEQ ID NO: 1847353 - DNA, 15 bp, Homo sapiens
tgtcattggctgcag

SEQ ID NO: 1847354 - DNA, 15 bp, Homo sapiens
gtcattggctgcagg

SEQ ID NO: 1847355 - DNA, 15 bp, Homo sapiens
tcattggctgcaggg

SEQ ID NO: 1847356 - DNA, 15 bp, Homo sapiens
cattggctgcagggg

SEQ ID NO: 1847357 - DNA, 15 bp, Homo sapiens
attggctgcaggggc

SEQ ID NO: 1847358 - DNA, 15 bp, Homo sapiens
ttggctgcaggggcc

SEQ ID NO: 1847359 - DNA, 15 bp, Homo sapiens
tggctgcaggggcca

SEQ ID NO: 1847360 - DNA, 15 bp, Homo sapiens
ggctgcaggggccag

SEQ ID NO: 1847361 - DNA, 15 bp, Homo sapiens
gctgcaggggccaga

SEQ ID NO: 1847362 - DNA, 15 bp, Homo sapiens
ctgcaggggccagag

SEQ ID NO: 1847363 - DNA, 15 bp, Homo sapiens
tgcaggggccagaga

SEQ ID NO: 1847364 - DNA, 15 bp, Homo sapiens
gcaggggccagagag

SEQ ID NO: 1847365 - DNA, 15 bp, Homo sapiens
caggggccagagagt

SEQ ID NO: 1847366 - DNA, 15 bp, Homo sapiens
aggggccagagagtc

SEQ ID NO: 1847367 - DNA, 15 bp, Homo sapiens
ggggccagagagtct

SEQ ID NO: 1847368 - DNA, 15 bp, Homo sapiens
gggccagagagtctt

SEQ ID NO: 1847369 - DNA, 15 bp, Homo sapiens
ggccagagagtcttt

SEQ ID NO: 1847370 - DNA, 15 bp, Homo sapiens
gccagagagtctttg

SEQ ID NO: 1847371 - DNA, 15 bp, Homo sapiens
ccagagagtctttgg

SEQ ID NO: 1847372 - DNA, 15 bp, Homo sapiens
cagagagtctttggg

SEQ ID NO: 1847373 - DNA, 15 bp, Homo sapiens
agagagtctttgggg

SEQ ID NO: 1847374 - DNA, 15 bp, Homo sapiens
gagagtctttgggga

SEQ ID NO: 1847375 - DNA, 15 bp, Homo sapiens
agagtctttggggag

SEQ ID NO: 1847376 - DNA, 15 bp, Homo sapiens
gagtctttggggagg

SEQ ID NO: 1847377 - DNA, 15 bp, Homo sapiens
agtctttggggaggc

SEQ ID NO: 1847378 - DNA, 15 bp, Homo sapiens
gtctttggggaggct

SEQ ID NO: 1847379 - DNA, 15 bp, Homo sapiens
tctttggggaggctc

SEQ ID NO: 1847380 - DNA, 15 bp, Homo sapiens
ctttggggaggctct

SEQ ID NO: 1847381 - DNA, 15 bp, Homo sapiens
tttggggaggctctg

SEQ ID NO: 1847382 - DNA, 15 bp, Homo sapiens
ttggggaggctctgc

SEQ ID NO: 1847383 - DNA, 15 bp, Homo sapiens
tggggaggctctgct

SEQ ID NO: 1847384 - DNA, 15 bp, Homo sapiens
ggggaggctctgctg

SEQ ID NO: 1847385 - DNA, 15 bp, Homo sapiens
gggaggctctgctgg

SEQ ID NO: 1847386 - DNA, 15 bp, Homo sapiens
ggaggctctgctggt

SEQ ID NO: 1847387 - DNA, 15 bp, Homo sapiens
gaggctctgctggta

SEQ ID NO: 1847388 - DNA, 15 bp, Homo sapiens
aggctctgctggtaa

SEQ ID NO: 1847389 - DNA, 15 bp, Homo sapiens
ggctctgctggtaaa

SEQ ID NO: 1847390 - DNA, 15 bp, Homo sapiens
gctctgctggtaaag

SEQ ID NO: 1847391 - DNA, 15 bp, Homo sapiens
ctctgctggtaaagg

SEQ ID NO: 1847392 - DNA, 15 bp, Homo sapiens
tctgctggtaaaggc

SEQ ID NO: 1847393 - DNA, 15 bp, Homo sapiens
ctgctggtaaaggct

SEQ ID NO: 1847394 - DNA, 15 bp, Homo sapiens
tgctggtaaaggctg

SEQ ID NO: 1847395 - DNA, 15 bp, Homo sapiens
gctggtaaaggctga

SEQ ID NO: 1847396 - DNA, 15 bp, Homo sapiens
ctggtaaaggctgag

SEQ ID NO: 1847397 - DNA, 15 bp, Homo sapiens
tggtaaaggctgagc

SEQ ID NO: 1847398 - DNA, 15 bp, Homo sapiens
ggtaaaggctgagcc

SEQ ID NO: 1847399 - DNA, 15 bp, Homo sapiens
gtaaaggctgagcct

SEQ ID NO: 1847400 - DNA, 15 bp, Homo sapiens
taaaggctgagccta

SEQ ID NO: 1847401 - DNA, 15 bp, Homo sapiens
aaaggctgagcctag

SEQ ID NO: 1847402 - DNA, 15 bp, Homo sapiens
aaggctgagcctagc

SEQ ID NO: 1847403 - DNA, 15 bp, Homo sapiens
aggctgagcctagcc

SEQ ID NO: 1847404 - DNA, 15 bp, Homo sapiens
ggctgagcctagcct

SEQ ID NO: 1847405 - DNA, 15 bp, Homo sapiens
gctgagcctagcctt

SEQ ID NO: 1847406 - DNA, 15 bp, Homo sapiens
ctgagcctagccttg

SEQ ID NO: 1847407 - DNA, 15 bp, Homo sapiens
tgagcctagccttgt

SEQ ID NO: 1847408 - DNA, 15 bp, Homo sapiens
gagcctagccttgta

SEQ ID NO: 1847409 - DNA, 15 bp, Homo sapiens
agcctagccttgtat

SEQ ID NO: 1847410 - DNA, 15 bp, Homo sapiens
gcctagccttgtatt

SEQ ID NO: 1847411 - DNA, 15 bp, Homo sapiens
cctagccttgtattg

SEQ ID NO: 1847412 - DNA, 15 bp, Homo sapiens
ctagccttgtattgc

SEQ ID NO: 1847413 - DNA, 15 bp, Homo sapiens
tagccttgtattgct

SEQ ID NO: 1847414 - DNA, 15 bp, Homo sapiens
agccttgtattgctc

SEQ ID NO: 1847415 - DNA, 15 bp, Homo sapiens
gccttgtattgctca

SEQ ID NO: 1847416 - DNA, 15 bp, Homo sapiens
ccttgtattgctcat

SEQ ID NO: 1847417 - DNA, 15 bp, Homo sapiens
cttgtattgctcatc

SEQ ID NO: 1847418 - DNA, 15 bp, Homo sapiens
ttgtattgctcatct

SEQ ID NO: 1847419 - DNA, 15 bp, Homo sapiens
tgtattgctcatctt

SEQ ID NO: 1847420 - DNA, 15 bp, Homo sapiens
gtattgctcatcttt

SEQ ID NO: 1847421 - DNA, 15 bp, Homo sapiens
tattgctcatctttt

SEQ ID NO: 1847422 - DNA, 15 bp, Homo sapiens
attgctcatcttttg

SEQ ID NO: 1847423 - DNA, 15 bp, Homo sapiens
ttgctcatcttttgg

SEQ ID NO: 1847424 - DNA, 15 bp, Homo sapiens
tgctcatcttttgga

SEQ ID NO: 1847425 - DNA, 15 bp, Homo sapiens
gctcatcttttggat

SEQ ID NO: 1847426 - DNA, 15 bp, Homo sapiens
ctcatcttttggata

SEQ ID NO: 1847427 - DNA, 15 bp, Homo sapiens
tcatcttttggataa

SEQ ID NO: 1847428 - DNA, 15 bp, Homo sapiens
catcttttggataag

SEQ ID NO: 1847429 - DNA, 15 bp, Homo sapiens
atcttttggataagg

SEQ ID NO: 1847430 - DNA, 15 bp, Homo sapiens
tcttttggataaggt

SEQ ID NO: 1847431 - DNA, 15 bp, Homo sapiens
cttttggataaggta

SEQ ID NO: 1847432 - DNA, 15 bp, Homo sapiens
ttttggataaggtaa

SEQ ID NO: 1847433 - DNA, 15 bp, Homo sapiens
tttggataaggtaag

SEQ ID NO: 1847434 - DNA, 15 bp, Homo sapiens
ttggataaggtaagg

SEQ ID NO: 1847435 - DNA, 15 bp, Homo sapiens
tggataaggtaagga

SEQ ID NO: 1847436 - DNA, 15 bp, Homo sapiens
ggataaggtaaggat

SEQ ID NO: 1847437 - DNA, 15 bp, Homo sapiens
gataaggtaaggatg

SEQ ID NO: 1847438 - DNA, 15 bp, Homo sapiens
ataaggtaaggatgg

SEQ ID NO: 1847439 - DNA, 15 bp, Homo sapiens
taaggtaaggatgga

SEQ ID NO: 1847440 - DNA, 15 bp, Homo sapiens
aaggtaaggatggaa

SEQ ID NO: 1847441 - DNA, 15 bp, Homo sapiens
aggtaaggatggaac

SEQ ID NO: 1847442 - DNA, 15 bp, Homo sapiens
ggtaaggatggaacc

SEQ ID NO: 1847443 - DNA, 15 bp, Homo sapiens
gtaaggatggaacct

SEQ ID NO: 1847444 - DNA, 15 bp, Homo sapiens
taaggatggaacctt

SEQ ID NO: 1847445 - DNA, 15 bp, Homo sapiens
aaggatggaaccttt

SEQ ID NO: 1847446 - DNA, 15 bp, Homo sapiens
aggatggaacctttg

SEQ ID NO: 1847447 - DNA, 15 bp, Homo sapiens
ggatggaacctttgt

SEQ ID NO: 1847448 - DNA, 15 bp, Homo sapiens
gatggaacctttgtg

SEQ ID NO: 1847449 - DNA, 15 bp, Homo sapiens
atggaacctttgtga

SEQ ID NO: 1847450 - DNA, 15 bp, Homo sapiens
tggaacctttgtgaa

SEQ ID NO: 1847451 - DNA, 15 bp, Homo sapiens
ggaacctttgtgaag

SEQ ID NO: 1847452 - DNA, 15 bp, Homo sapiens
gaacctttgtgaaga

SEQ ID NO: 1847453 - DNA, 15 bp, Homo sapiens
aacctttgtgaagag

SEQ ID NO: 1847454 - DNA, 15 bp, Homo sapiens
acctttgtgaagagg

SEQ ID NO: 1847455 - DNA, 15 bp, Homo sapiens
cctttgtgaagagga

SEQ ID NO: 1847456 - DNA, 15 bp, Homo sapiens
ctttgtgaagaggaa

SEQ ID NO: 1847457 - DNA, 15 bp, Homo sapiens
tttgtgaagaggaag

SEQ ID NO: 1847458 - DNA, 15 bp, Homo sapiens
ttgtgaagaggaaga

SEQ ID NO: 1847459 - DNA, 15 bp, Homo sapiens
tgtgaagaggaagac

SEQ ID NO: 1847460 - DNA, 15 bp, Homo sapiens
gtgaagaggaagact

SEQ ID NO: 1847461 - DNA, 15 bp, Homo sapiens
tgaagaggaagactg

SEQ ID NO: 1847462 - DNA, 15 bp, Homo sapiens
gaagaggaagactgg

SEQ ID NO: 1847463 - DNA, 15 bp, Homo sapiens
aagaggaagactgga

SEQ ID NO: 1847464 - DNA, 15 bp, Homo sapiens
agaggaagactggac

SEQ ID NO: 1847465 - DNA, 15 bp, Homo sapiens
gaggaagactggaca

SEQ ID NO: 1847466 - DNA, 15 bp, Homo sapiens
aggaagactggacac

SEQ ID NO: 1847467 - DNA, 15 bp, Homo sapiens
ggaagactggacacc

SEQ ID NO: 1847468 - DNA, 15 bp, Homo sapiens
gaagactggacacct

SEQ ID NO: 1847469 - DNA, 15 bp, Homo sapiens
aagactggacacctc

SEQ ID NO: 1847470 - DNA, 15 bp, Homo sapiens
agactggacacctcc

SEQ ID NO: 1847471 - DNA, 15 bp, Homo sapiens
gactggacacctcct

SEQ ID NO: 1847472 - DNA, 15 bp, Homo sapiens
actggacacctcctg

SEQ ID NO: 1847473 - DNA, 15 bp, Homo sapiens
ctggacacctcctgc

SEQ ID NO: 1847474 - DNA, 15 bp, Homo sapiens
tggacacctcctgcc

SEQ ID NO: 1847475 - DNA, 15 bp, Homo sapiens
ggacacctcctgccc

SEQ ID NO: 1847476 - DNA, 15 bp, Homo sapiens
gacacctcctgcccc

SEQ ID NO: 1847477 - DNA, 15 bp, Homo sapiens
acacctcctgccccc

SEQ ID NO: 1847478 - DNA, 15 bp, Homo sapiens
cacctcctgccccct

SEQ ID NO: 1847479 - DNA, 15 bp, Homo sapiens
acctcctgccccctc

SEQ ID NO: 1847480 - DNA, 15 bp, Homo sapiens
cctcctgccccctcc

SEQ ID NO: 1847481 - DNA, 15 bp, Homo sapiens
ctcctgccccctccc

SEQ ID NO: 1847482 - DNA, 15 bp, Homo sapiens
tcctgccccctccca

SEQ ID NO: 1847483 - DNA, 15 bp, Homo sapiens
cctgccccctcccac

SEQ ID NO: 1847484 - DNA, 15 bp, Homo sapiens
ctgccccctcccact

SEQ ID NO: 1847485 - DNA, 15 bp, Homo sapiens
tgccccctcccactg

SEQ ID NO: 1847486 - DNA, 15 bp, Homo sapiens
gccccctcccactgt

SEQ ID NO: 1847487 - DNA, 15 bp, Homo sapiens
ccccctcccactgtg

SEQ ID NO: 1847488 - DNA, 15 bp, Homo sapiens
cccctcccactgtgg

SEQ ID NO: 1847489 - DNA, 15 bp, Homo sapiens
ccctcccactgtggt

SEQ ID NO: 1847490 - DNA, 15 bp, Homo sapiens
cctcccactgtggtt

SEQ ID NO: 1847491 - DNA, 15 bp, Homo sapiens
ctcccactgtggttt

SEQ ID NO: 1847492 - DNA, 15 bp, Homo sapiens
tcccactgtggtttg

SEQ ID NO: 1847493 - DNA, 15 bp, Homo sapiens
cccactgtggtttga

SEQ ID NO: 1847494 - DNA, 15 bp, Homo sapiens
ccactgtggtttgag

SEQ ID NO: 1847495 - DNA, 15 bp, Homo sapiens
cactgtggtttgagt

SEQ ID NO: 1847496 - DNA, 15 bp, Homo sapiens
actgtggtttgagtg

SEQ ID NO: 1847497 - DNA, 15 bp, Homo sapiens
ctgtggtttgagtgg

SEQ ID NO: 1847498 - DNA, 15 bp, Homo sapiens
tgtggtttgagtgga

SEQ ID NO: 1847499 - DNA, 15 bp, Homo sapiens
gtggtttgagtggat

SEQ ID NO: 1847500 - DNA, 15 bp, Homo sapiens
tggtttgagtggatt

SEQ ID NO: 1847501 - DNA, 15 bp, Homo sapiens
ggtttgagtggattt

SEQ ID NO: 1847502 - DNA, 15 bp, Homo sapiens
gtttgagtggatttt

SEQ ID NO: 1847503 - DNA, 15 bp, Homo sapiens
tttgagtggatttta

SEQ ID NO: 1847504 - DNA, 15 bp, Homo sapiens
ttgagtggattttat

SEQ ID NO: 1847505 - DNA, 15 bp, Homo sapiens
tgagtggattttatc

SEQ ID NO: 1847506 - DNA, 15 bp, Homo sapiens
gagtggattttatcc

SEQ ID NO: 1847507 - DNA, 15 bp, Homo sapiens
agtggattttatccc

SEQ ID NO: 1847508 - DNA, 15 bp, Homo sapiens
gtggattttatcccg

SEQ ID NO: 1847509 - DNA, 15 bp, Homo sapiens
tggattttatcccgc

SEQ ID NO: 1847510 - DNA, 15 bp, Homo sapiens
ggattttatcccgca

SEQ ID NO: 1847511 - DNA, 15 bp, Homo sapiens
gattttatcccgcat

SEQ ID NO: 1847512 - DNA, 15 bp, Homo sapiens
attttatcccgcatc

SEQ ID NO: 1847513 - DNA, 15 bp, Homo sapiens
ttttatcccgcatct

SEQ ID NO: 1847514 - DNA, 15 bp, Homo sapiens
tttatcccgcatctg

SEQ ID NO: 1847515 - DNA, 15 bp, Homo sapiens
ttatcccgcatctgt

SEQ ID NO: 1847516 - DNA, 15 bp, Homo sapiens
tatcccgcatctgtt

SEQ ID NO: 1847517 - DNA, 15 bp, Homo sapiens
atcccgcatctgttg

SEQ ID NO: 1847518 - DNA, 15 bp, Homo sapiens
tcccgcatctgttgt

SEQ ID NO: 1847519 - DNA, 15 bp, Homo sapiens
cccgcatctgttgtt

SEQ ID NO: 1847520 - DNA, 15 bp, Homo sapiens
ccgcatctgttgttt

SEQ ID NO: 1847521 - DNA, 15 bp, Homo sapiens
cgcatctgttgtttg

SEQ ID NO: 1847522 - DNA, 15 bp, Homo sapiens
gcatctgttgtttgc

SEQ ID NO: 1847523 - DNA, 15 bp, Homo sapiens
catctgttgtttgcc

SEQ ID NO: 1847524 - DNA, 15 bp, Homo sapiens
atctgttgtttgcct

SEQ ID NO: 1847525 - DNA, 15 bp, Homo sapiens
tctgttgtttgcctg

SEQ ID NO: 1847526 - DNA, 15 bp, Homo sapiens
ctgttgtttgcctgg

SEQ ID NO: 1847527 - DNA, 15 bp, Homo sapiens
tgttgtttgcctggc

SEQ ID NO: 1847528 - DNA, 15 bp, Homo sapiens
gttgtttgcctggca

SEQ ID NO: 1847529 - DNA, 15 bp, Homo sapiens
ttgtttgcctggcat

SEQ ID NO: 1847530 - DNA, 15 bp, Homo sapiens
tgtttgcctggcatt

SEQ ID NO: 1847531 - DNA, 15 bp, Homo sapiens
gtttgcctggcattg

SEQ ID NO: 1847532 - DNA, 15 bp, Homo sapiens
tttgcctggcattgg

SEQ ID NO: 1847533 - DNA, 15 bp, Homo sapiens
ttgcctggcattgga

SEQ ID NO: 1847534 - DNA, 15 bp, Homo sapiens
tgcctggcattggat

SEQ ID NO: 1847535 - DNA, 15 bp, Homo sapiens
gcctggcattggatg

SEQ ID NO: 1847536 - DNA, 15 bp, Homo sapiens
cctggcattggatgg

SEQ ID NO: 1847537 - DNA, 15 bp, Homo sapiens
ctggcattggatggc

SEQ ID NO: 1847538 - DNA, 15 bp, Homo sapiens
tggcattggatggcc

SEQ ID NO: 1847539 - DNA, 15 bp, Homo sapiens
ggcattggatggccc

SEQ ID NO: 1847540 - DNA, 15 bp, Homo sapiens
gcattggatggccct

SEQ ID NO: 1847541 - DNA, 15 bp, Homo sapiens
cattggatggccctc

SEQ ID NO: 1847542 - DNA, 15 bp, Homo sapiens
attggatggccctcc

SEQ ID NO: 1847543 - DNA, 15 bp, Homo sapiens
ttggatggccctcca

SEQ ID NO: 1847544 - DNA, 15 bp, Homo sapiens
tggatggccctccac

SEQ ID NO: 1847545 - DNA, 15 bp, Homo sapiens
ggatggccctccaca

SEQ ID NO: 1847546 - DNA, 15 bp, Homo sapiens
gatggccctccacac

SEQ ID NO: 1847547 - DNA, 15 bp, Homo sapiens
atggccctccacacc

SEQ ID NO: 1847548 - DNA, 15 bp, Homo sapiens
tggccctccacacca

SEQ ID NO: 1847549 - DNA, 15 bp, Homo sapiens
ggccctccacaccag

SEQ ID NO: 1847550 - DNA, 15 bp, Homo sapiens
gccctccacaccaga

SEQ ID NO: 1847551 - DNA, 15 bp, Homo sapiens
ccctccacaccagag

SEQ ID NO: 1847552 - DNA, 15 bp, Homo sapiens
cctccacaccagaga

SEQ ID NO: 1847553 - DNA, 15 bp, Homo sapiens
ctccacaccagagag

SEQ ID NO: 1847554 - DNA, 15 bp, Homo sapiens
tccacaccagagagc

SEQ ID NO: 1847555 - DNA, 15 bp, Homo sapiens
ccacaccagagagct

SEQ ID NO: 1847556 - DNA, 15 bp, Homo sapiens
cacaccagagagcta

SEQ ID NO: 1847557 - DNA, 15 bp, Homo sapiens
acaccagagagctaa

SEQ ID NO: 1847558 - DNA, 15 bp, Homo sapiens
caccagagagctaat

SEQ ID NO: 1847559 - DNA, 15 bp, Homo sapiens
accagagagctaatg

SEQ ID NO: 1847560 - DNA, 15 bp, Homo sapiens
ccagagagctaatgc

SEQ ID NO: 1847561 - DNA, 15 bp, Homo sapiens
cagagagctaatgcc

SEQ ID NO: 1847562 - DNA, 15 bp, Homo sapiens
agagagctaatgcct

SEQ ID NO: 1847563 - DNA, 15 bp, Homo sapiens
gagagctaatgcctg

SEQ ID NO: 1847564 - DNA, 15 bp, Homo sapiens
agagctaatgcctgc

SEQ ID NO: 1847565 - DNA, 15 bp, Homo sapiens
gagctaatgcctgcc

SEQ ID NO: 1847566 - DNA, 15 bp, Homo sapiens
agctaatgcctgcct

SEQ ID NO: 1847567 - DNA, 15 bp, Homo sapiens
gctaatgcctgcctt

SEQ ID NO: 1847568 - DNA, 15 bp, Homo sapiens
ctaatgcctgccttc

SEQ ID NO: 1847569 - DNA, 15 bp, Homo sapiens
taatgcctgccttca

SEQ ID NO: 1847570 - DNA, 15 bp, Homo sapiens
aatgcctgccttcat

SEQ ID NO: 1847571 - DNA, 15 bp, Homo sapiens
atgcctgccttcatc

SEQ ID NO: 1847572 - DNA, 15 bp, Homo sapiens
tgcctgccttcatca

SEQ ID NO: 1847573 - DNA, 15 bp, Homo sapiens
gcctgccttcatcac

SEQ ID NO: 1847574 - DNA, 15 bp, Homo sapiens
cctgccttcatcact

SEQ ID NO: 1847575 - DNA, 15 bp, Homo sapiens
ctgccttcatcacta

SEQ ID NO: 1847576 - DNA, 15 bp, Homo sapiens
tgccttcatcactag

SEQ ID NO: 1847577 - DNA, 15 bp, Homo sapiens
gccttcatcactagt

SEQ ID NO: 1847578 - DNA, 15 bp, Homo sapiens
ccttcatcactagtg

SEQ ID NO: 1847579 - DNA, 15 bp, Homo sapiens
cttcatcactagtgt

SEQ ID NO: 1847580 - DNA, 15 bp, Homo sapiens
ttcatcactagtgtc

SEQ ID NO: 1847581 - DNA, 15 bp, Homo sapiens
tcatcactagtgtct

SEQ ID NO: 1847582 - DNA, 15 bp, Homo sapiens
catcactagtgtctc

SEQ ID NO: 1847583 - DNA, 15 bp, Homo sapiens
atcactagtgtctct

SEQ ID NO: 1847584 - DNA, 15 bp, Homo sapiens
tcactagtgtctctg

SEQ ID NO: 1847585 - DNA, 15 bp, Homo sapiens
cactagtgtctctgt

SEQ ID NO: 1847586 - DNA, 15 bp, Homo sapiens
actagtgtctctgtc

SEQ ID NO: 1847587 - DNA, 15 bp, Homo sapiens
ctagtgtctctgtct

SEQ ID NO: 1847588 - DNA, 15 bp, Homo sapiens
tagtgtctctgtctc

SEQ ID NO: 1847589 - DNA, 15 bp, Homo sapiens
agtgtctctgtctct

SEQ ID NO: 1847590 - DNA, 15 bp, Homo sapiens
gtgtctctgtctctt

SEQ ID NO: 1847591 - DNA, 15 bp, Homo sapiens
tgtctctgtctcttt

SEQ ID NO: 1847592 - DNA, 15 bp, Homo sapiens
gtctctgtctctttg

SEQ ID NO: 1847593 - DNA, 15 bp, Homo sapiens
tctctgtctctttgt

SEQ ID NO: 1847594 - DNA, 15 bp, Homo sapiens
ctctgtctctttgtt

SEQ ID NO: 1847595 - DNA, 15 bp, Homo sapiens
tctgtctctttgttt

SEQ ID NO: 1847596 - DNA, 15 bp, Homo sapiens
ctgtctctttgtttc

SEQ ID NO: 1847597 - DNA, 15 bp, Homo sapiens
tgtctctttgtttca

SEQ ID NO: 1847598 - DNA, 15 bp, Homo sapiens
gtctctttgtttcat

SEQ ID NO: 1847599 - DNA, 15 bp, Homo sapiens
tctctttgtttcatc

SEQ ID NO: 1847600 - DNA, 15 bp, Homo sapiens
ctctttgtttcatca

SEQ ID NO: 1847601 - DNA, 15 bp, Homo sapiens
tctttgtttcatcag

SEQ ID NO: 1847602 - DNA, 15 bp, Homo sapiens
ctttgtttcatcagc

SEQ ID NO: 1847603 - DNA, 15 bp, Homo sapiens
tttgtttcatcagct

SEQ ID NO: 1847604 - DNA, 15 bp, Homo sapiens
ttgtttcatcagctt

SEQ ID NO: 1847605 - DNA, 15 bp, Homo sapiens
tgtttcatcagcttc

SEQ ID NO: 1847606 - DNA, 15 bp, Homo sapiens
gtttcatcagcttct

SEQ ID NO: 1847607 - DNA, 15 bp, Homo sapiens
tttcatcagcttctt

SEQ ID NO: 1847608 - DNA, 15 bp, Homo sapiens
ttcatcagcttcttt

SEQ ID NO: 1847609 - DNA, 15 bp, Homo sapiens
tcatcagcttcttta

SEQ ID NO: 1847610 - DNA, 15 bp, Homo sapiens
catcagcttctttat

SEQ ID NO: 1847611 - DNA, 15 bp, Homo sapiens
atcagcttctttatg

SEQ ID NO: 1847612 - DNA, 15 bp, Homo sapiens
tcagcttctttatgt

SEQ ID NO: 1847613 - DNA, 15 bp, Homo sapiens
cagcttctttatgtg

SEQ ID NO: 1847614 - DNA, 15 bp, Homo sapiens
agcttctttatgtga

SEQ ID NO: 1847615 - DNA, 15 bp, Homo sapiens
gcttctttatgtgaa

SEQ ID NO: 1847616 - DNA, 15 bp, Homo sapiens
cttctttatgtgaaa

SEQ ID NO: 1847617 - DNA, 15 bp, Homo sapiens
ttctttatgtgaaaa

SEQ ID NO: 1847618 - DNA, 15 bp, Homo sapiens
tctttatgtgaaaag

SEQ ID NO: 1847619 - DNA, 15 bp, Homo sapiens
ctttatgtgaaaaga

SEQ ID NO: 1847620 - DNA, 15 bp, Homo sapiens
tttatgtgaaaagag

SEQ ID NO: 1847621 - DNA, 15 bp, Homo sapiens
ttatgtgaaaagaga

SEQ ID NO: 1847622 - DNA, 15 bp, Homo sapiens
tatgtgaaaagagag

SEQ ID NO: 1847623 - DNA, 15 bp, Homo sapiens
atgtgaaaagagaga

SEQ ID NO: 1847624 - DNA, 15 bp, Homo sapiens
tgtgaaaagagagaa

SEQ ID NO: 1847625 - DNA, 15 bp, Homo sapiens
gtgaaaagagagaaa

SEQ ID NO: 1847626 - DNA, 15 bp, Homo sapiens
tgaaaagagagaaat

SEQ ID NO: 1847627 - DNA, 15 bp, Homo sapiens
gaaaagagagaaatg

SEQ ID NO: 1847628 - DNA, 15 bp, Homo sapiens
aaaagagagaaatga

SEQ ID NO: 1847629 - DNA, 15 bp, Homo sapiens
aaagagagaaatgat

SEQ ID NO: 1847630 - DNA, 15 bp, Homo sapiens
aagagagaaatgatc

SEQ ID NO: 1847631 - DNA, 15 bp, Homo sapiens
agagagaaatgatct

SEQ ID NO: 1847632 - DNA, 15 bp, Homo sapiens
gagagaaatgatctc

SEQ ID NO: 1847633 - DNA, 15 bp, Homo sapiens
agagaaatgatctct

SEQ ID NO: 1847634 - DNA, 15 bp, Homo sapiens
gagaaatgatctctg

SEQ ID NO: 1847635 - DNA, 15 bp, Homo sapiens
agaaatgatctctgt

SEQ ID NO: 1847636 - DNA, 15 bp, Homo sapiens
gaaatgatctctgtc

SEQ ID NO: 1847637 - DNA, 15 bp, Homo sapiens
aaatgatctctgtct

SEQ ID NO: 1847638 - DNA, 15 bp, Homo sapiens
aatgatctctgtctc

SEQ ID NO: 1847639 - DNA, 15 bp, Homo sapiens
atgatctctgtctct

SEQ ID NO: 1847640 - DNA, 15 bp, Homo sapiens
tgatctctgtctctt

SEQ ID NO: 1847641 - DNA, 15 bp, Homo sapiens
gatctctgtctcttt

SEQ ID NO: 1847642 - DNA, 15 bp, Homo sapiens
atctctgtctctttc

SEQ ID NO: 1847643 - DNA, 15 bp, Homo sapiens
tctctgtctctttcc

SEQ ID NO: 1847644 - DNA, 15 bp, Homo sapiens
ctctgtctctttcca

SEQ ID NO: 1847645 - DNA, 15 bp, Homo sapiens
tctgtctctttccaa

SEQ ID NO: 1847646 - DNA, 15 bp, Homo sapiens
ctgtctctttccaaa

SEQ ID NO: 1847647 - DNA, 15 bp, Homo sapiens
tgtctctttccaaat

SEQ ID NO: 1847648 - DNA, 15 bp, Homo sapiens
gtctctttccaaatc

SEQ ID NO: 1847649 - DNA, 15 bp, Homo sapiens
tctctttccaaatcc

SEQ ID NO: 1847650 - DNA, 15 bp, Homo sapiens
ctctttccaaatccc

SEQ ID NO: 1847651 - DNA, 15 bp, Homo sapiens
tctttccaaatccca

SEQ ID NO: 1847652 - DNA, 15 bp, Homo sapiens
ctttccaaatcccag

SEQ ID NO: 1847653 - DNA, 15 bp, Homo sapiens
tttccaaatcccagc

SEQ ID NO: 1847654 - DNA, 15 bp, Homo sapiens
ttccaaatcccagca

SEQ ID NO: 1847655 - DNA, 15 bp, Homo sapiens
tccaaatcccagcaa

SEQ ID NO: 1847656 - DNA, 15 bp, Homo sapiens
ccaaatcccagcaag

SEQ ID NO: 1847657 - DNA, 15 bp, Homo sapiens
caaatcccagcaagg

SEQ ID NO: 1847658 - DNA, 15 bp, Homo sapiens
aaatcccagcaaggc

SEQ ID NO: 1847659 - DNA, 15 bp, Homo sapiens
aatcccagcaaggct

SEQ ID NO: 1847660 - DNA, 15 bp, Homo sapiens
atcccagcaaggctg

SEQ ID NO: 1847661 - DNA, 15 bp, Homo sapiens
tcccagcaaggctga

SEQ ID NO: 1847662 - DNA, 15 bp, Homo sapiens
cccagcaaggctgaa

SEQ ID NO: 1847663 - DNA, 15 bp, Homo sapiens
ccagcaaggctgaat

SEQ ID NO: 1847664 - DNA, 15 bp, Homo sapiens
cagcaaggctgaata

SEQ ID NO: 1847665 - DNA, 15 bp, Homo sapiens
agcaaggctgaataa

SEQ ID NO: 1847666 - DNA, 15 bp, Homo sapiens
gcaaggctgaataat

SEQ ID NO: 1847667 - DNA, 15 bp, Homo sapiens
aggctgaataatatc

SEQ ID NO: 1847668 - DNA, 15 bp, Homo sapiens
ggctgaataatatct

SEQ ID NO: 1847669 - DNA, 15 bp, Homo sapiens
gctgaataatatctg

SEQ ID NO: 1847670 - DNA, 15 bp, Homo sapiens
ctgaataatatctgt

SEQ ID NO: 1847671 - DNA, 15 bp, Homo sapiens
tgaataatatctgtg

SEQ ID NO: 1847672 - DNA, 15 bp, Homo sapiens
gaataatatctgtgg

SEQ ID NO: 1847673 - DNA, 15 bp, Homo sapiens
aataatatctgtgga

SEQ ID NO: 1847674 - DNA, 15 bp, Homo sapiens
ataatatctgtggat

SEQ ID NO: 1847675 - DNA, 15 bp, Homo sapiens
taatatctgtggata

SEQ ID NO: 1847676 - DNA, 15 bp, Homo sapiens
aatatctgtggatat

SEQ ID NO: 1847677 - DNA, 15 bp, Homo sapiens
atatctgtggatatt

SEQ ID NO: 1847678 - DNA, 15 bp, Homo sapiens
tatctgtggatattc

SEQ ID NO: 1847679 - DNA, 15 bp, Homo sapiens
atctgtggatattct

SEQ ID NO: 1847680 - DNA, 15 bp, Homo sapiens
tctgtggatattctt

SEQ ID NO: 1847681 - DNA, 15 bp, Homo sapiens
ctgtggatattcttt

SEQ ID NO: 1847682 - DNA, 15 bp, Homo sapiens
tgtggatattctttt

SEQ ID NO: 1847683 - DNA, 15 bp, Homo sapiens
gtggatattcttttc

SEQ ID NO: 1847684 - DNA, 15 bp, Homo sapiens
tggatattcttttct

SEQ ID NO: 1847685 - DNA, 15 bp, Homo sapiens
ggatattcttttcta

SEQ ID NO: 1847686 - DNA, 15 bp, Homo sapiens
gatattcttttctat

SEQ ID NO: 1847687 - DNA, 15 bp, Homo sapiens
atattcttttctatt

SEQ ID NO: 1847688 - DNA, 15 bp, Homo sapiens
tattcttttctattt

SEQ ID NO: 1847689 - DNA, 15 bp, Homo sapiens
attcttttctatttc

SEQ ID NO: 1847690 - DNA, 15 bp, Homo sapiens
ttcttttctatttct

SEQ ID NO: 1847691 - DNA, 15 bp, Homo sapiens
tcttttctatttctt

SEQ ID NO: 1847692 - DNA, 15 bp, Homo sapiens
cttttctatttctta

SEQ ID NO: 1847693 - DNA, 15 bp, Homo sapiens
ttttctatttcttaa

SEQ ID NO: 1847694 - DNA, 15 bp, Homo sapiens
tttctatttcttaat

SEQ ID NO: 1847695 - DNA, 15 bp, Homo sapiens
ttctatttcttaata

SEQ ID NO: 1847696 - DNA, 15 bp, Homo sapiens
tctatttcttaatac

SEQ ID NO: 1847697 - DNA, 15 bp, Homo sapiens
ctatttcttaatacc

SEQ ID NO: 1847698 - DNA, 15 bp, Homo sapiens
tatttcttaataccc

SEQ ID NO: 1847699 - DNA, 15 bp, Homo sapiens
atttcttaataccct

SEQ ID NO: 1847700 - DNA, 15 bp, Homo sapiens
tttcttaataccctc

SEQ ID NO: 1847701 - DNA, 15 bp, Homo sapiens
ttcttaataccctcg

SEQ ID NO: 1847702 - DNA, 15 bp, Homo sapiens
tcttaataccctcgc

SEQ ID NO: 1847703 - DNA, 15 bp, Homo sapiens
cttaataccctcgca

SEQ ID NO: 1847704 - DNA, 15 bp, Homo sapiens
ttaataccctcgcat

SEQ ID NO: 1847705 - DNA, 15 bp, Homo sapiens
taataccctcgcatt

SEQ ID NO: 1847706 - DNA, 15 bp, Homo sapiens
aataccctcgcattg

SEQ ID NO: 1847707 - DNA, 15 bp, Homo sapiens
ataccctcgcattgc

SEQ ID NO: 1847708 - DNA, 15 bp, Homo sapiens
taccctcgcattgct

SEQ ID NO: 1847709 - DNA, 15 bp, Homo sapiens
accctcgcattgctt

SEQ ID NO: 1847710 - DNA, 15 bp, Homo sapiens
ccctcgcattgctta

SEQ ID NO: 1847711 - DNA, 15 bp, Homo sapiens
cctcgcattgcttat

SEQ ID NO: 1847712 - DNA, 15 bp, Homo sapiens
ctcgcattgcttatg

SEQ ID NO: 1847713 - DNA, 15 bp, Homo sapiens
tcgcattgcttatga

SEQ ID NO: 1847714 - DNA, 15 bp, Homo sapiens
cgcattgcttatgaa

SEQ ID NO: 1847715 - DNA, 15 bp, Homo sapiens
gcattgcttatgaaa

SEQ ID NO: 1847716 - DNA, 15 bp, Homo sapiens
cattgcttatgaaaa

SEQ ID NO: 1847717 - DNA, 15 bp, Homo sapiens
attgcttatgaaaat

SEQ ID NO: 1847718 - DNA, 15 bp, Homo sapiens
ttgcttatgaaaatc

SEQ ID NO: 1847719 - DNA, 15 bp, Homo sapiens
tgcttatgaaaatcc

SEQ ID NO: 1847720 - DNA, 15 bp, Homo sapiens
gcttatgaaaatcct

SEQ ID NO: 1847721 - DNA, 15 bp, Homo sapiens
cttatgaaaatccta

SEQ ID NO: 1847722 - DNA, 15 bp, Homo sapiens
ttatgaaaatcctat

SEQ ID NO: 1847723 - DNA, 15 bp, Homo sapiens
tatgaaaatcctatg

SEQ ID NO: 1847724 - DNA, 15 bp, Homo sapiens
atgaaaatcctatgg

SEQ ID NO: 1847725 - DNA, 15 bp, Homo sapiens
tgaaaatcctatggg

SEQ ID NO: 1847726 - DNA, 15 bp, Homo sapiens
gaaaatcctatgggc

SEQ ID NO: 1847727 - DNA, 15 bp, Homo sapiens
aaaatcctatgggca

SEQ ID NO: 1847728 - DNA, 15 bp, Homo sapiens
aaatcctatgggcac

SEQ ID NO: 1847729 - DNA, 15 bp, Homo sapiens
aatcctatgggcaca

SEQ ID NO: 1847730 - DNA, 15 bp, Homo sapiens
atcctatgggcacat

SEQ ID NO: 1847731 - DNA, 15 bp, Homo sapiens
tcctatgggcacatt

SEQ ID NO: 1847732 - DNA, 15 bp, Homo sapiens
cctatgggcacattg

SEQ ID NO: 1847733 - DNA, 15 bp, Homo sapiens
ctatgggcacattgt

SEQ ID NO: 1847734 - DNA, 15 bp, Homo sapiens
tatgggcacattgta

SEQ ID NO: 1847735 - DNA, 15 bp, Homo sapiens
atgggcacattgtaa

SEQ ID NO: 1847736 - DNA, 15 bp, Homo sapiens
tgggcacattgtaaa

SEQ ID NO: 1847737 - DNA, 15 bp, Homo sapiens
gggcacattgtaaat

SEQ ID NO: 1847738 - DNA, 15 bp, Homo sapiens
ggcacattgtaaatt

SEQ ID NO: 1847739 - DNA, 15 bp, Homo sapiens
gcacattgtaaatta

SEQ ID NO: 1847740 - DNA, 15 bp, Homo sapiens
cacattgtaaattat

SEQ ID NO: 1847741 - DNA, 15 bp, Homo sapiens
acattgtaaattatc

SEQ ID NO: 1847742 - DNA, 15 bp, Homo sapiens
cattgtaaattatct

SEQ ID NO: 1847743 - DNA, 15 bp, Homo sapiens
attgtaaattatctg

SEQ ID NO: 1847744 - DNA, 15 bp, Homo sapiens
ttgtaaattatctgc

SEQ ID NO: 1847745 - DNA, 15 bp, Homo sapiens
tgtaaattatctgca

SEQ ID NO: 1847746 - DNA, 15 bp, Homo sapiens
gtaaattatctgcaa

SEQ ID NO: 1847747 - DNA, 15 bp, Homo sapiens
taaattatctgcaaa

SEQ ID NO: 1847748 - DNA, 15 bp, Homo sapiens
aaattatctgcaaaa

SEQ ID NO: 1847749 - DNA, 15 bp, Homo sapiens
aattatctgcaaaaa

SEQ ID NO: 1847750 - DNA, 15 bp, Homo sapiens
attatctgcaaaaaa

SEQ ID NO: 1847751 - DNA, 15 bp, Homo sapiens
ttatctgcaaaaaac

SEQ ID NO: 1847752 - DNA, 15 bp, Homo sapiens
tatctgcaaaaaaca

SEQ ID NO: 1847753 - DNA, 15 bp, Homo sapiens
atctgcaaaaaacag

SEQ ID NO: 1847754 - DNA, 15 bp, Homo sapiens
tctgcaaaaaacagc

SEQ ID NO: 1847755 - DNA, 15 bp, Homo sapiens
ctgcaaaaaacagca

SEQ ID NO: 1847756 - DNA, 15 bp, Homo sapiens
tgcaaaaaacagcag

SEQ ID NO: 1847757 - DNA, 15 bp, Homo sapiens
gcaaaaaacagcaga

SEQ ID NO: 1847758 - DNA, 15 bp, Homo sapiens
caaaaaacagcagag

SEQ ID NO: 1847759 - DNA, 15 bp, Homo sapiens
aaaaaacagcagagt

SEQ ID NO: 1847760 - DNA, 15 bp, Homo sapiens
aaaaacagcagagtg

SEQ ID NO: 1847761 - DNA, 15 bp, Homo sapiens
aaaacagcagagtgc

SEQ ID NO: 1847762 - DNA, 15 bp, Homo sapiens
aaacagcagagtgca

SEQ ID NO: 1847763 - DNA, 15 bp, Homo sapiens
aacagcagagtgcaa

SEQ ID NO: 1847764 - DNA, 15 bp, Homo sapiens
acagcagagtgcaaa

SEQ ID NO: 1847765 - DNA, 15 bp, Homo sapiens
cagcagagtgcaaag

SEQ ID NO: 1847766 - DNA, 15 bp, Homo sapiens
agcagagtgcaaaga

SEQ ID NO: 1847767 - DNA, 15 bp, Homo sapiens
gcagagtgcaaagaa

SEQ ID NO: 1847768 - DNA, 15 bp, Homo sapiens
cagagtgcaaagaag

SEQ ID NO: 1847769 - DNA, 15 bp, Homo sapiens
agagtgcaaagaagc

SEQ ID NO: 1847770 - DNA, 15 bp, Homo sapiens
gagtgcaaagaagca

SEQ ID NO: 1847771 - DNA, 15 bp, Homo sapiens
agtgcaaagaagcag

SEQ ID NO: 1847772 - DNA, 15 bp, Homo sapiens
gtgcaaagaagcaga

SEQ ID NO: 1847773 - DNA, 15 bp, Homo sapiens
tgcaaagaagcagaa

SEQ ID NO: 1847774 - DNA, 15 bp, Homo sapiens
gcaaagaagcagaaa

SEQ ID NO: 1847775 - DNA, 15 bp, Homo sapiens
caaagaagcagaaat

SEQ ID NO: 1847776 - DNA, 15 bp, Homo sapiens
aaagaagcagaaata

SEQ ID NO: 1847777 - DNA, 15 bp, Homo sapiens
aagagagaggtcccc

SEQ ID NO: 1847778 - DNA, 15 bp, Homo sapiens
agagagaggtcccct

SEQ ID NO: 1847779 - DNA, 15 bp, Homo sapiens
gagagaggtcccctt

SEQ ID NO: 1847780 - DNA, 15 bp, Homo sapiens
agagaggtccccttt

SEQ ID NO: 1847781 - DNA, 15 bp, Homo sapiens
gagaggtccccttta

SEQ ID NO: 1847782 - DNA, 15 bp, Homo sapiens
agaggtcccctttaa

SEQ ID NO: 1847783 - DNA, 15 bp, Homo sapiens
gaggtcccctttaaa

SEQ ID NO: 1847784 - DNA, 15 bp, Homo sapiens
aggtcccctttaaaa

SEQ ID NO: 1847785 - DNA, 15 bp, Homo sapiens
ggtcccctttaaaac

SEQ ID NO: 1847786 - DNA, 15 bp, Homo sapiens
gtcccctttaaaacg

SEQ ID NO: 1847787 - DNA, 15 bp, Homo sapiens
tcccctttaaaacgc

SEQ ID NO: 1847788 - DNA, 15 bp, Homo sapiens
cccctttaaaacgca

SEQ ID NO: 1847789 - DNA, 15 bp, Homo sapiens
ccctttaaaacgcaa

SEQ ID NO: 1847790 - DNA, 15 bp, Homo sapiens
cctttaaaacgcaag

SEQ ID NO: 1847791 - DNA, 15 bp, Homo sapiens
ctttaaaacgcaagc

SEQ ID NO: 1847792 - DNA, 15 bp, Homo sapiens
tttaaaacgcaagca

SEQ ID NO: 1847793 - DNA, 15 bp, Homo sapiens
ttaaaacgcaagcag

SEQ ID NO: 1847794 - DNA, 15 bp, Homo sapiens
taaaacgcaagcagg

SEQ ID NO: 1847795 - DNA, 15 bp, Homo sapiens
aaaacgcaagcaggg

SEQ ID NO: 1847796 - DNA, 15 bp, Homo sapiens
aaacgcaagcagggt

SEQ ID NO: 1847797 - DNA, 15 bp, Homo sapiens
aacgcaagcagggta

SEQ ID NO: 1847798 - DNA, 15 bp, Homo sapiens
acgcaagcagggtaa

SEQ ID NO: 1847799 - DNA, 15 bp, Homo sapiens
cgcaagcagggtaaa

SEQ ID NO: 1847800 - DNA, 15 bp, Homo sapiens
gcaagcagggtaaat

SEQ ID NO: 1847801 - DNA, 15 bp, Homo sapiens
caagcagggtaaata

SEQ ID NO: 1847802 - DNA, 15 bp, Homo sapiens
aagcagggtaaatat

SEQ ID NO: 1847803 - DNA, 15 bp, Homo sapiens
agcagggtaaatatt

SEQ ID NO: 1847804 - DNA, 15 bp, Homo sapiens
gcagggtaaatatta

SEQ ID NO: 1847805 - DNA, 15 bp, Homo sapiens
cagggtaaatattag

SEQ ID NO: 1847806 - DNA, 15 bp, Homo sapiens
agggtaaatattaga

SEQ ID NO: 1847807 - DNA, 15 bp, Homo sapiens
gggtaaatattagaa

SEQ ID NO: 1847808 - DNA, 15 bp, Homo sapiens
ggtaaatattagaaa

SEQ ID NO: 1847809 - DNA, 15 bp, Homo sapiens
gtaaatattagaaaa

SEQ ID NO: 1847810 - DNA, 15 bp, Homo sapiens
taaatattagaaaaa

SEQ ID NO: 1847811 - DNA, 15 bp, Homo sapiens
aaatattagaaaaat

SEQ ID NO: 1847812 - DNA, 15 bp, Homo sapiens
aatattagaaaaatg

SEQ ID NO: 1847813 - DNA, 15 bp, Homo sapiens
atattagaaaaatgg

SEQ ID NO: 1847814 - DNA, 15 bp, Homo sapiens
tattagaaaaatggc

SEQ ID NO: 1847815 - DNA, 15 bp, Homo sapiens
attagaaaaatggca

SEQ ID NO: 1847816 - DNA, 15 bp, Homo sapiens
ttagaaaaatggcaa

SEQ ID NO: 1847817 - DNA, 15 bp, Homo sapiens
tagaaaaatggcaag

SEQ ID NO: 1847818 - DNA, 15 bp, Homo sapiens
agaaaaatggcaaga

SEQ ID NO: 1847819 - DNA, 15 bp, Homo sapiens
gaaaaatggcaagaa

SEQ ID NO: 1847820 - DNA, 15 bp, Homo sapiens
aaaaatggcaagaat

SEQ ID NO: 1847821 - DNA, 15 bp, Homo sapiens
aaaatggcaagaatt

SEQ ID NO: 1847822 - DNA, 15 bp, Homo sapiens
aaatggcaagaattc

SEQ ID NO: 1847823 - DNA, 15 bp, Homo sapiens
aatggcaagaattca

SEQ ID NO: 1847824 - DNA, 15 bp, Homo sapiens
atggcaagaattcat

SEQ ID NO: 1847825 - DNA, 15 bp, Homo sapiens
tggcaagaattcata

SEQ ID NO: 1847826 - DNA, 15 bp, Homo sapiens
ggcaagaattcatag

SEQ ID NO: 1847827 - DNA, 15 bp, Homo sapiens
gcaagaattcataga

SEQ ID NO: 1847828 - DNA, 15 bp, Homo sapiens
caagaattcatagag

SEQ ID NO: 1847829 - DNA, 15 bp, Homo sapiens
aagaattcatagagc

SEQ ID NO: 1847830 - DNA, 15 bp, Homo sapiens
agaattcatagagca

SEQ ID NO: 1847831 - DNA, 15 bp, Homo sapiens
gaattcatagagcat

SEQ ID NO: 1847832 - DNA, 15 bp, Homo sapiens
aattcatagagcata

SEQ ID NO: 1847833 - DNA, 15 bp, Homo sapiens
attcatagagcataa

SEQ ID NO: 1847834 - DNA, 15 bp, Homo sapiens
ttcatagagcataaa

SEQ ID NO: 1847835 - DNA, 15 bp, Homo sapiens
tcatagagcataaag

SEQ ID NO: 1847836 - DNA, 15 bp, Homo sapiens
catagagcataaagc

SEQ ID NO: 1847837 - DNA, 15 bp, Homo sapiens
atagagcataaagct

SEQ ID NO: 1847838 - DNA, 15 bp, Homo sapiens
tagagcataaagctc

SEQ ID NO: 1847839 - DNA, 15 bp, Homo sapiens
agagcataaagctca

SEQ ID NO: 1847840 - DNA, 15 bp, Homo sapiens
gagcataaagctcat

SEQ ID NO: 1847841 - DNA, 15 bp, Homo sapiens
agcataaagctcata

SEQ ID NO: 1847842 - DNA, 15 bp, Homo sapiens
gcataaagctcataa

SEQ ID NO: 1847843 - DNA, 15 bp, Homo sapiens
cataaagctcataat

SEQ ID NO: 1847844 - DNA, 15 bp, Homo sapiens
ataaagctcataata

SEQ ID NO: 1847845 - DNA, 15 bp, Homo sapiens
taaagctcataataa

SEQ ID NO: 1847846 - DNA, 15 bp, Homo sapiens
aaagctcataataaa

SEQ ID NO: 1847847 - DNA, 15 bp, Homo sapiens
aagctcataataaac

SEQ ID NO: 1847848 - DNA, 15 bp, Homo sapiens
agctcataataaact

SEQ ID NO: 1847849 - DNA, 15 bp, Homo sapiens
gctcataataaactc

SEQ ID NO: 1847850 - DNA, 15 bp, Homo sapiens
ctcataataaactca

SEQ ID NO: 1847851 - DNA, 15 bp, Homo sapiens
tcataataaactcag

SEQ ID NO: 1847852 - DNA, 15 bp, Homo sapiens
cataataaactcaga

SEQ ID NO: 1847853 - DNA, 15 bp, Homo sapiens
ataataaactcagag

SEQ ID NO: 1847854 - DNA, 15 bp, Homo sapiens
taataaactcagaga

SEQ ID NO: 1847855 - DNA, 15 bp, Homo sapiens
aataaactcagagaa

SEQ ID NO: 1847856 - DNA, 15 bp, Homo sapiens
ataaactcagagaat

SEQ ID NO: 1847857 - DNA, 15 bp, Homo sapiens
taaactcagagaatg

SEQ ID NO: 1847858 - DNA, 15 bp, Homo sapiens
aaactcagagaatgc

SEQ ID NO: 1847859 - DNA, 15 bp, Homo sapiens
aactcagagaatgca

SEQ ID NO: 1847860 - DNA, 15 bp, Homo sapiens
actcagagaatgcat

SEQ ID NO: 1847861 - DNA, 15 bp, Homo sapiens
ctcagagaatgcatt

SEQ ID NO: 1847862 - DNA, 15 bp, Homo sapiens
tcagagaatgcattg

SEQ ID NO: 1847863 - DNA, 15 bp, Homo sapiens
cagagaatgcattgt

SEQ ID NO: 1847864 - DNA, 15 bp, Homo sapiens
agagaatgcattgtc

SEQ ID NO: 1847865 - DNA, 15 bp, Homo sapiens
gagaatgcattgtcc

SEQ ID NO: 1847866 - DNA, 15 bp, Homo sapiens
agaatgcattgtcct

SEQ ID NO: 1847867 - DNA, 15 bp, Homo sapiens
gaatgcattgtcctg

SEQ ID NO: 1847868 - DNA, 15 bp, Homo sapiens
aatgcattgtcctga

SEQ ID NO: 1847869 - DNA, 15 bp, Homo sapiens
atgcattgtcctgag

SEQ ID NO: 1847870 - DNA, 15 bp, Homo sapiens
tgcattgtcctgaga

SEQ ID NO: 1847871 - DNA, 15 bp, Homo sapiens
gcattgtcctgagaa

SEQ ID NO: 1847872 - DNA, 15 bp, Homo sapiens
cattgtcctgagaag

SEQ ID NO: 1847873 - DNA, 15 bp, Homo sapiens
attgtcctgagaagt

SEQ ID NO: 1847874 - DNA, 15 bp, Homo sapiens
ttgtcctgagaagtg

SEQ ID NO: 1847875 - DNA, 15 bp, Homo sapiens
tgtcctgagaagtgg

SEQ ID NO: 1847876 - DNA, 15 bp, Homo sapiens
gtcctgagaagtggt

SEQ ID NO: 1847877 - DNA, 15 bp, Homo sapiens
tcctgagaagtggta

SEQ ID NO: 1847878 - DNA, 15 bp, Homo sapiens
cctgagaagtggtaa

SEQ ID NO: 1847879 - DNA, 15 bp, Homo sapiens
ctgagaagtggtaaa

SEQ ID NO: 1847880 - DNA, 15 bp, Homo sapiens
tgagaagtggtaaag

SEQ ID NO: 1847881 - DNA, 15 bp, Homo sapiens
gagaagtggtaaagg

SEQ ID NO: 1847882 - DNA, 15 bp, Homo sapiens
agaagtggtaaagga

SEQ ID NO: 1847883 - DNA, 15 bp, Homo sapiens
gaagtggtaaaggaa

SEQ ID NO: 1847884 - DNA, 15 bp, Homo sapiens
aagtggtaaaggaag

SEQ ID NO: 1847885 - DNA, 15 bp, Homo sapiens
tggtaaaggaaggaa

SEQ ID NO: 1847886 - DNA, 15 bp, Homo sapiens
ggtaaaggaaggaag

SEQ ID NO: 1847887 - DNA, 15 bp, Homo sapiens
gtaaaggaaggaagt

SEQ ID NO: 1847888 - DNA, 15 bp, Homo sapiens
taaaggaaggaagtg

SEQ ID NO: 1847889 - DNA, 15 bp, Homo sapiens
aaaggaaggaagtgg

SEQ ID NO: 1847890 - DNA, 15 bp, Homo sapiens
aaggaaggaagtgga

SEQ ID NO: 1847891 - DNA, 15 bp, Homo sapiens
aggaaggaagtggaa

SEQ ID NO: 1847892 - DNA, 15 bp, Homo sapiens
ggaaggaagtggaat

SEQ ID NO: 1847893 - DNA, 15 bp, Homo sapiens
gaaggaagtggaata

SEQ ID NO: 1847894 - DNA, 15 bp, Homo sapiens
aaggaagtggaatag

SEQ ID NO: 1847895 - DNA, 15 bp, Homo sapiens
aggaagtggaataga

SEQ ID NO: 1847896 - DNA, 15 bp, Homo sapiens
ggaagtggaatagac

SEQ ID NO: 1847897 - DNA, 15 bp, Homo sapiens
gaagtggaatagact

SEQ ID NO: 1847898 - DNA, 15 bp, Homo sapiens
aagtggaatagactt

SEQ ID NO: 1847899 - DNA, 15 bp, Homo sapiens
agtggaatagacttc

SEQ ID NO: 1847900 - DNA, 15 bp, Homo sapiens
gtggaatagacttca

SEQ ID NO: 1847901 - DNA, 15 bp, Homo sapiens
tggaatagacttcaa

SEQ ID NO: 1847902 - DNA, 15 bp, Homo sapiens
ggaatagacttcaac

SEQ ID NO: 1847903 - DNA, 15 bp, Homo sapiens
gaatagacttcaaca

SEQ ID NO: 1847904 - DNA, 15 bp, Homo sapiens
aatagacttcaacaa

SEQ ID NO: 1847905 - DNA, 15 bp, Homo sapiens
atagacttcaacaaa

SEQ ID NO: 1847906 - DNA, 15 bp, Homo sapiens
tagacttcaacaaaa

SEQ ID NO: 1847907 - DNA, 15 bp, Homo sapiens
agacttcaacaaaat

SEQ ID NO: 1847908 - DNA, 15 bp, Homo sapiens
gacttcaacaaaatg

SEQ ID NO: 1847909 - DNA, 15 bp, Homo sapiens
acttcaacaaaatgg

SEQ ID NO: 1847910 - DNA, 15 bp, Homo sapiens
cttcaacaaaatggc

SEQ ID NO: 1847911 - DNA, 15 bp, Homo sapiens
ttcaacaaaatggca

SEQ ID NO: 1847912 - DNA, 15 bp, Homo sapiens
tcaacaaaatggcat

SEQ ID NO: 1847913 - DNA, 15 bp, Homo sapiens
caacaaaatggcata

SEQ ID NO: 1847914 - DNA, 15 bp, Homo sapiens
aacaaaatggcatag

SEQ ID NO: 1847915 - DNA, 15 bp, Homo sapiens
acaaaatggcataga

SEQ ID NO: 1847916 - DNA, 15 bp, Homo sapiens
caaaatggcatagaa

SEQ ID NO: 1847917 - DNA, 15 bp, Homo sapiens
aaaatggcatagaat

SEQ ID NO: 1847918 - DNA, 15 bp, Homo sapiens
aaatggcatagaatt

SEQ ID NO: 1847919 - DNA, 15 bp, Homo sapiens
aatggcatagaatta

SEQ ID NO: 1847920 - DNA, 15 bp, Homo sapiens
atggcatagaattaa

SEQ ID NO: 1847921 - DNA, 15 bp, Homo sapiens
tggcatagaattaac

SEQ ID NO: 1847922 - DNA, 15 bp, Homo sapiens
ggcatagaattaacg

SEQ ID NO: 1847923 - DNA, 15 bp, Homo sapiens
gcatagaattaacgg

SEQ ID NO: 1847924 - DNA, 15 bp, Homo sapiens
catagaattaacggc

SEQ ID NO: 1847925 - DNA, 15 bp, Homo sapiens
atagaattaacggca

SEQ ID NO: 1847926 - DNA, 15 bp, Homo sapiens
tagaattaacggcag

SEQ ID NO: 1847927 - DNA, 15 bp, Homo sapiens
agaattaacggcaga

SEQ ID NO: 1847928 - DNA, 15 bp, Homo sapiens
gaattaacggcagag

SEQ ID NO: 1847929 - DNA, 15 bp, Homo sapiens
aattaacggcagagg

SEQ ID NO: 1847930 - DNA, 15 bp, Homo sapiens
attaacggcagaggg

SEQ ID NO: 1847931 - DNA, 15 bp, Homo sapiens
ttaacggcagagggt

SEQ ID NO: 1847932 - DNA, 15 bp, Homo sapiens
taacggcagagggta

SEQ ID NO: 1847933 - DNA, 15 bp, Homo sapiens
aacggcagagggtat

SEQ ID NO: 1847934 - DNA, 15 bp, Homo sapiens
acggcagagggtatc

SEQ ID NO: 1847935 - DNA, 15 bp, Homo sapiens
cggcagagggtatca

SEQ ID NO: 1847936 - DNA, 15 bp, Homo sapiens
ggcagagggtatcat

SEQ ID NO: 1847937 - DNA, 15 bp, Homo sapiens
gcagagggtatcatg

SEQ ID NO: 1847938 - DNA, 15 bp, Homo sapiens
cagagggtatcatgt

SEQ ID NO: 1847939 - DNA, 15 bp, Homo sapiens
agagggtatcatgta

SEQ ID NO: 1847940 - DNA, 15 bp, Homo sapiens
gagggtatcatgtac

SEQ ID NO: 1847941 - DNA, 15 bp, Homo sapiens
agggtatcatgtacc

SEQ ID NO: 1847942 - DNA, 15 bp, Homo sapiens
gggtatcatgtacct

SEQ ID NO: 1847943 - DNA, 15 bp, Homo sapiens
ggtatcatgtacctg

SEQ ID NO: 1847944 - DNA, 15 bp, Homo sapiens
gtatcatgtacctgc

SEQ ID NO: 1847945 - DNA, 15 bp, Homo sapiens
tatcatgtacctgca

SEQ ID NO: 1847946 - DNA, 15 bp, Homo sapiens
atcatgtacctgcag

SEQ ID NO: 1847947 - DNA, 15 bp, Homo sapiens
tcatgtacctgcagg

SEQ ID NO: 1847948 - DNA, 15 bp, Homo sapiens
catgtacctgcaggg

SEQ ID NO: 1847949 - DNA, 15 bp, Homo sapiens
atgtacctgcagggt

SEQ ID NO: 1847950 - DNA, 15 bp, Homo sapiens
tgtacctgcagggta

SEQ ID NO: 1847951 - DNA, 15 bp, Homo sapiens
gtacctgcagggtat

SEQ ID NO: 1847952 - DNA, 15 bp, Homo sapiens
tacctgcagggtatt

SEQ ID NO: 1847953 - DNA, 15 bp, Homo sapiens
acctgcagggtattt

SEQ ID NO: 1847954 - DNA, 15 bp, Homo sapiens
cctgcagggtatttg

SEQ ID NO: 1847955 - DNA, 15 bp, Homo sapiens
ctgcagggtatttga

SEQ ID NO: 1847956 - DNA, 15 bp, Homo sapiens
tgcagggtatttgaa

SEQ ID NO: 1847957 - DNA, 15 bp, Homo sapiens
gcagggtatttgaac

SEQ ID NO: 1847958 - DNA, 15 bp, Homo sapiens
cagggtatttgaacc

SEQ ID NO: 1847959 - DNA, 15 bp, Homo sapiens
agggtatttgaaccg

SEQ ID NO: 1847960 - DNA, 15 bp, Homo sapiens
gggtatttgaaccgg

SEQ ID NO: 1847961 - DNA, 15 bp, Homo sapiens
ggtatttgaaccggg

SEQ ID NO: 1847962 - DNA, 15 bp, Homo sapiens
gtatttgaaccgggt

SEQ ID NO: 1847963 - DNA, 15 bp, Homo sapiens
tatttgaaccgggtg

SEQ ID NO: 1847964 - DNA, 15 bp, Homo sapiens
atttgaaccgggtga

SEQ ID NO: 1847965 - DNA, 15 bp, Homo sapiens
tttgaaccgggtgat

SEQ ID NO: 1847966 - DNA, 15 bp, Homo sapiens
ttgaaccgggtgatt

SEQ ID NO: 1847967 - DNA, 15 bp, Homo sapiens
tgaaccgggtgattt

SEQ ID NO: 1847968 - DNA, 15 bp, Homo sapiens
gaaccgggtgatttt

SEQ ID NO: 1847969 - DNA, 15 bp, Homo sapiens
aaccgggtgattttg

SEQ ID NO: 1847970 - DNA, 15 bp, Homo sapiens
accgggtgattttgt

SEQ ID NO: 1847971 - DNA, 15 bp, Homo sapiens
ccgggtgattttgtg

SEQ ID NO: 1847972 - DNA, 15 bp, Homo sapiens
cgggtgattttgtgt

SEQ ID NO: 1847973 - DNA, 15 bp, Homo sapiens
gggtgattttgtgtg

SEQ ID NO: 1847974 - DNA, 15 bp, Homo sapiens
ggtgattttgtgtgg

SEQ ID NO: 1847975 - DNA, 15 bp, Homo sapiens
gtgattttgtgtggc

SEQ ID NO: 1847976 - DNA, 15 bp, Homo sapiens
tgattttgtgtggca

SEQ ID NO: 1847977 - DNA, 15 bp, Homo sapiens
gattttgtgtggcag

SEQ ID NO: 1847978 - DNA, 15 bp, Homo sapiens
attttgtgtggcagt

SEQ ID NO: 1847979 - DNA, 15 bp, Homo sapiens
ttttgtgtggcagtg

SEQ ID NO: 1847980 - DNA, 15 bp, Homo sapiens
tttgtgtggcagtgc

SEQ ID NO: 1847981 - DNA, 15 bp, Homo sapiens
ttgtgtggcagtgcc

SEQ ID NO: 1847982 - DNA, 15 bp, Homo sapiens
tgtgtggcagtgccc

SEQ ID NO: 1847983 - DNA, 15 bp, Homo sapiens
gtgtggcagtgcccg

SEQ ID NO: 1847984 - DNA, 15 bp, Homo sapiens
tgtggcagtgcccgg

SEQ ID NO: 1847985 - DNA, 15 bp, Homo sapiens
gtggcagtgcccggg

SEQ ID NO: 1847986 - DNA, 15 bp, Homo sapiens
tggcagtgcccggga

SEQ ID NO: 1847987 - DNA, 15 bp, Homo sapiens
ggcagtgcccgggat

SEQ ID NO: 1847988 - DNA, 15 bp, Homo sapiens
gcagtgcccgggatc

SEQ ID NO: 1847989 - DNA, 15 bp, Homo sapiens
cagtgcccgggatcc

SEQ ID NO: 1847990 - DNA, 15 bp, Homo sapiens
agtgcccgggatcca

SEQ ID NO: 1847991 - DNA, 15 bp, Homo sapiens
gtgcccgggatccac

SEQ ID NO: 1847992 - DNA, 15 bp, Homo sapiens
tgcccgggatccaca

SEQ ID NO: 1847993 - DNA, 15 bp, Homo sapiens
gcccgggatccacag

SEQ ID NO: 1847994 - DNA, 15 bp, Homo sapiens
cccgggatccacaga

SEQ ID NO: 1847995 - DNA, 15 bp, Homo sapiens
ccgggatccacagac

SEQ ID NO: 1847996 - DNA, 15 bp, Homo sapiens
cgggatccacagacc

SEQ ID NO: 1847997 - DNA, 15 bp, Homo sapiens
gggatccacagaccc

SEQ ID NO: 1847998 - DNA, 15 bp, Homo sapiens
ggatccacagaccct

SEQ ID NO: 1847999 - DNA, 15 bp, Homo sapiens
gatccacagacccta

SEQ ID NO: 1848000 - DNA, 15 bp, Homo sapiens
atccacagaccctaa

SEQ ID NO: 1848001 - DNA, 15 bp, Homo sapiens
tccacagaccctaat

SEQ ID NO: 1848002 - DNA, 15 bp, Homo sapiens
ccacagaccctaatg

SEQ ID NO: 1848003 - DNA, 15 bp, Homo sapiens
cacagaccctaatga

SEQ ID NO: 1848004 - DNA, 15 bp, Homo sapiens
acagaccctaatgac

SEQ ID NO: 1848005 - DNA, 15 bp, Homo sapiens
cagaccctaatgaca

SEQ ID NO: 1848006 - DNA, 15 bp, Homo sapiens
agaccctaatgacac

SEQ ID NO: 1848007 - DNA, 15 bp, Homo sapiens
gaccctaatgacacc

SEQ ID NO: 1848008 - DNA, 15 bp, Homo sapiens
accctaatgacaccc

SEQ ID NO: 1848009 - DNA, 15 bp, Homo sapiens
ccctaatgacaccca

SEQ ID NO: 1848010 - DNA, 15 bp, Homo sapiens
cctaatgacacccaa

SEQ ID NO: 1848011 - DNA, 15 bp, Homo sapiens
ctaatgacacccaaa

SEQ ID NO: 1848012 - DNA, 15 bp, Homo sapiens
taatgacacccaaat

SEQ ID NO: 1848013 - DNA, 15 bp, Homo sapiens
aatgacacccaaatt

SEQ ID NO: 1848014 - DNA, 15 bp, Homo sapiens
atgacacccaaattt

SEQ ID NO: 1848015 - DNA, 15 bp, Homo sapiens
tgacacccaaatttg

SEQ ID NO: 1848016 - DNA, 15 bp, Homo sapiens
gacacccaaatttgt

SEQ ID NO: 1848017 - DNA, 15 bp, Homo sapiens
acacccaaatttgtg

SEQ ID NO: 1848018 - DNA, 15 bp, Homo sapiens
cacccaaatttgtga

SEQ ID NO: 1848019 - DNA, 15 bp, Homo sapiens
acccaaatttgtgag

SEQ ID NO: 1848020 - DNA, 15 bp, Homo sapiens
cccaaatttgtgagg

SEQ ID NO: 1848021 - DNA, 15 bp, Homo sapiens
ccaaatttgtgaggc

SEQ ID NO: 1848022 - DNA, 15 bp, Homo sapiens
caaatttgtgaggca

SEQ ID NO: 1848023 - DNA, 15 bp, Homo sapiens
aaatttgtgaggcat

SEQ ID NO: 1848024 - DNA, 15 bp, Homo sapiens
aatttgtgaggcatt

SEQ ID NO: 1848025 - DNA, 15 bp, Homo sapiens
atttgtgaggcattc

SEQ ID NO: 1848026 - DNA, 15 bp, Homo sapiens
tttgtgaggcattct

SEQ ID NO: 1848027 - DNA, 15 bp, Homo sapiens
ttgtgaggcattctt

SEQ ID NO: 1848028 - DNA, 15 bp, Homo sapiens
tgtgaggcattcttc

SEQ ID NO: 1848029 - DNA, 15 bp, Homo sapiens
gtgaggcattcttct

SEQ ID NO: 1848030 - DNA, 15 bp, Homo sapiens
tgaggcattcttctc

SEQ ID NO: 1848031 - DNA, 15 bp, Homo sapiens
gaggcattcttctca

SEQ ID NO: 1848032 - DNA, 15 bp, Homo sapiens
aggcattcttctcag

SEQ ID NO: 1848033 - DNA, 15 bp, Homo sapiens
ggcattcttctcagt

SEQ ID NO: 1848034 - DNA, 15 bp, Homo sapiens
gcattcttctcagtt

SEQ ID NO: 1848035 - DNA, 15 bp, Homo sapiens
cattcttctcagttt

SEQ ID NO: 1848036 - DNA, 15 bp, Homo sapiens
attcttctcagttta

SEQ ID NO: 1848037 - DNA, 15 bp, Homo sapiens
tcttctcagtttata

SEQ ID NO: 1848038 - DNA, 15 bp, Homo sapiens
cttctcagtttataa

SEQ ID NO: 1848039 - DNA, 15 bp, Homo sapiens
ttctcagtttataaa

SEQ ID NO: 1848040 - DNA, 15 bp, Homo sapiens
tctcagtttataaag

SEQ ID NO: 1848041 - DNA, 15 bp, Homo sapiens
ctcagtttataaaga

SEQ ID NO: 1848042 - DNA, 15 bp, Homo sapiens
tcagtttataaagaa

SEQ ID NO: 1848043 - DNA, 15 bp, Homo sapiens
cagtttataaagaac

SEQ ID NO: 1848044 - DNA, 15 bp, Homo sapiens
agtttataaagaaca

SEQ ID NO: 1848045 - DNA, 15 bp, Homo sapiens
gtttataaagaacat

SEQ ID NO: 1848046 - DNA, 15 bp, Homo sapiens
tttataaagaacatg

SEQ ID NO: 1848047 - DNA, 15 bp, Homo sapiens
ttataaagaacatga

SEQ ID NO: 1848048 - DNA, 15 bp, Homo sapiens
tataaagaacatgac

SEQ ID NO: 1848049 - DNA, 15 bp, Homo sapiens
ataaagaacatgact

SEQ ID NO: 1848050 - DNA, 15 bp, Homo sapiens
taaagaacatgactg

SEQ ID NO: 1848051 - DNA, 15 bp, Homo sapiens
aaagaacatgactga

SEQ ID NO: 1848052 - DNA, 15 bp, Homo sapiens
aagaacatgactgag

SEQ ID NO: 1848053 - DNA, 15 bp, Homo sapiens
agaacatgactgaga

SEQ ID NO: 1848054 - DNA, 15 bp, Homo sapiens
gaacatgactgagac

SEQ ID NO: 1848055 - DNA, 15 bp, Homo sapiens
aacatgactgagacc

SEQ ID NO: 1848056 - DNA, 15 bp, Homo sapiens
acatgactgagacca

SEQ ID NO: 1848057 - DNA, 15 bp, Homo sapiens
catgactgagaccac

SEQ ID NO: 1848058 - DNA, 15 bp, Homo sapiens
atgactgagaccacc

SEQ ID NO: 1848059 - DNA, 15 bp, Homo sapiens
tgactgagaccacct

SEQ ID NO: 1848060 - DNA, 15 bp, Homo sapiens
gactgagaccaccta

SEQ ID NO: 1848061 - DNA, 15 bp, Homo sapiens
actgagaccacctag

SEQ ID NO: 1848062 - DNA, 15 bp, Homo sapiens
ctgagaccacctagc

SEQ ID NO: 1848063 - DNA, 15 bp, Homo sapiens
tgagaccacctagca

SEQ ID NO: 1848064 - DNA, 15 bp, Homo sapiens
gagaccacctagcac

SEQ ID NO: 1848065 - DNA, 15 bp, Homo sapiens
agaccacctagcaca

SEQ ID NO: 1848066 - DNA, 15 bp, Homo sapiens
gaccacctagcacat

SEQ ID NO: 1848067 - DNA, 15 bp, Homo sapiens
accacctagcacatt

SEQ ID NO: 1848068 - DNA, 15 bp, Homo sapiens
ccacctagcacattt

SEQ ID NO: 1848069 - DNA, 15 bp, Homo sapiens
cacctagcacattta

SEQ ID NO: 1848070 - DNA, 15 bp, Homo sapiens
acctagcacatttaa

SEQ ID NO: 1848071 - DNA, 15 bp, Homo sapiens
cctagcacatttaac

SEQ ID NO: 1848072 - DNA, 15 bp, Homo sapiens
ctagcacatttaacc

SEQ ID NO: 1848073 - DNA, 15 bp, Homo sapiens
tagcacatttaaccg

SEQ ID NO: 1848074 - DNA, 15 bp, Homo sapiens
agcacatttaaccgg

SEQ ID NO: 1848075 - DNA, 15 bp, Homo sapiens
gcacatttaaccggg

SEQ ID NO: 1848076 - DNA, 15 bp, Homo sapiens
cacatttaaccgggt

SEQ ID NO: 1848077 - DNA, 15 bp, Homo sapiens
acatttaaccgggtc

SEQ ID NO: 1848078 - DNA, 15 bp, Homo sapiens
catttaaccgggtct

SEQ ID NO: 1848079 - DNA, 15 bp, Homo sapiens
atttaaccgggtctg

SEQ ID NO: 1848080 - DNA, 15 bp, Homo sapiens
tttaaccgggtctga

SEQ ID NO: 1848081 - DNA, 15 bp, Homo sapiens
ttaaccgggtctgaa

SEQ ID NO: 1848082 - DNA, 15 bp, Homo sapiens
taaccgggtctgaag

SEQ ID NO: 1848083 - DNA, 15 bp, Homo sapiens
aaccgggtctgaagg

SEQ ID NO: 1848084 - DNA, 15 bp, Homo sapiens
accgggtctgaagga

SEQ ID NO: 1848085 - DNA, 15 bp, Homo sapiens
ccgggtctgaaggac

SEQ ID NO: 1848086 - DNA, 15 bp, Homo sapiens
cgggtctgaaggacc

SEQ ID NO: 1848087 - DNA, 15 bp, Homo sapiens
gggtctgaaggacca

SEQ ID NO: 1848088 - DNA, 15 bp, Homo sapiens
ggtctgaaggaccag

SEQ ID NO: 1848089 - DNA, 15 bp, Homo sapiens
gtctgaaggaccagc

SEQ ID NO: 1848090 - DNA, 15 bp, Homo sapiens
tctgaaggaccagct

SEQ ID NO: 1848091 - DNA, 15 bp, Homo sapiens
ctgaaggaccagcta

SEQ ID NO: 1848092 - DNA, 15 bp, Homo sapiens
tgaaggaccagctaa

SEQ ID NO: 1848093 - DNA, 15 bp, Homo sapiens
gaaggaccagctaat

SEQ ID NO: 1848094 - DNA, 15 bp, Homo sapiens
aaggaccagctaatt

SEQ ID NO: 1848095 - DNA, 15 bp, Homo sapiens
aggaccagctaattt

SEQ ID NO: 1848096 - DNA, 15 bp, Homo sapiens
ggaccagctaatttc

SEQ ID NO: 1848097 - DNA, 15 bp, Homo sapiens
gaccagctaatttcc

SEQ ID NO: 1848098 - DNA, 15 bp, Homo sapiens
accagctaatttcct

SEQ ID NO: 1848099 - DNA, 15 bp, Homo sapiens
ccagctaatttccta

SEQ ID NO: 1848100 - DNA, 15 bp, Homo sapiens
cagctaatttcctaa

SEQ ID NO: 1848101 - DNA, 15 bp, Homo sapiens
agctaatttcctaaa

SEQ ID NO: 1848102 - DNA, 15 bp, Homo sapiens
gctaatttcctaaaa

SEQ ID NO: 1848103 - DNA, 15 bp, Homo sapiens
ctaatttcctaaaaa

SEQ ID NO: 1848104 - DNA, 15 bp, Homo sapiens
taatttcctaaaaat

SEQ ID NO: 1848105 - DNA, 15 bp, Homo sapiens
aatttcctaaaaata

SEQ ID NO: 1848106 - DNA, 15 bp, Homo sapiens
atttcctaaaaatag

SEQ ID NO: 1848107 - DNA, 15 bp, Homo sapiens
tttcctaaaaatagc

SEQ ID NO: 1848108 - DNA, 15 bp, Homo sapiens
ttcctaaaaatagca

SEQ ID NO: 1848109 - DNA, 15 bp, Homo sapiens
tcctaaaaatagcag

SEQ ID NO: 1848110 - DNA, 15 bp, Homo sapiens
cctaaaaatagcagt

SEQ ID NO: 1848111 - DNA, 15 bp, Homo sapiens
ctaaaaatagcagtt

SEQ ID NO: 1848112 - DNA, 15 bp, Homo sapiens
taaaaatagcagttt

SEQ ID NO: 1848113 - DNA, 15 bp, Homo sapiens
aaaaatagcagtttc

SEQ ID NO: 1848114 - DNA, 15 bp, Homo sapiens
aaaatagcagtttct

SEQ ID NO: 1848115 - DNA, 15 bp, Homo sapiens
aaatagcagtttctt

SEQ ID NO: 1848116 - DNA, 15 bp, Homo sapiens
aatagcagtttcttg

SEQ ID NO: 1848117 - DNA, 15 bp, Homo sapiens
atagcagtttcttgc

SEQ ID NO: 1848118 - DNA, 15 bp, Homo sapiens
tagcagtttcttgct

SEQ ID NO: 1848119 - DNA, 15 bp, Homo sapiens
agcagtttcttgctg

SEQ ID NO: 1848120 - DNA, 15 bp, Homo sapiens
gcagtttcttgctgg

SEQ ID NO: 1848121 - DNA, 15 bp, Homo sapiens
cagtttcttgctggg

SEQ ID NO: 1848122 - DNA, 15 bp, Homo sapiens
agtttcttgctgggc

SEQ ID NO: 1848123 - DNA, 15 bp, Homo sapiens
gtttcttgctgggca

SEQ ID NO: 1848124 - DNA, 15 bp, Homo sapiens
tttcttgctgggcat

SEQ ID NO: 1848125 - DNA, 15 bp, Homo sapiens
ttcttgctgggcata

SEQ ID NO: 1848126 - DNA, 15 bp, Homo sapiens
tcttgctgggcatat

SEQ ID NO: 1848127 - DNA, 15 bp, Homo sapiens
cttgctgggcatatg

SEQ ID NO: 1848128 - DNA, 15 bp, Homo sapiens
ttgctgggcatatgt

SEQ ID NO: 1848129 - DNA, 15 bp, Homo sapiens
tgctgggcatatgtc

SEQ ID NO: 1848130 - DNA, 15 bp, Homo sapiens
gctgggcatatgtct

SEQ ID NO: 1848131 - DNA, 15 bp, Homo sapiens
ctgggcatatgtctt

SEQ ID NO: 1848132 - DNA, 15 bp, Homo sapiens
tgggcatatgtctta

SEQ ID NO: 1848133 - DNA, 15 bp, Homo sapiens
gggcatatgtcttag

SEQ ID NO: 1848134 - DNA, 15 bp, Homo sapiens
ggcatatgtcttagg

SEQ ID NO: 1848135 - DNA, 15 bp, Homo sapiens
gcatatgtcttaggc

SEQ ID NO: 1848136 - DNA, 15 bp, Homo sapiens
catatgtcttaggct

SEQ ID NO: 1848137 - DNA, 15 bp, Homo sapiens
atatgtcttaggctt

SEQ ID NO: 1848138 - DNA, 15 bp, Homo sapiens
tatgtcttaggcttt

SEQ ID NO: 1848139 - DNA, 15 bp, Homo sapiens
atgtcttaggctttg

SEQ ID NO: 1848140 - DNA, 15 bp, Homo sapiens
tgtcttaggctttgc

SEQ ID NO: 1848141 - DNA, 15 bp, Homo sapiens
gtcttaggctttgct

SEQ ID NO: 1848142 - DNA, 15 bp, Homo sapiens
tcttaggctttgctg

SEQ ID NO: 1848143 - DNA, 15 bp, Homo sapiens
cttaggctttgctgg

SEQ ID NO: 1848144 - DNA, 15 bp, Homo sapiens
ttaggctttgctggc

SEQ ID NO: 1848145 - DNA, 15 bp, Homo sapiens
taggctttgctggct

SEQ ID NO: 1848146 - DNA, 15 bp, Homo sapiens
aggctttgctggctc

SEQ ID NO: 1848147 - DNA, 15 bp, Homo sapiens
ggctttgctggctct

SEQ ID NO: 1848148 - DNA, 15 bp, Homo sapiens
gctttgctggctcta

SEQ ID NO: 1848149 - DNA, 15 bp, Homo sapiens
ctttgctggctctaa

SEQ ID NO: 1848150 - DNA, 15 bp, Homo sapiens
tttgctggctctaag

SEQ ID NO: 1848151 - DNA, 15 bp, Homo sapiens
ttgctggctctaaga

SEQ ID NO: 1848152 - DNA, 15 bp, Homo sapiens
tgctggctctaagaa

SEQ ID NO: 1848153 - DNA, 15 bp, Homo sapiens
gctggctctaagaac

SEQ ID NO: 1848154 - DNA, 15 bp, Homo sapiens
ctggctctaagaact

SEQ ID NO: 1848155 - DNA, 15 bp, Homo sapiens
tggctctaagaactt

SEQ ID NO: 1848156 - DNA, 15 bp, Homo sapiens
ggctctaagaactta

SEQ ID NO: 1848157 - DNA, 15 bp, Homo sapiens
gctctaagaacttaa

SEQ ID NO: 1848158 - DNA, 15 bp, Homo sapiens
ctctaagaacttaat

SEQ ID NO: 1848159 - DNA, 15 bp, Homo sapiens
tctaagaacttaata

SEQ ID NO: 1848160 - DNA, 15 bp, Homo sapiens
ctaagaacttaatat

SEQ ID NO: 1848161 - DNA, 15 bp, Homo sapiens
taagaacttaatatt

SEQ ID NO: 1848162 - DNA, 15 bp, Homo sapiens
aagaacttaatatta

SEQ ID NO: 1848163 - DNA, 15 bp, Homo sapiens
agaacttaatattaa

SEQ ID NO: 1848164 - DNA, 15 bp, Homo sapiens
gaacttaatattaac

SEQ ID NO: 1848165 - DNA, 15 bp, Homo sapiens
aacttaatattaaca

SEQ ID NO: 1848166 - DNA, 15 bp, Homo sapiens
acttaatattaacaa

SEQ ID NO: 1848167 - DNA, 15 bp, Homo sapiens
cttaatattaacaat

SEQ ID NO: 1848168 - DNA, 15 bp, Homo sapiens
ttaatattaacaatt

SEQ ID NO: 1848169 - DNA, 15 bp, Homo sapiens
taatattaacaattc

SEQ ID NO: 1848170 - DNA, 15 bp, Homo sapiens
aatattaacaattca

SEQ ID NO: 1848171 - DNA, 15 bp, Homo sapiens
atattaacaattcac

SEQ ID NO: 1848172 - DNA, 15 bp, Homo sapiens
tattaacaattcaca

SEQ ID NO: 1848173 - DNA, 15 bp, Homo sapiens
attaacaattcacac

SEQ ID NO: 1848174 - DNA, 15 bp, Homo sapiens
ttaacaattcacaca

SEQ ID NO: 1848175 - DNA, 15 bp, Homo sapiens
taacaattcacacag

SEQ ID NO: 1848176 - DNA, 15 bp, Homo sapiens
aacaattcacacaga

SEQ ID NO: 1848177 - DNA, 15 bp, Homo sapiens
acaattcacacagaa

SEQ ID NO: 1848178 - DNA, 15 bp, Homo sapiens
caattcacacagaag

SEQ ID NO: 1848179 - DNA, 15 bp, Homo sapiens
aattcacacagaagg

SEQ ID NO: 1848180 - DNA, 15 bp, Homo sapiens
attcacacagaagga

SEQ ID NO: 1848181 - DNA, 15 bp, Homo sapiens
ttcacacagaaggaa

SEQ ID NO: 1848182 - DNA, 15 bp, Homo sapiens
tcacacagaaggaat

SEQ ID NO: 1848183 - DNA, 15 bp, Homo sapiens
cacacagaaggaatc

SEQ ID NO: 1848184 - DNA, 15 bp, Homo sapiens
acacagaaggaatcg

SEQ ID NO: 1848185 - DNA, 15 bp, Homo sapiens
cacagaaggaatcgt

SEQ ID NO: 1848186 - DNA, 15 bp, Homo sapiens
acagaaggaatcgtg

SEQ ID NO: 1848187 - DNA, 15 bp, Homo sapiens
cagaaggaatcgtgt

SEQ ID NO: 1848188 - DNA, 15 bp, Homo sapiens
agaaggaatcgtgtt

SEQ ID NO: 1848189 - DNA, 15 bp, Homo sapiens
gaaggaatcgtgttc

SEQ ID NO: 1848190 - DNA, 15 bp, Homo sapiens
aaggaatcgtgttca

SEQ ID NO: 1848191 - DNA, 15 bp, Homo sapiens
aggaatcgtgttcag

SEQ ID NO: 1848192 - DNA, 15 bp, Homo sapiens
ggaatcgtgttcagg

SEQ ID NO: 1848193 - DNA, 15 bp, Homo sapiens
gaatcgtgttcaggg

SEQ ID NO: 1848194 - DNA, 15 bp, Homo sapiens
aatcgtgttcagggc

SEQ ID NO: 1848195 - DNA, 15 bp, Homo sapiens
atcgtgttcagggca

SEQ ID NO: 1848196 - DNA, 15 bp, Homo sapiens
tcgtgttcagggcat

SEQ ID NO: 1848197 - DNA, 15 bp, Homo sapiens
cgtgttcagggcatt

SEQ ID NO: 1848198 - DNA, 15 bp, Homo sapiens
gtgttcagggcattg

SEQ ID NO: 1848199 - DNA, 15 bp, Homo sapiens
tgttcagggcattga

SEQ ID NO: 1848200 - DNA, 15 bp, Homo sapiens
gttcagggcattgac

SEQ ID NO: 1848201 - DNA, 15 bp, Homo sapiens
ttcagggcattgacc

SEQ ID NO: 1848202 - DNA, 15 bp, Homo sapiens
tcagggcattgacca

SEQ ID NO: 1848203 - DNA, 15 bp, Homo sapiens
cagggcattgaccaa

SEQ ID NO: 1848204 - DNA, 15 bp, Homo sapiens
agggcattgaccaat

SEQ ID NO: 1848205 - DNA, 15 bp, Homo sapiens
gggcattgaccaata

SEQ ID NO: 1848206 - DNA, 15 bp, Homo sapiens
ggcattgaccaatac

SEQ ID NO: 1848207 - DNA, 15 bp, Homo sapiens
gcattgaccaatact

SEQ ID NO: 1848208 - DNA, 15 bp, Homo sapiens
cattgaccaatactc

SEQ ID NO: 1848209 - DNA, 15 bp, Homo sapiens
attgaccaatactca

SEQ ID NO: 1848210 - DNA, 15 bp, Homo sapiens
ttgaccaatactcag

SEQ ID NO: 1848211 - DNA, 15 bp, Homo sapiens
tgaccaatactcagc

SEQ ID NO: 1848212 - DNA, 15 bp, Homo sapiens
gaccaatactcagct

SEQ ID NO: 1848213 - DNA, 15 bp, Homo sapiens
accaatactcagctc

SEQ ID NO: 1848214 - DNA, 15 bp, Homo sapiens
ccaatactcagctca

SEQ ID NO: 1848215 - DNA, 15 bp, Homo sapiens
caatactcagctcac

SEQ ID NO: 1848216 - DNA, 15 bp, Homo sapiens
aatactcagctcacc

SEQ ID NO: 1848217 - DNA, 15 bp, Homo sapiens
atactcagctcacct

SEQ ID NO: 1848218 - DNA, 15 bp, Homo sapiens
tactcagctcacctt

SEQ ID NO: 1848219 - DNA, 15 bp, Homo sapiens
actcagctcaccttt

SEQ ID NO: 1848220 - DNA, 15 bp, Homo sapiens
ctcagctcacctttg

SEQ ID NO: 1848221 - DNA, 15 bp, Homo sapiens
tcagctcacctttga

SEQ ID NO: 1848222 - DNA, 15 bp, Homo sapiens
cagctcacctttgaa

SEQ ID NO: 1848223 - DNA, 15 bp, Homo sapiens
agctcacctttgaat

SEQ ID NO: 1848224 - DNA, 15 bp, Homo sapiens
gctcacctttgaatg

SEQ ID NO: 1848225 - DNA, 15 bp, Homo sapiens
ctcacctttgaatgg

SEQ ID NO: 1848226 - DNA, 15 bp, Homo sapiens
tcacctttgaatggc

SEQ ID NO: 1848227 - DNA, 15 bp, Homo sapiens
cacctttgaatggcc

SEQ ID NO: 1848228 - DNA, 15 bp, Homo sapiens
acctttgaatggcca

SEQ ID NO: 1848229 - DNA, 15 bp, Homo sapiens
cctttgaatggccag

SEQ ID NO: 1848230 - DNA, 15 bp, Homo sapiens
ctttgaatggccaga

SEQ ID NO: 1848231 - DNA, 15 bp, Homo sapiens
tttgaatggccagag

SEQ ID NO: 1848232 - DNA, 15 bp, Homo sapiens
ttgaatggccagagg

SEQ ID NO: 1848233 - DNA, 15 bp, Homo sapiens
tgaatggccagagga

SEQ ID NO: 1848234 - DNA, 15 bp, Homo sapiens
gaatggccagaggac

SEQ ID NO: 1848235 - DNA, 15 bp, Homo sapiens
aatggccagaggaca

SEQ ID NO: 1848236 - DNA, 15 bp, Homo sapiens
atggccagaggacac

SEQ ID NO: 1848237 - DNA, 15 bp, Homo sapiens
tggccagaggacaca

SEQ ID NO: 1848238 - DNA, 15 bp, Homo sapiens
ggccagaggacacag

SEQ ID NO: 1848239 - DNA, 15 bp, Homo sapiens
gccagaggacacagc

SEQ ID NO: 1848240 - DNA, 15 bp, Homo sapiens
ccagaggacacagct

SEQ ID NO: 1848241 - DNA, 15 bp, Homo sapiens
cagaggacacagctc

SEQ ID NO: 1848242 - DNA, 15 bp, Homo sapiens
agaggacacagctct

SEQ ID NO: 1848243 - DNA, 15 bp, Homo sapiens
gaggacacagctcta

SEQ ID NO: 1848244 - DNA, 15 bp, Homo sapiens
aggacacagctctaa

SEQ ID NO: 1848245 - DNA, 15 bp, Homo sapiens
ggacacagctctaaa

SEQ ID NO: 1848246 - DNA, 15 bp, Homo sapiens
gacacagctctaaag

SEQ ID NO: 1848247 - DNA, 15 bp, Homo sapiens
acacagctctaaaga

SEQ ID NO: 1848248 - DNA, 15 bp, Homo sapiens
cacagctctaaagaa

SEQ ID NO: 1848249 - DNA, 15 bp, Homo sapiens
acagctctaaagaaa

SEQ ID NO: 1848250 - DNA, 15 bp, Homo sapiens
cagctctaaagaaag

SEQ ID NO: 1848251 - DNA, 15 bp, Homo sapiens
agctctaaagaaagg

SEQ ID NO: 1848252 - DNA, 15 bp, Homo sapiens
gctctaaagaaaggt

SEQ ID NO: 1848253 - DNA, 15 bp, Homo sapiens
ctctaaagaaaggtg

SEQ ID NO: 1848254 - DNA, 15 bp, Homo sapiens
tctaaagaaaggtgt

SEQ ID NO: 1848255 - DNA, 15 bp, Homo sapiens
ctaaagaaaggtgtg

SEQ ID NO: 1848256 - DNA, 15 bp, Homo sapiens
taaagaaaggtgtgc

SEQ ID NO: 1848257 - DNA, 15 bp, Homo sapiens
aaagaaaggtgtgca

SEQ ID NO: 1848258 - DNA, 15 bp, Homo sapiens
aagaaaggtgtgcaa

SEQ ID NO: 1848259 - DNA, 15 bp, Homo sapiens
agaaaggtgtgcaac

SEQ ID NO: 1848260 - DNA, 15 bp, Homo sapiens
gaaaggtgtgcaaca

SEQ ID NO: 1848261 - DNA, 15 bp, Homo sapiens
aaaggtgtgcaacaa

SEQ ID NO: 1848262 - DNA, 15 bp, Homo sapiens
aaggtgtgcaacaag

SEQ ID NO: 1848263 - DNA, 15 bp, Homo sapiens
aggtgtgcaacaagg

SEQ ID NO: 1848264 - DNA, 15 bp, Homo sapiens
ggtgtgcaacaagga

SEQ ID NO: 1848265 - DNA, 15 bp, Homo sapiens
gtgtgcaacaaggag

SEQ ID NO: 1848266 - DNA, 15 bp, Homo sapiens
tgtgcaacaaggagt

SEQ ID NO: 1848267 - DNA, 15 bp, Homo sapiens
gtgcaacaaggagtg

SEQ ID NO: 1848268 - DNA, 15 bp, Homo sapiens
tgcaacaaggagtgt

SEQ ID NO: 1848269 - DNA, 15 bp, Homo sapiens
gcaacaaggagtgtg

SEQ ID NO: 1848270 - DNA, 15 bp, Homo sapiens
caacaaggagtgtgg

SEQ ID NO: 1848271 - DNA, 15 bp, Homo sapiens
aacaaggagtgtggt

SEQ ID NO: 1848272 - DNA, 15 bp, Homo sapiens
acaaggagtgtggtt

SEQ ID NO: 1848273 - DNA, 15 bp, Homo sapiens
caaggagtgtggttg

SEQ ID NO: 1848274 - DNA, 15 bp, Homo sapiens
aaggagtgtggttga

SEQ ID NO: 1848275 - DNA, 15 bp, Homo sapiens
aggagtgtggttgag

SEQ ID NO: 1848276 - DNA, 15 bp, Homo sapiens
ggagtgtggttgagt

SEQ ID NO: 1848277 - DNA, 15 bp, Homo sapiens
gagtgtggttgagtg

SEQ ID NO: 1848278 - DNA, 15 bp, Homo sapiens
agtgtggttgagtgg

SEQ ID NO: 1848279 - DNA, 15 bp, Homo sapiens
gtgtggttgagtggg

SEQ ID NO: 1848280 - DNA, 15 bp, Homo sapiens
tgtggttgagtgggc

SEQ ID NO: 1848281 - DNA, 15 bp, Homo sapiens
gtggttgagtgggca

SEQ ID NO: 1848282 - DNA, 15 bp, Homo sapiens
tggttgagtgggcat

SEQ ID NO: 1848283 - DNA, 15 bp, Homo sapiens
ggttgagtgggcatg

SEQ ID NO: 1848284 - DNA, 15 bp, Homo sapiens
gttgagtgggcatgt

SEQ ID NO: 1848285 - DNA, 15 bp, Homo sapiens
ttgagtgggcatgtt

SEQ ID NO: 1848286 - DNA, 15 bp, Homo sapiens
tgagtgggcatgtta

SEQ ID NO: 1848287 - DNA, 15 bp, Homo sapiens
gagtgggcatgttat

SEQ ID NO: 1848288 - DNA, 15 bp, Homo sapiens
agtgggcatgttatc

SEQ ID NO: 1848289 - DNA, 15 bp, Homo sapiens
gtgggcatgttatct

SEQ ID NO: 1848290 - DNA, 15 bp, Homo sapiens
tgggcatgttatctt

SEQ ID NO: 1848291 - DNA, 15 bp, Homo sapiens
gggcatgttatcttc

SEQ ID NO: 1848292 - DNA, 15 bp, Homo sapiens
ggcatgttatcttcc

SEQ ID NO: 1848293 - DNA, 15 bp, Homo sapiens
gcatgttatcttcct

SEQ ID NO: 1848294 - DNA, 15 bp, Homo sapiens
catgttatcttccta

SEQ ID NO: 1848295 - DNA, 15 bp, Homo sapiens
atgttatcttcctag

SEQ ID NO: 1848296 - DNA, 15 bp, Homo sapiens
tgttatcttcctagg

SEQ ID NO: 1848297 - DNA, 15 bp, Homo sapiens
gttatcttcctaggt

SEQ ID NO: 1848298 - DNA, 15 bp, Homo sapiens
ttatcttcctaggtc

SEQ ID NO: 1848299 - DNA, 15 bp, Homo sapiens
tatcttcctaggtca

SEQ ID NO: 1848300 - DNA, 15 bp, Homo sapiens
atcttcctaggtcac

SEQ ID NO: 1848301 - DNA, 15 bp, Homo sapiens
tcttcctaggtcaca

SEQ ID NO: 1848302 - DNA, 15 bp, Homo sapiens
cttcctaggtcacaa

SEQ ID NO: 1848303 - DNA, 15 bp, Homo sapiens
ttcctaggtcacaag

SEQ ID NO: 1848304 - DNA, 15 bp, Homo sapiens
tcctaggtcacaagt

SEQ ID NO: 1848305 - DNA, 15 bp, Homo sapiens
cctaggtcacaagta

SEQ ID NO: 1848306 - DNA, 15 bp, Homo sapiens
ctaggtcacaagtaa

SEQ ID NO: 1848307 - DNA, 15 bp, Homo sapiens
taggtcacaagtaac

SEQ ID NO: 1848308 - DNA, 15 bp, Homo sapiens
aggtcacaagtaaca

SEQ ID NO: 1848309 - DNA, 15 bp, Homo sapiens
ggtcacaagtaacaa

SEQ ID NO: 1848310 - DNA, 15 bp, Homo sapiens
gtcacaagtaacaaa

SEQ ID NO: 1848311 - DNA, 15 bp, Homo sapiens
tcacaagtaacaaag

SEQ ID NO: 1848312 - DNA, 15 bp, Homo sapiens
cacaagtaacaaagt

SEQ ID NO: 1848313 - DNA, 15 bp, Homo sapiens
acaagtaacaaagtg

SEQ ID NO: 1848314 - DNA, 15 bp, Homo sapiens
caagtaacaaagtgc

SEQ ID NO: 1848315 - DNA, 15 bp, Homo sapiens
aagtaacaaagtgcc

SEQ ID NO: 1848316 - DNA, 15 bp, Homo sapiens
agtaacaaagtgcca

SEQ ID NO: 1848317 - DNA, 15 bp, Homo sapiens
gtaacaaagtgccac

SEQ ID NO: 1848318 - DNA, 15 bp, Homo sapiens
taacaaagtgccact

SEQ ID NO: 1848319 - DNA, 15 bp, Homo sapiens
aacaaagtgccactc

SEQ ID NO: 1848320 - DNA, 15 bp, Homo sapiens
acaaagtgccactcc

SEQ ID NO: 1848321 - DNA, 15 bp, Homo sapiens
caaagtgccactccc

SEQ ID NO: 1848322 - DNA, 15 bp, Homo sapiens
aaagtgccactcccc

SEQ ID NO: 1848323 - DNA, 15 bp, Homo sapiens
aagtgccactcccca

SEQ ID NO: 1848324 - DNA, 15 bp, Homo sapiens
agtgccactccccaa

SEQ ID NO: 1848325 - DNA, 15 bp, Homo sapiens
gtgccactccccaac

SEQ ID NO: 1848326 - DNA, 15 bp, Homo sapiens
tgccactccccaact

SEQ ID NO: 1848327 - DNA, 15 bp, Homo sapiens
gccactccccaactc

SEQ ID NO: 1848328 - DNA, 15 bp, Homo sapiens
ccactccccaactcc

SEQ ID NO: 1848329 - DNA, 15 bp, Homo sapiens
cactccccaactcca

SEQ ID NO: 1848330 - DNA, 15 bp, Homo sapiens
actccccaactccat

SEQ ID NO: 1848331 - DNA, 15 bp, Homo sapiens
ctccccaactccata

SEQ ID NO: 1848332 - DNA, 15 bp, Homo sapiens
tccccaactccatat

SEQ ID NO: 1848333 - DNA, 15 bp, Homo sapiens
ccccaactccatatt

SEQ ID NO: 1848334 - DNA, 15 bp, Homo sapiens
cccaactccatattc

SEQ ID NO: 1848335 - DNA, 15 bp, Homo sapiens
ccaactccatattca

SEQ ID NO: 1848336 - DNA, 15 bp, Homo sapiens
caactccatattcat

SEQ ID NO: 1848337 - DNA, 15 bp, Homo sapiens
aactccatattcata

SEQ ID NO: 1848338 - DNA, 15 bp, Homo sapiens
actccatattcataa

SEQ ID NO: 1848339 - DNA, 15 bp, Homo sapiens
ctccatattcataac

SEQ ID NO: 1848340 - DNA, 15 bp, Homo sapiens
tccatattcataaca

SEQ ID NO: 1848341 - DNA, 15 bp, Homo sapiens
ccatattcataacag

SEQ ID NO: 1848342 - DNA, 15 bp, Homo sapiens
catattcataacaga

SEQ ID NO: 1848343 - DNA, 15 bp, Homo sapiens
atattcataacagac

SEQ ID NO: 1848344 - DNA, 15 bp, Homo sapiens
tattcataacagaca

SEQ ID NO: 1848345 - DNA, 15 bp, Homo sapiens
attcataacagacat

SEQ ID NO: 1848346 - DNA, 15 bp, Homo sapiens
ttcataacagacatc

SEQ ID NO: 1848347 - DNA, 15 bp, Homo sapiens
tcataacagacatcc

SEQ ID NO: 1848348 - DNA, 15 bp, Homo sapiens
cataacagacatcca

SEQ ID NO: 1848349 - DNA, 15 bp, Homo sapiens
ataacagacatccat

SEQ ID NO: 1848350 - DNA, 15 bp, Homo sapiens
taacagacatccata

SEQ ID NO: 1848351 - DNA, 15 bp, Homo sapiens
aacagacatccataa

SEQ ID NO: 1848352 - DNA, 15 bp, Homo sapiens
acagacatccataat

SEQ ID NO: 1848353 - DNA, 15 bp, Homo sapiens
cagacatccataatc

SEQ ID NO: 1848354 - DNA, 15 bp, Homo sapiens
agacatccataatct

SEQ ID NO: 1848355 - DNA, 15 bp, Homo sapiens
gacatccataatcta

SEQ ID NO: 1848356 - DNA, 15 bp, Homo sapiens
acatccataatctat

SEQ ID NO: 1848357 - DNA, 15 bp, Homo sapiens
catccataatctatc

SEQ ID NO: 1848358 - DNA, 15 bp, Homo sapiens
atccataatctatca

SEQ ID NO: 1848359 - DNA, 15 bp, Homo sapiens
tccataatctatcag

SEQ ID NO: 1848360 - DNA, 15 bp, Homo sapiens
ccataatctatcagg

SEQ ID NO: 1848361 - DNA, 15 bp, Homo sapiens
cataatctatcagga

SEQ ID NO: 1848362 - DNA, 15 bp, Homo sapiens
ataatctatcaggat

SEQ ID NO: 1848363 - DNA, 15 bp, Homo sapiens
taatctatcaggatg

SEQ ID NO: 1848364 - DNA, 15 bp, Homo sapiens
aatctatcaggatgt

SEQ ID NO: 1848365 - DNA, 15 bp, Homo sapiens
atctatcaggatgtt

SEQ ID NO: 1848366 - DNA, 15 bp, Homo sapiens
tctatcaggatgttc

SEQ ID NO: 1848367 - DNA, 15 bp, Homo sapiens
ctatcaggatgttct

SEQ ID NO: 1848368 - DNA, 15 bp, Homo sapiens
tatcaggatgttctt

SEQ ID NO: 1848369 - DNA, 15 bp, Homo sapiens
atcaggatgttcttt

SEQ ID NO: 1848370 - DNA, 15 bp, Homo sapiens
tcaggatgttctttc

SEQ ID NO: 1848371 - DNA, 15 bp, Homo sapiens
caggatgttctttct

SEQ ID NO: 1848372 - DNA, 15 bp, Homo sapiens
aggatgttctttcta

SEQ ID NO: 1848373 - DNA, 15 bp, Homo sapiens
ggatgttctttctag

SEQ ID NO: 1848374 - DNA, 15 bp, Homo sapiens
gatgttctttctagc

SEQ ID NO: 1848375 - DNA, 15 bp, Homo sapiens
atgttctttctagcc

SEQ ID NO: 1848376 - DNA, 15 bp, Homo sapiens
tgttctttctagcca

SEQ ID NO: 1848377 - DNA, 15 bp, Homo sapiens
gttctttctagccaa

SEQ ID NO: 1848378 - DNA, 15 bp, Homo sapiens
ttctttctagccaag

SEQ ID NO: 1848379 - DNA, 15 bp, Homo sapiens
tctttctagccaagc

SEQ ID NO: 1848380 - DNA, 15 bp, Homo sapiens
ctttctagccaagcc

SEQ ID NO: 1848381 - DNA, 15 bp, Homo sapiens
tttctagccaagcca

SEQ ID NO: 1848382 - DNA, 15 bp, Homo sapiens
ttctagccaagccaa

SEQ ID NO: 1848383 - DNA, 15 bp, Homo sapiens
tctagccaagccaag

SEQ ID NO: 1848384 - DNA, 15 bp, Homo sapiens
ctagccaagccaaga

SEQ ID NO: 1848385 - DNA, 15 bp, Homo sapiens
tagccaagccaagat

SEQ ID NO: 1848386 - DNA, 15 bp, Homo sapiens
agccaagccaagatg

SEQ ID NO: 1848387 - DNA, 15 bp, Homo sapiens
gccaagccaagatgc

SEQ ID NO: 1848388 - DNA, 15 bp, Homo sapiens
ccaagccaagatgca

SEQ ID NO: 1848389 - DNA, 15 bp, Homo sapiens
caagccaagatgcaa

SEQ ID NO: 1848390 - DNA, 15 bp, Homo sapiens
aagccaagatgcaac

SEQ ID NO: 1848391 - DNA, 15 bp, Homo sapiens
agccaagatgcaact

SEQ ID NO: 1848392 - DNA, 15 bp, Homo sapiens
gccaagatgcaactt

SEQ ID NO: 1848393 - DNA, 15 bp, Homo sapiens
ccaagatgcaacttc

SEQ ID NO: 1848394 - DNA, 15 bp, Homo sapiens
caagatgcaacttca
